United States Patent Application Publication US 2019/0048337 A1 - sequence listing, part 10

SEQ ID NO: 309399 - RNA, 23 nt, Artificial Sequence
  Synthetic
gauggauaaggggagagagagag

SEQ ID NO: 309400 - RNA, 24 nt, Artificial Sequence
  Synthetic
ggauggauaaggggagagagagag

SEQ ID NO: 309401 - RNA, 18 nt, Artificial Sequence
  Synthetic
aaacaaguggagagagag

SEQ ID NO: 309402 - RNA, 19 nt, Artificial Sequence
  Synthetic
aaaacaaguggagagagag

SEQ ID NO: 309403 - RNA, 20 nt, Artificial Sequence
  Synthetic
gaaaacaaguggagagagag

SEQ ID NO: 309404 - RNA, 21 nt, Artificial Sequence
  Synthetic
ggaaaacaaguggagagagag

SEQ ID NO: 309405 - RNA, 22 nt, Artificial Sequence
  Synthetic
aggaaaacaaguggagagagag

SEQ ID NO: 309406 - RNA, 23 nt, Artificial Sequence
  Synthetic
gaggaaaacaaguggagagagag

SEQ ID NO: 309407 - RNA, 24 nt, Artificial Sequence
  Synthetic
agaggaaaacaaguggagagagag

SEQ ID NO: 309408 - RNA, 18 nt, Artificial Sequence
  Synthetic
cugugaaugccgagagag

SEQ ID NO: 309409 - RNA, 19 nt, Artificial Sequence
  Synthetic
ucugugaaugccgagagag

SEQ ID NO: 309410 - RNA, 20 nt, Artificial Sequence
  Synthetic
uucugugaaugccgagagag

SEQ ID NO: 309411 - RNA, 21 nt, Artificial Sequence
  Synthetic
auucugugaaugccgagagag

SEQ ID NO: 309412 - RNA, 22 nt, Artificial Sequence
  Synthetic
aauucugugaaugccgagagag

SEQ ID NO: 309413 - RNA, 23 nt, Artificial Sequence
  Synthetic
caauucugugaaugccgagagag

SEQ ID NO: 309414 - RNA, 24 nt, Artificial Sequence
  Synthetic
gcaauucugugaaugccgagagag

SEQ ID NO: 309415 - RNA, 18 nt, Artificial Sequence
  Synthetic
cucauucuugggagagag

SEQ ID NO: 309416 - RNA, 19 nt, Artificial Sequence
  Synthetic
gcucauucuugggagagag

SEQ ID NO: 309417 - RNA, 20 nt, Artificial Sequence
  Synthetic
ugcucauucuugggagagag

SEQ ID NO: 309418 - RNA, 21 nt, Artificial Sequence
  Synthetic
cugcucauucuugggagagag

SEQ ID NO: 309419 - RNA, 22 nt, Artificial Sequence
  Synthetic
ucugcucauucuugggagagag

SEQ ID NO: 309420 - RNA, 23 nt, Artificial Sequence
  Synthetic
cucugcucauucuugggagagag

SEQ ID NO: 309421 - RNA, 24 nt, Artificial Sequence
  Synthetic
ucucugcucauucuugggagagag

SEQ ID NO: 309422 - RNA, 18 nt, Artificial Sequence
  Synthetic
uuuagagaccauagagag

SEQ ID NO: 309423 - RNA, 19 nt, Artificial Sequence
  Synthetic
cuuuagagaccauagagag

SEQ ID NO: 309424 - RNA, 20 nt, Artificial Sequence
  Synthetic
gcuuuagagaccauagagag

SEQ ID NO: 309425 - RNA, 21 nt, Artificial Sequence
  Synthetic
cgcuuuagagaccauagagag

SEQ ID NO: 309426 - RNA, 22 nt, Artificial Sequence
  Synthetic
acgcuuuagagaccauagagag

SEQ ID NO: 309427 - RNA, 23 nt, Artificial Sequence
  Synthetic
aacgcuuuagagaccauagagag

SEQ ID NO: 309428 - RNA, 24 nt, Artificial Sequence
  Synthetic
uaacgcuuuagagaccauagagag

SEQ ID NO: 309429 - RNA, 18 nt, Artificial Sequence
  Synthetic
guauauaugcauagagag

SEQ ID NO: 309430 - RNA, 19 nt, Artificial Sequence
  Synthetic
uguauauaugcauagagag

SEQ ID NO: 309431 - RNA, 20 nt, Artificial Sequence
  Synthetic
auguauauaugcauagagag

SEQ ID NO: 309432 - RNA, 21 nt, Artificial Sequence
  Synthetic
cauguauauaugcauagagag

SEQ ID NO: 309433 - RNA, 22 nt, Artificial Sequence
  Synthetic
ccauguauauaugcauagagag

SEQ ID NO: 309434 - RNA, 23 nt, Artificial Sequence
  Synthetic
uccauguauauaugcauagagag

SEQ ID NO: 309435 - RNA, 24 nt, Artificial Sequence
  Synthetic
uuccauguauauaugcauagagag

SEQ ID NO: 309436 - RNA, 18 nt, Artificial Sequence
  Synthetic
gacaguggggcuagagag

SEQ ID NO: 309437 - RNA, 19 nt, Artificial Sequence
  Synthetic
cgacaguggggcuagagag

SEQ ID NO: 309438 - RNA, 20 nt, Artificial Sequence
  Synthetic
acgacaguggggcuagagag

SEQ ID NO: 309439 - RNA, 21 nt, Artificial Sequence
  Synthetic
cacgacaguggggcuagagag

SEQ ID NO: 309440 - RNA, 22 nt, Artificial Sequence
  Synthetic
ccacgacaguggggcuagagag

SEQ ID NO: 309441 - RNA, 23 nt, Artificial Sequence
  Synthetic
gccacgacaguggggcuagagag

SEQ ID NO: 309442 - RNA, 24 nt, Artificial Sequence
  Synthetic
ggccacgacaguggggcuagagag

SEQ ID NO: 309443 - RNA, 18 nt, Artificial Sequence
  Synthetic
gauaauaccucuagagag

SEQ ID NO: 309444 - RNA, 19 nt, Artificial Sequence
  Synthetic
ugauaauaccucuagagag

SEQ ID NO: 309445 - RNA, 20 nt, Artificial Sequence
  Synthetic
uugauaauaccucuagagag

SEQ ID NO: 309446 - RNA, 21 nt, Artificial Sequence
  Synthetic
auugauaauaccucuagagag

SEQ ID NO: 309447 - RNA, 22 nt, Artificial Sequence
  Synthetic
aauugauaauaccucuagagag

SEQ ID NO: 309448 - RNA, 23 nt, Artificial Sequence
  Synthetic
aaauugauaauaccucuagagag

SEQ ID NO: 309449 - RNA, 24 nt, Artificial Sequence
  Synthetic
caaauugauaauaccucuagagag

SEQ ID NO: 309450 - RNA, 18 nt, Artificial Sequence
  Synthetic
gagaauuacaguagagag

SEQ ID NO: 309451 - RNA, 19 nt, Artificial Sequence
  Synthetic
ugagaauuacaguagagag

SEQ ID NO: 309452 - RNA, 20 nt, Artificial Sequence
  Synthetic
augagaauuacaguagagag

SEQ ID NO: 309453 - RNA, 21 nt, Artificial Sequence
  Synthetic
uaugagaauuacaguagagag

SEQ ID NO: 309454 - RNA, 22 nt, Artificial Sequence
  Synthetic
uuaugagaauuacaguagagag

SEQ ID NO: 309455 - RNA, 23 nt, Artificial Sequence
  Synthetic
auuaugagaauuacaguagagag

SEQ ID NO: 309456 - RNA, 24 nt, Artificial Sequence
  Synthetic
cauuaugagaauuacaguagagag

SEQ ID NO: 309457 - RNA, 18 nt, Artificial Sequence
  Synthetic
aaaucugcaguuagagag

SEQ ID NO: 309458 - RNA, 19 nt, Artificial Sequence
  Synthetic
aaaaucugcaguuagagag

SEQ ID NO: 309459 - RNA, 20 nt, Artificial Sequence
  Synthetic
uaaaaucugcaguuagagag

SEQ ID NO: 309460 - RNA, 21 nt, Artificial Sequence
  Synthetic
guaaaaucugcaguuagagag

SEQ ID NO: 309461 - RNA, 22 nt, Artificial Sequence
  Synthetic
uguaaaaucugcaguuagagag

SEQ ID NO: 309462 - RNA, 23 nt, Artificial Sequence
  Synthetic
uuguaaaaucugcaguuagagag

SEQ ID NO: 309463 - RNA, 24 nt, Artificial Sequence
  Synthetic
guuguaaaaucugcaguuagagag

SEQ ID NO: 309464 - RNA, 18 nt, Artificial Sequence
  Synthetic
aucgcuugaacccgagag

SEQ ID NO: 309465 - RNA, 19 nt, Artificial Sequence
  Synthetic
uaucgcuugaacccgagag

SEQ ID NO: 309466 - RNA, 20 nt, Artificial Sequence
  Synthetic
guaucgcuugaacccgagag

SEQ ID NO: 309467 - RNA, 21 nt, Artificial Sequence
  Synthetic
aguaucgcuugaacccgagag

SEQ ID NO: 309468 - RNA, 22 nt, Artificial Sequence
  Synthetic
gaguaucgcuugaacccgagag

SEQ ID NO: 309469 - RNA, 23 nt, Artificial Sequence
  Synthetic
ggaguaucgcuugaacccgagag

SEQ ID NO: 309470 - RNA, 24 nt, Artificial Sequence
  Synthetic
aggaguaucgcuugaacccgagag

SEQ ID NO: 309471 - RNA, 18 nt, Artificial Sequence
  Synthetic
gguauugacaaaggagag

SEQ ID NO: 309472 - RNA, 19 nt, Artificial Sequence
  Synthetic
agguauugacaaaggagag

SEQ ID NO: 309473 - RNA, 20 nt, Artificial Sequence
  Synthetic
gagguauugacaaaggagag

SEQ ID NO: 309474 - RNA, 21 nt, Artificial Sequence
  Synthetic
agagguauugacaaaggagag

SEQ ID NO: 309475 - RNA, 22 nt, Artificial Sequence
  Synthetic
cagagguauugacaaaggagag

SEQ ID NO: 309476 - RNA, 23 nt, Artificial Sequence
  Synthetic
ucagagguauugacaaaggagag

SEQ ID NO: 309477 - RNA, 24 nt, Artificial Sequence
  Synthetic
uucagagguauugacaaaggagag

SEQ ID NO: 309478 - RNA, 18 nt, Artificial Sequence
  Synthetic
ggaggauagaaaggagag

SEQ ID NO: 309479 - RNA, 19 nt, Artificial Sequence
  Synthetic
gggaggauagaaaggagag

SEQ ID NO: 309480 - RNA, 20 nt, Artificial Sequence
  Synthetic
agggaggauagaaaggagag

SEQ ID NO: 309481 - RNA, 21 nt, Artificial Sequence
  Synthetic
gagggaggauagaaaggagag

SEQ ID NO: 309482 - RNA, 22 nt, Artificial Sequence
  Synthetic
agagggaggauagaaaggagag

SEQ ID NO: 309483 - RNA, 23 nt, Artificial Sequence
  Synthetic
gagagggaggauagaaaggagag

SEQ ID NO: 309484 - RNA, 24 nt, Artificial Sequence
  Synthetic
agagagggaggauagaaaggagag

SEQ ID NO: 309485 - RNA, 18 nt, Artificial Sequence
  Synthetic
auuaaagugaaaggagag

SEQ ID NO: 309486 - RNA, 19 nt, Artificial Sequence
  Synthetic
cauuaaagugaaaggagag

SEQ ID NO: 309487 - RNA, 20 nt, Artificial Sequence
  Synthetic
acauuaaagugaaaggagag

SEQ ID NO: 309488 - RNA, 21 nt, Artificial Sequence
  Synthetic
aacauuaaagugaaaggagag

SEQ ID NO: 309489 - RNA, 22 nt, Artificial Sequence
  Synthetic
gaacauuaaagugaaaggagag

SEQ ID NO: 309490 - RNA, 23 nt, Artificial Sequence
  Synthetic
ggaacauuaaagugaaaggagag

SEQ ID NO: 309491 - RNA, 24 nt, Artificial Sequence
  Synthetic
gggaacauuaaagugaaaggagag

SEQ ID NO: 309492 - RNA, 18 nt, Artificial Sequence
  Synthetic
agaugagaagaaggagag

SEQ ID NO: 309493 - RNA, 19 nt, Artificial Sequence
  Synthetic
uagaugagaagaaggagag

SEQ ID NO: 309494 - RNA, 20 nt, Artificial Sequence
  Synthetic
uuagaugagaagaaggagag

SEQ ID NO: 309495 - RNA, 21 nt, Artificial Sequence
  Synthetic
guuagaugagaagaaggagag

SEQ ID NO: 309496 - RNA, 22 nt, Artificial Sequence
  Synthetic
aguuagaugagaagaaggagag

SEQ ID NO: 309497 - RNA, 23 nt, Artificial Sequence
  Synthetic
gaguuagaugagaagaaggagag

SEQ ID NO: 309498 - RNA, 24 nt, Artificial Sequence
  Synthetic
ugaguuagaugagaagaaggagag

SEQ ID NO: 309499 - RNA, 18 nt, Artificial Sequence
  Synthetic
aaucugguagaaggagag

SEQ ID NO: 309500 - RNA, 19 nt, Artificial Sequence
  Synthetic
gaaucugguagaaggagag

SEQ ID NO: 309501 - RNA, 20 nt, Artificial Sequence
  Synthetic
ggaaucugguagaaggagag

SEQ ID NO: 309502 - RNA, 21 nt, Artificial Sequence
  Synthetic
uggaaucugguagaaggagag

SEQ ID NO: 309503 - RNA, 22 nt, Artificial Sequence
  Synthetic
uuggaaucugguagaaggagag

SEQ ID NO: 309504 - RNA, 23 nt, Artificial Sequence
  Synthetic
guuggaaucugguagaaggagag

SEQ ID NO: 309505 - RNA, 24 nt, Artificial Sequence
  Synthetic
gguuggaaucugguagaaggagag

SEQ ID NO: 309506 - RNA, 18 nt, Artificial Sequence
  Synthetic
gagaagugugaaggagag

SEQ ID NO: 309507 - RNA, 19 nt, Artificial Sequence
  Synthetic
agagaagugugaaggagag

SEQ ID NO: 309508 - RNA, 20 nt, Artificial Sequence
  Synthetic
aagagaagugugaaggagag

SEQ ID NO: 309509 - RNA, 21 nt, Artificial Sequence
  Synthetic
gaagagaagugugaaggagag

SEQ ID NO: 309510 - RNA, 22 nt, Artificial Sequence
  Synthetic
agaagagaagugugaaggagag

SEQ ID NO: 309511 - RNA, 23 nt, Artificial Sequence
  Synthetic
gagaagagaagugugaaggagag

SEQ ID NO: 309512 - RNA, 24 nt, Artificial Sequence
  Synthetic
ggagaagagaagugugaaggagag

SEQ ID NO: 309513 - RNA, 18 nt, Artificial Sequence
  Synthetic
aaaauggaagcaggagag

SEQ ID NO: 309514 - RNA, 19 nt, Artificial Sequence
  Synthetic
gaaaauggaagcaggagag

SEQ ID NO: 309515 - RNA, 20 nt, Artificial Sequence
  Synthetic
ugaaaauggaagcaggagag

SEQ ID NO: 309516 - RNA, 21 nt, Artificial Sequence
  Synthetic
gugaaaauggaagcaggagag

SEQ ID NO: 309517 - RNA, 22 nt, Artificial Sequence
  Synthetic
agugaaaauggaagcaggagag

SEQ ID NO: 309518 - RNA, 23 nt, Artificial Sequence
  Synthetic
aagugaaaauggaagcaggagag

SEQ ID NO: 309519 - RNA, 24 nt, Artificial Sequence
  Synthetic
uaagugaaaauggaagcaggagag

SEQ ID NO: 309520 - RNA, 18 nt, Artificial Sequence
  Synthetic
gaaguaccaguaggagag

SEQ ID NO: 309521 - RNA, 19 nt, Artificial Sequence
  Synthetic
ggaaguaccaguaggagag

SEQ ID NO: 309522 - RNA, 20 nt, Artificial Sequence
  Synthetic
aggaaguaccaguaggagag

SEQ ID NO: 309523 - RNA, 21 nt, Artificial Sequence
  Synthetic
caggaaguaccaguaggagag

SEQ ID NO: 309524 - RNA, 22 nt, Artificial Sequence
  Synthetic
ccaggaaguaccaguaggagag

SEQ ID NO: 309525 - RNA, 23 nt, Artificial Sequence
  Synthetic
cccaggaaguaccaguaggagag

SEQ ID NO: 309526 - RNA, 24 nt, Artificial Sequence
  Synthetic
ucccaggaaguaccaguaggagag

SEQ ID NO: 309527 - RNA, 18 nt, Artificial Sequence
  Synthetic
caaauccuuuuaggagag

SEQ ID NO: 309528 - RNA, 19 nt, Artificial Sequence
  Synthetic
acaaauccuuuuaggagag

SEQ ID NO: 309529 - RNA, 20 nt, Artificial Sequence
  Synthetic
aacaaauccuuuuaggagag

SEQ ID NO: 309530 - RNA, 21 nt, Artificial Sequence
  Synthetic
aaacaaauccuuuuaggagag

SEQ ID NO: 309531 - RNA, 22 nt, Artificial Sequence
  Synthetic
uaaacaaauccuuuuaggagag

SEQ ID NO: 309532 - RNA, 23 nt, Artificial Sequence
  Synthetic
uuaaacaaauccuuuuaggagag

SEQ ID NO: 309533 - RNA, 24 nt, Artificial Sequence
  Synthetic
uuuaaacaaauccuuuuaggagag

SEQ ID NO: 309534 - RNA, 18 nt, Artificial Sequence
  Synthetic
cagaggccaaagggagag

SEQ ID NO: 309535 - RNA, 19 nt, Artificial Sequence
  Synthetic
ucagaggccaaagggagag

SEQ ID NO: 309536 - RNA, 20 nt, Artificial Sequence
  Synthetic
cucagaggccaaagggagag

SEQ ID NO: 309537 - RNA, 21 nt, Artificial Sequence
  Synthetic
ccucagaggccaaagggagag

SEQ ID NO: 309538 - RNA, 22 nt, Artificial Sequence
  Synthetic
gccucagaggccaaagggagag

SEQ ID NO: 309539 - RNA, 23 nt, Artificial Sequence
  Synthetic
ugccucagaggccaaagggagag

SEQ ID NO: 309540 - RNA, 24 nt, Artificial Sequence
  Synthetic
gugccucagaggccaaagggagag

SEQ ID NO: 309541 - RNA, 18 nt, Artificial Sequence
  Synthetic
agagggaggaagggagag

SEQ ID NO: 309542 - RNA, 19 nt, Artificial Sequence
  Synthetic
gagagggaggaagggagag

SEQ ID NO: 309543 - RNA, 20 nt, Artificial Sequence
  Synthetic
agagagggaggaagggagag

SEQ ID NO: 309544 - RNA, 21 nt, Artificial Sequence
  Synthetic
gagagagggaggaagggagag

SEQ ID NO: 309545 - RNA, 22 nt, Artificial Sequence
  Synthetic
agagagagggaggaagggagag

SEQ ID NO: 309546 - RNA, 23 nt, Artificial Sequence
  Synthetic
gagagagagggaggaagggagag

SEQ ID NO: 309547 - RNA, 24 nt, Artificial Sequence
  Synthetic
agagagagagggaggaagggagag

SEQ ID NO: 309548 - RNA, 18 nt, Artificial Sequence
  Synthetic
gaaaagcuagagggagag

SEQ ID NO: 309549 - RNA, 19 nt, Artificial Sequence
  Synthetic
agaaaagcuagagggagag

SEQ ID NO: 309550 - RNA, 20 nt, Artificial Sequence
  Synthetic
aagaaaagcuagagggagag

SEQ ID NO: 309551 - RNA, 21 nt, Artificial Sequence
  Synthetic
gaagaaaagcuagagggagag

SEQ ID NO: 309552 - RNA, 22 nt, Artificial Sequence
  Synthetic
ggaagaaaagcuagagggagag

SEQ ID NO: 309553 - RNA, 23 nt, Artificial Sequence
  Synthetic
uggaagaaaagcuagagggagag

SEQ ID NO: 309554 - RNA, 24 nt, Artificial Sequence
  Synthetic
guggaagaaaagcuagagggagag

SEQ ID NO: 309555 - RNA, 18 nt, Artificial Sequence
  Synthetic
gcugggagggagggagag

SEQ ID NO: 309556 - RNA, 19 nt, Artificial Sequence
  Synthetic
ggcugggagggagggagag

SEQ ID NO: 309557 - RNA, 20 nt, Artificial Sequence
  Synthetic
cggcugggagggagggagag

SEQ ID NO: 309558 - RNA, 21 nt, Artificial Sequence
  Synthetic
acggcugggagggagggagag

SEQ ID NO: 309559 - RNA, 22 nt, Artificial Sequence
  Synthetic
uacggcugggagggagggagag

SEQ ID NO: 309560 - RNA, 23 nt, Artificial Sequence
  Synthetic
guacggcugggagggagggagag

SEQ ID NO: 309561 - RNA, 24 nt, Artificial Sequence
  Synthetic
aguacggcugggagggagggagag

SEQ ID NO: 309562 - RNA, 18 nt, Artificial Sequence
  Synthetic
ccauuaugggagggagag

SEQ ID NO: 309563 - RNA, 19 nt, Artificial Sequence
  Synthetic
gccauuaugggagggagag

SEQ ID NO: 309564 - RNA, 20 nt, Artificial Sequence
  Synthetic
ugccauuaugggagggagag

SEQ ID NO: 309565 - RNA, 21 nt, Artificial Sequence
  Synthetic
uugccauuaugggagggagag

SEQ ID NO: 309566 - RNA, 22 nt, Artificial Sequence
  Synthetic
cuugccauuaugggagggagag

SEQ ID NO: 309567 - RNA, 23 nt, Artificial Sequence
  Synthetic
acuugccauuaugggagggagag

SEQ ID NO: 309568 - RNA, 24 nt, Artificial Sequence
  Synthetic
uacuugccauuaugggagggagag

SEQ ID NO: 309569 - RNA, 18 nt, Artificial Sequence
  Synthetic
gaggagguggagggagag

SEQ ID NO: 309570 - RNA, 19 nt, Artificial Sequence
  Synthetic
ugaggagguggagggagag

SEQ ID NO: 309571 - RNA, 20 nt, Artificial Sequence
  Synthetic
cugaggagguggagggagag

SEQ ID NO: 309572 - RNA, 21 nt, Artificial Sequence
  Synthetic
gcugaggagguggagggagag

SEQ ID NO: 309573 - RNA, 22 nt, Artificial Sequence
  Synthetic
ggcugaggagguggagggagag

SEQ ID NO: 309574 - RNA, 23 nt, Artificial Sequence
  Synthetic
aggcugaggagguggagggagag

SEQ ID NO: 309575 - RNA, 24 nt, Artificial Sequence
  Synthetic
uaggcugaggagguggagggagag

SEQ ID NO: 309576 - RNA, 18 nt, Artificial Sequence
  Synthetic
guggguggguagggagag

SEQ ID NO: 309577 - RNA, 19 nt, Artificial Sequence
  Synthetic
gguggguggguagggagag

SEQ ID NO: 309578 - RNA, 20 nt, Artificial Sequence
  Synthetic
agguggguggguagggagag

SEQ ID NO: 309579 - RNA, 21 nt, Artificial Sequence
  Synthetic
gagguggguggguagggagag

SEQ ID NO: 309580 - RNA, 22 nt, Artificial Sequence
  Synthetic
agagguggguggguagggagag

SEQ ID NO: 309581 - RNA, 23 nt, Artificial Sequence
  Synthetic
gagagguggguggguagggagag

SEQ ID NO: 309582 - RNA, 24 nt, Artificial Sequence
  Synthetic
ugagagguggguggguagggagag

SEQ ID NO: 309583 - RNA, 18 nt, Artificial Sequence
  Synthetic
cgugaaauuaggggagag

SEQ ID NO: 309584 - RNA, 19 nt, Artificial Sequence
  Synthetic
ucgugaaauuaggggagag

SEQ ID NO: 309585 - RNA, 20 nt, Artificial Sequence
  Synthetic
cucgugaaauuaggggagag

SEQ ID NO: 309586 - RNA, 21 nt, Artificial Sequence
  Synthetic
ccucgugaaauuaggggagag

SEQ ID NO: 309587 - RNA, 22 nt, Artificial Sequence
  Synthetic
accucgugaaauuaggggagag

SEQ ID NO: 309588 - RNA, 23 nt, Artificial Sequence
  Synthetic
uaccucgugaaauuaggggagag

SEQ ID NO: 309589 - RNA, 24 nt, Artificial Sequence
  Synthetic
auaccucgugaaauuaggggagag

SEQ ID NO: 309590 - RNA, 18 nt, Artificial Sequence
  Synthetic
uccuagaaucugggagag

SEQ ID NO: 309591 - RNA, 19 nt, Artificial Sequence
  Synthetic
auccuagaaucugggagag

SEQ ID NO: 309592 - RNA, 20 nt, Artificial Sequence
  Synthetic
uauccuagaaucugggagag

SEQ ID NO: 309593 - RNA, 21 nt, Artificial Sequence
  Synthetic
uuauccuagaaucugggagag

SEQ ID NO: 309594 - RNA, 22 nt, Artificial Sequence
  Synthetic
cuuauccuagaaucugggagag

SEQ ID NO: 309595 - RNA, 23 nt, Artificial Sequence
  Synthetic
ccuuauccuagaaucugggagag

SEQ ID NO: 309596 - RNA, 24 nt, Artificial Sequence
  Synthetic
cccuuauccuagaaucugggagag

SEQ ID NO: 309597 - RNA, 18 nt, Artificial Sequence
  Synthetic
gaguuugaauugggagag

SEQ ID NO: 309598 - RNA, 19 nt, Artificial Sequence
  Synthetic
agaguuugaauugggagag

SEQ ID NO: 309599 - RNA, 20 nt, Artificial Sequence
  Synthetic
uagaguuugaauugggagag

SEQ ID NO: 309600 - RNA, 21 nt, Artificial Sequence
  Synthetic
cuagaguuugaauugggagag

SEQ ID NO: 309601 - RNA, 22 nt, Artificial Sequence
  Synthetic
ccuagaguuugaauugggagag

SEQ ID NO: 309602 - RNA, 23 nt, Artificial Sequence
  Synthetic
accuagaguuugaauugggagag

SEQ ID NO: 309603 - RNA, 24 nt, Artificial Sequence
  Synthetic
aaccuagaguuugaauugggagag

SEQ ID NO: 309604 - RNA, 18 nt, Artificial Sequence
  Synthetic
cagacuuauuugggagag

SEQ ID NO: 309605 - RNA, 19 nt, Artificial Sequence
  Synthetic
acagacuuauuugggagag

SEQ ID NO: 309606 - RNA, 20 nt, Artificial Sequence
  Synthetic
aacagacuuauuugggagag

SEQ ID NO: 309607 - RNA, 21 nt, Artificial Sequence
  Synthetic
aaacagacuuauuugggagag

SEQ ID NO: 309608 - RNA, 22 nt, Artificial Sequence
  Synthetic
gaaacagacuuauuugggagag

SEQ ID NO: 309609 - RNA, 23 nt, Artificial Sequence
  Synthetic
ugaaacagacuuauuugggagag

SEQ ID NO: 309610 - RNA, 24 nt, Artificial Sequence
  Synthetic
augaaacagacuuauuugggagag

SEQ ID NO: 309611 - RNA, 18 nt, Artificial Sequence
  Synthetic
gcuauuuauucuggagag

SEQ ID NO: 309612 - RNA, 19 nt, Artificial Sequence
  Synthetic
agcuauuuauucuggagag

SEQ ID NO: 309613 - RNA, 20 nt, Artificial Sequence
  Synthetic
cagcuauuuauucuggagag

SEQ ID NO: 309614 - RNA, 21 nt, Artificial Sequence
  Synthetic
acagcuauuuauucuggagag

SEQ ID NO: 309615 - RNA, 22 nt, Artificial Sequence
  Synthetic
cacagcuauuuauucuggagag

SEQ ID NO: 309616 - RNA, 23 nt, Artificial Sequence
  Synthetic
acacagcuauuuauucuggagag

SEQ ID NO: 309617 - RNA, 24 nt, Artificial Sequence
  Synthetic
uacacagcuauuuauucuggagag

SEQ ID NO: 309618 - RNA, 18 nt, Artificial Sequence
  Synthetic
acuuaagaaaguggagag

SEQ ID NO: 309619 - RNA, 19 nt, Artificial Sequence
  Synthetic
uacuuaagaaaguggagag

SEQ ID NO: 309620 - RNA, 20 nt, Artificial Sequence
  Synthetic
auacuuaagaaaguggagag

SEQ ID NO: 309621 - RNA, 21 nt, Artificial Sequence
  Synthetic
uauacuuaagaaaguggagag

SEQ ID NO: 309622 - RNA, 22 nt, Artificial Sequence
  Synthetic
cuauacuuaagaaaguggagag

SEQ ID NO: 309623 - RNA, 23 nt, Artificial Sequence
  Synthetic
ucuauacuuaagaaaguggagag

SEQ ID NO: 309624 - RNA, 24 nt, Artificial Sequence
  Synthetic
uucuauacuuaagaaaguggagag

SEQ ID NO: 309625 - RNA, 18 nt, Artificial Sequence
  Synthetic
aucagaaacauuggagag

SEQ ID NO: 309626 - RNA, 19 nt, Artificial Sequence
  Synthetic
gaucagaaacauuggagag

SEQ ID NO: 309627 - RNA, 20 nt, Artificial Sequence
  Synthetic
ugaucagaaacauuggagag

SEQ ID NO: 309628 - RNA, 21 nt, Artificial Sequence
  Synthetic
uugaucagaaacauuggagag

SEQ ID NO: 309629 - RNA, 22 nt, Artificial Sequence
  Synthetic
cuugaucagaaacauuggagag

SEQ ID NO: 309630 - RNA, 23 nt, Artificial Sequence
  Synthetic
gcuugaucagaaacauuggagag

SEQ ID NO: 309631 - RNA, 24 nt, Artificial Sequence
  Synthetic
ugcuugaucagaaacauuggagag

SEQ ID NO: 309632 - RNA, 18 nt, Artificial Sequence
  Synthetic
uggcaggagauuggagag

SEQ ID NO: 309633 - RNA, 19 nt, Artificial Sequence
  Synthetic
uuggcaggagauuggagag

SEQ ID NO: 309634 - RNA, 20 nt, Artificial Sequence
  Synthetic
guuggcaggagauuggagag

SEQ ID NO: 309635 - RNA, 21 nt, Artificial Sequence
  Synthetic
cguuggcaggagauuggagag

SEQ ID NO: 309636 - RNA, 22 nt, Artificial Sequence
  Synthetic
gcguuggcaggagauuggagag

SEQ ID NO: 309637 - RNA, 23 nt, Artificial Sequence
  Synthetic
ggcguuggcaggagauuggagag

SEQ ID NO: 309638 - RNA, 24 nt, Artificial Sequence
  Synthetic
aggcguuggcaggagauuggagag

SEQ ID NO: 309639 - RNA, 18 nt, Artificial Sequence
  Synthetic
aucaaaaaacuuggagag

SEQ ID NO: 309640 - RNA, 19 nt, Artificial Sequence
  Synthetic
gaucaaaaaacuuggagag

SEQ ID NO: 309641 - RNA, 20 nt, Artificial Sequence
  Synthetic
ugaucaaaaaacuuggagag

SEQ ID NO: 309642 - RNA, 21 nt, Artificial Sequence
  Synthetic
gugaucaaaaaacuuggagag

SEQ ID NO: 309643 - RNA, 22 nt, Artificial Sequence
  Synthetic
ggugaucaaaaaacuuggagag

SEQ ID NO: 309644 - RNA, 23 nt, Artificial Sequence
  Synthetic
aggugaucaaaaaacuuggagag

SEQ ID NO: 309645 - RNA, 24 nt, Artificial Sequence
  Synthetic
aaggugaucaaaaaacuuggagag

SEQ ID NO: 309646 - RNA, 18 nt, Artificial Sequence
  Synthetic
acagaaauucuuggagag

SEQ ID NO: 309647 - RNA, 19 nt, Artificial Sequence
  Synthetic
aacagaaauucuuggagag

SEQ ID NO: 309648 - RNA, 20 nt, Artificial Sequence
  Synthetic
aaacagaaauucuuggagag

SEQ ID NO: 309649 - RNA, 21 nt, Artificial Sequence
  Synthetic
gaaacagaaauucuuggagag

SEQ ID NO: 309650 - RNA, 22 nt, Artificial Sequence
  Synthetic
ugaaacagaaauucuuggagag

SEQ ID NO: 309651 - RNA, 23 nt, Artificial Sequence
  Synthetic
cugaaacagaaauucuuggagag

SEQ ID NO: 309652 - RNA, 24 nt, Artificial Sequence
  Synthetic
acugaaacagaaauucuuggagag

SEQ ID NO: 309653 - RNA, 18 nt, Artificial Sequence
  Synthetic
agaauucacuuuggagag

SEQ ID NO: 309654 - RNA, 19 nt, Artificial Sequence
  Synthetic
aagaauucacuuuggagag

SEQ ID NO: 309655 - RNA, 20 nt, Artificial Sequence
  Synthetic
aaagaauucacuuuggagag

SEQ ID NO: 309656 - RNA, 21 nt, Artificial Sequence
  Synthetic
uaaagaauucacuuuggagag

SEQ ID NO: 309657 - RNA, 22 nt, Artificial Sequence
  Synthetic
uuaaagaauucacuuuggagag

SEQ ID NO: 309658 - RNA, 23 nt, Artificial Sequence
  Synthetic
uuuaaagaauucacuuuggagag

SEQ ID NO: 309659 - RNA, 24 nt, Artificial Sequence
  Synthetic
auuuaaagaauucacuuuggagag

SEQ ID NO: 309660 - RNA, 18 nt, Artificial Sequence
  Synthetic
agguuaaaaaaaugagag

SEQ ID NO: 309661 - RNA, 19 nt, Artificial Sequence
  Synthetic
aagguuaaaaaaaugagag

SEQ ID NO: 309662 - RNA, 20 nt, Artificial Sequence
  Synthetic
uaagguuaaaaaaaugagag

SEQ ID NO: 309663 - RNA, 21 nt, Artificial Sequence
  Synthetic
auaagguuaaaaaaaugagag

SEQ ID NO: 309664 - RNA, 22 nt, Artificial Sequence
  Synthetic
cauaagguuaaaaaaaugagag

SEQ ID NO: 309665 - RNA, 23 nt, Artificial Sequence
  Synthetic
ucauaagguuaaaaaaaugagag

SEQ ID NO: 309666 - RNA, 24 nt, Artificial Sequence
  Synthetic
uucauaagguuaaaaaaaugagag

SEQ ID NO: 309667 - RNA, 18 nt, Artificial Sequence
  Synthetic
cucauaauagaaugagag

SEQ ID NO: 309668 - RNA, 19 nt, Artificial Sequence
  Synthetic
acucauaauagaaugagag

SEQ ID NO: 309669 - RNA, 20 nt, Artificial Sequence
  Synthetic
aacucauaauagaaugagag

SEQ ID NO: 309670 - RNA, 21 nt, Artificial Sequence
  Synthetic
aaacucauaauagaaugagag

SEQ ID NO: 309671 - RNA, 22 nt, Artificial Sequence
  Synthetic
aaaacucauaauagaaugagag

SEQ ID NO: 309672 - RNA, 23 nt, Artificial Sequence
  Synthetic
aaaaacucauaauagaaugagag

SEQ ID NO: 309673 - RNA, 24 nt, Artificial Sequence
  Synthetic
gaaaaacucauaauagaaugagag

SEQ ID NO: 309674 - RNA, 18 nt, Artificial Sequence
  Synthetic
ggggaccacuaaugagag

SEQ ID NO: 309675 - RNA, 19 nt, Artificial Sequence
  Synthetic
aggggaccacuaaugagag

SEQ ID NO: 309676 - RNA, 20 nt, Artificial Sequence
  Synthetic
gaggggaccacuaaugagag

SEQ ID NO: 309677 - RNA, 21 nt, Artificial Sequence
  Synthetic
ggaggggaccacuaaugagag

SEQ ID NO: 309678 - RNA, 22 nt, Artificial Sequence
  Synthetic
aggaggggaccacuaaugagag

SEQ ID NO: 309679 - RNA, 23 nt, Artificial Sequence
  Synthetic
caggaggggaccacuaaugagag

SEQ ID NO: 309680 - RNA, 24 nt, Artificial Sequence
  Synthetic
ccaggaggggaccacuaaugagag

SEQ ID NO: 309681 - RNA, 18 nt, Artificial Sequence
  Synthetic
uauuuggcugcaugagag

SEQ ID NO: 309682 - RNA, 19 nt, Artificial Sequence
  Synthetic
auauuuggcugcaugagag

SEQ ID NO: 309683 - RNA, 20 nt, Artificial Sequence
  Synthetic
aauauuuggcugcaugagag

SEQ ID NO: 309684 - RNA, 21 nt, Artificial Sequence
  Synthetic
aaauauuuggcugcaugagag

SEQ ID NO: 309685 - RNA, 22 nt, Artificial Sequence
  Synthetic
aaaauauuuggcugcaugagag

SEQ ID NO: 309686 - RNA, 23 nt, Artificial Sequence
  Synthetic
aaaaauauuuggcugcaugagag

SEQ ID NO: 309687 - RNA, 24 nt, Artificial Sequence
  Synthetic
gaaaaauauuuggcugcaugagag

SEQ ID NO: 309688 - RNA, 18 nt, Artificial Sequence
  Synthetic
gggcaacacagaugagag

SEQ ID NO: 309689 - RNA, 19 nt, Artificial Sequence
  Synthetic
agggcaacacagaugagag

SEQ ID NO: 309690 - RNA, 20 nt, Artificial Sequence
  Synthetic
cagggcaacacagaugagag

SEQ ID NO: 309691 - RNA, 21 nt, Artificial Sequence
  Synthetic
acagggcaacacagaugagag

SEQ ID NO: 309692 - RNA, 22 nt, Artificial Sequence
  Synthetic
cacagggcaacacagaugagag

SEQ ID NO: 309693 - RNA, 23 nt, Artificial Sequence
  Synthetic
gcacagggcaacacagaugagag

SEQ ID NO: 309694 - RNA, 24 nt, Artificial Sequence
  Synthetic
agcacagggcaacacagaugagag

SEQ ID NO: 309695 - RNA, 18 nt, Artificial Sequence
  Synthetic
ugacugcacauaugagag

SEQ ID NO: 309696 - RNA, 19 nt, Artificial Sequence
  Synthetic
augacugcacauaugagag

SEQ ID NO: 309697 - RNA, 20 nt, Artificial Sequence
  Synthetic
aaugacugcacauaugagag

SEQ ID NO: 309698 - RNA, 21 nt, Artificial Sequence
  Synthetic
aaaugacugcacauaugagag

SEQ ID NO: 309699 - RNA, 22 nt, Artificial Sequence
  Synthetic
aaaaugacugcacauaugagag

SEQ ID NO: 309700 - RNA, 23 nt, Artificial Sequence
  Synthetic
gaaaaugacugcacauaugagag

SEQ ID NO: 309701 - RNA, 24 nt, Artificial Sequence
  Synthetic
agaaaaugacugcacauaugagag

SEQ ID NO: 309702 - RNA, 18 nt, Artificial Sequence
  Synthetic
caccccuaaaacugagag

SEQ ID NO: 309703 - RNA, 19 nt, Artificial Sequence
  Synthetic
ccaccccuaaaacugagag

SEQ ID NO: 309704 - RNA, 20 nt, Artificial Sequence
  Synthetic
accaccccuaaaacugagag

SEQ ID NO: 309705 - RNA, 21 nt, Artificial Sequence
  Synthetic
gaccaccccuaaaacugagag

SEQ ID NO: 309706 - RNA, 22 nt, Artificial Sequence
  Synthetic
ggaccaccccuaaaacugagag

SEQ ID NO: 309707 - RNA, 23 nt, Artificial Sequence
  Synthetic
gggaccaccccuaaaacugagag

SEQ ID NO: 309708 - RNA, 24 nt, Artificial Sequence
  Synthetic
ugggaccaccccuaaaacugagag

SEQ ID NO: 309709 - RNA, 18 nt, Artificial Sequence
  Synthetic
cuggcugcugccugagag

SEQ ID NO: 309710 - RNA, 19 nt, Artificial Sequence
  Synthetic
gcuggcugcugccugagag

SEQ ID NO: 309711 - RNA, 20 nt, Artificial Sequence
  Synthetic
ggcuggcugcugccugagag

SEQ ID NO: 309712 - RNA, 21 nt, Artificial Sequence
  Synthetic
gggcuggcugcugccugagag

SEQ ID NO: 309713 - RNA, 22 nt, Artificial Sequence
  Synthetic
ggggcuggcugcugccugagag

SEQ ID NO: 309714 - RNA, 23 nt, Artificial Sequence
  Synthetic
aggggcuggcugcugccugagag

SEQ ID NO: 309715 - RNA, 24 nt, Artificial Sequence
  Synthetic
caggggcuggcugcugccugagag

SEQ ID NO: 309716 - RNA, 18 nt, Artificial Sequence
  Synthetic
aaaaccagguucugagag

SEQ ID NO: 309717 - RNA, 19 nt, Artificial Sequence
  Synthetic
gaaaaccagguucugagag

SEQ ID NO: 309718 - RNA, 20 nt, Artificial Sequence
  Synthetic
ugaaaaccagguucugagag

SEQ ID NO: 309719 - RNA, 21 nt, Artificial Sequence
  Synthetic
augaaaaccagguucugagag

SEQ ID NO: 309720 - RNA, 22 nt, Artificial Sequence
  Synthetic
gaugaaaaccagguucugagag

SEQ ID NO: 309721 - RNA, 23 nt, Artificial Sequence
  Synthetic
agaugaaaaccagguucugagag

SEQ ID NO: 309722 - RNA, 24 nt, Artificial Sequence
  Synthetic
aagaugaaaaccagguucugagag

SEQ ID NO: 309723 - RNA, 18 nt, Artificial Sequence
  Synthetic
cauggcagaaagugagag

SEQ ID NO: 309724 - RNA, 19 nt, Artificial Sequence
  Synthetic
ucauggcagaaagugagag

SEQ ID NO: 309725 - RNA, 20 nt, Artificial Sequence
  Synthetic
gucauggcagaaagugagag

SEQ ID NO: 309726 - RNA, 21 nt, Artificial Sequence
  Synthetic
agucauggcagaaagugagag

SEQ ID NO: 309727 - RNA, 22 nt, Artificial Sequence
  Synthetic
gagucauggcagaaagugagag

SEQ ID NO: 309728 - RNA, 23 nt, Artificial Sequence
  Synthetic
ggagucauggcagaaagugagag

SEQ ID NO: 309729 - RNA, 24 nt, Artificial Sequence
  Synthetic
uggagucauggcagaaagugagag

SEQ ID NO: 309730 - RNA, 18 nt, Artificial Sequence
  Synthetic
uuuuauuaacagugagag

SEQ ID NO: 309731 - RNA, 19 nt, Artificial Sequence
  Synthetic
uuuuuauuaacagugagag

SEQ ID NO: 309732 - RNA, 20 nt, Artificial Sequence
  Synthetic
auuuuuauuaacagugagag

SEQ ID NO: 309733 - RNA, 21 nt, Artificial Sequence
  Synthetic
aauuuuuauuaacagugagag

SEQ ID NO: 309734 - RNA, 22 nt, Artificial Sequence
  Synthetic
aaauuuuuauuaacagugagag

SEQ ID NO: 309735 - RNA, 23 nt, Artificial Sequence
  Synthetic
aaaauuuuuauuaacagugagag

SEQ ID NO: 309736 - RNA, 24 nt, Artificial Sequence
  Synthetic
uaaaauuuuuauuaacagugagag

SEQ ID NO: 309737 - RNA, 18 nt, Artificial Sequence
  Synthetic
uaugggguauggugagag

SEQ ID NO: 309738 - RNA, 19 nt, Artificial Sequence
  Synthetic
guaugggguauggugagag

SEQ ID NO: 309739 - RNA, 20 nt, Artificial Sequence
  Synthetic
uguaugggguauggugagag

SEQ ID NO: 309740 - RNA, 21 nt, Artificial Sequence
  Synthetic
guguaugggguauggugagag

SEQ ID NO: 309741 - RNA, 22 nt, Artificial Sequence
  Synthetic
uguguaugggguauggugagag

SEQ ID NO: 309742 - RNA, 23 nt, Artificial Sequence
  Synthetic
uuguguaugggguauggugagag

SEQ ID NO: 309743 - RNA, 24 nt, Artificial Sequence
  Synthetic
cuuguguaugggguauggugagag

SEQ ID NO: 309744 - RNA, 18 nt, Artificial Sequence
  Synthetic
aacaaaugugugugagag

SEQ ID NO: 309745 - RNA, 19 nt, Artificial Sequence
  Synthetic
aaacaaaugugugugagag

SEQ ID NO: 309746 - RNA, 20 nt, Artificial Sequence
  Synthetic
uaaacaaaugugugugagag

SEQ ID NO: 309747 - RNA, 21 nt, Artificial Sequence
  Synthetic
uuaaacaaaugugugugagag

SEQ ID NO: 309748 - RNA, 22 nt, Artificial Sequence
  Synthetic
auuaaacaaaugugugugagag

SEQ ID NO: 309749 - RNA, 23 nt, Artificial Sequence
  Synthetic
cauuaaacaaaugugugugagag

SEQ ID NO: 309750 - RNA, 24 nt, Artificial Sequence
  Synthetic
ucauuaaacaaaugugugugagag

SEQ ID NO: 309751 - RNA, 18 nt, Artificial Sequence
  Synthetic
aagaauaagacuugagag

SEQ ID NO: 309752 - RNA, 19 nt, Artificial Sequence
  Synthetic
aaagaauaagacuugagag

SEQ ID NO: 309753 - RNA, 20 nt, Artificial Sequence
  Synthetic
uaaagaauaagacuugagag

SEQ ID NO: 309754 - RNA, 21 nt, Artificial Sequence
  Synthetic
uuaaagaauaagacuugagag

SEQ ID NO: 309755 - RNA, 22 nt, Artificial Sequence
  Synthetic
uuuaaagaauaagacuugagag

SEQ ID NO: 309756 - RNA, 23 nt, Artificial Sequence
  Synthetic
uuuuaaagaauaagacuugagag

SEQ ID NO: 309757 - RNA, 24 nt, Artificial Sequence
  Synthetic
uuuuuaaagaauaagacuugagag

SEQ ID NO: 309758 - RNA, 18 nt, Artificial Sequence
  Synthetic
auguggaucccuugagag

SEQ ID NO: 309759 - RNA, 19 nt, Artificial Sequence
  Synthetic
cauguggaucccuugagag

SEQ ID NO: 309760 - RNA, 20 nt, Artificial Sequence
  Synthetic
ccauguggaucccuugagag

SEQ ID NO: 309761 - RNA, 21 nt, Artificial Sequence
  Synthetic
cccauguggaucccuugagag

SEQ ID NO: 309762 - RNA, 22 nt, Artificial Sequence
  Synthetic
acccauguggaucccuugagag

SEQ ID NO: 309763 - RNA, 23 nt, Artificial Sequence
  Synthetic
aacccauguggaucccuugagag

SEQ ID NO: 309764 - RNA, 24 nt, Artificial Sequence
  Synthetic
uaacccauguggaucccuugagag

SEQ ID NO: 309765 - RNA, 18 nt, Artificial Sequence
  Synthetic
uggcuucuggguugagag

SEQ ID NO: 309766 - RNA, 19 nt, Artificial Sequence
  Synthetic
cuggcuucuggguugagag

SEQ ID NO: 309767 - RNA, 20 nt, Artificial Sequence
  Synthetic
acuggcuucuggguugagag

SEQ ID NO: 309768 - RNA, 21 nt, Artificial Sequence
  Synthetic
cacuggcuucuggguugagag

SEQ ID NO: 309769 - RNA, 22 nt, Artificial Sequence
  Synthetic
acacuggcuucuggguugagag

SEQ ID NO: 309770 - RNA, 23 nt, Artificial Sequence
  Synthetic
cacacuggcuucuggguugagag

SEQ ID NO: 309771 - RNA, 24 nt, Artificial Sequence
  Synthetic
ucacacuggcuucuggguugagag

SEQ ID NO: 309772 - RNA, 18 nt, Artificial Sequence
  Synthetic
aagacucacuguugagag

SEQ ID NO: 309773 - RNA, 19 nt, Artificial Sequence
  Synthetic
uaagacucacuguugagag

SEQ ID NO: 309774 - RNA, 20 nt, Artificial Sequence
  Synthetic
auaagacucacuguugagag

SEQ ID NO: 309775 - RNA, 21 nt, Artificial Sequence
  Synthetic
aauaagacucacuguugagag

SEQ ID NO: 309776 - RNA, 22 nt, Artificial Sequence
  Synthetic
aaauaagacucacuguugagag

SEQ ID NO: 309777 - RNA, 23 nt, Artificial Sequence
  Synthetic
aaaauaagacucacuguugagag

SEQ ID NO: 309778 - RNA, 24 nt, Artificial Sequence
  Synthetic
caaaauaagacucacuguugagag

SEQ ID NO: 309779 - RNA, 18 nt, Artificial Sequence
  Synthetic
cuagaggguuguugagag

SEQ ID NO: 309780 - RNA, 19 nt, Artificial Sequence
  Synthetic
ccuagaggguuguugagag

SEQ ID NO: 309781 - RNA, 20 nt, Artificial Sequence
  Synthetic
cccuagaggguuguugagag

SEQ ID NO: 309782 - RNA, 21 nt, Artificial Sequence
  Synthetic
acccuagaggguuguugagag

SEQ ID NO: 309783 - RNA, 22 nt, Artificial Sequence
  Synthetic
uacccuagaggguuguugagag

SEQ ID NO: 309784 - RNA, 23 nt, Artificial Sequence
  Synthetic
cuacccuagaggguuguugagag

SEQ ID NO: 309785 - RNA, 24 nt, Artificial Sequence
  Synthetic
ccuacccuagaggguuguugagag

SEQ ID NO: 309786 - RNA, 18 nt, Artificial Sequence
  Synthetic
uccacucauauuugagag

SEQ ID NO: 309787 - RNA, 19 nt, Artificial Sequence
  Synthetic
uuccacucauauuugagag

SEQ ID NO: 309788 - RNA, 20 nt, Artificial Sequence
  Synthetic
cuuccacucauauuugagag

SEQ ID NO: 309789 - RNA, 21 nt, Artificial Sequence
  Synthetic
acuuccacucauauuugagag

SEQ ID NO: 309790 - RNA, 22 nt, Artificial Sequence
  Synthetic
aacuuccacucauauuugagag

SEQ ID NO: 309791 - RNA, 23 nt, Artificial Sequence
  Synthetic
aaacuuccacucauauuugagag

SEQ ID NO: 309792 - RNA, 24 nt, Artificial Sequence
  Synthetic
uaaacuuccacucauauuugagag

SEQ ID NO: 309793 - RNA, 18 nt, Artificial Sequence
  Synthetic
ugcuugccccuuugagag

SEQ ID NO: 309794 - RNA, 19 nt, Artificial Sequence
  Synthetic
uugcuugccccuuugagag

SEQ ID NO: 309795 - RNA, 20 nt, Artificial Sequence
  Synthetic
uuugcuugccccuuugagag

SEQ ID NO: 309796 - RNA, 21 nt, Artificial Sequence
  Synthetic
cuuugcuugccccuuugagag

SEQ ID NO: 309797 - RNA, 22 nt, Artificial Sequence
  Synthetic
ccuuugcuugccccuuugagag

SEQ ID NO: 309798 - RNA, 23 nt, Artificial Sequence
  Synthetic
uccuuugcuugccccuuugagag

SEQ ID NO: 309799 - RNA, 24 nt, Artificial Sequence
  Synthetic
uuccuuugcuugccccuuugagag

SEQ ID NO: 309800 - RNA, 18 nt, Artificial Sequence
  Synthetic
uuguaagcccuuugagag

SEQ ID NO: 309801 - RNA, 19 nt, Artificial Sequence
  Synthetic
auuguaagcccuuugagag

SEQ ID NO: 309802 - RNA, 20 nt, Artificial Sequence
  Synthetic
aauuguaagcccuuugagag

SEQ ID NO: 309803 - RNA, 21 nt, Artificial Sequence
  Synthetic
aaauuguaagcccuuugagag

SEQ ID NO: 309804 - RNA, 22 nt, Artificial Sequence
  Synthetic
gaaauuguaagcccuuugagag

SEQ ID NO: 309805 - RNA, 23 nt, Artificial Sequence
  Synthetic
ggaaauuguaagcccuuugagag

SEQ ID NO: 309806 - RNA, 24 nt, Artificial Sequence
  Synthetic
gggaaauuguaagcccuuugagag

SEQ ID NO: 309807 - RNA, 18 nt, Artificial Sequence
  Synthetic
ggaagggugguuugagag

SEQ ID NO: 309808 - RNA, 19 nt, Artificial Sequence
  Synthetic
uggaagggugguuugagag

SEQ ID NO: 309809 - RNA, 20 nt, Artificial Sequence
  Synthetic
guggaagggugguuugagag

SEQ ID NO: 309810 - RNA, 21 nt, Artificial Sequence
  Synthetic
gguggaagggugguuugagag

SEQ ID NO: 309811 - RNA, 22 nt, Artificial Sequence
  Synthetic
agguggaagggugguuugagag

SEQ ID NO: 309812 - RNA, 23 nt, Artificial Sequence
  Synthetic
uagguggaagggugguuugagag

SEQ ID NO: 309813 - RNA, 24 nt, Artificial Sequence
  Synthetic
guagguggaagggugguuugagag

SEQ ID NO: 309814 - RNA, 18 nt, Artificial Sequence
  Synthetic
gaauuuagaaaaauagag

SEQ ID NO: 309815 - RNA, 19 nt, Artificial Sequence
  Synthetic
agaauuuagaaaaauagag

SEQ ID NO: 309816 - RNA, 20 nt, Artificial Sequence
  Synthetic
aagaauuuagaaaaauagag

SEQ ID NO: 309817 - RNA, 21 nt, Artificial Sequence
  Synthetic
gaagaauuuagaaaaauagag

SEQ ID NO: 309818 - RNA, 22 nt, Artificial Sequence
  Synthetic
ugaagaauuuagaaaaauagag

SEQ ID NO: 309819 - RNA, 23 nt, Artificial Sequence
  Synthetic
uugaagaauuuagaaaaauagag

SEQ ID NO: 309820 - RNA, 24 nt, Artificial Sequence
  Synthetic
auugaagaauuuagaaaaauagag

SEQ ID NO: 309821 - RNA, 18 nt, Artificial Sequence
  Synthetic
ggauuacacaaaauagag

SEQ ID NO: 309822 - RNA, 19 nt, Artificial Sequence
  Synthetic
gggauuacacaaaauagag

SEQ ID NO: 309823 - RNA, 20 nt, Artificial Sequence
  Synthetic
ggggauuacacaaaauagag

SEQ ID NO: 309824 - RNA, 21 nt, Artificial Sequence
  Synthetic
aggggauuacacaaaauagag

SEQ ID NO: 309825 - RNA, 22 nt, Artificial Sequence
  Synthetic
aaggggauuacacaaaauagag

SEQ ID NO: 309826 - RNA, 23 nt, Artificial Sequence
  Synthetic
gaaggggauuacacaaaauagag

SEQ ID NO: 309827 - RNA, 24 nt, Artificial Sequence
  Synthetic
ggaaggggauuacacaaaauagag

SEQ ID NO: 309828 - RNA, 18 nt, Artificial Sequence
  Synthetic
uuguguauagaaauagag

SEQ ID NO: 309829 - RNA, 19 nt, Artificial Sequence
  Synthetic
uuuguguauagaaauagag

SEQ ID NO: 309830 - RNA, 20 nt, Artificial Sequence
  Synthetic
uuuuguguauagaaauagag

SEQ ID NO: 309831 - RNA, 21 nt, Artificial Sequence
  Synthetic
uuuuuguguauagaaauagag

SEQ ID NO: 309832 - RNA, 22 nt, Artificial Sequence
  Synthetic
auuuuuguguauagaaauagag

SEQ ID NO: 309833 - RNA, 23 nt, Artificial Sequence
  Synthetic
uauuuuuguguauagaaauagag

SEQ ID NO: 309834 - RNA, 24 nt, Artificial Sequence
  Synthetic
auauuuuuguguauagaaauagag

SEQ ID NO: 309835 - RNA, 18 nt, Artificial Sequence
  Synthetic
uguguagaggaaauagag

SEQ ID NO: 309836 - RNA, 19 nt, Artificial Sequence
  Synthetic
cuguguagaggaaauagag

SEQ ID NO: 309837 - RNA, 20 nt, Artificial Sequence
  Synthetic
ucuguguagaggaaauagag

SEQ ID NO: 309838 - RNA, 21 nt, Artificial Sequence
  Synthetic
gucuguguagaggaaauagag

SEQ ID NO: 309839 - RNA, 22 nt, Artificial Sequence
  Synthetic
agucuguguagaggaaauagag

SEQ ID NO: 309840 - RNA, 23 nt, Artificial Sequence
  Synthetic
gagucuguguagaggaaauagag

SEQ ID NO: 309841 - RNA, 24 nt, Artificial Sequence
  Synthetic
ggagucuguguagaggaaauagag

SEQ ID NO: 309842 - RNA, 18 nt, Artificial Sequence
  Synthetic
agaugaggugaaauagag

SEQ ID NO: 309843 - RNA, 19 nt, Artificial Sequence
  Synthetic
gagaugaggugaaauagag

SEQ ID NO: 309844 - RNA, 20 nt, Artificial Sequence
  Synthetic
agagaugaggugaaauagag

SEQ ID NO: 309845 - RNA, 21 nt, Artificial Sequence
  Synthetic
uagagaugaggugaaauagag

SEQ ID NO: 309846 - RNA, 22 nt, Artificial Sequence
  Synthetic
auagagaugaggugaaauagag

SEQ ID NO: 309847 - RNA, 23 nt, Artificial Sequence
  Synthetic
aauagagaugaggugaaauagag

SEQ ID NO: 309848 - RNA, 24 nt, Artificial Sequence
  Synthetic
aaauagagaugaggugaaauagag

SEQ ID NO: 309849 - RNA, 18 nt, Artificial Sequence
  Synthetic
uggcucgaaggaauagag

SEQ ID NO: 309850 - RNA, 19 nt, Artificial Sequence
  Synthetic
guggcucgaaggaauagag

SEQ ID NO: 309851 - RNA, 20 nt, Artificial Sequence
  Synthetic
gguggcucgaaggaauagag

SEQ ID NO: 309852 - RNA, 21 nt, Artificial Sequence
  Synthetic
ggguggcucgaaggaauagag

SEQ ID NO: 309853 - RNA, 22 nt, Artificial Sequence
  Synthetic
uggguggcucgaaggaauagag

SEQ ID NO: 309854 - RNA, 23 nt, Artificial Sequence
  Synthetic
guggguggcucgaaggaauagag

SEQ ID NO: 309855 - RNA, 24 nt, Artificial Sequence
  Synthetic
uguggguggcucgaaggaauagag

SEQ ID NO: 309856 - RNA, 18 nt, Artificial Sequence
  Synthetic
aagcaaaaaugaauagag

SEQ ID NO: 309857 - RNA, 19 nt, Artificial Sequence
  Synthetic
gaagcaaaaaugaauagag

SEQ ID NO: 309858 - RNA, 20 nt, Artificial Sequence
  Synthetic
ugaagcaaaaaugaauagag

SEQ ID NO: 309859 - RNA, 21 nt, Artificial Sequence
  Synthetic
augaagcaaaaaugaauagag

SEQ ID NO: 309860 - RNA, 22 nt, Artificial Sequence
  Synthetic
caugaagcaaaaaugaauagag

SEQ ID NO: 309861 - RNA, 23 nt, Artificial Sequence
  Synthetic
acaugaagcaaaaaugaauagag

SEQ ID NO: 309862 - RNA, 24 nt, Artificial Sequence
  Synthetic
uacaugaagcaaaaaugaauagag

SEQ ID NO: 309863 - RNA, 18 nt, Artificial Sequence
  Synthetic
aacaggauucuaauagag

SEQ ID NO: 309864 - RNA, 19 nt, Artificial Sequence
  Synthetic
aaacaggauucuaauagag

SEQ ID NO: 309865 - RNA, 20 nt, Artificial Sequence
  Synthetic
gaaacaggauucuaauagag

SEQ ID NO: 309866 - RNA, 21 nt, Artificial Sequence
  Synthetic
agaaacaggauucuaauagag

SEQ ID NO: 309867 - RNA, 22 nt, Artificial Sequence
  Synthetic
aagaaacaggauucuaauagag

SEQ ID NO: 309868 - RNA, 23 nt, Artificial Sequence
  Synthetic
caagaaacaggauucuaauagag

SEQ ID NO: 309869 - RNA, 24 nt, Artificial Sequence
  Synthetic
gcaagaaacaggauucuaauagag

SEQ ID NO: 309870 - RNA, 18 nt, Artificial Sequence
  Synthetic
aaccaaagccacauagag

SEQ ID NO: 309871 - RNA, 19 nt, Artificial Sequence
  Synthetic
uaaccaaagccacauagag

SEQ ID NO: 309872 - RNA, 20 nt, Artificial Sequence
  Synthetic
auaaccaaagccacauagag

SEQ ID NO: 309873 - RNA, 21 nt, Artificial Sequence
  Synthetic
uauaaccaaagccacauagag

SEQ ID NO: 309874 - RNA, 22 nt, Artificial Sequence
  Synthetic
auauaaccaaagccacauagag

SEQ ID NO: 309875 - RNA, 23 nt, Artificial Sequence
  Synthetic
uauauaaccaaagccacauagag

SEQ ID NO: 309876 - RNA, 24 nt, Artificial Sequence
  Synthetic
auauauaaccaaagccacauagag

SEQ ID NO: 309877 - RNA, 18 nt, Artificial Sequence
  Synthetic
auggccaagcacauagag

SEQ ID NO: 309878 - RNA, 19 nt, Artificial Sequence
  Synthetic
cauggccaagcacauagag

SEQ ID NO: 309879 - RNA, 20 nt, Artificial Sequence
  Synthetic
ccauggccaagcacauagag

SEQ ID NO: 309880 - RNA, 21 nt, Artificial Sequence
  Synthetic
uccauggccaagcacauagag

SEQ ID NO: 309881 - RNA, 22 nt, Artificial Sequence
  Synthetic
uuccauggccaagcacauagag

SEQ ID NO: 309882 - RNA, 23 nt, Artificial Sequence
  Synthetic
uuuccauggccaagcacauagag

SEQ ID NO: 309883 - RNA, 24 nt, Artificial Sequence
  Synthetic
cuuuccauggccaagcacauagag

SEQ ID NO: 309884 - RNA, 18 nt, Artificial Sequence
  Synthetic
cuaguuugugccauagag

SEQ ID NO: 309885 - RNA, 19 nt, Artificial Sequence
  Synthetic
ccuaguuugugccauagag

SEQ ID NO: 309886 - RNA, 20 nt, Artificial Sequence
  Synthetic
gccuaguuugugccauagag

SEQ ID NO: 309887 - RNA, 21 nt, Artificial Sequence
  Synthetic
agccuaguuugugccauagag

SEQ ID NO: 309888 - RNA, 22 nt, Artificial Sequence
  Synthetic
aagccuaguuugugccauagag

SEQ ID NO: 309889 - RNA, 23 nt, Artificial Sequence
  Synthetic
gaagccuaguuugugccauagag

SEQ ID NO: 309890 - RNA, 24 nt, Artificial Sequence
  Synthetic
agaagccuaguuugugccauagag

SEQ ID NO: 309891 - RNA, 18 nt, Artificial Sequence
  Synthetic
gaaguaaaccugauagag

SEQ ID NO: 309892 - RNA, 19 nt, Artificial Sequence
  Synthetic
agaaguaaaccugauagag

SEQ ID NO: 309893 - RNA, 20 nt, Artificial Sequence
  Synthetic
uagaaguaaaccugauagag

SEQ ID NO: 309894 - RNA, 21 nt, Artificial Sequence
  Synthetic
guagaaguaaaccugauagag

SEQ ID NO: 309895 - RNA, 22 nt, Artificial Sequence
  Synthetic
uguagaaguaaaccugauagag

SEQ ID NO: 309896 - RNA, 23 nt, Artificial Sequence
  Synthetic
uuguagaaguaaaccugauagag

SEQ ID NO: 309897 - RNA, 24 nt, Artificial Sequence
  Synthetic
cuuguagaaguaaaccugauagag

SEQ ID NO: 309898 - RNA, 18 nt, Artificial Sequence
  Synthetic
acaacacauaauauagag

SEQ ID NO: 309899 - RNA, 19 nt, Artificial Sequence
  Synthetic
aacaacacauaauauagag

SEQ ID NO: 309900 - RNA, 20 nt, Artificial Sequence
  Synthetic
caacaacacauaauauagag

SEQ ID NO: 309901 - RNA, 21 nt, Artificial Sequence
  Synthetic
ucaacaacacauaauauagag

SEQ ID NO: 309902 - RNA, 22 nt, Artificial Sequence
  Synthetic
uucaacaacacauaauauagag

SEQ ID NO: 309903 - RNA, 23 nt, Artificial Sequence
  Synthetic
cuucaacaacacauaauauagag

SEQ ID NO: 309904 - RNA, 24 nt, Artificial Sequence
  Synthetic
ccuucaacaacacauaauauagag

SEQ ID NO: 309905 - RNA, 18 nt, Artificial Sequence
  Synthetic
aagauuuguacuauagag

SEQ ID NO: 309906 - RNA, 19 nt, Artificial Sequence
  Synthetic
aaagauuuguacuauagag

SEQ ID NO: 309907 - RNA, 20 nt, Artificial Sequence
  Synthetic
aaaagauuuguacuauagag

SEQ ID NO: 309908 - RNA, 21 nt, Artificial Sequence
  Synthetic
gaaaagauuuguacuauagag

SEQ ID NO: 309909 - RNA, 22 nt, Artificial Sequence
  Synthetic
ugaaaagauuuguacuauagag

SEQ ID NO: 309910 - RNA, 23 nt, Artificial Sequence
  Synthetic
augaaaagauuuguacuauagag

SEQ ID NO: 309911 - RNA, 24 nt, Artificial Sequence
  Synthetic
uaugaaaagauuuguacuauagag

SEQ ID NO: 309912 - RNA, 18 nt, Artificial Sequence
  Synthetic
aguguuauuccuauagag

SEQ ID NO: 309913 - RNA, 19 nt, Artificial Sequence
  Synthetic
gaguguuauuccuauagag

SEQ ID NO: 309914 - RNA, 20 nt, Artificial Sequence
  Synthetic
ugaguguuauuccuauagag

SEQ ID NO: 309915 - RNA, 21 nt, Artificial Sequence
  Synthetic
augaguguuauuccuauagag

SEQ ID NO: 309916 - RNA, 22 nt, Artificial Sequence
  Synthetic
caugaguguuauuccuauagag

SEQ ID NO: 309917 - RNA, 23 nt, Artificial Sequence
  Synthetic
ucaugaguguuauuccuauagag

SEQ ID NO: 309918 - RNA, 24 nt, Artificial Sequence
  Synthetic
aucaugaguguuauuccuauagag

SEQ ID NO: 309919 - RNA, 18 nt, Artificial Sequence
  Synthetic
guuggcauuuguauagag

SEQ ID NO: 309920 - RNA, 19 nt, Artificial Sequence
  Synthetic
cguuggcauuuguauagag

SEQ ID NO: 309921 - RNA, 20 nt, Artificial Sequence
  Synthetic
gcguuggcauuuguauagag

SEQ ID NO: 309922 - RNA, 21 nt, Artificial Sequence
  Synthetic
agcguuggcauuuguauagag

SEQ ID NO: 309923 - RNA, 22 nt, Artificial Sequence
  Synthetic
cagcguuggcauuuguauagag

SEQ ID NO: 309924 - RNA, 23 nt, Artificial Sequence
  Synthetic
ccagcguuggcauuuguauagag

SEQ ID NO: 309925 - RNA, 24 nt, Artificial Sequence
  Synthetic
accagcguuggcauuuguauagag

SEQ ID NO: 309926 - RNA, 18 nt, Artificial Sequence
  Synthetic
aggaggaauuuuauagag

SEQ ID NO: 309927 - RNA, 19 nt, Artificial Sequence
  Synthetic
uaggaggaauuuuauagag

SEQ ID NO: 309928 - RNA, 20 nt, Artificial Sequence
  Synthetic
cuaggaggaauuuuauagag

SEQ ID NO: 309929 - RNA, 21 nt, Artificial Sequence
  Synthetic
acuaggaggaauuuuauagag

SEQ ID NO: 309930 - RNA, 22 nt, Artificial Sequence
  Synthetic
aacuaggaggaauuuuauagag

SEQ ID NO: 309931 - RNA, 23 nt, Artificial Sequence
  Synthetic
aaacuaggaggaauuuuauagag

SEQ ID NO: 309932 - RNA, 24 nt, Artificial Sequence
  Synthetic
gaaacuaggaggaauuuuauagag

SEQ ID NO: 309933 - RNA, 18 nt, Artificial Sequence
  Synthetic
guugagagaaaacuagag

SEQ ID NO: 309934 - RNA, 19 nt, Artificial Sequence
  Synthetic
uguugagagaaaacuagag

SEQ ID NO: 309935 - RNA, 20 nt, Artificial Sequence
  Synthetic
auguugagagaaaacuagag

SEQ ID NO: 309936 - RNA, 21 nt, Artificial Sequence
  Synthetic
aauguugagagaaaacuagag

SEQ ID NO: 309937 - RNA, 22 nt, Artificial Sequence
  Synthetic
aaauguugagagaaaacuagag

SEQ ID NO: 309938 - RNA, 23 nt, Artificial Sequence
  Synthetic
aaaauguugagagaaaacuagag

SEQ ID NO: 309939 - RNA, 24 nt, Artificial Sequence
  Synthetic
caaaauguugagagaaaacuagag

SEQ ID NO: 309940 - RNA, 18 nt, Artificial Sequence
  Synthetic
ugauuacuuggacuagag

SEQ ID NO: 309941 - RNA, 19 nt, Artificial Sequence
  Synthetic
augauuacuuggacuagag

SEQ ID NO: 309942 - RNA, 20 nt, Artificial Sequence
  Synthetic
aaugauuacuuggacuagag

SEQ ID NO: 309943 - RNA, 21 nt, Artificial Sequence
  Synthetic
aaaugauuacuuggacuagag

SEQ ID NO: 309944 - RNA, 22 nt, Artificial Sequence
  Synthetic
gaaaugauuacuuggacuagag

SEQ ID NO: 309945 - RNA, 23 nt, Artificial Sequence
  Synthetic
ggaaaugauuacuuggacuagag

SEQ ID NO: 309946 - RNA, 24 nt, Artificial Sequence
  Synthetic
aggaaaugauuacuuggacuagag

SEQ ID NO: 309947 - RNA, 18 nt, Artificial Sequence
  Synthetic
cuauaagacaaccuagag

SEQ ID NO: 309948 - RNA, 19 nt, Artificial Sequence
  Synthetic
gcuauaagacaaccuagag

SEQ ID NO: 309949 - RNA, 20 nt, Artificial Sequence
  Synthetic
agcuauaagacaaccuagag

SEQ ID NO: 309950 - RNA, 21 nt, Artificial Sequence
  Synthetic
cagcuauaagacaaccuagag

SEQ ID NO: 309951 - RNA, 22 nt, Artificial Sequence
  Synthetic
gcagcuauaagacaaccuagag

SEQ ID NO: 309952 - RNA, 23 nt, Artificial Sequence
  Synthetic
ggcagcuauaagacaaccuagag

SEQ ID NO: 309953 - RNA, 24 nt, Artificial Sequence
  Synthetic
uggcagcuauaagacaaccuagag

SEQ ID NO: 309954 - RNA, 18 nt, Artificial Sequence
  Synthetic
cuccuugaacaccuagag

SEQ ID NO: 309955 - RNA, 19 nt, Artificial Sequence
  Synthetic
acuccuugaacaccuagag

SEQ ID NO: 309956 - RNA, 20 nt, Artificial Sequence
  Synthetic
aacuccuugaacaccuagag

SEQ ID NO: 309957 - RNA, 21 nt, Artificial Sequence
  Synthetic
caacuccuugaacaccuagag

SEQ ID NO: 309958 - RNA, 22 nt, Artificial Sequence
  Synthetic
acaacuccuugaacaccuagag

SEQ ID NO: 309959 - RNA, 23 nt, Artificial Sequence
  Synthetic
cacaacuccuugaacaccuagag

SEQ ID NO: 309960 - RNA, 24 nt, Artificial Sequence
  Synthetic
ccacaacuccuugaacaccuagag

SEQ ID NO: 309961 - RNA, 18 nt, Artificial Sequence
  Synthetic
aauuggacaucccuagag

SEQ ID NO: 309962 - RNA, 19 nt, Artificial Sequence
  Synthetic
aaauuggacaucccuagag

SEQ ID NO: 309963 - RNA, 20 nt, Artificial Sequence
  Synthetic
gaaauuggacaucccuagag

SEQ ID NO: 309964 - RNA, 21 nt, Artificial Sequence
  Synthetic
agaaauuggacaucccuagag

SEQ ID NO: 309965 - RNA, 22 nt, Artificial Sequence
  Synthetic
cagaaauuggacaucccuagag

SEQ ID NO: 309966 - RNA, 23 nt, Artificial Sequence
  Synthetic
gcagaaauuggacaucccuagag

SEQ ID NO: 309967 - RNA, 24 nt, Artificial Sequence
  Synthetic
ugcagaaauuggacaucccuagag

SEQ ID NO: 309968 - RNA, 18 nt, Artificial Sequence
  Synthetic
auaccuagcaagcuagag

SEQ ID NO: 309969 - RNA, 19 nt, Artificial Sequence
  Synthetic
uauaccuagcaagcuagag

SEQ ID NO: 309970 - RNA, 20 nt, Artificial Sequence
  Synthetic
uuauaccuagcaagcuagag

SEQ ID NO: 309971 - RNA, 21 nt, Artificial Sequence
  Synthetic
uuuauaccuagcaagcuagag

SEQ ID NO: 309972 - RNA, 22 nt, Artificial Sequence
  Synthetic
uuuuauaccuagcaagcuagag

SEQ ID NO: 309973 - RNA, 23 nt, Artificial Sequence
  Synthetic
uuuuuauaccuagcaagcuagag

SEQ ID NO: 309974 - RNA, 24 nt, Artificial Sequence
  Synthetic
auuuuuauaccuagcaagcuagag

SEQ ID NO: 309975 - RNA, 18 nt, Artificial Sequence
  Synthetic
cacuucaccuggcuagag

SEQ ID NO: 309976 - RNA, 19 nt, Artificial Sequence
  Synthetic
gcacuucaccuggcuagag

SEQ ID NO: 309977 - RNA, 20 nt, Artificial Sequence
  Synthetic
ggcacuucaccuggcuagag

SEQ ID NO: 309978 - RNA, 21 nt, Artificial Sequence
  Synthetic
aggcacuucaccuggcuagag

SEQ ID NO: 309979 - RNA, 22 nt, Artificial Sequence
  Synthetic
caggcacuucaccuggcuagag

SEQ ID NO: 309980 - RNA, 23 nt, Artificial Sequence
  Synthetic
gcaggcacuucaccuggcuagag

SEQ ID NO: 309981 - RNA, 24 nt, Artificial Sequence
  Synthetic
agcaggcacuucaccuggcuagag

SEQ ID NO: 309982 - RNA, 18 nt, Artificial Sequence
  Synthetic
cauacucaucaucuagag

SEQ ID NO: 309983 - RNA, 19 nt, Artificial Sequence
  Synthetic
acauacucaucaucuagag

SEQ ID NO: 309984 - RNA, 20 nt, Artificial Sequence
  Synthetic
cacauacucaucaucuagag

SEQ ID NO: 309985 - RNA, 21 nt, Artificial Sequence
  Synthetic
ucacauacucaucaucuagag

SEQ ID NO: 309986 - RNA, 22 nt, Artificial Sequence
  Synthetic
uucacauacucaucaucuagag

SEQ ID NO: 309987 - RNA, 23 nt, Artificial Sequence
  Synthetic
cuucacauacucaucaucuagag

SEQ ID NO: 309988 - RNA, 24 nt, Artificial Sequence
  Synthetic
ucuucacauacucaucaucuagag

SEQ ID NO: 309989 - RNA, 18 nt, Artificial Sequence
  Synthetic
uccauggcaacucuagag

SEQ ID NO: 309990 - RNA, 19 nt, Artificial Sequence
  Synthetic
uuccauggcaacucuagag

SEQ ID NO: 309991 - RNA, 20 nt, Artificial Sequence
  Synthetic
cuuccauggcaacucuagag

SEQ ID NO: 309992 - RNA, 21 nt, Artificial Sequence
  Synthetic
ucuuccauggcaacucuagag

SEQ ID NO: 309993 - RNA, 22 nt, Artificial Sequence
  Synthetic
cucuuccauggcaacucuagag

SEQ ID NO: 309994 - RNA, 23 nt, Artificial Sequence
  Synthetic
ucucuuccauggcaacucuagag

SEQ ID NO: 309995 - RNA, 24 nt, Artificial Sequence
  Synthetic
uucucuuccauggcaacucuagag

SEQ ID NO: 309996 - RNA, 18 nt, Artificial Sequence
  Synthetic
gauucauuagcucuagag

SEQ ID NO: 309997 - RNA, 19 nt, Artificial Sequence
  Synthetic
ugauucauuagcucuagag

SEQ ID NO: 309998 - RNA, 20 nt, Artificial Sequence
  Synthetic
uugauucauuagcucuagag

SEQ ID NO: 309999 - RNA, 21 nt, Artificial Sequence
  Synthetic
uuugauucauuagcucuagag

SEQ ID NO: 310000 - RNA, 22 nt, Artificial Sequence
  Synthetic
uuuugauucauuagcucuagag

SEQ ID NO: 310001 - RNA, 23 nt, Artificial Sequence
  Synthetic
auuuugauucauuagcucuagag

SEQ ID NO: 310002 - RNA, 24 nt, Artificial Sequence
  Synthetic
gauuuugauucauuagcucuagag

SEQ ID NO: 310003 - RNA, 18 nt, Artificial Sequence
  Synthetic
ugugcucaugaaguagag

SEQ ID NO: 310004 - RNA, 19 nt, Artificial Sequence
  Synthetic
uugugcucaugaaguagag

SEQ ID NO: 310005 - RNA, 20 nt, Artificial Sequence
  Synthetic
uuugugcucaugaaguagag

SEQ ID NO: 310006 - RNA, 21 nt, Artificial Sequence
  Synthetic
cuuugugcucaugaaguagag

SEQ ID NO: 310007 - RNA, 22 nt, Artificial Sequence
  Synthetic
ucuuugugcucaugaaguagag

SEQ ID NO: 310008 - RNA, 23 nt, Artificial Sequence
  Synthetic
aucuuugugcucaugaaguagag

SEQ ID NO: 310009 - RNA, 24 nt, Artificial Sequence
  Synthetic
uaucuuugugcucaugaaguagag

SEQ ID NO: 310010 - RNA, 18 nt, Artificial Sequence
  Synthetic
uuuguauuuuaaguagag

SEQ ID NO: 310011 - RNA, 19 nt, Artificial Sequence
  Synthetic
uuuuguauuuuaaguagag

SEQ ID NO: 310012 - RNA, 20 nt, Artificial Sequence
  Synthetic
uuuuuguauuuuaaguagag

SEQ ID NO: 310013 - RNA, 21 nt, Artificial Sequence
  Synthetic
auuuuuguauuuuaaguagag

SEQ ID NO: 310014 - RNA, 22 nt, Artificial Sequence
  Synthetic
aauuuuuguauuuuaaguagag

SEQ ID NO: 310015 - RNA, 23 nt, Artificial Sequence
  Synthetic
uaauuuuuguauuuuaaguagag

SEQ ID NO: 310016 - RNA, 24 nt, Artificial Sequence
  Synthetic
cuaauuuuuguauuuuaaguagag

SEQ ID NO: 310017 - RNA, 18 nt, Artificial Sequence
  Synthetic
uuaugauaagcaguagag

SEQ ID NO: 310018 - RNA, 19 nt, Artificial Sequence
  Synthetic
guuaugauaagcaguagag

SEQ ID NO: 310019 - RNA, 20 nt, Artificial Sequence
  Synthetic
gguuaugauaagcaguagag

SEQ ID NO: 310020 - RNA, 21 nt, Artificial Sequence
  Synthetic
ugguuaugauaagcaguagag

SEQ ID NO: 310021 - RNA, 22 nt, Artificial Sequence
  Synthetic
gugguuaugauaagcaguagag

SEQ ID NO: 310022 - RNA, 23 nt, Artificial Sequence
  Synthetic
ugugguuaugauaagcaguagag

SEQ ID NO: 310023 - RNA, 24 nt, Artificial Sequence
  Synthetic
augugguuaugauaagcaguagag

SEQ ID NO: 310024 - RNA, 18 nt, Artificial Sequence
  Synthetic
ucuaacacucuaguagag

SEQ ID NO: 310025 - RNA, 19 nt, Artificial Sequence
  Synthetic
uucuaacacucuaguagag

SEQ ID NO: 310026 - RNA, 20 nt, Artificial Sequence
  Synthetic
uuucuaacacucuaguagag

SEQ ID NO: 310027 - RNA, 21 nt, Artificial Sequence
  Synthetic
uuuucuaacacucuaguagag

SEQ ID NO: 310028 - RNA, 22 nt, Artificial Sequence
  Synthetic
uuuuucuaacacucuaguagag

SEQ ID NO: 310029 - RNA, 23 nt, Artificial Sequence
  Synthetic
guuuuucuaacacucuaguagag

SEQ ID NO: 310030 - RNA, 24 nt, Artificial Sequence
  Synthetic
uguuuuucuaacacucuaguagag

SEQ ID NO: 310031 - RNA, 18 nt, Artificial Sequence
  Synthetic
uuuguaucuuuaguagag

SEQ ID NO: 310032 - RNA, 19 nt, Artificial Sequence
  Synthetic
uuuuguaucuuuaguagag

SEQ ID NO: 310033 - RNA, 20 nt, Artificial Sequence
  Synthetic
uuuuuguaucuuuaguagag

SEQ ID NO: 310034 - RNA, 21 nt, Artificial Sequence
  Synthetic
uuuuuuguaucuuuaguagag

SEQ ID NO: 310035 - RNA, 22 nt, Artificial Sequence
  Synthetic
auuuuuuguaucuuuaguagag

SEQ ID NO: 310036 - RNA, 23 nt, Artificial Sequence
  Synthetic
aauuuuuuguaucuuuaguagag

SEQ ID NO: 310037 - RNA, 24 nt, Artificial Sequence
  Synthetic
aaauuuuuuguaucuuuaguagag

SEQ ID NO: 310038 - RNA, 18 nt, Artificial Sequence
  Synthetic
uuuguaauuuuaguagag

SEQ ID NO: 310039 - RNA, 19 nt, Artificial Sequence
  Synthetic
uuuuguaauuuuaguagag

SEQ ID NO: 310040 - RNA, 20 nt, Artificial Sequence
  Synthetic
uuuuuguaauuuuaguagag

SEQ ID NO: 310041 - RNA, 21 nt, Artificial Sequence
  Synthetic
auuuuuguaauuuuaguagag

SEQ ID NO: 310042 - RNA, 22 nt, Artificial Sequence
  Synthetic
gauuuuuguaauuuuaguagag

SEQ ID NO: 310043 - RNA, 23 nt, Artificial Sequence
  Synthetic
ugauuuuuguaauuuuaguagag

SEQ ID NO: 310044 - RNA, 24 nt, Artificial Sequence
  Synthetic
cugauuuuuguaauuuuaguagag

SEQ ID NO: 310045 - RNA, 18 nt, Artificial Sequence
  Synthetic
ugugcauuuuuaguagag

SEQ ID NO: 310046 - RNA, 19 nt, Artificial Sequence
  Synthetic
uugugcauuuuuaguagag

SEQ ID NO: 310047 - RNA, 20 nt, Artificial Sequence
  Synthetic
uuugugcauuuuuaguagag

SEQ ID NO: 310048 - RNA, 21 nt, Artificial Sequence
  Synthetic
uuuugugcauuuuuaguagag

SEQ ID NO: 310049 - RNA, 22 nt, Artificial Sequence
  Synthetic
auuuugugcauuuuuaguagag

SEQ ID NO: 310050 - RNA, 23 nt, Artificial Sequence
  Synthetic
aauuuugugcauuuuuaguagag

SEQ ID NO: 310051 - RNA, 24 nt, Artificial Sequence
  Synthetic
uaauuuugugcauuuuuaguagag

SEQ ID NO: 310052 - RNA, 19 nt, Artificial Sequence
  Synthetic
uuguguauuuuuaguagag

SEQ ID NO: 310053 - RNA, 20 nt, Artificial Sequence
  Synthetic
uuuguguauuuuuaguagag

SEQ ID NO: 310054 - RNA, 21 nt, Artificial Sequence
  Synthetic
uuuuguguauuuuuaguagag

SEQ ID NO: 310055 - RNA, 22 nt, Artificial Sequence
  Synthetic
auuuuguguauuuuuaguagag

SEQ ID NO: 310056 - RNA, 23 nt, Artificial Sequence
  Synthetic
aauuuuguguauuuuuaguagag

SEQ ID NO: 310057 - RNA, 24 nt, Artificial Sequence
  Synthetic
uaauuuuguguauuuuuaguagag

SEQ ID NO: 310058 - RNA, 18 nt, Artificial Sequence
  Synthetic
uuuguauuuuuaguagag

SEQ ID NO: 310059 - RNA, 19 nt, Artificial Sequence
  Synthetic
uuuuguauuuuuaguagag

SEQ ID NO: 310060 - RNA, 20 nt, Artificial Sequence
  Synthetic
guuuuguauuuuuaguagag

SEQ ID NO: 310061 - RNA, 21 nt, Artificial Sequence
  Synthetic
uguuuuguauuuuuaguagag

SEQ ID NO: 310062 - RNA, 22 nt, Artificial Sequence
  Synthetic
auguuuuguauuuuuaguagag

SEQ ID NO: 310063 - RNA, 23 nt, Artificial Sequence
  Synthetic
aauguuuuguauuuuuaguagag

SEQ ID NO: 310064 - RNA, 24 nt, Artificial Sequence
  Synthetic
uaauguuuuguauuuuuaguagag

SEQ ID NO: 310065 - RNA, 21 nt, Artificial Sequence
  Synthetic
auuuuuguauuuuuaguagag

SEQ ID NO: 310066 - RNA, 22 nt, Artificial Sequence
  Synthetic
gauuuuuguauuuuuaguagag

SEQ ID NO: 310067 - RNA, 23 nt, Artificial Sequence
  Synthetic
ugauuuuuguauuuuuaguagag

SEQ ID NO: 310068 - RNA, 24 nt, Artificial Sequence
  Synthetic
cugauuuuuguauuuuuaguagag

SEQ ID NO: 310069 - RNA, 21 nt, Artificial Sequence
  Synthetic
guuuuuguauuuuuaguagag

SEQ ID NO: 310070 - RNA, 22 nt, Artificial Sequence
  Synthetic
aguuuuuguauuuuuaguagag

SEQ ID NO: 310071 - RNA, 23 nt, Artificial Sequence
  Synthetic
aaguuuuuguauuuuuaguagag

SEQ ID NO: 310072 - RNA, 24 nt, Artificial Sequence
  Synthetic
uaaguuuuuguauuuuuaguagag

SEQ ID NO: 310073 - RNA, 23 nt, Artificial Sequence
  Synthetic
aauuuuuuguauuuuuaguagag

SEQ ID NO: 310074 - RNA, 24 nt, Artificial Sequence
  Synthetic
uaauuuuuuguauuuuuaguagag

SEQ ID NO: 310075 - RNA, 18 nt, Artificial Sequence
  Synthetic
uuuuuauuuuuaguagag

SEQ ID NO: 310076 - RNA, 19 nt, Artificial Sequence
  Synthetic
uuuuuuauuuuuaguagag

SEQ ID NO: 310077 - RNA, 20 nt, Artificial Sequence
  Synthetic
uuuuuuuauuuuuaguagag

SEQ ID NO: 310078 - RNA, 21 nt, Artificial Sequence
  Synthetic
uuuuuuuuauuuuuaguagag

SEQ ID NO: 310079 - RNA, 22 nt, Artificial Sequence
  Synthetic
auuuuuuuuauuuuuaguagag

SEQ ID NO: 310080 - RNA, 23 nt, Artificial Sequence
  Synthetic
aauuuuuuuuauuuuuaguagag

SEQ ID NO: 310081 - RNA, 24 nt, Artificial Sequence
  Synthetic
uaauuuuuuuuauuuuuaguagag

SEQ ID NO: 310082 - RNA, 18 nt, Artificial Sequence
  Synthetic
uuuguguuuuuaguagag

SEQ ID NO: 310083 - RNA, 19 nt, Artificial Sequence
  Synthetic
uuuuguguuuuuaguagag

SEQ ID NO: 310084 - RNA, 20 nt, Artificial Sequence
  Synthetic
uuuuuguguuuuuaguagag

SEQ ID NO: 310085 - RNA, 21 nt, Artificial Sequence
  Synthetic
auuuuuguguuuuuaguagag

SEQ ID NO: 310086 - RNA, 22 nt, Artificial Sequence
  Synthetic
aauuuuuguguuuuuaguagag

SEQ ID NO: 310087 - RNA, 23 nt, Artificial Sequence
  Synthetic
uaauuuuuguguuuuuaguagag

SEQ ID NO: 310088 - RNA, 24 nt, Artificial Sequence
  Synthetic
cuaauuuuuguguuuuuaguagag

SEQ ID NO: 310089 - RNA, 18 nt, Artificial Sequence
  Synthetic
uuggauuuuuuaguagag

SEQ ID NO: 310090 - RNA, 19 nt, Artificial Sequence
  Synthetic
uuuggauuuuuuaguagag

SEQ ID NO: 310091 - RNA, 20 nt, Artificial Sequence
  Synthetic
uuuuggauuuuuuaguagag

SEQ ID NO: 310092 - RNA, 21 nt, Artificial Sequence
  Synthetic
uuuuuggauuuuuuaguagag

SEQ ID NO: 310093 - RNA, 22 nt, Artificial Sequence
  Synthetic
uuuuuuggauuuuuuaguagag

SEQ ID NO: 310094 - RNA, 23 nt, Artificial Sequence
  Synthetic
uuuuuuuggauuuuuuaguagag

SEQ ID NO: 310095 - RNA, 24 nt, Artificial Sequence
  Synthetic
uuuuuuuuggauuuuuuaguagag

SEQ ID NO: 310096 - RNA, 18 nt, Artificial Sequence
  Synthetic
uuguauuuuuuaguagag

SEQ ID NO: 310097 - RNA, 19 nt, Artificial Sequence
  Synthetic
uuuguauuuuuuaguagag

SEQ ID NO: 310098 - RNA, 20 nt, Artificial Sequence
  Synthetic
uuuuguauuuuuuaguagag

SEQ ID NO: 310099 - RNA, 21 nt, Artificial Sequence
  Synthetic
uuuuuguauuuuuuaguagag

SEQ ID NO: 310100 - RNA, 22 nt, Artificial Sequence
  Synthetic
uuuuuuguauuuuuuaguagag

SEQ ID NO: 310101 - RNA, 23 nt, Artificial Sequence
  Synthetic
uuuuuuuguauuuuuuaguagag

SEQ ID NO: 310102 - RNA, 24 nt, Artificial Sequence
  Synthetic
uuuuuuuuguauuuuuuaguagag

SEQ ID NO: 310103 - RNA, 18 nt, Artificial Sequence
  Synthetic
uuguguuuuuuaguagag

SEQ ID NO: 310104 - RNA, 19 nt, Artificial Sequence
  Synthetic
uuuguguuuuuuaguagag

SEQ ID NO: 310105 - RNA, 20 nt, Artificial Sequence
  Synthetic
uuuuguguuuuuuaguagag

SEQ ID NO: 310106 - RNA, 21 nt, Artificial Sequence
  Synthetic
uuuuuguguuuuuuaguagag

SEQ ID NO: 310107 - RNA, 22 nt, Artificial Sequence
  Synthetic
uuuuuuguguuuuuuaguagag

SEQ ID NO: 310108 - RNA, 23 nt, Artificial Sequence
  Synthetic
uuuuuuuguguuuuuuaguagag

SEQ ID NO: 310109 - RNA, 24 nt, Artificial Sequence
  Synthetic
auuuuuuuguguuuuuuaguagag

SEQ ID NO: 310110 - RNA, 18 nt, Artificial Sequence
  Synthetic
uguauuuuuuuaguagag

SEQ ID NO: 310111 - RNA, 19 nt, Artificial Sequence
  Synthetic
uuguauuuuuuuaguagag

SEQ ID NO: 310112 - RNA, 20 nt, Artificial Sequence
  Synthetic
uuuguauuuuuuuaguagag

SEQ ID NO: 310113 - RNA, 21 nt, Artificial Sequence
  Synthetic
uuuuguauuuuuuuaguagag

SEQ ID NO: 310114 - RNA, 22 nt, Artificial Sequence
  Synthetic
uuuuuguauuuuuuuaguagag

SEQ ID NO: 310115 - RNA, 23 nt, Artificial Sequence
  Synthetic
uuuuuuguauuuuuuuaguagag

SEQ ID NO: 310116 - RNA, 24 nt, Artificial Sequence
  Synthetic
auuuuuuguauuuuuuuaguagag

SEQ ID NO: 310117 - RNA, 18 nt, Artificial Sequence
  Synthetic
acgugccaucacguagag

SEQ ID NO: 310118 - RNA, 19 nt, Artificial Sequence
  Synthetic
cacgugccaucacguagag

SEQ ID NO: 310119 - RNA, 20 nt, Artificial Sequence
  Synthetic
ccacgugccaucacguagag

SEQ ID NO: 310120 - RNA, 21 nt, Artificial Sequence
  Synthetic
uccacgugccaucacguagag

SEQ ID NO: 310121 - RNA, 22 nt, Artificial Sequence
  Synthetic
auccacgugccaucacguagag

SEQ ID NO: 310122 - RNA, 23 nt, Artificial Sequence
  Synthetic
gauccacgugccaucacguagag

SEQ ID NO: 310123 - RNA, 24 nt, Artificial Sequence
  Synthetic
agauccacgugccaucacguagag

SEQ ID NO: 310124 - RNA, 18 nt, Artificial Sequence
  Synthetic
acuuuuccuuagguagag

SEQ ID NO: 310125 - RNA, 19 nt, Artificial Sequence
  Synthetic
gacuuuuccuuagguagag

SEQ ID NO: 310126 - RNA, 20 nt, Artificial Sequence
  Synthetic
agacuuuuccuuagguagag

SEQ ID NO: 310127 - RNA, 21 nt, Artificial Sequence
  Synthetic
gagacuuuuccuuagguagag

SEQ ID NO: 310128 - RNA, 22 nt, Artificial Sequence
  Synthetic
agagacuuuuccuuagguagag

SEQ ID NO: 310129 - RNA, 23 nt, Artificial Sequence
  Synthetic
aagagacuuuuccuuagguagag

SEQ ID NO: 310130 - RNA, 24 nt, Artificial Sequence
  Synthetic
caagagacuuuuccuuagguagag

SEQ ID NO: 310131 - RNA, 18 nt, Artificial Sequence
  Synthetic
cuuguauucaggguagag

SEQ ID NO: 310132 - RNA, 19 nt, Artificial Sequence
  Synthetic
ucuuguauucaggguagag

SEQ ID NO: 310133 - RNA, 20 nt, Artificial Sequence
  Synthetic
cucuuguauucaggguagag

SEQ ID NO: 310134 - RNA, 21 nt, Artificial Sequence
  Synthetic
ucucuuguauucaggguagag

SEQ ID NO: 310135 - RNA, 22 nt, Artificial Sequence
  Synthetic
gucucuuguauucaggguagag

SEQ ID NO: 310136 - RNA, 23 nt, Artificial Sequence
  Synthetic
ggucucuuguauucaggguagag

SEQ ID NO: 310137 - RNA, 24 nt, Artificial Sequence
  Synthetic
gggucucuuguauucaggguagag

SEQ ID NO: 310138 - RNA, 18 nt, Artificial Sequence
  Synthetic
gagaagaagaugguagag

SEQ ID NO: 310139 - RNA, 19 nt, Artificial Sequence
  Synthetic
ugagaagaagaugguagag

SEQ ID NO: 310140 - RNA, 20 nt, Artificial Sequence
  Synthetic
augagaagaagaugguagag

SEQ ID NO: 310141 - RNA, 21 nt, Artificial Sequence
  Synthetic
aaugagaagaagaugguagag

SEQ ID NO: 310142 - RNA, 22 nt, Artificial Sequence
  Synthetic
caaugagaagaagaugguagag

SEQ ID NO: 310143 - RNA, 23 nt, Artificial Sequence
  Synthetic
gcaaugagaagaagaugguagag

SEQ ID NO: 310144 - RNA, 24 nt, Artificial Sequence
  Synthetic
ggcaaugagaagaagaugguagag

SEQ ID NO: 310145 - RNA, 18 nt, Artificial Sequence
  Synthetic
uaugugaguaugguagag

SEQ ID NO: 310146 - RNA, 19 nt, Artificial Sequence
  Synthetic
auaugugaguaugguagag

SEQ ID NO: 310147 - RNA, 20 nt, Artificial Sequence
  Synthetic
aauaugugaguaugguagag

SEQ ID NO: 310148 - RNA, 21 nt, Artificial Sequence
  Synthetic
aaauaugugaguaugguagag

SEQ ID NO: 310149 - RNA, 22 nt, Artificial Sequence
  Synthetic
gaaauaugugaguaugguagag

SEQ ID NO: 310150 - RNA, 23 nt, Artificial Sequence
  Synthetic
cgaaauaugugaguaugguagag

SEQ ID NO: 310151 - RNA, 24 nt, Artificial Sequence
  Synthetic
ucgaaauaugugaguaugguagag

SEQ ID NO: 310152 - RNA, 18 nt, Artificial Sequence
  Synthetic
cugaaagaguauguagag

SEQ ID NO: 310153 - RNA, 19 nt, Artificial Sequence
  Synthetic
ucugaaagaguauguagag

SEQ ID NO: 310154 - RNA, 20 nt, Artificial Sequence
  Synthetic
gucugaaagaguauguagag

SEQ ID NO: 310155 - RNA, 21 nt, Artificial Sequence
  Synthetic
agucugaaagaguauguagag

SEQ ID NO: 310156 - RNA, 22 nt, Artificial Sequence
  Synthetic
cagucugaaagaguauguagag

SEQ ID NO: 310157 - RNA, 23 nt, Artificial Sequence
  Synthetic
ucagucugaaagaguauguagag

SEQ ID NO: 310158 - RNA, 24 nt, Artificial Sequence
  Synthetic
cucagucugaaagaguauguagag

SEQ ID NO: 310159 - RNA, 18 nt, Artificial Sequence
  Synthetic
ugauagacuguuguagag

SEQ ID NO: 310160 - RNA, 19 nt, Artificial Sequence
  Synthetic
cugauagacuguuguagag

SEQ ID NO: 310161 - RNA, 20 nt, Artificial Sequence
  Synthetic
gcugauagacuguuguagag

SEQ ID NO: 310162 - RNA, 21 nt, Artificial Sequence
  Synthetic
agcugauagacuguuguagag

SEQ ID NO: 310163 - RNA, 22 nt, Artificial Sequence
  Synthetic
uagcugauagacuguuguagag

SEQ ID NO: 310164 - RNA, 23 nt, Artificial Sequence
  Synthetic
cuagcugauagacuguuguagag

SEQ ID NO: 310165 - RNA, 24 nt, Artificial Sequence
  Synthetic
ucuagcugauagacuguuguagag

SEQ ID NO: 310166 - RNA, 18 nt, Artificial Sequence
  Synthetic
uguuuuuuuuuuguagag

SEQ ID NO: 310167 - RNA, 19 nt, Artificial Sequence
  Synthetic
uuguuuuuuuuuuguagag

SEQ ID NO: 310168 - RNA, 20 nt, Artificial Sequence
  Synthetic
uuuguuuuuuuuuuguagag

SEQ ID NO: 310169 - RNA, 21 nt, Artificial Sequence
  Synthetic
uuuuguuuuuuuuuuguagag

SEQ ID NO: 310170 - RNA, 22 nt, Artificial Sequence
  Synthetic
uuuuuguuuuuuuuuuguagag

SEQ ID NO: 310171 - RNA, 23 nt, Artificial Sequence
  Synthetic
uuuuuuguuuuuuuuuuguagag

SEQ ID NO: 310172 - RNA, 24 nt, Artificial Sequence
  Synthetic
uuuuuuuguuuuuuuuuuguagag

SEQ ID NO: 310173 - RNA, 18 nt, Artificial Sequence
  Synthetic
gcauuuugccaauuagag

SEQ ID NO: 310174 - RNA, 19 nt, Artificial Sequence
  Synthetic
agcauuuugccaauuagag

SEQ ID NO: 310175 - RNA, 20 nt, Artificial Sequence
  Synthetic
cagcauuuugccaauuagag

SEQ ID NO: 310176 - RNA, 21 nt, Artificial Sequence
  Synthetic
gcagcauuuugccaauuagag

SEQ ID NO: 310177 - RNA, 22 nt, Artificial Sequence
  Synthetic
ugcagcauuuugccaauuagag

SEQ ID NO: 310178 - RNA, 23 nt, Artificial Sequence
  Synthetic
cugcagcauuuugccaauuagag

SEQ ID NO: 310179 - RNA, 24 nt, Artificial Sequence
  Synthetic
ccugcagcauuuugccaauuagag

SEQ ID NO: 310180 - RNA, 18 nt, Artificial Sequence
  Synthetic
cuauuuuguucauuagag

SEQ ID NO: 310181 - RNA, 19 nt, Artificial Sequence
  Synthetic
ccuauuuuguucauuagag

SEQ ID NO: 310182 - RNA, 20 nt, Artificial Sequence
  Synthetic
accuauuuuguucauuagag

SEQ ID NO: 310183 - RNA, 21 nt, Artificial Sequence
  Synthetic
gaccuauuuuguucauuagag

SEQ ID NO: 310184 - RNA, 22 nt, Artificial Sequence
  Synthetic
agaccuauuuuguucauuagag

SEQ ID NO: 310185 - RNA, 23 nt, Artificial Sequence
  Synthetic
gagaccuauuuuguucauuagag

SEQ ID NO: 310186 - RNA, 24 nt, Artificial Sequence
  Synthetic
ugagaccuauuuuguucauuagag

SEQ ID NO: 310187 - RNA, 18 nt, Artificial Sequence
  Synthetic
aagguacugagauuagag

SEQ ID NO: 310188 - RNA, 19 nt, Artificial Sequence
  Synthetic
uaagguacugagauuagag

SEQ ID NO: 310189 - RNA, 20 nt, Artificial Sequence
  Synthetic
cuaagguacugagauuagag

SEQ ID NO: 310190 - RNA, 21 nt, Artificial Sequence
  Synthetic
gcuaagguacugagauuagag

SEQ ID NO: 310191 - RNA, 22 nt, Artificial Sequence
  Synthetic
ggcuaagguacugagauuagag

SEQ ID NO: 310192 - RNA, 23 nt, Artificial Sequence
  Synthetic
uggcuaagguacugagauuagag

SEQ ID NO: 310193 - RNA, 24 nt, Artificial Sequence
  Synthetic
uuggcuaagguacugagauuagag

SEQ ID NO: 310194 - RNA, 18 nt, Artificial Sequence
  Synthetic
gcucauaaaaccuuagag

SEQ ID NO: 310195 - RNA, 19 nt, Artificial Sequence
  Synthetic
ugcucauaaaaccuuagag

SEQ ID NO: 310196 - RNA, 20 nt, Artificial Sequence
  Synthetic
gugcucauaaaaccuuagag

SEQ ID NO: 310197 - RNA, 21 nt, Artificial Sequence
  Synthetic
ugugcucauaaaaccuuagag

SEQ ID NO: 310198 - RNA, 22 nt, Artificial Sequence
  Synthetic
cugugcucauaaaaccuuagag

SEQ ID NO: 310199 - RNA, 23 nt, Artificial Sequence
  Synthetic
gcugugcucauaaaaccuuagag

SEQ ID NO: 310200 - RNA, 24 nt, Artificial Sequence
  Synthetic
ggcugugcucauaaaaccuuagag

SEQ ID NO: 310201 - RNA, 18 nt, Artificial Sequence
  Synthetic
aaauaacggggguuagag

SEQ ID NO: 310202 - RNA, 19 nt, Artificial Sequence
  Synthetic
gaaauaacggggguuagag

SEQ ID NO: 310203 - RNA, 20 nt, Artificial Sequence
  Synthetic
ggaaauaacggggguuagag

SEQ ID NO: 310204 - RNA, 21 nt, Artificial Sequence
  Synthetic
aggaaauaacggggguuagag

SEQ ID NO: 310205 - RNA, 22 nt, Artificial Sequence
  Synthetic
aaggaaauaacggggguuagag

SEQ ID NO: 310206 - RNA, 23 nt, Artificial Sequence
  Synthetic
gaaggaaauaacggggguuagag

SEQ ID NO: 310207 - RNA, 24 nt, Artificial Sequence
  Synthetic
ggaaggaaauaacggggguuagag

SEQ ID NO: 310208 - RNA, 18 nt, Artificial Sequence
  Synthetic
uuucacaaacuguuagag

SEQ ID NO: 310209 - RNA, 19 nt, Artificial Sequence
  Synthetic
auuucacaaacuguuagag

SEQ ID NO: 310210 - RNA, 20 nt, Artificial Sequence
  Synthetic
uauuucacaaacuguuagag

SEQ ID NO: 310211 - RNA, 21 nt, Artificial Sequence
  Synthetic
guauuucacaaacuguuagag

SEQ ID NO: 310212 - RNA, 22 nt, Artificial Sequence
  Synthetic
cguauuucacaaacuguuagag

SEQ ID NO: 310213 - RNA, 23 nt, Artificial Sequence
  Synthetic
acguauuucacaaacuguuagag

SEQ ID NO: 310214 - RNA, 24 nt, Artificial Sequence
  Synthetic
aacguauuucacaaacuguuagag

SEQ ID NO: 310215 - RNA, 18 nt, Artificial Sequence
  Synthetic
cugaggcaaguguuagag

SEQ ID NO: 310216 - RNA, 19 nt, Artificial Sequence
  Synthetic
acugaggcaaguguuagag

SEQ ID NO: 310217 - RNA, 20 nt, Artificial Sequence
  Synthetic
gacugaggcaaguguuagag

SEQ ID NO: 310218 - RNA, 21 nt, Artificial Sequence
  Synthetic
agacugaggcaaguguuagag

SEQ ID NO: 310219 - RNA, 22 nt, Artificial Sequence
  Synthetic
gagacugaggcaaguguuagag

SEQ ID NO: 310220 - RNA, 23 nt, Artificial Sequence
  Synthetic
agagacugaggcaaguguuagag

SEQ ID NO: 310221 - RNA, 24 nt, Artificial Sequence
  Synthetic
aagagacugaggcaaguguuagag

SEQ ID NO: 310222 - RNA, 18 nt, Artificial Sequence
  Synthetic
uagucuucuguguuagag

SEQ ID NO: 310223 - RNA, 19 nt, Artificial Sequence
  Synthetic
auagucuucuguguuagag

SEQ ID NO: 310224 - RNA, 20 nt, Artificial Sequence
  Synthetic
aauagucuucuguguuagag

SEQ ID NO: 310225 - RNA, 21 nt, Artificial Sequence
  Synthetic
uaauagucuucuguguuagag

SEQ ID NO: 310226 - RNA, 22 nt, Artificial Sequence
  Synthetic
auaauagucuucuguguuagag

SEQ ID NO: 310227 - RNA, 23 nt, Artificial Sequence
  Synthetic
uauaauagucuucuguguuagag

SEQ ID NO: 310228 - RNA, 24 nt, Artificial Sequence
  Synthetic
uuauaauagucuucuguguuagag

SEQ ID NO: 310229 - RNA, 18 nt, Artificial Sequence
  Synthetic
gccacaaagaauuuagag

SEQ ID NO: 310230 - RNA, 19 nt, Artificial Sequence
  Synthetic
agccacaaagaauuuagag

SEQ ID NO: 310231 - RNA, 20 nt, Artificial Sequence
  Synthetic
uagccacaaagaauuuagag

SEQ ID NO: 310232 - RNA, 21 nt, Artificial Sequence
  Synthetic
guagccacaaagaauuuagag

SEQ ID NO: 310233 - RNA, 22 nt, Artificial Sequence
  Synthetic
aguagccacaaagaauuuagag

SEQ ID NO: 310234 - RNA, 23 nt, Artificial Sequence
  Synthetic
aaguagccacaaagaauuuagag

SEQ ID NO: 310235 - RNA, 24 nt, Artificial Sequence
  Synthetic
aaaguagccacaaagaauuuagag

SEQ ID NO: 310236 - RNA, 18 nt, Artificial Sequence
  Synthetic
uuuaaaaaagauuuagag

SEQ ID NO: 310237 - RNA, 19 nt, Artificial Sequence
  Synthetic
auuuaaaaaagauuuagag

SEQ ID NO: 310238 - RNA, 20 nt, Artificial Sequence
  Synthetic
aauuuaaaaaagauuuagag

SEQ ID NO: 310239 - RNA, 21 nt, Artificial Sequence
  Synthetic
gaauuuaaaaaagauuuagag

SEQ ID NO: 310240 - RNA, 22 nt, Artificial Sequence
  Synthetic
agaauuuaaaaaagauuuagag

SEQ ID NO: 310241 - RNA, 23 nt, Artificial Sequence
  Synthetic
aagaauuuaaaaaagauuuagag

SEQ ID NO: 310242 - RNA, 24 nt, Artificial Sequence
  Synthetic
caagaauuuaaaaaagauuuagag

SEQ ID NO: 310243 - RNA, 18 nt, Artificial Sequence
  Synthetic
uauuuaaaaacuuuagag

SEQ ID NO: 310244 - RNA, 19 nt, Artificial Sequence
  Synthetic
uuauuuaaaaacuuuagag

SEQ ID NO: 310245 - RNA, 20 nt, Artificial Sequence
  Synthetic
uuuauuuaaaaacuuuagag

SEQ ID NO: 310246 - RNA, 21 nt, Artificial Sequence
  Synthetic
guuuauuuaaaaacuuuagag

SEQ ID NO: 310247 - RNA, 22 nt, Artificial Sequence
  Synthetic
aguuuauuuaaaaacuuuagag

SEQ ID NO: 310248 - RNA, 23 nt, Artificial Sequence
  Synthetic
aaguuuauuuaaaaacuuuagag

SEQ ID NO: 310249 - RNA, 24 nt, Artificial Sequence
  Synthetic
aaaguuuauuuaaaaacuuuagag

SEQ ID NO: 310250 - RNA, 18 nt, Artificial Sequence
  Synthetic
ucuguuuauccuuuagag

SEQ ID NO: 310251 - RNA, 19 nt, Artificial Sequence
  Synthetic
cucuguuuauccuuuagag

SEQ ID NO: 310252 - RNA, 20 nt, Artificial Sequence
  Synthetic
ucucuguuuauccuuuagag

SEQ ID NO: 310253 - RNA, 21 nt, Artificial Sequence
  Synthetic
gucucuguuuauccuuuagag

SEQ ID NO: 310254 - RNA, 22 nt, Artificial Sequence
  Synthetic
agucucuguuuauccuuuagag

SEQ ID NO: 310255 - RNA, 23 nt, Artificial Sequence
  Synthetic
aagucucuguuuauccuuuagag

SEQ ID NO: 310256 - RNA, 24 nt, Artificial Sequence
  Synthetic
aaagucucuguuuauccuuuagag

SEQ ID NO: 310257 - RNA, 18 nt, Artificial Sequence
  Synthetic
agaauaaccaguuuagag

SEQ ID NO: 310258 - RNA, 19 nt, Artificial Sequence
  Synthetic
uagaauaaccaguuuagag

SEQ ID NO: 310259 - RNA, 20 nt, Artificial Sequence
  Synthetic
cuagaauaaccaguuuagag

SEQ ID NO: 310260 - RNA, 21 nt, Artificial Sequence
  Synthetic
acuagaauaaccaguuuagag

SEQ ID NO: 310261 - RNA, 22 nt, Artificial Sequence
  Synthetic
aacuagaauaaccaguuuagag

SEQ ID NO: 310262 - RNA, 23 nt, Artificial Sequence
  Synthetic
uaacuagaauaaccaguuuagag

SEQ ID NO: 310263 - RNA, 24 nt, Artificial Sequence
  Synthetic
cuaacuagaauaaccaguuuagag

SEQ ID NO: 310264 - RNA, 18 nt, Artificial Sequence
  Synthetic
ggagccugagguuuagag

SEQ ID NO: 310265 - RNA, 19 nt, Artificial Sequence
  Synthetic
aggagccugagguuuagag

SEQ ID NO: 310266 - RNA, 20 nt, Artificial Sequence
  Synthetic
aaggagccugagguuuagag

SEQ ID NO: 310267 - RNA, 21 nt, Artificial Sequence
  Synthetic
uaaggagccugagguuuagag

SEQ ID NO: 310268 - RNA, 22 nt, Artificial Sequence
  Synthetic
uuaaggagccugagguuuagag

SEQ ID NO: 310269 - RNA, 23 nt, Artificial Sequence
  Synthetic
auuaaggagccugagguuuagag

SEQ ID NO: 310270 - RNA, 24 nt, Artificial Sequence
  Synthetic
gauuaaggagccugagguuuagag

SEQ ID NO: 310271 - RNA, 18 nt, Artificial Sequence
  Synthetic
acccuagucauuuuagag

SEQ ID NO: 310272 - RNA, 19 nt, Artificial Sequence
  Synthetic
aacccuagucauuuuagag

SEQ ID NO: 310273 - RNA, 20 nt, Artificial Sequence
  Synthetic
gaacccuagucauuuuagag

SEQ ID NO: 310274 - RNA, 21 nt, Artificial Sequence
  Synthetic
ggaacccuagucauuuuagag

SEQ ID NO: 310275 - RNA, 22 nt, Artificial Sequence
  Synthetic
uggaacccuagucauuuuagag

SEQ ID NO: 310276 - RNA, 23 nt, Artificial Sequence
  Synthetic
auggaacccuagucauuuuagag

SEQ ID NO: 310277 - RNA, 24 nt, Artificial Sequence
  Synthetic
uauggaacccuagucauuuuagag

SEQ ID NO: 310278 - RNA, 18 nt, Artificial Sequence
  Synthetic
uaaauguggauuuuagag

SEQ ID NO: 310279 - RNA, 19 nt, Artificial Sequence
  Synthetic
auaaauguggauuuuagag

SEQ ID NO: 310280 - RNA, 20 nt, Artificial Sequence
  Synthetic
uauaaauguggauuuuagag

SEQ ID NO: 310281 - RNA, 21 nt, Artificial Sequence
  Synthetic
auauaaauguggauuuuagag

SEQ ID NO: 310282 - RNA, 22 nt, Artificial Sequence
  Synthetic
aauauaaauguggauuuuagag

SEQ ID NO: 310283 - RNA, 23 nt, Artificial Sequence
  Synthetic
gaauauaaauguggauuuuagag

SEQ ID NO: 310284 - RNA, 24 nt, Artificial Sequence
  Synthetic
ugaauauaaauguggauuuuagag

SEQ ID NO: 310285 - RNA, 18 nt, Artificial Sequence
  Synthetic
aggcaaggcuuuuuagag

SEQ ID NO: 310286 - RNA, 19 nt, Artificial Sequence
  Synthetic
caggcaaggcuuuuuagag

SEQ ID NO: 310287 - RNA, 20 nt, Artificial Sequence
  Synthetic
ccaggcaaggcuuuuuagag

SEQ ID NO: 310288 - RNA, 21 nt, Artificial Sequence
  Synthetic
accaggcaaggcuuuuuagag

SEQ ID NO: 310289 - RNA, 22 nt, Artificial Sequence
  Synthetic
gaccaggcaaggcuuuuuagag

SEQ ID NO: 310290 - RNA, 23 nt, Artificial Sequence
  Synthetic
ggaccaggcaaggcuuuuuagag

SEQ ID NO: 310291 - RNA, 24 nt, Artificial Sequence
  Synthetic
aggaccaggcaaggcuuuuuagag

SEQ ID NO: 310292 - RNA, 18 nt, Artificial Sequence
  Synthetic
cuagcuagauaaaacgag

SEQ ID NO: 310293 - RNA, 19 nt, Artificial Sequence
  Synthetic
ccuagcuagauaaaacgag

SEQ ID NO: 310294 - RNA, 20 nt, Artificial Sequence
  Synthetic
accuagcuagauaaaacgag

SEQ ID NO: 310295 - RNA, 21 nt, Artificial Sequence
  Synthetic
uaccuagcuagauaaaacgag

SEQ ID NO: 310296 - RNA, 22 nt, Artificial Sequence
  Synthetic
uuaccuagcuagauaaaacgag

SEQ ID NO: 310297 - RNA, 23 nt, Artificial Sequence
  Synthetic
auuaccuagcuagauaaaacgag

SEQ ID NO: 310298 - RNA, 24 nt, Artificial Sequence
  Synthetic
aauuaccuagcuagauaaaacgag

SEQ ID NO: 310299 - RNA, 18 nt, Artificial Sequence
  Synthetic
aucgcuugaacccacgag

SEQ ID NO: 310300 - RNA, 19 nt, Artificial Sequence
  Synthetic
aaucgcuugaacccacgag

SEQ ID NO: 310301 - RNA, 20 nt, Artificial Sequence
  Synthetic
gaaucgcuugaacccacgag

SEQ ID NO: 310302 - RNA, 21 nt, Artificial Sequence
  Synthetic
agaaucgcuugaacccacgag

SEQ ID NO: 310303 - RNA, 22 nt, Artificial Sequence
  Synthetic
gagaaucgcuugaacccacgag

SEQ ID NO: 310304 - RNA, 23 nt, Artificial Sequence
  Synthetic
ggagaaucgcuugaacccacgag

SEQ ID NO: 310305 - RNA, 24 nt, Artificial Sequence
  Synthetic
aggagaaucgcuugaacccacgag

SEQ ID NO: 310306 - RNA, 18 nt, Artificial Sequence
  Synthetic
aagaauuugaaagacgag

SEQ ID NO: 310307 - RNA, 19 nt, Artificial Sequence
  Synthetic
caagaauuugaaagacgag

SEQ ID NO: 310308 - RNA, 20 nt, Artificial Sequence
  Synthetic
acaagaauuugaaagacgag

SEQ ID NO: 310309 - RNA, 21 nt, Artificial Sequence
  Synthetic
aacaagaauuugaaagacgag

SEQ ID NO: 310310 - RNA, 22 nt, Artificial Sequence
  Synthetic
aaacaagaauuugaaagacgag

SEQ ID NO: 310311 - RNA, 23 nt, Artificial Sequence
  Synthetic
aaaacaagaauuugaaagacgag

SEQ ID NO: 310312 - RNA, 24 nt, Artificial Sequence
  Synthetic
aaaaacaagaauuugaaagacgag

SEQ ID NO: 310313 - RNA, 18 nt, Artificial Sequence
  Synthetic
ugugaaaguagggacgag

SEQ ID NO: 310314 - RNA, 19 nt, Artificial Sequence
  Synthetic
cugugaaaguagggacgag

SEQ ID NO: 310315 - RNA, 20 nt, Artificial Sequence
  Synthetic
gcugugaaaguagggacgag

SEQ ID NO: 310316 - RNA, 21 nt, Artificial Sequence
  Synthetic
agcugugaaaguagggacgag

SEQ ID NO: 310317 - RNA, 22 nt, Artificial Sequence
  Synthetic
cagcugugaaaguagggacgag

SEQ ID NO: 310318 - RNA, 23 nt, Artificial Sequence
  Synthetic
ucagcugugaaaguagggacgag

SEQ ID NO: 310319 - RNA, 24 nt, Artificial Sequence
  Synthetic
cucagcugugaaaguagggacgag

SEQ ID NO: 310320 - RNA, 18 nt, Artificial Sequence
  Synthetic
guaagccacaacaccgag

SEQ ID NO: 310321 - RNA, 19 nt, Artificial Sequence
  Synthetic
cguaagccacaacaccgag

SEQ ID NO: 310322 - RNA, 20 nt, Artificial Sequence
  Synthetic
gcguaagccacaacaccgag

SEQ ID NO: 310323 - RNA, 21 nt, Artificial Sequence
  Synthetic
ggcguaagccacaacaccgag

SEQ ID NO: 310324 - RNA, 22 nt, Artificial Sequence
  Synthetic
aggcguaagccacaacaccgag

SEQ ID NO: 310325 - RNA, 23 nt, Artificial Sequence
  Synthetic
caggcguaagccacaacaccgag

SEQ ID NO: 310326 - RNA, 24 nt, Artificial Sequence
  Synthetic
acaggcguaagccacaacaccgag

SEQ ID NO: 310327 - RNA, 18 nt, Artificial Sequence
  Synthetic
aggccauauauucccgag

SEQ ID NO: 310328 - RNA, 19 nt, Artificial Sequence
  Synthetic
aaggccauauauucccgag

SEQ ID NO: 310329 - RNA, 20 nt, Artificial Sequence
  Synthetic
gaaggccauauauucccgag

SEQ ID NO: 310330 - RNA, 21 nt, Artificial Sequence
  Synthetic
agaaggccauauauucccgag

SEQ ID NO: 310331 - RNA, 22 nt, Artificial Sequence
  Synthetic
uagaaggccauauauucccgag

SEQ ID NO: 310332 - RNA, 23 nt, Artificial Sequence
  Synthetic
uuagaaggccauauauucccgag

SEQ ID NO: 310333 - RNA, 24 nt, Artificial Sequence
  Synthetic
uuuagaaggccauauauucccgag

SEQ ID NO: 310334 - RNA, 18 nt, Artificial Sequence
  Synthetic
uuuuuuuuuuuucccgag

SEQ ID NO: 310335 - RNA, 19 nt, Artificial Sequence
  Synthetic
uuuuuuuuuuuuucccgag

SEQ ID NO: 310336 - RNA, 20 nt, Artificial Sequence
  Synthetic
uuuuuuuuuuuuuucccgag

SEQ ID NO: 310337 - RNA, 21 nt, Artificial Sequence
  Synthetic
uuuuuuuuuuuuuuucccgag

SEQ ID NO: 310338 - RNA, 22 nt, Artificial Sequence
  Synthetic
uuuuuuuuuuuuuuuucccgag

SEQ ID NO: 310339 - RNA, 23 nt, Artificial Sequence
  Synthetic
cuuuuuuuuuuuuuuuucccgag

SEQ ID NO: 310340 - RNA, 24 nt, Artificial Sequence
  Synthetic
ucuuuuuuuuuuuuuuuucccgag

SEQ ID NO: 310341 - RNA, 18 nt, Artificial Sequence
  Synthetic
gcaauuugagaggccgag

SEQ ID NO: 310342 - RNA, 19 nt, Artificial Sequence
  Synthetic
agcaauuugagaggccgag

SEQ ID NO: 310343 - RNA, 20 nt, Artificial Sequence
  Synthetic
cagcaauuugagaggccgag

SEQ ID NO: 310344 - RNA, 21 nt, Artificial Sequence
  Synthetic
ccagcaauuugagaggccgag

SEQ ID NO: 310345 - RNA, 22 nt, Artificial Sequence
  Synthetic
cccagcaauuugagaggccgag

SEQ ID NO: 310346 - RNA, 23 nt, Artificial Sequence
  Synthetic
ucccagcaauuugagaggccgag

SEQ ID NO: 310347 - RNA, 24 nt, Artificial Sequence
  Synthetic
aucccagcaauuugagaggccgag

SEQ ID NO: 310348 - RNA, 18 nt, Artificial Sequence
  Synthetic
gcgcuucaggaggccgag

SEQ ID NO: 310349 - RNA, 19 nt, Artificial Sequence
  Synthetic
agcgcuucaggaggccgag

SEQ ID NO: 310350 - RNA, 20 nt, Artificial Sequence
  Synthetic
cagcgcuucaggaggccgag

SEQ ID NO: 310351 - RNA, 21 nt, Artificial Sequence
  Synthetic
ucagcgcuucaggaggccgag

SEQ ID NO: 310352 - RNA, 22 nt, Artificial Sequence
  Synthetic
cucagcgcuucaggaggccgag

SEQ ID NO: 310353 - RNA, 23 nt, Artificial Sequence
  Synthetic
ucucagcgcuucaggaggccgag

SEQ ID NO: 310354 - RNA, 24 nt, Artificial Sequence
  Synthetic
aucucagcgcuucaggaggccgag

SEQ ID NO: 310355 - RNA, 18 nt, Artificial Sequence
  Synthetic
gcacuuggggaggccgag

SEQ ID NO: 310356 - RNA, 19 nt, Artificial Sequence
  Synthetic
agcacuuggggaggccgag

SEQ ID NO: 310357 - RNA, 20 nt, Artificial Sequence
  Synthetic
cagcacuuggggaggccgag

SEQ ID NO: 310358 - RNA, 21 nt, Artificial Sequence
  Synthetic
ccagcacuuggggaggccgag

SEQ ID NO: 310359 - RNA, 22 nt, Artificial Sequence
  Synthetic
cccagcacuuggggaggccgag

SEQ ID NO: 310360 - RNA, 23 nt, Artificial Sequence
  Synthetic
ucccagcacuuggggaggccgag

SEQ ID NO: 310361 - RNA, 24 nt, Artificial Sequence
  Synthetic
aucccagcacuuggggaggccgag

SEQ ID NO: 310362 - RNA, 18 nt, Artificial Sequence
  Synthetic
gcacucugggaggccgag

SEQ ID NO: 310363 - RNA, 19 nt, Artificial Sequence
  Synthetic
agcacucugggaggccgag

SEQ ID NO: 310364 - RNA, 20 nt, Artificial Sequence
  Synthetic
cagcacucugggaggccgag

SEQ ID NO: 310365 - RNA, 18 nt, Artificial Sequence
  Synthetic
guacuuugggaggccgag

SEQ ID NO: 310366 - RNA, 19 nt, Artificial Sequence
  Synthetic
aguacuuugggaggccgag

SEQ ID NO: 310367 - RNA, 20 nt, Artificial Sequence
  Synthetic
uaguacuuugggaggccgag

SEQ ID NO: 310368 - RNA, 21 nt, Artificial Sequence
  Synthetic
cuaguacuuugggaggccgag

SEQ ID NO: 310369 - RNA, 22 nt, Artificial Sequence
  Synthetic
ccuaguacuuugggaggccgag

SEQ ID NO: 310370 - RNA, 23 nt, Artificial Sequence
  Synthetic
uccuaguacuuugggaggccgag

SEQ ID NO: 310371 - RNA, 24 nt, Artificial Sequence
  Synthetic
auccuaguacuuugggaggccgag

SEQ ID NO: 310372 - RNA, 18 nt, Artificial Sequence
  Synthetic
gcucuuugugaggccgag

SEQ ID NO: 310373 - RNA, 19 nt, Artificial Sequence
  Synthetic
agcucuuugugaggccgag

SEQ ID NO: 310374 - RNA, 20 nt, Artificial Sequence
  Synthetic
cagcucuuugugaggccgag

SEQ ID NO: 310375 - RNA, 21 nt, Artificial Sequence
  Synthetic
ccagcucuuugugaggccgag

SEQ ID NO: 310376 - RNA, 22 nt, Artificial Sequence
  Synthetic
cccagcucuuugugaggccgag

SEQ ID NO: 310377 - RNA, 23 nt, Artificial Sequence
  Synthetic
ucccagcucuuugugaggccgag

SEQ ID NO: 310378 - RNA, 24 nt, Artificial Sequence
  Synthetic
aucccagcucuuugugaggccgag

SEQ ID NO: 310379 - RNA, 18 nt, Artificial Sequence
  Synthetic
ccaggcagaaauuccgag

SEQ ID NO: 310380 - RNA, 19 nt, Artificial Sequence
  Synthetic
accaggcagaaauuccgag

SEQ ID NO: 310381 - RNA, 20 nt, Artificial Sequence
  Synthetic
uaccaggcagaaauuccgag

SEQ ID NO: 310382 - RNA, 21 nt, Artificial Sequence
  Synthetic
guaccaggcagaaauuccgag

SEQ ID NO: 310383 - RNA, 22 nt, Artificial Sequence
  Synthetic
gguaccaggcagaaauuccgag

SEQ ID NO: 310384 - RNA, 23 nt, Artificial Sequence
  Synthetic
ugguaccaggcagaaauuccgag

SEQ ID NO: 310385 - RNA, 24 nt, Artificial Sequence
  Synthetic
gugguaccaggcagaaauuccgag

SEQ ID NO: 310386 - RNA, 18 nt, Artificial Sequence
  Synthetic
agaaaaggaucaagcgag

SEQ ID NO: 310387 - RNA, 19 nt, Artificial Sequence
  Synthetic
cagaaaaggaucaagcgag

SEQ ID NO: 310388 - RNA, 20 nt, Artificial Sequence
  Synthetic
gcagaaaaggaucaagcgag

SEQ ID NO: 310389 - RNA, 21 nt, Artificial Sequence
  Synthetic
ggcagaaaaggaucaagcgag

SEQ ID NO: 310390 - RNA, 22 nt, Artificial Sequence
  Synthetic
aggcagaaaaggaucaagcgag

SEQ ID NO: 310391 - RNA, 23 nt, Artificial Sequence
  Synthetic
uaggcagaaaaggaucaagcgag

SEQ ID NO: 310392 - RNA, 24 nt, Artificial Sequence
  Synthetic
uuaggcagaaaaggaucaagcgag

SEQ ID NO: 310393 - RNA, 18 nt, Artificial Sequence
  Synthetic
cuaguuugggacagcgag

SEQ ID NO: 310394 - RNA, 19 nt, Artificial Sequence
  Synthetic
ucuaguuugggacagcgag

SEQ ID NO: 310395 - RNA, 20 nt, Artificial Sequence
  Synthetic
cucuaguuugggacagcgag

SEQ ID NO: 310396 - RNA, 21 nt, Artificial Sequence
  Synthetic
acucuaguuugggacagcgag

SEQ ID NO: 310397 - RNA, 22 nt, Artificial Sequence
  Synthetic
cacucuaguuugggacagcgag

SEQ ID NO: 310398 - RNA, 23 nt, Artificial Sequence
  Synthetic
acacucuaguuugggacagcgag

SEQ ID NO: 310399 - RNA, 24 nt, Artificial Sequence
  Synthetic
cacacucuaguuugggacagcgag

SEQ ID NO: 310400 - RNA, 18 nt, Artificial Sequence
  Synthetic
accgaggccugucgcgag

SEQ ID NO: 310401 - RNA, 19 nt, Artificial Sequence
  Synthetic
caccgaggccugucgcgag

SEQ ID NO: 310402 - RNA, 20 nt, Artificial Sequence
  Synthetic
acaccgaggccugucgcgag

SEQ ID NO: 310403 - RNA, 21 nt, Artificial Sequence
  Synthetic
cacaccgaggccugucgcgag

SEQ ID NO: 310404 - RNA, 22 nt, Artificial Sequence
  Synthetic
acacaccgaggccugucgcgag

SEQ ID NO: 310405 - RNA, 23 nt, Artificial Sequence
  Synthetic
cacacaccgaggccugucgcgag

SEQ ID NO: 310406 - RNA, 24 nt, Artificial Sequence
  Synthetic
ucacacaccgaggccugucgcgag

SEQ ID NO: 310407 - RNA, 18 nt, Artificial Sequence
  Synthetic
gucgggggguggggcgag

SEQ ID NO: 310408 - RNA, 19 nt, Artificial Sequence
  Synthetic
ugucgggggguggggcgag

SEQ ID NO: 310409 - RNA, 20 nt, Artificial Sequence
  Synthetic
cugucgggggguggggcgag

SEQ ID NO: 310410 - RNA, 21 nt, Artificial Sequence
  Synthetic
ccugucgggggguggggcgag

SEQ ID NO: 310411 - RNA, 22 nt, Artificial Sequence
  Synthetic
gccugucgggggguggggcgag

SEQ ID NO: 310412 - RNA, 23 nt, Artificial Sequence
  Synthetic
ggccugucgggggguggggcgag

SEQ ID NO: 310413 - RNA, 24 nt, Artificial Sequence
  Synthetic
aggccugucgggggguggggcgag

SEQ ID NO: 310414 - RNA, 18 nt, Artificial Sequence
  Synthetic
agagagcaagcccucgag

SEQ ID NO: 310415 - RNA, 19 nt, Artificial Sequence
  Synthetic
gagagagcaagcccucgag

SEQ ID NO: 310416 - RNA, 20 nt, Artificial Sequence
  Synthetic
agagagagcaagcccucgag

SEQ ID NO: 310417 - RNA, 21 nt, Artificial Sequence
  Synthetic
gagagagagcaagcccucgag

SEQ ID NO: 310418 - RNA, 22 nt, Artificial Sequence
  Synthetic
agagagagagcaagcccucgag

SEQ ID NO: 310419 - RNA, 23 nt, Artificial Sequence
  Synthetic
cagagagagagcaagcccucgag

SEQ ID NO: 310420 - RNA, 24 nt, Artificial Sequence
  Synthetic
ccagagagagagcaagcccucgag

SEQ ID NO: 310421 - RNA, 18 nt, Artificial Sequence
  Synthetic
aaauaaacaccauucgag

SEQ ID NO: 310422 - RNA, 19 nt, Artificial Sequence
  Synthetic
aaaauaaacaccauucgag

SEQ ID NO: 310423 - RNA, 20 nt, Artificial Sequence
  Synthetic
aaaaauaaacaccauucgag

SEQ ID NO: 310424 - RNA, 21 nt, Artificial Sequence
  Synthetic
aaaaaauaaacaccauucgag

SEQ ID NO: 310425 - RNA, 22 nt, Artificial Sequence
  Synthetic
uaaaaaauaaacaccauucgag

SEQ ID NO: 310426 - RNA, 23 nt, Artificial Sequence
  Synthetic
uuaaaaaauaaacaccauucgag

SEQ ID NO: 310427 - RNA, 24 nt, Artificial Sequence
  Synthetic
uuuaaaaaauaaacaccauucgag

SEQ ID NO: 310428 - RNA, 18 nt, Artificial Sequence
  Synthetic
aaagcagagaacuucgag

SEQ ID NO: 310429 - RNA, 19 nt, Artificial Sequence
  Synthetic
gaaagcagagaacuucgag

SEQ ID NO: 310430 - RNA, 20 nt, Artificial Sequence
  Synthetic
agaaagcagagaacuucgag

SEQ ID NO: 310431 - RNA, 21 nt, Artificial Sequence
  Synthetic
aagaaagcagagaacuucgag

SEQ ID NO: 310432 - RNA, 22 nt, Artificial Sequence
  Synthetic
caagaaagcagagaacuucgag

SEQ ID NO: 310433 - RNA, 23 nt, Artificial Sequence
  Synthetic
ccaagaaagcagagaacuucgag

SEQ ID NO: 310434 - RNA, 24 nt, Artificial Sequence
  Synthetic
gccaagaaagcagagaacuucgag

SEQ ID NO: 310435 - RNA, 18 nt, Artificial Sequence
  Synthetic
gcacacaggcacuucgag

SEQ ID NO: 310436 - RNA, 19 nt, Artificial Sequence
  Synthetic
ugcacacaggcacuucgag

SEQ ID NO: 310437 - RNA, 20 nt, Artificial Sequence
  Synthetic
uugcacacaggcacuucgag

SEQ ID NO: 310438 - RNA, 21 nt, Artificial Sequence
  Synthetic
auugcacacaggcacuucgag

SEQ ID NO: 310439 - RNA, 22 nt, Artificial Sequence
  Synthetic
uauugcacacaggcacuucgag

SEQ ID NO: 310440 - RNA, 23 nt, Artificial Sequence
  Synthetic
cuauugcacacaggcacuucgag

SEQ ID NO: 310441 - RNA, 24 nt, Artificial Sequence
  Synthetic
acuauugcacacaggcacuucgag

SEQ ID NO: 310442 - RNA, 18 nt, Artificial Sequence
  Synthetic
ugaggccaggaguucgag

SEQ ID NO: 310443 - RNA, 19 nt, Artificial Sequence
  Synthetic
uugaggccaggaguucgag

SEQ ID NO: 310444 - RNA, 20 nt, Artificial Sequence
  Synthetic
cuugaggccaggaguucgag

SEQ ID NO: 310445 - RNA, 21 nt, Artificial Sequence
  Synthetic
acuugaggccaggaguucgag

SEQ ID NO: 310446 - RNA, 22 nt, Artificial Sequence
  Synthetic
cacuugaggccaggaguucgag

SEQ ID NO: 310447 - RNA, 23 nt, Artificial Sequence
  Synthetic
ucacuugaggccaggaguucgag

SEQ ID NO: 310448 - RNA, 24 nt, Artificial Sequence
  Synthetic
aucacuugaggccaggaguucgag

SEQ ID NO: 310449 - RNA, 18 nt, Artificial Sequence
  Synthetic
auggggucugaaaaggag

SEQ ID NO: 310450 - RNA, 19 nt, Artificial Sequence
  Synthetic
cauggggucugaaaaggag

SEQ ID NO: 310451 - RNA, 20 nt, Artificial Sequence
  Synthetic
ucauggggucugaaaaggag

SEQ ID NO: 310452 - RNA, 21 nt, Artificial Sequence
  Synthetic
cucauggggucugaaaaggag

SEQ ID NO: 310453 - RNA, 22 nt, Artificial Sequence
  Synthetic
gcucauggggucugaaaaggag

SEQ ID NO: 310454 - RNA, 23 nt, Artificial Sequence
  Synthetic
ugcucauggggucugaaaaggag

SEQ ID NO: 310455 - RNA, 24 nt, Artificial Sequence
  Synthetic
augcucauggggucugaaaaggag

SEQ ID NO: 310456 - RNA, 18 nt, Artificial Sequence
  Synthetic
aaggaggaagcaaaggag

SEQ ID NO: 310457 - RNA, 19 nt, Artificial Sequence
  Synthetic
gaaggaggaagcaaaggag

SEQ ID NO: 310458 - RNA, 20 nt, Artificial Sequence
  Synthetic
ugaaggaggaagcaaaggag

SEQ ID NO: 310459 - RNA, 21 nt, Artificial Sequence
  Synthetic
uugaaggaggaagcaaaggag

SEQ ID NO: 310460 - RNA, 22 nt, Artificial Sequence
  Synthetic
uuugaaggaggaagcaaaggag

SEQ ID NO: 310461 - RNA, 23 nt, Artificial Sequence
  Synthetic
uuuugaaggaggaagcaaaggag

SEQ ID NO: 310462 - RNA, 24 nt, Artificial Sequence
  Synthetic
guuuugaaggaggaagcaaaggag

SEQ ID NO: 310463 - RNA, 18 nt, Artificial Sequence
  Synthetic
gaugaaaagagaaaggag

SEQ ID NO: 310464 - RNA, 19 nt, Artificial Sequence
  Synthetic
ugaugaaaagagaaaggag

SEQ ID NO: 310465 - RNA, 20 nt, Artificial Sequence
  Synthetic
augaugaaaagagaaaggag

SEQ ID NO: 310466 - RNA, 21 nt, Artificial Sequence
  Synthetic
gaugaugaaaagagaaaggag

SEQ ID NO: 310467 - RNA, 22 nt, Artificial Sequence
  Synthetic
ugaugaugaaaagagaaaggag

SEQ ID NO: 310468 - RNA, 23 nt, Artificial Sequence
  Synthetic
augaugaugaaaagagaaaggag

SEQ ID NO: 310469 - RNA, 24 nt, Artificial Sequence
  Synthetic
aaugaugaugaaaagagaaaggag

SEQ ID NO: 310470 - RNA, 18 nt, Artificial Sequence
  Synthetic
augacuucuagaaaggag

SEQ ID NO: 310471 - RNA, 19 nt, Artificial Sequence
  Synthetic
aaugacuucuagaaaggag

SEQ ID NO: 310472 - RNA, 20 nt, Artificial Sequence
  Synthetic
caaugacuucuagaaaggag

SEQ ID NO: 310473 - RNA, 21 nt, Artificial Sequence
  Synthetic
gcaaugacuucuagaaaggag

SEQ ID NO: 310474 - RNA, 22 nt, Artificial Sequence
  Synthetic
agcaaugacuucuagaaaggag

SEQ ID NO: 310475 - RNA, 23 nt, Artificial Sequence
  Synthetic
aagcaaugacuucuagaaaggag

SEQ ID NO: 310476 - RNA, 24 nt, Artificial Sequence
  Synthetic
gaagcaaugacuucuagaaaggag

SEQ ID NO: 310477 - RNA, 18 nt, Artificial Sequence
  Synthetic
uaggcacuccgaaaggag

SEQ ID NO: 310478 - RNA, 19 nt, Artificial Sequence
  Synthetic
uuaggcacuccgaaaggag

SEQ ID NO: 310479 - RNA, 20 nt, Artificial Sequence
  Synthetic
auuaggcacuccgaaaggag

SEQ ID NO: 310480 - RNA, 21 nt, Artificial Sequence
  Synthetic
aauuaggcacuccgaaaggag

SEQ ID NO: 310481 - RNA, 22 nt, Artificial Sequence
  Synthetic
gaauuaggcacuccgaaaggag

SEQ ID NO: 310482 - RNA, 23 nt, Artificial Sequence
  Synthetic
cgaauuaggcacuccgaaaggag

SEQ ID NO: 310483 - RNA, 24 nt, Artificial Sequence
  Synthetic
acgaauuaggcacuccgaaaggag

SEQ ID NO: 310484 - RNA, 18 nt, Artificial Sequence
  Synthetic
ucaaaucacugaaaggag

SEQ ID NO: 310485 - RNA, 19 nt, Artificial Sequence
  Synthetic
uucaaaucacugaaaggag

SEQ ID NO: 310486 - RNA, 20 nt, Artificial Sequence
  Synthetic
uuucaaaucacugaaaggag

SEQ ID NO: 310487 - RNA, 21 nt, Artificial Sequence
  Synthetic
guuucaaaucacugaaaggag

SEQ ID NO: 310488 - RNA, 22 nt, Artificial Sequence
  Synthetic
aguuucaaaucacugaaaggag

SEQ ID NO: 310489 - RNA, 23 nt, Artificial Sequence
  Synthetic
gaguuucaaaucacugaaaggag

SEQ ID NO: 310490 - RNA, 24 nt, Artificial Sequence
  Synthetic
ggaguuucaaaucacugaaaggag

SEQ ID NO: 310491 - RNA, 18 nt, Artificial Sequence
  Synthetic
uuucugcuuauaaaggag

SEQ ID NO: 310492 - RNA, 19 nt, Artificial Sequence
  Synthetic
uuuucugcuuauaaaggag

SEQ ID NO: 310493 - RNA, 20 nt, Artificial Sequence
  Synthetic
uuuuucugcuuauaaaggag

SEQ ID NO: 310494 - RNA, 21 nt, Artificial Sequence
  Synthetic
uuuuuucugcuuauaaaggag

SEQ ID NO: 310495 - RNA, 22 nt, Artificial Sequence
  Synthetic
auuuuuucugcuuauaaaggag

SEQ ID NO: 310496 - RNA, 23 nt, Artificial Sequence
  Synthetic
cauuuuuucugcuuauaaaggag

SEQ ID NO: 310497 - RNA, 24 nt, Artificial Sequence
  Synthetic
ucauuuuuucugcuuauaaaggag

SEQ ID NO: 310498 - RNA, 18 nt, Artificial Sequence
  Synthetic
cgguauuuggacaaggag

SEQ ID NO: 310499 - RNA, 19 nt, Artificial Sequence
  Synthetic
ucgguauuuggacaaggag

SEQ ID NO: 310500 - RNA, 20 nt, Artificial Sequence
  Synthetic
uucgguauuuggacaaggag

SEQ ID NO: 310501 - RNA, 21 nt, Artificial Sequence
  Synthetic
uuucgguauuuggacaaggag

SEQ ID NO: 310502 - RNA, 22 nt, Artificial Sequence
  Synthetic
auuucgguauuuggacaaggag

SEQ ID NO: 310503 - RNA, 23 nt, Artificial Sequence
  Synthetic
uauuucgguauuuggacaaggag

SEQ ID NO: 310504 - RNA, 24 nt, Artificial Sequence
  Synthetic
guauuucgguauuuggacaaggag

SEQ ID NO: 310505 - RNA, 18 nt, Artificial Sequence
  Synthetic
auagggaggcccaaggag

SEQ ID NO: 310506 - RNA, 19 nt, Artificial Sequence
  Synthetic
aauagggaggcccaaggag

SEQ ID NO: 310507 - RNA, 20 nt, Artificial Sequence
  Synthetic
gaauagggaggcccaaggag

SEQ ID NO: 310508 - RNA, 21 nt, Artificial Sequence
  Synthetic
agaauagggaggcccaaggag

SEQ ID NO: 310509 - RNA, 22 nt, Artificial Sequence
  Synthetic
cagaauagggaggcccaaggag

SEQ ID NO: 310510 - RNA, 23 nt, Artificial Sequence
  Synthetic
ucagaauagggaggcccaaggag

SEQ ID NO: 310511 - RNA, 24 nt, Artificial Sequence
  Synthetic
cucagaauagggaggcccaaggag

SEQ ID NO: 310512 - RNA, 18 nt, Artificial Sequence
  Synthetic
ugcuauugugucaaggag

SEQ ID NO: 310513 - RNA, 19 nt, Artificial Sequence
  Synthetic
uugcuauugugucaaggag

SEQ ID NO: 310514 - RNA, 20 nt, Artificial Sequence
  Synthetic
cuugcuauugugucaaggag

SEQ ID NO: 310515 - RNA, 21 nt, Artificial Sequence
  Synthetic
gcuugcuauugugucaaggag

SEQ ID NO: 310516 - RNA, 22 nt, Artificial Sequence
  Synthetic
agcuugcuauugugucaaggag

SEQ ID NO: 310517 - RNA, 23 nt, Artificial Sequence
  Synthetic
cagcuugcuauugugucaaggag

SEQ ID NO: 310518 - RNA, 24 nt, Artificial Sequence
  Synthetic
ucagcuugcuauugugucaaggag

SEQ ID NO: 310519 - RNA, 18 nt, Artificial Sequence
  Synthetic
caauccauauucaaggag

SEQ ID NO: 310520 - RNA, 19 nt, Artificial Sequence
  Synthetic
ccaauccauauucaaggag

SEQ ID NO: 310521 - RNA, 20 nt, Artificial Sequence
  Synthetic
accaauccauauucaaggag

SEQ ID NO: 310522 - RNA, 21 nt, Artificial Sequence
  Synthetic
gaccaauccauauucaaggag

SEQ ID NO: 310523 - RNA, 22 nt, Artificial Sequence
  Synthetic
ugaccaauccauauucaaggag

SEQ ID NO: 310524 - RNA, 23 nt, Artificial Sequence
  Synthetic
uugaccaauccauauucaaggag

SEQ ID NO: 310525 - RNA, 24 nt, Artificial Sequence
  Synthetic
cuugaccaauccauauucaaggag

SEQ ID NO: 310526 - RNA, 18 nt, Artificial Sequence
  Synthetic
gcuuagaaguucaaggag

SEQ ID NO: 310527 - RNA, 19 nt, Artificial Sequence
  Synthetic
agcuuagaaguucaaggag

SEQ ID NO: 310528 - RNA, 20 nt, Artificial Sequence
  Synthetic
uagcuuagaaguucaaggag

SEQ ID NO: 310529 - RNA, 21 nt, Artificial Sequence
  Synthetic
auagcuuagaaguucaaggag

SEQ ID NO: 310530 - RNA, 22 nt, Artificial Sequence
  Synthetic
uauagcuuagaaguucaaggag

SEQ ID NO: 310531 - RNA, 23 nt, Artificial Sequence
  Synthetic
uuauagcuuagaaguucaaggag

SEQ ID NO: 310532 - RNA, 24 nt, Artificial Sequence
  Synthetic
guuauagcuuagaaguucaaggag

SEQ ID NO: 310533 - RNA, 18 nt, Artificial Sequence
  Synthetic
aagaagaagaagaaggag

SEQ ID NO: 310534 - RNA, 19 nt, Artificial Sequence
  Synthetic
gaagaagaagaagaaggag

SEQ ID NO: 310535 - RNA, 20 nt, Artificial Sequence
  Synthetic
agaagaagaagaagaaggag

SEQ ID NO: 310536 - RNA, 21 nt, Artificial Sequence
  Synthetic
aagaagaagaagaagaaggag

SEQ ID NO: 310537 - RNA, 22 nt, Artificial Sequence
  Synthetic
uaagaagaagaagaagaaggag

SEQ ID NO: 310538 - RNA, 23 nt, Artificial Sequence
  Synthetic
auaagaagaagaagaagaaggag

SEQ ID NO: 310539 - RNA, 24 nt, Artificial Sequence
  Synthetic
cauaagaagaagaagaagaaggag

SEQ ID NO: 310540 - RNA, 18 nt, Artificial Sequence
  Synthetic
agaaggagggagaaggag

SEQ ID NO: 310541 - RNA, 19 nt, Artificial Sequence
  Synthetic
aagaaggagggagaaggag

SEQ ID NO: 310542 - RNA, 20 nt, Artificial Sequence
  Synthetic
caagaaggagggagaaggag

SEQ ID NO: 310543 - RNA, 21 nt, Artificial Sequence
  Synthetic
gcaagaaggagggagaaggag

SEQ ID NO: 310544 - RNA, 22 nt, Artificial Sequence
  Synthetic
ggcaagaaggagggagaaggag

SEQ ID NO: 310545 - RNA, 23 nt, Artificial Sequence
  Synthetic
aggcaagaaggagggagaaggag

SEQ ID NO: 310546 - RNA, 24 nt, Artificial Sequence
  Synthetic
aaggcaagaaggagggagaaggag

SEQ ID NO: 310547 - RNA, 18 nt, Artificial Sequence
  Synthetic
ggaaucugguagaaggag

SEQ ID NO: 310548 - RNA, 19 nt, Artificial Sequence
  Synthetic
uggaaucugguagaaggag

SEQ ID NO: 310549 - RNA, 20 nt, Artificial Sequence
  Synthetic
uuggaaucugguagaaggag

SEQ ID NO: 310550 - RNA, 21 nt, Artificial Sequence
  Synthetic
guuggaaucugguagaaggag

SEQ ID NO: 310551 - RNA, 22 nt, Artificial Sequence
  Synthetic
gguuggaaucugguagaaggag

SEQ ID NO: 310552 - RNA, 23 nt, Artificial Sequence
  Synthetic
agguuggaaucugguagaaggag

SEQ ID NO: 310553 - RNA, 24 nt, Artificial Sequence
  Synthetic
aagguuggaaucugguagaaggag

SEQ ID NO: 310554 - RNA, 18 nt, Artificial Sequence
  Synthetic
gagugacagacgaaggag

SEQ ID NO: 310555 - RNA, 19 nt, Artificial Sequence
  Synthetic
agagugacagacgaaggag

SEQ ID NO: 310556 - RNA, 20 nt, Artificial Sequence
  Synthetic
aagagugacagacgaaggag

SEQ ID NO: 310557 - RNA, 21 nt, Artificial Sequence
  Synthetic
gaagagugacagacgaaggag

SEQ ID NO: 310558 - RNA, 22 nt, Artificial Sequence
  Synthetic
ggaagagugacagacgaaggag

SEQ ID NO: 310559 - RNA, 23 nt, Artificial Sequence
  Synthetic
aggaagagugacagacgaaggag

SEQ ID NO: 310560 - RNA, 24 nt, Artificial Sequence
  Synthetic
caggaagagugacagacgaaggag

SEQ ID NO: 310561 - RNA, 18 nt, Artificial Sequence
  Synthetic
agaaagggaaggaaggag

SEQ ID NO: 310562 - RNA, 19 nt, Artificial Sequence
  Synthetic
aagaaagggaaggaaggag

SEQ ID NO: 310563 - RNA, 20 nt, Artificial Sequence
  Synthetic
aaagaaagggaaggaaggag

SEQ ID NO: 310564 - RNA, 21 nt, Artificial Sequence
  Synthetic
gaaagaaagggaaggaaggag

SEQ ID NO: 310565 - RNA, 22 nt, Artificial Sequence
  Synthetic
ggaaagaaagggaaggaaggag

SEQ ID NO: 310566 - RNA, 23 nt, Artificial Sequence
  Synthetic
aggaaagaaagggaaggaaggag

SEQ ID NO: 310567 - RNA, 24 nt, Artificial Sequence
  Synthetic
gaggaaagaaagggaaggaaggag

SEQ ID NO: 310568 - RNA, 18 nt, Artificial Sequence
  Synthetic
agaagggggaggaaggag

SEQ ID NO: 310569 - RNA, 19 nt, Artificial Sequence
  Synthetic
uagaagggggaggaaggag

SEQ ID NO: 310570 - RNA, 20 nt, Artificial Sequence
  Synthetic
cuagaagggggaggaaggag

SEQ ID NO: 310571 - RNA, 21 nt, Artificial Sequence
  Synthetic
acuagaagggggaggaaggag

SEQ ID NO: 310572 - RNA, 22 nt, Artificial Sequence
  Synthetic
uacuagaagggggaggaaggag

SEQ ID NO: 310573 - RNA, 23 nt, Artificial Sequence
  Synthetic
cuacuagaagggggaggaaggag

SEQ ID NO: 310574 - RNA, 24 nt, Artificial Sequence
  Synthetic
acuacuagaagggggaggaaggag

SEQ ID NO: 310575 - RNA, 18 nt, Artificial Sequence
  Synthetic
agggagaaugggaaggag

SEQ ID NO: 310576 - RNA, 19 nt, Artificial Sequence
  Synthetic
gagggagaaugggaaggag

SEQ ID NO: 310577 - RNA, 20 nt, Artificial Sequence
  Synthetic
agagggagaaugggaaggag

SEQ ID NO: 310578 - RNA, 21 nt, Artificial Sequence
  Synthetic
cagagggagaaugggaaggag

SEQ ID NO: 310579 - RNA, 22 nt, Artificial Sequence
  Synthetic
acagagggagaaugggaaggag

SEQ ID NO: 310580 - RNA, 23 nt, Artificial Sequence
  Synthetic
gacagagggagaaugggaaggag

SEQ ID NO: 310581 - RNA, 24 nt, Artificial Sequence
  Synthetic
ggacagagggagaaugggaaggag

SEQ ID NO: 310582 - RNA, 18 nt, Artificial Sequence
  Synthetic
caguaaagacugaaggag

SEQ ID NO: 310583 - RNA, 19 nt, Artificial Sequence
  Synthetic
ccaguaaagacugaaggag

SEQ ID NO: 310584 - RNA, 20 nt, Artificial Sequence
  Synthetic
uccaguaaagacugaaggag

SEQ ID NO: 310585 - RNA, 21 nt, Artificial Sequence
  Synthetic
auccaguaaagacugaaggag

SEQ ID NO: 310586 - RNA, 22 nt, Artificial Sequence
  Synthetic
cauccaguaaagacugaaggag

SEQ ID NO: 310587 - RNA, 23 nt, Artificial Sequence
  Synthetic
acauccaguaaagacugaaggag

SEQ ID NO: 310588 - RNA, 24 nt, Artificial Sequence
  Synthetic
aacauccaguaaagacugaaggag

SEQ ID NO: 310589 - RNA, 18 nt, Artificial Sequence
  Synthetic
auaaaugaccugaaggag

SEQ ID NO: 310590 - RNA, 19 nt, Artificial Sequence
  Synthetic
cauaaaugaccugaaggag

SEQ ID NO: 310591 - RNA, 20 nt, Artificial Sequence
  Synthetic
acauaaaugaccugaaggag

SEQ ID NO: 310592 - RNA, 21 nt, Artificial Sequence
  Synthetic
aacauaaaugaccugaaggag

SEQ ID NO: 310593 - RNA, 22 nt, Artificial Sequence
  Synthetic
gaacauaaaugaccugaaggag

SEQ ID NO: 310594 - RNA, 23 nt, Artificial Sequence
  Synthetic
ggaacauaaaugaccugaaggag

SEQ ID NO: 310595 - RNA, 24 nt, Artificial Sequence
  Synthetic
aggaacauaaaugaccugaaggag

SEQ ID NO: 310596 - RNA, 18 nt, Artificial Sequence
  Synthetic
augcaacaggugaaggag

SEQ ID NO: 310597 - RNA, 19 nt, Artificial Sequence
  Synthetic
aaugcaacaggugaaggag

SEQ ID NO: 310598 - RNA, 20 nt, Artificial Sequence
  Synthetic
gaaugcaacaggugaaggag

SEQ ID NO: 310599 - RNA, 21 nt, Artificial Sequence
  Synthetic
ugaaugcaacaggugaaggag

SEQ ID NO: 310600 - RNA, 22 nt, Artificial Sequence
  Synthetic
augaaugcaacaggugaaggag

SEQ ID NO: 310601 - RNA, 23 nt, Artificial Sequence
  Synthetic
uaugaaugcaacaggugaaggag

SEQ ID NO: 310602 - RNA, 24 nt, Artificial Sequence
  Synthetic
uuaugaaugcaacaggugaaggag

SEQ ID NO: 310603 - RNA, 18 nt, Artificial Sequence
  Synthetic
aucccuaauucuaaggag

SEQ ID NO: 310604 - RNA, 19 nt, Artificial Sequence
  Synthetic
gaucccuaauucuaaggag

SEQ ID NO: 310605 - RNA, 20 nt, Artificial Sequence
  Synthetic
ggaucccuaauucuaaggag

SEQ ID NO: 310606 - RNA, 21 nt, Artificial Sequence
  Synthetic
aggaucccuaauucuaaggag

SEQ ID NO: 310607 - RNA, 22 nt, Artificial Sequence
  Synthetic
aaggaucccuaauucuaaggag

SEQ ID NO: 310608 - RNA, 23 nt, Artificial Sequence
  Synthetic
uaaggaucccuaauucuaaggag

SEQ ID NO: 310609 - RNA, 24 nt, Artificial Sequence
  Synthetic
uuaaggaucccuaauucuaaggag

SEQ ID NO: 310610 - RNA, 18 nt, Artificial Sequence
  Synthetic
aaggagagaaaacaggag

SEQ ID NO: 310611 - RNA, 19 nt, Artificial Sequence
  Synthetic
aaaggagagaaaacaggag

SEQ ID NO: 310612 - RNA, 20 nt, Artificial Sequence
  Synthetic
gaaaggagagaaaacaggag

SEQ ID NO: 310613 - RNA, 21 nt, Artificial Sequence
  Synthetic
cgaaaggagagaaaacaggag

SEQ ID NO: 310614 - RNA, 22 nt, Artificial Sequence
  Synthetic
acgaaaggagagaaaacaggag

SEQ ID NO: 310615 - RNA, 23 nt, Artificial Sequence
  Synthetic
aacgaaaggagagaaaacaggag

SEQ ID NO: 310616 - RNA, 24 nt, Artificial Sequence
  Synthetic
aaacgaaaggagagaaaacaggag

SEQ ID NO: 310617 - RNA, 18 nt, Artificial Sequence
  Synthetic
auagaccaauaacaggag

SEQ ID NO: 310618 - RNA, 19 nt, Artificial Sequence
  Synthetic
aauagaccaauaacaggag

SEQ ID NO: 310619 - RNA, 20 nt, Artificial Sequence
  Synthetic
gaauagaccaauaacaggag

SEQ ID NO: 310620 - RNA, 21 nt, Artificial Sequence
  Synthetic
ugaauagaccaauaacaggag

SEQ ID NO: 310621 - RNA, 22 nt, Artificial Sequence
  Synthetic
cugaauagaccaauaacaggag

SEQ ID NO: 310622 - RNA, 23 nt, Artificial Sequence
  Synthetic
ucugaauagaccaauaacaggag

SEQ ID NO: 310623 - RNA, 24 nt, Artificial Sequence
  Synthetic
cucugaauagaccaauaacaggag

SEQ ID NO: 310624 - RNA, 18 nt, Artificial Sequence
  Synthetic
acaggggaaacacaggag

SEQ ID NO: 310625 - RNA, 19 nt, Artificial Sequence
  Synthetic
aacaggggaaacacaggag

SEQ ID NO: 310626 - RNA, 20 nt, Artificial Sequence
  Synthetic
uaacaggggaaacacaggag

SEQ ID NO: 310627 - RNA, 21 nt, Artificial Sequence
  Synthetic
auaacaggggaaacacaggag

SEQ ID NO: 310628 - RNA, 22 nt, Artificial Sequence
  Synthetic
aauaacaggggaaacacaggag

SEQ ID NO: 310629 - RNA, 23 nt, Artificial Sequence
  Synthetic
aaauaacaggggaaacacaggag

SEQ ID NO: 310630 - RNA, 24 nt, Artificial Sequence
  Synthetic
aaaauaacaggggaaacacaggag

SEQ ID NO: 310631 - RNA, 18 nt, Artificial Sequence
  Synthetic
ggagcagggagacaggag

SEQ ID NO: 310632 - RNA, 19 nt, Artificial Sequence
  Synthetic
uggagcagggagacaggag

SEQ ID NO: 310633 - RNA, 20 nt, Artificial Sequence
  Synthetic
cuggagcagggagacaggag

SEQ ID NO: 310634 - RNA, 21 nt, Artificial Sequence
  Synthetic
acuggagcagggagacaggag

SEQ ID NO: 310635 - RNA, 22 nt, Artificial Sequence
  Synthetic
uacuggagcagggagacaggag

SEQ ID NO: 310636 - RNA, 23 nt, Artificial Sequence
  Synthetic
uuacuggagcagggagacaggag

SEQ ID NO: 310637 - RNA, 24 nt, Artificial Sequence
  Synthetic
uuuacuggagcagggagacaggag

SEQ ID NO: 310638 - RNA, 18 nt, Artificial Sequence
  Synthetic
agggaaacaauacaggag

SEQ ID NO: 310639 - RNA, 19 nt, Artificial Sequence
  Synthetic
uagggaaacaauacaggag

SEQ ID NO: 310640 - RNA, 20 nt, Artificial Sequence
  Synthetic
uuagggaaacaauacaggag

SEQ ID NO: 310641 - RNA, 21 nt, Artificial Sequence
  Synthetic
guuagggaaacaauacaggag

SEQ ID NO: 310642 - RNA, 22 nt, Artificial Sequence
  Synthetic
aguuagggaaacaauacaggag

SEQ ID NO: 310643 - RNA, 23 nt, Artificial Sequence
  Synthetic
gaguuagggaaacaauacaggag

SEQ ID NO: 310644 - RNA, 24 nt, Artificial Sequence
  Synthetic
ggaguuagggaaacaauacaggag

SEQ ID NO: 310645 - RNA, 18 nt, Artificial Sequence
  Synthetic
gaaggauguuaccaggag

SEQ ID NO: 310646 - RNA, 19 nt, Artificial Sequence
  Synthetic
ugaaggauguuaccaggag

SEQ ID NO: 310647 - RNA, 20 nt, Artificial Sequence
  Synthetic
uugaaggauguuaccaggag

SEQ ID NO: 310648 - RNA, 21 nt, Artificial Sequence
  Synthetic
guugaaggauguuaccaggag

SEQ ID NO: 310649 - RNA, 22 nt, Artificial Sequence
  Synthetic
aguugaaggauguuaccaggag

SEQ ID NO: 310650 - RNA, 23 nt, Artificial Sequence
  Synthetic
aaguugaaggauguuaccaggag

SEQ ID NO: 310651 - RNA, 24 nt, Artificial Sequence
  Synthetic
aaaguugaaggauguuaccaggag

SEQ ID NO: 310652 - RNA, 18 nt, Artificial Sequence
  Synthetic
aucacuggaacccaggag

SEQ ID NO: 310653 - RNA, 19 nt, Artificial Sequence
  Synthetic
aaucacuggaacccaggag

SEQ ID NO: 310654 - RNA, 20 nt, Artificial Sequence
  Synthetic
gaaucacuggaacccaggag

SEQ ID NO: 310655 - RNA, 21 nt, Artificial Sequence
  Synthetic
agaaucacuggaacccaggag

SEQ ID NO: 310656 - RNA, 22 nt, Artificial Sequence
  Synthetic
gagaaucacuggaacccaggag

SEQ ID NO: 310657 - RNA, 23 nt, Artificial Sequence
  Synthetic
ggagaaucacuggaacccaggag

SEQ ID NO: 310658 - RNA, 24 nt, Artificial Sequence
  Synthetic
aggagaaucacuggaacccaggag

SEQ ID NO: 310659 - RNA, 21 nt, Artificial Sequence
  Synthetic
agaauugcuugaacccaggag

SEQ ID NO: 310660 - RNA, 22 nt, Artificial Sequence
  Synthetic
gagaauugcuugaacccaggag

SEQ ID NO: 310661 - RNA, 23 nt, Artificial Sequence
  Synthetic
ggagaauugcuugaacccaggag

SEQ ID NO: 310662 - RNA, 24 nt, Artificial Sequence
  Synthetic
aggagaauugcuugaacccaggag

SEQ ID NO: 310663 - RNA, 23 nt, Artificial Sequence
  Synthetic
ugagaauugcuugaacccaggag

SEQ ID NO: 310664 - RNA, 24 nt, Artificial Sequence
  Synthetic
augagaauugcuugaacccaggag

SEQ ID NO: 310665 - RNA, 18 nt, Artificial Sequence
  Synthetic
aucauuugaacccaggag

SEQ ID NO: 310666 - RNA, 19 nt, Artificial Sequence
  Synthetic
aaucauuugaacccaggag

SEQ ID NO: 310667 - RNA, 20 nt, Artificial Sequence
  Synthetic
gaaucauuugaacccaggag

SEQ ID NO: 310668 - RNA, 21 nt, Artificial Sequence
  Synthetic
agaaucauuugaacccaggag

SEQ ID NO: 310669 - RNA, 22 nt, Artificial Sequence
  Synthetic
gagaaucauuugaacccaggag

SEQ ID NO: 310670 - RNA, 23 nt, Artificial Sequence
  Synthetic
ggagaaucauuugaacccaggag

SEQ ID NO: 310671 - RNA, 24 nt, Artificial Sequence
  Synthetic
aggagaaucauuugaacccaggag

SEQ ID NO: 310672 - RNA, 18 nt, Artificial Sequence
  Synthetic
aucguuugaacccaggag

SEQ ID NO: 310673 - RNA, 19 nt, Artificial Sequence
  Synthetic
aaucguuugaacccaggag

SEQ ID NO: 310674 - RNA, 20 nt, Artificial Sequence
  Synthetic
gaaucguuugaacccaggag

SEQ ID NO: 310675 - RNA, 21 nt, Artificial Sequence
  Synthetic
agaaucguuugaacccaggag

SEQ ID NO: 310676 - RNA, 22 nt, Artificial Sequence
  Synthetic
gagaaucguuugaacccaggag

SEQ ID NO: 310677 - RNA, 23 nt, Artificial Sequence
  Synthetic
ggagaaucguuugaacccaggag

SEQ ID NO: 310678 - RNA, 24 nt, Artificial Sequence
  Synthetic
aggagaaucguuugaacccaggag

SEQ ID NO: 310679 - RNA, 18 nt, Artificial Sequence
  Synthetic
auuucuugagcccaggag

SEQ ID NO: 310680 - RNA, 19 nt, Artificial Sequence
  Synthetic
aauuucuugagcccaggag

SEQ ID NO: 310681 - RNA, 20 nt, Artificial Sequence
  Synthetic
gaauuucuugagcccaggag

SEQ ID NO: 310682 - RNA, 21 nt, Artificial Sequence
  Synthetic
agaauuucuugagcccaggag

SEQ ID NO: 310683 - RNA, 22 nt, Artificial Sequence
  Synthetic
gagaauuucuugagcccaggag

SEQ ID NO: 310684 - RNA, 23 nt, Artificial Sequence
  Synthetic
ggagaauuucuugagcccaggag

SEQ ID NO: 310685 - RNA, 24 nt, Artificial Sequence
  Synthetic
gggagaauuucuugagcccaggag

SEQ ID NO: 310686 - RNA, 18 nt, Artificial Sequence
  Synthetic
agagguaagugccaggag

SEQ ID NO: 310687 - RNA, 19 nt, Artificial Sequence
  Synthetic
gagagguaagugccaggag

SEQ ID NO: 310688 - RNA, 20 nt, Artificial Sequence
  Synthetic
ggagagguaagugccaggag

SEQ ID NO: 310689 - RNA, 21 nt, Artificial Sequence
  Synthetic
uggagagguaagugccaggag

SEQ ID NO: 310690 - RNA, 22 nt, Artificial Sequence
  Synthetic
auggagagguaagugccaggag

SEQ ID NO: 310691 - RNA, 23 nt, Artificial Sequence
  Synthetic
gauggagagguaagugccaggag

SEQ ID NO: 310692 - RNA, 24 nt, Artificial Sequence
  Synthetic
ugauggagagguaagugccaggag

SEQ ID NO: 310693 - RNA, 18 nt, Artificial Sequence
  Synthetic
gagaguguuguccaggag

SEQ ID NO: 310694 - RNA, 19 nt, Artificial Sequence
  Synthetic
ggagaguguuguccaggag

SEQ ID NO: 310695 - RNA, 20 nt, Artificial Sequence
  Synthetic
uggagaguguuguccaggag

SEQ ID NO: 310696 - RNA, 21 nt, Artificial Sequence
  Synthetic
uuggagaguguuguccaggag

SEQ ID NO: 310697 - RNA, 22 nt, Artificial Sequence
  Synthetic
auuggagaguguuguccaggag

SEQ ID NO: 310698 - RNA, 23 nt, Artificial Sequence
  Synthetic
gauuggagaguguuguccaggag

SEQ ID NO: 310699 - RNA, 24 nt, Artificial Sequence
  Synthetic
ugauuggagaguguuguccaggag

SEQ ID NO: 310700 - RNA, 18 nt, Artificial Sequence
  Synthetic
gagauuggagagcaggag

SEQ ID NO: 310701 - RNA, 19 nt, Artificial Sequence
  Synthetic
ggagauuggagagcaggag

SEQ ID NO: 310702 - RNA, 20 nt, Artificial Sequence
  Synthetic
aggagauuggagagcaggag

SEQ ID NO: 310703 - RNA, 21 nt, Artificial Sequence
  Synthetic
caggagauuggagagcaggag

SEQ ID NO: 310704 - RNA, 22 nt, Artificial Sequence
  Synthetic
gcaggagauuggagagcaggag

SEQ ID NO: 310705 - RNA, 23 nt, Artificial Sequence
  Synthetic
ggcaggagauuggagagcaggag

SEQ ID NO: 310706 - RNA, 24 nt, Artificial Sequence
  Synthetic
uggcaggagauuggagagcaggag

SEQ ID NO: 310707 - RNA, 18 nt, Artificial Sequence
  Synthetic
gaggaggaggagcaggag

SEQ ID NO: 310708 - RNA, 19 nt, Artificial Sequence
  Synthetic
ggaggaggaggagcaggag

SEQ ID NO: 310709 - RNA, 20 nt, Artificial Sequence
  Synthetic
aggaggaggaggagcaggag

SEQ ID NO: 310710 - RNA, 21 nt, Artificial Sequence
  Synthetic
caggaggaggaggagcaggag

SEQ ID NO: 310711 - RNA, 22 nt, Artificial Sequence
  Synthetic
gcaggaggaggaggagcaggag

SEQ ID NO: 310712 - RNA, 23 nt, Artificial Sequence
  Synthetic
ggcaggaggaggaggagcaggag

SEQ ID NO: 310713 - RNA, 24 nt, Artificial Sequence
  Synthetic
aggcaggaggaggaggagcaggag

SEQ ID NO: 310714 - RNA, 18 nt, Artificial Sequence
  Synthetic
agggcaaucaggcaggag

SEQ ID NO: 310715 - RNA, 19 nt, Artificial Sequence
  Synthetic
cagggcaaucaggcaggag

SEQ ID NO: 310716 - RNA, 20 nt, Artificial Sequence
  Synthetic
ccagggcaaucaggcaggag

SEQ ID NO: 310717 - RNA, 18 nt, Artificial Sequence
  Synthetic
gagagauguaggcaggag

SEQ ID NO: 310718 - RNA, 19 nt, Artificial Sequence
  Synthetic
agagagauguaggcaggag

SEQ ID NO: 310719 - RNA, 20 nt, Artificial Sequence
  Synthetic
gagagagauguaggcaggag

SEQ ID NO: 310720 - RNA, 21 nt, Artificial Sequence
  Synthetic
agagagagauguaggcaggag

SEQ ID NO: 310721 - RNA, 22 nt, Artificial Sequence
  Synthetic
gagagagagauguaggcaggag

SEQ ID NO: 310722 - RNA, 23 nt, Artificial Sequence
  Synthetic
ggagagagagauguaggcaggag

SEQ ID NO: 310723 - RNA, 24 nt, Artificial Sequence
  Synthetic
gggagagagagauguaggcaggag

SEQ ID NO: 310724 - RNA, 18 nt, Artificial Sequence
  Synthetic
gaggagaagcggcaggag

SEQ ID NO: 310725 - RNA, 19 nt, Artificial Sequence
  Synthetic
ggaggagaagcggcaggag

SEQ ID NO: 310726 - RNA, 20 nt, Artificial Sequence
  Synthetic
aggaggagaagcggcaggag

SEQ ID NO: 310727 - RNA, 21 nt, Artificial Sequence
  Synthetic
gaggaggagaagcggcaggag

SEQ ID NO: 310728 - RNA, 22 nt, Artificial Sequence
  Synthetic
ugaggaggagaagcggcaggag

SEQ ID NO: 310729 - RNA, 23 nt, Artificial Sequence
  Synthetic
gugaggaggagaagcggcaggag

SEQ ID NO: 310730 - RNA, 24 nt, Artificial Sequence
  Synthetic
agugaggaggagaagcggcaggag

SEQ ID NO: 310731 - RNA, 18 nt, Artificial Sequence
  Synthetic
agcuguugguggcaggag

SEQ ID NO: 310732 - RNA, 19 nt, Artificial Sequence
  Synthetic
aagcuguugguggcaggag

SEQ ID NO: 310733 - RNA, 20 nt, Artificial Sequence
  Synthetic
uaagcuguugguggcaggag

SEQ ID NO: 310734 - RNA, 21 nt, Artificial Sequence
  Synthetic
auaagcuguugguggcaggag

SEQ ID NO: 310735 - RNA, 22 nt, Artificial Sequence
  Synthetic
aauaagcuguugguggcaggag

SEQ ID NO: 310736 - RNA, 23 nt, Artificial Sequence
  Synthetic
aaauaagcuguugguggcaggag

SEQ ID NO: 310737 - RNA, 24 nt, Artificial Sequence
  Synthetic
caaauaagcuguugguggcaggag

SEQ ID NO: 310738 - RNA, 18 nt, Artificial Sequence
  Synthetic
uuagacaaggugcaggag

SEQ ID NO: 310739 - RNA, 19 nt, Artificial Sequence
  Synthetic
cuuagacaaggugcaggag

SEQ ID NO: 310740 - RNA, 20 nt, Artificial Sequence
  Synthetic
ucuuagacaaggugcaggag

SEQ ID NO: 310741 - RNA, 21 nt, Artificial Sequence
  Synthetic
aucuuagacaaggugcaggag

SEQ ID NO: 310742 - RNA, 22 nt, Artificial Sequence
  Synthetic
uaucuuagacaaggugcaggag

SEQ ID NO: 310743 - RNA, 23 nt, Artificial Sequence
  Synthetic
uuaucuuagacaaggugcaggag

SEQ ID NO: 310744 - RNA, 24 nt, Artificial Sequence
  Synthetic
guuaucuuagacaaggugcaggag

SEQ ID NO: 310745 - RNA, 18 nt, Artificial Sequence
  Synthetic
ggggccccacaucaggag

SEQ ID NO: 310746 - RNA, 19 nt, Artificial Sequence
  Synthetic
cggggccccacaucaggag

SEQ ID NO: 310747 - RNA, 20 nt, Artificial Sequence
  Synthetic
ccggggccccacaucaggag

SEQ ID NO: 310748 - RNA, 21 nt, Artificial Sequence
  Synthetic
accggggccccacaucaggag

SEQ ID NO: 310749 - RNA, 22 nt, Artificial Sequence
  Synthetic
aaccggggccccacaucaggag

SEQ ID NO: 310750 - RNA, 23 nt, Artificial Sequence
  Synthetic
gaaccggggccccacaucaggag

SEQ ID NO: 310751 - RNA, 24 nt, Artificial Sequence
  Synthetic
ggaaccggggccccacaucaggag

SEQ ID NO: 310752 - RNA, 18 nt, Artificial Sequence
  Synthetic
caccugauguaucaggag

SEQ ID NO: 310753 - RNA, 19 nt, Artificial Sequence
  Synthetic
gcaccugauguaucaggag

SEQ ID NO: 310754 - RNA, 20 nt, Artificial Sequence
  Synthetic
agcaccugauguaucaggag

SEQ ID NO: 310755 - RNA, 21 nt, Artificial Sequence
  Synthetic
gagcaccugauguaucaggag

SEQ ID NO: 310756 - RNA, 22 nt, Artificial Sequence
  Synthetic
agagcaccugauguaucaggag

SEQ ID NO: 310757 - RNA, 23 nt, Artificial Sequence
  Synthetic
uagagcaccugauguaucaggag

SEQ ID NO: 310758 - RNA, 24 nt, Artificial Sequence
  Synthetic
auagagcaccugauguaucaggag

SEQ ID NO: 310759 - RNA, 18 nt, Artificial Sequence
  Synthetic
agaucacgaggucaggag

SEQ ID NO: 310760 - RNA, 19 nt, Artificial Sequence
  Synthetic
cagaucacgaggucaggag

SEQ ID NO: 310761 - RNA, 20 nt, Artificial Sequence
  Synthetic
gcagaucacgaggucaggag

SEQ ID NO: 310762 - RNA, 21 nt, Artificial Sequence
  Synthetic
ggcagaucacgaggucaggag

SEQ ID NO: 310763 - RNA, 22 nt, Artificial Sequence
  Synthetic
gggcagaucacgaggucaggag

SEQ ID NO: 310764 - RNA, 23 nt, Artificial Sequence
  Synthetic
cgggcagaucacgaggucaggag

SEQ ID NO: 310765 - RNA, 24 nt, Artificial Sequence
  Synthetic
gcgggcagaucacgaggucaggag

SEQ ID NO: 310766 - RNA, 18 nt, Artificial Sequence
  Synthetic
uuagucaggaaagaggag

SEQ ID NO: 310767 - RNA, 19 nt, Artificial Sequence
  Synthetic
uuuagucaggaaagaggag

SEQ ID NO: 310768 - RNA, 20 nt, Artificial Sequence
  Synthetic
cuuuagucaggaaagaggag

SEQ ID NO: 310769 - RNA, 21 nt, Artificial Sequence
  Synthetic
acuuuagucaggaaagaggag

SEQ ID NO: 310770 - RNA, 22 nt, Artificial Sequence
  Synthetic
aacuuuagucaggaaagaggag

SEQ ID NO: 310771 - RNA, 23 nt, Artificial Sequence
  Synthetic
aaacuuuagucaggaaagaggag

SEQ ID NO: 310772 - RNA, 24 nt, Artificial Sequence
  Synthetic
gaaacuuuagucaggaaagaggag

SEQ ID NO: 310773 - RNA, 18 nt, Artificial Sequence
  Synthetic
gaccaagcuaaagaggag

SEQ ID NO: 310774 - RNA, 19 nt, Artificial Sequence
  Synthetic
agaccaagcuaaagaggag

SEQ ID NO: 310775 - RNA, 20 nt, Artificial Sequence
  Synthetic
gagaccaagcuaaagaggag

SEQ ID NO: 310776 - RNA, 21 nt, Artificial Sequence
  Synthetic
agagaccaagcuaaagaggag

SEQ ID NO: 310777 - RNA, 22 nt, Artificial Sequence
  Synthetic
aagagaccaagcuaaagaggag

SEQ ID NO: 310778 - RNA, 23 nt, Artificial Sequence
  Synthetic
caagagaccaagcuaaagaggag

SEQ ID NO: 310779 - RNA, 24 nt, Artificial Sequence
  Synthetic
ucaagagaccaagcuaaagaggag

SEQ ID NO: 310780 - RNA, 18 nt, Artificial Sequence
  Synthetic
auuugaguucaagaggag

SEQ ID NO: 310781 - RNA, 19 nt, Artificial Sequence
  Synthetic
uauuugaguucaagaggag

SEQ ID NO: 310782 - RNA, 20 nt, Artificial Sequence
  Synthetic
guauuugaguucaagaggag

SEQ ID NO: 310783 - RNA, 21 nt, Artificial Sequence
  Synthetic
uguauuugaguucaagaggag

SEQ ID NO: 310784 - RNA, 22 nt, Artificial Sequence
  Synthetic
auguauuugaguucaagaggag

SEQ ID NO: 310785 - RNA, 23 nt, Artificial Sequence
  Synthetic
aauguauuugaguucaagaggag

SEQ ID NO: 310786 - RNA, 24 nt, Artificial Sequence
  Synthetic
gaauguauuugaguucaagaggag

SEQ ID NO: 310787 - RNA, 18 nt, Artificial Sequence
  Synthetic
cgcauuugggaagaggag

SEQ ID NO: 310788 - RNA, 19 nt, Artificial Sequence
  Synthetic
acgcauuugggaagaggag

SEQ ID NO: 310789 - RNA, 20 nt, Artificial Sequence
  Synthetic
gacgcauuugggaagaggag

SEQ ID NO: 310790 - RNA, 21 nt, Artificial Sequence
  Synthetic
agacgcauuugggaagaggag

SEQ ID NO: 310791 - RNA, 22 nt, Artificial Sequence
  Synthetic
gagacgcauuugggaagaggag

SEQ ID NO: 310792 - RNA, 23 nt, Artificial Sequence
  Synthetic
ggagacgcauuugggaagaggag

SEQ ID NO: 310793 - RNA, 24 nt, Artificial Sequence
  Synthetic
aggagacgcauuugggaagaggag

SEQ ID NO: 310794 - RNA, 18 nt, Artificial Sequence
  Synthetic
aaugaggacacagaggag

SEQ ID NO: 310795 - RNA, 19 nt, Artificial Sequence
  Synthetic
aaaugaggacacagaggag

SEQ ID NO: 310796 - RNA, 20 nt, Artificial Sequence
  Synthetic
caaaugaggacacagaggag

SEQ ID NO: 310797 - RNA, 21 nt, Artificial Sequence
  Synthetic
acaaaugaggacacagaggag

SEQ ID NO: 310798 - RNA, 22 nt, Artificial Sequence
  Synthetic
uacaaaugaggacacagaggag

SEQ ID NO: 310799 - RNA, 23 nt, Artificial Sequence
  Synthetic
uuacaaaugaggacacagaggag

SEQ ID NO: 310800 - RNA, 24 nt, Artificial Sequence
  Synthetic
uuuacaaaugaggacacagaggag

SEQ ID NO: 310801 - RNA, 18 nt, Artificial Sequence
  Synthetic
uagguaggggcagaggag

SEQ ID NO: 310802 - RNA, 19 nt, Artificial Sequence
  Synthetic
uuagguaggggcagaggag

SEQ ID NO: 310803 - RNA, 20 nt, Artificial Sequence
  Synthetic
uuuagguaggggcagaggag

SEQ ID NO: 310804 - RNA, 21 nt, Artificial Sequence
  Synthetic
guuuagguaggggcagaggag

SEQ ID NO: 310805 - RNA, 22 nt, Artificial Sequence
  Synthetic
aguuuagguaggggcagaggag

SEQ ID NO: 310806 - RNA, 23 nt, Artificial Sequence
  Synthetic
gaguuuagguaggggcagaggag

SEQ ID NO: 310807 - RNA, 24 nt, Artificial Sequence
  Synthetic
ugaguuuagguaggggcagaggag

SEQ ID NO: 310808 - RNA, 18 nt, Artificial Sequence
  Synthetic
caguagucuucagaggag

SEQ ID NO: 310809 - RNA, 19 nt, Artificial Sequence
  Synthetic
gcaguagucuucagaggag

SEQ ID NO: 310810 - RNA, 20 nt, Artificial Sequence
  Synthetic
agcaguagucuucagaggag

SEQ ID NO: 310811 - RNA, 21 nt, Artificial Sequence
  Synthetic
cagcaguagucuucagaggag

SEQ ID NO: 310812 - RNA, 22 nt, Artificial Sequence
  Synthetic
ucagcaguagucuucagaggag

SEQ ID NO: 310813 - RNA, 23 nt, Artificial Sequence
  Synthetic
aucagcaguagucuucagaggag

SEQ ID NO: 310814 - RNA, 24 nt, Artificial Sequence
  Synthetic
aaucagcaguagucuucagaggag

SEQ ID NO: 310815 - RNA, 18 nt, Artificial Sequence
  Synthetic
gagagacagagagaggag

SEQ ID NO: 310816 - RNA, 19 nt, Artificial Sequence
  Synthetic
agagagacagagagaggag

SEQ ID NO: 310817 - RNA, 20 nt, Artificial Sequence
  Synthetic
uagagagacagagagaggag

SEQ ID NO: 310818 - RNA, 21 nt, Artificial Sequence
  Synthetic
uuagagagacagagagaggag

SEQ ID NO: 310819 - RNA, 22 nt, Artificial Sequence
  Synthetic
uuuagagagacagagagaggag

SEQ ID NO: 310820 - RNA, 23 nt, Artificial Sequence
  Synthetic
uuuuagagagacagagagaggag

SEQ ID NO: 310821 - RNA, 24 nt, Artificial Sequence
  Synthetic
auuuuagagagacagagagaggag

SEQ ID NO: 310822 - RNA, 18 nt, Artificial Sequence
  Synthetic
augggagggagagaggag

SEQ ID NO: 310823 - RNA, 19 nt, Artificial Sequence
  Synthetic
uaugggagggagagaggag

SEQ ID NO: 310824 - RNA, 20 nt, Artificial Sequence
  Synthetic
uuaugggagggagagaggag

SEQ ID NO: 310825 - RNA, 21 nt, Artificial Sequence
  Synthetic
auuaugggagggagagaggag

SEQ ID NO: 310826 - RNA, 22 nt, Artificial Sequence
  Synthetic
cauuaugggagggagagaggag

SEQ ID NO: 310827 - RNA, 23 nt, Artificial Sequence
  Synthetic
ccauuaugggagggagagaggag

SEQ ID NO: 310828 - RNA, 24 nt, Artificial Sequence
  Synthetic
gccauuaugggagggagagaggag

SEQ ID NO: 310829 - RNA, 18 nt, Artificial Sequence
  Synthetic
acaaccucuauagaggag

SEQ ID NO: 310830 - RNA, 19 nt, Artificial Sequence
  Synthetic
gacaaccucuauagaggag

SEQ ID NO: 310831 - RNA, 20 nt, Artificial Sequence
  Synthetic
agacaaccucuauagaggag

SEQ ID NO: 310832 - RNA, 21 nt, Artificial Sequence
  Synthetic
aagacaaccucuauagaggag

SEQ ID NO: 310833 - RNA, 22 nt, Artificial Sequence
  Synthetic
gaagacaaccucuauagaggag

SEQ ID NO: 310834 - RNA, 23 nt, Artificial Sequence
  Synthetic
ugaagacaaccucuauagaggag

SEQ ID NO: 310835 - RNA, 24 nt, Artificial Sequence
  Synthetic
uugaagacaaccucuauagaggag

SEQ ID NO: 310836 - RNA, 18 nt, Artificial Sequence
  Synthetic
uuuggauuauacgaggag

SEQ ID NO: 310837 - RNA, 19 nt, Artificial Sequence
  Synthetic
guuuggauuauacgaggag

SEQ ID NO: 310838 - RNA, 20 nt, Artificial Sequence
  Synthetic
aguuuggauuauacgaggag

SEQ ID NO: 310839 - RNA, 21 nt, Artificial Sequence
  Synthetic
aaguuuggauuauacgaggag

SEQ ID NO: 310840 - RNA, 22 nt, Artificial Sequence
  Synthetic
aaaguuuggauuauacgaggag

SEQ ID NO: 310841 - RNA, 23 nt, Artificial Sequence
  Synthetic
aaaaguuuggauuauacgaggag

SEQ ID NO: 310842 - RNA, 24 nt, Artificial Sequence
  Synthetic
caaaaguuuggauuauacgaggag

SEQ ID NO: 310843 - RNA, 18 nt, Artificial Sequence
  Synthetic
gcacuccgaaaggaggag

SEQ ID NO: 310844 - RNA, 19 nt, Artificial Sequence
  Synthetic
ggcacuccgaaaggaggag

SEQ ID NO: 310845 - RNA, 20 nt, Artificial Sequence
  Synthetic
aggcacuccgaaaggaggag

SEQ ID NO: 310846 - RNA, 21 nt, Artificial Sequence
  Synthetic
uaggcacuccgaaaggaggag

SEQ ID NO: 310847 - RNA, 22 nt, Artificial Sequence
  Synthetic
uuaggcacuccgaaaggaggag

SEQ ID NO: 310848 - RNA, 23 nt, Artificial Sequence
  Synthetic
auuaggcacuccgaaaggaggag

SEQ ID NO: 310849 - RNA, 24 nt, Artificial Sequence
  Synthetic
aauuaggcacuccgaaaggaggag

SEQ ID NO: 310850 - RNA, 18 nt, Artificial Sequence
  Synthetic
gaggaggagcaggaggag

SEQ ID NO: 310851 - RNA, 19 nt, Artificial Sequence
  Synthetic
ggaggaggagcaggaggag

SEQ ID NO: 310852 - RNA, 20 nt, Artificial Sequence
  Synthetic
aggaggaggagcaggaggag

SEQ ID NO: 310853 - RNA, 21 nt, Artificial Sequence
  Synthetic
gaggaggaggagcaggaggag

SEQ ID NO: 310854 - RNA, 22 nt, Artificial Sequence
  Synthetic
ggaggaggaggagcaggaggag

SEQ ID NO: 310855 - RNA, 23 nt, Artificial Sequence
  Synthetic
aggaggaggaggagcaggaggag

SEQ ID NO: 310856 - RNA, 24 nt, Artificial Sequence
  Synthetic
caggaggaggaggagcaggaggag

SEQ ID NO: 310857 - RNA, 18 nt, Artificial Sequence
  Synthetic
agauguaggcaggaggag

SEQ ID NO: 310858 - RNA, 19 nt, Artificial Sequence
  Synthetic
gagauguaggcaggaggag

SEQ ID NO: 310859 - RNA, 20 nt, Artificial Sequence
  Synthetic
agagauguaggcaggaggag

SEQ ID NO: 310860 - RNA, 21 nt, Artificial Sequence
  Synthetic
gagagauguaggcaggaggag

SEQ ID NO: 310861 - RNA, 22 nt, Artificial Sequence
  Synthetic
agagagauguaggcaggaggag

SEQ ID NO: 310862 - RNA, 23 nt, Artificial Sequence
  Synthetic
gagagagauguaggcaggaggag

SEQ ID NO: 310863 - RNA, 24 nt, Artificial Sequence
  Synthetic
agagagagauguaggcaggaggag

SEQ ID NO: 310864 - RNA, 18 nt, Artificial Sequence
  Synthetic
aggcaggaggaggaggag

SEQ ID NO: 310865 - RNA, 19 nt, Artificial Sequence
  Synthetic
uaggcaggaggaggaggag

SEQ ID NO: 310866 - RNA, 20 nt, Artificial Sequence
  Synthetic
guaggcaggaggaggaggag

SEQ ID NO: 310867 - RNA, 21 nt, Artificial Sequence
  Synthetic
uguaggcaggaggaggaggag

SEQ ID NO: 310868 - RNA, 22 nt, Artificial Sequence
  Synthetic
auguaggcaggaggaggaggag

SEQ ID NO: 310869 - RNA, 23 nt, Artificial Sequence
  Synthetic
gauguaggcaggaggaggaggag

SEQ ID NO: 310870 - RNA, 24 nt, Artificial Sequence
  Synthetic
agauguaggcaggaggaggaggag

SEQ ID NO: 310871 - RNA, 18 nt, Artificial Sequence
  Synthetic
aaaaaaagugaggaggag

SEQ ID NO: 310872 - RNA, 19 nt, Artificial Sequence
  Synthetic
aaaaaaaagugaggaggag

SEQ ID NO: 310873 - RNA, 20 nt, Artificial Sequence
  Synthetic
uaaaaaaaagugaggaggag

SEQ ID NO: 310874 - RNA, 21 nt, Artificial Sequence
  Synthetic
auaaaaaaaagugaggaggag

SEQ ID NO: 310875 - RNA, 22 nt, Artificial Sequence
  Synthetic
uauaaaaaaaagugaggaggag

SEQ ID NO: 310876 - RNA, 23 nt, Artificial Sequence
  Synthetic
guauaaaaaaaagugaggaggag

SEQ ID NO: 310877 - RNA, 24 nt, Artificial Sequence
  Synthetic
gguauaaaaaaaagugaggaggag

SEQ ID NO: 310878 - RNA, 18 nt, Artificial Sequence
  Synthetic
agagagggacgggaggag

SEQ ID NO: 310879 - RNA, 19 nt, Artificial Sequence
  Synthetic
aagagagggacgggaggag

SEQ ID NO: 310880 - RNA, 20 nt, Artificial Sequence
  Synthetic
aaagagagggacgggaggag

SEQ ID NO: 310881 - RNA, 21 nt, Artificial Sequence
  Synthetic
gaaagagagggacgggaggag

SEQ ID NO: 310882 - RNA, 22 nt, Artificial Sequence
  Synthetic
agaaagagagggacgggaggag

SEQ ID NO: 310883 - RNA, 23 nt, Artificial Sequence
  Synthetic
gagaaagagagggacgggaggag

SEQ ID NO: 310884 - RNA, 24 nt, Artificial Sequence
  Synthetic
agagaaagagagggacgggaggag

SEQ ID NO: 310885 - RNA, 18 nt, Artificial Sequence
  Synthetic
uuguuguggguggaggag

SEQ ID NO: 310886 - RNA, 19 nt, Artificial Sequence
  Synthetic
uuuguuguggguggaggag

SEQ ID NO: 310887 - RNA, 20 nt, Artificial Sequence
  Synthetic
guuuguuguggguggaggag

SEQ ID NO: 310888 - RNA, 21 nt, Artificial Sequence
  Synthetic
gguuuguuguggguggaggag

SEQ ID NO: 310889 - RNA, 22 nt, Artificial Sequence
  Synthetic
agguuuguuguggguggaggag

SEQ ID NO: 310890 - RNA, 23 nt, Artificial Sequence
  Synthetic
aagguuuguuguggguggaggag

SEQ ID NO: 310891 - RNA, 24 nt, Artificial Sequence
  Synthetic
gaagguuuguuguggguggaggag

SEQ ID NO: 310892 - RNA, 18 nt, Artificial Sequence
  Synthetic
gucuagaauuuggaggag

SEQ ID NO: 310893 - RNA, 19 nt, Artificial Sequence
  Synthetic
ugucuagaauuuggaggag

SEQ ID NO: 310894 - RNA, 20 nt, Artificial Sequence
  Synthetic
augucuagaauuuggaggag

SEQ ID NO: 310895 - RNA, 21 nt, Artificial Sequence
  Synthetic
aaugucuagaauuuggaggag

SEQ ID NO: 310896 - RNA, 22 nt, Artificial Sequence
  Synthetic
uaaugucuagaauuuggaggag

SEQ ID NO: 310897 - RNA, 23 nt, Artificial Sequence
  Synthetic
cuaaugucuagaauuuggaggag

SEQ ID NO: 310898 - RNA, 24 nt, Artificial Sequence
  Synthetic
gcuaaugucuagaauuuggaggag

SEQ ID NO: 310899 - RNA, 18 nt, Artificial Sequence
  Synthetic
guuggggauuuggaggag

SEQ ID NO: 310900 - RNA, 19 nt, Artificial Sequence
  Synthetic
aguuggggauuuggaggag

SEQ ID NO: 310901 - RNA, 20 nt, Artificial Sequence
  Synthetic
aaguuggggauuuggaggag

SEQ ID NO: 310902 - RNA, 21 nt, Artificial Sequence
  Synthetic
caaguuggggauuuggaggag

SEQ ID NO: 310903 - RNA, 22 nt, Artificial Sequence
  Synthetic
ucaaguuggggauuuggaggag

SEQ ID NO: 310904 - RNA, 23 nt, Artificial Sequence
  Synthetic
gucaaguuggggauuuggaggag

SEQ ID NO: 310905 - RNA, 24 nt, Artificial Sequence
  Synthetic
ggucaaguuggggauuuggaggag

SEQ ID NO: 310906 - RNA, 18 nt, Artificial Sequence
  Synthetic
gaguuccagacugaggag

SEQ ID NO: 310907 - RNA, 19 nt, Artificial Sequence
  Synthetic
ugaguuccagacugaggag

SEQ ID NO: 310908 - RNA, 20 nt, Artificial Sequence
  Synthetic
augaguuccagacugaggag

SEQ ID NO: 310909 - RNA, 21 nt, Artificial Sequence
  Synthetic
uaugaguuccagacugaggag

SEQ ID NO: 310910 - RNA, 22 nt, Artificial Sequence
  Synthetic
guaugaguuccagacugaggag

SEQ ID NO: 310911 - RNA, 23 nt, Artificial Sequence
  Synthetic
aguaugaguuccagacugaggag

SEQ ID NO: 310912 - RNA, 24 nt, Artificial Sequence
  Synthetic
gaguaugaguuccagacugaggag

SEQ ID NO: 310913 - RNA, 18 nt, Artificial Sequence
  Synthetic
guuaaguaggcugaggag

SEQ ID NO: 310914 - RNA, 19 nt, Artificial Sequence
  Synthetic
cguuaaguaggcugaggag

SEQ ID NO: 310915 - RNA, 20 nt, Artificial Sequence
  Synthetic
acguuaaguaggcugaggag

SEQ ID NO: 310916 - RNA, 21 nt, Artificial Sequence
  Synthetic
cacguuaaguaggcugaggag

SEQ ID NO: 310917 - RNA, 22 nt, Artificial Sequence
  Synthetic
ucacguuaaguaggcugaggag

SEQ ID NO: 310918 - RNA, 23 nt, Artificial Sequence
  Synthetic
uucacguuaaguaggcugaggag

SEQ ID NO: 310919 - RNA, 24 nt, Artificial Sequence
  Synthetic
cuucacguuaaguaggcugaggag

SEQ ID NO: 310920 - RNA, 18 nt, Artificial Sequence
  Synthetic
gcaaucuucucugaggag

SEQ ID NO: 310921 - RNA, 19 nt, Artificial Sequence
  Synthetic
agcaaucuucucugaggag

SEQ ID NO: 310922 - RNA, 20 nt, Artificial Sequence
  Synthetic
aagcaaucuucucugaggag

SEQ ID NO: 310923 - RNA, 21 nt, Artificial Sequence
  Synthetic
uaagcaaucuucucugaggag

SEQ ID NO: 310924 - RNA, 22 nt, Artificial Sequence
  Synthetic
uuaagcaaucuucucugaggag

SEQ ID NO: 310925 - RNA, 23 nt, Artificial Sequence
  Synthetic
auuaagcaaucuucucugaggag

SEQ ID NO: 310926 - RNA, 24 nt, Artificial Sequence
  Synthetic
gauuaagcaaucuucucugaggag

SEQ ID NO: 310927 - RNA, 18 nt, Artificial Sequence
  Synthetic
gagauugcuucugaggag

SEQ ID NO: 310928 - RNA, 19 nt, Artificial Sequence
  Synthetic
agagauugcuucugaggag

SEQ ID NO: 310929 - RNA, 20 nt, Artificial Sequence
  Synthetic
aagagauugcuucugaggag

SEQ ID NO: 310930 - RNA, 21 nt, Artificial Sequence
  Synthetic
aaagagauugcuucugaggag

SEQ ID NO: 310931 - RNA, 22 nt, Artificial Sequence
  Synthetic
aaaagagauugcuucugaggag

SEQ ID NO: 310932 - RNA, 23 nt, Artificial Sequence
  Synthetic
uaaaagagauugcuucugaggag

SEQ ID NO: 310933 - RNA, 24 nt, Artificial Sequence
  Synthetic
uuaaaagagauugcuucugaggag

SEQ ID NO: 310934 - RNA, 18 nt, Artificial Sequence
  Synthetic
auaaaaaaaagugaggag

SEQ ID NO: 310935 - RNA, 19 nt, Artificial Sequence
  Synthetic
uauaaaaaaaagugaggag

SEQ ID NO: 310936 - RNA, 20 nt, Artificial Sequence
  Synthetic
guauaaaaaaaagugaggag

SEQ ID NO: 310937 - RNA, 21 nt, Artificial Sequence
  Synthetic
gguauaaaaaaaagugaggag

SEQ ID NO: 310938 - RNA, 22 nt, Artificial Sequence
  Synthetic
ggguauaaaaaaaagugaggag

SEQ ID NO: 310939 - RNA, 23 nt, Artificial Sequence
  Synthetic
uggguauaaaaaaaagugaggag

SEQ ID NO: 310940 - RNA, 24 nt, Artificial Sequence
  Synthetic
auggguauaaaaaaaagugaggag

SEQ ID NO: 310941 - RNA, 18 nt, Artificial Sequence
  Synthetic
aagcuugaaagugaggag

SEQ ID NO: 310942 - RNA, 19 nt, Artificial Sequence
  Synthetic
uaagcuugaaagugaggag

SEQ ID NO: 310943 - RNA, 20 nt, Artificial Sequence
  Synthetic
cuaagcuugaaagugaggag

SEQ ID NO: 310944 - RNA, 21 nt, Artificial Sequence
  Synthetic
gcuaagcuugaaagugaggag

SEQ ID NO: 310945 - RNA, 22 nt, Artificial Sequence
  Synthetic
agcuaagcuugaaagugaggag

SEQ ID NO: 310946 - RNA, 23 nt, Artificial Sequence
  Synthetic
gagcuaagcuugaaagugaggag

SEQ ID NO: 310947 - RNA, 24 nt, Artificial Sequence
  Synthetic
ggagcuaagcuugaaagugaggag

SEQ ID NO: 310948 - RNA, 18 nt, Artificial Sequence
  Synthetic
uuuggcuuaagugaggag

SEQ ID NO: 310949 - RNA, 19 nt, Artificial Sequence
  Synthetic
guuuggcuuaagugaggag

SEQ ID NO: 310950 - RNA, 20 nt, Artificial Sequence
  Synthetic
gguuuggcuuaagugaggag

SEQ ID NO: 310951 - RNA, 21 nt, Artificial Sequence
  Synthetic
agguuuggcuuaagugaggag

SEQ ID NO: 310952 - RNA, 22 nt, Artificial Sequence
  Synthetic
uagguuuggcuuaagugaggag

SEQ ID NO: 310953 - RNA, 23 nt, Artificial Sequence
  Synthetic
uuagguuuggcuuaagugaggag

SEQ ID NO: 310954 - RNA, 24 nt, Artificial Sequence
  Synthetic
uuuagguuuggcuuaagugaggag

SEQ ID NO: 310955 - RNA, 18 nt, Artificial Sequence
  Synthetic
acucccuccagugaggag

SEQ ID NO: 310956 - RNA, 19 nt, Artificial Sequence
  Synthetic
cacucccuccagugaggag

SEQ ID NO: 310957 - RNA, 20 nt, Artificial Sequence
  Synthetic
acacucccuccagugaggag

SEQ ID NO: 310958 - RNA, 21 nt, Artificial Sequence
  Synthetic
cacacucccuccagugaggag

SEQ ID NO: 310959 - RNA, 22 nt, Artificial Sequence
  Synthetic
gcacacucccuccagugaggag

SEQ ID NO: 310960 - RNA, 23 nt, Artificial Sequence
  Synthetic
ugcacacucccuccagugaggag

SEQ ID NO: 310961 - RNA, 24 nt, Artificial Sequence
  Synthetic
uugcacacucccuccagugaggag

SEQ ID NO: 310962 - RNA, 18 nt, Artificial Sequence
  Synthetic
gcaagauauauugaggag

SEQ ID NO: 310963 - RNA, 19 nt, Artificial Sequence
  Synthetic
ggcaagauauauugaggag

SEQ ID NO: 310964 - RNA, 20 nt, Artificial Sequence
  Synthetic
aggcaagauauauugaggag

SEQ ID NO: 310965 - RNA, 21 nt, Artificial Sequence
  Synthetic
aaggcaagauauauugaggag

SEQ ID NO: 310966 - RNA, 22 nt, Artificial Sequence
  Synthetic
gaaggcaagauauauugaggag

SEQ ID NO: 310967 - RNA, 23 nt, Artificial Sequence
  Synthetic
ugaaggcaagauauauugaggag

SEQ ID NO: 310968 - RNA, 24 nt, Artificial Sequence
  Synthetic
uugaaggcaagauauauugaggag

SEQ ID NO: 310969 - RNA, 18 nt, Artificial Sequence
  Synthetic
uucuagaucuuugaggag

SEQ ID NO: 310970 - RNA, 19 nt, Artificial Sequence
  Synthetic
guucuagaucuuugaggag

SEQ ID NO: 310971 - RNA, 20 nt, Artificial Sequence
  Synthetic
gguucuagaucuuugaggag

SEQ ID NO: 310972 - RNA, 21 nt, Artificial Sequence
  Synthetic
ugguucuagaucuuugaggag

SEQ ID NO: 310973 - RNA, 22 nt, Artificial Sequence
  Synthetic
cugguucuagaucuuugaggag

SEQ ID NO: 310974 - RNA, 23 nt, Artificial Sequence
  Synthetic
ucugguucuagaucuuugaggag

SEQ ID NO: 310975 - RNA, 24 nt, Artificial Sequence
  Synthetic
uucugguucuagaucuuugaggag

SEQ ID NO: 310976 - RNA, 18 nt, Artificial Sequence
  Synthetic
ugaguaacaaaauaggag

SEQ ID NO: 310977 - RNA, 19 nt, Artificial Sequence
  Synthetic
uugaguaacaaaauaggag

SEQ ID NO: 310978 - RNA, 20 nt, Artificial Sequence
  Synthetic
auugaguaacaaaauaggag

SEQ ID NO: 310979 - RNA, 21 nt, Artificial Sequence
  Synthetic
aauugaguaacaaaauaggag

SEQ ID NO: 310980 - RNA, 22 nt, Artificial Sequence
  Synthetic
aaauugaguaacaaaauaggag

SEQ ID NO: 310981 - RNA, 23 nt, Artificial Sequence
  Synthetic
aaaauugaguaacaaaauaggag

SEQ ID NO: 310982 - RNA, 24 nt, Artificial Sequence
  Synthetic
aaaaauugaguaacaaaauaggag

SEQ ID NO: 310983 - RNA, 18 nt, Artificial Sequence
  Synthetic
uaaauagaggaauaggag

SEQ ID NO: 310984 - RNA, 19 nt, Artificial Sequence
  Synthetic
cuaaauagaggaauaggag

SEQ ID NO: 310985 - RNA, 20 nt, Artificial Sequence
  Synthetic
ucuaaauagaggaauaggag

SEQ ID NO: 310986 - RNA, 21 nt, Artificial Sequence
  Synthetic
uucuaaauagaggaauaggag

SEQ ID NO: 310987 - RNA, 22 nt, Artificial Sequence
  Synthetic
uuucuaaauagaggaauaggag

SEQ ID NO: 310988 - RNA, 23 nt, Artificial Sequence
  Synthetic
guuucuaaauagaggaauaggag

SEQ ID NO: 310989 - RNA, 24 nt, Artificial Sequence
  Synthetic
gguuucuaaauagaggaauaggag

SEQ ID NO: 310990 - RNA, 18 nt, Artificial Sequence
  Synthetic
gucccaaagaccuaggag

SEQ ID NO: 310991 - RNA, 19 nt, Artificial Sequence
  Synthetic
agucccaaagaccuaggag

SEQ ID NO: 310992 - RNA, 20 nt, Artificial Sequence
  Synthetic
gagucccaaagaccuaggag

SEQ ID NO: 310993 - RNA, 21 nt, Artificial Sequence
  Synthetic
agagucccaaagaccuaggag

SEQ ID NO: 310994 - RNA, 22 nt, Artificial Sequence
  Synthetic
aagagucccaaagaccuaggag

SEQ ID NO: 310995 - RNA, 23 nt, Artificial Sequence
  Synthetic
aaagagucccaaagaccuaggag

SEQ ID NO: 310996 - RNA, 24 nt, Artificial Sequence
  Synthetic
aaaagagucccaaagaccuaggag

SEQ ID NO: 310997 - RNA, 18 nt, Artificial Sequence
  Synthetic
aaacguauucccuaggag

SEQ ID NO: 310998 - RNA, 19 nt, Artificial Sequence
  Synthetic
uaaacguauucccuaggag

SEQ ID NO: 310999 - RNA, 20 nt, Artificial Sequence
  Synthetic
guaaacguauucccuaggag

SEQ ID NO: 311000 - RNA, 21 nt, Artificial Sequence
  Synthetic
uguaaacguauucccuaggag

SEQ ID NO: 311001 - RNA, 22 nt, Artificial Sequence
  Synthetic
auguaaacguauucccuaggag

SEQ ID NO: 311002 - RNA, 23 nt, Artificial Sequence
  Synthetic
aauguaaacguauucccuaggag

SEQ ID NO: 311003 - RNA, 24 nt, Artificial Sequence
  Synthetic
aaauguaaacguauucccuaggag

SEQ ID NO: 311004 - RNA, 18 nt, Artificial Sequence
  Synthetic
gaaguagauugcuaggag

SEQ ID NO: 311005 - RNA, 19 nt, Artificial Sequence
  Synthetic
agaaguagauugcuaggag

SEQ ID NO: 311006 - RNA, 20 nt, Artificial Sequence
  Synthetic
gagaaguagauugcuaggag

SEQ ID NO: 311007 - RNA, 21 nt, Artificial Sequence
  Synthetic
ugagaaguagauugcuaggag

SEQ ID NO: 311008 - RNA, 22 nt, Artificial Sequence
  Synthetic
augagaaguagauugcuaggag

SEQ ID NO: 311009 - RNA, 23 nt, Artificial Sequence
  Synthetic
uaugagaaguagauugcuaggag

SEQ ID NO: 311010 - RNA, 24 nt, Artificial Sequence
  Synthetic
uuaugagaaguagauugcuaggag

SEQ ID NO: 311011 - RNA, 18 nt, Artificial Sequence
  Synthetic
guagauuuuuucuaggag

SEQ ID NO: 311012 - RNA, 19 nt, Artificial Sequence
  Synthetic
aguagauuuuuucuaggag

SEQ ID NO: 311013 - RNA, 20 nt, Artificial Sequence
  Synthetic
gaguagauuuuuucuaggag

SEQ ID NO: 311014 - RNA, 21 nt, Artificial Sequence
  Synthetic
agaguagauuuuuucuaggag

SEQ ID NO: 311015 - RNA, 22 nt, Artificial Sequence
  Synthetic
gagaguagauuuuuucuaggag

SEQ ID NO: 311016 - RNA, 23 nt, Artificial Sequence
  Synthetic
agagaguagauuuuuucuaggag

SEQ ID NO: 311017 - RNA, 24 nt, Artificial Sequence
  Synthetic
uagagaguagauuuuuucuaggag

SEQ ID NO: 311018 - RNA, 18 nt, Artificial Sequence
  Synthetic
guuaaaauguaguaggag

SEQ ID NO: 311019 - RNA, 19 nt, Artificial Sequence
  Synthetic
gguuaaaauguaguaggag

SEQ ID NO: 311020 - RNA, 20 nt, Artificial Sequence
  Synthetic
agguuaaaauguaguaggag

SEQ ID NO: 311021 - RNA, 21 nt, Artificial Sequence
  Synthetic
uagguuaaaauguaguaggag

SEQ ID NO: 311022 - RNA, 22 nt, Artificial Sequence
  Synthetic
guagguuaaaauguaguaggag

SEQ ID NO: 311023 - RNA, 23 nt, Artificial Sequence
  Synthetic
gguagguuaaaauguaguaggag

SEQ ID NO: 311024 - RNA, 24 nt, Artificial Sequence
  Synthetic
ugguagguuaaaauguaguaggag

SEQ ID NO: 311025 - RNA, 18 nt, Artificial Sequence
  Synthetic
cuagggaguggguaggag

SEQ ID NO: 311026 - RNA, 19 nt, Artificial Sequence
  Synthetic
gcuagggaguggguaggag

SEQ ID NO: 311027 - RNA, 20 nt, Artificial Sequence
  Synthetic
ggcuagggaguggguaggag

SEQ ID NO: 311028 - RNA, 21 nt, Artificial Sequence
  Synthetic
aggcuagggaguggguaggag

SEQ ID NO: 311029 - RNA, 22 nt, Artificial Sequence
  Synthetic
caggcuagggaguggguaggag

SEQ ID NO: 311030 - RNA, 23 nt, Artificial Sequence
  Synthetic
acaggcuagggaguggguaggag

SEQ ID NO: 311031 - RNA, 24 nt, Artificial Sequence
  Synthetic
uacaggcuagggaguggguaggag

SEQ ID NO: 311032 - RNA, 18 nt, Artificial Sequence
  Synthetic
uguuauuugugguaggag

SEQ ID NO: 311033 - RNA, 19 nt, Artificial Sequence
  Synthetic
uuguuauuugugguaggag

SEQ ID NO: 311034 - RNA, 20 nt, Artificial Sequence
  Synthetic
cuuguuauuugugguaggag

SEQ ID NO: 311035 - RNA, 21 nt, Artificial Sequence
  Synthetic
acuuguuauuugugguaggag

SEQ ID NO: 311036 - RNA, 22 nt, Artificial Sequence
  Synthetic
aacuuguuauuugugguaggag

SEQ ID NO: 311037 - RNA, 23 nt, Artificial Sequence
  Synthetic
uaacuuguuauuugugguaggag

SEQ ID NO: 311038 - RNA, 24 nt, Artificial Sequence
  Synthetic
auaacuuguuauuugugguaggag

SEQ ID NO: 311039 - RNA, 18 nt, Artificial Sequence
  Synthetic
guuauaaauuauuaggag

SEQ ID NO: 311040 - RNA, 19 nt, Artificial Sequence
  Synthetic
uguuauaaauuauuaggag

SEQ ID NO: 311041 - RNA, 20 nt, Artificial Sequence
  Synthetic
auguuauaaauuauuaggag

SEQ ID NO: 311042 - RNA, 21 nt, Artificial Sequence
  Synthetic
gauguuauaaauuauuaggag

SEQ ID NO: 311043 - RNA, 22 nt, Artificial Sequence
  Synthetic
agauguuauaaauuauuaggag

SEQ ID NO: 311044 - RNA, 23 nt, Artificial Sequence
  Synthetic
aagauguuauaaauuauuaggag

SEQ ID NO: 311045 - RNA, 24 nt, Artificial Sequence
  Synthetic
gaagauguuauaaauuauuaggag

SEQ ID NO: 311046 - RNA, 18 nt, Artificial Sequence
  Synthetic
uauaaaugaaguuaggag

SEQ ID NO: 311047 - RNA, 19 nt, Artificial Sequence
  Synthetic
uuauaaaugaaguuaggag

SEQ ID NO: 311048 - RNA, 20 nt, Artificial Sequence
  Synthetic
auuauaaaugaaguuaggag

SEQ ID NO: 311049 - RNA, 21 nt, Artificial Sequence
  Synthetic
gauuauaaaugaaguuaggag

SEQ ID NO: 311050 - RNA, 22 nt, Artificial Sequence
  Synthetic
ugauuauaaaugaaguuaggag

SEQ ID NO: 311051 - RNA, 23 nt, Artificial Sequence
  Synthetic
uugauuauaaaugaaguuaggag

SEQ ID NO: 311052 - RNA, 24 nt, Artificial Sequence
  Synthetic
cuugauuauaaaugaaguuaggag

SEQ ID NO: 311053 - RNA, 18 nt, Artificial Sequence
  Synthetic
uguuuguuuauuuaggag

SEQ ID NO: 311054 - RNA, 19 nt, Artificial Sequence
  Synthetic
uuguuuguuuauuuaggag

SEQ ID NO: 311055 - RNA, 20 nt, Artificial Sequence
  Synthetic
uuuguuuguuuauuuaggag

SEQ ID NO: 311056 - RNA, 21 nt, Artificial Sequence
  Synthetic
auuuguuuguuuauuuaggag

SEQ ID NO: 311057 - RNA, 22 nt, Artificial Sequence
  Synthetic
cauuuguuuguuuauuuaggag

SEQ ID NO: 311058 - RNA, 23 nt, Artificial Sequence
  Synthetic
ucauuuguuuguuuauuuaggag

SEQ ID NO: 311059 - RNA, 24 nt, Artificial Sequence
  Synthetic
uucauuuguuuguuuauuuaggag

SEQ ID NO: 311060 - RNA, 18 nt, Artificial Sequence
  Synthetic
acucuugagcuuuaggag

SEQ ID NO: 311061 - RNA, 19 nt, Artificial Sequence
  Synthetic
cacucuugagcuuuaggag

SEQ ID NO: 311062 - RNA, 20 nt, Artificial Sequence
  Synthetic
ucacucuugagcuuuaggag

SEQ ID NO: 311063 - RNA, 21 nt, Artificial Sequence
  Synthetic
uucacucuugagcuuuaggag

SEQ ID NO: 311064 - RNA, 22 nt, Artificial Sequence
  Synthetic
uuucacucuugagcuuuaggag

SEQ ID NO: 311065 - RNA, 23 nt, Artificial Sequence
  Synthetic
cuuucacucuugagcuuuaggag

SEQ ID NO: 311066 - RNA, 24 nt, Artificial Sequence
  Synthetic
ccuuucacucuugagcuuuaggag

SEQ ID NO: 311067 - RNA, 18 nt, Artificial Sequence
  Synthetic
auuguucuagccacggag

SEQ ID NO: 311068 - RNA, 19 nt, Artificial Sequence
  Synthetic
aauuguucuagccacggag

SEQ ID NO: 311069 - RNA, 20 nt, Artificial Sequence
  Synthetic
gaauuguucuagccacggag

SEQ ID NO: 311070 - RNA, 21 nt, Artificial Sequence
  Synthetic
ugaauuguucuagccacggag

SEQ ID NO: 311071 - RNA, 22 nt, Artificial Sequence
  Synthetic
augaauuguucuagccacggag

SEQ ID NO: 311072 - RNA, 23 nt, Artificial Sequence
  Synthetic
gaugaauuguucuagccacggag

SEQ ID NO: 311073 - RNA, 24 nt, Artificial Sequence
  Synthetic
agaugaauuguucuagccacggag

SEQ ID NO: 311074 - RNA, 18 nt, Artificial Sequence
  Synthetic
aagcggcaggagacggag

SEQ ID NO: 311075 - RNA, 19 nt, Artificial Sequence
  Synthetic
gaagcggcaggagacggag

SEQ ID NO: 311076 - RNA, 20 nt, Artificial Sequence
  Synthetic
agaagcggcaggagacggag

SEQ ID NO: 311077 - RNA, 21 nt, Artificial Sequence
  Synthetic
gagaagcggcaggagacggag

SEQ ID NO: 311078 - RNA, 22 nt, Artificial Sequence
  Synthetic
ggagaagcggcaggagacggag

SEQ ID NO: 311079 - RNA, 23 nt, Artificial Sequence
  Synthetic
aggagaagcggcaggagacggag

SEQ ID NO: 311080 - RNA, 24 nt, Artificial Sequence
  Synthetic
gaggagaagcggcaggagacggag

SEQ ID NO: 311081 - RNA, 18 nt, Artificial Sequence
  Synthetic
ucagcuagagauacggag

SEQ ID NO: 311082 - RNA, 19 nt, Artificial Sequence
  Synthetic
uucagcuagagauacggag

SEQ ID NO: 311083 - RNA, 20 nt, Artificial Sequence
  Synthetic
guucagcuagagauacggag

SEQ ID NO: 311084 - RNA, 21 nt, Artificial Sequence
  Synthetic
gguucagcuagagauacggag

SEQ ID NO: 311085 - RNA, 22 nt, Artificial Sequence
  Synthetic
ugguucagcuagagauacggag

SEQ ID NO: 311086 - RNA, 23 nt, Artificial Sequence
  Synthetic
gugguucagcuagagauacggag

SEQ ID NO: 311087 - RNA, 24 nt, Artificial Sequence
  Synthetic
ggugguucagcuagagauacggag

SEQ ID NO: 311088 - RNA, 18 nt, Artificial Sequence
  Synthetic
caagaaugugacucggag

SEQ ID NO: 311089 - RNA, 19 nt, Artificial Sequence
  Synthetic
acaagaaugugacucggag

SEQ ID NO: 311090 - RNA, 20 nt, Artificial Sequence
  Synthetic
cacaagaaugugacucggag

SEQ ID NO: 311091 - RNA, 21 nt, Artificial Sequence
  Synthetic
ucacaagaaugugacucggag

SEQ ID NO: 311092 - RNA, 22 nt, Artificial Sequence
  Synthetic
uucacaagaaugugacucggag

SEQ ID NO: 311093 - RNA, 23 nt, Artificial Sequence
  Synthetic
auucacaagaaugugacucggag

SEQ ID NO: 311094 - RNA, 24 nt, Artificial Sequence
  Synthetic
aauucacaagaaugugacucggag

SEQ ID NO: 311095 - RNA, 18 nt, Artificial Sequence
  Synthetic
uucaaaggggcaagggag

SEQ ID NO: 311096 - RNA, 19 nt, Artificial Sequence
  Synthetic
uuucaaaggggcaagggag

SEQ ID NO: 311097 - RNA, 20 nt, Artificial Sequence
  Synthetic
cuuucaaaggggcaagggag

SEQ ID NO: 311098 - RNA, 21 nt, Artificial Sequence
  Synthetic
ucuuucaaaggggcaagggag

SEQ ID NO: 311099 - RNA, 22 nt, Artificial Sequence
  Synthetic
uucuuucaaaggggcaagggag

SEQ ID NO: 311100 - RNA, 23 nt, Artificial Sequence
  Synthetic
auucuuucaaaggggcaagggag

SEQ ID NO: 311101 - RNA, 24 nt, Artificial Sequence
  Synthetic
uauucuuucaaaggggcaagggag

SEQ ID NO: 311102 - RNA, 18 nt, Artificial Sequence
  Synthetic
uaguaacccagaagggag

SEQ ID NO: 311103 - RNA, 19 nt, Artificial Sequence
  Synthetic
uuaguaacccagaagggag

SEQ ID NO: 311104 - RNA, 20 nt, Artificial Sequence
  Synthetic
cuuaguaacccagaagggag

SEQ ID NO: 311105 - RNA, 21 nt, Artificial Sequence
  Synthetic
ucuuaguaacccagaagggag

SEQ ID NO: 311106 - RNA, 22 nt, Artificial Sequence
  Synthetic
gucuuaguaacccagaagggag

SEQ ID NO: 311107 - RNA, 23 nt, Artificial Sequence
  Synthetic
ggucuuaguaacccagaagggag

SEQ ID NO: 311108 - RNA, 24 nt, Artificial Sequence
  Synthetic
gggucuuaguaacccagaagggag

SEQ ID NO: 311109 - RNA, 18 nt, Artificial Sequence
  Synthetic
acuguugagagaagggag

SEQ ID NO: 311110 - RNA, 19 nt, Artificial Sequence
  Synthetic
cacuguugagagaagggag

SEQ ID NO: 311111 - RNA, 20 nt, Artificial Sequence
  Synthetic
ucacuguugagagaagggag

SEQ ID NO: 311112 - RNA, 21 nt, Artificial Sequence
  Synthetic
cucacuguugagagaagggag

SEQ ID NO: 311113 - RNA, 22 nt, Artificial Sequence
  Synthetic
acucacuguugagagaagggag

SEQ ID NO: 311114 - RNA, 23 nt, Artificial Sequence
  Synthetic
gacucacuguugagagaagggag

SEQ ID NO: 311115 - RNA, 24 nt, Artificial Sequence
  Synthetic
agacucacuguugagagaagggag

SEQ ID NO: 311116 - RNA, 18 nt, Artificial Sequence
  Synthetic
acaugagcuagaagggag

SEQ ID NO: 311117 - RNA, 19 nt, Artificial Sequence
  Synthetic
uacaugagcuagaagggag

SEQ ID NO: 311118 - RNA, 20 nt, Artificial Sequence
  Synthetic
auacaugagcuagaagggag

SEQ ID NO: 311119 - RNA, 21 nt, Artificial Sequence
  Synthetic
aauacaugagcuagaagggag

SEQ ID NO: 311120 - RNA, 22 nt, Artificial Sequence
  Synthetic
uaauacaugagcuagaagggag

SEQ ID NO: 311121 - RNA, 23 nt, Artificial Sequence
  Synthetic
uuaauacaugagcuagaagggag

SEQ ID NO: 311122 - RNA, 24 nt, Artificial Sequence
  Synthetic
guuaauacaugagcuagaagggag

SEQ ID NO: 311123 - RNA, 18 nt, Artificial Sequence
  Synthetic
aucacuugaaccagggag

SEQ ID NO: 311124 - RNA, 19 nt, Artificial Sequence
  Synthetic
aaucacuugaaccagggag

SEQ ID NO: 311125 - RNA, 20 nt, Artificial Sequence
  Synthetic
gaaucacuugaaccagggag

SEQ ID NO: 311126 - RNA, 21 nt, Artificial Sequence
  Synthetic
agaaucacuugaaccagggag

SEQ ID NO: 311127 - RNA, 22 nt, Artificial Sequence
  Synthetic
gagaaucacuugaaccagggag

SEQ ID NO: 311128 - RNA, 23 nt, Artificial Sequence
  Synthetic
ggagaaucacuugaaccagggag

SEQ ID NO: 311129 - RNA, 24 nt, Artificial Sequence
  Synthetic
aggagaaucacuugaaccagggag

SEQ ID NO: 311130 - RNA, 18 nt, Artificial Sequence
  Synthetic
aaacauuugcccagggag

SEQ ID NO: 311131 - RNA, 19 nt, Artificial Sequence
  Synthetic
gaaacauuugcccagggag

SEQ ID NO: 311132 - RNA, 20 nt, Artificial Sequence
  Synthetic
ugaaacauuugcccagggag

SEQ ID NO: 311133 - RNA, 21 nt, Artificial Sequence
  Synthetic
uugaaacauuugcccagggag

SEQ ID NO: 311134 - RNA, 22 nt, Artificial Sequence
  Synthetic
uuugaaacauuugcccagggag

SEQ ID NO: 311135 - RNA, 23 nt, Artificial Sequence
  Synthetic
cuuugaaacauuugcccagggag

SEQ ID NO: 311136 - RNA, 24 nt, Artificial Sequence
  Synthetic
acuuugaaacauuugcccagggag

SEQ ID NO: 311137 - RNA, 18 nt, Artificial Sequence
  Synthetic
accgcuugagccagggag

SEQ ID NO: 311138 - RNA, 19 nt, Artificial Sequence
  Synthetic
aaccgcuugagccagggag

SEQ ID NO: 311139 - RNA, 20 nt, Artificial Sequence
  Synthetic
gaaccgcuugagccagggag

SEQ ID NO: 311140 - RNA, 21 nt, Artificial Sequence
  Synthetic
agaaccgcuugagccagggag

SEQ ID NO: 311141 - RNA, 22 nt, Artificial Sequence
  Synthetic
gagaaccgcuugagccagggag

SEQ ID NO: 311142 - RNA, 23 nt, Artificial Sequence
  Synthetic
ggagaaccgcuugagccagggag

SEQ ID NO: 311143 - RNA, 24 nt, Artificial Sequence
  Synthetic
aggagaaccgcuugagccagggag

SEQ ID NO: 311144 - RNA, 18 nt, Artificial Sequence
  Synthetic
augguuacuuccagggag

SEQ ID NO: 311145 - RNA, 19 nt, Artificial Sequence
  Synthetic
aaugguuacuuccagggag

SEQ ID NO: 311146 - RNA, 20 nt, Artificial Sequence
  Synthetic
gaaugguuacuuccagggag

SEQ ID NO: 311147 - RNA, 21 nt, Artificial Sequence
  Synthetic
agaaugguuacuuccagggag

SEQ ID NO: 311148 - RNA, 22 nt, Artificial Sequence
  Synthetic
gagaaugguuacuuccagggag

SEQ ID NO: 311149 - RNA, 23 nt, Artificial Sequence
  Synthetic
ggagaaugguuacuuccagggag

SEQ ID NO: 311150 - RNA, 24 nt, Artificial Sequence
  Synthetic
aggagaaugguuacuuccagggag

SEQ ID NO: 311151 - RNA, 18 nt, Artificial Sequence
  Synthetic
gaacaacuaagcagggag

SEQ ID NO: 311152 - RNA, 19 nt, Artificial Sequence
  Synthetic
agaacaacuaagcagggag

SEQ ID NO: 311153 - RNA, 20 nt, Artificial Sequence
  Synthetic
gagaacaacuaagcagggag

SEQ ID NO: 311154 - RNA, 21 nt, Artificial Sequence
  Synthetic
agagaacaacuaagcagggag

SEQ ID NO: 311155 - RNA, 22 nt, Artificial Sequence
  Synthetic
cagagaacaacuaagcagggag

SEQ ID NO: 311156 - RNA, 23 nt, Artificial Sequence
  Synthetic
acagagaacaacuaagcagggag

SEQ ID NO: 311157 - RNA, 24 nt, Artificial Sequence
  Synthetic
uacagagaacaacuaagcagggag

SEQ ID NO: 311158 - RNA, 18 nt, Artificial Sequence
  Synthetic
gugagcuggagcagggag

SEQ ID NO: 311159 - RNA, 19 nt, Artificial Sequence
  Synthetic
agugagcuggagcagggag

SEQ ID NO: 311160 - RNA, 20 nt, Artificial Sequence
  Synthetic
aagugagcuggagcagggag

SEQ ID NO: 311161 - RNA, 21 nt, Artificial Sequence
  Synthetic
aaagugagcuggagcagggag

SEQ ID NO: 311162 - RNA, 22 nt, Artificial Sequence
  Synthetic
aaaagugagcuggagcagggag

SEQ ID NO: 311163 - RNA, 23 nt, Artificial Sequence
  Synthetic
gaaaagugagcuggagcagggag

SEQ ID NO: 311164 - RNA, 24 nt, Artificial Sequence
  Synthetic
ggaaaagugagcuggagcagggag

SEQ ID NO: 311165 - RNA, 18 nt, Artificial Sequence
  Synthetic
gggaaguuuagcagggag

SEQ ID NO: 311166 - RNA, 19 nt, Artificial Sequence
  Synthetic
agggaaguuuagcagggag

SEQ ID NO: 311167 - RNA, 20 nt, Artificial Sequence
  Synthetic
uagggaaguuuagcagggag

SEQ ID NO: 311168 - RNA, 21 nt, Artificial Sequence
  Synthetic
cuagggaaguuuagcagggag

SEQ ID NO: 311169 - RNA, 22 nt, Artificial Sequence
  Synthetic
ucuagggaaguuuagcagggag

SEQ ID NO: 311170 - RNA, 23 nt, Artificial Sequence
  Synthetic
aucuagggaaguuuagcagggag

SEQ ID NO: 311171 - RNA, 24 nt, Artificial Sequence
  Synthetic
gaucuagggaaguuuagcagggag

SEQ ID NO: 311172 - RNA, 18 nt, Artificial Sequence
  Synthetic
gguuuuaccuucagggag

SEQ ID NO: 311173 - RNA, 19 nt, Artificial Sequence
  Synthetic
agguuuuaccuucagggag

SEQ ID NO: 311174 - RNA, 20 nt, Artificial Sequence
  Synthetic
aagguuuuaccuucagggag

SEQ ID NO: 311175 - RNA, 21 nt, Artificial Sequence
  Synthetic
caagguuuuaccuucagggag

SEQ ID NO: 311176 - RNA, 22 nt, Artificial Sequence
  Synthetic
gcaagguuuuaccuucagggag

SEQ ID NO: 311177 - RNA, 23 nt, Artificial Sequence
  Synthetic
ugcaagguuuuaccuucagggag

SEQ ID NO: 311178 - RNA, 24 nt, Artificial Sequence
  Synthetic
uugcaagguuuuaccuucagggag

SEQ ID NO: 311179 - RNA, 18 nt, Artificial Sequence
  Synthetic
ggagagaggcagagggag

SEQ ID NO: 311180 - RNA, 19 nt, Artificial Sequence
  Synthetic
aggagagaggcagagggag

SEQ ID NO: 311181 - RNA, 20 nt, Artificial Sequence
  Synthetic
gaggagagaggcagagggag

SEQ ID NO: 311182 - RNA, 21 nt, Artificial Sequence
  Synthetic
ggaggagagaggcagagggag

SEQ ID NO: 311183 - RNA, 22 nt, Artificial Sequence
  Synthetic
aggaggagagaggcagagggag

SEQ ID NO: 311184 - RNA, 23 nt, Artificial Sequence
  Synthetic
aaggaggagagaggcagagggag

SEQ ID NO: 311185 - RNA, 24 nt, Artificial Sequence
  Synthetic
caaggaggagagaggcagagggag

SEQ ID NO: 311186 - RNA, 18 nt, Artificial Sequence
  Synthetic
guggagagagagagggag

SEQ ID NO: 311187 - RNA, 19 nt, Artificial Sequence
  Synthetic
aguggagagagagagggag

SEQ ID NO: 311188 - RNA, 20 nt, Artificial Sequence
  Synthetic
aaguggagagagagagggag

SEQ ID NO: 311189 - RNA, 21 nt, Artificial Sequence
  Synthetic
caaguggagagagagagggag

SEQ ID NO: 311190 - RNA, 22 nt, Artificial Sequence
  Synthetic
acaaguggagagagagagggag

SEQ ID NO: 311191 - RNA, 23 nt, Artificial Sequence
  Synthetic
aacaaguggagagagagagggag

SEQ ID NO: 311192 - RNA, 24 nt, Artificial Sequence
  Synthetic
aaacaaguggagagagagagggag

SEQ ID NO: 311193 - RNA, 18 nt, Artificial Sequence
  Synthetic
aaggcaagaaggagggag

SEQ ID NO: 311194 - RNA, 19 nt, Artificial Sequence
  Synthetic
uaaggcaagaaggagggag

SEQ ID NO: 311195 - RNA, 20 nt, Artificial Sequence
  Synthetic
uuaaggcaagaaggagggag

SEQ ID NO: 311196 - RNA, 21 nt, Artificial Sequence
  Synthetic
uuuaaggcaagaaggagggag

SEQ ID NO: 311197 - RNA, 22 nt, Artificial Sequence
  Synthetic
uuuuaaggcaagaaggagggag

SEQ ID NO: 311198 - RNA, 23 nt, Artificial Sequence
  Synthetic
guuuuaaggcaagaaggagggag

SEQ ID NO: 311199 - RNA, 24 nt, Artificial Sequence
  Synthetic
uguuuuaaggcaagaaggagggag

SEQ ID NO: 311200 - RNA, 18 nt, Artificial Sequence
  Synthetic
uauuacauaaggagggag

SEQ ID NO: 311201 - RNA, 19 nt, Artificial Sequence
  Synthetic
cuauuacauaaggagggag

SEQ ID NO: 311202 - RNA, 20 nt, Artificial Sequence
  Synthetic
gcuauuacauaaggagggag

SEQ ID NO: 311203 - RNA, 21 nt, Artificial Sequence
  Synthetic
ggcuauuacauaaggagggag

SEQ ID NO: 311204 - RNA, 22 nt, Artificial Sequence
  Synthetic
aggcuauuacauaaggagggag

SEQ ID NO: 311205 - RNA, 23 nt, Artificial Sequence
  Synthetic
caggcuauuacauaaggagggag

SEQ ID NO: 311206 - RNA, 24 nt, Artificial Sequence
  Synthetic
acaggcuauuacauaaggagggag

SEQ ID NO: 311207 - RNA, 18 nt, Artificial Sequence
  Synthetic
cuggcucaagggagggag

SEQ ID NO: 311208 - RNA, 19 nt, Artificial Sequence
  Synthetic
ccuggcucaagggagggag

SEQ ID NO: 311209 - RNA, 20 nt, Artificial Sequence
  Synthetic
uccuggcucaagggagggag

SEQ ID NO: 311210 - RNA, 21 nt, Artificial Sequence
  Synthetic
uuccuggcucaagggagggag

SEQ ID NO: 311211 - RNA, 22 nt, Artificial Sequence
  Synthetic
cuuccuggcucaagggagggag

SEQ ID NO: 311212 - RNA, 23 nt, Artificial Sequence
  Synthetic
acuuccuggcucaagggagggag

SEQ ID NO: 311213 - RNA, 24 nt, Artificial Sequence
  Synthetic
uacuuccuggcucaagggagggag

SEQ ID NO: 311214 - RNA, 18 nt, Artificial Sequence
  Synthetic
aaggaggaggggagggag

SEQ ID NO: 311215 - RNA, 19 nt, Artificial Sequence
  Synthetic
aaaggaggaggggagggag

SEQ ID NO: 311216 - RNA, 20 nt, Artificial Sequence
  Synthetic
gaaaggaggaggggagggag

SEQ ID NO: 311217 - RNA, 21 nt, Artificial Sequence
  Synthetic
cgaaaggaggaggggagggag

SEQ ID NO: 311218 - RNA, 22 nt, Artificial Sequence
  Synthetic
ccgaaaggaggaggggagggag

SEQ ID NO: 311219 - RNA, 23 nt, Artificial Sequence
  Synthetic
uccgaaaggaggaggggagggag

SEQ ID NO: 311220 - RNA, 24 nt, Artificial Sequence
  Synthetic
cuccgaaaggaggaggggagggag

SEQ ID NO: 311221 - RNA, 18 nt, Artificial Sequence
  Synthetic
cugaggagguggagggag

SEQ ID NO: 311222 - RNA, 19 nt, Artificial Sequence
  Synthetic
gcugaggagguggagggag

SEQ ID NO: 311223 - RNA, 20 nt, Artificial Sequence
  Synthetic
ggcugaggagguggagggag

SEQ ID NO: 311224 - RNA, 21 nt, Artificial Sequence
  Synthetic
aggcugaggagguggagggag

SEQ ID NO: 311225 - RNA, 22 nt, Artificial Sequence
  Synthetic
uaggcugaggagguggagggag

SEQ ID NO: 311226 - RNA, 23 nt, Artificial Sequence
  Synthetic
guaggcugaggagguggagggag

SEQ ID NO: 311227 - RNA, 24 nt, Artificial Sequence
  Synthetic
aguaggcugaggagguggagggag

SEQ ID NO: 311228 - RNA, 18 nt, Artificial Sequence
  Synthetic
uucagaauuaugagggag

SEQ ID NO: 311229 - RNA, 19 nt, Artificial Sequence
  Synthetic
auucagaauuaugagggag

SEQ ID NO: 311230 - RNA, 20 nt, Artificial Sequence
  Synthetic
aauucagaauuaugagggag

SEQ ID NO: 311231 - RNA, 21 nt, Artificial Sequence
  Synthetic
caauucagaauuaugagggag

SEQ ID NO: 311232 - RNA, 22 nt, Artificial Sequence
  Synthetic
acaauucagaauuaugagggag

SEQ ID NO: 311233 - RNA, 23 nt, Artificial Sequence
  Synthetic
uacaauucagaauuaugagggag

SEQ ID NO: 311234 - RNA, 24 nt, Artificial Sequence
  Synthetic
guacaauucagaauuaugagggag

SEQ ID NO: 311235 - RNA, 18 nt, Artificial Sequence
  Synthetic
cccuuucuuaugagggag

SEQ ID NO: 311236 - RNA, 19 nt, Artificial Sequence
  Synthetic
ucccuuucuuaugagggag

SEQ ID NO: 311237 - RNA, 20 nt, Artificial Sequence
  Synthetic
uucccuuucuuaugagggag

SEQ ID NO: 311238 - RNA, 21 nt, Artificial Sequence
  Synthetic
guucccuuucuuaugagggag

SEQ ID NO: 311239 - RNA, 22 nt, Artificial Sequence
  Synthetic
uguucccuuucuuaugagggag

SEQ ID NO: 311240 - RNA, 23 nt, Artificial Sequence
  Synthetic
cuguucccuuucuuaugagggag

SEQ ID NO: 311241 - RNA, 24 nt, Artificial Sequence
  Synthetic
acuguucccuuucuuaugagggag

SEQ ID NO: 311242 - RNA, 18 nt, Artificial Sequence
  Synthetic
guuuacagaacuagggag

SEQ ID NO: 311243 - RNA, 19 nt, Artificial Sequence
  Synthetic
gguuuacagaacuagggag

SEQ ID NO: 311244 - RNA, 20 nt, Artificial Sequence
  Synthetic
agguuuacagaacuagggag

SEQ ID NO: 311245 - RNA, 21 nt, Artificial Sequence
  Synthetic
aagguuuacagaacuagggag

SEQ ID NO: 311246 - RNA, 22 nt, Artificial Sequence
  Synthetic
aaagguuuacagaacuagggag

SEQ ID NO: 311247 - RNA, 23 nt, Artificial Sequence
  Synthetic
aaaagguuuacagaacuagggag

SEQ ID NO: 311248 - RNA, 24 nt, Artificial Sequence
  Synthetic
caaaagguuuacagaacuagggag

SEQ ID NO: 311249 - RNA, 18 nt, Artificial Sequence
  Synthetic
uaucaguuuucuagggag

SEQ ID NO: 311250 - RNA, 19 nt, Artificial Sequence
  Synthetic
uuaucaguuuucuagggag

SEQ ID NO: 311251 - RNA, 20 nt, Artificial Sequence
  Synthetic
uuuaucaguuuucuagggag

SEQ ID NO: 311252 - RNA, 21 nt, Artificial Sequence
  Synthetic
cuuuaucaguuuucuagggag

SEQ ID NO: 311253 - RNA, 22 nt, Artificial Sequence
  Synthetic
acuuuaucaguuuucuagggag

SEQ ID NO: 311254 - RNA, 23 nt, Artificial Sequence
  Synthetic
aacuuuaucaguuuucuagggag

SEQ ID NO: 311255 - RNA, 24 nt, Artificial Sequence
  Synthetic
caacuuuaucaguuuucuagggag

SEQ ID NO: 311256 - RNA, 18 nt, Artificial Sequence
  Synthetic
gaguugagaaguagggag

SEQ ID NO: 311257 - RNA, 19 nt, Artificial Sequence
  Synthetic
ugaguugagaaguagggag

SEQ ID NO: 311258 - RNA, 20 nt, Artificial Sequence
  Synthetic
gugaguugagaaguagggag

SEQ ID NO: 311259 - RNA, 21 nt, Artificial Sequence
  Synthetic
ggugaguugagaaguagggag

SEQ ID NO: 311260 - RNA, 22 nt, Artificial Sequence
  Synthetic
uggugaguugagaaguagggag

SEQ ID NO: 311261 - RNA, 23 nt, Artificial Sequence
  Synthetic
guggugaguugagaaguagggag

SEQ ID NO: 311262 - RNA, 24 nt, Artificial Sequence
  Synthetic
gguggugaguugagaaguagggag

SEQ ID NO: 311263 - RNA, 18 nt, Artificial Sequence
  Synthetic
gaaagagagggacgggag

SEQ ID NO: 311264 - RNA, 19 nt, Artificial Sequence
  Synthetic
agaaagagagggacgggag

SEQ ID NO: 311265 - RNA, 20 nt, Artificial Sequence
  Synthetic
gagaaagagagggacgggag

SEQ ID NO: 311266 - RNA, 21 nt, Artificial Sequence
  Synthetic
agagaaagagagggacgggag

SEQ ID NO: 311267 - RNA, 22 nt, Artificial Sequence
  Synthetic
gagagaaagagagggacgggag

SEQ ID NO: 311268 - RNA, 23 nt, Artificial Sequence
  Synthetic
ugagagaaagagagggacgggag

SEQ ID NO: 311269 - RNA, 24 nt, Artificial Sequence
  Synthetic
uugagagaaagagagggacgggag

SEQ ID NO: 311270 - RNA, 18 nt, Artificial Sequence
  Synthetic
acacauggacaccgggag

SEQ ID NO: 311271 - RNA, 19 nt, Artificial Sequence
  Synthetic
aacacauggacaccgggag

SEQ ID NO: 311272 - RNA, 20 nt, Artificial Sequence
  Synthetic
gaacacauggacaccgggag

SEQ ID NO: 311273 - RNA, 21 nt, Artificial Sequence
  Synthetic
agaacacauggacaccgggag

SEQ ID NO: 311274 - RNA, 22 nt, Artificial Sequence
  Synthetic
gagaacacauggacaccgggag

SEQ ID NO: 311275 - RNA, 23 nt, Artificial Sequence
  Synthetic
ugagaacacauggacaccgggag

SEQ ID NO: 311276 - RNA, 24 nt, Artificial Sequence
  Synthetic
augagaacacauggacaccgggag

SEQ ID NO: 311277 - RNA, 18 nt, Artificial Sequence
  Synthetic
uguaaguaaacccgggag

SEQ ID NO: 311278 - RNA, 19 nt, Artificial Sequence
  Synthetic
guguaaguaaacccgggag

SEQ ID NO: 311279 - RNA, 20 nt, Artificial Sequence
  Synthetic
gguguaaguaaacccgggag

SEQ ID NO: 311280 - RNA, 21 nt, Artificial Sequence
  Synthetic
ugguguaaguaaacccgggag

SEQ ID NO: 311281 - RNA, 22 nt, Artificial Sequence
  Synthetic
augguguaaguaaacccgggag

SEQ ID NO: 311282 - RNA, 23 nt, Artificial Sequence
  Synthetic
aaugguguaaguaaacccgggag

SEQ ID NO: 311283 - RNA, 24 nt, Artificial Sequence
  Synthetic
gaaugguguaaguaaacccgggag

SEQ ID NO: 311284 - RNA, 18 nt, Artificial Sequence
  Synthetic
guugcucgaacccgggag

SEQ ID NO: 311285 - RNA, 19 nt, Artificial Sequence
  Synthetic
aguugcucgaacccgggag

SEQ ID NO: 311286 - RNA, 20 nt, Artificial Sequence
  Synthetic
gaguugcucgaacccgggag

SEQ ID NO: 311287 - RNA, 21 nt, Artificial Sequence
  Synthetic
agaguugcucgaacccgggag

SEQ ID NO: 311288 - RNA, 22 nt, Artificial Sequence
  Synthetic
gagaguugcucgaacccgggag

SEQ ID NO: 311289 - RNA, 23 nt, Artificial Sequence
  Synthetic
ggagaguugcucgaacccgggag

SEQ ID NO: 311290 - RNA, 24 nt, Artificial Sequence
  Synthetic
gggagaguugcucgaacccgggag

SEQ ID NO: 311291 - RNA, 18 nt, Artificial Sequence
  Synthetic
auggugugaacccgggag

SEQ ID NO: 311292 - RNA, 19 nt, Artificial Sequence
  Synthetic
aauggugugaacccgggag

SEQ ID NO: 311293 - RNA, 20 nt, Artificial Sequence
  Synthetic
aaauggugugaacccgggag

SEQ ID NO: 311294 - RNA, 21 nt, Artificial Sequence
  Synthetic
aaaauggugugaacccgggag

SEQ ID NO: 311295 - RNA, 22 nt, Artificial Sequence
  Synthetic
gaaaauggugugaacccgggag

SEQ ID NO: 311296 - RNA, 23 nt, Artificial Sequence
  Synthetic
ggaaaauggugugaacccgggag

SEQ ID NO: 311297 - RNA, 24 nt, Artificial Sequence
  Synthetic
aggaaaauggugugaacccgggag

SEQ ID NO: 311298 - RNA, 18 nt, Artificial Sequence
  Synthetic
aucacuugaacccgggag

SEQ ID NO: 311299 - RNA, 19 nt, Artificial Sequence
  Synthetic
aaucacuugaacccgggag

SEQ ID NO: 311300 - RNA, 20 nt, Artificial Sequence
  Synthetic
gaaucacuugaacccgggag

SEQ ID NO: 311301 - RNA, 21 nt, Artificial Sequence
  Synthetic
agaaucacuugaacccgggag

SEQ ID NO: 311302 - RNA, 22 nt, Artificial Sequence
  Synthetic
gagaaucacuugaacccgggag

SEQ ID NO: 311303 - RNA, 23 nt, Artificial Sequence
  Synthetic
ggagaaucacuugaacccgggag

SEQ ID NO: 311304 - RNA, 24 nt, Artificial Sequence
  Synthetic
aggagaaucacuugaacccgggag

SEQ ID NO: 311305 - RNA, 18 nt, Artificial Sequence
  Synthetic
auagcuugaacccgggag

SEQ ID NO: 311306 - RNA, 19 nt, Artificial Sequence
  Synthetic
gauagcuugaacccgggag

SEQ ID NO: 311307 - RNA, 20 nt, Artificial Sequence
  Synthetic
ggauagcuugaacccgggag

SEQ ID NO: 311308 - RNA, 21 nt, Artificial Sequence
  Synthetic
aggauagcuugaacccgggag

SEQ ID NO: 311309 - RNA, 22 nt, Artificial Sequence
  Synthetic
gaggauagcuugaacccgggag

SEQ ID NO: 311310 - RNA, 23 nt, Artificial Sequence
  Synthetic
ggaggauagcuugaacccgggag

SEQ ID NO: 311311 - RNA, 24 nt, Artificial Sequence
  Synthetic
aggaggauagcuugaacccgggag

SEQ ID NO: 311312 - RNA, 21 nt, Artificial Sequence
  Synthetic
agaaucgcuugaacccgggag

SEQ ID NO: 311313 - RNA, 22 nt, Artificial Sequence
  Synthetic
gagaaucgcuugaacccgggag

SEQ ID NO: 311314 - RNA, 23 nt, Artificial Sequence
  Synthetic
ggagaaucgcuugaacccgggag

SEQ ID NO: 311315 - RNA, 24 nt, Artificial Sequence
  Synthetic
aggagaaucgcuugaacccgggag

SEQ ID NO: 311316 - RNA, 21 nt, Artificial Sequence
  Synthetic
ggaaucgcuugaacccgggag

SEQ ID NO: 311317 - RNA, 22 nt, Artificial Sequence
  Synthetic
gggaaucgcuugaacccgggag

SEQ ID NO: 311318 - RNA, 23 nt, Artificial Sequence
  Synthetic
ggggaaucgcuugaacccgggag

SEQ ID NO: 311319 - RNA, 24 nt, Artificial Sequence
  Synthetic
aggggaaucgcuugaacccgggag

SEQ ID NO: 311320 - RNA, 18 nt, Artificial Sequence
  Synthetic
aucacuugaagccgggag

SEQ ID NO: 311321 - RNA, 19 nt, Artificial Sequence
  Synthetic
aaucacuugaagccgggag

SEQ ID NO: 311322 - RNA, 20 nt, Artificial Sequence
  Synthetic
gaaucacuugaagccgggag

SEQ ID NO: 311323 - RNA, 21 nt, Artificial Sequence
  Synthetic
agaaucacuugaagccgggag

SEQ ID NO: 311324 - RNA, 22 nt, Artificial Sequence
  Synthetic
gagaaucacuugaagccgggag

SEQ ID NO: 311325 - RNA, 23 nt, Artificial Sequence
  Synthetic
ggagaaucacuugaagccgggag

SEQ ID NO: 311326 - RNA, 24 nt, Artificial Sequence
  Synthetic
aggagaaucacuugaagccgggag

SEQ ID NO: 311327 - RNA, 18 nt, Artificial Sequence
  Synthetic
auggcaugaauccgggag

SEQ ID NO: 311328 - RNA, 19 nt, Artificial Sequence
  Synthetic
gauggcaugaauccgggag

SEQ ID NO: 311329 - RNA, 20 nt, Artificial Sequence
  Synthetic
ggauggcaugaauccgggag

SEQ ID NO: 311330 - RNA, 21 nt, Artificial Sequence
  Synthetic
aggauggcaugaauccgggag

SEQ ID NO: 311331 - RNA, 22 nt, Artificial Sequence
  Synthetic
gaggauggcaugaauccgggag

SEQ ID NO: 311332 - RNA, 23 nt, Artificial Sequence
  Synthetic
ggaggauggcaugaauccgggag

SEQ ID NO: 311333 - RNA, 24 nt, Artificial Sequence
  Synthetic
aggaggauggcaugaauccgggag

SEQ ID NO: 311334 - RNA, 18 nt, Artificial Sequence
  Synthetic
uuaaaugcauaaggggag

SEQ ID NO: 311335 - RNA, 19 nt, Artificial Sequence
  Synthetic
guuaaaugcauaaggggag

SEQ ID NO: 311336 - RNA, 20 nt, Artificial Sequence
  Synthetic
gguuaaaugcauaaggggag

SEQ ID NO: 311337 - RNA, 21 nt, Artificial Sequence
  Synthetic
ugguuaaaugcauaaggggag

SEQ ID NO: 311338 - RNA, 22 nt, Artificial Sequence
  Synthetic
augguuaaaugcauaaggggag

SEQ ID NO: 311339 - RNA, 23 nt, Artificial Sequence
  Synthetic
aaugguuaaaugcauaaggggag

SEQ ID NO: 311340 - RNA, 24 nt, Artificial Sequence
  Synthetic
gaaugguuaaaugcauaaggggag

SEQ ID NO: 311341 - RNA, 18 nt, Artificial Sequence
  Synthetic
gcuguacuuuaaggggag

SEQ ID NO: 311342 - RNA, 19 nt, Artificial Sequence
  Synthetic
agcuguacuuuaaggggag

SEQ ID NO: 311343 - RNA, 20 nt, Artificial Sequence
  Synthetic
cagcuguacuuuaaggggag

SEQ ID NO: 311344 - RNA, 21 nt, Artificial Sequence
  Synthetic
gcagcuguacuuuaaggggag

SEQ ID NO: 311345 - RNA, 22 nt, Artificial Sequence
  Synthetic
ugcagcuguacuuuaaggggag

SEQ ID NO: 311346 - RNA, 23 nt, Artificial Sequence
  Synthetic
cugcagcuguacuuuaaggggag

SEQ ID NO: 311347 - RNA, 24 nt, Artificial Sequence
  Synthetic
ucugcagcuguacuuuaaggggag

SEQ ID NO: 311348 - RNA, 18 nt, Artificial Sequence
  Synthetic
auuacaacaucaggggag

SEQ ID NO: 311349 - RNA, 19 nt, Artificial Sequence
  Synthetic
uauuacaacaucaggggag

SEQ ID NO: 311350 - RNA, 20 nt, Artificial Sequence
  Synthetic
cuauuacaacaucaggggag

SEQ ID NO: 311351 - RNA, 21 nt, Artificial Sequence
  Synthetic
ucuauuacaacaucaggggag

SEQ ID NO: 311352 - RNA, 22 nt, Artificial Sequence
  Synthetic
uucuauuacaacaucaggggag

SEQ ID NO: 311353 - RNA, 23 nt, Artificial Sequence
  Synthetic
cuucuauuacaacaucaggggag

SEQ ID NO: 311354 - RNA, 24 nt, Artificial Sequence
  Synthetic
gcuucuauuacaacaucaggggag

SEQ ID NO: 311355 - RNA, 18 nt, Artificial Sequence
  Synthetic
ugaccugcuucaggggag

SEQ ID NO: 311356 - RNA, 19 nt, Artificial Sequence
  Synthetic
augaccugcuucaggggag

SEQ ID NO: 311357 - RNA, 20 nt, Artificial Sequence
  Synthetic
caugaccugcuucaggggag

SEQ ID NO: 311358 - RNA, 21 nt, Artificial Sequence
  Synthetic
ucaugaccugcuucaggggag

SEQ ID NO: 311359 - RNA, 22 nt, Artificial Sequence
  Synthetic
cucaugaccugcuucaggggag

SEQ ID NO: 311360 - RNA, 23 nt, Artificial Sequence
  Synthetic
ucucaugaccugcuucaggggag

SEQ ID NO: 311361 - RNA, 24 nt, Artificial Sequence
  Synthetic
gucucaugaccugcuucaggggag

SEQ ID NO: 311362 - RNA, 18 nt, Artificial Sequence
  Synthetic
uuaaaucacugaggggag

SEQ ID NO: 311363 - RNA, 19 nt, Artificial Sequence
  Synthetic
uuuaaaucacugaggggag

SEQ ID NO: 311364 - RNA, 20 nt, Artificial Sequence
  Synthetic
uuuuaaaucacugaggggag

SEQ ID NO: 311365 - RNA, 21 nt, Artificial Sequence
  Synthetic
guuuuaaaucacugaggggag

SEQ ID NO: 311366 - RNA, 22 nt, Artificial Sequence
  Synthetic
uguuuuaaaucacugaggggag

SEQ ID NO: 311367 - RNA, 23 nt, Artificial Sequence
  Synthetic
uuguuuuaaaucacugaggggag

SEQ ID NO: 311368 - RNA, 24 nt, Artificial Sequence
  Synthetic
cuuguuuuaaaucacugaggggag

SEQ ID NO: 311369 - RNA, 18 nt, Artificial Sequence
  Synthetic
uaucagugauuaggggag

SEQ ID NO: 311370 - RNA, 19 nt, Artificial Sequence
  Synthetic
guaucagugauuaggggag

SEQ ID NO: 311371 - RNA, 20 nt, Artificial Sequence
  Synthetic
uguaucagugauuaggggag

SEQ ID NO: 311372 - RNA, 21 nt, Artificial Sequence
  Synthetic
guguaucagugauuaggggag

SEQ ID NO: 311373 - RNA, 22 nt, Artificial Sequence
  Synthetic
uguguaucagugauuaggggag

SEQ ID NO: 311374 - RNA, 23 nt, Artificial Sequence
  Synthetic
auguguaucagugauuaggggag

SEQ ID NO: 311375 - RNA, 24 nt, Artificial Sequence
  Synthetic
gauguguaucagugauuaggggag

SEQ ID NO: 311376 - RNA, 18 nt, Artificial Sequence
  Synthetic
gugguggggucgggggag

SEQ ID NO: 311377 - RNA, 19 nt, Artificial Sequence
  Synthetic
ugugguggggucgggggag

SEQ ID NO: 311378 - RNA, 20 nt, Artificial Sequence
  Synthetic
cugugguggggucgggggag

SEQ ID NO: 311379 - RNA, 21 nt, Artificial Sequence
  Synthetic
acugugguggggucgggggag

SEQ ID NO: 311380 - RNA, 22 nt, Artificial Sequence
  Synthetic
gacugugguggggucgggggag

SEQ ID NO: 311381 - RNA, 23 nt, Artificial Sequence
  Synthetic
ggacugugguggggucgggggag

SEQ ID NO: 311382 - RNA, 24 nt, Artificial Sequence
  Synthetic
gggacugugguggggucgggggag

SEQ ID NO: 311383 - RNA, 18 nt, Artificial Sequence
  Synthetic
guuguggggucgggggag

SEQ ID NO: 311384 - RNA, 19 nt, Artificial Sequence
  Synthetic
uguuguggggucgggggag

SEQ ID NO: 311385 - RNA, 20 nt, Artificial Sequence
  Synthetic
cuguuguggggucgggggag

SEQ ID NO: 311386 - RNA, 21 nt, Artificial Sequence
  Synthetic
ccuguuguggggucgggggag

SEQ ID NO: 311387 - RNA, 22 nt, Artificial Sequence
  Synthetic
gccuguuguggggucgggggag

SEQ ID NO: 311388 - RNA, 23 nt, Artificial Sequence
  Synthetic
ggccuguuguggggucgggggag

SEQ ID NO: 311389 - RNA, 24 nt, Artificial Sequence
  Synthetic
gggccuguuguggggucgggggag

SEQ ID NO: 311390 - RNA, 18 nt, Artificial Sequence
  Synthetic
uguucaagguggggggag

SEQ ID NO: 311391 - RNA, 19 nt, Artificial Sequence
  Synthetic
guguucaagguggggggag

SEQ ID NO: 311392 - RNA, 20 nt, Artificial Sequence
  Synthetic
uguguucaagguggggggag

SEQ ID NO: 311393 - RNA, 21 nt, Artificial Sequence
  Synthetic
cuguguucaagguggggggag

SEQ ID NO: 311394 - RNA, 22 nt, Artificial Sequence
  Synthetic
gcuguguucaagguggggggag

SEQ ID NO: 311395 - RNA, 23 nt, Artificial Sequence
  Synthetic
ggcuguguucaagguggggggag

SEQ ID NO: 311396 - RNA, 24 nt, Artificial Sequence
  Synthetic
uggcuguguucaagguggggggag

SEQ ID NO: 311397 - RNA, 18 nt, Artificial Sequence
  Synthetic
gucgugggguggggggag

SEQ ID NO: 311398 - RNA, 19 nt, Artificial Sequence
  Synthetic
ugucgugggguggggggag

SEQ ID NO: 311399 - RNA, 20 nt, Artificial Sequence
  Synthetic
cugucgugggguggggggag

SEQ ID NO: 311400 - RNA, 21 nt, Artificial Sequence
  Synthetic
ccugucgugggguggggggag

SEQ ID NO: 311401 - RNA, 22 nt, Artificial Sequence
  Synthetic
gccugucgugggguggggggag

SEQ ID NO: 311402 - RNA, 23 nt, Artificial Sequence
  Synthetic
ggccugucgugggguggggggag

SEQ ID NO: 311403 - RNA, 24 nt, Artificial Sequence
  Synthetic
gggccugucgugggguggggggag

SEQ ID NO: 311404 - RNA, 18 nt, Artificial Sequence
  Synthetic
guggugggguggggggag

SEQ ID NO: 311405 - RNA, 19 nt, Artificial Sequence
  Synthetic
uguggugggguggggggag

SEQ ID NO: 311406 - RNA, 20 nt, Artificial Sequence
  Synthetic
cuguggugggguggggggag

SEQ ID NO: 311407 - RNA, 21 nt, Artificial Sequence
  Synthetic
acuguggugggguggggggag

SEQ ID NO: 311408 - RNA, 22 nt, Artificial Sequence
  Synthetic
gacuguggugggguggggggag

SEQ ID NO: 311409 - RNA, 23 nt, Artificial Sequence
  Synthetic
ggacuguggugggguggggggag

SEQ ID NO: 311410 - RNA, 24 nt, Artificial Sequence
  Synthetic
gggacuguggugggguggggggag

SEQ ID NO: 311411 - RNA, 18 nt, Artificial Sequence
  Synthetic
guugugggguggggggag

SEQ ID NO: 311412 - RNA, 19 nt, Artificial Sequence
  Synthetic
uguugugggguggggggag

SEQ ID NO: 311413 - RNA, 20 nt, Artificial Sequence
  Synthetic
cuguugugggguggggggag

SEQ ID NO: 311414 - RNA, 21 nt, Artificial Sequence
  Synthetic
acuguugugggguggggggag

SEQ ID NO: 311415 - RNA, 22 nt, Artificial Sequence
  Synthetic
gacuguugugggguggggggag

SEQ ID NO: 311416 - RNA, 23 nt, Artificial Sequence
  Synthetic
ggacuguugugggguggggggag

SEQ ID NO: 311417 - RNA, 24 nt, Artificial Sequence
  Synthetic
gggacuguugugggguggggggag

SEQ ID NO: 311418 - RNA, 18 nt, Artificial Sequence
  Synthetic
uugucacacaugggggag

SEQ ID NO: 311419 - RNA, 19 nt, Artificial Sequence
  Synthetic
guugucacacaugggggag

SEQ ID NO: 311420 - RNA, 20 nt, Artificial Sequence
  Synthetic
gguugucacacaugggggag

SEQ ID NO: 311421 - RNA, 21 nt, Artificial Sequence
  Synthetic
ugguugucacacaugggggag

SEQ ID NO: 311422 - RNA, 22 nt, Artificial Sequence
  Synthetic
gugguugucacacaugggggag

SEQ ID NO: 311423 - RNA, 23 nt, Artificial Sequence
  Synthetic
ugugguugucacacaugggggag

SEQ ID NO: 311424 - RNA, 24 nt, Artificial Sequence
  Synthetic
uugugguugucacacaugggggag

SEQ ID NO: 311425 - RNA, 18 nt, Artificial Sequence
  Synthetic
cacauggagaugggggag

SEQ ID NO: 311426 - RNA, 19 nt, Artificial Sequence
  Synthetic
acacauggagaugggggag

SEQ ID NO: 311427 - RNA, 20 nt, Artificial Sequence
  Synthetic
aacacauggagaugggggag

SEQ ID NO: 311428 - RNA, 21 nt, Artificial Sequence
  Synthetic
gaacacauggagaugggggag

SEQ ID NO: 311429 - RNA, 22 nt, Artificial Sequence
  Synthetic
agaacacauggagaugggggag

SEQ ID NO: 311430 - RNA, 23 nt, Artificial Sequence
  Synthetic
gagaacacauggagaugggggag

SEQ ID NO: 311431 - RNA, 24 nt, Artificial Sequence
  Synthetic
ugagaacacauggagaugggggag

SEQ ID NO: 311432 - RNA, 18 nt, Artificial Sequence
  Synthetic
ugagagaaagugggggag

SEQ ID NO: 311433 - RNA, 19 nt, Artificial Sequence
  Synthetic
gugagagaaagugggggag

SEQ ID NO: 311434 - RNA, 20 nt, Artificial Sequence
  Synthetic
agugagagaaagugggggag

SEQ ID NO: 311435 - RNA, 21 nt, Artificial Sequence
  Synthetic
cagugagagaaagugggggag

SEQ ID NO: 311436 - RNA, 22 nt, Artificial Sequence
  Synthetic
ucagugagagaaagugggggag

SEQ ID NO: 311437 - RNA, 23 nt, Artificial Sequence
  Synthetic
aucagugagagaaagugggggag

SEQ ID NO: 311438 - RNA, 24 nt, Artificial Sequence
  Synthetic
aaucagugagagaaagugggggag

SEQ ID NO: 311439 - RNA, 18 nt, Artificial Sequence
  Synthetic
cgagaaggcaguggggag

SEQ ID NO: 311440 - RNA, 19 nt, Artificial Sequence
  Synthetic
ccgagaaggcaguggggag

SEQ ID NO: 311441 - RNA, 20 nt, Artificial Sequence
  Synthetic
gccgagaaggcaguggggag

SEQ ID NO: 311442 - RNA, 21 nt, Artificial Sequence
  Synthetic
agccgagaaggcaguggggag

SEQ ID NO: 311443 - RNA, 22 nt, Artificial Sequence
  Synthetic
gagccgagaaggcaguggggag

SEQ ID NO: 311444 - RNA, 23 nt, Artificial Sequence
  Synthetic
ggagccgagaaggcaguggggag

SEQ ID NO: 311445 - RNA, 24 nt, Artificial Sequence
  Synthetic
cggagccgagaaggcaguggggag

SEQ ID NO: 311446 - RNA, 18 nt, Artificial Sequence
  Synthetic
uaaaaguuugaaugggag

SEQ ID NO: 311447 - RNA, 19 nt, Artificial Sequence
  Synthetic
auaaaaguuugaaugggag

SEQ ID NO: 311448 - RNA, 20 nt, Artificial Sequence
  Synthetic
gauaaaaguuugaaugggag

SEQ ID NO: 311449 - RNA, 21 nt, Artificial Sequence
  Synthetic
ugauaaaaguuugaaugggag

SEQ ID NO: 311450 - RNA, 22 nt, Artificial Sequence
  Synthetic
uugauaaaaguuugaaugggag

SEQ ID NO: 311451 - RNA, 23 nt, Artificial Sequence
  Synthetic
guugauaaaaguuugaaugggag

SEQ ID NO: 311452 - RNA, 24 nt, Artificial Sequence
  Synthetic
aguugauaaaaguuugaaugggag

SEQ ID NO: 311453 - RNA, 18 nt, Artificial Sequence
  Synthetic
aaugccagaucaugggag

SEQ ID NO: 311454 - RNA, 19 nt, Artificial Sequence
  Synthetic
gaaugccagaucaugggag

SEQ ID NO: 311455 - RNA, 20 nt, Artificial Sequence
  Synthetic
ugaaugccagaucaugggag

SEQ ID NO: 311456 - RNA, 21 nt, Artificial Sequence
  Synthetic
cugaaugccagaucaugggag

SEQ ID NO: 311457 - RNA, 22 nt, Artificial Sequence
  Synthetic
ucugaaugccagaucaugggag

SEQ ID NO: 311458 - RNA, 23 nt, Artificial Sequence
  Synthetic
uucugaaugccagaucaugggag

SEQ ID NO: 311459 - RNA, 24 nt, Artificial Sequence
  Synthetic
auucugaaugccagaucaugggag

SEQ ID NO: 311460 - RNA, 18 nt, Artificial Sequence
  Synthetic
caagucaacugaugggag

SEQ ID NO: 311461 - RNA, 19 nt, Artificial Sequence
  Synthetic
acaagucaacugaugggag

SEQ ID NO: 311462 - RNA, 20 nt, Artificial Sequence
  Synthetic
aacaagucaacugaugggag

SEQ ID NO: 311463 - RNA, 21 nt, Artificial Sequence
  Synthetic
uaacaagucaacugaugggag

SEQ ID NO: 311464 - RNA, 22 nt, Artificial Sequence
  Synthetic
guaacaagucaacugaugggag

SEQ ID NO: 311465 - RNA, 23 nt, Artificial Sequence
  Synthetic
uguaacaagucaacugaugggag

SEQ ID NO: 311466 - RNA, 24 nt, Artificial Sequence
  Synthetic
uuguaacaagucaacugaugggag

SEQ ID NO: 311467 - RNA, 18 nt, Artificial Sequence
  Synthetic
auggcaugaaccugggag

SEQ ID NO: 311468 - RNA, 19 nt, Artificial Sequence
  Synthetic
aauggcaugaaccugggag

SEQ ID NO: 311469 - RNA, 20 nt, Artificial Sequence
  Synthetic
gaauggcaugaaccugggag

SEQ ID NO: 311470 - RNA, 21 nt, Artificial Sequence
  Synthetic
agaauggcaugaaccugggag

SEQ ID NO: 311471 - RNA, 22 nt, Artificial Sequence
  Synthetic
gagaauggcaugaaccugggag

SEQ ID NO: 311472 - RNA, 23 nt, Artificial Sequence
  Synthetic
ggagaauggcaugaaccugggag

SEQ ID NO: 311473 - RNA, 24 nt, Artificial Sequence
  Synthetic
aggagaauggcaugaaccugggag

SEQ ID NO: 311474 - RNA, 18 nt, Artificial Sequence
  Synthetic
aucacuugaaccugggag

SEQ ID NO: 311475 - RNA, 19 nt, Artificial Sequence
  Synthetic
aaucacuugaaccugggag

SEQ ID NO: 311476 - RNA, 20 nt, Artificial Sequence
  Synthetic
gaaucacuugaaccugggag

SEQ ID NO: 311477 - RNA, 21 nt, Artificial Sequence
  Synthetic
agaauugcuugaaccugggag

SEQ ID NO: 311478 - RNA, 22 nt, Artificial Sequence
  Synthetic
cagaauugcuugaaccugggag

SEQ ID NO: 311479 - RNA, 23 nt, Artificial Sequence
  Synthetic
gcagaauugcuugaaccugggag

SEQ ID NO: 311480 - RNA, 24 nt, Artificial Sequence
  Synthetic
agcagaauugcuugaaccugggag

SEQ ID NO: 311481 - RNA, 22 nt, Artificial Sequence
  Synthetic
gagaauugcuugaaccugggag

SEQ ID NO: 311482 - RNA, 23 nt, Artificial Sequence
  Synthetic
ggagaauugcuugaaccugggag

SEQ ID NO: 311483 - RNA, 24 nt, Artificial Sequence
  Synthetic
aggagaauugcuugaaccugggag

SEQ ID NO: 311484 - RNA, 18 nt, Artificial Sequence
  Synthetic
auuguuugaaccugggag

SEQ ID NO: 311485 - RNA, 19 nt, Artificial Sequence
  Synthetic
aauuguuugaaccugggag

SEQ ID NO: 311486 - RNA, 20 nt, Artificial Sequence
  Synthetic
gaauuguuugaaccugggag

SEQ ID NO: 311487 - RNA, 21 nt, Artificial Sequence
  Synthetic
agaauuguuugaaccugggag

SEQ ID NO: 311488 - RNA, 22 nt, Artificial Sequence
  Synthetic
gagaauuguuugaaccugggag

SEQ ID NO: 311489 - RNA, 23 nt, Artificial Sequence
  Synthetic
ggagaauuguuugaaccugggag

SEQ ID NO: 311490 - RNA, 24 nt, Artificial Sequence
  Synthetic
aggagaauuguuugaaccugggag

SEQ ID NO: 311491 - RNA, 18 nt, Artificial Sequence
  Synthetic
auuucauaucccugggag

SEQ ID NO: 311492 - RNA, 19 nt, Artificial Sequence
  Synthetic
aauuucauaucccugggag

SEQ ID NO: 311493 - RNA, 20 nt, Artificial Sequence
  Synthetic
aaauuucauaucccugggag

SEQ ID NO: 311494 - RNA, 21 nt, Artificial Sequence
  Synthetic
uaaauuucauaucccugggag

SEQ ID NO: 311495 - RNA, 22 nt, Artificial Sequence
  Synthetic
cuaaauuucauaucccugggag

SEQ ID NO: 311496 - RNA, 23 nt, Artificial Sequence
  Synthetic
ucuaaauuucauaucccugggag

SEQ ID NO: 311497 - RNA, 24 nt, Artificial Sequence
  Synthetic
aucuaaauuucauaucccugggag

SEQ ID NO: 311498 - RNA, 18 nt, Artificial Sequence
  Synthetic
aagcuucacugcugggag

SEQ ID NO: 311499 - RNA, 19 nt, Artificial Sequence
  Synthetic
caagcuucacugcugggag

SEQ ID NO: 311500 - RNA, 20 nt, Artificial Sequence
  Synthetic
gcaagcuucacugcugggag

SEQ ID NO: 311501 - RNA, 21 nt, Artificial Sequence
  Synthetic
ugcaagcuucacugcugggag

SEQ ID NO: 311502 - RNA, 22 nt, Artificial Sequence
  Synthetic
cugcaagcuucacugcugggag

SEQ ID NO: 311503 - RNA, 23 nt, Artificial Sequence
  Synthetic
gcugcaagcuucacugcugggag

SEQ ID NO: 311504 - RNA, 24 nt, Artificial Sequence
  Synthetic
ugcugcaagcuucacugcugggag

SEQ ID NO: 311505 - RNA, 18 nt, Artificial Sequence
  Synthetic
uauccuagaaucugggag

SEQ ID NO: 311506 - RNA, 19 nt, Artificial Sequence
  Synthetic
uuauccuagaaucugggag

SEQ ID NO: 311507 - RNA, 20 nt, Artificial Sequence
  Synthetic
cuuauccuagaaucugggag

SEQ ID NO: 311508 - RNA, 21 nt, Artificial Sequence
  Synthetic
ccuuauccuagaaucugggag

SEQ ID NO: 311509 - RNA, 22 nt, Artificial Sequence
  Synthetic
cccuuauccuagaaucugggag

SEQ ID NO: 311510 - RNA, 23 nt, Artificial Sequence
  Synthetic
ucccuuauccuagaaucugggag

SEQ ID NO: 311511 - RNA, 24 nt, Artificial Sequence
  Synthetic
uucccuuauccuagaaucugggag

SEQ ID NO: 311512 - RNA, 18 nt, Artificial Sequence
  Synthetic
acaggcugccucugggag

SEQ ID NO: 311513 - RNA, 19 nt, Artificial Sequence
  Synthetic
uacaggcugccucugggag

SEQ ID NO: 311514 - RNA, 20 nt, Artificial Sequence
  Synthetic
auacaggcugccucugggag

SEQ ID NO: 311515 - RNA, 21 nt, Artificial Sequence
  Synthetic
uauacaggcugccucugggag

SEQ ID NO: 311516 - RNA, 22 nt, Artificial Sequence
  Synthetic
auauacaggcugccucugggag

SEQ ID NO: 311517 - RNA, 23 nt, Artificial Sequence
  Synthetic
uauauacaggcugccucugggag

SEQ ID NO: 311518 - RNA, 24 nt, Artificial Sequence
  Synthetic
uuauauacaggcugccucugggag

SEQ ID NO: 311519 - RNA, 18 nt, Artificial Sequence
  Synthetic
cucacuuaaaagugggag

SEQ ID NO: 311520 - RNA, 19 nt, Artificial Sequence
  Synthetic
ucucacuuaaaagugggag

SEQ ID NO: 311521 - RNA, 20 nt, Artificial Sequence
  Synthetic
uucucacuuaaaagugggag

SEQ ID NO: 311522 - RNA, 21 nt, Artificial Sequence
  Synthetic
guucucacuuaaaagugggag

SEQ ID NO: 311523 - RNA, 22 nt, Artificial Sequence
  Synthetic
uguucucacuuaaaagugggag

SEQ ID NO: 311524 - RNA, 23 nt, Artificial Sequence
  Synthetic
auguucucacuuaaaagugggag

SEQ ID NO: 311525 - RNA, 24 nt, Artificial Sequence
  Synthetic
cauguucucacuuaaaagugggag

SEQ ID NO: 311526 - RNA, 18 nt, Artificial Sequence
  Synthetic
cucacucauaagugggag

SEQ ID NO: 311527 - RNA, 19 nt, Artificial Sequence
  Synthetic
ucucacucauaagugggag

SEQ ID NO: 311528 - RNA, 20 nt, Artificial Sequence
  Synthetic
uucucacucauaagugggag

SEQ ID NO: 311529 - RNA, 21 nt, Artificial Sequence
  Synthetic
guucucacucauaagugggag

SEQ ID NO: 311530 - RNA, 22 nt, Artificial Sequence
  Synthetic
uguucucacucauaagugggag

SEQ ID NO: 311531 - RNA, 23 nt, Artificial Sequence
  Synthetic
auguucucacucauaagugggag

SEQ ID NO: 311532 - RNA, 24 nt, Artificial Sequence
  Synthetic
cauguucucacucauaagugggag

SEQ ID NO: 311533 - RNA, 19 nt, Artificial Sequence
  Synthetic
ucucacucguaagugggag

SEQ ID NO: 311534 - RNA, 20 nt, Artificial Sequence
  Synthetic
uucucacucguaagugggag

SEQ ID NO: 311535 - RNA, 21 nt, Artificial Sequence
  Synthetic
guucucacucguaagugggag

SEQ ID NO: 311536 - RNA, 22 nt, Artificial Sequence
  Synthetic
uguucucacucguaagugggag

SEQ ID NO: 311537 - RNA, 23 nt, Artificial Sequence
  Synthetic
auguucucacucguaagugggag

SEQ ID NO: 311538 - RNA, 24 nt, Artificial Sequence
  Synthetic
cauguucucacucguaagugggag

SEQ ID NO: 311539 - RNA, 18 nt, Artificial Sequence
  Synthetic
cucauaugauugugggag

SEQ ID NO: 311540 - RNA, 19 nt, Artificial Sequence
  Synthetic
acucauaugauugugggag

SEQ ID NO: 311541 - RNA, 20 nt, Artificial Sequence
  Synthetic
aacucauaugauugugggag

SEQ ID NO: 311542 - RNA, 21 nt, Artificial Sequence
  Synthetic
uaacucauaugauugugggag

SEQ ID NO: 311543 - RNA, 22 nt, Artificial Sequence
  Synthetic
uuaacucauaugauugugggag

SEQ ID NO: 311544 - RNA, 23 nt, Artificial Sequence
  Synthetic
auuaacucauaugauugugggag

SEQ ID NO: 311545 - RNA, 24 nt, Artificial Sequence
  Synthetic
cauuaacucauaugauugugggag

SEQ ID NO: 311546 - RNA, 18 nt, Artificial Sequence
  Synthetic
gccuacaguuugugggag

SEQ ID NO: 311547 - RNA, 19 nt, Artificial Sequence
  Synthetic
ugccuacaguuugugggag

SEQ ID NO: 311548 - RNA, 20 nt, Artificial Sequence
  Synthetic
uugccuacaguuugugggag

SEQ ID NO: 311549 - RNA, 21 nt, Artificial Sequence
  Synthetic
uuugccuacaguuugugggag

SEQ ID NO: 311550 - RNA, 22 nt, Artificial Sequence
  Synthetic
auuugccuacaguuugugggag

SEQ ID NO: 311551 - RNA, 23 nt, Artificial Sequence
  Synthetic
uauuugccuacaguuugugggag

SEQ ID NO: 311552 - RNA, 24 nt, Artificial Sequence
  Synthetic
uuauuugccuacaguuugugggag

SEQ ID NO: 311553 - RNA, 18 nt, Artificial Sequence
  Synthetic
ucauauguuuugugggag

SEQ ID NO: 311554 - RNA, 19 nt, Artificial Sequence
  Synthetic
gucauauguuuugugggag

SEQ ID NO: 311555 - RNA, 20 nt, Artificial Sequence
  Synthetic
ugucauauguuuugugggag

SEQ ID NO: 311556 - RNA, 21 nt, Artificial Sequence
  Synthetic
cugucauauguuuugugggag

SEQ ID NO: 311557 - RNA, 22 nt, Artificial Sequence
  Synthetic
acugucauauguuuugugggag

SEQ ID NO: 311558 - RNA, 23 nt, Artificial Sequence
  Synthetic
cacugucauauguuuugugggag

SEQ ID NO: 311559 - RNA, 24 nt, Artificial Sequence
  Synthetic
acacugucauauguuuugugggag

SEQ ID NO: 311560 - RNA, 18 nt, Artificial Sequence
  Synthetic
cucacucauaauugggag

SEQ ID NO: 311561 - RNA, 19 nt, Artificial Sequence
  Synthetic
ucucacucauaauugggag

SEQ ID NO: 311562 - RNA, 20 nt, Artificial Sequence
  Synthetic
uucucacucauaauugggag

SEQ ID NO: 311563 - RNA, 21 nt, Artificial Sequence
  Synthetic
uuucucacucauaauugggag

SEQ ID NO: 311564 - RNA, 22 nt, Artificial Sequence
  Synthetic
uuuucucacucauaauugggag

SEQ ID NO: 311565 - RNA, 23 nt, Artificial Sequence
  Synthetic
auuuucucacucauaauugggag

SEQ ID NO: 311566 - RNA, 24 nt, Artificial Sequence
  Synthetic
cauuuucucacucauaauugggag

SEQ ID NO: 311567 - RNA, 18 nt, Artificial Sequence
  Synthetic
aucgcuugaacuugggag

SEQ ID NO: 311568 - RNA, 19 nt, Artificial Sequence
  Synthetic
aaucgcuugaacuugggag

SEQ ID NO: 311569 - RNA, 20 nt, Artificial Sequence
  Synthetic
gaaucgcuugaacuugggag

SEQ ID NO: 311570 - RNA, 21 nt, Artificial Sequence
  Synthetic
agaaucgcuugaacuugggag

SEQ ID NO: 311571 - RNA, 22 nt, Artificial Sequence
  Synthetic
cagaaucgcuugaacuugggag

SEQ ID NO: 311572 - RNA, 23 nt, Artificial Sequence
  Synthetic
ccagaaucgcuugaacuugggag

SEQ ID NO: 311573 - RNA, 24 nt, Artificial Sequence
  Synthetic
accagaaucgcuugaacuugggag

SEQ ID NO: 311574 - RNA, 18 nt, Artificial Sequence
  Synthetic
ucugcugacacuugggag

SEQ ID NO: 311575 - RNA, 19 nt, Artificial Sequence
  Synthetic
gucugcugacacuugggag

SEQ ID NO: 311576 - RNA, 20 nt, Artificial Sequence
  Synthetic
ggucugcugacacuugggag

SEQ ID NO: 311577 - RNA, 21 nt, Artificial Sequence
  Synthetic
uggucugcugacacuugggag

SEQ ID NO: 311578 - RNA, 22 nt, Artificial Sequence
  Synthetic
guggucugcugacacuugggag

SEQ ID NO: 311579 - RNA, 23 nt, Artificial Sequence
  Synthetic
aguggucugcugacacuugggag

SEQ ID NO: 311580 - RNA, 24 nt, Artificial Sequence
  Synthetic
caguggucugcugacacuugggag

SEQ ID NO: 311581 - RNA, 18 nt, Artificial Sequence
  Synthetic
uacuuuugagcuugggag

SEQ ID NO: 311582 - RNA, 19 nt, Artificial Sequence
  Synthetic
cuacuuuugagcuugggag

SEQ ID NO: 311583 - RNA, 20 nt, Artificial Sequence
  Synthetic
acuacuuuugagcuugggag

SEQ ID NO: 311584 - RNA, 21 nt, Artificial Sequence
  Synthetic
cacuacuuuugagcuugggag

SEQ ID NO: 311585 - RNA, 22 nt, Artificial Sequence
  Synthetic
ucacuacuuuugagcuugggag

SEQ ID NO: 311586 - RNA, 23 nt, Artificial Sequence
  Synthetic
uucacuacuuuugagcuugggag

SEQ ID NO: 311587 - RNA, 24 nt, Artificial Sequence
  Synthetic
uuucacuacuuuugagcuugggag

SEQ ID NO: 311588 - RNA, 18 nt, Artificial Sequence
  Synthetic
uuaacagaggcuugggag

SEQ ID NO: 311589 - RNA, 19 nt, Artificial Sequence
  Synthetic
guuaacagaggcuugggag

SEQ ID NO: 311590 - RNA, 20 nt, Artificial Sequence
  Synthetic
gguuaacagaggcuugggag

SEQ ID NO: 311591 - RNA, 21 nt, Artificial Sequence
  Synthetic
ugguuaacagaggcuugggag

SEQ ID NO: 311592 - RNA, 22 nt, Artificial Sequence
  Synthetic
augguuaacagaggcuugggag

SEQ ID NO: 311593 - RNA, 23 nt, Artificial Sequence
  Synthetic
caugguuaacagaggcuugggag

SEQ ID NO: 311594 - RNA, 24 nt, Artificial Sequence
  Synthetic
ucaugguuaacagaggcuugggag

SEQ ID NO: 311595 - RNA, 18 nt, Artificial Sequence
  Synthetic
agaucacgagguugggag

SEQ ID NO: 311596 - RNA, 19 nt, Artificial Sequence
  Synthetic
cagaucacgagguugggag

SEQ ID NO: 311597 - RNA, 20 nt, Artificial Sequence
  Synthetic
gcagaucacgagguugggag

SEQ ID NO: 311598 - RNA, 21 nt, Artificial Sequence
  Synthetic
ggcagaucacgagguugggag

SEQ ID NO: 311599 - RNA, 22 nt, Artificial Sequence
  Synthetic
gggcagaucacgagguugggag

SEQ ID NO: 311600 - RNA, 23 nt, Artificial Sequence
  Synthetic
cgggcagaucacgagguugggag

SEQ ID NO: 311601 - RNA, 24 nt, Artificial Sequence
  Synthetic
gcgggcagaucacgagguugggag

SEQ ID NO: 311602 - RNA, 18 nt, Artificial Sequence
  Synthetic
aacagacuuauuugggag

SEQ ID NO: 311603 - RNA, 19 nt, Artificial Sequence
  Synthetic
aaacagacuuauuugggag

SEQ ID NO: 311604 - RNA, 20 nt, Artificial Sequence
  Synthetic
gaaacagacuuauuugggag

SEQ ID NO: 311605 - RNA, 21 nt, Artificial Sequence
  Synthetic
ugaaacagacuuauuugggag

SEQ ID NO: 311606 - RNA, 22 nt, Artificial Sequence
  Synthetic
augaaacagacuuauuugggag

SEQ ID NO: 311607 - RNA, 23 nt, Artificial Sequence
  Synthetic
gaugaaacagacuuauuugggag

SEQ ID NO: 311608 - RNA, 24 nt, Artificial Sequence
  Synthetic
agaugaaacagacuuauuugggag

SEQ ID NO: 311609 - RNA, 18 nt, Artificial Sequence
  Synthetic
cauaaggaaguuugggag

SEQ ID NO: 311610 - RNA, 19 nt, Artificial Sequence
  Synthetic
acauaaggaaguuugggag

SEQ ID NO: 311611 - RNA, 20 nt, Artificial Sequence
  Synthetic
aacauaaggaaguuugggag

SEQ ID NO: 311612 - RNA, 21 nt, Artificial Sequence
  Synthetic
aaacauaaggaaguuugggag

SEQ ID NO: 311613 - RNA, 22 nt, Artificial Sequence
  Synthetic
aaaacauaaggaaguuugggag

SEQ ID NO: 311614 - RNA, 23 nt, Artificial Sequence
  Synthetic
uaaaacauaaggaaguuugggag

SEQ ID NO: 311615 - RNA, 24 nt, Artificial Sequence
  Synthetic
uuaaaacauaaggaaguuugggag

SEQ ID NO: 311616 - RNA, 18 nt, Artificial Sequence
  Synthetic
auuauuucaguuugggag

SEQ ID NO: 311617 - RNA, 19 nt, Artificial Sequence
  Synthetic
cauuauuucaguuugggag

SEQ ID NO: 311618 - RNA, 20 nt, Artificial Sequence
  Synthetic
ucauuauuucaguuugggag

SEQ ID NO: 311619 - RNA, 21 nt, Artificial Sequence
  Synthetic
gucauuauuucaguuugggag

SEQ ID NO: 311620 - RNA, 22 nt, Artificial Sequence
  Synthetic
ugucauuauuucaguuugggag

SEQ ID NO: 311621 - RNA, 23 nt, Artificial Sequence
  Synthetic
uugucauuauuucaguuugggag

SEQ ID NO: 311622 - RNA, 24 nt, Artificial Sequence
  Synthetic
guugucauuauuucaguuugggag

SEQ ID NO: 311623 - RNA, 18 nt, Artificial Sequence
  Synthetic
uugugguugguuugggag

SEQ ID NO: 311624 - RNA, 19 nt, Artificial Sequence
  Synthetic
uuugugguugguuugggag

SEQ ID NO: 311625 - RNA, 20 nt, Artificial Sequence
  Synthetic
cuuugugguugguuugggag

SEQ ID NO: 311626 - RNA, 21 nt, Artificial Sequence
  Synthetic
gcuuugugguugguuugggag

SEQ ID NO: 311627 - RNA, 22 nt, Artificial Sequence
  Synthetic
agcuuugugguugguuugggag

SEQ ID NO: 311628 - RNA, 23 nt, Artificial Sequence
  Synthetic
uagcuuugugguugguuugggag

SEQ ID NO: 311629 - RNA, 24 nt, Artificial Sequence
  Synthetic
uuagcuuugugguugguuugggag

SEQ ID NO: 311630 - RNA, 18 nt, Artificial Sequence
  Synthetic
caagaagauuuuugggag

SEQ ID NO: 311631 - RNA, 19 nt, Artificial Sequence
  Synthetic
ucaagaagauuuuugggag

SEQ ID NO: 311632 - RNA, 20 nt, Artificial Sequence
  Synthetic
uucaagaagauuuuugggag

SEQ ID NO: 311633 - RNA, 21 nt, Artificial Sequence
  Synthetic
cuucaagaagauuuuugggag

SEQ ID NO: 311634 - RNA, 22 nt, Artificial Sequence
  Synthetic
ccuucaagaagauuuuugggag

SEQ ID NO: 311635 - RNA, 23 nt, Artificial Sequence
  Synthetic
uccuucaagaagauuuuugggag

SEQ ID NO: 311636 - RNA, 24 nt, Artificial Sequence
  Synthetic
guccuucaagaagauuuuugggag

SEQ ID NO: 311637 - RNA, 18 nt, Artificial Sequence
  Synthetic
aaucagaguuuuugggag

SEQ ID NO: 311638 - RNA, 19 nt, Artificial Sequence
  Synthetic
aaaucagaguuuuugggag

SEQ ID NO: 311639 - RNA, 20 nt, Artificial Sequence
  Synthetic
uaaaucagaguuuuugggag

SEQ ID NO: 311640 - RNA, 21 nt, Artificial Sequence
  Synthetic
cuaaaucagaguuuuugggag

SEQ ID NO: 311641 - RNA, 22 nt, Artificial Sequence
  Synthetic
acuaaaucagaguuuuugggag

SEQ ID NO: 311642 - RNA, 23 nt, Artificial Sequence
  Synthetic
uacuaaaucagaguuuuugggag

SEQ ID NO: 311643 - RNA, 24 nt, Artificial Sequence
  Synthetic
cuacuaaaucagaguuuuugggag

SEQ ID NO: 311644 - RNA, 18 nt, Artificial Sequence
  Synthetic
ucaguugaugaaauggag

SEQ ID NO: 311645 - RNA, 19 nt, Artificial Sequence
  Synthetic
cucaguugaugaaauggag

SEQ ID NO: 311646 - RNA, 20 nt, Artificial Sequence
  Synthetic
ucucaguugaugaaauggag

SEQ ID NO: 311647 - RNA, 21 nt, Artificial Sequence
  Synthetic
gucucaguugaugaaauggag

SEQ ID NO: 311648 - RNA, 22 nt, Artificial Sequence
  Synthetic
ugucucaguugaugaaauggag

SEQ ID NO: 311649 - RNA, 23 nt, Artificial Sequence
  Synthetic
augucucaguugaugaaauggag

SEQ ID NO: 311650 - RNA, 24 nt, Artificial Sequence
  Synthetic
aaugucucaguugaugaaauggag

SEQ ID NO: 311651 - RNA, 18 nt, Artificial Sequence
  Synthetic
guaggaauaacaauggag

SEQ ID NO: 311652 - RNA, 19 nt, Artificial Sequence
  Synthetic
aguaggaauaacaauggag

SEQ ID NO: 311653 - RNA, 20 nt, Artificial Sequence
  Synthetic
aaguaggaauaacaauggag

SEQ ID NO: 311654 - RNA, 21 nt, Artificial Sequence
  Synthetic
aaaguaggaauaacaauggag

SEQ ID NO: 311655 - RNA, 22 nt, Artificial Sequence
  Synthetic
aaaaguaggaauaacaauggag

SEQ ID NO: 311656 - RNA, 23 nt, Artificial Sequence
  Synthetic
gaaaaguaggaauaacaauggag

SEQ ID NO: 311657 - RNA, 24 nt, Artificial Sequence
  Synthetic
ggaaaaguaggaauaacaauggag

SEQ ID NO: 311658 - RNA, 18 nt, Artificial Sequence
  Synthetic
auccuacccacaauggag

SEQ ID NO: 311659 - RNA, 19 nt, Artificial Sequence
  Synthetic
aauccuacccacaauggag

SEQ ID NO: 311660 - RNA, 20 nt, Artificial Sequence
  Synthetic
aaauccuacccacaauggag

SEQ ID NO: 311661 - RNA, 21 nt, Artificial Sequence
  Synthetic
uaaauccuacccacaauggag

SEQ ID NO: 311662 - RNA, 22 nt, Artificial Sequence
  Synthetic
auaaauccuacccacaauggag

SEQ ID NO: 311663 - RNA, 23 nt, Artificial Sequence
  Synthetic
aauaaauccuacccacaauggag

SEQ ID NO: 311664 - RNA, 24 nt, Artificial Sequence
  Synthetic
aaauaaauccuacccacaauggag

SEQ ID NO: 311665 - RNA, 18 nt, Artificial Sequence
  Synthetic
ucagagagcacaauggag

SEQ ID NO: 311666 - RNA, 19 nt, Artificial Sequence
  Synthetic
uucagagagcacaauggag

SEQ ID NO: 311667 - RNA, 20 nt, Artificial Sequence
  Synthetic
auucagagagcacaauggag

SEQ ID NO: 311668 - RNA, 21 nt, Artificial Sequence
  Synthetic
gauucagagagcacaauggag

SEQ ID NO: 311669 - RNA, 22 nt, Artificial Sequence
  Synthetic
agauucagagagcacaauggag

SEQ ID NO: 311670 - RNA, 23 nt, Artificial Sequence
  Synthetic
uagauucagagagcacaauggag

SEQ ID NO: 311671 - RNA, 24 nt, Artificial Sequence
  Synthetic
uuagauucagagagcacaauggag

SEQ ID NO: 311672 - RNA, 18 nt, Artificial Sequence
  Synthetic
aaccuucaaccaauggag

SEQ ID NO: 311673 - RNA, 19 nt, Artificial Sequence
  Synthetic
caaccuucaaccaauggag

SEQ ID NO: 311674 - RNA, 20 nt, Artificial Sequence
  Synthetic
gcaaccuucaaccaauggag

SEQ ID NO: 311675 - RNA, 21 nt, Artificial Sequence
  Synthetic
agcaaccuucaaccaauggag

SEQ ID NO: 311676 - RNA, 22 nt, Artificial Sequence
  Synthetic
gagcaaccuucaaccaauggag

SEQ ID NO: 311677 - RNA, 23 nt, Artificial Sequence
  Synthetic
ugagcaaccuucaaccaauggag

SEQ ID NO: 311678 - RNA, 24 nt, Artificial Sequence
  Synthetic
gugagcaaccuucaaccaauggag

SEQ ID NO: 311679 - RNA, 18 nt, Artificial Sequence
  Synthetic
uggaaauaaggaauggag

SEQ ID NO: 311680 - RNA, 19 nt, Artificial Sequence
  Synthetic
guggaaauaaggaauggag

SEQ ID NO: 311681 - RNA, 20 nt, Artificial Sequence
  Synthetic
gguggaaauaaggaauggag

SEQ ID NO: 311682 - RNA, 21 nt, Artificial Sequence
  Synthetic
agguggaaauaaggaauggag

SEQ ID NO: 311683 - RNA, 22 nt, Artificial Sequence
  Synthetic
gagguggaaauaaggaauggag

SEQ ID NO: 311684 - RNA, 23 nt, Artificial Sequence
  Synthetic
ggagguggaaauaaggaauggag

SEQ ID NO: 311685 - RNA, 24 nt, Artificial Sequence
  Synthetic
gggagguggaaauaaggaauggag

SEQ ID NO: 311686 - RNA, 18 nt, Artificial Sequence
  Synthetic
caagagucaggaauggag

SEQ ID NO: 311687 - RNA, 19 nt, Artificial Sequence
  Synthetic
ccaagagucaggaauggag

SEQ ID NO: 311688 - RNA, 20 nt, Artificial Sequence
  Synthetic
gccaagagucaggaauggag

SEQ ID NO: 311689 - RNA, 21 nt, Artificial Sequence
  Synthetic
agccaagagucaggaauggag

SEQ ID NO: 311690 - RNA, 22 nt, Artificial Sequence
  Synthetic
cagccaagagucaggaauggag

SEQ ID NO: 311691 - RNA, 23 nt, Artificial Sequence
  Synthetic
acagccaagagucaggaauggag

SEQ ID NO: 311692 - RNA, 24 nt, Artificial Sequence
  Synthetic
cacagccaagagucaggaauggag

SEQ ID NO: 311693 - RNA, 18 nt, Artificial Sequence
  Synthetic
uaaauauaaugaauggag

SEQ ID NO: 311694 - RNA, 19 nt, Artificial Sequence
  Synthetic
cuaaauauaaugaauggag

SEQ ID NO: 311695 - RNA, 20 nt, Artificial Sequence
  Synthetic
gcuaaauauaaugaauggag

SEQ ID NO: 311696 - RNA, 21 nt, Artificial Sequence
  Synthetic
agcuaaauauaaugaauggag

SEQ ID NO: 311697 - RNA, 22 nt, Artificial Sequence
  Synthetic
gagcuaaauauaaugaauggag

SEQ ID NO: 311698 - RNA, 23 nt, Artificial Sequence
  Synthetic
agagcuaaauauaaugaauggag

SEQ ID NO: 311699 - RNA, 24 nt, Artificial Sequence
  Synthetic
cagagcuaaauauaaugaauggag

SEQ ID NO: 311700 - RNA, 18 nt, Artificial Sequence
  Synthetic
cgaugagaacacauggag

SEQ ID NO: 311701 - RNA, 19 nt, Artificial Sequence
  Synthetic
acgaugagaacacauggag

SEQ ID NO: 311702 - RNA, 20 nt, Artificial Sequence
  Synthetic
aacgaugagaacacauggag

SEQ ID NO: 311703 - RNA, 21 nt, Artificial Sequence
  Synthetic
gaacgaugagaacacauggag

SEQ ID NO: 311704 - RNA, 22 nt, Artificial Sequence
  Synthetic
ugaacgaugagaacacauggag

SEQ ID NO: 311705 - RNA, 23 nt, Artificial Sequence
  Synthetic
uugaacgaugagaacacauggag

SEQ ID NO: 311706 - RNA, 24 nt, Artificial Sequence
  Synthetic
guugaacgaugagaacacauggag

SEQ ID NO: 311707 - RNA, 18 nt, Artificial Sequence
  Synthetic
acacauggacucauggag

SEQ ID NO: 311708 - RNA, 19 nt, Artificial Sequence
  Synthetic
aacacauggacucauggag

SEQ ID NO: 311709 - RNA, 20 nt, Artificial Sequence
  Synthetic
gaacacauggacucauggag

SEQ ID NO: 311710 - RNA, 21 nt, Artificial Sequence
  Synthetic
agaacacauggacucauggag

SEQ ID NO: 311711 - RNA, 22 nt, Artificial Sequence
  Synthetic
gagaacacauggacucauggag

SEQ ID NO: 311712 - RNA, 23 nt, Artificial Sequence
  Synthetic
ugagaacacauggacucauggag

SEQ ID NO: 311713 - RNA, 24 nt, Artificial Sequence
  Synthetic
augagaacacauggacucauggag

SEQ ID NO: 311714 - RNA, 18 nt, Artificial Sequence
  Synthetic
ccaaaaaugcucauggag

SEQ ID NO: 311715 - RNA, 19 nt, Artificial Sequence
  Synthetic
accaaaaaugcucauggag

SEQ ID NO: 311716 - RNA, 20 nt, Artificial Sequence
  Synthetic
aaccaaaaaugcucauggag

SEQ ID NO: 311717 - RNA, 21 nt, Artificial Sequence
  Synthetic
uaaccaaaaaugcucauggag

SEQ ID NO: 311718 - RNA, 22 nt, Artificial Sequence
  Synthetic
auaaccaaaaaugcucauggag

SEQ ID NO: 311719 - RNA, 23 nt, Artificial Sequence
  Synthetic
aauaaccaaaaaugcucauggag

SEQ ID NO: 311720 - RNA, 24 nt, Artificial Sequence
  Synthetic
aaauaaccaaaaaugcucauggag

SEQ ID NO: 311721 - RNA, 18 nt, Artificial Sequence
  Synthetic
cccacaaggaggauggag

SEQ ID NO: 311722 - RNA, 19 nt, Artificial Sequence
  Synthetic
ucccacaaggaggauggag

SEQ ID NO: 311723 - RNA, 20 nt, Artificial Sequence
  Synthetic
uucccacaaggaggauggag

SEQ ID NO: 311724 - RNA, 21 nt, Artificial Sequence
  Synthetic
cuucccacaaggaggauggag

SEQ ID NO: 311725 - RNA, 22 nt, Artificial Sequence
  Synthetic
acuucccacaaggaggauggag

SEQ ID NO: 311726 - RNA, 23 nt, Artificial Sequence
  Synthetic
gacuucccacaaggaggauggag

SEQ ID NO: 311727 - RNA, 24 nt, Artificial Sequence
  Synthetic
agacuucccacaaggaggauggag

SEQ ID NO: 311728 - RNA, 18 nt, Artificial Sequence
  Synthetic
uacugaguauggauggag

SEQ ID NO: 311729 - RNA, 19 nt, Artificial Sequence
  Synthetic
auacugaguauggauggag

SEQ ID NO: 311730 - RNA, 20 nt, Artificial Sequence
  Synthetic
gauacugaguauggauggag

SEQ ID NO: 311731 - RNA, 21 nt, Artificial Sequence
  Synthetic
agauacugaguauggauggag

SEQ ID NO: 311732 - RNA, 22 nt, Artificial Sequence
  Synthetic
aagauacugaguauggauggag

SEQ ID NO: 311733 - RNA, 23 nt, Artificial Sequence
  Synthetic
uaagauacugaguauggauggag

SEQ ID NO: 311734 - RNA, 24 nt, Artificial Sequence
  Synthetic
guaagauacugaguauggauggag

SEQ ID NO: 311735 - RNA, 18 nt, Artificial Sequence
  Synthetic
uuuugaacuaugauggag

SEQ ID NO: 311736 - RNA, 19 nt, Artificial Sequence
  Synthetic
cuuuugaacuaugauggag

SEQ ID NO: 311737 - RNA, 20 nt, Artificial Sequence
  Synthetic
ccuuuugaacuaugauggag

SEQ ID NO: 311738 - RNA, 21 nt, Artificial Sequence
  Synthetic
accuuuugaacuaugauggag

SEQ ID NO: 311739 - RNA, 22 nt, Artificial Sequence
  Synthetic
caccuuuugaacuaugauggag

SEQ ID NO: 311740 - RNA, 23 nt, Artificial Sequence
  Synthetic
ucaccuuuugaacuaugauggag

SEQ ID NO: 311741 - RNA, 24 nt, Artificial Sequence
  Synthetic
gucaccuuuugaacuaugauggag

SEQ ID NO: 311742 - RNA, 18 nt, Artificial Sequence
  Synthetic
aguaagccuuugauggag

SEQ ID NO: 311743 - RNA, 19 nt, Artificial Sequence
  Synthetic
aaguaagccuuugauggag

SEQ ID NO: 311744 - RNA, 20 nt, Artificial Sequence
  Synthetic
uaaguaagccuuugauggag

SEQ ID NO: 311745 - RNA, 21 nt, Artificial Sequence
  Synthetic
uuaaguaagccuuugauggag

SEQ ID NO: 311746 - RNA, 22 nt, Artificial Sequence
  Synthetic
auuaaguaagccuuugauggag

SEQ ID NO: 311747 - RNA, 23 nt, Artificial Sequence
  Synthetic
uauuaaguaagccuuugauggag

SEQ ID NO: 311748 - RNA, 24 nt, Artificial Sequence
  Synthetic
guauuaaguaagccuuugauggag

SEQ ID NO: 311749 - RNA, 18 nt, Artificial Sequence
  Synthetic
guacugagagauauggag

SEQ ID NO: 311750 - RNA, 19 nt, Artificial Sequence
  Synthetic
aguacugagagauauggag

SEQ ID NO: 311751 - RNA, 20 nt, Artificial Sequence
  Synthetic
gaguacugagagauauggag

SEQ ID NO: 311752 - RNA, 21 nt, Artificial Sequence
  Synthetic
agaguacugagagauauggag

SEQ ID NO: 311753 - RNA, 22 nt, Artificial Sequence
  Synthetic
aagaguacugagagauauggag

SEQ ID NO: 311754 - RNA, 23 nt, Artificial Sequence
  Synthetic
uaagaguacugagagauauggag

SEQ ID NO: 311755 - RNA, 24 nt, Artificial Sequence
  Synthetic
cuaagaguacugagagauauggag

SEQ ID NO: 311756 - RNA, 18 nt, Artificial Sequence
  Synthetic
uaaugucucgauauggag

SEQ ID NO: 311757 - RNA, 19 nt, Artificial Sequence
  Synthetic
uuaaugucucgauauggag

SEQ ID NO: 311758 - RNA, 20 nt, Artificial Sequence
  Synthetic
uuuaaugucucgauauggag

SEQ ID NO: 311759 - RNA, 21 nt, Artificial Sequence
  Synthetic
uuuuaaugucucgauauggag

SEQ ID NO: 311760 - RNA, 22 nt, Artificial Sequence
  Synthetic
auuuuaaugucucgauauggag

SEQ ID NO: 311761 - RNA, 23 nt, Artificial Sequence
  Synthetic
aauuuuaaugucucgauauggag

SEQ ID NO: 311762 - RNA, 24 nt, Artificial Sequence
  Synthetic
uaauuuuaaugucucgauauggag

SEQ ID NO: 311763 - RNA, 18 nt, Artificial Sequence
  Synthetic
ucauuucccccuauggag

SEQ ID NO: 311764 - RNA, 19 nt, Artificial Sequence
  Synthetic
uucauuucccccuauggag

SEQ ID NO: 311765 - RNA, 20 nt, Artificial Sequence
  Synthetic
auucauuucccccuauggag

SEQ ID NO: 311766 - RNA, 21 nt, Artificial Sequence
  Synthetic
cauucauuucccccuauggag

SEQ ID NO: 311767 - RNA, 22 nt, Artificial Sequence
  Synthetic
acauucauuucccccuauggag

SEQ ID NO: 311768 - RNA, 23 nt, Artificial Sequence
  Synthetic
cacauucauuucccccuauggag

SEQ ID NO: 311769 - RNA, 24 nt, Artificial Sequence
  Synthetic
acacauucauuucccccuauggag

SEQ ID NO: 311770 - RNA, 18 nt, Artificial Sequence
  Synthetic
cucuuucaucuuauggag

SEQ ID NO: 311771 - RNA, 19 nt, Artificial Sequence
  Synthetic
ccucuuucaucuuauggag

SEQ ID NO: 311772 - RNA, 20 nt, Artificial Sequence
  Synthetic
uccucuuucaucuuauggag

SEQ ID NO: 311773 - RNA, 21 nt, Artificial Sequence
  Synthetic
auccucuuucaucuuauggag

SEQ ID NO: 311774 - RNA, 22 nt, Artificial Sequence
  Synthetic
aauccucuuucaucuuauggag

SEQ ID NO: 311775 - RNA, 23 nt, Artificial Sequence
  Synthetic
aaauccucuuucaucuuauggag

SEQ ID NO: 311776 - RNA, 24 nt, Artificial Sequence
  Synthetic
uaaauccucuuucaucuuauggag

SEQ ID NO: 311777 - RNA, 18 nt, Artificial Sequence
  Synthetic
guacagagagaacuggag

SEQ ID NO: 311778 - RNA, 19 nt, Artificial Sequence
  Synthetic
gguacagagagaacuggag

SEQ ID NO: 311779 - RNA, 20 nt, Artificial Sequence
  Synthetic
ugguacagagagaacuggag

SEQ ID NO: 311780 - RNA, 21 nt, Artificial Sequence
  Synthetic
uugguacagagagaacuggag

SEQ ID NO: 311781 - RNA, 22 nt, Artificial Sequence
  Synthetic
uuugguacagagagaacuggag

SEQ ID NO: 311782 - RNA, 23 nt, Artificial Sequence
  Synthetic
auuugguacagagagaacuggag

SEQ ID NO: 311783 - RNA, 24 nt, Artificial Sequence
  Synthetic
gauuugguacagagagaacuggag

SEQ ID NO: 311784 - RNA, 18 nt, Artificial Sequence
  Synthetic
gugacagggacacuggag

SEQ ID NO: 311785 - RNA, 19 nt, Artificial Sequence
  Synthetic
ugugacagggacacuggag

SEQ ID NO: 311786 - RNA, 20 nt, Artificial Sequence
  Synthetic
augugacagggacacuggag

SEQ ID NO: 311787 - RNA, 21 nt, Artificial Sequence
  Synthetic
caugugacagggacacuggag

SEQ ID NO: 311788 - RNA, 22 nt, Artificial Sequence
  Synthetic
ccaugugacagggacacuggag

SEQ ID NO: 311789 - RNA, 23 nt, Artificial Sequence
  Synthetic
cccaugugacagggacacuggag

SEQ ID NO: 311790 - RNA, 24 nt, Artificial Sequence
  Synthetic
gcccaugugacagggacacuggag

SEQ ID NO: 311791 - RNA, 18 nt, Artificial Sequence
  Synthetic
ccaaauuuugcacuggag

SEQ ID NO: 311792 - RNA, 19 nt, Artificial Sequence
  Synthetic
uccaaauuuugcacuggag

SEQ ID NO: 311793 - RNA, 20 nt, Artificial Sequence
  Synthetic
uuccaaauuuugcacuggag

SEQ ID NO: 311794 - RNA, 21 nt, Artificial Sequence
  Synthetic
guuccaaauuuugcacuggag

SEQ ID NO: 311795 - RNA, 22 nt, Artificial Sequence
  Synthetic
uguuccaaauuuugcacuggag

SEQ ID NO: 311796 - RNA, 23 nt, Artificial Sequence
  Synthetic
cuguuccaaauuuugcacuggag

SEQ ID NO: 311797 - RNA, 24 nt, Artificial Sequence
  Synthetic
ucuguuccaaauuuugcacuggag

SEQ ID NO: 311798 - RNA, 18 nt, Artificial Sequence
  Synthetic
ccaugcucuucacuggag

SEQ ID NO: 311799 - RNA, 19 nt, Artificial Sequence
  Synthetic
gccaugcucuucacuggag

SEQ ID NO: 311800 - RNA, 20 nt, Artificial Sequence
  Synthetic
cgccaugcucuucacuggag

SEQ ID NO: 311801 - RNA, 21 nt, Artificial Sequence
  Synthetic
gcgccaugcucuucacuggag

SEQ ID NO: 311802 - RNA, 22 nt, Artificial Sequence
  Synthetic
ggcgccaugcucuucacuggag

SEQ ID NO: 311803 - RNA, 23 nt, Artificial Sequence
  Synthetic
gggcgccaugcucuucacuggag

SEQ ID NO: 311804 - RNA, 24 nt, Artificial Sequence
  Synthetic
ggggcgccaugcucuucacuggag

SEQ ID NO: 311805 - RNA, 18 nt, Artificial Sequence
  Synthetic
agaguugagagacuggag

SEQ ID NO: 311806 - RNA, 19 nt, Artificial Sequence
  Synthetic
gagaguugagagacuggag

SEQ ID NO: 311807 - RNA, 20 nt, Artificial Sequence
  Synthetic
agagaguugagagacuggag

SEQ ID NO: 311808 - RNA, 21 nt, Artificial Sequence
  Synthetic
uagagaguugagagacuggag

SEQ ID NO: 311809 - RNA, 22 nt, Artificial Sequence
  Synthetic
auagagaguugagagacuggag

SEQ ID NO: 311810 - RNA, 23 nt, Artificial Sequence
  Synthetic
cauagagaguugagagacuggag

SEQ ID NO: 311811 - RNA, 24 nt, Artificial Sequence
  Synthetic
ccauagagaguugagagacuggag

SEQ ID NO: 311812 - RNA, 18 nt, Artificial Sequence
  Synthetic
ggauguuuuuuacuggag

SEQ ID NO: 311813 - RNA, 19 nt, Artificial Sequence
  Synthetic
uggauguuuuuuacuggag

SEQ ID NO: 311814 - RNA, 20 nt, Artificial Sequence
  Synthetic
guggauguuuuuuacuggag

SEQ ID NO: 311815 - RNA, 21 nt, Artificial Sequence
  Synthetic
uguggauguuuuuuacuggag

SEQ ID NO: 311816 - RNA, 22 nt, Artificial Sequence
  Synthetic
guguggauguuuuuuacuggag

SEQ ID NO: 311817 - RNA, 23 nt, Artificial Sequence
  Synthetic
uguguggauguuuuuuacuggag

SEQ ID NO: 311818 - RNA, 24 nt, Artificial Sequence
  Synthetic
uuguguggauguuuuuuacuggag

SEQ ID NO: 311819 - RNA, 18 nt, Artificial Sequence
  Synthetic
aaucccuugaaccuggag

SEQ ID NO: 311820 - RNA, 19 nt, Artificial Sequence
  Synthetic
gaaucccuugaaccuggag

SEQ ID NO: 311821 - RNA, 20 nt, Artificial Sequence
  Synthetic
agaaucccuugaaccuggag

SEQ ID NO: 311822 - RNA, 21 nt, Artificial Sequence
  Synthetic
gagaaucccuugaaccuggag

SEQ ID NO: 311823 - RNA, 22 nt, Artificial Sequence
  Synthetic
ggagaaucccuugaaccuggag

SEQ ID NO: 311824 - RNA, 23 nt, Artificial Sequence
  Synthetic
aggagaaucccuugaaccuggag

SEQ ID NO: 311825 - RNA, 24 nt, Artificial Sequence
  Synthetic
caggagaaucccuugaaccuggag

SEQ ID NO: 311826 - RNA, 18 nt, Artificial Sequence
  Synthetic
uaucaaguaacccuggag

SEQ ID NO: 311827 - RNA, 19 nt, Artificial Sequence
  Synthetic
guaucaaguaacccuggag

SEQ ID NO: 311828 - RNA, 20 nt, Artificial Sequence
  Synthetic
gguaucaaguaacccuggag

SEQ ID NO: 311829 - RNA, 21 nt, Artificial Sequence
  Synthetic
agguaucaaguaacccuggag

SEQ ID NO: 311830 - RNA, 22 nt, Artificial Sequence
  Synthetic
uagguaucaaguaacccuggag

SEQ ID NO: 311831 - RNA, 23 nt, Artificial Sequence
  Synthetic
uuagguaucaaguaacccuggag

SEQ ID NO: 311832 - RNA, 24 nt, Artificial Sequence
  Synthetic
cuuagguaucaaguaacccuggag

SEQ ID NO: 311833 - RNA, 18 nt, Artificial Sequence
  Synthetic
agcagaaggaagcuggag

SEQ ID NO: 311834 - RNA, 19 nt, Artificial Sequence
  Synthetic
aagcagaaggaagcuggag

SEQ ID NO: 311835 - RNA, 20 nt, Artificial Sequence
  Synthetic
aaagcagaaggaagcuggag

SEQ ID NO: 311836 - RNA, 21 nt, Artificial Sequence
  Synthetic
aaaagcagaaggaagcuggag

SEQ ID NO: 311837 - RNA, 22 nt, Artificial Sequence
  Synthetic
gaaaagcagaaggaagcuggag

SEQ ID NO: 311838 - RNA, 23 nt, Artificial Sequence
  Synthetic
ugaaaagcagaaggaagcuggag

SEQ ID NO: 311839 - RNA, 24 nt, Artificial Sequence
  Synthetic
uugaaaagcagaaggaagcuggag

SEQ ID NO: 311840 - RNA, 18 nt, Artificial Sequence
  Synthetic
gauuuccgccagcuggag

SEQ ID NO: 311841 - RNA, 19 nt, Artificial Sequence
  Synthetic
ggauuuccgccagcuggag

SEQ ID NO: 311842 - RNA, 20 nt, Artificial Sequence
  Synthetic
aggauuuccgccagcuggag

SEQ ID NO: 311843 - RNA, 21 nt, Artificial Sequence
  Synthetic
aaggauuuccgccagcuggag

SEQ ID NO: 311844 - RNA, 22 nt, Artificial Sequence
  Synthetic
aaaggauuuccgccagcuggag

SEQ ID NO: 311845 - RNA, 23 nt, Artificial Sequence
  Synthetic
gaaaggauuuccgccagcuggag

SEQ ID NO: 311846 - RNA, 24 nt, Artificial Sequence
  Synthetic
ggaaaggauuuccgccagcuggag

SEQ ID NO: 311847 - RNA, 18 nt, Artificial Sequence
  Synthetic
ugccucugggagcuggag

SEQ ID NO: 311848 - RNA, 19 nt, Artificial Sequence
  Synthetic
cugccucugggagcuggag

SEQ ID NO: 311849 - RNA, 20 nt, Artificial Sequence
  Synthetic
gcugccucugggagcuggag

SEQ ID NO: 311850 - RNA, 21 nt, Artificial Sequence
  Synthetic
ggcugccucugggagcuggag

SEQ ID NO: 311851 - RNA, 22 nt, Artificial Sequence
  Synthetic
aggcugccucugggagcuggag

SEQ ID NO: 311852 - RNA, 23 nt, Artificial Sequence
  Synthetic
caggcugccucugggagcuggag

SEQ ID NO: 311853 - RNA, 24 nt, Artificial Sequence
  Synthetic
acaggcugccucugggagcuggag

SEQ ID NO: 311854 - RNA, 18 nt, Artificial Sequence
  Synthetic
uggaaaagugagcuggag

SEQ ID NO: 311855 - RNA, 19 nt, Artificial Sequence
  Synthetic
uuggaaaagugagcuggag

SEQ ID NO: 311856 - RNA, 20 nt, Artificial Sequence
  Synthetic
auuggaaaagugagcuggag

SEQ ID NO: 311857 - RNA, 21 nt, Artificial Sequence
  Synthetic
gauuggaaaagugagcuggag

SEQ ID NO: 311858 - RNA, 22 nt, Artificial Sequence
  Synthetic
ugauuggaaaagugagcuggag

SEQ ID NO: 311859 - RNA, 23 nt, Artificial Sequence
  Synthetic
cugauuggaaaagugagcuggag

SEQ ID NO: 311860 - RNA, 24 nt, Artificial Sequence
  Synthetic
acugauuggaaaagugagcuggag

SEQ ID NO: 311861 - RNA, 18 nt, Artificial Sequence
  Synthetic
agguggugcaugcuggag

SEQ ID NO: 311862 - RNA, 19 nt, Artificial Sequence
  Synthetic
cagguggugcaugcuggag

SEQ ID NO: 311863 - RNA, 20 nt, Artificial Sequence
  Synthetic
ucagguggugcaugcuggag

SEQ ID NO: 311864 - RNA, 21 nt, Artificial Sequence
  Synthetic
uucagguggugcaugcuggag

SEQ ID NO: 311865 - RNA, 22 nt, Artificial Sequence
  Synthetic
cuucagguggugcaugcuggag

SEQ ID NO: 311866 - RNA, 23 nt, Artificial Sequence
  Synthetic
ucuucagguggugcaugcuggag

SEQ ID NO: 311867 - RNA, 24 nt, Artificial Sequence
  Synthetic
uucuucagguggugcaugcuggag

SEQ ID NO: 311868 - RNA, 18 nt, Artificial Sequence
  Synthetic
ucaguggaauaucuggag

SEQ ID NO: 311869 - RNA, 19 nt, Artificial Sequence
  Synthetic
cucaguggaauaucuggag

SEQ ID NO: 311870 - RNA, 20 nt, Artificial Sequence
  Synthetic
acucaguggaauaucuggag

SEQ ID NO: 311871 - RNA, 21 nt, Artificial Sequence
  Synthetic
aacucaguggaauaucuggag

SEQ ID NO: 311872 - RNA, 22 nt, Artificial Sequence
  Synthetic
gaacucaguggaauaucuggag

SEQ ID NO: 311873 - RNA, 23 nt, Artificial Sequence
  Synthetic
agaacucaguggaauaucuggag

SEQ ID NO: 311874 - RNA, 24 nt, Artificial Sequence
  Synthetic
aagaacucaguggaauaucuggag

SEQ ID NO: 311875 - RNA, 18 nt, Artificial Sequence
  Synthetic
uccaaaaggacucuggag

SEQ ID NO: 311876 - RNA, 19 nt, Artificial Sequence
  Synthetic
cuccaaaaggacucuggag

SEQ ID NO: 311877 - RNA, 20 nt, Artificial Sequence
  Synthetic
acuccaaaaggacucuggag

SEQ ID NO: 311878 - RNA, 21 nt, Artificial Sequence
  Synthetic
aacuccaaaaggacucuggag

SEQ ID NO: 311879 - RNA, 22 nt, Artificial Sequence
  Synthetic
aaacuccaaaaggacucuggag

SEQ ID NO: 311880 - RNA, 23 nt, Artificial Sequence
  Synthetic
gaaacuccaaaaggacucuggag

SEQ ID NO: 311881 - RNA, 24 nt, Artificial Sequence
  Synthetic
ggaaacuccaaaaggacucuggag

SEQ ID NO: 311882 - RNA, 18 nt, Artificial Sequence
  Synthetic
guuuauauuauucuggag

SEQ ID NO: 311883 - RNA, 19 nt, Artificial Sequence
  Synthetic
gguuuauauuauucuggag

SEQ ID NO: 311884 - RNA, 20 nt, Artificial Sequence
  Synthetic
ggguuuauauuauucuggag

SEQ ID NO: 311885 - RNA, 21 nt, Artificial Sequence
  Synthetic
aggguuuauauuauucuggag

SEQ ID NO: 311886 - RNA, 22 nt, Artificial Sequence
  Synthetic
aaggguuuauauuauucuggag

SEQ ID NO: 311887 - RNA, 23 nt, Artificial Sequence
  Synthetic
caaggguuuauauuauucuggag

SEQ ID NO: 311888 - RNA, 24 nt, Artificial Sequence
  Synthetic
ucaaggguuuauauuauucuggag

SEQ ID NO: 311889 - RNA, 18 nt, Artificial Sequence
  Synthetic
ugcuggggaaaaguggag

SEQ ID NO: 311890 - RNA, 19 nt, Artificial Sequence
  Synthetic
uugcuggggaaaaguggag

SEQ ID NO: 311891 - RNA, 20 nt, Artificial Sequence
  Synthetic
uuugcuggggaaaaguggag

SEQ ID NO: 311892 - RNA, 21 nt, Artificial Sequence
  Synthetic
cuuugcuggggaaaaguggag

SEQ ID NO: 311893 - RNA, 22 nt, Artificial Sequence
  Synthetic
ucuuugcuggggaaaaguggag

SEQ ID NO: 311894 - RNA, 23 nt, Artificial Sequence
  Synthetic
uucuuugcuggggaaaaguggag

SEQ ID NO: 311895 - RNA, 24 nt, Artificial Sequence
  Synthetic
guucuuugcuggggaaaaguggag

SEQ ID NO: 311896 - RNA, 18 nt, Artificial Sequence
  Synthetic
auacuuaagaaaguggag

SEQ ID NO: 311897 - RNA, 19 nt, Artificial Sequence
  Synthetic
uauacuuaagaaaguggag

SEQ ID NO: 311898 - RNA, 20 nt, Artificial Sequence
  Synthetic
cuauacuuaagaaaguggag

SEQ ID NO: 311899 - RNA, 21 nt, Artificial Sequence
  Synthetic
ucuauacuuaagaaaguggag

SEQ ID NO: 311900 - RNA, 22 nt, Artificial Sequence
  Synthetic
uucuauacuuaagaaaguggag

SEQ ID NO: 311901 - RNA, 23 nt, Artificial Sequence
  Synthetic
auucuauacuuaagaaaguggag

SEQ ID NO: 311902 - RNA, 24 nt, Artificial Sequence
  Synthetic
gauucuauacuuaagaaaguggag

SEQ ID NO: 311903 - RNA, 18 nt, Artificial Sequence
  Synthetic
acagauuugaaaguggag

SEQ ID NO: 311904 - RNA, 19 nt, Artificial Sequence
  Synthetic
gacagauuugaaaguggag

SEQ ID NO: 311905 - RNA, 20 nt, Artificial Sequence
  Synthetic
ugacagauuugaaaguggag

SEQ ID NO: 311906 - RNA, 21 nt, Artificial Sequence
  Synthetic
uugacagauuugaaaguggag

SEQ ID NO: 311907 - RNA, 22 nt, Artificial Sequence
  Synthetic
uuugacagauuugaaaguggag

SEQ ID NO: 311908 - RNA, 23 nt, Artificial Sequence
  Synthetic
uuuugacagauuugaaaguggag

SEQ ID NO: 311909 - RNA, 24 nt, Artificial Sequence
  Synthetic
cuuuugacagauuugaaaguggag

SEQ ID NO: 311910 - RNA, 18 nt, Artificial Sequence
  Synthetic
acguaaaaucaaguggag

SEQ ID NO: 311911 - RNA, 19 nt, Artificial Sequence
  Synthetic
cacguaaaaucaaguggag

SEQ ID NO: 311912 - RNA, 20 nt, Artificial Sequence
  Synthetic
gcacguaaaaucaaguggag

SEQ ID NO: 311913 - RNA, 21 nt, Artificial Sequence
  Synthetic
ggcacguaaaaucaaguggag

SEQ ID NO: 311914 - RNA, 22 nt, Artificial Sequence
  Synthetic
gggcacguaaaaucaaguggag

SEQ ID NO: 311915 - RNA, 23 nt, Artificial Sequence
  Synthetic
ugggcacguaaaaucaaguggag

SEQ ID NO: 311916 - RNA, 24 nt, Artificial Sequence
  Synthetic
gugggcacguaaaaucaaguggag

SEQ ID NO: 311917 - RNA, 18 nt, Artificial Sequence
  Synthetic
aaacauuggagaguggag

SEQ ID NO: 311918 - RNA, 19 nt, Artificial Sequence
  Synthetic
gaaacauuggagaguggag

SEQ ID NO: 311919 - RNA, 20 nt, Artificial Sequence
  Synthetic
agaaacauuggagaguggag

SEQ ID NO: 311920 - RNA, 21 nt, Artificial Sequence
  Synthetic
cagaaacauuggagaguggag

SEQ ID NO: 311921 - RNA, 22 nt, Artificial Sequence
  Synthetic
ucagaaacauuggagaguggag

SEQ ID NO: 311922 - RNA, 23 nt, Artificial Sequence
  Synthetic
aucagaaacauuggagaguggag

SEQ ID NO: 311923 - RNA, 24 nt, Artificial Sequence
  Synthetic
gaucagaaacauuggagaguggag

SEQ ID NO: 311924 - RNA, 18 nt, Artificial Sequence
  Synthetic
ucucaauacugaguggag

SEQ ID NO: 311925 - RNA, 19 nt, Artificial Sequence
  Synthetic
aucucaauacugaguggag

SEQ ID NO: 311926 - RNA, 20 nt, Artificial Sequence
  Synthetic
caucucaauacugaguggag

SEQ ID NO: 311927 - RNA, 21 nt, Artificial Sequence
  Synthetic
acaucucaauacugaguggag

SEQ ID NO: 311928 - RNA, 22 nt, Artificial Sequence
  Synthetic
uacaucucaauacugaguggag

SEQ ID NO: 311929 - RNA, 23 nt, Artificial Sequence
  Synthetic
guacaucucaauacugaguggag

SEQ ID NO: 311930 - RNA, 24 nt, Artificial Sequence
  Synthetic
aguacaucucaauacugaguggag

SEQ ID NO: 311931 - RNA, 18 nt, Artificial Sequence
  Synthetic
cauugucauuuaguggag

SEQ ID NO: 311932 - RNA, 19 nt, Artificial Sequence
  Synthetic
acauugucauuuaguggag

SEQ ID NO: 311933 - RNA, 20 nt, Artificial Sequence
  Synthetic
uacauugucauuuaguggag

SEQ ID NO: 311934 - RNA, 21 nt, Artificial Sequence
  Synthetic
uuacauugucauuuaguggag

SEQ ID NO: 311935 - RNA, 22 nt, Artificial Sequence
  Synthetic
guuacauugucauuuaguggag

SEQ ID NO: 311936 - RNA, 23 nt, Artificial Sequence
  Synthetic
uguuacauugucauuuaguggag

SEQ ID NO: 311937 - RNA, 24 nt, Artificial Sequence
  Synthetic
uuguuacauugucauuuaguggag

SEQ ID NO: 311938 - RNA, 18 nt, Artificial Sequence
  Synthetic
uuuguaucuuuaguggag

SEQ ID NO: 311939 - RNA, 19 nt, Artificial Sequence
  Synthetic
uuuuguaucuuuaguggag

SEQ ID NO: 311940 - RNA, 20 nt, Artificial Sequence
  Synthetic
uuuuuguaucuuuaguggag

SEQ ID NO: 311941 - RNA, 21 nt, Artificial Sequence
  Synthetic
auuuuuguaucuuuaguggag

SEQ ID NO: 311942 - RNA, 22 nt, Artificial Sequence
  Synthetic
aauuuuuguaucuuuaguggag

SEQ ID NO: 311943 - RNA, 23 nt, Artificial Sequence
  Synthetic
uaauuuuuguaucuuuaguggag

SEQ ID NO: 311944 - RNA, 24 nt, Artificial Sequence
  Synthetic
cuaauuuuuguaucuuuaguggag

SEQ ID NO: 311945 - RNA, 18 nt, Artificial Sequence
  Synthetic
ggagggagaaagguggag

SEQ ID NO: 311946 - RNA, 19 nt, Artificial Sequence
  Synthetic
aggagggagaaagguggag

SEQ ID NO: 311947 - RNA, 20 nt, Artificial Sequence
  Synthetic
caggagggagaaagguggag

SEQ ID NO: 311948 - RNA, 21 nt, Artificial Sequence
  Synthetic
acaggagggagaaagguggag

SEQ ID NO: 311949 - RNA, 22 nt, Artificial Sequence
  Synthetic
gacaggagggagaaagguggag

SEQ ID NO: 311950 - RNA, 23 nt, Artificial Sequence
  Synthetic
agacaggagggagaaagguggag

SEQ ID NO: 311951 - RNA, 24 nt, Artificial Sequence
  Synthetic
gagacaggagggagaaagguggag

SEQ ID NO: 311952 - RNA, 18 nt, Artificial Sequence
  Synthetic
guuuugugggagguggag

SEQ ID NO: 311953 - RNA, 19 nt, Artificial Sequence
  Synthetic
uguuuugugggagguggag

SEQ ID NO: 311954 - RNA, 20 nt, Artificial Sequence
  Synthetic
auguuuugugggagguggag

SEQ ID NO: 311955 - RNA, 21 nt, Artificial Sequence
  Synthetic
uauguuuugugggagguggag

SEQ ID NO: 311956 - RNA, 22 nt, Artificial Sequence
  Synthetic
auauguuuugugggagguggag

SEQ ID NO: 311957 - RNA, 23 nt, Artificial Sequence
  Synthetic
cauauguuuugugggagguggag

SEQ ID NO: 311958 - RNA, 24 nt, Artificial Sequence
  Synthetic
ucauauguuuugugggagguggag

SEQ ID NO: 311959 - RNA, 18 nt, Artificial Sequence
  Synthetic
uaugucccggggguggag

SEQ ID NO: 311960 - RNA, 19 nt, Artificial Sequence
  Synthetic
guaugucccggggguggag

SEQ ID NO: 311961 - RNA, 20 nt, Artificial Sequence
  Synthetic
uguaugucccggggguggag

SEQ ID NO: 311962 - RNA, 21 nt, Artificial Sequence
  Synthetic
uuguaugucccggggguggag

SEQ ID NO: 311963 - RNA, 22 nt, Artificial Sequence
  Synthetic
auuguaugucccggggguggag

SEQ ID NO: 311964 - RNA, 23 nt, Artificial Sequence
  Synthetic
cauuguaugucccggggguggag

SEQ ID NO: 311965 - RNA, 24 nt, Artificial Sequence
  Synthetic
ccauuguaugucccggggguggag

SEQ ID NO: 311966 - RNA, 18 nt, Artificial Sequence
  Synthetic
gguuuguuguggguggag

SEQ ID NO: 311967 - RNA, 19 nt, Artificial Sequence
  Synthetic
agguuuguuguggguggag

SEQ ID NO: 311968 - RNA, 20 nt, Artificial Sequence
  Synthetic
aagguuuguuguggguggag

SEQ ID NO: 311969 - RNA, 21 nt, Artificial Sequence
  Synthetic
gaagguuuguuguggguggag

SEQ ID NO: 311970 - RNA, 22 nt, Artificial Sequence
  Synthetic
ggaagguuuguuguggguggag

SEQ ID NO: 311971 - RNA, 23 nt, Artificial Sequence
  Synthetic
aggaagguuuguuguggguggag

SEQ ID NO: 311972 - RNA, 24 nt, Artificial Sequence
  Synthetic
gaggaagguuuguuguggguggag

SEQ ID NO: 311973 - RNA, 18 nt, Artificial Sequence
  Synthetic
uuaugaguggguguggag

SEQ ID NO: 311974 - RNA, 19 nt, Artificial Sequence
  Synthetic
uuuaugaguggguguggag

SEQ ID NO: 311975 - RNA, 20 nt, Artificial Sequence
  Synthetic
guuuaugaguggguguggag

SEQ ID NO: 311976 - RNA, 21 nt, Artificial Sequence
  Synthetic
uguuuaugaguggguguggag

SEQ ID NO: 311977 - RNA, 22 nt, Artificial Sequence
  Synthetic
auguuuaugaguggguguggag

SEQ ID NO: 311978 - RNA, 23 nt, Artificial Sequence
  Synthetic
aauguuuaugaguggguguggag

SEQ ID NO: 311979 - RNA, 24 nt, Artificial Sequence
  Synthetic
uaauguuuaugaguggguguggag

SEQ ID NO: 311980 - RNA, 18 nt, Artificial Sequence
  Synthetic
uucugauucuguguggag

SEQ ID NO: 311981 - RNA, 19 nt, Artificial Sequence
  Synthetic
uuucugauucuguguggag

SEQ ID NO: 311982 - RNA, 20 nt, Artificial Sequence
  Synthetic
cuuucugauucuguguggag

SEQ ID NO: 311983 - RNA, 21 nt, Artificial Sequence
  Synthetic
ucuuucugauucuguguggag

SEQ ID NO: 311984 - RNA, 22 nt, Artificial Sequence
  Synthetic
cucuuucugauucuguguggag

SEQ ID NO: 311985 - RNA, 23 nt, Artificial Sequence
  Synthetic
ucucuuucugauucuguguggag

SEQ ID NO: 311986 - RNA, 24 nt, Artificial Sequence
  Synthetic
aucucuuucugauucuguguggag

SEQ ID NO: 311987 - RNA, 18 nt, Artificial Sequence
  Synthetic
uaacuuggaagauuggag

SEQ ID NO: 311988 - RNA, 19 nt, Artificial Sequence
  Synthetic
guaacuuggaagauuggag

SEQ ID NO: 311989 - RNA, 20 nt, Artificial Sequence
  Synthetic
uguaacuuggaagauuggag

SEQ ID NO: 311990 - RNA, 21 nt, Artificial Sequence
  Synthetic
cuguaacuuggaagauuggag

SEQ ID NO: 311991 - RNA, 22 nt, Artificial Sequence
  Synthetic
gcuguaacuuggaagauuggag

SEQ ID NO: 311992 - RNA, 23 nt, Artificial Sequence
  Synthetic
ugcuguaacuuggaagauuggag

SEQ ID NO: 311993 - RNA, 24 nt, Artificial Sequence
  Synthetic
cugcuguaacuuggaagauuggag

SEQ ID NO: 311994 - RNA, 18 nt, Artificial Sequence
  Synthetic
aaccuguacagauuggag

SEQ ID NO: 311995 - RNA, 19 nt, Artificial Sequence
  Synthetic
aaaccuguacagauuggag

SEQ ID NO: 311996 - RNA, 20 nt, Artificial Sequence
  Synthetic
gaaaccuguacagauuggag

SEQ ID NO: 311997 - RNA, 21 nt, Artificial Sequence
  Synthetic
agaaaccuguacagauuggag

SEQ ID NO: 311998 - RNA, 22 nt, Artificial Sequence
  Synthetic
gagaaaccuguacagauuggag

SEQ ID NO: 311999 - RNA, 23 nt, Artificial Sequence
  Synthetic
agagaaaccuguacagauuggag

SEQ ID NO: 312000 - RNA, 24 nt, Artificial Sequence
  Synthetic
gagagaaaccuguacagauuggag

SEQ ID NO: 312001 - RNA, 18 nt, Artificial Sequence
  Synthetic
gugggggugagauuggag

SEQ ID NO: 312002 - RNA, 19 nt, Artificial Sequence
  Synthetic
ggugggggugagauuggag

SEQ ID NO: 312003 - RNA, 20 nt, Artificial Sequence
  Synthetic
gggugggggugagauuggag

SEQ ID NO: 312004 - RNA, 21 nt, Artificial Sequence
  Synthetic
ggggugggggugagauuggag

SEQ ID NO: 312005 - RNA, 22 nt, Artificial Sequence
  Synthetic
uggggugggggugagauuggag

SEQ ID NO: 312006 - RNA, 23 nt, Artificial Sequence
  Synthetic
guggggugggggugagauuggag

SEQ ID NO: 312007 - RNA, 24 nt, Artificial Sequence
  Synthetic
aguggggugggggugagauuggag

SEQ ID NO: 312008 - RNA, 18 nt, Artificial Sequence
  Synthetic
agccaguaauuauuggag

SEQ ID NO: 312009 - RNA, 19 nt, Artificial Sequence
  Synthetic
uagccaguaauuauuggag

SEQ ID NO: 312010 - RNA, 20 nt, Artificial Sequence
  Synthetic
guagccaguaauuauuggag

SEQ ID NO: 312011 - RNA, 21 nt, Artificial Sequence
  Synthetic
uguagccaguaauuauuggag

SEQ ID NO: 312012 - RNA, 22 nt, Artificial Sequence
  Synthetic
auguagccaguaauuauuggag

SEQ ID NO: 312013 - RNA, 23 nt, Artificial Sequence
  Synthetic
gauguagccaguaauuauuggag

SEQ ID NO: 312014 - RNA, 24 nt, Artificial Sequence
  Synthetic
ugauguagccaguaauuauuggag

SEQ ID NO: 312015 - RNA, 18 nt, Artificial Sequence
  Synthetic
ugguggugguuauuggag

SEQ ID NO: 312016 - RNA, 19 nt, Artificial Sequence
  Synthetic
gugguggugguuauuggag

SEQ ID NO: 312017 - RNA, 20 nt, Artificial Sequence
  Synthetic
ugugguggugguuauuggag

SEQ ID NO: 312018 - RNA, 21 nt, Artificial Sequence
  Synthetic
augugguggugguuauuggag

SEQ ID NO: 312019 - RNA, 22 nt, Artificial Sequence
  Synthetic
uaugugguggugguuauuggag

SEQ ID NO: 312020 - RNA, 23 nt, Artificial Sequence
  Synthetic
auaugugguggugguuauuggag

SEQ ID NO: 312021 - RNA, 24 nt, Artificial Sequence
  Synthetic
cauaugugguggugguuauuggag

SEQ ID NO: 312022 - RNA, 18 nt, Artificial Sequence
  Synthetic
uuguacuuguucuuggag

SEQ ID NO: 312023 - RNA, 19 nt, Artificial Sequence
  Synthetic
auuguacuuguucuuggag

SEQ ID NO: 312024 - RNA, 20 nt, Artificial Sequence
  Synthetic
gauuguacuuguucuuggag

SEQ ID NO: 312025 - RNA, 21 nt, Artificial Sequence
  Synthetic
ugauuguacuuguucuuggag

SEQ ID NO: 312026 - RNA, 22 nt, Artificial Sequence
  Synthetic
uugauuguacuuguucuuggag

SEQ ID NO: 312027 - RNA, 23 nt, Artificial Sequence
  Synthetic
auugauuguacuuguucuuggag

SEQ ID NO: 312028 - RNA, 24 nt, Artificial Sequence
  Synthetic
aauugauuguacuuguucuuggag

SEQ ID NO: 312029 - RNA, 18 nt, Artificial Sequence
  Synthetic
uagaaggugagguuggag

SEQ ID NO: 312030 - RNA, 19 nt, Artificial Sequence
  Synthetic
guagaaggugagguuggag

SEQ ID NO: 312031 - RNA, 20 nt, Artificial Sequence
  Synthetic
aguagaaggugagguuggag

SEQ ID NO: 312032 - RNA, 21 nt, Artificial Sequence
  Synthetic
aaguagaaggugagguuggag

SEQ ID NO: 312033 - RNA, 22 nt, Artificial Sequence
  Synthetic
aaaguagaaggugagguuggag

SEQ ID NO: 312034 - RNA, 23 nt, Artificial Sequence
  Synthetic
uaaaguagaaggugagguuggag

SEQ ID NO: 312035 - RNA, 24 nt, Artificial Sequence
  Synthetic
auaaaguagaaggugagguuggag

SEQ ID NO: 312036 - RNA, 18 nt, Artificial Sequence
  Synthetic
aaugucuagaauuuggag

SEQ ID NO: 312037 - RNA, 19 nt, Artificial Sequence
  Synthetic
uaaugucuagaauuuggag

SEQ ID NO: 312038 - RNA, 20 nt, Artificial Sequence
  Synthetic
cuaaugucuagaauuuggag

SEQ ID NO: 312039 - RNA, 21 nt, Artificial Sequence
  Synthetic
gcuaaugucuagaauuuggag

SEQ ID NO: 312040 - RNA, 22 nt, Artificial Sequence
  Synthetic
agcuaaugucuagaauuuggag

SEQ ID NO: 312041 - RNA, 23 nt, Artificial Sequence
  Synthetic
gagcuaaugucuagaauuuggag

SEQ ID NO: 312042 - RNA, 24 nt, Artificial Sequence
  Synthetic
ggagcuaaugucuagaauuuggag

SEQ ID NO: 312043 - RNA, 18 nt, Artificial Sequence
  Synthetic
uggaucuuacauuuggag

SEQ ID NO: 312044 - RNA, 19 nt, Artificial Sequence
  Synthetic
auggaucuuacauuuggag

SEQ ID NO: 312045 - RNA, 20 nt, Artificial Sequence
  Synthetic
uauggaucuuacauuuggag

SEQ ID NO: 312046 - RNA, 21 nt, Artificial Sequence
  Synthetic
uuauggaucuuacauuuggag

SEQ ID NO: 312047 - RNA, 22 nt, Artificial Sequence
  Synthetic
uuuauggaucuuacauuuggag

SEQ ID NO: 312048 - RNA, 23 nt, Artificial Sequence
  Synthetic
cuuuauggaucuuacauuuggag

SEQ ID NO: 312049 - RNA, 24 nt, Artificial Sequence
  Synthetic
ucuuuauggaucuuacauuuggag

SEQ ID NO: 312050 - RNA, 18 nt, Artificial Sequence
  Synthetic
gaaggggcagauuuggag

SEQ ID NO: 312051 - RNA, 19 nt, Artificial Sequence
  Synthetic
agaaggggcagauuuggag

SEQ ID NO: 312052 - RNA, 20 nt, Artificial Sequence
  Synthetic
aagaaggggcagauuuggag

SEQ ID NO: 312053 - RNA, 21 nt, Artificial Sequence
  Synthetic
aaagaaggggcagauuuggag

SEQ ID NO: 312054 - RNA, 22 nt, Artificial Sequence
  Synthetic
aaaagaaggggcagauuuggag

SEQ ID NO: 312055 - RNA, 23 nt, Artificial Sequence
  Synthetic
gaaaagaaggggcagauuuggag

SEQ ID NO: 312056 - RNA, 24 nt, Artificial Sequence
  Synthetic
agaaaagaaggggcagauuuggag

SEQ ID NO: 312057 - RNA, 18 nt, Artificial Sequence
  Synthetic
ggcuccuuuuauuuggag

SEQ ID NO: 312058 - RNA, 19 nt, Artificial Sequence
  Synthetic
uggcuccuuuuauuuggag

SEQ ID NO: 312059 - RNA, 20 nt, Artificial Sequence
  Synthetic
cuggcuccuuuuauuuggag

SEQ ID NO: 312060 - RNA, 21 nt, Artificial Sequence
  Synthetic
acuggcuccuuuuauuuggag

SEQ ID NO: 312061 - RNA, 22 nt, Artificial Sequence
  Synthetic
uacuggcuccuuuuauuuggag

SEQ ID NO: 312062 - RNA, 23 nt, Artificial Sequence
  Synthetic
auacuggcuccuuuuauuuggag

SEQ ID NO: 312063 - RNA, 24 nt, Artificial Sequence
  Synthetic
cauacuggcuccuuuuauuuggag

SEQ ID NO: 312064 - RNA, 18 nt, Artificial Sequence
  Synthetic
aauauuuaaacuuuggag

SEQ ID NO: 312065 - RNA, 19 nt, Artificial Sequence
  Synthetic
aaauauuuaaacuuuggag

SEQ ID NO: 312066 - RNA, 20 nt, Artificial Sequence
  Synthetic
caaauauuuaaacuuuggag

SEQ ID NO: 312067 - RNA, 21 nt, Artificial Sequence
  Synthetic
ucaaauauuuaaacuuuggag

SEQ ID NO: 312068 - RNA, 22 nt, Artificial Sequence
  Synthetic
uucaaauauuuaaacuuuggag

SEQ ID NO: 312069 - RNA, 23 nt, Artificial Sequence
  Synthetic
auucaaauauuuaaacuuuggag

SEQ ID NO: 312070 - RNA, 24 nt, Artificial Sequence
  Synthetic
uauucaaauauuuaaacuuuggag

SEQ ID NO: 312071 - RNA, 18 nt, Artificial Sequence
  Synthetic
cacacuggugcuuuggag

SEQ ID NO: 312072 - RNA, 19 nt, Artificial Sequence
  Synthetic
gcacacuggugcuuuggag

SEQ ID NO: 312073 - RNA, 20 nt, Artificial Sequence
  Synthetic
agcacacuggugcuuuggag

SEQ ID NO: 312074 - RNA, 21 nt, Artificial Sequence
  Synthetic
gagcacacuggugcuuuggag

SEQ ID NO: 312075 - RNA, 22 nt, Artificial Sequence
  Synthetic
agagcacacuggugcuuuggag

SEQ ID NO: 312076 - RNA, 23 nt, Artificial Sequence
  Synthetic
aagagcacacuggugcuuuggag

SEQ ID NO: 312077 - RNA, 24 nt, Artificial Sequence
  Synthetic
aaagagcacacuggugcuuuggag

SEQ ID NO: 312078 - RNA, 18 nt, Artificial Sequence
  Synthetic
agaaguagcauuuuggag

SEQ ID NO: 312079 - RNA, 19 nt, Artificial Sequence
  Synthetic
uagaaguagcauuuuggag

SEQ ID NO: 312080 - RNA, 20 nt, Artificial Sequence
  Synthetic
auagaaguagcauuuuggag

SEQ ID NO: 312081 - RNA, 21 nt, Artificial Sequence
  Synthetic
cauagaaguagcauuuuggag

SEQ ID NO: 312082 - RNA, 22 nt, Artificial Sequence
  Synthetic
ucauagaaguagcauuuuggag

SEQ ID NO: 312083 - RNA, 23 nt, Artificial Sequence
  Synthetic
uucauagaaguagcauuuuggag

SEQ ID NO: 312084 - RNA, 24 nt, Artificial Sequence
  Synthetic
auucauagaaguagcauuuuggag

SEQ ID NO: 312085 - RNA, 18 nt, Artificial Sequence
  Synthetic
guugauucucuuuuggag

SEQ ID NO: 312086 - RNA, 19 nt, Artificial Sequence
  Synthetic
uguugauucucuuuuggag

SEQ ID NO: 312087 - RNA, 20 nt, Artificial Sequence
  Synthetic
uuguugauucucuuuuggag

SEQ ID NO: 312088 - RNA, 21 nt, Artificial Sequence
  Synthetic
auuguugauucucuuuuggag

SEQ ID NO: 312089 - RNA, 22 nt, Artificial Sequence
  Synthetic
aauuguugauucucuuuuggag

SEQ ID NO: 312090 - RNA, 23 nt, Artificial Sequence
  Synthetic
aaauuguugauucucuuuuggag

SEQ ID NO: 312091 - RNA, 24 nt, Artificial Sequence
  Synthetic
uaaauuguugauucucuuuuggag

SEQ ID NO: 312092 - RNA, 18 nt, Artificial Sequence
  Synthetic
ugaguucuaaaaaaugag

SEQ ID NO: 312093 - RNA, 19 nt, Artificial Sequence
  Synthetic
uugaguucuaaaaaaugag

SEQ ID NO: 312094 - RNA, 20 nt, Artificial Sequence
  Synthetic
auugaguucuaaaaaaugag

SEQ ID NO: 312095 - RNA, 21 nt, Artificial Sequence
  Synthetic
aauugaguucuaaaaaaugag

SEQ ID NO: 312096 - RNA, 22 nt, Artificial Sequence
  Synthetic
gaauugaguucuaaaaaaugag

SEQ ID NO: 312097 - RNA, 23 nt, Artificial Sequence
  Synthetic
ugaauugaguucuaaaaaaugag

SEQ ID NO: 312098 - RNA, 24 nt, Artificial Sequence
  Synthetic
uugaauugaguucuaaaaaaugag

SEQ ID NO: 312099 - RNA, 18 nt, Artificial Sequence
  Synthetic
uaugaugugaaaaaugag

SEQ ID NO: 312100 - RNA, 19 nt, Artificial Sequence
  Synthetic
auaugaugugaaaaaugag

SEQ ID NO: 312101 - RNA, 20 nt, Artificial Sequence
  Synthetic
gauaugaugugaaaaaugag

SEQ ID NO: 312102 - RNA, 21 nt, Artificial Sequence
  Synthetic
ugauaugaugugaaaaaugag

SEQ ID NO: 312103 - RNA, 22 nt, Artificial Sequence
  Synthetic
uugauaugaugugaaaaaugag

SEQ ID NO: 312104 - RNA, 23 nt, Artificial Sequence
  Synthetic
guugauaugaugugaaaaaugag

SEQ ID NO: 312105 - RNA, 24 nt, Artificial Sequence
  Synthetic
gguugauaugaugugaaaaaugag

SEQ ID NO: 312106 - RNA, 18 nt, Artificial Sequence
  Synthetic
guucagaaucaaaaugag

SEQ ID NO: 312107 - RNA, 19 nt, Artificial Sequence
  Synthetic
aguucagaaucaaaaugag

SEQ ID NO: 312108 - RNA, 20 nt, Artificial Sequence
  Synthetic
aaguucagaaucaaaaugag

SEQ ID NO: 312109 - RNA, 21 nt, Artificial Sequence
  Synthetic
caaguucagaaucaaaaugag

SEQ ID NO: 312110 - RNA, 22 nt, Artificial Sequence
  Synthetic
ccaaguucagaaucaaaaugag

SEQ ID NO: 312111 - RNA, 23 nt, Artificial Sequence
  Synthetic
gccaaguucagaaucaaaaugag

SEQ ID NO: 312112 - RNA, 24 nt, Artificial Sequence
  Synthetic
ggccaaguucagaaucaaaaugag

SEQ ID NO: 312113 - RNA, 18 nt, Artificial Sequence
  Synthetic
agcaauaaaacaaaugag

SEQ ID NO: 312114 - RNA, 19 nt, Artificial Sequence
  Synthetic
gagcaauaaaacaaaugag

SEQ ID NO: 312115 - RNA, 20 nt, Artificial Sequence
  Synthetic
ggagcaauaaaacaaaugag

SEQ ID NO: 312116 - RNA, 21 nt, Artificial Sequence
  Synthetic
gggagcaauaaaacaaaugag

SEQ ID NO: 312117 - RNA, 22 nt, Artificial Sequence
  Synthetic
agggagcaauaaaacaaaugag

SEQ ID NO: 312118 - RNA, 23 nt, Artificial Sequence
  Synthetic
aagggagcaauaaaacaaaugag

SEQ ID NO: 312119 - RNA, 24 nt, Artificial Sequence
  Synthetic
aaagggagcaauaaaacaaaugag

SEQ ID NO: 312120 - RNA, 18 nt, Artificial Sequence
  Synthetic
acaauucagacaaaugag

SEQ ID NO: 312121 - RNA, 19 nt, Artificial Sequence
  Synthetic
aacaauucagacaaaugag

SEQ ID NO: 312122 - RNA, 20 nt, Artificial Sequence
  Synthetic
gaacaauucagacaaaugag

SEQ ID NO: 312123 - RNA, 21 nt, Artificial Sequence
  Synthetic
ugaacaauucagacaaaugag

SEQ ID NO: 312124 - RNA, 22 nt, Artificial Sequence
  Synthetic
augaacaauucagacaaaugag

SEQ ID NO: 312125 - RNA, 23 nt, Artificial Sequence
  Synthetic
gaugaacaauucagacaaaugag

SEQ ID NO: 312126 - RNA, 24 nt, Artificial Sequence
  Synthetic
ugaugaacaauucagacaaaugag

SEQ ID NO: 312127 - RNA, 18 nt, Artificial Sequence
  Synthetic
guggacaaggcaaaugag

SEQ ID NO: 312128 - RNA, 19 nt, Artificial Sequence
  Synthetic
aguggacaaggcaaaugag

SEQ ID NO: 312129 - RNA, 20 nt, Artificial Sequence
  Synthetic
caguggacaaggcaaaugag

SEQ ID NO: 312130 - RNA, 21 nt, Artificial Sequence
  Synthetic
acaguggacaaggcaaaugag

SEQ ID NO: 312131 - RNA, 22 nt, Artificial Sequence
  Synthetic
cacaguggacaaggcaaaugag

SEQ ID NO: 312132 - RNA, 23 nt, Artificial Sequence
  Synthetic
ucacaguggacaaggcaaaugag

SEQ ID NO: 312133 - RNA, 24 nt, Artificial Sequence
  Synthetic
aucacaguggacaaggcaaaugag

SEQ ID NO: 312134 - RNA, 18 nt, Artificial Sequence
  Synthetic
aagaagauucuaaaugag

SEQ ID NO: 312135 - RNA, 19 nt, Artificial Sequence
  Synthetic
aaagaagauucuaaaugag

SEQ ID NO: 312136 - RNA, 20 nt, Artificial Sequence
  Synthetic
uaaagaagauucuaaaugag

SEQ ID NO: 312137 - RNA, 21 nt, Artificial Sequence
  Synthetic
guaaagaagauucuaaaugag

SEQ ID NO: 312138 - RNA, 22 nt, Artificial Sequence
  Synthetic
uguaaagaagauucuaaaugag

SEQ ID NO: 312139 - RNA, 23 nt, Artificial Sequence
  Synthetic
uuguaaagaagauucuaaaugag

SEQ ID NO: 312140 - RNA, 24 nt, Artificial Sequence
  Synthetic
auuguaaagaagauucuaaaugag

SEQ ID NO: 312141 - RNA, 18 nt, Artificial Sequence
  Synthetic
uagcaaaugguaaaugag

SEQ ID NO: 312142 - RNA, 19 nt, Artificial Sequence
  Synthetic
uuagcaaaugguaaaugag

SEQ ID NO: 312143 - RNA, 20 nt, Artificial Sequence
  Synthetic
uuuagcaaaugguaaaugag

SEQ ID NO: 312144 - RNA, 21 nt, Artificial Sequence
  Synthetic
cuuuagcaaaugguaaaugag

SEQ ID NO: 312145 - RNA, 22 nt, Artificial Sequence
  Synthetic
gcuuuagcaaaugguaaaugag

SEQ ID NO: 312146 - RNA, 23 nt, Artificial Sequence
  Synthetic
ugcuuuagcaaaugguaaaugag

SEQ ID NO: 312147 - RNA, 24 nt, Artificial Sequence
  Synthetic
uugcuuuagcaaaugguaaaugag

SEQ ID NO: 312148 - RNA, 18 nt, Artificial Sequence
  Synthetic
gguggaacguuaaaugag

SEQ ID NO: 312149 - RNA, 19 nt, Artificial Sequence
  Synthetic
ugguggaacguuaaaugag

SEQ ID NO: 312150 - RNA, 20 nt, Artificial Sequence
  Synthetic
gugguggaacguuaaaugag

SEQ ID NO: 312151 - RNA, 21 nt, Artificial Sequence
  Synthetic
ggugguggaacguuaaaugag

SEQ ID NO: 312152 - RNA, 22 nt, Artificial Sequence
  Synthetic
aggugguggaacguuaaaugag

SEQ ID NO: 312153 - RNA, 23 nt, Artificial Sequence
  Synthetic
aaggugguggaacguuaaaugag

SEQ ID NO: 312154 - RNA, 24 nt, Artificial Sequence
  Synthetic
uaaggugguggaacguuaaaugag

SEQ ID NO: 312155 - RNA, 18 nt, Artificial Sequence
  Synthetic
cuucacuuucccaaugag

SEQ ID NO: 312156 - RNA, 19 nt, Artificial Sequence
  Synthetic
gcuucacuuucccaaugag

SEQ ID NO: 312157 - RNA, 20 nt, Artificial Sequence
  Synthetic
agcuucacuuucccaaugag

SEQ ID NO: 312158 - RNA, 21 nt, Artificial Sequence
  Synthetic
gagcuucacuuucccaaugag

SEQ ID NO: 312159 - RNA, 22 nt, Artificial Sequence
  Synthetic
agagcuucacuuucccaaugag

SEQ ID NO: 312160 - RNA, 23 nt, Artificial Sequence
  Synthetic
gagagcuucacuuucccaaugag

SEQ ID NO: 312161 - RNA, 24 nt, Artificial Sequence
  Synthetic
ggagagcuucacuuucccaaugag

SEQ ID NO: 312162 - RNA, 18 nt, Artificial Sequence
  Synthetic
gcaucacaaagcaaugag

SEQ ID NO: 312163 - RNA, 19 nt, Artificial Sequence
  Synthetic
agcaucacaaagcaaugag

SEQ ID NO: 312164 - RNA, 20 nt, Artificial Sequence
  Synthetic
gagcaucacaaagcaaugag

SEQ ID NO: 312165 - RNA, 21 nt, Artificial Sequence
  Synthetic
ugagcaucacaaagcaaugag

SEQ ID NO: 312166 - RNA, 22 nt, Artificial Sequence
  Synthetic
uugagcaucacaaagcaaugag

SEQ ID NO: 312167 - RNA, 23 nt, Artificial Sequence
  Synthetic
uuugagcaucacaaagcaaugag

SEQ ID NO: 312168 - RNA, 24 nt, Artificial Sequence
  Synthetic
uuuugagcaucacaaagcaaugag

SEQ ID NO: 312169 - RNA, 18 nt, Artificial Sequence
  Synthetic
uguuuaaauggcaaugag

SEQ ID NO: 312170 - RNA, 19 nt, Artificial Sequence
  Synthetic
auguuuaaauggcaaugag

SEQ ID NO: 312171 - RNA, 20 nt, Artificial Sequence
  Synthetic
cauguuuaaauggcaaugag

SEQ ID NO: 312172 - RNA, 21 nt, Artificial Sequence
  Synthetic
acauguuuaaauggcaaugag

SEQ ID NO: 312173 - RNA, 22 nt, Artificial Sequence
  Synthetic
cacauguuuaaauggcaaugag

SEQ ID NO: 312174 - RNA, 23 nt, Artificial Sequence
  Synthetic
acacauguuuaaauggcaaugag

SEQ ID NO: 312175 - RNA, 24 nt, Artificial Sequence
  Synthetic
uacacauguuuaaauggcaaugag

SEQ ID NO: 312176 - RNA, 18 nt, Artificial Sequence
  Synthetic
uuuaaaaagugcaaugag

SEQ ID NO: 312177 - RNA, 19 nt, Artificial Sequence
  Synthetic
uuuuaaaaagugcaaugag

SEQ ID NO: 312178 - RNA, 20 nt, Artificial Sequence
  Synthetic
guuuuaaaaagugcaaugag

SEQ ID NO: 312179 - RNA, 21 nt, Artificial Sequence
  Synthetic
aguuuuaaaaagugcaaugag

SEQ ID NO: 312180 - RNA, 22 nt, Artificial Sequence
  Synthetic
caguuuuaaaaagugcaaugag

SEQ ID NO: 312181 - RNA, 23 nt, Artificial Sequence
  Synthetic
gcaguuuuaaaaagugcaaugag

SEQ ID NO: 312182 - RNA, 24 nt, Artificial Sequence
  Synthetic
ugcaguuuuaaaaagugcaaugag

SEQ ID NO: 312183 - RNA, 18 nt, Artificial Sequence
  Synthetic
aaaggagugaucaaugag

SEQ ID NO: 312184 - RNA, 19 nt, Artificial Sequence
  Synthetic
aaaaggagugaucaaugag

SEQ ID NO: 312185 - RNA, 20 nt, Artificial Sequence
  Synthetic
gaaaaggagugaucaaugag

SEQ ID NO: 312186 - RNA, 21 nt, Artificial Sequence
  Synthetic
agaaaaggagugaucaaugag

SEQ ID NO: 312187 - RNA, 22 nt, Artificial Sequence
  Synthetic
aagaaaaggagugaucaaugag

SEQ ID NO: 312188 - RNA, 23 nt, Artificial Sequence
  Synthetic
aaagaaaaggagugaucaaugag

SEQ ID NO: 312189 - RNA, 24 nt, Artificial Sequence
  Synthetic
aaaagaaaaggagugaucaaugag

SEQ ID NO: 312190 - RNA, 18 nt, Artificial Sequence
  Synthetic
acauaucaagucaaugag

SEQ ID NO: 312191 - RNA, 19 nt, Artificial Sequence
  Synthetic
gacauaucaagucaaugag

SEQ ID NO: 312192 - RNA, 20 nt, Artificial Sequence
  Synthetic
agacauaucaagucaaugag

SEQ ID NO: 312193 - RNA, 21 nt, Artificial Sequence
  Synthetic
cagacauaucaagucaaugag

SEQ ID NO: 312194 - RNA, 22 nt, Artificial Sequence
  Synthetic
acagacauaucaagucaaugag

SEQ ID NO: 312195 - RNA, 23 nt, Artificial Sequence
  Synthetic
cacagacauaucaagucaaugag

SEQ ID NO: 312196 - RNA, 24 nt, Artificial Sequence
  Synthetic
gcacagacauaucaagucaaugag

SEQ ID NO: 312197 - RNA, 18 nt, Artificial Sequence
  Synthetic
caggcauuaaagaaugag

SEQ ID NO: 312198 - RNA, 19 nt, Artificial Sequence
  Synthetic
ccaggcauuaaagaaugag

SEQ ID NO: 312199 - RNA, 20 nt, Artificial Sequence
  Synthetic
gccaggcauuaaagaaugag

SEQ ID NO: 312200 - RNA, 21 nt, Artificial Sequence
  Synthetic
agccaggcauuaaagaaugag

SEQ ID NO: 312201 - RNA, 22 nt, Artificial Sequence
  Synthetic
aagccaggcauuaaagaaugag

SEQ ID NO: 312202 - RNA, 23 nt, Artificial Sequence
  Synthetic
uaagccaggcauuaaagaaugag

SEQ ID NO: 312203 - RNA, 24 nt, Artificial Sequence
  Synthetic
uuaagccaggcauuaaagaaugag

SEQ ID NO: 312204 - RNA, 18 nt, Artificial Sequence
  Synthetic
gcacagaauaagaaugag

SEQ ID NO: 312205 - RNA, 19 nt, Artificial Sequence
  Synthetic
ugcacagaauaagaaugag

SEQ ID NO: 312206 - RNA, 20 nt, Artificial Sequence
  Synthetic
augcacagaauaagaaugag

SEQ ID NO: 312207 - RNA, 21 nt, Artificial Sequence
  Synthetic
aaugcacagaauaagaaugag

SEQ ID NO: 312208 - RNA, 22 nt, Artificial Sequence
  Synthetic
aaaugcacagaauaagaaugag

SEQ ID NO: 312209 - RNA, 23 nt, Artificial Sequence
  Synthetic
caaaugcacagaauaagaaugag

SEQ ID NO: 312210 - RNA, 24 nt, Artificial Sequence
  Synthetic
ucaaaugcacagaauaagaaugag

SEQ ID NO: 312211 - RNA, 18 nt, Artificial Sequence
  Synthetic
aguugaaaucagaaugag

SEQ ID NO: 312212 - RNA, 19 nt, Artificial Sequence
  Synthetic
aaguugaaaucagaaugag

SEQ ID NO: 312213 - RNA, 20 nt, Artificial Sequence
  Synthetic
aaaguugaaaucagaaugag

SEQ ID NO: 312214 - RNA, 21 nt, Artificial Sequence
  Synthetic
aaaaguugaaaucagaaugag

SEQ ID NO: 312215 - RNA, 22 nt, Artificial Sequence
  Synthetic
uaaaaguugaaaucagaaugag

SEQ ID NO: 312216 - RNA, 23 nt, Artificial Sequence
  Synthetic
auaaaaguugaaaucagaaugag

SEQ ID NO: 312217 - RNA, 24 nt, Artificial Sequence
  Synthetic
aauaaaaguugaaaucagaaugag

SEQ ID NO: 312218 - RNA, 18 nt, Artificial Sequence
  Synthetic
uuacuuggagagaaugag

SEQ ID NO: 312219 - RNA, 19 nt, Artificial Sequence
  Synthetic
guuacuuggagagaaugag

SEQ ID NO: 312220 - RNA, 20 nt, Artificial Sequence
  Synthetic
uguuacuuggagagaaugag

SEQ ID NO: 312221 - RNA, 21 nt, Artificial Sequence
  Synthetic
uuguuacuuggagagaaugag

SEQ ID NO: 312222 - RNA, 22 nt, Artificial Sequence
  Synthetic
uuuguuacuuggagagaaugag

SEQ ID NO: 312223 - RNA, 23 nt, Artificial Sequence
  Synthetic
uuuuguuacuuggagagaaugag

SEQ ID NO: 312224 - RNA, 24 nt, Artificial Sequence
  Synthetic
cuuuuguuacuuggagagaaugag

SEQ ID NO: 312225 - RNA, 18 nt, Artificial Sequence
  Synthetic
gggcuaugauagaaugag

SEQ ID NO: 312226 - RNA, 19 nt, Artificial Sequence
  Synthetic
ugggcuaugauagaaugag

SEQ ID NO: 312227 - RNA, 20 nt, Artificial Sequence
  Synthetic
augggcuaugauagaaugag

SEQ ID NO: 312228 - RNA, 21 nt, Artificial Sequence
  Synthetic
caugggcuaugauagaaugag

SEQ ID NO: 312229 - RNA, 22 nt, Artificial Sequence
  Synthetic
acaugggcuaugauagaaugag

SEQ ID NO: 312230 - RNA, 23 nt, Artificial Sequence
  Synthetic
aacaugggcuaugauagaaugag

SEQ ID NO: 312231 - RNA, 24 nt, Artificial Sequence
  Synthetic
aaacaugggcuaugauagaaugag

SEQ ID NO: 312232 - RNA, 18 nt, Artificial Sequence
  Synthetic
uuugggagugggaaugag

SEQ ID NO: 312233 - RNA, 19 nt, Artificial Sequence
  Synthetic
guuugggagugggaaugag

SEQ ID NO: 312234 - RNA, 20 nt, Artificial Sequence
  Synthetic
gguuugggagugggaaugag

SEQ ID NO: 312235 - RNA, 21 nt, Artificial Sequence
  Synthetic
ugguuugggagugggaaugag

SEQ ID NO: 312236 - RNA, 22 nt, Artificial Sequence
  Synthetic
uugguuugggagugggaaugag

SEQ ID NO: 312237 - RNA, 23 nt, Artificial Sequence
  Synthetic
guugguuugggagugggaaugag

SEQ ID NO: 312238 - RNA, 24 nt, Artificial Sequence
  Synthetic
gguugguuugggagugggaaugag

SEQ ID NO: 312239 - RNA, 18 nt, Artificial Sequence
  Synthetic
gcuuuuaaucugaaugag

SEQ ID NO: 312240 - RNA, 19 nt, Artificial Sequence
  Synthetic
agcuuuuaaucugaaugag

SEQ ID NO: 312241 - RNA, 20 nt, Artificial Sequence
  Synthetic
uagcuuuuaaucugaaugag

SEQ ID NO: 312242 - RNA, 21 nt, Artificial Sequence
  Synthetic
uuagcuuuuaaucugaaugag

SEQ ID NO: 312243 - RNA, 22 nt, Artificial Sequence
  Synthetic
uuuagcuuuuaaucugaaugag

SEQ ID NO: 312244 - RNA, 23 nt, Artificial Sequence
  Synthetic
cuuuagcuuuuaaucugaaugag

SEQ ID NO: 312245 - RNA, 24 nt, Artificial Sequence
  Synthetic
acuuuagcuuuuaaucugaaugag

SEQ ID NO: 312246 - RNA, 18 nt, Artificial Sequence
  Synthetic
cauacaacagauaaugag

SEQ ID NO: 312247 - RNA, 19 nt, Artificial Sequence
  Synthetic
ccauacaacagauaaugag

SEQ ID NO: 312248 - RNA, 20 nt, Artificial Sequence
  Synthetic
accauacaacagauaaugag

SEQ ID NO: 312249 - RNA, 21 nt, Artificial Sequence
  Synthetic
uaccauacaacagauaaugag

SEQ ID NO: 312250 - RNA, 22 nt, Artificial Sequence
  Synthetic
uuaccauacaacagauaaugag

SEQ ID NO: 312251 - RNA, 23 nt, Artificial Sequence
  Synthetic
auuaccauacaacagauaaugag

SEQ ID NO: 312252 - RNA, 24 nt, Artificial Sequence
  Synthetic
uauuaccauacaacagauaaugag

SEQ ID NO: 312253 - RNA, 18 nt, Artificial Sequence
  Synthetic
acagucacccaacaugag

SEQ ID NO: 312254 - RNA, 19 nt, Artificial Sequence
  Synthetic
aacagucacccaacaugag

SEQ ID NO: 312255 - RNA, 20 nt, Artificial Sequence
  Synthetic
gaacagucacccaacaugag

SEQ ID NO: 312256 - RNA, 21 nt, Artificial Sequence
  Synthetic
agaacagucacccaacaugag

SEQ ID NO: 312257 - RNA, 22 nt, Artificial Sequence
  Synthetic
aagaacagucacccaacaugag

SEQ ID NO: 312258 - RNA, 23 nt, Artificial Sequence
  Synthetic
aaagaacagucacccaacaugag

SEQ ID NO: 312259 - RNA, 24 nt, Artificial Sequence
  Synthetic
aaaagaacagucacccaacaugag

SEQ ID NO: 312260 - RNA, 18 nt, Artificial Sequence
  Synthetic
uuuuugacagaacaugag

SEQ ID NO: 312261 - RNA, 19 nt, Artificial Sequence
  Synthetic
guuuuugacagaacaugag

SEQ ID NO: 312262 - RNA, 20 nt, Artificial Sequence
  Synthetic
uguuuuugacagaacaugag

SEQ ID NO: 312263 - RNA, 21 nt, Artificial Sequence
  Synthetic
auguuuuugacagaacaugag

SEQ ID NO: 312264 - RNA, 22 nt, Artificial Sequence
  Synthetic
gauguuuuugacagaacaugag

SEQ ID NO: 312265 - RNA, 23 nt, Artificial Sequence
  Synthetic
ggauguuuuugacagaacaugag

SEQ ID NO: 312266 - RNA, 24 nt, Artificial Sequence
  Synthetic
uggauguuuuugacagaacaugag

SEQ ID NO: 312267 - RNA, 18 nt, Artificial Sequence
  Synthetic
gguaaagauuaacaugag

SEQ ID NO: 312268 - RNA, 19 nt, Artificial Sequence
  Synthetic
ggguaaagauuaacaugag

SEQ ID NO: 312269 - RNA, 20 nt, Artificial Sequence
  Synthetic
cggguaaagauuaacaugag

SEQ ID NO: 312270 - RNA, 21 nt, Artificial Sequence
  Synthetic
acggguaaagauuaacaugag

SEQ ID NO: 312271 - RNA, 22 nt, Artificial Sequence
  Synthetic
cacggguaaagauuaacaugag

SEQ ID NO: 312272 - RNA, 23 nt, Artificial Sequence
  Synthetic
acacggguaaagauuaacaugag

SEQ ID NO: 312273 - RNA, 24 nt, Artificial Sequence
  Synthetic
uacacggguaaagauuaacaugag

SEQ ID NO: 312274 - RNA, 18 nt, Artificial Sequence
  Synthetic
gaaaauuaaacacaugag

SEQ ID NO: 312275 - RNA, 19 nt, Artificial Sequence
  Synthetic
ugaaaauuaaacacaugag

SEQ ID NO: 312276 - RNA, 20 nt, Artificial Sequence
  Synthetic
cugaaaauuaaacacaugag

SEQ ID NO: 312277 - RNA, 21 nt, Artificial Sequence
  Synthetic
gcugaaaauuaaacacaugag

SEQ ID NO: 312278 - RNA, 22 nt, Artificial Sequence
  Synthetic
ugcugaaaauuaaacacaugag

SEQ ID NO: 312279 - RNA, 23 nt, Artificial Sequence
  Synthetic
uugcugaaaauuaaacacaugag

SEQ ID NO: 312280 - RNA, 24 nt, Artificial Sequence
  Synthetic
guugcugaaaauuaaacacaugag

SEQ ID NO: 312281 - RNA, 18 nt, Artificial Sequence
  Synthetic
acagaaaaaugacaugag

SEQ ID NO: 312282 - RNA, 19 nt, Artificial Sequence
  Synthetic
aacagaaaaaugacaugag

SEQ ID NO: 312283 - RNA, 20 nt, Artificial Sequence
  Synthetic
aaacagaaaaaugacaugag

SEQ ID NO: 312284 - RNA, 21 nt, Artificial Sequence
  Synthetic
gaaacagaaaaaugacaugag

SEQ ID NO: 312285 - RNA, 22 nt, Artificial Sequence
  Synthetic
ugaaacagaaaaaugacaugag

SEQ ID NO: 312286 - RNA, 23 nt, Artificial Sequence
  Synthetic
cugaaacagaaaaaugacaugag

SEQ ID NO: 312287 - RNA, 24 nt, Artificial Sequence
  Synthetic
ccugaaacagaaaaaugacaugag

SEQ ID NO: 312288 - RNA, 18 nt, Artificial Sequence
  Synthetic
agauacuuacaccaugag

SEQ ID NO: 312289 - RNA, 19 nt, Artificial Sequence
  Synthetic
gagauacuuacaccaugag

SEQ ID NO: 312290 - RNA, 20 nt, Artificial Sequence
  Synthetic
ugagauacuuacaccaugag

SEQ ID NO: 312291 - RNA, 21 nt, Artificial Sequence
  Synthetic
cugagauacuuacaccaugag

SEQ ID NO: 312292 - RNA, 22 nt, Artificial Sequence
  Synthetic
acugagauacuuacaccaugag

SEQ ID NO: 312293 - RNA, 23 nt, Artificial Sequence
  Synthetic
cacugagauacuuacaccaugag

SEQ ID NO: 312294 - RNA, 24 nt, Artificial Sequence
  Synthetic
ucacugagauacuuacaccaugag

SEQ ID NO: 312295 - RNA, 18 nt, Artificial Sequence
  Synthetic
auuauuuuucaccaugag

SEQ ID NO: 312296 - RNA, 19 nt, Artificial Sequence
  Synthetic
uauuauuuuucaccaugag

SEQ ID NO: 312297 - RNA, 20 nt, Artificial Sequence
  Synthetic
uuauuauuuuucaccaugag

SEQ ID NO: 312298 - RNA, 21 nt, Artificial Sequence
  Synthetic
auuauuauuuuucaccaugag

SEQ ID NO: 312299 - RNA, 22 nt, Artificial Sequence
  Synthetic
uauuauuauuuuucaccaugag

SEQ ID NO: 312300 - RNA, 23 nt, Artificial Sequence
  Synthetic
uuauuauuauuuuucaccaugag

SEQ ID NO: 312301 - RNA, 24 nt, Artificial Sequence
  Synthetic
auuauuauuauuuuucaccaugag

SEQ ID NO: 312302 - RNA, 18 nt, Artificial Sequence
  Synthetic
uguaauauuuaccaugag

SEQ ID NO: 312303 - RNA, 19 nt, Artificial Sequence
  Synthetic
auguaauauuuaccaugag

SEQ ID NO: 312304 - RNA, 20 nt, Artificial Sequence
  Synthetic
gauguaauauuuaccaugag

SEQ ID NO: 312305 - RNA, 21 nt, Artificial Sequence
  Synthetic
agauguaauauuuaccaugag

SEQ ID NO: 312306 - RNA, 22 nt, Artificial Sequence
  Synthetic
aagauguaauauuuaccaugag

SEQ ID NO: 312307 - RNA, 23 nt, Artificial Sequence
  Synthetic
aaagauguaauauuuaccaugag

SEQ ID NO: 312308 - RNA, 24 nt, Artificial Sequence
  Synthetic
uaaagauguaauauuuaccaugag

SEQ ID NO: 312309 - RNA, 18 nt, Artificial Sequence
  Synthetic
uuaguuugagagcaugag

SEQ ID NO: 312310 - RNA, 19 nt, Artificial Sequence
  Synthetic
cuuaguuugagagcaugag

SEQ ID NO: 312311 - RNA, 20 nt, Artificial Sequence
  Synthetic
ucuuaguuugagagcaugag

SEQ ID NO: 312312 - RNA, 21 nt, Artificial Sequence
  Synthetic
cucuuaguuugagagcaugag

SEQ ID NO: 312313 - RNA, 22 nt, Artificial Sequence
  Synthetic
acucuuaguuugagagcaugag

SEQ ID NO: 312314 - RNA, 23 nt, Artificial Sequence
  Synthetic
uacucuuaguuugagagcaugag

SEQ ID NO: 312315 - RNA, 24 nt, Artificial Sequence
  Synthetic
auacucuuaguuugagagcaugag

SEQ ID NO: 312316 - RNA, 18 nt, Artificial Sequence
  Synthetic
aaguuagagaaagaugag

SEQ ID NO: 312317 - RNA, 19 nt, Artificial Sequence
  Synthetic
gaaguuagagaaagaugag

SEQ ID NO: 312318 - RNA, 20 nt, Artificial Sequence
  Synthetic
ugaaguuagagaaagaugag

SEQ ID NO: 312319 - RNA, 21 nt, Artificial Sequence
  Synthetic
augaaguuagagaaagaugag

SEQ ID NO: 312320 - RNA, 22 nt, Artificial Sequence
  Synthetic
aaugaaguuagagaaagaugag

SEQ ID NO: 312321 - RNA, 23 nt, Artificial Sequence
  Synthetic
aaaugaaguuagagaaagaugag

SEQ ID NO: 312322 - RNA, 24 nt, Artificial Sequence
  Synthetic
gaaaugaaguuagagaaagaugag

SEQ ID NO: 312323 - RNA, 18 nt, Artificial Sequence
  Synthetic
ugauaaugacaagaugag

SEQ ID NO: 312324 - RNA, 19 nt, Artificial Sequence
  Synthetic
augauaaugacaagaugag

SEQ ID NO: 312325 - RNA, 20 nt, Artificial Sequence
  Synthetic
uaugauaaugacaagaugag

SEQ ID NO: 312326 - RNA, 21 nt, Artificial Sequence
  Synthetic
guaugauaaugacaagaugag

SEQ ID NO: 312327 - RNA, 22 nt, Artificial Sequence
  Synthetic
gguaugauaaugacaagaugag

SEQ ID NO: 312328 - RNA, 23 nt, Artificial Sequence
  Synthetic
ugguaugauaaugacaagaugag

SEQ ID NO: 312329 - RNA, 24 nt, Artificial Sequence
  Synthetic
gugguaugauaaugacaagaugag

SEQ ID NO: 312330 - RNA, 18 nt, Artificial Sequence
  Synthetic
ugcuuaaaggaagaugag

SEQ ID NO: 312331 - RNA, 19 nt, Artificial Sequence
  Synthetic
augcuuaaaggaagaugag

SEQ ID NO: 312332 - RNA, 20 nt, Artificial Sequence
  Synthetic
aaugcuuaaaggaagaugag

SEQ ID NO: 312333 - RNA, 21 nt, Artificial Sequence
  Synthetic
aaaugcuuaaaggaagaugag

SEQ ID NO: 312334 - RNA, 22 nt, Artificial Sequence
  Synthetic
gaaaugcuuaaaggaagaugag

SEQ ID NO: 312335 - RNA, 23 nt, Artificial Sequence
  Synthetic
agaaaugcuuaaaggaagaugag

SEQ ID NO: 312336 - RNA, 24 nt, Artificial Sequence
  Synthetic
cagaaaugcuuaaaggaagaugag

SEQ ID NO: 312337 - RNA, 18 nt, Artificial Sequence
  Synthetic
aaaauagggagagaugag

SEQ ID NO: 312338 - RNA, 19 nt, Artificial Sequence
  Synthetic
gaaaauagggagagaugag

SEQ ID NO: 312339 - RNA, 20 nt, Artificial Sequence
  Synthetic
cgaaaauagggagagaugag

SEQ ID NO: 312340 - RNA, 21 nt, Artificial Sequence
  Synthetic
ccgaaaauagggagagaugag

SEQ ID NO: 312341 - RNA, 22 nt, Artificial Sequence
  Synthetic
accgaaaauagggagagaugag

SEQ ID NO: 312342 - RNA, 23 nt, Artificial Sequence
  Synthetic
aaccgaaaauagggagagaugag

SEQ ID NO: 312343 - RNA, 24 nt, Artificial Sequence
  Synthetic
aaaccgaaaauagggagagaugag

SEQ ID NO: 312344 - RNA, 18 nt, Artificial Sequence
  Synthetic
uauagaaauagagaugag

SEQ ID NO: 312345 - RNA, 19 nt, Artificial Sequence
  Synthetic
guauagaaauagagaugag

SEQ ID NO: 312346 - RNA, 20 nt, Artificial Sequence
  Synthetic
uguauagaaauagagaugag

SEQ ID NO: 312347 - RNA, 21 nt, Artificial Sequence
  Synthetic
guguauagaaauagagaugag

SEQ ID NO: 312348 - RNA, 22 nt, Artificial Sequence
  Synthetic
uguguauagaaauagagaugag

SEQ ID NO: 312349 - RNA, 23 nt, Artificial Sequence
  Synthetic
uuguguauagaaauagagaugag

SEQ ID NO: 312350 - RNA, 24 nt, Artificial Sequence
  Synthetic
uuuguguauagaaauagagaugag

SEQ ID NO: 312351 - RNA, 18 nt, Artificial Sequence
  Synthetic
uauucccuaggagaugag

SEQ ID NO: 312352 - RNA, 19 nt, Artificial Sequence
  Synthetic
guauucccuaggagaugag

SEQ ID NO: 312353 - RNA, 20 nt, Artificial Sequence
  Synthetic
cguauucccuaggagaugag

SEQ ID NO: 312354 - RNA, 21 nt, Artificial Sequence
  Synthetic
acguauucccuaggagaugag

SEQ ID NO: 312355 - RNA, 22 nt, Artificial Sequence
  Synthetic
aacguauucccuaggagaugag

SEQ ID NO: 312356 - RNA, 23 nt, Artificial Sequence
  Synthetic
aaacguauucccuaggagaugag

SEQ ID NO: 312357 - RNA, 24 nt, Artificial Sequence
  Synthetic
uaaacguauucccuaggagaugag

SEQ ID NO: 312358 - RNA, 18 nt, Artificial Sequence
  Synthetic
guaaaguucguagaugag

SEQ ID NO: 312359 - RNA, 19 nt, Artificial Sequence
  Synthetic
aguaaaguucguagaugag

SEQ ID NO: 312360 - RNA, 20 nt, Artificial Sequence
  Synthetic
gaguaaaguucguagaugag

SEQ ID NO: 312361 - RNA, 21 nt, Artificial Sequence
  Synthetic
agaguaaaguucguagaugag

SEQ ID NO: 312362 - RNA, 22 nt, Artificial Sequence
  Synthetic
cagaguaaaguucguagaugag

SEQ ID NO: 312363 - RNA, 23 nt, Artificial Sequence
  Synthetic
ucagaguaaaguucguagaugag

SEQ ID NO: 312364 - RNA, 24 nt, Artificial Sequence
  Synthetic
uucagaguaaaguucguagaugag

SEQ ID NO: 312365 - RNA, 18 nt, Artificial Sequence
  Synthetic
auccuugaguuagaugag

SEQ ID NO: 312366 - RNA, 19 nt, Artificial Sequence
  Synthetic
gauccuugaguuagaugag

SEQ ID NO: 312367 - RNA, 20 nt, Artificial Sequence
  Synthetic
ggauccuugaguuagaugag

SEQ ID NO: 312368 - RNA, 21 nt, Artificial Sequence
  Synthetic
uggauccuugaguuagaugag

SEQ ID NO: 312369 - RNA, 22 nt, Artificial Sequence
  Synthetic
cuggauccuugaguuagaugag

SEQ ID NO: 312370 - RNA, 23 nt, Artificial Sequence
  Synthetic
acuggauccuugaguuagaugag

SEQ ID NO: 312371 - RNA, 24 nt, Artificial Sequence
  Synthetic
gacuggauccuugaguuagaugag

SEQ ID NO: 312372 - RNA, 18 nt, Artificial Sequence
  Synthetic
ugggucuuaaaggaugag

SEQ ID NO: 312373 - RNA, 19 nt, Artificial Sequence
  Synthetic
augggucuuaaaggaugag

SEQ ID NO: 312374 - RNA, 20 nt, Artificial Sequence
  Synthetic
gaugggucuuaaaggaugag

SEQ ID NO: 312375 - RNA, 21 nt, Artificial Sequence
  Synthetic
ggaugggucuuaaaggaugag

SEQ ID NO: 312376 - RNA, 22 nt, Artificial Sequence
  Synthetic
gggaugggucuuaaaggaugag

SEQ ID NO: 312377 - RNA, 23 nt, Artificial Sequence
  Synthetic
ugggaugggucuuaaaggaugag

SEQ ID NO: 312378 - RNA, 24 nt, Artificial Sequence
  Synthetic
cugggaugggucuuaaaggaugag

SEQ ID NO: 312379 - RNA, 18 nt, Artificial Sequence
  Synthetic
gcacuuugggaggaugag

SEQ ID NO: 312380 - RNA, 19 nt, Artificial Sequence
  Synthetic
agcacuuugggaggaugag

SEQ ID NO: 312381 - RNA, 20 nt, Artificial Sequence
  Synthetic
cagcacuuugggaggaugag

SEQ ID NO: 312382 - RNA, 21 nt, Artificial Sequence
  Synthetic
ccagcacuuugggaggaugag

SEQ ID NO: 312383 - RNA, 22 nt, Artificial Sequence
  Synthetic
cccagcacuuugggaggaugag

SEQ ID NO: 312384 - RNA, 23 nt, Artificial Sequence
  Synthetic
ucccagcacuuugggaggaugag

SEQ ID NO: 312385 - RNA, 24 nt, Artificial Sequence
  Synthetic
aucccagcacuuugggaggaugag

SEQ ID NO: 312386 - RNA, 18 nt, Artificial Sequence
  Synthetic
aaacaaaaugaggaugag

SEQ ID NO: 312387 - RNA, 19 nt, Artificial Sequence
  Synthetic
aaaacaaaaugaggaugag

SEQ ID NO: 312388 - RNA, 20 nt, Artificial Sequence
  Synthetic
caaaacaaaaugaggaugag

SEQ ID NO: 312389 - RNA, 21 nt, Artificial Sequence
  Synthetic
acaaaacaaaaugaggaugag

SEQ ID NO: 312390 - RNA, 22 nt, Artificial Sequence
  Synthetic
aacaaaacaaaaugaggaugag

SEQ ID NO: 312391 - RNA, 23 nt, Artificial Sequence
  Synthetic
aaacaaaacaaaaugaggaugag

SEQ ID NO: 312392 - RNA, 24 nt, Artificial Sequence
  Synthetic
aaaacaaaacaaaaugaggaugag

SEQ ID NO: 312393 - RNA, 18 nt, Artificial Sequence
  Synthetic
agcagaucaauggaugag

SEQ ID NO: 312394 - RNA, 19 nt, Artificial Sequence
  Synthetic
cagcagaucaauggaugag

SEQ ID NO: 312395 - RNA, 20 nt, Artificial Sequence
  Synthetic
ucagcagaucaauggaugag

SEQ ID NO: 312396 - RNA, 21 nt, Artificial Sequence
  Synthetic
aucagcagaucaauggaugag

SEQ ID NO: 312397 - RNA, 22 nt, Artificial Sequence
  Synthetic
caucagcagaucaauggaugag

SEQ ID NO: 312398 - RNA, 23 nt, Artificial Sequence
  Synthetic
gcaucagcagaucaauggaugag

SEQ ID NO: 312399 - RNA, 24 nt, Artificial Sequence
  Synthetic
ggcaucagcagaucaauggaugag

SEQ ID NO: 312400 - RNA, 18 nt, Artificial Sequence
  Synthetic
gcauugugacuggaugag

SEQ ID NO: 312401 - RNA, 19 nt, Artificial Sequence
  Synthetic
ugcauugugacuggaugag

SEQ ID NO: 312402 - RNA, 20 nt, Artificial Sequence
  Synthetic
uugcauugugacuggaugag

SEQ ID NO: 312403 - RNA, 21 nt, Artificial Sequence
  Synthetic
uuugcauugugacuggaugag

SEQ ID NO: 312404 - RNA, 22 nt, Artificial Sequence
  Synthetic
uuuugcauugugacuggaugag

SEQ ID NO: 312405 - RNA, 23 nt, Artificial Sequence
  Synthetic
uuuuugcauugugacuggaugag

SEQ ID NO: 312406 - RNA, 24 nt, Artificial Sequence
  Synthetic
auuuuugcauugugacuggaugag

SEQ ID NO: 312407 - RNA, 18 nt, Artificial Sequence
  Synthetic
uuugaccaucaugaugag

SEQ ID NO: 312408 - RNA, 19 nt, Artificial Sequence
  Synthetic
cuuugaccaucaugaugag

SEQ ID NO: 312409 - RNA, 20 nt, Artificial Sequence
  Synthetic
gcuuugaccaucaugaugag

SEQ ID NO: 312410 - RNA, 21 nt, Artificial Sequence
  Synthetic
ggcuuugaccaucaugaugag

SEQ ID NO: 312411 - RNA, 22 nt, Artificial Sequence
  Synthetic
aggcuuugaccaucaugaugag

SEQ ID NO: 312412 - RNA, 23 nt, Artificial Sequence
  Synthetic
caggcuuugaccaucaugaugag

SEQ ID NO: 312413 - RNA, 24 nt, Artificial Sequence
  Synthetic
ucaggcuuugaccaucaugaugag

SEQ ID NO: 312414 - RNA, 18 nt, Artificial Sequence
  Synthetic
aaguaaguaaguuaugag

SEQ ID NO: 312415 - RNA, 19 nt, Artificial Sequence
  Synthetic
uaaguaaguaaguuaugag

SEQ ID NO: 312416 - RNA, 20 nt, Artificial Sequence
  Synthetic
auaaguaaguaaguuaugag

SEQ ID NO: 312417 - RNA, 21 nt, Artificial Sequence
  Synthetic
uauaaguaaguaaguuaugag

SEQ ID NO: 312418 - RNA, 22 nt, Artificial Sequence
  Synthetic
uuauaaguaaguaaguuaugag

SEQ ID NO: 312419 - RNA, 23 nt, Artificial Sequence
  Synthetic
cuuauaaguaaguaaguuaugag

SEQ ID NO: 312420 - RNA, 24 nt, Artificial Sequence
  Synthetic
ccuuauaaguaaguaaguuaugag

SEQ ID NO: 312421 - RNA, 18 nt, Artificial Sequence
  Synthetic
uauguacucaguuaugag

SEQ ID NO: 312422 - RNA, 19 nt, Artificial Sequence
  Synthetic
auauguacucaguuaugag

SEQ ID NO: 312423 - RNA, 20 nt, Artificial Sequence
  Synthetic
uauauguacucaguuaugag

SEQ ID NO: 312424 - RNA, 21 nt, Artificial Sequence
  Synthetic
cuauauguacucaguuaugag

SEQ ID NO: 312425 - RNA, 22 nt, Artificial Sequence
  Synthetic
acuauauguacucaguuaugag

SEQ ID NO: 312426 - RNA, 23 nt, Artificial Sequence
  Synthetic
uacuauauguacucaguuaugag

SEQ ID NO: 312427 - RNA, 24 nt, Artificial Sequence
  Synthetic
auacuauauguacucaguuaugag

SEQ ID NO: 312428 - RNA, 18 nt, Artificial Sequence
  Synthetic
uaaucauuuaguuaugag

SEQ ID NO: 312429 - RNA, 19 nt, Artificial Sequence
  Synthetic
guaaucauuuaguuaugag

SEQ ID NO: 312430 - RNA, 20 nt, Artificial Sequence
  Synthetic
uguaaucauuuaguuaugag

SEQ ID NO: 312431 - RNA, 21 nt, Artificial Sequence
  Synthetic
guguaaucauuuaguuaugag

SEQ ID NO: 312432 - RNA, 22 nt, Artificial Sequence
  Synthetic
aguguaaucauuuaguuaugag

SEQ ID NO: 312433 - RNA, 23 nt, Artificial Sequence
  Synthetic
aaguguaaucauuuaguuaugag

SEQ ID NO: 312434 - RNA, 24 nt, Artificial Sequence
  Synthetic
aaaguguaaucauuuaguuaugag

SEQ ID NO: 312435 - RNA, 18 nt, Artificial Sequence
  Synthetic
auguuauuuaguuaugag

SEQ ID NO: 312436 - RNA, 19 nt, Artificial Sequence
  Synthetic
aauguuauuuaguuaugag

SEQ ID NO: 312437 - RNA, 20 nt, Artificial Sequence
  Synthetic
aaauguuauuuaguuaugag

SEQ ID NO: 312438 - RNA, 21 nt, Artificial Sequence
  Synthetic
aaaauguuauuuaguuaugag

SEQ ID NO: 312439 - RNA, 22 nt, Artificial Sequence
  Synthetic
aaaaauguuauuuaguuaugag

SEQ ID NO: 312440 - RNA, 23 nt, Artificial Sequence
  Synthetic
uaaaaauguuauuuaguuaugag

SEQ ID NO: 312441 - RNA, 24 nt, Artificial Sequence
  Synthetic
auaaaaauguuauuuaguuaugag

SEQ ID NO: 312442 - RNA, 18 nt, Artificial Sequence
  Synthetic
uuuucagugauuuaugag

SEQ ID NO: 312443 - RNA, 19 nt, Artificial Sequence
  Synthetic
uuuuucagugauuuaugag

SEQ ID NO: 312444 - RNA, 20 nt, Artificial Sequence
  Synthetic
uuuuuucagugauuuaugag

SEQ ID NO: 312445 - RNA, 21 nt, Artificial Sequence
  Synthetic
uuuuuuucagugauuuaugag

SEQ ID NO: 312446 - RNA, 22 nt, Artificial Sequence
  Synthetic
auuuuuuucagugauuuaugag

SEQ ID NO: 312447 - RNA, 23 nt, Artificial Sequence
  Synthetic
aauuuuuuucagugauuuaugag

SEQ ID NO: 312448 - RNA, 24 nt, Artificial Sequence
  Synthetic
uaauuuuuuucagugauuuaugag

SEQ ID NO: 312449 - RNA, 18 nt, Artificial Sequence
  Synthetic
agcauuccaaaaacugag

SEQ ID NO: 312450 - RNA, 19 nt, Artificial Sequence
  Synthetic
gagcauuccaaaaacugag

SEQ ID NO: 312451 - RNA, 20 nt, Artificial Sequence
  Synthetic
agagcauuccaaaaacugag

SEQ ID NO: 312452 - RNA, 21 nt, Artificial Sequence
  Synthetic
gagagcauuccaaaaacugag

SEQ ID NO: 312453 - RNA, 22 nt, Artificial Sequence
  Synthetic
agagagcauuccaaaaacugag

SEQ ID NO: 312454 - RNA, 23 nt, Artificial Sequence
  Synthetic
gagagagcauuccaaaaacugag

SEQ ID NO: 312455 - RNA, 24 nt, Artificial Sequence
  Synthetic
agagagagcauuccaaaaacugag

SEQ ID NO: 312456 - RNA, 18 nt, Artificial Sequence
  Synthetic
ccugacuuugaaacugag

SEQ ID NO: 312457 - RNA, 19 nt, Artificial Sequence
  Synthetic
uccugacuuugaaacugag

SEQ ID NO: 312458 - RNA, 20 nt, Artificial Sequence
  Synthetic
uuccugacuuugaaacugag

SEQ ID NO: 312459 - RNA, 21 nt, Artificial Sequence
  Synthetic
uuuccugacuuugaaacugag

SEQ ID NO: 312460 - RNA, 22 nt, Artificial Sequence
  Synthetic
auuuccugacuuugaaacugag

SEQ ID NO: 312461 - RNA, 23 nt, Artificial Sequence
  Synthetic
aauuuccugacuuugaaacugag

SEQ ID NO: 312462 - RNA, 24 nt, Artificial Sequence
  Synthetic
aaauuuccugacuuugaaacugag

SEQ ID NO: 312463 - RNA, 18 nt, Artificial Sequence
  Synthetic
uccuacuaaugaacugag

SEQ ID NO: 312464 - RNA, 19 nt, Artificial Sequence
  Synthetic
uuccuacuaaugaacugag

SEQ ID NO: 312465 - RNA, 20 nt, Artificial Sequence
  Synthetic
uuuccuacuaaugaacugag

SEQ ID NO: 312466 - RNA, 21 nt, Artificial Sequence
  Synthetic
auuuccuacuaaugaacugag

SEQ ID NO: 312467 - RNA, 22 nt, Artificial Sequence
  Synthetic
gauuuccuacuaaugaacugag

SEQ ID NO: 312468 - RNA, 23 nt, Artificial Sequence
  Synthetic
ggauuuccuacuaaugaacugag

SEQ ID NO: 312469 - RNA, 24 nt, Artificial Sequence
  Synthetic
gggauuuccuacuaaugaacugag

SEQ ID NO: 312470 - RNA, 18 nt, Artificial Sequence
  Synthetic
uugaugauaaccacugag

SEQ ID NO: 312471 - RNA, 19 nt, Artificial Sequence
  Synthetic
cuugaugauaaccacugag

SEQ ID NO: 312472 - RNA, 20 nt, Artificial Sequence
  Synthetic
acuugaugauaaccacugag

SEQ ID NO: 312473 - RNA, 21 nt, Artificial Sequence
  Synthetic
aacuugaugauaaccacugag

SEQ ID NO: 312474 - RNA, 22 nt, Artificial Sequence
  Synthetic
aaacuugaugauaaccacugag

SEQ ID NO: 312475 - RNA, 23 nt, Artificial Sequence
  Synthetic
caaacuugaugauaaccacugag

SEQ ID NO: 312476 - RNA, 24 nt, Artificial Sequence
  Synthetic
ccaaacuugaugauaaccacugag

SEQ ID NO: 312477 - RNA, 18 nt, Artificial Sequence
  Synthetic
uauggcugaagcacugag

SEQ ID NO: 312478 - RNA, 19 nt, Artificial Sequence
  Synthetic
guauggcugaagcacugag

SEQ ID NO: 312479 - RNA, 20 nt, Artificial Sequence
  Synthetic
aguauggcugaagcacugag

SEQ ID NO: 312480 - RNA, 21 nt, Artificial Sequence
  Synthetic
caguauggcugaagcacugag

SEQ ID NO: 312481 - RNA, 22 nt, Artificial Sequence
  Synthetic
ucaguauggcugaagcacugag

SEQ ID NO: 312482 - RNA, 23 nt, Artificial Sequence
  Synthetic
aucaguauggcugaagcacugag

SEQ ID NO: 312483 - RNA, 24 nt, Artificial Sequence
  Synthetic
uaucaguauggcugaagcacugag

SEQ ID NO: 312484 - RNA, 18 nt, Artificial Sequence
  Synthetic
ggcggagguugcacugag

SEQ ID NO: 312485 - RNA, 19 nt, Artificial Sequence
  Synthetic
aggcggagguugcacugag

SEQ ID NO: 312486 - RNA, 20 nt, Artificial Sequence
  Synthetic
gaggcggagguugcacugag

SEQ ID NO: 312487 - RNA, 21 nt, Artificial Sequence
  Synthetic
ggaggcggagguugcacugag

SEQ ID NO: 312488 - RNA, 22 nt, Artificial Sequence
  Synthetic
gggaggcggagguugcacugag

SEQ ID NO: 312489 - RNA, 23 nt, Artificial Sequence
  Synthetic
cgggaggcggagguugcacugag

SEQ ID NO: 312490 - RNA, 24 nt, Artificial Sequence
  Synthetic
ccgggaggcggagguugcacugag

SEQ ID NO: 312491 - RNA, 18 nt, Artificial Sequence
  Synthetic
uuguuuuaaaucacugag

SEQ ID NO: 312492 - RNA, 19 nt, Artificial Sequence
  Synthetic
cuuguuuuaaaucacugag

SEQ ID NO: 312493 - RNA, 20 nt, Artificial Sequence
  Synthetic
gcuuguuuuaaaucacugag

SEQ ID NO: 312494 - RNA, 21 nt, Artificial Sequence
  Synthetic
agcuuguuuuaaaucacugag

SEQ ID NO: 312495 - RNA, 22 nt, Artificial Sequence
  Synthetic
cagcuuguuuuaaaucacugag

SEQ ID NO: 312496 - RNA, 23 nt, Artificial Sequence
  Synthetic
gcagcuuguuuuaaaucacugag

SEQ ID NO: 312497 - RNA, 24 nt, Artificial Sequence
  Synthetic
ugcagcuuguuuuaaaucacugag

SEQ ID NO: 312498 - RNA, 18 nt, Artificial Sequence
  Synthetic
acugugcuuuucacugag

SEQ ID NO: 312499 - RNA, 19 nt, Artificial Sequence
  Synthetic
gacugugcuuuucacugag

SEQ ID NO: 312500 - RNA, 20 nt, Artificial Sequence
  Synthetic
agacugugcuuuucacugag

SEQ ID NO: 312501 - RNA, 21 nt, Artificial Sequence
  Synthetic
cagacugugcuuuucacugag

SEQ ID NO: 312502 - RNA, 22 nt, Artificial Sequence
  Synthetic
acagacugugcuuuucacugag

SEQ ID NO: 312503 - RNA, 23 nt, Artificial Sequence
  Synthetic
aacagacugugcuuuucacugag

SEQ ID NO: 312504 - RNA, 24 nt, Artificial Sequence
  Synthetic
gaacagacugugcuuuucacugag

SEQ ID NO: 312505 - RNA, 18 nt, Artificial Sequence
  Synthetic
uaugaguuccagacugag

SEQ ID NO: 312506 - RNA, 19 nt, Artificial Sequence
  Synthetic
guaugaguuccagacugag

SEQ ID NO: 312507 - RNA, 20 nt, Artificial Sequence
  Synthetic
aguaugaguuccagacugag

SEQ ID NO: 312508 - RNA, 21 nt, Artificial Sequence
  Synthetic
gaguaugaguuccagacugag

SEQ ID NO: 312509 - RNA, 22 nt, Artificial Sequence
  Synthetic
agaguaugaguuccagacugag

SEQ ID NO: 312510 - RNA, 23 nt, Artificial Sequence
  Synthetic
aagaguaugaguuccagacugag

SEQ ID NO: 312511 - RNA, 24 nt, Artificial Sequence
  Synthetic
aaagaguaugaguuccagacugag

SEQ ID NO: 312512 - RNA, 18 nt, Artificial Sequence
  Synthetic
aauccuucccuuacugag

SEQ ID NO: 312513 - RNA, 19 nt, Artificial Sequence
  Synthetic
aaauccuucccuuacugag

SEQ ID NO: 312514 - RNA, 20 nt, Artificial Sequence
  Synthetic
aaaauccuucccuuacugag

SEQ ID NO: 312515 - RNA, 21 nt, Artificial Sequence
  Synthetic
gaaaauccuucccuuacugag

SEQ ID NO: 312516 - RNA, 22 nt, Artificial Sequence
  Synthetic
ugaaaauccuucccuuacugag

SEQ ID NO: 312517 - RNA, 23 nt, Artificial Sequence
  Synthetic
gugaaaauccuucccuuacugag

SEQ ID NO: 312518 - RNA, 24 nt, Artificial Sequence
  Synthetic
agugaaaauccuucccuuacugag

SEQ ID NO: 312519 - RNA, 18 nt, Artificial Sequence
  Synthetic
ggcaauaugcuuacugag

SEQ ID NO: 312520 - RNA, 19 nt, Artificial Sequence
  Synthetic
gggcaauaugcuuacugag

SEQ ID NO: 312521 - RNA, 20 nt, Artificial Sequence
  Synthetic
ggggcaauaugcuuacugag

SEQ ID NO: 312522 - RNA, 21 nt, Artificial Sequence
  Synthetic
aggggcaauaugcuuacugag

SEQ ID NO: 312523 - RNA, 22 nt, Artificial Sequence
  Synthetic
gaggggcaauaugcuuacugag

SEQ ID NO: 312524 - RNA, 23 nt, Artificial Sequence
  Synthetic
ugaggggcaauaugcuuacugag

SEQ ID NO: 312525 - RNA, 24 nt, Artificial Sequence
  Synthetic
cugaggggcaauaugcuuacugag

SEQ ID NO: 312526 - RNA, 18 nt, Artificial Sequence
  Synthetic
gggucaucauuuacugag

SEQ ID NO: 312527 - RNA, 19 nt, Artificial Sequence
  Synthetic
ggggucaucauuuacugag

SEQ ID NO: 312528 - RNA, 20 nt, Artificial Sequence
  Synthetic
uggggucaucauuuacugag

SEQ ID NO: 312529 - RNA, 21 nt, Artificial Sequence
  Synthetic
auggggucaucauuuacugag

SEQ ID NO: 312530 - RNA, 22 nt, Artificial Sequence
  Synthetic
gauggggucaucauuuacugag

SEQ ID NO: 312531 - RNA, 23 nt, Artificial Sequence
  Synthetic
agauggggucaucauuuacugag

SEQ ID NO: 312532 - RNA, 24 nt, Artificial Sequence
  Synthetic
aagauggggucaucauuuacugag

SEQ ID NO: 312533 - RNA, 18 nt, Artificial Sequence
  Synthetic
acuucagugggaccugag

SEQ ID NO: 312534 - RNA, 19 nt, Artificial Sequence
  Synthetic
gacuucagugggaccugag

SEQ ID NO: 312535 - RNA, 20 nt, Artificial Sequence
  Synthetic
ugacuucagugggaccugag

SEQ ID NO: 312536 - RNA, 21 nt, Artificial Sequence
  Synthetic
augacuucagugggaccugag

SEQ ID NO: 312537 - RNA, 22 nt, Artificial Sequence
  Synthetic
aaugacuucagugggaccugag

SEQ ID NO: 312538 - RNA, 23 nt, Artificial Sequence
  Synthetic
aaaugacuucagugggaccugag

SEQ ID NO: 312539 - RNA, 24 nt, Artificial Sequence
  Synthetic
aaaaugacuucagugggaccugag

SEQ ID NO: 312540 - RNA, 18 nt, Artificial Sequence
  Synthetic
uagaugaggauaccugag

SEQ ID NO: 312541 - RNA, 19 nt, Artificial Sequence
  Synthetic
cuagaugaggauaccugag

SEQ ID NO: 312542 - RNA, 20 nt, Artificial Sequence
  Synthetic
gcuagaugaggauaccugag

SEQ ID NO: 312543 - RNA, 21 nt, Artificial Sequence
  Synthetic
ugcuagaugaggauaccugag

SEQ ID NO: 312544 - RNA, 22 nt, Artificial Sequence
  Synthetic
augcuagaugaggauaccugag

SEQ ID NO: 312545 - RNA, 23 nt, Artificial Sequence
  Synthetic
aaugcuagaugaggauaccugag

SEQ ID NO: 312546 - RNA, 24 nt, Artificial Sequence
  Synthetic
aaaugcuagaugaggauaccugag

SEQ ID NO: 312547 - RNA, 18 nt, Artificial Sequence
  Synthetic
cacuaugauuacccugag

SEQ ID NO: 312548 - RNA, 19 nt, Artificial Sequence
  Synthetic
ucacuaugauuacccugag

SEQ ID NO: 312549 - RNA, 20 nt, Artificial Sequence
  Synthetic
uucacuaugauuacccugag

SEQ ID NO: 312550 - RNA, 21 nt, Artificial Sequence
  Synthetic
auucacuaugauuacccugag

SEQ ID NO: 312551 - RNA, 22 nt, Artificial Sequence
  Synthetic
uauucacuaugauuacccugag

SEQ ID NO: 312552 - RNA, 23 nt, Artificial Sequence
  Synthetic
auauucacuaugauuacccugag

SEQ ID NO: 312553 - RNA, 24 nt, Artificial Sequence
  Synthetic
cauauucacuaugauuacccugag

SEQ ID NO: 312554 - RNA, 18 nt, Artificial Sequence
  Synthetic
gggagaagcagcccugag

SEQ ID NO: 312555 - RNA, 19 nt, Artificial Sequence
  Synthetic
ugggagaagcagcccugag

SEQ ID NO: 312556 - RNA, 20 nt, Artificial Sequence
  Synthetic
uugggagaagcagcccugag

SEQ ID NO: 312557 - RNA, 21 nt, Artificial Sequence
  Synthetic
auugggagaagcagcccugag

SEQ ID NO: 312558 - RNA, 22 nt, Artificial Sequence
  Synthetic
aauugggagaagcagcccugag

SEQ ID NO: 312559 - RNA, 23 nt, Artificial Sequence
  Synthetic
uaauugggagaagcagcccugag

SEQ ID NO: 312560 - RNA, 24 nt, Artificial Sequence
  Synthetic
cuaauugggagaagcagcccugag

SEQ ID NO: 312561 - RNA, 18 nt, Artificial Sequence
  Synthetic
uccccaucagucccugag

SEQ ID NO: 312562 - RNA, 19 nt, Artificial Sequence
  Synthetic
cuccccaucagucccugag

SEQ ID NO: 312563 - RNA, 20 nt, Artificial Sequence
  Synthetic
acuccccaucagucccugag

SEQ ID NO: 312564 - RNA, 21 nt, Artificial Sequence
  Synthetic
gacuccccaucagucccugag

SEQ ID NO: 312565 - RNA, 22 nt, Artificial Sequence
  Synthetic
ugacuccccaucagucccugag

SEQ ID NO: 312566 - RNA, 23 nt, Artificial Sequence
  Synthetic
cugacuccccaucagucccugag

SEQ ID NO: 312567 - RNA, 24 nt, Artificial Sequence
  Synthetic
acugacuccccaucagucccugag

SEQ ID NO: 312568 - RNA, 18 nt, Artificial Sequence
  Synthetic
gcacuuugggagccugag

SEQ ID NO: 312569 - RNA, 19 nt, Artificial Sequence
  Synthetic
agcacuuugggagccugag

SEQ ID NO: 312570 - RNA, 20 nt, Artificial Sequence
  Synthetic
cagcacuuugggagccugag

SEQ ID NO: 312571 - RNA, 21 nt, Artificial Sequence
  Synthetic
ccagcacuuugggagccugag

SEQ ID NO: 312572 - RNA, 22 nt, Artificial Sequence
  Synthetic
cccagcacuuugggagccugag

SEQ ID NO: 312573 - RNA, 23 nt, Artificial Sequence
  Synthetic
ucccagcacuuugggagccugag

SEQ ID NO: 312574 - RNA, 24 nt, Artificial Sequence
  Synthetic
aucccagcacuuugggagccugag

SEQ ID NO: 312575 - RNA, 18 nt, Artificial Sequence
  Synthetic
uuagagcugccuccugag

SEQ ID NO: 312576 - RNA, 19 nt, Artificial Sequence
  Synthetic
uuuagagcugccuccugag

SEQ ID NO: 312577 - RNA, 20 nt, Artificial Sequence
  Synthetic
auuuagagcugccuccugag

SEQ ID NO: 312578 - RNA, 21 nt, Artificial Sequence
  Synthetic
aauuuagagcugccuccugag

SEQ ID NO: 312579 - RNA, 22 nt, Artificial Sequence
  Synthetic
caauuuagagcugccuccugag

SEQ ID NO: 312580 - RNA, 23 nt, Artificial Sequence
  Synthetic
ccaauuuagagcugccuccugag

SEQ ID NO: 312581 - RNA, 24 nt, Artificial Sequence
  Synthetic
gccaauuuagagcugccuccugag

SEQ ID NO: 312582 - RNA, 18 nt, Artificial Sequence
  Synthetic
uuaucuuagcaagcugag

SEQ ID NO: 312583 - RNA, 19 nt, Artificial Sequence
  Synthetic
guuaucuuagcaagcugag

SEQ ID NO: 312584 - RNA, 20 nt, Artificial Sequence
  Synthetic
aguuaucuuagcaagcugag

SEQ ID NO: 312585 - RNA, 21 nt, Artificial Sequence
  Synthetic
aaguuaucuuagcaagcugag

SEQ ID NO: 312586 - RNA, 22 nt, Artificial Sequence
  Synthetic
caaguuaucuuagcaagcugag

SEQ ID NO: 312587 - RNA, 23 nt, Artificial Sequence
  Synthetic
ucaaguuaucuuagcaagcugag

SEQ ID NO: 312588 - RNA, 24 nt, Artificial Sequence
  Synthetic
uucaaguuaucuuagcaagcugag

SEQ ID NO: 312589 - RNA, 18 nt, Artificial Sequence
  Synthetic
gcuacucgggaagcugag

SEQ ID NO: 312590 - RNA, 19 nt, Artificial Sequence
  Synthetic
agcuacucgggaagcugag

SEQ ID NO: 312591 - RNA, 20 nt, Artificial Sequence
  Synthetic
cagcuacucgggaagcugag

SEQ ID NO: 312592 - RNA, 21 nt, Artificial Sequence
  Synthetic
ccagcuacucgggaagcugag

SEQ ID NO: 312593 - RNA, 22 nt, Artificial Sequence
  Synthetic
cccagcuacucgggaagcugag

SEQ ID NO: 312594 - RNA, 23 nt, Artificial Sequence
  Synthetic
ucccagcuacucgggaagcugag

SEQ ID NO: 312595 - RNA, 24 nt, Artificial Sequence
  Synthetic
gucccagcuacucgggaagcugag

SEQ ID NO: 312596 - RNA, 18 nt, Artificial Sequence
  Synthetic
aauuucuuaccagcugag

SEQ ID NO: 312597 - RNA, 19 nt, Artificial Sequence
  Synthetic
uaauuucuuaccagcugag

SEQ ID NO: 312598 - RNA, 20 nt, Artificial Sequence
  Synthetic
uuaauuucuuaccagcugag

SEQ ID NO: 312599 - RNA, 21 nt, Artificial Sequence
  Synthetic
uuuaauuucuuaccagcugag

SEQ ID NO: 312600 - RNA, 22 nt, Artificial Sequence
  Synthetic
cuuuaauuucuuaccagcugag

SEQ ID NO: 312601 - RNA, 23 nt, Artificial Sequence
  Synthetic
acuuuaauuucuuaccagcugag

SEQ ID NO: 312602 - RNA, 24 nt, Artificial Sequence
  Synthetic
cacuuuaauuucuuaccagcugag

SEQ ID NO: 312603 - RNA, 18 nt, Artificial Sequence
  Synthetic
acuuuaaggggagcugag

SEQ ID NO: 312604 - RNA, 19 nt, Artificial Sequence
  Synthetic
uacuuuaaggggagcugag

SEQ ID NO: 312605 - RNA, 20 nt, Artificial Sequence
  Synthetic
guacuuuaaggggagcugag

SEQ ID NO: 312606 - RNA, 21 nt, Artificial Sequence
  Synthetic
uguacuuuaaggggagcugag

SEQ ID NO: 312607 - RNA, 22 nt, Artificial Sequence
  Synthetic
cuguacuuuaaggggagcugag

SEQ ID NO: 312608 - RNA, 23 nt, Artificial Sequence
  Synthetic
gcuguacuuuaaggggagcugag

SEQ ID NO: 312609 - RNA, 24 nt, Artificial Sequence
  Synthetic
agcuguacuuuaaggggagcugag

SEQ ID NO: 312610 - RNA, 18 nt, Artificial Sequence
  Synthetic
aaugcucauggagcugag

SEQ ID NO: 312611 - RNA, 19 nt, Artificial Sequence
  Synthetic
aaaugcucauggagcugag

SEQ ID NO: 312612 - RNA, 20 nt, Artificial Sequence
  Synthetic
aaaaugcucauggagcugag

SEQ ID NO: 312613 - RNA, 21 nt, Artificial Sequence
  Synthetic
aaaaaugcucauggagcugag

SEQ ID NO: 312614 - RNA, 22 nt, Artificial Sequence
  Synthetic
caaaaaugcucauggagcugag

SEQ ID NO: 312615 - RNA, 23 nt, Artificial Sequence
  Synthetic
ccaaaaaugcucauggagcugag

SEQ ID NO: 312616 - RNA, 24 nt, Artificial Sequence
  Synthetic
accaaaaaugcucauggagcugag

SEQ ID NO: 312617 - RNA, 18 nt, Artificial Sequence
  Synthetic
cuuuuugugaaggcugag

SEQ ID NO: 312618 - RNA, 19 nt, Artificial Sequence
  Synthetic
ccuuuuugugaaggcugag

SEQ ID NO: 312619 - RNA, 20 nt, Artificial Sequence
  Synthetic
uccuuuuugugaaggcugag

SEQ ID NO: 312620 - RNA, 21 nt, Artificial Sequence
  Synthetic
guccuuuuugugaaggcugag

SEQ ID NO: 312621 - RNA, 22 nt, Artificial Sequence
  Synthetic
aguccuuuuugugaaggcugag

SEQ ID NO: 312622 - RNA, 23 nt, Artificial Sequence
  Synthetic
aaguccuuuuugugaaggcugag

SEQ ID NO: 312623 - RNA, 24 nt, Artificial Sequence
  Synthetic
caaguccuuuuugugaaggcugag

SEQ ID NO: 312624 - RNA, 18 nt, Artificial Sequence
  Synthetic
gcuacucaagaggcugag

SEQ ID NO: 312625 - RNA, 19 nt, Artificial Sequence
  Synthetic
agcuacucaagaggcugag

SEQ ID NO: 312626 - RNA, 20 nt, Artificial Sequence
  Synthetic
cagcuacucaagaggcugag

SEQ ID NO: 312627 - RNA, 21 nt, Artificial Sequence
  Synthetic
ucagcuacucaagaggcugag

SEQ ID NO: 312628 - RNA, 22 nt, Artificial Sequence
  Synthetic
cucagcuacucaagaggcugag

SEQ ID NO: 312629 - RNA, 23 nt, Artificial Sequence
  Synthetic
ucucagcuacucaagaggcugag

SEQ ID NO: 312630 - RNA, 24 nt, Artificial Sequence
  Synthetic
gucucagcuacucaagaggcugag

SEQ ID NO: 312631 - RNA, 18 nt, Artificial Sequence
  Synthetic
acuacucaggaggcugag

SEQ ID NO: 312632 - RNA, 19 nt, Artificial Sequence
  Synthetic
aacuacucaggaggcugag

SEQ ID NO: 312633 - RNA, 20 nt, Artificial Sequence
  Synthetic
caacuacucaggaggcugag

SEQ ID NO: 312634 - RNA, 21 nt, Artificial Sequence
  Synthetic
ccaacuacucaggaggcugag

SEQ ID NO: 312635 - RNA, 22 nt, Artificial Sequence
  Synthetic
cccaacuacucaggaggcugag

SEQ ID NO: 312636 - RNA, 23 nt, Artificial Sequence
  Synthetic
ucccaacuacucaggaggcugag

SEQ ID NO: 312637 - RNA, 24 nt, Artificial Sequence
  Synthetic
aucccaacuacucaggaggcugag

SEQ ID NO: 312638 - RNA, 18 nt, Artificial Sequence
  Synthetic
gcuacucaggaggcugag

SEQ ID NO: 312639 - RNA, 19 nt, Artificial Sequence
  Synthetic
agcuacucaggaggcugag

SEQ ID NO: 312640 - RNA, 21 nt, Artificial Sequence
  Synthetic
ccagcuacucaggaggcugag

SEQ ID NO: 312641 - RNA, 22 nt, Artificial Sequence
  Synthetic
cccagcuacucaggaggcugag

SEQ ID NO: 312642 - RNA, 23 nt, Artificial Sequence
  Synthetic
ccccagcuacucaggaggcugag

SEQ ID NO: 312643 - RNA, 24 nt, Artificial Sequence
  Synthetic
gccccagcuacucaggaggcugag

SEQ ID NO: 312644 - RNA, 23 nt, Artificial Sequence
  Synthetic
ucccagcuacucaggaggcugag

SEQ ID NO: 312645 - RNA, 24 nt, Artificial Sequence
  Synthetic
gucccagcuacucaggaggcugag

SEQ ID NO: 312646 - RNA, 20 nt, Artificial Sequence
  Synthetic
uagcuacucaggaggcugag

SEQ ID NO: 312647 - RNA, 21 nt, Artificial Sequence
  Synthetic
guagcuacucaggaggcugag

SEQ ID NO: 312648 - RNA, 22 nt, Artificial Sequence
  Synthetic
aguagcuacucaggaggcugag

SEQ ID NO: 312649 - RNA, 23 nt, Artificial Sequence
  Synthetic
gaguagcuacucaggaggcugag

SEQ ID NO: 312650 - RNA, 24 nt, Artificial Sequence
  Synthetic
ugaguagcuacucaggaggcugag

SEQ ID NO: 312651 - RNA, 18 nt, Artificial Sequence
  Synthetic
gaugcucgggaggcugag

SEQ ID NO: 312652 - RNA, 19 nt, Artificial Sequence
  Synthetic
agaugcucgggaggcugag

SEQ ID NO: 312653 - RNA, 20 nt, Artificial Sequence
  Synthetic
uagaugcucgggaggcugag

SEQ ID NO: 312654 - RNA, 21 nt, Artificial Sequence
  Synthetic
cuagaugcucgggaggcugag

SEQ ID NO: 312655 - RNA, 22 nt, Artificial Sequence
  Synthetic
ccuagaugcucgggaggcugag

SEQ ID NO: 312656 - RNA, 23 nt, Artificial Sequence
  Synthetic
uccuagaugcucgggaggcugag

SEQ ID NO: 312657 - RNA, 24 nt, Artificial Sequence
  Synthetic
guccuagaugcucgggaggcugag

SEQ ID NO: 312658 - RNA, 18 nt, Artificial Sequence
  Synthetic
cucaucugggaggcugag

SEQ ID NO: 312659 - RNA, 19 nt, Artificial Sequence
  Synthetic
gcucaucugggaggcugag

SEQ ID NO: 312660 - RNA, 20 nt, Artificial Sequence
  Synthetic
agcucaucugggaggcugag

SEQ ID NO: 312661 - RNA, 21 nt, Artificial Sequence
  Synthetic
uagcucaucugggaggcugag

SEQ ID NO: 312662 - RNA, 22 nt, Artificial Sequence
  Synthetic
uuagcucaucugggaggcugag

SEQ ID NO: 312663 - RNA, 23 nt, Artificial Sequence
  Synthetic
auuagcucaucugggaggcugag

SEQ ID NO: 312664 - RNA, 24 nt, Artificial Sequence
  Synthetic
gauuagcucaucugggaggcugag

SEQ ID NO: 312665 - RNA, 18 nt, Artificial Sequence
  Synthetic
gcuacuugggaggcugag

SEQ ID NO: 312666 - RNA, 19 nt, Artificial Sequence
  Synthetic
agcuacuugggaggcugag

SEQ ID NO: 312667 - RNA, 20 nt, Artificial Sequence
  Synthetic
uagcuacuugggaggcugag

SEQ ID NO: 312668 - RNA, 21 nt, Artificial Sequence
  Synthetic
cuagcuacuugggaggcugag

SEQ ID NO: 312669 - RNA, 22 nt, Artificial Sequence
  Synthetic
ccuagcuacuugggaggcugag

SEQ ID NO: 312670 - RNA, 23 nt, Artificial Sequence
  Synthetic
uccuagcuacuugggaggcugag

SEQ ID NO: 312671 - RNA, 24 nt, Artificial Sequence
  Synthetic
auccuagcuacuugggaggcugag

SEQ ID NO: 312672 - RNA, 21 nt, Artificial Sequence
  Synthetic
gcagcacuuugggaggcugag

SEQ ID NO: 312673 - RNA, 22 nt, Artificial Sequence
  Synthetic
cgcagcacuuugggaggcugag

SEQ ID NO: 312674 - RNA, 23 nt, Artificial Sequence
  Synthetic
ucgcagcacuuugggaggcugag

SEQ ID NO: 312675 - RNA, 24 nt, Artificial Sequence
  Synthetic
aucgcagcacuuugggaggcugag

SEQ ID NO: 312676 - RNA, 18 nt, Artificial Sequence
  Synthetic
guacuuugggaggcugag

SEQ ID NO: 312677 - RNA, 19 nt, Artificial Sequence
  Synthetic
aguacuuugggaggcugag

SEQ ID NO: 312678 - RNA, 20 nt, Artificial Sequence
  Synthetic
caguacuuugggaggcugag

SEQ ID NO: 312679 - RNA, 21 nt, Artificial Sequence
  Synthetic
ccaguacuuugggaggcugag

SEQ ID NO: 312680 - RNA, 22 nt, Artificial Sequence
  Synthetic
cccaguacuuugggaggcugag

SEQ ID NO: 312681 - RNA, 23 nt, Artificial Sequence
  Synthetic
ucccaguacuuugggaggcugag

SEQ ID NO: 312682 - RNA, 24 nt, Artificial Sequence
  Synthetic
aucccaguacuuugggaggcugag

SEQ ID NO: 312683 - RNA, 18 nt, Artificial Sequence
  Synthetic
gugcuuugggaggcugag

SEQ ID NO: 312684 - RNA, 19 nt, Artificial Sequence
  Synthetic
agugcuuugggaggcugag

SEQ ID NO: 312685 - RNA, 20 nt, Artificial Sequence
  Synthetic
cagugcuuugggaggcugag

SEQ ID NO: 312686 - RNA, 21 nt, Artificial Sequence
  Synthetic
ccagugcuuugggaggcugag

SEQ ID NO: 312687 - RNA, 22 nt, Artificial Sequence
  Synthetic
cccagugcuuugggaggcugag

SEQ ID NO: 312688 - RNA, 23 nt, Artificial Sequence
  Synthetic
ucccagugcuuugggaggcugag

SEQ ID NO: 312689 - RNA, 24 nt, Artificial Sequence
  Synthetic
aucccagugcuuugggaggcugag

SEQ ID NO: 312690 - RNA, 18 nt, Artificial Sequence
  Synthetic
uucuguugaaaugcugag

SEQ ID NO: 312691 - RNA, 19 nt, Artificial Sequence
  Synthetic
guucuguugaaaugcugag

SEQ ID NO: 312692 - RNA, 20 nt, Artificial Sequence
  Synthetic
aguucuguugaaaugcugag

SEQ ID NO: 312693 - RNA, 21 nt, Artificial Sequence
  Synthetic
aaguucuguugaaaugcugag

SEQ ID NO: 312694 - RNA, 22 nt, Artificial Sequence
  Synthetic
uaaguucuguugaaaugcugag

SEQ ID NO: 312695 - RNA, 23 nt, Artificial Sequence
  Synthetic
uuaaguucuguugaaaugcugag

SEQ ID NO: 312696 - RNA, 24 nt, Artificial Sequence
  Synthetic
uuuaaguucuguugaaaugcugag

SEQ ID NO: 312697 - RNA, 18 nt, Artificial Sequence
  Synthetic
aauaaucugugugcugag

SEQ ID NO: 312698 - RNA, 19 nt, Artificial Sequence
  Synthetic
uaauaaucugugugcugag

SEQ ID NO: 312699 - RNA, 20 nt, Artificial Sequence
  Synthetic
auaauaaucugugugcugag

SEQ ID NO: 312700 - RNA, 21 nt, Artificial Sequence
  Synthetic
gauaauaaucugugugcugag

SEQ ID NO: 312701 - RNA, 22 nt, Artificial Sequence
  Synthetic
ugauaauaaucugugugcugag

SEQ ID NO: 312702 - RNA, 23 nt, Artificial Sequence
  Synthetic
uugauaauaaucugugugcugag

SEQ ID NO: 312703 - RNA, 24 nt, Artificial Sequence
  Synthetic
uuugauaauaaucugugugcugag

SEQ ID NO: 312704 - RNA, 18 nt, Artificial Sequence
  Synthetic
ccaaaaaccauugcugag

SEQ ID NO: 312705 - RNA, 19 nt, Artificial Sequence
  Synthetic
uccaaaaaccauugcugag

SEQ ID NO: 312706 - RNA, 20 nt, Artificial Sequence
  Synthetic
cuccaaaaaccauugcugag

SEQ ID NO: 312707 - RNA, 21 nt, Artificial Sequence
  Synthetic
acuccaaaaaccauugcugag

SEQ ID NO: 312708 - RNA, 22 nt, Artificial Sequence
  Synthetic
aacuccaaaaaccauugcugag

SEQ ID NO: 312709 - RNA, 23 nt, Artificial Sequence
  Synthetic
caacuccaaaaaccauugcugag

SEQ ID NO: 312710 - RNA, 24 nt, Artificial Sequence
  Synthetic
ucaacuccaaaaaccauugcugag

SEQ ID NO: 312711 - RNA, 18 nt, Artificial Sequence
  Synthetic
ucauucaucauugcugag

SEQ ID NO: 312712 - RNA, 19 nt, Artificial Sequence
  Synthetic
uucauucaucauugcugag

SEQ ID NO: 312713 - RNA, 20 nt, Artificial Sequence
  Synthetic
guucauucaucauugcugag

SEQ ID NO: 312714 - RNA, 21 nt, Artificial Sequence
  Synthetic
aguucauucaucauugcugag

SEQ ID NO: 312715 - RNA, 22 nt, Artificial Sequence
  Synthetic
gaguucauucaucauugcugag

SEQ ID NO: 312716 - RNA, 23 nt, Artificial Sequence
  Synthetic
agaguucauucaucauugcugag

SEQ ID NO: 312717 - RNA, 24 nt, Artificial Sequence
  Synthetic
aagaguucauucaucauugcugag

SEQ ID NO: 312718 - RNA, 18 nt, Artificial Sequence
  Synthetic
aagauuuucauugcugag

SEQ ID NO: 312719 - RNA, 19 nt, Artificial Sequence
  Synthetic
uaagauuuucauugcugag

SEQ ID NO: 312720 - RNA, 20 nt, Artificial Sequence
  Synthetic
guaagauuuucauugcugag

SEQ ID NO: 312721 - RNA, 21 nt, Artificial Sequence
  Synthetic
uguaagauuuucauugcugag

SEQ ID NO: 312722 - RNA, 22 nt, Artificial Sequence
  Synthetic
auguaagauuuucauugcugag

SEQ ID NO: 312723 - RNA, 23 nt, Artificial Sequence
  Synthetic
uauguaagauuuucauugcugag

SEQ ID NO: 312724 - RNA, 24 nt, Artificial Sequence
  Synthetic
uuauguaagauuuucauugcugag

SEQ ID NO: 312725 - RNA, 18 nt, Artificial Sequence
  Synthetic
auuaagcuaguugcugag

SEQ ID NO: 312726 - RNA, 19 nt, Artificial Sequence
  Synthetic
aauuaagcuaguugcugag

SEQ ID NO: 312727 - RNA, 20 nt, Artificial Sequence
  Synthetic
gaauuaagcuaguugcugag

SEQ ID NO: 312728 - RNA, 21 nt, Artificial Sequence
  Synthetic
agaauuaagcuaguugcugag

SEQ ID NO: 312729 - RNA, 22 nt, Artificial Sequence
  Synthetic
aagaauuaagcuaguugcugag

SEQ ID NO: 312730 - RNA, 23 nt, Artificial Sequence
  Synthetic
caagaauuaagcuaguugcugag

SEQ ID NO: 312731 - RNA, 24 nt, Artificial Sequence
  Synthetic
ucaagaauuaagcuaguugcugag

SEQ ID NO: 312732 - RNA, 18 nt, Artificial Sequence
  Synthetic
ucuuuuacauuugcugag

SEQ ID NO: 312733 - RNA, 19 nt, Artificial Sequence
  Synthetic
uucuuuuacauuugcugag

SEQ ID NO: 312734 - RNA, 20 nt, Artificial Sequence
  Synthetic
guucuuuuacauuugcugag

SEQ ID NO: 312735 - RNA, 21 nt, Artificial Sequence
  Synthetic
uguucuuuuacauuugcugag

SEQ ID NO: 312736 - RNA, 22 nt, Artificial Sequence
  Synthetic
cuguucuuuuacauuugcugag

SEQ ID NO: 312737 - RNA, 23 nt, Artificial Sequence
  Synthetic
ucuguucuuuuacauuugcugag

SEQ ID NO: 312738 - RNA, 24 nt, Artificial Sequence
  Synthetic
uucuguucuuuuacauuugcugag

SEQ ID NO: 312739 - RNA, 18 nt, Artificial Sequence
  Synthetic
cuaaggucagaaucugag

SEQ ID NO: 312740 - RNA, 19 nt, Artificial Sequence
  Synthetic
ucuaaggucagaaucugag

SEQ ID NO: 312741 - RNA, 20 nt, Artificial Sequence
  Synthetic
uucuaaggucagaaucugag

SEQ ID NO: 312742 - RNA, 21 nt, Artificial Sequence
  Synthetic
auucuaaggucagaaucugag

SEQ ID NO: 312743 - RNA, 22 nt, Artificial Sequence
  Synthetic
gauucuaaggucagaaucugag

SEQ ID NO: 312744 - RNA, 23 nt, Artificial Sequence
  Synthetic
ugauucuaaggucagaaucugag

SEQ ID NO: 312745 - RNA, 24 nt, Artificial Sequence
  Synthetic
uugauucuaaggucagaaucugag

SEQ ID NO: 312746 - RNA, 18 nt, Artificial Sequence
  Synthetic
agcacauaauaaucugag

SEQ ID NO: 312747 - RNA, 19 nt, Artificial Sequence
  Synthetic
cagcacauaauaaucugag

SEQ ID NO: 312748 - RNA, 20 nt, Artificial Sequence
  Synthetic
ccagcacauaauaaucugag

SEQ ID NO: 312749 - RNA, 21 nt, Artificial Sequence
  Synthetic
uccagcacauaauaaucugag

SEQ ID NO: 312750 - RNA, 22 nt, Artificial Sequence
  Synthetic
uuccagcacauaauaaucugag

SEQ ID NO: 312751 - RNA, 23 nt, Artificial Sequence
  Synthetic
uuuccagcacauaauaaucugag

SEQ ID NO: 312752 - RNA, 24 nt, Artificial Sequence
  Synthetic
uuuuccagcacauaauaaucugag

SEQ ID NO: 312753 - RNA, 18 nt, Artificial Sequence
  Synthetic
gagagugugacaucugag

SEQ ID NO: 312754 - RNA, 19 nt, Artificial Sequence
  Synthetic
ugagagugugacaucugag

SEQ ID NO: 312755 - RNA, 20 nt, Artificial Sequence
  Synthetic
cugagagugugacaucugag

SEQ ID NO: 312756 - RNA, 21 nt, Artificial Sequence
  Synthetic
gcugagagugugacaucugag

SEQ ID NO: 312757 - RNA, 22 nt, Artificial Sequence
  Synthetic
ggcugagagugugacaucugag

SEQ ID NO: 312758 - RNA, 23 nt, Artificial Sequence
  Synthetic
aggcugagagugugacaucugag

SEQ ID NO: 312759 - RNA, 24 nt, Artificial Sequence
  Synthetic
gaggcugagagugugacaucugag

SEQ ID NO: 312760 - RNA, 18 nt, Artificial Sequence
  Synthetic
auuccagacauaucugag

SEQ ID NO: 312761 - RNA, 19 nt, Artificial Sequence
  Synthetic
gauuccagacauaucugag

SEQ ID NO: 312762 - RNA, 20 nt, Artificial Sequence
  Synthetic
agauuccagacauaucugag

SEQ ID NO: 312763 - RNA, 21 nt, Artificial Sequence
  Synthetic
gagauuccagacauaucugag

SEQ ID NO: 312764 - RNA, 22 nt, Artificial Sequence
  Synthetic
ggagauuccagacauaucugag

SEQ ID NO: 312765 - RNA, 23 nt, Artificial Sequence
  Synthetic
aggagauuccagacauaucugag

SEQ ID NO: 312766 - RNA, 24 nt, Artificial Sequence
  Synthetic
aaggagauuccagacauaucugag

SEQ ID NO: 312767 - RNA, 18 nt, Artificial Sequence
  Synthetic
cuggaugagaccucugag

SEQ ID NO: 312768 - RNA, 19 nt, Artificial Sequence
  Synthetic
ccuggaugagaccucugag

SEQ ID NO: 312769 - RNA, 20 nt, Artificial Sequence
  Synthetic
uccuggaugagaccucugag

SEQ ID NO: 312770 - RNA, 21 nt, Artificial Sequence
  Synthetic
uuccuggaugagaccucugag

SEQ ID NO: 312771 - RNA, 22 nt, Artificial Sequence
  Synthetic
guuccuggaugagaccucugag

SEQ ID NO: 312772 - RNA, 23 nt, Artificial Sequence
  Synthetic
uguuccuggaugagaccucugag

SEQ ID NO: 312773 - RNA, 24 nt, Artificial Sequence
  Synthetic
guguuccuggaugagaccucugag

SEQ ID NO: 312774 - RNA, 18 nt, Artificial Sequence
  Synthetic
gaagaucugagcucugag

SEQ ID NO: 312775 - RNA, 19 nt, Artificial Sequence
  Synthetic
agaagaucugagcucugag

SEQ ID NO: 312776 - RNA, 20 nt, Artificial Sequence
  Synthetic
uagaagaucugagcucugag

SEQ ID NO: 312777 - RNA, 21 nt, Artificial Sequence
  Synthetic
uuagaagaucugagcucugag

SEQ ID NO: 312778 - RNA, 22 nt, Artificial Sequence
  Synthetic
guuagaagaucugagcucugag

SEQ ID NO: 312779 - RNA, 23 nt, Artificial Sequence
  Synthetic
aguuagaagaucugagcucugag

SEQ ID NO: 312780 - RNA, 24 nt, Artificial Sequence
  Synthetic
aaguuagaagaucugagcucugag

SEQ ID NO: 312781 - RNA, 18 nt, Artificial Sequence
  Synthetic
uugucgacuagcucugag

SEQ ID NO: 312782 - RNA, 19 nt, Artificial Sequence
  Synthetic
uuugucgacuagcucugag

SEQ ID NO: 312783 - RNA, 20 nt, Artificial Sequence
  Synthetic
auuugucgacuagcucugag

SEQ ID NO: 312784 - RNA, 21 nt, Artificial Sequence
  Synthetic
uauuugucgacuagcucugag

SEQ ID NO: 312785 - RNA, 22 nt, Artificial Sequence
  Synthetic
auauuugucgacuagcucugag

SEQ ID NO: 312786 - RNA, 23 nt, Artificial Sequence
  Synthetic
aauauuugucgacuagcucugag

SEQ ID NO: 312787 - RNA, 24 nt, Artificial Sequence
  Synthetic
aaauauuugucgacuagcucugag

SEQ ID NO: 312788 - RNA, 18 nt, Artificial Sequence
  Synthetic
gcagugaaagagucugag

SEQ ID NO: 312789 - RNA, 19 nt, Artificial Sequence
  Synthetic
ugcagugaaagagucugag

SEQ ID NO: 312790 - RNA, 20 nt, Artificial Sequence
  Synthetic
augcagugaaagagucugag

SEQ ID NO: 312791 - RNA, 21 nt, Artificial Sequence
  Synthetic
uaugcagugaaagagucugag

SEQ ID NO: 312792 - RNA, 22 nt, Artificial Sequence
  Synthetic
uuaugcagugaaagagucugag

SEQ ID NO: 312793 - RNA, 23 nt, Artificial Sequence
  Synthetic
guuaugcagugaaagagucugag

SEQ ID NO: 312794 - RNA, 24 nt, Artificial Sequence
  Synthetic
uguuaugcagugaaagagucugag

SEQ ID NO: 312795 - RNA, 18 nt, Artificial Sequence
  Synthetic
gcuacaugggagucugag

SEQ ID NO: 312796 - RNA, 19 nt, Artificial Sequence
  Synthetic
agcuacaugggagucugag

SEQ ID NO: 312797 - RNA, 20 nt, Artificial Sequence
  Synthetic
cagcuacaugggagucugag

SEQ ID NO: 312798 - RNA, 21 nt, Artificial Sequence
  Synthetic
ccagcuacaugggagucugag

SEQ ID NO: 312799 - RNA, 22 nt, Artificial Sequence
  Synthetic
cccagcuacaugggagucugag

SEQ ID NO: 312800 - RNA, 23 nt, Artificial Sequence
  Synthetic
ucccagcuacaugggagucugag

SEQ ID NO: 312801 - RNA, 24 nt, Artificial Sequence
  Synthetic
gucccagcuacaugggagucugag

SEQ ID NO: 312802 - RNA, 18 nt, Artificial Sequence
  Synthetic
aagcguguugagucugag

SEQ ID NO: 312803 - RNA, 19 nt, Artificial Sequence
  Synthetic
gaagcguguugagucugag

SEQ ID NO: 312804 - RNA, 20 nt, Artificial Sequence
  Synthetic
ggaagcguguugagucugag

SEQ ID NO: 312805 - RNA, 21 nt, Artificial Sequence
  Synthetic
uggaagcguguugagucugag

SEQ ID NO: 312806 - RNA, 22 nt, Artificial Sequence
  Synthetic
uuggaagcguguugagucugag

SEQ ID NO: 312807 - RNA, 23 nt, Artificial Sequence
  Synthetic
uuuggaagcguguugagucugag

SEQ ID NO: 312808 - RNA, 24 nt, Artificial Sequence
  Synthetic
auuuggaagcguguugagucugag

SEQ ID NO: 312809 - RNA, 18 nt, Artificial Sequence
  Synthetic
cugaauaauuauucugag

SEQ ID NO: 312810 - RNA, 19 nt, Artificial Sequence
  Synthetic
ucugaauaauuauucugag

SEQ ID NO: 312811 - RNA, 20 nt, Artificial Sequence
  Synthetic
uucugaauaauuauucugag

SEQ ID NO: 312812 - RNA, 21 nt, Artificial Sequence
  Synthetic
auucugaauaauuauucugag

SEQ ID NO: 312813 - RNA, 22 nt, Artificial Sequence
  Synthetic
gauucugaauaauuauucugag

SEQ ID NO: 312814 - RNA, 23 nt, Artificial Sequence
  Synthetic
ugauucugaauaauuauucugag

SEQ ID NO: 312815 - RNA, 24 nt, Artificial Sequence
  Synthetic
uugauucugaauaauuauucugag

SEQ ID NO: 312816 - RNA, 18 nt, Artificial Sequence
  Synthetic
agucauauaaguucugag

SEQ ID NO: 312817 - RNA, 19 nt, Artificial Sequence
  Synthetic
cagucauauaaguucugag

SEQ ID NO: 312818 - RNA, 20 nt, Artificial Sequence
  Synthetic
ccagucauauaaguucugag

SEQ ID NO: 312819 - RNA, 21 nt, Artificial Sequence
  Synthetic
cccagucauauaaguucugag

SEQ ID NO: 312820 - RNA, 22 nt, Artificial Sequence
  Synthetic
ucccagucauauaaguucugag

SEQ ID NO: 312821 - RNA, 23 nt, Artificial Sequence
  Synthetic
uucccagucauauaaguucugag

SEQ ID NO: 312822 - RNA, 24 nt, Artificial Sequence
  Synthetic
uuucccagucauauaaguucugag

SEQ ID NO: 312823 - RNA, 18 nt, Artificial Sequence
  Synthetic
cucuuacuucuuucugag

SEQ ID NO: 312824 - RNA, 19 nt, Artificial Sequence
  Synthetic
ccucuuacuucuuucugag

SEQ ID NO: 312825 - RNA, 20 nt, Artificial Sequence
  Synthetic
uccucuuacuucuuucugag

SEQ ID NO: 312826 - RNA, 21 nt, Artificial Sequence
  Synthetic
uuccucuuacuucuuucugag

SEQ ID NO: 312827 - RNA, 22 nt, Artificial Sequence
  Synthetic
auuccucuuacuucuuucugag

SEQ ID NO: 312828 - RNA, 23 nt, Artificial Sequence
  Synthetic
uauuccucuuacuucuuucugag

SEQ ID NO: 312829 - RNA, 24 nt, Artificial Sequence
  Synthetic
auauuccucuuacuucuuucugag

SEQ ID NO: 312830 - RNA, 18 nt, Artificial Sequence
  Synthetic
gguauaaaaaaaagugag

SEQ ID NO: 312831 - RNA, 19 nt, Artificial Sequence
  Synthetic
ggguauaaaaaaaagugag

SEQ ID NO: 312832 - RNA, 20 nt, Artificial Sequence
  Synthetic
uggguauaaaaaaaagugag

SEQ ID NO: 312833 - RNA, 21 nt, Artificial Sequence
  Synthetic
auggguauaaaaaaaagugag

SEQ ID NO: 312834 - RNA, 22 nt, Artificial Sequence
  Synthetic
gauggguauaaaaaaaagugag

SEQ ID NO: 312835 - RNA, 23 nt, Artificial Sequence
  Synthetic
ggauggguauaaaaaaaagugag

SEQ ID NO: 312836 - RNA, 24 nt, Artificial Sequence
  Synthetic
uggauggguauaaaaaaaagugag

SEQ ID NO: 312837 - RNA, 18 nt, Artificial Sequence
  Synthetic
acugauuggaaaagugag

SEQ ID NO: 312838 - RNA, 19 nt, Artificial Sequence
  Synthetic
aacugauuggaaaagugag

SEQ ID NO: 312839 - RNA, 20 nt, Artificial Sequence
  Synthetic
aaacugauuggaaaagugag

SEQ ID NO: 312840 - RNA, 21 nt, Artificial Sequence
  Synthetic
aaaacugauuggaaaagugag

SEQ ID NO: 312841 - RNA, 22 nt, Artificial Sequence
  Synthetic
aaaaacugauuggaaaagugag

SEQ ID NO: 312842 - RNA, 23 nt, Artificial Sequence
  Synthetic
uaaaaacugauuggaaaagugag

SEQ ID NO: 312843 - RNA, 24 nt, Artificial Sequence
  Synthetic
auaaaaacugauuggaaaagugag

SEQ ID NO: 312844 - RNA, 18 nt, Artificial Sequence
  Synthetic
gucauggcagaaagugag

SEQ ID NO: 312845 - RNA, 19 nt, Artificial Sequence
  Synthetic
agucauggcagaaagugag

SEQ ID NO: 312846 - RNA, 20 nt, Artificial Sequence
  Synthetic
gagucauggcagaaagugag

SEQ ID NO: 312847 - RNA, 21 nt, Artificial Sequence
  Synthetic
ggagucauggcagaaagugag

SEQ ID NO: 312848 - RNA, 22 nt, Artificial Sequence
  Synthetic
uggagucauggcagaaagugag

SEQ ID NO: 312849 - RNA, 23 nt, Artificial Sequence
  Synthetic
uuggagucauggcagaaagugag

SEQ ID NO: 312850 - RNA, 24 nt, Artificial Sequence
  Synthetic
auuggagucauggcagaaagugag

SEQ ID NO: 312851 - RNA, 18 nt, Artificial Sequence
  Synthetic
gcuaagcuugaaagugag

SEQ ID NO: 312852 - RNA, 19 nt, Artificial Sequence
  Synthetic
agcuaagcuugaaagugag

SEQ ID NO: 312853 - RNA, 20 nt, Artificial Sequence
  Synthetic
gagcuaagcuugaaagugag

SEQ ID NO: 312854 - RNA, 21 nt, Artificial Sequence
  Synthetic
ggagcuaagcuugaaagugag

SEQ ID NO: 312855 - RNA, 22 nt, Artificial Sequence
  Synthetic
uggagcuaagcuugaaagugag

SEQ ID NO: 312856 - RNA, 23 nt, Artificial Sequence
  Synthetic
uuggagcuaagcuugaaagugag

SEQ ID NO: 312857 - RNA, 24 nt, Artificial Sequence
  Synthetic
auuggagcuaagcuugaaagugag

SEQ ID NO: 312858 - RNA, 18 nt, Artificial Sequence
  Synthetic
caggcugucacaagugag

SEQ ID NO: 312859 - RNA, 19 nt, Artificial Sequence
  Synthetic
acaggcugucacaagugag

SEQ ID NO: 312860 - RNA, 20 nt, Artificial Sequence
  Synthetic
uacaggcugucacaagugag

SEQ ID NO: 312861 - RNA, 21 nt, Artificial Sequence
  Synthetic
cuacaggcugucacaagugag

SEQ ID NO: 312862 - RNA, 22 nt, Artificial Sequence
  Synthetic
ucuacaggcugucacaagugag

SEQ ID NO: 312863 - RNA, 23 nt, Artificial Sequence
  Synthetic
cucuacaggcugucacaagugag

SEQ ID NO: 312864 - RNA, 24 nt, Artificial Sequence
  Synthetic
ucucuacaggcugucacaagugag

SEQ ID NO: 312865 - RNA, 18 nt, Artificial Sequence
  Synthetic
agguuuggcuuaagugag

SEQ ID NO: 312866 - RNA, 19 nt, Artificial Sequence
  Synthetic
uagguuuggcuuaagugag

SEQ ID NO: 312867 - RNA, 20 nt, Artificial Sequence
  Synthetic
uuagguuuggcuuaagugag

SEQ ID NO: 312868 - RNA, 21 nt, Artificial Sequence
  Synthetic
uuuagguuuggcuuaagugag

SEQ ID NO: 312869 - RNA, 22 nt, Artificial Sequence
  Synthetic
cuuuagguuuggcuuaagugag

SEQ ID NO: 312870 - RNA, 23 nt, Artificial Sequence
  Synthetic
acuuuagguuuggcuuaagugag

SEQ ID NO: 312871 - RNA, 24 nt, Artificial Sequence
  Synthetic
cacuuuagguuuggcuuaagugag

SEQ ID NO: 312872 - RNA, 18 nt, Artificial Sequence
  Synthetic
uucggagguuuaagugag

SEQ ID NO: 312873 - RNA, 19 nt, Artificial Sequence
  Synthetic
cuucggagguuuaagugag

SEQ ID NO: 312874 - RNA, 20 nt, Artificial Sequence
  Synthetic
ucuucggagguuuaagugag

SEQ ID NO: 312875 - RNA, 21 nt, Artificial Sequence
  Synthetic
cucuucggagguuuaagugag

SEQ ID NO: 312876 - RNA, 22 nt, Artificial Sequence
  Synthetic
acucuucggagguuuaagugag

SEQ ID NO: 312877 - RNA, 23 nt, Artificial Sequence
  Synthetic
aacucuucggagguuuaagugag

SEQ ID NO: 312878 - RNA, 24 nt, Artificial Sequence
  Synthetic
gaacucuucggagguuuaagugag

SEQ ID NO: 312879 - RNA, 18 nt, Artificial Sequence
  Synthetic
ucuaauguuuuaagugag

SEQ ID NO: 312880 - RNA, 19 nt, Artificial Sequence
  Synthetic
uucuaauguuuuaagugag

SEQ ID NO: 312881 - RNA, 20 nt, Artificial Sequence
  Synthetic
uuucuaauguuuuaagugag

SEQ ID NO: 312882 - RNA, 21 nt, Artificial Sequence
  Synthetic
uuuucuaauguuuuaagugag

SEQ ID NO: 312883 - RNA, 22 nt, Artificial Sequence
  Synthetic
uuuuucuaauguuuuaagugag

SEQ ID NO: 312884 - RNA, 23 nt, Artificial Sequence
  Synthetic
auuuuucuaauguuuuaagugag

SEQ ID NO: 312885 - RNA, 24 nt, Artificial Sequence
  Synthetic
uauuuuucuaauguuuuaagugag

SEQ ID NO: 312886 - RNA, 18 nt, Artificial Sequence
  Synthetic
ccacagacauacagugag

SEQ ID NO: 312887 - RNA, 19 nt, Artificial Sequence
  Synthetic
accacagacauacagugag

SEQ ID NO: 312888 - RNA, 20 nt, Artificial Sequence
  Synthetic
uaccacagacauacagugag

SEQ ID NO: 312889 - RNA, 21 nt, Artificial Sequence
  Synthetic
cuaccacagacauacagugag

SEQ ID NO: 312890 - RNA, 22 nt, Artificial Sequence
  Synthetic
acuaccacagacauacagugag

SEQ ID NO: 312891 - RNA, 23 nt, Artificial Sequence
  Synthetic
uacuaccacagacauacagugag

SEQ ID NO: 312892 - RNA, 24 nt, Artificial Sequence
  Synthetic
cuacuaccacagacauacagugag

SEQ ID NO: 312893 - RNA, 18 nt, Artificial Sequence
  Synthetic
uguauaaugagcagugag

SEQ ID NO: 312894 - RNA, 19 nt, Artificial Sequence
  Synthetic
guguauaaugagcagugag

SEQ ID NO: 312895 - RNA, 20 nt, Artificial Sequence
  Synthetic
aguguauaaugagcagugag

SEQ ID NO: 312896 - RNA, 21 nt, Artificial Sequence
  Synthetic
uaguguauaaugagcagugag

SEQ ID NO: 312897 - RNA, 22 nt, Artificial Sequence
  Synthetic
uuaguguauaaugagcagugag

SEQ ID NO: 312898 - RNA, 23 nt, Artificial Sequence
  Synthetic
auuaguguauaaugagcagugag

SEQ ID NO: 312899 - RNA, 24 nt, Artificial Sequence
  Synthetic
aauuaguguauaaugagcagugag

SEQ ID NO: 312900 - RNA, 18 nt, Artificial Sequence
  Synthetic
ggcagaggaugcagugag

SEQ ID NO: 312901 - RNA, 19 nt, Artificial Sequence
  Synthetic
aggcagaggaugcagugag

SEQ ID NO: 312902 - RNA, 20 nt, Artificial Sequence
  Synthetic
gaggcagaggaugcagugag

SEQ ID NO: 312903 - RNA, 21 nt, Artificial Sequence
  Synthetic
ggaggcagaggaugcagugag

SEQ ID NO: 312904 - RNA, 22 nt, Artificial Sequence
  Synthetic
aggaggcagaggaugcagugag

SEQ ID NO: 312905 - RNA, 23 nt, Artificial Sequence
  Synthetic
uaggaggcagaggaugcagugag

SEQ ID NO: 312906 - RNA, 24 nt, Artificial Sequence
  Synthetic
guaggaggcagaggaugcagugag

SEQ ID NO: 312907 - RNA, 18 nt, Artificial Sequence
  Synthetic
agucgaggcugcagugag

SEQ ID NO: 312908 - RNA, 19 nt, Artificial Sequence
  Synthetic
aagucgaggcugcagugag

SEQ ID NO: 312909 - RNA, 20 nt, Artificial Sequence
  Synthetic
gaagucgaggcugcagugag

SEQ ID NO: 312910 - RNA, 21 nt, Artificial Sequence
  Synthetic
ggaagucgaggcugcagugag

SEQ ID NO: 312911 - RNA, 22 nt, Artificial Sequence
  Synthetic
aggaagucgaggcugcagugag

SEQ ID NO: 312912 - RNA, 23 nt, Artificial Sequence
  Synthetic
uaggaagucgaggcugcagugag

SEQ ID NO: 312913 - RNA, 24 nt, Artificial Sequence
  Synthetic
cuaggaagucgaggcugcagugag

SEQ ID NO: 312914 - RNA, 18 nt, Artificial Sequence
  Synthetic
ggcagagauugcagugag

SEQ ID NO: 312915 - RNA, 19 nt, Artificial Sequence
  Synthetic
aggcagagauugcagugag

SEQ ID NO: 312916 - RNA, 20 nt, Artificial Sequence
  Synthetic
gaggcagagauugcagugag

SEQ ID NO: 312917 - RNA, 21 nt, Artificial Sequence
  Synthetic
cgaggcagagauugcagugag

SEQ ID NO: 312918 - RNA, 22 nt, Artificial Sequence
  Synthetic
gcgaggcagagauugcagugag

SEQ ID NO: 312919 - RNA, 23 nt, Artificial Sequence
  Synthetic
cgcgaggcagagauugcagugag

SEQ ID NO: 312920 - RNA, 24 nt, Artificial Sequence
  Synthetic
ccgcgaggcagagauugcagugag

SEQ ID NO: 312921 - RNA, 18 nt, Artificial Sequence
  Synthetic
ggcagagcuugcagugag

SEQ ID NO: 312922 - RNA, 19 nt, Artificial Sequence
  Synthetic
aggcagagcuugcagugag

SEQ ID NO: 312923 - RNA, 20 nt, Artificial Sequence
  Synthetic
gaggcagagcuugcagugag

SEQ ID NO: 312924 - RNA, 21 nt, Artificial Sequence
  Synthetic
ggaggcagagcuugcagugag

SEQ ID NO: 312925 - RNA, 22 nt, Artificial Sequence
  Synthetic
gggaggcagagcuugcagugag

SEQ ID NO: 312926 - RNA, 23 nt, Artificial Sequence
  Synthetic
cgggaggcagagcuugcagugag

SEQ ID NO: 312927 - RNA, 24 nt, Artificial Sequence
  Synthetic
ccgggaggcagagcuugcagugag

SEQ ID NO: 312928 - RNA, 18 nt, Artificial Sequence
  Synthetic
ugcagagcuugcagugag

SEQ ID NO: 312929 - RNA, 19 nt, Artificial Sequence
  Synthetic
augcagagcuugcagugag

SEQ ID NO: 312930 - RNA, 20 nt, Artificial Sequence
  Synthetic
gaugcagagcuugcagugag

SEQ ID NO: 312931 - RNA, 21 nt, Artificial Sequence
  Synthetic
ggaugcagagcuugcagugag

SEQ ID NO: 312932 - RNA, 22 nt, Artificial Sequence
  Synthetic
gggaugcagagcuugcagugag

SEQ ID NO: 312933 - RNA, 23 nt, Artificial Sequence
  Synthetic
ugggaugcagagcuugcagugag

SEQ ID NO: 312934 - RNA, 24 nt, Artificial Sequence
  Synthetic
cugggaugcagagcuugcagugag

SEQ ID NO: 312935 - RNA, 18 nt, Artificial Sequence
  Synthetic
gacggagcuugcagugag

SEQ ID NO: 312936 - RNA, 19 nt, Artificial Sequence
  Synthetic
agacggagcuugcagugag

SEQ ID NO: 312937 - RNA, 20 nt, Artificial Sequence
  Synthetic
gagacggagcuugcagugag

SEQ ID NO: 312938 - RNA, 21 nt, Artificial Sequence
  Synthetic
ggagacggagcuugcagugag

SEQ ID NO: 312939 - RNA, 22 nt, Artificial Sequence
  Synthetic
gggagacggagcuugcagugag

SEQ ID NO: 312940 - RNA, 23 nt, Artificial Sequence
  Synthetic
ugggagacggagcuugcagugag

SEQ ID NO: 312941 - RNA, 24 nt, Artificial Sequence
  Synthetic
cugggagacggagcuugcagugag

SEQ ID NO: 312942 - RNA, 22 nt, Artificial Sequence
  Synthetic
gggagguggagcuugcagugag

SEQ ID NO: 312943 - RNA, 23 nt, Artificial Sequence
  Synthetic
ugggagguggagcuugcagugag

SEQ ID NO: 312944 - RNA, 24 nt, Artificial Sequence
  Synthetic
cugggagguggagcuugcagugag

SEQ ID NO: 312945 - RNA, 18 nt, Artificial Sequence
  Synthetic
ggcagaaguugcagugag

SEQ ID NO: 312946 - RNA, 19 nt, Artificial Sequence
  Synthetic
aggcagaaguugcagugag

SEQ ID NO: 312947 - RNA, 20 nt, Artificial Sequence
  Synthetic
gaggcagaaguugcagugag

SEQ ID NO: 312948 - RNA, 21 nt, Artificial Sequence
  Synthetic
agaggcagaaguugcagugag

SEQ ID NO: 312949 - RNA, 22 nt, Artificial Sequence
  Synthetic
gagaggcagaaguugcagugag

SEQ ID NO: 312950 - RNA, 23 nt, Artificial Sequence
  Synthetic
cgagaggcagaaguugcagugag

SEQ ID NO: 312951 - RNA, 24 nt, Artificial Sequence
  Synthetic
ccgagaggcagaaguugcagugag

SEQ ID NO: 312952 - RNA, 18 nt, Artificial Sequence
  Synthetic
gguagaaguugcagugag

SEQ ID NO: 312953 - RNA, 19 nt, Artificial Sequence
  Synthetic
agguagaaguugcagugag

SEQ ID NO: 312954 - RNA, 20 nt, Artificial Sequence
  Synthetic
gagguagaaguugcagugag

SEQ ID NO: 312955 - RNA, 21 nt, Artificial Sequence
  Synthetic
ggagguagaaguugcagugag

SEQ ID NO: 312956 - RNA, 22 nt, Artificial Sequence
  Synthetic
aggagguagaaguugcagugag

SEQ ID NO: 312957 - RNA, 23 nt, Artificial Sequence
  Synthetic
caggagguagaaguugcagugag

SEQ ID NO: 312958 - RNA, 24 nt, Artificial Sequence
  Synthetic
ccaggagguagaaguugcagugag

SEQ ID NO: 312959 - RNA, 18 nt, Artificial Sequence
  Synthetic
gacagagguugcagugag

SEQ ID NO: 312960 - RNA, 19 nt, Artificial Sequence
  Synthetic
agacagagguugcagugag

SEQ ID NO: 312961 - RNA, 20 nt, Artificial Sequence
  Synthetic
gagacagagguugcagugag

SEQ ID NO: 312962 - RNA, 21 nt, Artificial Sequence
  Synthetic
ggagacagagguugcagugag

SEQ ID NO: 312963 - RNA, 22 nt, Artificial Sequence
  Synthetic
gggagacagagguugcagugag

SEQ ID NO: 312964 - RNA, 23 nt, Artificial Sequence
  Synthetic
ugggagacagagguugcagugag

SEQ ID NO: 312965 - RNA, 24 nt, Artificial Sequence
  Synthetic
cugggagacagagguugcagugag

SEQ ID NO: 312966 - RNA, 19 nt, Artificial Sequence
  Synthetic
ggacagagguugcagugag

SEQ ID NO: 312967 - RNA, 20 nt, Artificial Sequence
  Synthetic
gggacagagguugcagugag

SEQ ID NO: 312968 - RNA, 21 nt, Artificial Sequence
  Synthetic
ggggacagagguugcagugag

SEQ ID NO: 312969 - RNA, 22 nt, Artificial Sequence
  Synthetic
gggggacagagguugcagugag

SEQ ID NO: 312970 - RNA, 23 nt, Artificial Sequence
  Synthetic
agggggacagagguugcagugag

SEQ ID NO: 312971 - RNA, 24 nt, Artificial Sequence
  Synthetic
gagggggacagagguugcagugag

SEQ ID NO: 312972 - RNA, 21 nt, Artificial Sequence
  Synthetic
ggaggcagagguugcagugag

SEQ ID NO: 312973 - RNA, 22 nt, Artificial Sequence
  Synthetic
aggaggcagagguugcagugag

SEQ ID NO: 312974 - RNA, 23 nt, Artificial Sequence
  Synthetic
caggaggcagagguugcagugag

SEQ ID NO: 312975 - RNA, 24 nt, Artificial Sequence
  Synthetic
ccaggaggcagagguugcagugag

SEQ ID NO: 312976 - RNA, 22 nt, Artificial Sequence
  Synthetic
gggaggcagagguugcagugag

SEQ ID NO: 312977 - RNA, 23 nt, Artificial Sequence
  Synthetic
cgggaggcagagguugcagugag

SEQ ID NO: 312978 - RNA, 24 nt, Artificial Sequence
  Synthetic
ucgggaggcagagguugcagugag

SEQ ID NO: 312979 - RNA, 23 nt, Artificial Sequence
  Synthetic
ggggaggcagagguugcagugag

SEQ ID NO: 312980 - RNA, 24 nt, Artificial Sequence
  Synthetic
uggggaggcagagguugcagugag

SEQ ID NO: 312981 - RNA, 23 nt, Artificial Sequence
  Synthetic
cgggaggcggagguugcagugag

SEQ ID NO: 312982 - RNA, 24 nt, Artificial Sequence
  Synthetic
ccgggaggcggagguugcagugag

SEQ ID NO: 312983 - RNA, 22 nt, Artificial Sequence
  Synthetic
uggaggcggagguugcagugag

SEQ ID NO: 312984 - RNA, 23 nt, Artificial Sequence
  Synthetic
cuggaggcggagguugcagugag

SEQ ID NO: 312985 - RNA, 24 nt, Artificial Sequence
  Synthetic
ccuggaggcggagguugcagugag

SEQ ID NO: 312986 - RNA, 18 nt, Artificial Sequence
  Synthetic
gguggagguugcagugag

SEQ ID NO: 312987 - RNA, 19 nt, Artificial Sequence
  Synthetic
agguggagguugcagugag

SEQ ID NO: 312988 - RNA, 20 nt, Artificial Sequence
  Synthetic
gagguggagguugcagugag

SEQ ID NO: 312989 - RNA, 24 nt, Artificial Sequence
  Synthetic
ccgggagguggagguugcagugag

SEQ ID NO: 312990 - RNA, 18 nt, Artificial Sequence
  Synthetic
ggcagauguugcagugag

SEQ ID NO: 312991 - RNA, 19 nt, Artificial Sequence
  Synthetic
aggcagauguugcagugag

SEQ ID NO: 312992 - RNA, 20 nt, Artificial Sequence
  Synthetic
gaggcagauguugcagugag

SEQ ID NO: 312993 - RNA, 21 nt, Artificial Sequence
  Synthetic
ggaggcagauguugcagugag

SEQ ID NO: 312994 - RNA, 22 nt, Artificial Sequence
  Synthetic
gggaggcagauguugcagugag

SEQ ID NO: 312995 - RNA, 23 nt, Artificial Sequence
  Synthetic
cgggaggcagauguugcagugag

SEQ ID NO: 312996 - RNA, 24 nt, Artificial Sequence
  Synthetic
ccgggaggcagauguugcagugag

SEQ ID NO: 312997 - RNA, 18 nt, Artificial Sequence
  Synthetic
ggcagaguuugcagugag

SEQ ID NO: 312998 - RNA, 19 nt, Artificial Sequence
  Synthetic
aggcagaguuugcagugag

SEQ ID NO: 312999 - RNA, 20 nt, Artificial Sequence
  Synthetic
gaggcagaguuugcagugag

SEQ ID NO: 313000 - RNA, 21 nt, Artificial Sequence
  Synthetic
ggaggcagaguuugcagugag

SEQ ID NO: 313001 - RNA, 22 nt, Artificial Sequence
  Synthetic
uggaggcagaguuugcagugag

SEQ ID NO: 313002 - RNA, 23 nt, Artificial Sequence
  Synthetic
cuggaggcagaguuugcagugag

SEQ ID NO: 313003 - RNA, 24 nt, Artificial Sequence
  Synthetic
ccuggaggcagaguuugcagugag

SEQ ID NO: 313004 - RNA, 18 nt, Artificial Sequence
  Synthetic
ggcggaguuugcagugag

SEQ ID NO: 313005 - RNA, 19 nt, Artificial Sequence
  Synthetic
aggcggaguuugcagugag

SEQ ID NO: 313006 - RNA, 20 nt, Artificial Sequence
  Synthetic
gaggcggaguuugcagugag

SEQ ID NO: 313007 - RNA, 21 nt, Artificial Sequence
  Synthetic
ggaggcggaguuugcagugag

SEQ ID NO: 313008 - RNA, 22 nt, Artificial Sequence
  Synthetic
gggaggcggaguuugcagugag

SEQ ID NO: 313009 - RNA, 23 nt, Artificial Sequence
  Synthetic
cgggaggcggaguuugcagugag

SEQ ID NO: 313010 - RNA, 24 nt, Artificial Sequence
  Synthetic
ccgggaggcggaguuugcagugag

SEQ ID NO: 313011 - RNA, 18 nt, Artificial Sequence
  Synthetic
aguguaguuugcagugag

SEQ ID NO: 313012 - RNA, 19 nt, Artificial Sequence
  Synthetic
aaguguaguuugcagugag

SEQ ID NO: 313013 - RNA, 20 nt, Artificial Sequence
  Synthetic
gaaguguaguuugcagugag

SEQ ID NO: 313014 - RNA, 21 nt, Artificial Sequence
  Synthetic
ggaaguguaguuugcagugag

SEQ ID NO: 313015 - RNA, 22 nt, Artificial Sequence
  Synthetic
gggaaguguaguuugcagugag

SEQ ID NO: 313016 - RNA, 23 nt, Artificial Sequence
  Synthetic
ugggaaguguaguuugcagugag

SEQ ID NO: 313017 - RNA, 24 nt, Artificial Sequence
  Synthetic
cugggaaguguaguuugcagugag

SEQ ID NO: 313018 - RNA, 18 nt, Artificial Sequence
  Synthetic
aaaucaaaggucagugag

SEQ ID NO: 313019 - RNA, 19 nt, Artificial Sequence
  Synthetic
gaaaucaaaggucagugag

SEQ ID NO: 313020 - RNA, 20 nt, Artificial Sequence
  Synthetic
agaaaucaaaggucagugag

SEQ ID NO: 313021 - RNA, 21 nt, Artificial Sequence
  Synthetic
cagaaaucaaaggucagugag

SEQ ID NO: 313022 - RNA, 22 nt, Artificial Sequence
  Synthetic
ccagaaaucaaaggucagugag

SEQ ID NO: 313023 - RNA, 23 nt, Artificial Sequence
  Synthetic
cccagaaaucaaaggucagugag

SEQ ID NO: 313024 - RNA, 24 nt, Artificial Sequence
  Synthetic
acccagaaaucaaaggucagugag

SEQ ID NO: 313025 - RNA, 18 nt, Artificial Sequence
  Synthetic
ggaugagaggagagugag

SEQ ID NO: 313026 - RNA, 19 nt, Artificial Sequence
  Synthetic
uggaugagaggagagugag

SEQ ID NO: 313027 - RNA, 20 nt, Artificial Sequence
  Synthetic
auggaugagaggagagugag

SEQ ID NO: 313028 - RNA, 21 nt, Artificial Sequence
  Synthetic
aauggaugagaggagagugag

SEQ ID NO: 313029 - RNA, 22 nt, Artificial Sequence
  Synthetic
caauggaugagaggagagugag

SEQ ID NO: 313030 - RNA, 23 nt, Artificial Sequence
  Synthetic
ucaauggaugagaggagagugag

SEQ ID NO: 313031 - RNA, 24 nt, Artificial Sequence
  Synthetic
aucaauggaugagaggagagugag

SEQ ID NO: 313032 - RNA, 18 nt, Artificial Sequence
  Synthetic
acauugaggaugagugag

SEQ ID NO: 313033 - RNA, 19 nt, Artificial Sequence
  Synthetic
gacauugaggaugagugag

SEQ ID NO: 313034 - RNA, 20 nt, Artificial Sequence
  Synthetic
agacauugaggaugagugag

SEQ ID NO: 313035 - RNA, 21 nt, Artificial Sequence
  Synthetic
aagacauugaggaugagugag

SEQ ID NO: 313036 - RNA, 22 nt, Artificial Sequence
  Synthetic
uaagacauugaggaugagugag

SEQ ID NO: 313037 - RNA, 23 nt, Artificial Sequence
  Synthetic
cuaagacauugaggaugagugag

SEQ ID NO: 313038 - RNA, 24 nt, Artificial Sequence
  Synthetic
gcuaagacauugaggaugagugag

SEQ ID NO: 313039 - RNA, 18 nt, Artificial Sequence
  Synthetic
aaauuggaguauagugag

SEQ ID NO: 313040 - RNA, 19 nt, Artificial Sequence
  Synthetic
uaaauuggaguauagugag

SEQ ID NO: 313041 - RNA, 20 nt, Artificial Sequence
  Synthetic
guaaauuggaguauagugag

SEQ ID NO: 313042 - RNA, 21 nt, Artificial Sequence
  Synthetic
uguaaauuggaguauagugag

SEQ ID NO: 313043 - RNA, 22 nt, Artificial Sequence
  Synthetic
guguaaauuggaguauagugag

SEQ ID NO: 313044 - RNA, 23 nt, Artificial Sequence
  Synthetic
uguguaaauuggaguauagugag

SEQ ID NO: 313045 - RNA, 24 nt, Artificial Sequence
  Synthetic
guguguaaauuggaguauagugag

SEQ ID NO: 313046 - RNA, 18 nt, Artificial Sequence
  Synthetic
auuuuaucuacuagugag

SEQ ID NO: 313047 - RNA, 19 nt, Artificial Sequence
  Synthetic
uauuuuaucuacuagugag

SEQ ID NO: 313048 - RNA, 20 nt, Artificial Sequence
  Synthetic
uuauuuuaucuacuagugag

SEQ ID NO: 313049 - RNA, 21 nt, Artificial Sequence
  Synthetic
guuauuuuaucuacuagugag

SEQ ID NO: 313050 - RNA, 22 nt, Artificial Sequence
  Synthetic
aguuauuuuaucuacuagugag

SEQ ID NO: 313051 - RNA, 23 nt, Artificial Sequence
  Synthetic
gaguuauuuuaucuacuagugag

SEQ ID NO: 313052 - RNA, 24 nt, Artificial Sequence
  Synthetic
agaguuauuuuaucuacuagugag

SEQ ID NO: 313053 - RNA, 18 nt, Artificial Sequence
  Synthetic
cacacuuuugguagugag

SEQ ID NO: 313054 - RNA, 19 nt, Artificial Sequence
  Synthetic
ucacacuuuugguagugag

SEQ ID NO: 313055 - RNA, 20 nt, Artificial Sequence
  Synthetic
aucacacuuuugguagugag

SEQ ID NO: 313056 - RNA, 21 nt, Artificial Sequence
  Synthetic
caucacacuuuugguagugag

SEQ ID NO: 313057 - RNA, 22 nt, Artificial Sequence
  Synthetic
ccaucacacuuuugguagugag

SEQ ID NO: 313058 - RNA, 23 nt, Artificial Sequence
  Synthetic
accaucacacuuuugguagugag

SEQ ID NO: 313059 - RNA, 24 nt, Artificial Sequence
  Synthetic
uaccaucacacuuuugguagugag

SEQ ID NO: 313060 - RNA, 18 nt, Artificial Sequence
  Synthetic
gucuuggaguguagugag

SEQ ID NO: 313061 - RNA, 19 nt, Artificial Sequence
  Synthetic
agucuuggaguguagugag

SEQ ID NO: 313062 - RNA, 20 nt, Artificial Sequence
  Synthetic
aagucuuggaguguagugag

SEQ ID NO: 313063 - RNA, 21 nt, Artificial Sequence
  Synthetic
gaagucuuggaguguagugag

SEQ ID NO: 313064 - RNA, 22 nt, Artificial Sequence
  Synthetic
ggaagucuuggaguguagugag

SEQ ID NO: 313065 - RNA, 23 nt, Artificial Sequence
  Synthetic
gggaagucuuggaguguagugag

SEQ ID NO: 313066 - RNA, 24 nt, Artificial Sequence
  Synthetic
agggaagucuuggaguguagugag

SEQ ID NO: 313067 - RNA, 18 nt, Artificial Sequence
  Synthetic
gaaguagauuguagugag

SEQ ID NO: 313068 - RNA, 19 nt, Artificial Sequence
  Synthetic
agaaguagauuguagugag

SEQ ID NO: 313069 - RNA, 20 nt, Artificial Sequence
  Synthetic
aagaaguagauuguagugag

SEQ ID NO: 313070 - RNA, 21 nt, Artificial Sequence
  Synthetic
aaagaaguagauuguagugag

SEQ ID NO: 313071 - RNA, 22 nt, Artificial Sequence
  Synthetic
gaaagaaguagauuguagugag

SEQ ID NO: 313072 - RNA, 23 nt, Artificial Sequence
  Synthetic
ugaaagaaguagauuguagugag

SEQ ID NO: 313073 - RNA, 24 nt, Artificial Sequence
  Synthetic
gugaaagaaguagauuguagugag

SEQ ID NO: 313074 - RNA, 18 nt, Artificial Sequence
  Synthetic
ggcagagcuuguagugag

SEQ ID NO: 313075 - RNA, 19 nt, Artificial Sequence
  Synthetic
aggcagagcuuguagugag

SEQ ID NO: 313076 - RNA, 20 nt, Artificial Sequence
  Synthetic
gaggcagagcuuguagugag

SEQ ID NO: 313077 - RNA, 21 nt, Artificial Sequence
  Synthetic
ggaggcagagcuuguagugag

SEQ ID NO: 313078 - RNA, 22 nt, Artificial Sequence
  Synthetic
gggaggcagagcuuguagugag

SEQ ID NO: 313079 - RNA, 23 nt, Artificial Sequence
  Synthetic
ugggaggcagagcuuguagugag

SEQ ID NO: 313080 - RNA, 24 nt, Artificial Sequence
  Synthetic
cugggaggcagagcuuguagugag

SEQ ID NO: 313081 - RNA, 18 nt, Artificial Sequence
  Synthetic
ggagagaauguuagugag

SEQ ID NO: 313082 - RNA, 19 nt, Artificial Sequence
  Synthetic
aggagagaauguuagugag

SEQ ID NO: 313083 - RNA, 20 nt, Artificial Sequence
  Synthetic
uaggagagaauguuagugag

SEQ ID NO: 313084 - RNA, 21 nt, Artificial Sequence
  Synthetic
uuaggagagaauguuagugag

SEQ ID NO: 313085 - RNA, 22 nt, Artificial Sequence
  Synthetic
uuuaggagagaauguuagugag

SEQ ID NO: 313086 - RNA, 23 nt, Artificial Sequence
  Synthetic
guuuaggagagaauguuagugag

SEQ ID NO: 313087 - RNA, 24 nt, Artificial Sequence
  Synthetic
gguuuaggagagaauguuagugag

SEQ ID NO: 313088 - RNA, 18 nt, Artificial Sequence
  Synthetic
aauucacuauuuagugag

SEQ ID NO: 313089 - RNA, 19 nt, Artificial Sequence
  Synthetic
uaauucacuauuuagugag

SEQ ID NO: 313090 - RNA, 20 nt, Artificial Sequence
  Synthetic
uuaauucacuauuuagugag

SEQ ID NO: 313091 - RNA, 21 nt, Artificial Sequence
  Synthetic
guuaauucacuauuuagugag

SEQ ID NO: 313092 - RNA, 22 nt, Artificial Sequence
  Synthetic
uguuaauucacuauuuagugag

SEQ ID NO: 313093 - RNA, 23 nt, Artificial Sequence
  Synthetic
guguuaauucacuauuuagugag

SEQ ID NO: 313094 - RNA, 24 nt, Artificial Sequence
  Synthetic
uguguuaauucacuauuuagugag

SEQ ID NO: 313095 - RNA, 18 nt, Artificial Sequence
  Synthetic
agugguacauaaggugag

SEQ ID NO: 313096 - RNA, 19 nt, Artificial Sequence
  Synthetic
cagugguacauaaggugag

SEQ ID NO: 313097 - RNA, 20 nt, Artificial Sequence
  Synthetic
gcagugguacauaaggugag

SEQ ID NO: 313098 - RNA, 21 nt, Artificial Sequence
  Synthetic
agcagugguacauaaggugag

SEQ ID NO: 313099 - RNA, 22 nt, Artificial Sequence
  Synthetic
gagcagugguacauaaggugag

SEQ ID NO: 313100 - RNA, 23 nt, Artificial Sequence
  Synthetic
ggagcagugguacauaaggugag

SEQ ID NO: 313101 - RNA, 24 nt, Artificial Sequence
  Synthetic
aggagcagugguacauaaggugag

SEQ ID NO: 313102 - RNA, 18 nt, Artificial Sequence
  Synthetic
ugcuucugaggaggugag

SEQ ID NO: 313103 - RNA, 19 nt, Artificial Sequence
  Synthetic
uugcuucugaggaggugag

SEQ ID NO: 313104 - RNA, 20 nt, Artificial Sequence
  Synthetic
auugcuucugaggaggugag

SEQ ID NO: 313105 - RNA, 21 nt, Artificial Sequence
  Synthetic
gauugcuucugaggaggugag

SEQ ID NO: 313106 - RNA, 22 nt, Artificial Sequence
  Synthetic
agauugcuucugaggaggugag

SEQ ID NO: 313107 - RNA, 23 nt, Artificial Sequence
  Synthetic
gagauugcuucugaggaggugag

SEQ ID NO: 313108 - RNA, 24 nt, Artificial Sequence
  Synthetic
agagauugcuucugaggaggugag

SEQ ID NO: 313109 - RNA, 18 nt, Artificial Sequence
  Synthetic
gugggagguggaggugag

SEQ ID NO: 313110 - RNA, 19 nt, Artificial Sequence
  Synthetic
ugugggagguggaggugag

SEQ ID NO: 313111 - RNA, 20 nt, Artificial Sequence
  Synthetic
uugugggagguggaggugag

SEQ ID NO: 313112 - RNA, 21 nt, Artificial Sequence
  Synthetic
uuugugggagguggaggugag

SEQ ID NO: 313113 - RNA, 22 nt, Artificial Sequence
  Synthetic
uuuugugggagguggaggugag

SEQ ID NO: 313114 - RNA, 23 nt, Artificial Sequence
  Synthetic
guuuugugggagguggaggugag

SEQ ID NO: 313115 - RNA, 24 nt, Artificial Sequence
  Synthetic
uguuuugugggagguggaggugag

SEQ ID NO: 313116 - RNA, 18 nt, Artificial Sequence
  Synthetic
gguggagcuugcggugag

SEQ ID NO: 313117 - RNA, 19 nt, Artificial Sequence
  Synthetic
agguggagcuugcggugag

SEQ ID NO: 313118 - RNA, 20 nt, Artificial Sequence
  Synthetic
gagguggagcuugcggugag

SEQ ID NO: 313119 - RNA, 22 nt, Artificial Sequence
  Synthetic
gggagguggagcuugcggugag

SEQ ID NO: 313120 - RNA, 23 nt, Artificial Sequence
  Synthetic
cgggagguggagcuugcggugag

SEQ ID NO: 313121 - RNA, 24 nt, Artificial Sequence
  Synthetic
ccgggagguggagcuugcggugag

SEQ ID NO: 313122 - RNA, 18 nt, Artificial Sequence
  Synthetic
aaaagaauucagggugag

SEQ ID NO: 313123 - RNA, 19 nt, Artificial Sequence
  Synthetic
gaaaagaauucagggugag

SEQ ID NO: 313124 - RNA, 20 nt, Artificial Sequence
  Synthetic
ggaaaagaauucagggugag

SEQ ID NO: 313125 - RNA, 21 nt, Artificial Sequence
  Synthetic
aggaaaagaauucagggugag

SEQ ID NO: 313126 - RNA, 22 nt, Artificial Sequence
  Synthetic
aaggaaaagaauucagggugag

SEQ ID NO: 313127 - RNA, 23 nt, Artificial Sequence
  Synthetic
aaaggaaaagaauucagggugag

SEQ ID NO: 313128 - RNA, 24 nt, Artificial Sequence
  Synthetic
aaaaggaaaagaauucagggugag

SEQ ID NO: 313129 - RNA, 18 nt, Artificial Sequence
  Synthetic
accaagcccuagggugag

SEQ ID NO: 313130 - RNA, 19 nt, Artificial Sequence
  Synthetic
uaccaagcccuagggugag

SEQ ID NO: 313131 - RNA, 20 nt, Artificial Sequence
  Synthetic
guaccaagcccuagggugag

SEQ ID NO: 313132 - RNA, 21 nt, Artificial Sequence
  Synthetic
gguaccaagcccuagggugag

SEQ ID NO: 313133 - RNA, 22 nt, Artificial Sequence
  Synthetic
ugguaccaagcccuagggugag

SEQ ID NO: 313134 - RNA, 23 nt, Artificial Sequence
  Synthetic
cugguaccaagcccuagggugag

SEQ ID NO: 313135 - RNA, 24 nt, Artificial Sequence
  Synthetic
ucugguaccaagcccuagggugag

SEQ ID NO: 313136 - RNA, 18 nt, Artificial Sequence
  Synthetic
uguagguuuaugggugag

SEQ ID NO: 313137 - RNA, 19 nt, Artificial Sequence
  Synthetic
guguagguuuaugggugag

SEQ ID NO: 313138 - RNA, 20 nt, Artificial Sequence
  Synthetic
aguguagguuuaugggugag

SEQ ID NO: 313139 - RNA, 21 nt, Artificial Sequence
  Synthetic
gaguguagguuuaugggugag

SEQ ID NO: 313140 - RNA, 22 nt, Artificial Sequence
  Synthetic
agaguguagguuuaugggugag

SEQ ID NO: 313141 - RNA, 23 nt, Artificial Sequence
  Synthetic
cagaguguagguuuaugggugag

SEQ ID NO: 313142 - RNA, 24 nt, Artificial Sequence
  Synthetic
gcagaguguagguuuaugggugag

SEQ ID NO: 313143 - RNA, 18 nt, Artificial Sequence
  Synthetic
acccaaucauugggugag

SEQ ID NO: 313144 - RNA, 19 nt, Artificial Sequence
  Synthetic
cacccaaucauugggugag

SEQ ID NO: 313145 - RNA, 20 nt, Artificial Sequence
  Synthetic
acacccaaucauugggugag

SEQ ID NO: 313146 - RNA, 21 nt, Artificial Sequence
  Synthetic
cacacccaaucauugggugag

SEQ ID NO: 313147 - RNA, 22 nt, Artificial Sequence
  Synthetic
ccacacccaaucauugggugag

SEQ ID NO: 313148 - RNA, 23 nt, Artificial Sequence
  Synthetic
accacacccaaucauugggugag

SEQ ID NO: 313149 - RNA, 24 nt, Artificial Sequence
  Synthetic
caccacacccaaucauugggugag

SEQ ID NO: 313150 - RNA, 18 nt, Artificial Sequence
  Synthetic
ucauauugugauggugag

SEQ ID NO: 313151 - RNA, 19 nt, Artificial Sequence
  Synthetic
cucauauugugauggugag

SEQ ID NO: 313152 - RNA, 20 nt, Artificial Sequence
  Synthetic
acucauauugugauggugag

SEQ ID NO: 313153 - RNA, 21 nt, Artificial Sequence
  Synthetic
uacucauauugugauggugag

SEQ ID NO: 313154 - RNA, 22 nt, Artificial Sequence
  Synthetic
auacucauauugugauggugag

SEQ ID NO: 313155 - RNA, 23 nt, Artificial Sequence
  Synthetic
aauacucauauugugauggugag

SEQ ID NO: 313156 - RNA, 24 nt, Artificial Sequence
  Synthetic
uaauacucauauugugauggugag

SEQ ID NO: 313157 - RNA, 18 nt, Artificial Sequence
  Synthetic
aagucuuaugguggugag

SEQ ID NO: 313158 - RNA, 19 nt, Artificial Sequence
  Synthetic
gaagucuuaugguggugag

SEQ ID NO: 313159 - RNA, 20 nt, Artificial Sequence
  Synthetic
agaagucuuaugguggugag

SEQ ID NO: 313160 - RNA, 21 nt, Artificial Sequence
  Synthetic
aagaagucuuaugguggugag

SEQ ID NO: 313161 - RNA, 22 nt, Artificial Sequence
  Synthetic
caagaagucuuaugguggugag

SEQ ID NO: 313162 - RNA, 23 nt, Artificial Sequence
  Synthetic
ccaagaagucuuaugguggugag

SEQ ID NO: 313163 - RNA, 24 nt, Artificial Sequence
  Synthetic
gccaagaagucuuaugguggugag

SEQ ID NO: 313164 - RNA, 18 nt, Artificial Sequence
  Synthetic
aagucuuauuguggugag

SEQ ID NO: 313165 - RNA, 19 nt, Artificial Sequence
  Synthetic
gaagucuuauuguggugag

SEQ ID NO: 313166 - RNA, 20 nt, Artificial Sequence
  Synthetic
agaagucuuauuguggugag

SEQ ID NO: 313167 - RNA, 21 nt, Artificial Sequence
  Synthetic
aagaagucuuauuguggugag

SEQ ID NO: 313168 - RNA, 22 nt, Artificial Sequence
  Synthetic
caagaagucuuauuguggugag

SEQ ID NO: 313169 - RNA, 23 nt, Artificial Sequence
  Synthetic
ccaagaagucuuauuguggugag

SEQ ID NO: 313170 - RNA, 24 nt, Artificial Sequence
  Synthetic
gccaagaagucuuauuguggugag

SEQ ID NO: 313171 - RNA, 18 nt, Artificial Sequence
  Synthetic
cuucauaaccuuggugag

SEQ ID NO: 313172 - RNA, 19 nt, Artificial Sequence
  Synthetic
ccuucauaaccuuggugag

SEQ ID NO: 313173 - RNA, 20 nt, Artificial Sequence
  Synthetic
accuucauaaccuuggugag

SEQ ID NO: 313174 - RNA, 21 nt, Artificial Sequence
  Synthetic
uaccuucauaaccuuggugag

SEQ ID NO: 313175 - RNA, 22 nt, Artificial Sequence
  Synthetic
cuaccuucauaaccuuggugag

SEQ ID NO: 313176 - RNA, 23 nt, Artificial Sequence
  Synthetic
gcuaccuucauaaccuuggugag

SEQ ID NO: 313177 - RNA, 24 nt, Artificial Sequence
  Synthetic
ugcuaccuucauaaccuuggugag

SEQ ID NO: 313178 - RNA, 18 nt, Artificial Sequence
  Synthetic
aaagaaugaaaaugugag

SEQ ID NO: 313179 - RNA, 19 nt, Artificial Sequence
  Synthetic
aaaagaaugaaaaugugag

SEQ ID NO: 313180 - RNA, 20 nt, Artificial Sequence
  Synthetic
aaaaagaaugaaaaugugag

SEQ ID NO: 313181 - RNA, 21 nt, Artificial Sequence
  Synthetic
aaaaaagaaugaaaaugugag

SEQ ID NO: 313182 - RNA, 22 nt, Artificial Sequence
  Synthetic
uaaaaaagaaugaaaaugugag

SEQ ID NO: 313183 - RNA, 23 nt, Artificial Sequence
  Synthetic
uuaaaaaagaaugaaaaugugag

SEQ ID NO: 313184 - RNA, 24 nt, Artificial Sequence
  Synthetic
auuaaaaaagaaugaaaaugugag

SEQ ID NO: 313185 - RNA, 18 nt, Artificial Sequence
  Synthetic
uguaauguucaaugugag

SEQ ID NO: 313186 - RNA, 19 nt, Artificial Sequence
  Synthetic
uuguaauguucaaugugag

SEQ ID NO: 313187 - RNA, 20 nt, Artificial Sequence
  Synthetic
cuuguaauguucaaugugag

SEQ ID NO: 313188 - RNA, 21 nt, Artificial Sequence
  Synthetic
ucuuguaauguucaaugugag

SEQ ID NO: 313189 - RNA, 22 nt, Artificial Sequence
  Synthetic
aucuuguaauguucaaugugag

SEQ ID NO: 313190 - RNA, 23 nt, Artificial Sequence
  Synthetic
uaucuuguaauguucaaugugag

SEQ ID NO: 313191 - RNA, 24 nt, Artificial Sequence
  Synthetic
uuaucuuguaauguucaaugugag

SEQ ID NO: 313192 - RNA, 18 nt, Artificial Sequence
  Synthetic
guguaacuggaaugugag

SEQ ID NO: 313193 - RNA, 19 nt, Artificial Sequence
  Synthetic
aguguaacuggaaugugag

SEQ ID NO: 313194 - RNA, 20 nt, Artificial Sequence
  Synthetic
gaguguaacuggaaugugag

SEQ ID NO: 313195 - RNA, 21 nt, Artificial Sequence
  Synthetic
agaguguaacuggaaugugag

SEQ ID NO: 313196 - RNA, 22 nt, Artificial Sequence
  Synthetic
uagaguguaacuggaaugugag

SEQ ID NO: 313197 - RNA, 23 nt, Artificial Sequence
  Synthetic
guagaguguaacuggaaugugag

SEQ ID NO: 313198 - RNA, 24 nt, Artificial Sequence
  Synthetic
gguagaguguaacuggaaugugag

SEQ ID NO: 313199 - RNA, 18 nt, Artificial Sequence
  Synthetic
ugaccaauugaaugugag

SEQ ID NO: 313200 - RNA, 19 nt, Artificial Sequence
  Synthetic
gugaccaauugaaugugag

SEQ ID NO: 313201 - RNA, 20 nt, Artificial Sequence
  Synthetic
ugugaccaauugaaugugag

SEQ ID NO: 313202 - RNA, 21 nt, Artificial Sequence
  Synthetic
uugugaccaauugaaugugag

SEQ ID NO: 313203 - RNA, 22 nt, Artificial Sequence
  Synthetic
guugugaccaauugaaugugag

SEQ ID NO: 313204 - RNA, 23 nt, Artificial Sequence
  Synthetic
aguugugaccaauugaaugugag

SEQ ID NO: 313205 - RNA, 24 nt, Artificial Sequence
  Synthetic
uaguugugaccaauugaaugugag

SEQ ID NO: 313206 - RNA, 18 nt, Artificial Sequence
  Synthetic
cccuguucauaaugugag

SEQ ID NO: 313207 - RNA, 19 nt, Artificial Sequence
  Synthetic
ucccuguucauaaugugag

SEQ ID NO: 313208 - RNA, 20 nt, Artificial Sequence
  Synthetic
uucccuguucauaaugugag

SEQ ID NO: 313209 - RNA, 21 nt, Artificial Sequence
  Synthetic
cuucccuguucauaaugugag

SEQ ID NO: 313210 - RNA, 22 nt, Artificial Sequence
  Synthetic
acuucccuguucauaaugugag

SEQ ID NO: 313211 - RNA, 23 nt, Artificial Sequence
  Synthetic
aacuucccuguucauaaugugag

SEQ ID NO: 313212 - RNA, 24 nt, Artificial Sequence
  Synthetic
aaacuucccuguucauaaugugag

SEQ ID NO: 313213 - RNA, 18 nt, Artificial Sequence
  Synthetic
gauaccuagguaugugag

SEQ ID NO: 313214 - RNA, 19 nt, Artificial Sequence
  Synthetic
ugauaccuagguaugugag

SEQ ID NO: 313215 - RNA, 20 nt, Artificial Sequence
  Synthetic
gugauaccuagguaugugag

SEQ ID NO: 313216 - RNA, 21 nt, Artificial Sequence
  Synthetic
ugugauaccuagguaugugag

SEQ ID NO: 313217 - RNA, 22 nt, Artificial Sequence
  Synthetic
uugugauaccuagguaugugag

SEQ ID NO: 313218 - RNA, 23 nt, Artificial Sequence
  Synthetic
guugugauaccuagguaugugag

SEQ ID NO: 313219 - RNA, 24 nt, Artificial Sequence
  Synthetic
aguugugauaccuagguaugugag

SEQ ID NO: 313220 - RNA, 18 nt, Artificial Sequence
  Synthetic
uuuuagcaaaccugugag

SEQ ID NO: 313221 - RNA, 19 nt, Artificial Sequence
  Synthetic
cuuuuagcaaaccugugag

SEQ ID NO: 313222 - RNA, 20 nt, Artificial Sequence
  Synthetic
ucuuuuagcaaaccugugag

SEQ ID NO: 313223 - RNA, 21 nt, Artificial Sequence
  Synthetic
aucuuuuagcaaaccugugag

SEQ ID NO: 313224 - RNA, 22 nt, Artificial Sequence
  Synthetic
gaucuuuuagcaaaccugugag

SEQ ID NO: 313225 - RNA, 23 nt, Artificial Sequence
  Synthetic
agaucuuuuagcaaaccugugag

SEQ ID NO: 313226 - RNA, 24 nt, Artificial Sequence
  Synthetic
gagaucuuuuagcaaaccugugag

SEQ ID NO: 313227 - RNA, 18 nt, Artificial Sequence
  Synthetic
aggauuaacaccugugag

SEQ ID NO: 313228 - RNA, 19 nt, Artificial Sequence
  Synthetic
caggauuaacaccugugag

SEQ ID NO: 313229 - RNA, 20 nt, Artificial Sequence
  Synthetic
ucaggauuaacaccugugag

SEQ ID NO: 313230 - RNA, 21 nt, Artificial Sequence
  Synthetic
cucaggauuaacaccugugag

SEQ ID NO: 313231 - RNA, 22 nt, Artificial Sequence
  Synthetic
ucucaggauuaacaccugugag

SEQ ID NO: 313232 - RNA, 23 nt, Artificial Sequence
  Synthetic
cucucaggauuaacaccugugag

SEQ ID NO: 313233 - RNA, 24 nt, Artificial Sequence
  Synthetic
gcucucaggauuaacaccugugag

SEQ ID NO: 313234 - RNA, 18 nt, Artificial Sequence
  Synthetic
gccuaguggagcugugag

SEQ ID NO: 313235 - RNA, 19 nt, Artificial Sequence
  Synthetic
ugccuaguggagcugugag

SEQ ID NO: 313236 - RNA, 20 nt, Artificial Sequence
  Synthetic
cugccuaguggagcugugag

SEQ ID NO: 313237 - RNA, 21 nt, Artificial Sequence
  Synthetic
acugccuaguggagcugugag

SEQ ID NO: 313238 - RNA, 22 nt, Artificial Sequence
  Synthetic
cacugccuaguggagcugugag

SEQ ID NO: 313239 - RNA, 23 nt, Artificial Sequence
  Synthetic
gcacugccuaguggagcugugag

SEQ ID NO: 313240 - RNA, 24 nt, Artificial Sequence
  Synthetic
ggcacugccuaguggagcugugag

SEQ ID NO: 313241 - RNA, 18 nt, Artificial Sequence
  Synthetic
aagggaguuaucugugag

SEQ ID NO: 313242 - RNA, 19 nt, Artificial Sequence
  Synthetic
aaagggaguuaucugugag

SEQ ID NO: 313243 - RNA, 20 nt, Artificial Sequence
  Synthetic
caaagggaguuaucugugag

SEQ ID NO: 313244 - RNA, 21 nt, Artificial Sequence
  Synthetic
acaaagggaguuaucugugag

SEQ ID NO: 313245 - RNA, 22 nt, Artificial Sequence
  Synthetic
aacaaagggaguuaucugugag

SEQ ID NO: 313246 - RNA, 23 nt, Artificial Sequence
  Synthetic
aaacaaagggaguuaucugugag

SEQ ID NO: 313247 - RNA, 24 nt, Artificial Sequence
  Synthetic
uaaacaaagggaguuaucugugag

SEQ ID NO: 313248 - RNA, 18 nt, Artificial Sequence
  Synthetic
aaucaaaaccucugugag

SEQ ID NO: 313249 - RNA, 19 nt, Artificial Sequence
  Synthetic
aaaucaaaaccucugugag

SEQ ID NO: 313250 - RNA, 20 nt, Artificial Sequence
  Synthetic
caaaucaaaaccucugugag

SEQ ID NO: 313251 - RNA, 21 nt, Artificial Sequence
  Synthetic
gcaaaucaaaaccucugugag

SEQ ID NO: 313252 - RNA, 22 nt, Artificial Sequence
  Synthetic
ugcaaaucaaaaccucugugag

SEQ ID NO: 313253 - RNA, 23 nt, Artificial Sequence
  Synthetic
augcaaaucaaaaccucugugag

SEQ ID NO: 313254 - RNA, 24 nt, Artificial Sequence
  Synthetic
aaugcaaaucaaaaccucugugag

SEQ ID NO: 313255 - RNA, 18 nt, Artificial Sequence
  Synthetic
uuugcauuucugugugag

SEQ ID NO: 313256 - RNA, 19 nt, Artificial Sequence
  Synthetic
guuugcauuucugugugag

SEQ ID NO: 313257 - RNA, 20 nt, Artificial Sequence
  Synthetic
uguuugcauuucugugugag

SEQ ID NO: 313258 - RNA, 21 nt, Artificial Sequence
  Synthetic
auguuugcauuucugugugag

SEQ ID NO: 313259 - RNA, 22 nt, Artificial Sequence
  Synthetic
aauguuugcauuucugugugag

SEQ ID NO: 313260 - RNA, 23 nt, Artificial Sequence
  Synthetic
caauguuugcauuucugugugag

SEQ ID NO: 313261 - RNA, 24 nt, Artificial Sequence
  Synthetic
ucaauguuugcauuucugugugag

SEQ ID NO: 313262 - RNA, 18 nt, Artificial Sequence
  Synthetic
uaaacaaaugugugugag

SEQ ID NO: 313263 - RNA, 19 nt, Artificial Sequence
  Synthetic
uuaaacaaaugugugugag

SEQ ID NO: 313264 - RNA, 20 nt, Artificial Sequence
  Synthetic
auuaaacaaaugugugugag

SEQ ID NO: 313265 - RNA, 21 nt, Artificial Sequence
  Synthetic
cauuaaacaaaugugugugag

SEQ ID NO: 313266 - RNA, 22 nt, Artificial Sequence
  Synthetic
ucauuaaacaaaugugugugag

SEQ ID NO: 313267 - RNA, 23 nt, Artificial Sequence
  Synthetic
aucauuaaacaaaugugugugag

SEQ ID NO: 313268 - RNA, 24 nt, Artificial Sequence
  Synthetic
aaucauuaaacaaaugugugugag

SEQ ID NO: 313269 - RNA, 18 nt, Artificial Sequence
  Synthetic
uauaaguaugugugugag

SEQ ID NO: 313270 - RNA, 19 nt, Artificial Sequence
  Synthetic
guauaaguaugugugugag

SEQ ID NO: 313271 - RNA, 20 nt, Artificial Sequence
  Synthetic
aguauaaguaugugugugag

SEQ ID NO: 313272 - RNA, 21 nt, Artificial Sequence
  Synthetic
aaguauaaguaugugugugag

SEQ ID NO: 313273 - RNA, 22 nt, Artificial Sequence
  Synthetic
uaaguauaaguaugugugugag

SEQ ID NO: 313274 - RNA, 23 nt, Artificial Sequence
  Synthetic
uuaaguauaaguaugugugugag

SEQ ID NO: 313275 - RNA, 24 nt, Artificial Sequence
  Synthetic
auuaaguauaaguaugugugugag

SEQ ID NO: 313276 - RNA, 18 nt, Artificial Sequence
  Synthetic
uaaagaucuuugugugag

SEQ ID NO: 313277 - RNA, 19 nt, Artificial Sequence
  Synthetic
uuaaagaucuuugugugag

SEQ ID NO: 313278 - RNA, 20 nt, Artificial Sequence
  Synthetic
uuuaaagaucuuugugugag

SEQ ID NO: 313279 - RNA, 21 nt, Artificial Sequence
  Synthetic
cuuuaaagaucuuugugugag

SEQ ID NO: 313280 - RNA, 22 nt, Artificial Sequence
  Synthetic
ucuuuaaagaucuuugugugag

SEQ ID NO: 313281 - RNA, 23 nt, Artificial Sequence
  Synthetic
cucuuuaaagaucuuugugugag

SEQ ID NO: 313282 - RNA, 24 nt, Artificial Sequence
  Synthetic
ucucuuuaaagaucuuugugugag

SEQ ID NO: 313283 - RNA, 18 nt, Artificial Sequence
  Synthetic
uuuacaucuacuugugag

SEQ ID NO: 313284 - RNA, 19 nt, Artificial Sequence
  Synthetic
uuuuacaucuacuugugag

SEQ ID NO: 313285 - RNA, 20 nt, Artificial Sequence
  Synthetic
uuuuuacaucuacuugugag

SEQ ID NO: 313286 - RNA, 21 nt, Artificial Sequence
  Synthetic
cuuuuuacaucuacuugugag

SEQ ID NO: 313287 - RNA, 22 nt, Artificial Sequence
  Synthetic
gcuuuuuacaucuacuugugag

SEQ ID NO: 313288 - RNA, 23 nt, Artificial Sequence
  Synthetic
cgcuuuuuacaucuacuugugag

SEQ ID NO: 313289 - RNA, 24 nt, Artificial Sequence
  Synthetic
acgcuuuuuacaucuacuugugag

SEQ ID NO: 313290 - RNA, 18 nt, Artificial Sequence
  Synthetic
uauuucauuuuuugugag

SEQ ID NO: 313291 - RNA, 19 nt, Artificial Sequence
  Synthetic
uuauuucauuuuuugugag

SEQ ID NO: 313292 - RNA, 20 nt, Artificial Sequence
  Synthetic
uuuauuucauuuuuugugag

SEQ ID NO: 313293 - RNA, 21 nt, Artificial Sequence
  Synthetic
cuuuauuucauuuuuugugag

SEQ ID NO: 313294 - RNA, 22 nt, Artificial Sequence
  Synthetic
acuuuauuucauuuuuugugag

SEQ ID NO: 313295 - RNA, 23 nt, Artificial Sequence
  Synthetic
aacuuuauuucauuuuuugugag

SEQ ID NO: 313296 - RNA, 24 nt, Artificial Sequence
  Synthetic
aaacuuuauuucauuuuuugugag

SEQ ID NO: 313297 - RNA, 18 nt, Artificial Sequence
  Synthetic
uuuuuuuuuuuuugugag

SEQ ID NO: 313298 - RNA, 19 nt, Artificial Sequence
  Synthetic
uuuuuuuuuuuuuugugag

SEQ ID NO: 313299 - RNA, 20 nt, Artificial Sequence
  Synthetic
uuuuuuuuuuuuuuugugag

SEQ ID NO: 313300 - RNA, 21 nt, Artificial Sequence
  Synthetic
uuuuuuuuuuuuuuuugugag

SEQ ID NO: 313301 - RNA, 22 nt, Artificial Sequence
  Synthetic
uuuuuuuuuuuuuuuuugugag

SEQ ID NO: 313302 - RNA, 23 nt, Artificial Sequence
  Synthetic
uuuuuuuuuuuuuuuuuugugag

SEQ ID NO: 313303 - RNA, 24 nt, Artificial Sequence
  Synthetic
uuuuuuuuuuuuuuuuuuugugag

SEQ ID NO: 313304 - RNA, 18 nt, Artificial Sequence
  Synthetic
aucacucaugaaauugag

SEQ ID NO: 313305 - RNA, 19 nt, Artificial Sequence
  Synthetic
uaucacucaugaaauugag

SEQ ID NO: 313306 - RNA, 20 nt, Artificial Sequence
  Synthetic
uuaucacucaugaaauugag

SEQ ID NO: 313307 - RNA, 21 nt, Artificial Sequence
  Synthetic
guuaucacucaugaaauugag

SEQ ID NO: 313308 - RNA, 22 nt, Artificial Sequence
  Synthetic
aguuaucacucaugaaauugag

SEQ ID NO: 313309 - RNA, 23 nt, Artificial Sequence
  Synthetic
caguuaucacucaugaaauugag

SEQ ID NO: 313310 - RNA, 24 nt, Artificial Sequence
  Synthetic
gcaguuaucacucaugaaauugag

SEQ ID NO: 313311 - RNA, 18 nt, Artificial Sequence
  Synthetic
uaguaauccuaaauugag

SEQ ID NO: 313312 - RNA, 19 nt, Artificial Sequence
  Synthetic
guaguaauccuaaauugag

SEQ ID NO: 313313 - RNA, 20 nt, Artificial Sequence
  Synthetic
cguaguaauccuaaauugag

SEQ ID NO: 313314 - RNA, 21 nt, Artificial Sequence
  Synthetic
ucguaguaauccuaaauugag

SEQ ID NO: 313315 - RNA, 22 nt, Artificial Sequence
  Synthetic
uucguaguaauccuaaauugag

SEQ ID NO: 313316 - RNA, 23 nt, Artificial Sequence
  Synthetic
cuucguaguaauccuaaauugag

SEQ ID NO: 313317 - RNA, 24 nt, Artificial Sequence
  Synthetic
ucuucguaguaauccuaaauugag

SEQ ID NO: 313318 - RNA, 18 nt, Artificial Sequence
  Synthetic
aaugaagucugaauugag

SEQ ID NO: 313319 - RNA, 19 nt, Artificial Sequence
  Synthetic
aaaugaagucugaauugag

SEQ ID NO: 313320 - RNA, 20 nt, Artificial Sequence
  Synthetic
gaaaugaagucugaauugag

SEQ ID NO: 313321 - RNA, 21 nt, Artificial Sequence
  Synthetic
agaaaugaagucugaauugag

SEQ ID NO: 313322 - RNA, 22 nt, Artificial Sequence
  Synthetic
uagaaaugaagucugaauugag

SEQ ID NO: 313323 - RNA, 23 nt, Artificial Sequence
  Synthetic
guagaaaugaagucugaauugag

SEQ ID NO: 313324 - RNA, 24 nt, Artificial Sequence
  Synthetic
gguagaaaugaagucugaauugag

SEQ ID NO: 313325 - RNA, 18 nt, Artificial Sequence
  Synthetic
cggcuaguacuaauugag

SEQ ID NO: 313326 - RNA, 19 nt, Artificial Sequence
  Synthetic
gcggcuaguacuaauugag

SEQ ID NO: 313327 - RNA, 20 nt, Artificial Sequence
  Synthetic
ugcggcuaguacuaauugag

SEQ ID NO: 313328 - RNA, 21 nt, Artificial Sequence
  Synthetic
augcggcuaguacuaauugag

SEQ ID NO: 313329 - RNA, 22 nt, Artificial Sequence
  Synthetic
aaugcggcuaguacuaauugag

SEQ ID NO: 313330 - RNA, 23 nt, Artificial Sequence
  Synthetic
aaaugcggcuaguacuaauugag

SEQ ID NO: 313331 - RNA, 24 nt, Artificial Sequence
  Synthetic
aaaaugcggcuaguacuaauugag

SEQ ID NO: 313332 - RNA, 18 nt, Artificial Sequence
  Synthetic
accagagguuccauugag

SEQ ID NO: 313333 - RNA, 19 nt, Artificial Sequence
  Synthetic
gaccagagguuccauugag

SEQ ID NO: 313334 - RNA, 20 nt, Artificial Sequence
  Synthetic
ggaccagagguuccauugag

SEQ ID NO: 313335 - RNA, 21 nt, Artificial Sequence
  Synthetic
uggaccagagguuccauugag

SEQ ID NO: 313336 - RNA, 22 nt, Artificial Sequence
  Synthetic
cuggaccagagguuccauugag

SEQ ID NO: 313337 - RNA, 23 nt, Artificial Sequence
  Synthetic
ccuggaccagagguuccauugag

SEQ ID NO: 313338 - RNA, 24 nt, Artificial Sequence
  Synthetic
uccuggaccagagguuccauugag

SEQ ID NO: 313339 - RNA, 18 nt, Artificial Sequence
  Synthetic
caacaaauaugcauugag

SEQ ID NO: 313340 - RNA, 19 nt, Artificial Sequence
  Synthetic
acaacaaauaugcauugag

SEQ ID NO: 313341 - RNA, 20 nt, Artificial Sequence
  Synthetic
uacaacaaauaugcauugag

SEQ ID NO: 313342 - RNA, 21 nt, Artificial Sequence
  Synthetic
auacaacaaauaugcauugag

SEQ ID NO: 313343 - RNA, 22 nt, Artificial Sequence
  Synthetic
uauacaacaaauaugcauugag

SEQ ID NO: 313344 - RNA, 23 nt, Artificial Sequence
  Synthetic
guauacaacaaauaugcauugag

SEQ ID NO: 313345 - RNA, 24 nt, Artificial Sequence
  Synthetic
aguauacaacaaauaugcauugag

SEQ ID NO: 313346 - RNA, 18 nt, Artificial Sequence
  Synthetic
gcauguaauuucauugag

SEQ ID NO: 313347 - RNA, 19 nt, Artificial Sequence
  Synthetic
ugcauguaauuucauugag

SEQ ID NO: 313348 - RNA, 20 nt, Artificial Sequence
  Synthetic
cugcauguaauuucauugag

SEQ ID NO: 313349 - RNA, 21 nt, Artificial Sequence
  Synthetic
gcugcauguaauuucauugag

SEQ ID NO: 313350 - RNA, 22 nt, Artificial Sequence
  Synthetic
ugcugcauguaauuucauugag

SEQ ID NO: 313351 - RNA, 23 nt, Artificial Sequence
  Synthetic
uugcugcauguaauuucauugag

SEQ ID NO: 313352 - RNA, 24 nt, Artificial Sequence
  Synthetic
uuugcugcauguaauuucauugag

SEQ ID NO: 313353 - RNA, 18 nt, Artificial Sequence
  Synthetic
gcauacccugagauugag

SEQ ID NO: 313354 - RNA, 19 nt, Artificial Sequence
  Synthetic
agcauacccugagauugag

SEQ ID NO: 313355 - RNA, 20 nt, Artificial Sequence
  Synthetic
aagcauacccugagauugag

SEQ ID NO: 313356 - RNA, 21 nt, Artificial Sequence
  Synthetic
gaagcauacccugagauugag

SEQ ID NO: 313357 - RNA, 22 nt, Artificial Sequence
  Synthetic
ggaagcauacccugagauugag

SEQ ID NO: 313358 - RNA, 23 nt, Artificial Sequence
  Synthetic
gggaagcauacccugagauugag

SEQ ID NO: 313359 - RNA, 24 nt, Artificial Sequence
  Synthetic
ugggaagcauacccugagauugag

SEQ ID NO: 313360 - RNA, 18 nt, Artificial Sequence
  Synthetic
aaaggcagcaggauugag

SEQ ID NO: 313361 - RNA, 19 nt, Artificial Sequence
  Synthetic
uaaaggcagcaggauugag

SEQ ID NO: 313362 - RNA, 20 nt, Artificial Sequence
  Synthetic
guaaaggcagcaggauugag

SEQ ID NO: 313363 - RNA, 21 nt, Artificial Sequence
  Synthetic
aguaaaggcagcaggauugag

SEQ ID NO: 313364 - RNA, 22 nt, Artificial Sequence
  Synthetic
gaguaaaggcagcaggauugag

SEQ ID NO: 313365 - RNA, 23 nt, Artificial Sequence
  Synthetic
ggaguaaaggcagcaggauugag

SEQ ID NO: 313366 - RNA, 24 nt, Artificial Sequence
  Synthetic
gggaguaaaggcagcaggauugag

SEQ ID NO: 313367 - RNA, 18 nt, Artificial Sequence
  Synthetic
agaaaauucaugauugag

SEQ ID NO: 313368 - RNA, 19 nt, Artificial Sequence
  Synthetic
aagaaaauucaugauugag

SEQ ID NO: 313369 - RNA, 20 nt, Artificial Sequence
  Synthetic
gaagaaaauucaugauugag

SEQ ID NO: 313370 - RNA, 21 nt, Artificial Sequence
  Synthetic
ugaagaaaauucaugauugag

SEQ ID NO: 313371 - RNA, 22 nt, Artificial Sequence
  Synthetic
augaagaaaauucaugauugag

SEQ ID NO: 313372 - RNA, 23 nt, Artificial Sequence
  Synthetic
caugaagaaaauucaugauugag

SEQ ID NO: 313373 - RNA, 24 nt, Artificial Sequence
  Synthetic
ccaugaagaaaauucaugauugag

SEQ ID NO: 313374 - RNA, 18 nt, Artificial Sequence
  Synthetic
auauuagauaauauugag

SEQ ID NO: 313375 - RNA, 19 nt, Artificial Sequence
  Synthetic
cauauuagauaauauugag

SEQ ID NO: 313376 - RNA, 20 nt, Artificial Sequence
  Synthetic
gcauauuagauaauauugag

SEQ ID NO: 313377 - RNA, 21 nt, Artificial Sequence
  Synthetic
agcauauuagauaauauugag

SEQ ID NO: 313378 - RNA, 22 nt, Artificial Sequence
  Synthetic
gagcauauuagauaauauugag

SEQ ID NO: 313379 - RNA, 23 nt, Artificial Sequence
  Synthetic
ugagcauauuagauaauauugag

SEQ ID NO: 313380 - RNA, 24 nt, Artificial Sequence
  Synthetic
cugagcauauuagauaauauugag

SEQ ID NO: 313381 - RNA, 18 nt, Artificial Sequence
  Synthetic
aaggcaagauauauugag

SEQ ID NO: 313382 - RNA, 19 nt, Artificial Sequence
  Synthetic
gaaggcaagauauauugag

SEQ ID NO: 313383 - RNA, 20 nt, Artificial Sequence
  Synthetic
ugaaggcaagauauauugag

SEQ ID NO: 313384 - RNA, 21 nt, Artificial Sequence
  Synthetic
uugaaggcaagauauauugag

SEQ ID NO: 313385 - RNA, 22 nt, Artificial Sequence
  Synthetic
cuugaaggcaagauauauugag

SEQ ID NO: 313386 - RNA, 23 nt, Artificial Sequence
  Synthetic
ccuugaaggcaagauauauugag

SEQ ID NO: 313387 - RNA, 24 nt, Artificial Sequence
  Synthetic
gccuugaaggcaagauauauugag

SEQ ID NO: 313388 - RNA, 18 nt, Artificial Sequence
  Synthetic
gcuagaguggguauugag

SEQ ID NO: 313389 - RNA, 19 nt, Artificial Sequence
  Synthetic
agcuagaguggguauugag

SEQ ID NO: 313390 - RNA, 20 nt, Artificial Sequence
  Synthetic
aagcuagaguggguauugag

SEQ ID NO: 313391 - RNA, 21 nt, Artificial Sequence
  Synthetic
aaagcuagaguggguauugag

SEQ ID NO: 313392 - RNA, 22 nt, Artificial Sequence
  Synthetic
aaaagcuagaguggguauugag

SEQ ID NO: 313393 - RNA, 23 nt, Artificial Sequence
  Synthetic
uaaaagcuagaguggguauugag

SEQ ID NO: 313394 - RNA, 24 nt, Artificial Sequence
  Synthetic
uuaaaagcuagaguggguauugag

SEQ ID NO: 313395 - RNA, 18 nt, Artificial Sequence
  Synthetic
ccaaugcauaaacuugag

SEQ ID NO: 313396 - RNA, 19 nt, Artificial Sequence
  Synthetic
cccaaugcauaaacuugag

SEQ ID NO: 313397 - RNA, 20 nt, Artificial Sequence
  Synthetic
ucccaaugcauaaacuugag

SEQ ID NO: 313398 - RNA, 21 nt, Artificial Sequence
  Synthetic
aucccaaugcauaaacuugag

SEQ ID NO: 313399 - RNA, 22 nt, Artificial Sequence
  Synthetic
aaucccaaugcauaaacuugag

SEQ ID NO: 313400 - RNA, 23 nt, Artificial Sequence
  Synthetic
uaaucccaaugcauaaacuugag

SEQ ID NO: 313401 - RNA, 24 nt, Artificial Sequence
  Synthetic
cuaaucccaaugcauaaacuugag

SEQ ID NO: 313402 - RNA, 18 nt, Artificial Sequence
  Synthetic
aauacauuuccacuugag

SEQ ID NO: 313403 - RNA, 19 nt, Artificial Sequence
  Synthetic
aaauacauuuccacuugag

SEQ ID NO: 313404 - RNA, 20 nt, Artificial Sequence
  Synthetic
uaaauacauuuccacuugag

SEQ ID NO: 313405 - RNA, 21 nt, Artificial Sequence
  Synthetic
cuaaauacauuuccacuugag

SEQ ID NO: 313406 - RNA, 22 nt, Artificial Sequence
  Synthetic
ucuaaauacauuuccacuugag

SEQ ID NO: 313407 - RNA, 23 nt, Artificial Sequence
  Synthetic
uucuaaauacauuuccacuugag

SEQ ID NO: 313408 - RNA, 24 nt, Artificial Sequence
  Synthetic
uuucuaaauacauuuccacuugag

SEQ ID NO: 313409 - RNA, 18 nt, Artificial Sequence
  Synthetic
gugggcggaucacuugag

SEQ ID NO: 313410 - RNA, 19 nt, Artificial Sequence
  Synthetic
ggugggcggaucacuugag

SEQ ID NO: 313411 - RNA, 20 nt, Artificial Sequence
  Synthetic
aggugggcggaucacuugag

SEQ ID NO: 313412 - RNA, 21 nt, Artificial Sequence
  Synthetic
gaggugggcggaucacuugag

SEQ ID NO: 313413 - RNA, 22 nt, Artificial Sequence
  Synthetic
cgaggugggcggaucacuugag

SEQ ID NO: 313414 - RNA, 23 nt, Artificial Sequence
  Synthetic
ccgaggugggcggaucacuugag

SEQ ID NO: 313415 - RNA, 24 nt, Artificial Sequence
  Synthetic
gccgaggugggcggaucacuugag

SEQ ID NO: 313416 - RNA, 18 nt, Artificial Sequence
  Synthetic
uguuauggcuuacuugag

SEQ ID NO: 313417 - RNA, 19 nt, Artificial Sequence
  Synthetic
uuguuauggcuuacuugag

SEQ ID NO: 313418 - RNA, 20 nt, Artificial Sequence
  Synthetic
cuuguuauggcuuacuugag

SEQ ID NO: 313419 - RNA, 21 nt, Artificial Sequence
  Synthetic
acuuguuauggcuuacuugag

SEQ ID NO: 313420 - RNA, 22 nt, Artificial Sequence
  Synthetic
cacuuguuauggcuuacuugag

SEQ ID NO: 313421 - RNA, 23 nt, Artificial Sequence
  Synthetic
acacuuguuauggcuuacuugag

SEQ ID NO: 313422 - RNA, 24 nt, Artificial Sequence
  Synthetic
aacacuuguuauggcuuacuugag

SEQ ID NO: 313423 - RNA, 18 nt, Artificial Sequence
  Synthetic
agagaaggaacccuugag

SEQ ID NO: 313424 - RNA, 19 nt, Artificial Sequence
  Synthetic
cagagaaggaacccuugag

SEQ ID NO: 313425 - RNA, 20 nt, Artificial Sequence
  Synthetic
acagagaaggaacccuugag

SEQ ID NO: 313426 - RNA, 21 nt, Artificial Sequence
  Synthetic
uacagagaaggaacccuugag

SEQ ID NO: 313427 - RNA, 22 nt, Artificial Sequence
  Synthetic
guacagagaaggaacccuugag

SEQ ID NO: 313428 - RNA, 23 nt, Artificial Sequence
  Synthetic
aguacagagaaggaacccuugag

SEQ ID NO: 313429 - RNA, 24 nt, Artificial Sequence
  Synthetic
caguacagagaaggaacccuugag

SEQ ID NO: 313430 - RNA, 18 nt, Artificial Sequence
  Synthetic
agccuuucaggccuugag

SEQ ID NO: 313431 - RNA, 19 nt, Artificial Sequence
  Synthetic
uagccuuucaggccuugag

SEQ ID NO: 313432 - RNA, 20 nt, Artificial Sequence
  Synthetic
uuagccuuucaggccuugag

SEQ ID NO: 313433 - RNA, 21 nt, Artificial Sequence
  Synthetic
cuuagccuuucaggccuugag

SEQ ID NO: 313434 - RNA, 22 nt, Artificial Sequence
  Synthetic
ccuuagccuuucaggccuugag

SEQ ID NO: 313435 - RNA, 23 nt, Artificial Sequence
  Synthetic
cccuuagccuuucaggccuugag

SEQ ID NO: 313436 - RNA, 24 nt, Artificial Sequence
  Synthetic
ccccuuagccuuucaggccuugag

SEQ ID NO: 313437 - RNA, 18 nt, Artificial Sequence
  Synthetic
acaaagauacuccuugag

SEQ ID NO: 313438 - RNA, 19 nt, Artificial Sequence
  Synthetic
cacaaagauacuccuugag

SEQ ID NO: 313439 - RNA, 20 nt, Artificial Sequence
  Synthetic
ccacaaagauacuccuugag

SEQ ID NO: 313440 - RNA, 21 nt, Artificial Sequence
  Synthetic
accacaaagauacuccuugag

SEQ ID NO: 313441 - RNA, 22 nt, Artificial Sequence
  Synthetic
caccacaaagauacuccuugag

SEQ ID NO: 313442 - RNA, 23 nt, Artificial Sequence
  Synthetic
acaccacaaagauacuccuugag

SEQ ID NO: 313443 - RNA, 24 nt, Artificial Sequence
  Synthetic
aacaccacaaagauacuccuugag

SEQ ID NO: 313444 - RNA, 18 nt, Artificial Sequence
  Synthetic
gcacaagaaccgcuugag

SEQ ID NO: 313445 - RNA, 19 nt, Artificial Sequence
  Synthetic
ggcacaagaaccgcuugag

SEQ ID NO: 313446 - RNA, 20 nt, Artificial Sequence
  Synthetic
aggcacaagaaccgcuugag

SEQ ID NO: 313447 - RNA, 21 nt, Artificial Sequence
  Synthetic
gaggcacaagaaccgcuugag

SEQ ID NO: 313448 - RNA, 22 nt, Artificial Sequence
  Synthetic
ugaggcacaagaaccgcuugag

SEQ ID NO: 313449 - RNA, 23 nt, Artificial Sequence
  Synthetic
cugaggcacaagaaccgcuugag

SEQ ID NO: 313450 - RNA, 24 nt, Artificial Sequence
  Synthetic
gcugaggcacaagaaccgcuugag

SEQ ID NO: 313451 - RNA, 18 nt, Artificial Sequence
  Synthetic
ugggcugcacugcuugag

SEQ ID NO: 313452 - RNA, 19 nt, Artificial Sequence
  Synthetic
gugggcugcacugcuugag

SEQ ID NO: 313453 - RNA, 20 nt, Artificial Sequence
  Synthetic
ugugggcugcacugcuugag

SEQ ID NO: 313454 - RNA, 21 nt, Artificial Sequence
  Synthetic
cugugggcugcacugcuugag

SEQ ID NO: 313455 - RNA, 22 nt, Artificial Sequence
  Synthetic
acugugggcugcacugcuugag

SEQ ID NO: 313456 - RNA, 23 nt, Artificial Sequence
  Synthetic
uacugugggcugcacugcuugag

SEQ ID NO: 313457 - RNA, 24 nt, Artificial Sequence
  Synthetic
uuacugugggcugcacugcuugag

SEQ ID NO: 313458 - RNA, 18 nt, Artificial Sequence
  Synthetic
aguuaauuugcucuugag

SEQ ID NO: 313459 - RNA, 19 nt, Artificial Sequence
  Synthetic
aaguuaauuugcucuugag

SEQ ID NO: 313460 - RNA, 20 nt, Artificial Sequence
  Synthetic
aaaguuaauuugcucuugag

SEQ ID NO: 313461 - RNA, 21 nt, Artificial Sequence
  Synthetic
gaaaguuaauuugcucuugag

SEQ ID NO: 313462 - RNA, 22 nt, Artificial Sequence
  Synthetic
ggaaaguuaauuugcucuugag

SEQ ID NO: 313463 - RNA, 23 nt, Artificial Sequence
  Synthetic
gggaaaguuaauuugcucuugag

SEQ ID NO: 313464 - RNA, 24 nt, Artificial Sequence
  Synthetic
agggaaaguuaauuugcucuugag

SEQ ID NO: 313465 - RNA, 18 nt, Artificial Sequence
  Synthetic
ccugggauaagucuugag

SEQ ID NO: 313466 - RNA, 19 nt, Artificial Sequence
  Synthetic
cccugggauaagucuugag

SEQ ID NO: 313467 - RNA, 20 nt, Artificial Sequence
  Synthetic
gcccugggauaagucuugag

SEQ ID NO: 313468 - RNA, 21 nt, Artificial Sequence
  Synthetic
agcccugggauaagucuugag

SEQ ID NO: 313469 - RNA, 22 nt, Artificial Sequence
  Synthetic
aagcccugggauaagucuugag

SEQ ID NO: 313470 - RNA, 23 nt, Artificial Sequence
  Synthetic
aaagcccugggauaagucuugag

SEQ ID NO: 313471 - RNA, 24 nt, Artificial Sequence
  Synthetic
aaaagcccugggauaagucuugag

SEQ ID NO: 313472 - RNA, 18 nt, Artificial Sequence
  Synthetic
auucauauacuucuugag

SEQ ID NO: 313473 - RNA, 19 nt, Artificial Sequence
  Synthetic
uauucauauacuucuugag

SEQ ID NO: 313474 - RNA, 20 nt, Artificial Sequence
  Synthetic
uuauucauauacuucuugag

SEQ ID NO: 313475 - RNA, 21 nt, Artificial Sequence
  Synthetic
cuuauucauauacuucuugag

SEQ ID NO: 313476 - RNA, 22 nt, Artificial Sequence
  Synthetic
ccuuauucauauacuucuugag

SEQ ID NO: 313477 - RNA, 23 nt, Artificial Sequence
  Synthetic
cccuuauucauauacuucuugag

SEQ ID NO: 313478 - RNA, 24 nt, Artificial Sequence
  Synthetic
ucccuuauucauauacuucuugag

SEQ ID NO: 313479 - RNA, 18 nt, Artificial Sequence
  Synthetic
uucuauccuuuucuugag

SEQ ID NO: 313480 - RNA, 19 nt, Artificial Sequence
  Synthetic
cuucuauccuuuucuugag

SEQ ID NO: 313481 - RNA, 20 nt, Artificial Sequence
  Synthetic
acuucuauccuuuucuugag

SEQ ID NO: 313482 - RNA, 21 nt, Artificial Sequence
  Synthetic
gacuucuauccuuuucuugag

SEQ ID NO: 313483 - RNA, 22 nt, Artificial Sequence
  Synthetic
agacuucuauccuuuucuugag

SEQ ID NO: 313484 - RNA, 23 nt, Artificial Sequence
  Synthetic
uagacuucuauccuuuucuugag

SEQ ID NO: 313485 - RNA, 24 nt, Artificial Sequence
  Synthetic
cuagacuucuauccuuuucuugag

SEQ ID NO: 313486 - RNA, 18 nt, Artificial Sequence
  Synthetic
gacuaagcagcaguugag

SEQ ID NO: 313487 - RNA, 19 nt, Artificial Sequence
  Synthetic
ggacuaagcagcaguugag

SEQ ID NO: 313488 - RNA, 20 nt, Artificial Sequence
  Synthetic
uggacuaagcagcaguugag

SEQ ID NO: 313489 - RNA, 21 nt, Artificial Sequence
  Synthetic
auggacuaagcagcaguugag

SEQ ID NO: 313490 - RNA, 22 nt, Artificial Sequence
  Synthetic
uauggacuaagcagcaguugag

SEQ ID NO: 313491 - RNA, 23 nt, Artificial Sequence
  Synthetic
uuauggacuaagcagcaguugag

SEQ ID NO: 313492 - RNA, 24 nt, Artificial Sequence
  Synthetic
uuuauggacuaagcagcaguugag

SEQ ID NO: 313493 - RNA, 18 nt, Artificial Sequence
  Synthetic
uggaagacaucuguugag

SEQ ID NO: 313494 - RNA, 19 nt, Artificial Sequence
  Synthetic
cuggaagacaucuguugag

SEQ ID NO: 313495 - RNA, 20 nt, Artificial Sequence
  Synthetic
gcuggaagacaucuguugag

SEQ ID NO: 313496 - RNA, 21 nt, Artificial Sequence
  Synthetic
agcuggaagacaucuguugag

SEQ ID NO: 313497 - RNA, 22 nt, Artificial Sequence
  Synthetic
aagcuggaagacaucuguugag

SEQ ID NO: 313498 - RNA, 23 nt, Artificial Sequence
  Synthetic
aaagcuggaagacaucuguugag

SEQ ID NO: 313499 - RNA, 24 nt, Artificial Sequence
  Synthetic
aaaagcuggaagacaucuguugag

SEQ ID NO: 313500 - RNA, 18 nt, Artificial Sequence
  Synthetic
cccuagaggguuguugag

SEQ ID NO: 313501 - RNA, 19 nt, Artificial Sequence
  Synthetic
acccuagaggguuguugag

SEQ ID NO: 313502 - RNA, 20 nt, Artificial Sequence
  Synthetic
uacccuagaggguuguugag

SEQ ID NO: 313503 - RNA, 21 nt, Artificial Sequence
  Synthetic
cuacccuagaggguuguugag

SEQ ID NO: 313504 - RNA, 22 nt, Artificial Sequence
  Synthetic
ccuacccuagaggguuguugag

SEQ ID NO: 313505 - RNA, 23 nt, Artificial Sequence
  Synthetic
cccuacccuagaggguuguugag

SEQ ID NO: 313506 - RNA, 24 nt, Artificial Sequence
  Synthetic
ccccuacccuagaggguuguugag

SEQ ID NO: 313507 - RNA, 18 nt, Artificial Sequence
  Synthetic
uuguuuuguuuuguugag

SEQ ID NO: 313508 - RNA, 19 nt, Artificial Sequence
  Synthetic
uuuguuuuguuuuguugag

SEQ ID NO: 313509 - RNA, 20 nt, Artificial Sequence
  Synthetic
uuuuguuuuguuuuguugag

SEQ ID NO: 313510 - RNA, 21 nt, Artificial Sequence
  Synthetic
guuuuguuuuguuuuguugag

SEQ ID NO: 313511 - RNA, 22 nt, Artificial Sequence
  Synthetic
uguuuuguuuuguuuuguugag

SEQ ID NO: 313512 - RNA, 23 nt, Artificial Sequence
  Synthetic
uuguuuuguuuuguuuuguugag

SEQ ID NO: 313513 - RNA, 24 nt, Artificial Sequence
  Synthetic
uuuguuuuguuuuguuuuguugag

SEQ ID NO: 313514 - RNA, 18 nt, Artificial Sequence
  Synthetic
aaagcuuucaaauuugag

SEQ ID NO: 313515 - RNA, 19 nt, Artificial Sequence
  Synthetic
uaaagcuuucaaauuugag

SEQ ID NO: 313516 - RNA, 20 nt, Artificial Sequence
  Synthetic
auaaagcuuucaaauuugag

SEQ ID NO: 313517 - RNA, 21 nt, Artificial Sequence
  Synthetic
aauaaagcuuucaaauuugag

SEQ ID NO: 313518 - RNA, 22 nt, Artificial Sequence
  Synthetic
aaauaaagcuuucaaauuugag

SEQ ID NO: 313519 - RNA, 23 nt, Artificial Sequence
  Synthetic
uaaauaaagcuuucaaauuugag

SEQ ID NO: 313520 - RNA, 24 nt, Artificial Sequence
  Synthetic
auaaauaaagcuuucaaauuugag

SEQ ID NO: 313521 - RNA, 18 nt, Artificial Sequence
  Synthetic
acauuuaaggaauuugag

SEQ ID NO: 313522 - RNA, 19 nt, Artificial Sequence
  Synthetic
uacauuuaaggaauuugag

SEQ ID NO: 313523 - RNA, 20 nt, Artificial Sequence
  Synthetic
uuacauuuaaggaauuugag

SEQ ID NO: 313524 - RNA, 21 nt, Artificial Sequence
  Synthetic
uuuacauuuaaggaauuugag

SEQ ID NO: 313525 - RNA, 22 nt, Artificial Sequence
  Synthetic
guuuacauuuaaggaauuugag

SEQ ID NO: 313526 - RNA, 23 nt, Artificial Sequence
  Synthetic
gguuuacauuuaaggaauuugag

SEQ ID NO: 313527 - RNA, 24 nt, Artificial Sequence
  Synthetic
ugguuuacauuuaaggaauuugag

SEQ ID NO: 313528 - RNA, 18 nt, Artificial Sequence
  Synthetic
ucaacauaggaauuugag

SEQ ID NO: 313529 - RNA, 19 nt, Artificial Sequence
  Synthetic
uucaacauaggaauuugag

SEQ ID NO: 313530 - RNA, 20 nt, Artificial Sequence
  Synthetic
uuucaacauaggaauuugag

SEQ ID NO: 313531 - RNA, 21 nt, Artificial Sequence
  Synthetic
auuucaacauaggaauuugag

SEQ ID NO: 313532 - RNA, 22 nt, Artificial Sequence
  Synthetic
gauuucaacauaggaauuugag

SEQ ID NO: 313533 - RNA, 23 nt, Artificial Sequence
  Synthetic
ggauuucaacauaggaauuugag

SEQ ID NO: 313534 - RNA, 24 nt, Artificial Sequence
  Synthetic
aggauuucaacauaggaauuugag

SEQ ID NO: 313535 - RNA, 18 nt, Artificial Sequence
  Synthetic
ggaaauauaguauuugag

SEQ ID NO: 313536 - RNA, 19 nt, Artificial Sequence
  Synthetic
aggaaauauaguauuugag

SEQ ID NO: 313537 - RNA, 20 nt, Artificial Sequence
  Synthetic
aaggaaauauaguauuugag

SEQ ID NO: 313538 - RNA, 21 nt, Artificial Sequence
  Synthetic
caaggaaauauaguauuugag

SEQ ID NO: 313539 - RNA, 22 nt, Artificial Sequence
  Synthetic
ucaaggaaauauaguauuugag

SEQ ID NO: 313540 - RNA, 23 nt, Artificial Sequence
  Synthetic
aucaaggaaauauaguauuugag

SEQ ID NO: 313541 - RNA, 24 nt, Artificial Sequence
  Synthetic
aaucaaggaaauauaguauuugag

SEQ ID NO: 313542 - RNA, 18 nt, Artificial Sequence
  Synthetic
uguauguauguauuugag

SEQ ID NO: 313543 - RNA, 19 nt, Artificial Sequence
  Synthetic
auguauguauguauuugag

SEQ ID NO: 313544 - RNA, 20 nt, Artificial Sequence
  Synthetic
uauguauguauguauuugag

SEQ ID NO: 313545 - RNA, 21 nt, Artificial Sequence
  Synthetic
guauguauguauguauuugag

SEQ ID NO: 313546 - RNA, 22 nt, Artificial Sequence
  Synthetic
cguauguauguauguauuugag

SEQ ID NO: 313547 - RNA, 23 nt, Artificial Sequence
  Synthetic
acguauguauguauguauuugag

SEQ ID NO: 313548 - RNA, 24 nt, Artificial Sequence
  Synthetic
uacguauguauguauguauuugag

SEQ ID NO: 313549 - RNA, 18 nt, Artificial Sequence
  Synthetic
cuuaaaacauuauuugag

SEQ ID NO: 313550 - RNA, 19 nt, Artificial Sequence
  Synthetic
acuuaaaacauuauuugag

SEQ ID NO: 313551 - RNA, 20 nt, Artificial Sequence
  Synthetic
uacuuaaaacauuauuugag

SEQ ID NO: 313552 - RNA, 21 nt, Artificial Sequence
  Synthetic
auacuuaaaacauuauuugag

SEQ ID NO: 313553 - RNA, 22 nt, Artificial Sequence
  Synthetic
cauacuuaaaacauuauuugag

SEQ ID NO: 313554 - RNA, 23 nt, Artificial Sequence
  Synthetic
acauacuuaaaacauuauuugag

SEQ ID NO: 313555 - RNA, 24 nt, Artificial Sequence
  Synthetic
gacauacuuaaaacauuauuugag

SEQ ID NO: 313556 - RNA, 18 nt, Artificial Sequence
  Synthetic
uuauuauuauuauuugag

SEQ ID NO: 313557 - RNA, 19 nt, Artificial Sequence
  Synthetic
auuauuauuauuauuugag

SEQ ID NO: 313558 - RNA, 20 nt, Artificial Sequence
  Synthetic
uauuauuauuauuauuugag

SEQ ID NO: 313559 - RNA, 21 nt, Artificial Sequence
  Synthetic
uuauuauuauuauuauuugag

SEQ ID NO: 313560 - RNA, 22 nt, Artificial Sequence
  Synthetic
auuauuauuauuauuauuugag

SEQ ID NO: 313561 - RNA, 23 nt, Artificial Sequence
  Synthetic
aauuauuauuauuauuauuugag

SEQ ID NO: 313562 - RNA, 24 nt, Artificial Sequence
  Synthetic
uaauuauuauuauuauuauuugag

SEQ ID NO: 313563 - RNA, 18 nt, Artificial Sequence
  Synthetic
uucucuguuaacuuugag

SEQ ID NO: 313564 - RNA, 19 nt, Artificial Sequence
  Synthetic
guucucuguuaacuuugag

SEQ ID NO: 313565 - RNA, 20 nt, Artificial Sequence
  Synthetic
aguucucuguuaacuuugag

SEQ ID NO: 313566 - RNA, 21 nt, Artificial Sequence
  Synthetic
aaguucucuguuaacuuugag

SEQ ID NO: 313567 - RNA, 22 nt, Artificial Sequence
  Synthetic
aaaguucucuguuaacuuugag

SEQ ID NO: 313568 - RNA, 23 nt, Artificial Sequence
  Synthetic
uaaaguucucuguuaacuuugag

SEQ ID NO: 313569 - RNA, 24 nt, Artificial Sequence
  Synthetic
uuaaaguucucuguuaacuuugag

SEQ ID NO: 313570 - RNA, 18 nt, Artificial Sequence
  Synthetic
uaagcaggugacuuugag

SEQ ID NO: 313571 - RNA, 19 nt, Artificial Sequence
  Synthetic
cuaagcaggugacuuugag

SEQ ID NO: 313572 - RNA, 20 nt, Artificial Sequence
  Synthetic
gcuaagcaggugacuuugag

SEQ ID NO: 313573 - RNA, 21 nt, Artificial Sequence
  Synthetic
ugcuaagcaggugacuuugag

SEQ ID NO: 313574 - RNA, 22 nt, Artificial Sequence
  Synthetic
uugcuaagcaggugacuuugag

SEQ ID NO: 313575 - RNA, 23 nt, Artificial Sequence
  Synthetic
guugcuaagcaggugacuuugag

SEQ ID NO: 313576 - RNA, 24 nt, Artificial Sequence
  Synthetic
gguugcuaagcaggugacuuugag

SEQ ID NO: 313577 - RNA, 18 nt, Artificial Sequence
  Synthetic
cauucauaauacuuugag

SEQ ID NO: 313578 - RNA, 19 nt, Artificial Sequence
  Synthetic
acauucauaauacuuugag

SEQ ID NO: 313579 - RNA, 20 nt, Artificial Sequence
  Synthetic
aacauucauaauacuuugag

SEQ ID NO: 313580 - RNA, 21 nt, Artificial Sequence
  Synthetic
aaacauucauaauacuuugag

SEQ ID NO: 313581 - RNA, 22 nt, Artificial Sequence
  Synthetic
aaaacauucauaauacuuugag

SEQ ID NO: 313582 - RNA, 23 nt, Artificial Sequence
  Synthetic
uaaaacauucauaauacuuugag

SEQ ID NO: 313583 - RNA, 24 nt, Artificial Sequence
  Synthetic
guaaaacauucauaauacuuugag

SEQ ID NO: 313584 - RNA, 18 nt, Artificial Sequence
  Synthetic
aacuagaauuccuuugag

SEQ ID NO: 313585 - RNA, 19 nt, Artificial Sequence
  Synthetic
aaacuagaauuccuuugag

SEQ ID NO: 313586 - RNA, 20 nt, Artificial Sequence
  Synthetic
aaaacuagaauuccuuugag

SEQ ID NO: 313587 - RNA, 21 nt, Artificial Sequence
  Synthetic
aaaaacuagaauuccuuugag

SEQ ID NO: 313588 - RNA, 22 nt, Artificial Sequence
  Synthetic
uaaaaacuagaauuccuuugag

SEQ ID NO: 313589 - RNA, 23 nt, Artificial Sequence
  Synthetic
auaaaaacuagaauuccuuugag

SEQ ID NO: 313590 - RNA, 24 nt, Artificial Sequence
  Synthetic
uauaaaaacuagaauuccuuugag

SEQ ID NO: 313591 - RNA, 18 nt, Artificial Sequence
  Synthetic
uagaauguggaguuugag

SEQ ID NO: 313592 - RNA, 19 nt, Artificial Sequence
  Synthetic
auagaauguggaguuugag

SEQ ID NO: 313593 - RNA, 20 nt, Artificial Sequence
  Synthetic
gauagaauguggaguuugag

SEQ ID NO: 313594 - RNA, 21 nt, Artificial Sequence
  Synthetic
agauagaauguggaguuugag

SEQ ID NO: 313595 - RNA, 22 nt, Artificial Sequence
  Synthetic
uagauagaauguggaguuugag

SEQ ID NO: 313596 - RNA, 23 nt, Artificial Sequence
  Synthetic
auagauagaauguggaguuugag

SEQ ID NO: 313597 - RNA, 24 nt, Artificial Sequence
  Synthetic
gauagauagaauguggaguuugag

SEQ ID NO: 313598 - RNA, 18 nt, Artificial Sequence
  Synthetic
ccucuuuguggguuugag

SEQ ID NO: 313599 - RNA, 19 nt, Artificial Sequence
  Synthetic
uccucuuuguggguuugag

SEQ ID NO: 313600 - RNA, 20 nt, Artificial Sequence
  Synthetic
uuccucuuuguggguuugag

SEQ ID NO: 313601 - RNA, 21 nt, Artificial Sequence
  Synthetic
cuuccucuuuguggguuugag

SEQ ID NO: 313602 - RNA, 22 nt, Artificial Sequence
  Synthetic
ucuuccucuuuguggguuugag

SEQ ID NO: 313603 - RNA, 23 nt, Artificial Sequence
  Synthetic
uucuuccucuuuguggguuugag

SEQ ID NO: 313604 - RNA, 24 nt, Artificial Sequence
  Synthetic
uuucuuccucuuuguggguuugag

SEQ ID NO: 313605 - RNA, 18 nt, Artificial Sequence
  Synthetic
uuuguuuguuuguuugag

SEQ ID NO: 313606 - RNA, 19 nt, Artificial Sequence
  Synthetic
uuuuguuuguuuguuugag

SEQ ID NO: 313607 - RNA, 20 nt, Artificial Sequence
  Synthetic
uuuuuguuuguuuguuugag

SEQ ID NO: 313608 - RNA, 21 nt, Artificial Sequence
  Synthetic
uuuuuuguuuguuuguuugag

SEQ ID NO: 313609 - RNA, 22 nt, Artificial Sequence
  Synthetic
uuuuuuuguuuguuuguuugag

SEQ ID NO: 313610 - RNA, 23 nt, Artificial Sequence
  Synthetic
uuuuuuuuguuuguuuguuugag

SEQ ID NO: 313611 - RNA, 24 nt, Artificial Sequence
  Synthetic
cuuuuuuuuguuuguuuguuugag

SEQ ID NO: 313612 - RNA, 18 nt, Artificial Sequence
  Synthetic
ccaccagaagauuuugag

SEQ ID NO: 313613 - RNA, 19 nt, Artificial Sequence
  Synthetic
gccaccagaagauuuugag

SEQ ID NO: 313614 - RNA, 20 nt, Artificial Sequence
  Synthetic
agccaccagaagauuuugag

SEQ ID NO: 313615 - RNA, 21 nt, Artificial Sequence
  Synthetic
gagccaccagaagauuuugag

SEQ ID NO: 313616 - RNA, 22 nt, Artificial Sequence
  Synthetic
agagccaccagaagauuuugag

SEQ ID NO: 313617 - RNA, 23 nt, Artificial Sequence
  Synthetic
aagagccaccagaagauuuugag

SEQ ID NO: 313618 - RNA, 24 nt, Artificial Sequence
  Synthetic
gaagagccaccagaagauuuugag

SEQ ID NO: 313619 - RNA, 18 nt, Artificial Sequence
  Synthetic
gcuuuaggguauuuugag

SEQ ID NO: 313620 - RNA, 19 nt, Artificial Sequence
  Synthetic
agcuuuaggguauuuugag

SEQ ID NO: 313621 - RNA, 20 nt, Artificial Sequence
  Synthetic
aagcuuuaggguauuuugag

SEQ ID NO: 313622 - RNA, 21 nt, Artificial Sequence
  Synthetic
uaagcuuuaggguauuuugag

SEQ ID NO: 313623 - RNA, 22 nt, Artificial Sequence
  Synthetic
uuaagcuuuaggguauuuugag

SEQ ID NO: 313624 - RNA, 23 nt, Artificial Sequence
  Synthetic
guuaagcuuuaggguauuuugag

SEQ ID NO: 313625 - RNA, 24 nt, Artificial Sequence
  Synthetic
gguuaagcuuuaggguauuuugag

SEQ ID NO: 313626 - RNA, 18 nt, Artificial Sequence
  Synthetic
gaagggaaagcuuuugag

SEQ ID NO: 313627 - RNA, 19 nt, Artificial Sequence
  Synthetic
ggaagggaaagcuuuugag

SEQ ID NO: 313628 - RNA, 20 nt, Artificial Sequence
  Synthetic
gggaagggaaagcuuuugag

SEQ ID NO: 313629 - RNA, 21 nt, Artificial Sequence
  Synthetic
ugggaagggaaagcuuuugag

SEQ ID NO: 313630 - RNA, 22 nt, Artificial Sequence
  Synthetic
gugggaagggaaagcuuuugag

SEQ ID NO: 313631 - RNA, 23 nt, Artificial Sequence
  Synthetic
ggugggaagggaaagcuuuugag

SEQ ID NO: 313632 - RNA, 24 nt, Artificial Sequence
  Synthetic
uggugggaagggaaagcuuuugag

SEQ ID NO: 313633 - RNA, 18 nt, Artificial Sequence
  Synthetic
ucaguauaaauuuuugag

SEQ ID NO: 313634 - RNA, 19 nt, Artificial Sequence
  Synthetic
uucaguauaaauuuuugag

SEQ ID NO: 313635 - RNA, 20 nt, Artificial Sequence
  Synthetic
auucaguauaaauuuuugag

SEQ ID NO: 313636 - RNA, 21 nt, Artificial Sequence
  Synthetic
uauucaguauaaauuuuugag

SEQ ID NO: 313637 - RNA, 22 nt, Artificial Sequence
  Synthetic
guauucaguauaaauuuuugag

SEQ ID NO: 313638 - RNA, 23 nt, Artificial Sequence
  Synthetic
aguauucaguauaaauuuuugag

SEQ ID NO: 313639 - RNA, 24 nt, Artificial Sequence
  Synthetic
gaguauucaguauaaauuuuugag

SEQ ID NO: 313640 - RNA, 18 nt, Artificial Sequence
  Synthetic
auugcgaauauuuuugag

SEQ ID NO: 313641 - RNA, 19 nt, Artificial Sequence
  Synthetic
uauugcgaauauuuuugag

SEQ ID NO: 313642 - RNA, 20 nt, Artificial Sequence
  Synthetic
auauugcgaauauuuuugag

SEQ ID NO: 313643 - RNA, 21 nt, Artificial Sequence
  Synthetic
aauauugcgaauauuuuugag

SEQ ID NO: 313644 - RNA, 22 nt, Artificial Sequence
  Synthetic
uaauauugcgaauauuuuugag

SEQ ID NO: 313645 - RNA, 23 nt, Artificial Sequence
  Synthetic
auaauauugcgaauauuuuugag

SEQ ID NO: 313646 - RNA, 24 nt, Artificial Sequence
  Synthetic
uauaauauugcgaauauuuuugag

SEQ ID NO: 313647 - RNA, 18 nt, Artificial Sequence
  Synthetic
uauguauuuauuuuugag

SEQ ID NO: 313648 - RNA, 19 nt, Artificial Sequence
  Synthetic
cuauguauuuauuuuugag

SEQ ID NO: 313649 - RNA, 20 nt, Artificial Sequence
  Synthetic
ucuauguauuuauuuuugag

SEQ ID NO: 313650 - RNA, 21 nt, Artificial Sequence
  Synthetic
uucuauguauuuauuuuugag

SEQ ID NO: 313651 - RNA, 22 nt, Artificial Sequence
  Synthetic
uuucuauguauuuauuuuugag

SEQ ID NO: 313652 - RNA, 23 nt, Artificial Sequence
  Synthetic
cuuucuauguauuuauuuuugag

SEQ ID NO: 313653 - RNA, 24 nt, Artificial Sequence
  Synthetic
ucuuucuauguauuuauuuuugag

SEQ ID NO: 313654 - RNA, 18 nt, Artificial Sequence
  Synthetic
uuucugcagguuuuugag

SEQ ID NO: 313655 - RNA, 19 nt, Artificial Sequence
  Synthetic
auuucugcagguuuuugag

SEQ ID NO: 313656 - RNA, 20 nt, Artificial Sequence
  Synthetic
uauuucugcagguuuuugag

SEQ ID NO: 313657 - RNA, 21 nt, Artificial Sequence
  Synthetic
auauuucugcagguuuuugag

SEQ ID NO: 313658 - RNA, 22 nt, Artificial Sequence
  Synthetic
aauauuucugcagguuuuugag

SEQ ID NO: 313659 - RNA, 23 nt, Artificial Sequence
  Synthetic
aaauauuucugcagguuuuugag

SEQ ID NO: 313660 - RNA, 24 nt, Artificial Sequence
  Synthetic
uaaauauuucugcagguuuuugag

SEQ ID NO: 313661 - RNA, 18 nt, Artificial Sequence
  Synthetic
ucuuuauuuguuuuugag

SEQ ID NO: 313662 - RNA, 19 nt, Artificial Sequence
  Synthetic
uucuuuauuuguuuuugag

SEQ ID NO: 313663 - RNA, 20 nt, Artificial Sequence
  Synthetic
uuucuuuauuuguuuuugag

SEQ ID NO: 313664 - RNA, 21 nt, Artificial Sequence
  Synthetic
uuuucuuuauuuguuuuugag

SEQ ID NO: 313665 - RNA, 22 nt, Artificial Sequence
  Synthetic
uuuuucuuuauuuguuuuugag

SEQ ID NO: 313666 - RNA, 23 nt, Artificial Sequence
  Synthetic
auuuuucuuuauuuguuuuugag

SEQ ID NO: 313667 - RNA, 24 nt, Artificial Sequence
  Synthetic
cauuuuucuuuauuuguuuuugag

SEQ ID NO: 313668 - RNA, 18 nt, Artificial Sequence
  Synthetic
uguuuguuuguuuuugag

SEQ ID NO: 313669 - RNA, 19 nt, Artificial Sequence
  Synthetic
uuguuuguuuguuuuugag

SEQ ID NO: 313670 - RNA, 20 nt, Artificial Sequence
  Synthetic
guuguuuguuuguuuuugag

SEQ ID NO: 313671 - RNA, 21 nt, Artificial Sequence
  Synthetic
gguuguuuguuuguuuuugag

SEQ ID NO: 313672 - RNA, 22 nt, Artificial Sequence
  Synthetic
ugguuguuuguuuguuuuugag

SEQ ID NO: 313673 - RNA, 23 nt, Artificial Sequence
  Synthetic
uugguuguuuguuuguuuuugag

SEQ ID NO: 313674 - RNA, 24 nt, Artificial Sequence
  Synthetic
uuugguuguuuguuuguuuuugag

SEQ ID NO: 313675 - RNA, 18 nt, Artificial Sequence
  Synthetic
ugaacuuucuuuuuugag

SEQ ID NO: 313676 - RNA, 19 nt, Artificial Sequence
  Synthetic
augaacuuucuuuuuugag

SEQ ID NO: 313677 - RNA, 20 nt, Artificial Sequence
  Synthetic
uaugaacuuucuuuuuugag

SEQ ID NO: 313678 - RNA, 21 nt, Artificial Sequence
  Synthetic
uuaugaacuuucuuuuuugag

SEQ ID NO: 313679 - RNA, 22 nt, Artificial Sequence
  Synthetic
uuuaugaacuuucuuuuuugag

SEQ ID NO: 313680 - RNA, 23 nt, Artificial Sequence
  Synthetic
uuuuaugaacuuucuuuuuugag

SEQ ID NO: 313681 - RNA, 24 nt, Artificial Sequence
  Synthetic
cuuuuaugaacuuucuuuuuugag

SEQ ID NO: 313682 - RNA, 18 nt, Artificial Sequence
  Synthetic
uuuauuuauuuuuuugag

SEQ ID NO: 313683 - RNA, 19 nt, Artificial Sequence
  Synthetic
auuuauuuauuuuuuugag

SEQ ID NO: 313684 - RNA, 20 nt, Artificial Sequence
  Synthetic
aauuuauuuauuuuuuugag

SEQ ID NO: 313685 - RNA, 21 nt, Artificial Sequence
  Synthetic
aaauuuauuuauuuuuuugag

SEQ ID NO: 313686 - RNA, 22 nt, Artificial Sequence
  Synthetic
caaauuuauuuauuuuuuugag

SEQ ID NO: 313687 - RNA, 23 nt, Artificial Sequence
  Synthetic
acaaauuuauuuauuuuuuugag

SEQ ID NO: 313688 - RNA, 24 nt, Artificial Sequence
  Synthetic
uacaaauuuauuuauuuuuuugag

SEQ ID NO: 313689 - RNA, 18 nt, Artificial Sequence
  Synthetic
uuauuuuauuuuuuugag

SEQ ID NO: 313690 - RNA, 19 nt, Artificial Sequence
  Synthetic
uuuauuuuauuuuuuugag

SEQ ID NO: 313691 - RNA, 20 nt, Artificial Sequence
  Synthetic
uuuuauuuuauuuuuuugag

SEQ ID NO: 313692 - RNA, 21 nt, Artificial Sequence
  Synthetic
auuuuauuuuauuuuuuugag

SEQ ID NO: 313693 - RNA, 22 nt, Artificial Sequence
  Synthetic
uauuuuauuuuauuuuuuugag

SEQ ID NO: 313694 - RNA, 23 nt, Artificial Sequence
  Synthetic
uuauuuuauuuuauuuuuuugag

SEQ ID NO: 313695 - RNA, 24 nt, Artificial Sequence
  Synthetic
uuuauuuuauuuuauuuuuuugag

SEQ ID NO: 313696 - RNA, 18 nt, Artificial Sequence
  Synthetic
uuuuuuccuuuuuuugag

SEQ ID NO: 313697 - RNA, 19 nt, Artificial Sequence
  Synthetic
uuuuuuuccuuuuuuugag

SEQ ID NO: 313698 - RNA, 20 nt, Artificial Sequence
  Synthetic
cuuuuuuuccuuuuuuugag

SEQ ID NO: 313699 - RNA, 21 nt, Artificial Sequence
  Synthetic
ucuuuuuuuccuuuuuuugag

SEQ ID NO: 313700 - RNA, 22 nt, Artificial Sequence
  Synthetic
uucuuuuuuuccuuuuuuugag

SEQ ID NO: 313701 - RNA, 23 nt, Artificial Sequence
  Synthetic
uuucuuuuuuuccuuuuuuugag

SEQ ID NO: 313702 - RNA, 24 nt, Artificial Sequence
  Synthetic
cuuucuuuuuuuccuuuuuuugag

SEQ ID NO: 313703 - RNA, 18 nt, Artificial Sequence
  Synthetic
uuguuuuguuuuuuugag

SEQ ID NO: 313704 - RNA, 19 nt, Artificial Sequence
  Synthetic
uuuguuuuguuuuuuugag

SEQ ID NO: 313705 - RNA, 20 nt, Artificial Sequence
  Synthetic
uuuuguuuuguuuuuuugag

SEQ ID NO: 313706 - RNA, 21 nt, Artificial Sequence
  Synthetic
uuuuuguuuuguuuuuuugag

SEQ ID NO: 313707 - RNA, 22 nt, Artificial Sequence
  Synthetic
guuuuuguuuuguuuuuuugag

SEQ ID NO: 313708 - RNA, 23 nt, Artificial Sequence
  Synthetic
uguuuuuguuuuguuuuuuugag

SEQ ID NO: 313709 - RNA, 24 nt, Artificial Sequence
  Synthetic
uuguuuuuguuuuguuuuuuugag

SEQ ID NO: 313710 - RNA, 18 nt, Artificial Sequence
  Synthetic
cuuuaauuuuuuuuugag

SEQ ID NO: 313711 - RNA, 19 nt, Artificial Sequence
  Synthetic
ucuuuaauuuuuuuuugag

SEQ ID NO: 313712 - RNA, 20 nt, Artificial Sequence
  Synthetic
uucuuuaauuuuuuuuugag

SEQ ID NO: 313713 - RNA, 21 nt, Artificial Sequence
  Synthetic
uuucuuuaauuuuuuuuugag

SEQ ID NO: 313714 - RNA, 22 nt, Artificial Sequence
  Synthetic
uuuucuuuaauuuuuuuuugag

SEQ ID NO: 313715 - RNA, 23 nt, Artificial Sequence
  Synthetic
uuuuucuuuaauuuuuuuuugag

SEQ ID NO: 313716 - RNA, 24 nt, Artificial Sequence
  Synthetic
uuuuuucuuuaauuuuuuuuugag

SEQ ID NO: 313717 - RNA, 18 nt, Artificial Sequence
  Synthetic
uacuuuuuuuuuuuugag

SEQ ID NO: 313718 - RNA, 19 nt, Artificial Sequence
  Synthetic
auacuuuuuuuuuuuugag

SEQ ID NO: 313719 - RNA, 20 nt, Artificial Sequence
  Synthetic
gauacuuuuuuuuuuuugag

SEQ ID NO: 313720 - RNA, 21 nt, Artificial Sequence
  Synthetic
ggauacuuuuuuuuuuuugag

SEQ ID NO: 313721 - RNA, 22 nt, Artificial Sequence
  Synthetic
uggauacuuuuuuuuuuuugag

SEQ ID NO: 313722 - RNA, 23 nt, Artificial Sequence
  Synthetic
uuggauacuuuuuuuuuuuugag

SEQ ID NO: 313723 - RNA, 24 nt, Artificial Sequence
  Synthetic
auuggauacuuuuuuuuuuuugag

SEQ ID NO: 313724 - RNA, 21 nt, Artificial Sequence
  Synthetic
uuuuuuuuuuuuuuuuuugag

SEQ ID NO: 313725 - RNA, 22 nt, Artificial Sequence
  Synthetic
cuuuuuuuuuuuuuuuuuugag

SEQ ID NO: 313726 - RNA, 23 nt, Artificial Sequence
  Synthetic
ccuuuuuuuuuuuuuuuuuugag

SEQ ID NO: 313727 - RNA, 24 nt, Artificial Sequence
  Synthetic
uccuuuuuuuuuuuuuuuuuugag

SEQ ID NO: 313728 - RNA, 23 nt, Artificial Sequence
  Synthetic
ucuuuuuuuuuuuuuuuuuugag

SEQ ID NO: 313729 - RNA, 24 nt, Artificial Sequence
  Synthetic
uucuuuuuuuuuuuuuuuuuugag

SEQ ID NO: 313730 - RNA, 22 nt, Artificial Sequence
  Synthetic
uuuuuuuuuuuuuuuuuuugag

SEQ ID NO: 313731 - RNA, 23 nt, Artificial Sequence
  Synthetic
guuuuuuuuuuuuuuuuuuugag

SEQ ID NO: 313732 - RNA, 24 nt, Artificial Sequence
  Synthetic
uguuuuuuuuuuuuuuuuuuugag

SEQ ID NO: 313733 - RNA, 18 nt, Artificial Sequence
  Synthetic
aaaaauacaaaaaaauag

SEQ ID NO: 313734 - RNA, 19 nt, Artificial Sequence
  Synthetic
uaaaaauacaaaaaaauag

SEQ ID NO: 313735 - RNA, 20 nt, Artificial Sequence
  Synthetic
cuaaaaauacaaaaaaauag

SEQ ID NO: 313736 - RNA, 21 nt, Artificial Sequence
  Synthetic
acuaaaaauacaaaaaaauag

SEQ ID NO: 313737 - RNA, 22 nt, Artificial Sequence
  Synthetic
uacuaaaaauacaaaaaaauag

SEQ ID NO: 313738 - RNA, 23 nt, Artificial Sequence
  Synthetic
cuacuaaaaauacaaaaaaauag

SEQ ID NO: 313739 - RNA, 24 nt, Artificial Sequence
  Synthetic
ucuacuaaaaauacaaaaaaauag

SEQ ID NO: 313740 - RNA, 18 nt, Artificial Sequence
  Synthetic
aacucuuccaaaaaauag

SEQ ID NO: 313741 - RNA, 19 nt, Artificial Sequence
  Synthetic
caacucuuccaaaaaauag

SEQ ID NO: 313742 - RNA, 20 nt, Artificial Sequence
  Synthetic
acaacucuuccaaaaaauag

SEQ ID NO: 313743 - RNA, 21 nt, Artificial Sequence
  Synthetic
aacaacucuuccaaaaaauag

SEQ ID NO: 313744 - RNA, 22 nt, Artificial Sequence
  Synthetic
aaacaacucuuccaaaaaauag

SEQ ID NO: 313745 - RNA, 23 nt, Artificial Sequence
  Synthetic
uaaacaacucuuccaaaaaauag

SEQ ID NO: 313746 - RNA, 24 nt, Artificial Sequence
  Synthetic
auaaacaacucuuccaaaaaauag

SEQ ID NO: 313747 - RNA, 18 nt, Artificial Sequence
  Synthetic
guaauucaacaaaaauag

SEQ ID NO: 313748 - RNA, 19 nt, Artificial Sequence
  Synthetic
gguaauucaacaaaaauag

SEQ ID NO: 313749 - RNA, 20 nt, Artificial Sequence
  Synthetic
agguaauucaacaaaaauag

SEQ ID NO: 313750 - RNA, 21 nt, Artificial Sequence
  Synthetic
uagguaauucaacaaaaauag

SEQ ID NO: 313751 - RNA, 22 nt, Artificial Sequence
  Synthetic
uuagguaauucaacaaaaauag

SEQ ID NO: 313752 - RNA, 23 nt, Artificial Sequence
  Synthetic
auuagguaauucaacaaaaauag

SEQ ID NO: 313753 - RNA, 24 nt, Artificial Sequence
  Synthetic
aauuagguaauucaacaaaaauag

SEQ ID NO: 313754 - RNA, 18 nt, Artificial Sequence
  Synthetic
cauucuucagaaaaauag

SEQ ID NO: 313755 - RNA, 19 nt, Artificial Sequence
  Synthetic
gcauucuucagaaaaauag

SEQ ID NO: 313756 - RNA, 20 nt, Artificial Sequence
  Synthetic
ugcauucuucagaaaaauag

SEQ ID NO: 313757 - RNA, 21 nt, Artificial Sequence
  Synthetic
augcauucuucagaaaaauag

SEQ ID NO: 313758 - RNA, 22 nt, Artificial Sequence
  Synthetic
uaugcauucuucagaaaaauag

SEQ ID NO: 313759 - RNA, 23 nt, Artificial Sequence
  Synthetic
uuaugcauucuucagaaaaauag

SEQ ID NO: 313760 - RNA, 24 nt, Artificial Sequence
  Synthetic
uuuaugcauucuucagaaaaauag

SEQ ID NO: 313761 - RNA, 18 nt, Artificial Sequence
  Synthetic
cuaggauauuaaaaauag

SEQ ID NO: 313762 - RNA, 19 nt, Artificial Sequence
  Synthetic
ucuaggauauuaaaaauag

SEQ ID NO: 313763 - RNA, 20 nt, Artificial Sequence
  Synthetic
aucuaggauauuaaaaauag

SEQ ID NO: 313764 - RNA, 21 nt, Artificial Sequence
  Synthetic
aaucuaggauauuaaaaauag

SEQ ID NO: 313765 - RNA, 22 nt, Artificial Sequence
  Synthetic
gaaucuaggauauuaaaaauag

SEQ ID NO: 313766 - RNA, 23 nt, Artificial Sequence
  Synthetic
ugaaucuaggauauuaaaaauag

SEQ ID NO: 313767 - RNA, 24 nt, Artificial Sequence
  Synthetic
cugaaucuaggauauuaaaaauag

SEQ ID NO: 313768 - RNA, 18 nt, Artificial Sequence
  Synthetic
aauagccauggaaaauag

SEQ ID NO: 313769 - RNA, 19 nt, Artificial Sequence
  Synthetic
caauagccauggaaaauag

SEQ ID NO: 313770 - RNA, 20 nt, Artificial Sequence
  Synthetic
gcaauagccauggaaaauag

SEQ ID NO: 313771 - RNA, 21 nt, Artificial Sequence
  Synthetic
agcaauagccauggaaaauag

SEQ ID NO: 313772 - RNA, 22 nt, Artificial Sequence
  Synthetic
cagcaauagccauggaaaauag

SEQ ID NO: 313773 - RNA, 23 nt, Artificial Sequence
  Synthetic
ucagcaauagccauggaaaauag

SEQ ID NO: 313774 - RNA, 24 nt, Artificial Sequence
  Synthetic
uucagcaauagccauggaaaauag

SEQ ID NO: 313775 - RNA, 18 nt, Artificial Sequence
  Synthetic
cagaagucaauaaaauag

SEQ ID NO: 313776 - RNA, 19 nt, Artificial Sequence
  Synthetic
gcagaagucaauaaaauag

SEQ ID NO: 313777 - RNA, 20 nt, Artificial Sequence
  Synthetic
agcagaagucaauaaaauag

SEQ ID NO: 313778 - RNA, 21 nt, Artificial Sequence
  Synthetic
gagcagaagucaauaaaauag

SEQ ID NO: 313779 - RNA, 22 nt, Artificial Sequence
  Synthetic
agagcagaagucaauaaaauag

SEQ ID NO: 313780 - RNA, 23 nt, Artificial Sequence
  Synthetic
uagagcagaagucaauaaaauag

SEQ ID NO: 313781 - RNA, 24 nt, Artificial Sequence
  Synthetic
uuagagcagaagucaauaaaauag

SEQ ID NO: 313782 - RNA, 18 nt, Artificial Sequence
  Synthetic
aagacccuaauaaaauag

SEQ ID NO: 313783 - RNA, 19 nt, Artificial Sequence
  Synthetic
caagacccuaauaaaauag

SEQ ID NO: 313784 - RNA, 20 nt, Artificial Sequence
  Synthetic
acaagacccuaauaaaauag

SEQ ID NO: 313785 - RNA, 21 nt, Artificial Sequence
  Synthetic
aacaagacccuaauaaaauag

SEQ ID NO: 313786 - RNA, 22 nt, Artificial Sequence
  Synthetic
caacaagacccuaauaaaauag

SEQ ID NO: 313787 - RNA, 23 nt, Artificial Sequence
  Synthetic
ucaacaagacccuaauaaaauag

SEQ ID NO: 313788 - RNA, 24 nt, Artificial Sequence
  Synthetic
cucaacaagacccuaauaaaauag

SEQ ID NO: 313789 - RNA, 18 nt, Artificial Sequence
  Synthetic
gcuuuuacaguaaaauag

SEQ ID NO: 313790 - RNA, 19 nt, Artificial Sequence
  Synthetic
agcuuuuacaguaaaauag

SEQ ID NO: 313791 - RNA, 20 nt, Artificial Sequence
  Synthetic
aagcuuuuacaguaaaauag

SEQ ID NO: 313792 - RNA, 21 nt, Artificial Sequence
  Synthetic
aaagcuuuuacaguaaaauag

SEQ ID NO: 313793 - RNA, 22 nt, Artificial Sequence
  Synthetic
uaaagcuuuuacaguaaaauag

SEQ ID NO: 313794 - RNA, 23 nt, Artificial Sequence
  Synthetic
auaaagcuuuuacaguaaaauag

SEQ ID NO: 313795 - RNA, 24 nt, Artificial Sequence
  Synthetic
gauaaagcuuuuacaguaaaauag

SEQ ID NO: 313796 - RNA, 18 nt, Artificial Sequence
  Synthetic
aguaguagaaacaaauag

SEQ ID NO: 313797 - RNA, 19 nt, Artificial Sequence
  Synthetic
aaguaguagaaacaaauag

SEQ ID NO: 313798 - RNA, 20 nt, Artificial Sequence
  Synthetic
caaguaguagaaacaaauag

SEQ ID NO: 313799 - RNA, 21 nt, Artificial Sequence
  Synthetic
gcaaguaguagaaacaaauag

SEQ ID NO: 313800 - RNA, 22 nt, Artificial Sequence
  Synthetic
ugcaaguaguagaaacaaauag

SEQ ID NO: 313801 - RNA, 23 nt, Artificial Sequence
  Synthetic
uugcaaguaguagaaacaaauag

SEQ ID NO: 313802 - RNA, 24 nt, Artificial Sequence
  Synthetic
auugcaaguaguagaaacaaauag

SEQ ID NO: 313803 - RNA, 20 nt, Artificial Sequence
  Synthetic
cgccucagccucccaaauag

SEQ ID NO: 313804 - RNA, 21 nt, Artificial Sequence
  Synthetic
ccgccucagccucccaaauag

SEQ ID NO: 313805 - RNA, 22 nt, Artificial Sequence
  Synthetic
uccgccucagccucccaaauag

SEQ ID NO: 313806 - RNA, 23 nt, Artificial Sequence
  Synthetic
cuccgccucagccucccaaauag

SEQ ID NO: 313807 - RNA, 24 nt, Artificial Sequence
  Synthetic
ucuccgccucagccucccaaauag

SEQ ID NO: 313808 - RNA, 18 nt, Artificial Sequence
  Synthetic
ugauugugagccaaauag

SEQ ID NO: 313809 - RNA, 19 nt, Artificial Sequence
  Synthetic
gugauugugagccaaauag

SEQ ID NO: 313810 - RNA, 20 nt, Artificial Sequence
  Synthetic
agugauugugagccaaauag

SEQ ID NO: 313811 - RNA, 21 nt, Artificial Sequence
  Synthetic
gagugauugugagccaaauag

SEQ ID NO: 313812 - RNA, 22 nt, Artificial Sequence
  Synthetic
agagugauugugagccaaauag

SEQ ID NO: 313813 - RNA, 23 nt, Artificial Sequence
  Synthetic
gagagugauugugagccaaauag

SEQ ID NO: 313814 - RNA, 24 nt, Artificial Sequence
  Synthetic
agagagugauugugagccaaauag

SEQ ID NO: 313815 - RNA, 18 nt, Artificial Sequence
  Synthetic
cccugcacauucaaauag

SEQ ID NO: 313816 - RNA, 19 nt, Artificial Sequence
  Synthetic
ccccugcacauucaaauag

SEQ ID NO: 313817 - RNA, 20 nt, Artificial Sequence
  Synthetic
accccugcacauucaaauag

SEQ ID NO: 313818 - RNA, 21 nt, Artificial Sequence
  Synthetic
uaccccugcacauucaaauag

SEQ ID NO: 313819 - RNA, 22 nt, Artificial Sequence
  Synthetic
auaccccugcacauucaaauag

SEQ ID NO: 313820 - RNA, 23 nt, Artificial Sequence
  Synthetic
cauaccccugcacauucaaauag

SEQ ID NO: 313821 - RNA, 24 nt, Artificial Sequence
  Synthetic
ucauaccccugcacauucaaauag

SEQ ID NO: 313822 - RNA, 18 nt, Artificial Sequence
  Synthetic
auugcuaugaagaaauag

SEQ ID NO: 313823 - RNA, 19 nt, Artificial Sequence
  Synthetic
uauugcuaugaagaaauag

SEQ ID NO: 313824 - RNA, 20 nt, Artificial Sequence
  Synthetic
guauugcuaugaagaaauag

SEQ ID NO: 313825 - RNA, 21 nt, Artificial Sequence
  Synthetic
uguauugcuaugaagaaauag

SEQ ID NO: 313826 - RNA, 22 nt, Artificial Sequence
  Synthetic
auguauugcuaugaagaaauag

SEQ ID NO: 313827 - RNA, 23 nt, Artificial Sequence
  Synthetic
cauguauugcuaugaagaaauag

SEQ ID NO: 313828 - RNA, 24 nt, Artificial Sequence
  Synthetic
gcauguauugcuaugaagaaauag

SEQ ID NO: 313829 - RNA, 18 nt, Artificial Sequence
  Synthetic
acauguugacugaaauag

SEQ ID NO: 313830 - RNA, 19 nt, Artificial Sequence
  Synthetic
cacauguugacugaaauag

SEQ ID NO: 313831 - RNA, 20 nt, Artificial Sequence
  Synthetic
acacauguugacugaaauag

SEQ ID NO: 313832 - RNA, 21 nt, Artificial Sequence
  Synthetic
gacacauguugacugaaauag

SEQ ID NO: 313833 - RNA, 22 nt, Artificial Sequence
  Synthetic
ggacacauguugacugaaauag

SEQ ID NO: 313834 - RNA, 23 nt, Artificial Sequence
  Synthetic
aggacacauguugacugaaauag

SEQ ID NO: 313835 - RNA, 24 nt, Artificial Sequence
  Synthetic
uaggacacauguugacugaaauag

SEQ ID NO: 313836 - RNA, 18 nt, Artificial Sequence
  Synthetic
auaugacaaauuaaauag

SEQ ID NO: 313837 - RNA, 19 nt, Artificial Sequence
  Synthetic
aauaugacaaauuaaauag

SEQ ID NO: 313838 - RNA, 20 nt, Artificial Sequence
  Synthetic
aaauaugacaaauuaaauag

SEQ ID NO: 313839 - RNA, 21 nt, Artificial Sequence
  Synthetic
uaaauaugacaaauuaaauag

SEQ ID NO: 313840 - RNA, 22 nt, Artificial Sequence
  Synthetic
uuaaauaugacaaauuaaauag

SEQ ID NO: 313841 - RNA, 23 nt, Artificial Sequence
  Synthetic
uuuaaauaugacaaauuaaauag

SEQ ID NO: 313842 - RNA, 24 nt, Artificial Sequence
  Synthetic
uuuuaaauaugacaaauuaaauag

SEQ ID NO: 313843 - RNA, 18 nt, Artificial Sequence
  Synthetic
cauuaaaauauuaaauag

SEQ ID NO: 313844 - RNA, 19 nt, Artificial Sequence
  Synthetic
ccauuaaaauauuaaauag

SEQ ID NO: 313845 - RNA, 20 nt, Artificial Sequence
  Synthetic
cccauuaaaauauuaaauag

SEQ ID NO: 313846 - RNA, 21 nt, Artificial Sequence
  Synthetic
ucccauuaaaauauuaaauag

SEQ ID NO: 313847 - RNA, 22 nt, Artificial Sequence
  Synthetic
uucccauuaaaauauuaaauag

SEQ ID NO: 313848 - RNA, 23 nt, Artificial Sequence
  Synthetic
cuucccauuaaaauauuaaauag

SEQ ID NO: 313849 - RNA, 24 nt, Artificial Sequence
  Synthetic
ucuucccauuaaaauauuaaauag

SEQ ID NO: 313850 - RNA, 18 nt, Artificial Sequence
  Synthetic
uuaaaucuaaaacaauag

SEQ ID NO: 313851 - RNA, 19 nt, Artificial Sequence
  Synthetic
cuuaaaucuaaaacaauag

SEQ ID NO: 313852 - RNA, 20 nt, Artificial Sequence
  Synthetic
ccuuaaaucuaaaacaauag

SEQ ID NO: 313853 - RNA, 21 nt, Artificial Sequence
  Synthetic
cccuuaaaucuaaaacaauag

SEQ ID NO: 313854 - RNA, 22 nt, Artificial Sequence
  Synthetic
ccccuuaaaucuaaaacaauag

SEQ ID NO: 313855 - RNA, 23 nt, Artificial Sequence
  Synthetic
accccuuaaaucuaaaacaauag

SEQ ID NO: 313856 - RNA, 24 nt, Artificial Sequence
  Synthetic
uaccccuuaaaucuaaaacaauag

SEQ ID NO: 313857 - RNA, 18 nt, Artificial Sequence
  Synthetic
ucuccaugguaacaauag

SEQ ID NO: 313858 - RNA, 19 nt, Artificial Sequence
  Synthetic
cucuccaugguaacaauag

SEQ ID NO: 313859 - RNA, 20 nt, Artificial Sequence
  Synthetic
ccucuccaugguaacaauag

SEQ ID NO: 313860 - RNA, 21 nt, Artificial Sequence
  Synthetic
cccucuccaugguaacaauag

SEQ ID NO: 313861 - RNA, 22 nt, Artificial Sequence
  Synthetic
gcccucuccaugguaacaauag

SEQ ID NO: 313862 - RNA, 23 nt, Artificial Sequence
  Synthetic
ugcccucuccaugguaacaauag

SEQ ID NO: 313863 - RNA, 24 nt, Artificial Sequence
  Synthetic
uugcccucuccaugguaacaauag

SEQ ID NO: 313864 - RNA, 18 nt, Artificial Sequence
  Synthetic
ggguucuauugacaauag

SEQ ID NO: 313865 - RNA, 19 nt, Artificial Sequence
  Synthetic
uggguucuauugacaauag

SEQ ID NO: 313866 - RNA, 20 nt, Artificial Sequence
  Synthetic
cuggguucuauugacaauag

SEQ ID NO: 313867 - RNA, 21 nt, Artificial Sequence
  Synthetic
acuggguucuauugacaauag

SEQ ID NO: 313868 - RNA, 22 nt, Artificial Sequence
  Synthetic
aacuggguucuauugacaauag

SEQ ID NO: 313869 - RNA, 23 nt, Artificial Sequence
  Synthetic
aaacuggguucuauugacaauag

SEQ ID NO: 313870 - RNA, 24 nt, Artificial Sequence
  Synthetic
gaaacuggguucuauugacaauag

SEQ ID NO: 313871 - RNA, 18 nt, Artificial Sequence
  Synthetic
ugauuauaaaaccaauag

SEQ ID NO: 313872 - RNA, 19 nt, Artificial Sequence
  Synthetic
augauuauaaaaccaauag

SEQ ID NO: 313873 - RNA, 20 nt, Artificial Sequence
  Synthetic
uaugauuauaaaaccaauag

SEQ ID NO: 313874 - RNA, 21 nt, Artificial Sequence
  Synthetic
auaugauuauaaaaccaauag

SEQ ID NO: 313875 - RNA, 22 nt, Artificial Sequence
  Synthetic
uauaugauuauaaaaccaauag

SEQ ID NO: 313876 - RNA, 23 nt, Artificial Sequence
  Synthetic
guauaugauuauaaaaccaauag

SEQ ID NO: 313877 - RNA, 24 nt, Artificial Sequence
  Synthetic
gguauaugauuauaaaaccaauag

SEQ ID NO: 313878 - RNA, 18 nt, Artificial Sequence
  Synthetic
gacaagauaauccaauag

SEQ ID NO: 313879 - RNA, 19 nt, Artificial Sequence
  Synthetic
ugacaagauaauccaauag

SEQ ID NO: 313880 - RNA, 20 nt, Artificial Sequence
  Synthetic
gugacaagauaauccaauag

SEQ ID NO: 313881 - RNA, 21 nt, Artificial Sequence
  Synthetic
ggugacaagauaauccaauag

SEQ ID NO: 313882 - RNA, 22 nt, Artificial Sequence
  Synthetic
aggugacaagauaauccaauag

SEQ ID NO: 313883 - RNA, 23 nt, Artificial Sequence
  Synthetic
aaggugacaagauaauccaauag

SEQ ID NO: 313884 - RNA, 24 nt, Artificial Sequence
  Synthetic
aaaggugacaagauaauccaauag

SEQ ID NO: 313885 - RNA, 18 nt, Artificial Sequence
  Synthetic
gaaaucaacuuccaauag

SEQ ID NO: 313886 - RNA, 19 nt, Artificial Sequence
  Synthetic
ugaaaucaacuuccaauag

SEQ ID NO: 313887 - RNA, 20 nt, Artificial Sequence
  Synthetic
gugaaaucaacuuccaauag

SEQ ID NO: 313888 - RNA, 21 nt, Artificial Sequence
  Synthetic
ggugaaaucaacuuccaauag

SEQ ID NO: 313889 - RNA, 22 nt, Artificial Sequence
  Synthetic
uggugaaaucaacuuccaauag

SEQ ID NO: 313890 - RNA, 23 nt, Artificial Sequence
  Synthetic
auggugaaaucaacuuccaauag

SEQ ID NO: 313891 - RNA, 24 nt, Artificial Sequence
  Synthetic
gauggugaaaucaacuuccaauag

SEQ ID NO: 313892 - RNA, 18 nt, Artificial Sequence
  Synthetic
uuuuugccagugcaauag

SEQ ID NO: 313893 - RNA, 19 nt, Artificial Sequence
  Synthetic
auuuuugccagugcaauag

SEQ ID NO: 313894 - RNA, 20 nt, Artificial Sequence
  Synthetic
aauuuuugccagugcaauag

SEQ ID NO: 313895 - RNA, 21 nt, Artificial Sequence
  Synthetic
gaauuuuugccagugcaauag

SEQ ID NO: 313896 - RNA, 22 nt, Artificial Sequence
  Synthetic
ugaauuuuugccagugcaauag

SEQ ID NO: 313897 - RNA, 23 nt, Artificial Sequence
  Synthetic
uugaauuuuugccagugcaauag

SEQ ID NO: 313898 - RNA, 24 nt, Artificial Sequence
  Synthetic
cuugaauuuuugccagugcaauag

SEQ ID NO: 313899 - RNA, 18 nt, Artificial Sequence
  Synthetic
ucaaaacuuuugcaauag

SEQ ID NO: 313900 - RNA, 19 nt, Artificial Sequence
  Synthetic
uucaaaacuuuugcaauag

SEQ ID NO: 313901 - RNA, 20 nt, Artificial Sequence
  Synthetic
guucaaaacuuuugcaauag

SEQ ID NO: 313902 - RNA, 21 nt, Artificial Sequence
  Synthetic
uguucaaaacuuuugcaauag

SEQ ID NO: 313903 - RNA, 22 nt, Artificial Sequence
  Synthetic
guguucaaaacuuuugcaauag

SEQ ID NO: 313904 - RNA, 23 nt, Artificial Sequence
  Synthetic
uguguucaaaacuuuugcaauag

SEQ ID NO: 313905 - RNA, 24 nt, Artificial Sequence
  Synthetic
cuguguucaaaacuuuugcaauag

SEQ ID NO: 313906 - RNA, 18 nt, Artificial Sequence
  Synthetic
ccauuaaaaugucaauag

SEQ ID NO: 313907 - RNA, 19 nt, Artificial Sequence
  Synthetic
cccauuaaaaugucaauag

SEQ ID NO: 313908 - RNA, 20 nt, Artificial Sequence
  Synthetic
ucccauuaaaaugucaauag

SEQ ID NO: 313909 - RNA, 21 nt, Artificial Sequence
  Synthetic
aucccauuaaaaugucaauag

SEQ ID NO: 313910 - RNA, 22 nt, Artificial Sequence
  Synthetic
aaucccauuaaaaugucaauag

SEQ ID NO: 313911 - RNA, 23 nt, Artificial Sequence
  Synthetic
aaaucccauuaaaaugucaauag

SEQ ID NO: 313912 - RNA, 24 nt, Artificial Sequence
  Synthetic
caaaucccauuaaaaugucaauag

SEQ ID NO: 313913 - RNA, 18 nt, Artificial Sequence
  Synthetic
ggcccccauugucaauag

SEQ ID NO: 313914 - RNA, 19 nt, Artificial Sequence
  Synthetic
aggcccccauugucaauag

SEQ ID NO: 313915 - RNA, 20 nt, Artificial Sequence
  Synthetic
caggcccccauugucaauag

SEQ ID NO: 313916 - RNA, 21 nt, Artificial Sequence
  Synthetic
acaggcccccauugucaauag

SEQ ID NO: 313917 - RNA, 22 nt, Artificial Sequence
  Synthetic
cacaggcccccauugucaauag

SEQ ID NO: 313918 - RNA, 23 nt, Artificial Sequence
  Synthetic
ccacaggcccccauugucaauag

SEQ ID NO: 313919 - RNA, 24 nt, Artificial Sequence
  Synthetic
gccacaggcccccauugucaauag

SEQ ID NO: 313920 - RNA, 18 nt, Artificial Sequence
  Synthetic
cacaugguaguucaauag

SEQ ID NO: 313921 - RNA, 19 nt, Artificial Sequence
  Synthetic
acacaugguaguucaauag

SEQ ID NO: 313922 - RNA, 20 nt, Artificial Sequence
  Synthetic
gacacaugguaguucaauag

SEQ ID NO: 313923 - RNA, 21 nt, Artificial Sequence
  Synthetic
ugacacaugguaguucaauag

SEQ ID NO: 313924 - RNA, 22 nt, Artificial Sequence
  Synthetic
cugacacaugguaguucaauag

SEQ ID NO: 313925 - RNA, 23 nt, Artificial Sequence
  Synthetic
acugacacaugguaguucaauag

SEQ ID NO: 313926 - RNA, 24 nt, Artificial Sequence
  Synthetic
cacugacacaugguaguucaauag

SEQ ID NO: 313927 - RNA, 18 nt, Artificial Sequence
  Synthetic
uaggaaacauuucaauag

SEQ ID NO: 313928 - RNA, 19 nt, Artificial Sequence
  Synthetic
auaggaaacauuucaauag

SEQ ID NO: 313929 - RNA, 20 nt, Artificial Sequence
  Synthetic
aauaggaaacauuucaauag

SEQ ID NO: 313930 - RNA, 21 nt, Artificial Sequence
  Synthetic
uaauaggaaacauuucaauag

SEQ ID NO: 313931 - RNA, 22 nt, Artificial Sequence
  Synthetic
guaauaggaaacauuucaauag

SEQ ID NO: 313932 - RNA, 23 nt, Artificial Sequence
  Synthetic
gguaauaggaaacauuucaauag

SEQ ID NO: 313933 - RNA, 24 nt, Artificial Sequence
  Synthetic
cgguaauaggaaacauuucaauag

SEQ ID NO: 313934 - RNA, 18 nt, Artificial Sequence
  Synthetic
cacauuuuguuucaauag

SEQ ID NO: 313935 - RNA, 19 nt, Artificial Sequence
  Synthetic
ucacauuuuguuucaauag

SEQ ID NO: 313936 - RNA, 20 nt, Artificial Sequence
  Synthetic
uucacauuuuguuucaauag

SEQ ID NO: 313937 - RNA, 21 nt, Artificial Sequence
  Synthetic
cuucacauuuuguuucaauag

SEQ ID NO: 313938 - RNA, 22 nt, Artificial Sequence
  Synthetic
gcuucacauuuuguuucaauag

SEQ ID NO: 313939 - RNA, 23 nt, Artificial Sequence
  Synthetic
agcuucacauuuuguuucaauag

SEQ ID NO: 313940 - RNA, 24 nt, Artificial Sequence
  Synthetic
gagcuucacauuuuguuucaauag

SEQ ID NO: 313941 - RNA, 18 nt, Artificial Sequence
  Synthetic
uaacuagugaaagaauag

SEQ ID NO: 313942 - RNA, 19 nt, Artificial Sequence
  Synthetic
uuaacuagugaaagaauag

SEQ ID NO: 313943 - RNA, 20 nt, Artificial Sequence
  Synthetic
uuuaacuagugaaagaauag

SEQ ID NO: 313944 - RNA, 21 nt, Artificial Sequence
  Synthetic
uuuuaacuagugaaagaauag

SEQ ID NO: 313945 - RNA, 22 nt, Artificial Sequence
  Synthetic
auuuuaacuagugaaagaauag

SEQ ID NO: 313946 - RNA, 23 nt, Artificial Sequence
  Synthetic
cauuuuaacuagugaaagaauag

SEQ ID NO: 313947 - RNA, 24 nt, Artificial Sequence
  Synthetic
acauuuuaacuagugaaagaauag

SEQ ID NO: 313948 - RNA, 18 nt, Artificial Sequence
  Synthetic
uuguauagagaagaauag

SEQ ID NO: 313949 - RNA, 19 nt, Artificial Sequence
  Synthetic
cuuguauagagaagaauag

SEQ ID NO: 313950 - RNA, 20 nt, Artificial Sequence
  Synthetic
acuuguauagagaagaauag

SEQ ID NO: 313951 - RNA, 21 nt, Artificial Sequence
  Synthetic
aacuuguauagagaagaauag

SEQ ID NO: 313952 - RNA, 22 nt, Artificial Sequence
  Synthetic
uaacuuguauagagaagaauag

SEQ ID NO: 313953 - RNA, 23 nt, Artificial Sequence
  Synthetic
auaacuuguauagagaagaauag

SEQ ID NO: 313954 - RNA, 24 nt, Artificial Sequence
  Synthetic
cauaacuuguauagagaagaauag

SEQ ID NO: 313955 - RNA, 18 nt, Artificial Sequence
  Synthetic
cuaauagagacagaauag

SEQ ID NO: 313956 - RNA, 19 nt, Artificial Sequence
  Synthetic
ucuaauagagacagaauag

SEQ ID NO: 313957 - RNA, 20 nt, Artificial Sequence
  Synthetic
uucuaauagagacagaauag

SEQ ID NO: 313958 - RNA, 21 nt, Artificial Sequence
  Synthetic
uuucuaauagagacagaauag

SEQ ID NO: 313959 - RNA, 22 nt, Artificial Sequence
  Synthetic
uuuucuaauagagacagaauag

SEQ ID NO: 313960 - RNA, 23 nt, Artificial Sequence
  Synthetic
cuuuucuaauagagacagaauag

SEQ ID NO: 313961 - RNA, 24 nt, Artificial Sequence
  Synthetic
ccuuuucuaauagagacagaauag

SEQ ID NO: 313962 - RNA, 18 nt, Artificial Sequence
  Synthetic
agucaagguagagaauag

SEQ ID NO: 313963 - RNA, 19 nt, Artificial Sequence
  Synthetic
gagucaagguagagaauag

SEQ ID NO: 313964 - RNA, 20 nt, Artificial Sequence
  Synthetic
ugagucaagguagagaauag

SEQ ID NO: 313965 - RNA, 21 nt, Artificial Sequence
  Synthetic
uugagucaagguagagaauag

SEQ ID NO: 313966 - RNA, 22 nt, Artificial Sequence
  Synthetic
uuugagucaagguagagaauag

SEQ ID NO: 313967 - RNA, 23 nt, Artificial Sequence
  Synthetic
uuuugagucaagguagagaauag

SEQ ID NO: 313968 - RNA, 24 nt, Artificial Sequence
  Synthetic
cuuuugagucaagguagagaauag

SEQ ID NO: 313969 - RNA, 18 nt, Artificial Sequence
  Synthetic
cccggaaugauagaauag

SEQ ID NO: 313970 - RNA, 19 nt, Artificial Sequence
  Synthetic
acccggaaugauagaauag

SEQ ID NO: 313971 - RNA, 20 nt, Artificial Sequence
  Synthetic
aacccggaaugauagaauag

SEQ ID NO: 313972 - RNA, 21 nt, Artificial Sequence
  Synthetic
gaacccggaaugauagaauag

SEQ ID NO: 313973 - RNA, 22 nt, Artificial Sequence
  Synthetic
agaacccggaaugauagaauag

SEQ ID NO: 313974 - RNA, 23 nt, Artificial Sequence
  Synthetic
uagaacccggaaugauagaauag

SEQ ID NO: 313975 - RNA, 24 nt, Artificial Sequence
  Synthetic
auagaacccggaaugauagaauag

SEQ ID NO: 313976 - RNA, 18 nt, Artificial Sequence
  Synthetic
aauuaaaggccugaauag

SEQ ID NO: 313977 - RNA, 19 nt, Artificial Sequence
  Synthetic
uaauuaaaggccugaauag

SEQ ID NO: 313978 - RNA, 20 nt, Artificial Sequence
  Synthetic
uuaauuaaaggccugaauag

SEQ ID NO: 313979 - RNA, 21 nt, Artificial Sequence
  Synthetic
auuaauuaaaggccugaauag

SEQ ID NO: 313980 - RNA, 22 nt, Artificial Sequence
  Synthetic
aauuaauuaaaggccugaauag

SEQ ID NO: 313981 - RNA, 23 nt, Artificial Sequence
  Synthetic
uaauuaauuaaaggccugaauag

SEQ ID NO: 313982 - RNA, 24 nt, Artificial Sequence
  Synthetic
guaauuaauuaaaggccugaauag

SEQ ID NO: 313983 - RNA, 18 nt, Artificial Sequence
  Synthetic
ccucagccuccugaauag

SEQ ID NO: 313984 - RNA, 19 nt, Artificial Sequence
  Synthetic
gccucagccuccugaauag

SEQ ID NO: 313985 - RNA, 20 nt, Artificial Sequence
  Synthetic
ugccucagccuccugaauag

SEQ ID NO: 313986 - RNA, 21 nt, Artificial Sequence
  Synthetic
cugccucagccuccugaauag

SEQ ID NO: 313987 - RNA, 22 nt, Artificial Sequence
  Synthetic
ccugccucagccuccugaauag

SEQ ID NO: 313988 - RNA, 23 nt, Artificial Sequence
  Synthetic
uccugccucagccuccugaauag

SEQ ID NO: 313989 - RNA, 24 nt, Artificial Sequence
  Synthetic
cuccugccucagccuccugaauag

SEQ ID NO: 313990 - RNA, 18 nt, Artificial Sequence
  Synthetic
uuacucggcagugaauag

SEQ ID NO: 313991 - RNA, 19 nt, Artificial Sequence
  Synthetic
uuuacucggcagugaauag

SEQ ID NO: 313992 - RNA, 20 nt, Artificial Sequence
  Synthetic
uuuuacucggcagugaauag

SEQ ID NO: 313993 - RNA, 21 nt, Artificial Sequence
  Synthetic
auuuuacucggcagugaauag

SEQ ID NO: 313994 - RNA, 22 nt, Artificial Sequence
  Synthetic
aauuuuacucggcagugaauag

SEQ ID NO: 313995 - RNA, 23 nt, Artificial Sequence
  Synthetic
gaauuuuacucggcagugaauag

SEQ ID NO: 313996 - RNA, 24 nt, Artificial Sequence
  Synthetic
ggaauuuuacucggcagugaauag

SEQ ID NO: 313997 - RNA, 18 nt, Artificial Sequence
  Synthetic
uguaauuccauugaauag

SEQ ID NO: 313998 - RNA, 19 nt, Artificial Sequence
  Synthetic
auguaauuccauugaauag

SEQ ID NO: 313999 - RNA, 20 nt, Artificial Sequence
  Synthetic
aauguaauuccauugaauag

SEQ ID NO: 314000 - RNA, 21 nt, Artificial Sequence
  Synthetic
gaauguaauuccauugaauag

SEQ ID NO: 314001 - RNA, 22 nt, Artificial Sequence
  Synthetic
ugaauguaauuccauugaauag

SEQ ID NO: 314002 - RNA, 23 nt, Artificial Sequence
  Synthetic
augaauguaauuccauugaauag

SEQ ID NO: 314003 - RNA, 24 nt, Artificial Sequence
  Synthetic
aaugaauguaauuccauugaauag

SEQ ID NO: 314004 - RNA, 18 nt, Artificial Sequence
  Synthetic
uauacaauuuuugaauag

SEQ ID NO: 314005 - RNA, 19 nt, Artificial Sequence
  Synthetic
guauacaauuuuugaauag

SEQ ID NO: 314006 - RNA, 20 nt, Artificial Sequence
  Synthetic
aguauacaauuuuugaauag

SEQ ID NO: 314007 - RNA, 21 nt, Artificial Sequence
  Synthetic
aaguauacaauuuuugaauag

SEQ ID NO: 314008 - RNA, 22 nt, Artificial Sequence
  Synthetic
gaaguauacaauuuuugaauag

SEQ ID NO: 314009 - RNA, 23 nt, Artificial Sequence
  Synthetic
agaaguauacaauuuuugaauag

SEQ ID NO: 314010 - RNA, 24 nt, Artificial Sequence
  Synthetic
uagaaguauacaauuuuugaauag

SEQ ID NO: 314011 - RNA, 18 nt, Artificial Sequence
  Synthetic
ucuaauucacaauaauag

SEQ ID NO: 314012 - RNA, 19 nt, Artificial Sequence
  Synthetic
uucuaauucacaauaauag

SEQ ID NO: 314013 - RNA, 20 nt, Artificial Sequence
  Synthetic
uuucuaauucacaauaauag

SEQ ID NO: 314014 - RNA, 21 nt, Artificial Sequence
  Synthetic
uuuucuaauucacaauaauag

SEQ ID NO: 314015 - RNA, 22 nt, Artificial Sequence
  Synthetic
auuuucuaauucacaauaauag

SEQ ID NO: 314016 - RNA, 23 nt, Artificial Sequence
  Synthetic
uauuuucuaauucacaauaauag

SEQ ID NO: 314017 - RNA, 24 nt, Artificial Sequence
  Synthetic
guauuuucuaauucacaauaauag

SEQ ID NO: 314018 - RNA, 18 nt, Artificial Sequence
  Synthetic
augcccauacaauaauag

SEQ ID NO: 314019 - RNA, 19 nt, Artificial Sequence
  Synthetic
gaugcccauacaauaauag

SEQ ID NO: 314020 - RNA, 20 nt, Artificial Sequence
  Synthetic
agaugcccauacaauaauag

SEQ ID NO: 314021 - RNA, 21 nt, Artificial Sequence
  Synthetic
uagaugcccauacaauaauag

SEQ ID NO: 314022 - RNA, 22 nt, Artificial Sequence
  Synthetic
auagaugcccauacaauaauag

SEQ ID NO: 314023 - RNA, 23 nt, Artificial Sequence
  Synthetic
cauagaugcccauacaauaauag

SEQ ID NO: 314024 - RNA, 24 nt, Artificial Sequence
  Synthetic
acauagaugcccauacaauaauag

SEQ ID NO: 314025 - RNA, 18 nt, Artificial Sequence
  Synthetic
acuacaguacaauaauag

SEQ ID NO: 314026 - RNA, 19 nt, Artificial Sequence
  Synthetic
aacuacaguacaauaauag

SEQ ID NO: 314027 - RNA, 20 nt, Artificial Sequence
  Synthetic
aaacuacaguacaauaauag

SEQ ID NO: 314028 - RNA, 21 nt, Artificial Sequence
  Synthetic
caaacuacaguacaauaauag

SEQ ID NO: 314029 - RNA, 22 nt, Artificial Sequence
  Synthetic
acaaacuacaguacaauaauag

SEQ ID NO: 314030 - RNA, 23 nt, Artificial Sequence
  Synthetic
gacaaacuacaguacaauaauag

SEQ ID NO: 314031 - RNA, 24 nt, Artificial Sequence
  Synthetic
agacaaacuacaguacaauaauag

SEQ ID NO: 314032 - RNA, 18 nt, Artificial Sequence
  Synthetic
ucacuuacugaauaauag

SEQ ID NO: 314033 - RNA, 19 nt, Artificial Sequence
  Synthetic
cucacuuacugaauaauag

SEQ ID NO: 314034 - RNA, 20 nt, Artificial Sequence
  Synthetic
acucacuuacugaauaauag

SEQ ID NO: 314035 - RNA, 21 nt, Artificial Sequence
  Synthetic
gacucacuuacugaauaauag

SEQ ID NO: 314036 - RNA, 22 nt, Artificial Sequence
  Synthetic
ggacucacuuacugaauaauag

SEQ ID NO: 314037 - RNA, 23 nt, Artificial Sequence
  Synthetic
uggacucacuuacugaauaauag

SEQ ID NO: 314038 - RNA, 24 nt, Artificial Sequence
  Synthetic
uuggacucacuuacugaauaauag

SEQ ID NO: 314039 - RNA, 18 nt, Artificial Sequence
  Synthetic
gaaacuagggacuaauag

SEQ ID NO: 314040 - RNA, 19 nt, Artificial Sequence
  Synthetic
agaaacuagggacuaauag

SEQ ID NO: 314041 - RNA, 20 nt, Artificial Sequence
  Synthetic
uagaaacuagggacuaauag

SEQ ID NO: 314042 - RNA, 21 nt, Artificial Sequence
  Synthetic
guagaaacuagggacuaauag

SEQ ID NO: 314043 - RNA, 22 nt, Artificial Sequence
  Synthetic
aguagaaacuagggacuaauag

SEQ ID NO: 314044 - RNA, 23 nt, Artificial Sequence
  Synthetic
caguagaaacuagggacuaauag

SEQ ID NO: 314045 - RNA, 24 nt, Artificial Sequence
  Synthetic
acaguagaaacuagggacuaauag

SEQ ID NO: 314046 - RNA, 18 nt, Artificial Sequence
  Synthetic
cuggccauacuguaauag

SEQ ID NO: 314047 - RNA, 19 nt, Artificial Sequence
  Synthetic
acuggccauacuguaauag

SEQ ID NO: 314048 - RNA, 20 nt, Artificial Sequence
  Synthetic
uacuggccauacuguaauag

SEQ ID NO: 314049 - RNA, 21 nt, Artificial Sequence
  Synthetic
auacuggccauacuguaauag

SEQ ID NO: 314050 - RNA, 22 nt, Artificial Sequence
  Synthetic
aauacuggccauacuguaauag

SEQ ID NO: 314051 - RNA, 23 nt, Artificial Sequence
  Synthetic
aaauacuggccauacuguaauag

SEQ ID NO: 314052 - RNA, 24 nt, Artificial Sequence
  Synthetic
gaaauacuggccauacuguaauag

SEQ ID NO: 314053 - RNA, 18 nt, Artificial Sequence
  Synthetic
cuuguuaccucuuaauag

SEQ ID NO: 314054 - RNA, 19 nt, Artificial Sequence
  Synthetic
ucuuguuaccucuuaauag

SEQ ID NO: 314055 - RNA, 20 nt, Artificial Sequence
  Synthetic
gucuuguuaccucuuaauag

SEQ ID NO: 314056 - RNA, 21 nt, Artificial Sequence
  Synthetic
ggucuuguuaccucuuaauag

SEQ ID NO: 314057 - RNA, 22 nt, Artificial Sequence
  Synthetic
gggucuuguuaccucuuaauag

SEQ ID NO: 314058 - RNA, 23 nt, Artificial Sequence
  Synthetic
ugggucuuguuaccucuuaauag

SEQ ID NO: 314059 - RNA, 24 nt, Artificial Sequence
  Synthetic
cugggucuuguuaccucuuaauag

SEQ ID NO: 314060 - RNA, 18 nt, Artificial Sequence
  Synthetic
uaauuagcaauuuaauag

SEQ ID NO: 314061 - RNA, 19 nt, Artificial Sequence
  Synthetic
uuaauuagcaauuuaauag

SEQ ID NO: 314062 - RNA, 20 nt, Artificial Sequence
  Synthetic
auuaauuagcaauuuaauag

SEQ ID NO: 314063 - RNA, 21 nt, Artificial Sequence
  Synthetic
uauuaauuagcaauuuaauag

SEQ ID NO: 314064 - RNA, 22 nt, Artificial Sequence
  Synthetic
cuauuaauuagcaauuuaauag

SEQ ID NO: 314065 - RNA, 23 nt, Artificial Sequence
  Synthetic
gcuauuaauuagcaauuuaauag

SEQ ID NO: 314066 - RNA, 24 nt, Artificial Sequence
  Synthetic
ugcuauuaauuagcaauuuaauag

SEQ ID NO: 314067 - RNA, 18 nt, Artificial Sequence
  Synthetic
agggagggaguuuaauag

SEQ ID NO: 314068 - RNA, 19 nt, Artificial Sequence
  Synthetic
aagggagggaguuuaauag

SEQ ID NO: 314069 - RNA, 20 nt, Artificial Sequence
  Synthetic
caagggagggaguuuaauag

SEQ ID NO: 314070 - RNA, 21 nt, Artificial Sequence
  Synthetic
ccaagggagggaguuuaauag

SEQ ID NO: 314071 - RNA, 22 nt, Artificial Sequence
  Synthetic
accaagggagggaguuuaauag

SEQ ID NO: 314072 - RNA, 23 nt, Artificial Sequence
  Synthetic
uaccaagggagggaguuuaauag

SEQ ID NO: 314073 - RNA, 24 nt, Artificial Sequence
  Synthetic
guaccaagggagggaguuuaauag

SEQ ID NO: 314074 - RNA, 18 nt, Artificial Sequence
  Synthetic
cugcucugcuuuuaauag

SEQ ID NO: 314075 - RNA, 19 nt, Artificial Sequence
  Synthetic
gcugcucugcuuuuaauag

SEQ ID NO: 314076 - RNA, 20 nt, Artificial Sequence
  Synthetic
ggcugcucugcuuuuaauag

SEQ ID NO: 314077 - RNA, 21 nt, Artificial Sequence
  Synthetic
aggcugcucugcuuuuaauag

SEQ ID NO: 314078 - RNA, 22 nt, Artificial Sequence
  Synthetic
uaggcugcucugcuuuuaauag

SEQ ID NO: 314079 - RNA, 23 nt, Artificial Sequence
  Synthetic
auaggcugcucugcuuuuaauag

SEQ ID NO: 314080 - RNA, 24 nt, Artificial Sequence
  Synthetic
cauaggcugcucugcuuuuaauag

SEQ ID NO: 314081 - RNA, 18 nt, Artificial Sequence
  Synthetic
aggagcugcaaaacauag

SEQ ID NO: 314082 - RNA, 19 nt, Artificial Sequence
  Synthetic
caggagcugcaaaacauag

SEQ ID NO: 314083 - RNA, 20 nt, Artificial Sequence
  Synthetic
gcaggagcugcaaaacauag

SEQ ID NO: 314084 - RNA, 21 nt, Artificial Sequence
  Synthetic
ugcaggagcugcaaaacauag

SEQ ID NO: 314085 - RNA, 22 nt, Artificial Sequence
  Synthetic
augcaggagcugcaaaacauag

SEQ ID NO: 314086 - RNA, 23 nt, Artificial Sequence
  Synthetic
aaugcaggagcugcaaaacauag

SEQ ID NO: 314087 - RNA, 24 nt, Artificial Sequence
  Synthetic
aaaugcaggagcugcaaaacauag

SEQ ID NO: 314088 - RNA, 18 nt, Artificial Sequence
  Synthetic
uuucauuuuuaaacauag

SEQ ID NO: 314089 - RNA, 19 nt, Artificial Sequence
  Synthetic
uuuucauuuuuaaacauag

SEQ ID NO: 314090 - RNA, 20 nt, Artificial Sequence
  Synthetic
guuuucauuuuuaaacauag

SEQ ID NO: 314091 - RNA, 21 nt, Artificial Sequence
  Synthetic
aguuuucauuuuuaaacauag

SEQ ID NO: 314092 - RNA, 22 nt, Artificial Sequence
  Synthetic
gaguuuucauuuuuaaacauag

SEQ ID NO: 314093 - RNA, 23 nt, Artificial Sequence
  Synthetic
agaguuuucauuuuuaaacauag

SEQ ID NO: 314094 - RNA, 24 nt, Artificial Sequence
  Synthetic
aagaguuuucauuuuuaaacauag

SEQ ID NO: 314095 - RNA, 18 nt, Artificial Sequence
  Synthetic
gguguauuaauaacauag

SEQ ID NO: 314096 - RNA, 19 nt, Artificial Sequence
  Synthetic
ggguguauuaauaacauag

SEQ ID NO: 314097 - RNA, 20 nt, Artificial Sequence
  Synthetic
aggguguauuaauaacauag

SEQ ID NO: 314098 - RNA, 21 nt, Artificial Sequence
  Synthetic
gaggguguauuaauaacauag

SEQ ID NO: 314099 - RNA, 22 nt, Artificial Sequence
  Synthetic
ggaggguguauuaauaacauag

SEQ ID NO: 314100 - RNA, 23 nt, Artificial Sequence
  Synthetic
aggaggguguauuaauaacauag

SEQ ID NO: 314101 - RNA, 24 nt, Artificial Sequence
  Synthetic
uaggaggguguauuaauaacauag

SEQ ID NO: 314102 - RNA, 18 nt, Artificial Sequence
  Synthetic
auaaccaaagccacauag

SEQ ID NO: 314103 - RNA, 19 nt, Artificial Sequence
  Synthetic
uauaaccaaagccacauag

SEQ ID NO: 314104 - RNA, 20 nt, Artificial Sequence
  Synthetic
auauaaccaaagccacauag

SEQ ID NO: 314105 - RNA, 21 nt, Artificial Sequence
  Synthetic
uauauaaccaaagccacauag

SEQ ID NO: 314106 - RNA, 22 nt, Artificial Sequence
  Synthetic
auauauaaccaaagccacauag

SEQ ID NO: 314107 - RNA, 23 nt, Artificial Sequence
  Synthetic
aauauauaaccaaagccacauag

SEQ ID NO: 314108 - RNA, 24 nt, Artificial Sequence
  Synthetic
caauauauaaccaaagccacauag

SEQ ID NO: 314109 - RNA, 18 nt, Artificial Sequence
  Synthetic
ucccuaggcugcacauag

SEQ ID NO: 314110 - RNA, 19 nt, Artificial Sequence
  Synthetic
gucccuaggcugcacauag

SEQ ID NO: 314111 - RNA, 20 nt, Artificial Sequence
  Synthetic
agucccuaggcugcacauag

SEQ ID NO: 314112 - RNA, 21 nt, Artificial Sequence
  Synthetic
uagucccuaggcugcacauag

SEQ ID NO: 314113 - RNA, 22 nt, Artificial Sequence
  Synthetic
cuagucccuaggcugcacauag

SEQ ID NO: 314114 - RNA, 23 nt, Artificial Sequence
  Synthetic
ccuagucccuaggcugcacauag

SEQ ID NO: 314115 - RNA, 24 nt, Artificial Sequence
  Synthetic
accuagucccuaggcugcacauag

SEQ ID NO: 314116 - RNA, 18 nt, Artificial Sequence
  Synthetic
cggagauugaagacauag

SEQ ID NO: 314117 - RNA, 19 nt, Artificial Sequence
  Synthetic
acggagauugaagacauag

SEQ ID NO: 314118 - RNA, 20 nt, Artificial Sequence
  Synthetic
gacggagauugaagacauag

SEQ ID NO: 314119 - RNA, 21 nt, Artificial Sequence
  Synthetic
agacggagauugaagacauag

SEQ ID NO: 314120 - RNA, 22 nt, Artificial Sequence
  Synthetic
uagacggagauugaagacauag

SEQ ID NO: 314121 - RNA, 23 nt, Artificial Sequence
  Synthetic
guagacggagauugaagacauag

SEQ ID NO: 314122 - RNA, 24 nt, Artificial Sequence
  Synthetic
uguagacggagauugaagacauag

SEQ ID NO: 314123 - RNA, 18 nt, Artificial Sequence
  Synthetic
uaugucaguguuacauag

SEQ ID NO: 314124 - RNA, 19 nt, Artificial Sequence
  Synthetic
cuaugucaguguuacauag

SEQ ID NO: 314125 - RNA, 20 nt, Artificial Sequence
  Synthetic
acuaugucaguguuacauag

SEQ ID NO: 314126 - RNA, 21 nt, Artificial Sequence
  Synthetic
uacuaugucaguguuacauag

SEQ ID NO: 314127 - RNA, 22 nt, Artificial Sequence
  Synthetic
cuacuaugucaguguuacauag

SEQ ID NO: 314128 - RNA, 23 nt, Artificial Sequence
  Synthetic
ucuacuaugucaguguuacauag

SEQ ID NO: 314129 - RNA, 24 nt, Artificial Sequence
  Synthetic
uucuacuaugucaguguuacauag

SEQ ID NO: 314130 - RNA, 18 nt, Artificial Sequence
  Synthetic
uaauguguuuuuacauag

SEQ ID NO: 314131 - RNA, 19 nt, Artificial Sequence
  Synthetic
auaauguguuuuuacauag

SEQ ID NO: 314132 - RNA, 20 nt, Artificial Sequence
  Synthetic
aauaauguguuuuuacauag

SEQ ID NO: 314133 - RNA, 21 nt, Artificial Sequence
  Synthetic
aaauaauguguuuuuacauag

SEQ ID NO: 314134 - RNA, 22 nt, Artificial Sequence
  Synthetic
aaaauaauguguuuuuacauag

SEQ ID NO: 314135 - RNA, 23 nt, Artificial Sequence
  Synthetic
aaaaauaauguguuuuuacauag

SEQ ID NO: 314136 - RNA, 24 nt, Artificial Sequence
  Synthetic
aaaaaauaauguguuuuuacauag

SEQ ID NO: 314137 - RNA, 18 nt, Artificial Sequence
  Synthetic
guggcaacagucccauag

SEQ ID NO: 314138 - RNA, 19 nt, Artificial Sequence
  Synthetic
uguggcaacagucccauag

SEQ ID NO: 314139 - RNA, 20 nt, Artificial Sequence
  Synthetic
cuguggcaacagucccauag

SEQ ID NO: 314140 - RNA, 21 nt, Artificial Sequence
  Synthetic
ucuguggcaacagucccauag

SEQ ID NO: 314141 - RNA, 22 nt, Artificial Sequence
  Synthetic
uucuguggcaacagucccauag

SEQ ID NO: 314142 - RNA, 23 nt, Artificial Sequence
  Synthetic
uuucuguggcaacagucccauag

SEQ ID NO: 314143 - RNA, 24 nt, Artificial Sequence
  Synthetic
uuuucuguggcaacagucccauag

SEQ ID NO: 314144 - RNA, 18 nt, Artificial Sequence
  Synthetic
ugguauacagggccauag

SEQ ID NO: 314145 - RNA, 19 nt, Artificial Sequence
  Synthetic
cugguauacagggccauag

SEQ ID NO: 314146 - RNA, 20 nt, Artificial Sequence
  Synthetic
acugguauacagggccauag

SEQ ID NO: 314147 - RNA, 21 nt, Artificial Sequence
  Synthetic
aacugguauacagggccauag

SEQ ID NO: 314148 - RNA, 22 nt, Artificial Sequence
  Synthetic
gaacugguauacagggccauag

SEQ ID NO: 314149 - RNA, 23 nt, Artificial Sequence
  Synthetic
agaacugguauacagggccauag

SEQ ID NO: 314150 - RNA, 24 nt, Artificial Sequence
  Synthetic
aagaacugguauacagggccauag

SEQ ID NO: 314151 - RNA, 18 nt, Artificial Sequence
  Synthetic
auuacauuaaugccauag

SEQ ID NO: 314152 - RNA, 19 nt, Artificial Sequence
  Synthetic
uauuacauuaaugccauag

SEQ ID NO: 314153 - RNA, 20 nt, Artificial Sequence
  Synthetic
auauuacauuaaugccauag

SEQ ID NO: 314154 - RNA, 21 nt, Artificial Sequence
  Synthetic
uauauuacauuaaugccauag

SEQ ID NO: 314155 - RNA, 22 nt, Artificial Sequence
  Synthetic
auauauuacauuaaugccauag

SEQ ID NO: 314156 - RNA, 23 nt, Artificial Sequence
  Synthetic
aauauauuacauuaaugccauag

SEQ ID NO: 314157 - RNA, 24 nt, Artificial Sequence
  Synthetic
uaauauauuacauuaaugccauag

SEQ ID NO: 314158 - RNA, 18 nt, Artificial Sequence
  Synthetic
uuuuagcauaugccauag

SEQ ID NO: 314159 - RNA, 19 nt, Artificial Sequence
  Synthetic
cuuuuagcauaugccauag

SEQ ID NO: 314160 - RNA, 20 nt, Artificial Sequence
  Synthetic
acuuuuagcauaugccauag

SEQ ID NO: 314161 - RNA, 21 nt, Artificial Sequence
  Synthetic
uacuuuuagcauaugccauag

SEQ ID NO: 314162 - RNA, 22 nt, Artificial Sequence
  Synthetic
guacuuuuagcauaugccauag

SEQ ID NO: 314163 - RNA, 23 nt, Artificial Sequence
  Synthetic
uguacuuuuagcauaugccauag

SEQ ID NO: 314164 - RNA, 24 nt, Artificial Sequence
  Synthetic
auguacuuuuagcauaugccauag

SEQ ID NO: 314165 - RNA, 18 nt, Artificial Sequence
  Synthetic
aggagcucuuuuccauag

SEQ ID NO: 314166 - RNA, 19 nt, Artificial Sequence
  Synthetic
uaggagcucuuuuccauag

SEQ ID NO: 314167 - RNA, 20 nt, Artificial Sequence
  Synthetic
cuaggagcucuuuuccauag

SEQ ID NO: 314168 - RNA, 21 nt, Artificial Sequence
  Synthetic
ccuaggagcucuuuuccauag

SEQ ID NO: 314169 - RNA, 22 nt, Artificial Sequence
  Synthetic
uccuaggagcucuuuuccauag

SEQ ID NO: 314170 - RNA, 23 nt, Artificial Sequence
  Synthetic
uuccuaggagcucuuuuccauag

SEQ ID NO: 314171 - RNA, 24 nt, Artificial Sequence
  Synthetic
uuuccuaggagcucuuuuccauag

SEQ ID NO: 314172 - RNA, 18 nt, Artificial Sequence
  Synthetic
augcagaccaaagcauag

SEQ ID NO: 314173 - RNA, 19 nt, Artificial Sequence
  Synthetic
aaugcagaccaaagcauag

SEQ ID NO: 314174 - RNA, 20 nt, Artificial Sequence
  Synthetic
gaaugcagaccaaagcauag

SEQ ID NO: 314175 - RNA, 21 nt, Artificial Sequence
  Synthetic
ggaaugcagaccaaagcauag

SEQ ID NO: 314176 - RNA, 22 nt, Artificial Sequence
  Synthetic
aggaaugcagaccaaagcauag

SEQ ID NO: 314177 - RNA, 23 nt, Artificial Sequence
  Synthetic
caggaaugcagaccaaagcauag

SEQ ID NO: 314178 - RNA, 24 nt, Artificial Sequence
  Synthetic
acaggaaugcagaccaaagcauag

SEQ ID NO: 314179 - RNA, 18 nt, Artificial Sequence
  Synthetic
uugaaacuugaagcauag

SEQ ID NO: 314180 - RNA, 19 nt, Artificial Sequence
  Synthetic
auugaaacuugaagcauag

SEQ ID NO: 314181 - RNA, 20 nt, Artificial Sequence
  Synthetic
cauugaaacuugaagcauag

SEQ ID NO: 314182 - RNA, 21 nt, Artificial Sequence
  Synthetic
gcauugaaacuugaagcauag

SEQ ID NO: 314183 - RNA, 22 nt, Artificial Sequence
  Synthetic
ggcauugaaacuugaagcauag

SEQ ID NO: 314184 - RNA, 23 nt, Artificial Sequence
  Synthetic
aggcauugaaacuugaagcauag

SEQ ID NO: 314185 - RNA, 24 nt, Artificial Sequence
  Synthetic
uaggcauugaaacuugaagcauag

SEQ ID NO: 314186 - RNA, 18 nt, Artificial Sequence
  Synthetic
uauuuguguucagcauag

SEQ ID NO: 314187 - RNA, 19 nt, Artificial Sequence
  Synthetic
auauuuguguucagcauag

SEQ ID NO: 314188 - RNA, 20 nt, Artificial Sequence
  Synthetic
gauauuuguguucagcauag

SEQ ID NO: 314189 - RNA, 21 nt, Artificial Sequence
  Synthetic
agauauuuguguucagcauag

SEQ ID NO: 314190 - RNA, 22 nt, Artificial Sequence
  Synthetic
gagauauuuguguucagcauag

SEQ ID NO: 314191 - RNA, 23 nt, Artificial Sequence
  Synthetic
ggagauauuuguguucagcauag

SEQ ID NO: 314192 - RNA, 24 nt, Artificial Sequence
  Synthetic
aggagauauuuguguucagcauag

SEQ ID NO: 314193 - RNA, 18 nt, Artificial Sequence
  Synthetic
auuaacugaugagcauag

SEQ ID NO: 314194 - RNA, 19 nt, Artificial Sequence
  Synthetic
aauuaacugaugagcauag

SEQ ID NO: 314195 - RNA, 20 nt, Artificial Sequence
  Synthetic
aaauuaacugaugagcauag

SEQ ID NO: 314196 - RNA, 21 nt, Artificial Sequence
  Synthetic
caaauuaacugaugagcauag

SEQ ID NO: 314197 - RNA, 22 nt, Artificial Sequence
  Synthetic
acaaauuaacugaugagcauag

SEQ ID NO: 314198 - RNA, 23 nt, Artificial Sequence
  Synthetic
aacaaauuaacugaugagcauag

SEQ ID NO: 314199 - RNA, 24 nt, Artificial Sequence
  Synthetic
gaacaaauuaacugaugagcauag

SEQ ID NO: 314200 - RNA, 18 nt, Artificial Sequence
  Synthetic
ucccuuuucuuagcauag

SEQ ID NO: 314201 - RNA, 19 nt, Artificial Sequence
  Synthetic
uucccuuuucuuagcauag

SEQ ID NO: 314202 - RNA, 20 nt, Artificial Sequence
  Synthetic
auucccuuuucuuagcauag

SEQ ID NO: 314203 - RNA, 21 nt, Artificial Sequence
  Synthetic
cauucccuuuucuuagcauag

SEQ ID NO: 314204 - RNA, 22 nt, Artificial Sequence
  Synthetic
ccauucccuuuucuuagcauag

SEQ ID NO: 314205 - RNA, 23 nt, Artificial Sequence
  Synthetic
uccauucccuuuucuuagcauag

SEQ ID NO: 314206 - RNA, 24 nt, Artificial Sequence
  Synthetic
uuccauucccuuuucuuagcauag

SEQ ID NO: 314207 - RNA, 18 nt, Artificial Sequence
  Synthetic
uaaaggagcaaaucauag

SEQ ID NO: 314208 - RNA, 19 nt, Artificial Sequence
  Synthetic
uuaaaggagcaaaucauag

SEQ ID NO: 314209 - RNA, 20 nt, Artificial Sequence
  Synthetic
uuuaaaggagcaaaucauag

SEQ ID NO: 314210 - RNA, 21 nt, Artificial Sequence
  Synthetic
uuuuaaaggagcaaaucauag

SEQ ID NO: 314211 - RNA, 22 nt, Artificial Sequence
  Synthetic
guuuuaaaggagcaaaucauag

SEQ ID NO: 314212 - RNA, 23 nt, Artificial Sequence
  Synthetic
aguuuuaaaggagcaaaucauag

SEQ ID NO: 314213 - RNA, 24 nt, Artificial Sequence
  Synthetic
gaguuuuaaaggagcaaaucauag

SEQ ID NO: 314214 - RNA, 18 nt, Artificial Sequence
  Synthetic
aucuaggcaagaucauag

SEQ ID NO: 314215 - RNA, 19 nt, Artificial Sequence
  Synthetic
uaucuaggcaagaucauag

SEQ ID NO: 314216 - RNA, 20 nt, Artificial Sequence
  Synthetic
uuaucuaggcaagaucauag

SEQ ID NO: 314217 - RNA, 21 nt, Artificial Sequence
  Synthetic
auuaucuaggcaagaucauag

SEQ ID NO: 314218 - RNA, 22 nt, Artificial Sequence
  Synthetic
gauuaucuaggcaagaucauag

SEQ ID NO: 314219 - RNA, 23 nt, Artificial Sequence
  Synthetic
agauuaucuaggcaagaucauag

SEQ ID NO: 314220 - RNA, 24 nt, Artificial Sequence
  Synthetic
cagauuaucuaggcaagaucauag

SEQ ID NO: 314221 - RNA, 18 nt, Artificial Sequence
  Synthetic
cauuuuuaaauaucauag

SEQ ID NO: 314222 - RNA, 19 nt, Artificial Sequence
  Synthetic
ucauuuuuaaauaucauag

SEQ ID NO: 314223 - RNA, 20 nt, Artificial Sequence
  Synthetic
aucauuuuuaaauaucauag

SEQ ID NO: 314224 - RNA, 21 nt, Artificial Sequence
  Synthetic
gaucauuuuuaaauaucauag

SEQ ID NO: 314225 - RNA, 22 nt, Artificial Sequence
  Synthetic
agaucauuuuuaaauaucauag

SEQ ID NO: 314226 - RNA, 23 nt, Artificial Sequence
  Synthetic
gagaucauuuuuaaauaucauag

SEQ ID NO: 314227 - RNA, 24 nt, Artificial Sequence
  Synthetic
ugagaucauuuuuaaauaucauag

SEQ ID NO: 314228 - RNA, 18 nt, Artificial Sequence
  Synthetic
uuguggaacauaucauag

SEQ ID NO: 314229 - RNA, 19 nt, Artificial Sequence
  Synthetic
auuguggaacauaucauag

SEQ ID NO: 314230 - RNA, 20 nt, Artificial Sequence
  Synthetic
aauuguggaacauaucauag

SEQ ID NO: 314231 - RNA, 21 nt, Artificial Sequence
  Synthetic
uaauuguggaacauaucauag

SEQ ID NO: 314232 - RNA, 22 nt, Artificial Sequence
  Synthetic
guaauuguggaacauaucauag

SEQ ID NO: 314233 - RNA, 23 nt, Artificial Sequence
  Synthetic
aguaauuguggaacauaucauag

SEQ ID NO: 314234 - RNA, 24 nt, Artificial Sequence
  Synthetic
aaguaauuguggaacauaucauag

SEQ ID NO: 314235 - RNA, 18 nt, Artificial Sequence
  Synthetic
gcauauucucacucauag

SEQ ID NO: 314236 - RNA, 19 nt, Artificial Sequence
  Synthetic
cgcauauucucacucauag

SEQ ID NO: 314237 - RNA, 20 nt, Artificial Sequence
  Synthetic
ccgcauauucucacucauag

SEQ ID NO: 314238 - RNA, 21 nt, Artificial Sequence
  Synthetic
accgcauauucucacucauag

SEQ ID NO: 314239 - RNA, 22 nt, Artificial Sequence
  Synthetic
caccgcauauucucacucauag

SEQ ID NO: 314240 - RNA, 23 nt, Artificial Sequence
  Synthetic
acaccgcauauucucacucauag

SEQ ID NO: 314241 - RNA, 24 nt, Artificial Sequence
  Synthetic
aacaccgcauauucucacucauag

SEQ ID NO: 314242 - RNA, 19 nt, Artificial Sequence
  Synthetic
ugcauauucucacucauag

SEQ ID NO: 314243 - RNA, 20 nt, Artificial Sequence
  Synthetic
cugcauauucucacucauag

SEQ ID NO: 314244 - RNA, 21 nt, Artificial Sequence
  Synthetic
acugcauauucucacucauag

SEQ ID NO: 314245 - RNA, 22 nt, Artificial Sequence
  Synthetic
cacugcauauucucacucauag

SEQ ID NO: 314246 - RNA, 23 nt, Artificial Sequence
  Synthetic
acacugcauauucucacucauag

SEQ ID NO: 314247 - RNA, 24 nt, Artificial Sequence
  Synthetic
aacacugcauauucucacucauag

SEQ ID NO: 314248 - RNA, 18 nt, Artificial Sequence
  Synthetic
gcauguucucacucauag

SEQ ID NO: 314249 - RNA, 19 nt, Artificial Sequence
  Synthetic
cgcauguucucacucauag

SEQ ID NO: 314250 - RNA, 20 nt, Artificial Sequence
  Synthetic
ccgcauguucucacucauag

SEQ ID NO: 314251 - RNA, 21 nt, Artificial Sequence
  Synthetic
accgcauguucucacucauag

SEQ ID NO: 314252 - RNA, 22 nt, Artificial Sequence
  Synthetic
caccgcauguucucacucauag

SEQ ID NO: 314253 - RNA, 23 nt, Artificial Sequence
  Synthetic
acaccgcauguucucacucauag

SEQ ID NO: 314254 - RNA, 24 nt, Artificial Sequence
  Synthetic
aacaccgcauguucucacucauag

SEQ ID NO: 314255 - RNA, 18 nt, Artificial Sequence
  Synthetic
gggagcuuuuacucauag

SEQ ID NO: 314256 - RNA, 19 nt, Artificial Sequence
  Synthetic
cgggagcuuuuacucauag

SEQ ID NO: 314257 - RNA, 20 nt, Artificial Sequence
  Synthetic
ccgggagcuuuuacucauag

SEQ ID NO: 314258 - RNA, 21 nt, Artificial Sequence
  Synthetic
uccgggagcuuuuacucauag

SEQ ID NO: 314259 - RNA, 22 nt, Artificial Sequence
  Synthetic
cuccgggagcuuuuacucauag

SEQ ID NO: 314260 - RNA, 23 nt, Artificial Sequence
  Synthetic
ccuccgggagcuuuuacucauag

SEQ ID NO: 314261 - RNA, 24 nt, Artificial Sequence
  Synthetic
gccuccgggagcuuuuacucauag

SEQ ID NO: 314262 - RNA, 18 nt, Artificial Sequence
  Synthetic
aaauguggauccucauag

SEQ ID NO: 314263 - RNA, 19 nt, Artificial Sequence
  Synthetic
aaaauguggauccucauag

SEQ ID NO: 314264 - RNA, 20 nt, Artificial Sequence
  Synthetic
aaaaauguggauccucauag

SEQ ID NO: 314265 - RNA, 21 nt, Artificial Sequence
  Synthetic
aaaaaauguggauccucauag

SEQ ID NO: 314266 - RNA, 22 nt, Artificial Sequence
  Synthetic
aaaaaaauguggauccucauag

SEQ ID NO: 314267 - RNA, 23 nt, Artificial Sequence
  Synthetic
aaaaaaaauguggauccucauag

SEQ ID NO: 314268 - RNA, 24 nt, Artificial Sequence
  Synthetic
gaaaaaaaauguggauccucauag

SEQ ID NO: 314269 - RNA, 18 nt, Artificial Sequence
  Synthetic
acugagaaguccucauag

SEQ ID NO: 314270 - RNA, 19 nt, Artificial Sequence
  Synthetic
uacugagaaguccucauag

SEQ ID NO: 314271 - RNA, 20 nt, Artificial Sequence
  Synthetic
uuacugagaaguccucauag

SEQ ID NO: 314272 - RNA, 21 nt, Artificial Sequence
  Synthetic
guuacugagaaguccucauag

SEQ ID NO: 314273 - RNA, 22 nt, Artificial Sequence
  Synthetic
gguuacugagaaguccucauag

SEQ ID NO: 314274 - RNA, 23 nt, Artificial Sequence
  Synthetic
ggguuacugagaaguccucauag

SEQ ID NO: 314275 - RNA, 24 nt, Artificial Sequence
  Synthetic
aggguuacugagaaguccucauag

SEQ ID NO: 314276 - RNA, 18 nt, Artificial Sequence
  Synthetic
agauauaguuucucauag

SEQ ID NO: 314277 - RNA, 19 nt, Artificial Sequence
  Synthetic
uagauauaguuucucauag

SEQ ID NO: 314278 - RNA, 20 nt, Artificial Sequence
  Synthetic
guagauauaguuucucauag

SEQ ID NO: 314279 - RNA, 21 nt, Artificial Sequence
  Synthetic
aguagauauaguuucucauag

SEQ ID NO: 314280 - RNA, 22 nt, Artificial Sequence
  Synthetic
aaguagauauaguuucucauag

SEQ ID NO: 314281 - RNA, 23 nt, Artificial Sequence
  Synthetic
uaaguagauauaguuucucauag

SEQ ID NO: 314282 - RNA, 24 nt, Artificial Sequence
  Synthetic
guaaguagauauaguuucucauag

SEQ ID NO: 314283 - RNA, 18 nt, Artificial Sequence
  Synthetic
gcauauucucauucauag

SEQ ID NO: 314284 - RNA, 19 nt, Artificial Sequence
  Synthetic
cgcauauucucauucauag

SEQ ID NO: 314285 - RNA, 20 nt, Artificial Sequence
  Synthetic
ccgcauauucucauucauag

SEQ ID NO: 314286 - RNA, 21 nt, Artificial Sequence
  Synthetic
accgcauauucucauucauag

SEQ ID NO: 314287 - RNA, 22 nt, Artificial Sequence
  Synthetic
caccgcauauucucauucauag

SEQ ID NO: 314288 - RNA, 23 nt, Artificial Sequence
  Synthetic
acaccgcauauucucauucauag

SEQ ID NO: 314289 - RNA, 24 nt, Artificial Sequence
  Synthetic
aacaccgcauauucucauucauag

SEQ ID NO: 314290 - RNA, 18 nt, Artificial Sequence
  Synthetic
cagaauaaguguucauag

SEQ ID NO: 314291 - RNA, 19 nt, Artificial Sequence
  Synthetic
ccagaauaaguguucauag

SEQ ID NO: 314292 - RNA, 20 nt, Artificial Sequence
  Synthetic
uccagaauaaguguucauag

SEQ ID NO: 314293 - RNA, 21 nt, Artificial Sequence
  Synthetic
uuccagaauaaguguucauag

SEQ ID NO: 314294 - RNA, 22 nt, Artificial Sequence
  Synthetic
cuuccagaauaaguguucauag

SEQ ID NO: 314295 - RNA, 23 nt, Artificial Sequence
  Synthetic
ucuuccagaauaaguguucauag

SEQ ID NO: 314296 - RNA, 24 nt, Artificial Sequence
  Synthetic
uucuuccagaauaaguguucauag

SEQ ID NO: 314297 - RNA, 18 nt, Artificial Sequence
  Synthetic
cugcuuuuacuuucauag

SEQ ID NO: 314298 - RNA, 19 nt, Artificial Sequence
  Synthetic
ucugcuuuuacuuucauag

SEQ ID NO: 314299 - RNA, 20 nt, Artificial Sequence
  Synthetic
uucugcuuuuacuuucauag

SEQ ID NO: 314300 - RNA, 21 nt, Artificial Sequence
  Synthetic
cuucugcuuuuacuuucauag

SEQ ID NO: 314301 - RNA, 22 nt, Artificial Sequence
  Synthetic
ccuucugcuuuuacuuucauag

SEQ ID NO: 314302 - RNA, 23 nt, Artificial Sequence
  Synthetic
uccuucugcuuuuacuuucauag

SEQ ID NO: 314303 - RNA, 24 nt, Artificial Sequence
  Synthetic
auccuucugcuuuuacuuucauag

SEQ ID NO: 314304 - RNA, 18 nt, Artificial Sequence
  Synthetic
uaaacaguugaaagauag

SEQ ID NO: 314305 - RNA, 19 nt, Artificial Sequence
  Synthetic
uuaaacaguugaaagauag

SEQ ID NO: 314306 - RNA, 20 nt, Artificial Sequence
  Synthetic
auuaaacaguugaaagauag

SEQ ID NO: 314307 - RNA, 21 nt, Artificial Sequence
  Synthetic
cauuaaacaguugaaagauag

SEQ ID NO: 314308 - RNA, 22 nt, Artificial Sequence
  Synthetic
ucauuaaacaguugaaagauag

SEQ ID NO: 314309 - RNA, 23 nt, Artificial Sequence
  Synthetic
gucauuaaacaguugaaagauag

SEQ ID NO: 314310 - RNA, 24 nt, Artificial Sequence
  Synthetic
ugucauuaaacaguugaaagauag

SEQ ID NO: 314311 - RNA, 18 nt, Artificial Sequence
  Synthetic
auuuucuuugaaagauag

SEQ ID NO: 314312 - RNA, 19 nt, Artificial Sequence
  Synthetic
gauuuucuuugaaagauag

SEQ ID NO: 314313 - RNA, 20 nt, Artificial Sequence
  Synthetic
agauuuucuuugaaagauag

SEQ ID NO: 314314 - RNA, 21 nt, Artificial Sequence
  Synthetic
gagauuuucuuugaaagauag

SEQ ID NO: 314315 - RNA, 22 nt, Artificial Sequence
  Synthetic
agagauuuucuuugaaagauag

SEQ ID NO: 314316 - RNA, 23 nt, Artificial Sequence
  Synthetic
aagagauuuucuuugaaagauag

SEQ ID NO: 314317 - RNA, 24 nt, Artificial Sequence
  Synthetic
aaagagauuuucuuugaaagauag

SEQ ID NO: 314318 - RNA, 18 nt, Artificial Sequence
  Synthetic
aauaugaauuuaagauag

SEQ ID NO: 314319 - RNA, 19 nt, Artificial Sequence
  Synthetic
caauaugaauuuaagauag

SEQ ID NO: 314320 - RNA, 20 nt, Artificial Sequence
  Synthetic
ccaauaugaauuuaagauag

SEQ ID NO: 314321 - RNA, 21 nt, Artificial Sequence
  Synthetic
accaauaugaauuuaagauag

SEQ ID NO: 314322 - RNA, 22 nt, Artificial Sequence
  Synthetic
caccaauaugaauuuaagauag

SEQ ID NO: 314323 - RNA, 23 nt, Artificial Sequence
  Synthetic
gcaccaauaugaauuuaagauag

SEQ ID NO: 314324 - RNA, 24 nt, Artificial Sequence
  Synthetic
agcaccaauaugaauuuaagauag

SEQ ID NO: 314325 - RNA, 18 nt, Artificial Sequence
  Synthetic
aagauuuucaacagauag

SEQ ID NO: 314326 - RNA, 19 nt, Artificial Sequence
  Synthetic
uaagauuuucaacagauag

SEQ ID NO: 314327 - RNA, 20 nt, Artificial Sequence
  Synthetic
auaagauuuucaacagauag

SEQ ID NO: 314328 - RNA, 21 nt, Artificial Sequence
  Synthetic
aauaagauuuucaacagauag

SEQ ID NO: 314329 - RNA, 22 nt, Artificial Sequence
  Synthetic
gaauaagauuuucaacagauag

SEQ ID NO: 314330 - RNA, 23 nt, Artificial Sequence
  Synthetic
ggaauaagauuuucaacagauag

SEQ ID NO: 314331 - RNA, 24 nt, Artificial Sequence
  Synthetic
gggaauaagauuuucaacagauag

SEQ ID NO: 314332 - RNA, 18 nt, Artificial Sequence
  Synthetic
auaagaucacacagauag

SEQ ID NO: 314333 - RNA, 19 nt, Artificial Sequence
  Synthetic
cauaagaucacacagauag

SEQ ID NO: 314334 - RNA, 20 nt, Artificial Sequence
  Synthetic
gcauaagaucacacagauag

SEQ ID NO: 314335 - RNA, 21 nt, Artificial Sequence
  Synthetic
ugcauaagaucacacagauag

SEQ ID NO: 314336 - RNA, 22 nt, Artificial Sequence
  Synthetic
uugcauaagaucacacagauag

SEQ ID NO: 314337 - RNA, 23 nt, Artificial Sequence
  Synthetic
uuugcauaagaucacacagauag

SEQ ID NO: 314338 - RNA, 24 nt, Artificial Sequence
  Synthetic
uuuugcauaagaucacacagauag

SEQ ID NO: 314339 - RNA, 18 nt, Artificial Sequence
  Synthetic
aagaggauauccagauag

SEQ ID NO: 314340 - RNA, 19 nt, Artificial Sequence
  Synthetic
gaagaggauauccagauag

SEQ ID NO: 314341 - RNA, 20 nt, Artificial Sequence
  Synthetic
agaagaggauauccagauag

SEQ ID NO: 314342 - RNA, 21 nt, Artificial Sequence
  Synthetic
cagaagaggauauccagauag

SEQ ID NO: 314343 - RNA, 22 nt, Artificial Sequence
  Synthetic
ccagaagaggauauccagauag

SEQ ID NO: 314344 - RNA, 23 nt, Artificial Sequence
  Synthetic
cccagaagaggauauccagauag

SEQ ID NO: 314345 - RNA, 24 nt, Artificial Sequence
  Synthetic
ucccagaagaggauauccagauag

SEQ ID NO: 314346 - RNA, 18 nt, Artificial Sequence
  Synthetic
uugcuuuuaggcagauag

SEQ ID NO: 314347 - RNA, 19 nt, Artificial Sequence
  Synthetic
uuugcuuuuaggcagauag

SEQ ID NO: 314348 - RNA, 20 nt, Artificial Sequence
  Synthetic
cuuugcuuuuaggcagauag

SEQ ID NO: 314349 - RNA, 21 nt, Artificial Sequence
  Synthetic
ucuuugcuuuuaggcagauag

SEQ ID NO: 314350 - RNA, 22 nt, Artificial Sequence
  Synthetic
aucuuugcuuuuaggcagauag

SEQ ID NO: 314351 - RNA, 23 nt, Artificial Sequence
  Synthetic
aaucuuugcuuuuaggcagauag

SEQ ID NO: 314352 - RNA, 24 nt, Artificial Sequence
  Synthetic
aaaucuuugcuuuuaggcagauag

SEQ ID NO: 314353 - RNA, 18 nt, Artificial Sequence
  Synthetic
agugccaacggcagauag

SEQ ID NO: 314354 - RNA, 19 nt, Artificial Sequence
  Synthetic
gagugccaacggcagauag

SEQ ID NO: 314355 - RNA, 20 nt, Artificial Sequence
  Synthetic
ugagugccaacggcagauag

SEQ ID NO: 314356 - RNA, 21 nt, Artificial Sequence
  Synthetic
augagugccaacggcagauag

SEQ ID NO: 314357 - RNA, 22 nt, Artificial Sequence
  Synthetic
gaugagugccaacggcagauag

SEQ ID NO: 314358 - RNA, 23 nt, Artificial Sequence
  Synthetic
ggaugagugccaacggcagauag

SEQ ID NO: 314359 - RNA, 24 nt, Artificial Sequence
  Synthetic
aggaugagugccaacggcagauag

SEQ ID NO: 314360 - RNA, 18 nt, Artificial Sequence
  Synthetic
gugaaaaaaaucagauag

SEQ ID NO: 314361 - RNA, 19 nt, Artificial Sequence
  Synthetic
ugugaaaaaaaucagauag

SEQ ID NO: 314362 - RNA, 20 nt, Artificial Sequence
  Synthetic
gugugaaaaaaaucagauag

SEQ ID NO: 314363 - RNA, 21 nt, Artificial Sequence
  Synthetic
agugugaaaaaaaucagauag

SEQ ID NO: 314364 - RNA, 22 nt, Artificial Sequence
  Synthetic
uagugugaaaaaaaucagauag

SEQ ID NO: 314365 - RNA, 23 nt, Artificial Sequence
  Synthetic
uuagugugaaaaaaaucagauag

SEQ ID NO: 314366 - RNA, 24 nt, Artificial Sequence
  Synthetic
auuagugugaaaaaaaucagauag

SEQ ID NO: 314367 - RNA, 18 nt, Artificial Sequence
  Synthetic
ggcauuguauagagauag

SEQ ID NO: 314368 - RNA, 19 nt, Artificial Sequence
  Synthetic
uggcauuguauagagauag

SEQ ID NO: 314369 - RNA, 20 nt, Artificial Sequence
  Synthetic
auggcauuguauagagauag

SEQ ID NO: 314370 - RNA, 21 nt, Artificial Sequence
  Synthetic
aauggcauuguauagagauag

SEQ ID NO: 314371 - RNA, 22 nt, Artificial Sequence
  Synthetic
aaauggcauuguauagagauag

SEQ ID NO: 314372 - RNA, 23 nt, Artificial Sequence
  Synthetic
aaaauggcauuguauagagauag

SEQ ID NO: 314373 - RNA, 24 nt, Artificial Sequence
  Synthetic
uaaaauggcauuguauagagauag

SEQ ID NO: 314374 - RNA, 18 nt, Artificial Sequence
  Synthetic
ugaguaacaaggagauag

SEQ ID NO: 314375 - RNA, 19 nt, Artificial Sequence
  Synthetic
augaguaacaaggagauag

SEQ ID NO: 314376 - RNA, 20 nt, Artificial Sequence
  Synthetic
caugaguaacaaggagauag

SEQ ID NO: 314377 - RNA, 21 nt, Artificial Sequence
  Synthetic
gcaugaguaacaaggagauag

SEQ ID NO: 314378 - RNA, 22 nt, Artificial Sequence
  Synthetic
ggcaugaguaacaaggagauag

SEQ ID NO: 314379 - RNA, 23 nt, Artificial Sequence
  Synthetic
gggcaugaguaacaaggagauag

SEQ ID NO: 314380 - RNA, 24 nt, Artificial Sequence
  Synthetic
ugggcaugaguaacaaggagauag

SEQ ID NO: 314381 - RNA, 18 nt, Artificial Sequence
  Synthetic
aauaagucagggagauag

SEQ ID NO: 314382 - RNA, 19 nt, Artificial Sequence
  Synthetic
caauaagucagggagauag

SEQ ID NO: 314383 - RNA, 20 nt, Artificial Sequence
  Synthetic
ccaauaagucagggagauag

SEQ ID NO: 314384 - RNA, 21 nt, Artificial Sequence
  Synthetic
cccaauaagucagggagauag

SEQ ID NO: 314385 - RNA, 22 nt, Artificial Sequence
  Synthetic
ccccaauaagucagggagauag

SEQ ID NO: 314386 - RNA, 23 nt, Artificial Sequence
  Synthetic
cccccaauaagucagggagauag

SEQ ID NO: 314387 - RNA, 24 nt, Artificial Sequence
  Synthetic
acccccaauaagucagggagauag

SEQ ID NO: 314388 - RNA, 18 nt, Artificial Sequence
  Synthetic
guguggacucugagauag

SEQ ID NO: 314389 - RNA, 19 nt, Artificial Sequence
  Synthetic
gguguggacucugagauag

SEQ ID NO: 314390 - RNA, 20 nt, Artificial Sequence
  Synthetic
agguguggacucugagauag

SEQ ID NO: 314391 - RNA, 21 nt, Artificial Sequence
  Synthetic
uagguguggacucugagauag

SEQ ID NO: 314392 - RNA, 22 nt, Artificial Sequence
  Synthetic
guagguguggacucugagauag

SEQ ID NO: 314393 - RNA, 23 nt, Artificial Sequence
  Synthetic
uguagguguggacucugagauag

SEQ ID NO: 314394 - RNA, 24 nt, Artificial Sequence
  Synthetic
auguagguguggacucugagauag

SEQ ID NO: 314395 - RNA, 18 nt, Artificial Sequence
  Synthetic
aacacaauauugagauag

SEQ ID NO: 314396 - RNA, 19 nt, Artificial Sequence
  Synthetic
aaacacaauauugagauag

SEQ ID NO: 314397 - RNA, 20 nt, Artificial Sequence
  Synthetic
uaaacacaauauugagauag

SEQ ID NO: 314398 - RNA, 21 nt, Artificial Sequence
  Synthetic
auaaacacaauauugagauag

SEQ ID NO: 314399 - RNA, 22 nt, Artificial Sequence
  Synthetic
aauaaacacaauauugagauag

SEQ ID NO: 314400 - RNA, 23 nt, Artificial Sequence
  Synthetic
uaauaaacacaauauugagauag

SEQ ID NO: 314401 - RNA, 24 nt, Artificial Sequence
  Synthetic
cuaauaaacacaauauugagauag

SEQ ID NO: 314402 - RNA, 18 nt, Artificial Sequence
  Synthetic
agauagauagauagauag

SEQ ID NO: 314403 - RNA, 19 nt, Artificial Sequence
  Synthetic
uagauagauagauagauag

SEQ ID NO: 314404 - RNA, 20 nt, Artificial Sequence
  Synthetic
auagauagauagauagauag

SEQ ID NO: 314405 - RNA, 21 nt, Artificial Sequence
  Synthetic
gauagauagauagauagauag

SEQ ID NO: 314406 - RNA, 22 nt, Artificial Sequence
  Synthetic
agauagauagauagauagauag

SEQ ID NO: 314407 - RNA, 23 nt, Artificial Sequence
  Synthetic
uagauagauagauagauagauag

SEQ ID NO: 314408 - RNA, 24 nt, Artificial Sequence
  Synthetic
auagauagauagauagauagauag

SEQ ID NO: 314409 - RNA, 18 nt, Artificial Sequence
  Synthetic
augagaaaggaaggauag

SEQ ID NO: 314410 - RNA, 19 nt, Artificial Sequence
  Synthetic
aaugagaaaggaaggauag

SEQ ID NO: 314411 - RNA, 20 nt, Artificial Sequence
  Synthetic
aaaugagaaaggaaggauag

SEQ ID NO: 314412 - RNA, 21 nt, Artificial Sequence
  Synthetic
aaaaugagaaaggaaggauag

SEQ ID NO: 314413 - RNA, 22 nt, Artificial Sequence
  Synthetic
aaaaaugagaaaggaaggauag

SEQ ID NO: 314414 - RNA, 23 nt, Artificial Sequence
  Synthetic
gaaaaaugagaaaggaaggauag

SEQ ID NO: 314415 - RNA, 24 nt, Artificial Sequence
  Synthetic
ugaaaaaugagaaaggaaggauag

SEQ ID NO: 314416 - RNA, 18 nt, Artificial Sequence
  Synthetic
uuucuaguuuaaggauag

SEQ ID NO: 314417 - RNA, 19 nt, Artificial Sequence
  Synthetic
auuucuaguuuaaggauag

SEQ ID NO: 314418 - RNA, 20 nt, Artificial Sequence
  Synthetic
cauuucuaguuuaaggauag

SEQ ID NO: 314419 - RNA, 21 nt, Artificial Sequence
  Synthetic
gcauuucuaguuuaaggauag

SEQ ID NO: 314420 - RNA, 22 nt, Artificial Sequence
  Synthetic
ggcauuucuaguuuaaggauag

SEQ ID NO: 314421 - RNA, 23 nt, Artificial Sequence
  Synthetic
cggcauuucuaguuuaaggauag

SEQ ID NO: 314422 - RNA, 24 nt, Artificial Sequence
  Synthetic
gcggcauuucuaguuuaaggauag

SEQ ID NO: 314423 - RNA, 18 nt, Artificial Sequence
  Synthetic
cuaauuuuuucaggauag

SEQ ID NO: 314424 - RNA, 19 nt, Artificial Sequence
  Synthetic
ucuaauuuuuucaggauag

SEQ ID NO: 314425 - RNA, 20 nt, Artificial Sequence
  Synthetic
uucuaauuuuuucaggauag

SEQ ID NO: 314426 - RNA, 21 nt, Artificial Sequence
  Synthetic
auucuaauuuuuucaggauag

SEQ ID NO: 314427 - RNA, 22 nt, Artificial Sequence
  Synthetic
uauucuaauuuuuucaggauag

SEQ ID NO: 314428 - RNA, 23 nt, Artificial Sequence
  Synthetic
uuauucuaauuuuuucaggauag

SEQ ID NO: 314429 - RNA, 24 nt, Artificial Sequence
  Synthetic
auuauucuaauuuuuucaggauag

SEQ ID NO: 314430 - RNA, 18 nt, Artificial Sequence
  Synthetic
uuggaugcugcgggauag

SEQ ID NO: 314431 - RNA, 19 nt, Artificial Sequence
  Synthetic
uuuggaugcugcgggauag

SEQ ID NO: 314432 - RNA, 20 nt, Artificial Sequence
  Synthetic
auuuggaugcugcgggauag

SEQ ID NO: 314433 - RNA, 21 nt, Artificial Sequence
  Synthetic
aauuuggaugcugcgggauag

SEQ ID NO: 314434 - RNA, 22 nt, Artificial Sequence
  Synthetic
gaauuuggaugcugcgggauag

SEQ ID NO: 314435 - RNA, 23 nt, Artificial Sequence
  Synthetic
ggaauuuggaugcugcgggauag

SEQ ID NO: 314436 - RNA, 24 nt, Artificial Sequence
  Synthetic
aggaauuuggaugcugcgggauag

SEQ ID NO: 314437 - RNA, 18 nt, Artificial Sequence
  Synthetic
cuuagaaggagaugauag

SEQ ID NO: 314438 - RNA, 19 nt, Artificial Sequence
  Synthetic
gcuuagaaggagaugauag

SEQ ID NO: 314439 - RNA, 20 nt, Artificial Sequence
  Synthetic
ugcuuagaaggagaugauag

SEQ ID NO: 314440 - RNA, 21 nt, Artificial Sequence
  Synthetic
augcuuagaaggagaugauag

SEQ ID NO: 314441 - RNA, 22 nt, Artificial Sequence
  Synthetic
aaugcuuagaaggagaugauag

SEQ ID NO: 314442 - RNA, 23 nt, Artificial Sequence
  Synthetic
gaaugcuuagaaggagaugauag

SEQ ID NO: 314443 - RNA, 24 nt, Artificial Sequence
  Synthetic
agaaugcuuagaaggagaugauag

SEQ ID NO: 314444 - RNA, 18 nt, Artificial Sequence
  Synthetic
ugacaauagugaugauag

SEQ ID NO: 314445 - RNA, 19 nt, Artificial Sequence
  Synthetic
augacaauagugaugauag

SEQ ID NO: 314446 - RNA, 20 nt, Artificial Sequence
  Synthetic
gaugacaauagugaugauag

SEQ ID NO: 314447 - RNA, 21 nt, Artificial Sequence
  Synthetic
agaugacaauagugaugauag

SEQ ID NO: 314448 - RNA, 22 nt, Artificial Sequence
  Synthetic
aagaugacaauagugaugauag

SEQ ID NO: 314449 - RNA, 23 nt, Artificial Sequence
  Synthetic
aaagaugacaauagugaugauag

SEQ ID NO: 314450 - RNA, 24 nt, Artificial Sequence
  Synthetic
aaaagaugacaauagugaugauag

SEQ ID NO: 314451 - RNA, 18 nt, Artificial Sequence
  Synthetic
uagaaguaaaccugauag

SEQ ID NO: 314452 - RNA, 19 nt, Artificial Sequence
  Synthetic
guagaaguaaaccugauag

SEQ ID NO: 314453 - RNA, 20 nt, Artificial Sequence
  Synthetic
uguagaaguaaaccugauag

SEQ ID NO: 314454 - RNA, 21 nt, Artificial Sequence
  Synthetic
uuguagaaguaaaccugauag

SEQ ID NO: 314455 - RNA, 22 nt, Artificial Sequence
  Synthetic
cuuguagaaguaaaccugauag

SEQ ID NO: 314456 - RNA, 23 nt, Artificial Sequence
  Synthetic
gcuuguagaaguaaaccugauag

SEQ ID NO: 314457 - RNA, 24 nt, Artificial Sequence
  Synthetic
ggcuuguagaaguaaaccugauag

SEQ ID NO: 314458 - RNA, 18 nt, Artificial Sequence
  Synthetic
aaauguauaggcugauag

SEQ ID NO: 314459 - RNA, 19 nt, Artificial Sequence
  Synthetic
aaaauguauaggcugauag

SEQ ID NO: 314460 - RNA, 20 nt, Artificial Sequence
  Synthetic
aaaaauguauaggcugauag

SEQ ID NO: 314461 - RNA, 21 nt, Artificial Sequence
  Synthetic
gaaaaauguauaggcugauag

SEQ ID NO: 314462 - RNA, 22 nt, Artificial Sequence
  Synthetic
ugaaaaauguauaggcugauag

SEQ ID NO: 314463 - RNA, 23 nt, Artificial Sequence
  Synthetic
augaaaaauguauaggcugauag

SEQ ID NO: 314464 - RNA, 24 nt, Artificial Sequence
  Synthetic
uaugaaaaauguauaggcugauag

SEQ ID NO: 314465 - RNA, 18 nt, Artificial Sequence
  Synthetic
auccacuaaaagugauag

SEQ ID NO: 314466 - RNA, 19 nt, Artificial Sequence
  Synthetic
aauccacuaaaagugauag

SEQ ID NO: 314467 - RNA, 20 nt, Artificial Sequence
  Synthetic
aaauccacuaaaagugauag

SEQ ID NO: 314468 - RNA, 21 nt, Artificial Sequence
  Synthetic
aaaauccacuaaaagugauag

SEQ ID NO: 314469 - RNA, 22 nt, Artificial Sequence
  Synthetic
aaaaauccacuaaaagugauag

SEQ ID NO: 314470 - RNA, 23 nt, Artificial Sequence
  Synthetic
uaaaaauccacuaaaagugauag

SEQ ID NO: 314471 - RNA, 24 nt, Artificial Sequence
  Synthetic
auaaaaauccacuaaaagugauag

SEQ ID NO: 314472 - RNA, 18 nt, Artificial Sequence
  Synthetic
aaagagcauucgugauag

SEQ ID NO: 314473 - RNA, 19 nt, Artificial Sequence
  Synthetic
aaaagagcauucgugauag

SEQ ID NO: 314474 - RNA, 20 nt, Artificial Sequence
  Synthetic
gaaaagagcauucgugauag

SEQ ID NO: 314475 - RNA, 21 nt, Artificial Sequence
  Synthetic
ugaaaagagcauucgugauag

SEQ ID NO: 314476 - RNA, 22 nt, Artificial Sequence
  Synthetic
uugaaaagagcauucgugauag

SEQ ID NO: 314477 - RNA, 23 nt, Artificial Sequence
  Synthetic
guugaaaagagcauucgugauag

SEQ ID NO: 314478 - RNA, 24 nt, Artificial Sequence
  Synthetic
gguugaaaagagcauucgugauag

SEQ ID NO: 314479 - RNA, 18 nt, Artificial Sequence
  Synthetic
uagucauuucugugauag

SEQ ID NO: 314480 - RNA, 19 nt, Artificial Sequence
  Synthetic
uuagucauuucugugauag

SEQ ID NO: 314481 - RNA, 20 nt, Artificial Sequence
  Synthetic
auuagucauuucugugauag

SEQ ID NO: 314482 - RNA, 21 nt, Artificial Sequence
  Synthetic
uauuagucauuucugugauag

SEQ ID NO: 314483 - RNA, 22 nt, Artificial Sequence
  Synthetic
auauuagucauuucugugauag

SEQ ID NO: 314484 - RNA, 23 nt, Artificial Sequence
  Synthetic
cauauuagucauuucugugauag

SEQ ID NO: 314485 - RNA, 24 nt, Artificial Sequence
  Synthetic
ucauauuagucauuucugugauag

SEQ ID NO: 314486 - RNA, 18 nt, Artificial Sequence
  Synthetic
aucagaugucaaauauag

SEQ ID NO: 314487 - RNA, 19 nt, Artificial Sequence
  Synthetic
caucagaugucaaauauag

SEQ ID NO: 314488 - RNA, 20 nt, Artificial Sequence
  Synthetic
ccaucagaugucaaauauag

SEQ ID NO: 314489 - RNA, 21 nt, Artificial Sequence
  Synthetic
cccaucagaugucaaauauag

SEQ ID NO: 314490 - RNA, 22 nt, Artificial Sequence
  Synthetic
ucccaucagaugucaaauauag

SEQ ID NO: 314491 - RNA, 23 nt, Artificial Sequence
  Synthetic
uucccaucagaugucaaauauag

SEQ ID NO: 314492 - RNA, 24 nt, Artificial Sequence
  Synthetic
cuucccaucagaugucaaauauag

SEQ ID NO: 314493 - RNA, 18 nt, Artificial Sequence
  Synthetic
caccccucagaaauauag

SEQ ID NO: 314494 - RNA, 19 nt, Artificial Sequence
  Synthetic
ccaccccucagaaauauag

SEQ ID NO: 314495 - RNA, 20 nt, Artificial Sequence
  Synthetic
uccaccccucagaaauauag

SEQ ID NO: 314496 - RNA, 21 nt, Artificial Sequence
  Synthetic
uuccaccccucagaaauauag

SEQ ID NO: 314497 - RNA, 22 nt, Artificial Sequence
  Synthetic
auuccaccccucagaaauauag

SEQ ID NO: 314498 - RNA, 23 nt, Artificial Sequence
  Synthetic
uauuccaccccucagaaauauag

SEQ ID NO: 314499 - RNA, 24 nt, Artificial Sequence
  Synthetic
uuauuccaccccucagaaauauag

SEQ ID NO: 314500 - RNA, 18 nt, Artificial Sequence
  Synthetic
aacacauuuucaauauag

SEQ ID NO: 314501 - RNA, 19 nt, Artificial Sequence
  Synthetic
caacacauuuucaauauag

SEQ ID NO: 314502 - RNA, 20 nt, Artificial Sequence
  Synthetic
acaacacauuuucaauauag

SEQ ID NO: 314503 - RNA, 21 nt, Artificial Sequence
  Synthetic
aacaacacauuuucaauauag

SEQ ID NO: 314504 - RNA, 22 nt, Artificial Sequence
  Synthetic
aaacaacacauuuucaauauag

SEQ ID NO: 314505 - RNA, 23 nt, Artificial Sequence
  Synthetic
uaaacaacacauuuucaauauag

SEQ ID NO: 314506 - RNA, 24 nt, Artificial Sequence
  Synthetic
cuaaacaacacauuuucaauauag

SEQ ID NO: 314507 - RNA, 18 nt, Artificial Sequence
  Synthetic
gacagaucauuaauauag

SEQ ID NO: 314508 - RNA, 19 nt, Artificial Sequence
  Synthetic
agacagaucauuaauauag

SEQ ID NO: 314509 - RNA, 20 nt, Artificial Sequence
  Synthetic
aagacagaucauuaauauag

SEQ ID NO: 314510 - RNA, 21 nt, Artificial Sequence
  Synthetic
uaagacagaucauuaauauag

SEQ ID NO: 314511 - RNA, 22 nt, Artificial Sequence
  Synthetic
uuaagacagaucauuaauauag

SEQ ID NO: 314512 - RNA, 23 nt, Artificial Sequence
  Synthetic
auuaagacagaucauuaauauag

SEQ ID NO: 314513 - RNA, 24 nt, Artificial Sequence
  Synthetic
aauuaagacagaucauuaauauag

SEQ ID NO: 314514 - RNA, 18 nt, Artificial Sequence
  Synthetic
uuguauauggacauauag

SEQ ID NO: 314515 - RNA, 19 nt, Artificial Sequence
  Synthetic
auuguauauggacauauag

SEQ ID NO: 314516 - RNA, 20 nt, Artificial Sequence
  Synthetic
cauuguauauggacauauag

SEQ ID NO: 314517 - RNA, 21 nt, Artificial Sequence
  Synthetic
ccauuguauauggacauauag

SEQ ID NO: 314518 - RNA, 22 nt, Artificial Sequence
  Synthetic
cccauuguauauggacauauag

SEQ ID NO: 314519 - RNA, 23 nt, Artificial Sequence
  Synthetic
acccauuguauauggacauauag

SEQ ID NO: 314520 - RNA, 24 nt, Artificial Sequence
  Synthetic
aacccauuguauauggacauauag

SEQ ID NO: 314521 - RNA, 18 nt, Artificial Sequence
  Synthetic
ccugccuuuuucauauag

SEQ ID NO: 314522 - RNA, 19 nt, Artificial Sequence
  Synthetic
gccugccuuuuucauauag

SEQ ID NO: 314523 - RNA, 20 nt, Artificial Sequence
  Synthetic
ugccugccuuuuucauauag

SEQ ID NO: 314524 - RNA, 21 nt, Artificial Sequence
  Synthetic
gugccugccuuuuucauauag

SEQ ID NO: 314525 - RNA, 22 nt, Artificial Sequence
  Synthetic
ugugccugccuuuuucauauag

SEQ ID NO: 314526 - RNA, 23 nt, Artificial Sequence
  Synthetic
augugccugccuuuuucauauag

SEQ ID NO: 314527 - RNA, 24 nt, Artificial Sequence
  Synthetic
uaugugccugccuuuuucauauag

SEQ ID NO: 314528 - RNA, 18 nt, Artificial Sequence
  Synthetic
uuacacauguugauauag

SEQ ID NO: 314529 - RNA, 19 nt, Artificial Sequence
  Synthetic
uuuacacauguugauauag

SEQ ID NO: 314530 - RNA, 20 nt, Artificial Sequence
  Synthetic
auuuacacauguugauauag

SEQ ID NO: 314531 - RNA, 21 nt, Artificial Sequence
  Synthetic
uauuuacacauguugauauag

SEQ ID NO: 314532 - RNA, 22 nt, Artificial Sequence
  Synthetic
guauuuacacauguugauauag

SEQ ID NO: 314533 - RNA, 23 nt, Artificial Sequence
  Synthetic
uguauuuacacauguugauauag

SEQ ID NO: 314534 - RNA, 24 nt, Artificial Sequence
  Synthetic
guguauuuacacauguugauauag

SEQ ID NO: 314535 - RNA, 18 nt, Artificial Sequence
  Synthetic
augcuguaaaauauauag

SEQ ID NO: 314536 - RNA, 19 nt, Artificial Sequence
  Synthetic
aaugcuguaaaauauauag

SEQ ID NO: 314537 - RNA, 20 nt, Artificial Sequence
  Synthetic
aaaugcuguaaaauauauag

SEQ ID NO: 314538 - RNA, 21 nt, Artificial Sequence
  Synthetic
aaaaugcuguaaaauauauag

SEQ ID NO: 314539 - RNA, 22 nt, Artificial Sequence
  Synthetic
aaaaaugcuguaaaauauauag

SEQ ID NO: 314540 - RNA, 23 nt, Artificial Sequence
  Synthetic
aaaaaaugcuguaaaauauauag

SEQ ID NO: 314541 - RNA, 24 nt, Artificial Sequence
  Synthetic
aaaaaaaugcuguaaaauauauag

SEQ ID NO: 314542 - RNA, 18 nt, Artificial Sequence
  Synthetic
acuggcuucaauauauag

SEQ ID NO: 314543 - RNA, 19 nt, Artificial Sequence
  Synthetic
cacuggcuucaauauauag

SEQ ID NO: 314544 - RNA, 20 nt, Artificial Sequence
  Synthetic
ccacuggcuucaauauauag

SEQ ID NO: 314545 - RNA, 21 nt, Artificial Sequence
  Synthetic
uccacuggcuucaauauauag

SEQ ID NO: 314546 - RNA, 22 nt, Artificial Sequence
  Synthetic
auccacuggcuucaauauauag

SEQ ID NO: 314547 - RNA, 23 nt, Artificial Sequence
  Synthetic
aauccacuggcuucaauauauag

SEQ ID NO: 314548 - RNA, 24 nt, Artificial Sequence
  Synthetic
uaauccacuggcuucaauauauag

SEQ ID NO: 314549 - RNA, 18 nt, Artificial Sequence
  Synthetic
gcuagaggggauauauag

SEQ ID NO: 314550 - RNA, 19 nt, Artificial Sequence
  Synthetic
agcuagaggggauauauag

SEQ ID NO: 314551 - RNA, 20 nt, Artificial Sequence
  Synthetic
cagcuagaggggauauauag

SEQ ID NO: 314552 - RNA, 21 nt, Artificial Sequence
  Synthetic
ccagcuagaggggauauauag

SEQ ID NO: 314553 - RNA, 22 nt, Artificial Sequence
  Synthetic
gccagcuagaggggauauauag

SEQ ID NO: 314554 - RNA, 23 nt, Artificial Sequence
  Synthetic
ggccagcuagaggggauauauag

SEQ ID NO: 314555 - RNA, 24 nt, Artificial Sequence
  Synthetic
aggccagcuagaggggauauauag

SEQ ID NO: 314556 - RNA, 18 nt, Artificial Sequence
  Synthetic
uucauguggacuauauag

SEQ ID NO: 314557 - RNA, 19 nt, Artificial Sequence
  Synthetic
cuucauguggacuauauag

SEQ ID NO: 314558 - RNA, 20 nt, Artificial Sequence
  Synthetic
ucuucauguggacuauauag

SEQ ID NO: 314559 - RNA, 21 nt, Artificial Sequence
  Synthetic
cucuucauguggacuauauag

SEQ ID NO: 314560 - RNA, 22 nt, Artificial Sequence
  Synthetic
ccucuucauguggacuauauag

SEQ ID NO: 314561 - RNA, 23 nt, Artificial Sequence
  Synthetic
uccucuucauguggacuauauag

SEQ ID NO: 314562 - RNA, 24 nt, Artificial Sequence
  Synthetic
auccucuucauguggacuauauag

SEQ ID NO: 314563 - RNA, 18 nt, Artificial Sequence
  Synthetic
aauuuaaaguuuauauag

SEQ ID NO: 314564 - RNA, 19 nt, Artificial Sequence
  Synthetic
uaauuuaaaguuuauauag

SEQ ID NO: 314565 - RNA, 20 nt, Artificial Sequence
  Synthetic
guaauuuaaaguuuauauag

SEQ ID NO: 314566 - RNA, 21 nt, Artificial Sequence
  Synthetic
uguaauuuaaaguuuauauag

SEQ ID NO: 314567 - RNA, 22 nt, Artificial Sequence
  Synthetic
auguaauuuaaaguuuauauag

SEQ ID NO: 314568 - RNA, 23 nt, Artificial Sequence
  Synthetic
gauguaauuuaaaguuuauauag

SEQ ID NO: 314569 - RNA, 24 nt, Artificial Sequence
  Synthetic
ugauguaauuuaaaguuuauauag

SEQ ID NO: 314570 - RNA, 18 nt, Artificial Sequence
  Synthetic
uucucaaauaaacuauag

SEQ ID NO: 314571 - RNA, 19 nt, Artificial Sequence
  Synthetic
uuucucaaauaaacuauag

SEQ ID NO: 314572 - RNA, 20 nt, Artificial Sequence
  Synthetic
uuuucucaaauaaacuauag

SEQ ID NO: 314573 - RNA, 21 nt, Artificial Sequence
  Synthetic
auuuucucaaauaaacuauag

SEQ ID NO: 314574 - RNA, 22 nt, Artificial Sequence
  Synthetic
uauuuucucaaauaaacuauag

SEQ ID NO: 314575 - RNA, 23 nt, Artificial Sequence
  Synthetic
uuauuuucucaaauaaacuauag

SEQ ID NO: 314576 - RNA, 24 nt, Artificial Sequence
  Synthetic
auuauuuucucaaauaaacuauag

SEQ ID NO: 314577 - RNA, 18 nt, Artificial Sequence
  Synthetic
aaauuguagacccuauag

SEQ ID NO: 314578 - RNA, 19 nt, Artificial Sequence
  Synthetic
aaaauuguagacccuauag

SEQ ID NO: 314579 - RNA, 20 nt, Artificial Sequence
  Synthetic
aaaaauuguagacccuauag

SEQ ID NO: 314580 - RNA, 21 nt, Artificial Sequence
  Synthetic
uaaaaauuguagacccuauag

SEQ ID NO: 314581 - RNA, 22 nt, Artificial Sequence
  Synthetic
auaaaaauuguagacccuauag

SEQ ID NO: 314582 - RNA, 23 nt, Artificial Sequence
  Synthetic
aauaaaaauuguagacccuauag

SEQ ID NO: 314583 - RNA, 24 nt, Artificial Sequence
  Synthetic
gaauaaaaauuguagacccuauag

SEQ ID NO: 314584 - RNA, 18 nt, Artificial Sequence
  Synthetic
cuuguaaacagccuauag

SEQ ID NO: 314585 - RNA, 19 nt, Artificial Sequence
  Synthetic
ucuuguaaacagccuauag

SEQ ID NO: 314586 - RNA, 20 nt, Artificial Sequence
  Synthetic
uucuuguaaacagccuauag

SEQ ID NO: 314587 - RNA, 21 nt, Artificial Sequence
  Synthetic
uuucuuguaaacagccuauag

SEQ ID NO: 314588 - RNA, 22 nt, Artificial Sequence
  Synthetic
guuucuuguaaacagccuauag

SEQ ID NO: 314589 - RNA, 23 nt, Artificial Sequence
  Synthetic
uguuucuuguaaacagccuauag

SEQ ID NO: 314590 - RNA, 24 nt, Artificial Sequence
  Synthetic
auguuucuuguaaacagccuauag

SEQ ID NO: 314591 - RNA, 18 nt, Artificial Sequence
  Synthetic
aagguauacugccuauag

SEQ ID NO: 314592 - RNA, 19 nt, Artificial Sequence
  Synthetic
uaagguauacugccuauag

SEQ ID NO: 314593 - RNA, 20 nt, Artificial Sequence
  Synthetic
auaagguauacugccuauag

SEQ ID NO: 314594 - RNA, 21 nt, Artificial Sequence
  Synthetic
aauaagguauacugccuauag

SEQ ID NO: 314595 - RNA, 22 nt, Artificial Sequence
  Synthetic
gaauaagguauacugccuauag

SEQ ID NO: 314596 - RNA, 23 nt, Artificial Sequence
  Synthetic
ugaauaagguauacugccuauag

SEQ ID NO: 314597 - RNA, 24 nt, Artificial Sequence
  Synthetic
augaauaagguauacugccuauag

SEQ ID NO: 314598 - RNA, 18 nt, Artificial Sequence
  Synthetic
ugaguguuauuccuauag

SEQ ID NO: 314599 - RNA, 19 nt, Artificial Sequence
  Synthetic
augaguguuauuccuauag

SEQ ID NO: 314600 - RNA, 20 nt, Artificial Sequence
  Synthetic
caugaguguuauuccuauag

SEQ ID NO: 314601 - RNA, 21 nt, Artificial Sequence
  Synthetic
ucaugaguguuauuccuauag

SEQ ID NO: 314602 - RNA, 22 nt, Artificial Sequence
  Synthetic
aucaugaguguuauuccuauag

SEQ ID NO: 314603 - RNA, 23 nt, Artificial Sequence
  Synthetic
caucaugaguguuauuccuauag

SEQ ID NO: 314604 - RNA, 24 nt, Artificial Sequence
  Synthetic
acaucaugaguguuauuccuauag

SEQ ID NO: 314605 - RNA, 18 nt, Artificial Sequence
  Synthetic
uuuuuucucaaucuauag

SEQ ID NO: 314606 - RNA, 19 nt, Artificial Sequence
  Synthetic
auuuuuucucaaucuauag

SEQ ID NO: 314607 - RNA, 20 nt, Artificial Sequence
  Synthetic
uauuuuuucucaaucuauag

SEQ ID NO: 314608 - RNA, 21 nt, Artificial Sequence
  Synthetic
cuauuuuuucucaaucuauag

SEQ ID NO: 314609 - RNA, 22 nt, Artificial Sequence
  Synthetic
ucuauuuuuucucaaucuauag

SEQ ID NO: 314610 - RNA, 23 nt, Artificial Sequence
  Synthetic
gucuauuuuuucucaaucuauag

SEQ ID NO: 314611 - RNA, 24 nt, Artificial Sequence
  Synthetic
agucuauuuuuucucaaucuauag

SEQ ID NO: 314612 - RNA, 18 nt, Artificial Sequence
  Synthetic
ggagaacagaaucuauag

SEQ ID NO: 314613 - RNA, 19 nt, Artificial Sequence
  Synthetic
aggagaacagaaucuauag

SEQ ID NO: 314614 - RNA, 20 nt, Artificial Sequence
  Synthetic
aaggagaacagaaucuauag

SEQ ID NO: 314615 - RNA, 21 nt, Artificial Sequence
  Synthetic
aaaggagaacagaaucuauag

SEQ ID NO: 314616 - RNA, 22 nt, Artificial Sequence
  Synthetic
uaaaggagaacagaaucuauag

SEQ ID NO: 314617 - RNA, 23 nt, Artificial Sequence
  Synthetic
cuaaaggagaacagaaucuauag

SEQ ID NO: 314618 - RNA, 24 nt, Artificial Sequence
  Synthetic
ucuaaaggagaacagaaucuauag

SEQ ID NO: 314619 - RNA, 18 nt, Artificial Sequence
  Synthetic
aaaaaaaaauaucuauag

SEQ ID NO: 314620 - RNA, 19 nt, Artificial Sequence
  Synthetic
aaaaaaaaaauaucuauag

SEQ ID NO: 314621 - RNA, 20 nt, Artificial Sequence
  Synthetic
aaaaaaaaaaauaucuauag

SEQ ID NO: 314622 - RNA, 21 nt, Artificial Sequence
  Synthetic
aaaaaaaaaaaauaucuauag

SEQ ID NO: 314623 - RNA, 22 nt, Artificial Sequence
  Synthetic
gaaaaaaaaaaaauaucuauag

SEQ ID NO: 314624 - RNA, 23 nt, Artificial Sequence
  Synthetic
ggaaaaaaaaaaaauaucuauag

SEQ ID NO: 314625 - RNA, 24 nt, Artificial Sequence
  Synthetic
aggaaaaaaaaaaaauaucuauag

SEQ ID NO: 314626 - RNA, 18 nt, Artificial Sequence
  Synthetic
ugaagacaaccucuauag

SEQ ID NO: 314627 - RNA, 19 nt, Artificial Sequence
  Synthetic
uugaagacaaccucuauag

SEQ ID NO: 314628 - RNA, 20 nt, Artificial Sequence
  Synthetic
auugaagacaaccucuauag

SEQ ID NO: 314629 - RNA, 21 nt, Artificial Sequence
  Synthetic
aauugaagacaaccucuauag

SEQ ID NO: 314630 - RNA, 22 nt, Artificial Sequence
  Synthetic
uaauugaagacaaccucuauag

SEQ ID NO: 314631 - RNA, 23 nt, Artificial Sequence
  Synthetic
uuaauugaagacaaccucuauag

SEQ ID NO: 314632 - RNA, 24 nt, Artificial Sequence
  Synthetic
uuuaauugaagacaaccucuauag

SEQ ID NO: 314633 - RNA, 18 nt, Artificial Sequence
  Synthetic
ggccugacgggucuauag

SEQ ID NO: 314634 - RNA, 19 nt, Artificial Sequence
  Synthetic
uggccugacgggucuauag

SEQ ID NO: 314635 - RNA, 20 nt, Artificial Sequence
  Synthetic
cuggccugacgggucuauag

SEQ ID NO: 314636 - RNA, 21 nt, Artificial Sequence
  Synthetic
acuggccugacgggucuauag

SEQ ID NO: 314637 - RNA, 22 nt, Artificial Sequence
  Synthetic
uacuggccugacgggucuauag

SEQ ID NO: 314638 - RNA, 23 nt, Artificial Sequence
  Synthetic
auacuggccugacgggucuauag

SEQ ID NO: 314639 - RNA, 24 nt, Artificial Sequence
  Synthetic
aauacuggccugacgggucuauag

SEQ ID NO: 314640 - RNA, 18 nt, Artificial Sequence
  Synthetic
agagaacaccaaguauag

SEQ ID NO: 314641 - RNA, 19 nt, Artificial Sequence
  Synthetic
cagagaacaccaaguauag

SEQ ID NO: 314642 - RNA, 20 nt, Artificial Sequence
  Synthetic
ucagagaacaccaaguauag

SEQ ID NO: 314643 - RNA, 21 nt, Artificial Sequence
  Synthetic
uucagagaacaccaaguauag

SEQ ID NO: 314644 - RNA, 22 nt, Artificial Sequence
  Synthetic
cuucagagaacaccaaguauag

SEQ ID NO: 314645 - RNA, 23 nt, Artificial Sequence
  Synthetic
gcuucagagaacaccaaguauag

SEQ ID NO: 314646 - RNA, 24 nt, Artificial Sequence
  Synthetic
ugcuucagagaacaccaaguauag

SEQ ID NO: 314647 - RNA, 18 nt, Artificial Sequence
  Synthetic
agcuagaagcaaguauag

SEQ ID NO: 314648 - RNA, 19 nt, Artificial Sequence
  Synthetic
aagcuagaagcaaguauag

SEQ ID NO: 314649 - RNA, 20 nt, Artificial Sequence
  Synthetic
aaagcuagaagcaaguauag

SEQ ID NO: 314650 - RNA, 21 nt, Artificial Sequence
  Synthetic
gaaagcuagaagcaaguauag

SEQ ID NO: 314651 - RNA, 22 nt, Artificial Sequence
  Synthetic
agaaagcuagaagcaaguauag

SEQ ID NO: 314652 - RNA, 23 nt, Artificial Sequence
  Synthetic
aagaaagcuagaagcaaguauag

SEQ ID NO: 314653 - RNA, 24 nt, Artificial Sequence
  Synthetic
aaagaaagcuagaagcaaguauag

SEQ ID NO: 314654 - RNA, 18 nt, Artificial Sequence
  Synthetic
gaggcauccacaguauag

SEQ ID NO: 314655 - RNA, 19 nt, Artificial Sequence
  Synthetic
cgaggcauccacaguauag

SEQ ID NO: 314656 - RNA, 20 nt, Artificial Sequence
  Synthetic
ccgaggcauccacaguauag

SEQ ID NO: 314657 - RNA, 21 nt, Artificial Sequence
  Synthetic
uccgaggcauccacaguauag

SEQ ID NO: 314658 - RNA, 22 nt, Artificial Sequence
  Synthetic
auccgaggcauccacaguauag

SEQ ID NO: 314659 - RNA, 23 nt, Artificial Sequence
  Synthetic
aauccgaggcauccacaguauag

SEQ ID NO: 314660 - RNA, 24 nt, Artificial Sequence
  Synthetic
gaauccgaggcauccacaguauag

SEQ ID NO: 314661 - RNA, 18 nt, Artificial Sequence
  Synthetic
gggguaauuguaguauag

SEQ ID NO: 314662 - RNA, 19 nt, Artificial Sequence
  Synthetic
agggguaauuguaguauag

SEQ ID NO: 314663 - RNA, 20 nt, Artificial Sequence
  Synthetic
uagggguaauuguaguauag

SEQ ID NO: 314664 - RNA, 21 nt, Artificial Sequence
  Synthetic
guagggguaauuguaguauag

SEQ ID NO: 314665 - RNA, 22 nt, Artificial Sequence
  Synthetic
aguagggguaauuguaguauag

SEQ ID NO: 314666 - RNA, 23 nt, Artificial Sequence
  Synthetic
aaguagggguaauuguaguauag

SEQ ID NO: 314667 - RNA, 24 nt, Artificial Sequence
  Synthetic
aaaguagggguaauuguaguauag

SEQ ID NO: 314668 - RNA, 18 nt, Artificial Sequence
  Synthetic
agacuuuauaacguauag

SEQ ID NO: 314669 - RNA, 19 nt, Artificial Sequence
  Synthetic
uagacuuuauaacguauag

SEQ ID NO: 314670 - RNA, 20 nt, Artificial Sequence
  Synthetic
uuagacuuuauaacguauag

SEQ ID NO: 314671 - RNA, 21 nt, Artificial Sequence
  Synthetic
uuuagacuuuauaacguauag

SEQ ID NO: 314672 - RNA, 22 nt, Artificial Sequence
  Synthetic
uuuuagacuuuauaacguauag

SEQ ID NO: 314673 - RNA, 23 nt, Artificial Sequence
  Synthetic
cuuuuagacuuuauaacguauag

SEQ ID NO: 314674 - RNA, 24 nt, Artificial Sequence
  Synthetic
ccuuuuagacuuuauaacguauag

SEQ ID NO: 314675 - RNA, 18 nt, Artificial Sequence
  Synthetic
cagacaguagguguauag

SEQ ID NO: 314676 - RNA, 19 nt, Artificial Sequence
  Synthetic
ccagacaguagguguauag

SEQ ID NO: 314677 - RNA, 20 nt, Artificial Sequence
  Synthetic
uccagacaguagguguauag

SEQ ID NO: 314678 - RNA, 21 nt, Artificial Sequence
  Synthetic
uuccagacaguagguguauag

SEQ ID NO: 314679 - RNA, 22 nt, Artificial Sequence
  Synthetic
auuccagacaguagguguauag

SEQ ID NO: 314680 - RNA, 23 nt, Artificial Sequence
  Synthetic
aauuccagacaguagguguauag

SEQ ID NO: 314681 - RNA, 24 nt, Artificial Sequence
  Synthetic
gaauuccagacaguagguguauag

SEQ ID NO: 314682 - RNA, 18 nt, Artificial Sequence
  Synthetic
gaaaaccugaaauuauag

SEQ ID NO: 314683 - RNA, 19 nt, Artificial Sequence
  Synthetic
agaaaaccugaaauuauag

SEQ ID NO: 314684 - RNA, 20 nt, Artificial Sequence
  Synthetic
aagaaaaccugaaauuauag

SEQ ID NO: 314685 - RNA, 21 nt, Artificial Sequence
  Synthetic
gaagaaaaccugaaauuauag

SEQ ID NO: 314686 - RNA, 22 nt, Artificial Sequence
  Synthetic
ugaagaaaaccugaaauuauag

SEQ ID NO: 314687 - RNA, 23 nt, Artificial Sequence
  Synthetic
cugaagaaaaccugaaauuauag

SEQ ID NO: 314688 - RNA, 24 nt, Artificial Sequence
  Synthetic
ccugaagaaaaccugaaauuauag

SEQ ID NO: 314689 - RNA, 18 nt, Artificial Sequence
  Synthetic
caucaucuguaauuauag

SEQ ID NO: 314690 - RNA, 19 nt, Artificial Sequence
  Synthetic
ucaucaucuguaauuauag

SEQ ID NO: 314691 - RNA, 20 nt, Artificial Sequence
  Synthetic
aucaucaucuguaauuauag

SEQ ID NO: 314692 - RNA, 21 nt, Artificial Sequence
  Synthetic
gaucaucaucuguaauuauag

SEQ ID NO: 314693 - RNA, 22 nt, Artificial Sequence
  Synthetic
ugaucaucaucuguaauuauag

SEQ ID NO: 314694 - RNA, 23 nt, Artificial Sequence
  Synthetic
augaucaucaucuguaauuauag

SEQ ID NO: 314695 - RNA, 24 nt, Artificial Sequence
  Synthetic
aaugaucaucaucuguaauuauag

SEQ ID NO: 314696 - RNA, 18 nt, Artificial Sequence
  Synthetic
ccuaacaauuaauuauag

SEQ ID NO: 314697 - RNA, 19 nt, Artificial Sequence
  Synthetic
accuaacaauuaauuauag

SEQ ID NO: 314698 - RNA, 20 nt, Artificial Sequence
  Synthetic
aaccuaacaauuaauuauag

SEQ ID NO: 314699 - RNA, 21 nt, Artificial Sequence
  Synthetic
uaaccuaacaauuaauuauag

SEQ ID NO: 314700 - RNA, 22 nt, Artificial Sequence
  Synthetic
uuaaccuaacaauuaauuauag

SEQ ID NO: 314701 - RNA, 23 nt, Artificial Sequence
  Synthetic
guuaaccuaacaauuaauuauag

SEQ ID NO: 314702 - RNA, 24 nt, Artificial Sequence
  Synthetic
uguuaaccuaacaauuaauuauag

SEQ ID NO: 314703 - RNA, 18 nt, Artificial Sequence
  Synthetic
agaagcuugucauuauag

SEQ ID NO: 314704 - RNA, 19 nt, Artificial Sequence
  Synthetic
uagaagcuugucauuauag

SEQ ID NO: 314705 - RNA, 20 nt, Artificial Sequence
  Synthetic
guagaagcuugucauuauag

SEQ ID NO: 314706 - RNA, 21 nt, Artificial Sequence
  Synthetic
aguagaagcuugucauuauag

SEQ ID NO: 314707 - RNA, 22 nt, Artificial Sequence
  Synthetic
gaguagaagcuugucauuauag

SEQ ID NO: 314708 - RNA, 23 nt, Artificial Sequence
  Synthetic
ugaguagaagcuugucauuauag

SEQ ID NO: 314709 - RNA, 24 nt, Artificial Sequence
  Synthetic
cugaguagaagcuugucauuauag

SEQ ID NO: 314710 - RNA, 18 nt, Artificial Sequence
  Synthetic
guaugaucaagauuauag

SEQ ID NO: 314711 - RNA, 19 nt, Artificial Sequence
  Synthetic
uguaugaucaagauuauag

SEQ ID NO: 314712 - RNA, 20 nt, Artificial Sequence
  Synthetic
uuguaugaucaagauuauag

SEQ ID NO: 314713 - RNA, 21 nt, Artificial Sequence
  Synthetic
uuuguaugaucaagauuauag

SEQ ID NO: 314714 - RNA, 22 nt, Artificial Sequence
  Synthetic
uuuuguaugaucaagauuauag

SEQ ID NO: 314715 - RNA, 23 nt, Artificial Sequence
  Synthetic
auuuuguaugaucaagauuauag

SEQ ID NO: 314716 - RNA, 24 nt, Artificial Sequence
  Synthetic
uauuuuguaugaucaagauuauag

SEQ ID NO: 314717 - RNA, 18 nt, Artificial Sequence
  Synthetic
cagacacccauauuauag

SEQ ID NO: 314718 - RNA, 19 nt, Artificial Sequence
  Synthetic
gcagacacccauauuauag

SEQ ID NO: 314719 - RNA, 20 nt, Artificial Sequence
  Synthetic
ggcagacacccauauuauag

SEQ ID NO: 314720 - RNA, 21 nt, Artificial Sequence
  Synthetic
uggcagacacccauauuauag

SEQ ID NO: 314721 - RNA, 22 nt, Artificial Sequence
  Synthetic
guggcagacacccauauuauag

SEQ ID NO: 314722 - RNA, 23 nt, Artificial Sequence
  Synthetic
aguggcagacacccauauuauag

SEQ ID NO: 314723 - RNA, 24 nt, Artificial Sequence
  Synthetic
gaguggcagacacccauauuauag

SEQ ID NO: 314724 - RNA, 18 nt, Artificial Sequence
  Synthetic
gaggauaguauauuauag

SEQ ID NO: 314725 - RNA, 19 nt, Artificial Sequence
  Synthetic
agaggauaguauauuauag

SEQ ID NO: 314726 - RNA, 20 nt, Artificial Sequence
  Synthetic
aagaggauaguauauuauag

SEQ ID NO: 314727 - RNA, 21 nt, Artificial Sequence
  Synthetic
caagaggauaguauauuauag

SEQ ID NO: 314728 - RNA, 22 nt, Artificial Sequence
  Synthetic
ccaagaggauaguauauuauag

SEQ ID NO: 314729 - RNA, 23 nt, Artificial Sequence
  Synthetic
uccaagaggauaguauauuauag

SEQ ID NO: 314730 - RNA, 24 nt, Artificial Sequence
  Synthetic
uuccaagaggauaguauauuauag

SEQ ID NO: 314731 - RNA, 18 nt, Artificial Sequence
  Synthetic
gaggaaagauuauuauag

SEQ ID NO: 314732 - RNA, 19 nt, Artificial Sequence
  Synthetic
agaggaaagauuauuauag

SEQ ID NO: 314733 - RNA, 20 nt, Artificial Sequence
  Synthetic
aagaggaaagauuauuauag

SEQ ID NO: 314734 - RNA, 21 nt, Artificial Sequence
  Synthetic
gaagaggaaagauuauuauag

SEQ ID NO: 314735 - RNA, 22 nt, Artificial Sequence
  Synthetic
agaagaggaaagauuauuauag

SEQ ID NO: 314736 - RNA, 23 nt, Artificial Sequence
  Synthetic
gagaagaggaaagauuauuauag

SEQ ID NO: 314737 - RNA, 24 nt, Artificial Sequence
  Synthetic
agagaagaggaaagauuauuauag

SEQ ID NO: 314738 - RNA, 18 nt, Artificial Sequence
  Synthetic
gguuacacuuccuuauag

SEQ ID NO: 314739 - RNA, 19 nt, Artificial Sequence
  Synthetic
ugguuacacuuccuuauag

SEQ ID NO: 314740 - RNA, 20 nt, Artificial Sequence
  Synthetic
uugguuacacuuccuuauag

SEQ ID NO: 314741 - RNA, 21 nt, Artificial Sequence
  Synthetic
guugguuacacuuccuuauag

SEQ ID NO: 314742 - RNA, 22 nt, Artificial Sequence
  Synthetic
aguugguuacacuuccuuauag

SEQ ID NO: 314743 - RNA, 23 nt, Artificial Sequence
  Synthetic
gaguugguuacacuuccuuauag

SEQ ID NO: 314744 - RNA, 24 nt, Artificial Sequence
  Synthetic
ggaguugguuacacuuccuuauag

SEQ ID NO: 314745 - RNA, 18 nt, Artificial Sequence
  Synthetic
cuucgaaucugcuuauag

SEQ ID NO: 314746 - RNA, 19 nt, Artificial Sequence
  Synthetic
ucuucgaaucugcuuauag

SEQ ID NO: 314747 - RNA, 20 nt, Artificial Sequence
  Synthetic
gucuucgaaucugcuuauag

SEQ ID NO: 314748 - RNA, 21 nt, Artificial Sequence
  Synthetic
ugucuucgaaucugcuuauag

SEQ ID NO: 314749 - RNA, 22 nt, Artificial Sequence
  Synthetic
uugucuucgaaucugcuuauag

SEQ ID NO: 314750 - RNA, 23 nt, Artificial Sequence
  Synthetic
cuugucuucgaaucugcuuauag

SEQ ID NO: 314751 - RNA, 24 nt, Artificial Sequence
  Synthetic
ccuugucuucgaaucugcuuauag

SEQ ID NO: 314752 - RNA, 18 nt, Artificial Sequence
  Synthetic
gguauuguuuucuuauag

SEQ ID NO: 314753 - RNA, 19 nt, Artificial Sequence
  Synthetic
ggguauuguuuucuuauag

SEQ ID NO: 314754 - RNA, 20 nt, Artificial Sequence
  Synthetic
uggguauuguuuucuuauag

SEQ ID NO: 314755 - RNA, 21 nt, Artificial Sequence
  Synthetic
uuggguauuguuuucuuauag

SEQ ID NO: 314756 - RNA, 22 nt, Artificial Sequence
  Synthetic
auuggguauuguuuucuuauag

SEQ ID NO: 314757 - RNA, 23 nt, Artificial Sequence
  Synthetic
aauuggguauuguuuucuuauag

SEQ ID NO: 314758 - RNA, 24 nt, Artificial Sequence
  Synthetic
aaauuggguauuguuuucuuauag

SEQ ID NO: 314759 - RNA, 18 nt, Artificial Sequence
  Synthetic
auauaauguuaguuauag

SEQ ID NO: 314760 - RNA, 19 nt, Artificial Sequence
  Synthetic
cauauaauguuaguuauag

SEQ ID NO: 314761 - RNA, 20 nt, Artificial Sequence
  Synthetic
ucauauaauguuaguuauag

SEQ ID NO: 314762 - RNA, 21 nt, Artificial Sequence
  Synthetic
uucauauaauguuaguuauag

SEQ ID NO: 314763 - RNA, 22 nt, Artificial Sequence
  Synthetic
auucauauaauguuaguuauag

SEQ ID NO: 314764 - RNA, 23 nt, Artificial Sequence
  Synthetic
aauucauauaauguuaguuauag

SEQ ID NO: 314765 - RNA, 24 nt, Artificial Sequence
  Synthetic
gaauucauauaauguuaguuauag

SEQ ID NO: 314766 - RNA, 18 nt, Artificial Sequence
  Synthetic
auuucauaaacuuuauag

SEQ ID NO: 314767 - RNA, 19 nt, Artificial Sequence
  Synthetic
cauuucauaaacuuuauag

SEQ ID NO: 314768 - RNA, 20 nt, Artificial Sequence
  Synthetic
acauuucauaaacuuuauag

SEQ ID NO: 314769 - RNA, 21 nt, Artificial Sequence
  Synthetic
uacauuucauaaacuuuauag

SEQ ID NO: 314770 - RNA, 22 nt, Artificial Sequence
  Synthetic
uuacauuucauaaacuuuauag

SEQ ID NO: 314771 - RNA, 23 nt, Artificial Sequence
  Synthetic
uuuacauuucauaaacuuuauag

SEQ ID NO: 314772 - RNA, 24 nt, Artificial Sequence
  Synthetic
auuuacauuucauaaacuuuauag

SEQ ID NO: 314773 - RNA, 18 nt, Artificial Sequence
  Synthetic
cuguguguagcuuuauag

SEQ ID NO: 314774 - RNA, 19 nt, Artificial Sequence
  Synthetic
ucuguguguagcuuuauag

SEQ ID NO: 314775 - RNA, 20 nt, Artificial Sequence
  Synthetic
gucuguguguagcuuuauag

SEQ ID NO: 314776 - RNA, 21 nt, Artificial Sequence
  Synthetic
agucuguguguagcuuuauag

SEQ ID NO: 314777 - RNA, 22 nt, Artificial Sequence
  Synthetic
cagucuguguguagcuuuauag

SEQ ID NO: 314778 - RNA, 23 nt, Artificial Sequence
  Synthetic
ccagucuguguguagcuuuauag

SEQ ID NO: 314779 - RNA, 24 nt, Artificial Sequence
  Synthetic
uccagucuguguguagcuuuauag

SEQ ID NO: 314780 - RNA, 18 nt, Artificial Sequence
  Synthetic
cuaggaggaauuuuauag

SEQ ID NO: 314781 - RNA, 19 nt, Artificial Sequence
  Synthetic
acuaggaggaauuuuauag

SEQ ID NO: 314782 - RNA, 20 nt, Artificial Sequence
  Synthetic
aacuaggaggaauuuuauag

SEQ ID NO: 314783 - RNA, 21 nt, Artificial Sequence
  Synthetic
aaacuaggaggaauuuuauag

SEQ ID NO: 314784 - RNA, 22 nt, Artificial Sequence
  Synthetic
gaaacuaggaggaauuuuauag

SEQ ID NO: 314785 - RNA, 23 nt, Artificial Sequence
  Synthetic
agaaacuaggaggaauuuuauag

SEQ ID NO: 314786 - RNA, 24 nt, Artificial Sequence
  Synthetic
cagaaacuaggaggaauuuuauag

SEQ ID NO: 314787 - RNA, 18 nt, Artificial Sequence
  Synthetic
auaauccccauuuuauag

SEQ ID NO: 314788 - RNA, 19 nt, Artificial Sequence
  Synthetic
uauaauccccauuuuauag

SEQ ID NO: 314789 - RNA, 20 nt, Artificial Sequence
  Synthetic
uuauaauccccauuuuauag

SEQ ID NO: 314790 - RNA, 21 nt, Artificial Sequence
  Synthetic
uuuauaauccccauuuuauag

SEQ ID NO: 314791 - RNA, 22 nt, Artificial Sequence
  Synthetic
uuuuauaauccccauuuuauag

SEQ ID NO: 314792 - RNA, 23 nt, Artificial Sequence
  Synthetic
auuuuauaauccccauuuuauag

SEQ ID NO: 314793 - RNA, 24 nt, Artificial Sequence
  Synthetic
uauuuuauaauccccauuuuauag

SEQ ID NO: 314794 - RNA, 18 nt, Artificial Sequence
  Synthetic
gcaauucccauuuuauag

SEQ ID NO: 314795 - RNA, 19 nt, Artificial Sequence
  Synthetic
ugcaauucccauuuuauag

SEQ ID NO: 314796 - RNA, 20 nt, Artificial Sequence
  Synthetic
uugcaauucccauuuuauag

SEQ ID NO: 314797 - RNA, 21 nt, Artificial Sequence
  Synthetic
guugcaauucccauuuuauag

SEQ ID NO: 314798 - RNA, 22 nt, Artificial Sequence
  Synthetic
uguugcaauucccauuuuauag

SEQ ID NO: 314799 - RNA, 23 nt, Artificial Sequence
  Synthetic
auguugcaauucccauuuuauag

SEQ ID NO: 314800 - RNA, 24 nt, Artificial Sequence
  Synthetic
uauguugcaauucccauuuuauag

SEQ ID NO: 314801 - RNA, 18 nt, Artificial Sequence
  Synthetic
ccuauccugauuuuauag

SEQ ID NO: 314802 - RNA, 19 nt, Artificial Sequence
  Synthetic
accuauccugauuuuauag

SEQ ID NO: 314803 - RNA, 20 nt, Artificial Sequence
  Synthetic
caccuauccugauuuuauag

SEQ ID NO: 314804 - RNA, 21 nt, Artificial Sequence
  Synthetic
ucaccuauccugauuuuauag

SEQ ID NO: 314805 - RNA, 22 nt, Artificial Sequence
  Synthetic
aucaccuauccugauuuuauag

SEQ ID NO: 314806 - RNA, 23 nt, Artificial Sequence
  Synthetic
aaucaccuauccugauuuuauag

SEQ ID NO: 314807 - RNA, 24 nt, Artificial Sequence
  Synthetic
caaucaccuauccugauuuuauag

SEQ ID NO: 314808 - RNA, 18 nt, Artificial Sequence
  Synthetic
gacaacauuguuuuauag

SEQ ID NO: 314809 - RNA, 19 nt, Artificial Sequence
  Synthetic
agacaacauuguuuuauag

SEQ ID NO: 314810 - RNA, 20 nt, Artificial Sequence
  Synthetic
aagacaacauuguuuuauag

SEQ ID NO: 314811 - RNA, 21 nt, Artificial Sequence
  Synthetic
aaagacaacauuguuuuauag

SEQ ID NO: 314812 - RNA, 22 nt, Artificial Sequence
  Synthetic
caaagacaacauuguuuuauag

SEQ ID NO: 314813 - RNA, 23 nt, Artificial Sequence
  Synthetic
ccaaagacaacauuguuuuauag

SEQ ID NO: 314814 - RNA, 24 nt, Artificial Sequence
  Synthetic
uccaaagacaacauuguuuuauag

SEQ ID NO: 314815 - RNA, 18 nt, Artificial Sequence
  Synthetic
guuucuaccaaaaacuag

SEQ ID NO: 314816 - RNA, 19 nt, Artificial Sequence
  Synthetic
cguuucuaccaaaaacuag

SEQ ID NO: 314817 - RNA, 20 nt, Artificial Sequence
  Synthetic
acguuucuaccaaaaacuag

SEQ ID NO: 314818 - RNA, 21 nt, Artificial Sequence
  Synthetic
uacguuucuaccaaaaacuag

SEQ ID NO: 314819 - RNA, 22 nt, Artificial Sequence
  Synthetic
cuacguuucuaccaaaaacuag

SEQ ID NO: 314820 - RNA, 23 nt, Artificial Sequence
  Synthetic
acuacguuucuaccaaaaacuag

SEQ ID NO: 314821 - RNA, 24 nt, Artificial Sequence
  Synthetic
aacuacguuucuaccaaaaacuag

SEQ ID NO: 314822 - RNA, 18 nt, Artificial Sequence
  Synthetic
auguugagagaaaacuag

SEQ ID NO: 314823 - RNA, 19 nt, Artificial Sequence
  Synthetic
aauguugagagaaaacuag

SEQ ID NO: 314824 - RNA, 20 nt, Artificial Sequence
  Synthetic
aaauguugagagaaaacuag

SEQ ID NO: 314825 - RNA, 21 nt, Artificial Sequence
  Synthetic
aaaauguugagagaaaacuag

SEQ ID NO: 314826 - RNA, 22 nt, Artificial Sequence
  Synthetic
caaaauguugagagaaaacuag

SEQ ID NO: 314827 - RNA, 23 nt, Artificial Sequence
  Synthetic
acaaaauguugagagaaaacuag

SEQ ID NO: 314828 - RNA, 24 nt, Artificial Sequence
  Synthetic
uacaaaauguugagagaaaacuag

SEQ ID NO: 314829 - RNA, 18 nt, Artificial Sequence
  Synthetic
aauuuacuagcaaacuag

SEQ ID NO: 314830 - RNA, 19 nt, Artificial Sequence
  Synthetic
caauuuacuagcaaacuag

SEQ ID NO: 314831 - RNA, 20 nt, Artificial Sequence
  Synthetic
gcaauuuacuagcaaacuag

SEQ ID NO: 314832 - RNA, 21 nt, Artificial Sequence
  Synthetic
ugcaauuuacuagcaaacuag

SEQ ID NO: 314833 - RNA, 22 nt, Artificial Sequence
  Synthetic
augcaauuuacuagcaaacuag

SEQ ID NO: 314834 - RNA, 23 nt, Artificial Sequence
  Synthetic
aaugcaauuuacuagcaaacuag

SEQ ID NO: 314835 - RNA, 24 nt, Artificial Sequence
  Synthetic
aaaugcaauuuacuagcaaacuag

SEQ ID NO: 314836 - RNA, 18 nt, Artificial Sequence
  Synthetic
acaaaaagcagaaacuag

SEQ ID NO: 314837 - RNA, 19 nt, Artificial Sequence
  Synthetic
cacaaaaagcagaaacuag

SEQ ID NO: 314838 - RNA, 20 nt, Artificial Sequence
  Synthetic
gcacaaaaagcagaaacuag

SEQ ID NO: 314839 - RNA, 21 nt, Artificial Sequence
  Synthetic
agcacaaaaagcagaaacuag

SEQ ID NO: 314840 - RNA, 22 nt, Artificial Sequence
  Synthetic
cagcacaaaaagcagaaacuag

SEQ ID NO: 314841 - RNA, 23 nt, Artificial Sequence
  Synthetic
gcagcacaaaaagcagaaacuag

SEQ ID NO: 314842 - RNA, 24 nt, Artificial Sequence
  Synthetic
agcagcacaaaaagcagaaacuag

SEQ ID NO: 314843 - RNA, 18 nt, Artificial Sequence
  Synthetic
guacauacuggaaacuag

SEQ ID NO: 314844 - RNA, 19 nt, Artificial Sequence
  Synthetic
aguacauacuggaaacuag

SEQ ID NO: 314845 - RNA, 20 nt, Artificial Sequence
  Synthetic
caguacauacuggaaacuag

SEQ ID NO: 314846 - RNA, 21 nt, Artificial Sequence
  Synthetic
acaguacauacuggaaacuag

SEQ ID NO: 314847 - RNA, 22 nt, Artificial Sequence
  Synthetic
aacaguacauacuggaaacuag

SEQ ID NO: 314848 - RNA, 23 nt, Artificial Sequence
  Synthetic
caacaguacauacuggaaacuag

SEQ ID NO: 314849 - RNA, 24 nt, Artificial Sequence
  Synthetic
gcaacaguacauacuggaaacuag

SEQ ID NO: 314850 - RNA, 18 nt, Artificial Sequence
  Synthetic
aaaauaaaaugaaacuag

SEQ ID NO: 314851 - RNA, 19 nt, Artificial Sequence
  Synthetic
uaaaauaaaaugaaacuag

SEQ ID NO: 314852 - RNA, 20 nt, Artificial Sequence
  Synthetic
guaaaauaaaaugaaacuag

SEQ ID NO: 314853 - RNA, 21 nt, Artificial Sequence
  Synthetic
uguaaaauaaaaugaaacuag

SEQ ID NO: 314854 - RNA, 22 nt, Artificial Sequence
  Synthetic
guguaaaauaaaaugaaacuag

SEQ ID NO: 314855 - RNA, 23 nt, Artificial Sequence
  Synthetic
uguguaaaauaaaaugaaacuag

SEQ ID NO: 314856 - RNA, 24 nt, Artificial Sequence
  Synthetic
uuguguaaaauaaaaugaaacuag

SEQ ID NO: 314857 - RNA, 18 nt, Artificial Sequence
  Synthetic
acugcuccauucaacuag

SEQ ID NO: 314858 - RNA, 19 nt, Artificial Sequence
  Synthetic
cacugcuccauucaacuag

SEQ ID NO: 314859 - RNA, 20 nt, Artificial Sequence
  Synthetic
ucacugcuccauucaacuag

SEQ ID NO: 314860 - RNA, 21 nt, Artificial Sequence
  Synthetic
uucacugcuccauucaacuag

SEQ ID NO: 314861 - RNA, 22 nt, Artificial Sequence
  Synthetic
uuucacugcuccauucaacuag

SEQ ID NO: 314862 - RNA, 23 nt, Artificial Sequence
  Synthetic
uuuucacugcuccauucaacuag

SEQ ID NO: 314863 - RNA, 24 nt, Artificial Sequence
  Synthetic
cuuuucacugcuccauucaacuag

SEQ ID NO: 314864 - RNA, 18 nt, Artificial Sequence
  Synthetic
uuguuguuaauuaacuag

SEQ ID NO: 314865 - RNA, 19 nt, Artificial Sequence
  Synthetic
uuuguuguuaauuaacuag

SEQ ID NO: 314866 - RNA, 20 nt, Artificial Sequence
  Synthetic
uuuuguuguuaauuaacuag

SEQ ID NO: 314867 - RNA, 21 nt, Artificial Sequence
  Synthetic
guuuuguuguuaauuaacuag

SEQ ID NO: 314868 - RNA, 22 nt, Artificial Sequence
  Synthetic
uguuuuguuguuaauuaacuag

SEQ ID NO: 314869 - RNA, 23 nt, Artificial Sequence
  Synthetic
cuguuuuguuguuaauuaacuag

SEQ ID NO: 314870 - RNA, 24 nt, Artificial Sequence
  Synthetic
gcuguuuuguuguuaauuaacuag

SEQ ID NO: 314871 - RNA, 18 nt, Artificial Sequence
  Synthetic
cauuauauggaacacuag

SEQ ID NO: 314872 - RNA, 19 nt, Artificial Sequence
  Synthetic
ccauuauauggaacacuag

SEQ ID NO: 314873 - RNA, 20 nt, Artificial Sequence
  Synthetic
accauuauauggaacacuag

SEQ ID NO: 314874 - RNA, 21 nt, Artificial Sequence
  Synthetic
caccauuauauggaacacuag

SEQ ID NO: 314875 - RNA, 22 nt, Artificial Sequence
  Synthetic
ucaccauuauauggaacacuag

SEQ ID NO: 314876 - RNA, 23 nt, Artificial Sequence
  Synthetic
aucaccauuauauggaacacuag

SEQ ID NO: 314877 - RNA, 24 nt, Artificial Sequence
  Synthetic
uaucaccauuauauggaacacuag

SEQ ID NO: 314878 - RNA, 18 nt, Artificial Sequence
  Synthetic
auagauguuaggcacuag

SEQ ID NO: 314879 - RNA, 19 nt, Artificial Sequence
  Synthetic
aauagauguuaggcacuag

SEQ ID NO: 314880 - RNA, 20 nt, Artificial Sequence
  Synthetic
uaauagauguuaggcacuag

SEQ ID NO: 314881 - RNA, 21 nt, Artificial Sequence
  Synthetic
guaauagauguuaggcacuag

SEQ ID NO: 314882 - RNA, 22 nt, Artificial Sequence
  Synthetic
uguaauagauguuaggcacuag

SEQ ID NO: 314883 - RNA, 23 nt, Artificial Sequence
  Synthetic
auguaauagauguuaggcacuag

SEQ ID NO: 314884 - RNA, 24 nt, Artificial Sequence
  Synthetic
uauguaauagauguuaggcacuag

SEQ ID NO: 314885 - RNA, 18 nt, Artificial Sequence
  Synthetic
gcacguuagaaucacuag

SEQ ID NO: 314886 - RNA, 19 nt, Artificial Sequence
  Synthetic
ugcacguuagaaucacuag

SEQ ID NO: 314887 - RNA, 20 nt, Artificial Sequence
  Synthetic
cugcacguuagaaucacuag

SEQ ID NO: 314888 - RNA, 21 nt, Artificial Sequence
  Synthetic
gcugcacguuagaaucacuag

SEQ ID NO: 314889 - RNA, 22 nt, Artificial Sequence
  Synthetic
ggcugcacguuagaaucacuag

SEQ ID NO: 314890 - RNA, 23 nt, Artificial Sequence
  Synthetic
uggcugcacguuagaaucacuag

SEQ ID NO: 314891 - RNA, 24 nt, Artificial Sequence
  Synthetic
cuggcugcacguuagaaucacuag

SEQ ID NO: 314892 - RNA, 18 nt, Artificial Sequence
  Synthetic
gagacugucacagacuag

SEQ ID NO: 314893 - RNA, 19 nt, Artificial Sequence
  Synthetic
agagacugucacagacuag

SEQ ID NO: 314894 - RNA, 20 nt, Artificial Sequence
  Synthetic
gagagacugucacagacuag

SEQ ID NO: 314895 - RNA, 21 nt, Artificial Sequence
  Synthetic
ugagagacugucacagacuag

SEQ ID NO: 314896 - RNA, 22 nt, Artificial Sequence
  Synthetic
cugagagacugucacagacuag

SEQ ID NO: 314897 - RNA, 23 nt, Artificial Sequence
  Synthetic
acugagagacugucacagacuag

SEQ ID NO: 314898 - RNA, 24 nt, Artificial Sequence
  Synthetic
aacugagagacugucacagacuag

SEQ ID NO: 314899 - RNA, 18 nt, Artificial Sequence
  Synthetic
caccaacccugagacuag

SEQ ID NO: 314900 - RNA, 19 nt, Artificial Sequence
  Synthetic
gcaccaacccugagacuag

SEQ ID NO: 314901 - RNA, 20 nt, Artificial Sequence
  Synthetic
agcaccaacccugagacuag

SEQ ID NO: 314902 - RNA, 21 nt, Artificial Sequence
  Synthetic
uagcaccaacccugagacuag

SEQ ID NO: 314903 - RNA, 22 nt, Artificial Sequence
  Synthetic
auagcaccaacccugagacuag

SEQ ID NO: 314904 - RNA, 23 nt, Artificial Sequence
  Synthetic
cauagcaccaacccugagacuag

SEQ ID NO: 314905 - RNA, 24 nt, Artificial Sequence
  Synthetic
acauagcaccaacccugagacuag

SEQ ID NO: 314906 - RNA, 18 nt, Artificial Sequence
  Synthetic
cuguuguugaaggacuag

SEQ ID NO: 314907 - RNA, 19 nt, Artificial Sequence
  Synthetic
ucuguuguugaaggacuag

SEQ ID NO: 314908 - RNA, 20 nt, Artificial Sequence
  Synthetic
uucuguuguugaaggacuag

SEQ ID NO: 314909 - RNA, 21 nt, Artificial Sequence
  Synthetic
uuucuguuguugaaggacuag

SEQ ID NO: 314910 - RNA, 22 nt, Artificial Sequence
  Synthetic
guuucuguuguugaaggacuag

SEQ ID NO: 314911 - RNA, 23 nt, Artificial Sequence
  Synthetic
gguuucuguuguugaaggacuag

SEQ ID NO: 314912 - RNA, 24 nt, Artificial Sequence
  Synthetic
agguuucuguuguugaaggacuag

SEQ ID NO: 314913 - RNA, 18 nt, Artificial Sequence
  Synthetic
guuauuucaagggacuag

SEQ ID NO: 314914 - RNA, 19 nt, Artificial Sequence
  Synthetic
uguuauuucaagggacuag

SEQ ID NO: 314915 - RNA, 20 nt, Artificial Sequence
  Synthetic
auguuauuucaagggacuag

SEQ ID NO: 314916 - RNA, 21 nt, Artificial Sequence
  Synthetic
cauguuauuucaagggacuag

SEQ ID NO: 314917 - RNA, 22 nt, Artificial Sequence
  Synthetic
ucauguuauuucaagggacuag

SEQ ID NO: 314918 - RNA, 23 nt, Artificial Sequence
  Synthetic
gucauguuauuucaagggacuag

SEQ ID NO: 314919 - RNA, 24 nt, Artificial Sequence
  Synthetic
ugucauguuauuucaagggacuag

SEQ ID NO: 314920 - RNA, 18 nt, Artificial Sequence
  Synthetic
auuucaaauagggacuag

SEQ ID NO: 314921 - RNA, 19 nt, Artificial Sequence
  Synthetic
uauuucaaauagggacuag

SEQ ID NO: 314922 - RNA, 20 nt, Artificial Sequence
  Synthetic
uuauuucaaauagggacuag

SEQ ID NO: 314923 - RNA, 21 nt, Artificial Sequence
  Synthetic
auuauuucaaauagggacuag

SEQ ID NO: 314924 - RNA, 22 nt, Artificial Sequence
  Synthetic
cauuauuucaaauagggacuag

SEQ ID NO: 314925 - RNA, 23 nt, Artificial Sequence
  Synthetic
ucauuauuucaaauagggacuag

SEQ ID NO: 314926 - RNA, 24 nt, Artificial Sequence
  Synthetic
cucauuauuucaaauagggacuag

SEQ ID NO: 314927 - RNA, 18 nt, Artificial Sequence
  Synthetic
cuggcugguauauacuag

SEQ ID NO: 314928 - RNA, 19 nt, Artificial Sequence
  Synthetic
ccuggcugguauauacuag

SEQ ID NO: 314929 - RNA, 20 nt, Artificial Sequence
  Synthetic
gccuggcugguauauacuag

SEQ ID NO: 314930 - RNA, 21 nt, Artificial Sequence
  Synthetic
ggccuggcugguauauacuag

SEQ ID NO: 314931 - RNA, 22 nt, Artificial Sequence
  Synthetic
aggccuggcugguauauacuag

SEQ ID NO: 314932 - RNA, 23 nt, Artificial Sequence
  Synthetic
aaggccuggcugguauauacuag

SEQ ID NO: 314933 - RNA, 24 nt, Artificial Sequence
  Synthetic
gaaggccuggcugguauauacuag

SEQ ID NO: 314934 - RNA, 18 nt, Artificial Sequence
  Synthetic
uuugaguccuuauacuag

SEQ ID NO: 314935 - RNA, 19 nt, Artificial Sequence
  Synthetic
uuuugaguccuuauacuag

SEQ ID NO: 314936 - RNA, 20 nt, Artificial Sequence
  Synthetic
uuuuugaguccuuauacuag

SEQ ID NO: 314937 - RNA, 21 nt, Artificial Sequence
  Synthetic
auuuuugaguccuuauacuag

SEQ ID NO: 314938 - RNA, 22 nt, Artificial Sequence
  Synthetic
uauuuuugaguccuuauacuag

SEQ ID NO: 314939 - RNA, 23 nt, Artificial Sequence
  Synthetic
guauuuuugaguccuuauacuag

SEQ ID NO: 314940 - RNA, 24 nt, Artificial Sequence
  Synthetic
uguauuuuugaguccuuauacuag

SEQ ID NO: 314941 - RNA, 18 nt, Artificial Sequence
  Synthetic
gacauuggggacuacuag

SEQ ID NO: 314942 - RNA, 19 nt, Artificial Sequence
  Synthetic
agacauuggggacuacuag

SEQ ID NO: 314943 - RNA, 20 nt, Artificial Sequence
  Synthetic
uagacauuggggacuacuag

SEQ ID NO: 314944 - RNA, 21 nt, Artificial Sequence
  Synthetic
auagacauuggggacuacuag

SEQ ID NO: 314945 - RNA, 22 nt, Artificial Sequence
  Synthetic
aauagacauuggggacuacuag

SEQ ID NO: 314946 - RNA, 23 nt, Artificial Sequence
  Synthetic
caauagacauuggggacuacuag

SEQ ID NO: 314947 - RNA, 24 nt, Artificial Sequence
  Synthetic
acaauagacauuggggacuacuag

SEQ ID NO: 314948 - RNA, 18 nt, Artificial Sequence
  Synthetic
cuccuaucaaaaaccuag

SEQ ID NO: 314949 - RNA, 19 nt, Artificial Sequence
  Synthetic
acuccuaucaaaaaccuag

SEQ ID NO: 314950 - RNA, 20 nt, Artificial Sequence
  Synthetic
cacuccuaucaaaaaccuag

SEQ ID NO: 314951 - RNA, 21 nt, Artificial Sequence
  Synthetic
ccacuccuaucaaaaaccuag

SEQ ID NO: 314952 - RNA, 22 nt, Artificial Sequence
  Synthetic
cccacuccuaucaaaaaccuag

SEQ ID NO: 314953 - RNA, 23 nt, Artificial Sequence
  Synthetic
ucccacuccuaucaaaaaccuag

SEQ ID NO: 314954 - RNA, 24 nt, Artificial Sequence
  Synthetic
aucccacuccuaucaaaaaccuag

SEQ ID NO: 314955 - RNA, 18 nt, Artificial Sequence
  Synthetic
uggucucguaaaaccuag

SEQ ID NO: 314956 - RNA, 19 nt, Artificial Sequence
  Synthetic
uuggucucguaaaaccuag

SEQ ID NO: 314957 - RNA, 20 nt, Artificial Sequence
  Synthetic
uuuggucucguaaaaccuag

SEQ ID NO: 314958 - RNA, 21 nt, Artificial Sequence
  Synthetic
cuuuggucucguaaaaccuag

SEQ ID NO: 314959 - RNA, 22 nt, Artificial Sequence
  Synthetic
acuuuggucucguaaaaccuag

SEQ ID NO: 314960 - RNA, 23 nt, Artificial Sequence
  Synthetic
aacuuuggucucguaaaaccuag

SEQ ID NO: 314961 - RNA, 24 nt, Artificial Sequence
  Synthetic
gaacuuuggucucguaaaaccuag

SEQ ID NO: 314962 - RNA, 18 nt, Artificial Sequence
  Synthetic
ucuucugcacugaccuag

SEQ ID NO: 314963 - RNA, 19 nt, Artificial Sequence
  Synthetic
cucuucugcacugaccuag

SEQ ID NO: 314964 - RNA, 20 nt, Artificial Sequence
  Synthetic
ucucuucugcacugaccuag

SEQ ID NO: 314965 - RNA, 21 nt, Artificial Sequence
  Synthetic
uucucuucugcacugaccuag

SEQ ID NO: 314966 - RNA, 22 nt, Artificial Sequence
  Synthetic
uuucucuucugcacugaccuag

SEQ ID NO: 314967 - RNA, 23 nt, Artificial Sequence
  Synthetic
auuucucuucugcacugaccuag

SEQ ID NO: 314968 - RNA, 24 nt, Artificial Sequence
  Synthetic
cauuucucuucugcacugaccuag

SEQ ID NO: 314969 - RNA, 18 nt, Artificial Sequence
  Synthetic
ugaauacguaauaccuag

SEQ ID NO: 314970 - RNA, 19 nt, Artificial Sequence
  Synthetic
cugaauacguaauaccuag

SEQ ID NO: 314971 - RNA, 20 nt, Artificial Sequence
  Synthetic
acugaauacguaauaccuag

SEQ ID NO: 314972 - RNA, 21 nt, Artificial Sequence
  Synthetic
cacugaauacguaauaccuag

SEQ ID NO: 314973 - RNA, 22 nt, Artificial Sequence
  Synthetic
ccacugaauacguaauaccuag

SEQ ID NO: 314974 - RNA, 23 nt, Artificial Sequence
  Synthetic
uccacugaauacguaauaccuag

SEQ ID NO: 314975 - RNA, 24 nt, Artificial Sequence
  Synthetic
uuccacugaauacguaauaccuag

SEQ ID NO: 314976 - RNA, 18 nt, Artificial Sequence
  Synthetic
agcuguuccacuaccuag

SEQ ID NO: 314977 - RNA, 19 nt, Artificial Sequence
  Synthetic
aagcuguuccacuaccuag

SEQ ID NO: 314978 - RNA, 20 nt, Artificial Sequence
  Synthetic
aaagcuguuccacuaccuag

SEQ ID NO: 314979 - RNA, 21 nt, Artificial Sequence
  Synthetic
gaaagcuguuccacuaccuag

SEQ ID NO: 314980 - RNA, 22 nt, Artificial Sequence
  Synthetic
cgaaagcuguuccacuaccuag

SEQ ID NO: 314981 - RNA, 23 nt, Artificial Sequence
  Synthetic
acgaaagcuguuccacuaccuag

SEQ ID NO: 314982 - RNA, 24 nt, Artificial Sequence
  Synthetic
uacgaaagcuguuccacuaccuag

SEQ ID NO: 314983 - RNA, 18 nt, Artificial Sequence
  Synthetic
accauacuaccuaccuag

SEQ ID NO: 314984 - RNA, 19 nt, Artificial Sequence
  Synthetic
uaccauacuaccuaccuag

SEQ ID NO: 314985 - RNA, 20 nt, Artificial Sequence
  Synthetic
auaccauacuaccuaccuag

SEQ ID NO: 314986 - RNA, 21 nt, Artificial Sequence
  Synthetic
uauaccauacuaccuaccuag

SEQ ID NO: 314987 - RNA, 22 nt, Artificial Sequence
  Synthetic
cuauaccauacuaccuaccuag

SEQ ID NO: 314988 - RNA, 23 nt, Artificial Sequence
  Synthetic
gcuauaccauacuaccuaccuag

SEQ ID NO: 314989 - RNA, 24 nt, Artificial Sequence
  Synthetic
ugcuauaccauacuaccuaccuag

SEQ ID NO: 314990 - RNA, 18 nt, Artificial Sequence
  Synthetic
caaccuggagcuaccuag

SEQ ID NO: 314991 - RNA, 19 nt, Artificial Sequence
  Synthetic
ucaaccuggagcuaccuag

SEQ ID NO: 314992 - RNA, 20 nt, Artificial Sequence
  Synthetic
gucaaccuggagcuaccuag

SEQ ID NO: 314993 - RNA, 21 nt, Artificial Sequence
  Synthetic
ggucaaccuggagcuaccuag

SEQ ID NO: 314994 - RNA, 22 nt, Artificial Sequence
  Synthetic
aggucaaccuggagcuaccuag

SEQ ID NO: 314995 - RNA, 23 nt, Artificial Sequence
  Synthetic
aaggucaaccuggagcuaccuag

SEQ ID NO: 314996 - RNA, 24 nt, Artificial Sequence
  Synthetic
aaaggucaaccuggagcuaccuag

SEQ ID NO: 314997 - RNA, 18 nt, Artificial Sequence
  Synthetic
aacauaacugcuaccuag

SEQ ID NO: 314998 - RNA, 19 nt, Artificial Sequence
  Synthetic
gaacauaacugcuaccuag

SEQ ID NO: 314999 - RNA, 20 nt, Artificial Sequence
  Synthetic
ggaacauaacugcuaccuag

SEQ ID NO: 315000 - RNA, 21 nt, Artificial Sequence
  Synthetic
uggaacauaacugcuaccuag

SEQ ID NO: 315001 - RNA, 22 nt, Artificial Sequence
  Synthetic
guggaacauaacugcuaccuag

SEQ ID NO: 315002 - RNA, 23 nt, Artificial Sequence
  Synthetic
uguggaacauaacugcuaccuag

SEQ ID NO: 315003 - RNA, 24 nt, Artificial Sequence
  Synthetic
cuguggaacauaacugcuaccuag

SEQ ID NO: 315004 - RNA, 18 nt, Artificial Sequence
  Synthetic
uaccgauuauguaccuag

SEQ ID NO: 315005 - RNA, 19 nt, Artificial Sequence
  Synthetic
cuaccgauuauguaccuag

SEQ ID NO: 315006 - RNA, 20 nt, Artificial Sequence
  Synthetic
acuaccgauuauguaccuag

SEQ ID NO: 315007 - RNA, 21 nt, Artificial Sequence
  Synthetic
cacuaccgauuauguaccuag

SEQ ID NO: 315008 - RNA, 22 nt, Artificial Sequence
  Synthetic
ucacuaccgauuauguaccuag

SEQ ID NO: 315009 - RNA, 23 nt, Artificial Sequence
  Synthetic
cucacuaccgauuauguaccuag

SEQ ID NO: 315010 - RNA, 24 nt, Artificial Sequence
  Synthetic
ucucacuaccgauuauguaccuag

SEQ ID NO: 315011 - RNA, 18 nt, Artificial Sequence
  Synthetic
aaaccauaaaaacccuag

SEQ ID NO: 315012 - RNA, 19 nt, Artificial Sequence
  Synthetic
aaaaccauaaaaacccuag

SEQ ID NO: 315013 - RNA, 20 nt, Artificial Sequence
  Synthetic
uaaaaccauaaaaacccuag

SEQ ID NO: 315014 - RNA, 21 nt, Artificial Sequence
  Synthetic
cuaaaaccauaaaaacccuag

SEQ ID NO: 315015 - RNA, 22 nt, Artificial Sequence
  Synthetic
ccuaaaaccauaaaaacccuag

SEQ ID NO: 315016 - RNA, 23 nt, Artificial Sequence
  Synthetic
accuaaaaccauaaaaacccuag

SEQ ID NO: 315017 - RNA, 24 nt, Artificial Sequence
  Synthetic
aaccuaaaaccauaaaaacccuag

SEQ ID NO: 315018 - RNA, 18 nt, Artificial Sequence
  Synthetic
cucaucccaggacccuag

SEQ ID NO: 315019 - RNA, 19 nt, Artificial Sequence
  Synthetic
ucucaucccaggacccuag

SEQ ID NO: 315020 - RNA, 20 nt, Artificial Sequence
  Synthetic
uucucaucccaggacccuag

SEQ ID NO: 315021 - RNA, 21 nt, Artificial Sequence
  Synthetic
cuucucaucccaggacccuag

SEQ ID NO: 315022 - RNA, 22 nt, Artificial Sequence
  Synthetic
ucuucucaucccaggacccuag

SEQ ID NO: 315023 - RNA, 23 nt, Artificial Sequence
  Synthetic
gucuucucaucccaggacccuag

SEQ ID NO: 315024 - RNA, 24 nt, Artificial Sequence
  Synthetic
ugucuucucaucccaggacccuag

SEQ ID NO: 315025 - RNA, 18 nt, Artificial Sequence
  Synthetic
uugugguccaaccccuag

SEQ ID NO: 315026 - RNA, 19 nt, Artificial Sequence
  Synthetic
uuugugguccaaccccuag

SEQ ID NO: 315027 - RNA, 20 nt, Artificial Sequence
  Synthetic
auuugugguccaaccccuag

SEQ ID NO: 315028 - RNA, 21 nt, Artificial Sequence
  Synthetic
uauuugugguccaaccccuag

SEQ ID NO: 315029 - RNA, 22 nt, Artificial Sequence
  Synthetic
auauuugugguccaaccccuag

SEQ ID NO: 315030 - RNA, 23 nt, Artificial Sequence
  Synthetic
gauauuugugguccaaccccuag

SEQ ID NO: 315031 - RNA, 24 nt, Artificial Sequence
  Synthetic
ugauauuugugguccaaccccuag

SEQ ID NO: 315032 - RNA, 18 nt, Artificial Sequence
  Synthetic
ggcacccaagagcccuag

SEQ ID NO: 315033 - RNA, 19 nt, Artificial Sequence
  Synthetic
aggcacccaagagcccuag

SEQ ID NO: 315034 - RNA, 20 nt, Artificial Sequence
  Synthetic
uaggcacccaagagcccuag

SEQ ID NO: 315035 - RNA, 21 nt, Artificial Sequence
  Synthetic
uuaggcacccaagagcccuag

SEQ ID NO: 315036 - RNA, 22 nt, Artificial Sequence
  Synthetic
uuuaggcacccaagagcccuag

SEQ ID NO: 315037 - RNA, 23 nt, Artificial Sequence
  Synthetic
guuuaggcacccaagagcccuag

SEQ ID NO: 315038 - RNA, 24 nt, Artificial Sequence
  Synthetic
gguuuaggcacccaagagcccuag

SEQ ID NO: 315039 - RNA, 18 nt, Artificial Sequence
  Synthetic
gagcaaaaucaucccuag

SEQ ID NO: 315040 - RNA, 19 nt, Artificial Sequence
  Synthetic
ggagcaaaaucaucccuag

SEQ ID NO: 315041 - RNA, 20 nt, Artificial Sequence
  Synthetic
gggagcaaaaucaucccuag

SEQ ID NO: 315042 - RNA, 21 nt, Artificial Sequence
  Synthetic
ggggagcaaaaucaucccuag

SEQ ID NO: 315043 - RNA, 22 nt, Artificial Sequence
  Synthetic
uggggagcaaaaucaucccuag

SEQ ID NO: 315044 - RNA, 23 nt, Artificial Sequence
  Synthetic
uuggggagcaaaaucaucccuag

SEQ ID NO: 315045 - RNA, 24 nt, Artificial Sequence
  Synthetic
cuuggggagcaaaaucaucccuag

SEQ ID NO: 315046 - RNA, 18 nt, Artificial Sequence
  Synthetic
guaaccuguugucccuag

SEQ ID NO: 315047 - RNA, 19 nt, Artificial Sequence
  Synthetic
aguaaccuguugucccuag

SEQ ID NO: 315048 - RNA, 20 nt, Artificial Sequence
  Synthetic
aaguaaccuguugucccuag

SEQ ID NO: 315049 - RNA, 21 nt, Artificial Sequence
  Synthetic
uaaguaaccuguugucccuag

SEQ ID NO: 315050 - RNA, 22 nt, Artificial Sequence
  Synthetic
cuaaguaaccuguugucccuag

SEQ ID NO: 315051 - RNA, 23 nt, Artificial Sequence
  Synthetic
acuaaguaaccuguugucccuag

SEQ ID NO: 315052 - RNA, 24 nt, Artificial Sequence
  Synthetic
gacuaaguaaccuguugucccuag

SEQ ID NO: 315053 - RNA, 18 nt, Artificial Sequence
  Synthetic
ugaauauuugcagccuag

SEQ ID NO: 315054 - RNA, 19 nt, Artificial Sequence
  Synthetic
augaauauuugcagccuag

SEQ ID NO: 315055 - RNA, 20 nt, Artificial Sequence
  Synthetic
uaugaauauuugcagccuag

SEQ ID NO: 315056 - RNA, 21 nt, Artificial Sequence
  Synthetic
uuaugaauauuugcagccuag

SEQ ID NO: 315057 - RNA, 22 nt, Artificial Sequence
  Synthetic
uuuaugaauauuugcagccuag

SEQ ID NO: 315058 - RNA, 23 nt, Artificial Sequence
  Synthetic
cuuuaugaauauuugcagccuag

SEQ ID NO: 315059 - RNA, 24 nt, Artificial Sequence
  Synthetic
ccuuuaugaauauuugcagccuag

SEQ ID NO: 315060 - RNA, 18 nt, Artificial Sequence
  Synthetic
cacuggggcacugccuag

SEQ ID NO: 315061 - RNA, 19 nt, Artificial Sequence
  Synthetic
ccacuggggcacugccuag

SEQ ID NO: 315062 - RNA, 20 nt, Artificial Sequence
  Synthetic
cccacuggggcacugccuag

SEQ ID NO: 315063 - RNA, 21 nt, Artificial Sequence
  Synthetic
ccccacuggggcacugccuag

SEQ ID NO: 315064 - RNA, 22 nt, Artificial Sequence
  Synthetic
uccccacuggggcacugccuag

SEQ ID NO: 315065 - RNA, 23 nt, Artificial Sequence
  Synthetic
guccccacuggggcacugccuag

SEQ ID NO: 315066 - RNA, 24 nt, Artificial Sequence
  Synthetic
aguccccacuggggcacugccuag

SEQ ID NO: 315067 - RNA, 18 nt, Artificial Sequence
  Synthetic
uuugggcauacugccuag

SEQ ID NO: 315068 - RNA, 19 nt, Artificial Sequence
  Synthetic
cuuugggcauacugccuag

SEQ ID NO: 315069 - RNA, 20 nt, Artificial Sequence
  Synthetic
gcuuugggcauacugccuag

SEQ ID NO: 315070 - RNA, 21 nt, Artificial Sequence
  Synthetic
ggcuuugggcauacugccuag

SEQ ID NO: 315071 - RNA, 22 nt, Artificial Sequence
  Synthetic
gggcuuugggcauacugccuag

SEQ ID NO: 315072 - RNA, 23 nt, Artificial Sequence
  Synthetic
ugggcuuugggcauacugccuag

SEQ ID NO: 315073 - RNA, 24 nt, Artificial Sequence
  Synthetic
augggcuuugggcauacugccuag

SEQ ID NO: 315074 - RNA, 18 nt, Artificial Sequence
  Synthetic
ccuucaaccagcuccuag

SEQ ID NO: 315075 - RNA, 19 nt, Artificial Sequence
  Synthetic
cccuucaaccagcuccuag

SEQ ID NO: 315076 - RNA, 20 nt, Artificial Sequence
  Synthetic
ucccuucaaccagcuccuag

SEQ ID NO: 315077 - RNA, 21 nt, Artificial Sequence
  Synthetic
cucccuucaaccagcuccuag

SEQ ID NO: 315078 - RNA, 22 nt, Artificial Sequence
  Synthetic
ccucccuucaaccagcuccuag

SEQ ID NO: 315079 - RNA, 23 nt, Artificial Sequence
  Synthetic
cccucccuucaaccagcuccuag

SEQ ID NO: 315080 - RNA, 24 nt, Artificial Sequence
  Synthetic
ccccucccuucaaccagcuccuag

SEQ ID NO: 315081 - RNA, 18 nt, Artificial Sequence
  Synthetic
cauuucucucaguccuag

SEQ ID NO: 315082 - RNA, 19 nt, Artificial Sequence
  Synthetic
gcauuucucucaguccuag

SEQ ID NO: 315083 - RNA, 20 nt, Artificial Sequence
  Synthetic
agcauuucucucaguccuag

SEQ ID NO: 315084 - RNA, 21 nt, Artificial Sequence
  Synthetic
uagcauuucucucaguccuag

SEQ ID NO: 315085 - RNA, 22 nt, Artificial Sequence
  Synthetic
uuagcauuucucucaguccuag

SEQ ID NO: 315086 - RNA, 23 nt, Artificial Sequence
  Synthetic
auuagcauuucucucaguccuag

SEQ ID NO: 315087 - RNA, 24 nt, Artificial Sequence
  Synthetic
aauuagcauuucucucaguccuag

SEQ ID NO: 315088 - RNA, 18 nt, Artificial Sequence
  Synthetic
uguugugcuggguccuag

SEQ ID NO: 315089 - RNA, 19 nt, Artificial Sequence
  Synthetic
guguugugcuggguccuag

SEQ ID NO: 315090 - RNA, 20 nt, Artificial Sequence
  Synthetic
cguguugugcuggguccuag

SEQ ID NO: 315091 - RNA, 21 nt, Artificial Sequence
  Synthetic
acguguugugcuggguccuag

SEQ ID NO: 315092 - RNA, 22 nt, Artificial Sequence
  Synthetic
uacguguugugcuggguccuag

SEQ ID NO: 315093 - RNA, 23 nt, Artificial Sequence
  Synthetic
uuacguguugugcuggguccuag

SEQ ID NO: 315094 - RNA, 24 nt, Artificial Sequence
  Synthetic
auuacguguugugcuggguccuag

SEQ ID NO: 315095 - RNA, 18 nt, Artificial Sequence
  Synthetic
ccuuccacacuguccuag

SEQ ID NO: 315096 - RNA, 19 nt, Artificial Sequence
  Synthetic
cccuuccacacuguccuag

SEQ ID NO: 315097 - RNA, 20 nt, Artificial Sequence
  Synthetic
ucccuuccacacuguccuag

SEQ ID NO: 315098 - RNA, 21 nt, Artificial Sequence
  Synthetic
uucccuuccacacuguccuag

SEQ ID NO: 315099 - RNA, 22 nt, Artificial Sequence
  Synthetic
uuucccuuccacacuguccuag

SEQ ID NO: 315100 - RNA, 23 nt, Artificial Sequence
  Synthetic
auuucccuuccacacuguccuag

SEQ ID NO: 315101 - RNA, 24 nt, Artificial Sequence
  Synthetic
cauuucccuuccacacuguccuag

SEQ ID NO: 315102 - RNA, 18 nt, Artificial Sequence
  Synthetic
uacuguaaugauuccuag

SEQ ID NO: 315103 - RNA, 19 nt, Artificial Sequence
  Synthetic
uuacuguaaugauuccuag

SEQ ID NO: 315104 - RNA, 20 nt, Artificial Sequence
  Synthetic
auuacuguaaugauuccuag

SEQ ID NO: 315105 - RNA, 21 nt, Artificial Sequence
  Synthetic
uauuacuguaaugauuccuag

SEQ ID NO: 315106 - RNA, 22 nt, Artificial Sequence
  Synthetic
uuauuacuguaaugauuccuag

SEQ ID NO: 315107 - RNA, 23 nt, Artificial Sequence
  Synthetic
uuuauuacuguaaugauuccuag

SEQ ID NO: 315108 - RNA, 24 nt, Artificial Sequence
  Synthetic
guuuauuacuguaaugauuccuag

SEQ ID NO: 315109 - RNA, 18 nt, Artificial Sequence
  Synthetic
caguggaagaaaagcuag

SEQ ID NO: 315110 - RNA, 19 nt, Artificial Sequence
  Synthetic
acaguggaagaaaagcuag

SEQ ID NO: 315111 - RNA, 20 nt, Artificial Sequence
  Synthetic
gacaguggaagaaaagcuag

SEQ ID NO: 315112 - RNA, 21 nt, Artificial Sequence
  Synthetic
ugacaguggaagaaaagcuag

SEQ ID NO: 315113 - RNA, 22 nt, Artificial Sequence
  Synthetic
cugacaguggaagaaaagcuag

SEQ ID NO: 315114 - RNA, 23 nt, Artificial Sequence
  Synthetic
ucugacaguggaagaaaagcuag

SEQ ID NO: 315115 - RNA, 24 nt, Artificial Sequence
  Synthetic
cucugacaguggaagaaaagcuag

SEQ ID NO: 315116 - RNA, 18 nt, Artificial Sequence
  Synthetic
aacaaauuccaaagcuag

SEQ ID NO: 315117 - RNA, 19 nt, Artificial Sequence
  Synthetic
aaacaaauuccaaagcuag

SEQ ID NO: 315118 - RNA, 20 nt, Artificial Sequence
  Synthetic
caaacaaauuccaaagcuag

SEQ ID NO: 315119 - RNA, 21 nt, Artificial Sequence
  Synthetic
gcaaacaaauuccaaagcuag

SEQ ID NO: 315120 - RNA, 22 nt, Artificial Sequence
  Synthetic
agcaaacaaauuccaaagcuag

SEQ ID NO: 315121 - RNA, 23 nt, Artificial Sequence
  Synthetic
gagcaaacaaauuccaaagcuag

SEQ ID NO: 315122 - RNA, 24 nt, Artificial Sequence
  Synthetic
agagcaaacaaauuccaaagcuag

SEQ ID NO: 315123 - RNA, 18 nt, Artificial Sequence
  Synthetic
agaaacccuacaagcuag

SEQ ID NO: 315124 - RNA, 19 nt, Artificial Sequence
  Synthetic
cagaaacccuacaagcuag

SEQ ID NO: 315125 - RNA, 20 nt, Artificial Sequence
  Synthetic
gcagaaacccuacaagcuag

SEQ ID NO: 315126 - RNA, 21 nt, Artificial Sequence
  Synthetic
ugcagaaacccuacaagcuag

SEQ ID NO: 315127 - RNA, 22 nt, Artificial Sequence
  Synthetic
cugcagaaacccuacaagcuag

SEQ ID NO: 315128 - RNA, 23 nt, Artificial Sequence
  Synthetic
ucugcagaaacccuacaagcuag

SEQ ID NO: 315129 - RNA, 24 nt, Artificial Sequence
  Synthetic
cucugcagaaacccuacaagcuag

SEQ ID NO: 315130 - RNA, 18 nt, Artificial Sequence
  Synthetic
guggaacagucaagcuag

SEQ ID NO: 315131 - RNA, 19 nt, Artificial Sequence
  Synthetic
uguggaacagucaagcuag

SEQ ID NO: 315132 - RNA, 20 nt, Artificial Sequence
  Synthetic
uuguggaacagucaagcuag

SEQ ID NO: 315133 - RNA, 21 nt, Artificial Sequence
  Synthetic
uuuguggaacagucaagcuag

SEQ ID NO: 315134 - RNA, 22 nt, Artificial Sequence
  Synthetic
guuuguggaacagucaagcuag

SEQ ID NO: 315135 - RNA, 23 nt, Artificial Sequence
  Synthetic
uguuuguggaacagucaagcuag

SEQ ID NO: 315136 - RNA, 24 nt, Artificial Sequence
  Synthetic
auguuuguggaacagucaagcuag

SEQ ID NO: 315137 - RNA, 18 nt, Artificial Sequence
  Synthetic
aggucaaagagaagcuag

SEQ ID NO: 315138 - RNA, 19 nt, Artificial Sequence
  Synthetic
gaggucaaagagaagcuag

SEQ ID NO: 315139 - RNA, 20 nt, Artificial Sequence
  Synthetic
ugaggucaaagagaagcuag

SEQ ID NO: 315140 - RNA, 21 nt, Artificial Sequence
  Synthetic
augaggucaaagagaagcuag

SEQ ID NO: 315141 - RNA, 22 nt, Artificial Sequence
  Synthetic
aaugaggucaaagagaagcuag

SEQ ID NO: 315142 - RNA, 23 nt, Artificial Sequence
  Synthetic
caaugaggucaaagagaagcuag

SEQ ID NO: 315143 - RNA, 24 nt, Artificial Sequence
  Synthetic
ucaaugaggucaaagagaagcuag

SEQ ID NO: 315144 - RNA, 18 nt, Artificial Sequence
  Synthetic
uuuuaaaguggaagcuag

SEQ ID NO: 315145 - RNA, 19 nt, Artificial Sequence
  Synthetic
cuuuuaaaguggaagcuag

SEQ ID NO: 315146 - RNA, 20 nt, Artificial Sequence
  Synthetic
ucuuuuaaaguggaagcuag

SEQ ID NO: 315147 - RNA, 21 nt, Artificial Sequence
  Synthetic
aucuuuuaaaguggaagcuag

SEQ ID NO: 315148 - RNA, 22 nt, Artificial Sequence
  Synthetic
uaucuuuuaaaguggaagcuag

SEQ ID NO: 315149 - RNA, 23 nt, Artificial Sequence
  Synthetic
uuaucuuuuaaaguggaagcuag

SEQ ID NO: 315150 - RNA, 24 nt, Artificial Sequence
  Synthetic
uuuaucuuuuaaaguggaagcuag

SEQ ID NO: 315151 - RNA, 18 nt, Artificial Sequence
  Synthetic
agaaaaguuggaagcuag

SEQ ID NO: 315152 - RNA, 19 nt, Artificial Sequence
  Synthetic
cagaaaaguuggaagcuag

SEQ ID NO: 315153 - RNA, 20 nt, Artificial Sequence
  Synthetic
gcagaaaaguuggaagcuag

SEQ ID NO: 315154 - RNA, 21 nt, Artificial Sequence
  Synthetic
agcagaaaaguuggaagcuag

SEQ ID NO: 315155 - RNA, 22 nt, Artificial Sequence
  Synthetic
cagcagaaaaguuggaagcuag

SEQ ID NO: 315156 - RNA, 23 nt, Artificial Sequence
  Synthetic
gcagcagaaaaguuggaagcuag

SEQ ID NO: 315157 - RNA, 24 nt, Artificial Sequence
  Synthetic
ugcagcagaaaaguuggaagcuag

SEQ ID NO: 315158 - RNA, 18 nt, Artificial Sequence
  Synthetic
ucaccuaaggccagcuag

SEQ ID NO: 315159 - RNA, 19 nt, Artificial Sequence
  Synthetic
gucaccuaaggccagcuag

SEQ ID NO: 315160 - RNA, 20 nt, Artificial Sequence
  Synthetic
agucaccuaaggccagcuag

SEQ ID NO: 315161 - RNA, 21 nt, Artificial Sequence
  Synthetic
aagucaccuaaggccagcuag

SEQ ID NO: 315162 - RNA, 22 nt, Artificial Sequence
  Synthetic
gaagucaccuaaggccagcuag

SEQ ID NO: 315163 - RNA, 23 nt, Artificial Sequence
  Synthetic
agaagucaccuaaggccagcuag

SEQ ID NO: 315164 - RNA, 24 nt, Artificial Sequence
  Synthetic
gagaagucaccuaaggccagcuag

SEQ ID NO: 315165 - RNA, 18 nt, Artificial Sequence
  Synthetic
aaacuguaucucagcuag

SEQ ID NO: 315166 - RNA, 19 nt, Artificial Sequence
  Synthetic
aaaacuguaucucagcuag

SEQ ID NO: 315167 - RNA, 20 nt, Artificial Sequence
  Synthetic
aaaaacuguaucucagcuag

SEQ ID NO: 315168 - RNA, 21 nt, Artificial Sequence
  Synthetic
aaaaaacuguaucucagcuag

SEQ ID NO: 315169 - RNA, 22 nt, Artificial Sequence
  Synthetic
gaaaaaacuguaucucagcuag

SEQ ID NO: 315170 - RNA, 23 nt, Artificial Sequence
  Synthetic
ggaaaaaacuguaucucagcuag

SEQ ID NO: 315171 - RNA, 24 nt, Artificial Sequence
  Synthetic
gggaaaaaacuguaucucagcuag

SEQ ID NO: 315172 - RNA, 18 nt, Artificial Sequence
  Synthetic
uguuaauacaugagcuag

SEQ ID NO: 315173 - RNA, 19 nt, Artificial Sequence
  Synthetic
auguuaauacaugagcuag

SEQ ID NO: 315174 - RNA, 20 nt, Artificial Sequence
  Synthetic
cauguuaauacaugagcuag

SEQ ID NO: 315175 - RNA, 21 nt, Artificial Sequence
  Synthetic
acauguuaauacaugagcuag

SEQ ID NO: 315176 - RNA, 22 nt, Artificial Sequence
  Synthetic
cacauguuaauacaugagcuag

SEQ ID NO: 315177 - RNA, 23 nt, Artificial Sequence
  Synthetic
ucacauguuaauacaugagcuag

SEQ ID NO: 315178 - RNA, 24 nt, Artificial Sequence
  Synthetic
gucacauguuaauacaugagcuag

SEQ ID NO: 315179 - RNA, 18 nt, Artificial Sequence
  Synthetic
ccuugguuuaauagcuag

SEQ ID NO: 315180 - RNA, 19 nt, Artificial Sequence
  Synthetic
accuugguuuaauagcuag

SEQ ID NO: 315181 - RNA, 20 nt, Artificial Sequence
  Synthetic
gaccuugguuuaauagcuag

SEQ ID NO: 315182 - RNA, 21 nt, Artificial Sequence
  Synthetic
ggaccuugguuuaauagcuag

SEQ ID NO: 315183 - RNA, 22 nt, Artificial Sequence
  Synthetic
uggaccuugguuuaauagcuag

SEQ ID NO: 315184 - RNA, 23 nt, Artificial Sequence
  Synthetic
auggaccuugguuuaauagcuag

SEQ ID NO: 315185 - RNA, 24 nt, Artificial Sequence
  Synthetic
uauggaccuugguuuaauagcuag

SEQ ID NO: 315186 - RNA, 18 nt, Artificial Sequence
  Synthetic
auacugauuuauagcuag

SEQ ID NO: 315187 - RNA, 19 nt, Artificial Sequence
  Synthetic
aauacugauuuauagcuag

SEQ ID NO: 315188 - RNA, 20 nt, Artificial Sequence
  Synthetic
aaauacugauuuauagcuag

SEQ ID NO: 315189 - RNA, 21 nt, Artificial Sequence
  Synthetic
aaaauacugauuuauagcuag

SEQ ID NO: 315190 - RNA, 22 nt, Artificial Sequence
  Synthetic
caaaauacugauuuauagcuag

SEQ ID NO: 315191 - RNA, 23 nt, Artificial Sequence
  Synthetic
gcaaaauacugauuuauagcuag

SEQ ID NO: 315192 - RNA, 24 nt, Artificial Sequence
  Synthetic
agcaaaauacugauuuauagcuag

SEQ ID NO: 315193 - RNA, 18 nt, Artificial Sequence
  Synthetic
agagacaaagcuagcuag

SEQ ID NO: 315194 - RNA, 19 nt, Artificial Sequence
  Synthetic
cagagacaaagcuagcuag

SEQ ID NO: 315195 - RNA, 20 nt, Artificial Sequence
  Synthetic
ccagagacaaagcuagcuag

SEQ ID NO: 315196 - RNA, 21 nt, Artificial Sequence
  Synthetic
uccagagacaaagcuagcuag

SEQ ID NO: 315197 - RNA, 22 nt, Artificial Sequence
  Synthetic
uuccagagacaaagcuagcuag

SEQ ID NO: 315198 - RNA, 23 nt, Artificial Sequence
  Synthetic
guuccagagacaaagcuagcuag

SEQ ID NO: 315199 - RNA, 24 nt, Artificial Sequence
  Synthetic
uguuccagagacaaagcuagcuag

SEQ ID NO: 315200 - RNA, 18 nt, Artificial Sequence
  Synthetic
aacuaggcagcuagcuag

SEQ ID NO: 315201 - RNA, 19 nt, Artificial Sequence
  Synthetic
uaacuaggcagcuagcuag

SEQ ID NO: 315202 - RNA, 20 nt, Artificial Sequence
  Synthetic
auaacuaggcagcuagcuag

SEQ ID NO: 315203 - RNA, 21 nt, Artificial Sequence
  Synthetic
gauaacuaggcagcuagcuag

SEQ ID NO: 315204 - RNA, 22 nt, Artificial Sequence
  Synthetic
ugauaacuaggcagcuagcuag

SEQ ID NO: 315205 - RNA, 23 nt, Artificial Sequence
  Synthetic
cugauaacuaggcagcuagcuag

SEQ ID NO: 315206 - RNA, 24 nt, Artificial Sequence
  Synthetic
acugauaacuaggcagcuagcuag

SEQ ID NO: 315207 - RNA, 18 nt, Artificial Sequence
  Synthetic
ugaaggacauaaggcuag

SEQ ID NO: 315208 - RNA, 19 nt, Artificial Sequence
  Synthetic
cugaaggacauaaggcuag

SEQ ID NO: 315209 - RNA, 20 nt, Artificial Sequence
  Synthetic
acugaaggacauaaggcuag

SEQ ID NO: 315210 - RNA, 21 nt, Artificial Sequence
  Synthetic
uacugaaggacauaaggcuag

SEQ ID NO: 315211 - RNA, 22 nt, Artificial Sequence
  Synthetic
uuacugaaggacauaaggcuag

SEQ ID NO: 315212 - RNA, 23 nt, Artificial Sequence
  Synthetic
uuuacugaaggacauaaggcuag

SEQ ID NO: 315213 - RNA, 24 nt, Artificial Sequence
  Synthetic
auuuacugaaggacauaaggcuag

SEQ ID NO: 315214 - RNA, 18 nt, Artificial Sequence
  Synthetic
cuucuuucuccaggcuag

SEQ ID NO: 315215 - RNA, 19 nt, Artificial Sequence
  Synthetic
ucuucuuucuccaggcuag

SEQ ID NO: 315216 - RNA, 20 nt, Artificial Sequence
  Synthetic
uucuucuuucuccaggcuag

SEQ ID NO: 315217 - RNA, 21 nt, Artificial Sequence
  Synthetic
auucuucuuucuccaggcuag

SEQ ID NO: 315218 - RNA, 22 nt, Artificial Sequence
  Synthetic
uauucuucuuucuccaggcuag

SEQ ID NO: 315219 - RNA, 23 nt, Artificial Sequence
  Synthetic
uuauucuucuuucuccaggcuag

SEQ ID NO: 315220 - RNA, 24 nt, Artificial Sequence
  Synthetic
uuuauucuucuuucuccaggcuag

SEQ ID NO: 315221 - RNA, 18 nt, Artificial Sequence
  Synthetic
guaucucaaaacggcuag

SEQ ID NO: 315222 - RNA, 19 nt, Artificial Sequence
  Synthetic
cguaucucaaaacggcuag

SEQ ID NO: 315223 - RNA, 20 nt, Artificial Sequence
  Synthetic
gcguaucucaaaacggcuag

SEQ ID NO: 315224 - RNA, 21 nt, Artificial Sequence
  Synthetic
ugcguaucucaaaacggcuag

SEQ ID NO: 315225 - RNA, 22 nt, Artificial Sequence
  Synthetic
uugcguaucucaaaacggcuag

SEQ ID NO: 315226 - RNA, 23 nt, Artificial Sequence
  Synthetic
auugcguaucucaaaacggcuag

SEQ ID NO: 315227 - RNA, 24 nt, Artificial Sequence
  Synthetic
uauugcguaucucaaaacggcuag

SEQ ID NO: 315228 - RNA, 18 nt, Artificial Sequence
  Synthetic
gcaacuacuaaaugcuag

SEQ ID NO: 315229 - RNA, 19 nt, Artificial Sequence
  Synthetic
ugcaacuacuaaaugcuag

SEQ ID NO: 315230 - RNA, 20 nt, Artificial Sequence
  Synthetic
augcaacuacuaaaugcuag

SEQ ID NO: 315231 - RNA, 21 nt, Artificial Sequence
  Synthetic
caugcaacuacuaaaugcuag

SEQ ID NO: 315232 - RNA, 22 nt, Artificial Sequence
  Synthetic
acaugcaacuacuaaaugcuag

SEQ ID NO: 315233 - RNA, 23 nt, Artificial Sequence
  Synthetic
cacaugcaacuacuaaaugcuag

SEQ ID NO: 315234 - RNA, 24 nt, Artificial Sequence
  Synthetic
gcacaugcaacuacuaaaugcuag

SEQ ID NO: 315235 - RNA, 18 nt, Artificial Sequence
  Synthetic
uuagugaaugaaugcuag

SEQ ID NO: 315236 - RNA, 19 nt, Artificial Sequence
  Synthetic
uuuagugaaugaaugcuag

SEQ ID NO: 315237 - RNA, 20 nt, Artificial Sequence
  Synthetic
uuuuagugaaugaaugcuag

SEQ ID NO: 315238 - RNA, 21 nt, Artificial Sequence
  Synthetic
cuuuuagugaaugaaugcuag

SEQ ID NO: 315239 - RNA, 22 nt, Artificial Sequence
  Synthetic
ccuuuuagugaaugaaugcuag

SEQ ID NO: 315240 - RNA, 23 nt, Artificial Sequence
  Synthetic
accuuuuagugaaugaaugcuag

SEQ ID NO: 315241 - RNA, 24 nt, Artificial Sequence
  Synthetic
gaccuuuuagugaaugaaugcuag

SEQ ID NO: 315242 - RNA, 18 nt, Artificial Sequence
  Synthetic
cuaaggcugugaugcuag

SEQ ID NO: 315243 - RNA, 19 nt, Artificial Sequence
  Synthetic
ccuaaggcugugaugcuag

SEQ ID NO: 315244 - RNA, 20 nt, Artificial Sequence
  Synthetic
uccuaaggcugugaugcuag

SEQ ID NO: 315245 - RNA, 21 nt, Artificial Sequence
  Synthetic
uuccuaaggcugugaugcuag

SEQ ID NO: 315246 - RNA, 22 nt, Artificial Sequence
  Synthetic
guuccuaaggcugugaugcuag

SEQ ID NO: 315247 - RNA, 23 nt, Artificial Sequence
  Synthetic
gguuccuaaggcugugaugcuag

SEQ ID NO: 315248 - RNA, 24 nt, Artificial Sequence
  Synthetic
agguuccuaaggcugugaugcuag

SEQ ID NO: 315249 - RNA, 18 nt, Artificial Sequence
  Synthetic
agcauggcauuaugcuag

SEQ ID NO: 315250 - RNA, 19 nt, Artificial Sequence
  Synthetic
aagcauggcauuaugcuag

SEQ ID NO: 315251 - RNA, 20 nt, Artificial Sequence
  Synthetic
aaagcauggcauuaugcuag

SEQ ID NO: 315252 - RNA, 21 nt, Artificial Sequence
  Synthetic
aaaagcauggcauuaugcuag

SEQ ID NO: 315253 - RNA, 22 nt, Artificial Sequence
  Synthetic
aaaaagcauggcauuaugcuag

SEQ ID NO: 315254 - RNA, 23 nt, Artificial Sequence
  Synthetic
aaaaaagcauggcauuaugcuag

SEQ ID NO: 315255 - RNA, 24 nt, Artificial Sequence
  Synthetic
gaaaaaagcauggcauuaugcuag

SEQ ID NO: 315256 - RNA, 18 nt, Artificial Sequence
  Synthetic
ucagacccugccugcuag

SEQ ID NO: 315257 - RNA, 19 nt, Artificial Sequence
  Synthetic
cucagacccugccugcuag

SEQ ID NO: 315258 - RNA, 20 nt, Artificial Sequence
  Synthetic
ucucagacccugccugcuag

SEQ ID NO: 315259 - RNA, 21 nt, Artificial Sequence
  Synthetic
aucucagacccugccugcuag

SEQ ID NO: 315260 - RNA, 22 nt, Artificial Sequence
  Synthetic
aaucucagacccugccugcuag

SEQ ID NO: 315261 - RNA, 23 nt, Artificial Sequence
  Synthetic
aaaucucagacccugccugcuag

SEQ ID NO: 315262 - RNA, 24 nt, Artificial Sequence
  Synthetic
gaaaucucagacccugccugcuag

SEQ ID NO: 315263 - RNA, 18 nt, Artificial Sequence
  Synthetic
uaccgauggaggugcuag

SEQ ID NO: 315264 - RNA, 19 nt, Artificial Sequence
  Synthetic
uuaccgauggaggugcuag

SEQ ID NO: 315265 - RNA, 20 nt, Artificial Sequence
  Synthetic
guuaccgauggaggugcuag

SEQ ID NO: 315266 - RNA, 21 nt, Artificial Sequence
  Synthetic
aguuaccgauggaggugcuag

SEQ ID NO: 315267 - RNA, 22 nt, Artificial Sequence
  Synthetic
aaguuaccgauggaggugcuag

SEQ ID NO: 315268 - RNA, 23 nt, Artificial Sequence
  Synthetic
gaaguuaccgauggaggugcuag

SEQ ID NO: 315269 - RNA, 24 nt, Artificial Sequence
  Synthetic
agaaguuaccgauggaggugcuag

SEQ ID NO: 315270 - RNA, 18 nt, Artificial Sequence
  Synthetic
guucucuuggauugcuag

SEQ ID NO: 315271 - RNA, 19 nt, Artificial Sequence
  Synthetic
uguucucuuggauugcuag

SEQ ID NO: 315272 - RNA, 20 nt, Artificial Sequence
  Synthetic
auguucucuuggauugcuag

SEQ ID NO: 315273 - RNA, 21 nt, Artificial Sequence
  Synthetic
gauguucucuuggauugcuag

SEQ ID NO: 315274 - RNA, 22 nt, Artificial Sequence
  Synthetic
ugauguucucuuggauugcuag

SEQ ID NO: 315275 - RNA, 23 nt, Artificial Sequence
  Synthetic
gugauguucucuuggauugcuag

SEQ ID NO: 315276 - RNA, 24 nt, Artificial Sequence
  Synthetic
ugugauguucucuuggauugcuag

SEQ ID NO: 315277 - RNA, 18 nt, Artificial Sequence
  Synthetic
agaugcguuuauugcuag

SEQ ID NO: 315278 - RNA, 19 nt, Artificial Sequence
  Synthetic
uagaugcguuuauugcuag

SEQ ID NO: 315279 - RNA, 20 nt, Artificial Sequence
  Synthetic
auagaugcguuuauugcuag

SEQ ID NO: 315280 - RNA, 21 nt, Artificial Sequence
  Synthetic
cauagaugcguuuauugcuag

SEQ ID NO: 315281 - RNA, 22 nt, Artificial Sequence
  Synthetic
acauagaugcguuuauugcuag

SEQ ID NO: 315282 - RNA, 23 nt, Artificial Sequence
  Synthetic
aacauagaugcguuuauugcuag

SEQ ID NO: 315283 - RNA, 24 nt, Artificial Sequence
  Synthetic
uaacauagaugcguuuauugcuag

SEQ ID NO: 315284 - RNA, 18 nt, Artificial Sequence
  Synthetic
aaguucacggguugcuag

SEQ ID NO: 315285 - RNA, 19 nt, Artificial Sequence
  Synthetic
uaaguucacggguugcuag

SEQ ID NO: 315286 - RNA, 20 nt, Artificial Sequence
  Synthetic
uuaaguucacggguugcuag

SEQ ID NO: 315287 - RNA, 21 nt, Artificial Sequence
  Synthetic
guuaaguucacggguugcuag

SEQ ID NO: 315288 - RNA, 22 nt, Artificial Sequence
  Synthetic
gguuaaguucacggguugcuag

SEQ ID NO: 315289 - RNA, 23 nt, Artificial Sequence
  Synthetic
agguuaaguucacggguugcuag

SEQ ID NO: 315290 - RNA, 24 nt, Artificial Sequence
  Synthetic
uagguuaaguucacggguugcuag

SEQ ID NO: 315291 - RNA, 18 nt, Artificial Sequence
  Synthetic
auaaacuagaaaaucuag

SEQ ID NO: 315292 - RNA, 19 nt, Artificial Sequence
  Synthetic
aauaaacuagaaaaucuag

SEQ ID NO: 315293 - RNA, 20 nt, Artificial Sequence
  Synthetic
aaauaaacuagaaaaucuag

SEQ ID NO: 315294 - RNA, 21 nt, Artificial Sequence
  Synthetic
caaauaaacuagaaaaucuag

SEQ ID NO: 315295 - RNA, 22 nt, Artificial Sequence
  Synthetic
acaaauaaacuagaaaaucuag

SEQ ID NO: 315296 - RNA, 23 nt, Artificial Sequence
  Synthetic
cacaaauaaacuagaaaaucuag

SEQ ID NO: 315297 - RNA, 24 nt, Artificial Sequence
  Synthetic
acacaaauaaacuagaaaaucuag

SEQ ID NO: 315298 - RNA, 18 nt, Artificial Sequence
  Synthetic
uuugaguuuaaaaucuag

SEQ ID NO: 315299 - RNA, 19 nt, Artificial Sequence
  Synthetic
uuuugaguuuaaaaucuag

SEQ ID NO: 315300 - RNA, 20 nt, Artificial Sequence
  Synthetic
cuuuugaguuuaaaaucuag

SEQ ID NO: 315301 - RNA, 21 nt, Artificial Sequence
  Synthetic
ucuuuugaguuuaaaaucuag

SEQ ID NO: 315302 - RNA, 22 nt, Artificial Sequence
  Synthetic
cucuuuugaguuuaaaaucuag

SEQ ID NO: 315303 - RNA, 23 nt, Artificial Sequence
  Synthetic
ucucuuuugaguuuaaaaucuag

SEQ ID NO: 315304 - RNA, 24 nt, Artificial Sequence
  Synthetic
uucucuuuugaguuuaaaaucuag

SEQ ID NO: 315305 - RNA, 18 nt, Artificial Sequence
  Synthetic
uuaaaacuccaaaucuag

SEQ ID NO: 315306 - RNA, 19 nt, Artificial Sequence
  Synthetic
auuaaaacuccaaaucuag

SEQ ID NO: 315307 - RNA, 20 nt, Artificial Sequence
  Synthetic
uauuaaaacuccaaaucuag

SEQ ID NO: 315308 - RNA, 21 nt, Artificial Sequence
  Synthetic
auauuaaaacuccaaaucuag

SEQ ID NO: 315309 - RNA, 22 nt, Artificial Sequence
  Synthetic
cauauuaaaacuccaaaucuag

SEQ ID NO: 315310 - RNA, 23 nt, Artificial Sequence
  Synthetic
ccauauuaaaacuccaaaucuag

SEQ ID NO: 315311 - RNA, 24 nt, Artificial Sequence
  Synthetic
uccauauuaaaacuccaaaucuag

SEQ ID NO: 315312 - RNA, 18 nt, Artificial Sequence
  Synthetic
acauaucuuuaaaucuag

SEQ ID NO: 315313 - RNA, 19 nt, Artificial Sequence
  Synthetic
aacauaucuuuaaaucuag

SEQ ID NO: 315314 - RNA, 20 nt, Artificial Sequence
  Synthetic
aaacauaucuuuaaaucuag

SEQ ID NO: 315315 - RNA, 21 nt, Artificial Sequence
  Synthetic
aaaacauaucuuuaaaucuag

SEQ ID NO: 315316 - RNA, 22 nt, Artificial Sequence
  Synthetic
uaaaacauaucuuuaaaucuag

SEQ ID NO: 315317 - RNA, 23 nt, Artificial Sequence
  Synthetic
auaaaacauaucuuuaaaucuag

SEQ ID NO: 315318 - RNA, 24 nt, Artificial Sequence
  Synthetic
aauaaaacauaucuuuaaaucuag

SEQ ID NO: 315319 - RNA, 18 nt, Artificial Sequence
  Synthetic
ccaacccuagcaaucuag

SEQ ID NO: 315320 - RNA, 19 nt, Artificial Sequence
  Synthetic
accaacccuagcaaucuag

SEQ ID NO: 315321 - RNA, 20 nt, Artificial Sequence
  Synthetic
gaccaacccuagcaaucuag

SEQ ID NO: 315322 - RNA, 21 nt, Artificial Sequence
  Synthetic
agaccaacccuagcaaucuag

SEQ ID NO: 315323 - RNA, 22 nt, Artificial Sequence
  Synthetic
aagaccaacccuagcaaucuag

SEQ ID NO: 315324 - RNA, 23 nt, Artificial Sequence
  Synthetic
uaagaccaacccuagcaaucuag

SEQ ID NO: 315325 - RNA, 24 nt, Artificial Sequence
  Synthetic
uuaagaccaacccuagcaaucuag

SEQ ID NO: 315326 - RNA, 18 nt, Artificial Sequence
  Synthetic
uuaaucauuagaaucuag

SEQ ID NO: 315327 - RNA, 19 nt, Artificial Sequence
  Synthetic
uuuaaucauuagaaucuag

SEQ ID NO: 315328 - RNA, 20 nt, Artificial Sequence
  Synthetic
auuuaaucauuagaaucuag

SEQ ID NO: 315329 - RNA, 21 nt, Artificial Sequence
  Synthetic
uauuuaaucauuagaaucuag

SEQ ID NO: 315330 - RNA, 22 nt, Artificial Sequence
  Synthetic
auauuuaaucauuagaaucuag

SEQ ID NO: 315331 - RNA, 23 nt, Artificial Sequence
  Synthetic
uauauuuaaucauuagaaucuag

SEQ ID NO: 315332 - RNA, 24 nt, Artificial Sequence
  Synthetic
uuauauuuaaucauuagaaucuag

SEQ ID NO: 315333 - RNA, 18 nt, Artificial Sequence
  Synthetic
uguuucagaauaaucuag

SEQ ID NO: 315334 - RNA, 19 nt, Artificial Sequence
  Synthetic
uuguuucagaauaaucuag

SEQ ID NO: 315335 - RNA, 20 nt, Artificial Sequence
  Synthetic
uuuguuucagaauaaucuag

SEQ ID NO: 315336 - RNA, 21 nt, Artificial Sequence
  Synthetic
guuuguuucagaauaaucuag

SEQ ID NO: 315337 - RNA, 22 nt, Artificial Sequence
  Synthetic
aguuuguuucagaauaaucuag

SEQ ID NO: 315338 - RNA, 23 nt, Artificial Sequence
  Synthetic
caguuuguuucagaauaaucuag

SEQ ID NO: 315339 - RNA, 24 nt, Artificial Sequence
  Synthetic
ucaguuuguuucagaauaaucuag

SEQ ID NO: 315340 - RNA, 18 nt, Artificial Sequence
  Synthetic
uuuugguuguacaucuag

SEQ ID NO: 315341 - RNA, 19 nt, Artificial Sequence
  Synthetic
uuuuugguuguacaucuag

SEQ ID NO: 315342 - RNA, 20 nt, Artificial Sequence
  Synthetic
auuuuugguuguacaucuag

SEQ ID NO: 315343 - RNA, 21 nt, Artificial Sequence
  Synthetic
cauuuuugguuguacaucuag

SEQ ID NO: 315344 - RNA, 22 nt, Artificial Sequence
  Synthetic
acauuuuugguuguacaucuag

SEQ ID NO: 315345 - RNA, 23 nt, Artificial Sequence
  Synthetic
gacauuuuugguuguacaucuag

SEQ ID NO: 315346 - RNA, 24 nt, Artificial Sequence
  Synthetic
agacauuuuugguuguacaucuag

SEQ ID NO: 315347 - RNA, 18 nt, Artificial Sequence
  Synthetic
guuuuucuaacacucuag

SEQ ID NO: 315348 - RNA, 19 nt, Artificial Sequence
  Synthetic
uguuuuucuaacacucuag

SEQ ID NO: 315349 - RNA, 20 nt, Artificial Sequence
  Synthetic
guguuuuucuaacacucuag

SEQ ID NO: 315350 - RNA, 21 nt, Artificial Sequence
  Synthetic
uguguuuuucuaacacucuag

SEQ ID NO: 315351 - RNA, 22 nt, Artificial Sequence
  Synthetic
auguguuuuucuaacacucuag

SEQ ID NO: 315352 - RNA, 23 nt, Artificial Sequence
  Synthetic
uauguguuuuucuaacacucuag

SEQ ID NO: 315353 - RNA, 24 nt, Artificial Sequence
  Synthetic
auauguguuuuucuaacacucuag

SEQ ID NO: 315354 - RNA, 18 nt, Artificial Sequence
  Synthetic
aguuugugugggcucuag

SEQ ID NO: 315355 - RNA, 19 nt, Artificial Sequence
  Synthetic
caguuugugugggcucuag

SEQ ID NO: 315356 - RNA, 20 nt, Artificial Sequence
  Synthetic
gcaguuugugugggcucuag

SEQ ID NO: 315357 - RNA, 21 nt, Artificial Sequence
  Synthetic
ugcaguuugugugggcucuag

SEQ ID NO: 315358 - RNA, 22 nt, Artificial Sequence
  Synthetic
uugcaguuugugugggcucuag

SEQ ID NO: 315359 - RNA, 23 nt, Artificial Sequence
  Synthetic
auugcaguuugugugggcucuag

SEQ ID NO: 315360 - RNA, 24 nt, Artificial Sequence
  Synthetic
cauugcaguuugugugggcucuag

SEQ ID NO: 315361 - RNA, 18 nt, Artificial Sequence
  Synthetic
aggaaaucauuucucuag

SEQ ID NO: 315362 - RNA, 19 nt, Artificial Sequence
  Synthetic
uaggaaaucauuucucuag

SEQ ID NO: 315363 - RNA, 20 nt, Artificial Sequence
  Synthetic
auaggaaaucauuucucuag

SEQ ID NO: 315364 - RNA, 21 nt, Artificial Sequence
  Synthetic
uauaggaaaucauuucucuag

SEQ ID NO: 315365 - RNA, 22 nt, Artificial Sequence
  Synthetic
uuauaggaaaucauuucucuag

SEQ ID NO: 315366 - RNA, 23 nt, Artificial Sequence
  Synthetic
auuauaggaaaucauuucucuag

SEQ ID NO: 315367 - RNA, 24 nt, Artificial Sequence
  Synthetic
cauuauaggaaaucauuucucuag

SEQ ID NO: 315368 - RNA, 18 nt, Artificial Sequence
  Synthetic
gagaucauauuagucuag

SEQ ID NO: 315369 - RNA, 19 nt, Artificial Sequence
  Synthetic
ggagaucauauuagucuag

SEQ ID NO: 315370 - RNA, 20 nt, Artificial Sequence
  Synthetic
uggagaucauauuagucuag

SEQ ID NO: 315371 - RNA, 21 nt, Artificial Sequence
  Synthetic
cuggagaucauauuagucuag

SEQ ID NO: 315372 - RNA, 22 nt, Artificial Sequence
  Synthetic
acuggagaucauauuagucuag

SEQ ID NO: 315373 - RNA, 23 nt, Artificial Sequence
  Synthetic
cacuggagaucauauuagucuag

SEQ ID NO: 315374 - RNA, 24 nt, Artificial Sequence
  Synthetic
ccacuggagaucauauuagucuag

SEQ ID NO: 315375 - RNA, 18 nt, Artificial Sequence
  Synthetic
ucccagugugcggucuag

SEQ ID NO: 315376 - RNA, 19 nt, Artificial Sequence
  Synthetic
aucccagugugcggucuag

SEQ ID NO: 315377 - RNA, 20 nt, Artificial Sequence
  Synthetic
caucccagugugcggucuag

SEQ ID NO: 315378 - RNA, 21 nt, Artificial Sequence
  Synthetic
gcaucccagugugcggucuag

SEQ ID NO: 315379 - RNA, 22 nt, Artificial Sequence
  Synthetic
agcaucccagugugcggucuag

SEQ ID NO: 315380 - RNA, 23 nt, Artificial Sequence
  Synthetic
aagcaucccagugugcggucuag

SEQ ID NO: 315381 - RNA, 24 nt, Artificial Sequence
  Synthetic
gaagcaucccagugugcggucuag

SEQ ID NO: 315382 - RNA, 18 nt, Artificial Sequence
  Synthetic
gagagguuuagggucuag

SEQ ID NO: 315383 - RNA, 19 nt, Artificial Sequence
  Synthetic
ugagagguuuagggucuag

SEQ ID NO: 315384 - RNA, 20 nt, Artificial Sequence
  Synthetic
augagagguuuagggucuag

SEQ ID NO: 315385 - RNA, 21 nt, Artificial Sequence
  Synthetic
gaugagagguuuagggucuag

SEQ ID NO: 315386 - RNA, 22 nt, Artificial Sequence
  Synthetic
ugaugagagguuuagggucuag

SEQ ID NO: 315387 - RNA, 23 nt, Artificial Sequence
  Synthetic
cugaugagagguuuagggucuag

SEQ ID NO: 315388 - RNA, 24 nt, Artificial Sequence
  Synthetic
gcugaugagagguuuagggucuag

SEQ ID NO: 315389 - RNA, 18 nt, Artificial Sequence
  Synthetic
ugaaaaucacuggucuag

SEQ ID NO: 315390 - RNA, 19 nt, Artificial Sequence
  Synthetic
uugaaaaucacuggucuag

SEQ ID NO: 315391 - RNA, 20 nt, Artificial Sequence
  Synthetic
guugaaaaucacuggucuag

SEQ ID NO: 315392 - RNA, 21 nt, Artificial Sequence
  Synthetic
aguugaaaaucacuggucuag

SEQ ID NO: 315393 - RNA, 22 nt, Artificial Sequence
  Synthetic
uaguugaaaaucacuggucuag

SEQ ID NO: 315394 - RNA, 23 nt, Artificial Sequence
  Synthetic
cuaguugaaaaucacuggucuag

SEQ ID NO: 315395 - RNA, 24 nt, Artificial Sequence
  Synthetic
ccuaguugaaaaucacuggucuag

SEQ ID NO: 315396 - RNA, 18 nt, Artificial Sequence
  Synthetic
auauaccagaaugucuag

SEQ ID NO: 315397 - RNA, 19 nt, Artificial Sequence
  Synthetic
aauauaccagaaugucuag

SEQ ID NO: 315398 - RNA, 20 nt, Artificial Sequence
  Synthetic
gaauauaccagaaugucuag

SEQ ID NO: 315399 - RNA, 21 nt, Artificial Sequence
  Synthetic
agaauauaccagaaugucuag

SEQ ID NO: 315400 - RNA, 22 nt, Artificial Sequence
  Synthetic
gagaauauaccagaaugucuag

SEQ ID NO: 315401 - RNA, 23 nt, Artificial Sequence
  Synthetic
ggagaauauaccagaaugucuag

SEQ ID NO: 315402 - RNA, 24 nt, Artificial Sequence
  Synthetic
gggagaauauaccagaaugucuag

SEQ ID NO: 315403 - RNA, 18 nt, Artificial Sequence
  Synthetic
uuggaguuugcauucuag

SEQ ID NO: 315404 - RNA, 19 nt, Artificial Sequence
  Synthetic
auuggaguuugcauucuag

SEQ ID NO: 315405 - RNA, 20 nt, Artificial Sequence
  Synthetic
cauuggaguuugcauucuag

SEQ ID NO: 315406 - RNA, 21 nt, Artificial Sequence
  Synthetic
ucauuggaguuugcauucuag

SEQ ID NO: 315407 - RNA, 22 nt, Artificial Sequence
  Synthetic
cucauuggaguuugcauucuag

SEQ ID NO: 315408 - RNA, 23 nt, Artificial Sequence
  Synthetic
ccucauuggaguuugcauucuag

SEQ ID NO: 315409 - RNA, 24 nt, Artificial Sequence
  Synthetic
gccucauuggaguuugcauucuag

SEQ ID NO: 315410 - RNA, 18 nt, Artificial Sequence
  Synthetic
aaaccauauucauucuag

SEQ ID NO: 315411 - RNA, 19 nt, Artificial Sequence
  Synthetic
uaaaccauauucauucuag

SEQ ID NO: 315412 - RNA, 20 nt, Artificial Sequence
  Synthetic
uuaaaccauauucauucuag

SEQ ID NO: 315413 - RNA, 21 nt, Artificial Sequence
  Synthetic
guuaaaccauauucauucuag

SEQ ID NO: 315414 - RNA, 22 nt, Artificial Sequence
  Synthetic
aguuaaaccauauucauucuag

SEQ ID NO: 315415 - RNA, 23 nt, Artificial Sequence
  Synthetic
aaguuaaaccauauucauucuag

SEQ ID NO: 315416 - RNA, 24 nt, Artificial Sequence
  Synthetic
caaguuaaaccauauucauucuag

SEQ ID NO: 315417 - RNA, 18 nt, Artificial Sequence
  Synthetic
aaaaugaggagauucuag

SEQ ID NO: 315418 - RNA, 19 nt, Artificial Sequence
  Synthetic
uaaaaugaggagauucuag

SEQ ID NO: 315419 - RNA, 20 nt, Artificial Sequence
  Synthetic
auaaaaugaggagauucuag

SEQ ID NO: 315420 - RNA, 21 nt, Artificial Sequence
  Synthetic
cauaaaaugaggagauucuag

SEQ ID NO: 315421 - RNA, 22 nt, Artificial Sequence
  Synthetic
gcauaaaaugaggagauucuag

SEQ ID NO: 315422 - RNA, 23 nt, Artificial Sequence
  Synthetic
ugcauaaaaugaggagauucuag

SEQ ID NO: 315423 - RNA, 24 nt, Artificial Sequence
  Synthetic
augcauaaaaugaggagauucuag

SEQ ID NO: 315424 - RNA, 18 nt, Artificial Sequence
  Synthetic
ucuucuggaguauucuag

SEQ ID NO: 315425 - RNA, 19 nt, Artificial Sequence
  Synthetic
uucuucuggaguauucuag

SEQ ID NO: 315426 - RNA, 20 nt, Artificial Sequence
  Synthetic
uuucuucuggaguauucuag

SEQ ID NO: 315427 - RNA, 21 nt, Artificial Sequence
  Synthetic
uuuucuucuggaguauucuag

SEQ ID NO: 315428 - RNA, 22 nt, Artificial Sequence
  Synthetic
cuuuucuucuggaguauucuag

SEQ ID NO: 315429 - RNA, 23 nt, Artificial Sequence
  Synthetic
ccuuuucuucuggaguauucuag

SEQ ID NO: 315430 - RNA, 24 nt, Artificial Sequence
  Synthetic
uccuuuucuucuggaguauucuag

SEQ ID NO: 315431 - RNA, 18 nt, Artificial Sequence
  Synthetic
uuuuuccuuuuauucuag

SEQ ID NO: 315432 - RNA, 19 nt, Artificial Sequence
  Synthetic
auuuuuccuuuuauucuag

SEQ ID NO: 315433 - RNA, 20 nt, Artificial Sequence
  Synthetic
uauuuuuccuuuuauucuag

SEQ ID NO: 315434 - RNA, 21 nt, Artificial Sequence
  Synthetic
uuauuuuuccuuuuauucuag

SEQ ID NO: 315435 - RNA, 22 nt, Artificial Sequence
  Synthetic
uuuauuuuuccuuuuauucuag

SEQ ID NO: 315436 - RNA, 23 nt, Artificial Sequence
  Synthetic
auuuauuuuuccuuuuauucuag

SEQ ID NO: 315437 - RNA, 24 nt, Artificial Sequence
  Synthetic
uauuuauuuuuccuuuuauucuag

SEQ ID NO: 315438 - RNA, 18 nt, Artificial Sequence
  Synthetic
aaacgugucugcuucuag

SEQ ID NO: 315439 - RNA, 19 nt, Artificial Sequence
  Synthetic
uaaacgugucugcuucuag

SEQ ID NO: 315440 - RNA, 20 nt, Artificial Sequence
  Synthetic
uuaaacgugucugcuucuag

SEQ ID NO: 315441 - RNA, 21 nt, Artificial Sequence
  Synthetic
cuuaaacgugucugcuucuag

SEQ ID NO: 315442 - RNA, 22 nt, Artificial Sequence
  Synthetic
ccuuaaacgugucugcuucuag

SEQ ID NO: 315443 - RNA, 23 nt, Artificial Sequence
  Synthetic
uccuuaaacgugucugcuucuag

SEQ ID NO: 315444 - RNA, 24 nt, Artificial Sequence
  Synthetic
uuccuuaaacgugucugcuucuag

SEQ ID NO: 315445 - RNA, 18 nt, Artificial Sequence
  Synthetic
cuggaugaagucuucuag

SEQ ID NO: 315446 - RNA, 19 nt, Artificial Sequence
  Synthetic
acuggaugaagucuucuag

SEQ ID NO: 315447 - RNA, 20 nt, Artificial Sequence
  Synthetic
gacuggaugaagucuucuag

SEQ ID NO: 315448 - RNA, 21 nt, Artificial Sequence
  Synthetic
ggacuggaugaagucuucuag

SEQ ID NO: 315449 - RNA, 22 nt, Artificial Sequence
  Synthetic
gggacuggaugaagucuucuag

SEQ ID NO: 315450 - RNA, 23 nt, Artificial Sequence
  Synthetic
ugggacuggaugaagucuucuag

SEQ ID NO: 315451 - RNA, 24 nt, Artificial Sequence
  Synthetic
augggacuggaugaagucuucuag

SEQ ID NO: 315452 - RNA, 18 nt, Artificial Sequence
  Synthetic
cccggauuacaguucuag

SEQ ID NO: 315453 - RNA, 19 nt, Artificial Sequence
  Synthetic
ccccggauuacaguucuag

SEQ ID NO: 315454 - RNA, 20 nt, Artificial Sequence
  Synthetic
cccccggauuacaguucuag

SEQ ID NO: 315455 - RNA, 21 nt, Artificial Sequence
  Synthetic
ucccccggauuacaguucuag

SEQ ID NO: 315456 - RNA, 22 nt, Artificial Sequence
  Synthetic
uucccccggauuacaguucuag

SEQ ID NO: 315457 - RNA, 23 nt, Artificial Sequence
  Synthetic
guucccccggauuacaguucuag

SEQ ID NO: 315458 - RNA, 24 nt, Artificial Sequence
  Synthetic
gguucccccggauuacaguucuag

SEQ ID NO: 315459 - RNA, 18 nt, Artificial Sequence
  Synthetic
aucuggcauaauuucuag

SEQ ID NO: 315460 - RNA, 19 nt, Artificial Sequence
  Synthetic
aaucuggcauaauuucuag

SEQ ID NO: 315461 - RNA, 20 nt, Artificial Sequence
  Synthetic
uaaucuggcauaauuucuag

SEQ ID NO: 315462 - RNA, 21 nt, Artificial Sequence
  Synthetic
cuaaucuggcauaauuucuag

SEQ ID NO: 315463 - RNA, 22 nt, Artificial Sequence
  Synthetic
gcuaaucuggcauaauuucuag

SEQ ID NO: 315464 - RNA, 23 nt, Artificial Sequence
  Synthetic
ugcuaaucuggcauaauuucuag

SEQ ID NO: 315465 - RNA, 24 nt, Artificial Sequence
  Synthetic
augcuaaucuggcauaauuucuag

SEQ ID NO: 315466 - RNA, 18 nt, Artificial Sequence
  Synthetic
uuuccuugcuauuucuag

SEQ ID NO: 315467 - RNA, 19 nt, Artificial Sequence
  Synthetic
uuuuccuugcuauuucuag

SEQ ID NO: 315468 - RNA, 20 nt, Artificial Sequence
  Synthetic
uuuuuccuugcuauuucuag

SEQ ID NO: 315469 - RNA, 21 nt, Artificial Sequence
  Synthetic
guuuuuccuugcuauuucuag

SEQ ID NO: 315470 - RNA, 22 nt, Artificial Sequence
  Synthetic
aguuuuuccuugcuauuucuag

SEQ ID NO: 315471 - RNA, 23 nt, Artificial Sequence
  Synthetic
aaguuuuuccuugcuauuucuag

SEQ ID NO: 315472 - RNA, 24 nt, Artificial Sequence
  Synthetic
gaaguuuuuccuugcuauuucuag

SEQ ID NO: 315473 - RNA, 18 nt, Artificial Sequence
  Synthetic
caugauacguauuucuag

SEQ ID NO: 315474 - RNA, 19 nt, Artificial Sequence
  Synthetic
acaugauacguauuucuag

SEQ ID NO: 315475 - RNA, 20 nt, Artificial Sequence
  Synthetic
gacaugauacguauuucuag

SEQ ID NO: 315476 - RNA, 21 nt, Artificial Sequence
  Synthetic
agacaugauacguauuucuag

SEQ ID NO: 315477 - RNA, 22 nt, Artificial Sequence
  Synthetic
aagacaugauacguauuucuag

SEQ ID NO: 315478 - RNA, 23 nt, Artificial Sequence
  Synthetic
uaagacaugauacguauuucuag

SEQ ID NO: 315479 - RNA, 24 nt, Artificial Sequence
  Synthetic
cuaagacaugauacguauuucuag

SEQ ID NO: 315480 - RNA, 18 nt, Artificial Sequence
  Synthetic
gucuucacauguuucuag

SEQ ID NO: 315481 - RNA, 19 nt, Artificial Sequence
  Synthetic
ggucuucacauguuucuag

SEQ ID NO: 315482 - RNA, 20 nt, Artificial Sequence
  Synthetic
uggucuucacauguuucuag

SEQ ID NO: 315483 - RNA, 21 nt, Artificial Sequence
  Synthetic
uuggucuucacauguuucuag

SEQ ID NO: 315484 - RNA, 22 nt, Artificial Sequence
  Synthetic
uuuggucuucacauguuucuag

SEQ ID NO: 315485 - RNA, 23 nt, Artificial Sequence
  Synthetic
uuuuggucuucacauguuucuag

SEQ ID NO: 315486 - RNA, 24 nt, Artificial Sequence
  Synthetic
uuuuuggucuucacauguuucuag

SEQ ID NO: 315487 - RNA, 18 nt, Artificial Sequence
  Synthetic
auuagucaaaaaaaguag

SEQ ID NO: 315488 - RNA, 19 nt, Artificial Sequence
  Synthetic
uauuagucaaaaaaaguag

SEQ ID NO: 315489 - RNA, 20 nt, Artificial Sequence
  Synthetic
uuauuagucaaaaaaaguag

SEQ ID NO: 315490 - RNA, 21 nt, Artificial Sequence
  Synthetic
uuuauuagucaaaaaaaguag

SEQ ID NO: 315491 - RNA, 22 nt, Artificial Sequence
  Synthetic
cuuuauuagucaaaaaaaguag

SEQ ID NO: 315492 - RNA, 23 nt, Artificial Sequence
  Synthetic
acuuuauuagucaaaaaaaguag

SEQ ID NO: 315493 - RNA, 24 nt, Artificial Sequence
  Synthetic
gacuuuauuagucaaaaaaaguag

SEQ ID NO: 315494 - RNA, 18 nt, Artificial Sequence
  Synthetic
aaagaauucaaaaaguag

SEQ ID NO: 315495 - RNA, 19 nt, Artificial Sequence
  Synthetic
aaaagaauucaaaaaguag

SEQ ID NO: 315496 - RNA, 20 nt, Artificial Sequence
  Synthetic
gaaaagaauucaaaaaguag

SEQ ID NO: 315497 - RNA, 21 nt, Artificial Sequence
  Synthetic
agaaaagaauucaaaaaguag

SEQ ID NO: 315498 - RNA, 22 nt, Artificial Sequence
  Synthetic
gagaaaagaauucaaaaaguag

SEQ ID NO: 315499 - RNA, 23 nt, Artificial Sequence
  Synthetic
agagaaaagaauucaaaaaguag

SEQ ID NO: 315500 - RNA, 24 nt, Artificial Sequence
  Synthetic
cagagaaaagaauucaaaaaguag

SEQ ID NO: 315501 - RNA, 18 nt, Artificial Sequence
  Synthetic
auucaccaagaaaaguag

SEQ ID NO: 315502 - RNA, 19 nt, Artificial Sequence
  Synthetic
uauucaccaagaaaaguag

SEQ ID NO: 315503 - RNA, 20 nt, Artificial Sequence
  Synthetic
auauucaccaagaaaaguag

SEQ ID NO: 315504 - RNA, 21 nt, Artificial Sequence
  Synthetic
aauauucaccaagaaaaguag

SEQ ID NO: 315505 - RNA, 22 nt, Artificial Sequence
  Synthetic
caauauucaccaagaaaaguag

SEQ ID NO: 315506 - RNA, 23 nt, Artificial Sequence
  Synthetic
ucaauauucaccaagaaaaguag

SEQ ID NO: 315507 - RNA, 24 nt, Artificial Sequence
  Synthetic
cucaauauucaccaagaaaaguag

SEQ ID NO: 315508 - RNA, 18 nt, Artificial Sequence
  Synthetic
guuaagaucucaaaguag

SEQ ID NO: 315509 - RNA, 19 nt, Artificial Sequence
  Synthetic
uguuaagaucucaaaguag

SEQ ID NO: 315510 - RNA, 20 nt, Artificial Sequence
  Synthetic
uuguuaagaucucaaaguag

SEQ ID NO: 315511 - RNA, 21 nt, Artificial Sequence
  Synthetic
cuuguuaagaucucaaaguag

SEQ ID NO: 315512 - RNA, 22 nt, Artificial Sequence
  Synthetic
ucuuguuaagaucucaaaguag

SEQ ID NO: 315513 - RNA, 23 nt, Artificial Sequence
  Synthetic
aucuuguuaagaucucaaaguag

SEQ ID NO: 315514 - RNA, 24 nt, Artificial Sequence
  Synthetic
gaucuuguuaagaucucaaaguag

SEQ ID NO: 315515 - RNA, 18 nt, Artificial Sequence
  Synthetic
accuaggcaaacaaguag

SEQ ID NO: 315516 - RNA, 19 nt, Artificial Sequence
  Synthetic
uaccuaggcaaacaaguag

SEQ ID NO: 315517 - RNA, 20 nt, Artificial Sequence
  Synthetic
guaccuaggcaaacaaguag

SEQ ID NO: 315518 - RNA, 21 nt, Artificial Sequence
  Synthetic
uguaccuaggcaaacaaguag

SEQ ID NO: 315519 - RNA, 22 nt, Artificial Sequence
  Synthetic
guguaccuaggcaaacaaguag

SEQ ID NO: 315520 - RNA, 23 nt, Artificial Sequence
  Synthetic
gguguaccuaggcaaacaaguag

SEQ ID NO: 315521 - RNA, 24 nt, Artificial Sequence
  Synthetic
agguguaccuaggcaaacaaguag

SEQ ID NO: 315522 - RNA, 18 nt, Artificial Sequence
  Synthetic
uugcuauaucacaaguag

SEQ ID NO: 315523 - RNA, 19 nt, Artificial Sequence
  Synthetic
uuugcuauaucacaaguag

SEQ ID NO: 315524 - RNA, 20 nt, Artificial Sequence
  Synthetic
auuugcuauaucacaaguag

SEQ ID NO: 315525 - RNA, 21 nt, Artificial Sequence
  Synthetic
aauuugcuauaucacaaguag

SEQ ID NO: 315526 - RNA, 22 nt, Artificial Sequence
  Synthetic
gaauuugcuauaucacaaguag

SEQ ID NO: 315527 - RNA, 23 nt, Artificial Sequence
  Synthetic
ugaauuugcuauaucacaaguag

SEQ ID NO: 315528 - RNA, 24 nt, Artificial Sequence
  Synthetic
gugaauuugcuauaucacaaguag

SEQ ID NO: 315529 - RNA, 18 nt, Artificial Sequence
  Synthetic
ucucagcaucccaaguag

SEQ ID NO: 315530 - RNA, 19 nt, Artificial Sequence
  Synthetic
cucucagcaucccaaguag

SEQ ID NO: 315531 - RNA, 20 nt, Artificial Sequence
  Synthetic
ucucucagcaucccaaguag

SEQ ID NO: 315532 - RNA, 21 nt, Artificial Sequence
  Synthetic
gucucucagcaucccaaguag

SEQ ID NO: 315533 - RNA, 22 nt, Artificial Sequence
  Synthetic
agucucucagcaucccaaguag

SEQ ID NO: 315534 - RNA, 23 nt, Artificial Sequence
  Synthetic
gagucucucagcaucccaaguag

SEQ ID NO: 315535 - RNA, 24 nt, Artificial Sequence
  Synthetic
ugagucucucagcaucccaaguag

SEQ ID NO: 315536 - RNA, 18 nt, Artificial Sequence
  Synthetic
ccacagccucccaaguag

SEQ ID NO: 315537 - RNA, 19 nt, Artificial Sequence
  Synthetic
gccacagccucccaaguag

SEQ ID NO: 315538 - RNA, 20 nt, Artificial Sequence
  Synthetic
ugccacagccucccaaguag

SEQ ID NO: 315539 - RNA, 21 nt, Artificial Sequence
  Synthetic
augccacagccucccaaguag

SEQ ID NO: 315540 - RNA, 22 nt, Artificial Sequence
  Synthetic
caugccacagccucccaaguag

SEQ ID NO: 315541 - RNA, 23 nt, Artificial Sequence
  Synthetic
ucaugccacagccucccaaguag

SEQ ID NO: 315542 - RNA, 24 nt, Artificial Sequence
  Synthetic
cucaugccacagccucccaaguag

SEQ ID NO: 315543 - RNA, 18 nt, Artificial Sequence
  Synthetic
ccucagccucccaaguag

SEQ ID NO: 315544 - RNA, 19 nt, Artificial Sequence
  Synthetic
accucagccucccaaguag

SEQ ID NO: 315545 - RNA, 20 nt, Artificial Sequence
  Synthetic
aaccucagccucccaaguag

SEQ ID NO: 315546 - RNA, 21 nt, Artificial Sequence
  Synthetic
caaccucagccucccaaguag

SEQ ID NO: 315547 - RNA, 22 nt, Artificial Sequence
  Synthetic
ccaaccucagccucccaaguag

SEQ ID NO: 315548 - RNA, 23 nt, Artificial Sequence
  Synthetic
cccaaccucagccucccaaguag

SEQ ID NO: 315549 - RNA, 24 nt, Artificial Sequence
  Synthetic
ccccaaccucagccucccaaguag

SEQ ID NO: 315550 - RNA, 18 nt, Artificial Sequence
  Synthetic
ccuuagccucccaaguag

SEQ ID NO: 315551 - RNA, 19 nt, Artificial Sequence
  Synthetic
accuuagccucccaaguag

SEQ ID NO: 315552 - RNA, 20 nt, Artificial Sequence
  Synthetic
uaccuuagccucccaaguag

SEQ ID NO: 315553 - RNA, 21 nt, Artificial Sequence
  Synthetic
cuaccuuagccucccaaguag

SEQ ID NO: 315554 - RNA, 22 nt, Artificial Sequence
  Synthetic
ccuaccuuagccucccaaguag

SEQ ID NO: 315555 - RNA, 23 nt, Artificial Sequence
  Synthetic
uccuaccuuagccucccaaguag

SEQ ID NO: 315556 - RNA, 24 nt, Artificial Sequence
  Synthetic
cuccuaccuuagccucccaaguag

SEQ ID NO: 315557 - RNA, 18 nt, Artificial Sequence
  Synthetic
ccucagccuuccaaguag

SEQ ID NO: 315558 - RNA, 19 nt, Artificial Sequence
  Synthetic
gccucagccuuccaaguag

SEQ ID NO: 315559 - RNA, 20 nt, Artificial Sequence
  Synthetic
ugccucagccuuccaaguag

SEQ ID NO: 315560 - RNA, 21 nt, Artificial Sequence
  Synthetic
cugccucagccuuccaaguag

SEQ ID NO: 315561 - RNA, 22 nt, Artificial Sequence
  Synthetic
ccugccucagccuuccaaguag

SEQ ID NO: 315562 - RNA, 23 nt, Artificial Sequence
  Synthetic
uccugccucagccuuccaaguag

SEQ ID NO: 315563 - RNA, 24 nt, Artificial Sequence
  Synthetic
cuccugccucagccuuccaaguag

SEQ ID NO: 315564 - RNA, 18 nt, Artificial Sequence
  Synthetic
ggaagauauugcaaguag

SEQ ID NO: 315565 - RNA, 19 nt, Artificial Sequence
  Synthetic
aggaagauauugcaaguag

SEQ ID NO: 315566 - RNA, 20 nt, Artificial Sequence
  Synthetic
aaggaagauauugcaaguag

SEQ ID NO: 315567 - RNA, 21 nt, Artificial Sequence
  Synthetic
aaaggaagauauugcaaguag

SEQ ID NO: 315568 - RNA, 22 nt, Artificial Sequence
  Synthetic
uaaaggaagauauugcaaguag

SEQ ID NO: 315569 - RNA, 23 nt, Artificial Sequence
  Synthetic
cuaaaggaagauauugcaaguag

SEQ ID NO: 315570 - RNA, 24 nt, Artificial Sequence
  Synthetic
acuaaaggaagauauugcaaguag

SEQ ID NO: 315571 - RNA, 18 nt, Artificial Sequence
  Synthetic
aaagaaugggggaaguag

SEQ ID NO: 315572 - RNA, 19 nt, Artificial Sequence
  Synthetic
caaagaaugggggaaguag

SEQ ID NO: 315573 - RNA, 20 nt, Artificial Sequence
  Synthetic
ccaaagaaugggggaaguag

SEQ ID NO: 315574 - RNA, 21 nt, Artificial Sequence
  Synthetic
accaaagaaugggggaaguag

SEQ ID NO: 315575 - RNA, 22 nt, Artificial Sequence
  Synthetic
caccaaagaaugggggaaguag

SEQ ID NO: 315576 - RNA, 23 nt, Artificial Sequence
  Synthetic
ucaccaaagaaugggggaaguag

SEQ ID NO: 315577 - RNA, 24 nt, Artificial Sequence
  Synthetic
gucaccaaagaaugggggaaguag

SEQ ID NO: 315578 - RNA, 18 nt, Artificial Sequence
  Synthetic
aaugccuuguggaaguag

SEQ ID NO: 315579 - RNA, 19 nt, Artificial Sequence
  Synthetic
aaaugccuuguggaaguag

SEQ ID NO: 315580 - RNA, 20 nt, Artificial Sequence
  Synthetic
uaaaugccuuguggaaguag

SEQ ID NO: 315581 - RNA, 21 nt, Artificial Sequence
  Synthetic
uuaaaugccuuguggaaguag

SEQ ID NO: 315582 - RNA, 22 nt, Artificial Sequence
  Synthetic
uuuaaaugccuuguggaaguag

SEQ ID NO: 315583 - RNA, 23 nt, Artificial Sequence
  Synthetic
guuuaaaugccuuguggaaguag

SEQ ID NO: 315584 - RNA, 24 nt, Artificial Sequence
  Synthetic
uguuuaaaugccuuguggaaguag

SEQ ID NO: 315585 - RNA, 18 nt, Artificial Sequence
  Synthetic
augacguaacugaaguag

SEQ ID NO: 315586 - RNA, 19 nt, Artificial Sequence
  Synthetic
aaugacguaacugaaguag

SEQ ID NO: 315587 - RNA, 20 nt, Artificial Sequence
  Synthetic
aaaugacguaacugaaguag

SEQ ID NO: 315588 - RNA, 21 nt, Artificial Sequence
  Synthetic
gaaaugacguaacugaaguag

SEQ ID NO: 315589 - RNA, 22 nt, Artificial Sequence
  Synthetic
agaaaugacguaacugaaguag

SEQ ID NO: 315590 - RNA, 23 nt, Artificial Sequence
  Synthetic
uagaaaugacguaacugaaguag

SEQ ID NO: 315591 - RNA, 24 nt, Artificial Sequence
  Synthetic
auagaaaugacguaacugaaguag

SEQ ID NO: 315592 - RNA, 18 nt, Artificial Sequence
  Synthetic
ccuucagugacuaaguag

SEQ ID NO: 315593 - RNA, 19 nt, Artificial Sequence
  Synthetic
uccuucagugacuaaguag

SEQ ID NO: 315594 - RNA, 20 nt, Artificial Sequence
  Synthetic
cuccuucagugacuaaguag

SEQ ID NO: 315595 - RNA, 21 nt, Artificial Sequence
  Synthetic
ucuccuucagugacuaaguag

SEQ ID NO: 315596 - RNA, 22 nt, Artificial Sequence
  Synthetic
uucuccuucagugacuaaguag

SEQ ID NO: 315597 - RNA, 23 nt, Artificial Sequence
  Synthetic
uuucuccuucagugacuaaguag

SEQ ID NO: 315598 - RNA, 24 nt, Artificial Sequence
  Synthetic
guuucuccuucagugacuaaguag

SEQ ID NO: 315599 - RNA, 18 nt, Artificial Sequence
  Synthetic
ccucagccuccuaaguag

SEQ ID NO: 315600 - RNA, 19 nt, Artificial Sequence
  Synthetic
accucagccuccuaaguag

SEQ ID NO: 315601 - RNA, 20 nt, Artificial Sequence
  Synthetic
caccucagccuccuaaguag

SEQ ID NO: 315602 - RNA, 21 nt, Artificial Sequence
  Synthetic
ccaccucagccuccuaaguag

SEQ ID NO: 315603 - RNA, 22 nt, Artificial Sequence
  Synthetic
cccaccucagccuccuaaguag

SEQ ID NO: 315604 - RNA, 23 nt, Artificial Sequence
  Synthetic
ucccaccucagccuccuaaguag

SEQ ID NO: 315605 - RNA, 24 nt, Artificial Sequence
  Synthetic
cucccaccucagccuccuaaguag

SEQ ID NO: 315606 - RNA, 18 nt, Artificial Sequence
  Synthetic
caaauucccaguaaguag

SEQ ID NO: 315607 - RNA, 19 nt, Artificial Sequence
  Synthetic
ucaaauucccaguaaguag

SEQ ID NO: 315608 - RNA, 20 nt, Artificial Sequence
  Synthetic
gucaaauucccaguaaguag

SEQ ID NO: 315609 - RNA, 21 nt, Artificial Sequence
  Synthetic
ugucaaauucccaguaaguag

SEQ ID NO: 315610 - RNA, 22 nt, Artificial Sequence
  Synthetic
augucaaauucccaguaaguag

SEQ ID NO: 315611 - RNA, 23 nt, Artificial Sequence
  Synthetic
gaugucaaauucccaguaaguag

SEQ ID NO: 315612 - RNA, 24 nt, Artificial Sequence
  Synthetic
agaugucaaauucccaguaaguag

SEQ ID NO: 315613 - RNA, 18 nt, Artificial Sequence
  Synthetic
acccuuaggauuaaguag

SEQ ID NO: 315614 - RNA, 19 nt, Artificial Sequence
  Synthetic
uacccuuaggauuaaguag

SEQ ID NO: 315615 - RNA, 20 nt, Artificial Sequence
  Synthetic
uuacccuuaggauuaaguag

SEQ ID NO: 315616 - RNA, 21 nt, Artificial Sequence
  Synthetic
guuacccuuaggauuaaguag

SEQ ID NO: 315617 - RNA, 22 nt, Artificial Sequence
  Synthetic
aguuacccuuaggauuaaguag

SEQ ID NO: 315618 - RNA, 23 nt, Artificial Sequence
  Synthetic
gaguuacccuuaggauuaaguag

SEQ ID NO: 315619 - RNA, 24 nt, Artificial Sequence
  Synthetic
agaguuacccuuaggauuaaguag

SEQ ID NO: 315620 - RNA, 18 nt, Artificial Sequence
  Synthetic
aauuuagucguuaaguag

SEQ ID NO: 315621 - RNA, 19 nt, Artificial Sequence
  Synthetic
caauuuagucguuaaguag

SEQ ID NO: 315622 - RNA, 20 nt, Artificial Sequence
  Synthetic
acaauuuagucguuaaguag

SEQ ID NO: 315623 - RNA, 21 nt, Artificial Sequence
  Synthetic
aacaauuuagucguuaaguag

SEQ ID NO: 315624 - RNA, 22 nt, Artificial Sequence
  Synthetic
gaacaauuuagucguuaaguag

SEQ ID NO: 315625 - RNA, 23 nt, Artificial Sequence
  Synthetic
ggaacaauuuagucguuaaguag

SEQ ID NO: 315626 - RNA, 24 nt, Artificial Sequence
  Synthetic
uggaacaauuuagucguuaaguag

SEQ ID NO: 315627 - RNA, 18 nt, Artificial Sequence
  Synthetic
ucguuugacuuuaaguag

SEQ ID NO: 315628 - RNA, 19 nt, Artificial Sequence
  Synthetic
uucguuugacuuuaaguag

SEQ ID NO: 315629 - RNA, 20 nt, Artificial Sequence
  Synthetic
uuucguuugacuuuaaguag

SEQ ID NO: 315630 - RNA, 21 nt, Artificial Sequence
  Synthetic
cuuucguuugacuuuaaguag

SEQ ID NO: 315631 - RNA, 22 nt, Artificial Sequence
  Synthetic
ccuuucguuugacuuuaaguag

SEQ ID NO: 315632 - RNA, 23 nt, Artificial Sequence
  Synthetic
uccuuucguuugacuuuaaguag

SEQ ID NO: 315633 - RNA, 24 nt, Artificial Sequence
  Synthetic
uuccuuucguuugacuuuaaguag

SEQ ID NO: 315634 - RNA, 18 nt, Artificial Sequence
  Synthetic
guugaggauacacaguag

SEQ ID NO: 315635 - RNA, 19 nt, Artificial Sequence
  Synthetic
gguugaggauacacaguag

SEQ ID NO: 315636 - RNA, 20 nt, Artificial Sequence
  Synthetic
ugguugaggauacacaguag

SEQ ID NO: 315637 - RNA, 21 nt, Artificial Sequence
  Synthetic
cugguugaggauacacaguag

SEQ ID NO: 315638 - RNA, 22 nt, Artificial Sequence
  Synthetic
ucugguugaggauacacaguag

SEQ ID NO: 315639 - RNA, 23 nt, Artificial Sequence
  Synthetic
aucugguugaggauacacaguag

SEQ ID NO: 315640 - RNA, 24 nt, Artificial Sequence
  Synthetic
uaucugguugaggauacacaguag

SEQ ID NO: 315641 - RNA, 18 nt, Artificial Sequence
  Synthetic
caaguccuaagacaguag

SEQ ID NO: 315642 - RNA, 19 nt, Artificial Sequence
  Synthetic
acaaguccuaagacaguag

SEQ ID NO: 315643 - RNA, 20 nt, Artificial Sequence
  Synthetic
cacaaguccuaagacaguag

SEQ ID NO: 315644 - RNA, 21 nt, Artificial Sequence
  Synthetic
ucacaaguccuaagacaguag

SEQ ID NO: 315645 - RNA, 22 nt, Artificial Sequence
  Synthetic
uucacaaguccuaagacaguag

SEQ ID NO: 315646 - RNA, 23 nt, Artificial Sequence
  Synthetic
auucacaaguccuaagacaguag

SEQ ID NO: 315647 - RNA, 24 nt, Artificial Sequence
  Synthetic
aauucacaaguccuaagacaguag

SEQ ID NO: 315648 - RNA, 18 nt, Artificial Sequence
  Synthetic
auuguaauuuuacaguag

SEQ ID NO: 315649 - RNA, 19 nt, Artificial Sequence
  Synthetic
gauuguaauuuuacaguag

SEQ ID NO: 315650 - RNA, 20 nt, Artificial Sequence
  Synthetic
agauuguaauuuuacaguag

SEQ ID NO: 315651 - RNA, 21 nt, Artificial Sequence
  Synthetic
uagauuguaauuuuacaguag

SEQ ID NO: 315652 - RNA, 22 nt, Artificial Sequence
  Synthetic
auagauuguaauuuuacaguag

SEQ ID NO: 315653 - RNA, 23 nt, Artificial Sequence
  Synthetic
uauagauuguaauuuuacaguag

SEQ ID NO: 315654 - RNA, 24 nt, Artificial Sequence
  Synthetic
auauagauuguaauuuuacaguag

SEQ ID NO: 315655 - RNA, 18 nt, Artificial Sequence
  Synthetic
uggagaauuauccaguag

SEQ ID NO: 315656 - RNA, 19 nt, Artificial Sequence
  Synthetic
guggagaauuauccaguag

SEQ ID NO: 315657 - RNA, 20 nt, Artificial Sequence
  Synthetic
uguggagaauuauccaguag

SEQ ID NO: 315658 - RNA, 21 nt, Artificial Sequence
  Synthetic
guguggagaauuauccaguag

SEQ ID NO: 315659 - RNA, 22 nt, Artificial Sequence
  Synthetic
uguguggagaauuauccaguag

SEQ ID NO: 315660 - RNA, 23 nt, Artificial Sequence
  Synthetic
uuguguggagaauuauccaguag

SEQ ID NO: 315661 - RNA, 24 nt, Artificial Sequence
  Synthetic
cuuguguggagaauuauccaguag

SEQ ID NO: 315662 - RNA, 18 nt, Artificial Sequence
  Synthetic
gccucugucuuccaguag

SEQ ID NO: 315663 - RNA, 19 nt, Artificial Sequence
  Synthetic
ugccucugucuuccaguag

SEQ ID NO: 315664 - RNA, 20 nt, Artificial Sequence
  Synthetic
cugccucugucuuccaguag

SEQ ID NO: 315665 - RNA, 21 nt, Artificial Sequence
  Synthetic
ccugccucugucuuccaguag

SEQ ID NO: 315666 - RNA, 22 nt, Artificial Sequence
  Synthetic
uccugccucugucuuccaguag

SEQ ID NO: 315667 - RNA, 23 nt, Artificial Sequence
  Synthetic
cuccugccucugucuuccaguag

SEQ ID NO: 315668 - RNA, 24 nt, Artificial Sequence
  Synthetic
ucuccugccucugucuuccaguag

SEQ ID NO: 315669 - RNA, 18 nt, Artificial Sequence
  Synthetic
cgauucgcaaagcaguag

SEQ ID NO: 315670 - RNA, 19 nt, Artificial Sequence
  Synthetic
ccgauucgcaaagcaguag

SEQ ID NO: 315671 - RNA, 20 nt, Artificial Sequence
  Synthetic
cccgauucgcaaagcaguag

SEQ ID NO: 315672 - RNA, 21 nt, Artificial Sequence
  Synthetic
acccgauucgcaaagcaguag

SEQ ID NO: 315673 - RNA, 22 nt, Artificial Sequence
  Synthetic
gacccgauucgcaaagcaguag

SEQ ID NO: 315674 - RNA, 23 nt, Artificial Sequence
  Synthetic
ggacccgauucgcaaagcaguag

SEQ ID NO: 315675 - RNA, 24 nt, Artificial Sequence
  Synthetic
gggacccgauucgcaaagcaguag

SEQ ID NO: 315676 - RNA, 18 nt, Artificial Sequence
  Synthetic
agguggagguggcaguag

SEQ ID NO: 315677 - RNA, 19 nt, Artificial Sequence
  Synthetic
gagguggagguggcaguag

SEQ ID NO: 315678 - RNA, 20 nt, Artificial Sequence
  Synthetic
ggagguggagguggcaguag

SEQ ID NO: 315679 - RNA, 21 nt, Artificial Sequence
  Synthetic
uggagguggagguggcaguag

SEQ ID NO: 315680 - RNA, 22 nt, Artificial Sequence
  Synthetic
guggagguggagguggcaguag

SEQ ID NO: 315681 - RNA, 23 nt, Artificial Sequence
  Synthetic
gguggagguggagguggcaguag

SEQ ID NO: 315682 - RNA, 24 nt, Artificial Sequence
  Synthetic
ggguggagguggagguggcaguag

SEQ ID NO: 315683 - RNA, 18 nt, Artificial Sequence
  Synthetic
aaaaaaauauugcaguag

SEQ ID NO: 315684 - RNA, 19 nt, Artificial Sequence
  Synthetic
caaaaaaauauugcaguag

SEQ ID NO: 315685 - RNA, 20 nt, Artificial Sequence
  Synthetic
acaaaaaaauauugcaguag

SEQ ID NO: 315686 - RNA, 21 nt, Artificial Sequence
  Synthetic
aacaaaaaaauauugcaguag

SEQ ID NO: 315687 - RNA, 22 nt, Artificial Sequence
  Synthetic
gaacaaaaaaauauugcaguag

SEQ ID NO: 315688 - RNA, 23 nt, Artificial Sequence
  Synthetic
agaacaaaaaaauauugcaguag

SEQ ID NO: 315689 - RNA, 24 nt, Artificial Sequence
  Synthetic
gagaacaaaaaaauauugcaguag

SEQ ID NO: 315690 - RNA, 18 nt, Artificial Sequence
  Synthetic
ucacauuugaaucaguag

SEQ ID NO: 315691 - RNA, 19 nt, Artificial Sequence
  Synthetic
uucacauuugaaucaguag

SEQ ID NO: 315692 - RNA, 20 nt, Artificial Sequence
  Synthetic
auucacauuugaaucaguag

SEQ ID NO: 315693 - RNA, 21 nt, Artificial Sequence
  Synthetic
gauucacauuugaaucaguag

SEQ ID NO: 315694 - RNA, 22 nt, Artificial Sequence
  Synthetic
agauucacauuugaaucaguag

SEQ ID NO: 315695 - RNA, 23 nt, Artificial Sequence
  Synthetic
gagauucacauuugaaucaguag

SEQ ID NO: 315696 - RNA, 24 nt, Artificial Sequence
  Synthetic
agagauucacauuugaaucaguag

SEQ ID NO: 315697 - RNA, 18 nt, Artificial Sequence
  Synthetic
gggggcaaagaucaguag

SEQ ID NO: 315698 - RNA, 19 nt, Artificial Sequence
  Synthetic
ugggggcaaagaucaguag

SEQ ID NO: 315699 - RNA, 20 nt, Artificial Sequence
  Synthetic
cugggggcaaagaucaguag

SEQ ID NO: 315700 - RNA, 21 nt, Artificial Sequence
  Synthetic
acugggggcaaagaucaguag

SEQ ID NO: 315701 - RNA, 22 nt, Artificial Sequence
  Synthetic
uacugggggcaaagaucaguag

SEQ ID NO: 315702 - RNA, 23 nt, Artificial Sequence
  Synthetic
uuacugggggcaaagaucaguag

SEQ ID NO: 315703 - RNA, 24 nt, Artificial Sequence
  Synthetic
uuuacugggggcaaagaucaguag

SEQ ID NO: 315704 - RNA, 18 nt, Artificial Sequence
  Synthetic
uauguucgagaucaguag

SEQ ID NO: 315705 - RNA, 19 nt, Artificial Sequence
  Synthetic
uuauguucgagaucaguag

SEQ ID NO: 315706 - RNA, 20 nt, Artificial Sequence
  Synthetic
uuuauguucgagaucaguag

SEQ ID NO: 315707 - RNA, 21 nt, Artificial Sequence
  Synthetic
cuuuauguucgagaucaguag

SEQ ID NO: 315708 - RNA, 22 nt, Artificial Sequence
  Synthetic
ucuuuauguucgagaucaguag

SEQ ID NO: 315709 - RNA, 23 nt, Artificial Sequence
  Synthetic
aucuuuauguucgagaucaguag

SEQ ID NO: 315710 - RNA, 24 nt, Artificial Sequence
  Synthetic
uaucuuuauguucgagaucaguag

SEQ ID NO: 315711 - RNA, 18 nt, Artificial Sequence
  Synthetic
uuacuuaauuaucaguag

SEQ ID NO: 315712 - RNA, 19 nt, Artificial Sequence
  Synthetic
auuacuuaauuaucaguag

SEQ ID NO: 315713 - RNA, 20 nt, Artificial Sequence
  Synthetic
gauuacuuaauuaucaguag

SEQ ID NO: 315714 - RNA, 21 nt, Artificial Sequence
  Synthetic
agauuacuuaauuaucaguag

SEQ ID NO: 315715 - RNA, 22 nt, Artificial Sequence
  Synthetic
aagauuacuuaauuaucaguag

SEQ ID NO: 315716 - RNA, 23 nt, Artificial Sequence
  Synthetic
aaagauuacuuaauuaucaguag

SEQ ID NO: 315717 - RNA, 24 nt, Artificial Sequence
  Synthetic
gaaagauuacuuaauuaucaguag

SEQ ID NO: 315718 - RNA, 18 nt, Artificial Sequence
  Synthetic
caguguaggagucaguag

SEQ ID NO: 315719 - RNA, 19 nt, Artificial Sequence
  Synthetic
gcaguguaggagucaguag

SEQ ID NO: 315720 - RNA, 20 nt, Artificial Sequence
  Synthetic
agcaguguaggagucaguag

SEQ ID NO: 315721 - RNA, 21 nt, Artificial Sequence
  Synthetic
gagcaguguaggagucaguag

SEQ ID NO: 315722 - RNA, 22 nt, Artificial Sequence
  Synthetic
ggagcaguguaggagucaguag

SEQ ID NO: 315723 - RNA, 23 nt, Artificial Sequence
  Synthetic
aggagcaguguaggagucaguag

SEQ ID NO: 315724 - RNA, 24 nt, Artificial Sequence
  Synthetic
aaggagcaguguaggagucaguag

SEQ ID NO: 315725 - RNA, 18 nt, Artificial Sequence
  Synthetic
gguccaagacuucaguag

SEQ ID NO: 315726 - RNA, 19 nt, Artificial Sequence
  Synthetic
ggguccaagacuucaguag

SEQ ID NO: 315727 - RNA, 20 nt, Artificial Sequence
  Synthetic
aggguccaagacuucaguag

SEQ ID NO: 315728 - RNA, 21 nt, Artificial Sequence
  Synthetic
gaggguccaagacuucaguag

SEQ ID NO: 315729 - RNA, 22 nt, Artificial Sequence
  Synthetic
ugaggguccaagacuucaguag

SEQ ID NO: 315730 - RNA, 23 nt, Artificial Sequence
  Synthetic
uugaggguccaagacuucaguag

SEQ ID NO: 315731 - RNA, 24 nt, Artificial Sequence
  Synthetic
uuugaggguccaagacuucaguag

SEQ ID NO: 315732 - RNA, 18 nt, Artificial Sequence
  Synthetic
gauucacaacaagaguag

SEQ ID NO: 315733 - RNA, 19 nt, Artificial Sequence
  Synthetic
agauucacaacaagaguag

SEQ ID NO: 315734 - RNA, 20 nt, Artificial Sequence
  Synthetic
gagauucacaacaagaguag

SEQ ID NO: 315735 - RNA, 21 nt, Artificial Sequence
  Synthetic
ggagauucacaacaagaguag

SEQ ID NO: 315736 - RNA, 22 nt, Artificial Sequence
  Synthetic
aggagauucacaacaagaguag

SEQ ID NO: 315737 - RNA, 23 nt, Artificial Sequence
  Synthetic
aaggagauucacaacaagaguag

SEQ ID NO: 315738 - RNA, 24 nt, Artificial Sequence
  Synthetic
aaaggagauucacaacaagaguag

SEQ ID NO: 315739 - RNA, 18 nt, Artificial Sequence
  Synthetic
uaggagcucccagaguag

SEQ ID NO: 315740 - RNA, 19 nt, Artificial Sequence
  Synthetic
uuaggagcucccagaguag

SEQ ID NO: 315741 - RNA, 20 nt, Artificial Sequence
  Synthetic
cuuaggagcucccagaguag

SEQ ID NO: 315742 - RNA, 21 nt, Artificial Sequence
  Synthetic
ccuuaggagcucccagaguag

SEQ ID NO: 315743 - RNA, 22 nt, Artificial Sequence
  Synthetic
cccuuaggagcucccagaguag

SEQ ID NO: 315744 - RNA, 23 nt, Artificial Sequence
  Synthetic
gcccuuaggagcucccagaguag

SEQ ID NO: 315745 - RNA, 24 nt, Artificial Sequence
  Synthetic
agcccuuaggagcucccagaguag

SEQ ID NO: 315746 - RNA, 18 nt, Artificial Sequence
  Synthetic
ccucagccuccagaguag

SEQ ID NO: 315747 - RNA, 19 nt, Artificial Sequence
  Synthetic
gccucagccuccagaguag

SEQ ID NO: 315748 - RNA, 20 nt, Artificial Sequence
  Synthetic
ugccucagccuccagaguag

SEQ ID NO: 315749 - RNA, 21 nt, Artificial Sequence
  Synthetic
cugccucagccuccagaguag

SEQ ID NO: 315750 - RNA, 22 nt, Artificial Sequence
  Synthetic
ccugccucagccuccagaguag

SEQ ID NO: 315751 - RNA, 23 nt, Artificial Sequence
  Synthetic
uccugccucagccuccagaguag

SEQ ID NO: 315752 - RNA, 24 nt, Artificial Sequence
  Synthetic
cuccugccucagccuccagaguag

SEQ ID NO: 315753 - RNA, 18 nt, Artificial Sequence
  Synthetic
cuauuuaaaauagaguag

SEQ ID NO: 315754 - RNA, 19 nt, Artificial Sequence
  Synthetic
gcuauuuaaaauagaguag

SEQ ID NO: 315755 - RNA, 20 nt, Artificial Sequence
  Synthetic
ugcuauuuaaaauagaguag

SEQ ID NO: 315756 - RNA, 21 nt, Artificial Sequence
  Synthetic
gugcuauuuaaaauagaguag

SEQ ID NO: 315757 - RNA, 22 nt, Artificial Sequence
  Synthetic
ggugcuauuuaaaauagaguag

SEQ ID NO: 315758 - RNA, 23 nt, Artificial Sequence
  Synthetic
uggugcuauuuaaaauagaguag

SEQ ID NO: 315759 - RNA, 24 nt, Artificial Sequence
  Synthetic
cuggugcuauuuaaaauagaguag

SEQ ID NO: 315760 - RNA, 18 nt, Artificial Sequence
  Synthetic
gccaagcacauagaguag

SEQ ID NO: 315761 - RNA, 19 nt, Artificial Sequence
  Synthetic
ggccaagcacauagaguag

SEQ ID NO: 315762 - RNA, 20 nt, Artificial Sequence
  Synthetic
uggccaagcacauagaguag

SEQ ID NO: 315763 - RNA, 21 nt, Artificial Sequence
  Synthetic
auggccaagcacauagaguag

SEQ ID NO: 315764 - RNA, 22 nt, Artificial Sequence
  Synthetic
cauggccaagcacauagaguag

SEQ ID NO: 315765 - RNA, 23 nt, Artificial Sequence
  Synthetic
ccauggccaagcacauagaguag

SEQ ID NO: 315766 - RNA, 24 nt, Artificial Sequence
  Synthetic
uccauggccaagcacauagaguag

SEQ ID NO: 315767 - RNA, 18 nt, Artificial Sequence
  Synthetic
ccucagccuaccgaguag

SEQ ID NO: 315768 - RNA, 19 nt, Artificial Sequence
  Synthetic
gccucagccuaccgaguag

SEQ ID NO: 315769 - RNA, 20 nt, Artificial Sequence
  Synthetic
ugccucagccuaccgaguag

SEQ ID NO: 315770 - RNA, 21 nt, Artificial Sequence
  Synthetic
cugccucagccuaccgaguag

SEQ ID NO: 315771 - RNA, 22 nt, Artificial Sequence
  Synthetic
ccugccucagccuaccgaguag

SEQ ID NO: 315772 - RNA, 23 nt, Artificial Sequence
  Synthetic
uccugccucagccuaccgaguag

SEQ ID NO: 315773 - RNA, 24 nt, Artificial Sequence
  Synthetic
cuccugccucagccuaccgaguag

SEQ ID NO: 315774 - RNA, 18 nt, Artificial Sequence
  Synthetic
ccucagccucccgaguag

SEQ ID NO: 315775 - RNA, 19 nt, Artificial Sequence
  Synthetic
accucagccucccgaguag

SEQ ID NO: 315776 - RNA, 20 nt, Artificial Sequence
  Synthetic
uaccucagccucccgaguag

SEQ ID NO: 315777 - RNA, 19 nt, Artificial Sequence
  Synthetic
gccucagccucccgaguag

SEQ ID NO: 315778 - RNA, 20 nt, Artificial Sequence
  Synthetic
cgccucagccucccgaguag

SEQ ID NO: 315779 - RNA, 21 nt, Artificial Sequence
  Synthetic
ccgccucagccucccgaguag

SEQ ID NO: 315780 - RNA, 22 nt, Artificial Sequence
  Synthetic
cccgccucagccucccgaguag

SEQ ID NO: 315781 - RNA, 23 nt, Artificial Sequence
  Synthetic
ucccgccucagccucccgaguag

SEQ ID NO: 315782 - RNA, 24 nt, Artificial Sequence
  Synthetic
cucccgccucagccucccgaguag

SEQ ID NO: 315783 - RNA, 20 nt, Artificial Sequence
  Synthetic
ugccucagccucccgaguag

SEQ ID NO: 315784 - RNA, 22 nt, Artificial Sequence
  Synthetic
ucugccucagccucccgaguag

SEQ ID NO: 315785 - RNA, 23 nt, Artificial Sequence
  Synthetic
cucugccucagccucccgaguag

SEQ ID NO: 315786 - RNA, 24 nt, Artificial Sequence
  Synthetic
ucucugccucagccucccgaguag

SEQ ID NO: 315787 - RNA, 18 nt, Artificial Sequence
  Synthetic
ccuuagccucccgaguag

SEQ ID NO: 315788 - RNA, 19 nt, Artificial Sequence
  Synthetic
gccuuagccucccgaguag

SEQ ID NO: 315789 - RNA, 20 nt, Artificial Sequence
  Synthetic
ugccuuagccucccgaguag

SEQ ID NO: 315790 - RNA, 21 nt, Artificial Sequence
  Synthetic
cugccuuagccucccgaguag

SEQ ID NO: 315791 - RNA, 22 nt, Artificial Sequence
  Synthetic
ccugccuuagccucccgaguag

SEQ ID NO: 315792 - RNA, 23 nt, Artificial Sequence
  Synthetic
uccugccuuagccucccgaguag

SEQ ID NO: 315793 - RNA, 24 nt, Artificial Sequence
  Synthetic
cuccugccuuagccucccgaguag

SEQ ID NO: 315794 - RNA, 20 nt, Artificial Sequence
  Synthetic
ugccucagcuucccgaguag

SEQ ID NO: 315795 - RNA, 21 nt, Artificial Sequence
  Synthetic
cugccucagcuucccgaguag

SEQ ID NO: 315796 - RNA, 22 nt, Artificial Sequence
  Synthetic
ccugccucagcuucccgaguag

SEQ ID NO: 315797 - RNA, 23 nt, Artificial Sequence
  Synthetic
uccugccucagcuucccgaguag

SEQ ID NO: 315798 - RNA, 24 nt, Artificial Sequence
  Synthetic
cuccugccucagcuucccgaguag

SEQ ID NO: 315799 - RNA, 18 nt, Artificial Sequence
  Synthetic
ccucagccucucgaguag

SEQ ID NO: 315800 - RNA, 19 nt, Artificial Sequence
  Synthetic
gccucagccucucgaguag

SEQ ID NO: 315801 - RNA, 20 nt, Artificial Sequence
  Synthetic
ugccucagccucucgaguag

SEQ ID NO: 315802 - RNA, 21 nt, Artificial Sequence
  Synthetic
cugccucagccucucgaguag

SEQ ID NO: 315803 - RNA, 22 nt, Artificial Sequence
  Synthetic
ucugccucagccucucgaguag

SEQ ID NO: 315804 - RNA, 23 nt, Artificial Sequence
  Synthetic
uucugccucagccucucgaguag

SEQ ID NO: 315805 - RNA, 24 nt, Artificial Sequence
  Synthetic
cuucugccucagccucucgaguag

SEQ ID NO: 315806 - RNA, 18 nt, Artificial Sequence
  Synthetic
ugacagacgaaggaguag

SEQ ID NO: 315807 - RNA, 19 nt, Artificial Sequence
  Synthetic
gugacagacgaaggaguag

SEQ ID NO: 315808 - RNA, 20 nt, Artificial Sequence
  Synthetic
agugacagacgaaggaguag

SEQ ID NO: 315809 - RNA, 21 nt, Artificial Sequence
  Synthetic
gagugacagacgaaggaguag

SEQ ID NO: 315810 - RNA, 22 nt, Artificial Sequence
  Synthetic
agagugacagacgaaggaguag

SEQ ID NO: 315811 - RNA, 23 nt, Artificial Sequence
  Synthetic
aagagugacagacgaaggaguag

SEQ ID NO: 315812 - RNA, 24 nt, Artificial Sequence
  Synthetic
gaagagugacagacgaaggaguag

SEQ ID NO: 315813 - RNA, 18 nt, Artificial Sequence
  Synthetic
cuucacugcugggaguag

SEQ ID NO: 315814 - RNA, 19 nt, Artificial Sequence
  Synthetic
gcuucacugcugggaguag

SEQ ID NO: 315815 - RNA, 20 nt, Artificial Sequence
  Synthetic
agcuucacugcugggaguag

SEQ ID NO: 315816 - RNA, 21 nt, Artificial Sequence
  Synthetic
aagcuucacugcugggaguag

SEQ ID NO: 315817 - RNA, 22 nt, Artificial Sequence
  Synthetic
caagcuucacugcugggaguag

SEQ ID NO: 315818 - RNA, 23 nt, Artificial Sequence
  Synthetic
gcaagcuucacugcugggaguag

SEQ ID NO: 315819 - RNA, 24 nt, Artificial Sequence
  Synthetic
ugcaagcuucacugcugggaguag

SEQ ID NO: 315820 - RNA, 19 nt, Artificial Sequence
  Synthetic
accucagccuccugaguag

SEQ ID NO: 315821 - RNA, 20 nt, Artificial Sequence
  Synthetic
aaccucagccuccugaguag

SEQ ID NO: 315822 - RNA, 21 nt, Artificial Sequence
  Synthetic
caaccucagccuccugaguag

SEQ ID NO: 315823 - RNA, 22 nt, Artificial Sequence
  Synthetic
ccaaccucagccuccugaguag

SEQ ID NO: 315824 - RNA, 23 nt, Artificial Sequence
  Synthetic
uccaaccucagccuccugaguag

SEQ ID NO: 315825 - RNA, 24 nt, Artificial Sequence
  Synthetic
cuccaaccucagccuccugaguag

SEQ ID NO: 315826 - RNA, 21 nt, Artificial Sequence
  Synthetic
cugccucagccuccugaguag

SEQ ID NO: 315827 - RNA, 22 nt, Artificial Sequence
  Synthetic
ucugccucagccuccugaguag

SEQ ID NO: 315828 - RNA, 23 nt, Artificial Sequence
  Synthetic
cucugccucagccuccugaguag

SEQ ID NO: 315829 - RNA, 24 nt, Artificial Sequence
  Synthetic
ucucugccucagccuccugaguag

SEQ ID NO: 315830 - RNA, 18 nt, Artificial Sequence
  Synthetic
cuucagccuccugaguag

SEQ ID NO: 315831 - RNA, 19 nt, Artificial Sequence
  Synthetic
gcuucagccuccugaguag

SEQ ID NO: 315832 - RNA, 20 nt, Artificial Sequence
  Synthetic
ugcuucagccuccugaguag

SEQ ID NO: 315833 - RNA, 21 nt, Artificial Sequence
  Synthetic
cugcuucagccuccugaguag

SEQ ID NO: 315834 - RNA, 22 nt, Artificial Sequence
  Synthetic
ccugcuucagccuccugaguag

SEQ ID NO: 315835 - RNA, 23 nt, Artificial Sequence
  Synthetic
uccugcuucagccuccugaguag

SEQ ID NO: 315836 - RNA, 24 nt, Artificial Sequence
  Synthetic
cuccugcuucagccuccugaguag

SEQ ID NO: 315837 - RNA, 18 nt, Artificial Sequence
  Synthetic
ccucagccaucugaguag

SEQ ID NO: 315838 - RNA, 19 nt, Artificial Sequence
  Synthetic
gccucagccaucugaguag

SEQ ID NO: 315839 - RNA, 20 nt, Artificial Sequence
  Synthetic
ugccucagccaucugaguag

SEQ ID NO: 315840 - RNA, 21 nt, Artificial Sequence
  Synthetic
cugccucagccaucugaguag

SEQ ID NO: 315841 - RNA, 22 nt, Artificial Sequence
  Synthetic
ccugccucagccaucugaguag

SEQ ID NO: 315842 - RNA, 23 nt, Artificial Sequence
  Synthetic
uccugccucagccaucugaguag

SEQ ID NO: 315843 - RNA, 24 nt, Artificial Sequence
  Synthetic
cuccugccucagccaucugaguag

SEQ ID NO: 315844 - RNA, 19 nt, Artificial Sequence
  Synthetic
gccucagccucuugaguag

SEQ ID NO: 315845 - RNA, 20 nt, Artificial Sequence
  Synthetic
ugccucagccucuugaguag

SEQ ID NO: 315846 - RNA, 21 nt, Artificial Sequence
  Synthetic
cugccucagccucuugaguag

SEQ ID NO: 315847 - RNA, 22 nt, Artificial Sequence
  Synthetic
ccugccucagccucuugaguag

SEQ ID NO: 315848 - RNA, 23 nt, Artificial Sequence
  Synthetic
uccugccucagccucuugaguag

SEQ ID NO: 315849 - RNA, 24 nt, Artificial Sequence
  Synthetic
cuccugccucagccucuugaguag

SEQ ID NO: 315850 - RNA, 18 nt, Artificial Sequence
  Synthetic
ggcgcacacuuugaguag

SEQ ID NO: 315851 - RNA, 19 nt, Artificial Sequence
  Synthetic
uggcgcacacuuugaguag

SEQ ID NO: 315852 - RNA, 20 nt, Artificial Sequence
  Synthetic
cuggcgcacacuuugaguag

SEQ ID NO: 315853 - RNA, 21 nt, Artificial Sequence
  Synthetic
ucuggcgcacacuuugaguag

SEQ ID NO: 315854 - RNA, 22 nt, Artificial Sequence
  Synthetic
cucuggcgcacacuuugaguag

SEQ ID NO: 315855 - RNA, 23 nt, Artificial Sequence
  Synthetic
ucucuggcgcacacuuugaguag

SEQ ID NO: 315856 - RNA, 24 nt, Artificial Sequence
  Synthetic
gucucuggcgcacacuuugaguag

SEQ ID NO: 315857 - RNA, 18 nt, Artificial Sequence
  Synthetic
acaauuuuugaauaguag

SEQ ID NO: 315858 - RNA, 19 nt, Artificial Sequence
  Synthetic
uacaauuuuugaauaguag

SEQ ID NO: 315859 - RNA, 20 nt, Artificial Sequence
  Synthetic
auacaauuuuugaauaguag

SEQ ID NO: 315860 - RNA, 21 nt, Artificial Sequence
  Synthetic
uauacaauuuuugaauaguag

SEQ ID NO: 315861 - RNA, 22 nt, Artificial Sequence
  Synthetic
guauacaauuuuugaauaguag

SEQ ID NO: 315862 - RNA, 23 nt, Artificial Sequence
  Synthetic
aguauacaauuuuugaauaguag

SEQ ID NO: 315863 - RNA, 24 nt, Artificial Sequence
  Synthetic
aaguauacaauuuuugaauaguag

SEQ ID NO: 315864 - RNA, 18 nt, Artificial Sequence
  Synthetic
gagaaagggccauaguag

SEQ ID NO: 315865 - RNA, 19 nt, Artificial Sequence
  Synthetic
agagaaagggccauaguag

SEQ ID NO: 315866 - RNA, 20 nt, Artificial Sequence
  Synthetic
gagagaaagggccauaguag

SEQ ID NO: 315867 - RNA, 21 nt, Artificial Sequence
  Synthetic
agagagaaagggccauaguag

SEQ ID NO: 315868 - RNA, 22 nt, Artificial Sequence
  Synthetic
aagagagaaagggccauaguag

SEQ ID NO: 315869 - RNA, 23 nt, Artificial Sequence
  Synthetic
gaagagagaaagggccauaguag

SEQ ID NO: 315870 - RNA, 24 nt, Artificial Sequence
  Synthetic
ggaagagagaaagggccauaguag

SEQ ID NO: 315871 - RNA, 18 nt, Artificial Sequence
  Synthetic
uagaagcaaguauaguag

SEQ ID NO: 315872 - RNA, 19 nt, Artificial Sequence
  Synthetic
cuagaagcaaguauaguag

SEQ ID NO: 315873 - RNA, 20 nt, Artificial Sequence
  Synthetic
gcuagaagcaaguauaguag

SEQ ID NO: 315874 - RNA, 21 nt, Artificial Sequence
  Synthetic
agcuagaagcaaguauaguag

SEQ ID NO: 315875 - RNA, 22 nt, Artificial Sequence
  Synthetic
aagcuagaagcaaguauaguag

SEQ ID NO: 315876 - RNA, 23 nt, Artificial Sequence
  Synthetic
aaagcuagaagcaaguauaguag

SEQ ID NO: 315877 - RNA, 24 nt, Artificial Sequence
  Synthetic
gaaagcuagaagcaaguauaguag

SEQ ID NO: 315878 - RNA, 18 nt, Artificial Sequence
  Synthetic
ucauaaaaauuauaguag

SEQ ID NO: 315879 - RNA, 19 nt, Artificial Sequence
  Synthetic
aucauaaaaauuauaguag

SEQ ID NO: 315880 - RNA, 20 nt, Artificial Sequence
  Synthetic
caucauaaaaauuauaguag

SEQ ID NO: 315881 - RNA, 21 nt, Artificial Sequence
  Synthetic
acaucauaaaaauuauaguag

SEQ ID NO: 315882 - RNA, 22 nt, Artificial Sequence
  Synthetic
gacaucauaaaaauuauaguag

SEQ ID NO: 315883 - RNA, 23 nt, Artificial Sequence
  Synthetic
agacaucauaaaaauuauaguag

SEQ ID NO: 315884 - RNA, 24 nt, Artificial Sequence
  Synthetic
gagacaucauaaaaauuauaguag

SEQ ID NO: 315885 - RNA, 18 nt, Artificial Sequence
  Synthetic
cauacuggaaacuaguag

SEQ ID NO: 315886 - RNA, 19 nt, Artificial Sequence
  Synthetic
acauacuggaaacuaguag

SEQ ID NO: 315887 - RNA, 20 nt, Artificial Sequence
  Synthetic
uacauacuggaaacuaguag

SEQ ID NO: 315888 - RNA, 21 nt, Artificial Sequence
  Synthetic
guacauacuggaaacuaguag

SEQ ID NO: 315889 - RNA, 22 nt, Artificial Sequence
  Synthetic
aguacauacuggaaacuaguag

SEQ ID NO: 315890 - RNA, 23 nt, Artificial Sequence
  Synthetic
caguacauacuggaaacuaguag

SEQ ID NO: 315891 - RNA, 24 nt, Artificial Sequence
  Synthetic
acaguacauacuggaaacuaguag

SEQ ID NO: 315892 - RNA, 18 nt, Artificial Sequence
  Synthetic
ccucagccucccuaguag

SEQ ID NO: 315893 - RNA, 19 nt, Artificial Sequence
  Synthetic
gccucagccucccuaguag

SEQ ID NO: 315894 - RNA, 20 nt, Artificial Sequence
  Synthetic
ugccucagccucccuaguag

SEQ ID NO: 315895 - RNA, 21 nt, Artificial Sequence
  Synthetic
cugccucagccucccuaguag

SEQ ID NO: 315896 - RNA, 22 nt, Artificial Sequence
  Synthetic
ccugccucagccucccuaguag

SEQ ID NO: 315897 - RNA, 23 nt, Artificial Sequence
  Synthetic
uccugccucagccucccuaguag

SEQ ID NO: 315898 - RNA, 24 nt, Artificial Sequence
  Synthetic
cuccugccucagccucccuaguag

SEQ ID NO: 315899 - RNA, 18 nt, Artificial Sequence
  Synthetic
gagcucacaaucuaguag

SEQ ID NO: 315900 - RNA, 19 nt, Artificial Sequence
  Synthetic
agagcucacaaucuaguag

SEQ ID NO: 315901 - RNA, 20 nt, Artificial Sequence
  Synthetic
cagagcucacaaucuaguag

SEQ ID NO: 315902 - RNA, 21 nt, Artificial Sequence
  Synthetic
ucagagcucacaaucuaguag

SEQ ID NO: 315903 - RNA, 22 nt, Artificial Sequence
  Synthetic
gucagagcucacaaucuaguag

SEQ ID NO: 315904 - RNA, 23 nt, Artificial Sequence
  Synthetic
agucagagcucacaaucuaguag

SEQ ID NO: 315905 - RNA, 24 nt, Artificial Sequence
  Synthetic
aagucagagcucacaaucuaguag

SEQ ID NO: 315906 - RNA, 18 nt, Artificial Sequence
  Synthetic
uuucuaacacucuaguag

SEQ ID NO: 315907 - RNA, 19 nt, Artificial Sequence
  Synthetic
uuuucuaacacucuaguag

SEQ ID NO: 315908 - RNA, 20 nt, Artificial Sequence
  Synthetic
uuuuucuaacacucuaguag

SEQ ID NO: 315909 - RNA, 21 nt, Artificial Sequence
  Synthetic
guuuuucuaacacucuaguag

SEQ ID NO: 315910 - RNA, 22 nt, Artificial Sequence
  Synthetic
uguuuuucuaacacucuaguag

SEQ ID NO: 315911 - RNA, 23 nt, Artificial Sequence
  Synthetic
guguuuuucuaacacucuaguag

SEQ ID NO: 315912 - RNA, 24 nt, Artificial Sequence
  Synthetic
uguguuuuucuaacacucuaguag

SEQ ID NO: 315913 - RNA, 18 nt, Artificial Sequence
  Synthetic
aggaaaaacaagacguag

SEQ ID NO: 315914 - RNA, 19 nt, Artificial Sequence
  Synthetic
uaggaaaaacaagacguag

SEQ ID NO: 315915 - RNA, 20 nt, Artificial Sequence
  Synthetic
cuaggaaaaacaagacguag

SEQ ID NO: 315916 - RNA, 21 nt, Artificial Sequence
  Synthetic
acuaggaaaaacaagacguag

SEQ ID NO: 315917 - RNA, 22 nt, Artificial Sequence
  Synthetic
aacuaggaaaaacaagacguag

SEQ ID NO: 315918 - RNA, 23 nt, Artificial Sequence
  Synthetic
aaacuaggaaaaacaagacguag

SEQ ID NO: 315919 - RNA, 24 nt, Artificial Sequence
  Synthetic
gaaacuaggaaaaacaagacguag

SEQ ID NO: 315920 - RNA, 18 nt, Artificial Sequence
  Synthetic
ggcagaauauuaccguag

SEQ ID NO: 315921 - RNA, 19 nt, Artificial Sequence
  Synthetic
gggcagaauauuaccguag

SEQ ID NO: 315922 - RNA, 20 nt, Artificial Sequence
  Synthetic
cgggcagaauauuaccguag

SEQ ID NO: 315923 - RNA, 21 nt, Artificial Sequence
  Synthetic
gcgggcagaauauuaccguag

SEQ ID NO: 315924 - RNA, 22 nt, Artificial Sequence
  Synthetic
ggcgggcagaauauuaccguag

SEQ ID NO: 315925 - RNA, 23 nt, Artificial Sequence
  Synthetic
gggcgggcagaauauuaccguag

SEQ ID NO: 315926 - RNA, 24 nt, Artificial Sequence
  Synthetic
ugggcgggcagaauauuaccguag

SEQ ID NO: 315927 - RNA, 18 nt, Artificial Sequence
  Synthetic
ugcaauauauacccguag

SEQ ID NO: 315928 - RNA, 19 nt, Artificial Sequence
  Synthetic
augcaauauauacccguag

SEQ ID NO: 315929 - RNA, 20 nt, Artificial Sequence
  Synthetic
caugcaauauauacccguag

SEQ ID NO: 315930 - RNA, 21 nt, Artificial Sequence
  Synthetic
ucaugcaauauauacccguag

SEQ ID NO: 315931 - RNA, 22 nt, Artificial Sequence
  Synthetic
uucaugcaauauauacccguag

SEQ ID NO: 315932 - RNA, 23 nt, Artificial Sequence
  Synthetic
auucaugcaauauauacccguag

SEQ ID NO: 315933 - RNA, 24 nt, Artificial Sequence
  Synthetic
aauucaugcaauauauacccguag

SEQ ID NO: 315934 - RNA, 18 nt, Artificial Sequence
  Synthetic
ccucagccucccccguag

SEQ ID NO: 315935 - RNA, 19 nt, Artificial Sequence
  Synthetic
gccucagccucccccguag

SEQ ID NO: 315936 - RNA, 20 nt, Artificial Sequence
  Synthetic
ugccucagccucccccguag

SEQ ID NO: 315937 - RNA, 21 nt, Artificial Sequence
  Synthetic
cugccucagccucccccguag

SEQ ID NO: 315938 - RNA, 22 nt, Artificial Sequence
  Synthetic
ccugccucagccucccccguag

SEQ ID NO: 315939 - RNA, 23 nt, Artificial Sequence
  Synthetic
uccugccucagccucccccguag

SEQ ID NO: 315940 - RNA, 24 nt, Artificial Sequence
  Synthetic
cuccugccucagccucccccguag

SEQ ID NO: 315941 - RNA, 18 nt, Artificial Sequence
  Synthetic
ucagaguaaaguucguag

SEQ ID NO: 315942 - RNA, 19 nt, Artificial Sequence
  Synthetic
uucagaguaaaguucguag

SEQ ID NO: 315943 - RNA, 20 nt, Artificial Sequence
  Synthetic
guucagaguaaaguucguag

SEQ ID NO: 315944 - RNA, 21 nt, Artificial Sequence
  Synthetic
gguucagaguaaaguucguag

SEQ ID NO: 315945 - RNA, 22 nt, Artificial Sequence
  Synthetic
ugguucagaguaaaguucguag

SEQ ID NO: 315946 - RNA, 23 nt, Artificial Sequence
  Synthetic
augguucagaguaaaguucguag

SEQ ID NO: 315947 - RNA, 24 nt, Artificial Sequence
  Synthetic
aaugguucagaguaaaguucguag

SEQ ID NO: 315948 - RNA, 18 nt, Artificial Sequence
  Synthetic
guuggcagacaaagguag

SEQ ID NO: 315949 - RNA, 19 nt, Artificial Sequence
  Synthetic
uguuggcagacaaagguag

SEQ ID NO: 315950 - RNA, 20 nt, Artificial Sequence
  Synthetic
uuguuggcagacaaagguag

SEQ ID NO: 315951 - RNA, 21 nt, Artificial Sequence
  Synthetic
auuguuggcagacaaagguag

SEQ ID NO: 315952 - RNA, 22 nt, Artificial Sequence
  Synthetic
aauuguuggcagacaaagguag

SEQ ID NO: 315953 - RNA, 23 nt, Artificial Sequence
  Synthetic
gaauuguuggcagacaaagguag

SEQ ID NO: 315954 - RNA, 24 nt, Artificial Sequence
  Synthetic
agaauuguuggcagacaaagguag

SEQ ID NO: 315955 - RNA, 18 nt, Artificial Sequence
  Synthetic
gaagcaaagacaagguag

SEQ ID NO: 315956 - RNA, 19 nt, Artificial Sequence
  Synthetic
agaagcaaagacaagguag

SEQ ID NO: 315957 - RNA, 20 nt, Artificial Sequence
  Synthetic
uagaagcaaagacaagguag

SEQ ID NO: 315958 - RNA, 21 nt, Artificial Sequence
  Synthetic
auagaagcaaagacaagguag

SEQ ID NO: 315959 - RNA, 22 nt, Artificial Sequence
  Synthetic
aauagaagcaaagacaagguag

SEQ ID NO: 315960 - RNA, 23 nt, Artificial Sequence
  Synthetic
caauagaagcaaagacaagguag

SEQ ID NO: 315961 - RNA, 24 nt, Artificial Sequence
  Synthetic
ucaauagaagcaaagacaagguag

SEQ ID NO: 315962 - RNA, 18 nt, Artificial Sequence
  Synthetic
guuagaugaagaagguag

SEQ ID NO: 315963 - RNA, 19 nt, Artificial Sequence
  Synthetic
aguuagaugaagaagguag

SEQ ID NO: 315964 - RNA, 20 nt, Artificial Sequence
  Synthetic
caguuagaugaagaagguag

SEQ ID NO: 315965 - RNA, 21 nt, Artificial Sequence
  Synthetic
acaguuagaugaagaagguag

SEQ ID NO: 315966 - RNA, 22 nt, Artificial Sequence
  Synthetic
aacaguuagaugaagaagguag

SEQ ID NO: 315967 - RNA, 23 nt, Artificial Sequence
  Synthetic
caacaguuagaugaagaagguag

SEQ ID NO: 315968 - RNA, 24 nt, Artificial Sequence
  Synthetic
acaacaguuagaugaagaagguag

SEQ ID NO: 315969 - RNA, 18 nt, Artificial Sequence
  Synthetic
caaacagcuuacagguag

SEQ ID NO: 315970 - RNA, 19 nt, Artificial Sequence
  Synthetic
ucaaacagcuuacagguag

SEQ ID NO: 315971 - RNA, 20 nt, Artificial Sequence
  Synthetic
gucaaacagcuuacagguag

SEQ ID NO: 315972 - RNA, 21 nt, Artificial Sequence
  Synthetic
ggucaaacagcuuacagguag

SEQ ID NO: 315973 - RNA, 22 nt, Artificial Sequence
  Synthetic
aggucaaacagcuuacagguag

SEQ ID NO: 315974 - RNA, 23 nt, Artificial Sequence
  Synthetic
aaggucaaacagcuuacagguag

SEQ ID NO: 315975 - RNA, 24 nt, Artificial Sequence
  Synthetic
caaggucaaacagcuuacagguag

SEQ ID NO: 315976 - RNA, 18 nt, Artificial Sequence
  Synthetic
aaagagcauuccagguag

SEQ ID NO: 315977 - RNA, 19 nt, Artificial Sequence
  Synthetic
gaaagagcauuccagguag

SEQ ID NO: 315978 - RNA, 20 nt, Artificial Sequence
  Synthetic
ggaaagagcauuccagguag

SEQ ID NO: 315979 - RNA, 21 nt, Artificial Sequence
  Synthetic
gggaaagagcauuccagguag

SEQ ID NO: 315980 - RNA, 22 nt, Artificial Sequence
  Synthetic
ggggaaagagcauuccagguag

SEQ ID NO: 315981 - RNA, 23 nt, Artificial Sequence
  Synthetic
uggggaaagagcauuccagguag

SEQ ID NO: 315982 - RNA, 24 nt, Artificial Sequence
  Synthetic
uuggggaaagagcauuccagguag

SEQ ID NO: 315983 - RNA, 18 nt, Artificial Sequence
  Synthetic
ggcaaugaaaucagguag

SEQ ID NO: 315984 - RNA, 19 nt, Artificial Sequence
  Synthetic
uggcaaugaaaucagguag

SEQ ID NO: 315985 - RNA, 20 nt, Artificial Sequence
  Synthetic
auggcaaugaaaucagguag

SEQ ID NO: 315986 - RNA, 21 nt, Artificial Sequence
  Synthetic
cauggcaaugaaaucagguag

SEQ ID NO: 315987 - RNA, 22 nt, Artificial Sequence
  Synthetic
ccauggcaaugaaaucagguag

SEQ ID NO: 315988 - RNA, 23 nt, Artificial Sequence
  Synthetic
uccauggcaaugaaaucagguag

SEQ ID NO: 315989 - RNA, 24 nt, Artificial Sequence
  Synthetic
uuccauggcaaugaaaucagguag

SEQ ID NO: 315990 - RNA, 18 nt, Artificial Sequence
  Synthetic
gauggguuggucagguag

SEQ ID NO: 315991 - RNA, 19 nt, Artificial Sequence
  Synthetic
agauggguuggucagguag

SEQ ID NO: 315992 - RNA, 20 nt, Artificial Sequence
  Synthetic
gagauggguuggucagguag

SEQ ID NO: 315993 - RNA, 21 nt, Artificial Sequence
  Synthetic
agagauggguuggucagguag

SEQ ID NO: 315994 - RNA, 22 nt, Artificial Sequence
  Synthetic
aagagauggguuggucagguag

SEQ ID NO: 315995 - RNA, 23 nt, Artificial Sequence
  Synthetic
uaagagauggguuggucagguag

SEQ ID NO: 315996 - RNA, 24 nt, Artificial Sequence
  Synthetic
cuaagagauggguuggucagguag

SEQ ID NO: 315997 - RNA, 18 nt, Artificial Sequence
  Synthetic
ucucuaacauucagguag

SEQ ID NO: 315998 - RNA, 19 nt, Artificial Sequence
  Synthetic
gucucuaacauucagguag

SEQ ID NO: 315999 - RNA, 20 nt, Artificial Sequence
  Synthetic
ugucucuaacauucagguag

SEQ ID NO: 316000 - RNA, 21 nt, Artificial Sequence
  Synthetic
uugucucuaacauucagguag

SEQ ID NO: 316001 - RNA, 22 nt, Artificial Sequence
  Synthetic
cuugucucuaacauucagguag

SEQ ID NO: 316002 - RNA, 23 nt, Artificial Sequence
  Synthetic
ucuugucucuaacauucagguag

SEQ ID NO: 316003 - RNA, 24 nt, Artificial Sequence
  Synthetic
gucuugucucuaacauucagguag

SEQ ID NO: 316004 - RNA, 18 nt, Artificial Sequence
  Synthetic
agguuuucauguagguag

SEQ ID NO: 316005 - RNA, 19 nt, Artificial Sequence
  Synthetic
cagguuuucauguagguag

SEQ ID NO: 316006 - RNA, 20 nt, Artificial Sequence
  Synthetic
ccagguuuucauguagguag

SEQ ID NO: 316007 - RNA, 21 nt, Artificial Sequence
  Synthetic
cccagguuuucauguagguag

SEQ ID NO: 316008 - RNA, 22 nt, Artificial Sequence
  Synthetic
ucccagguuuucauguagguag

SEQ ID NO: 316009 - RNA, 23 nt, Artificial Sequence
  Synthetic
uucccagguuuucauguagguag

SEQ ID NO: 316010 - RNA, 24 nt, Artificial Sequence
  Synthetic
uuucccagguuuucauguagguag

SEQ ID NO: 316011 - RNA, 18 nt, Artificial Sequence
  Synthetic
ucuauaauauguagguag

SEQ ID NO: 316012 - RNA, 19 nt, Artificial Sequence
  Synthetic
uucuauaauauguagguag

SEQ ID NO: 316013 - RNA, 20 nt, Artificial Sequence
  Synthetic
uuucuauaauauguagguag

SEQ ID NO: 316014 - RNA, 21 nt, Artificial Sequence
  Synthetic
uuuucuauaauauguagguag

SEQ ID NO: 316015 - RNA, 22 nt, Artificial Sequence
  Synthetic
auuuucuauaauauguagguag

SEQ ID NO: 316016 - RNA, 23 nt, Artificial Sequence
  Synthetic
aauuuucuauaauauguagguag

SEQ ID NO: 316017 - RNA, 24 nt, Artificial Sequence
  Synthetic
gaauuuucuauaauauguagguag

SEQ ID NO: 316018 - RNA, 18 nt, Artificial Sequence
  Synthetic
cuauagcuuuuuagguag

SEQ ID NO: 316019 - RNA, 19 nt, Artificial Sequence
  Synthetic
acuauagcuuuuuagguag

SEQ ID NO: 316020 - RNA, 20 nt, Artificial Sequence
  Synthetic
aacuauagcuuuuuagguag

SEQ ID NO: 316021 - RNA, 21 nt, Artificial Sequence
  Synthetic
uaacuauagcuuuuuagguag

SEQ ID NO: 316022 - RNA, 22 nt, Artificial Sequence
  Synthetic
guaacuauagcuuuuuagguag

SEQ ID NO: 316023 - RNA, 23 nt, Artificial Sequence
  Synthetic
uguaacuauagcuuuuuagguag

SEQ ID NO: 316024 - RNA, 24 nt, Artificial Sequence
  Synthetic
cuguaacuauagcuuuuuagguag

SEQ ID NO: 316025 - RNA, 18 nt, Artificial Sequence
  Synthetic
uaaaaauauguacgguag

SEQ ID NO: 316026 - RNA, 19 nt, Artificial Sequence
  Synthetic
auaaaaauauguacgguag

SEQ ID NO: 316027 - RNA, 20 nt, Artificial Sequence
  Synthetic
cauaaaaauauguacgguag

SEQ ID NO: 316028 - RNA, 21 nt, Artificial Sequence
  Synthetic
ccauaaaaauauguacgguag

SEQ ID NO: 316029 - RNA, 22 nt, Artificial Sequence
  Synthetic
accauaaaaauauguacgguag

SEQ ID NO: 316030 - RNA, 23 nt, Artificial Sequence
  Synthetic
caccauaaaaauauguacgguag

SEQ ID NO: 316031 - RNA, 24 nt, Artificial Sequence
  Synthetic
ccaccauaaaaauauguacgguag

SEQ ID NO: 316032 - RNA, 18 nt, Artificial Sequence
  Synthetic
aucacuugaacccgguag

SEQ ID NO: 316033 - RNA, 19 nt, Artificial Sequence
  Synthetic
aaucacuugaacccgguag

SEQ ID NO: 316034 - RNA, 20 nt, Artificial Sequence
  Synthetic
gaaucacuugaacccgguag

SEQ ID NO: 316035 - RNA, 21 nt, Artificial Sequence
  Synthetic
agaaucacuugaacccgguag

SEQ ID NO: 316036 - RNA, 22 nt, Artificial Sequence
  Synthetic
gagaaucacuugaacccgguag

SEQ ID NO: 316037 - RNA, 23 nt, Artificial Sequence
  Synthetic
ggagaaucacuugaacccgguag

SEQ ID NO: 316038 - RNA, 24 nt, Artificial Sequence
  Synthetic
aggagaaucacuugaacccgguag

SEQ ID NO: 316039 - RNA, 18 nt, Artificial Sequence
  Synthetic
acaaauaaagaaggguag

SEQ ID NO: 316040 - RNA, 19 nt, Artificial Sequence
  Synthetic
cacaaauaaagaaggguag

SEQ ID NO: 316041 - RNA, 20 nt, Artificial Sequence
  Synthetic
acacaaauaaagaaggguag

SEQ ID NO: 316042 - RNA, 21 nt, Artificial Sequence
  Synthetic
cacacaaauaaagaaggguag

SEQ ID NO: 316043 - RNA, 22 nt, Artificial Sequence
  Synthetic
gcacacaaauaaagaaggguag

SEQ ID NO: 316044 - RNA, 23 nt, Artificial Sequence
  Synthetic
ugcacacaaauaaagaaggguag

SEQ ID NO: 316045 - RNA, 24 nt, Artificial Sequence
  Synthetic
gugcacacaaauaaagaaggguag

SEQ ID NO: 316046 - RNA, 18 nt, Artificial Sequence
  Synthetic
ugggaaucuggaggguag

SEQ ID NO: 316047 - RNA, 19 nt, Artificial Sequence
  Synthetic
uugggaaucuggaggguag

SEQ ID NO: 316048 - RNA, 20 nt, Artificial Sequence
  Synthetic
cuugggaaucuggaggguag

SEQ ID NO: 316049 - RNA, 21 nt, Artificial Sequence
  Synthetic
ccuugggaaucuggaggguag

SEQ ID NO: 316050 - RNA, 22 nt, Artificial Sequence
  Synthetic
cccuugggaaucuggaggguag

SEQ ID NO: 316051 - RNA, 23 nt, Artificial Sequence
  Synthetic
ucccuugggaaucuggaggguag

SEQ ID NO: 316052 - RNA, 24 nt, Artificial Sequence
  Synthetic
cucccuugggaaucuggaggguag

SEQ ID NO: 316053 - RNA, 18 nt, Artificial Sequence
  Synthetic
ccucagccucccggguag

SEQ ID NO: 316054 - RNA, 19 nt, Artificial Sequence
  Synthetic
accucagccucccggguag

SEQ ID NO: 316055 - RNA, 20 nt, Artificial Sequence
  Synthetic
caccucagccucccggguag

SEQ ID NO: 316056 - RNA, 21 nt, Artificial Sequence
  Synthetic
ccaccucagccucccggguag

SEQ ID NO: 316057 - RNA, 22 nt, Artificial Sequence
  Synthetic
cccaccucagccucccggguag

SEQ ID NO: 316058 - RNA, 23 nt, Artificial Sequence
  Synthetic
ucccaccucagccucccggguag

SEQ ID NO: 316059 - RNA, 24 nt, Artificial Sequence
  Synthetic
cucccaccucagccucccggguag

SEQ ID NO: 316060 - RNA, 18 nt, Artificial Sequence
  Synthetic
gggaccagggagggguag

SEQ ID NO: 316061 - RNA, 19 nt, Artificial Sequence
  Synthetic
agggaccagggagggguag

SEQ ID NO: 316062 - RNA, 20 nt, Artificial Sequence
  Synthetic
cagggaccagggagggguag

SEQ ID NO: 316063 - RNA, 21 nt, Artificial Sequence
  Synthetic
ccagggaccagggagggguag

SEQ ID NO: 316064 - RNA, 22 nt, Artificial Sequence
  Synthetic
gccagggaccagggagggguag

SEQ ID NO: 316065 - RNA, 23 nt, Artificial Sequence
  Synthetic
ugccagggaccagggagggguag

SEQ ID NO: 316066 - RNA, 24 nt, Artificial Sequence
  Synthetic
uugccagggaccagggagggguag

SEQ ID NO: 316067 - RNA, 18 nt, Artificial Sequence
  Synthetic
ugggaggcuccgggguag

SEQ ID NO: 316068 - RNA, 19 nt, Artificial Sequence
  Synthetic
cugggaggcuccgggguag

SEQ ID NO: 316069 - RNA, 20 nt, Artificial Sequence
  Synthetic
gcugggaggcuccgggguag

SEQ ID NO: 316070 - RNA, 21 nt, Artificial Sequence
  Synthetic
ugcugggaggcuccgggguag

SEQ ID NO: 316071 - RNA, 22 nt, Artificial Sequence
  Synthetic
gugcugggaggcuccgggguag

SEQ ID NO: 316072 - RNA, 23 nt, Artificial Sequence
  Synthetic
agugcugggaggcuccgggguag

SEQ ID NO: 316073 - RNA, 24 nt, Artificial Sequence
  Synthetic
cagugcugggaggcuccgggguag

SEQ ID NO: 316074 - RNA, 18 nt, Artificial Sequence
  Synthetic
ggaauuaggcauggguag

SEQ ID NO: 316075 - RNA, 19 nt, Artificial Sequence
  Synthetic
gggaauuaggcauggguag

SEQ ID NO: 316076 - RNA, 20 nt, Artificial Sequence
  Synthetic
agggaauuaggcauggguag

SEQ ID NO: 316077 - RNA, 21 nt, Artificial Sequence
  Synthetic
gagggaauuaggcauggguag

SEQ ID NO: 316078 - RNA, 22 nt, Artificial Sequence
  Synthetic
cgagggaauuaggcauggguag

SEQ ID NO: 316079 - RNA, 23 nt, Artificial Sequence
  Synthetic
gcgagggaauuaggcauggguag

SEQ ID NO: 316080 - RNA, 24 nt, Artificial Sequence
  Synthetic
agcgagggaauuaggcauggguag

SEQ ID NO: 316081 - RNA, 18 nt, Artificial Sequence
  Synthetic
gaaaugggauauggguag

SEQ ID NO: 316082 - RNA, 19 nt, Artificial Sequence
  Synthetic
ggaaaugggauauggguag

SEQ ID NO: 316083 - RNA, 20 nt, Artificial Sequence
  Synthetic
gggaaaugggauauggguag

SEQ ID NO: 316084 - RNA, 21 nt, Artificial Sequence
  Synthetic
ggggaaaugggauauggguag

SEQ ID NO: 316085 - RNA, 22 nt, Artificial Sequence
  Synthetic
uggggaaaugggauauggguag

SEQ ID NO: 316086 - RNA, 23 nt, Artificial Sequence
  Synthetic
auggggaaaugggauauggguag

SEQ ID NO: 316087 - RNA, 24 nt, Artificial Sequence
  Synthetic
aauggggaaaugggauauggguag

SEQ ID NO: 316088 - RNA, 18 nt, Artificial Sequence
  Synthetic
ccucagcuuccuggguag

SEQ ID NO: 316089 - RNA, 19 nt, Artificial Sequence
  Synthetic
accucagcuuccuggguag

SEQ ID NO: 316090 - RNA, 20 nt, Artificial Sequence
  Synthetic
uaccucagcuuccuggguag

SEQ ID NO: 316091 - RNA, 21 nt, Artificial Sequence
  Synthetic
cuaccucagcuuccuggguag

SEQ ID NO: 316092 - RNA, 22 nt, Artificial Sequence
  Synthetic
ccuaccucagcuuccuggguag

SEQ ID NO: 316093 - RNA, 23 nt, Artificial Sequence
  Synthetic
uccuaccucagcuuccuggguag

SEQ ID NO: 316094 - RNA, 24 nt, Artificial Sequence
  Synthetic
cuccuaccucagcuuccuggguag

SEQ ID NO: 316095 - RNA, 18 nt, Artificial Sequence
  Synthetic
uaauaucagagaugguag

SEQ ID NO: 316096 - RNA, 19 nt, Artificial Sequence
  Synthetic
cuaauaucagagaugguag

SEQ ID NO: 316097 - RNA, 20 nt, Artificial Sequence
  Synthetic
ucuaauaucagagaugguag

SEQ ID NO: 316098 - RNA, 21 nt, Artificial Sequence
  Synthetic
aucuaauaucagagaugguag

SEQ ID NO: 316099 - RNA, 22 nt, Artificial Sequence
  Synthetic
uaucuaauaucagagaugguag

SEQ ID NO: 316100 - RNA, 23 nt, Artificial Sequence
  Synthetic
cuaucuaauaucagagaugguag

SEQ ID NO: 316101 - RNA, 24 nt, Artificial Sequence
  Synthetic
gcuaucuaauaucagagaugguag

SEQ ID NO: 316102 - RNA, 18 nt, Artificial Sequence
  Synthetic
aagguuggaaucugguag

SEQ ID NO: 316103 - RNA, 19 nt, Artificial Sequence
  Synthetic
aaagguuggaaucugguag

SEQ ID NO: 316104 - RNA, 20 nt, Artificial Sequence
  Synthetic
uaaagguuggaaucugguag

SEQ ID NO: 316105 - RNA, 21 nt, Artificial Sequence
  Synthetic
cuaaagguuggaaucugguag

SEQ ID NO: 316106 - RNA, 22 nt, Artificial Sequence
  Synthetic
acuaaagguuggaaucugguag

SEQ ID NO: 316107 - RNA, 23 nt, Artificial Sequence
  Synthetic
aacuaaagguuggaaucugguag

SEQ ID NO: 316108 - RNA, 24 nt, Artificial Sequence
  Synthetic
uaacuaaagguuggaaucugguag

SEQ ID NO: 316109 - RNA, 18 nt, Artificial Sequence
  Synthetic
uuagcuuuggggugguag

SEQ ID NO: 316110 - RNA, 19 nt, Artificial Sequence
  Synthetic
cuuagcuuuggggugguag

SEQ ID NO: 316111 - RNA, 20 nt, Artificial Sequence
  Synthetic
ucuuagcuuuggggugguag

SEQ ID NO: 316112 - RNA, 21 nt, Artificial Sequence
  Synthetic
cucuuagcuuuggggugguag

SEQ ID NO: 316113 - RNA, 22 nt, Artificial Sequence
  Synthetic
ccucuuagcuuuggggugguag

SEQ ID NO: 316114 - RNA, 23 nt, Artificial Sequence
  Synthetic
uccucuuagcuuuggggugguag

SEQ ID NO: 316115 - RNA, 24 nt, Artificial Sequence
  Synthetic
guccucuuagcuuuggggugguag

SEQ ID NO: 316116 - RNA, 18 nt, Artificial Sequence
  Synthetic
uuucucagacugugguag

SEQ ID NO: 316117 - RNA, 19 nt, Artificial Sequence
  Synthetic
guuucucagacugugguag

SEQ ID NO: 316118 - RNA, 20 nt, Artificial Sequence
  Synthetic
uguuucucagacugugguag

SEQ ID NO: 316119 - RNA, 21 nt, Artificial Sequence
  Synthetic
cuguuucucagacugugguag

SEQ ID NO: 316120 - RNA, 22 nt, Artificial Sequence
  Synthetic
acuguuucucagacugugguag

SEQ ID NO: 316121 - RNA, 23 nt, Artificial Sequence
  Synthetic
gacuguuucucagacugugguag

SEQ ID NO: 316122 - RNA, 24 nt, Artificial Sequence
  Synthetic
ugacuguuucucagacugugguag

SEQ ID NO: 316123 - RNA, 18 nt, Artificial Sequence
  Synthetic
ucaguaaaucugugguag

SEQ ID NO: 316124 - RNA, 19 nt, Artificial Sequence
  Synthetic
cucaguaaaucugugguag

SEQ ID NO: 316125 - RNA, 20 nt, Artificial Sequence
  Synthetic
gcucaguaaaucugugguag

SEQ ID NO: 316126 - RNA, 21 nt, Artificial Sequence
  Synthetic
ugcucaguaaaucugugguag

SEQ ID NO: 316127 - RNA, 22 nt, Artificial Sequence
  Synthetic
gugcucaguaaaucugugguag

SEQ ID NO: 316128 - RNA, 23 nt, Artificial Sequence
  Synthetic
ggugcucaguaaaucugugguag

SEQ ID NO: 316129 - RNA, 24 nt, Artificial Sequence
  Synthetic
aggugcucaguaaaucugugguag

SEQ ID NO: 316130 - RNA, 18 nt, Artificial Sequence
  Synthetic
acaaggcuuaauugguag

SEQ ID NO: 316131 - RNA, 19 nt, Artificial Sequence
  Synthetic
aacaaggcuuaauugguag

SEQ ID NO: 316132 - RNA, 20 nt, Artificial Sequence
  Synthetic
caacaaggcuuaauugguag

SEQ ID NO: 316133 - RNA, 21 nt, Artificial Sequence
  Synthetic
ucaacaaggcuuaauugguag

SEQ ID NO: 316134 - RNA, 22 nt, Artificial Sequence
  Synthetic
gucaacaaggcuuaauugguag

SEQ ID NO: 316135 - RNA, 23 nt, Artificial Sequence
  Synthetic
agucaacaaggcuuaauugguag

SEQ ID NO: 316136 - RNA, 24 nt, Artificial Sequence
  Synthetic
uagucaacaaggcuuaauugguag

SEQ ID NO: 316137 - RNA, 18 nt, Artificial Sequence
  Synthetic
gccuaaccaauuugguag

SEQ ID NO: 316138 - RNA, 19 nt, Artificial Sequence
  Synthetic
agccuaaccaauuugguag

SEQ ID NO: 316139 - RNA, 20 nt, Artificial Sequence
  Synthetic
aagccuaaccaauuugguag

SEQ ID NO: 316140 - RNA, 21 nt, Artificial Sequence
  Synthetic
caagccuaaccaauuugguag

SEQ ID NO: 316141 - RNA, 22 nt, Artificial Sequence
  Synthetic
ccaagccuaaccaauuugguag

SEQ ID NO: 316142 - RNA, 23 nt, Artificial Sequence
  Synthetic
gccaagccuaaccaauuugguag

SEQ ID NO: 316143 - RNA, 24 nt, Artificial Sequence
  Synthetic
ugccaagccuaaccaauuugguag

SEQ ID NO: 316144 - RNA, 18 nt, Artificial Sequence
  Synthetic
ggcucacauuuuugguag

SEQ ID NO: 316145 - RNA, 19 nt, Artificial Sequence
  Synthetic
gggcucacauuuuugguag

SEQ ID NO: 316146 - RNA, 20 nt, Artificial Sequence
  Synthetic
agggcucacauuuuugguag

SEQ ID NO: 316147 - RNA, 21 nt, Artificial Sequence
  Synthetic
aagggcucacauuuuugguag

SEQ ID NO: 316148 - RNA, 22 nt, Artificial Sequence
  Synthetic
caagggcucacauuuuugguag

SEQ ID NO: 316149 - RNA, 23 nt, Artificial Sequence
  Synthetic
gcaagggcucacauuuuugguag

SEQ ID NO: 316150 - RNA, 24 nt, Artificial Sequence
  Synthetic
agcaagggcucacauuuuugguag

SEQ ID NO: 316151 - RNA, 18 nt, Artificial Sequence
  Synthetic
aaagaaaagaaaauguag

SEQ ID NO: 316152 - RNA, 19 nt, Artificial Sequence
  Synthetic
aaaagaaaagaaaauguag

SEQ ID NO: 316153 - RNA, 20 nt, Artificial Sequence
  Synthetic
aaaaagaaaagaaaauguag

SEQ ID NO: 316154 - RNA, 21 nt, Artificial Sequence
  Synthetic
aaaaaagaaaagaaaauguag

SEQ ID NO: 316155 - RNA, 22 nt, Artificial Sequence
  Synthetic
aaaaaaagaaaagaaaauguag

SEQ ID NO: 316156 - RNA, 23 nt, Artificial Sequence
  Synthetic
uaaaaaaagaaaagaaaauguag

SEQ ID NO: 316157 - RNA, 24 nt, Artificial Sequence
  Synthetic
uuaaaaaaagaaaagaaaauguag

SEQ ID NO: 316158 - RNA, 18 nt, Artificial Sequence
  Synthetic
ugguagguuaaaauguag

SEQ ID NO: 316159 - RNA, 19 nt, Artificial Sequence
  Synthetic
gugguagguuaaaauguag

SEQ ID NO: 316160 - RNA, 20 nt, Artificial Sequence
  Synthetic
ugugguagguuaaaauguag

SEQ ID NO: 316161 - RNA, 21 nt, Artificial Sequence
  Synthetic
uugugguagguuaaaauguag

SEQ ID NO: 316162 - RNA, 22 nt, Artificial Sequence
  Synthetic
uuugugguagguuaaaauguag

SEQ ID NO: 316163 - RNA, 23 nt, Artificial Sequence
  Synthetic
auuugugguagguuaaaauguag

SEQ ID NO: 316164 - RNA, 24 nt, Artificial Sequence
  Synthetic
uauuugugguagguuaaaauguag

SEQ ID NO: 316165 - RNA, 18 nt, Artificial Sequence
  Synthetic
uaguuuggggaaauguag

SEQ ID NO: 316166 - RNA, 19 nt, Artificial Sequence
  Synthetic
uuaguuuggggaaauguag

SEQ ID NO: 316167 - RNA, 20 nt, Artificial Sequence
  Synthetic
uuuaguuuggggaaauguag

SEQ ID NO: 316168 - RNA, 21 nt, Artificial Sequence
  Synthetic
uuuuaguuuggggaaauguag

SEQ ID NO: 316169 - RNA, 22 nt, Artificial Sequence
  Synthetic
cuuuuaguuuggggaaauguag

SEQ ID NO: 316170 - RNA, 23 nt, Artificial Sequence
  Synthetic
ccuuuuaguuuggggaaauguag

SEQ ID NO: 316171 - RNA, 24 nt, Artificial Sequence
  Synthetic
accuuuuaguuuggggaaauguag

SEQ ID NO: 316172 - RNA, 18 nt, Artificial Sequence
  Synthetic
ggaaaccuuugaauguag

SEQ ID NO: 316173 - RNA, 19 nt, Artificial Sequence
  Synthetic
uggaaaccuuugaauguag

SEQ ID NO: 316174 - RNA, 20 nt, Artificial Sequence
  Synthetic
uuggaaaccuuugaauguag

SEQ ID NO: 316175 - RNA, 21 nt, Artificial Sequence
  Synthetic
auuggaaaccuuugaauguag

SEQ ID NO: 316176 - RNA, 22 nt, Artificial Sequence
  Synthetic
uauuggaaaccuuugaauguag

SEQ ID NO: 316177 - RNA, 23 nt, Artificial Sequence
  Synthetic
uuauuggaaaccuuugaauguag

SEQ ID NO: 316178 - RNA, 24 nt, Artificial Sequence
  Synthetic
guuauuggaaaccuuugaauguag

SEQ ID NO: 316179 - RNA, 18 nt, Artificial Sequence
  Synthetic
gagaaauaccuaauguag

SEQ ID NO: 316180 - RNA, 19 nt, Artificial Sequence
  Synthetic
ggagaaauaccuaauguag

SEQ ID NO: 316181 - RNA, 20 nt, Artificial Sequence
  Synthetic
aggagaaauaccuaauguag

SEQ ID NO: 316182 - RNA, 21 nt, Artificial Sequence
  Synthetic
uaggagaaauaccuaauguag

SEQ ID NO: 316183 - RNA, 22 nt, Artificial Sequence
  Synthetic
uuaggagaaauaccuaauguag

SEQ ID NO: 316184 - RNA, 23 nt, Artificial Sequence
  Synthetic
guuaggagaaauaccuaauguag

SEQ ID NO: 316185 - RNA, 24 nt, Artificial Sequence
  Synthetic
cguuaggagaaauaccuaauguag

SEQ ID NO: 316186 - RNA, 18 nt, Artificial Sequence
  Synthetic
cuuucaucacacauguag

SEQ ID NO: 316187 - RNA, 19 nt, Artificial Sequence
  Synthetic
gcuuucaucacacauguag

SEQ ID NO: 316188 - RNA, 20 nt, Artificial Sequence
  Synthetic
agcuuucaucacacauguag

SEQ ID NO: 316189 - RNA, 21 nt, Artificial Sequence
  Synthetic
aagcuuucaucacacauguag

SEQ ID NO: 316190 - RNA, 22 nt, Artificial Sequence
  Synthetic
gaagcuuucaucacacauguag

SEQ ID NO: 316191 - RNA, 23 nt, Artificial Sequence
  Synthetic
ugaagcuuucaucacacauguag

SEQ ID NO: 316192 - RNA, 24 nt, Artificial Sequence
  Synthetic
cugaagcuuucaucacacauguag

SEQ ID NO: 316193 - RNA, 18 nt, Artificial Sequence
  Synthetic
uguucaguuuccauguag

SEQ ID NO: 316194 - RNA, 19 nt, Artificial Sequence
  Synthetic
uuguucaguuuccauguag

SEQ ID NO: 316195 - RNA, 20 nt, Artificial Sequence
  Synthetic
guuguucaguuuccauguag

SEQ ID NO: 316196 - RNA, 21 nt, Artificial Sequence
  Synthetic
gguuguucaguuuccauguag

SEQ ID NO: 316197 - RNA, 22 nt, Artificial Sequence
  Synthetic
agguuguucaguuuccauguag

SEQ ID NO: 316198 - RNA, 23 nt, Artificial Sequence
  Synthetic
cagguuguucaguuuccauguag

SEQ ID NO: 316199 - RNA, 24 nt, Artificial Sequence
  Synthetic
gcagguuguucaguuuccauguag

SEQ ID NO: 316200 - RNA, 18 nt, Artificial Sequence
  Synthetic
gucauugucuagauguag

SEQ ID NO: 316201 - RNA, 19 nt, Artificial Sequence
  Synthetic
agucauugucuagauguag

SEQ ID NO: 316202 - RNA, 20 nt, Artificial Sequence
  Synthetic
gagucauugucuagauguag

SEQ ID NO: 316203 - RNA, 21 nt, Artificial Sequence
  Synthetic
ugagucauugucuagauguag

SEQ ID NO: 316204 - RNA, 22 nt, Artificial Sequence
  Synthetic
cugagucauugucuagauguag

SEQ ID NO: 316205 - RNA, 23 nt, Artificial Sequence
  Synthetic
acugagucauugucuagauguag

SEQ ID NO: 316206 - RNA, 24 nt, Artificial Sequence
  Synthetic
cacugagucauugucuagauguag

SEQ ID NO: 316207 - RNA, 18 nt, Artificial Sequence
  Synthetic
gcgcuuggugggauguag

SEQ ID NO: 316208 - RNA, 19 nt, Artificial Sequence
  Synthetic
ugcgcuuggugggauguag

SEQ ID NO: 316209 - RNA, 20 nt, Artificial Sequence
  Synthetic
uugcgcuuggugggauguag

SEQ ID NO: 316210 - RNA, 21 nt, Artificial Sequence
  Synthetic
guugcgcuuggugggauguag

SEQ ID NO: 316211 - RNA, 22 nt, Artificial Sequence
  Synthetic
gguugcgcuuggugggauguag

SEQ ID NO: 316212 - RNA, 23 nt, Artificial Sequence
  Synthetic
ggguugcgcuuggugggauguag

SEQ ID NO: 316213 - RNA, 24 nt, Artificial Sequence
  Synthetic
uggguugcgcuuggugggauguag

SEQ ID NO: 316214 - RNA, 18 nt, Artificial Sequence
  Synthetic
gccagcucugugauguag

SEQ ID NO: 316215 - RNA, 19 nt, Artificial Sequence
  Synthetic
ggccagcucugugauguag

SEQ ID NO: 316216 - RNA, 20 nt, Artificial Sequence
  Synthetic
gggccagcucugugauguag

SEQ ID NO: 316217 - RNA, 21 nt, Artificial Sequence
  Synthetic
ggggccagcucugugauguag

SEQ ID NO: 316218 - RNA, 22 nt, Artificial Sequence
  Synthetic
aggggccagcucugugauguag

SEQ ID NO: 316219 - RNA, 23 nt, Artificial Sequence
  Synthetic
aaggggccagcucugugauguag

SEQ ID NO: 316220 - RNA, 24 nt, Artificial Sequence
  Synthetic
gaaggggccagcucugugauguag

SEQ ID NO: 316221 - RNA, 18 nt, Artificial Sequence
  Synthetic
ucacaaugccauauguag

SEQ ID NO: 316222 - RNA, 19 nt, Artificial Sequence
  Synthetic
gucacaaugccauauguag

SEQ ID NO: 316223 - RNA, 20 nt, Artificial Sequence
  Synthetic
ugucacaaugccauauguag

SEQ ID NO: 316224 - RNA, 21 nt, Artificial Sequence
  Synthetic
uugucacaaugccauauguag

SEQ ID NO: 316225 - RNA, 22 nt, Artificial Sequence
  Synthetic
uuugucacaaugccauauguag

SEQ ID NO: 316226 - RNA, 23 nt, Artificial Sequence
  Synthetic
auuugucacaaugccauauguag

SEQ ID NO: 316227 - RNA, 24 nt, Artificial Sequence
  Synthetic
uauuugucacaaugccauauguag

SEQ ID NO: 316228 - RNA, 18 nt, Artificial Sequence
  Synthetic
uuacgcaguuguauguag

SEQ ID NO: 316229 - RNA, 19 nt, Artificial Sequence
  Synthetic
uuuacgcaguuguauguag

SEQ ID NO: 316230 - RNA, 20 nt, Artificial Sequence
  Synthetic
auuuacgcaguuguauguag

SEQ ID NO: 316231 - RNA, 21 nt, Artificial Sequence
  Synthetic
cauuuacgcaguuguauguag

SEQ ID NO: 316232 - RNA, 22 nt, Artificial Sequence
  Synthetic
ucauuuacgcaguuguauguag

SEQ ID NO: 316233 - RNA, 23 nt, Artificial Sequence
  Synthetic
aucauuuacgcaguuguauguag

SEQ ID NO: 316234 - RNA, 24 nt, Artificial Sequence
  Synthetic
gaucauuuacgcaguuguauguag

SEQ ID NO: 316235 - RNA, 18 nt, Artificial Sequence
  Synthetic
ucaggauuuuguauguag

SEQ ID NO: 316236 - RNA, 19 nt, Artificial Sequence
  Synthetic
uucaggauuuuguauguag

SEQ ID NO: 316237 - RNA, 20 nt, Artificial Sequence
  Synthetic
uuucaggauuuuguauguag

SEQ ID NO: 316238 - RNA, 21 nt, Artificial Sequence
  Synthetic
uuuucaggauuuuguauguag

SEQ ID NO: 316239 - RNA, 22 nt, Artificial Sequence
  Synthetic
uuuuucaggauuuuguauguag

SEQ ID NO: 316240 - RNA, 23 nt, Artificial Sequence
  Synthetic
uuuuuucaggauuuuguauguag

SEQ ID NO: 316241 - RNA, 24 nt, Artificial Sequence
  Synthetic
auuuuuucaggauuuuguauguag

SEQ ID NO: 316242 - RNA, 18 nt, Artificial Sequence
  Synthetic
acuuauaaucaacuguag

SEQ ID NO: 316243 - RNA, 19 nt, Artificial Sequence
  Synthetic
aacuuauaaucaacuguag

SEQ ID NO: 316244 - RNA, 20 nt, Artificial Sequence
  Synthetic
aaacuuauaaucaacuguag

SEQ ID NO: 316245 - RNA, 21 nt, Artificial Sequence
  Synthetic
aaaacuuauaaucaacuguag

SEQ ID NO: 316246 - RNA, 22 nt, Artificial Sequence
  Synthetic
aaaaacuuauaaucaacuguag

SEQ ID NO: 316247 - RNA, 23 nt, Artificial Sequence
  Synthetic
aaaaaacuuauaaucaacuguag

SEQ ID NO: 316248 - RNA, 24 nt, Artificial Sequence
  Synthetic
aaaaaaacuuauaaucaacuguag

SEQ ID NO: 316249 - RNA, 18 nt, Artificial Sequence
  Synthetic
auagagagaucacuguag

SEQ ID NO: 316250 - RNA, 19 nt, Artificial Sequence
  Synthetic
uauagagagaucacuguag

SEQ ID NO: 316251 - RNA, 20 nt, Artificial Sequence
  Synthetic
uuauagagagaucacuguag

SEQ ID NO: 316252 - RNA, 21 nt, Artificial Sequence
  Synthetic
uuuauagagagaucacuguag

SEQ ID NO: 316253 - RNA, 22 nt, Artificial Sequence
  Synthetic
cuuuauagagagaucacuguag

SEQ ID NO: 316254 - RNA, 23 nt, Artificial Sequence
  Synthetic
gcuuuauagagagaucacuguag

SEQ ID NO: 316255 - RNA, 24 nt, Artificial Sequence
  Synthetic
ugcuuuauagagagaucacuguag

SEQ ID NO: 316256 - RNA, 18 nt, Artificial Sequence
  Synthetic
uuccaauauuugcuguag

SEQ ID NO: 316257 - RNA, 19 nt, Artificial Sequence
  Synthetic
uuuccaauauuugcuguag

SEQ ID NO: 316258 - RNA, 20 nt, Artificial Sequence
  Synthetic
cuuuccaauauuugcuguag

SEQ ID NO: 316259 - RNA, 21 nt, Artificial Sequence
  Synthetic
acuuuccaauauuugcuguag

SEQ ID NO: 316260 - RNA, 22 nt, Artificial Sequence
  Synthetic
aacuuuccaauauuugcuguag

SEQ ID NO: 316261 - RNA, 23 nt, Artificial Sequence
  Synthetic
aaacuuuccaauauuugcuguag

SEQ ID NO: 316262 - RNA, 24 nt, Artificial Sequence
  Synthetic
gaaacuuuccaauauuugcuguag

SEQ ID NO: 316263 - RNA, 18 nt, Artificial Sequence
  Synthetic
ggcuagagcuuucuguag

SEQ ID NO: 316264 - RNA, 19 nt, Artificial Sequence
  Synthetic
aggcuagagcuuucuguag

SEQ ID NO: 316265 - RNA, 20 nt, Artificial Sequence
  Synthetic
gaggcuagagcuuucuguag

SEQ ID NO: 316266 - RNA, 21 nt, Artificial Sequence
  Synthetic
ggaggcuagagcuuucuguag

SEQ ID NO: 316267 - RNA, 22 nt, Artificial Sequence
  Synthetic
aggaggcuagagcuuucuguag

SEQ ID NO: 316268 - RNA, 23 nt, Artificial Sequence
  Synthetic
caggaggcuagagcuuucuguag

SEQ ID NO: 316269 - RNA, 24 nt, Artificial Sequence
  Synthetic
ucaggaggcuagagcuuucuguag

SEQ ID NO: 316270 - RNA, 18 nt, Artificial Sequence
  Synthetic
cuuuacgagaaaguguag

SEQ ID NO: 316271 - RNA, 19 nt, Artificial Sequence
  Synthetic
ccuuuacgagaaaguguag

SEQ ID NO: 316272 - RNA, 20 nt, Artificial Sequence
  Synthetic
accuuuacgagaaaguguag

SEQ ID NO: 316273 - RNA, 21 nt, Artificial Sequence
  Synthetic
gaccuuuacgagaaaguguag

SEQ ID NO: 316274 - RNA, 22 nt, Artificial Sequence
  Synthetic
ugaccuuuacgagaaaguguag

SEQ ID NO: 316275 - RNA, 23 nt, Artificial Sequence
  Synthetic
cugaccuuuacgagaaaguguag

SEQ ID NO: 316276 - RNA, 24 nt, Artificial Sequence
  Synthetic
acugaccuuuacgagaaaguguag

SEQ ID NO: 316277 - RNA, 18 nt, Artificial Sequence
  Synthetic
gagcaauaagcaguguag

SEQ ID NO: 316278 - RNA, 19 nt, Artificial Sequence
  Synthetic
ggagcaauaagcaguguag

SEQ ID NO: 316279 - RNA, 20 nt, Artificial Sequence
  Synthetic
uggagcaauaagcaguguag

SEQ ID NO: 316280 - RNA, 21 nt, Artificial Sequence
  Synthetic
cuggagcaauaagcaguguag

SEQ ID NO: 316281 - RNA, 22 nt, Artificial Sequence
  Synthetic
ccuggagcaauaagcaguguag

SEQ ID NO: 316282 - RNA, 23 nt, Artificial Sequence
  Synthetic
accuggagcaauaagcaguguag

SEQ ID NO: 316283 - RNA, 24 nt, Artificial Sequence
  Synthetic
aaccuggagcaauaagcaguguag

SEQ ID NO: 316284 - RNA, 18 nt, Artificial Sequence
  Synthetic
cuagagccuagaguguag

SEQ ID NO: 316285 - RNA, 19 nt, Artificial Sequence
  Synthetic
ucuagagccuagaguguag

SEQ ID NO: 316286 - RNA, 20 nt, Artificial Sequence
  Synthetic
cucuagagccuagaguguag

SEQ ID NO: 316287 - RNA, 21 nt, Artificial Sequence
  Synthetic
ccucuagagccuagaguguag

SEQ ID NO: 316288 - RNA, 22 nt, Artificial Sequence
  Synthetic
gccucuagagccuagaguguag

SEQ ID NO: 316289 - RNA, 23 nt, Artificial Sequence
  Synthetic
ggccucuagagccuagaguguag

SEQ ID NO: 316290 - RNA, 24 nt, Artificial Sequence
  Synthetic
uggccucuagagccuagaguguag

SEQ ID NO: 316291 - RNA, 18 nt, Artificial Sequence
  Synthetic
uuuguauuuuuaguguag

SEQ ID NO: 316292 - RNA, 19 nt, Artificial Sequence
  Synthetic
uuuuguauuuuuaguguag

SEQ ID NO: 316293 - RNA, 20 nt, Artificial Sequence
  Synthetic
uuuuuguauuuuuaguguag

SEQ ID NO: 316294 - RNA, 21 nt, Artificial Sequence
  Synthetic
auuuuuguauuuuuaguguag

SEQ ID NO: 316295 - RNA, 22 nt, Artificial Sequence
  Synthetic
aauuuuuguauuuuuaguguag

SEQ ID NO: 316296 - RNA, 23 nt, Artificial Sequence
  Synthetic
aaauuuuuguauuuuuaguguag

SEQ ID NO: 316297 - RNA, 24 nt, Artificial Sequence
  Synthetic
caaauuuuuguauuuuuaguguag

SEQ ID NO: 316298 - RNA, 18 nt, Artificial Sequence
  Synthetic
ccucagccucccguguag

SEQ ID NO: 316299 - RNA, 19 nt, Artificial Sequence
  Synthetic
gccucagccucccguguag

SEQ ID NO: 316300 - RNA, 20 nt, Artificial Sequence
  Synthetic
ugccucagccucccguguag

SEQ ID NO: 316301 - RNA, 21 nt, Artificial Sequence
  Synthetic
cugccucagccucccguguag

SEQ ID NO: 316302 - RNA, 22 nt, Artificial Sequence
  Synthetic
ccugccucagccucccguguag

SEQ ID NO: 316303 - RNA, 23 nt, Artificial Sequence
  Synthetic
uccugccucagccucccguguag

SEQ ID NO: 316304 - RNA, 24 nt, Artificial Sequence
  Synthetic
cuccugccucagccucccguguag

SEQ ID NO: 316305 - RNA, 18 nt, Artificial Sequence
  Synthetic
gccauggagucuguguag

SEQ ID NO: 316306 - RNA, 19 nt, Artificial Sequence
  Synthetic
agccauggagucuguguag

SEQ ID NO: 316307 - RNA, 20 nt, Artificial Sequence
  Synthetic
cagccauggagucuguguag

SEQ ID NO: 316308 - RNA, 21 nt, Artificial Sequence
  Synthetic
ucagccauggagucuguguag

SEQ ID NO: 316309 - RNA, 22 nt, Artificial Sequence
  Synthetic
gucagccauggagucuguguag

SEQ ID NO: 316310 - RNA, 23 nt, Artificial Sequence
  Synthetic
agucagccauggagucuguguag

SEQ ID NO: 316311 - RNA, 24 nt, Artificial Sequence
  Synthetic
gagucagccauggagucuguguag

SEQ ID NO: 316312 - RNA, 18 nt, Artificial Sequence
  Synthetic
cuucuaaaauguguguag

SEQ ID NO: 316313 - RNA, 19 nt, Artificial Sequence
  Synthetic
ucuucuaaaauguguguag

SEQ ID NO: 316314 - RNA, 20 nt, Artificial Sequence
  Synthetic
uucuucuaaaauguguguag

SEQ ID NO: 316315 - RNA, 21 nt, Artificial Sequence
  Synthetic
uuucuucuaaaauguguguag

SEQ ID NO: 316316 - RNA, 22 nt, Artificial Sequence
  Synthetic
cuuucuucuaaaauguguguag

SEQ ID NO: 316317 - RNA, 23 nt, Artificial Sequence
  Synthetic
ucuuucuucuaaaauguguguag

SEQ ID NO: 316318 - RNA, 24 nt, Artificial Sequence
  Synthetic
cucuuucuucuaaaauguguguag

SEQ ID NO: 316319 - RNA, 18 nt, Artificial Sequence
  Synthetic
cuggagaugcaauuguag

SEQ ID NO: 316320 - RNA, 19 nt, Artificial Sequence
  Synthetic
ucuggagaugcaauuguag

SEQ ID NO: 316321 - RNA, 20 nt, Artificial Sequence
  Synthetic
aucuggagaugcaauuguag

SEQ ID NO: 316322 - RNA, 21 nt, Artificial Sequence
  Synthetic
gaucuggagaugcaauuguag

SEQ ID NO: 316323 - RNA, 22 nt, Artificial Sequence
  Synthetic
agaucuggagaugcaauuguag

SEQ ID NO: 316324 - RNA, 23 nt, Artificial Sequence
  Synthetic
gagaucuggagaugcaauuguag

SEQ ID NO: 316325 - RNA, 24 nt, Artificial Sequence
  Synthetic
ggagaucuggagaugcaauuguag

SEQ ID NO: 316326 - RNA, 18 nt, Artificial Sequence
  Synthetic
auauucaucuucuuguag

SEQ ID NO: 316327 - RNA, 19 nt, Artificial Sequence
  Synthetic
uauauucaucuucuuguag

SEQ ID NO: 316328 - RNA, 20 nt, Artificial Sequence
  Synthetic
auauauucaucuucuuguag

SEQ ID NO: 316329 - RNA, 21 nt, Artificial Sequence
  Synthetic
aauauauucaucuucuuguag

SEQ ID NO: 316330 - RNA, 22 nt, Artificial Sequence
  Synthetic
aaauauauucaucuucuuguag

SEQ ID NO: 316331 - RNA, 23 nt, Artificial Sequence
  Synthetic
gaaauauauucaucuucuuguag

SEQ ID NO: 316332 - RNA, 24 nt, Artificial Sequence
  Synthetic
agaaauauauucaucuucuuguag

SEQ ID NO: 316333 - RNA, 18 nt, Artificial Sequence
  Synthetic
aaauaaacaugguuguag

SEQ ID NO: 316334 - RNA, 19 nt, Artificial Sequence
  Synthetic
aaaauaaacaugguuguag

SEQ ID NO: 316335 - RNA, 20 nt, Artificial Sequence
  Synthetic
uaaaauaaacaugguuguag

SEQ ID NO: 316336 - RNA, 21 nt, Artificial Sequence
  Synthetic
uuaaaauaaacaugguuguag

SEQ ID NO: 316337 - RNA, 22 nt, Artificial Sequence
  Synthetic
cuuaaaauaaacaugguuguag

SEQ ID NO: 316338 - RNA, 23 nt, Artificial Sequence
  Synthetic
ucuuaaaauaaacaugguuguag

SEQ ID NO: 316339 - RNA, 24 nt, Artificial Sequence
  Synthetic
uucuuaaaauaaacaugguuguag

SEQ ID NO: 316340 - RNA, 18 nt, Artificial Sequence
  Synthetic
agucacagcugguuguag

SEQ ID NO: 316341 - RNA, 19 nt, Artificial Sequence
  Synthetic
uagucacagcugguuguag

SEQ ID NO: 316342 - RNA, 20 nt, Artificial Sequence
  Synthetic
auagucacagcugguuguag

SEQ ID NO: 316343 - RNA, 21 nt, Artificial Sequence
  Synthetic
gauagucacagcugguuguag

SEQ ID NO: 316344 - RNA, 22 nt, Artificial Sequence
  Synthetic
cgauagucacagcugguuguag

SEQ ID NO: 316345 - RNA, 23 nt, Artificial Sequence
  Synthetic
ccgauagucacagcugguuguag

SEQ ID NO: 316346 - RNA, 24 nt, Artificial Sequence
  Synthetic
accgauagucacagcugguuguag

SEQ ID NO: 316347 - RNA, 18 nt, Artificial Sequence
  Synthetic
ugugagaaaauguuguag

SEQ ID NO: 316348 - RNA, 19 nt, Artificial Sequence
  Synthetic
cugugagaaaauguuguag

SEQ ID NO: 316349 - RNA, 20 nt, Artificial Sequence
  Synthetic
ucugugagaaaauguuguag

SEQ ID NO: 316350 - RNA, 21 nt, Artificial Sequence
  Synthetic
uucugugagaaaauguuguag

SEQ ID NO: 316351 - RNA, 22 nt, Artificial Sequence
  Synthetic
auucugugagaaaauguuguag

SEQ ID NO: 316352 - RNA, 23 nt, Artificial Sequence
  Synthetic
uauucugugagaaaauguuguag

SEQ ID NO: 316353 - RNA, 24 nt, Artificial Sequence
  Synthetic
uuauucugugagaaaauguuguag

SEQ ID NO: 316354 - RNA, 18 nt, Artificial Sequence
  Synthetic
cauuuggaaacuuuguag

SEQ ID NO: 316355 - RNA, 19 nt, Artificial Sequence
  Synthetic
acauuuggaaacuuuguag

SEQ ID NO: 316356 - RNA, 20 nt, Artificial Sequence
  Synthetic
aacauuuggaaacuuuguag

SEQ ID NO: 316357 - RNA, 21 nt, Artificial Sequence
  Synthetic
uaacauuuggaaacuuuguag

SEQ ID NO: 316358 - RNA, 22 nt, Artificial Sequence
  Synthetic
uuaacauuuggaaacuuuguag

SEQ ID NO: 316359 - RNA, 23 nt, Artificial Sequence
  Synthetic
uuuaacauuuggaaacuuuguag

SEQ ID NO: 316360 - RNA, 24 nt, Artificial Sequence
  Synthetic
uuuuaacauuuggaaacuuuguag

SEQ ID NO: 316361 - RNA, 18 nt, Artificial Sequence
  Synthetic
ucaaggaaagcuuuguag

SEQ ID NO: 316362 - RNA, 19 nt, Artificial Sequence
  Synthetic
aucaaggaaagcuuuguag

SEQ ID NO: 316363 - RNA, 20 nt, Artificial Sequence
  Synthetic
aaucaaggaaagcuuuguag

SEQ ID NO: 316364 - RNA, 21 nt, Artificial Sequence
  Synthetic
uaaucaaggaaagcuuuguag

SEQ ID NO: 316365 - RNA, 22 nt, Artificial Sequence
  Synthetic
uuaaucaaggaaagcuuuguag

SEQ ID NO: 316366 - RNA, 23 nt, Artificial Sequence
  Synthetic
auuaaucaaggaaagcuuuguag

SEQ ID NO: 316367 - RNA, 24 nt, Artificial Sequence
  Synthetic
aauuaaucaaggaaagcuuuguag

SEQ ID NO: 316368 - RNA, 18 nt, Artificial Sequence
  Synthetic
acaaaaaaaaaaaauuag

SEQ ID NO: 316369 - RNA, 19 nt, Artificial Sequence
  Synthetic
uacaaaaaaaaaaaauuag

SEQ ID NO: 316370 - RNA, 20 nt, Artificial Sequence
  Synthetic
auacaaaaaaaaaaaauuag

SEQ ID NO: 316371 - RNA, 21 nt, Artificial Sequence
  Synthetic
aauacaaaaaaaaaaaauuag

SEQ ID NO: 316372 - RNA, 22 nt, Artificial Sequence
  Synthetic
aaauacaaaaaaaaaaaauuag

SEQ ID NO: 316373 - RNA, 23 nt, Artificial Sequence
  Synthetic
aaaauacaaaaaaaaaaaauuag

SEQ ID NO: 316374 - RNA, 24 nt, Artificial Sequence
  Synthetic
aaaaauacaaaaaaaaaaaauuag

SEQ ID NO: 316375 - RNA, 18 nt, Artificial Sequence
  Synthetic
aauacaaaaaaaaauuag

SEQ ID NO: 316376 - RNA, 19 nt, Artificial Sequence
  Synthetic
aaauacaaaaaaaaauuag

SEQ ID NO: 316377 - RNA, 20 nt, Artificial Sequence
  Synthetic
aaaauacaaaaaaaaauuag

SEQ ID NO: 316378 - RNA, 21 nt, Artificial Sequence
  Synthetic
aaaaauacaaaaaaaaauuag

SEQ ID NO: 316379 - RNA, 22 nt, Artificial Sequence
  Synthetic
uaaaaauacaaaaaaaaauuag

SEQ ID NO: 316380 - RNA, 23 nt, Artificial Sequence
  Synthetic
cuaaaaauacaaaaaaaaauuag

SEQ ID NO: 316381 - RNA, 24 nt, Artificial Sequence
  Synthetic
acuaaaaauacaaaaaaaaauuag

SEQ ID NO: 316382 - RNA, 18 nt, Artificial Sequence
  Synthetic
aaaauacaaaaaaauuag

SEQ ID NO: 316383 - RNA, 19 nt, Artificial Sequence
  Synthetic
aaaaauacaaaaaaauuag

SEQ ID NO: 316384 - RNA, 20 nt, Artificial Sequence
  Synthetic
uaaaaauacaaaaaaauuag

SEQ ID NO: 316385 - RNA, 21 nt, Artificial Sequence
  Synthetic
cuaaaaauacaaaaaaauuag

SEQ ID NO: 316386 - RNA, 22 nt, Artificial Sequence
  Synthetic
acuaaaaauacaaaaaaauuag

SEQ ID NO: 316387 - RNA, 23 nt, Artificial Sequence
  Synthetic
uacuaaaaauacaaaaaaauuag

SEQ ID NO: 316388 - RNA, 24 nt, Artificial Sequence
  Synthetic
cuacuaaaaauacaaaaaaauuag

SEQ ID NO: 316389 - RNA, 18 nt, Artificial Sequence
  Synthetic
aaaaacacaaaaaauuag

SEQ ID NO: 316390 - RNA, 19 nt, Artificial Sequence
  Synthetic
uaaaaacacaaaaaauuag

SEQ ID NO: 316391 - RNA, 20 nt, Artificial Sequence
  Synthetic
cuaaaaacacaaaaaauuag

SEQ ID NO: 316392 - RNA, 21 nt, Artificial Sequence
  Synthetic
acuaaaaacacaaaaaauuag

SEQ ID NO: 316393 - RNA, 22 nt, Artificial Sequence
  Synthetic
uacuaaaaacacaaaaaauuag

SEQ ID NO: 316394 - RNA, 23 nt, Artificial Sequence
  Synthetic
cuacuaaaaacacaaaaaauuag

SEQ ID NO: 316395 - RNA, 24 nt, Artificial Sequence
  Synthetic
ucuacuaaaaacacaaaaaauuag

SEQ ID NO: 316396 - RNA, 18 nt, Artificial Sequence
  Synthetic
aaaaauacaaaaaauuag

SEQ ID NO: 316397 - RNA, 19 nt, Artificial Sequence
  Synthetic
aaaaaauacaaaaaauuag

SEQ ID NO: 316398 - RNA, 20 nt, Artificial Sequence
  Synthetic
uaaaaaauacaaaaaauuag

SEQ ID NO: 316399 - RNA, 21 nt, Artificial Sequence
  Synthetic
cuaaaaaauacaaaaaauuag

SEQ ID NO: 316400 - RNA, 22 nt, Artificial Sequence
  Synthetic
acuaaaaaauacaaaaaauuag

SEQ ID NO: 316401 - RNA, 23 nt, Artificial Sequence
  Synthetic
uacuaaaaaauacaaaaaauuag

SEQ ID NO: 316402 - RNA, 24 nt, Artificial Sequence
  Synthetic
cuacuaaaaaauacaaaaaauuag

SEQ ID NO: 316403 - RNA, 21 nt, Artificial Sequence
  Synthetic
gcuaaaaauacaaaaaauuag

SEQ ID NO: 316404 - RNA, 22 nt, Artificial Sequence
  Synthetic
ugcuaaaaauacaaaaaauuag

SEQ ID NO: 316405 - RNA, 23 nt, Artificial Sequence
  Synthetic
cugcuaaaaauacaaaaaauuag

SEQ ID NO: 316406 - RNA, 24 nt, Artificial Sequence
  Synthetic
ucugcuaaaaauacaaaaaauuag

SEQ ID NO: 316407 - RNA, 18 nt, Artificial Sequence
  Synthetic
uaaaauacaaaaaauuag

SEQ ID NO: 316408 - RNA, 19 nt, Artificial Sequence
  Synthetic
uuaaaauacaaaaaauuag

SEQ ID NO: 316409 - RNA, 20 nt, Artificial Sequence
  Synthetic
cuuaaaauacaaaaaauuag

SEQ ID NO: 316410 - RNA, 21 nt, Artificial Sequence
  Synthetic
acuuaaaauacaaaaaauuag

SEQ ID NO: 316411 - RNA, 22 nt, Artificial Sequence
  Synthetic
uacuuaaaauacaaaaaauuag

SEQ ID NO: 316412 - RNA, 23 nt, Artificial Sequence
  Synthetic
cuacuuaaaauacaaaaaauuag

SEQ ID NO: 316413 - RNA, 24 nt, Artificial Sequence
  Synthetic
ucuacuuaaaauacaaaaaauuag

SEQ ID NO: 316414 - RNA, 18 nt, Artificial Sequence
  Synthetic
uaaaguacaaaaaauuag

SEQ ID NO: 316415 - RNA, 19 nt, Artificial Sequence
  Synthetic
cuaaaguacaaaaaauuag

SEQ ID NO: 316416 - RNA, 20 nt, Artificial Sequence
  Synthetic
acuaaaguacaaaaaauuag

SEQ ID NO: 316417 - RNA, 21 nt, Artificial Sequence
  Synthetic
cacuaaaguacaaaaaauuag

SEQ ID NO: 316418 - RNA, 22 nt, Artificial Sequence
  Synthetic
ccacuaaaguacaaaaaauuag

SEQ ID NO: 316419 - RNA, 23 nt, Artificial Sequence
  Synthetic
uccacuaaaguacaaaaaauuag

SEQ ID NO: 316420 - RNA, 24 nt, Artificial Sequence
  Synthetic
cuccacuaaaguacaaaaaauuag

SEQ ID NO: 316421 - RNA, 18 nt, Artificial Sequence
  Synthetic
aaaaaaagaaaaaauuag

SEQ ID NO: 316422 - RNA, 19 nt, Artificial Sequence
  Synthetic
caaaaaaagaaaaaauuag

SEQ ID NO: 316423 - RNA, 20 nt, Artificial Sequence
  Synthetic
acaaaaaaagaaaaaauuag

SEQ ID NO: 316424 - RNA, 21 nt, Artificial Sequence
  Synthetic
uacaaaaaaagaaaaaauuag

SEQ ID NO: 316425 - RNA, 22 nt, Artificial Sequence
  Synthetic
auacaaaaaaagaaaaaauuag

SEQ ID NO: 316426 - RNA, 23 nt, Artificial Sequence
  Synthetic
aauacaaaaaaagaaaaaauuag

SEQ ID NO: 316427 - RNA, 24 nt, Artificial Sequence
  Synthetic
aaauacaaaaaaagaaaaaauuag

SEQ ID NO: 316428 - RNA, 18 nt, Artificial Sequence
  Synthetic
aaaaauauaaaaaauuag

SEQ ID NO: 316429 - RNA, 19 nt, Artificial Sequence
  Synthetic
uaaaaauauaaaaaauuag

SEQ ID NO: 316430 - RNA, 20 nt, Artificial Sequence
  Synthetic
cuaaaaauauaaaaaauuag

SEQ ID NO: 316431 - RNA, 21 nt, Artificial Sequence
  Synthetic
acuaaaaauauaaaaaauuag

SEQ ID NO: 316432 - RNA, 22 nt, Artificial Sequence
  Synthetic
uacuaaaaauauaaaaaauuag

SEQ ID NO: 316433 - RNA, 23 nt, Artificial Sequence
  Synthetic
cuacuaaaaauauaaaaaauuag

SEQ ID NO: 316434 - RNA, 24 nt, Artificial Sequence
  Synthetic
ucuacuaaaaauauaaaaaauuag

SEQ ID NO: 316435 - RNA, 18 nt, Artificial Sequence
  Synthetic
caaaaauacaaaaauuag

SEQ ID NO: 316436 - RNA, 19 nt, Artificial Sequence
  Synthetic
ccaaaaauacaaaaauuag

SEQ ID NO: 316437 - RNA, 20 nt, Artificial Sequence
  Synthetic
accaaaaauacaaaaauuag

SEQ ID NO: 316438 - RNA, 21 nt, Artificial Sequence
  Synthetic
uaccaaaaauacaaaaauuag

SEQ ID NO: 316439 - RNA, 22 nt, Artificial Sequence
  Synthetic
cuaccaaaaauacaaaaauuag

SEQ ID NO: 316440 - RNA, 23 nt, Artificial Sequence
  Synthetic
ucuaccaaaaauacaaaaauuag

SEQ ID NO: 316441 - RNA, 24 nt, Artificial Sequence
  Synthetic
cucuaccaaaaauacaaaaauuag

SEQ ID NO: 316442 - RNA, 18 nt, Artificial Sequence
  Synthetic
uaaaaauacaaaaauuag

SEQ ID NO: 316443 - RNA, 21 nt, Artificial Sequence
  Synthetic
cacuaaaaauacaaaaauuag

SEQ ID NO: 316444 - RNA, 22 nt, Artificial Sequence
  Synthetic
ccacuaaaaauacaaaaauuag

SEQ ID NO: 316445 - RNA, 23 nt, Artificial Sequence
  Synthetic
uccacuaaaaauacaaaaauuag

SEQ ID NO: 316446 - RNA, 24 nt, Artificial Sequence
  Synthetic
cuccacuaaaaauacaaaaauuag

SEQ ID NO: 316447 - RNA, 19 nt, Artificial Sequence
  Synthetic
uuaaaaauacaaaaauuag

SEQ ID NO: 316448 - RNA, 20 nt, Artificial Sequence
  Synthetic
auuaaaaauacaaaaauuag

SEQ ID NO: 316449 - RNA, 21 nt, Artificial Sequence
  Synthetic
uauuaaaaauacaaaaauuag

SEQ ID NO: 316450 - RNA, 22 nt, Artificial Sequence
  Synthetic
cuauuaaaaauacaaaaauuag

SEQ ID NO: 316451 - RNA, 23 nt, Artificial Sequence
  Synthetic
ucuauuaaaaauacaaaaauuag

SEQ ID NO: 316452 - RNA, 24 nt, Artificial Sequence
  Synthetic
cucuauuaaaaauacaaaaauuag

SEQ ID NO: 316453 - RNA, 18 nt, Artificial Sequence
  Synthetic
auacaaaaacaaaauuag

SEQ ID NO: 316454 - RNA, 19 nt, Artificial Sequence
  Synthetic
aauacaaaaacaaaauuag

SEQ ID NO: 316455 - RNA, 20 nt, Artificial Sequence
  Synthetic
aaauacaaaaacaaaauuag

SEQ ID NO: 316456 - RNA, 21 nt, Artificial Sequence
  Synthetic
aaaauacaaaaacaaaauuag

SEQ ID NO: 316457 - RNA, 22 nt, Artificial Sequence
  Synthetic
aaaaauacaaaaacaaaauuag

SEQ ID NO: 316458 - RNA, 23 nt, Artificial Sequence
  Synthetic
uaaaaauacaaaaacaaaauuag

SEQ ID NO: 316459 - RNA, 24 nt, Artificial Sequence
  Synthetic
cuaaaaauacaaaaacaaaauuag

SEQ ID NO: 316460 - RNA, 18 nt, Artificial Sequence
  Synthetic
auagagcuacaaaauuag

SEQ ID NO: 316461 - RNA, 19 nt, Artificial Sequence
  Synthetic
uauagagcuacaaaauuag

SEQ ID NO: 316462 - RNA, 20 nt, Artificial Sequence
  Synthetic
uuauagagcuacaaaauuag

SEQ ID NO: 316463 - RNA, 21 nt, Artificial Sequence
  Synthetic
guuauagagcuacaaaauuag

SEQ ID NO: 316464 - RNA, 22 nt, Artificial Sequence
  Synthetic
uguuauagagcuacaaaauuag

SEQ ID NO: 316465 - RNA, 23 nt, Artificial Sequence
  Synthetic
guguuauagagcuacaaaauuag

SEQ ID NO: 316466 - RNA, 24 nt, Artificial Sequence
  Synthetic
aguguuauagagcuacaaaauuag

SEQ ID NO: 316467 - RNA, 18 nt, Artificial Sequence
  Synthetic
uuuaggaugcaaaauuag

SEQ ID NO: 316468 - RNA, 19 nt, Artificial Sequence
  Synthetic
cuuuaggaugcaaaauuag

SEQ ID NO: 316469 - RNA, 20 nt, Artificial Sequence
  Synthetic
ucuuuaggaugcaaaauuag

SEQ ID NO: 316470 - RNA, 21 nt, Artificial Sequence
  Synthetic
aucuuuaggaugcaaaauuag

SEQ ID NO: 316471 - RNA, 22 nt, Artificial Sequence
  Synthetic
uaucuuuaggaugcaaaauuag

SEQ ID NO: 316472 - RNA, 23 nt, Artificial Sequence
  Synthetic
guaucuuuaggaugcaaaauuag

SEQ ID NO: 316473 - RNA, 24 nt, Artificial Sequence
  Synthetic
aguaucuuuaggaugcaaaauuag

SEQ ID NO: 316474 - RNA, 18 nt, Artificial Sequence
  Synthetic
aggagcacagaaaauuag

SEQ ID NO: 316475 - RNA, 19 nt, Artificial Sequence
  Synthetic
aaggagcacagaaaauuag

SEQ ID NO: 316476 - RNA, 20 nt, Artificial Sequence
  Synthetic
aaaggagcacagaaaauuag

SEQ ID NO: 316477 - RNA, 21 nt, Artificial Sequence
  Synthetic
gaaaggagcacagaaaauuag

SEQ ID NO: 316478 - RNA, 22 nt, Artificial Sequence
  Synthetic
agaaaggagcacagaaaauuag

SEQ ID NO: 316479 - RNA, 23 nt, Artificial Sequence
  Synthetic
aagaaaggagcacagaaaauuag

SEQ ID NO: 316480 - RNA, 24 nt, Artificial Sequence
  Synthetic
aaagaaaggagcacagaaaauuag

SEQ ID NO: 316481 - RNA, 18 nt, Artificial Sequence
  Synthetic
uuuugagaauaaaauuag

SEQ ID NO: 316482 - RNA, 19 nt, Artificial Sequence
  Synthetic
auuuugagaauaaaauuag

SEQ ID NO: 316483 - RNA, 20 nt, Artificial Sequence
  Synthetic
cauuuugagaauaaaauuag

SEQ ID NO: 316484 - RNA, 21 nt, Artificial Sequence
  Synthetic
ucauuuugagaauaaaauuag

SEQ ID NO: 316485 - RNA, 22 nt, Artificial Sequence
  Synthetic
cucauuuugagaauaaaauuag

SEQ ID NO: 316486 - RNA, 23 nt, Artificial Sequence
  Synthetic
acucauuuugagaauaaaauuag

SEQ ID NO: 316487 - RNA, 24 nt, Artificial Sequence
  Synthetic
aacucauuuugagaauaaaauuag

SEQ ID NO: 316488 - RNA, 18 nt, Artificial Sequence
  Synthetic
uaaaaauaguaaaauuag

SEQ ID NO: 316489 - RNA, 19 nt, Artificial Sequence
  Synthetic
cuaaaaauaguaaaauuag

SEQ ID NO: 316490 - RNA, 20 nt, Artificial Sequence
  Synthetic
acuaaaaauaguaaaauuag

SEQ ID NO: 316491 - RNA, 21 nt, Artificial Sequence
  Synthetic
uacuaaaaauaguaaaauuag

SEQ ID NO: 316492 - RNA, 22 nt, Artificial Sequence
  Synthetic
uuacuaaaaauaguaaaauuag

SEQ ID NO: 316493 - RNA, 23 nt, Artificial Sequence
  Synthetic
uuuacuaaaaauaguaaaauuag

SEQ ID NO: 316494 - RNA, 24 nt, Artificial Sequence
  Synthetic
cuuuacuaaaaauaguaaaauuag

SEQ ID NO: 316495 - RNA, 18 nt, Artificial Sequence
  Synthetic
auuuacugcacaaauuag

SEQ ID NO: 316496 - RNA, 19 nt, Artificial Sequence
  Synthetic
uauuuacugcacaaauuag

SEQ ID NO: 316497 - RNA, 20 nt, Artificial Sequence
  Synthetic
cuauuuacugcacaaauuag

SEQ ID NO: 316498 - RNA, 21 nt, Artificial Sequence
  Synthetic
ucuauuuacugcacaaauuag

SEQ ID NO: 316499 - RNA, 22 nt, Artificial Sequence
  Synthetic
aucuauuuacugcacaaauuag

SEQ ID NO: 316500 - RNA, 23 nt, Artificial Sequence
  Synthetic
caucuauuuacugcacaaauuag

SEQ ID NO: 316501 - RNA, 24 nt, Artificial Sequence
  Synthetic
acaucuauuuacugcacaaauuag

SEQ ID NO: 316502 - RNA, 18 nt, Artificial Sequence
  Synthetic
ucaucuaauagaaauuag

SEQ ID NO: 316503 - RNA, 19 nt, Artificial Sequence
  Synthetic
cucaucuaauagaaauuag

SEQ ID NO: 316504 - RNA, 20 nt, Artificial Sequence
  Synthetic
acucaucuaauagaaauuag

SEQ ID NO: 316505 - RNA, 21 nt, Artificial Sequence
  Synthetic
cacucaucuaauagaaauuag

SEQ ID NO: 316506 - RNA, 22 nt, Artificial Sequence
  Synthetic
ucacucaucuaauagaaauuag

SEQ ID NO: 316507 - RNA, 23 nt, Artificial Sequence
  Synthetic
aucacucaucuaauagaaauuag

SEQ ID NO: 316508 - RNA, 24 nt, Artificial Sequence
  Synthetic
aaucacucaucuaauagaaauuag

SEQ ID NO: 316509 - RNA, 18 nt, Artificial Sequence
  Synthetic
aauaccucgugaaauuag

SEQ ID NO: 316510 - RNA, 19 nt, Artificial Sequence
  Synthetic
caauaccucgugaaauuag

SEQ ID NO: 316511 - RNA, 20 nt, Artificial Sequence
  Synthetic
ucaauaccucgugaaauuag

SEQ ID NO: 316512 - RNA, 21 nt, Artificial Sequence
  Synthetic
uucaauaccucgugaaauuag

SEQ ID NO: 316513 - RNA, 22 nt, Artificial Sequence
  Synthetic
auucaauaccucgugaaauuag

SEQ ID NO: 316514 - RNA, 23 nt, Artificial Sequence
  Synthetic
uauucaauaccucgugaaauuag

SEQ ID NO: 316515 - RNA, 24 nt, Artificial Sequence
  Synthetic
uuauucaauaccucgugaaauuag

SEQ ID NO: 316516 - RNA, 18 nt, Artificial Sequence
  Synthetic
aaauagguuuacaauuag

SEQ ID NO: 316517 - RNA, 19 nt, Artificial Sequence
  Synthetic
aaaauagguuuacaauuag

SEQ ID NO: 316518 - RNA, 20 nt, Artificial Sequence
  Synthetic
uaaaauagguuuacaauuag

SEQ ID NO: 316519 - RNA, 21 nt, Artificial Sequence
  Synthetic
uuaaaauagguuuacaauuag

SEQ ID NO: 316520 - RNA, 22 nt, Artificial Sequence
  Synthetic
auuaaaauagguuuacaauuag

SEQ ID NO: 316521 - RNA, 23 nt, Artificial Sequence
  Synthetic
cauuaaaauagguuuacaauuag

SEQ ID NO: 316522 - RNA, 24 nt, Artificial Sequence
  Synthetic
ccauuaaaauagguuuacaauuag

SEQ ID NO: 316523 - RNA, 18 nt, Artificial Sequence
  Synthetic
gaauguacugccaauuag

SEQ ID NO: 316524 - RNA, 19 nt, Artificial Sequence
  Synthetic
ggaauguacugccaauuag

SEQ ID NO: 316525 - RNA, 20 nt, Artificial Sequence
  Synthetic
aggaauguacugccaauuag

SEQ ID NO: 316526 - RNA, 21 nt, Artificial Sequence
  Synthetic
aaggaauguacugccaauuag

SEQ ID NO: 316527 - RNA, 22 nt, Artificial Sequence
  Synthetic
gaaggaauguacugccaauuag

SEQ ID NO: 316528 - RNA, 23 nt, Artificial Sequence
  Synthetic
ggaaggaauguacugccaauuag

SEQ ID NO: 316529 - RNA, 24 nt, Artificial Sequence
  Synthetic
uggaaggaauguacugccaauuag

SEQ ID NO: 316530 - RNA, 18 nt, Artificial Sequence
  Synthetic
cagcauuuugccaauuag

SEQ ID NO: 316531 - RNA, 19 nt, Artificial Sequence
  Synthetic
gcagcauuuugccaauuag

SEQ ID NO: 316532 - RNA, 20 nt, Artificial Sequence
  Synthetic
ugcagcauuuugccaauuag

SEQ ID NO: 316533 - RNA, 21 nt, Artificial Sequence
  Synthetic
cugcagcauuuugccaauuag

SEQ ID NO: 316534 - RNA, 22 nt, Artificial Sequence
  Synthetic
ccugcagcauuuugccaauuag

SEQ ID NO: 316535 - RNA, 23 nt, Artificial Sequence
  Synthetic
accugcagcauuuugccaauuag

SEQ ID NO: 316536 - RNA, 24 nt, Artificial Sequence
  Synthetic
aaccugcagcauuuugccaauuag

SEQ ID NO: 316537 - RNA, 18 nt, Artificial Sequence
  Synthetic
aacaauaaagucaauuag

SEQ ID NO: 316538 - RNA, 19 nt, Artificial Sequence
  Synthetic
gaacaauaaagucaauuag

SEQ ID NO: 316539 - RNA, 20 nt, Artificial Sequence
  Synthetic
ugaacaauaaagucaauuag

SEQ ID NO: 316540 - RNA, 21 nt, Artificial Sequence
  Synthetic
augaacaauaaagucaauuag

SEQ ID NO: 316541 - RNA, 22 nt, Artificial Sequence
  Synthetic
uaugaacaauaaagucaauuag

SEQ ID NO: 316542 - RNA, 23 nt, Artificial Sequence
  Synthetic
uuaugaacaauaaagucaauuag

SEQ ID NO: 316543 - RNA, 24 nt, Artificial Sequence
  Synthetic
auuaugaacaauaaagucaauuag

SEQ ID NO: 316544 - RNA, 18 nt, Artificial Sequence
  Synthetic
uagaauaccaagaauuag

SEQ ID NO: 316545 - RNA, 19 nt, Artificial Sequence
  Synthetic
auagaauaccaagaauuag

SEQ ID NO: 316546 - RNA, 20 nt, Artificial Sequence
  Synthetic
uauagaauaccaagaauuag

SEQ ID NO: 316547 - RNA, 21 nt, Artificial Sequence
  Synthetic
auauagaauaccaagaauuag

SEQ ID NO: 316548 - RNA, 22 nt, Artificial Sequence
  Synthetic
aauauagaauaccaagaauuag

SEQ ID NO: 316549 - RNA, 23 nt, Artificial Sequence
  Synthetic
caauauagaauaccaagaauuag

SEQ ID NO: 316550 - RNA, 24 nt, Artificial Sequence
  Synthetic
ccaauauagaauaccaagaauuag

SEQ ID NO: 316551 - RNA, 18 nt, Artificial Sequence
  Synthetic
uuaucguaaaugaauuag

SEQ ID NO: 316552 - RNA, 19 nt, Artificial Sequence
  Synthetic
auuaucguaaaugaauuag

SEQ ID NO: 316553 - RNA, 20 nt, Artificial Sequence
  Synthetic
cauuaucguaaaugaauuag

SEQ ID NO: 316554 - RNA, 21 nt, Artificial Sequence
  Synthetic
ccauuaucguaaaugaauuag

SEQ ID NO: 316555 - RNA, 22 nt, Artificial Sequence
  Synthetic
gccauuaucguaaaugaauuag

SEQ ID NO: 316556 - RNA, 23 nt, Artificial Sequence
  Synthetic
ggccauuaucguaaaugaauuag

SEQ ID NO: 316557 - RNA, 24 nt, Artificial Sequence
  Synthetic
aggccauuaucguaaaugaauuag

SEQ ID NO: 316558 - RNA, 18 nt, Artificial Sequence
  Synthetic
uaaugugucuauaauuag

SEQ ID NO: 316559 - RNA, 19 nt, Artificial Sequence
  Synthetic
uuaaugugucuauaauuag

SEQ ID NO: 316560 - RNA, 20 nt, Artificial Sequence
  Synthetic
uuuaaugugucuauaauuag

SEQ ID NO: 316561 - RNA, 21 nt, Artificial Sequence
  Synthetic
uuuuaaugugucuauaauuag

SEQ ID NO: 316562 - RNA, 22 nt, Artificial Sequence
  Synthetic
guuuuaaugugucuauaauuag

SEQ ID NO: 316563 - RNA, 23 nt, Artificial Sequence
  Synthetic
uguuuuaaugugucuauaauuag

SEQ ID NO: 316564 - RNA, 24 nt, Artificial Sequence
  Synthetic
auguuuuaaugugucuauaauuag

SEQ ID NO: 316565 - RNA, 18 nt, Artificial Sequence
  Synthetic
uuuaaguuuuagcauuag

SEQ ID NO: 316566 - RNA, 19 nt, Artificial Sequence
  Synthetic
cuuuaaguuuuagcauuag

SEQ ID NO: 316567 - RNA, 20 nt, Artificial Sequence
  Synthetic
acuuuaaguuuuagcauuag

SEQ ID NO: 316568 - RNA, 21 nt, Artificial Sequence
  Synthetic
uacuuuaaguuuuagcauuag

SEQ ID NO: 316569 - RNA, 22 nt, Artificial Sequence
  Synthetic
auacuuuaaguuuuagcauuag

SEQ ID NO: 316570 - RNA, 23 nt, Artificial Sequence
  Synthetic
uauacuuuaaguuuuagcauuag

SEQ ID NO: 316571 - RNA, 24 nt, Artificial Sequence
  Synthetic
uuauacuuuaaguuuuagcauuag

SEQ ID NO: 316572 - RNA, 18 nt, Artificial Sequence
  Synthetic
cagaagaguuaucauuag

SEQ ID NO: 316573 - RNA, 19 nt, Artificial Sequence
  Synthetic
acagaagaguuaucauuag

SEQ ID NO: 316574 - RNA, 20 nt, Artificial Sequence
  Synthetic
uacagaagaguuaucauuag

SEQ ID NO: 316575 - RNA, 21 nt, Artificial Sequence
  Synthetic
guacagaagaguuaucauuag

SEQ ID NO: 316576 - RNA, 22 nt, Artificial Sequence
  Synthetic
cguacagaagaguuaucauuag

SEQ ID NO: 316577 - RNA, 23 nt, Artificial Sequence
  Synthetic
gcguacagaagaguuaucauuag

SEQ ID NO: 316578 - RNA, 24 nt, Artificial Sequence
  Synthetic
ugcguacagaagaguuaucauuag

SEQ ID NO: 316579 - RNA, 18 nt, Artificial Sequence
  Synthetic
uugcugauaccucauuag

SEQ ID NO: 316580 - RNA, 19 nt, Artificial Sequence
  Synthetic
uuugcugauaccucauuag

SEQ ID NO: 316581 - RNA, 20 nt, Artificial Sequence
  Synthetic
guuugcugauaccucauuag

SEQ ID NO: 316582 - RNA, 21 nt, Artificial Sequence
  Synthetic
uguuugcugauaccucauuag

SEQ ID NO: 316583 - RNA, 22 nt, Artificial Sequence
  Synthetic
auguuugcugauaccucauuag

SEQ ID NO: 316584 - RNA, 23 nt, Artificial Sequence
  Synthetic
cauguuugcugauaccucauuag

SEQ ID NO: 316585 - RNA, 24 nt, Artificial Sequence
  Synthetic
ucauguuugcugauaccucauuag

SEQ ID NO: 316586 - RNA, 18 nt, Artificial Sequence
  Synthetic
gaaacaagaguucauuag

SEQ ID NO: 316587 - RNA, 19 nt, Artificial Sequence
  Synthetic
agaaacaagaguucauuag

SEQ ID NO: 316588 - RNA, 20 nt, Artificial Sequence
  Synthetic
uagaaacaagaguucauuag

SEQ ID NO: 316589 - RNA, 21 nt, Artificial Sequence
  Synthetic
auagaaacaagaguucauuag

SEQ ID NO: 316590 - RNA, 22 nt, Artificial Sequence
  Synthetic
gauagaaacaagaguucauuag

SEQ ID NO: 316591 - RNA, 23 nt, Artificial Sequence
  Synthetic
ugauagaaacaagaguucauuag

SEQ ID NO: 316592 - RNA, 24 nt, Artificial Sequence
  Synthetic
augauagaaacaagaguucauuag

SEQ ID NO: 316593 - RNA, 18 nt, Artificial Sequence
  Synthetic
aaauuuaacuuucauuag

SEQ ID NO: 316594 - RNA, 19 nt, Artificial Sequence
  Synthetic
aaaauuuaacuuucauuag

SEQ ID NO: 316595 - RNA, 20 nt, Artificial Sequence
  Synthetic
gaaaauuuaacuuucauuag

SEQ ID NO: 316596 - RNA, 21 nt, Artificial Sequence
  Synthetic
agaaaauuuaacuuucauuag

SEQ ID NO: 316597 - RNA, 22 nt, Artificial Sequence
  Synthetic
aagaaaauuuaacuuucauuag

SEQ ID NO: 316598 - RNA, 23 nt, Artificial Sequence
  Synthetic
uaagaaaauuuaacuuucauuag

SEQ ID NO: 316599 - RNA, 24 nt, Artificial Sequence
  Synthetic
uuaagaaaauuuaacuuucauuag

SEQ ID NO: 316600 - RNA, 18 nt, Artificial Sequence
  Synthetic
acauuugcaaaagauuag

SEQ ID NO: 316601 - RNA, 19 nt, Artificial Sequence
  Synthetic
gacauuugcaaaagauuag

SEQ ID NO: 316602 - RNA, 20 nt, Artificial Sequence
  Synthetic
ugacauuugcaaaagauuag

SEQ ID NO: 316603 - RNA, 21 nt, Artificial Sequence
  Synthetic
gugacauuugcaaaagauuag

SEQ ID NO: 316604 - RNA, 22 nt, Artificial Sequence
  Synthetic
ggugacauuugcaaaagauuag

SEQ ID NO: 316605 - RNA, 23 nt, Artificial Sequence
  Synthetic
aggugacauuugcaaaagauuag

SEQ ID NO: 316606 - RNA, 24 nt, Artificial Sequence
  Synthetic
aaggugacauuugcaaaagauuag

SEQ ID NO: 316607 - RNA, 18 nt, Artificial Sequence
  Synthetic
gaaacaucugaagauuag

SEQ ID NO: 316608 - RNA, 19 nt, Artificial Sequence
  Synthetic
ggaaacaucugaagauuag

SEQ ID NO: 316609 - RNA, 20 nt, Artificial Sequence
  Synthetic
uggaaacaucugaagauuag

SEQ ID NO: 316610 - RNA, 21 nt, Artificial Sequence
  Synthetic
uuggaaacaucugaagauuag

SEQ ID NO: 316611 - RNA, 22 nt, Artificial Sequence
  Synthetic
cuuggaaacaucugaagauuag

SEQ ID NO: 316612 - RNA, 23 nt, Artificial Sequence
  Synthetic
ccuuggaaacaucugaagauuag

SEQ ID NO: 316613 - RNA, 24 nt, Artificial Sequence
  Synthetic
accuuggaaacaucugaagauuag

SEQ ID NO: 316614 - RNA, 18 nt, Artificial Sequence
  Synthetic
gcuggguuuagagauuag

SEQ ID NO: 316615 - RNA, 19 nt, Artificial Sequence
  Synthetic
agcuggguuuagagauuag

SEQ ID NO: 316616 - RNA, 20 nt, Artificial Sequence
  Synthetic
cagcuggguuuagagauuag

SEQ ID NO: 316617 - RNA, 21 nt, Artificial Sequence
  Synthetic
ucagcuggguuuagagauuag

SEQ ID NO: 316618 - RNA, 22 nt, Artificial Sequence
  Synthetic
gucagcuggguuuagagauuag

SEQ ID NO: 316619 - RNA, 23 nt, Artificial Sequence
  Synthetic
agucagcuggguuuagagauuag

SEQ ID NO: 316620 - RNA, 24 nt, Artificial Sequence
  Synthetic
aagucagcuggguuuagagauuag

SEQ ID NO: 316621 - RNA, 18 nt, Artificial Sequence
  Synthetic
agcagcgucauagauuag

SEQ ID NO: 316622 - RNA, 19 nt, Artificial Sequence
  Synthetic
aagcagcgucauagauuag

SEQ ID NO: 316623 - RNA, 20 nt, Artificial Sequence
  Synthetic
aaagcagcgucauagauuag

SEQ ID NO: 316624 - RNA, 21 nt, Artificial Sequence
  Synthetic
caaagcagcgucauagauuag

SEQ ID NO: 316625 - RNA, 22 nt, Artificial Sequence
  Synthetic
ccaaagcagcgucauagauuag

SEQ ID NO: 316626 - RNA, 23 nt, Artificial Sequence
  Synthetic
cccaaagcagcgucauagauuag

SEQ ID NO: 316627 - RNA, 24 nt, Artificial Sequence
  Synthetic
ucccaaagcagcgucauagauuag

SEQ ID NO: 316628 - RNA, 18 nt, Artificial Sequence
  Synthetic
auggguugggaggauuag

SEQ ID NO: 316629 - RNA, 19 nt, Artificial Sequence
  Synthetic
cauggguugggaggauuag

SEQ ID NO: 316630 - RNA, 20 nt, Artificial Sequence
  Synthetic
ucauggguugggaggauuag

SEQ ID NO: 316631 - RNA, 21 nt, Artificial Sequence
  Synthetic
cucauggguugggaggauuag

SEQ ID NO: 316632 - RNA, 22 nt, Artificial Sequence
  Synthetic
ucucauggguugggaggauuag

SEQ ID NO: 316633 - RNA, 23 nt, Artificial Sequence
  Synthetic
aucucauggguugggaggauuag

SEQ ID NO: 316634 - RNA, 24 nt, Artificial Sequence
  Synthetic
uaucucauggguugggaggauuag

SEQ ID NO: 316635 - RNA, 18 nt, Artificial Sequence
  Synthetic
agaaaugacugggauuag

SEQ ID NO: 316636 - RNA, 19 nt, Artificial Sequence
  Synthetic
gagaaaugacugggauuag

SEQ ID NO: 316637 - RNA, 20 nt, Artificial Sequence
  Synthetic
agagaaaugacugggauuag

SEQ ID NO: 316638 - RNA, 21 nt, Artificial Sequence
  Synthetic
uagagaaaugacugggauuag

SEQ ID NO: 316639 - RNA, 22 nt, Artificial Sequence
  Synthetic
guagagaaaugacugggauuag

SEQ ID NO: 316640 - RNA, 23 nt, Artificial Sequence
  Synthetic
uguagagaaaugacugggauuag

SEQ ID NO: 316641 - RNA, 24 nt, Artificial Sequence
  Synthetic
auguagagaaaugacugggauuag

SEQ ID NO: 316642 - RNA, 18 nt, Artificial Sequence
  Synthetic
ucuugauuucuggauuag

SEQ ID NO: 316643 - RNA, 19 nt, Artificial Sequence
  Synthetic
uucuugauuucuggauuag

SEQ ID NO: 316644 - RNA, 20 nt, Artificial Sequence
  Synthetic
auucuugauuucuggauuag

SEQ ID NO: 316645 - RNA, 21 nt, Artificial Sequence
  Synthetic
cauucuugauuucuggauuag

SEQ ID NO: 316646 - RNA, 22 nt, Artificial Sequence
  Synthetic
ccauucuugauuucuggauuag

SEQ ID NO: 316647 - RNA, 23 nt, Artificial Sequence
  Synthetic
cccauucuugauuucuggauuag

SEQ ID NO: 316648 - RNA, 24 nt, Artificial Sequence
  Synthetic
ccccauucuugauuucuggauuag

SEQ ID NO: 316649 - RNA, 18 nt, Artificial Sequence
  Synthetic
uaaaaaccuguggauuag

SEQ ID NO: 316650 - RNA, 19 nt, Artificial Sequence
  Synthetic
uuaaaaaccuguggauuag

SEQ ID NO: 316651 - RNA, 20 nt, Artificial Sequence
  Synthetic
uuuaaaaaccuguggauuag

SEQ ID NO: 316652 - RNA, 21 nt, Artificial Sequence
  Synthetic
cuuuaaaaaccuguggauuag

SEQ ID NO: 316653 - RNA, 22 nt, Artificial Sequence
  Synthetic
acuuuaaaaaccuguggauuag

SEQ ID NO: 316654 - RNA, 23 nt, Artificial Sequence
  Synthetic
aacuuuaaaaaccuguggauuag

SEQ ID NO: 316655 - RNA, 24 nt, Artificial Sequence
  Synthetic
uaacuuuaaaaaccuguggauuag

SEQ ID NO: 316656 - RNA, 18 nt, Artificial Sequence
  Synthetic
caggaaagacaugauuag

SEQ ID NO: 316657 - RNA, 19 nt, Artificial Sequence
  Synthetic
ucaggaaagacaugauuag

SEQ ID NO: 316658 - RNA, 20 nt, Artificial Sequence
  Synthetic
uucaggaaagacaugauuag

SEQ ID NO: 316659 - RNA, 21 nt, Artificial Sequence
  Synthetic
cuucaggaaagacaugauuag

SEQ ID NO: 316660 - RNA, 22 nt, Artificial Sequence
  Synthetic
gcuucaggaaagacaugauuag

SEQ ID NO: 316661 - RNA, 23 nt, Artificial Sequence
  Synthetic
ugcuucaggaaagacaugauuag

SEQ ID NO: 316662 - RNA, 24 nt, Artificial Sequence
  Synthetic
augcuucaggaaagacaugauuag

SEQ ID NO: 316663 - RNA, 18 nt, Artificial Sequence
  Synthetic
auguguaucagugauuag

SEQ ID NO: 316664 - RNA, 19 nt, Artificial Sequence
  Synthetic
gauguguaucagugauuag

SEQ ID NO: 316665 - RNA, 20 nt, Artificial Sequence
  Synthetic
agauguguaucagugauuag

SEQ ID NO: 316666 - RNA, 21 nt, Artificial Sequence
  Synthetic
cagauguguaucagugauuag

SEQ ID NO: 316667 - RNA, 22 nt, Artificial Sequence
  Synthetic
acagauguguaucagugauuag

SEQ ID NO: 316668 - RNA, 23 nt, Artificial Sequence
  Synthetic
aacagauguguaucagugauuag

SEQ ID NO: 316669 - RNA, 24 nt, Artificial Sequence
  Synthetic
gaacagauguguaucagugauuag

SEQ ID NO: 316670 - RNA, 18 nt, Artificial Sequence
  Synthetic
uaucaguugggugauuag

SEQ ID NO: 316671 - RNA, 19 nt, Artificial Sequence
  Synthetic
uuaucaguugggugauuag

SEQ ID NO: 316672 - RNA, 20 nt, Artificial Sequence
  Synthetic
uuuaucaguugggugauuag

SEQ ID NO: 316673 - RNA, 21 nt, Artificial Sequence
  Synthetic
guuuaucaguugggugauuag

SEQ ID NO: 316674 - RNA, 22 nt, Artificial Sequence
  Synthetic
uguuuaucaguugggugauuag

SEQ ID NO: 316675 - RNA, 23 nt, Artificial Sequence
  Synthetic
uuguuuaucaguugggugauuag

SEQ ID NO: 316676 - RNA, 24 nt, Artificial Sequence
  Synthetic
uuuguuuaucaguugggugauuag

SEQ ID NO: 316677 - RNA, 18 nt, Artificial Sequence
  Synthetic
uuuacagccugugauuag

SEQ ID NO: 316678 - RNA, 19 nt, Artificial Sequence
  Synthetic
guuuacagccugugauuag

SEQ ID NO: 316679 - RNA, 20 nt, Artificial Sequence
  Synthetic
aguuuacagccugugauuag

SEQ ID NO: 316680 - RNA, 21 nt, Artificial Sequence
  Synthetic
caguuuacagccugugauuag

SEQ ID NO: 316681 - RNA, 22 nt, Artificial Sequence
  Synthetic
ucaguuuacagccugugauuag

SEQ ID NO: 316682 - RNA, 23 nt, Artificial Sequence
  Synthetic
aucaguuuacagccugugauuag

SEQ ID NO: 316683 - RNA, 24 nt, Artificial Sequence
  Synthetic
gaucaguuuacagccugugauuag

SEQ ID NO: 316684 - RNA, 18 nt, Artificial Sequence
  Synthetic
uauuuuaagugugauuag

SEQ ID NO: 316685 - RNA, 19 nt, Artificial Sequence
  Synthetic
cuauuuuaagugugauuag

SEQ ID NO: 316686 - RNA, 20 nt, Artificial Sequence
  Synthetic
gcuauuuuaagugugauuag

SEQ ID NO: 316687 - RNA, 21 nt, Artificial Sequence
  Synthetic
ggcuauuuuaagugugauuag

SEQ ID NO: 316688 - RNA, 22 nt, Artificial Sequence
  Synthetic
aggcuauuuuaagugugauuag

SEQ ID NO: 316689 - RNA, 23 nt, Artificial Sequence
  Synthetic
uaggcuauuuuaagugugauuag

SEQ ID NO: 316690 - RNA, 24 nt, Artificial Sequence
  Synthetic
auaggcuauuuuaagugugauuag

SEQ ID NO: 316691 - RNA, 18 nt, Artificial Sequence
  Synthetic
cuauuuaugaaauauuag

SEQ ID NO: 316692 - RNA, 19 nt, Artificial Sequence
  Synthetic
ccuauuuaugaaauauuag

SEQ ID NO: 316693 - RNA, 20 nt, Artificial Sequence
  Synthetic
cccuauuuaugaaauauuag

SEQ ID NO: 316694 - RNA, 21 nt, Artificial Sequence
  Synthetic
gcccuauuuaugaaauauuag

SEQ ID NO: 316695 - RNA, 22 nt, Artificial Sequence
  Synthetic
agcccuauuuaugaaauauuag

SEQ ID NO: 316696 - RNA, 23 nt, Artificial Sequence
  Synthetic
cagcccuauuuaugaaauauuag

SEQ ID NO: 316697 - RNA, 24 nt, Artificial Sequence
  Synthetic
acagcccuauuuaugaaauauuag

SEQ ID NO: 316698 - RNA, 18 nt, Artificial Sequence
  Synthetic
aaauauauuaaauauuag

SEQ ID NO: 316699 - RNA, 19 nt, Artificial Sequence
  Synthetic
aaaauauauuaaauauuag

SEQ ID NO: 316700 - RNA, 20 nt, Artificial Sequence
  Synthetic
aaaaauauauuaaauauuag

SEQ ID NO: 316701 - RNA, 21 nt, Artificial Sequence
  Synthetic
uaaaaauauauuaaauauuag

SEQ ID NO: 316702 - RNA, 22 nt, Artificial Sequence
  Synthetic
auaaaaauauauuaaauauuag

SEQ ID NO: 316703 - RNA, 23 nt, Artificial Sequence
  Synthetic
aauaaaaauauauuaaauauuag

SEQ ID NO: 316704 - RNA, 24 nt, Artificial Sequence
  Synthetic
aaauaaaaauauauuaaauauuag

SEQ ID NO: 316705 - RNA, 18 nt, Artificial Sequence
  Synthetic
uuagacacaagauauuag

SEQ ID NO: 316706 - RNA, 19 nt, Artificial Sequence
  Synthetic
auuagacacaagauauuag

SEQ ID NO: 316707 - RNA, 20 nt, Artificial Sequence
  Synthetic
gauuagacacaagauauuag

SEQ ID NO: 316708 - RNA, 21 nt, Artificial Sequence
  Synthetic
ugauuagacacaagauauuag

SEQ ID NO: 316709 - RNA, 22 nt, Artificial Sequence
  Synthetic
augauuagacacaagauauuag

SEQ ID NO: 316710 - RNA, 23 nt, Artificial Sequence
  Synthetic
caugauuagacacaagauauuag

SEQ ID NO: 316711 - RNA, 24 nt, Artificial Sequence
  Synthetic
acaugauuagacacaagauauuag

SEQ ID NO: 316712 - RNA, 18 nt, Artificial Sequence
  Synthetic
aacagcccaguauauuag

SEQ ID NO: 316713 - RNA, 19 nt, Artificial Sequence
  Synthetic
caacagcccaguauauuag

SEQ ID NO: 316714 - RNA, 20 nt, Artificial Sequence
  Synthetic
ccaacagcccaguauauuag

SEQ ID NO: 316715 - RNA, 21 nt, Artificial Sequence
  Synthetic
cccaacagcccaguauauuag

SEQ ID NO: 316716 - RNA, 22 nt, Artificial Sequence
  Synthetic
gcccaacagcccaguauauuag

SEQ ID NO: 316717 - RNA, 23 nt, Artificial Sequence
  Synthetic
agcccaacagcccaguauauuag

SEQ ID NO: 316718 - RNA, 24 nt, Artificial Sequence
  Synthetic
cagcccaacagcccaguauauuag

SEQ ID NO: 316719 - RNA, 18 nt, Artificial Sequence
  Synthetic
gcucugaaauuauauuag

SEQ ID NO: 316720 - RNA, 19 nt, Artificial Sequence
  Synthetic
agcucugaaauuauauuag

SEQ ID NO: 316721 - RNA, 20 nt, Artificial Sequence
  Synthetic
aagcucugaaauuauauuag

SEQ ID NO: 316722 - RNA, 21 nt, Artificial Sequence
  Synthetic
aaagcucugaaauuauauuag

SEQ ID NO: 316723 - RNA, 22 nt, Artificial Sequence
  Synthetic
aaaagcucugaaauuauauuag

SEQ ID NO: 316724 - RNA, 23 nt, Artificial Sequence
  Synthetic
caaaagcucugaaauuauauuag

SEQ ID NO: 316725 - RNA, 24 nt, Artificial Sequence
  Synthetic
acaaaagcucugaaauuauauuag

SEQ ID NO: 316726 - RNA, 18 nt, Artificial Sequence
  Synthetic
agagccugucucuauuag

SEQ ID NO: 316727 - RNA, 19 nt, Artificial Sequence
  Synthetic
gagagccugucucuauuag

SEQ ID NO: 316728 - RNA, 20 nt, Artificial Sequence
  Synthetic
ugagagccugucucuauuag

SEQ ID NO: 316729 - RNA, 21 nt, Artificial Sequence
  Synthetic
gugagagccugucucuauuag

SEQ ID NO: 316730 - RNA, 22 nt, Artificial Sequence
  Synthetic
agugagagccugucucuauuag

SEQ ID NO: 316731 - RNA, 23 nt, Artificial Sequence
  Synthetic
cagugagagccugucucuauuag

SEQ ID NO: 316732 - RNA, 24 nt, Artificial Sequence
  Synthetic
acagugagagccugucucuauuag

SEQ ID NO: 316733 - RNA, 18 nt, Artificial Sequence
  Synthetic
aauauuguauaguauuag

SEQ ID NO: 316734 - RNA, 19 nt, Artificial Sequence
  Synthetic
uaauauuguauaguauuag

SEQ ID NO: 316735 - RNA, 20 nt, Artificial Sequence
  Synthetic
cuaauauuguauaguauuag

SEQ ID NO: 316736 - RNA, 21 nt, Artificial Sequence
  Synthetic
ucuaauauuguauaguauuag

SEQ ID NO: 316737 - RNA, 22 nt, Artificial Sequence
  Synthetic
aucuaauauuguauaguauuag

SEQ ID NO: 316738 - RNA, 23 nt, Artificial Sequence
  Synthetic
aaucuaauauuguauaguauuag

SEQ ID NO: 316739 - RNA, 24 nt, Artificial Sequence
  Synthetic
aaaucuaauauuguauaguauuag

SEQ ID NO: 316740 - RNA, 18 nt, Artificial Sequence
  Synthetic
gggacaauauuuuauuag

SEQ ID NO: 316741 - RNA, 19 nt, Artificial Sequence
  Synthetic
ugggacaauauuuuauuag

SEQ ID NO: 316742 - RNA, 20 nt, Artificial Sequence
  Synthetic
augggacaauauuuuauuag

SEQ ID NO: 316743 - RNA, 21 nt, Artificial Sequence
  Synthetic
aaugggacaauauuuuauuag

SEQ ID NO: 316744 - RNA, 22 nt, Artificial Sequence
  Synthetic
aaaugggacaauauuuuauuag

SEQ ID NO: 316745 - RNA, 23 nt, Artificial Sequence
  Synthetic
aaaaugggacaauauuuuauuag

SEQ ID NO: 316746 - RNA, 24 nt, Artificial Sequence
  Synthetic
uaaaaugggacaauauuuuauuag

SEQ ID NO: 316747 - RNA, 18 nt, Artificial Sequence
  Synthetic
ccuaggaauacaacuuag

SEQ ID NO: 316748 - RNA, 19 nt, Artificial Sequence
  Synthetic
accuaggaauacaacuuag

SEQ ID NO: 316749 - RNA, 20 nt, Artificial Sequence
  Synthetic
uaccuaggaauacaacuuag

SEQ ID NO: 316750 - RNA, 21 nt, Artificial Sequence
  Synthetic
auaccuaggaauacaacuuag

SEQ ID NO: 316751 - RNA, 22 nt, Artificial Sequence
  Synthetic
aauaccuaggaauacaacuuag

SEQ ID NO: 316752 - RNA, 23 nt, Artificial Sequence
  Synthetic
aaauaccuaggaauacaacuuag

SEQ ID NO: 316753 - RNA, 24 nt, Artificial Sequence
  Synthetic
aaaauaccuaggaauacaacuuag

SEQ ID NO: 316754 - RNA, 18 nt, Artificial Sequence
  Synthetic
cguuuuagcuuaacuuag

SEQ ID NO: 316755 - RNA, 19 nt, Artificial Sequence
  Synthetic
gcguuuuagcuuaacuuag

SEQ ID NO: 316756 - RNA, 20 nt, Artificial Sequence
  Synthetic
ugcguuuuagcuuaacuuag

SEQ ID NO: 316757 - RNA, 21 nt, Artificial Sequence
  Synthetic
augcguuuuagcuuaacuuag

SEQ ID NO: 316758 - RNA, 22 nt, Artificial Sequence
  Synthetic
caugcguuuuagcuuaacuuag

SEQ ID NO: 316759 - RNA, 23 nt, Artificial Sequence
  Synthetic
ucaugcguuuuagcuuaacuuag

SEQ ID NO: 316760 - RNA, 24 nt, Artificial Sequence
  Synthetic
aucaugcguuuuagcuuaacuuag

SEQ ID NO: 316761 - RNA, 18 nt, Artificial Sequence
  Synthetic
guggcaggacgcacuuag

SEQ ID NO: 316762 - RNA, 19 nt, Artificial Sequence
  Synthetic
gguggcaggacgcacuuag

SEQ ID NO: 316763 - RNA, 20 nt, Artificial Sequence
  Synthetic
agguggcaggacgcacuuag

SEQ ID NO: 316764 - RNA, 21 nt, Artificial Sequence
  Synthetic
cagguggcaggacgcacuuag

SEQ ID NO: 316765 - RNA, 22 nt, Artificial Sequence
  Synthetic
ucagguggcaggacgcacuuag

SEQ ID NO: 316766 - RNA, 23 nt, Artificial Sequence
  Synthetic
aucagguggcaggacgcacuuag

SEQ ID NO: 316767 - RNA, 24 nt, Artificial Sequence
  Synthetic
caucagguggcaggacgcacuuag

SEQ ID NO: 316768 - RNA, 18 nt, Artificial Sequence
  Synthetic
ggcaggaccaagacuuag

SEQ ID NO: 316769 - RNA, 19 nt, Artificial Sequence
  Synthetic
aggcaggaccaagacuuag

SEQ ID NO: 316770 - RNA, 20 nt, Artificial Sequence
  Synthetic
caggcaggaccaagacuuag

SEQ ID NO: 316771 - RNA, 21 nt, Artificial Sequence
  Synthetic
acaggcaggaccaagacuuag

SEQ ID NO: 316772 - RNA, 22 nt, Artificial Sequence
  Synthetic
uacaggcaggaccaagacuuag

SEQ ID NO: 316773 - RNA, 23 nt, Artificial Sequence
  Synthetic
auacaggcaggaccaagacuuag

SEQ ID NO: 316774 - RNA, 24 nt, Artificial Sequence
  Synthetic
aauacaggcaggaccaagacuuag

SEQ ID NO: 316775 - RNA, 18 nt, Artificial Sequence
  Synthetic
ccucuuauaccuacuuag

SEQ ID NO: 316776 - RNA, 19 nt, Artificial Sequence
  Synthetic
cccucuuauaccuacuuag

SEQ ID NO: 316777 - RNA, 20 nt, Artificial Sequence
  Synthetic
ucccucuuauaccuacuuag

SEQ ID NO: 316778 - RNA, 21 nt, Artificial Sequence
  Synthetic
uucccucuuauaccuacuuag

SEQ ID NO: 316779 - RNA, 22 nt, Artificial Sequence
  Synthetic
uuucccucuuauaccuacuuag

SEQ ID NO: 316780 - RNA, 23 nt, Artificial Sequence
  Synthetic
cuuucccucuuauaccuacuuag

SEQ ID NO: 316781 - RNA, 24 nt, Artificial Sequence
  Synthetic
acuuucccucuuauaccuacuuag

SEQ ID NO: 316782 - RNA, 18 nt, Artificial Sequence
  Synthetic
gugaaaauggcuacuuag

SEQ ID NO: 316783 - RNA, 19 nt, Artificial Sequence
  Synthetic
agugaaaauggcuacuuag

SEQ ID NO: 316784 - RNA, 20 nt, Artificial Sequence
  Synthetic
uagugaaaauggcuacuuag

SEQ ID NO: 316785 - RNA, 21 nt, Artificial Sequence
  Synthetic
cuagugaaaauggcuacuuag

SEQ ID NO: 316786 - RNA, 22 nt, Artificial Sequence
  Synthetic
acuagugaaaauggcuacuuag

SEQ ID NO: 316787 - RNA, 23 nt, Artificial Sequence
  Synthetic
gacuagugaaaauggcuacuuag

SEQ ID NO: 316788 - RNA, 24 nt, Artificial Sequence
  Synthetic
agacuagugaaaauggcuacuuag

SEQ ID NO: 316789 - RNA, 18 nt, Artificial Sequence
  Synthetic
cuccccuacaucccuuag

SEQ ID NO: 316790 - RNA, 19 nt, Artificial Sequence
  Synthetic
ccuccccuacaucccuuag

SEQ ID NO: 316791 - RNA, 20 nt, Artificial Sequence
  Synthetic
uccuccccuacaucccuuag

SEQ ID NO: 316792 - RNA, 21 nt, Artificial Sequence
  Synthetic
auccuccccuacaucccuuag

SEQ ID NO: 316793 - RNA, 22 nt, Artificial Sequence
  Synthetic
aauccuccccuacaucccuuag

SEQ ID NO: 316794 - RNA, 23 nt, Artificial Sequence
  Synthetic
gaauccuccccuacaucccuuag

SEQ ID NO: 316795 - RNA, 24 nt, Artificial Sequence
  Synthetic
agaauccuccccuacaucccuuag

SEQ ID NO: 316796 - RNA, 18 nt, Artificial Sequence
  Synthetic
ggacuugcuuugccuuag

SEQ ID NO: 316797 - RNA, 19 nt, Artificial Sequence
  Synthetic
gggacuugcuuugccuuag

SEQ ID NO: 316798 - RNA, 20 nt, Artificial Sequence
  Synthetic
ugggacuugcuuugccuuag

SEQ ID NO: 316799 - RNA, 21 nt, Artificial Sequence
  Synthetic
augggacuugcuuugccuuag

SEQ ID NO: 316800 - RNA, 22 nt, Artificial Sequence
  Synthetic
gaugggacuugcuuugccuuag

SEQ ID NO: 316801 - RNA, 23 nt, Artificial Sequence
  Synthetic
ggaugggacuugcuuugccuuag

SEQ ID NO: 316802 - RNA, 24 nt, Artificial Sequence
  Synthetic
cggaugggacuugcuuugccuuag

SEQ ID NO: 316803 - RNA, 18 nt, Artificial Sequence
  Synthetic
agaaaaggaaauccuuag

SEQ ID NO: 316804 - RNA, 19 nt, Artificial Sequence
  Synthetic
aagaaaaggaaauccuuag

SEQ ID NO: 316805 - RNA, 20 nt, Artificial Sequence
  Synthetic
aaagaaaaggaaauccuuag

SEQ ID NO: 316806 - RNA, 21 nt, Artificial Sequence
  Synthetic
uaaagaaaaggaaauccuuag

SEQ ID NO: 316807 - RNA, 22 nt, Artificial Sequence
  Synthetic
uuaaagaaaaggaaauccuuag

SEQ ID NO: 316808 - RNA, 23 nt, Artificial Sequence
  Synthetic
uuuaaagaaaaggaaauccuuag

SEQ ID NO: 316809 - RNA, 24 nt, Artificial Sequence
  Synthetic
cuuuaaagaaaaggaaauccuuag

SEQ ID NO: 316810 - RNA, 18 nt, Artificial Sequence
  Synthetic
aggaaggaucauccuuag

SEQ ID NO: 316811 - RNA, 19 nt, Artificial Sequence
  Synthetic
caggaaggaucauccuuag

SEQ ID NO: 316812 - RNA, 20 nt, Artificial Sequence
  Synthetic
ccaggaaggaucauccuuag

SEQ ID NO: 316813 - RNA, 21 nt, Artificial Sequence
  Synthetic
accaggaaggaucauccuuag

SEQ ID NO: 316814 - RNA, 22 nt, Artificial Sequence
  Synthetic
caccaggaaggaucauccuuag

SEQ ID NO: 316815 - RNA, 23 nt, Artificial Sequence
  Synthetic
ccaccaggaaggaucauccuuag

SEQ ID NO: 316816 - RNA, 24 nt, Artificial Sequence
  Synthetic
gccaccaggaaggaucauccuuag

SEQ ID NO: 316817 - RNA, 18 nt, Artificial Sequence
  Synthetic
uugagauaaacuccuuag

SEQ ID NO: 316818 - RNA, 19 nt, Artificial Sequence
  Synthetic
guugagauaaacuccuuag

SEQ ID NO: 316819 - RNA, 20 nt, Artificial Sequence
  Synthetic
gguugagauaaacuccuuag

SEQ ID NO: 316820 - RNA, 21 nt, Artificial Sequence
  Synthetic
ugguugagauaaacuccuuag

SEQ ID NO: 316821 - RNA, 22 nt, Artificial Sequence
  Synthetic
cugguugagauaaacuccuuag

SEQ ID NO: 316822 - RNA, 23 nt, Artificial Sequence
  Synthetic
acugguugagauaaacuccuuag

SEQ ID NO: 316823 - RNA, 24 nt, Artificial Sequence
  Synthetic
cacugguugagauaaacuccuuag

SEQ ID NO: 316824 - RNA, 18 nt, Artificial Sequence
  Synthetic
uacggacaggcagcuuag

SEQ ID NO: 316825 - RNA, 19 nt, Artificial Sequence
  Synthetic
uuacggacaggcagcuuag

SEQ ID NO: 316826 - RNA, 20 nt, Artificial Sequence
  Synthetic
cuuacggacaggcagcuuag

SEQ ID NO: 316827 - RNA, 21 nt, Artificial Sequence
  Synthetic
ucuuacggacaggcagcuuag

SEQ ID NO: 316828 - RNA, 22 nt, Artificial Sequence
  Synthetic
uucuuacggacaggcagcuuag

SEQ ID NO: 316829 - RNA, 23 nt, Artificial Sequence
  Synthetic
auucuuacggacaggcagcuuag

SEQ ID NO: 316830 - RNA, 24 nt, Artificial Sequence
  Synthetic
gauucuuacggacaggcagcuuag

SEQ ID NO: 316831 - RNA, 18 nt, Artificial Sequence
  Synthetic
agcaaaaauggagcuuag

SEQ ID NO: 316832 - RNA, 19 nt, Artificial Sequence
  Synthetic
gagcaaaaauggagcuuag

SEQ ID NO: 316833 - RNA, 20 nt, Artificial Sequence
  Synthetic
ggagcaaaaauggagcuuag

SEQ ID NO: 316834 - RNA, 21 nt, Artificial Sequence
  Synthetic
aggagcaaaaauggagcuuag

SEQ ID NO: 316835 - RNA, 22 nt, Artificial Sequence
  Synthetic
gaggagcaaaaauggagcuuag

SEQ ID NO: 316836 - RNA, 23 nt, Artificial Sequence
  Synthetic
ggaggagcaaaaauggagcuuag

SEQ ID NO: 316837 - RNA, 24 nt, Artificial Sequence
  Synthetic
aggaggagcaaaaauggagcuuag

SEQ ID NO: 316838 - RNA, 18 nt, Artificial Sequence
  Synthetic
uauaggaauauagcuuag

SEQ ID NO: 316839 - RNA, 19 nt, Artificial Sequence
  Synthetic
auauaggaauauagcuuag

SEQ ID NO: 316840 - RNA, 20 nt, Artificial Sequence
  Synthetic
gauauaggaauauagcuuag

SEQ ID NO: 316841 - RNA, 21 nt, Artificial Sequence
  Synthetic
ggauauaggaauauagcuuag

SEQ ID NO: 316842 - RNA, 22 nt, Artificial Sequence
  Synthetic
aggauauaggaauauagcuuag

SEQ ID NO: 316843 - RNA, 23 nt, Artificial Sequence
  Synthetic
aaggauauaggaauauagcuuag

SEQ ID NO: 316844 - RNA, 24 nt, Artificial Sequence
  Synthetic
gaaggauauaggaauauagcuuag

SEQ ID NO: 316845 - RNA, 18 nt, Artificial Sequence
  Synthetic
uaaaaacagaaugcuuag

SEQ ID NO: 316846 - RNA, 19 nt, Artificial Sequence
  Synthetic
cuaaaaacagaaugcuuag

SEQ ID NO: 316847 - RNA, 20 nt, Artificial Sequence
  Synthetic
gcuaaaaacagaaugcuuag

SEQ ID NO: 316848 - RNA, 21 nt, Artificial Sequence
  Synthetic
agcuaaaaacagaaugcuuag

SEQ ID NO: 316849 - RNA, 22 nt, Artificial Sequence
  Synthetic
aagcuaaaaacagaaugcuuag

SEQ ID NO: 316850 - RNA, 23 nt, Artificial Sequence
  Synthetic
gaagcuaaaaacagaaugcuuag

SEQ ID NO: 316851 - RNA, 24 nt, Artificial Sequence
  Synthetic
ugaagcuaaaaacagaaugcuuag

SEQ ID NO: 316852 - RNA, 18 nt, Artificial Sequence
  Synthetic
gauaauaacgaugcuuag

SEQ ID NO: 316853 - RNA, 19 nt, Artificial Sequence
  Synthetic
cgauaauaacgaugcuuag

SEQ ID NO: 316854 - RNA, 20 nt, Artificial Sequence
  Synthetic
ucgauaauaacgaugcuuag

SEQ ID NO: 316855 - RNA, 21 nt, Artificial Sequence
  Synthetic
aucgauaauaacgaugcuuag

SEQ ID NO: 316856 - RNA, 22 nt, Artificial Sequence
  Synthetic
caucgauaauaacgaugcuuag

SEQ ID NO: 316857 - RNA, 23 nt, Artificial Sequence
  Synthetic
gcaucgauaauaacgaugcuuag

SEQ ID NO: 316858 - RNA, 24 nt, Artificial Sequence
  Synthetic
agcaucgauaauaacgaugcuuag

SEQ ID NO: 316859 - RNA, 18 nt, Artificial Sequence
  Synthetic
ucuguuagggaugcuuag

SEQ ID NO: 316860 - RNA, 19 nt, Artificial Sequence
  Synthetic
aucuguuagggaugcuuag

SEQ ID NO: 316861 - RNA, 20 nt, Artificial Sequence
  Synthetic
caucuguuagggaugcuuag

SEQ ID NO: 316862 - RNA, 21 nt, Artificial Sequence
  Synthetic
ucaucuguuagggaugcuuag

SEQ ID NO: 316863 - RNA, 22 nt, Artificial Sequence
  Synthetic
gucaucuguuagggaugcuuag

SEQ ID NO: 316864 - RNA, 23 nt, Artificial Sequence
  Synthetic
ugucaucuguuagggaugcuuag

SEQ ID NO: 316865 - RNA, 24 nt, Artificial Sequence
  Synthetic
uugucaucuguuagggaugcuuag

SEQ ID NO: 316866 - RNA, 18 nt, Artificial Sequence
  Synthetic
aacuugaaaugugcuuag

SEQ ID NO: 316867 - RNA, 19 nt, Artificial Sequence
  Synthetic
gaacuugaaaugugcuuag

SEQ ID NO: 316868 - RNA, 20 nt, Artificial Sequence
  Synthetic
agaacuugaaaugugcuuag

SEQ ID NO: 316869 - RNA, 21 nt, Artificial Sequence
  Synthetic
gagaacuugaaaugugcuuag

SEQ ID NO: 316870 - RNA, 22 nt, Artificial Sequence
  Synthetic
ugagaacuugaaaugugcuuag

SEQ ID NO: 316871 - RNA, 23 nt, Artificial Sequence
  Synthetic
uugagaacuugaaaugugcuuag

SEQ ID NO: 316872 - RNA, 24 nt, Artificial Sequence
  Synthetic
auugagaacuugaaaugugcuuag

SEQ ID NO: 316873 - RNA, 18 nt, Artificial Sequence
  Synthetic
ucaaccauuagaucuuag

SEQ ID NO: 316874 - RNA, 19 nt, Artificial Sequence
  Synthetic
gucaaccauuagaucuuag

SEQ ID NO: 316875 - RNA, 20 nt, Artificial Sequence
  Synthetic
agucaaccauuagaucuuag

SEQ ID NO: 316876 - RNA, 21 nt, Artificial Sequence
  Synthetic
gagucaaccauuagaucuuag

SEQ ID NO: 316877 - RNA, 22 nt, Artificial Sequence
  Synthetic
agagucaaccauuagaucuuag

SEQ ID NO: 316878 - RNA, 23 nt, Artificial Sequence
  Synthetic
gagagucaaccauuagaucuuag

SEQ ID NO: 316879 - RNA, 24 nt, Artificial Sequence
  Synthetic
agagagucaaccauuagaucuuag

SEQ ID NO: 316880 - RNA, 18 nt, Artificial Sequence
  Synthetic
ggguuuaauugcucuuag

SEQ ID NO: 316881 - RNA, 19 nt, Artificial Sequence
  Synthetic
aggguuuaauugcucuuag

SEQ ID NO: 316882 - RNA, 20 nt, Artificial Sequence
  Synthetic
uaggguuuaauugcucuuag

SEQ ID NO: 316883 - RNA, 21 nt, Artificial Sequence
  Synthetic
uuaggguuuaauugcucuuag

SEQ ID NO: 316884 - RNA, 22 nt, Artificial Sequence
  Synthetic
guuaggguuuaauugcucuuag

SEQ ID NO: 316885 - RNA, 23 nt, Artificial Sequence
  Synthetic
gguuaggguuuaauugcucuuag

SEQ ID NO: 316886 - RNA, 24 nt, Artificial Sequence
  Synthetic
ugguuaggguuuaauugcucuuag

SEQ ID NO: 316887 - RNA, 18 nt, Artificial Sequence
  Synthetic
uuauuuuucaucucuuag

SEQ ID NO: 316888 - RNA, 19 nt, Artificial Sequence
  Synthetic
uuuauuuuucaucucuuag

SEQ ID NO: 316889 - RNA, 20 nt, Artificial Sequence
  Synthetic
cuuuauuuuucaucucuuag

SEQ ID NO: 316890 - RNA, 21 nt, Artificial Sequence
  Synthetic
ucuuuauuuuucaucucuuag

SEQ ID NO: 316891 - RNA, 22 nt, Artificial Sequence
  Synthetic
uucuuuauuuuucaucucuuag

SEQ ID NO: 316892 - RNA, 23 nt, Artificial Sequence
  Synthetic
uuucuuuauuuuucaucucuuag

SEQ ID NO: 316893 - RNA, 24 nt, Artificial Sequence
  Synthetic
cuuucuuuauuuuucaucucuuag

SEQ ID NO: 316894 - RNA, 18 nt, Artificial Sequence
  Synthetic
aagaguaggaagucuuag

SEQ ID NO: 316895 - RNA, 19 nt, Artificial Sequence
  Synthetic
uaagaguaggaagucuuag

SEQ ID NO: 316896 - RNA, 20 nt, Artificial Sequence
  Synthetic
cuaagaguaggaagucuuag

SEQ ID NO: 316897 - RNA, 21 nt, Artificial Sequence
  Synthetic
acuaagaguaggaagucuuag

SEQ ID NO: 316898 - RNA, 22 nt, Artificial Sequence
  Synthetic
aacuaagaguaggaagucuuag

SEQ ID NO: 316899 - RNA, 23 nt, Artificial Sequence
  Synthetic
gaacuaagaguaggaagucuuag

SEQ ID NO: 316900 - RNA, 24 nt, Artificial Sequence
  Synthetic
ugaacuaagaguaggaagucuuag

SEQ ID NO: 316901 - RNA, 18 nt, Artificial Sequence
  Synthetic
ucuagcuggaagucuuag

SEQ ID NO: 316902 - RNA, 19 nt, Artificial Sequence
  Synthetic
cucuagcuggaagucuuag

SEQ ID NO: 316903 - RNA, 20 nt, Artificial Sequence
  Synthetic
ucucuagcuggaagucuuag

SEQ ID NO: 316904 - RNA, 21 nt, Artificial Sequence
  Synthetic
uucucuagcuggaagucuuag

SEQ ID NO: 316905 - RNA, 22 nt, Artificial Sequence
  Synthetic
uuucucuagcuggaagucuuag

SEQ ID NO: 316906 - RNA, 23 nt, Artificial Sequence
  Synthetic
auuucucuagcuggaagucuuag

SEQ ID NO: 316907 - RNA, 24 nt, Artificial Sequence
  Synthetic
cauuucucuagcuggaagucuuag

SEQ ID NO: 316908 - RNA, 18 nt, Artificial Sequence
  Synthetic
aguagaaaagagucuuag

SEQ ID NO: 316909 - RNA, 19 nt, Artificial Sequence
  Synthetic
aaguagaaaagagucuuag

SEQ ID NO: 316910 - RNA, 20 nt, Artificial Sequence
  Synthetic
aaaguagaaaagagucuuag

SEQ ID NO: 316911 - RNA, 21 nt, Artificial Sequence
  Synthetic
gaaaguagaaaagagucuuag

SEQ ID NO: 316912 - RNA, 22 nt, Artificial Sequence
  Synthetic
agaaaguagaaaagagucuuag

SEQ ID NO: 316913 - RNA, 23 nt, Artificial Sequence
  Synthetic
gagaaaguagaaaagagucuuag

SEQ ID NO: 316914 - RNA, 24 nt, Artificial Sequence
  Synthetic
ggagaaaguagaaaagagucuuag

SEQ ID NO: 316915 - RNA, 18 nt, Artificial Sequence
  Synthetic
ggaagggagaggucuuag

SEQ ID NO: 316916 - RNA, 19 nt, Artificial Sequence
  Synthetic
gggaagggagaggucuuag

SEQ ID NO: 316917 - RNA, 20 nt, Artificial Sequence
  Synthetic
ugggaagggagaggucuuag

SEQ ID NO: 316918 - RNA, 21 nt, Artificial Sequence
  Synthetic
augggaagggagaggucuuag

SEQ ID NO: 316919 - RNA, 22 nt, Artificial Sequence
  Synthetic
gaugggaagggagaggucuuag

SEQ ID NO: 316920 - RNA, 23 nt, Artificial Sequence
  Synthetic
ugaugggaagggagaggucuuag

SEQ ID NO: 316921 - RNA, 24 nt, Artificial Sequence
  Synthetic
gugaugggaagggagaggucuuag

SEQ ID NO: 316922 - RNA, 18 nt, Artificial Sequence
  Synthetic
caauccagaauuucuuag

SEQ ID NO: 316923 - RNA, 19 nt, Artificial Sequence
  Synthetic
ccaauccagaauuucuuag

SEQ ID NO: 316924 - RNA, 20 nt, Artificial Sequence
  Synthetic
gccaauccagaauuucuuag

SEQ ID NO: 316925 - RNA, 21 nt, Artificial Sequence
  Synthetic
ugccaauccagaauuucuuag

SEQ ID NO: 316926 - RNA, 22 nt, Artificial Sequence
  Synthetic
uugccaauccagaauuucuuag

SEQ ID NO: 316927 - RNA, 23 nt, Artificial Sequence
  Synthetic
uuugccaauccagaauuucuuag

SEQ ID NO: 316928 - RNA, 24 nt, Artificial Sequence
  Synthetic
cuuugccaauccagaauuucuuag

SEQ ID NO: 316929 - RNA, 18 nt, Artificial Sequence
  Synthetic
aaaaaaaaaaaaaguuag

SEQ ID NO: 316930 - RNA, 19 nt, Artificial Sequence
  Synthetic
caaaaaaaaaaaaaguuag

SEQ ID NO: 316931 - RNA, 20 nt, Artificial Sequence
  Synthetic
acaaaaaaaaaaaaaguuag

SEQ ID NO: 316932 - RNA, 21 nt, Artificial Sequence
  Synthetic
uacaaaaaaaaaaaaaguuag

SEQ ID NO: 316933 - RNA, 22 nt, Artificial Sequence
  Synthetic
auacaaaaaaaaaaaaaguuag

SEQ ID NO: 316934 - RNA, 23 nt, Artificial Sequence
  Synthetic
aauacaaaaaaaaaaaaaguuag

SEQ ID NO: 316935 - RNA, 24 nt, Artificial Sequence
  Synthetic
aaauacaaaaaaaaaaaaaguuag

SEQ ID NO: 316936 - RNA, 18 nt, Artificial Sequence
  Synthetic
gauuuccaugaaaguuag

SEQ ID NO: 316937 - RNA, 19 nt, Artificial Sequence
  Synthetic
agauuuccaugaaaguuag

SEQ ID NO: 316938 - RNA, 20 nt, Artificial Sequence
  Synthetic
gagauuuccaugaaaguuag

SEQ ID NO: 316939 - RNA, 21 nt, Artificial Sequence
  Synthetic
ggagauuuccaugaaaguuag

SEQ ID NO: 316940 - RNA, 22 nt, Artificial Sequence
  Synthetic
aggagauuuccaugaaaguuag

SEQ ID NO: 316941 - RNA, 23 nt, Artificial Sequence
  Synthetic
aaggagauuuccaugaaaguuag

SEQ ID NO: 316942 - RNA, 24 nt, Artificial Sequence
  Synthetic
gaaggagauuuccaugaaaguuag

SEQ ID NO: 316943 - RNA, 18 nt, Artificial Sequence
  Synthetic
uuggcauuaagaaguuag

SEQ ID NO: 316944 - RNA, 19 nt, Artificial Sequence
  Synthetic
cuuggcauuaagaaguuag

SEQ ID NO: 316945 - RNA, 20 nt, Artificial Sequence
  Synthetic
gcuuggcauuaagaaguuag

SEQ ID NO: 316946 - RNA, 21 nt, Artificial Sequence
  Synthetic
agcuuggcauuaagaaguuag

SEQ ID NO: 316947 - RNA, 22 nt, Artificial Sequence
  Synthetic
gagcuuggcauuaagaaguuag

SEQ ID NO: 316948 - RNA, 23 nt, Artificial Sequence
  Synthetic
agagcuuggcauuaagaaguuag

SEQ ID NO: 316949 - RNA, 24 nt, Artificial Sequence
  Synthetic
cagagcuuggcauuaagaaguuag

SEQ ID NO: 316950 - RNA, 18 nt, Artificial Sequence
  Synthetic
ugguguaacaacaguuag

SEQ ID NO: 316951 - RNA, 19 nt, Artificial Sequence
  Synthetic
uugguguaacaacaguuag

SEQ ID NO: 316952 - RNA, 20 nt, Artificial Sequence
  Synthetic
uuugguguaacaacaguuag

SEQ ID NO: 316953 - RNA, 21 nt, Artificial Sequence
  Synthetic
guuugguguaacaacaguuag

SEQ ID NO: 316954 - RNA, 22 nt, Artificial Sequence
  Synthetic
gguuugguguaacaacaguuag

SEQ ID NO: 316955 - RNA, 23 nt, Artificial Sequence
  Synthetic
ugguuugguguaacaacaguuag

SEQ ID NO: 316956 - RNA, 24 nt, Artificial Sequence
  Synthetic
uugguuugguguaacaacaguuag

SEQ ID NO: 316957 - RNA, 18 nt, Artificial Sequence
  Synthetic
uuuauuacucccaguuag

SEQ ID NO: 316958 - RNA, 19 nt, Artificial Sequence
  Synthetic
uuuuauuacucccaguuag

SEQ ID NO: 316959 - RNA, 20 nt, Artificial Sequence
  Synthetic
auuuuauuacucccaguuag

SEQ ID NO: 316960 - RNA, 21 nt, Artificial Sequence
  Synthetic
aauuuuauuacucccaguuag

SEQ ID NO: 316961 - RNA, 22 nt, Artificial Sequence
  Synthetic
aaauuuuauuacucccaguuag

SEQ ID NO: 316962 - RNA, 23 nt, Artificial Sequence
  Synthetic
uaaauuuuauuacucccaguuag

SEQ ID NO: 316963 - RNA, 24 nt, Artificial Sequence
  Synthetic
cuaaauuuuauuacucccaguuag

SEQ ID NO: 316964 - RNA, 18 nt, Artificial Sequence
  Synthetic
acuggauccuugaguuag

SEQ ID NO: 316965 - RNA, 19 nt, Artificial Sequence
  Synthetic
gacuggauccuugaguuag

SEQ ID NO: 316966 - RNA, 20 nt, Artificial Sequence
  Synthetic
ggacuggauccuugaguuag

SEQ ID NO: 316967 - RNA, 21 nt, Artificial Sequence
  Synthetic
uggacuggauccuugaguuag

SEQ ID NO: 316968 - RNA, 22 nt, Artificial Sequence
  Synthetic
uuggacuggauccuugaguuag

SEQ ID NO: 316969 - RNA, 23 nt, Artificial Sequence
  Synthetic
uuuggacuggauccuugaguuag

SEQ ID NO: 316970 - RNA, 24 nt, Artificial Sequence
  Synthetic
guuuggacuggauccuugaguuag

SEQ ID NO: 316971 - RNA, 18 nt, Artificial Sequence
  Synthetic
auuuggaaguauaguuag

SEQ ID NO: 316972 - RNA, 19 nt, Artificial Sequence
  Synthetic
uauuuggaaguauaguuag

SEQ ID NO: 316973 - RNA, 20 nt, Artificial Sequence
  Synthetic
auauuuggaaguauaguuag

SEQ ID NO: 316974 - RNA, 21 nt, Artificial Sequence
  Synthetic
aauauuuggaaguauaguuag

SEQ ID NO: 316975 - RNA, 22 nt, Artificial Sequence
  Synthetic
aaauauuuggaaguauaguuag

SEQ ID NO: 316976 - RNA, 23 nt, Artificial Sequence
  Synthetic
uaaauauuuggaaguauaguuag

SEQ ID NO: 316977 - RNA, 24 nt, Artificial Sequence
  Synthetic
auaaauauuuggaaguauaguuag

SEQ ID NO: 316978 - RNA, 18 nt, Artificial Sequence
  Synthetic
agggagggauaacguuag

SEQ ID NO: 316979 - RNA, 19 nt, Artificial Sequence
  Synthetic
gagggagggauaacguuag

SEQ ID NO: 316980 - RNA, 20 nt, Artificial Sequence
  Synthetic
agagggagggauaacguuag

SEQ ID NO: 316981 - RNA, 21 nt, Artificial Sequence
  Synthetic
cagagggagggauaacguuag

SEQ ID NO: 316982 - RNA, 22 nt, Artificial Sequence
  Synthetic
gcagagggagggauaacguuag

SEQ ID NO: 316983 - RNA, 23 nt, Artificial Sequence
  Synthetic
ggcagagggagggauaacguuag

SEQ ID NO: 316984 - RNA, 24 nt, Artificial Sequence
  Synthetic
gggcagagggagggauaacguuag

SEQ ID NO: 316985 - RNA, 18 nt, Artificial Sequence
  Synthetic
ugauuuucaaaagguuag

SEQ ID NO: 316986 - RNA, 19 nt, Artificial Sequence
  Synthetic
uugauuuucaaaagguuag

SEQ ID NO: 316987 - RNA, 20 nt, Artificial Sequence
  Synthetic
guugauuuucaaaagguuag

SEQ ID NO: 316988 - RNA, 21 nt, Artificial Sequence
  Synthetic
aguugauuuucaaaagguuag

SEQ ID NO: 316989 - RNA, 22 nt, Artificial Sequence
  Synthetic
aaguugauuuucaaaagguuag

SEQ ID NO: 316990 - RNA, 23 nt, Artificial Sequence
  Synthetic
caaguugauuuucaaaagguuag

SEQ ID NO: 316991 - RNA, 24 nt, Artificial Sequence
  Synthetic
gcaaguugauuuucaaaagguuag

SEQ ID NO: 316992 - RNA, 18 nt, Artificial Sequence
  Synthetic
cgaggggugggagguuag

SEQ ID NO: 316993 - RNA, 19 nt, Artificial Sequence
  Synthetic
ucgaggggugggagguuag

SEQ ID NO: 316994 - RNA, 20 nt, Artificial Sequence
  Synthetic
gucgaggggugggagguuag

SEQ ID NO: 316995 - RNA, 21 nt, Artificial Sequence
  Synthetic
ugucgaggggugggagguuag

SEQ ID NO: 316996 - RNA, 22 nt, Artificial Sequence
  Synthetic
cugucgaggggugggagguuag

SEQ ID NO: 316997 - RNA, 23 nt, Artificial Sequence
  Synthetic
ccugucgaggggugggagguuag

SEQ ID NO: 316998 - RNA, 24 nt, Artificial Sequence
  Synthetic
gccugucgaggggugggagguuag

SEQ ID NO: 316999 - RNA, 18 nt, Artificial Sequence
  Synthetic
cuucaagauguggguuag

SEQ ID NO: 317000 - RNA, 19 nt, Artificial Sequence
  Synthetic
gcuucaagauguggguuag

SEQ ID NO: 317001 - RNA, 20 nt, Artificial Sequence
  Synthetic
ugcuucaagauguggguuag

SEQ ID NO: 317002 - RNA, 21 nt, Artificial Sequence
  Synthetic
cugcuucaagauguggguuag

SEQ ID NO: 317003 - RNA, 22 nt, Artificial Sequence
  Synthetic
ucugcuucaagauguggguuag

SEQ ID NO: 317004 - RNA, 23 nt, Artificial Sequence
  Synthetic
cucugcuucaagauguggguuag

SEQ ID NO: 317005 - RNA, 24 nt, Artificial Sequence
  Synthetic
gcucugcuucaagauguggguuag

SEQ ID NO: 317006 - RNA, 18 nt, Artificial Sequence
  Synthetic
uguugguugauugguuag

SEQ ID NO: 317007 - RNA, 19 nt, Artificial Sequence
  Synthetic
uuguugguugauugguuag

SEQ ID NO: 317008 - RNA, 20 nt, Artificial Sequence
  Synthetic
cuuguugguugauugguuag

SEQ ID NO: 317009 - RNA, 21 nt, Artificial Sequence
  Synthetic
ccuuguugguugauugguuag

SEQ ID NO: 317010 - RNA, 22 nt, Artificial Sequence
  Synthetic
uccuuguugguugauugguuag

SEQ ID NO: 317011 - RNA, 23 nt, Artificial Sequence
  Synthetic
auccuuguugguugauugguuag

SEQ ID NO: 317012 - RNA, 24 nt, Artificial Sequence
  Synthetic
gauccuuguugguugauugguuag

SEQ ID NO: 317013 - RNA, 18 nt, Artificial Sequence
  Synthetic
gggguuucaccauguuag

SEQ ID NO: 317014 - RNA, 19 nt, Artificial Sequence
  Synthetic
ugggguuucaccauguuag

SEQ ID NO: 317015 - RNA, 20 nt, Artificial Sequence
  Synthetic
augggguuucaccauguuag

SEQ ID NO: 317016 - RNA, 18 nt, Artificial Sequence
  Synthetic
aacgcaagcagauguuag

SEQ ID NO: 317017 - RNA, 19 nt, Artificial Sequence
  Synthetic
caacgcaagcagauguuag

SEQ ID NO: 317018 - RNA, 20 nt, Artificial Sequence
  Synthetic
gcaacgcaagcagauguuag

SEQ ID NO: 317019 - RNA, 21 nt, Artificial Sequence
  Synthetic
ugcaacgcaagcagauguuag

SEQ ID NO: 317020 - RNA, 22 nt, Artificial Sequence
  Synthetic
gugcaacgcaagcagauguuag

SEQ ID NO: 317021 - RNA, 23 nt, Artificial Sequence
  Synthetic
agugcaacgcaagcagauguuag

SEQ ID NO: 317022 - RNA, 24 nt, Artificial Sequence
  Synthetic
cagugcaacgcaagcagauguuag

SEQ ID NO: 317023 - RNA, 18 nt, Artificial Sequence
  Synthetic
accugcuguagauguuag

SEQ ID NO: 317024 - RNA, 19 nt, Artificial Sequence
  Synthetic
uaccugcuguagauguuag

SEQ ID NO: 317025 - RNA, 20 nt, Artificial Sequence
  Synthetic
auaccugcuguagauguuag

SEQ ID NO: 317026 - RNA, 21 nt, Artificial Sequence
  Synthetic
aauaccugcuguagauguuag

SEQ ID NO: 317027 - RNA, 22 nt, Artificial Sequence
  Synthetic
caauaccugcuguagauguuag

SEQ ID NO: 317028 - RNA, 23 nt, Artificial Sequence
  Synthetic
ccaauaccugcuguagauguuag

SEQ ID NO: 317029 - RNA, 24 nt, Artificial Sequence
  Synthetic
gccaauaccugcuguagauguuag

SEQ ID NO: 317030 - RNA, 18 nt, Artificial Sequence
  Synthetic
uuauugaggauauguuag

SEQ ID NO: 317031 - RNA, 19 nt, Artificial Sequence
  Synthetic
uuuauugaggauauguuag

SEQ ID NO: 317032 - RNA, 20 nt, Artificial Sequence
  Synthetic
auuuauugaggauauguuag

SEQ ID NO: 317033 - RNA, 21 nt, Artificial Sequence
  Synthetic
gauuuauugaggauauguuag

SEQ ID NO: 317034 - RNA, 22 nt, Artificial Sequence
  Synthetic
cgauuuauugaggauauguuag

SEQ ID NO: 317035 - RNA, 23 nt, Artificial Sequence
  Synthetic
ucgauuuauugaggauauguuag

SEQ ID NO: 317036 - RNA, 24 nt, Artificial Sequence
  Synthetic
aucgauuuauugaggauauguuag

SEQ ID NO: 317037 - RNA, 18 nt, Artificial Sequence
  Synthetic
uuuuaucaacuauguuag

SEQ ID NO: 317038 - RNA, 19 nt, Artificial Sequence
  Synthetic
auuuuaucaacuauguuag

SEQ ID NO: 317039 - RNA, 20 nt, Artificial Sequence
  Synthetic
aauuuuaucaacuauguuag

SEQ ID NO: 317040 - RNA, 21 nt, Artificial Sequence
  Synthetic
gaauuuuaucaacuauguuag

SEQ ID NO: 317041 - RNA, 22 nt, Artificial Sequence
  Synthetic
ggaauuuuaucaacuauguuag

SEQ ID NO: 317042 - RNA, 23 nt, Artificial Sequence
  Synthetic
aggaauuuuaucaacuauguuag

SEQ ID NO: 317043 - RNA, 24 nt, Artificial Sequence
  Synthetic
aaggaauuuuaucaacuauguuag

SEQ ID NO: 317044 - RNA, 18 nt, Artificial Sequence
  Synthetic
agugcuuugcacuguuag

SEQ ID NO: 317045 - RNA, 19 nt, Artificial Sequence
  Synthetic
aagugcuuugcacuguuag

SEQ ID NO: 317046 - RNA, 20 nt, Artificial Sequence
  Synthetic
uaagugcuuugcacuguuag

SEQ ID NO: 317047 - RNA, 21 nt, Artificial Sequence
  Synthetic
cuaagugcuuugcacuguuag

SEQ ID NO: 317048 - RNA, 22 nt, Artificial Sequence
  Synthetic
ucuaagugcuuugcacuguuag

SEQ ID NO: 317049 - RNA, 23 nt, Artificial Sequence
  Synthetic
uucuaagugcuuugcacuguuag

SEQ ID NO: 317050 - RNA, 24 nt, Artificial Sequence
  Synthetic
auucuaagugcuuugcacuguuag

SEQ ID NO: 317051 - RNA, 18 nt, Artificial Sequence
  Synthetic
uuaggccagcuguguuag

SEQ ID NO: 317052 - RNA, 19 nt, Artificial Sequence
  Synthetic
auuaggccagcuguguuag

SEQ ID NO: 317053 - RNA, 20 nt, Artificial Sequence
  Synthetic
gauuaggccagcuguguuag

SEQ ID NO: 317054 - RNA, 21 nt, Artificial Sequence
  Synthetic
ugauuaggccagcuguguuag

SEQ ID NO: 317055 - RNA, 22 nt, Artificial Sequence
  Synthetic
gugauuaggccagcuguguuag

SEQ ID NO: 317056 - RNA, 23 nt, Artificial Sequence
  Synthetic
ugugauuaggccagcuguguuag

SEQ ID NO: 317057 - RNA, 24 nt, Artificial Sequence
  Synthetic
augugauuaggccagcuguguuag

SEQ ID NO: 317058 - RNA, 18 nt, Artificial Sequence
  Synthetic
cauuaggacucuuguuag

SEQ ID NO: 317059 - RNA, 19 nt, Artificial Sequence
  Synthetic
ccauuaggacucuuguuag

SEQ ID NO: 317060 - RNA, 20 nt, Artificial Sequence
  Synthetic
accauuaggacucuuguuag

SEQ ID NO: 317061 - RNA, 21 nt, Artificial Sequence
  Synthetic
aaccauuaggacucuuguuag

SEQ ID NO: 317062 - RNA, 22 nt, Artificial Sequence
  Synthetic
uaaccauuaggacucuuguuag

SEQ ID NO: 317063 - RNA, 23 nt, Artificial Sequence
  Synthetic
guaaccauuaggacucuuguuag

SEQ ID NO: 317064 - RNA, 24 nt, Artificial Sequence
  Synthetic
gguaaccauuaggacucuuguuag

SEQ ID NO: 317065 - RNA, 18 nt, Artificial Sequence
  Synthetic
gcauuuagauguuguuag

SEQ ID NO: 317066 - RNA, 19 nt, Artificial Sequence
  Synthetic
ggcauuuagauguuguuag

SEQ ID NO: 317067 - RNA, 20 nt, Artificial Sequence
  Synthetic
aggcauuuagauguuguuag

SEQ ID NO: 317068 - RNA, 21 nt, Artificial Sequence
  Synthetic
gaggcauuuagauguuguuag

SEQ ID NO: 317069 - RNA, 22 nt, Artificial Sequence
  Synthetic
agaggcauuuagauguuguuag

SEQ ID NO: 317070 - RNA, 23 nt, Artificial Sequence
  Synthetic
uagaggcauuuagauguuguuag

SEQ ID NO: 317071 - RNA, 24 nt, Artificial Sequence
  Synthetic
cuagaggcauuuagauguuguuag

SEQ ID NO: 317072 - RNA, 18 nt, Artificial Sequence
  Synthetic
agaaaaaaaaaaauuuag

SEQ ID NO: 317073 - RNA, 19 nt, Artificial Sequence
  Synthetic
cagaaaaaaaaaaauuuag

SEQ ID NO: 317074 - RNA, 20 nt, Artificial Sequence
  Synthetic
ucagaaaaaaaaaaauuuag

SEQ ID NO: 317075 - RNA, 21 nt, Artificial Sequence
  Synthetic
cucagaaaaaaaaaaauuuag

SEQ ID NO: 317076 - RNA, 22 nt, Artificial Sequence
  Synthetic
ucucagaaaaaaaaaaauuuag

SEQ ID NO: 317077 - RNA, 23 nt, Artificial Sequence
  Synthetic
aucucagaaaaaaaaaaauuuag

SEQ ID NO: 317078 - RNA, 24 nt, Artificial Sequence
  Synthetic
caucucagaaaaaaaaaaauuuag

SEQ ID NO: 317079 - RNA, 18 nt, Artificial Sequence
  Synthetic
caagaagacuaaauuuag

SEQ ID NO: 317080 - RNA, 19 nt, Artificial Sequence
  Synthetic
gcaagaagacuaaauuuag

SEQ ID NO: 317081 - RNA, 20 nt, Artificial Sequence
  Synthetic
ggcaagaagacuaaauuuag

SEQ ID NO: 317082 - RNA, 21 nt, Artificial Sequence
  Synthetic
gggcaagaagacuaaauuuag

SEQ ID NO: 317083 - RNA, 22 nt, Artificial Sequence
  Synthetic
agggcaagaagacuaaauuuag

SEQ ID NO: 317084 - RNA, 23 nt, Artificial Sequence
  Synthetic
aagggcaagaagacuaaauuuag

SEQ ID NO: 317085 - RNA, 24 nt, Artificial Sequence
  Synthetic
aaagggcaagaagacuaaauuuag

SEQ ID NO: 317086 - RNA, 18 nt, Artificial Sequence
  Synthetic
gacaccagaggaauuuag

SEQ ID NO: 317087 - RNA, 19 nt, Artificial Sequence
  Synthetic
agacaccagaggaauuuag

SEQ ID NO: 317088 - RNA, 20 nt, Artificial Sequence
  Synthetic
aagacaccagaggaauuuag

SEQ ID NO: 317089 - RNA, 21 nt, Artificial Sequence
  Synthetic
caagacaccagaggaauuuag

SEQ ID NO: 317090 - RNA, 22 nt, Artificial Sequence
  Synthetic
ccaagacaccagaggaauuuag

SEQ ID NO: 317091 - RNA, 23 nt, Artificial Sequence
  Synthetic
cccaagacaccagaggaauuuag

SEQ ID NO: 317092 - RNA, 24 nt, Artificial Sequence
  Synthetic
ucccaagacaccagaggaauuuag

SEQ ID NO: 317093 - RNA, 18 nt, Artificial Sequence
  Synthetic
gccacugaagacauuuag

SEQ ID NO: 317094 - RNA, 19 nt, Artificial Sequence
  Synthetic
ugccacugaagacauuuag

SEQ ID NO: 317095 - RNA, 20 nt, Artificial Sequence
  Synthetic
uugccacugaagacauuuag

SEQ ID NO: 317096 - RNA, 21 nt, Artificial Sequence
  Synthetic
uuugccacugaagacauuuag

SEQ ID NO: 317097 - RNA, 22 nt, Artificial Sequence
  Synthetic
uuuugccacugaagacauuuag

SEQ ID NO: 317098 - RNA, 23 nt, Artificial Sequence
  Synthetic
cuuuugccacugaagacauuuag

SEQ ID NO: 317099 - RNA, 24 nt, Artificial Sequence
  Synthetic
gcuuuugccacugaagacauuuag

SEQ ID NO: 317100 - RNA, 18 nt, Artificial Sequence
  Synthetic
ugauagacauacauuuag

SEQ ID NO: 317101 - RNA, 19 nt, Artificial Sequence
  Synthetic
uugauagacauacauuuag

SEQ ID NO: 317102 - RNA, 20 nt, Artificial Sequence
  Synthetic
cuugauagacauacauuuag

SEQ ID NO: 317103 - RNA, 21 nt, Artificial Sequence
  Synthetic
gcuugauagacauacauuuag

SEQ ID NO: 317104 - RNA, 22 nt, Artificial Sequence
  Synthetic
ugcuugauagacauacauuuag

SEQ ID NO: 317105 - RNA, 23 nt, Artificial Sequence
  Synthetic
uugcuugauagacauacauuuag

SEQ ID NO: 317106 - RNA, 24 nt, Artificial Sequence
  Synthetic
uuugcuugauagacauacauuuag

SEQ ID NO: 317107 - RNA, 18 nt, Artificial Sequence
  Synthetic
cacacugaggccauuuag

SEQ ID NO: 317108 - RNA, 19 nt, Artificial Sequence
  Synthetic
gcacacugaggccauuuag

SEQ ID NO: 317109 - RNA, 20 nt, Artificial Sequence
  Synthetic
agcacacugaggccauuuag

SEQ ID NO: 317110 - RNA, 21 nt, Artificial Sequence
  Synthetic
gagcacacugaggccauuuag

SEQ ID NO: 317111 - RNA, 22 nt, Artificial Sequence
  Synthetic
agagcacacugaggccauuuag

SEQ ID NO: 317112 - RNA, 23 nt, Artificial Sequence
  Synthetic
gagagcacacugaggccauuuag

SEQ ID NO: 317113 - RNA, 24 nt, Artificial Sequence
  Synthetic
agagagcacacugaggccauuuag

SEQ ID NO: 317114 - RNA, 18 nt, Artificial Sequence
  Synthetic
uguuacauugucauuuag

SEQ ID NO: 317115 - RNA, 19 nt, Artificial Sequence
  Synthetic
uuguuacauugucauuuag

SEQ ID NO: 317116 - RNA, 20 nt, Artificial Sequence
  Synthetic
cuuguuacauugucauuuag

SEQ ID NO: 317117 - RNA, 21 nt, Artificial Sequence
  Synthetic
acuuguuacauugucauuuag

SEQ ID NO: 317118 - RNA, 22 nt, Artificial Sequence
  Synthetic
cacuuguuacauugucauuuag

SEQ ID NO: 317119 - RNA, 23 nt, Artificial Sequence
  Synthetic
ccacuuguuacauugucauuuag

SEQ ID NO: 317120 - RNA, 24 nt, Artificial Sequence
  Synthetic
gccacuuguuacauugucauuuag

SEQ ID NO: 317121 - RNA, 18 nt, Artificial Sequence
  Synthetic
uuucugguuaagauuuag

SEQ ID NO: 317122 - RNA, 19 nt, Artificial Sequence
  Synthetic
uuuucugguuaagauuuag

SEQ ID NO: 317123 - RNA, 20 nt, Artificial Sequence
  Synthetic
auuuucugguuaagauuuag

SEQ ID NO: 317124 - RNA, 21 nt, Artificial Sequence
  Synthetic
gauuuucugguuaagauuuag

SEQ ID NO: 317125 - RNA, 22 nt, Artificial Sequence
  Synthetic
agauuuucugguuaagauuuag

SEQ ID NO: 317126 - RNA, 23 nt, Artificial Sequence
  Synthetic
gagauuuucugguuaagauuuag

SEQ ID NO: 317127 - RNA, 24 nt, Artificial Sequence
  Synthetic
cgagauuuucugguuaagauuuag

SEQ ID NO: 317128 - RNA, 18 nt, Artificial Sequence
  Synthetic
caagaggcagagauuuag

SEQ ID NO: 317129 - RNA, 19 nt, Artificial Sequence
  Synthetic
gcaagaggcagagauuuag

SEQ ID NO: 317130 - RNA, 20 nt, Artificial Sequence
  Synthetic
agcaagaggcagagauuuag

SEQ ID NO: 317131 - RNA, 21 nt, Artificial Sequence
  Synthetic
cagcaagaggcagagauuuag

SEQ ID NO: 317132 - RNA, 22 nt, Artificial Sequence
  Synthetic
acagcaagaggcagagauuuag

SEQ ID NO: 317133 - RNA, 23 nt, Artificial Sequence
  Synthetic
aacagcaagaggcagagauuuag

SEQ ID NO: 317134 - RNA, 24 nt, Artificial Sequence
  Synthetic
aaacagcaagaggcagagauuuag

SEQ ID NO: 317135 - RNA, 18 nt, Artificial Sequence
  Synthetic
gaugguaaguagauuuag

SEQ ID NO: 317136 - RNA, 19 nt, Artificial Sequence
  Synthetic
ggaugguaaguagauuuag

SEQ ID NO: 317137 - RNA, 20 nt, Artificial Sequence
  Synthetic
aggaugguaaguagauuuag

SEQ ID NO: 317138 - RNA, 21 nt, Artificial Sequence
  Synthetic
aaggaugguaaguagauuuag

SEQ ID NO: 317139 - RNA, 22 nt, Artificial Sequence
  Synthetic
gaaggaugguaaguagauuuag

SEQ ID NO: 317140 - RNA, 23 nt, Artificial Sequence
  Synthetic
ggaaggaugguaaguagauuuag

SEQ ID NO: 317141 - RNA, 24 nt, Artificial Sequence
  Synthetic
uggaaggaugguaaguagauuuag

SEQ ID NO: 317142 - RNA, 18 nt, Artificial Sequence
  Synthetic
gccauacaauugauuuag

SEQ ID NO: 317143 - RNA, 19 nt, Artificial Sequence
  Synthetic
agccauacaauugauuuag

SEQ ID NO: 317144 - RNA, 20 nt, Artificial Sequence
  Synthetic
uagccauacaauugauuuag

SEQ ID NO: 317145 - RNA, 21 nt, Artificial Sequence
  Synthetic
auagccauacaauugauuuag

SEQ ID NO: 317146 - RNA, 22 nt, Artificial Sequence
  Synthetic
gauagccauacaauugauuuag

SEQ ID NO: 317147 - RNA, 23 nt, Artificial Sequence
  Synthetic
agauagccauacaauugauuuag

SEQ ID NO: 317148 - RNA, 24 nt, Artificial Sequence
  Synthetic
aagauagccauacaauugauuuag

SEQ ID NO: 317149 - RNA, 18 nt, Artificial Sequence
  Synthetic
cggaaguaaaauauuuag

SEQ ID NO: 317150 - RNA, 19 nt, Artificial Sequence
  Synthetic
gcggaaguaaaauauuuag

SEQ ID NO: 317151 - RNA, 20 nt, Artificial Sequence
  Synthetic
ggcggaaguaaaauauuuag

SEQ ID NO: 317152 - RNA, 21 nt, Artificial Sequence
  Synthetic
uggcggaaguaaaauauuuag

SEQ ID NO: 317153 - RNA, 22 nt, Artificial Sequence
  Synthetic
guggcggaaguaaaauauuuag

SEQ ID NO: 317154 - RNA, 23 nt, Artificial Sequence
  Synthetic
aguggcggaaguaaaauauuuag

SEQ ID NO: 317155 - RNA, 24 nt, Artificial Sequence
  Synthetic
caguggcggaaguaaaauauuuag

SEQ ID NO: 317156 - RNA, 18 nt, Artificial Sequence
  Synthetic
cagacuguaaauauuuag

SEQ ID NO: 317157 - RNA, 19 nt, Artificial Sequence
  Synthetic
gcagacuguaaauauuuag

SEQ ID NO: 317158 - RNA, 20 nt, Artificial Sequence
  Synthetic
ugcagacuguaaauauuuag

SEQ ID NO: 317159 - RNA, 21 nt, Artificial Sequence
  Synthetic
gugcagacuguaaauauuuag

SEQ ID NO: 317160 - RNA, 22 nt, Artificial Sequence
  Synthetic
ugugcagacuguaaauauuuag

SEQ ID NO: 317161 - RNA, 23 nt, Artificial Sequence
  Synthetic
augugcagacuguaaauauuuag

SEQ ID NO: 317162 - RNA, 24 nt, Artificial Sequence
  Synthetic
uaugugcagacuguaaauauuuag

SEQ ID NO: 317163 - RNA, 18 nt, Artificial Sequence
  Synthetic
ggaacaaugaauauuuag

SEQ ID NO: 317164 - RNA, 19 nt, Artificial Sequence
  Synthetic
aggaacaaugaauauuuag

SEQ ID NO: 317165 - RNA, 20 nt, Artificial Sequence
  Synthetic
uaggaacaaugaauauuuag

SEQ ID NO: 317166 - RNA, 21 nt, Artificial Sequence
  Synthetic
uuaggaacaaugaauauuuag

SEQ ID NO: 317167 - RNA, 22 nt, Artificial Sequence
  Synthetic
uuuaggaacaaugaauauuuag

SEQ ID NO: 317168 - RNA, 23 nt, Artificial Sequence
  Synthetic
auuuaggaacaaugaauauuuag

SEQ ID NO: 317169 - RNA, 24 nt, Artificial Sequence
  Synthetic
cauuuaggaacaaugaauauuuag

SEQ ID NO: 317170 - RNA, 18 nt, Artificial Sequence
  Synthetic
agaaagaaacauauuuag

SEQ ID NO: 317171 - RNA, 19 nt, Artificial Sequence
  Synthetic
gagaaagaaacauauuuag

SEQ ID NO: 317172 - RNA, 20 nt, Artificial Sequence
  Synthetic
ggagaaagaaacauauuuag

SEQ ID NO: 317173 - RNA, 21 nt, Artificial Sequence
  Synthetic
gggagaaagaaacauauuuag

SEQ ID NO: 317174 - RNA, 22 nt, Artificial Sequence
  Synthetic
ggggagaaagaaacauauuuag

SEQ ID NO: 317175 - RNA, 23 nt, Artificial Sequence
  Synthetic
aggggagaaagaaacauauuuag

SEQ ID NO: 317176 - RNA, 24 nt, Artificial Sequence
  Synthetic
aaggggagaaagaaacauauuuag

SEQ ID NO: 317177 - RNA, 18 nt, Artificial Sequence
  Synthetic
ucaaccugucauauuuag

SEQ ID NO: 317178 - RNA, 19 nt, Artificial Sequence
  Synthetic
uucaaccugucauauuuag

SEQ ID NO: 317179 - RNA, 20 nt, Artificial Sequence
  Synthetic
uuucaaccugucauauuuag

SEQ ID NO: 317180 - RNA, 21 nt, Artificial Sequence
  Synthetic
auuucaaccugucauauuuag

SEQ ID NO: 317181 - RNA, 22 nt, Artificial Sequence
  Synthetic
cauuucaaccugucauauuuag

SEQ ID NO: 317182 - RNA, 23 nt, Artificial Sequence
  Synthetic
acauuucaaccugucauauuuag

SEQ ID NO: 317183 - RNA, 24 nt, Artificial Sequence
  Synthetic
aacauuucaaccugucauauuuag

SEQ ID NO: 317184 - RNA, 18 nt, Artificial Sequence
  Synthetic
uggucaugggauauuuag

SEQ ID NO: 317185 - RNA, 19 nt, Artificial Sequence
  Synthetic
cuggucaugggauauuuag

SEQ ID NO: 317186 - RNA, 20 nt, Artificial Sequence
  Synthetic
ucuggucaugggauauuuag

SEQ ID NO: 317187 - RNA, 21 nt, Artificial Sequence
  Synthetic
uucuggucaugggauauuuag

SEQ ID NO: 317188 - RNA, 22 nt, Artificial Sequence
  Synthetic
cuucuggucaugggauauuuag

SEQ ID NO: 317189 - RNA, 23 nt, Artificial Sequence
  Synthetic
ucuucuggucaugggauauuuag

SEQ ID NO: 317190 - RNA, 24 nt, Artificial Sequence
  Synthetic
cucuucuggucaugggauauuuag

SEQ ID NO: 317191 - RNA, 18 nt, Artificial Sequence
  Synthetic
auguuuugagcuauuuag

SEQ ID NO: 317192 - RNA, 19 nt, Artificial Sequence
  Synthetic
gauguuuugagcuauuuag

SEQ ID NO: 317193 - RNA, 20 nt, Artificial Sequence
  Synthetic
ugauguuuugagcuauuuag

SEQ ID NO: 317194 - RNA, 21 nt, Artificial Sequence
  Synthetic
cugauguuuugagcuauuuag

SEQ ID NO: 317195 - RNA, 22 nt, Artificial Sequence
  Synthetic
acugauguuuugagcuauuuag

SEQ ID NO: 317196 - RNA, 23 nt, Artificial Sequence
  Synthetic
gacugauguuuugagcuauuuag

SEQ ID NO: 317197 - RNA, 24 nt, Artificial Sequence
  Synthetic
agacugauguuuugagcuauuuag

SEQ ID NO: 317198 - RNA, 18 nt, Artificial Sequence
  Synthetic
agcuaaagcaguauuuag

SEQ ID NO: 317199 - RNA, 19 nt, Artificial Sequence
  Synthetic
cagcuaaagcaguauuuag

SEQ ID NO: 317200 - RNA, 20 nt, Artificial Sequence
  Synthetic
acagcuaaagcaguauuuag

SEQ ID NO: 317201 - RNA, 21 nt, Artificial Sequence
  Synthetic
cacagcuaaagcaguauuuag

SEQ ID NO: 317202 - RNA, 22 nt, Artificial Sequence
  Synthetic
acacagcuaaagcaguauuuag

SEQ ID NO: 317203 - RNA, 23 nt, Artificial Sequence
  Synthetic
gacacagcuaaagcaguauuuag

SEQ ID NO: 317204 - RNA, 24 nt, Artificial Sequence
  Synthetic
ggacacagcuaaagcaguauuuag

SEQ ID NO: 317205 - RNA, 18 nt, Artificial Sequence
  Synthetic
aaugugcucaguauuuag

SEQ ID NO: 317206 - RNA, 19 nt, Artificial Sequence
  Synthetic
caaugugcucaguauuuag

SEQ ID NO: 317207 - RNA, 20 nt, Artificial Sequence
  Synthetic
acaaugugcucaguauuuag

SEQ ID NO: 317208 - RNA, 21 nt, Artificial Sequence
  Synthetic
aacaaugugcucaguauuuag

SEQ ID NO: 317209 - RNA, 22 nt, Artificial Sequence
  Synthetic
uaacaaugugcucaguauuuag

SEQ ID NO: 317210 - RNA, 23 nt, Artificial Sequence
  Synthetic
cuaacaaugugcucaguauuuag

SEQ ID NO: 317211 - RNA, 24 nt, Artificial Sequence
  Synthetic
gcuaacaaugugcucaguauuuag

SEQ ID NO: 317212 - RNA, 18 nt, Artificial Sequence
  Synthetic
uauuugaguauuauuuag

SEQ ID NO: 317213 - RNA, 19 nt, Artificial Sequence
  Synthetic
uuauuugaguauuauuuag

SEQ ID NO: 317214 - RNA, 20 nt, Artificial Sequence
  Synthetic
uuuauuugaguauuauuuag

SEQ ID NO: 317215 - RNA, 21 nt, Artificial Sequence
  Synthetic
uuuuauuugaguauuauuuag

SEQ ID NO: 317216 - RNA, 22 nt, Artificial Sequence
  Synthetic
uuuuuauuugaguauuauuuag

SEQ ID NO: 317217 - RNA, 23 nt, Artificial Sequence
  Synthetic
guuuuuauuugaguauuauuuag

SEQ ID NO: 317218 - RNA, 24 nt, Artificial Sequence
  Synthetic
aguuuuuauuugaguauuauuuag

SEQ ID NO: 317219 - RNA, 18 nt, Artificial Sequence
  Synthetic
agugaaaguguuauuuag

SEQ ID NO: 317220 - RNA, 19 nt, Artificial Sequence
  Synthetic
uagugaaaguguuauuuag

SEQ ID NO: 317221 - RNA, 20 nt, Artificial Sequence
  Synthetic
auagugaaaguguuauuuag

SEQ ID NO: 317222 - RNA, 21 nt, Artificial Sequence
  Synthetic
cauagugaaaguguuauuuag

SEQ ID NO: 317223 - RNA, 22 nt, Artificial Sequence
  Synthetic
ccauagugaaaguguuauuuag

SEQ ID NO: 317224 - RNA, 23 nt, Artificial Sequence
  Synthetic
gccauagugaaaguguuauuuag

SEQ ID NO: 317225 - RNA, 24 nt, Artificial Sequence
  Synthetic
ggccauagugaaaguguuauuuag

SEQ ID NO: 317226 - RNA, 18 nt, Artificial Sequence
  Synthetic
uguucagcauuuauuuag

SEQ ID NO: 317227 - RNA, 19 nt, Artificial Sequence
  Synthetic
uuguucagcauuuauuuag

SEQ ID NO: 317228 - RNA, 20 nt, Artificial Sequence
  Synthetic
uuuguucagcauuuauuuag

SEQ ID NO: 317229 - RNA, 21 nt, Artificial Sequence
  Synthetic
auuuguucagcauuuauuuag

SEQ ID NO: 317230 - RNA, 22 nt, Artificial Sequence
  Synthetic
uauuuguucagcauuuauuuag

SEQ ID NO: 317231 - RNA, 23 nt, Artificial Sequence
  Synthetic
auauuuguucagcauuuauuuag

SEQ ID NO: 317232 - RNA, 24 nt, Artificial Sequence
  Synthetic
aauauuuguucagcauuuauuuag

SEQ ID NO: 317233 - RNA, 18 nt, Artificial Sequence
  Synthetic
auuuguuuguuuauuuag

SEQ ID NO: 317234 - RNA, 19 nt, Artificial Sequence
  Synthetic
cauuuguuuguuuauuuag

SEQ ID NO: 317235 - RNA, 20 nt, Artificial Sequence
  Synthetic
ucauuuguuuguuuauuuag

SEQ ID NO: 317236 - RNA, 21 nt, Artificial Sequence
  Synthetic
uucauuuguuuguuuauuuag

SEQ ID NO: 317237 - RNA, 22 nt, Artificial Sequence
  Synthetic
guucauuuguuuguuuauuuag

SEQ ID NO: 317238 - RNA, 23 nt, Artificial Sequence
  Synthetic
uguucauuuguuuguuuauuuag

SEQ ID NO: 317239 - RNA, 24 nt, Artificial Sequence
  Synthetic
uuguucauuuguuuguuuauuuag

SEQ ID NO: 317240 - RNA, 18 nt, Artificial Sequence
  Synthetic
auguuaaucaaacuuuag

SEQ ID NO: 317241 - RNA, 19 nt, Artificial Sequence
  Synthetic
gauguuaaucaaacuuuag

SEQ ID NO: 317242 - RNA, 20 nt, Artificial Sequence
  Synthetic
ugauguuaaucaaacuuuag

SEQ ID NO: 317243 - RNA, 21 nt, Artificial Sequence
  Synthetic
cugauguuaaucaaacuuuag

SEQ ID NO: 317244 - RNA, 22 nt, Artificial Sequence
  Synthetic
acugauguuaaucaaacuuuag

SEQ ID NO: 317245 - RNA, 23 nt, Artificial Sequence
  Synthetic
uacugauguuaaucaaacuuuag

SEQ ID NO: 317246 - RNA, 24 nt, Artificial Sequence
  Synthetic
auacugauguuaaucaaacuuuag

SEQ ID NO: 317247 - RNA, 18 nt, Artificial Sequence
  Synthetic
uaaauuugacaacuuuag

SEQ ID NO: 317248 - RNA, 19 nt, Artificial Sequence
  Synthetic
guaaauuugacaacuuuag

SEQ ID NO: 317249 - RNA, 20 nt, Artificial Sequence
  Synthetic
uguaaauuugacaacuuuag

SEQ ID NO: 317250 - RNA, 21 nt, Artificial Sequence
  Synthetic
guguaaauuugacaacuuuag

SEQ ID NO: 317251 - RNA, 22 nt, Artificial Sequence
  Synthetic
aguguaaauuugacaacuuuag

SEQ ID NO: 317252 - RNA, 23 nt, Artificial Sequence
  Synthetic
uaguguaaauuugacaacuuuag

SEQ ID NO: 317253 - RNA, 24 nt, Artificial Sequence
  Synthetic
auaguguaaauuugacaacuuuag

SEQ ID NO: 317254 - RNA, 18 nt, Artificial Sequence
  Synthetic
agcggaaacggacuuuag

SEQ ID NO: 317255 - RNA, 19 nt, Artificial Sequence
  Synthetic
aagcggaaacggacuuuag

SEQ ID NO: 317256 - RNA, 20 nt, Artificial Sequence
  Synthetic
gaagcggaaacggacuuuag

SEQ ID NO: 317257 - RNA, 21 nt, Artificial Sequence
  Synthetic
agaagcggaaacggacuuuag

SEQ ID NO: 317258 - RNA, 22 nt, Artificial Sequence
  Synthetic
uagaagcggaaacggacuuuag

SEQ ID NO: 317259 - RNA, 23 nt, Artificial Sequence
  Synthetic
auagaagcggaaacggacuuuag

SEQ ID NO: 317260 - RNA, 24 nt, Artificial Sequence
  Synthetic
gauagaagcggaaacggacuuuag

SEQ ID NO: 317261 - RNA, 18 nt, Artificial Sequence
  Synthetic
aaaacagacauacuuuag

SEQ ID NO: 317262 - RNA, 19 nt, Artificial Sequence
  Synthetic
aaaaacagacauacuuuag

SEQ ID NO: 317263 - RNA, 20 nt, Artificial Sequence
  Synthetic
uaaaaacagacauacuuuag

SEQ ID NO: 317264 - RNA, 21 nt, Artificial Sequence
  Synthetic
auaaaaacagacauacuuuag

SEQ ID NO: 317265 - RNA, 22 nt, Artificial Sequence
  Synthetic
gauaaaaacagacauacuuuag

SEQ ID NO: 317266 - RNA, 23 nt, Artificial Sequence
  Synthetic
ggauaaaaacagacauacuuuag

SEQ ID NO: 317267 - RNA, 24 nt, Artificial Sequence
  Synthetic
uggauaaaaacagacauacuuuag

SEQ ID NO: 317268 - RNA, 18 nt, Artificial Sequence
  Synthetic
ccuucacuacuccuuuag

SEQ ID NO: 317269 - RNA, 19 nt, Artificial Sequence
  Synthetic
uccuucacuacuccuuuag

SEQ ID NO: 317270 - RNA, 20 nt, Artificial Sequence
  Synthetic
guccuucacuacuccuuuag

SEQ ID NO: 317271 - RNA, 21 nt, Artificial Sequence
  Synthetic
aguccuucacuacuccuuuag

SEQ ID NO: 317272 - RNA, 22 nt, Artificial Sequence
  Synthetic
caguccuucacuacuccuuuag

SEQ ID NO: 317273 - RNA, 23 nt, Artificial Sequence
  Synthetic
gcaguccuucacuacuccuuuag

SEQ ID NO: 317274 - RNA, 24 nt, Artificial Sequence
  Synthetic
agcaguccuucacuacuccuuuag

SEQ ID NO: 317275 - RNA, 18 nt, Artificial Sequence
  Synthetic
caggcaauccuccuuuag

SEQ ID NO: 317276 - RNA, 19 nt, Artificial Sequence
  Synthetic
acaggcaauccuccuuuag

SEQ ID NO: 317277 - RNA, 20 nt, Artificial Sequence
  Synthetic
aacaggcaauccuccuuuag

SEQ ID NO: 317278 - RNA, 21 nt, Artificial Sequence
  Synthetic
aaacaggcaauccuccuuuag

SEQ ID NO: 317279 - RNA, 22 nt, Artificial Sequence
  Synthetic
aaaacaggcaauccuccuuuag

SEQ ID NO: 317280 - RNA, 23 nt, Artificial Sequence
  Synthetic
aaaaacaggcaauccuccuuuag

SEQ ID NO: 317281 - RNA, 24 nt, Artificial Sequence
  Synthetic
caaaaacaggcaauccuccuuuag

SEQ ID NO: 317282 - RNA, 18 nt, Artificial Sequence
  Synthetic
caucucauuuuccuuuag

SEQ ID NO: 317283 - RNA, 19 nt, Artificial Sequence
  Synthetic
ucaucucauuuuccuuuag

SEQ ID NO: 317284 - RNA, 20 nt, Artificial Sequence
  Synthetic
uucaucucauuuuccuuuag

SEQ ID NO: 317285 - RNA, 21 nt, Artificial Sequence
  Synthetic
uuucaucucauuuuccuuuag

SEQ ID NO: 317286 - RNA, 22 nt, Artificial Sequence
  Synthetic
uuuucaucucauuuuccuuuag

SEQ ID NO: 317287 - RNA, 23 nt, Artificial Sequence
  Synthetic
uuuuucaucucauuuuccuuuag

SEQ ID NO: 317288 - RNA, 24 nt, Artificial Sequence
  Synthetic
cuuuuucaucucauuuuccuuuag

SEQ ID NO: 317289 - RNA, 18 nt, Artificial Sequence
  Synthetic
uucacucuugagcuuuag

SEQ ID NO: 317290 - RNA, 19 nt, Artificial Sequence
  Synthetic
uuucacucuugagcuuuag

SEQ ID NO: 317291 - RNA, 20 nt, Artificial Sequence
  Synthetic
cuuucacucuugagcuuuag

SEQ ID NO: 317292 - RNA, 21 nt, Artificial Sequence
  Synthetic
ccuuucacucuugagcuuuag

SEQ ID NO: 317293 - RNA, 22 nt, Artificial Sequence
  Synthetic
uccuuucacucuugagcuuuag

SEQ ID NO: 317294 - RNA, 23 nt, Artificial Sequence
  Synthetic
uuccuuucacucuugagcuuuag

SEQ ID NO: 317295 - RNA, 24 nt, Artificial Sequence
  Synthetic
uuuccuuucacucuugagcuuuag

SEQ ID NO: 317296 - RNA, 18 nt, Artificial Sequence
  Synthetic
acagacauuacgcuuuag

SEQ ID NO: 317297 - RNA, 19 nt, Artificial Sequence
  Synthetic
aacagacauuacgcuuuag

SEQ ID NO: 317298 - RNA, 20 nt, Artificial Sequence
  Synthetic
aaacagacauuacgcuuuag

SEQ ID NO: 317299 - RNA, 21 nt, Artificial Sequence
  Synthetic
aaaacagacauuacgcuuuag

SEQ ID NO: 317300 - RNA, 22 nt, Artificial Sequence
  Synthetic
uaaaacagacauuacgcuuuag

SEQ ID NO: 317301 - RNA, 23 nt, Artificial Sequence
  Synthetic
guaaaacagacauuacgcuuuag

SEQ ID NO: 317302 - RNA, 24 nt, Artificial Sequence
  Synthetic
gguaaaacagacauuacgcuuuag

SEQ ID NO: 317303 - RNA, 18 nt, Artificial Sequence
  Synthetic
uagauaguucaucuuuag

SEQ ID NO: 317304 - RNA, 19 nt, Artificial Sequence
  Synthetic
auagauaguucaucuuuag

SEQ ID NO: 317305 - RNA, 20 nt, Artificial Sequence
  Synthetic
gauagauaguucaucuuuag

SEQ ID NO: 317306 - RNA, 21 nt, Artificial Sequence
  Synthetic
ugauagauaguucaucuuuag

SEQ ID NO: 317307 - RNA, 22 nt, Artificial Sequence
  Synthetic
augauagauaguucaucuuuag

SEQ ID NO: 317308 - RNA, 23 nt, Artificial Sequence
  Synthetic
aaugauagauaguucaucuuuag

SEQ ID NO: 317309 - RNA, 24 nt, Artificial Sequence
  Synthetic
aaaugauagauaguucaucuuuag

SEQ ID NO: 317310 - RNA, 18 nt, Artificial Sequence
  Synthetic
uaauuuuuguaucuuuag

SEQ ID NO: 317311 - RNA, 19 nt, Artificial Sequence
  Synthetic
auaauuuuuguaucuuuag

SEQ ID NO: 317312 - RNA, 20 nt, Artificial Sequence
  Synthetic
aauaauuuuuguaucuuuag

SEQ ID NO: 317313 - RNA, 21 nt, Artificial Sequence
  Synthetic
gaauaauuuuuguaucuuuag

SEQ ID NO: 317314 - RNA, 22 nt, Artificial Sequence
  Synthetic
cgaauaauuuuuguaucuuuag

SEQ ID NO: 317315 - RNA, 23 nt, Artificial Sequence
  Synthetic
ccgaauaauuuuuguaucuuuag

SEQ ID NO: 317316 - RNA, 24 nt, Artificial Sequence
  Synthetic
cccgaauaauuuuuguaucuuuag

SEQ ID NO: 317317 - RNA, 19 nt, Artificial Sequence
  Synthetic
cuaauuuuuguaucuuuag

SEQ ID NO: 317318 - RNA, 20 nt, Artificial Sequence
  Synthetic
gcuaauuuuuguaucuuuag

SEQ ID NO: 317319 - RNA, 21 nt, Artificial Sequence
  Synthetic
ggcuaauuuuuguaucuuuag

SEQ ID NO: 317320 - RNA, 22 nt, Artificial Sequence
  Synthetic
uggcuaauuuuuguaucuuuag

SEQ ID NO: 317321 - RNA, 23 nt, Artificial Sequence
  Synthetic
cuggcuaauuuuuguaucuuuag

SEQ ID NO: 317322 - RNA, 24 nt, Artificial Sequence
  Synthetic
ccuggcuaauuuuuguaucuuuag

SEQ ID NO: 317323 - RNA, 19 nt, Artificial Sequence
  Synthetic
aaauuuuuuguaucuuuag

SEQ ID NO: 317324 - RNA, 20 nt, Artificial Sequence
  Synthetic
caaauuuuuuguaucuuuag

SEQ ID NO: 317325 - RNA, 21 nt, Artificial Sequence
  Synthetic
gcaaauuuuuuguaucuuuag

SEQ ID NO: 317326 - RNA, 22 nt, Artificial Sequence
  Synthetic
ggcaaauuuuuuguaucuuuag

SEQ ID NO: 317327 - RNA, 23 nt, Artificial Sequence
  Synthetic
uggcaaauuuuuuguaucuuuag

SEQ ID NO: 317328 - RNA, 24 nt, Artificial Sequence
  Synthetic
cuggcaaauuuuuuguaucuuuag

SEQ ID NO: 317329 - RNA, 18 nt, Artificial Sequence
  Synthetic
aguauagaaacucuuuag

SEQ ID NO: 317330 - RNA, 19 nt, Artificial Sequence
  Synthetic
aaguauagaaacucuuuag

SEQ ID NO: 317331 - RNA, 20 nt, Artificial Sequence
  Synthetic
aaaguauagaaacucuuuag

SEQ ID NO: 317332 - RNA, 21 nt, Artificial Sequence
  Synthetic
uaaaguauagaaacucuuuag

SEQ ID NO: 317333 - RNA, 22 nt, Artificial Sequence
  Synthetic
auaaaguauagaaacucuuuag

SEQ ID NO: 317334 - RNA, 23 nt, Artificial Sequence
  Synthetic
aauaaaguauagaaacucuuuag

SEQ ID NO: 317335 - RNA, 24 nt, Artificial Sequence
  Synthetic
gaauaaaguauagaaacucuuuag

SEQ ID NO: 317336 - RNA, 18 nt, Artificial Sequence
  Synthetic
uucagaaaugcucuuuag

SEQ ID NO: 317337 - RNA, 19 nt, Artificial Sequence
  Synthetic
auucagaaaugcucuuuag

SEQ ID NO: 317338 - RNA, 20 nt, Artificial Sequence
  Synthetic
cauucagaaaugcucuuuag

SEQ ID NO: 317339 - RNA, 21 nt, Artificial Sequence
  Synthetic
ucauucagaaaugcucuuuag

SEQ ID NO: 317340 - RNA, 22 nt, Artificial Sequence
  Synthetic
aucauucagaaaugcucuuuag

SEQ ID NO: 317341 - RNA, 23 nt, Artificial Sequence
  Synthetic
caucauucagaaaugcucuuuag

SEQ ID NO: 317342 - RNA, 24 nt, Artificial Sequence
  Synthetic
ccaucauucagaaaugcucuuuag

SEQ ID NO: 317343 - RNA, 18 nt, Artificial Sequence
  Synthetic
uaaguaacuuuucuuuag

SEQ ID NO: 317344 - RNA, 19 nt, Artificial Sequence
  Synthetic
uuaaguaacuuuucuuuag

SEQ ID NO: 317345 - RNA, 20 nt, Artificial Sequence
  Synthetic
uuuaaguaacuuuucuuuag

SEQ ID NO: 317346 - RNA, 21 nt, Artificial Sequence
  Synthetic
auuuaaguaacuuuucuuuag

SEQ ID NO: 317347 - RNA, 22 nt, Artificial Sequence
  Synthetic
uauuuaaguaacuuuucuuuag

SEQ ID NO: 317348 - RNA, 23 nt, Artificial Sequence
  Synthetic
uuauuuaaguaacuuuucuuuag

SEQ ID NO: 317349 - RNA, 24 nt, Artificial Sequence
  Synthetic
auuauuuaaguaacuuuucuuuag

SEQ ID NO: 317350 - RNA, 18 nt, Artificial Sequence
  Synthetic
agauaauggaaaguuuag

SEQ ID NO: 317351 - RNA, 19 nt, Artificial Sequence
  Synthetic
cagauaauggaaaguuuag

SEQ ID NO: 317352 - RNA, 20 nt, Artificial Sequence
  Synthetic
ccagauaauggaaaguuuag

SEQ ID NO: 317353 - RNA, 21 nt, Artificial Sequence
  Synthetic
uccagauaauggaaaguuuag

SEQ ID NO: 317354 - RNA, 22 nt, Artificial Sequence
  Synthetic
auccagauaauggaaaguuuag

SEQ ID NO: 317355 - RNA, 23 nt, Artificial Sequence
  Synthetic
uauccagauaauggaaaguuuag

SEQ ID NO: 317356 - RNA, 24 nt, Artificial Sequence
  Synthetic
uuauccagauaauggaaaguuuag

SEQ ID NO: 317357 - RNA, 18 nt, Artificial Sequence
  Synthetic
agaucuagggaaguuuag

SEQ ID NO: 317358 - RNA, 19 nt, Artificial Sequence
  Synthetic
aagaucuagggaaguuuag

SEQ ID NO: 317359 - RNA, 20 nt, Artificial Sequence
  Synthetic
aaagaucuagggaaguuuag

SEQ ID NO: 317360 - RNA, 21 nt, Artificial Sequence
  Synthetic
gaaagaucuagggaaguuuag

SEQ ID NO: 317361 - RNA, 22 nt, Artificial Sequence
  Synthetic
ugaaagaucuagggaaguuuag

SEQ ID NO: 317362 - RNA, 23 nt, Artificial Sequence
  Synthetic
augaaagaucuagggaaguuuag

SEQ ID NO: 317363 - RNA, 24 nt, Artificial Sequence
  Synthetic
aaugaaagaucuagggaaguuuag

SEQ ID NO: 317364 - RNA, 18 nt, Artificial Sequence
  Synthetic
uuauaauuaacaguuuag

SEQ ID NO: 317365 - RNA, 19 nt, Artificial Sequence
  Synthetic
auuauaauuaacaguuuag

SEQ ID NO: 317366 - RNA, 20 nt, Artificial Sequence
  Synthetic
cauuauaauuaacaguuuag

SEQ ID NO: 317367 - RNA, 21 nt, Artificial Sequence
  Synthetic
acauuauaauuaacaguuuag

SEQ ID NO: 317368 - RNA, 22 nt, Artificial Sequence
  Synthetic
cacauuauaauuaacaguuuag

SEQ ID NO: 317369 - RNA, 23 nt, Artificial Sequence
  Synthetic
acacauuauaauuaacaguuuag

SEQ ID NO: 317370 - RNA, 24 nt, Artificial Sequence
  Synthetic
aacacauuauaauuaacaguuuag

SEQ ID NO: 317371 - RNA, 18 nt, Artificial Sequence
  Synthetic
cuuugaucuguaguuuag

SEQ ID NO: 317372 - RNA, 19 nt, Artificial Sequence
  Synthetic
ucuuugaucuguaguuuag

SEQ ID NO: 317373 - RNA, 20 nt, Artificial Sequence
  Synthetic
uucuuugaucuguaguuuag

SEQ ID NO: 317374 - RNA, 21 nt, Artificial Sequence
  Synthetic
cuucuuugaucuguaguuuag

SEQ ID NO: 317375 - RNA, 22 nt, Artificial Sequence
  Synthetic
ucuucuuugaucuguaguuuag

SEQ ID NO: 317376 - RNA, 23 nt, Artificial Sequence
  Synthetic
aucuucuuugaucuguaguuuag

SEQ ID NO: 317377 - RNA, 24 nt, Artificial Sequence
  Synthetic
uaucuucuuugaucuguaguuuag

SEQ ID NO: 317378 - RNA, 18 nt, Artificial Sequence
  Synthetic
uucuguaugcagguuuag

SEQ ID NO: 317379 - RNA, 19 nt, Artificial Sequence
  Synthetic
uuucuguaugcagguuuag

SEQ ID NO: 317380 - RNA, 20 nt, Artificial Sequence
  Synthetic
uuuucuguaugcagguuuag

SEQ ID NO: 317381 - RNA, 21 nt, Artificial Sequence
  Synthetic
auuuucuguaugcagguuuag

SEQ ID NO: 317382 - RNA, 22 nt, Artificial Sequence
  Synthetic
uauuuucuguaugcagguuuag

SEQ ID NO: 317383 - RNA, 23 nt, Artificial Sequence
  Synthetic
auauuuucuguaugcagguuuag

SEQ ID NO: 317384 - RNA, 24 nt, Artificial Sequence
  Synthetic
aauauuuucuguaugcagguuuag

SEQ ID NO: 317385 - RNA, 18 nt, Artificial Sequence
  Synthetic
uaagugagagagguuuag

SEQ ID NO: 317386 - RNA, 19 nt, Artificial Sequence
  Synthetic
guaagugagagagguuuag

SEQ ID NO: 317387 - RNA, 20 nt, Artificial Sequence
  Synthetic
aguaagugagagagguuuag

SEQ ID NO: 317388 - RNA, 21 nt, Artificial Sequence
  Synthetic
aaguaagugagagagguuuag

SEQ ID NO: 317389 - RNA, 22 nt, Artificial Sequence
  Synthetic
gaaguaagugagagagguuuag

SEQ ID NO: 317390 - RNA, 23 nt, Artificial Sequence
  Synthetic
ugaaguaagugagagagguuuag

SEQ ID NO: 317391 - RNA, 24 nt, Artificial Sequence
  Synthetic
gugaaguaagugagagagguuuag

SEQ ID NO: 317392 - RNA, 18 nt, Artificial Sequence
  Synthetic
aaggagccugagguuuag

SEQ ID NO: 317393 - RNA, 19 nt, Artificial Sequence
  Synthetic
uaaggagccugagguuuag

SEQ ID NO: 317394 - RNA, 20 nt, Artificial Sequence
  Synthetic
uuaaggagccugagguuuag

SEQ ID NO: 317395 - RNA, 21 nt, Artificial Sequence
  Synthetic
auuaaggagccugagguuuag

SEQ ID NO: 317396 - RNA, 22 nt, Artificial Sequence
  Synthetic
gauuaaggagccugagguuuag

SEQ ID NO: 317397 - RNA, 23 nt, Artificial Sequence
  Synthetic
agauuaaggagccugagguuuag

SEQ ID NO: 317398 - RNA, 24 nt, Artificial Sequence
  Synthetic
aagauuaaggagccugagguuuag

SEQ ID NO: 317399 - RNA, 18 nt, Artificial Sequence
  Synthetic
ugaacucuucugguuuag

SEQ ID NO: 317400 - RNA, 19 nt, Artificial Sequence
  Synthetic
cugaacucuucugguuuag

SEQ ID NO: 317401 - RNA, 20 nt, Artificial Sequence
  Synthetic
gcugaacucuucugguuuag

SEQ ID NO: 317402 - RNA, 21 nt, Artificial Sequence
  Synthetic
agcugaacucuucugguuuag

SEQ ID NO: 317403 - RNA, 22 nt, Artificial Sequence
  Synthetic
gagcugaacucuucugguuuag

SEQ ID NO: 317404 - RNA, 23 nt, Artificial Sequence
  Synthetic
agagcugaacucuucugguuuag

SEQ ID NO: 317405 - RNA, 24 nt, Artificial Sequence
  Synthetic
uagagcugaacucuucugguuuag

SEQ ID NO: 317406 - RNA, 18 nt, Artificial Sequence
  Synthetic
cuugacagugugguuuag

SEQ ID NO: 317407 - RNA, 19 nt, Artificial Sequence
  Synthetic
ucuugacagugugguuuag

SEQ ID NO: 317408 - RNA, 20 nt, Artificial Sequence
  Synthetic
uucuugacagugugguuuag

SEQ ID NO: 317409 - RNA, 21 nt, Artificial Sequence
  Synthetic
uuucuugacagugugguuuag

SEQ ID NO: 317410 - RNA, 22 nt, Artificial Sequence
  Synthetic
auuucuugacagugugguuuag

SEQ ID NO: 317411 - RNA, 23 nt, Artificial Sequence
  Synthetic
cauuucuugacagugugguuuag

SEQ ID NO: 317412 - RNA, 24 nt, Artificial Sequence
  Synthetic
ucauuucuugacagugugguuuag

SEQ ID NO: 317413 - RNA, 18 nt, Artificial Sequence
  Synthetic
aaaauuagaaauguuuag

SEQ ID NO: 317414 - RNA, 19 nt, Artificial Sequence
  Synthetic
gaaaauuagaaauguuuag

SEQ ID NO: 317415 - RNA, 20 nt, Artificial Sequence
  Synthetic
ggaaaauuagaaauguuuag

SEQ ID NO: 317416 - RNA, 21 nt, Artificial Sequence
  Synthetic
gggaaaauuagaaauguuuag

SEQ ID NO: 317417 - RNA, 22 nt, Artificial Sequence
  Synthetic
ugggaaaauuagaaauguuuag

SEQ ID NO: 317418 - RNA, 23 nt, Artificial Sequence
  Synthetic
augggaaaauuagaaauguuuag

SEQ ID NO: 317419 - RNA, 24 nt, Artificial Sequence
  Synthetic
aaugggaaaauuagaaauguuuag

SEQ ID NO: 317420 - RNA, 18 nt, Artificial Sequence
  Synthetic
uuggagcugaauguuuag

SEQ ID NO: 317421 - RNA, 19 nt, Artificial Sequence
  Synthetic
uuuggagcugaauguuuag

SEQ ID NO: 317422 - RNA, 20 nt, Artificial Sequence
  Synthetic
uuuuggagcugaauguuuag

SEQ ID NO: 317423 - RNA, 21 nt, Artificial Sequence
  Synthetic
uuuuuggagcugaauguuuag

SEQ ID NO: 317424 - RNA, 22 nt, Artificial Sequence
  Synthetic
cuuuuuggagcugaauguuuag

SEQ ID NO: 317425 - RNA, 23 nt, Artificial Sequence
  Synthetic
ccuuuuuggagcugaauguuuag

SEQ ID NO: 317426 - RNA, 24 nt, Artificial Sequence
  Synthetic
gccuuuuuggagcugaauguuuag

SEQ ID NO: 317427 - RNA, 18 nt, Artificial Sequence
  Synthetic
aaggacugaaguguuuag

SEQ ID NO: 317428 - RNA, 19 nt, Artificial Sequence
  Synthetic
aaaggacugaaguguuuag

SEQ ID NO: 317429 - RNA, 20 nt, Artificial Sequence
  Synthetic
aaaaggacugaaguguuuag

SEQ ID NO: 317430 - RNA, 21 nt, Artificial Sequence
  Synthetic
caaaaggacugaaguguuuag

SEQ ID NO: 317431 - RNA, 22 nt, Artificial Sequence
  Synthetic
ccaaaaggacugaaguguuuag

SEQ ID NO: 317432 - RNA, 23 nt, Artificial Sequence
  Synthetic
cccaaaaggacugaaguguuuag

SEQ ID NO: 317433 - RNA, 24 nt, Artificial Sequence
  Synthetic
acccaaaaggacugaaguguuuag

SEQ ID NO: 317434 - RNA, 18 nt, Artificial Sequence
  Synthetic
aguagugguauuguuuag

SEQ ID NO: 317435 - RNA, 19 nt, Artificial Sequence
  Synthetic
caguagugguauuguuuag

SEQ ID NO: 317436 - RNA, 20 nt, Artificial Sequence
  Synthetic
acaguagugguauuguuuag

SEQ ID NO: 317437 - RNA, 21 nt, Artificial Sequence
  Synthetic
aacaguagugguauuguuuag

SEQ ID NO: 317438 - RNA, 22 nt, Artificial Sequence
  Synthetic
uaacaguagugguauuguuuag

SEQ ID NO: 317439 - RNA, 23 nt, Artificial Sequence
  Synthetic
uuaacaguagugguauuguuuag

SEQ ID NO: 317440 - RNA, 24 nt, Artificial Sequence
  Synthetic
auuaacaguagugguauuguuuag

SEQ ID NO: 317441 - RNA, 18 nt, Artificial Sequence
  Synthetic
cuuuacuaccuuguuuag

SEQ ID NO: 317442 - RNA, 19 nt, Artificial Sequence
  Synthetic
ucuuuacuaccuuguuuag

SEQ ID NO: 317443 - RNA, 20 nt, Artificial Sequence
  Synthetic
cucuuuacuaccuuguuuag

SEQ ID NO: 317444 - RNA, 21 nt, Artificial Sequence
  Synthetic
acucuuuacuaccuuguuuag

SEQ ID NO: 317445 - RNA, 22 nt, Artificial Sequence
  Synthetic
cacucuuuacuaccuuguuuag

SEQ ID NO: 317446 - RNA, 23 nt, Artificial Sequence
  Synthetic
ucacucuuuacuaccuuguuuag

SEQ ID NO: 317447 - RNA, 24 nt, Artificial Sequence
  Synthetic
cucacucuuuacuaccuuguuuag

SEQ ID NO: 317448 - RNA, 18 nt, Artificial Sequence
  Synthetic
ugauuuuuguaauuuuag

SEQ ID NO: 317449 - RNA, 19 nt, Artificial Sequence
  Synthetic
cugauuuuuguaauuuuag

SEQ ID NO: 317450 - RNA, 20 nt, Artificial Sequence
  Synthetic
gcugauuuuuguaauuuuag

SEQ ID NO: 317451 - RNA, 21 nt, Artificial Sequence
  Synthetic
agcugauuuuuguaauuuuag

SEQ ID NO: 317452 - RNA, 22 nt, Artificial Sequence
  Synthetic
cagcugauuuuuguaauuuuag

SEQ ID NO: 317453 - RNA, 23 nt, Artificial Sequence
  Synthetic
ccagcugauuuuuguaauuuuag

SEQ ID NO: 317454 - RNA, 24 nt, Artificial Sequence
  Synthetic
cccagcugauuuuuguaauuuuag

SEQ ID NO: 317455 - RNA, 18 nt, Artificial Sequence
  Synthetic
guggaauuuacauuuuag

SEQ ID NO: 317456 - RNA, 19 nt, Artificial Sequence
  Synthetic
uguggaauuuacauuuuag

SEQ ID NO: 317457 - RNA, 20 nt, Artificial Sequence
  Synthetic
uuguggaauuuacauuuuag

SEQ ID NO: 317458 - RNA, 21 nt, Artificial Sequence
  Synthetic
guuguggaauuuacauuuuag

SEQ ID NO: 317459 - RNA, 22 nt, Artificial Sequence
  Synthetic
uguuguggaauuuacauuuuag

SEQ ID NO: 317460 - RNA, 23 nt, Artificial Sequence
  Synthetic
uuguuguggaauuuacauuuuag

SEQ ID NO: 317461 - RNA, 24 nt, Artificial Sequence
  Synthetic
uuuguuguggaauuuacauuuuag

SEQ ID NO: 317462 - RNA, 18 nt, Artificial Sequence
  Synthetic
agcagguuaagauuuuag

SEQ ID NO: 317463 - RNA, 19 nt, Artificial Sequence
  Synthetic
uagcagguuaagauuuuag

SEQ ID NO: 317464 - RNA, 20 nt, Artificial Sequence
  Synthetic
uuagcagguuaagauuuuag

SEQ ID NO: 317465 - RNA, 21 nt, Artificial Sequence
  Synthetic
guuagcagguuaagauuuuag

SEQ ID NO: 317466 - RNA, 22 nt, Artificial Sequence
  Synthetic
aguuagcagguuaagauuuuag

SEQ ID NO: 317467 - RNA, 23 nt, Artificial Sequence
  Synthetic
gaguuagcagguuaagauuuuag

SEQ ID NO: 317468 - RNA, 24 nt, Artificial Sequence
  Synthetic
ugaguuagcagguuaagauuuuag

SEQ ID NO: 317469 - RNA, 18 nt, Artificial Sequence
  Synthetic
ugauaggguauauuuuag

SEQ ID NO: 317470 - RNA, 19 nt, Artificial Sequence
  Synthetic
uugauaggguauauuuuag

SEQ ID NO: 317471 - RNA, 20 nt, Artificial Sequence
  Synthetic
cuugauaggguauauuuuag

SEQ ID NO: 317472 - RNA, 21 nt, Artificial Sequence
  Synthetic
gcuugauaggguauauuuuag

SEQ ID NO: 317473 - RNA, 22 nt, Artificial Sequence
  Synthetic
ugcuugauaggguauauuuuag

SEQ ID NO: 317474 - RNA, 23 nt, Artificial Sequence
  Synthetic
augcuugauaggguauauuuuag

SEQ ID NO: 317475 - RNA, 24 nt, Artificial Sequence
  Synthetic
aaugcuugauaggguauauuuuag

SEQ ID NO: 317476 - RNA, 18 nt, Artificial Sequence
  Synthetic
gagaacaagcuauuuuag

SEQ ID NO: 317477 - RNA, 19 nt, Artificial Sequence
  Synthetic
agagaacaagcuauuuuag

SEQ ID NO: 317478 - RNA, 20 nt, Artificial Sequence
  Synthetic
cagagaacaagcuauuuuag

SEQ ID NO: 317479 - RNA, 21 nt, Artificial Sequence
  Synthetic
acagagaacaagcuauuuuag

SEQ ID NO: 317480 - RNA, 22 nt, Artificial Sequence
  Synthetic
gacagagaacaagcuauuuuag

SEQ ID NO: 317481 - RNA, 23 nt, Artificial Sequence
  Synthetic
ugacagagaacaagcuauuuuag

SEQ ID NO: 317482 - RNA, 24 nt, Artificial Sequence
  Synthetic
uugacagagaacaagcuauuuuag

SEQ ID NO: 317483 - RNA, 18 nt, Artificial Sequence
  Synthetic
gaugguugcuuauuuuag

SEQ ID NO: 317484 - RNA, 19 nt, Artificial Sequence
  Synthetic
agaugguugcuuauuuuag

SEQ ID NO: 317485 - RNA, 20 nt, Artificial Sequence
  Synthetic
uagaugguugcuuauuuuag

SEQ ID NO: 317486 - RNA, 21 nt, Artificial Sequence
  Synthetic
uuagaugguugcuuauuuuag

SEQ ID NO: 317487 - RNA, 22 nt, Artificial Sequence
  Synthetic
auuagaugguugcuuauuuuag

SEQ ID NO: 317488 - RNA, 23 nt, Artificial Sequence
  Synthetic
uauuagaugguugcuuauuuuag

SEQ ID NO: 317489 - RNA, 24 nt, Artificial Sequence
  Synthetic
cuauuagaugguugcuuauuuuag

SEQ ID NO: 317490 - RNA, 18 nt, Artificial Sequence
  Synthetic
auaauuagguuauuuuag

SEQ ID NO: 317491 - RNA, 19 nt, Artificial Sequence
  Synthetic
aauaauuagguuauuuuag

SEQ ID NO: 317492 - RNA, 20 nt, Artificial Sequence
  Synthetic
aaauaauuagguuauuuuag

SEQ ID NO: 317493 - RNA, 21 nt, Artificial Sequence
  Synthetic
uaaauaauuagguuauuuuag

SEQ ID NO: 317494 - RNA, 22 nt, Artificial Sequence
  Synthetic
auaaauaauuagguuauuuuag

SEQ ID NO: 317495 - RNA, 23 nt, Artificial Sequence
  Synthetic
aauaaauaauuagguuauuuuag

SEQ ID NO: 317496 - RNA, 24 nt, Artificial Sequence
  Synthetic
aaauaaauaauuagguuauuuuag

SEQ ID NO: 317497 - RNA, 18 nt, Artificial Sequence
  Synthetic
uuccuuaauaacuuuuag

SEQ ID NO: 317498 - RNA, 19 nt, Artificial Sequence
  Synthetic
cuuccuuaauaacuuuuag

SEQ ID NO: 317499 - RNA, 20 nt, Artificial Sequence
  Synthetic
ucuuccuuaauaacuuuuag

SEQ ID NO: 317500 - RNA, 21 nt, Artificial Sequence
  Synthetic
cucuuccuuaauaacuuuuag

SEQ ID NO: 317501 - RNA, 22 nt, Artificial Sequence
  Synthetic
acucuuccuuaauaacuuuuag

SEQ ID NO: 317502 - RNA, 23 nt, Artificial Sequence
  Synthetic
gacucuuccuuaauaacuuuuag

SEQ ID NO: 317503 - RNA, 24 nt, Artificial Sequence
  Synthetic
agacucuuccuuaauaacuuuuag

SEQ ID NO: 317504 - RNA, 18 nt, Artificial Sequence
  Synthetic
aaauaccguaacuuuuag

SEQ ID NO: 317505 - RNA, 19 nt, Artificial Sequence
  Synthetic
aaaauaccguaacuuuuag

SEQ ID NO: 317506 - RNA, 20 nt, Artificial Sequence
  Synthetic
caaaauaccguaacuuuuag

SEQ ID NO: 317507 - RNA, 21 nt, Artificial Sequence
  Synthetic
acaaaauaccguaacuuuuag

SEQ ID NO: 317508 - RNA, 22 nt, Artificial Sequence
  Synthetic
aacaaaauaccguaacuuuuag

SEQ ID NO: 317509 - RNA, 23 nt, Artificial Sequence
  Synthetic
aaacaaaauaccguaacuuuuag

SEQ ID NO: 317510 - RNA, 24 nt, Artificial Sequence
  Synthetic
uaaacaaaauaccguaacuuuuag

SEQ ID NO: 317511 - RNA, 18 nt, Artificial Sequence
  Synthetic
cuaauuuuguacuuuuag

SEQ ID NO: 317512 - RNA, 19 nt, Artificial Sequence
  Synthetic
gcuaauuuuguacuuuuag

SEQ ID NO: 317513 - RNA, 20 nt, Artificial Sequence
  Synthetic
ggcuaauuuuguacuuuuag

SEQ ID NO: 317514 - RNA, 21 nt, Artificial Sequence
  Synthetic
uggcuaauuuuguacuuuuag

SEQ ID NO: 317515 - RNA, 22 nt, Artificial Sequence
  Synthetic
cuggcuaauuuuguacuuuuag

SEQ ID NO: 317516 - RNA, 23 nt, Artificial Sequence
  Synthetic
ccuggcuaauuuuguacuuuuag

SEQ ID NO: 317517 - RNA, 24 nt, Artificial Sequence
  Synthetic
gccuggcuaauuuuguacuuuuag

SEQ ID NO: 317518 - RNA, 18 nt, Artificial Sequence
  Synthetic
uuaaacaaauccuuuuag

SEQ ID NO: 317519 - RNA, 19 nt, Artificial Sequence
  Synthetic
uuuaaacaaauccuuuuag

SEQ ID NO: 317520 - RNA, 20 nt, Artificial Sequence
  Synthetic
uuuuaaacaaauccuuuuag

SEQ ID NO: 317521 - RNA, 21 nt, Artificial Sequence
  Synthetic
auuuuaaacaaauccuuuuag

SEQ ID NO: 317522 - RNA, 22 nt, Artificial Sequence
  Synthetic
uauuuuaaacaaauccuuuuag

SEQ ID NO: 317523 - RNA, 23 nt, Artificial Sequence
  Synthetic
cuauuuuaaacaaauccuuuuag

SEQ ID NO: 317524 - RNA, 24 nt, Artificial Sequence
  Synthetic
acuauuuuaaacaaauccuuuuag

SEQ ID NO: 317525 - RNA, 18 nt, Artificial Sequence
  Synthetic
uaggauguuuucuuuuag

SEQ ID NO: 317526 - RNA, 19 nt, Artificial Sequence
  Synthetic
auaggauguuuucuuuuag

SEQ ID NO: 317527 - RNA, 20 nt, Artificial Sequence
  Synthetic
uauaggauguuuucuuuuag

SEQ ID NO: 317528 - RNA, 21 nt, Artificial Sequence
  Synthetic
uuauaggauguuuucuuuuag

SEQ ID NO: 317529 - RNA, 22 nt, Artificial Sequence
  Synthetic
auuauaggauguuuucuuuuag

SEQ ID NO: 317530 - RNA, 23 nt, Artificial Sequence
  Synthetic
aauuauaggauguuuucuuuuag

SEQ ID NO: 317531 - RNA, 24 nt, Artificial Sequence
  Synthetic
caauuauaggauguuuucuuuuag

SEQ ID NO: 317532 - RNA, 18 nt, Artificial Sequence
  Synthetic
auuuuuggcaaguuuuag

SEQ ID NO: 317533 - RNA, 19 nt, Artificial Sequence
  Synthetic
aauuuuuggcaaguuuuag

SEQ ID NO: 317534 - RNA, 20 nt, Artificial Sequence
  Synthetic
gaauuuuuggcaaguuuuag

SEQ ID NO: 317535 - RNA, 21 nt, Artificial Sequence
  Synthetic
ugaauuuuuggcaaguuuuag

SEQ ID NO: 317536 - RNA, 22 nt, Artificial Sequence
  Synthetic
gugaauuuuuggcaaguuuuag

SEQ ID NO: 317537 - RNA, 23 nt, Artificial Sequence
  Synthetic
ugugaauuuuuggcaaguuuuag

SEQ ID NO: 317538 - RNA, 24 nt, Artificial Sequence
  Synthetic
gugugaauuuuuggcaaguuuuag

SEQ ID NO: 317539 - RNA, 18 nt, Artificial Sequence
  Synthetic
cugucagaauaguuuuag

SEQ ID NO: 317540 - RNA, 19 nt, Artificial Sequence
  Synthetic
ucugucagaauaguuuuag

SEQ ID NO: 317541 - RNA, 20 nt, Artificial Sequence
  Synthetic
uucugucagaauaguuuuag

SEQ ID NO: 317542 - RNA, 21 nt, Artificial Sequence
  Synthetic
cuucugucagaauaguuuuag

SEQ ID NO: 317543 - RNA, 22 nt, Artificial Sequence
  Synthetic
acuucugucagaauaguuuuag

SEQ ID NO: 317544 - RNA, 23 nt, Artificial Sequence
  Synthetic
gacuucugucagaauaguuuuag

SEQ ID NO: 317545 - RNA, 24 nt, Artificial Sequence
  Synthetic
ugacuucugucagaauaguuuuag

SEQ ID NO: 317546 - RNA, 18 nt, Artificial Sequence
  Synthetic
ugauuggaauaguuuuag

SEQ ID NO: 317547 - RNA, 19 nt, Artificial Sequence
  Synthetic
uugauuggaauaguuuuag

SEQ ID NO: 317548 - RNA, 20 nt, Artificial Sequence
  Synthetic
auugauuggaauaguuuuag

SEQ ID NO: 317549 - RNA, 21 nt, Artificial Sequence
  Synthetic
uauugauuggaauaguuuuag

SEQ ID NO: 317550 - RNA, 22 nt, Artificial Sequence
  Synthetic
cuauugauuggaauaguuuuag

SEQ ID NO: 317551 - RNA, 23 nt, Artificial Sequence
  Synthetic
ucuauugauuggaauaguuuuag

SEQ ID NO: 317552 - RNA, 24 nt, Artificial Sequence
  Synthetic
uucuauugauuggaauaguuuuag

SEQ ID NO: 317553 - RNA, 18 nt, Artificial Sequence
  Synthetic
ugcuuggaauaguuuuag

SEQ ID NO: 317554 - RNA, 19 nt, Artificial Sequence
  Synthetic
uugcuuggaauaguuuuag

SEQ ID NO: 317555 - RNA, 20 nt, Artificial Sequence
  Synthetic
auugcuuggaauaguuuuag

SEQ ID NO: 317556 - RNA, 21 nt, Artificial Sequence
  Synthetic
uauugcuuggaauaguuuuag

SEQ ID NO: 317557 - RNA, 22 nt, Artificial Sequence
  Synthetic
guauugcuuggaauaguuuuag

SEQ ID NO: 317558 - RNA, 23 nt, Artificial Sequence
  Synthetic
uguauugcuuggaauaguuuuag

SEQ ID NO: 317559 - RNA, 24 nt, Artificial Sequence
  Synthetic
uuguauugcuuggaauaguuuuag

SEQ ID NO: 317560 - RNA, 18 nt, Artificial Sequence
  Synthetic
gucuauuucuaguuuuag

SEQ ID NO: 317561 - RNA, 19 nt, Artificial Sequence
  Synthetic
agucuauuucuaguuuuag

SEQ ID NO: 317562 - RNA, 20 nt, Artificial Sequence
  Synthetic
cagucuauuucuaguuuuag

SEQ ID NO: 317563 - RNA, 21 nt, Artificial Sequence
  Synthetic
acagucuauuucuaguuuuag

SEQ ID NO: 317564 - RNA, 22 nt, Artificial Sequence
  Synthetic
aacagucuauuucuaguuuuag

SEQ ID NO: 317565 - RNA, 23 nt, Artificial Sequence
  Synthetic
aaacagucuauuucuaguuuuag

SEQ ID NO: 317566 - RNA, 24 nt, Artificial Sequence
  Synthetic
uaaacagucuauuucuaguuuuag

SEQ ID NO: 317567 - RNA, 18 nt, Artificial Sequence
  Synthetic
ucuacucugugguuuuag

SEQ ID NO: 317568 - RNA, 19 nt, Artificial Sequence
  Synthetic
aucuacucugugguuuuag

SEQ ID NO: 317569 - RNA, 20 nt, Artificial Sequence
  Synthetic
caucuacucugugguuuuag

SEQ ID NO: 317570 - RNA, 21 nt, Artificial Sequence
  Synthetic
ccaucuacucugugguuuuag

SEQ ID NO: 317571 - RNA, 22 nt, Artificial Sequence
  Synthetic
uccaucuacucugugguuuuag

SEQ ID NO: 317572 - RNA, 23 nt, Artificial Sequence
  Synthetic
uuccaucuacucugugguuuuag

SEQ ID NO: 317573 - RNA, 24 nt, Artificial Sequence
  Synthetic
cuuccaucuacucugugguuuuag

SEQ ID NO: 317574 - RNA, 18 nt, Artificial Sequence
  Synthetic
uuaauaugauuguuuuag

SEQ ID NO: 317575 - RNA, 19 nt, Artificial Sequence
  Synthetic
auuaauaugauuguuuuag

SEQ ID NO: 317576 - RNA, 20 nt, Artificial Sequence
  Synthetic
cauuaauaugauuguuuuag

SEQ ID NO: 317577 - RNA, 21 nt, Artificial Sequence
  Synthetic
ucauuaauaugauuguuuuag

SEQ ID NO: 317578 - RNA, 22 nt, Artificial Sequence
  Synthetic
aucauuaauaugauuguuuuag

SEQ ID NO: 317579 - RNA, 23 nt, Artificial Sequence
  Synthetic
aaucauuaauaugauuguuuuag

SEQ ID NO: 317580 - RNA, 24 nt, Artificial Sequence
  Synthetic
aaaucauuaauaugauuguuuuag

SEQ ID NO: 317581 - RNA, 18 nt, Artificial Sequence
  Synthetic
aauuuugugcauuuuuag

SEQ ID NO: 317582 - RNA, 19 nt, Artificial Sequence
  Synthetic
uaauuuugugcauuuuuag

SEQ ID NO: 317583 - RNA, 20 nt, Artificial Sequence
  Synthetic
cuaauuuugugcauuuuuag

SEQ ID NO: 317584 - RNA, 21 nt, Artificial Sequence
  Synthetic
gcuaauuuugugcauuuuuag

SEQ ID NO: 317585 - RNA, 22 nt, Artificial Sequence
  Synthetic
ggcuaauuuugugcauuuuuag

SEQ ID NO: 317586 - RNA, 23 nt, Artificial Sequence
  Synthetic
uggcuaauuuugugcauuuuuag

SEQ ID NO: 317587 - RNA, 24 nt, Artificial Sequence
  Synthetic
cuggcuaauuuugugcauuuuuag

SEQ ID NO: 317588 - RNA, 18 nt, Artificial Sequence
  Synthetic
uaaguuuugcauuuuuag

SEQ ID NO: 317589 - RNA, 19 nt, Artificial Sequence
  Synthetic
cuaaguuuugcauuuuuag

SEQ ID NO: 317590 - RNA, 20 nt, Artificial Sequence
  Synthetic
gcuaaguuuugcauuuuuag

SEQ ID NO: 317591 - RNA, 21 nt, Artificial Sequence
  Synthetic
ugcuaaguuuugcauuuuuag

SEQ ID NO: 317592 - RNA, 22 nt, Artificial Sequence
  Synthetic
cugcuaaguuuugcauuuuuag

SEQ ID NO: 317593 - RNA, 23 nt, Artificial Sequence
  Synthetic
ccugcuaaguuuugcauuuuuag

SEQ ID NO: 317594 - RNA, 24 nt, Artificial Sequence
  Synthetic
cccugcuaaguuuugcauuuuuag

SEQ ID NO: 317595 - RNA, 18 nt, Artificial Sequence
  Synthetic
uaauuuuuauauuuuuag

SEQ ID NO: 317596 - RNA, 19 nt, Artificial Sequence
  Synthetic
cuaauuuuuauauuuuuag

SEQ ID NO: 317597 - RNA, 20 nt, Artificial Sequence
  Synthetic
gcuaauuuuuauauuuuuag

SEQ ID NO: 317598 - RNA, 21 nt, Artificial Sequence
  Synthetic
ggcuaauuuuuauauuuuuag

SEQ ID NO: 317599 - RNA, 22 nt, Artificial Sequence
  Synthetic
cggcuaauuuuuauauuuuuag

SEQ ID NO: 317600 - RNA, 23 nt, Artificial Sequence
  Synthetic
ccggcuaauuuuuauauuuuuag

SEQ ID NO: 317601 - RNA, 24 nt, Artificial Sequence
  Synthetic
cccggcuaauuuuuauauuuuuag

SEQ ID NO: 317602 - RNA, 18 nt, Artificial Sequence
  Synthetic
aauuuuguguauuuuuag

SEQ ID NO: 317603 - RNA, 19 nt, Artificial Sequence
  Synthetic
uaauuuuguguauuuuuag

SEQ ID NO: 317604 - RNA, 20 nt, Artificial Sequence
  Synthetic
cuaauuuuguguauuuuuag

SEQ ID NO: 317605 - RNA, 21 nt, Artificial Sequence
  Synthetic
gcuaauuuuguguauuuuuag

SEQ ID NO: 317606 - RNA, 22 nt, Artificial Sequence
  Synthetic
ggcuaauuuuguguauuuuuag

SEQ ID NO: 317607 - RNA, 23 nt, Artificial Sequence
  Synthetic
cggcuaauuuuguguauuuuuag

SEQ ID NO: 317608 - RNA, 24 nt, Artificial Sequence
  Synthetic
ccggcuaauuuuguguauuuuuag

SEQ ID NO: 317609 - RNA, 18 nt, Artificial Sequence
  Synthetic
gaauguuuguauuuuuag

SEQ ID NO: 317610 - RNA, 19 nt, Artificial Sequence
  Synthetic
ugaauguuuguauuuuuag

SEQ ID NO: 317611 - RNA, 20 nt, Artificial Sequence
  Synthetic
gugaauguuuguauuuuuag

SEQ ID NO: 317612 - RNA, 21 nt, Artificial Sequence
  Synthetic
ggugaauguuuguauuuuuag

SEQ ID NO: 317613 - RNA, 22 nt, Artificial Sequence
  Synthetic
uggugaauguuuguauuuuuag

SEQ ID NO: 317614 - RNA, 23 nt, Artificial Sequence
  Synthetic
cuggugaauguuuguauuuuuag

SEQ ID NO: 317615 - RNA, 24 nt, Artificial Sequence
  Synthetic
ccuggugaauguuuguauuuuuag

SEQ ID NO: 317616 - RNA, 18 nt, Artificial Sequence
  Synthetic
uaauguuuguauuuuuag

SEQ ID NO: 317617 - RNA, 19 nt, Artificial Sequence
  Synthetic
cuaauguuuguauuuuuag

SEQ ID NO: 317618 - RNA, 20 nt, Artificial Sequence
  Synthetic
ccuaauguuuguauuuuuag

SEQ ID NO: 317619 - RNA, 21 nt, Artificial Sequence
  Synthetic
accuaauguuuguauuuuuag

SEQ ID NO: 317620 - RNA, 22 nt, Artificial Sequence
  Synthetic
caccuaauguuuguauuuuuag

SEQ ID NO: 317621 - RNA, 23 nt, Artificial Sequence
  Synthetic
ccaccuaauguuuguauuuuuag

SEQ ID NO: 317622 - RNA, 24 nt, Artificial Sequence
  Synthetic
cccaccuaauguuuguauuuuuag

SEQ ID NO: 317623 - RNA, 18 nt, Artificial Sequence
  Synthetic
cuaauuuuguauuuuuag

SEQ ID NO: 317624 - RNA, 19 nt, Artificial Sequence
  Synthetic
gcuaauuuuguauuuuuag

SEQ ID NO: 317625 - RNA, 20 nt, Artificial Sequence
  Synthetic
agcuaauuuuguauuuuuag

SEQ ID NO: 317626 - RNA, 24 nt, Artificial Sequence
  Synthetic
gcccagcuaauuuuguauuuuuag

SEQ ID NO: 317627 - RNA, 20 nt, Artificial Sequence
  Synthetic
ggcuaauuuuguauuuuuag

SEQ ID NO: 317628 - RNA, 24 nt, Artificial Sequence
  Synthetic
gccuggcuaauuuuguauuuuuag

SEQ ID NO: 317629 - RNA, 18 nt, Artificial Sequence
  Synthetic
aauguuuuguauuuuuag

SEQ ID NO: 317630 - RNA, 19 nt, Artificial Sequence
  Synthetic
uaauguuuuguauuuuuag

SEQ ID NO: 317631 - RNA, 20 nt, Artificial Sequence
  Synthetic
cuaauguuuuguauuuuuag

SEQ ID NO: 317632 - RNA, 21 nt, Artificial Sequence
  Synthetic
gcuaauguuuuguauuuuuag

SEQ ID NO: 317633 - RNA, 22 nt, Artificial Sequence
  Synthetic
ggcuaauguuuuguauuuuuag

SEQ ID NO: 317634 - RNA, 23 nt, Artificial Sequence
  Synthetic
uggcuaauguuuuguauuuuuag

SEQ ID NO: 317635 - RNA, 24 nt, Artificial Sequence
  Synthetic
cuggcuaauguuuuguauuuuuag

SEQ ID NO: 317636 - RNA, 18 nt, Artificial Sequence
  Synthetic
uaauuuuuguauuuuuag

SEQ ID NO: 317637 - RNA, 19 nt, Artificial Sequence
  Synthetic
cuaauuuuuguauuuuuag

SEQ ID NO: 317638 - RNA, 20 nt, Artificial Sequence
  Synthetic
acuaauuuuuguauuuuuag

SEQ ID NO: 317639 - RNA, 21 nt, Artificial Sequence
  Synthetic
aacuaauuuuuguauuuuuag

SEQ ID NO: 317640 - RNA, 22 nt, Artificial Sequence
  Synthetic
caacuaauuuuuguauuuuuag

SEQ ID NO: 317641 - RNA, 23 nt, Artificial Sequence
  Synthetic
ccaacuaauuuuuguauuuuuag

SEQ ID NO: 317642 - RNA, 24 nt, Artificial Sequence
  Synthetic
cccaacuaauuuuuguauuuuuag

SEQ ID NO: 317643 - RNA, 20 nt, Artificial Sequence
  Synthetic
gcuaauuuuuguauuuuuag

SEQ ID NO: 317644 - RNA, 24 nt, Artificial Sequence
  Synthetic
cccagcuaauuuuuguauuuuuag

SEQ ID NO: 317645 - RNA, 21 nt, Artificial Sequence
  Synthetic
ugcuaauuuuuguauuuuuag

SEQ ID NO: 317646 - RNA, 22 nt, Artificial Sequence
  Synthetic
cugcuaauuuuuguauuuuuag

SEQ ID NO: 317647 - RNA, 23 nt, Artificial Sequence
  Synthetic
ccugcuaauuuuuguauuuuuag

SEQ ID NO: 317648 - RNA, 24 nt, Artificial Sequence
  Synthetic
cccugcuaauuuuuguauuuuuag

SEQ ID NO: 317649 - RNA, 22 nt, Artificial Sequence
  Synthetic
gugcuaauuuuuguauuuuuag

SEQ ID NO: 317650 - RNA, 23 nt, Artificial Sequence
  Synthetic
ugugcuaauuuuuguauuuuuag

SEQ ID NO: 317651 - RNA, 24 nt, Artificial Sequence
  Synthetic
gugugcuaauuuuuguauuuuuag

SEQ ID NO: 317652 - RNA, 20 nt, Artificial Sequence
  Synthetic
ucuaauuuuuguauuuuuag

SEQ ID NO: 317653 - RNA, 21 nt, Artificial Sequence
  Synthetic
aucuaauuuuuguauuuuuag

SEQ ID NO: 317654 - RNA, 22 nt, Artificial Sequence
  Synthetic
caucuaauuuuuguauuuuuag

SEQ ID NO: 317655 - RNA, 23 nt, Artificial Sequence
  Synthetic
ccaucuaauuuuuguauuuuuag

SEQ ID NO: 317656 - RNA, 24 nt, Artificial Sequence
  Synthetic
cccaucuaauuuuuguauuuuuag

SEQ ID NO: 317657 - RNA, 18 nt, Artificial Sequence
  Synthetic
ugauuuuuguauuuuuag

SEQ ID NO: 317658 - RNA, 19 nt, Artificial Sequence
  Synthetic
cugauuuuuguauuuuuag

SEQ ID NO: 317659 - RNA, 20 nt, Artificial Sequence
  Synthetic
gcugauuuuuguauuuuuag

SEQ ID NO: 317660 - RNA, 21 nt, Artificial Sequence
  Synthetic
agcugauuuuuguauuuuuag

SEQ ID NO: 317661 - RNA, 22 nt, Artificial Sequence
  Synthetic
cagcugauuuuuguauuuuuag

SEQ ID NO: 317662 - RNA, 23 nt, Artificial Sequence
  Synthetic
ccagcugauuuuuguauuuuuag

SEQ ID NO: 317663 - RNA, 24 nt, Artificial Sequence
  Synthetic
cccagcugauuuuuguauuuuuag

SEQ ID NO: 317664 - RNA, 18 nt, Artificial Sequence
  Synthetic
aaguuuuuguauuuuuag

SEQ ID NO: 317665 - RNA, 19 nt, Artificial Sequence
  Synthetic
uaaguuuuuguauuuuuag

SEQ ID NO: 317666 - RNA, 20 nt, Artificial Sequence
  Synthetic
cuaaguuuuuguauuuuuag

SEQ ID NO: 317667 - RNA, 21 nt, Artificial Sequence
  Synthetic
gcuaaguuuuuguauuuuuag

SEQ ID NO: 317668 - RNA, 22 nt, Artificial Sequence
  Synthetic
agcuaaguuuuuguauuuuuag

SEQ ID NO: 317669 - RNA, 23 nt, Artificial Sequence
  Synthetic
cagcuaaguuuuuguauuuuuag

SEQ ID NO: 317670 - RNA, 24 nt, Artificial Sequence
  Synthetic
ccagcuaaguuuuuguauuuuuag

SEQ ID NO: 317671 - RNA, 18 nt, Artificial Sequence
  Synthetic
aauuuuuuguauuuuuag

SEQ ID NO: 317672 - RNA, 19 nt, Artificial Sequence
  Synthetic
uaauuuuuuguauuuuuag

SEQ ID NO: 317673 - RNA, 20 nt, Artificial Sequence
  Synthetic
cuaauuuuuuguauuuuuag

SEQ ID NO: 317674 - RNA, 21 nt, Artificial Sequence
  Synthetic
gcuaauuuuuuguauuuuuag

SEQ ID NO: 317675 - RNA, 22 nt, Artificial Sequence
  Synthetic
ggcuaauuuuuuguauuuuuag

SEQ ID NO: 317676 - RNA, 23 nt, Artificial Sequence
  Synthetic
cggcuaauuuuuuguauuuuuag

SEQ ID NO: 317677 - RNA, 24 nt, Artificial Sequence
  Synthetic
ccggcuaauuuuuuguauuuuuag

SEQ ID NO: 317678 - RNA, 23 nt, Artificial Sequence
  Synthetic
uggcuaauuuuuuguauuuuuag

SEQ ID NO: 317679 - RNA, 24 nt, Artificial Sequence
  Synthetic
cuggcuaauuuuuuguauuuuuag

SEQ ID NO: 317680 - RNA, 21 nt, Artificial Sequence
  Synthetic
cuaauuuuuuuguauuuuuag

SEQ ID NO: 317681 - RNA, 22 nt, Artificial Sequence
  Synthetic
gcuaauuuuuuuguauuuuuag

SEQ ID NO: 317682 - RNA, 23 nt, Artificial Sequence
  Synthetic
agcuaauuuuuuuguauuuuuag

SEQ ID NO: 317683 - RNA, 24 nt, Artificial Sequence
  Synthetic
cagcuaauuuuuuuguauuuuuag

SEQ ID NO: 317684 - RNA, 23 nt, Artificial Sequence
  Synthetic
cgcuaauuuuuuuguauuuuuag

SEQ ID NO: 317685 - RNA, 24 nt, Artificial Sequence
  Synthetic
ccgcuaauuuuuuuguauuuuuag

SEQ ID NO: 317686 - RNA, 18 nt, Artificial Sequence
  Synthetic
uuuuuuuuguauuuuuag

SEQ ID NO: 317687 - RNA, 19 nt, Artificial Sequence
  Synthetic
auuuuuuuuguauuuuuag

SEQ ID NO: 317688 - RNA, 20 nt, Artificial Sequence
  Synthetic
aauuuuuuuuguauuuuuag

SEQ ID NO: 317689 - RNA, 21 nt, Artificial Sequence
  Synthetic
uaauuuuuuuuguauuuuuag

SEQ ID NO: 317690 - RNA, 22 nt, Artificial Sequence
  Synthetic
cuaauuuuuuuuguauuuuuag

SEQ ID NO: 317691 - RNA, 23 nt, Artificial Sequence
  Synthetic
gcuaauuuuuuuuguauuuuuag

SEQ ID NO: 317692 - RNA, 24 nt, Artificial Sequence
  Synthetic
ugcuaauuuuuuuuguauuuuuag

SEQ ID NO: 317693 - RNA, 19 nt, Artificial Sequence
  Synthetic
uuuuuuuuuguauuuuuag

SEQ ID NO: 317694 - RNA, 20 nt, Artificial Sequence
  Synthetic
uuuuuuuuuuguauuuuuag

SEQ ID NO: 317695 - RNA, 21 nt, Artificial Sequence
  Synthetic
uuuuuuuuuuuguauuuuuag

SEQ ID NO: 317696 - RNA, 22 nt, Artificial Sequence
  Synthetic
uuuuuuuuuuuuguauuuuuag

SEQ ID NO: 317697 - RNA, 23 nt, Artificial Sequence
  Synthetic
guuuuuuuuuuuuguauuuuuag

SEQ ID NO: 317698 - RNA, 24 nt, Artificial Sequence
  Synthetic
uguuuuuuuuuuuuguauuuuuag

SEQ ID NO: 317699 - RNA, 23 nt, Artificial Sequence
  Synthetic
uuuuuuuuuuuuuguauuuuuag

SEQ ID NO: 317700 - RNA, 24 nt, Artificial Sequence
  Synthetic
uuuuuuuuuuuuuuguauuuuuag

SEQ ID NO: 317701 - RNA, 18 nt, Artificial Sequence
  Synthetic
aauuuuuuuuauuuuuag

SEQ ID NO: 317702 - RNA, 19 nt, Artificial Sequence
  Synthetic
uaauuuuuuuuauuuuuag

SEQ ID NO: 317703 - RNA, 20 nt, Artificial Sequence
  Synthetic
cuaauuuuuuuuauuuuuag

SEQ ID NO: 317704 - RNA, 21 nt, Artificial Sequence
  Synthetic
gcuaauuuuuuuuauuuuuag

SEQ ID NO: 317705 - RNA, 22 nt, Artificial Sequence
  Synthetic
ggcuaauuuuuuuuauuuuuag

SEQ ID NO: 317706 - RNA, 23 nt, Artificial Sequence
  Synthetic
cggcuaauuuuuuuuauuuuuag

SEQ ID NO: 317707 - RNA, 24 nt, Artificial Sequence
  Synthetic
ccggcuaauuuuuuuuauuuuuag

SEQ ID NO: 317708 - RNA, 18 nt, Artificial Sequence
  Synthetic
ccaggcaaggcuuuuuag

SEQ ID NO: 317709 - RNA, 19 nt, Artificial Sequence
  Synthetic
accaggcaaggcuuuuuag

SEQ ID NO: 317710 - RNA, 20 nt, Artificial Sequence
  Synthetic
gaccaggcaaggcuuuuuag

SEQ ID NO: 317711 - RNA, 21 nt, Artificial Sequence
  Synthetic
ggaccaggcaaggcuuuuuag

SEQ ID NO: 317712 - RNA, 22 nt, Artificial Sequence
  Synthetic
aggaccaggcaaggcuuuuuag

SEQ ID NO: 317713 - RNA, 23 nt, Artificial Sequence
  Synthetic
uaggaccaggcaaggcuuuuuag

SEQ ID NO: 317714 - RNA, 24 nt, Artificial Sequence
  Synthetic
auaggaccaggcaaggcuuuuuag

SEQ ID NO: 317715 - RNA, 18 nt, Artificial Sequence
  Synthetic
uucaaagauucuuuuuag

SEQ ID NO: 317716 - RNA, 19 nt, Artificial Sequence
  Synthetic
auucaaagauucuuuuuag

SEQ ID NO: 317717 - RNA, 20 nt, Artificial Sequence
  Synthetic
uauucaaagauucuuuuuag

SEQ ID NO: 317718 - RNA, 21 nt, Artificial Sequence
  Synthetic
auauucaaagauucuuuuuag

SEQ ID NO: 317719 - RNA, 22 nt, Artificial Sequence
  Synthetic
uauauucaaagauucuuuuuag

SEQ ID NO: 317720 - RNA, 23 nt, Artificial Sequence
  Synthetic
auauauucaaagauucuuuuuag

SEQ ID NO: 317721 - RNA, 24 nt, Artificial Sequence
  Synthetic
uauauauucaaagauucuuuuuag

SEQ ID NO: 317722 - RNA, 18 nt, Artificial Sequence
  Synthetic
agcuucagcaguuuuuag

SEQ ID NO: 317723 - RNA, 19 nt, Artificial Sequence
  Synthetic
uagcuucagcaguuuuuag

SEQ ID NO: 317724 - RNA, 20 nt, Artificial Sequence
  Synthetic
cuagcuucagcaguuuuuag

SEQ ID NO: 317725 - RNA, 21 nt, Artificial Sequence
  Synthetic
ccuagcuucagcaguuuuuag

SEQ ID NO: 317726 - RNA, 22 nt, Artificial Sequence
  Synthetic
cccuagcuucagcaguuuuuag

SEQ ID NO: 317727 - RNA, 23 nt, Artificial Sequence
  Synthetic
gcccuagcuucagcaguuuuuag

SEQ ID NO: 317728 - RNA, 24 nt, Artificial Sequence
  Synthetic
agcccuagcuucagcaguuuuuag

SEQ ID NO: 317729 - RNA, 18 nt, Artificial Sequence
  Synthetic
uaauuuuucuguuuuuag

SEQ ID NO: 317730 - RNA, 19 nt, Artificial Sequence
  Synthetic
cuaauuuuucuguuuuuag

SEQ ID NO: 317731 - RNA, 20 nt, Artificial Sequence
  Synthetic
gcuaauuuuucuguuuuuag

SEQ ID NO: 317732 - RNA, 21 nt, Artificial Sequence
  Synthetic
ggcuaauuuuucuguuuuuag

SEQ ID NO: 317733 - RNA, 22 nt, Artificial Sequence
  Synthetic
cggcuaauuuuucuguuuuuag

SEQ ID NO: 317734 - RNA, 23 nt, Artificial Sequence
  Synthetic
ccggcuaauuuuucuguuuuuag

SEQ ID NO: 317735 - RNA, 24 nt, Artificial Sequence
  Synthetic
cccggcuaauuuuucuguuuuuag

SEQ ID NO: 317736 - RNA, 18 nt, Artificial Sequence
  Synthetic
uauuucucguguuuuuag

SEQ ID NO: 317737 - RNA, 19 nt, Artificial Sequence
  Synthetic
cuauuucucguguuuuuag

SEQ ID NO: 317738 - RNA, 20 nt, Artificial Sequence
  Synthetic
acuauuucucguguuuuuag

SEQ ID NO: 317739 - RNA, 21 nt, Artificial Sequence
  Synthetic
aacuauuucucguguuuuuag

SEQ ID NO: 317740 - RNA, 22 nt, Artificial Sequence
  Synthetic
caacuauuucucguguuuuuag

SEQ ID NO: 317741 - RNA, 23 nt, Artificial Sequence
  Synthetic
ccaacuauuucucguguuuuuag

SEQ ID NO: 317742 - RNA, 24 nt, Artificial Sequence
  Synthetic
cccaacuauuucucguguuuuuag

SEQ ID NO: 317743 - RNA, 18 nt, Artificial Sequence
  Synthetic
uaauuuuuguguuuuuag

SEQ ID NO: 317744 - RNA, 19 nt, Artificial Sequence
  Synthetic
cuaauuuuuguguuuuuag

SEQ ID NO: 317745 - RNA, 20 nt, Artificial Sequence
  Synthetic
gcuaauuuuuguguuuuuag

SEQ ID NO: 317746 - RNA, 21 nt, Artificial Sequence
  Synthetic
ggcuaauuuuuguguuuuuag

SEQ ID NO: 317747 - RNA, 22 nt, Artificial Sequence
  Synthetic
uggcuaauuuuuguguuuuuag

SEQ ID NO: 317748 - RNA, 23 nt, Artificial Sequence
  Synthetic
cuggcuaauuuuuguguuuuuag

SEQ ID NO: 317749 - RNA, 24 nt, Artificial Sequence
  Synthetic
ccuggcuaauuuuuguguuuuuag

SEQ ID NO: 317750 - RNA, 18 nt, Artificial Sequence
  Synthetic
uuuuuuuggauuuuuuag

SEQ ID NO: 317751 - RNA, 19 nt, Artificial Sequence
  Synthetic
uuuuuuuuggauuuuuuag

SEQ ID NO: 317752 - RNA, 20 nt, Artificial Sequence
  Synthetic
uuuuuuuuuggauuuuuuag

SEQ ID NO: 317753 - RNA, 21 nt, Artificial Sequence
  Synthetic
uuuuuuuuuuggauuuuuuag

SEQ ID NO: 317754 - RNA, 22 nt, Artificial Sequence
  Synthetic
uuuuuuuuuuuggauuuuuuag

SEQ ID NO: 317755 - RNA, 23 nt, Artificial Sequence
  Synthetic
uuuuuuuuuuuuggauuuuuuag

SEQ ID NO: 317756 - RNA, 24 nt, Artificial Sequence
  Synthetic
uuuuuuuuuuuuuggauuuuuuag

SEQ ID NO: 317757 - RNA, 18 nt, Artificial Sequence
  Synthetic
uuuuuuuguauuuuuuag

SEQ ID NO: 317758 - RNA, 19 nt, Artificial Sequence
  Synthetic
uuuuuuuuguauuuuuuag

SEQ ID NO: 317759 - RNA, 20 nt, Artificial Sequence
  Synthetic
uuuuuuuuuguauuuuuuag

SEQ ID NO: 317760 - RNA, 18 nt, Artificial Sequence
  Synthetic
auguagucaguuuuuuag

SEQ ID NO: 317761 - RNA, 19 nt, Artificial Sequence
  Synthetic
aauguagucaguuuuuuag

SEQ ID NO: 317762 - RNA, 20 nt, Artificial Sequence
  Synthetic
uaauguagucaguuuuuuag

SEQ ID NO: 317763 - RNA, 21 nt, Artificial Sequence
  Synthetic
guaauguagucaguuuuuuag

SEQ ID NO: 317764 - RNA, 22 nt, Artificial Sequence
  Synthetic
gguaauguagucaguuuuuuag

SEQ ID NO: 317765 - RNA, 23 nt, Artificial Sequence
  Synthetic
agguaauguagucaguuuuuuag

SEQ ID NO: 317766 - RNA, 24 nt, Artificial Sequence
  Synthetic
aagguaauguagucaguuuuuuag

SEQ ID NO: 317767 - RNA, 18 nt, Artificial Sequence
  Synthetic
uuuuuuuguguuuuuuag

SEQ ID NO: 317768 - RNA, 19 nt, Artificial Sequence
  Synthetic
auuuuuuuguguuuuuuag

SEQ ID NO: 317769 - RNA, 20 nt, Artificial Sequence
  Synthetic
aauuuuuuuguguuuuuuag

SEQ ID NO: 317770 - RNA, 21 nt, Artificial Sequence
  Synthetic
uaauuuuuuuguguuuuuuag

SEQ ID NO: 317771 - RNA, 22 nt, Artificial Sequence
  Synthetic
cuaauuuuuuuguguuuuuuag

SEQ ID NO: 317772 - RNA, 23 nt, Artificial Sequence
  Synthetic
gcuaauuuuuuuguguuuuuuag

SEQ ID NO: 317773 - RNA, 24 nt, Artificial Sequence
  Synthetic
ggcuaauuuuuuuguguuuuuuag

SEQ ID NO: 317774 - RNA, 18 nt, Artificial Sequence
  Synthetic
uuuuuuguauuuuuuuag

SEQ ID NO: 317775 - RNA, 19 nt, Artificial Sequence
  Synthetic
auuuuuuguauuuuuuuag

SEQ ID NO: 317776 - RNA, 20 nt, Artificial Sequence
  Synthetic
aauuuuuuguauuuuuuuag

SEQ ID NO: 317777 - RNA, 21 nt, Artificial Sequence
  Synthetic
uaauuuuuuguauuuuuuuag

SEQ ID NO: 317778 - RNA, 22 nt, Artificial Sequence
  Synthetic
guaauuuuuuguauuuuuuuag

SEQ ID NO: 317779 - RNA, 23 nt, Artificial Sequence
  Synthetic
gguaauuuuuuguauuuuuuuag

SEQ ID NO: 317780 - RNA, 24 nt, Artificial Sequence
  Synthetic
ggguaauuuuuuguauuuuuuuag

SEQ ID NO: 317781 - RNA, 18 nt, Artificial Sequence
  Synthetic
acuucaauuuaaaaaacg

SEQ ID NO: 317782 - RNA, 19 nt, Artificial Sequence
  Synthetic
aacuucaauuuaaaaaacg

SEQ ID NO: 317783 - RNA, 20 nt, Artificial Sequence
  Synthetic
aaacuucaauuuaaaaaacg

SEQ ID NO: 317784 - RNA, 21 nt, Artificial Sequence
  Synthetic
aaaacuucaauuuaaaaaacg

SEQ ID NO: 317785 - RNA, 22 nt, Artificial Sequence
  Synthetic
uaaaacuucaauuuaaaaaacg

SEQ ID NO: 317786 - RNA, 23 nt, Artificial Sequence
  Synthetic
uuaaaacuucaauuuaaaaaacg

SEQ ID NO: 317787 - RNA, 24 nt, Artificial Sequence
  Synthetic
auuaaaacuucaauuuaaaaaacg

SEQ ID NO: 317788 - RNA, 18 nt, Artificial Sequence
  Synthetic
agugagccaagaaaaacg

SEQ ID NO: 317789 - RNA, 19 nt, Artificial Sequence
  Synthetic
gagugagccaagaaaaacg

SEQ ID NO: 317790 - RNA, 20 nt, Artificial Sequence
  Synthetic
ggagugagccaagaaaaacg

SEQ ID NO: 317791 - RNA, 21 nt, Artificial Sequence
  Synthetic
aggagugagccaagaaaaacg

SEQ ID NO: 317792 - RNA, 22 nt, Artificial Sequence
  Synthetic
gaggagugagccaagaaaaacg

SEQ ID NO: 317793 - RNA, 23 nt, Artificial Sequence
  Synthetic
agaggagugagccaagaaaaacg

SEQ ID NO: 317794 - RNA, 24 nt, Artificial Sequence
  Synthetic
gagaggagugagccaagaaaaacg

SEQ ID NO: 317795 - RNA, 18 nt, Artificial Sequence
  Synthetic
cuggcucucagaaaaacg

SEQ ID NO: 317796 - RNA, 19 nt, Artificial Sequence
  Synthetic
gcuggcucucagaaaaacg

SEQ ID NO: 317797 - RNA, 20 nt, Artificial Sequence
  Synthetic
agcuggcucucagaaaaacg

SEQ ID NO: 317798 - RNA, 21 nt, Artificial Sequence
  Synthetic
cagcuggcucucagaaaaacg

SEQ ID NO: 317799 - RNA, 22 nt, Artificial Sequence
  Synthetic
acagcuggcucucagaaaaacg

SEQ ID NO: 317800 - RNA, 23 nt, Artificial Sequence
  Synthetic
cacagcuggcucucagaaaaacg

SEQ ID NO: 317801 - RNA, 24 nt, Artificial Sequence
  Synthetic
ccacagcuggcucucagaaaaacg

SEQ ID NO: 317802 - RNA, 18 nt, Artificial Sequence
  Synthetic
acuucuauuuuaaaaacg

SEQ ID NO: 317803 - RNA, 19 nt, Artificial Sequence
  Synthetic
gacuucuauuuuaaaaacg

SEQ ID NO: 317804 - RNA, 20 nt, Artificial Sequence
  Synthetic
agacuucuauuuuaaaaacg

SEQ ID NO: 317805 - RNA, 21 nt, Artificial Sequence
  Synthetic
cagacuucuauuuuaaaaacg

SEQ ID NO: 317806 - RNA, 22 nt, Artificial Sequence
  Synthetic
ucagacuucuauuuuaaaaacg

SEQ ID NO: 317807 - RNA, 23 nt, Artificial Sequence
  Synthetic
cucagacuucuauuuuaaaaacg

SEQ ID NO: 317808 - RNA, 24 nt, Artificial Sequence
  Synthetic
gcucagacuucuauuuuaaaaacg

SEQ ID NO: 317809 - RNA, 18 nt, Artificial Sequence
  Synthetic
ccccggccucccaaaacg

SEQ ID NO: 317810 - RNA, 19 nt, Artificial Sequence
  Synthetic
gccccggccucccaaaacg

SEQ ID NO: 317811 - RNA, 20 nt, Artificial Sequence
  Synthetic
cgccccggccucccaaaacg

SEQ ID NO: 317812 - RNA, 21 nt, Artificial Sequence
  Synthetic
ccgccccggccucccaaaacg

SEQ ID NO: 317813 - RNA, 22 nt, Artificial Sequence
  Synthetic
cccgccccggccucccaaaacg

SEQ ID NO: 317814 - RNA, 23 nt, Artificial Sequence
  Synthetic
gcccgccccggccucccaaaacg

SEQ ID NO: 317815 - RNA, 24 nt, Artificial Sequence
  Synthetic
cgcccgccccggccucccaaaacg

SEQ ID NO: 317816 - RNA, 18 nt, Artificial Sequence
  Synthetic
cagugaaaaaugaaaacg

SEQ ID NO: 317817 - RNA, 19 nt, Artificial Sequence
  Synthetic
ccagugaaaaaugaaaacg

SEQ ID NO: 317818 - RNA, 20 nt, Artificial Sequence
  Synthetic
cccagugaaaaaugaaaacg

SEQ ID NO: 317819 - RNA, 21 nt, Artificial Sequence
  Synthetic
gcccagugaaaaaugaaaacg

SEQ ID NO: 317820 - RNA, 22 nt, Artificial Sequence
  Synthetic
agcccagugaaaaaugaaaacg

SEQ ID NO: 317821 - RNA, 23 nt, Artificial Sequence
  Synthetic
gagcccagugaaaaaugaaaacg

SEQ ID NO: 317822 - RNA, 24 nt, Artificial Sequence
  Synthetic
agagcccagugaaaaaugaaaacg

SEQ ID NO: 317823 - RNA, 18 nt, Artificial Sequence
  Synthetic
auuaaaauucauaaaacg

SEQ ID NO: 317824 - RNA, 19 nt, Artificial Sequence
  Synthetic
gauuaaaauucauaaaacg

SEQ ID NO: 317825 - RNA, 20 nt, Artificial Sequence
  Synthetic
ugauuaaaauucauaaaacg

SEQ ID NO: 317826 - RNA, 21 nt, Artificial Sequence
  Synthetic
augauuaaaauucauaaaacg

SEQ ID NO: 317827 - RNA, 22 nt, Artificial Sequence
  Synthetic
aaugauuaaaauucauaaaacg

SEQ ID NO: 317828 - RNA, 23 nt, Artificial Sequence
  Synthetic
caaugauuaaaauucauaaaacg

SEQ ID NO: 317829 - RNA, 24 nt, Artificial Sequence
  Synthetic
ucaaugauuaaaauucauaaaacg

SEQ ID NO: 317830 - RNA, 18 nt, Artificial Sequence
  Synthetic
agaugucaugguaaaacg

SEQ ID NO: 317831 - RNA, 19 nt, Artificial Sequence
  Synthetic
gagaugucaugguaaaacg

SEQ ID NO: 317832 - RNA, 20 nt, Artificial Sequence
  Synthetic
ggagaugucaugguaaaacg

SEQ ID NO: 317833 - RNA, 21 nt, Artificial Sequence
  Synthetic
cggagaugucaugguaaaacg

SEQ ID NO: 317834 - RNA, 22 nt, Artificial Sequence
  Synthetic
ucggagaugucaugguaaaacg

SEQ ID NO: 317835 - RNA, 23 nt, Artificial Sequence
  Synthetic
cucggagaugucaugguaaaacg

SEQ ID NO: 317836 - RNA, 24 nt, Artificial Sequence
  Synthetic
acucggagaugucaugguaaaacg

SEQ ID NO: 317837 - RNA, 18 nt, Artificial Sequence
  Synthetic
acagugcuucaacaaacg

SEQ ID NO: 317838 - RNA, 19 nt, Artificial Sequence
  Synthetic
aacagugcuucaacaaacg

SEQ ID NO: 317839 - RNA, 20 nt, Artificial Sequence
  Synthetic
gaacagugcuucaacaaacg

SEQ ID NO: 317840 - RNA, 21 nt, Artificial Sequence
  Synthetic
ugaacagugcuucaacaaacg

SEQ ID NO: 317841 - RNA, 22 nt, Artificial Sequence
  Synthetic
augaacagugcuucaacaaacg

SEQ ID NO: 317842 - RNA, 23 nt, Artificial Sequence
  Synthetic
uaugaacagugcuucaacaaacg

SEQ ID NO: 317843 - RNA, 24 nt, Artificial Sequence
  Synthetic
uuaugaacagugcuucaacaaacg

SEQ ID NO: 317844 - RNA, 18 nt, Artificial Sequence
  Synthetic
uuaauguguuaacaaacg

SEQ ID NO: 317845 - RNA, 19 nt, Artificial Sequence
  Synthetic
uuuaauguguuaacaaacg

SEQ ID NO: 317846 - RNA, 20 nt, Artificial Sequence
  Synthetic
uuuuaauguguuaacaaacg

SEQ ID NO: 317847 - RNA, 21 nt, Artificial Sequence
  Synthetic
uuuuuaauguguuaacaaacg

SEQ ID NO: 317848 - RNA, 22 nt, Artificial Sequence
  Synthetic
cuuuuuaauguguuaacaaacg

SEQ ID NO: 317849 - RNA, 23 nt, Artificial Sequence
  Synthetic
acuuuuuaauguguuaacaaacg

SEQ ID NO: 317850 - RNA, 24 nt, Artificial Sequence
  Synthetic
gacuuuuuaauguguuaacaaacg

SEQ ID NO: 317851 - RNA, 18 nt, Artificial Sequence
  Synthetic
uuacaucuguuagaaacg

SEQ ID NO: 317852 - RNA, 19 nt, Artificial Sequence
  Synthetic
uuuacaucuguuagaaacg

SEQ ID NO: 317853 - RNA, 20 nt, Artificial Sequence
  Synthetic
uuuuacaucuguuagaaacg

SEQ ID NO: 317854 - RNA, 21 nt, Artificial Sequence
  Synthetic
uuuuuacaucuguuagaaacg

SEQ ID NO: 317855 - RNA, 22 nt, Artificial Sequence
  Synthetic
guuuuuacaucuguuagaaacg

SEQ ID NO: 317856 - RNA, 23 nt, Artificial Sequence
  Synthetic
uguuuuuacaucuguuagaaacg

SEQ ID NO: 317857 - RNA, 24 nt, Artificial Sequence
  Synthetic
uuguuuuuacaucuguuagaaacg

SEQ ID NO: 317858 - RNA, 18 nt, Artificial Sequence
  Synthetic
cagaagugcuaggaaacg

SEQ ID NO: 317859 - RNA, 19 nt, Artificial Sequence
  Synthetic
ucagaagugcuaggaaacg

SEQ ID NO: 317860 - RNA, 20 nt, Artificial Sequence
  Synthetic
uucagaagugcuaggaaacg

SEQ ID NO: 317861 - RNA, 21 nt, Artificial Sequence
  Synthetic
cuucagaagugcuaggaaacg

SEQ ID NO: 317862 - RNA, 22 nt, Artificial Sequence
  Synthetic
ccuucagaagugcuaggaaacg

SEQ ID NO: 317863 - RNA, 23 nt, Artificial Sequence
  Synthetic
cccuucagaagugcuaggaaacg

SEQ ID NO: 317864 - RNA, 24 nt, Artificial Sequence
  Synthetic
acccuucagaagugcuaggaaacg

SEQ ID NO: 317865 - RNA, 18 nt, Artificial Sequence
  Synthetic
aaauacacagaguaaacg

SEQ ID NO: 317866 - RNA, 19 nt, Artificial Sequence
  Synthetic
uaaauacacagaguaaacg

SEQ ID NO: 317867 - RNA, 20 nt, Artificial Sequence
  Synthetic
auaaauacacagaguaaacg

SEQ ID NO: 317868 - RNA, 21 nt, Artificial Sequence
  Synthetic
uauaaauacacagaguaaacg

SEQ ID NO: 317869 - RNA, 22 nt, Artificial Sequence
  Synthetic
uuauaaauacacagaguaaacg

SEQ ID NO: 317870 - RNA, 23 nt, Artificial Sequence
  Synthetic
auuauaaauacacagaguaaacg

SEQ ID NO: 317871 - RNA, 24 nt, Artificial Sequence
  Synthetic
cauuauaaauacacagaguaaacg

SEQ ID NO: 317872 - RNA, 18 nt, Artificial Sequence
  Synthetic
ugccaaagacaaacaacg

SEQ ID NO: 317873 - RNA, 19 nt, Artificial Sequence
  Synthetic
uugccaaagacaaacaacg

SEQ ID NO: 317874 - RNA, 20 nt, Artificial Sequence
  Synthetic
auugccaaagacaaacaacg

SEQ ID NO: 317875 - RNA, 21 nt, Artificial Sequence
  Synthetic
aauugccaaagacaaacaacg

SEQ ID NO: 317876 - RNA, 22 nt, Artificial Sequence
  Synthetic
gaauugccaaagacaaacaacg

SEQ ID NO: 317877 - RNA, 23 nt, Artificial Sequence
  Synthetic
ugaauugccaaagacaaacaacg

SEQ ID NO: 317878 - RNA, 24 nt, Artificial Sequence
  Synthetic
cugaauugccaaagacaaacaacg

SEQ ID NO: 317879 - RNA, 18 nt, Artificial Sequence
  Synthetic
uaaaaggaauacacaacg

SEQ ID NO: 317880 - RNA, 19 nt, Artificial Sequence
  Synthetic
guaaaaggaauacacaacg

SEQ ID NO: 317881 - RNA, 20 nt, Artificial Sequence
  Synthetic
uguaaaaggaauacacaacg

SEQ ID NO: 317882 - RNA, 21 nt, Artificial Sequence
  Synthetic
auguaaaaggaauacacaacg

SEQ ID NO: 317883 - RNA, 22 nt, Artificial Sequence
  Synthetic
uauguaaaaggaauacacaacg

SEQ ID NO: 317884 - RNA, 23 nt, Artificial Sequence
  Synthetic
uuauguaaaaggaauacacaacg

SEQ ID NO: 317885 - RNA, 24 nt, Artificial Sequence
  Synthetic
auuauguaaaaggaauacacaacg

SEQ ID NO: 317886 - RNA, 18 nt, Artificial Sequence
  Synthetic
aacaaagcuuccacaacg

SEQ ID NO: 317887 - RNA, 19 nt, Artificial Sequence
  Synthetic
gaacaaagcuuccacaacg

SEQ ID NO: 317888 - RNA, 20 nt, Artificial Sequence
  Synthetic
agaacaaagcuuccacaacg

SEQ ID NO: 317889 - RNA, 21 nt, Artificial Sequence
  Synthetic
aagaacaaagcuuccacaacg

SEQ ID NO: 317890 - RNA, 22 nt, Artificial Sequence
  Synthetic
aaagaacaaagcuuccacaacg

SEQ ID NO: 317891 - RNA, 23 nt, Artificial Sequence
  Synthetic
aaaagaacaaagcuuccacaacg

SEQ ID NO: 317892 - RNA, 24 nt, Artificial Sequence
  Synthetic
caaaagaacaaagcuuccacaacg

SEQ ID NO: 317893 - RNA, 18 nt, Artificial Sequence
  Synthetic
cguggaaaauuuacaacg

SEQ ID NO: 317894 - RNA, 19 nt, Artificial Sequence
  Synthetic
ucguggaaaauuuacaacg

SEQ ID NO: 317895 - RNA, 20 nt, Artificial Sequence
  Synthetic
gucguggaaaauuuacaacg

SEQ ID NO: 317896 - RNA, 21 nt, Artificial Sequence
  Synthetic
cgucguggaaaauuuacaacg

SEQ ID NO: 317897 - RNA, 22 nt, Artificial Sequence
  Synthetic
ucgucguggaaaauuuacaacg

SEQ ID NO: 317898 - RNA, 23 nt, Artificial Sequence
  Synthetic
aucgucguggaaaauuuacaacg

SEQ ID NO: 317899 - RNA, 24 nt, Artificial Sequence
  Synthetic
caucgucguggaaaauuuacaacg

SEQ ID NO: 317900 - RNA, 18 nt, Artificial Sequence
  Synthetic
aauaaaggucaaccaacg

SEQ ID NO: 317901 - RNA, 19 nt, Artificial Sequence
  Synthetic
caauaaaggucaaccaacg

SEQ ID NO: 317902 - RNA, 20 nt, Artificial Sequence
  Synthetic
ucaauaaaggucaaccaacg

SEQ ID NO: 317903 - RNA, 21 nt, Artificial Sequence
  Synthetic
uucaauaaaggucaaccaacg

SEQ ID NO: 317904 - RNA, 22 nt, Artificial Sequence
  Synthetic
auucaauaaaggucaaccaacg

SEQ ID NO: 317905 - RNA, 23 nt, Artificial Sequence
  Synthetic
aauucaauaaaggucaaccaacg

SEQ ID NO: 317906 - RNA, 24 nt, Artificial Sequence
  Synthetic
aaauucaauaaaggucaaccaacg

SEQ ID NO: 317907 - RNA, 18 nt, Artificial Sequence
  Synthetic
aaaacagagaacccaacg

SEQ ID NO: 317908 - RNA, 19 nt, Artificial Sequence
  Synthetic
gaaaacagagaacccaacg

SEQ ID NO: 317909 - RNA, 20 nt, Artificial Sequence
  Synthetic
ggaaaacagagaacccaacg

SEQ ID NO: 317910 - RNA, 21 nt, Artificial Sequence
  Synthetic
cggaaaacagagaacccaacg

SEQ ID NO: 317911 - RNA, 22 nt, Artificial Sequence
  Synthetic
ccggaaaacagagaacccaacg

SEQ ID NO: 317912 - RNA, 23 nt, Artificial Sequence
  Synthetic
uccggaaaacagagaacccaacg

SEQ ID NO: 317913 - RNA, 24 nt, Artificial Sequence
  Synthetic
auccggaaaacagagaacccaacg

SEQ ID NO: 317914 - RNA, 18 nt, Artificial Sequence
  Synthetic
uuaggacugcuuccaacg

SEQ ID NO: 317915 - RNA, 19 nt, Artificial Sequence
  Synthetic
uuuaggacugcuuccaacg

SEQ ID NO: 317916 - RNA, 20 nt, Artificial Sequence
  Synthetic
guuuaggacugcuuccaacg

SEQ ID NO: 317917 - RNA, 21 nt, Artificial Sequence
  Synthetic
gguuuaggacugcuuccaacg

SEQ ID NO: 317918 - RNA, 22 nt, Artificial Sequence
  Synthetic
ugguuuaggacugcuuccaacg

SEQ ID NO: 317919 - RNA, 23 nt, Artificial Sequence
  Synthetic
uugguuuaggacugcuuccaacg

SEQ ID NO: 317920 - RNA, 24 nt, Artificial Sequence
  Synthetic
auugguuuaggacugcuuccaacg

SEQ ID NO: 317921 - RNA, 18 nt, Artificial Sequence
  Synthetic
guucuaagagacagaacg

SEQ ID NO: 317922 - RNA, 19 nt, Artificial Sequence
  Synthetic
aguucuaagagacagaacg

SEQ ID NO: 317923 - RNA, 20 nt, Artificial Sequence
  Synthetic
gaguucuaagagacagaacg

SEQ ID NO: 317924 - RNA, 21 nt, Artificial Sequence
  Synthetic
ugaguucuaagagacagaacg

SEQ ID NO: 317925 - RNA, 22 nt, Artificial Sequence
  Synthetic
cugaguucuaagagacagaacg

SEQ ID NO: 317926 - RNA, 23 nt, Artificial Sequence
  Synthetic
ucugaguucuaagagacagaacg

SEQ ID NO: 317927 - RNA, 24 nt, Artificial Sequence
  Synthetic
cucugaguucuaagagacagaacg

SEQ ID NO: 317928 - RNA, 18 nt, Artificial Sequence
  Synthetic
auggggauuauuggaacg

SEQ ID NO: 317929 - RNA, 19 nt, Artificial Sequence
  Synthetic
aauggggauuauuggaacg

SEQ ID NO: 317930 - RNA, 20 nt, Artificial Sequence
  Synthetic
gaauggggauuauuggaacg

SEQ ID NO: 317931 - RNA, 21 nt, Artificial Sequence
  Synthetic
ugaauggggauuauuggaacg

SEQ ID NO: 317932 - RNA, 22 nt, Artificial Sequence
  Synthetic
uugaauggggauuauuggaacg

SEQ ID NO: 317933 - RNA, 23 nt, Artificial Sequence
  Synthetic
cuugaauggggauuauuggaacg

SEQ ID NO: 317934 - RNA, 24 nt, Artificial Sequence
  Synthetic
acuugaauggggauuauuggaacg

SEQ ID NO: 317935 - RNA, 18 nt, Artificial Sequence
  Synthetic
uaaauaaauccuugaacg

SEQ ID NO: 317936 - RNA, 19 nt, Artificial Sequence
  Synthetic
uuaaauaaauccuugaacg

SEQ ID NO: 317937 - RNA, 20 nt, Artificial Sequence
  Synthetic
auuaaauaaauccuugaacg

SEQ ID NO: 317938 - RNA, 21 nt, Artificial Sequence
  Synthetic
gauuaaauaaauccuugaacg

SEQ ID NO: 317939 - RNA, 22 nt, Artificial Sequence
  Synthetic
ggauuaaauaaauccuugaacg

SEQ ID NO: 317940 - RNA, 23 nt, Artificial Sequence
  Synthetic
aggauuaaauaaauccuugaacg

SEQ ID NO: 317941 - RNA, 24 nt, Artificial Sequence
  Synthetic
aaggauuaaauaaauccuugaacg

SEQ ID NO: 317942 - RNA, 18 nt, Artificial Sequence
  Synthetic
aggagaaucgcuugaacg

SEQ ID NO: 317943 - RNA, 19 nt, Artificial Sequence
  Synthetic
caggagaaucgcuugaacg

SEQ ID NO: 317944 - RNA, 20 nt, Artificial Sequence
  Synthetic
gcaggagaaucgcuugaacg

SEQ ID NO: 317945 - RNA, 21 nt, Artificial Sequence
  Synthetic
ggcaggagaaucgcuugaacg

SEQ ID NO: 317946 - RNA, 22 nt, Artificial Sequence
  Synthetic
aggcaggagaaucgcuugaacg

SEQ ID NO: 317947 - RNA, 23 nt, Artificial Sequence
  Synthetic
gaggcaggagaaucgcuugaacg

SEQ ID NO: 317948 - RNA, 24 nt, Artificial Sequence
  Synthetic
agaggcaggagaaucgcuugaacg

SEQ ID NO: 317949 - RNA, 18 nt, Artificial Sequence
  Synthetic
auaagugggaguugaacg

SEQ ID NO: 317950 - RNA, 19 nt, Artificial Sequence
  Synthetic
cauaagugggaguugaacg

SEQ ID NO: 317951 - RNA, 20 nt, Artificial Sequence
  Synthetic
ucauaagugggaguugaacg

SEQ ID NO: 317952 - RNA, 21 nt, Artificial Sequence
  Synthetic
cucauaagugggaguugaacg

SEQ ID NO: 317953 - RNA, 22 nt, Artificial Sequence
  Synthetic
acucauaagugggaguugaacg

SEQ ID NO: 317954 - RNA, 23 nt, Artificial Sequence
  Synthetic
cacucauaagugggaguugaacg

SEQ ID NO: 317955 - RNA, 24 nt, Artificial Sequence
  Synthetic
ucacucauaagugggaguugaacg

SEQ ID NO: 317956 - RNA, 18 nt, Artificial Sequence
  Synthetic
ggaggaaaagcaauaacg

SEQ ID NO: 317957 - RNA, 19 nt, Artificial Sequence
  Synthetic
uggaggaaaagcaauaacg

SEQ ID NO: 317958 - RNA, 20 nt, Artificial Sequence
  Synthetic
cuggaggaaaagcaauaacg

SEQ ID NO: 317959 - RNA, 21 nt, Artificial Sequence
  Synthetic
gcuggaggaaaagcaauaacg

SEQ ID NO: 317960 - RNA, 22 nt, Artificial Sequence
  Synthetic
ggcuggaggaaaagcaauaacg

SEQ ID NO: 317961 - RNA, 23 nt, Artificial Sequence
  Synthetic
aggcuggaggaaaagcaauaacg

SEQ ID NO: 317962 - RNA, 24 nt, Artificial Sequence
  Synthetic
caggcuggaggaaaagcaauaacg

SEQ ID NO: 317963 - RNA, 18 nt, Artificial Sequence
  Synthetic
auguauaacuguauaacg

SEQ ID NO: 317964 - RNA, 19 nt, Artificial Sequence
  Synthetic
aauguauaacuguauaacg

SEQ ID NO: 317965 - RNA, 20 nt, Artificial Sequence
  Synthetic
uaauguauaacuguauaacg

SEQ ID NO: 317966 - RNA, 21 nt, Artificial Sequence
  Synthetic
guaauguauaacuguauaacg

SEQ ID NO: 317967 - RNA, 22 nt, Artificial Sequence
  Synthetic
uguaauguauaacuguauaacg

SEQ ID NO: 317968 - RNA, 23 nt, Artificial Sequence
  Synthetic
cuguaauguauaacuguauaacg

SEQ ID NO: 317969 - RNA, 24 nt, Artificial Sequence
  Synthetic
acuguaauguauaacuguauaacg

SEQ ID NO: 317970 - RNA, 18 nt, Artificial Sequence
  Synthetic
auaugauacauuauaacg

SEQ ID NO: 317971 - RNA, 19 nt, Artificial Sequence
  Synthetic
aauaugauacauuauaacg

SEQ ID NO: 317972 - RNA, 20 nt, Artificial Sequence
  Synthetic
uaauaugauacauuauaacg

SEQ ID NO: 317973 - RNA, 21 nt, Artificial Sequence
  Synthetic
auaauaugauacauuauaacg

SEQ ID NO: 317974 - RNA, 22 nt, Artificial Sequence
  Synthetic
gauaauaugauacauuauaacg

SEQ ID NO: 317975 - RNA, 23 nt, Artificial Sequence
  Synthetic
ugauaauaugauacauuauaacg

SEQ ID NO: 317976 - RNA, 24 nt, Artificial Sequence
  Synthetic
augauaauaugauacauuauaacg

SEQ ID NO: 317977 - RNA, 18 nt, Artificial Sequence
  Synthetic
ugcuagucaucucuaacg

SEQ ID NO: 317978 - RNA, 19 nt, Artificial Sequence
  Synthetic
cugcuagucaucucuaacg

SEQ ID NO: 317979 - RNA, 20 nt, Artificial Sequence
  Synthetic
gcugcuagucaucucuaacg

SEQ ID NO: 317980 - RNA, 21 nt, Artificial Sequence
  Synthetic
ggcugcuagucaucucuaacg

SEQ ID NO: 317981 - RNA, 22 nt, Artificial Sequence
  Synthetic
aggcugcuagucaucucuaacg

SEQ ID NO: 317982 - RNA, 23 nt, Artificial Sequence
  Synthetic
aaggcugcuagucaucucuaacg

SEQ ID NO: 317983 - RNA, 24 nt, Artificial Sequence
  Synthetic
uaaggcugcuagucaucucuaacg

SEQ ID NO: 317984 - RNA, 18 nt, Artificial Sequence
  Synthetic
gaagcauugucaguaacg

SEQ ID NO: 317985 - RNA, 19 nt, Artificial Sequence
  Synthetic
agaagcauugucaguaacg

SEQ ID NO: 317986 - RNA, 20 nt, Artificial Sequence
  Synthetic
cagaagcauugucaguaacg

SEQ ID NO: 317987 - RNA, 21 nt, Artificial Sequence
  Synthetic
ccagaagcauugucaguaacg

SEQ ID NO: 317988 - RNA, 22 nt, Artificial Sequence
  Synthetic
uccagaagcauugucaguaacg

SEQ ID NO: 317989 - RNA, 23 nt, Artificial Sequence
  Synthetic
guccagaagcauugucaguaacg

SEQ ID NO: 317990 - RNA, 24 nt, Artificial Sequence
  Synthetic
uguccagaagcauugucaguaacg

SEQ ID NO: 317991 - RNA, 18 nt, Artificial Sequence
  Synthetic
uaggccuguuuuuuaacg

SEQ ID NO: 317992 - RNA, 19 nt, Artificial Sequence
  Synthetic
uuaggccuguuuuuuaacg

SEQ ID NO: 317993 - RNA, 20 nt, Artificial Sequence
  Synthetic
uuuaggccuguuuuuuaacg

SEQ ID NO: 317994 - RNA, 21 nt, Artificial Sequence
  Synthetic
auuuaggccuguuuuuuaacg

SEQ ID NO: 317995 - RNA, 22 nt, Artificial Sequence
  Synthetic
uauuuaggccuguuuuuuaacg

SEQ ID NO: 317996 - RNA, 23 nt, Artificial Sequence
  Synthetic
auauuuaggccuguuuuuuaacg

SEQ ID NO: 317997 - RNA, 24 nt, Artificial Sequence
  Synthetic
gauauuuaggccuguuuuuuaacg

SEQ ID NO: 317998 - RNA, 18 nt, Artificial Sequence
  Synthetic
aggaguucaccaaacacg

SEQ ID NO: 317999 - RNA, 19 nt, Artificial Sequence
  Synthetic
uaggaguucaccaaacacg

SEQ ID NO: 318000 - RNA, 20 nt, Artificial Sequence
  Synthetic
auaggaguucaccaaacacg

SEQ ID NO: 318001 - RNA, 21 nt, Artificial Sequence
  Synthetic
aauaggaguucaccaaacacg

SEQ ID NO: 318002 - RNA, 22 nt, Artificial Sequence
  Synthetic
caauaggaguucaccaaacacg

SEQ ID NO: 318003 - RNA, 23 nt, Artificial Sequence
  Synthetic
ucaauaggaguucaccaaacacg

SEQ ID NO: 318004 - RNA, 24 nt, Artificial Sequence
  Synthetic
uucaauaggaguucaccaaacacg

SEQ ID NO: 318005 - RNA, 18 nt, Artificial Sequence
  Synthetic
ccaaauagaauaaacacg

SEQ ID NO: 318006 - RNA, 19 nt, Artificial Sequence
  Synthetic
cccaaauagaauaaacacg

SEQ ID NO: 318007 - RNA, 20 nt, Artificial Sequence
  Synthetic
ccccaaauagaauaaacacg

SEQ ID NO: 318008 - RNA, 21 nt, Artificial Sequence
  Synthetic
accccaaauagaauaaacacg

SEQ ID NO: 318009 - RNA, 22 nt, Artificial Sequence
  Synthetic
aaccccaaauagaauaaacacg

SEQ ID NO: 318010 - RNA, 23 nt, Artificial Sequence
  Synthetic
aaaccccaaauagaauaaacacg

SEQ ID NO: 318011 - RNA, 24 nt, Artificial Sequence
  Synthetic
caaaccccaaauagaauaaacacg

SEQ ID NO: 318012 - RNA, 18 nt, Artificial Sequence
  Synthetic
ggucccucccacaacacg

SEQ ID NO: 318013 - RNA, 19 nt, Artificial Sequence
  Synthetic
uggucccucccacaacacg

SEQ ID NO: 318014 - RNA, 20 nt, Artificial Sequence
  Synthetic
auggucccucccacaacacg

SEQ ID NO: 318015 - RNA, 21 nt, Artificial Sequence
  Synthetic
cauggucccucccacaacacg

SEQ ID NO: 318016 - RNA, 22 nt, Artificial Sequence
  Synthetic
acauggucccucccacaacacg

SEQ ID NO: 318017 - RNA, 23 nt, Artificial Sequence
  Synthetic
cacauggucccucccacaacacg

SEQ ID NO: 318018 - RNA, 24 nt, Artificial Sequence
  Synthetic
ccacauggucccucccacaacacg

SEQ ID NO: 318019 - RNA, 18 nt, Artificial Sequence
  Synthetic
accauccuggcgaacacg

SEQ ID NO: 318020 - RNA, 19 nt, Artificial Sequence
  Synthetic
gaccauccuggcgaacacg

SEQ ID NO: 318021 - RNA, 20 nt, Artificial Sequence
  Synthetic
agaccauccuggcgaacacg

SEQ ID NO: 318022 - RNA, 21 nt, Artificial Sequence
  Synthetic
gagaccauccuggcgaacacg

SEQ ID NO: 318023 - RNA, 22 nt, Artificial Sequence
  Synthetic
cgagaccauccuggcgaacacg

SEQ ID NO: 318024 - RNA, 23 nt, Artificial Sequence
  Synthetic
ucgagaccauccuggcgaacacg

SEQ ID NO: 318025 - RNA, 24 nt, Artificial Sequence
  Synthetic
aucgagaccauccuggcgaacacg

SEQ ID NO: 318026 - RNA, 18 nt, Artificial Sequence
  Synthetic
gcuuaaaacaugaacacg

SEQ ID NO: 318027 - RNA, 19 nt, Artificial Sequence
  Synthetic
agcuuaaaacaugaacacg

SEQ ID NO: 318028 - RNA, 20 nt, Artificial Sequence
  Synthetic
uagcuuaaaacaugaacacg

SEQ ID NO: 318029 - RNA, 21 nt, Artificial Sequence
  Synthetic
uuagcuuaaaacaugaacacg

SEQ ID NO: 318030 - RNA, 22 nt, Artificial Sequence
  Synthetic
cuuagcuuaaaacaugaacacg

SEQ ID NO: 318031 - RNA, 23 nt, Artificial Sequence
  Synthetic
acuuagcuuaaaacaugaacacg

SEQ ID NO: 318032 - RNA, 24 nt, Artificial Sequence
  Synthetic
cacuuagcuuaaaacaugaacacg

SEQ ID NO: 318033 - RNA, 18 nt, Artificial Sequence
  Synthetic
uugguagaaaauaacacg

SEQ ID NO: 318034 - RNA, 19 nt, Artificial Sequence
  Synthetic
guugguagaaaauaacacg

SEQ ID NO: 318035 - RNA, 20 nt, Artificial Sequence
  Synthetic
uguugguagaaaauaacacg

SEQ ID NO: 318036 - RNA, 21 nt, Artificial Sequence
  Synthetic
cuguugguagaaaauaacacg

SEQ ID NO: 318037 - RNA, 22 nt, Artificial Sequence
  Synthetic
acuguugguagaaaauaacacg

SEQ ID NO: 318038 - RNA, 23 nt, Artificial Sequence
  Synthetic
gacuguugguagaaaauaacacg

SEQ ID NO: 318039 - RNA, 24 nt, Artificial Sequence
  Synthetic
ugacuguugguagaaaauaacacg

SEQ ID NO: 318040 - RNA, 18 nt, Artificial Sequence
  Synthetic
accauccuggcuaacacg

SEQ ID NO: 318041 - RNA, 19 nt, Artificial Sequence
  Synthetic
caccauccuggcuaacacg

SEQ ID NO: 318042 - RNA, 20 nt, Artificial Sequence
  Synthetic
acaccauccuggcuaacacg

SEQ ID NO: 318043 - RNA, 21 nt, Artificial Sequence
  Synthetic
gacaccauccuggcuaacacg

SEQ ID NO: 318044 - RNA, 22 nt, Artificial Sequence
  Synthetic
cgacaccauccuggcuaacacg

SEQ ID NO: 318045 - RNA, 23 nt, Artificial Sequence
  Synthetic
ucgacaccauccuggcuaacacg

SEQ ID NO: 318046 - RNA, 24 nt, Artificial Sequence
  Synthetic
aucgacaccauccuggcuaacacg

SEQ ID NO: 318047 - RNA, 19 nt, Artificial Sequence
  Synthetic
gaccauccuggcuaacacg

SEQ ID NO: 318048 - RNA, 20 nt, Artificial Sequence
  Synthetic
agaccauccuggcuaacacg

SEQ ID NO: 318049 - RNA, 21 nt, Artificial Sequence
  Synthetic
aagaccauccuggcuaacacg

SEQ ID NO: 318050 - RNA, 22 nt, Artificial Sequence
  Synthetic
caagaccauccuggcuaacacg

SEQ ID NO: 318051 - RNA, 23 nt, Artificial Sequence
  Synthetic
ucaagaccauccuggcuaacacg

SEQ ID NO: 318052 - RNA, 24 nt, Artificial Sequence
  Synthetic
aucaagaccauccuggcuaacacg

SEQ ID NO: 318053 - RNA, 21 nt, Artificial Sequence
  Synthetic
gagaccauccuggcuaacacg

SEQ ID NO: 318054 - RNA, 22 nt, Artificial Sequence
  Synthetic
agagaccauccuggcuaacacg

SEQ ID NO: 318055 - RNA, 23 nt, Artificial Sequence
  Synthetic
uagagaccauccuggcuaacacg

SEQ ID NO: 318056 - RNA, 24 nt, Artificial Sequence
  Synthetic
auagagaccauccuggcuaacacg

SEQ ID NO: 318057 - RNA, 22 nt, Artificial Sequence
  Synthetic
cgagaccauccuggcuaacacg

SEQ ID NO: 318058 - RNA, 23 nt, Artificial Sequence
  Synthetic
ccgagaccauccuggcuaacacg

SEQ ID NO: 318059 - RNA, 24 nt, Artificial Sequence
  Synthetic
accgagaccauccuggcuaacacg

SEQ ID NO: 318060 - RNA, 22 nt, Artificial Sequence
  Synthetic
ggagaccauccuggcuaacacg

SEQ ID NO: 318061 - RNA, 23 nt, Artificial Sequence
  Synthetic
uggagaccauccuggcuaacacg

SEQ ID NO: 318062 - RNA, 24 nt, Artificial Sequence
  Synthetic
auggagaccauccuggcuaacacg

SEQ ID NO: 318063 - RNA, 22 nt, Artificial Sequence
  Synthetic
ugagaccauccuggcuaacacg

SEQ ID NO: 318064 - RNA, 23 nt, Artificial Sequence
  Synthetic
uugagaccauccuggcuaacacg

SEQ ID NO: 318065 - RNA, 24 nt, Artificial Sequence
  Synthetic
auugagaccauccuggcuaacacg

SEQ ID NO: 318066 - RNA, 18 nt, Artificial Sequence
  Synthetic
auauuaaacaaacacacg

SEQ ID NO: 318067 - RNA, 19 nt, Artificial Sequence
  Synthetic
uauauuaaacaaacacacg

SEQ ID NO: 318068 - RNA, 20 nt, Artificial Sequence
  Synthetic
auauauuaaacaaacacacg

SEQ ID NO: 318069 - RNA, 21 nt, Artificial Sequence
  Synthetic
cauauauuaaacaaacacacg

SEQ ID NO: 318070 - RNA, 22 nt, Artificial Sequence
  Synthetic
ccauauauuaaacaaacacacg

SEQ ID NO: 318071 - RNA, 23 nt, Artificial Sequence
  Synthetic
cccauauauuaaacaaacacacg

SEQ ID NO: 318072 - RNA, 24 nt, Artificial Sequence
  Synthetic
gcccauauauuaaacaaacacacg

SEQ ID NO: 318073 - RNA, 18 nt, Artificial Sequence
  Synthetic
ggucucucccuugacacg

SEQ ID NO: 318074 - RNA, 19 nt, Artificial Sequence
  Synthetic
uggucucucccuugacacg

SEQ ID NO: 318075 - RNA, 20 nt, Artificial Sequence
  Synthetic
cuggucucucccuugacacg

SEQ ID NO: 318076 - RNA, 21 nt, Artificial Sequence
  Synthetic
ccuggucucucccuugacacg

SEQ ID NO: 318077 - RNA, 22 nt, Artificial Sequence
  Synthetic
accuggucucucccuugacacg

SEQ ID NO: 318078 - RNA, 23 nt, Artificial Sequence
  Synthetic
caccuggucucucccuugacacg

SEQ ID NO: 318079 - RNA, 24 nt, Artificial Sequence
  Synthetic
ccaccuggucucucccuugacacg

SEQ ID NO: 318080 - RNA, 18 nt, Artificial Sequence
  Synthetic
guuaaaaaucuugacacg

SEQ ID NO: 318081 - RNA, 19 nt, Artificial Sequence
  Synthetic
aguuaaaaaucuugacacg

SEQ ID NO: 318082 - RNA, 20 nt, Artificial Sequence
  Synthetic
aaguuaaaaaucuugacacg

SEQ ID NO: 318083 - RNA, 21 nt, Artificial Sequence
  Synthetic
uaaguuaaaaaucuugacacg

SEQ ID NO: 318084 - RNA, 22 nt, Artificial Sequence
  Synthetic
uuaaguuaaaaaucuugacacg

SEQ ID NO: 318085 - RNA, 23 nt, Artificial Sequence
  Synthetic
guuaaguuaaaaaucuugacacg

SEQ ID NO: 318086 - RNA, 24 nt, Artificial Sequence
  Synthetic
gguuaaguuaaaaaucuugacacg

SEQ ID NO: 318087 - RNA, 18 nt, Artificial Sequence
  Synthetic
aaacugucuuuguacacg

SEQ ID NO: 318088 - RNA, 19 nt, Artificial Sequence
  Synthetic
aaaacugucuuuguacacg

SEQ ID NO: 318089 - RNA, 20 nt, Artificial Sequence
  Synthetic
caaaacugucuuuguacacg

SEQ ID NO: 318090 - RNA, 21 nt, Artificial Sequence
  Synthetic
ccaaaacugucuuuguacacg

SEQ ID NO: 318091 - RNA, 22 nt, Artificial Sequence
  Synthetic
accaaaacugucuuuguacacg

SEQ ID NO: 318092 - RNA, 23 nt, Artificial Sequence
  Synthetic
caccaaaacugucuuuguacacg

SEQ ID NO: 318093 - RNA, 24 nt, Artificial Sequence
  Synthetic
ccaccaaaacugucuuuguacacg

SEQ ID NO: 318094 - RNA, 18 nt, Artificial Sequence
  Synthetic
uguuaugggagaaccacg

SEQ ID NO: 318095 - RNA, 19 nt, Artificial Sequence
  Synthetic
guguuaugggagaaccacg

SEQ ID NO: 318096 - RNA, 20 nt, Artificial Sequence
  Synthetic
aguguuaugggagaaccacg

SEQ ID NO: 318097 - RNA, 21 nt, Artificial Sequence
  Synthetic
aaguguuaugggagaaccacg

SEQ ID NO: 318098 - RNA, 22 nt, Artificial Sequence
  Synthetic
aaaguguuaugggagaaccacg

SEQ ID NO: 318099 - RNA, 23 nt, Artificial Sequence
  Synthetic
caaaguguuaugggagaaccacg

SEQ ID NO: 318100 - RNA, 24 nt, Artificial Sequence
  Synthetic
acaaaguguuaugggagaaccacg

SEQ ID NO: 318101 - RNA, 18 nt, Artificial Sequence
  Synthetic
gggcuucccugaaccacg

SEQ ID NO: 318102 - RNA, 19 nt, Artificial Sequence
  Synthetic
agggcuucccugaaccacg

SEQ ID NO: 318103 - RNA, 20 nt, Artificial Sequence
  Synthetic
gagggcuucccugaaccacg

SEQ ID NO: 318104 - RNA, 21 nt, Artificial Sequence
  Synthetic
ugagggcuucccugaaccacg

SEQ ID NO: 318105 - RNA, 22 nt, Artificial Sequence
  Synthetic
gugagggcuucccugaaccacg

SEQ ID NO: 318106 - RNA, 23 nt, Artificial Sequence
  Synthetic
ugugagggcuucccugaaccacg

SEQ ID NO: 318107 - RNA, 24 nt, Artificial Sequence
  Synthetic
cugugagggcuucccugaaccacg

SEQ ID NO: 318108 - RNA, 18 nt, Artificial Sequence
  Synthetic
cugggacagagcaccacg

SEQ ID NO: 318109 - RNA, 19 nt, Artificial Sequence
  Synthetic
ccugggacagagcaccacg

SEQ ID NO: 318110 - RNA, 20 nt, Artificial Sequence
  Synthetic
cccugggacagagcaccacg

SEQ ID NO: 318111 - RNA, 21 nt, Artificial Sequence
  Synthetic
ucccugggacagagcaccacg

SEQ ID NO: 318112 - RNA, 22 nt, Artificial Sequence
  Synthetic
cucccugggacagagcaccacg

SEQ ID NO: 318113 - RNA, 23 nt, Artificial Sequence
  Synthetic
ucucccugggacagagcaccacg

SEQ ID NO: 318114 - RNA, 24 nt, Artificial Sequence
  Synthetic
aucucccugggacagagcaccacg

SEQ ID NO: 318115 - RNA, 18 nt, Artificial Sequence
  Synthetic
aauaugaggaagaccacg

SEQ ID NO: 318116 - RNA, 19 nt, Artificial Sequence
  Synthetic
caauaugaggaagaccacg

SEQ ID NO: 318117 - RNA, 20 nt, Artificial Sequence
  Synthetic
acaauaugaggaagaccacg

SEQ ID NO: 318118 - RNA, 21 nt, Artificial Sequence
  Synthetic
uacaauaugaggaagaccacg

SEQ ID NO: 318119 - RNA, 22 nt, Artificial Sequence
  Synthetic
guacaauaugaggaagaccacg

SEQ ID NO: 318120 - RNA, 23 nt, Artificial Sequence
  Synthetic
uguacaauaugaggaagaccacg

SEQ ID NO: 318121 - RNA, 24 nt, Artificial Sequence
  Synthetic
cuguacaauaugaggaagaccacg

SEQ ID NO: 318122 - RNA, 18 nt, Artificial Sequence
  Synthetic
agguguuuacuccccacg

SEQ ID NO: 318123 - RNA, 19 nt, Artificial Sequence
  Synthetic
aagguguuuacuccccacg

SEQ ID NO: 318124 - RNA, 20 nt, Artificial Sequence
  Synthetic
gaagguguuuacuccccacg

SEQ ID NO: 318125 - RNA, 21 nt, Artificial Sequence
  Synthetic
cgaagguguuuacuccccacg

SEQ ID NO: 318126 - RNA, 22 nt, Artificial Sequence
  Synthetic
ccgaagguguuuacuccccacg

SEQ ID NO: 318127 - RNA, 23 nt, Artificial Sequence
  Synthetic
accgaagguguuuacuccccacg

SEQ ID NO: 318128 - RNA, 24 nt, Artificial Sequence
  Synthetic
aaccgaagguguuuacuccccacg

SEQ ID NO: 318129 - RNA, 18 nt, Artificial Sequence
  Synthetic
ucuuugggagaagccacg

SEQ ID NO: 318130 - RNA, 19 nt, Artificial Sequence
  Synthetic
cucuuugggagaagccacg

SEQ ID NO: 318131 - RNA, 20 nt, Artificial Sequence
  Synthetic
ucucuuugggagaagccacg

SEQ ID NO: 318132 - RNA, 21 nt, Artificial Sequence
  Synthetic
uucucuuugggagaagccacg

SEQ ID NO: 318133 - RNA, 22 nt, Artificial Sequence
  Synthetic
uuucucuuugggagaagccacg

SEQ ID NO: 318134 - RNA, 23 nt, Artificial Sequence
  Synthetic
auuucucuuugggagaagccacg

SEQ ID NO: 318135 - RNA, 24 nt, Artificial Sequence
  Synthetic
uauuucucuuugggagaagccacg

SEQ ID NO: 318136 - RNA, 18 nt, Artificial Sequence
  Synthetic
uacuucccaccagccacg

SEQ ID NO: 318137 - RNA, 19 nt, Artificial Sequence
  Synthetic
auacuucccaccagccacg

SEQ ID NO: 318138 - RNA, 20 nt, Artificial Sequence
  Synthetic
uauacuucccaccagccacg

SEQ ID NO: 318139 - RNA, 21 nt, Artificial Sequence
  Synthetic
guauacuucccaccagccacg

SEQ ID NO: 318140 - RNA, 22 nt, Artificial Sequence
  Synthetic
uguauacuucccaccagccacg

SEQ ID NO: 318141 - RNA, 23 nt, Artificial Sequence
  Synthetic
auguauacuucccaccagccacg

SEQ ID NO: 318142 - RNA, 24 nt, Artificial Sequence
  Synthetic
aauguauacuucccaccagccacg

SEQ ID NO: 318143 - RNA, 18 nt, Artificial Sequence
  Synthetic
ggcuugccuuaugccacg

SEQ ID NO: 318144 - RNA, 19 nt, Artificial Sequence
  Synthetic
aggcuugccuuaugccacg

SEQ ID NO: 318145 - RNA, 20 nt, Artificial Sequence
  Synthetic
caggcuugccuuaugccacg

SEQ ID NO: 318146 - RNA, 21 nt, Artificial Sequence
  Synthetic
acaggcuugccuuaugccacg

SEQ ID NO: 318147 - RNA, 22 nt, Artificial Sequence
  Synthetic
uacaggcuugccuuaugccacg

SEQ ID NO: 318148 - RNA, 23 nt, Artificial Sequence
  Synthetic
auacaggcuugccuuaugccacg

SEQ ID NO: 318149 - RNA, 24 nt, Artificial Sequence
  Synthetic
uauacaggcuugccuuaugccacg

SEQ ID NO: 318150 - RNA, 18 nt, Artificial Sequence
  Synthetic
ucucccggugcugccacg

SEQ ID NO: 318151 - RNA, 19 nt, Artificial Sequence
  Synthetic
aucucccggugcugccacg

SEQ ID NO: 318152 - RNA, 20 nt, Artificial Sequence
  Synthetic
aaucucccggugcugccacg

SEQ ID NO: 318153 - RNA, 21 nt, Artificial Sequence
  Synthetic
caaucucccggugcugccacg

SEQ ID NO: 318154 - RNA, 22 nt, Artificial Sequence
  Synthetic
acaaucucccggugcugccacg

SEQ ID NO: 318155 - RNA, 23 nt, Artificial Sequence
  Synthetic
cacaaucucccggugcugccacg

SEQ ID NO: 318156 - RNA, 24 nt, Artificial Sequence
  Synthetic
gcacaaucucccggugcugccacg

SEQ ID NO: 318157 - RNA, 18 nt, Artificial Sequence
  Synthetic
aaugaaagaacauccacg

SEQ ID NO: 318158 - RNA, 19 nt, Artificial Sequence
  Synthetic
caaugaaagaacauccacg

SEQ ID NO: 318159 - RNA, 20 nt, Artificial Sequence
  Synthetic
acaaugaaagaacauccacg

SEQ ID NO: 318160 - RNA, 21 nt, Artificial Sequence
  Synthetic
aacaaugaaagaacauccacg

SEQ ID NO: 318161 - RNA, 22 nt, Artificial Sequence
  Synthetic
aaacaaugaaagaacauccacg

SEQ ID NO: 318162 - RNA, 23 nt, Artificial Sequence
  Synthetic
aaaacaaugaaagaacauccacg

SEQ ID NO: 318163 - RNA, 24 nt, Artificial Sequence
  Synthetic
aaaaacaaugaaagaacauccacg

SEQ ID NO: 318164 - RNA, 18 nt, Artificial Sequence
  Synthetic
aaaauagaacucuccacg

SEQ ID NO: 318165 - RNA, 19 nt, Artificial Sequence
  Synthetic
caaaauagaacucuccacg

SEQ ID NO: 318166 - RNA, 20 nt, Artificial Sequence
  Synthetic
acaaaauagaacucuccacg

SEQ ID NO: 318167 - RNA, 21 nt, Artificial Sequence
  Synthetic
aacaaaauagaacucuccacg

SEQ ID NO: 318168 - RNA, 22 nt, Artificial Sequence
  Synthetic
aaacaaaauagaacucuccacg

SEQ ID NO: 318169 - RNA, 23 nt, Artificial Sequence
  Synthetic
aaaacaaaauagaacucuccacg

SEQ ID NO: 318170 - RNA, 24 nt, Artificial Sequence
  Synthetic
caaaacaaaauagaacucuccacg

SEQ ID NO: 318171 - RNA, 18 nt, Artificial Sequence
  Synthetic
cgugcaauauguuccacg

SEQ ID NO: 318172 - RNA, 19 nt, Artificial Sequence
  Synthetic
acgugcaauauguuccacg

SEQ ID NO: 318173 - RNA, 20 nt, Artificial Sequence
  Synthetic
uacgugcaauauguuccacg

SEQ ID NO: 318174 - RNA, 21 nt, Artificial Sequence
  Synthetic
uuacgugcaauauguuccacg

SEQ ID NO: 318175 - RNA, 22 nt, Artificial Sequence
  Synthetic
guuacgugcaauauguuccacg

SEQ ID NO: 318176 - RNA, 23 nt, Artificial Sequence
  Synthetic
aguuacgugcaauauguuccacg

SEQ ID NO: 318177 - RNA, 24 nt, Artificial Sequence
  Synthetic
gaguuacgugcaauauguuccacg

SEQ ID NO: 318178 - RNA, 18 nt, Artificial Sequence
  Synthetic
aacacacgcagaagcacg

SEQ ID NO: 318179 - RNA, 19 nt, Artificial Sequence
  Synthetic
aaacacacgcagaagcacg

SEQ ID NO: 318180 - RNA, 20 nt, Artificial Sequence
  Synthetic
caaacacacgcagaagcacg

SEQ ID NO: 318181 - RNA, 21 nt, Artificial Sequence
  Synthetic
acaaacacacgcagaagcacg

SEQ ID NO: 318182 - RNA, 22 nt, Artificial Sequence
  Synthetic
aacaaacacacgcagaagcacg

SEQ ID NO: 318183 - RNA, 23 nt, Artificial Sequence
  Synthetic
aaacaaacacacgcagaagcacg

SEQ ID NO: 318184 - RNA, 24 nt, Artificial Sequence
  Synthetic
uaaacaaacacacgcagaagcacg

SEQ ID NO: 318185 - RNA, 18 nt, Artificial Sequence
  Synthetic
agagggcgcagaagcacg

SEQ ID NO: 318186 - RNA, 19 nt, Artificial Sequence
  Synthetic
cagagggcgcagaagcacg

SEQ ID NO: 318187 - RNA, 20 nt, Artificial Sequence
  Synthetic
acagagggcgcagaagcacg

SEQ ID NO: 318188 - RNA, 21 nt, Artificial Sequence
  Synthetic
cacagagggcgcagaagcacg

SEQ ID NO: 318189 - RNA, 22 nt, Artificial Sequence
  Synthetic
ccacagagggcgcagaagcacg

SEQ ID NO: 318190 - RNA, 23 nt, Artificial Sequence
  Synthetic
cccacagagggcgcagaagcacg

SEQ ID NO: 318191 - RNA, 24 nt, Artificial Sequence
  Synthetic
gcccacagagggcgcagaagcacg

SEQ ID NO: 318192 - RNA, 18 nt, Artificial Sequence
  Synthetic
ugccucuuagugcgcacg

SEQ ID NO: 318193 - RNA, 19 nt, Artificial Sequence
  Synthetic
uugccucuuagugcgcacg

SEQ ID NO: 318194 - RNA, 20 nt, Artificial Sequence
  Synthetic
uuugccucuuagugcgcacg

SEQ ID NO: 318195 - RNA, 21 nt, Artificial Sequence
  Synthetic
uuuugccucuuagugcgcacg

SEQ ID NO: 318196 - RNA, 22 nt, Artificial Sequence
  Synthetic
auuuugccucuuagugcgcacg

SEQ ID NO: 318197 - RNA, 23 nt, Artificial Sequence
  Synthetic
cauuuugccucuuagugcgcacg

SEQ ID NO: 318198 - RNA, 24 nt, Artificial Sequence
  Synthetic
acauuuugccucuuagugcgcacg

SEQ ID NO: 318199 - RNA, 18 nt, Artificial Sequence
  Synthetic
caagugauacuuggcacg

SEQ ID NO: 318200 - RNA, 19 nt, Artificial Sequence
  Synthetic
ucaagugauacuuggcacg

SEQ ID NO: 318201 - RNA, 20 nt, Artificial Sequence
  Synthetic
uucaagugauacuuggcacg

SEQ ID NO: 318202 - RNA, 21 nt, Artificial Sequence
  Synthetic
auucaagugauacuuggcacg

SEQ ID NO: 318203 - RNA, 22 nt, Artificial Sequence
  Synthetic
gauucaagugauacuuggcacg

SEQ ID NO: 318204 - RNA, 23 nt, Artificial Sequence
  Synthetic
agauucaagugauacuuggcacg

SEQ ID NO: 318205 - RNA, 24 nt, Artificial Sequence
  Synthetic
cagauucaagugauacuuggcacg

SEQ ID NO: 318206 - RNA, 18 nt, Artificial Sequence
  Synthetic
gggugauucugcugcacg

SEQ ID NO: 318207 - RNA, 19 nt, Artificial Sequence
  Synthetic
ggggugauucugcugcacg

SEQ ID NO: 318208 - RNA, 20 nt, Artificial Sequence
  Synthetic
aggggugauucugcugcacg

SEQ ID NO: 318209 - RNA, 21 nt, Artificial Sequence
  Synthetic
caggggugauucugcugcacg

SEQ ID NO: 318210 - RNA, 22 nt, Artificial Sequence
  Synthetic
ccaggggugauucugcugcacg

SEQ ID NO: 318211 - RNA, 23 nt, Artificial Sequence
  Synthetic
gccaggggugauucugcugcacg

SEQ ID NO: 318212 - RNA, 24 nt, Artificial Sequence
  Synthetic
agccaggggugauucugcugcacg

SEQ ID NO: 318213 - RNA, 18 nt, Artificial Sequence
  Synthetic
gauccacgugccaucacg

SEQ ID NO: 318214 - RNA, 19 nt, Artificial Sequence
  Synthetic
agauccacgugccaucacg

SEQ ID NO: 318215 - RNA, 20 nt, Artificial Sequence
  Synthetic
aagauccacgugccaucacg

SEQ ID NO: 318216 - RNA, 21 nt, Artificial Sequence
  Synthetic
aaagauccacgugccaucacg

SEQ ID NO: 318217 - RNA, 22 nt, Artificial Sequence
  Synthetic
uaaagauccacgugccaucacg

SEQ ID NO: 318218 - RNA, 23 nt, Artificial Sequence
  Synthetic
guaaagauccacgugccaucacg

SEQ ID NO: 318219 - RNA, 24 nt, Artificial Sequence
  Synthetic
gguaaagauccacgugccaucacg

SEQ ID NO: 318220 - RNA, 18 nt, Artificial Sequence
  Synthetic
uaacgaauaugggucacg

SEQ ID NO: 318221 - RNA, 19 nt, Artificial Sequence
  Synthetic
uuaacgaauaugggucacg

SEQ ID NO: 318222 - RNA, 20 nt, Artificial Sequence
  Synthetic
uuuaacgaauaugggucacg

SEQ ID NO: 318223 - RNA, 21 nt, Artificial Sequence
  Synthetic
cuuuaacgaauaugggucacg

SEQ ID NO: 318224 - RNA, 22 nt, Artificial Sequence
  Synthetic
ucuuuaacgaauaugggucacg

SEQ ID NO: 318225 - RNA, 23 nt, Artificial Sequence
  Synthetic
cucuuuaacgaauaugggucacg

SEQ ID NO: 318226 - RNA, 24 nt, Artificial Sequence
  Synthetic
acucuuuaacgaauaugggucacg

SEQ ID NO: 318227 - RNA, 18 nt, Artificial Sequence
  Synthetic
augugcagauuugucacg

SEQ ID NO: 318228 - RNA, 19 nt, Artificial Sequence
  Synthetic
caugugcagauuugucacg

SEQ ID NO: 318229 - RNA, 20 nt, Artificial Sequence
  Synthetic
gcaugugcagauuugucacg

SEQ ID NO: 318230 - RNA, 21 nt, Artificial Sequence
  Synthetic
ugcaugugcagauuugucacg

SEQ ID NO: 318231 - RNA, 22 nt, Artificial Sequence
  Synthetic
gugcaugugcagauuugucacg

SEQ ID NO: 318232 - RNA, 23 nt, Artificial Sequence
  Synthetic
ggugcaugugcagauuugucacg

SEQ ID NO: 318233 - RNA, 24 nt, Artificial Sequence
  Synthetic
aggugcaugugcagauuugucacg

SEQ ID NO: 318234 - RNA, 18 nt, Artificial Sequence
  Synthetic
guaagacccagcuucacg

SEQ ID NO: 318235 - RNA, 19 nt, Artificial Sequence
  Synthetic
cguaagacccagcuucacg

SEQ ID NO: 318236 - RNA, 20 nt, Artificial Sequence
  Synthetic
gcguaagacccagcuucacg

SEQ ID NO: 318237 - RNA, 21 nt, Artificial Sequence
  Synthetic
agcguaagacccagcuucacg

SEQ ID NO: 318238 - RNA, 22 nt, Artificial Sequence
  Synthetic
gagcguaagacccagcuucacg

SEQ ID NO: 318239 - RNA, 23 nt, Artificial Sequence
  Synthetic
agagcguaagacccagcuucacg

SEQ ID NO: 318240 - RNA, 24 nt, Artificial Sequence
  Synthetic
cagagcguaagacccagcuucacg

SEQ ID NO: 318241 - RNA, 18 nt, Artificial Sequence
  Synthetic
uguucuaauuuuaagacg

SEQ ID NO: 318242 - RNA, 19 nt, Artificial Sequence
  Synthetic
uuguucuaauuuuaagacg

SEQ ID NO: 318243 - RNA, 20 nt, Artificial Sequence
  Synthetic
auuguucuaauuuuaagacg

SEQ ID NO: 318244 - RNA, 21 nt, Artificial Sequence
  Synthetic
uauuguucuaauuuuaagacg

SEQ ID NO: 318245 - RNA, 22 nt, Artificial Sequence
  Synthetic
uuauuguucuaauuuuaagacg

SEQ ID NO: 318246 - RNA, 23 nt, Artificial Sequence
  Synthetic
uuuauuguucuaauuuuaagacg

SEQ ID NO: 318247 - RNA, 24 nt, Artificial Sequence
  Synthetic
guuuauuguucuaauuuuaagacg

SEQ ID NO: 318248 - RNA, 18 nt, Artificial Sequence
  Synthetic
ggcaagauugcacagacg

SEQ ID NO: 318249 - RNA, 19 nt, Artificial Sequence
  Synthetic
aggcaagauugcacagacg

SEQ ID NO: 318250 - RNA, 20 nt, Artificial Sequence
  Synthetic
uaggcaagauugcacagacg

SEQ ID NO: 318251 - RNA, 21 nt, Artificial Sequence
  Synthetic
auaggcaagauugcacagacg

SEQ ID NO: 318252 - RNA, 22 nt, Artificial Sequence
  Synthetic
gauaggcaagauugcacagacg

SEQ ID NO: 318253 - RNA, 23 nt, Artificial Sequence
  Synthetic
agauaggcaagauugcacagacg

SEQ ID NO: 318254 - RNA, 24 nt, Artificial Sequence
  Synthetic
aagauaggcaagauugcacagacg

SEQ ID NO: 318255 - RNA, 18 nt, Artificial Sequence
  Synthetic
gaguaucaaggacagacg

SEQ ID NO: 318256 - RNA, 19 nt, Artificial Sequence
  Synthetic
agaguaucaaggacagacg

SEQ ID NO: 318257 - RNA, 20 nt, Artificial Sequence
  Synthetic
aagaguaucaaggacagacg

SEQ ID NO: 318258 - RNA, 21 nt, Artificial Sequence
  Synthetic
caagaguaucaaggacagacg

SEQ ID NO: 318259 - RNA, 22 nt, Artificial Sequence
  Synthetic
acaagaguaucaaggacagacg

SEQ ID NO: 318260 - RNA, 23 nt, Artificial Sequence
  Synthetic
aacaagaguaucaaggacagacg

SEQ ID NO: 318261 - RNA, 24 nt, Artificial Sequence
  Synthetic
aaacaagaguaucaaggacagacg

SEQ ID NO: 318262 - RNA, 18 nt, Artificial Sequence
  Synthetic
caggaagagugacagacg

SEQ ID NO: 318263 - RNA, 19 nt, Artificial Sequence
  Synthetic
ucaggaagagugacagacg

SEQ ID NO: 318264 - RNA, 20 nt, Artificial Sequence
  Synthetic
gucaggaagagugacagacg

SEQ ID NO: 318265 - RNA, 21 nt, Artificial Sequence
  Synthetic
ggucaggaagagugacagacg

SEQ ID NO: 318266 - RNA, 22 nt, Artificial Sequence
  Synthetic
gggucaggaagagugacagacg

SEQ ID NO: 318267 - RNA, 23 nt, Artificial Sequence
  Synthetic
ggggucaggaagagugacagacg

SEQ ID NO: 318268 - RNA, 24 nt, Artificial Sequence
  Synthetic
uggggucaggaagagugacagacg

SEQ ID NO: 318269 - RNA, 18 nt, Artificial Sequence
  Synthetic
gaucauguauuacagacg

SEQ ID NO: 318270 - RNA, 19 nt, Artificial Sequence
  Synthetic
agaucauguauuacagacg

SEQ ID NO: 318271 - RNA, 20 nt, Artificial Sequence
  Synthetic
uagaucauguauuacagacg

SEQ ID NO: 318272 - RNA, 21 nt, Artificial Sequence
  Synthetic
uuagaucauguauuacagacg

SEQ ID NO: 318273 - RNA, 22 nt, Artificial Sequence
  Synthetic
auuagaucauguauuacagacg

SEQ ID NO: 318274 - RNA, 23 nt, Artificial Sequence
  Synthetic
cauuagaucauguauuacagacg

SEQ ID NO: 318275 - RNA, 24 nt, Artificial Sequence
  Synthetic
ucauuagaucauguauuacagacg

SEQ ID NO: 318276 - RNA, 18 nt, Artificial Sequence
  Synthetic
agauuuugggcugagacg

SEQ ID NO: 318277 - RNA, 19 nt, Artificial Sequence
  Synthetic
gagauuuugggcugagacg

SEQ ID NO: 318278 - RNA, 20 nt, Artificial Sequence
  Synthetic
ggagauuuugggcugagacg

SEQ ID NO: 318279 - RNA, 21 nt, Artificial Sequence
  Synthetic
aggagauuuugggcugagacg

SEQ ID NO: 318280 - RNA, 22 nt, Artificial Sequence
  Synthetic
aaggagauuuugggcugagacg

SEQ ID NO: 318281 - RNA, 23 nt, Artificial Sequence
  Synthetic
uaaggagauuuugggcugagacg

SEQ ID NO: 318282 - RNA, 24 nt, Artificial Sequence
  Synthetic
uuaaggagauuuugggcugagacg

SEQ ID NO: 318283 - RNA, 18 nt, Artificial Sequence
  Synthetic
aguuuuugggcugagacg

SEQ ID NO: 318284 - RNA, 19 nt, Artificial Sequence
  Synthetic
gaguuuuugggcugagacg

SEQ ID NO: 318285 - RNA, 20 nt, Artificial Sequence
  Synthetic
agaguuuuugggcugagacg

SEQ ID NO: 318286 - RNA, 21 nt, Artificial Sequence
  Synthetic
aagaguuuuugggcugagacg

SEQ ID NO: 318287 - RNA, 22 nt, Artificial Sequence
  Synthetic
aaagaguuuuugggcugagacg

SEQ ID NO: 318288 - RNA, 23 nt, Artificial Sequence
  Synthetic
uaaagaguuuuugggcugagacg

SEQ ID NO: 318289 - RNA, 24 nt, Artificial Sequence
  Synthetic
uuaaagaguuuuugggcugagacg

SEQ ID NO: 318290 - RNA, 18 nt, Artificial Sequence
  Synthetic
ucccagcuacucaggacg

SEQ ID NO: 318291 - RNA, 19 nt, Artificial Sequence
  Synthetic
aucccagcuacucaggacg

SEQ ID NO: 318292 - RNA, 20 nt, Artificial Sequence
  Synthetic
aaucccagcuacucaggacg

SEQ ID NO: 318293 - RNA, 21 nt, Artificial Sequence
  Synthetic
uaaucccagcuacucaggacg

SEQ ID NO: 318294 - RNA, 22 nt, Artificial Sequence
  Synthetic
guaaucccagcuacucaggacg

SEQ ID NO: 318295 - RNA, 23 nt, Artificial Sequence
  Synthetic
uguaaucccagcuacucaggacg

SEQ ID NO: 318296 - RNA, 24 nt, Artificial Sequence
  Synthetic
cuguaaucccagcuacucaggacg

SEQ ID NO: 318297 - RNA, 18 nt, Artificial Sequence
  Synthetic
ccgauggugauguggacg

SEQ ID NO: 318298 - RNA, 19 nt, Artificial Sequence
  Synthetic
gccgauggugauguggacg

SEQ ID NO: 318299 - RNA, 20 nt, Artificial Sequence
  Synthetic
ugccgauggugauguggacg

SEQ ID NO: 318300 - RNA, 21 nt, Artificial Sequence
  Synthetic
augccgauggugauguggacg

SEQ ID NO: 318301 - RNA, 22 nt, Artificial Sequence
  Synthetic
aaugccgauggugauguggacg

SEQ ID NO: 318302 - RNA, 23 nt, Artificial Sequence
  Synthetic
aaaugccgauggugauguggacg

SEQ ID NO: 318303 - RNA, 24 nt, Artificial Sequence
  Synthetic
aaaaugccgauggugauguggacg

SEQ ID NO: 318304 - RNA, 18 nt, Artificial Sequence
  Synthetic
gaauucuuggcacugacg

SEQ ID NO: 318305 - RNA, 19 nt, Artificial Sequence
  Synthetic
ugaauucuuggcacugacg

SEQ ID NO: 318306 - RNA, 20 nt, Artificial Sequence
  Synthetic
cugaauucuuggcacugacg

SEQ ID NO: 318307 - RNA, 21 nt, Artificial Sequence
  Synthetic
ccugaauucuuggcacugacg

SEQ ID NO: 318308 - RNA, 22 nt, Artificial Sequence
  Synthetic
uccugaauucuuggcacugacg

SEQ ID NO: 318309 - RNA, 23 nt, Artificial Sequence
  Synthetic
cuccugaauucuuggcacugacg

SEQ ID NO: 318310 - RNA, 24 nt, Artificial Sequence
  Synthetic
acuccugaauucuuggcacugacg

SEQ ID NO: 318311 - RNA, 18 nt, Artificial Sequence
  Synthetic
uagguuacugaggugacg

SEQ ID NO: 318312 - RNA, 19 nt, Artificial Sequence
  Synthetic
auagguuacugaggugacg

SEQ ID NO: 318313 - RNA, 20 nt, Artificial Sequence
  Synthetic
cauagguuacugaggugacg

SEQ ID NO: 318314 - RNA, 21 nt, Artificial Sequence
  Synthetic
acauagguuacugaggugacg

SEQ ID NO: 318315 - RNA, 22 nt, Artificial Sequence
  Synthetic
gacauagguuacugaggugacg

SEQ ID NO: 318316 - RNA, 23 nt, Artificial Sequence
  Synthetic
agacauagguuacugaggugacg

SEQ ID NO: 318317 - RNA, 24 nt, Artificial Sequence
  Synthetic
aagacauagguuacugaggugacg

SEQ ID NO: 318318 - RNA, 18 nt, Artificial Sequence
  Synthetic
aggcacugugcugugacg

SEQ ID NO: 318319 - RNA, 19 nt, Artificial Sequence
  Synthetic
caggcacugugcugugacg

SEQ ID NO: 318320 - RNA, 20 nt, Artificial Sequence
  Synthetic
gcaggcacugugcugugacg

SEQ ID NO: 318321 - RNA, 21 nt, Artificial Sequence
  Synthetic
ugcaggcacugugcugugacg

SEQ ID NO: 318322 - RNA, 22 nt, Artificial Sequence
  Synthetic
uugcaggcacugugcugugacg

SEQ ID NO: 318323 - RNA, 23 nt, Artificial Sequence
  Synthetic
guugcaggcacugugcugugacg

SEQ ID NO: 318324 - RNA, 24 nt, Artificial Sequence
  Synthetic
uguugcaggcacugugcugugacg

SEQ ID NO: 318325 - RNA, 18 nt, Artificial Sequence
  Synthetic
auauaugguauaaauacg

SEQ ID NO: 318326 - RNA, 19 nt, Artificial Sequence
  Synthetic
cauauaugguauaaauacg

SEQ ID NO: 318327 - RNA, 20 nt, Artificial Sequence
  Synthetic
acauauaugguauaaauacg

SEQ ID NO: 318328 - RNA, 21 nt, Artificial Sequence
  Synthetic
aacauauaugguauaaauacg

SEQ ID NO: 318329 - RNA, 22 nt, Artificial Sequence
  Synthetic
uaacauauaugguauaaauacg

SEQ ID NO: 318330 - RNA, 23 nt, Artificial Sequence
  Synthetic
auaacauauaugguauaaauacg

SEQ ID NO: 318331 - RNA, 24 nt, Artificial Sequence
  Synthetic
aauaacauauaugguauaaauacg

SEQ ID NO: 318332 - RNA, 18 nt, Artificial Sequence
  Synthetic
auuuauuuuuaauauacg

SEQ ID NO: 318333 - RNA, 19 nt, Artificial Sequence
  Synthetic
uauuuauuuuuaauauacg

SEQ ID NO: 318334 - RNA, 20 nt, Artificial Sequence
  Synthetic
auauuuauuuuuaauauacg

SEQ ID NO: 318335 - RNA, 21 nt, Artificial Sequence
  Synthetic
uauauuuauuuuuaauauacg

SEQ ID NO: 318336 - RNA, 22 nt, Artificial Sequence
  Synthetic
auauauuuauuuuuaauauacg

SEQ ID NO: 318337 - RNA, 23 nt, Artificial Sequence
  Synthetic
uauauauuuauuuuuaauauacg

SEQ ID NO: 318338 - RNA, 24 nt, Artificial Sequence
  Synthetic
guauauauuuauuuuuaauauacg

SEQ ID NO: 318339 - RNA, 18 nt, Artificial Sequence
  Synthetic
uauaaauauauauauacg

SEQ ID NO: 318340 - RNA, 19 nt, Artificial Sequence
  Synthetic
cuauaaauauauauauacg

SEQ ID NO: 318341 - RNA, 20 nt, Artificial Sequence
  Synthetic
acuauaaauauauauauacg

SEQ ID NO: 318342 - RNA, 21 nt, Artificial Sequence
  Synthetic
uacuauaaauauauauauacg

SEQ ID NO: 318343 - RNA, 22 nt, Artificial Sequence
  Synthetic
auacuauaaauauauauauacg

SEQ ID NO: 318344 - RNA, 23 nt, Artificial Sequence
  Synthetic
cauacuauaaauauauauauacg

SEQ ID NO: 318345 - RNA, 24 nt, Artificial Sequence
  Synthetic
ccauacuauaaauauauauauacg

SEQ ID NO: 318346 - RNA, 18 nt, Artificial Sequence
  Synthetic
guacaaacacaguauacg

SEQ ID NO: 318347 - RNA, 19 nt, Artificial Sequence
  Synthetic
gguacaaacacaguauacg

SEQ ID NO: 318348 - RNA, 20 nt, Artificial Sequence
  Synthetic
agguacaaacacaguauacg

SEQ ID NO: 318349 - RNA, 21 nt, Artificial Sequence
  Synthetic
cagguacaaacacaguauacg

SEQ ID NO: 318350 - RNA, 22 nt, Artificial Sequence
  Synthetic
acagguacaaacacaguauacg

SEQ ID NO: 318351 - RNA, 23 nt, Artificial Sequence
  Synthetic
aacagguacaaacacaguauacg

SEQ ID NO: 318352 - RNA, 24 nt, Artificial Sequence
  Synthetic
gaacagguacaaacacaguauacg

SEQ ID NO: 318353 - RNA, 18 nt, Artificial Sequence
  Synthetic
aaaaguuuggauuauacg

SEQ ID NO: 318354 - RNA, 19 nt, Artificial Sequence
  Synthetic
caaaaguuuggauuauacg

SEQ ID NO: 318355 - RNA, 20 nt, Artificial Sequence
  Synthetic
gcaaaaguuuggauuauacg

SEQ ID NO: 318356 - RNA, 21 nt, Artificial Sequence
  Synthetic
ugcaaaaguuuggauuauacg

SEQ ID NO: 318357 - RNA, 22 nt, Artificial Sequence
  Synthetic
augcaaaaguuuggauuauacg

SEQ ID NO: 318358 - RNA, 23 nt, Artificial Sequence
  Synthetic
gaugcaaaaguuuggauuauacg

SEQ ID NO: 318359 - RNA, 24 nt, Artificial Sequence
  Synthetic
ggaugcaaaaguuuggauuauacg

SEQ ID NO: 318360 - RNA, 18 nt, Artificial Sequence
  Synthetic
uaucagauuaaaaguacg

SEQ ID NO: 318361 - RNA, 19 nt, Artificial Sequence
  Synthetic
auaucagauuaaaaguacg

SEQ ID NO: 318362 - RNA, 20 nt, Artificial Sequence
  Synthetic
aauaucagauuaaaaguacg

SEQ ID NO: 318363 - RNA, 21 nt, Artificial Sequence
  Synthetic
aaauaucagauuaaaaguacg

SEQ ID NO: 318364 - RNA, 22 nt, Artificial Sequence
  Synthetic
aaaauaucagauuaaaaguacg

SEQ ID NO: 318365 - RNA, 23 nt, Artificial Sequence
  Synthetic
uaaaauaucagauuaaaaguacg

SEQ ID NO: 318366 - RNA, 24 nt, Artificial Sequence
  Synthetic
auaaaauaucagauuaaaaguacg

SEQ ID NO: 318367 - RNA, 18 nt, Artificial Sequence
  Synthetic
auuugacucugaaguacg

SEQ ID NO: 318368 - RNA, 19 nt, Artificial Sequence
  Synthetic
cauuugacucugaaguacg

SEQ ID NO: 318369 - RNA, 20 nt, Artificial Sequence
  Synthetic
acauuugacucugaaguacg

SEQ ID NO: 318370 - RNA, 21 nt, Artificial Sequence
  Synthetic
cacauuugacucugaaguacg

SEQ ID NO: 318371 - RNA, 22 nt, Artificial Sequence
  Synthetic
ucacauuugacucugaaguacg

SEQ ID NO: 318372 - RNA, 23 nt, Artificial Sequence
  Synthetic
uucacauuugacucugaaguacg

SEQ ID NO: 318373 - RNA, 24 nt, Artificial Sequence
  Synthetic
cuucacauuugacucugaaguacg

SEQ ID NO: 318374 - RNA, 18 nt, Artificial Sequence
  Synthetic
ugaaauacugagaguacg

SEQ ID NO: 318375 - RNA, 19 nt, Artificial Sequence
  Synthetic
uugaaauacugagaguacg

SEQ ID NO: 318376 - RNA, 20 nt, Artificial Sequence
  Synthetic
auugaaauacugagaguacg

SEQ ID NO: 318377 - RNA, 21 nt, Artificial Sequence
  Synthetic
aauugaaauacugagaguacg

SEQ ID NO: 318378 - RNA, 22 nt, Artificial Sequence
  Synthetic
uaauugaaauacugagaguacg

SEQ ID NO: 318379 - RNA, 23 nt, Artificial Sequence
  Synthetic
auaauugaaauacugagaguacg

SEQ ID NO: 318380 - RNA, 24 nt, Artificial Sequence
  Synthetic
gauaauugaaauacugagaguacg

SEQ ID NO: 318381 - RNA, 18 nt, Artificial Sequence
  Synthetic
uuagaggugaauaguacg

SEQ ID NO: 318382 - RNA, 19 nt, Artificial Sequence
  Synthetic
uuuagaggugaauaguacg

SEQ ID NO: 318383 - RNA, 20 nt, Artificial Sequence
  Synthetic
uuuuagaggugaauaguacg

SEQ ID NO: 318384 - RNA, 21 nt, Artificial Sequence
  Synthetic
cuuuuagaggugaauaguacg

SEQ ID NO: 318385 - RNA, 22 nt, Artificial Sequence
  Synthetic
acuuuuagaggugaauaguacg

SEQ ID NO: 318386 - RNA, 23 nt, Artificial Sequence
  Synthetic
uacuuuuagaggugaauaguacg

SEQ ID NO: 318387 - RNA, 24 nt, Artificial Sequence
  Synthetic
uuacuuuuagaggugaauaguacg

SEQ ID NO: 318388 - RNA, 18 nt, Artificial Sequence
  Synthetic
ccaauauaccucgguacg

SEQ ID NO: 318389 - RNA, 19 nt, Artificial Sequence
  Synthetic
accaauauaccucgguacg

SEQ ID NO: 318390 - RNA, 20 nt, Artificial Sequence
  Synthetic
caccaauauaccucgguacg

SEQ ID NO: 318391 - RNA, 21 nt, Artificial Sequence
  Synthetic
ucaccaauauaccucgguacg

SEQ ID NO: 318392 - RNA, 22 nt, Artificial Sequence
  Synthetic
aucaccaauauaccucgguacg

SEQ ID NO: 318393 - RNA, 23 nt, Artificial Sequence
  Synthetic
gaucaccaauauaccucgguacg

SEQ ID NO: 318394 - RNA, 24 nt, Artificial Sequence
  Synthetic
cgaucaccaauauaccucgguacg

SEQ ID NO: 318395 - RNA, 18 nt, Artificial Sequence
  Synthetic
auggcaugacuguguacg

SEQ ID NO: 318396 - RNA, 19 nt, Artificial Sequence
  Synthetic
gauggcaugacuguguacg

SEQ ID NO: 318397 - RNA, 20 nt, Artificial Sequence
  Synthetic
ggauggcaugacuguguacg

SEQ ID NO: 318398 - RNA, 21 nt, Artificial Sequence
  Synthetic
uggauggcaugacuguguacg

SEQ ID NO: 318399 - RNA, 22 nt, Artificial Sequence
  Synthetic
guggauggcaugacuguguacg

SEQ ID NO: 318400 - RNA, 23 nt, Artificial Sequence
  Synthetic
uguggauggcaugacuguguacg

SEQ ID NO: 318401 - RNA, 24 nt, Artificial Sequence
  Synthetic
uuguggauggcaugacuguguacg

SEQ ID NO: 318402 - RNA, 18 nt, Artificial Sequence
  Synthetic
aaauaaucccauuguacg

SEQ ID NO: 318403 - RNA, 19 nt, Artificial Sequence
  Synthetic
gaaauaaucccauuguacg

SEQ ID NO: 318404 - RNA, 20 nt, Artificial Sequence
  Synthetic
ggaaauaaucccauuguacg

SEQ ID NO: 318405 - RNA, 21 nt, Artificial Sequence
  Synthetic
aggaaauaaucccauuguacg

SEQ ID NO: 318406 - RNA, 22 nt, Artificial Sequence
  Synthetic
caggaaauaaucccauuguacg

SEQ ID NO: 318407 - RNA, 23 nt, Artificial Sequence
  Synthetic
ucaggaaauaaucccauuguacg

SEQ ID NO: 318408 - RNA, 24 nt, Artificial Sequence
  Synthetic
aucaggaaauaaucccauuguacg

SEQ ID NO: 318409 - RNA, 18 nt, Artificial Sequence
  Synthetic
ugcuaaaugcaacuuacg

SEQ ID NO: 318410 - RNA, 19 nt, Artificial Sequence
  Synthetic
augcuaaaugcaacuuacg

SEQ ID NO: 318411 - RNA, 20 nt, Artificial Sequence
  Synthetic
aaugcuaaaugcaacuuacg

SEQ ID NO: 318412 - RNA, 21 nt, Artificial Sequence
  Synthetic
aaaugcuaaaugcaacuuacg

SEQ ID NO: 318413 - RNA, 22 nt, Artificial Sequence
  Synthetic
aaaaugcuaaaugcaacuuacg

SEQ ID NO: 318414 - RNA, 23 nt, Artificial Sequence
  Synthetic
uaaaaugcuaaaugcaacuuacg

SEQ ID NO: 318415 - RNA, 24 nt, Artificial Sequence
  Synthetic
uuaaaaugcuaaaugcaacuuacg

SEQ ID NO: 318416 - RNA, 18 nt, Artificial Sequence
  Synthetic
uuucacuuuuauguuacg

SEQ ID NO: 318417 - RNA, 19 nt, Artificial Sequence
  Synthetic
cuuucacuuuuauguuacg

SEQ ID NO: 318418 - RNA, 20 nt, Artificial Sequence
  Synthetic
ccuuucacuuuuauguuacg

SEQ ID NO: 318419 - RNA, 21 nt, Artificial Sequence
  Synthetic
accuuucacuuuuauguuacg

SEQ ID NO: 318420 - RNA, 22 nt, Artificial Sequence
  Synthetic
caccuuucacuuuuauguuacg

SEQ ID NO: 318421 - RNA, 23 nt, Artificial Sequence
  Synthetic
ccaccuuucacuuuuauguuacg

SEQ ID NO: 318422 - RNA, 24 nt, Artificial Sequence
  Synthetic
uccaccuuucacuuuuauguuacg

SEQ ID NO: 318423 - RNA, 18 nt, Artificial Sequence
  Synthetic
guguaguuagcauuuacg

SEQ ID NO: 318424 - RNA, 19 nt, Artificial Sequence
  Synthetic
uguguaguuagcauuuacg

SEQ ID NO: 318425 - RNA, 20 nt, Artificial Sequence
  Synthetic
cuguguaguuagcauuuacg

SEQ ID NO: 318426 - RNA, 21 nt, Artificial Sequence
  Synthetic
acuguguaguuagcauuuacg

SEQ ID NO: 318427 - RNA, 22 nt, Artificial Sequence
  Synthetic
uacuguguaguuagcauuuacg

SEQ ID NO: 318428 - RNA, 23 nt, Artificial Sequence
  Synthetic
uuacuguguaguuagcauuuacg

SEQ ID NO: 318429 - RNA, 24 nt, Artificial Sequence
  Synthetic
uuuacuguguaguuagcauuuacg

SEQ ID NO: 318430 - RNA, 18 nt, Artificial Sequence
  Synthetic
aaaaggagacacuuuacg

SEQ ID NO: 318431 - RNA, 19 nt, Artificial Sequence
  Synthetic
aaaaaggagacacuuuacg

SEQ ID NO: 318432 - RNA, 20 nt, Artificial Sequence
  Synthetic
gaaaaaggagacacuuuacg

SEQ ID NO: 318433 - RNA, 21 nt, Artificial Sequence
  Synthetic
ggaaaaaggagacacuuuacg

SEQ ID NO: 318434 - RNA, 22 nt, Artificial Sequence
  Synthetic
aggaaaaaggagacacuuuacg

SEQ ID NO: 318435 - RNA, 23 nt, Artificial Sequence
  Synthetic
aaggaaaaaggagacacuuuacg

SEQ ID NO: 318436 - RNA, 24 nt, Artificial Sequence
  Synthetic
caaggaaaaaggagacacuuuacg

SEQ ID NO: 318437 - RNA, 18 nt, Artificial Sequence
  Synthetic
cuagggaguacuuuuacg

SEQ ID NO: 318438 - RNA, 19 nt, Artificial Sequence
  Synthetic
acuagggaguacuuuuacg

SEQ ID NO: 318439 - RNA, 20 nt, Artificial Sequence
  Synthetic
aacuagggaguacuuuuacg

SEQ ID NO: 318440 - RNA, 21 nt, Artificial Sequence
  Synthetic
uaacuagggaguacuuuuacg

SEQ ID NO: 318441 - RNA, 22 nt, Artificial Sequence
  Synthetic
uuaacuagggaguacuuuuacg

SEQ ID NO: 318442 - RNA, 23 nt, Artificial Sequence
  Synthetic
guuaacuagggaguacuuuuacg

SEQ ID NO: 318443 - RNA, 24 nt, Artificial Sequence
  Synthetic
gguuaacuagggaguacuuuuacg

SEQ ID NO: 318444 - RNA, 18 nt, Artificial Sequence
  Synthetic
uggcuaccauauuaaccg

SEQ ID NO: 318445 - RNA, 19 nt, Artificial Sequence
  Synthetic
guggcuaccauauuaaccg

SEQ ID NO: 318446 - RNA, 20 nt, Artificial Sequence
  Synthetic
aguggcuaccauauuaaccg

SEQ ID NO: 318447 - RNA, 21 nt, Artificial Sequence
  Synthetic
uaguggcuaccauauuaaccg

SEQ ID NO: 318448 - RNA, 22 nt, Artificial Sequence
  Synthetic
uuaguggcuaccauauuaaccg

SEQ ID NO: 318449 - RNA, 23 nt, Artificial Sequence
  Synthetic
guuaguggcuaccauauuaaccg

SEQ ID NO: 318450 - RNA, 24 nt, Artificial Sequence
  Synthetic
gguuaguggcuaccauauuaaccg

SEQ ID NO: 318451 - RNA, 18 nt, Artificial Sequence
  Synthetic
uuugaaaaggaaacaccg

SEQ ID NO: 318452 - RNA, 19 nt, Artificial Sequence
  Synthetic
uuuugaaaaggaaacaccg

SEQ ID NO: 318453 - RNA, 20 nt, Artificial Sequence
  Synthetic
auuuugaaaaggaaacaccg

SEQ ID NO: 318454 - RNA, 21 nt, Artificial Sequence
  Synthetic
uauuuugaaaaggaaacaccg

SEQ ID NO: 318455 - RNA, 22 nt, Artificial Sequence
  Synthetic
auauuuugaaaaggaaacaccg

SEQ ID NO: 318456 - RNA, 23 nt, Artificial Sequence
  Synthetic
uauauuuugaaaaggaaacaccg

SEQ ID NO: 318457 - RNA, 24 nt, Artificial Sequence
  Synthetic
auauauuuugaaaaggaaacaccg

SEQ ID NO: 318458 - RNA, 18 nt, Artificial Sequence
  Synthetic
acuuuccagguuccaccg

SEQ ID NO: 318459 - RNA, 19 nt, Artificial Sequence
  Synthetic
uacuuuccagguuccaccg

SEQ ID NO: 318460 - RNA, 20 nt, Artificial Sequence
  Synthetic
uuacuuuccagguuccaccg

SEQ ID NO: 318461 - RNA, 21 nt, Artificial Sequence
  Synthetic
auuacuuuccagguuccaccg

SEQ ID NO: 318462 - RNA, 22 nt, Artificial Sequence
  Synthetic
gauuacuuuccagguuccaccg

SEQ ID NO: 318463 - RNA, 23 nt, Artificial Sequence
  Synthetic
agauuacuuuccagguuccaccg

SEQ ID NO: 318464 - RNA, 24 nt, Artificial Sequence
  Synthetic
gagauuacuuuccagguuccaccg

SEQ ID NO: 318465 - RNA, 18 nt, Artificial Sequence
  Synthetic
uggaggaaagaggcaccg

SEQ ID NO: 318466 - RNA, 19 nt, Artificial Sequence
  Synthetic
cuggaggaaagaggcaccg

SEQ ID NO: 318467 - RNA, 20 nt, Artificial Sequence
  Synthetic
ccuggaggaaagaggcaccg

SEQ ID NO: 318468 - RNA, 21 nt, Artificial Sequence
  Synthetic
uccuggaggaaagaggcaccg

SEQ ID NO: 318469 - RNA, 22 nt, Artificial Sequence
  Synthetic
cuccuggaggaaagaggcaccg

SEQ ID NO: 318470 - RNA, 23 nt, Artificial Sequence
  Synthetic
ucuccuggaggaaagaggcaccg

SEQ ID NO: 318471 - RNA, 24 nt, Artificial Sequence
  Synthetic
gucuccuggaggaaagaggcaccg

SEQ ID NO: 318472 - RNA, 18 nt, Artificial Sequence
  Synthetic
aaguuauuuauugcaccg

SEQ ID NO: 318473 - RNA, 19 nt, Artificial Sequence
  Synthetic
gaaguuauuuauugcaccg

SEQ ID NO: 318474 - RNA, 20 nt, Artificial Sequence
  Synthetic
agaaguuauuuauugcaccg

SEQ ID NO: 318475 - RNA, 21 nt, Artificial Sequence
  Synthetic
uagaaguuauuuauugcaccg

SEQ ID NO: 318476 - RNA, 22 nt, Artificial Sequence
  Synthetic
auagaaguuauuuauugcaccg

SEQ ID NO: 318477 - RNA, 23 nt, Artificial Sequence
  Synthetic
aauagaaguuauuuauugcaccg

SEQ ID NO: 318478 - RNA, 24 nt, Artificial Sequence
  Synthetic
gaauagaaguuauuuauugcaccg

SEQ ID NO: 318479 - RNA, 18 nt, Artificial Sequence
  Synthetic
ccuaagucacuuucaccg

SEQ ID NO: 318480 - RNA, 19 nt, Artificial Sequence
  Synthetic
uccuaagucacuuucaccg

SEQ ID NO: 318481 - RNA, 20 nt, Artificial Sequence
  Synthetic
guccuaagucacuuucaccg

SEQ ID NO: 318482 - RNA, 21 nt, Artificial Sequence
  Synthetic
cguccuaagucacuuucaccg

SEQ ID NO: 318483 - RNA, 22 nt, Artificial Sequence
  Synthetic
ccguccuaagucacuuucaccg

SEQ ID NO: 318484 - RNA, 23 nt, Artificial Sequence
  Synthetic
cccguccuaagucacuuucaccg

SEQ ID NO: 318485 - RNA, 24 nt, Artificial Sequence
  Synthetic
ccccguccuaagucacuuucaccg

SEQ ID NO: 318486 - RNA, 18 nt, Artificial Sequence
  Synthetic
accauccccuaaggaccg

SEQ ID NO: 318487 - RNA, 19 nt, Artificial Sequence
  Synthetic
caccauccccuaaggaccg

SEQ ID NO: 318488 - RNA, 20 nt, Artificial Sequence
  Synthetic
acaccauccccuaaggaccg

SEQ ID NO: 318489 - RNA, 21 nt, Artificial Sequence
  Synthetic
cacaccauccccuaaggaccg

SEQ ID NO: 318490 - RNA, 22 nt, Artificial Sequence
  Synthetic
ccacaccauccccuaaggaccg

SEQ ID NO: 318491 - RNA, 23 nt, Artificial Sequence
  Synthetic
cccacaccauccccuaaggaccg

SEQ ID NO: 318492 - RNA, 24 nt, Artificial Sequence
  Synthetic
acccacaccauccccuaaggaccg

SEQ ID NO: 318493 - RNA, 18 nt, Artificial Sequence
  Synthetic
auuaaaauugaaugaccg

SEQ ID NO: 318494 - RNA, 19 nt, Artificial Sequence
  Synthetic
gauuaaaauugaaugaccg

SEQ ID NO: 318495 - RNA, 20 nt, Artificial Sequence
  Synthetic
agauuaaaauugaaugaccg

SEQ ID NO: 318496 - RNA, 21 nt, Artificial Sequence
  Synthetic
gagauuaaaauugaaugaccg

SEQ ID NO: 318497 - RNA, 22 nt, Artificial Sequence
  Synthetic
agagauuaaaauugaaugaccg

SEQ ID NO: 318498 - RNA, 23 nt, Artificial Sequence
  Synthetic
uagagauuaaaauugaaugaccg

SEQ ID NO: 318499 - RNA, 24 nt, Artificial Sequence
  Synthetic
auagagauuaaaauugaaugaccg

SEQ ID NO: 318500 - RNA, 18 nt, Artificial Sequence
  Synthetic
gugugauguuccauaccg

SEQ ID NO: 318501 - RNA, 19 nt, Artificial Sequence
  Synthetic
ggugugauguuccauaccg

SEQ ID NO: 318502 - RNA, 20 nt, Artificial Sequence
  Synthetic
aggugugauguuccauaccg

SEQ ID NO: 318503 - RNA, 21 nt, Artificial Sequence
  Synthetic
caggugugauguuccauaccg

SEQ ID NO: 318504 - RNA, 22 nt, Artificial Sequence
  Synthetic
ccaggugugauguuccauaccg

SEQ ID NO: 318505 - RNA, 23 nt, Artificial Sequence
  Synthetic
accaggugugauguuccauaccg

SEQ ID NO: 318506 - RNA, 24 nt, Artificial Sequence
  Synthetic
caccaggugugauguuccauaccg

SEQ ID NO: 318507 - RNA, 18 nt, Artificial Sequence
  Synthetic
uuaaaaauaacuauaccg

SEQ ID NO: 318508 - RNA, 19 nt, Artificial Sequence
  Synthetic
uuuaaaaauaacuauaccg

SEQ ID NO: 318509 - RNA, 20 nt, Artificial Sequence
  Synthetic
auuuaaaaauaacuauaccg

SEQ ID NO: 318510 - RNA, 21 nt, Artificial Sequence
  Synthetic
cauuuaaaaauaacuauaccg

SEQ ID NO: 318511 - RNA, 22 nt, Artificial Sequence
  Synthetic
ucauuuaaaaauaacuauaccg

SEQ ID NO: 318512 - RNA, 23 nt, Artificial Sequence
  Synthetic
gucauuuaaaaauaacuauaccg

SEQ ID NO: 318513 - RNA, 24 nt, Artificial Sequence
  Synthetic
ggucauuuaaaaauaacuauaccg

SEQ ID NO: 318514 - RNA, 18 nt, Artificial Sequence
  Synthetic
gcgggcagaauauuaccg

SEQ ID NO: 318515 - RNA, 19 nt, Artificial Sequence
  Synthetic
ggcgggcagaauauuaccg

SEQ ID NO: 318516 - RNA, 20 nt, Artificial Sequence
  Synthetic
gggcgggcagaauauuaccg

SEQ ID NO: 318517 - RNA, 21 nt, Artificial Sequence
  Synthetic
ugggcgggcagaauauuaccg

SEQ ID NO: 318518 - RNA, 22 nt, Artificial Sequence
  Synthetic
gugggcgggcagaauauuaccg

SEQ ID NO: 318519 - RNA, 23 nt, Artificial Sequence
  Synthetic
ggugggcgggcagaauauuaccg

SEQ ID NO: 318520 - RNA, 24 nt, Artificial Sequence
  Synthetic
aggugggcgggcagaauauuaccg

SEQ ID NO: 318521 - RNA, 18 nt, Artificial Sequence
  Synthetic
auucuuaagaaguuaccg

SEQ ID NO: 318522 - RNA, 19 nt, Artificial Sequence
  Synthetic
gauucuuaagaaguuaccg

SEQ ID NO: 318523 - RNA, 20 nt, Artificial Sequence
  Synthetic
agauucuuaagaaguuaccg

SEQ ID NO: 318524 - RNA, 21 nt, Artificial Sequence
  Synthetic
aagauucuuaagaaguuaccg

SEQ ID NO: 318525 - RNA, 22 nt, Artificial Sequence
  Synthetic
gaagauucuuaagaaguuaccg

SEQ ID NO: 318526 - RNA, 23 nt, Artificial Sequence
  Synthetic
ugaagauucuuaagaaguuaccg

SEQ ID NO: 318527 - RNA, 24 nt, Artificial Sequence
  Synthetic
augaagauucuuaagaaguuaccg

SEQ ID NO: 318528 - RNA, 18 nt, Artificial Sequence
  Synthetic
aucuuauucacuuuaccg

SEQ ID NO: 318529 - RNA, 19 nt, Artificial Sequence
  Synthetic
caucuuauucacuuuaccg

SEQ ID NO: 318530 - RNA, 20 nt, Artificial Sequence
  Synthetic
gcaucuuauucacuuuaccg

SEQ ID NO: 318531 - RNA, 21 nt, Artificial Sequence
  Synthetic
ugcaucuuauucacuuuaccg

SEQ ID NO: 318532 - RNA, 22 nt, Artificial Sequence
  Synthetic
gugcaucuuauucacuuuaccg

SEQ ID NO: 318533 - RNA, 23 nt, Artificial Sequence
  Synthetic
agugcaucuuauucacuuuaccg

SEQ ID NO: 318534 - RNA, 24 nt, Artificial Sequence
  Synthetic
aagugcaucuuauucacuuuaccg

SEQ ID NO: 318535 - RNA, 18 nt, Artificial Sequence
  Synthetic
ugcuuucaacugaacccg

SEQ ID NO: 318536 - RNA, 19 nt, Artificial Sequence
  Synthetic
uugcuuucaacugaacccg

SEQ ID NO: 318537 - RNA, 20 nt, Artificial Sequence
  Synthetic
uuugcuuucaacugaacccg

SEQ ID NO: 318538 - RNA, 21 nt, Artificial Sequence
  Synthetic
cuuugcuuucaacugaacccg

SEQ ID NO: 318539 - RNA, 22 nt, Artificial Sequence
  Synthetic
ucuuugcuuucaacugaacccg

SEQ ID NO: 318540 - RNA, 23 nt, Artificial Sequence
  Synthetic
cucuuugcuuucaacugaacccg

SEQ ID NO: 318541 - RNA, 24 nt, Artificial Sequence
  Synthetic
acucuuugcuuucaacugaacccg

SEQ ID NO: 318542 - RNA, 18 nt, Artificial Sequence
  Synthetic
uaguaccgaacccacccg

SEQ ID NO: 318543 - RNA, 19 nt, Artificial Sequence
  Synthetic
auaguaccgaacccacccg

SEQ ID NO: 318544 - RNA, 20 nt, Artificial Sequence
  Synthetic
cauaguaccgaacccacccg

SEQ ID NO: 318545 - RNA, 21 nt, Artificial Sequence
  Synthetic
acauaguaccgaacccacccg

SEQ ID NO: 318546 - RNA, 22 nt, Artificial Sequence
  Synthetic
cacauaguaccgaacccacccg

SEQ ID NO: 318547 - RNA, 23 nt, Artificial Sequence
  Synthetic
acacauaguaccgaacccacccg

SEQ ID NO: 318548 - RNA, 24 nt, Artificial Sequence
  Synthetic
gacacauaguaccgaacccacccg

SEQ ID NO: 318549 - RNA, 18 nt, Artificial Sequence
  Synthetic
cagcucccuuucaccccg

SEQ ID NO: 318550 - RNA, 19 nt, Artificial Sequence
  Synthetic
gcagcucccuuucaccccg

SEQ ID NO: 318551 - RNA, 20 nt, Artificial Sequence
  Synthetic
ugcagcucccuuucaccccg

SEQ ID NO: 318552 - RNA, 21 nt, Artificial Sequence
  Synthetic
uugcagcucccuuucaccccg

SEQ ID NO: 318553 - RNA, 22 nt, Artificial Sequence
  Synthetic
uuugcagcucccuuucaccccg

SEQ ID NO: 318554 - RNA, 23 nt, Artificial Sequence
  Synthetic
uuuugcagcucccuuucaccccg

SEQ ID NO: 318555 - RNA, 24 nt, Artificial Sequence
  Synthetic
uuuuugcagcucccuuucaccccg

SEQ ID NO: 318556 - RNA, 18 nt, Artificial Sequence
  Synthetic
cucuagagaagguccccg

SEQ ID NO: 318557 - RNA, 19 nt, Artificial Sequence
  Synthetic
ucucuagagaagguccccg

SEQ ID NO: 318558 - RNA, 20 nt, Artificial Sequence
  Synthetic
gucucuagagaagguccccg

SEQ ID NO: 318559 - RNA, 21 nt, Artificial Sequence
  Synthetic
agucucuagagaagguccccg

SEQ ID NO: 318560 - RNA, 22 nt, Artificial Sequence
  Synthetic
aagucucuagagaagguccccg

SEQ ID NO: 318561 - RNA, 23 nt, Artificial Sequence
  Synthetic
gaagucucuagagaagguccccg

SEQ ID NO: 318562 - RNA, 24 nt, Artificial Sequence
  Synthetic
ugaagucucuagagaagguccccg

SEQ ID NO: 318563 - RNA, 18 nt, Artificial Sequence
  Synthetic
cuuaauuacagaagcccg

SEQ ID NO: 318564 - RNA, 19 nt, Artificial Sequence
  Synthetic
acuuaauuacagaagcccg

SEQ ID NO: 318565 - RNA, 20 nt, Artificial Sequence
  Synthetic
cacuuaauuacagaagcccg

SEQ ID NO: 318566 - RNA, 21 nt, Artificial Sequence
  Synthetic
acacuuaauuacagaagcccg

SEQ ID NO: 318567 - RNA, 22 nt, Artificial Sequence
  Synthetic
gacacuuaauuacagaagcccg

SEQ ID NO: 318568 - RNA, 23 nt, Artificial Sequence
  Synthetic
ugacacuuaauuacagaagcccg

SEQ ID NO: 318569 - RNA, 24 nt, Artificial Sequence
  Synthetic
gugacacuuaauuacagaagcccg

SEQ ID NO: 318570 - RNA, 18 nt, Artificial Sequence
  Synthetic
ugcaauacuacucagccg

SEQ ID NO: 318571 - RNA, 19 nt, Artificial Sequence
  Synthetic
augcaauacuacucagccg

SEQ ID NO: 318572 - RNA, 20 nt, Artificial Sequence
  Synthetic
caugcaauacuacucagccg

SEQ ID NO: 318573 - RNA, 21 nt, Artificial Sequence
  Synthetic
ccaugcaauacuacucagccg

SEQ ID NO: 318574 - RNA, 22 nt, Artificial Sequence
  Synthetic
accaugcaauacuacucagccg

SEQ ID NO: 318575 - RNA, 23 nt, Artificial Sequence
  Synthetic
uaccaugcaauacuacucagccg

SEQ ID NO: 318576 - RNA, 24 nt, Artificial Sequence
  Synthetic
auaccaugcaauacuacucagccg

SEQ ID NO: 318577 - RNA, 18 nt, Artificial Sequence
  Synthetic
acauacaaauuuuagccg

SEQ ID NO: 318578 - RNA, 19 nt, Artificial Sequence
  Synthetic
aacauacaaauuuuagccg

SEQ ID NO: 318579 - RNA, 20 nt, Artificial Sequence
  Synthetic
caacauacaaauuuuagccg

SEQ ID NO: 318580 - RNA, 21 nt, Artificial Sequence
  Synthetic
ucaacauacaaauuuuagccg

SEQ ID NO: 318581 - RNA, 22 nt, Artificial Sequence
  Synthetic
uucaacauacaaauuuuagccg

SEQ ID NO: 318582 - RNA, 23 nt, Artificial Sequence
  Synthetic
cuucaacauacaaauuuuagccg

SEQ ID NO: 318583 - RNA, 24 nt, Artificial Sequence
  Synthetic
acuucaacauacaaauuuuagccg

SEQ ID NO: 318584 - RNA, 18 nt, Artificial Sequence
  Synthetic
aucuucuucacaaggccg

SEQ ID NO: 318585 - RNA, 19 nt, Artificial Sequence
  Synthetic
caucuucuucacaaggccg

SEQ ID NO: 318586 - RNA, 20 nt, Artificial Sequence
  Synthetic
gcaucuucuucacaaggccg

SEQ ID NO: 318587 - RNA, 21 nt, Artificial Sequence
  Synthetic
agcaucuucuucacaaggccg

SEQ ID NO: 318588 - RNA, 22 nt, Artificial Sequence
  Synthetic
aagcaucuucuucacaaggccg

SEQ ID NO: 318589 - RNA, 23 nt, Artificial Sequence
  Synthetic
caagcaucuucuucacaaggccg

SEQ ID NO: 318590 - RNA, 24 nt, Artificial Sequence
  Synthetic
gcaagcaucuucuucacaaggccg

SEQ ID NO: 318591 - RNA, 18 nt, Artificial Sequence
  Synthetic
ccaaugcuggcaaggccg

SEQ ID NO: 318592 - RNA, 19 nt, Artificial Sequence
  Synthetic
cccaaugcuggcaaggccg

SEQ ID NO: 318593 - RNA, 20 nt, Artificial Sequence
  Synthetic
acccaaugcuggcaaggccg

SEQ ID NO: 318594 - RNA, 21 nt, Artificial Sequence
  Synthetic
cacccaaugcuggcaaggccg

SEQ ID NO: 318595 - RNA, 22 nt, Artificial Sequence
  Synthetic
acacccaaugcuggcaaggccg

SEQ ID NO: 318596 - RNA, 23 nt, Artificial Sequence
  Synthetic
gacacccaaugcuggcaaggccg

SEQ ID NO: 318597 - RNA, 24 nt, Artificial Sequence
  Synthetic
agacacccaaugcuggcaaggccg

SEQ ID NO: 318598 - RNA, 18 nt, Artificial Sequence
  Synthetic
uugcacaggaaugggccg

SEQ ID NO: 318599 - RNA, 19 nt, Artificial Sequence
  Synthetic
cuugcacaggaaugggccg

SEQ ID NO: 318600 - RNA, 20 nt, Artificial Sequence
  Synthetic
ucuugcacaggaaugggccg

SEQ ID NO: 318601 - RNA, 21 nt, Artificial Sequence
  Synthetic
aucuugcacaggaaugggccg

SEQ ID NO: 318602 - RNA, 22 nt, Artificial Sequence
  Synthetic
caucuugcacaggaaugggccg

SEQ ID NO: 318603 - RNA, 23 nt, Artificial Sequence
  Synthetic
gcaucuugcacaggaaugggccg

SEQ ID NO: 318604 - RNA, 24 nt, Artificial Sequence
  Synthetic
ggcaucuugcacaggaaugggccg

SEQ ID NO: 318605 - RNA, 18 nt, Artificial Sequence
  Synthetic
aucuaacagguacugccg

SEQ ID NO: 318606 - RNA, 19 nt, Artificial Sequence
  Synthetic
uaucuaacagguacugccg

SEQ ID NO: 318607 - RNA, 20 nt, Artificial Sequence
  Synthetic
uuaucuaacagguacugccg

SEQ ID NO: 318608 - RNA, 21 nt, Artificial Sequence
  Synthetic
cuuaucuaacagguacugccg

SEQ ID NO: 318609 - RNA, 22 nt, Artificial Sequence
  Synthetic
ccuuaucuaacagguacugccg

SEQ ID NO: 318610 - RNA, 23 nt, Artificial Sequence
  Synthetic
cccuuaucuaacagguacugccg

SEQ ID NO: 318611 - RNA, 24 nt, Artificial Sequence
  Synthetic
gcccuuaucuaacagguacugccg

SEQ ID NO: 318612 - RNA, 18 nt, Artificial Sequence
  Synthetic
aguuguaaagauuugccg

SEQ ID NO: 318613 - RNA, 19 nt, Artificial Sequence
  Synthetic
aaguuguaaagauuugccg

SEQ ID NO: 318614 - RNA, 20 nt, Artificial Sequence
  Synthetic
uaaguuguaaagauuugccg

SEQ ID NO: 318615 - RNA, 21 nt, Artificial Sequence
  Synthetic
guaaguuguaaagauuugccg

SEQ ID NO: 318616 - RNA, 22 nt, Artificial Sequence
  Synthetic
aguaaguuguaaagauuugccg

SEQ ID NO: 318617 - RNA, 23 nt, Artificial Sequence
  Synthetic
caguaaguuguaaagauuugccg

SEQ ID NO: 318618 - RNA, 24 nt, Artificial Sequence
  Synthetic
ucaguaaguuguaaagauuugccg

SEQ ID NO: 318619 - RNA, 18 nt, Artificial Sequence
  Synthetic
gaaaaagccacuuugccg

SEQ ID NO: 318620 - RNA, 19 nt, Artificial Sequence
  Synthetic
agaaaaagccacuuugccg

SEQ ID NO: 318621 - RNA, 20 nt, Artificial Sequence
  Synthetic
gagaaaaagccacuuugccg

SEQ ID NO: 318622 - RNA, 21 nt, Artificial Sequence
  Synthetic
ggagaaaaagccacuuugccg

SEQ ID NO: 318623 - RNA, 22 nt, Artificial Sequence
  Synthetic
gggagaaaaagccacuuugccg

SEQ ID NO: 318624 - RNA, 23 nt, Artificial Sequence
  Synthetic
cgggagaaaaagccacuuugccg

SEQ ID NO: 318625 - RNA, 24 nt, Artificial Sequence
  Synthetic
ucgggagaaaaagccacuuugccg

SEQ ID NO: 318626 - RNA, 18 nt, Artificial Sequence
  Synthetic
caaaggcacagcaauccg

SEQ ID NO: 318627 - RNA, 19 nt, Artificial Sequence
  Synthetic
ccaaaggcacagcaauccg

SEQ ID NO: 318628 - RNA, 20 nt, Artificial Sequence
  Synthetic
uccaaaggcacagcaauccg

SEQ ID NO: 318629 - RNA, 21 nt, Artificial Sequence
  Synthetic
auccaaaggcacagcaauccg

SEQ ID NO: 318630 - RNA, 22 nt, Artificial Sequence
  Synthetic
aauccaaaggcacagcaauccg

SEQ ID NO: 318631 - RNA, 23 nt, Artificial Sequence
  Synthetic
uaauccaaaggcacagcaauccg

SEQ ID NO: 318632 - RNA, 24 nt, Artificial Sequence
  Synthetic
cuaauccaaaggcacagcaauccg

SEQ ID NO: 318633 - RNA, 18 nt, Artificial Sequence
  Synthetic
cugaacuaaaagcauccg

SEQ ID NO: 318634 - RNA, 19 nt, Artificial Sequence
  Synthetic
ucugaacuaaaagcauccg

SEQ ID NO: 318635 - RNA, 20 nt, Artificial Sequence
  Synthetic
cucugaacuaaaagcauccg

SEQ ID NO: 318636 - RNA, 21 nt, Artificial Sequence
  Synthetic
gcucugaacuaaaagcauccg

SEQ ID NO: 318637 - RNA, 22 nt, Artificial Sequence
  Synthetic
ugcucugaacuaaaagcauccg

SEQ ID NO: 318638 - RNA, 23 nt, Artificial Sequence
  Synthetic
cugcucugaacuaaaagcauccg

SEQ ID NO: 318639 - RNA, 24 nt, Artificial Sequence
  Synthetic
gcugcucugaacuaaaagcauccg

SEQ ID NO: 318640 - RNA, 18 nt, Artificial Sequence
  Synthetic
cacuaaauuuagcauccg

SEQ ID NO: 318641 - RNA, 19 nt, Artificial Sequence
  Synthetic
gcacuaaauuuagcauccg

SEQ ID NO: 318642 - RNA, 20 nt, Artificial Sequence
  Synthetic
ugcacuaaauuuagcauccg

SEQ ID NO: 318643 - RNA, 21 nt, Artificial Sequence
  Synthetic
augcacuaaauuuagcauccg

SEQ ID NO: 318644 - RNA, 22 nt, Artificial Sequence
  Synthetic
aaugcacuaaauuuagcauccg

SEQ ID NO: 318645 - RNA, 23 nt, Artificial Sequence
  Synthetic
aaaugcacuaaauuuagcauccg

SEQ ID NO: 318646 - RNA, 24 nt, Artificial Sequence
  Synthetic
caaaugcacuaaauuuagcauccg

SEQ ID NO: 318647 - RNA, 18 nt, Artificial Sequence
  Synthetic
guccaacacuaugauccg

SEQ ID NO: 318648 - RNA, 19 nt, Artificial Sequence
  Synthetic
uguccaacacuaugauccg

SEQ ID NO: 318649 - RNA, 20 nt, Artificial Sequence
  Synthetic
cuguccaacacuaugauccg

SEQ ID NO: 318650 - RNA, 21 nt, Artificial Sequence
  Synthetic
acuguccaacacuaugauccg

SEQ ID NO: 318651 - RNA, 22 nt, Artificial Sequence
  Synthetic
aacuguccaacacuaugauccg

SEQ ID NO: 318652 - RNA, 23 nt, Artificial Sequence
  Synthetic
gaacuguccaacacuaugauccg

SEQ ID NO: 318653 - RNA, 24 nt, Artificial Sequence
  Synthetic
ggaacuguccaacacuaugauccg

SEQ ID NO: 318654 - RNA, 18 nt, Artificial Sequence
  Synthetic
uuguggauuugcuauccg

SEQ ID NO: 318655 - RNA, 19 nt, Artificial Sequence
  Synthetic
uuuguggauuugcuauccg

SEQ ID NO: 318656 - RNA, 20 nt, Artificial Sequence
  Synthetic
auuuguggauuugcuauccg

SEQ ID NO: 318657 - RNA, 21 nt, Artificial Sequence
  Synthetic
cauuuguggauuugcuauccg

SEQ ID NO: 318658 - RNA, 22 nt, Artificial Sequence
  Synthetic
acauuuguggauuugcuauccg

SEQ ID NO: 318659 - RNA, 23 nt, Artificial Sequence
  Synthetic
aacauuuguggauuugcuauccg

SEQ ID NO: 318660 - RNA, 24 nt, Artificial Sequence
  Synthetic
gaacauuuguggauuugcuauccg

SEQ ID NO: 318661 - RNA, 18 nt, Artificial Sequence
  Synthetic
uaaaucagccauucuccg

SEQ ID NO: 318662 - RNA, 19 nt, Artificial Sequence
  Synthetic
auaaaucagccauucuccg

SEQ ID NO: 318663 - RNA, 20 nt, Artificial Sequence
  Synthetic
cauaaaucagccauucuccg

SEQ ID NO: 318664 - RNA, 21 nt, Artificial Sequence
  Synthetic
gcauaaaucagccauucuccg

SEQ ID NO: 318665 - RNA, 22 nt, Artificial Sequence
  Synthetic
ugcauaaaucagccauucuccg

SEQ ID NO: 318666 - RNA, 23 nt, Artificial Sequence
  Synthetic
gugcauaaaucagccauucuccg

SEQ ID NO: 318667 - RNA, 24 nt, Artificial Sequence
  Synthetic
ugugcauaaaucagccauucuccg

SEQ ID NO: 318668 - RNA, 18 nt, Artificial Sequence
  Synthetic
cugcauugagcaaguccg

SEQ ID NO: 318669 - RNA, 19 nt, Artificial Sequence
  Synthetic
gcugcauugagcaaguccg

SEQ ID NO: 318670 - RNA, 20 nt, Artificial Sequence
  Synthetic
ggcugcauugagcaaguccg

SEQ ID NO: 318671 - RNA, 21 nt, Artificial Sequence
  Synthetic
aggcugcauugagcaaguccg

SEQ ID NO: 318672 - RNA, 22 nt, Artificial Sequence
  Synthetic
aaggcugcauugagcaaguccg

SEQ ID NO: 318673 - RNA, 23 nt, Artificial Sequence
  Synthetic
caaggcugcauugagcaaguccg

SEQ ID NO: 318674 - RNA, 24 nt, Artificial Sequence
  Synthetic
gcaaggcugcauugagcaaguccg

SEQ ID NO: 318675 - RNA, 18 nt, Artificial Sequence
  Synthetic
aacugaggauggauuccg

SEQ ID NO: 318676 - RNA, 19 nt, Artificial Sequence
  Synthetic
gaacugaggauggauuccg

SEQ ID NO: 318677 - RNA, 20 nt, Artificial Sequence
  Synthetic
agaacugaggauggauuccg

SEQ ID NO: 318678 - RNA, 21 nt, Artificial Sequence
  Synthetic
cagaacugaggauggauuccg

SEQ ID NO: 318679 - RNA, 22 nt, Artificial Sequence
  Synthetic
ccagaacugaggauggauuccg

SEQ ID NO: 318680 - RNA, 23 nt, Artificial Sequence
  Synthetic
uccagaacugaggauggauuccg

SEQ ID NO: 318681 - RNA, 24 nt, Artificial Sequence
  Synthetic
cuccagaacugaggauggauuccg

SEQ ID NO: 318682 - RNA, 18 nt, Artificial Sequence
  Synthetic
aguuuugcaauaguuccg

SEQ ID NO: 318683 - RNA, 19 nt, Artificial Sequence
  Synthetic
caguuuugcaauaguuccg

SEQ ID NO: 318684 - RNA, 20 nt, Artificial Sequence
  Synthetic
ccaguuuugcaauaguuccg

SEQ ID NO: 318685 - RNA, 21 nt, Artificial Sequence
  Synthetic
accaguuuugcaauaguuccg

SEQ ID NO: 318686 - RNA, 22 nt, Artificial Sequence
  Synthetic
uaccaguuuugcaauaguuccg

SEQ ID NO: 318687 - RNA, 23 nt, Artificial Sequence
  Synthetic
auaccaguuuugcaauaguuccg

SEQ ID NO: 318688 - RNA, 24 nt, Artificial Sequence
  Synthetic
uauaccaguuuugcaauaguuccg

SEQ ID NO: 318689 - RNA, 18 nt, Artificial Sequence
  Synthetic
agacaagguuguguuccg

SEQ ID NO: 318690 - RNA, 19 nt, Artificial Sequence
  Synthetic
cagacaagguuguguuccg

SEQ ID NO: 318691 - RNA, 20 nt, Artificial Sequence
  Synthetic
acagacaagguuguguuccg

SEQ ID NO: 318692 - RNA, 21 nt, Artificial Sequence
  Synthetic
cacagacaagguuguguuccg

SEQ ID NO: 318693 - RNA, 22 nt, Artificial Sequence
  Synthetic
gcacagacaagguuguguuccg

SEQ ID NO: 318694 - RNA, 23 nt, Artificial Sequence
  Synthetic
ugcacagacaagguuguguuccg

SEQ ID NO: 318695 - RNA, 24 nt, Artificial Sequence
  Synthetic
augcacagacaagguuguguuccg

SEQ ID NO: 318696 - RNA, 18 nt, Artificial Sequence
  Synthetic
acacuaacuugcuuuccg

SEQ ID NO: 318697 - RNA, 19 nt, Artificial Sequence
  Synthetic
uacacuaacuugcuuuccg

SEQ ID NO: 318698 - RNA, 20 nt, Artificial Sequence
  Synthetic
cuacacuaacuugcuuuccg

SEQ ID NO: 318699 - RNA, 21 nt, Artificial Sequence
  Synthetic
acuacacuaacuugcuuuccg

SEQ ID NO: 318700 - RNA, 22 nt, Artificial Sequence
  Synthetic
gacuacacuaacuugcuuuccg

SEQ ID NO: 318701 - RNA, 23 nt, Artificial Sequence
  Synthetic
ggacuacacuaacuugcuuuccg

SEQ ID NO: 318702 - RNA, 24 nt, Artificial Sequence
  Synthetic
uggacuacacuaacuugcuuuccg

SEQ ID NO: 318703 - RNA, 18 nt, Artificial Sequence
  Synthetic
caccugucugucuuuccg

SEQ ID NO: 318704 - RNA, 19 nt, Artificial Sequence
  Synthetic
acaccugucugucuuuccg

SEQ ID NO: 318705 - RNA, 20 nt, Artificial Sequence
  Synthetic
uacaccugucugucuuuccg

SEQ ID NO: 318706 - RNA, 21 nt, Artificial Sequence
  Synthetic
guacaccugucugucuuuccg

SEQ ID NO: 318707 - RNA, 22 nt, Artificial Sequence
  Synthetic
uguacaccugucugucuuuccg

SEQ ID NO: 318708 - RNA, 23 nt, Artificial Sequence
  Synthetic
uuguacaccugucugucuuuccg

SEQ ID NO: 318709 - RNA, 24 nt, Artificial Sequence
  Synthetic
cuuguacaccugucugucuuuccg

SEQ ID NO: 318710 - RNA, 18 nt, Artificial Sequence
  Synthetic
auuguggaggaagaagcg

SEQ ID NO: 318711 - RNA, 19 nt, Artificial Sequence
  Synthetic
aauuguggaggaagaagcg

SEQ ID NO: 318712 - RNA, 20 nt, Artificial Sequence
  Synthetic
caauuguggaggaagaagcg

SEQ ID NO: 318713 - RNA, 21 nt, Artificial Sequence
  Synthetic
acaauuguggaggaagaagcg

SEQ ID NO: 318714 - RNA, 22 nt, Artificial Sequence
  Synthetic
aacaauuguggaggaagaagcg

SEQ ID NO: 318715 - RNA, 23 nt, Artificial Sequence
  Synthetic
aaacaauuguggaggaagaagcg

SEQ ID NO: 318716 - RNA, 24 nt, Artificial Sequence
  Synthetic
aaaacaauuguggaggaagaagcg

SEQ ID NO: 318717 - RNA, 18 nt, Artificial Sequence
  Synthetic
uguagaauuucaacagcg

SEQ ID NO: 318718 - RNA, 19 nt, Artificial Sequence
  Synthetic
guguagaauuucaacagcg

SEQ ID NO: 318719 - RNA, 20 nt, Artificial Sequence
  Synthetic
uguguagaauuucaacagcg

SEQ ID NO: 318720 - RNA, 21 nt, Artificial Sequence
  Synthetic
auguguagaauuucaacagcg

SEQ ID NO: 318721 - RNA, 22 nt, Artificial Sequence
  Synthetic
aauguguagaauuucaacagcg

SEQ ID NO: 318722 - RNA, 23 nt, Artificial Sequence
  Synthetic
aaauguguagaauuucaacagcg

SEQ ID NO: 318723 - RNA, 24 nt, Artificial Sequence
  Synthetic
aaaauguguagaauuucaacagcg

SEQ ID NO: 318724 - RNA, 18 nt, Artificial Sequence
  Synthetic
cucuaguuugggacagcg

SEQ ID NO: 318725 - RNA, 19 nt, Artificial Sequence
  Synthetic
acucuaguuugggacagcg

SEQ ID NO: 318726 - RNA, 20 nt, Artificial Sequence
  Synthetic
cacucuaguuugggacagcg

SEQ ID NO: 318727 - RNA, 21 nt, Artificial Sequence
  Synthetic
acacucuaguuugggacagcg

SEQ ID NO: 318728 - RNA, 22 nt, Artificial Sequence
  Synthetic
cacacucuaguuugggacagcg

SEQ ID NO: 318729 - RNA, 23 nt, Artificial Sequence
  Synthetic
acacacucuaguuugggacagcg

SEQ ID NO: 318730 - RNA, 24 nt, Artificial Sequence
  Synthetic
cacacacucuaguuugggacagcg

SEQ ID NO: 318731 - RNA, 18 nt, Artificial Sequence
  Synthetic
ggaacauugaguacagcg

SEQ ID NO: 318732 - RNA, 19 nt, Artificial Sequence
  Synthetic
uggaacauugaguacagcg

SEQ ID NO: 318733 - RNA, 20 nt, Artificial Sequence
  Synthetic
cuggaacauugaguacagcg

SEQ ID NO: 318734 - RNA, 21 nt, Artificial Sequence
  Synthetic
acuggaacauugaguacagcg

SEQ ID NO: 318735 - RNA, 22 nt, Artificial Sequence
  Synthetic
gacuggaacauugaguacagcg

SEQ ID NO: 318736 - RNA, 23 nt, Artificial Sequence
  Synthetic
agacuggaacauugaguacagcg

SEQ ID NO: 318737 - RNA, 24 nt, Artificial Sequence
  Synthetic
gagacuggaacauugaguacagcg

SEQ ID NO: 318738 - RNA, 18 nt, Artificial Sequence
  Synthetic
guugucuguuagagagcg

SEQ ID NO: 318739 - RNA, 19 nt, Artificial Sequence
  Synthetic
gguugucuguuagagagcg

SEQ ID NO: 318740 - RNA, 20 nt, Artificial Sequence
  Synthetic
agguugucuguuagagagcg

SEQ ID NO: 318741 - RNA, 21 nt, Artificial Sequence
  Synthetic
gagguugucuguuagagagcg

SEQ ID NO: 318742 - RNA, 22 nt, Artificial Sequence
  Synthetic
ugagguugucuguuagagagcg

SEQ ID NO: 318743 - RNA, 23 nt, Artificial Sequence
  Synthetic
gugagguugucuguuagagagcg

SEQ ID NO: 318744 - RNA, 24 nt, Artificial Sequence
  Synthetic
agugagguugucuguuagagagcg

SEQ ID NO: 318745 - RNA, 18 nt, Artificial Sequence
  Synthetic
ucagaaugagaaggagcg

SEQ ID NO: 318746 - RNA, 19 nt, Artificial Sequence
  Synthetic
aucagaaugagaaggagcg

SEQ ID NO: 318747 - RNA, 20 nt, Artificial Sequence
  Synthetic
aaucagaaugagaaggagcg

SEQ ID NO: 318748 - RNA, 21 nt, Artificial Sequence
  Synthetic
aaaucagaaugagaaggagcg

SEQ ID NO: 318749 - RNA, 22 nt, Artificial Sequence
  Synthetic
gaaaucagaaugagaaggagcg

SEQ ID NO: 318750 - RNA, 23 nt, Artificial Sequence
  Synthetic
ugaaaucagaaugagaaggagcg

SEQ ID NO: 318751 - RNA, 24 nt, Artificial Sequence
  Synthetic
uugaaaucagaaugagaaggagcg

SEQ ID NO: 318752 - RNA, 18 nt, Artificial Sequence
  Synthetic
gagcuggagcagggagcg

SEQ ID NO: 318753 - RNA, 19 nt, Artificial Sequence
  Synthetic
ugagcuggagcagggagcg

SEQ ID NO: 318754 - RNA, 20 nt, Artificial Sequence
  Synthetic
gugagcuggagcagggagcg

SEQ ID NO: 318755 - RNA, 21 nt, Artificial Sequence
  Synthetic
agugagcuggagcagggagcg

SEQ ID NO: 318756 - RNA, 22 nt, Artificial Sequence
  Synthetic
aagugagcuggagcagggagcg

SEQ ID NO: 318757 - RNA, 23 nt, Artificial Sequence
  Synthetic
aaagugagcuggagcagggagcg

SEQ ID NO: 318758 - RNA, 24 nt, Artificial Sequence
  Synthetic
aaaagugagcuggagcagggagcg

SEQ ID NO: 318759 - RNA, 18 nt, Artificial Sequence
  Synthetic
cccaucaaaaagugagcg

SEQ ID NO: 318760 - RNA, 19 nt, Artificial Sequence
  Synthetic
ccccaucaaaaagugagcg

SEQ ID NO: 318761 - RNA, 20 nt, Artificial Sequence
  Synthetic
accccaucaaaaagugagcg

SEQ ID NO: 318762 - RNA, 21 nt, Artificial Sequence
  Synthetic
aaccccaucaaaaagugagcg

SEQ ID NO: 318763 - RNA, 22 nt, Artificial Sequence
  Synthetic
caaccccaucaaaaagugagcg

SEQ ID NO: 318764 - RNA, 23 nt, Artificial Sequence
  Synthetic
acaaccccaucaaaaagugagcg

SEQ ID NO: 318765 - RNA, 24 nt, Artificial Sequence
  Synthetic
aacaaccccaucaaaaagugagcg

SEQ ID NO: 318766 - RNA, 18 nt, Artificial Sequence
  Synthetic
gauuaacaccugugagcg

SEQ ID NO: 318767 - RNA, 19 nt, Artificial Sequence
  Synthetic
ggauuaacaccugugagcg

SEQ ID NO: 318768 - RNA, 20 nt, Artificial Sequence
  Synthetic
aggauuaacaccugugagcg

SEQ ID NO: 318769 - RNA, 21 nt, Artificial Sequence
  Synthetic
caggauuaacaccugugagcg

SEQ ID NO: 318770 - RNA, 22 nt, Artificial Sequence
  Synthetic
ucaggauuaacaccugugagcg

SEQ ID NO: 318771 - RNA, 23 nt, Artificial Sequence
  Synthetic
cucaggauuaacaccugugagcg

SEQ ID NO: 318772 - RNA, 24 nt, Artificial Sequence
  Synthetic
ucucaggauuaacaccugugagcg

SEQ ID NO: 318773 - RNA, 18 nt, Artificial Sequence
  Synthetic
uagcauaguuccauagcg

SEQ ID NO: 318774 - RNA, 19 nt, Artificial Sequence
  Synthetic
cuagcauaguuccauagcg

SEQ ID NO: 318775 - RNA, 20 nt, Artificial Sequence
  Synthetic
gcuagcauaguuccauagcg

SEQ ID NO: 318776 - RNA, 21 nt, Artificial Sequence
  Synthetic
ggcuagcauaguuccauagcg

SEQ ID NO: 318777 - RNA, 22 nt, Artificial Sequence
  Synthetic
aggcuagcauaguuccauagcg

SEQ ID NO: 318778 - RNA, 23 nt, Artificial Sequence
  Synthetic
caggcuagcauaguuccauagcg

SEQ ID NO: 318779 - RNA, 24 nt, Artificial Sequence
  Synthetic
ucaggcuagcauaguuccauagcg

SEQ ID NO: 318780 - RNA, 18 nt, Artificial Sequence
  Synthetic
cuuugaaauaauauagcg

SEQ ID NO: 318781 - RNA, 19 nt, Artificial Sequence
  Synthetic
ccuuugaaauaauauagcg

SEQ ID NO: 318782 - RNA, 20 nt, Artificial Sequence
  Synthetic
cccuuugaaauaauauagcg

SEQ ID NO: 318783 - RNA, 21 nt, Artificial Sequence
  Synthetic
acccuuugaaauaauauagcg

SEQ ID NO: 318784 - RNA, 22 nt, Artificial Sequence
  Synthetic
gacccuuugaaauaauauagcg

SEQ ID NO: 318785 - RNA, 23 nt, Artificial Sequence
  Synthetic
ugacccuuugaaauaauauagcg

SEQ ID NO: 318786 - RNA, 24 nt, Artificial Sequence
  Synthetic
gugacccuuugaaauaauauagcg

SEQ ID NO: 318787 - RNA, 18 nt, Artificial Sequence
  Synthetic
gaaguaaaauauuuagcg

SEQ ID NO: 318788 - RNA, 19 nt, Artificial Sequence
  Synthetic
ggaaguaaaauauuuagcg

SEQ ID NO: 318789 - RNA, 20 nt, Artificial Sequence
  Synthetic
cggaaguaaaauauuuagcg

SEQ ID NO: 318790 - RNA, 21 nt, Artificial Sequence
  Synthetic
gcggaaguaaaauauuuagcg

SEQ ID NO: 318791 - RNA, 22 nt, Artificial Sequence
  Synthetic
ggcggaaguaaaauauuuagcg

SEQ ID NO: 318792 - RNA, 23 nt, Artificial Sequence
  Synthetic
uggcggaaguaaaauauuuagcg

SEQ ID NO: 318793 - RNA, 24 nt, Artificial Sequence
  Synthetic
guggcggaaguaaaauauuuagcg

SEQ ID NO: 318794 - RNA, 18 nt, Artificial Sequence
  Synthetic
ggugucuuuuuagccgcg

SEQ ID NO: 318795 - RNA, 19 nt, Artificial Sequence
  Synthetic
aggugucuuuuuagccgcg

SEQ ID NO: 318796 - RNA, 20 nt, Artificial Sequence
  Synthetic
aaggugucuuuuuagccgcg

SEQ ID NO: 318797 - RNA, 21 nt, Artificial Sequence
  Synthetic
uaaggugucuuuuuagccgcg

SEQ ID NO: 318798 - RNA, 22 nt, Artificial Sequence
  Synthetic
cuaaggugucuuuuuagccgcg

SEQ ID NO: 318799 - RNA, 23 nt, Artificial Sequence
  Synthetic
ucuaaggugucuuuuuagccgcg

SEQ ID NO: 318800 - RNA, 24 nt, Artificial Sequence
  Synthetic
cucuaaggugucuuuuuagccgcg

SEQ ID NO: 318801 - RNA, 18 nt, Artificial Sequence
  Synthetic
ccuauaaucugaaaggcg

SEQ ID NO: 318802 - RNA, 19 nt, Artificial Sequence
  Synthetic
accuauaaucugaaaggcg

SEQ ID NO: 318803 - RNA, 20 nt, Artificial Sequence
  Synthetic
gaccuauaaucugaaaggcg

SEQ ID NO: 318804 - RNA, 21 nt, Artificial Sequence
  Synthetic
agaccuauaaucugaaaggcg

SEQ ID NO: 318805 - RNA, 22 nt, Artificial Sequence
  Synthetic
aagaccuauaaucugaaaggcg

SEQ ID NO: 318806 - RNA, 23 nt, Artificial Sequence
  Synthetic
uaagaccuauaaucugaaaggcg

SEQ ID NO: 318807 - RNA, 24 nt, Artificial Sequence
  Synthetic
uuaagaccuauaaucugaaaggcg

SEQ ID NO: 318808 - RNA, 18 nt, Artificial Sequence
  Synthetic
caaucauggcagaaggcg

SEQ ID NO: 318809 - RNA, 19 nt, Artificial Sequence
  Synthetic
acaaucauggcagaaggcg

SEQ ID NO: 318810 - RNA, 20 nt, Artificial Sequence
  Synthetic
cacaaucauggcagaaggcg

SEQ ID NO: 318811 - RNA, 21 nt, Artificial Sequence
  Synthetic
ucacaaucauggcagaaggcg

SEQ ID NO: 318812 - RNA, 22 nt, Artificial Sequence
  Synthetic
cucacaaucauggcagaaggcg

SEQ ID NO: 318813 - RNA, 23 nt, Artificial Sequence
  Synthetic
ccucacaaucauggcagaaggcg

SEQ ID NO: 318814 - RNA, 24 nt, Artificial Sequence
  Synthetic
gccucacaaucauggcagaaggcg

SEQ ID NO: 318815 - RNA, 18 nt, Artificial Sequence
  Synthetic
aacacauuuccuaaggcg

SEQ ID NO: 318816 - RNA, 19 nt, Artificial Sequence
  Synthetic
gaacacauuuccuaaggcg

SEQ ID NO: 318817 - RNA, 20 nt, Artificial Sequence
  Synthetic
ggaacacauuuccuaaggcg

SEQ ID NO: 318818 - RNA, 21 nt, Artificial Sequence
  Synthetic
gggaacacauuuccuaaggcg

SEQ ID NO: 318819 - RNA, 22 nt, Artificial Sequence
  Synthetic
ugggaacacauuuccuaaggcg

SEQ ID NO: 318820 - RNA, 23 nt, Artificial Sequence
  Synthetic
augggaacacauuuccuaaggcg

SEQ ID NO: 318821 - RNA, 24 nt, Artificial Sequence
  Synthetic
gaugggaacacauuuccuaaggcg

SEQ ID NO: 318822 - RNA, 18 nt, Artificial Sequence
  Synthetic
gucaggaaagaggaggcg

SEQ ID NO: 318823 - RNA, 19 nt, Artificial Sequence
  Synthetic
agucaggaaagaggaggcg

SEQ ID NO: 318824 - RNA, 20 nt, Artificial Sequence
  Synthetic
uagucaggaaagaggaggcg

SEQ ID NO: 318825 - RNA, 21 nt, Artificial Sequence
  Synthetic
uuagucaggaaagaggaggcg

SEQ ID NO: 318826 - RNA, 22 nt, Artificial Sequence
  Synthetic
uuuagucaggaaagaggaggcg

SEQ ID NO: 318827 - RNA, 23 nt, Artificial Sequence
  Synthetic
cuuuagucaggaaagaggaggcg

SEQ ID NO: 318828 - RNA, 24 nt, Artificial Sequence
  Synthetic
acuuuagucaggaaagaggaggcg

SEQ ID NO: 318829 - RNA, 18 nt, Artificial Sequence
  Synthetic
uacaaauuuuagccggcg

SEQ ID NO: 318830 - RNA, 19 nt, Artificial Sequence
  Synthetic
auacaaauuuuagccggcg

SEQ ID NO: 318831 - RNA, 20 nt, Artificial Sequence
  Synthetic
cauacaaauuuuagccggcg

SEQ ID NO: 318832 - RNA, 21 nt, Artificial Sequence
  Synthetic
acauacaaauuuuagccggcg

SEQ ID NO: 318833 - RNA, 22 nt, Artificial Sequence
  Synthetic
aacauacaaauuuuagccggcg

SEQ ID NO: 318834 - RNA, 23 nt, Artificial Sequence
  Synthetic
caacauacaaauuuuagccggcg

SEQ ID NO: 318835 - RNA, 24 nt, Artificial Sequence
  Synthetic
ucaacauacaaauuuuagccggcg

SEQ ID NO: 318836 - RNA, 18 nt, Artificial Sequence
  Synthetic
ggcuccaaaaccagggcg

SEQ ID NO: 318837 - RNA, 19 nt, Artificial Sequence
  Synthetic
aggcuccaaaaccagggcg

SEQ ID NO: 318838 - RNA, 20 nt, Artificial Sequence
  Synthetic
aaggcuccaaaaccagggcg

SEQ ID NO: 318839 - RNA, 21 nt, Artificial Sequence
  Synthetic
gaaggcuccaaaaccagggcg

SEQ ID NO: 318840 - RNA, 22 nt, Artificial Sequence
  Synthetic
ggaaggcuccaaaaccagggcg

SEQ ID NO: 318841 - RNA, 23 nt, Artificial Sequence
  Synthetic
aggaaggcuccaaaaccagggcg

SEQ ID NO: 318842 - RNA, 24 nt, Artificial Sequence
  Synthetic
uaggaaggcuccaaaaccagggcg

SEQ ID NO: 318843 - RNA, 18 nt, Artificial Sequence
  Synthetic
ugcagcccacagagggcg

SEQ ID NO: 318844 - RNA, 19 nt, Artificial Sequence
  Synthetic
gugcagcccacagagggcg

SEQ ID NO: 318845 - RNA, 20 nt, Artificial Sequence
  Synthetic
ggugcagcccacagagggcg

SEQ ID NO: 318846 - RNA, 21 nt, Artificial Sequence
  Synthetic
gggugcagcccacagagggcg

SEQ ID NO: 318847 - RNA, 22 nt, Artificial Sequence
  Synthetic
ugggugcagcccacagagggcg

SEQ ID NO: 318848 - RNA, 23 nt, Artificial Sequence
  Synthetic
gugggugcagcccacagagggcg

SEQ ID NO: 318849 - RNA, 24 nt, Artificial Sequence
  Synthetic
agugggugcagcccacagagggcg

SEQ ID NO: 318850 - RNA, 18 nt, Artificial Sequence
  Synthetic
augugaggguuaggggcg

SEQ ID NO: 318851 - RNA, 19 nt, Artificial Sequence
  Synthetic
aaugugaggguuaggggcg

SEQ ID NO: 318852 - RNA, 20 nt, Artificial Sequence
  Synthetic
caaugugaggguuaggggcg

SEQ ID NO: 318853 - RNA, 21 nt, Artificial Sequence
  Synthetic
acaaugugaggguuaggggcg

SEQ ID NO: 318854 - RNA, 22 nt, Artificial Sequence
  Synthetic
aacaaugugaggguuaggggcg

SEQ ID NO: 318855 - RNA, 23 nt, Artificial Sequence
  Synthetic
aaacaaugugaggguuaggggcg

SEQ ID NO: 318856 - RNA, 24 nt, Artificial Sequence
  Synthetic
caaacaaugugaggguuaggggcg

SEQ ID NO: 318857 - RNA, 18 nt, Artificial Sequence
  Synthetic
gugugaggguucggggcg

SEQ ID NO: 318858 - RNA, 19 nt, Artificial Sequence
  Synthetic
agugugaggguucggggcg

SEQ ID NO: 318859 - RNA, 20 nt, Artificial Sequence
  Synthetic
cagugugaggguucggggcg

SEQ ID NO: 318860 - RNA, 21 nt, Artificial Sequence
  Synthetic
acagugugaggguucggggcg

SEQ ID NO: 318861 - RNA, 22 nt, Artificial Sequence
  Synthetic
aacagugugaggguucggggcg

SEQ ID NO: 318862 - RNA, 23 nt, Artificial Sequence
  Synthetic
aaacagugugaggguucggggcg

SEQ ID NO: 318863 - RNA, 24 nt, Artificial Sequence
  Synthetic
caaacagugugaggguucggggcg

SEQ ID NO: 318864 - RNA, 18 nt, Artificial Sequence
  Synthetic
cugucgggggguggggcg

SEQ ID NO: 318865 - RNA, 19 nt, Artificial Sequence
  Synthetic
ccugucgggggguggggcg

SEQ ID NO: 318866 - RNA, 20 nt, Artificial Sequence
  Synthetic
gccugucgggggguggggcg

SEQ ID NO: 318867 - RNA, 21 nt, Artificial Sequence
  Synthetic
ggccugucgggggguggggcg

SEQ ID NO: 318868 - RNA, 22 nt, Artificial Sequence
  Synthetic
aggccugucgggggguggggcg

SEQ ID NO: 318869 - RNA, 23 nt, Artificial Sequence
  Synthetic
gaggccugucgggggguggggcg

SEQ ID NO: 318870 - RNA, 24 nt, Artificial Sequence
  Synthetic
ugaggccugucgggggguggggcg

SEQ ID NO: 318871 - RNA, 18 nt, Artificial Sequence
  Synthetic
auauaugcagaaugggcg

SEQ ID NO: 318872 - RNA, 19 nt, Artificial Sequence
  Synthetic
gauauaugcagaaugggcg

SEQ ID NO: 318873 - RNA, 20 nt, Artificial Sequence
  Synthetic
agauauaugcagaaugggcg

SEQ ID NO: 318874 - RNA, 21 nt, Artificial Sequence
  Synthetic
gagauauaugcagaaugggcg

SEQ ID NO: 318875 - RNA, 22 nt, Artificial Sequence
  Synthetic
ugagauauaugcagaaugggcg

SEQ ID NO: 318876 - RNA, 23 nt, Artificial Sequence
  Synthetic
augagauauaugcagaaugggcg

SEQ ID NO: 318877 - RNA, 24 nt, Artificial Sequence
  Synthetic
caugagauauaugcagaaugggcg

SEQ ID NO: 318878 - RNA, 18 nt, Artificial Sequence
  Synthetic
ugcgcuccaaccugggcg

SEQ ID NO: 318879 - RNA, 19 nt, Artificial Sequence
  Synthetic
cugcgcuccaaccugggcg

SEQ ID NO: 318880 - RNA, 20 nt, Artificial Sequence
  Synthetic
acugcgcuccaaccugggcg

SEQ ID NO: 318881 - RNA, 21 nt, Artificial Sequence
  Synthetic
cacugcgcuccaaccugggcg

SEQ ID NO: 318882 - RNA, 22 nt, Artificial Sequence
  Synthetic
ccacugcgcuccaaccugggcg

SEQ ID NO: 318883 - RNA, 23 nt, Artificial Sequence
  Synthetic
gccacugcgcuccaaccugggcg

SEQ ID NO: 318884 - RNA, 24 nt, Artificial Sequence
  Synthetic
ugccacugcgcuccaaccugggcg

SEQ ID NO: 318885 - RNA, 18 nt, Artificial Sequence
  Synthetic
guaaccaggggcugggcg

SEQ ID NO: 318886 - RNA, 19 nt, Artificial Sequence
  Synthetic
aguaaccaggggcugggcg

SEQ ID NO: 318887 - RNA, 20 nt, Artificial Sequence
  Synthetic
uaguaaccaggggcugggcg

SEQ ID NO: 318888 - RNA, 21 nt, Artificial Sequence
  Synthetic
auaguaaccaggggcugggcg

SEQ ID NO: 318889 - RNA, 22 nt, Artificial Sequence
  Synthetic
gauaguaaccaggggcugggcg

SEQ ID NO: 318890 - RNA, 23 nt, Artificial Sequence
  Synthetic
ugauaguaaccaggggcugggcg

SEQ ID NO: 318891 - RNA, 24 nt, Artificial Sequence
  Synthetic
augauaguaaccaggggcugggcg

SEQ ID NO: 318892 - RNA, 18 nt, Artificial Sequence
  Synthetic
cccaucaaaaagugggcg

SEQ ID NO: 318893 - RNA, 19 nt, Artificial Sequence
  Synthetic
ccccaucaaaaagugggcg

SEQ ID NO: 318894 - RNA, 20 nt, Artificial Sequence
  Synthetic
accccaucaaaaagugggcg

SEQ ID NO: 318895 - RNA, 21 nt, Artificial Sequence
  Synthetic
aaccccaucaaaaagugggcg

SEQ ID NO: 318896 - RNA, 22 nt, Artificial Sequence
  Synthetic
caaccccaucaaaaagugggcg

SEQ ID NO: 318897 - RNA, 23 nt, Artificial Sequence
  Synthetic
acaaccccaucaaaaagugggcg

SEQ ID NO: 318898 - RNA, 24 nt, Artificial Sequence
  Synthetic
aacaaccccaucaaaaagugggcg

SEQ ID NO: 318899 - RNA, 18 nt, Artificial Sequence
  Synthetic
cccauccaaaagugggcg

SEQ ID NO: 318900 - RNA, 19 nt, Artificial Sequence
  Synthetic
ccccauccaaaagugggcg

SEQ ID NO: 318901 - RNA, 20 nt, Artificial Sequence
  Synthetic
accccauccaaaagugggcg

SEQ ID NO: 318902 - RNA, 21 nt, Artificial Sequence
  Synthetic
aaccccauccaaaagugggcg

SEQ ID NO: 318903 - RNA, 22 nt, Artificial Sequence
  Synthetic
caaccccauccaaaagugggcg

SEQ ID NO: 318904 - RNA, 23 nt, Artificial Sequence
  Synthetic
acaaccccauccaaaagugggcg

SEQ ID NO: 318905 - RNA, 24 nt, Artificial Sequence
  Synthetic
aacaaccccauccaaaagugggcg

SEQ ID NO: 318906 - RNA, 18 nt, Artificial Sequence
  Synthetic
gaggguggagguugggcg

SEQ ID NO: 318907 - RNA, 19 nt, Artificial Sequence
  Synthetic
agaggguggagguugggcg

SEQ ID NO: 318908 - RNA, 20 nt, Artificial Sequence
  Synthetic
cagaggguggagguugggcg

SEQ ID NO: 318909 - RNA, 21 nt, Artificial Sequence
  Synthetic
ucagaggguggagguugggcg

SEQ ID NO: 318910 - RNA, 22 nt, Artificial Sequence
  Synthetic
aucagaggguggagguugggcg

SEQ ID NO: 318911 - RNA, 23 nt, Artificial Sequence
  Synthetic
uaucagaggguggagguugggcg

SEQ ID NO: 318912 - RNA, 24 nt, Artificial Sequence
  Synthetic
cuaucagaggguggagguugggcg

SEQ ID NO: 318913 - RNA, 18 nt, Artificial Sequence
  Synthetic
agcaaaagaagcauggcg

SEQ ID NO: 318914 - RNA, 19 nt, Artificial Sequence
  Synthetic
aagcaaaagaagcauggcg

SEQ ID NO: 318915 - RNA, 20 nt, Artificial Sequence
  Synthetic
uaagcaaaagaagcauggcg

SEQ ID NO: 318916 - RNA, 21 nt, Artificial Sequence
  Synthetic
cuaagcaaaagaagcauggcg

SEQ ID NO: 318917 - RNA, 22 nt, Artificial Sequence
  Synthetic
ucuaagcaaaagaagcauggcg

SEQ ID NO: 318918 - RNA, 23 nt, Artificial Sequence
  Synthetic
uucuaagcaaaagaagcauggcg

SEQ ID NO: 318919 - RNA, 24 nt, Artificial Sequence
  Synthetic
guucuaagcaaaagaagcauggcg

SEQ ID NO: 318920 - RNA, 18 nt, Artificial Sequence
  Synthetic
aucugcccaugacuggcg

SEQ ID NO: 318921 - RNA, 19 nt, Artificial Sequence
  Synthetic
uaucugcccaugacuggcg

SEQ ID NO: 318922 - RNA, 20 nt, Artificial Sequence
  Synthetic
uuaucugcccaugacuggcg

SEQ ID NO: 318923 - RNA, 21 nt, Artificial Sequence
  Synthetic
auuaucugcccaugacuggcg

SEQ ID NO: 318924 - RNA, 22 nt, Artificial Sequence
  Synthetic
gauuaucugcccaugacuggcg

SEQ ID NO: 318925 - RNA, 23 nt, Artificial Sequence
  Synthetic
agauuaucugcccaugacuggcg

SEQ ID NO: 318926 - RNA, 24 nt, Artificial Sequence
  Synthetic
gagauuaucugcccaugacuggcg

SEQ ID NO: 318927 - RNA, 18 nt, Artificial Sequence
  Synthetic
aacaagaggcucuuggcg

SEQ ID NO: 318928 - RNA, 19 nt, Artificial Sequence
  Synthetic
uaacaagaggcucuuggcg

SEQ ID NO: 318929 - RNA, 20 nt, Artificial Sequence
  Synthetic
uuaacaagaggcucuuggcg

SEQ ID NO: 318930 - RNA, 21 nt, Artificial Sequence
  Synthetic
uuuaacaagaggcucuuggcg

SEQ ID NO: 318931 - RNA, 22 nt, Artificial Sequence
  Synthetic
guuuaacaagaggcucuuggcg

SEQ ID NO: 318932 - RNA, 23 nt, Artificial Sequence
  Synthetic
uguuuaacaagaggcucuuggcg

SEQ ID NO: 318933 - RNA, 24 nt, Artificial Sequence
  Synthetic
auguuuaacaagaggcucuuggcg

SEQ ID NO: 318934 - RNA, 18 nt, Artificial Sequence
  Synthetic
augucagucaaaaaugcg

SEQ ID NO: 318935 - RNA, 19 nt, Artificial Sequence
  Synthetic
caugucagucaaaaaugcg

SEQ ID NO: 318936 - RNA, 20 nt, Artificial Sequence
  Synthetic
ccaugucagucaaaaaugcg

SEQ ID NO: 318937 - RNA, 21 nt, Artificial Sequence
  Synthetic
accaugucagucaaaaaugcg

SEQ ID NO: 318938 - RNA, 22 nt, Artificial Sequence
  Synthetic
caccaugucagucaaaaaugcg

SEQ ID NO: 318939 - RNA, 23 nt, Artificial Sequence
  Synthetic
ucaccaugucagucaaaaaugcg

SEQ ID NO: 318940 - RNA, 24 nt, Artificial Sequence
  Synthetic
uucaccaugucagucaaaaaugcg

SEQ ID NO: 318941 - RNA, 18 nt, Artificial Sequence
  Synthetic
ccccucacuucaaaugcg

SEQ ID NO: 318942 - RNA, 19 nt, Artificial Sequence
  Synthetic
cccccucacuucaaaugcg

SEQ ID NO: 318943 - RNA, 20 nt, Artificial Sequence
  Synthetic
acccccucacuucaaaugcg

SEQ ID NO: 318944 - RNA, 21 nt, Artificial Sequence
  Synthetic
cacccccucacuucaaaugcg

SEQ ID NO: 318945 - RNA, 22 nt, Artificial Sequence
  Synthetic
ucacccccucacuucaaaugcg

SEQ ID NO: 318946 - RNA, 23 nt, Artificial Sequence
  Synthetic
cucacccccucacuucaaaugcg

SEQ ID NO: 318947 - RNA, 24 nt, Artificial Sequence
  Synthetic
ccucacccccucacuucaaaugcg

SEQ ID NO: 318948 - RNA, 18 nt, Artificial Sequence
  Synthetic
augaaaugaaacaaugcg

SEQ ID NO: 318949 - RNA, 19 nt, Artificial Sequence
  Synthetic
aaugaaaugaaacaaugcg

SEQ ID NO: 318950 - RNA, 20 nt, Artificial Sequence
  Synthetic
aaaugaaaugaaacaaugcg

SEQ ID NO: 318951 - RNA, 21 nt, Artificial Sequence
  Synthetic
gaaaugaaaugaaacaaugcg

SEQ ID NO: 318952 - RNA, 22 nt, Artificial Sequence
  Synthetic
cgaaaugaaaugaaacaaugcg

SEQ ID NO: 318953 - RNA, 23 nt, Artificial Sequence
  Synthetic
ucgaaaugaaaugaaacaaugcg

SEQ ID NO: 318954 - RNA, 24 nt, Artificial Sequence
  Synthetic
gucgaaaugaaaugaaacaaugcg

SEQ ID NO: 318955 - RNA, 18 nt, Artificial Sequence
  Synthetic
uucuaacaguuuaaugcg

SEQ ID NO: 318956 - RNA, 19 nt, Artificial Sequence
  Synthetic
guucuaacaguuuaaugcg

SEQ ID NO: 318957 - RNA, 20 nt, Artificial Sequence
  Synthetic
aguucuaacaguuuaaugcg

SEQ ID NO: 318958 - RNA, 21 nt, Artificial Sequence
  Synthetic
uaguucuaacaguuuaaugcg

SEQ ID NO: 318959 - RNA, 22 nt, Artificial Sequence
  Synthetic
auaguucuaacaguuuaaugcg

SEQ ID NO: 318960 - RNA, 23 nt, Artificial Sequence
  Synthetic
aauaguucuaacaguuuaaugcg

SEQ ID NO: 318961 - RNA, 24 nt, Artificial Sequence
  Synthetic
uaauaguucuaacaguuuaaugcg

SEQ ID NO: 318962 - RNA, 18 nt, Artificial Sequence
  Synthetic
aauaaugcuccagaugcg

SEQ ID NO: 318963 - RNA, 19 nt, Artificial Sequence
  Synthetic
aaauaaugcuccagaugcg

SEQ ID NO: 318964 - RNA, 20 nt, Artificial Sequence
  Synthetic
aaaauaaugcuccagaugcg

SEQ ID NO: 318965 - RNA, 21 nt, Artificial Sequence
  Synthetic
uaaaauaaugcuccagaugcg

SEQ ID NO: 318966 - RNA, 22 nt, Artificial Sequence
  Synthetic
auaaaauaaugcuccagaugcg

SEQ ID NO: 318967 - RNA, 23 nt, Artificial Sequence
  Synthetic
aauaaaauaaugcuccagaugcg

SEQ ID NO: 318968 - RNA, 24 nt, Artificial Sequence
  Synthetic
uaauaaaauaaugcuccagaugcg

SEQ ID NO: 318969 - RNA, 18 nt, Artificial Sequence
  Synthetic
uggucacaccuaacugcg

SEQ ID NO: 318970 - RNA, 19 nt, Artificial Sequence
  Synthetic
auggucacaccuaacugcg

SEQ ID NO: 318971 - RNA, 20 nt, Artificial Sequence
  Synthetic
cauggucacaccuaacugcg

SEQ ID NO: 318972 - RNA, 21 nt, Artificial Sequence
  Synthetic
acauggucacaccuaacugcg

SEQ ID NO: 318973 - RNA, 22 nt, Artificial Sequence
  Synthetic
cacauggucacaccuaacugcg

SEQ ID NO: 318974 - RNA, 23 nt, Artificial Sequence
  Synthetic
ucacauggucacaccuaacugcg

SEQ ID NO: 318975 - RNA, 24 nt, Artificial Sequence
  Synthetic
gucacauggucacaccuaacugcg

SEQ ID NO: 318976 - RNA, 18 nt, Artificial Sequence
  Synthetic
auugauuguuucacugcg

SEQ ID NO: 318977 - RNA, 19 nt, Artificial Sequence
  Synthetic
uauugauuguuucacugcg

SEQ ID NO: 318978 - RNA, 20 nt, Artificial Sequence
  Synthetic
uuauugauuguuucacugcg

SEQ ID NO: 318979 - RNA, 21 nt, Artificial Sequence
  Synthetic
uuuauugauuguuucacugcg

SEQ ID NO: 318980 - RNA, 22 nt, Artificial Sequence
  Synthetic
cuuuauugauuguuucacugcg

SEQ ID NO: 318981 - RNA, 23 nt, Artificial Sequence
  Synthetic
acuuuauugauuguuucacugcg

SEQ ID NO: 318982 - RNA, 24 nt, Artificial Sequence
  Synthetic
cacuuuauugauuguuucacugcg

SEQ ID NO: 318983 - RNA, 18 nt, Artificial Sequence
  Synthetic
caacugacagcuccugcg

SEQ ID NO: 318984 - RNA, 19 nt, Artificial Sequence
  Synthetic
ccaacugacagcuccugcg

SEQ ID NO: 318985 - RNA, 20 nt, Artificial Sequence
  Synthetic
uccaacugacagcuccugcg

SEQ ID NO: 318986 - RNA, 21 nt, Artificial Sequence
  Synthetic
uuccaacugacagcuccugcg

SEQ ID NO: 318987 - RNA, 22 nt, Artificial Sequence
  Synthetic
auuccaacugacagcuccugcg

SEQ ID NO: 318988 - RNA, 23 nt, Artificial Sequence
  Synthetic
uauuccaacugacagcuccugcg

SEQ ID NO: 318989 - RNA, 24 nt, Artificial Sequence
  Synthetic
guauuccaacugacagcuccugcg

SEQ ID NO: 318990 - RNA, 18 nt, Artificial Sequence
  Synthetic
ccuacaaauguggcugcg

SEQ ID NO: 318991 - RNA, 19 nt, Artificial Sequence
  Synthetic
accuacaaauguggcugcg

SEQ ID NO: 318992 - RNA, 20 nt, Artificial Sequence
  Synthetic
aaccuacaaauguggcugcg

SEQ ID NO: 318993 - RNA, 21 nt, Artificial Sequence
  Synthetic
aaaccuacaaauguggcugcg

SEQ ID NO: 318994 - RNA, 22 nt, Artificial Sequence
  Synthetic
uaaaccuacaaauguggcugcg

SEQ ID NO: 318995 - RNA, 23 nt, Artificial Sequence
  Synthetic
uuaaaccuacaaauguggcugcg

SEQ ID NO: 318996 - RNA, 24 nt, Artificial Sequence
  Synthetic
uuuaaaccuacaaauguggcugcg

SEQ ID NO: 318997 - RNA, 18 nt, Artificial Sequence
  Synthetic
uuaagacuuuuggcugcg

SEQ ID NO: 318998 - RNA, 19 nt, Artificial Sequence
  Synthetic
uuuaagacuuuuggcugcg

SEQ ID NO: 318999 - RNA, 20 nt, Artificial Sequence
  Synthetic
uuuuaagacuuuuggcugcg

SEQ ID NO: 319000 - RNA, 21 nt, Artificial Sequence
  Synthetic
auuuuaagacuuuuggcugcg

SEQ ID NO: 319001 - RNA, 22 nt, Artificial Sequence
  Synthetic
uauuuuaagacuuuuggcugcg

SEQ ID NO: 319002 - RNA, 23 nt, Artificial Sequence
  Synthetic
uuauuuuaagacuuuuggcugcg

SEQ ID NO: 319003 - RNA, 24 nt, Artificial Sequence
  Synthetic
auuauuuuaagacuuuuggcugcg

SEQ ID NO: 319004 - RNA, 18 nt, Artificial Sequence
  Synthetic
gguguuugaaugucugcg

SEQ ID NO: 319005 - RNA, 19 nt, Artificial Sequence
  Synthetic
ugguguuugaaugucugcg

SEQ ID NO: 319006 - RNA, 20 nt, Artificial Sequence
  Synthetic
augguguuugaaugucugcg

SEQ ID NO: 319007 - RNA, 21 nt, Artificial Sequence
  Synthetic
gaugguguuugaaugucugcg

SEQ ID NO: 319008 - RNA, 22 nt, Artificial Sequence
  Synthetic
ugaugguguuugaaugucugcg

SEQ ID NO: 319009 - RNA, 23 nt, Artificial Sequence
  Synthetic
augaugguguuugaaugucugcg

SEQ ID NO: 319010 - RNA, 24 nt, Artificial Sequence
  Synthetic
gaugaugguguuugaaugucugcg

SEQ ID NO: 319011 - RNA, 18 nt, Artificial Sequence
  Synthetic
uaaacuauaaauugugcg

SEQ ID NO: 319012 - RNA, 19 nt, Artificial Sequence
  Synthetic
auaaacuauaaauugugcg

SEQ ID NO: 319013 - RNA, 20 nt, Artificial Sequence
  Synthetic
gauaaacuauaaauugugcg

SEQ ID NO: 319014 - RNA, 21 nt, Artificial Sequence
  Synthetic
ugauaaacuauaaauugugcg

SEQ ID NO: 319015 - RNA, 22 nt, Artificial Sequence
  Synthetic
cugauaaacuauaaauugugcg

SEQ ID NO: 319016 - RNA, 23 nt, Artificial Sequence
  Synthetic
ccugauaaacuauaaauugugcg

SEQ ID NO: 319017 - RNA, 24 nt, Artificial Sequence
  Synthetic
cccugauaaacuauaaauugugcg

SEQ ID NO: 319018 - RNA, 18 nt, Artificial Sequence
  Synthetic
aacuggcguaauauugcg

SEQ ID NO: 319019 - RNA, 19 nt, Artificial Sequence
  Synthetic
uaacuggcguaauauugcg

SEQ ID NO: 319020 - RNA, 20 nt, Artificial Sequence
  Synthetic
guaacuggcguaauauugcg

SEQ ID NO: 319021 - RNA, 21 nt, Artificial Sequence
  Synthetic
aguaacuggcguaauauugcg

SEQ ID NO: 319022 - RNA, 22 nt, Artificial Sequence
  Synthetic
aaguaacuggcguaauauugcg

SEQ ID NO: 319023 - RNA, 23 nt, Artificial Sequence
  Synthetic
aaaguaacuggcguaauauugcg

SEQ ID NO: 319024 - RNA, 24 nt, Artificial Sequence
  Synthetic
aaaaguaacuggcguaauauugcg

SEQ ID NO: 319025 - RNA, 18 nt, Artificial Sequence
  Synthetic
acucaguccugccuugcg

SEQ ID NO: 319026 - RNA, 19 nt, Artificial Sequence
  Synthetic
gacucaguccugccuugcg

SEQ ID NO: 319027 - RNA, 20 nt, Artificial Sequence
  Synthetic
ggacucaguccugccuugcg

SEQ ID NO: 319028 - RNA, 21 nt, Artificial Sequence
  Synthetic
aggacucaguccugccuugcg

SEQ ID NO: 319029 - RNA, 22 nt, Artificial Sequence
  Synthetic
gaggacucaguccugccuugcg

SEQ ID NO: 319030 - RNA, 23 nt, Artificial Sequence
  Synthetic
agaggacucaguccugccuugcg

SEQ ID NO: 319031 - RNA, 24 nt, Artificial Sequence
  Synthetic
uagaggacucaguccugccuugcg

SEQ ID NO: 319032 - RNA, 18 nt, Artificial Sequence
  Synthetic
cgggagguggagcuugcg

SEQ ID NO: 319033 - RNA, 19 nt, Artificial Sequence
  Synthetic
ccgggagguggagcuugcg

SEQ ID NO: 319034 - RNA, 20 nt, Artificial Sequence
  Synthetic
uccgggagguggagcuugcg

SEQ ID NO: 319035 - RNA, 21 nt, Artificial Sequence
  Synthetic
auccgggagguggagcuugcg

SEQ ID NO: 319036 - RNA, 22 nt, Artificial Sequence
  Synthetic
aauccgggagguggagcuugcg

SEQ ID NO: 319037 - RNA, 23 nt, Artificial Sequence
  Synthetic
gaauccgggagguggagcuugcg

SEQ ID NO: 319038 - RNA, 24 nt, Artificial Sequence
  Synthetic
ugaauccgggagguggagcuugcg

SEQ ID NO: 319039 - RNA, 18 nt, Artificial Sequence
  Synthetic
aauucuuuuucucuugcg

SEQ ID NO: 319040 - RNA, 19 nt, Artificial Sequence
  Synthetic
aaauucuuuuucucuugcg

SEQ ID NO: 319041 - RNA, 20 nt, Artificial Sequence
  Synthetic
gaaauucuuuuucucuugcg

SEQ ID NO: 319042 - RNA, 21 nt, Artificial Sequence
  Synthetic
ggaaauucuuuuucucuugcg

SEQ ID NO: 319043 - RNA, 22 nt, Artificial Sequence
  Synthetic
gggaaauucuuuuucucuugcg

SEQ ID NO: 319044 - RNA, 23 nt, Artificial Sequence
  Synthetic
ugggaaauucuuuuucucuugcg

SEQ ID NO: 319045 - RNA, 24 nt, Artificial Sequence
  Synthetic
cugggaaauucuuuuucucuugcg

SEQ ID NO: 319046 - RNA, 18 nt, Artificial Sequence
  Synthetic
caggagguggagguugcg

SEQ ID NO: 319047 - RNA, 19 nt, Artificial Sequence
  Synthetic
ccaggagguggagguugcg

SEQ ID NO: 319048 - RNA, 20 nt, Artificial Sequence
  Synthetic
cccaggagguggagguugcg

SEQ ID NO: 319049 - RNA, 21 nt, Artificial Sequence
  Synthetic
acccaggagguggagguugcg

SEQ ID NO: 319050 - RNA, 22 nt, Artificial Sequence
  Synthetic
aacccaggagguggagguugcg

SEQ ID NO: 319051 - RNA, 23 nt, Artificial Sequence
  Synthetic
gaacccaggagguggagguugcg

SEQ ID NO: 319052 - RNA, 24 nt, Artificial Sequence
  Synthetic
ugaacccaggagguggagguugcg

SEQ ID NO: 319053 - RNA, 18 nt, Artificial Sequence
  Synthetic
gguuguuuugugguugcg

SEQ ID NO: 319054 - RNA, 19 nt, Artificial Sequence
  Synthetic
ggguuguuuugugguugcg

SEQ ID NO: 319055 - RNA, 20 nt, Artificial Sequence
  Synthetic
aggguuguuuugugguugcg

SEQ ID NO: 319056 - RNA, 21 nt, Artificial Sequence
  Synthetic
uaggguuguuuugugguugcg

SEQ ID NO: 319057 - RNA, 22 nt, Artificial Sequence
  Synthetic
guaggguuguuuugugguugcg

SEQ ID NO: 319058 - RNA, 23 nt, Artificial Sequence
  Synthetic
uguaggguuguuuugugguugcg

SEQ ID NO: 319059 - RNA, 24 nt, Artificial Sequence
  Synthetic
guguaggguuguuuugugguugcg

SEQ ID NO: 319060 - RNA, 18 nt, Artificial Sequence
  Synthetic
uuuucuaguuuauuugcg

SEQ ID NO: 319061 - RNA, 19 nt, Artificial Sequence
  Synthetic
auuuucuaguuuauuugcg

SEQ ID NO: 319062 - RNA, 20 nt, Artificial Sequence
  Synthetic
gauuuucuaguuuauuugcg

SEQ ID NO: 319063 - RNA, 18 nt, Artificial Sequence
  Synthetic
ucacacuuuaacuuugcg

SEQ ID NO: 319064 - RNA, 19 nt, Artificial Sequence
  Synthetic
uucacacuuuaacuuugcg

SEQ ID NO: 319065 - RNA, 20 nt, Artificial Sequence
  Synthetic
cuucacacuuuaacuuugcg

SEQ ID NO: 319066 - RNA, 21 nt, Artificial Sequence
  Synthetic
ucuucacacuuuaacuuugcg

SEQ ID NO: 319067 - RNA, 22 nt, Artificial Sequence
  Synthetic
uucuucacacuuuaacuuugcg

SEQ ID NO: 319068 - RNA, 23 nt, Artificial Sequence
  Synthetic
uuucuucacacuuuaacuuugcg

SEQ ID NO: 319069 - RNA, 24 nt, Artificial Sequence
  Synthetic
uuuucuucacacuuuaacuuugcg

SEQ ID NO: 319070 - RNA, 18 nt, Artificial Sequence
  Synthetic
uuguccugaaaaaaaucg

SEQ ID NO: 319071 - RNA, 19 nt, Artificial Sequence
  Synthetic
guuguccugaaaaaaaucg

SEQ ID NO: 319072 - RNA, 20 nt, Artificial Sequence
  Synthetic
uguuguccugaaaaaaaucg

SEQ ID NO: 319073 - RNA, 21 nt, Artificial Sequence
  Synthetic
auguuguccugaaaaaaaucg

SEQ ID NO: 319074 - RNA, 22 nt, Artificial Sequence
  Synthetic
gauguuguccugaaaaaaaucg

SEQ ID NO: 319075 - RNA, 23 nt, Artificial Sequence
  Synthetic
agauguuguccugaaaaaaaucg

SEQ ID NO: 319076 - RNA, 24 nt, Artificial Sequence
  Synthetic
gagauguuguccugaaaaaaaucg

SEQ ID NO: 319077 - RNA, 18 nt, Artificial Sequence
  Synthetic
uaauagccugagaaaucg

SEQ ID NO: 319078 - RNA, 19 nt, Artificial Sequence
  Synthetic
auaauagccugagaaaucg

SEQ ID NO: 319079 - RNA, 20 nt, Artificial Sequence
  Synthetic
uauaauagccugagaaaucg

SEQ ID NO: 319080 - RNA, 21 nt, Artificial Sequence
  Synthetic
cuauaauagccugagaaaucg

SEQ ID NO: 319081 - RNA, 22 nt, Artificial Sequence
  Synthetic
gcuauaauagccugagaaaucg

SEQ ID NO: 319082 - RNA, 23 nt, Artificial Sequence
  Synthetic
ugcuauaauagccugagaaaucg

SEQ ID NO: 319083 - RNA, 24 nt, Artificial Sequence
  Synthetic
cugcuauaauagccugagaaaucg

SEQ ID NO: 319084 - RNA, 18 nt, Artificial Sequence
  Synthetic
gccuacagcaugaaaucg

SEQ ID NO: 319085 - RNA, 19 nt, Artificial Sequence
  Synthetic
ugccuacagcaugaaaucg

SEQ ID NO: 319086 - RNA, 20 nt, Artificial Sequence
  Synthetic
uugccuacagcaugaaaucg

SEQ ID NO: 319087 - RNA, 21 nt, Artificial Sequence
  Synthetic
auugccuacagcaugaaaucg

SEQ ID NO: 319088 - RNA, 22 nt, Artificial Sequence
  Synthetic
aauugccuacagcaugaaaucg

SEQ ID NO: 319089 - RNA, 23 nt, Artificial Sequence
  Synthetic
caauugccuacagcaugaaaucg

SEQ ID NO: 319090 - RNA, 24 nt, Artificial Sequence
  Synthetic
ccaauugccuacagcaugaaaucg

SEQ ID NO: 319091 - RNA, 18 nt, Artificial Sequence
  Synthetic
cuucuauaggauaaaucg

SEQ ID NO: 319092 - RNA, 19 nt, Artificial Sequence
  Synthetic
acuucuauaggauaaaucg

SEQ ID NO: 319093 - RNA, 20 nt, Artificial Sequence
  Synthetic
aacuucuauaggauaaaucg

SEQ ID NO: 319094 - RNA, 21 nt, Artificial Sequence
  Synthetic
aaacuucuauaggauaaaucg

SEQ ID NO: 319095 - RNA, 22 nt, Artificial Sequence
  Synthetic
gaaacuucuauaggauaaaucg

SEQ ID NO: 319096 - RNA, 23 nt, Artificial Sequence
  Synthetic
ggaaacuucuauaggauaaaucg

SEQ ID NO: 319097 - RNA, 24 nt, Artificial Sequence
  Synthetic
aggaaacuucuauaggauaaaucg

SEQ ID NO: 319098 - RNA, 18 nt, Artificial Sequence
  Synthetic
cucaaacuagaagaaucg

SEQ ID NO: 319099 - RNA, 19 nt, Artificial Sequence
  Synthetic
ucucaaacuagaagaaucg

SEQ ID NO: 319100 - RNA, 20 nt, Artificial Sequence
  Synthetic
aucucaaacuagaagaaucg

SEQ ID NO: 319101 - RNA, 21 nt, Artificial Sequence
  Synthetic
aaucucaaacuagaagaaucg

SEQ ID NO: 319102 - RNA, 22 nt, Artificial Sequence
  Synthetic
aaaucucaaacuagaagaaucg

SEQ ID NO: 319103 - RNA, 23 nt, Artificial Sequence
  Synthetic
aaaaucucaaacuagaagaaucg

SEQ ID NO: 319104 - RNA, 24 nt, Artificial Sequence
  Synthetic
uaaaaucucaaacuagaagaaucg

SEQ ID NO: 319105 - RNA, 18 nt, Artificial Sequence
  Synthetic
aucaaauaaaccgaaucg

SEQ ID NO: 319106 - RNA, 19 nt, Artificial Sequence
  Synthetic
aaucaaauaaaccgaaucg

SEQ ID NO: 319107 - RNA, 20 nt, Artificial Sequence
  Synthetic
caaucaaauaaaccgaaucg

SEQ ID NO: 319108 - RNA, 21 nt, Artificial Sequence
  Synthetic
ccaaucaaauaaaccgaaucg

SEQ ID NO: 319109 - RNA, 22 nt, Artificial Sequence
  Synthetic
gccaaucaaauaaaccgaaucg

SEQ ID NO: 319110 - RNA, 23 nt, Artificial Sequence
  Synthetic
agccaaucaaauaaaccgaaucg

SEQ ID NO: 319111 - RNA, 24 nt, Artificial Sequence
  Synthetic
uagccaaucaaauaaaccgaaucg

SEQ ID NO: 319112 - RNA, 18 nt, Artificial Sequence
  Synthetic
augaauaaauauuaaucg

SEQ ID NO: 319113 - RNA, 19 nt, Artificial Sequence
  Synthetic
aaugaauaaauauuaaucg

SEQ ID NO: 319114 - RNA, 20 nt, Artificial Sequence
  Synthetic
aaaugaauaaauauuaaucg

SEQ ID NO: 319115 - RNA, 21 nt, Artificial Sequence
  Synthetic
aaaaugaauaaauauuaaucg

SEQ ID NO: 319116 - RNA, 22 nt, Artificial Sequence
  Synthetic
caaaaugaauaaauauuaaucg

SEQ ID NO: 319117 - RNA, 23 nt, Artificial Sequence
  Synthetic
ucaaaaugaauaaauauuaaucg

SEQ ID NO: 319118 - RNA, 24 nt, Artificial Sequence
  Synthetic
gucaaaaugaauaaauauuaaucg

SEQ ID NO: 319119 - RNA, 18 nt, Artificial Sequence
  Synthetic
uucuuaauaauuuaaucg

SEQ ID NO: 319120 - RNA, 19 nt, Artificial Sequence
  Synthetic
guucuuaauaauuuaaucg

SEQ ID NO: 319121 - RNA, 20 nt, Artificial Sequence
  Synthetic
gguucuuaauaauuuaaucg

SEQ ID NO: 319122 - RNA, 21 nt, Artificial Sequence
  Synthetic
agguucuuaauaauuuaaucg

SEQ ID NO: 319123 - RNA, 22 nt, Artificial Sequence
  Synthetic
gagguucuuaauaauuuaaucg

SEQ ID NO: 319124 - RNA, 23 nt, Artificial Sequence
  Synthetic
agagguucuuaauaauuuaaucg

SEQ ID NO: 319125 - RNA, 24 nt, Artificial Sequence
  Synthetic
cagagguucuuaauaauuuaaucg

SEQ ID NO: 319126 - RNA, 18 nt, Artificial Sequence
  Synthetic
agauacauuuuuuaaucg

SEQ ID NO: 319127 - RNA, 19 nt, Artificial Sequence
  Synthetic
uagauacauuuuuuaaucg

SEQ ID NO: 319128 - RNA, 20 nt, Artificial Sequence
  Synthetic
auagauacauuuuuuaaucg

SEQ ID NO: 319129 - RNA, 21 nt, Artificial Sequence
  Synthetic
aauagauacauuuuuuaaucg

SEQ ID NO: 319130 - RNA, 22 nt, Artificial Sequence
  Synthetic
gaauagauacauuuuuuaaucg

SEQ ID NO: 319131 - RNA, 23 nt, Artificial Sequence
  Synthetic
ggaauagauacauuuuuuaaucg

SEQ ID NO: 319132 - RNA, 24 nt, Artificial Sequence
  Synthetic
aggaauagauacauuuuuuaaucg

SEQ ID NO: 319133 - RNA, 18 nt, Artificial Sequence
  Synthetic
gaaauuugcugaagaucg

SEQ ID NO: 319134 - RNA, 19 nt, Artificial Sequence
  Synthetic
agaaauuugcugaagaucg

SEQ ID NO: 319135 - RNA, 20 nt, Artificial Sequence
  Synthetic
aagaaauuugcugaagaucg

SEQ ID NO: 319136 - RNA, 21 nt, Artificial Sequence
  Synthetic
uaagaaauuugcugaagaucg

SEQ ID NO: 319137 - RNA, 22 nt, Artificial Sequence
  Synthetic
auaagaaauuugcugaagaucg

SEQ ID NO: 319138 - RNA, 23 nt, Artificial Sequence
  Synthetic
gauaagaaauuugcugaagaucg

SEQ ID NO: 319139 - RNA, 24 nt, Artificial Sequence
  Synthetic
agauaagaaauuugcugaagaucg

SEQ ID NO: 319140 - RNA, 18 nt, Artificial Sequence
  Synthetic
auaaccugccugagaucg

SEQ ID NO: 319141 - RNA, 19 nt, Artificial Sequence
  Synthetic
aauaaccugccugagaucg

SEQ ID NO: 319142 - RNA, 20 nt, Artificial Sequence
  Synthetic
uaauaaccugccugagaucg

SEQ ID NO: 319143 - RNA, 21 nt, Artificial Sequence
  Synthetic
auaauaaccugccugagaucg

SEQ ID NO: 319144 - RNA, 22 nt, Artificial Sequence
  Synthetic
gauaauaaccugccugagaucg

SEQ ID NO: 319145 - RNA, 23 nt, Artificial Sequence
  Synthetic
ggauaauaaccugccugagaucg

SEQ ID NO: 319146 - RNA, 24 nt, Artificial Sequence
  Synthetic
aggauaauaaccugccugagaucg

SEQ ID NO: 319147 - RNA, 18 nt, Artificial Sequence
  Synthetic
ugauugauggauggaucg

SEQ ID NO: 319148 - RNA, 19 nt, Artificial Sequence
  Synthetic
uugauugauggauggaucg

SEQ ID NO: 319149 - RNA, 20 nt, Artificial Sequence
  Synthetic
auugauugauggauggaucg

SEQ ID NO: 319150 - RNA, 21 nt, Artificial Sequence
  Synthetic
gauugauugauggauggaucg

SEQ ID NO: 319151 - RNA, 22 nt, Artificial Sequence
  Synthetic
ugauugauugauggauggaucg

SEQ ID NO: 319152 - RNA, 23 nt, Artificial Sequence
  Synthetic
augauugauugauggauggaucg

SEQ ID NO: 319153 - RNA, 24 nt, Artificial Sequence
  Synthetic
uaugauugauugauggauggaucg

SEQ ID NO: 319154 - RNA, 18 nt, Artificial Sequence
  Synthetic
gucauagccauuuuaucg

SEQ ID NO: 319155 - RNA, 19 nt, Artificial Sequence
  Synthetic
ugucauagccauuuuaucg

SEQ ID NO: 319156 - RNA, 20 nt, Artificial Sequence
  Synthetic
cugucauagccauuuuaucg

SEQ ID NO: 319157 - RNA, 21 nt, Artificial Sequence
  Synthetic
ucugucauagccauuuuaucg

SEQ ID NO: 319158 - RNA, 22 nt, Artificial Sequence
  Synthetic
cucugucauagccauuuuaucg

SEQ ID NO: 319159 - RNA, 23 nt, Artificial Sequence
  Synthetic
ucucugucauagccauuuuaucg

SEQ ID NO: 319160 - RNA, 24 nt, Artificial Sequence
  Synthetic
aucucugucauagccauuuuaucg

SEQ ID NO: 319161 - RNA, 18 nt, Artificial Sequence
  Synthetic
gcaaauggauaaaacucg

SEQ ID NO: 319162 - RNA, 19 nt, Artificial Sequence
  Synthetic
agcaaauggauaaaacucg

SEQ ID NO: 319163 - RNA, 20 nt, Artificial Sequence
  Synthetic
uagcaaauggauaaaacucg

SEQ ID NO: 319164 - RNA, 21 nt, Artificial Sequence
  Synthetic
cuagcaaauggauaaaacucg

SEQ ID NO: 319165 - RNA, 22 nt, Artificial Sequence
  Synthetic
ucuagcaaauggauaaaacucg

SEQ ID NO: 319166 - RNA, 23 nt, Artificial Sequence
  Synthetic
aucuagcaaauggauaaaacucg

SEQ ID NO: 319167 - RNA, 24 nt, Artificial Sequence
  Synthetic
aaucuagcaaauggauaaaacucg

SEQ ID NO: 319168 - RNA, 18 nt, Artificial Sequence
  Synthetic
cugagacagucaaacucg

SEQ ID NO: 319169 - RNA, 19 nt, Artificial Sequence
  Synthetic
ucugagacagucaaacucg

SEQ ID NO: 319170 - RNA, 20 nt, Artificial Sequence
  Synthetic
gucugagacagucaaacucg

SEQ ID NO: 319171 - RNA, 21 nt, Artificial Sequence
  Synthetic
ugucugagacagucaaacucg

SEQ ID NO: 319172 - RNA, 22 nt, Artificial Sequence
  Synthetic
gugucugagacagucaaacucg

SEQ ID NO: 319173 - RNA, 23 nt, Artificial Sequence
  Synthetic
ggugucugagacagucaaacucg

SEQ ID NO: 319174 - RNA, 24 nt, Artificial Sequence
  Synthetic
aggugucugagacagucaaacucg

SEQ ID NO: 319175 - RNA, 18 nt, Artificial Sequence
  Synthetic
guccuuggcaacaacucg

SEQ ID NO: 319176 - RNA, 19 nt, Artificial Sequence
  Synthetic
aguccuuggcaacaacucg

SEQ ID NO: 319177 - RNA, 20 nt, Artificial Sequence
  Synthetic
aaguccuuggcaacaacucg

SEQ ID NO: 319178 - RNA, 21 nt, Artificial Sequence
  Synthetic
uaaguccuuggcaacaacucg

SEQ ID NO: 319179 - RNA, 22 nt, Artificial Sequence
  Synthetic
cuaaguccuuggcaacaacucg

SEQ ID NO: 319180 - RNA, 23 nt, Artificial Sequence
  Synthetic
ucuaaguccuuggcaacaacucg

SEQ ID NO: 319181 - RNA, 24 nt, Artificial Sequence
  Synthetic
aucuaaguccuuggcaacaacucg

SEQ ID NO: 319182 - RNA, 18 nt, Artificial Sequence
  Synthetic
auugcugugccccacucg

SEQ ID NO: 319183 - RNA, 19 nt, Artificial Sequence
  Synthetic
gauugcugugccccacucg

SEQ ID NO: 319184 - RNA, 20 nt, Artificial Sequence
  Synthetic
ugauugcugugccccacucg

SEQ ID NO: 319185 - RNA, 21 nt, Artificial Sequence
  Synthetic
cugauugcugugccccacucg

SEQ ID NO: 319186 - RNA, 22 nt, Artificial Sequence
  Synthetic
acugauugcugugccccacucg

SEQ ID NO: 319187 - RNA, 23 nt, Artificial Sequence
  Synthetic
uacugauugcugugccccacucg

SEQ ID NO: 319188 - RNA, 24 nt, Artificial Sequence
  Synthetic
auacugauugcugugccccacucg

SEQ ID NO: 319189 - RNA, 18 nt, Artificial Sequence
  Synthetic
ugaaucugcuuucacucg

SEQ ID NO: 319190 - RNA, 19 nt, Artificial Sequence
  Synthetic
uugaaucugcuuucacucg

SEQ ID NO: 319191 - RNA, 20 nt, Artificial Sequence
  Synthetic
uuugaaucugcuuucacucg

SEQ ID NO: 319192 - RNA, 21 nt, Artificial Sequence
  Synthetic
guuugaaucugcuuucacucg

SEQ ID NO: 319193 - RNA, 22 nt, Artificial Sequence
  Synthetic
uguuugaaucugcuuucacucg

SEQ ID NO: 319194 - RNA, 23 nt, Artificial Sequence
  Synthetic
uuguuugaaucugcuuucacucg

SEQ ID NO: 319195 - RNA, 24 nt, Artificial Sequence
  Synthetic
uuuguuugaaucugcuuucacucg

SEQ ID NO: 319196 - RNA, 18 nt, Artificial Sequence
  Synthetic
acagaaaaccgagacucg

SEQ ID NO: 319197 - RNA, 19 nt, Artificial Sequence
  Synthetic
gacagaaaaccgagacucg

SEQ ID NO: 319198 - RNA, 20 nt, Artificial Sequence
  Synthetic
agacagaaaaccgagacucg

SEQ ID NO: 319199 - RNA, 21 nt, Artificial Sequence
  Synthetic
gagacagaaaaccgagacucg

SEQ ID NO: 319200 - RNA, 22 nt, Artificial Sequence
  Synthetic
agagacagaaaaccgagacucg

SEQ ID NO: 319201 - RNA, 23 nt, Artificial Sequence
  Synthetic
uagagacagaaaaccgagacucg

SEQ ID NO: 319202 - RNA, 24 nt, Artificial Sequence
  Synthetic
uuagagacagaaaaccgagacucg

SEQ ID NO: 319203 - RNA, 18 nt, Artificial Sequence
  Synthetic
ggcagacuauuggacucg

SEQ ID NO: 319204 - RNA, 19 nt, Artificial Sequence
  Synthetic
aggcagacuauuggacucg

SEQ ID NO: 319205 - RNA, 20 nt, Artificial Sequence
  Synthetic
gaggcagacuauuggacucg

SEQ ID NO: 319206 - RNA, 21 nt, Artificial Sequence
  Synthetic
agaggcagacuauuggacucg

SEQ ID NO: 319207 - RNA, 22 nt, Artificial Sequence
  Synthetic
gagaggcagacuauuggacucg

SEQ ID NO: 319208 - RNA, 23 nt, Artificial Sequence
  Synthetic
agagaggcagacuauuggacucg

SEQ ID NO: 319209 - RNA, 24 nt, Artificial Sequence
  Synthetic
cagagaggcagacuauuggacucg

SEQ ID NO: 319210 - RNA, 18 nt, Artificial Sequence
  Synthetic
ucacaagaaugugacucg

SEQ ID NO: 319211 - RNA, 19 nt, Artificial Sequence
  Synthetic
uucacaagaaugugacucg

SEQ ID NO: 319212 - RNA, 20 nt, Artificial Sequence
  Synthetic
auucacaagaaugugacucg

SEQ ID NO: 319213 - RNA, 21 nt, Artificial Sequence
  Synthetic
aauucacaagaaugugacucg

SEQ ID NO: 319214 - RNA, 22 nt, Artificial Sequence
  Synthetic
gaauucacaagaaugugacucg

SEQ ID NO: 319215 - RNA, 23 nt, Artificial Sequence
  Synthetic
agaauucacaagaaugugacucg

SEQ ID NO: 319216 - RNA, 24 nt, Artificial Sequence
  Synthetic
cagaauucacaagaaugugacucg

SEQ ID NO: 319217 - RNA, 18 nt, Artificial Sequence
  Synthetic
aaaaccucuuccaccucg

SEQ ID NO: 319218 - RNA, 19 nt, Artificial Sequence
  Synthetic
gaaaaccucuuccaccucg

SEQ ID NO: 319219 - RNA, 20 nt, Artificial Sequence
  Synthetic
agaaaaccucuuccaccucg

SEQ ID NO: 319220 - RNA, 21 nt, Artificial Sequence
  Synthetic
gagaaaaccucuuccaccucg

SEQ ID NO: 319221 - RNA, 22 nt, Artificial Sequence
  Synthetic
agagaaaaccucuuccaccucg

SEQ ID NO: 319222 - RNA, 23 nt, Artificial Sequence
  Synthetic
gagagaaaaccucuuccaccucg

SEQ ID NO: 319223 - RNA, 24 nt, Artificial Sequence
  Synthetic
agagagaaaaccucuuccaccucg

SEQ ID NO: 319224 - RNA, 18 nt, Artificial Sequence
  Synthetic
uguacuguuccucccucg

SEQ ID NO: 319225 - RNA, 19 nt, Artificial Sequence
  Synthetic
guguacuguuccucccucg

SEQ ID NO: 319226 - RNA, 20 nt, Artificial Sequence
  Synthetic
aguguacuguuccucccucg

SEQ ID NO: 319227 - RNA, 21 nt, Artificial Sequence
  Synthetic
aaguguacuguuccucccucg

SEQ ID NO: 319228 - RNA, 22 nt, Artificial Sequence
  Synthetic
uaaguguacuguuccucccucg

SEQ ID NO: 319229 - RNA, 23 nt, Artificial Sequence
  Synthetic
uuaaguguacuguuccucccucg

SEQ ID NO: 319230 - RNA, 24 nt, Artificial Sequence
  Synthetic
guuaaguguacuguuccucccucg

SEQ ID NO: 319231 - RNA, 18 nt, Artificial Sequence
  Synthetic
uugaugguuuuagccucg

SEQ ID NO: 319232 - RNA, 19 nt, Artificial Sequence
  Synthetic
uuugaugguuuuagccucg

SEQ ID NO: 319233 - RNA, 20 nt, Artificial Sequence
  Synthetic
uuuugaugguuuuagccucg

SEQ ID NO: 319234 - RNA, 21 nt, Artificial Sequence
  Synthetic
uuuuugaugguuuuagccucg

SEQ ID NO: 319235 - RNA, 22 nt, Artificial Sequence
  Synthetic
uuuuuugaugguuuuagccucg

SEQ ID NO: 319236 - RNA, 23 nt, Artificial Sequence
  Synthetic
auuuuuugaugguuuuagccucg

SEQ ID NO: 319237 - RNA, 24 nt, Artificial Sequence
  Synthetic
cauuuuuugaugguuuuagccucg

SEQ ID NO: 319238 - RNA, 18 nt, Artificial Sequence
  Synthetic
auuguguuuuauuccucg

SEQ ID NO: 319239 - RNA, 19 nt, Artificial Sequence
  Synthetic
cauuguguuuuauuccucg

SEQ ID NO: 319240 - RNA, 20 nt, Artificial Sequence
  Synthetic
ccauuguguuuuauuccucg

SEQ ID NO: 319241 - RNA, 21 nt, Artificial Sequence
  Synthetic
accauuguguuuuauuccucg

SEQ ID NO: 319242 - RNA, 22 nt, Artificial Sequence
  Synthetic
aaccauuguguuuuauuccucg

SEQ ID NO: 319243 - RNA, 23 nt, Artificial Sequence
  Synthetic
uaaccauuguguuuuauuccucg

SEQ ID NO: 319244 - RNA, 24 nt, Artificial Sequence
  Synthetic
auaaccauuguguuuuauuccucg

SEQ ID NO: 319245 - RNA, 18 nt, Artificial Sequence
  Synthetic
aagaacacaguaagcucg

SEQ ID NO: 319246 - RNA, 19 nt, Artificial Sequence
  Synthetic
gaagaacacaguaagcucg

SEQ ID NO: 319247 - RNA, 20 nt, Artificial Sequence
  Synthetic
agaagaacacaguaagcucg

SEQ ID NO: 319248 - RNA, 21 nt, Artificial Sequence
  Synthetic
aagaagaacacaguaagcucg

SEQ ID NO: 319249 - RNA, 22 nt, Artificial Sequence
  Synthetic
aaagaagaacacaguaagcucg

SEQ ID NO: 319250 - RNA, 23 nt, Artificial Sequence
  Synthetic
aaaagaagaacacaguaagcucg

SEQ ID NO: 319251 - RNA, 24 nt, Artificial Sequence
  Synthetic
aaaaagaagaacacaguaagcucg

SEQ ID NO: 319252 - RNA, 18 nt, Artificial Sequence
  Synthetic
cuacuuaaugucagcucg

SEQ ID NO: 319253 - RNA, 19 nt, Artificial Sequence
  Synthetic
gcuacuuaaugucagcucg

SEQ ID NO: 319254 - RNA, 20 nt, Artificial Sequence
  Synthetic
agcuacuuaaugucagcucg

SEQ ID NO: 319255 - RNA, 21 nt, Artificial Sequence
  Synthetic
aagcuacuuaaugucagcucg

SEQ ID NO: 319256 - RNA, 22 nt, Artificial Sequence
  Synthetic
gaagcuacuuaaugucagcucg

SEQ ID NO: 319257 - RNA, 23 nt, Artificial Sequence
  Synthetic
agaagcuacuuaaugucagcucg

SEQ ID NO: 319258 - RNA, 24 nt, Artificial Sequence
  Synthetic
aagaagcuacuuaaugucagcucg

SEQ ID NO: 319259 - RNA, 18 nt, Artificial Sequence
  Synthetic
uggugagaucucggcucg

SEQ ID NO: 319260 - RNA, 19 nt, Artificial Sequence
  Synthetic
guggugagaucucggcucg

SEQ ID NO: 319261 - RNA, 20 nt, Artificial Sequence
  Synthetic
aguggugagaucucggcucg

SEQ ID NO: 319262 - RNA, 21 nt, Artificial Sequence
  Synthetic
caguggugagaucucggcucg

SEQ ID NO: 319263 - RNA, 22 nt, Artificial Sequence
  Synthetic
gcaguggugagaucucggcucg

SEQ ID NO: 319264 - RNA, 23 nt, Artificial Sequence
  Synthetic
ugcaguggugagaucucggcucg

SEQ ID NO: 319265 - RNA, 24 nt, Artificial Sequence
  Synthetic
gugcaguggugagaucucggcucg

SEQ ID NO: 319266 - RNA, 18 nt, Artificial Sequence
  Synthetic
auuuuucacuggggcucg

SEQ ID NO: 319267 - RNA, 19 nt, Artificial Sequence
  Synthetic
aauuuuucacuggggcucg

SEQ ID NO: 319268 - RNA, 20 nt, Artificial Sequence
  Synthetic
aaauuuuucacuggggcucg

SEQ ID NO: 319269 - RNA, 21 nt, Artificial Sequence
  Synthetic
aaaauuuuucacuggggcucg

SEQ ID NO: 319270 - RNA, 22 nt, Artificial Sequence
  Synthetic
uaaaauuuuucacuggggcucg

SEQ ID NO: 319271 - RNA, 23 nt, Artificial Sequence
  Synthetic
auaaaauuuuucacuggggcucg

SEQ ID NO: 319272 - RNA, 24 nt, Artificial Sequence
  Synthetic
gauaaaauuuuucacuggggcucg

SEQ ID NO: 319273 - RNA, 18 nt, Artificial Sequence
  Synthetic
ucaucuguggguggcucg

SEQ ID NO: 319274 - RNA, 19 nt, Artificial Sequence
  Synthetic
cucaucuguggguggcucg

SEQ ID NO: 319275 - RNA, 20 nt, Artificial Sequence
  Synthetic
ucucaucuguggguggcucg

SEQ ID NO: 319276 - RNA, 21 nt, Artificial Sequence
  Synthetic
uucucaucuguggguggcucg

SEQ ID NO: 319277 - RNA, 22 nt, Artificial Sequence
  Synthetic
uuucucaucuguggguggcucg

SEQ ID NO: 319278 - RNA, 23 nt, Artificial Sequence
  Synthetic
uuuucucaucuguggguggcucg

SEQ ID NO: 319279 - RNA, 24 nt, Artificial Sequence
  Synthetic
guuuucucaucuguggguggcucg

SEQ ID NO: 319280 - RNA, 18 nt, Artificial Sequence
  Synthetic
acaaccaaauggcucucg

SEQ ID NO: 319281 - RNA, 19 nt, Artificial Sequence
  Synthetic
gacaaccaaauggcucucg

SEQ ID NO: 319282 - RNA, 20 nt, Artificial Sequence
  Synthetic
agacaaccaaauggcucucg

SEQ ID NO: 319283 - RNA, 21 nt, Artificial Sequence
  Synthetic
aagacaaccaaauggcucucg

SEQ ID NO: 319284 - RNA, 22 nt, Artificial Sequence
  Synthetic
caagacaaccaaauggcucucg

SEQ ID NO: 319285 - RNA, 23 nt, Artificial Sequence
  Synthetic
gcaagacaaccaaauggcucucg

SEQ ID NO: 319286 - RNA, 24 nt, Artificial Sequence
  Synthetic
agcaagacaaccaaauggcucucg

SEQ ID NO: 319287 - RNA, 18 nt, Artificial Sequence
  Synthetic
aggccuaagccagucucg

SEQ ID NO: 319288 - RNA, 19 nt, Artificial Sequence
  Synthetic
gaggccuaagccagucucg

SEQ ID NO: 319289 - RNA, 20 nt, Artificial Sequence
  Synthetic
agaggccuaagccagucucg

SEQ ID NO: 319290 - RNA, 21 nt, Artificial Sequence
  Synthetic
cagaggccuaagccagucucg

SEQ ID NO: 319291 - RNA, 22 nt, Artificial Sequence
  Synthetic
gcagaggccuaagccagucucg

SEQ ID NO: 319292 - RNA, 23 nt, Artificial Sequence
  Synthetic
agcagaggccuaagccagucucg

SEQ ID NO: 319293 - RNA, 24 nt, Artificial Sequence
  Synthetic
cagcagaggccuaagccagucucg

SEQ ID NO: 319294 - RNA, 18 nt, Artificial Sequence
  Synthetic
aguaugucccuagucucg

SEQ ID NO: 319295 - RNA, 19 nt, Artificial Sequence
  Synthetic
aaguaugucccuagucucg

SEQ ID NO: 319296 - RNA, 20 nt, Artificial Sequence
  Synthetic
uaaguaugucccuagucucg

SEQ ID NO: 319297 - RNA, 21 nt, Artificial Sequence
  Synthetic
auaaguaugucccuagucucg

SEQ ID NO: 319298 - RNA, 22 nt, Artificial Sequence
  Synthetic
cauaaguaugucccuagucucg

SEQ ID NO: 319299 - RNA, 23 nt, Artificial Sequence
  Synthetic
acauaaguaugucccuagucucg

SEQ ID NO: 319300 - RNA, 24 nt, Artificial Sequence
  Synthetic
uacauaaguaugucccuagucucg

SEQ ID NO: 319301 - RNA, 18 nt, Artificial Sequence
  Synthetic
auugauuggacugucucg

SEQ ID NO: 319302 - RNA, 19 nt, Artificial Sequence
  Synthetic
gauugauuggacugucucg

SEQ ID NO: 319303 - RNA, 20 nt, Artificial Sequence
  Synthetic
ugauugauuggacugucucg

SEQ ID NO: 319304 - RNA, 21 nt, Artificial Sequence
  Synthetic
cugauugauuggacugucucg

SEQ ID NO: 319305 - RNA, 22 nt, Artificial Sequence
  Synthetic
acugauugauuggacugucucg

SEQ ID NO: 319306 - RNA, 23 nt, Artificial Sequence
  Synthetic
uacugauugauuggacugucucg

SEQ ID NO: 319307 - RNA, 24 nt, Artificial Sequence
  Synthetic
uuacugauugauuggacugucucg

SEQ ID NO: 319308 - RNA, 18 nt, Artificial Sequence
  Synthetic
ugggagucccauuucucg

SEQ ID NO: 319309 - RNA, 19 nt, Artificial Sequence
  Synthetic
cugggagucccauuucucg

SEQ ID NO: 319310 - RNA, 20 nt, Artificial Sequence
  Synthetic
acugggagucccauuucucg

SEQ ID NO: 319311 - RNA, 21 nt, Artificial Sequence
  Synthetic
cacugggagucccauuucucg

SEQ ID NO: 319312 - RNA, 22 nt, Artificial Sequence
  Synthetic
ucacugggagucccauuucucg

SEQ ID NO: 319313 - RNA, 23 nt, Artificial Sequence
  Synthetic
gucacugggagucccauuucucg

SEQ ID NO: 319314 - RNA, 24 nt, Artificial Sequence
  Synthetic
ugucacugggagucccauuucucg

SEQ ID NO: 319315 - RNA, 18 nt, Artificial Sequence
  Synthetic
uuugugagcauaaagucg

SEQ ID NO: 319316 - RNA, 19 nt, Artificial Sequence
  Synthetic
auuugugagcauaaagucg

SEQ ID NO: 319317 - RNA, 20 nt, Artificial Sequence
  Synthetic
cauuugugagcauaaagucg

SEQ ID NO: 319318 - RNA, 21 nt, Artificial Sequence
  Synthetic
acauuugugagcauaaagucg

SEQ ID NO: 319319 - RNA, 22 nt, Artificial Sequence
  Synthetic
cacauuugugagcauaaagucg

SEQ ID NO: 319320 - RNA, 23 nt, Artificial Sequence
  Synthetic
acacauuugugagcauaaagucg

SEQ ID NO: 319321 - RNA, 24 nt, Artificial Sequence
  Synthetic
aacacauuugugagcauaaagucg

SEQ ID NO: 319322 - RNA, 18 nt, Artificial Sequence
  Synthetic
auaaaaucuauaaagucg

SEQ ID NO: 319323 - RNA, 19 nt, Artificial Sequence
  Synthetic
aauaaaaucuauaaagucg

SEQ ID NO: 319324 - RNA, 20 nt, Artificial Sequence
  Synthetic
aaauaaaaucuauaaagucg

SEQ ID NO: 319325 - RNA, 21 nt, Artificial Sequence
  Synthetic
caaauaaaaucuauaaagucg

SEQ ID NO: 319326 - RNA, 22 nt, Artificial Sequence
  Synthetic
ucaaauaaaaucuauaaagucg

SEQ ID NO: 319327 - RNA, 23 nt, Artificial Sequence
  Synthetic
aucaaauaaaaucuauaaagucg

SEQ ID NO: 319328 - RNA, 24 nt, Artificial Sequence
  Synthetic
aaucaaauaaaaucuauaaagucg

SEQ ID NO: 319329 - RNA, 18 nt, Artificial Sequence
  Synthetic
aagcaccaccuacagucg

SEQ ID NO: 319330 - RNA, 19 nt, Artificial Sequence
  Synthetic
uaagcaccaccuacagucg

SEQ ID NO: 319331 - RNA, 20 nt, Artificial Sequence
  Synthetic
auaagcaccaccuacagucg

SEQ ID NO: 319332 - RNA, 21 nt, Artificial Sequence
  Synthetic
uauaagcaccaccuacagucg

SEQ ID NO: 319333 - RNA, 22 nt, Artificial Sequence
  Synthetic
cuauaagcaccaccuacagucg

SEQ ID NO: 319334 - RNA, 23 nt, Artificial Sequence
  Synthetic
ccuauaagcaccaccuacagucg

SEQ ID NO: 319335 - RNA, 24 nt, Artificial Sequence
  Synthetic
accuauaagcaccaccuacagucg

SEQ ID NO: 319336 - RNA, 18 nt, Artificial Sequence
  Synthetic
cccagggauuggcagucg

SEQ ID NO: 319337 - RNA, 19 nt, Artificial Sequence
  Synthetic
acccagggauuggcagucg

SEQ ID NO: 319338 - RNA, 20 nt, Artificial Sequence
  Synthetic
aacccagggauuggcagucg

SEQ ID NO: 319339 - RNA, 21 nt, Artificial Sequence
  Synthetic
caacccagggauuggcagucg

SEQ ID NO: 319340 - RNA, 22 nt, Artificial Sequence
  Synthetic
acaacccagggauuggcagucg

SEQ ID NO: 319341 - RNA, 23 nt, Artificial Sequence
  Synthetic
aacaacccagggauuggcagucg

SEQ ID NO: 319342 - RNA, 24 nt, Artificial Sequence
  Synthetic
aaacaacccagggauuggcagucg

SEQ ID NO: 319343 - RNA, 18 nt, Artificial Sequence
  Synthetic
aaccaucguagucagucg

SEQ ID NO: 319344 - RNA, 19 nt, Artificial Sequence
  Synthetic
aaaccaucguagucagucg

SEQ ID NO: 319345 - RNA, 20 nt, Artificial Sequence
  Synthetic
caaaccaucguagucagucg

SEQ ID NO: 319346 - RNA, 21 nt, Artificial Sequence
  Synthetic
ucaaaccaucguagucagucg

SEQ ID NO: 319347 - RNA, 22 nt, Artificial Sequence
  Synthetic
gucaaaccaucguagucagucg

SEQ ID NO: 319348 - RNA, 23 nt, Artificial Sequence
  Synthetic
agucaaaccaucguagucagucg

SEQ ID NO: 319349 - RNA, 24 nt, Artificial Sequence
  Synthetic
aagucaaaccaucguagucagucg

SEQ ID NO: 319350 - RNA, 18 nt, Artificial Sequence
  Synthetic
gaaugauacacaucgucg

SEQ ID NO: 319351 - RNA, 19 nt, Artificial Sequence
  Synthetic
ugaaugauacacaucgucg

SEQ ID NO: 319352 - RNA, 20 nt, Artificial Sequence
  Synthetic
gugaaugauacacaucgucg

SEQ ID NO: 319353 - RNA, 21 nt, Artificial Sequence
  Synthetic
ugugaaugauacacaucgucg

SEQ ID NO: 319354 - RNA, 22 nt, Artificial Sequence
  Synthetic
uugugaaugauacacaucgucg

SEQ ID NO: 319355 - RNA, 23 nt, Artificial Sequence
  Synthetic
uuugugaaugauacacaucgucg

SEQ ID NO: 319356 - RNA, 24 nt, Artificial Sequence
  Synthetic
auuugugaaugauacacaucgucg

SEQ ID NO: 319357 - RNA, 18 nt, Artificial Sequence
  Synthetic
cucuaaugugagaggucg

SEQ ID NO: 319358 - RNA, 19 nt, Artificial Sequence
  Synthetic
gcucuaaugugagaggucg

SEQ ID NO: 319359 - RNA, 20 nt, Artificial Sequence
  Synthetic
ggcucuaaugugagaggucg

SEQ ID NO: 319360 - RNA, 21 nt, Artificial Sequence
  Synthetic
uggcucuaaugugagaggucg

SEQ ID NO: 319361 - RNA, 22 nt, Artificial Sequence
  Synthetic
auggcucuaaugugagaggucg

SEQ ID NO: 319362 - RNA, 23 nt, Artificial Sequence
  Synthetic
aauggcucuaaugugagaggucg

SEQ ID NO: 319363 - RNA, 24 nt, Artificial Sequence
  Synthetic
aaauggcucuaaugugagaggucg

SEQ ID NO: 319364 - RNA, 18 nt, Artificial Sequence
  Synthetic
cguaaauuaguucggucg

SEQ ID NO: 319365 - RNA, 19 nt, Artificial Sequence
  Synthetic
acguaaauuaguucggucg

SEQ ID NO: 319366 - RNA, 20 nt, Artificial Sequence
  Synthetic
aacguaaauuaguucggucg

SEQ ID NO: 319367 - RNA, 21 nt, Artificial Sequence
  Synthetic
gaacguaaauuaguucggucg

SEQ ID NO: 319368 - RNA, 22 nt, Artificial Sequence
  Synthetic
ggaacguaaauuaguucggucg

SEQ ID NO: 319369 - RNA, 23 nt, Artificial Sequence
  Synthetic
gggaacguaaauuaguucggucg

SEQ ID NO: 319370 - RNA, 24 nt, Artificial Sequence
  Synthetic
ugggaacguaaauuaguucggucg

SEQ ID NO: 319371 - RNA, 18 nt, Artificial Sequence
  Synthetic
auuccacagagagggucg

SEQ ID NO: 319372 - RNA, 19 nt, Artificial Sequence
  Synthetic
cauuccacagagagggucg

SEQ ID NO: 319373 - RNA, 20 nt, Artificial Sequence
  Synthetic
ccauuccacagagagggucg

SEQ ID NO: 319374 - RNA, 21 nt, Artificial Sequence
  Synthetic
gccauuccacagagagggucg

SEQ ID NO: 319375 - RNA, 22 nt, Artificial Sequence
  Synthetic
cgccauuccacagagagggucg

SEQ ID NO: 319376 - RNA, 23 nt, Artificial Sequence
  Synthetic
acgccauuccacagagagggucg

SEQ ID NO: 319377 - RNA, 24 nt, Artificial Sequence
  Synthetic
aacgccauuccacagagagggucg

SEQ ID NO: 319378 - RNA, 18 nt, Artificial Sequence
  Synthetic
gggacugugguggggucg

SEQ ID NO: 319379 - RNA, 19 nt, Artificial Sequence
  Synthetic
ggggacugugguggggucg

SEQ ID NO: 319380 - RNA, 20 nt, Artificial Sequence
  Synthetic
uggggacugugguggggucg

SEQ ID NO: 319381 - RNA, 21 nt, Artificial Sequence
  Synthetic
cuggggacugugguggggucg

SEQ ID NO: 319382 - RNA, 22 nt, Artificial Sequence
  Synthetic
ucuggggacugugguggggucg

SEQ ID NO: 319383 - RNA, 23 nt, Artificial Sequence
  Synthetic
cucuggggacugugguggggucg

SEQ ID NO: 319384 - RNA, 24 nt, Artificial Sequence
  Synthetic
acucuggggacugugguggggucg

SEQ ID NO: 319385 - RNA, 18 nt, Artificial Sequence
  Synthetic
gggccuguuguggggucg

SEQ ID NO: 319386 - RNA, 19 nt, Artificial Sequence
  Synthetic
agggccuguuguggggucg

SEQ ID NO: 319387 - RNA, 20 nt, Artificial Sequence
  Synthetic
cagggccuguuguggggucg

SEQ ID NO: 319388 - RNA, 21 nt, Artificial Sequence
  Synthetic
ccagggccuguuguggggucg

SEQ ID NO: 319389 - RNA, 22 nt, Artificial Sequence
  Synthetic
accagggccuguuguggggucg

SEQ ID NO: 319390 - RNA, 23 nt, Artificial Sequence
  Synthetic
caccagggccuguuguggggucg

SEQ ID NO: 319391 - RNA, 24 nt, Artificial Sequence
  Synthetic
acaccagggccuguuguggggucg

SEQ ID NO: 319392 - RNA, 18 nt, Artificial Sequence
  Synthetic
aaaacguagaacuggucg

SEQ ID NO: 319393 - RNA, 19 nt, Artificial Sequence
  Synthetic
aaaaacguagaacuggucg

SEQ ID NO: 319394 - RNA, 20 nt, Artificial Sequence
  Synthetic
gaaaaacguagaacuggucg

SEQ ID NO: 319395 - RNA, 21 nt, Artificial Sequence
  Synthetic
agaaaaacguagaacuggucg

SEQ ID NO: 319396 - RNA, 22 nt, Artificial Sequence
  Synthetic
cagaaaaacguagaacuggucg

SEQ ID NO: 319397 - RNA, 23 nt, Artificial Sequence
  Synthetic
ucagaaaaacguagaacuggucg

SEQ ID NO: 319398 - RNA, 24 nt, Artificial Sequence
  Synthetic
cucagaaaaacguagaacuggucg

SEQ ID NO: 319399 - RNA, 18 nt, Artificial Sequence
  Synthetic
uuauccauucauuggucg

SEQ ID NO: 319400 - RNA, 19 nt, Artificial Sequence
  Synthetic
uuuauccauucauuggucg

SEQ ID NO: 319401 - RNA, 20 nt, Artificial Sequence
  Synthetic
cuuuauccauucauuggucg

SEQ ID NO: 319402 - RNA, 21 nt, Artificial Sequence
  Synthetic
ucuuuauccauucauuggucg

SEQ ID NO: 319403 - RNA, 22 nt, Artificial Sequence
  Synthetic
uucuuuauccauucauuggucg

SEQ ID NO: 319404 - RNA, 23 nt, Artificial Sequence
  Synthetic
uuucuuuauccauucauuggucg

SEQ ID NO: 319405 - RNA, 24 nt, Artificial Sequence
  Synthetic
uuuucuuuauccauucauuggucg

SEQ ID NO: 319406 - RNA, 18 nt, Artificial Sequence
  Synthetic
ugggugcuucauuggucg

SEQ ID NO: 319407 - RNA, 19 nt, Artificial Sequence
  Synthetic
cugggugcuucauuggucg

SEQ ID NO: 319408 - RNA, 20 nt, Artificial Sequence
  Synthetic
ccugggugcuucauuggucg

SEQ ID NO: 319409 - RNA, 21 nt, Artificial Sequence
  Synthetic
uccugggugcuucauuggucg

SEQ ID NO: 319410 - RNA, 22 nt, Artificial Sequence
  Synthetic
uuccugggugcuucauuggucg

SEQ ID NO: 319411 - RNA, 23 nt, Artificial Sequence
  Synthetic
uuuccugggugcuucauuggucg

SEQ ID NO: 319412 - RNA, 24 nt, Artificial Sequence
  Synthetic
guuuccugggugcuucauuggucg

SEQ ID NO: 319413 - RNA, 18 nt, Artificial Sequence
  Synthetic
aaagaagauucacugucg

SEQ ID NO: 319414 - RNA, 19 nt, Artificial Sequence
  Synthetic
caaagaagauucacugucg

SEQ ID NO: 319415 - RNA, 20 nt, Artificial Sequence
  Synthetic
acaaagaagauucacugucg

SEQ ID NO: 319416 - RNA, 21 nt, Artificial Sequence
  Synthetic
gacaaagaagauucacugucg

SEQ ID NO: 319417 - RNA, 22 nt, Artificial Sequence
  Synthetic
ugacaaagaagauucacugucg

SEQ ID NO: 319418 - RNA, 23 nt, Artificial Sequence
  Synthetic
cugacaaagaagauucacugucg

SEQ ID NO: 319419 - RNA, 24 nt, Artificial Sequence
  Synthetic
ccugacaaagaagauucacugucg

SEQ ID NO: 319420 - RNA, 18 nt, Artificial Sequence
  Synthetic
acguucucaaugcugucg

SEQ ID NO: 319421 - RNA, 19 nt, Artificial Sequence
  Synthetic
cacguucucaaugcugucg

SEQ ID NO: 319422 - RNA, 20 nt, Artificial Sequence
  Synthetic
ucacguucucaaugcugucg

SEQ ID NO: 319423 - RNA, 21 nt, Artificial Sequence
  Synthetic
uucacguucucaaugcugucg

SEQ ID NO: 319424 - RNA, 22 nt, Artificial Sequence
  Synthetic
uuucacguucucaaugcugucg

SEQ ID NO: 319425 - RNA, 23 nt, Artificial Sequence
  Synthetic
uuuucacguucucaaugcugucg

SEQ ID NO: 319426 - RNA, 24 nt, Artificial Sequence
  Synthetic
uuuuucacguucucaaugcugucg

SEQ ID NO: 319427 - RNA, 18 nt, Artificial Sequence
  Synthetic
cuuuauagcuuagugucg

SEQ ID NO: 319428 - RNA, 19 nt, Artificial Sequence
  Synthetic
acuuuauagcuuagugucg

SEQ ID NO: 319429 - RNA, 20 nt, Artificial Sequence
  Synthetic
uacuuuauagcuuagugucg

SEQ ID NO: 319430 - RNA, 21 nt, Artificial Sequence
  Synthetic
guacuuuauagcuuagugucg

SEQ ID NO: 319431 - RNA, 22 nt, Artificial Sequence
  Synthetic
uguacuuuauagcuuagugucg

SEQ ID NO: 319432 - RNA, 23 nt, Artificial Sequence
  Synthetic
uuguacuuuauagcuuagugucg

SEQ ID NO: 319433 - RNA, 24 nt, Artificial Sequence
  Synthetic
uuuguacuuuauagcuuagugucg

SEQ ID NO: 319434 - RNA, 18 nt, Artificial Sequence
  Synthetic
gcaacugagaacuugucg

SEQ ID NO: 319435 - RNA, 19 nt, Artificial Sequence
  Synthetic
ggcaacugagaacuugucg

SEQ ID NO: 319436 - RNA, 20 nt, Artificial Sequence
  Synthetic
aggcaacugagaacuugucg

SEQ ID NO: 319437 - RNA, 21 nt, Artificial Sequence
  Synthetic
caggcaacugagaacuugucg

SEQ ID NO: 319438 - RNA, 22 nt, Artificial Sequence
  Synthetic
gcaggcaacugagaacuugucg

SEQ ID NO: 319439 - RNA, 23 nt, Artificial Sequence
  Synthetic
agcaggcaacugagaacuugucg

SEQ ID NO: 319440 - RNA, 24 nt, Artificial Sequence
  Synthetic
gagcaggcaacugagaacuugucg

SEQ ID NO: 319441 - RNA, 18 nt, Artificial Sequence
  Synthetic
auuauuagaaugaauucg

SEQ ID NO: 319442 - RNA, 19 nt, Artificial Sequence
  Synthetic
aauuauuagaaugaauucg

SEQ ID NO: 319443 - RNA, 20 nt, Artificial Sequence
  Synthetic
aaauuauuagaaugaauucg

SEQ ID NO: 319444 - RNA, 21 nt, Artificial Sequence
  Synthetic
aaaauuauuagaaugaauucg

SEQ ID NO: 319445 - RNA, 22 nt, Artificial Sequence
  Synthetic
aaaaauuauuagaaugaauucg

SEQ ID NO: 319446 - RNA, 23 nt, Artificial Sequence
  Synthetic
uaaaaauuauuagaaugaauucg

SEQ ID NO: 319447 - RNA, 24 nt, Artificial Sequence
  Synthetic
cuaaaaauuauuagaaugaauucg

SEQ ID NO: 319448 - RNA, 18 nt, Artificial Sequence
  Synthetic
acaacagauauacauucg

SEQ ID NO: 319449 - RNA, 19 nt, Artificial Sequence
  Synthetic
aacaacagauauacauucg

SEQ ID NO: 319450 - RNA, 20 nt, Artificial Sequence
  Synthetic
caacaacagauauacauucg

SEQ ID NO: 319451 - RNA, 21 nt, Artificial Sequence
  Synthetic
ucaacaacagauauacauucg

SEQ ID NO: 319452 - RNA, 22 nt, Artificial Sequence
  Synthetic
cucaacaacagauauacauucg

SEQ ID NO: 319453 - RNA, 23 nt, Artificial Sequence
  Synthetic
gcucaacaacagauauacauucg

SEQ ID NO: 319454 - RNA, 24 nt, Artificial Sequence
  Synthetic
ugcucaacaacagauauacauucg

SEQ ID NO: 319455 - RNA, 18 nt, Artificial Sequence
  Synthetic
uauuagauaauucauucg

SEQ ID NO: 319456 - RNA, 19 nt, Artificial Sequence
  Synthetic
auauuagauaauucauucg

SEQ ID NO: 319457 - RNA, 20 nt, Artificial Sequence
  Synthetic
aauauuagauaauucauucg

SEQ ID NO: 319458 - RNA, 21 nt, Artificial Sequence
  Synthetic
aaauauuagauaauucauucg

SEQ ID NO: 319459 - RNA, 22 nt, Artificial Sequence
  Synthetic
gaaauauuagauaauucauucg

SEQ ID NO: 319460 - RNA, 23 nt, Artificial Sequence
  Synthetic
ugaaauauuagauaauucauucg

SEQ ID NO: 319461 - RNA, 24 nt, Artificial Sequence
  Synthetic
uugaaauauuagauaauucauucg

SEQ ID NO: 319462 - RNA, 18 nt, Artificial Sequence
  Synthetic
ccaaauaaaucagauucg

SEQ ID NO: 319463 - RNA, 19 nt, Artificial Sequence
  Synthetic
accaaauaaaucagauucg

SEQ ID NO: 319464 - RNA, 20 nt, Artificial Sequence
  Synthetic
aaccaaauaaaucagauucg

SEQ ID NO: 319465 - RNA, 21 nt, Artificial Sequence
  Synthetic
aaaccaaauaaaucagauucg

SEQ ID NO: 319466 - RNA, 22 nt, Artificial Sequence
  Synthetic
gaaaccaaauaaaucagauucg

SEQ ID NO: 319467 - RNA, 23 nt, Artificial Sequence
  Synthetic
agaaaccaaauaaaucagauucg

SEQ ID NO: 319468 - RNA, 24 nt, Artificial Sequence
  Synthetic
uagaaaccaaauaaaucagauucg

SEQ ID NO: 319469 - RNA, 18 nt, Artificial Sequence
  Synthetic
gcuuggccuauagauucg

SEQ ID NO: 319470 - RNA, 19 nt, Artificial Sequence
  Synthetic
agcuuggccuauagauucg

SEQ ID NO: 319471 - RNA, 20 nt, Artificial Sequence
  Synthetic
cagcuuggccuauagauucg

SEQ ID NO: 319472 - RNA, 21 nt, Artificial Sequence
  Synthetic
gcagcuuggccuauagauucg

SEQ ID NO: 319473 - RNA, 22 nt, Artificial Sequence
  Synthetic
ugcagcuuggccuauagauucg

SEQ ID NO: 319474 - RNA, 23 nt, Artificial Sequence
  Synthetic
cugcagcuuggccuauagauucg

SEQ ID NO: 319475 - RNA, 24 nt, Artificial Sequence
  Synthetic
ucugcagcuuggccuauagauucg

SEQ ID NO: 319476 - RNA, 18 nt, Artificial Sequence
  Synthetic
uuaggaagcuuugauucg

SEQ ID NO: 319477 - RNA, 19 nt, Artificial Sequence
  Synthetic
auuaggaagcuuugauucg

SEQ ID NO: 319478 - RNA, 20 nt, Artificial Sequence
  Synthetic
cauuaggaagcuuugauucg

SEQ ID NO: 319479 - RNA, 21 nt, Artificial Sequence
  Synthetic
acauuaggaagcuuugauucg

SEQ ID NO: 319480 - RNA, 22 nt, Artificial Sequence
  Synthetic
aacauuaggaagcuuugauucg

SEQ ID NO: 319481 - RNA, 23 nt, Artificial Sequence
  Synthetic
aaacauuaggaagcuuugauucg

SEQ ID NO: 319482 - RNA, 24 nt, Artificial Sequence
  Synthetic
uaaacauuaggaagcuuugauucg

SEQ ID NO: 319483 - RNA, 18 nt, Artificial Sequence
  Synthetic
cuaauaaagccaacuucg

SEQ ID NO: 319484 - RNA, 19 nt, Artificial Sequence
  Synthetic
gcuaauaaagccaacuucg

SEQ ID NO: 319485 - RNA, 20 nt, Artificial Sequence
  Synthetic
ugcuaauaaagccaacuucg

SEQ ID NO: 319486 - RNA, 21 nt, Artificial Sequence
  Synthetic
augcuaauaaagccaacuucg

SEQ ID NO: 319487 - RNA, 22 nt, Artificial Sequence
  Synthetic
gaugcuaauaaagccaacuucg

SEQ ID NO: 319488 - RNA, 23 nt, Artificial Sequence
  Synthetic
agaugcuaauaaagccaacuucg

SEQ ID NO: 319489 - RNA, 24 nt, Artificial Sequence
  Synthetic
gagaugcuaauaaagccaacuucg

SEQ ID NO: 319490 - RNA, 18 nt, Artificial Sequence
  Synthetic
uugcacacaggcacuucg

SEQ ID NO: 319491 - RNA, 19 nt, Artificial Sequence
  Synthetic
auugcacacaggcacuucg

SEQ ID NO: 319492 - RNA, 20 nt, Artificial Sequence
  Synthetic
uauugcacacaggcacuucg

SEQ ID NO: 319493 - RNA, 21 nt, Artificial Sequence
  Synthetic
cuauugcacacaggcacuucg

SEQ ID NO: 319494 - RNA, 22 nt, Artificial Sequence
  Synthetic
acuauugcacacaggcacuucg

SEQ ID NO: 319495 - RNA, 23 nt, Artificial Sequence
  Synthetic
gacuauugcacacaggcacuucg

SEQ ID NO: 319496 - RNA, 24 nt, Artificial Sequence
  Synthetic
ugacuauugcacacaggcacuucg

SEQ ID NO: 319497 - RNA, 18 nt, Artificial Sequence
  Synthetic
auauguacuacuacuucg

SEQ ID NO: 319498 - RNA, 19 nt, Artificial Sequence
  Synthetic
cauauguacuacuacuucg

SEQ ID NO: 319499 - RNA, 20 nt, Artificial Sequence
  Synthetic
acauauguacuacuacuucg

SEQ ID NO: 319500 - RNA, 21 nt, Artificial Sequence
  Synthetic
aacauauguacuacuacuucg

SEQ ID NO: 319501 - RNA, 22 nt, Artificial Sequence
  Synthetic
aaacauauguacuacuacuucg

SEQ ID NO: 319502 - RNA, 23 nt, Artificial Sequence
  Synthetic
gaaacauauguacuacuacuucg

SEQ ID NO: 319503 - RNA, 24 nt, Artificial Sequence
  Synthetic
agaaacauauguacuacuacuucg

SEQ ID NO: 319504 - RNA, 18 nt, Artificial Sequence
  Synthetic
aucagcuugagcccuucg

SEQ ID NO: 319505 - RNA, 19 nt, Artificial Sequence
  Synthetic
aaucagcuugagcccuucg

SEQ ID NO: 319506 - RNA, 20 nt, Artificial Sequence
  Synthetic
uaaucagcuugagcccuucg

SEQ ID NO: 319507 - RNA, 21 nt, Artificial Sequence
  Synthetic
auaaucagcuugagcccuucg

SEQ ID NO: 319508 - RNA, 22 nt, Artificial Sequence
  Synthetic
aauaaucagcuugagcccuucg

SEQ ID NO: 319509 - RNA, 23 nt, Artificial Sequence
  Synthetic
aaauaaucagcuugagcccuucg

SEQ ID NO: 319510 - RNA, 24 nt, Artificial Sequence
  Synthetic
aaaauaaucagcuugagcccuucg

SEQ ID NO: 319511 - RNA, 18 nt, Artificial Sequence
  Synthetic
ggaauaauaaugccuucg

SEQ ID NO: 319512 - RNA, 19 nt, Artificial Sequence
  Synthetic
aggaauaauaaugccuucg

SEQ ID NO: 319513 - RNA, 20 nt, Artificial Sequence
  Synthetic
aaggaauaauaaugccuucg

SEQ ID NO: 319514 - RNA, 21 nt, Artificial Sequence
  Synthetic
aaaggaauaauaaugccuucg

SEQ ID NO: 319515 - RNA, 22 nt, Artificial Sequence
  Synthetic
aaaaggaauaauaaugccuucg

SEQ ID NO: 319516 - RNA, 23 nt, Artificial Sequence
  Synthetic
aaaaaggaauaauaaugccuucg

SEQ ID NO: 319517 - RNA, 24 nt, Artificial Sequence
  Synthetic
gaaaaaggaauaauaaugccuucg

SEQ ID NO: 319518 - RNA, 18 nt, Artificial Sequence
  Synthetic
uuguuagacuggaguucg

SEQ ID NO: 319519 - RNA, 19 nt, Artificial Sequence
  Synthetic
uuuguuagacuggaguucg

SEQ ID NO: 319520 - RNA, 20 nt, Artificial Sequence
  Synthetic
auuuguuagacuggaguucg

SEQ ID NO: 319521 - RNA, 21 nt, Artificial Sequence
  Synthetic
cauuuguuagacuggaguucg

SEQ ID NO: 319522 - RNA, 22 nt, Artificial Sequence
  Synthetic
gcauuuguuagacuggaguucg

SEQ ID NO: 319523 - RNA, 23 nt, Artificial Sequence
  Synthetic
agcauuuguuagacuggaguucg

SEQ ID NO: 319524 - RNA, 24 nt, Artificial Sequence
  Synthetic
uagcauuuguuagacuggaguucg

SEQ ID NO: 319525 - RNA, 18 nt, Artificial Sequence
  Synthetic
uuuccaaugucuaguucg

SEQ ID NO: 319526 - RNA, 19 nt, Artificial Sequence
  Synthetic
cuuuccaaugucuaguucg

SEQ ID NO: 319527 - RNA, 20 nt, Artificial Sequence
  Synthetic
acuuuccaaugucuaguucg

SEQ ID NO: 319528 - RNA, 21 nt, Artificial Sequence
  Synthetic
uacuuuccaaugucuaguucg

SEQ ID NO: 319529 - RNA, 22 nt, Artificial Sequence
  Synthetic
cuacuuuccaaugucuaguucg

SEQ ID NO: 319530 - RNA, 23 nt, Artificial Sequence
  Synthetic
ccuacuuuccaaugucuaguucg

SEQ ID NO: 319531 - RNA, 24 nt, Artificial Sequence
  Synthetic
accuacuuuccaaugucuaguucg

SEQ ID NO: 319532 - RNA, 18 nt, Artificial Sequence
  Synthetic
cccaugcacuaggguucg

SEQ ID NO: 319533 - RNA, 19 nt, Artificial Sequence
  Synthetic
ucccaugcacuaggguucg

SEQ ID NO: 319534 - RNA, 20 nt, Artificial Sequence
  Synthetic
uucccaugcacuaggguucg

SEQ ID NO: 319535 - RNA, 21 nt, Artificial Sequence
  Synthetic
guucccaugcacuaggguucg

SEQ ID NO: 319536 - RNA, 22 nt, Artificial Sequence
  Synthetic
uguucccaugcacuaggguucg

SEQ ID NO: 319537 - RNA, 23 nt, Artificial Sequence
  Synthetic
uuguucccaugcacuaggguucg

SEQ ID NO: 319538 - RNA, 24 nt, Artificial Sequence
  Synthetic
auuguucccaugcacuaggguucg

SEQ ID NO: 319539 - RNA, 18 nt, Artificial Sequence
  Synthetic
cuaaauuauucauguucg

SEQ ID NO: 319540 - RNA, 19 nt, Artificial Sequence
  Synthetic
ccuaaauuauucauguucg

SEQ ID NO: 319541 - RNA, 20 nt, Artificial Sequence
  Synthetic
gccuaaauuauucauguucg

SEQ ID NO: 319542 - RNA, 21 nt, Artificial Sequence
  Synthetic
ugccuaaauuauucauguucg

SEQ ID NO: 319543 - RNA, 22 nt, Artificial Sequence
  Synthetic
cugccuaaauuauucauguucg

SEQ ID NO: 319544 - RNA, 23 nt, Artificial Sequence
  Synthetic
ccugccuaaauuauucauguucg

SEQ ID NO: 319545 - RNA, 24 nt, Artificial Sequence
  Synthetic
uccugccuaaauuauucauguucg

SEQ ID NO: 319546 - RNA, 18 nt, Artificial Sequence
  Synthetic
aaaaauuguuaacuuucg

SEQ ID NO: 319547 - RNA, 19 nt, Artificial Sequence
  Synthetic
aaaaaauuguuaacuuucg

SEQ ID NO: 319548 - RNA, 20 nt, Artificial Sequence
  Synthetic
aaaaaaauuguuaacuuucg

SEQ ID NO: 319549 - RNA, 21 nt, Artificial Sequence
  Synthetic
aaaaaaaauuguuaacuuucg

SEQ ID NO: 319550 - RNA, 22 nt, Artificial Sequence
  Synthetic
gaaaaaaaauuguuaacuuucg

SEQ ID NO: 319551 - RNA, 23 nt, Artificial Sequence
  Synthetic
agaaaaaaaauuguuaacuuucg

SEQ ID NO: 319552 - RNA, 24 nt, Artificial Sequence
  Synthetic
cagaaaaaaaauuguuaacuuucg

SEQ ID NO: 319553 - RNA, 18 nt, Artificial Sequence
  Synthetic
uugaaaagaaagcuuucg

SEQ ID NO: 319554 - RNA, 19 nt, Artificial Sequence
  Synthetic
uuugaaaagaaagcuuucg

SEQ ID NO: 319555 - RNA, 20 nt, Artificial Sequence
  Synthetic
auuugaaaagaaagcuuucg

SEQ ID NO: 319556 - RNA, 21 nt, Artificial Sequence
  Synthetic
uauuugaaaagaaagcuuucg

SEQ ID NO: 319557 - RNA, 22 nt, Artificial Sequence
  Synthetic
uuauuugaaaagaaagcuuucg

SEQ ID NO: 319558 - RNA, 23 nt, Artificial Sequence
  Synthetic
cuuauuugaaaagaaagcuuucg

SEQ ID NO: 319559 - RNA, 24 nt, Artificial Sequence
  Synthetic
ccuuauuugaaaagaaagcuuucg

SEQ ID NO: 319560 - RNA, 18 nt, Artificial Sequence
  Synthetic
cucuaaaucacucuuucg

SEQ ID NO: 319561 - RNA, 19 nt, Artificial Sequence
  Synthetic
ucucuaaaucacucuuucg

SEQ ID NO: 319562 - RNA, 20 nt, Artificial Sequence
  Synthetic
uucucuaaaucacucuuucg

SEQ ID NO: 319563 - RNA, 21 nt, Artificial Sequence
  Synthetic
auucucuaaaucacucuuucg

SEQ ID NO: 319564 - RNA, 22 nt, Artificial Sequence
  Synthetic
cauucucuaaaucacucuuucg

SEQ ID NO: 319565 - RNA, 23 nt, Artificial Sequence
  Synthetic
ccauucucuaaaucacucuuucg

SEQ ID NO: 319566 - RNA, 24 nt, Artificial Sequence
  Synthetic
uccauucucuaaaucacucuuucg

SEQ ID NO: 319567 - RNA, 18 nt, Artificial Sequence
  Synthetic
agggcaugcugucuuucg

SEQ ID NO: 319568 - RNA, 19 nt, Artificial Sequence
  Synthetic
aagggcaugcugucuuucg

SEQ ID NO: 319569 - RNA, 20 nt, Artificial Sequence
  Synthetic
caagggcaugcugucuuucg

SEQ ID NO: 319570 - RNA, 21 nt, Artificial Sequence
  Synthetic
ucaagggcaugcugucuuucg

SEQ ID NO: 319571 - RNA, 22 nt, Artificial Sequence
  Synthetic
gucaagggcaugcugucuuucg

SEQ ID NO: 319572 - RNA, 23 nt, Artificial Sequence
  Synthetic
ugucaagggcaugcugucuuucg

SEQ ID NO: 319573 - RNA, 24 nt, Artificial Sequence
  Synthetic
augucaagggcaugcugucuuucg

SEQ ID NO: 319574 - RNA, 18 nt, Artificial Sequence
  Synthetic
auucagagacuucuuucg

SEQ ID NO: 319575 - RNA, 19 nt, Artificial Sequence
  Synthetic
gauucagagacuucuuucg

SEQ ID NO: 319576 - RNA, 20 nt, Artificial Sequence
  Synthetic
ugauucagagacuucuuucg

SEQ ID NO: 319577 - RNA, 21 nt, Artificial Sequence
  Synthetic
uugauucagagacuucuuucg

SEQ ID NO: 319578 - RNA, 22 nt, Artificial Sequence
  Synthetic
uuugauucagagacuucuuucg

SEQ ID NO: 319579 - RNA, 23 nt, Artificial Sequence
  Synthetic
cuuugauucagagacuucuuucg

SEQ ID NO: 319580 - RNA, 24 nt, Artificial Sequence
  Synthetic
gcuuugauucagagacuucuuucg

SEQ ID NO: 319581 - RNA, 18 nt, Artificial Sequence
  Synthetic
ucuuuuagggaaguuucg

SEQ ID NO: 319582 - RNA, 19 nt, Artificial Sequence
  Synthetic
gucuuuuagggaaguuucg

SEQ ID NO: 319583 - RNA, 20 nt, Artificial Sequence
  Synthetic
ugucuuuuagggaaguuucg

SEQ ID NO: 319584 - RNA, 21 nt, Artificial Sequence
  Synthetic
uugucuuuuagggaaguuucg

SEQ ID NO: 319585 - RNA, 22 nt, Artificial Sequence
  Synthetic
auugucuuuuagggaaguuucg

SEQ ID NO: 319586 - RNA, 23 nt, Artificial Sequence
  Synthetic
aauugucuuuuagggaaguuucg

SEQ ID NO: 319587 - RNA, 24 nt, Artificial Sequence
  Synthetic
caauugucuuuuagggaaguuucg

SEQ ID NO: 319588 - RNA, 18 nt, Artificial Sequence
  Synthetic
ucaaauguagugguuucg

SEQ ID NO: 319589 - RNA, 19 nt, Artificial Sequence
  Synthetic
cucaaauguagugguuucg

SEQ ID NO: 319590 - RNA, 20 nt, Artificial Sequence
  Synthetic
ucucaaauguagugguuucg

SEQ ID NO: 319591 - RNA, 21 nt, Artificial Sequence
  Synthetic
uucucaaauguagugguuucg

SEQ ID NO: 319592 - RNA, 22 nt, Artificial Sequence
  Synthetic
cuucucaaauguagugguuucg

SEQ ID NO: 319593 - RNA, 23 nt, Artificial Sequence
  Synthetic
acuucucaaauguagugguuucg

SEQ ID NO: 319594 - RNA, 24 nt, Artificial Sequence
  Synthetic
uacuucucaaauguagugguuucg

SEQ ID NO: 319595 - RNA, 18 nt, Artificial Sequence
  Synthetic
aaaguuaaauugguuucg

SEQ ID NO: 319596 - RNA, 19 nt, Artificial Sequence
  Synthetic
uaaaguuaaauugguuucg

SEQ ID NO: 319597 - RNA, 20 nt, Artificial Sequence
  Synthetic
cuaaaguuaaauugguuucg

SEQ ID NO: 319598 - RNA, 21 nt, Artificial Sequence
  Synthetic
ccuaaaguuaaauugguuucg

SEQ ID NO: 319599 - RNA, 22 nt, Artificial Sequence
  Synthetic
accuaaaguuaaauugguuucg

SEQ ID NO: 319600 - RNA, 23 nt, Artificial Sequence
  Synthetic
aaccuaaaguuaaauugguuucg

SEQ ID NO: 319601 - RNA, 24 nt, Artificial Sequence
  Synthetic
uaaccuaaaguuaaauugguuucg

SEQ ID NO: 319602 - RNA, 18 nt, Artificial Sequence
  Synthetic
uaggaaucgauuguuucg

SEQ ID NO: 319603 - RNA, 19 nt, Artificial Sequence
  Synthetic
uuaggaaucgauuguuucg

SEQ ID NO: 319604 - RNA, 20 nt, Artificial Sequence
  Synthetic
uuuaggaaucgauuguuucg

SEQ ID NO: 319605 - RNA, 21 nt, Artificial Sequence
  Synthetic
cuuuaggaaucgauuguuucg

SEQ ID NO: 319606 - RNA, 22 nt, Artificial Sequence
  Synthetic
ccuuuaggaaucgauuguuucg

SEQ ID NO: 319607 - RNA, 23 nt, Artificial Sequence
  Synthetic
accuuuaggaaucgauuguuucg

SEQ ID NO: 319608 - RNA, 24 nt, Artificial Sequence
  Synthetic
gaccuuuaggaaucgauuguuucg

SEQ ID NO: 319609 - RNA, 18 nt, Artificial Sequence
  Synthetic
auaaauaggcaauuuucg

SEQ ID NO: 319610 - RNA, 19 nt, Artificial Sequence
  Synthetic
cauaaauaggcaauuuucg

SEQ ID NO: 319611 - RNA, 20 nt, Artificial Sequence
  Synthetic
acauaaauaggcaauuuucg

SEQ ID NO: 319612 - RNA, 21 nt, Artificial Sequence
  Synthetic
uacauaaauaggcaauuuucg

SEQ ID NO: 319613 - RNA, 22 nt, Artificial Sequence
  Synthetic
auacauaaauaggcaauuuucg

SEQ ID NO: 319614 - RNA, 23 nt, Artificial Sequence
  Synthetic
uauacauaaauaggcaauuuucg

SEQ ID NO: 319615 - RNA, 24 nt, Artificial Sequence
  Synthetic
guauacauaaauaggcaauuuucg

SEQ ID NO: 319616 - RNA, 18 nt, Artificial Sequence
  Synthetic
uccuuggccgacuuuucg

SEQ ID NO: 319617 - RNA, 19 nt, Artificial Sequence
  Synthetic
auccuuggccgacuuuucg

SEQ ID NO: 319618 - RNA, 20 nt, Artificial Sequence
  Synthetic
uauccuuggccgacuuuucg

SEQ ID NO: 319619 - RNA, 21 nt, Artificial Sequence
  Synthetic
cuauccuuggccgacuuuucg

SEQ ID NO: 319620 - RNA, 22 nt, Artificial Sequence
  Synthetic
ccuauccuuggccgacuuuucg

SEQ ID NO: 319621 - RNA, 23 nt, Artificial Sequence
  Synthetic
uccuauccuuggccgacuuuucg

SEQ ID NO: 319622 - RNA, 24 nt, Artificial Sequence
  Synthetic
uuccuauccuuggccgacuuuucg

SEQ ID NO: 319623 - RNA, 18 nt, Artificial Sequence
  Synthetic
ucuauuuuuaaguuuucg

SEQ ID NO: 319624 - RNA, 19 nt, Artificial Sequence
  Synthetic
uucuauuuuuaaguuuucg

SEQ ID NO: 319625 - RNA, 20 nt, Artificial Sequence
  Synthetic
guucuauuuuuaaguuuucg

SEQ ID NO: 319626 - RNA, 21 nt, Artificial Sequence
  Synthetic
aguucuauuuuuaaguuuucg

SEQ ID NO: 319627 - RNA, 22 nt, Artificial Sequence
  Synthetic
uaguucuauuuuuaaguuuucg

SEQ ID NO: 319628 - RNA, 23 nt, Artificial Sequence
  Synthetic
guaguucuauuuuuaaguuuucg

SEQ ID NO: 319629 - RNA, 24 nt, Artificial Sequence
  Synthetic
gguaguucuauuuuuaaguuuucg

SEQ ID NO: 319630 - RNA, 18 nt, Artificial Sequence
  Synthetic
cuggcagcagauuuuucg

SEQ ID NO: 319631 - RNA, 19 nt, Artificial Sequence
  Synthetic
ucuggcagcagauuuuucg

SEQ ID NO: 319632 - RNA, 20 nt, Artificial Sequence
  Synthetic
aucuggcagcagauuuuucg

SEQ ID NO: 319633 - RNA, 21 nt, Artificial Sequence
  Synthetic
caucuggcagcagauuuuucg

SEQ ID NO: 319634 - RNA, 22 nt, Artificial Sequence
  Synthetic
acaucuggcagcagauuuuucg

SEQ ID NO: 319635 - RNA, 23 nt, Artificial Sequence
  Synthetic
uacaucuggcagcagauuuuucg

SEQ ID NO: 319636 - RNA, 24 nt, Artificial Sequence
  Synthetic
auacaucuggcagcagauuuuucg

SEQ ID NO: 319637 - RNA, 18 nt, Artificial Sequence
  Synthetic
ucccuguuguuuuuuucg

SEQ ID NO: 319638 - RNA, 19 nt, Artificial Sequence
  Synthetic
uucccuguuguuuuuuucg

SEQ ID NO: 319639 - RNA, 20 nt, Artificial Sequence
  Synthetic
guucccuguuguuuuuuucg

SEQ ID NO: 319640 - RNA, 21 nt, Artificial Sequence
  Synthetic
cguucccuguuguuuuuuucg

SEQ ID NO: 319641 - RNA, 22 nt, Artificial Sequence
  Synthetic
acguucccuguuguuuuuuucg

SEQ ID NO: 319642 - RNA, 23 nt, Artificial Sequence
  Synthetic
aacguucccuguuguuuuuuucg

SEQ ID NO: 319643 - RNA, 24 nt, Artificial Sequence
  Synthetic
uaacguucccuguuguuuuuuucg

SEQ ID NO: 319644 - RNA, 18 nt, Artificial Sequence
  Synthetic
aaaaaaaaaaaaaaaagg

SEQ ID NO: 319645 - RNA, 19 nt, Artificial Sequence
  Synthetic
uaaaaaaaaaaaaaaaagg

SEQ ID NO: 319646 - RNA, 20 nt, Artificial Sequence
  Synthetic
uuaaaaaaaaaaaaaaaagg

SEQ ID NO: 319647 - RNA, 21 nt, Artificial Sequence
  Synthetic
uuuaaaaaaaaaaaaaaaagg

SEQ ID NO: 319648 - RNA, 22 nt, Artificial Sequence
  Synthetic
auuuaaaaaaaaaaaaaaaagg

SEQ ID NO: 319649 - RNA, 23 nt, Artificial Sequence
  Synthetic
aauuuaaaaaaaaaaaaaaaagg

SEQ ID NO: 319650 - RNA, 24 nt, Artificial Sequence
  Synthetic
aaauuuaaaaaaaaaaaaaaaagg

SEQ ID NO: 319651 - RNA, 18 nt, Artificial Sequence
  Synthetic
uggaauugcucaaaaagg

SEQ ID NO: 319652 - RNA, 19 nt, Artificial Sequence
  Synthetic
auggaauugcucaaaaagg

SEQ ID NO: 319653 - RNA, 20 nt, Artificial Sequence
  Synthetic
uauggaauugcucaaaaagg

SEQ ID NO: 319654 - RNA, 21 nt, Artificial Sequence
  Synthetic
uuauggaauugcucaaaaagg

SEQ ID NO: 319655 - RNA, 22 nt, Artificial Sequence
  Synthetic
auuauggaauugcucaaaaagg

SEQ ID NO: 319656 - RNA, 23 nt, Artificial Sequence
  Synthetic
aauuauggaauugcucaaaaagg

SEQ ID NO: 319657 - RNA, 24 nt, Artificial Sequence
  Synthetic
caauuauggaauugcucaaaaagg

SEQ ID NO: 319658 - RNA, 18 nt, Artificial Sequence
  Synthetic
agcucugagugaaaaagg

SEQ ID NO: 319659 - RNA, 19 nt, Artificial Sequence
  Synthetic
aagcucugagugaaaaagg

SEQ ID NO: 319660 - RNA, 20 nt, Artificial Sequence
  Synthetic
uaagcucugagugaaaaagg

SEQ ID NO: 319661 - RNA, 21 nt, Artificial Sequence
  Synthetic
cuaagcucugagugaaaaagg

SEQ ID NO: 319662 - RNA, 22 nt, Artificial Sequence
  Synthetic
acuaagcucugagugaaaaagg

SEQ ID NO: 319663 - RNA, 23 nt, Artificial Sequence
  Synthetic
uacuaagcucugagugaaaaagg

SEQ ID NO: 319664 - RNA, 24 nt, Artificial Sequence
  Synthetic
cuacuaagcucugagugaaaaagg

SEQ ID NO: 319665 - RNA, 18 nt, Artificial Sequence
  Synthetic
cagaugaggaacaaaagg

SEQ ID NO: 319666 - RNA, 19 nt, Artificial Sequence
  Synthetic
ucagaugaggaacaaaagg

SEQ ID NO: 319667 - RNA, 20 nt, Artificial Sequence
  Synthetic
cucagaugaggaacaaaagg

SEQ ID NO: 319668 - RNA, 21 nt, Artificial Sequence
  Synthetic
ucucagaugaggaacaaaagg

SEQ ID NO: 319669 - RNA, 22 nt, Artificial Sequence
  Synthetic
cucucagaugaggaacaaaagg

SEQ ID NO: 319670 - RNA, 23 nt, Artificial Sequence
  Synthetic
ucucucagaugaggaacaaaagg

SEQ ID NO: 319671 - RNA, 24 nt, Artificial Sequence
  Synthetic
aucucucagaugaggaacaaaagg

SEQ ID NO: 319672 - RNA, 18 nt, Artificial Sequence
  Synthetic
uuuacuguagagaaaagg

SEQ ID NO: 319673 - RNA, 19 nt, Artificial Sequence
  Synthetic
uuuuacuguagagaaaagg

SEQ ID NO: 319674 - RNA, 20 nt, Artificial Sequence
  Synthetic
auuuuacuguagagaaaagg

SEQ ID NO: 319675 - RNA, 21 nt, Artificial Sequence
  Synthetic
uauuuuacuguagagaaaagg

SEQ ID NO: 319676 - RNA, 22 nt, Artificial Sequence
  Synthetic
auauuuuacuguagagaaaagg

SEQ ID NO: 319677 - RNA, 23 nt, Artificial Sequence
  Synthetic
cauauuuuacuguagagaaaagg

SEQ ID NO: 319678 - RNA, 24 nt, Artificial Sequence
  Synthetic
gcauauuuuacuguagagaaaagg

SEQ ID NO: 319679 - RNA, 18 nt, Artificial Sequence
  Synthetic
uuacacauggagaaaagg

SEQ ID NO: 319680 - RNA, 19 nt, Artificial Sequence
  Synthetic
auuacacauggagaaaagg

SEQ ID NO: 319681 - RNA, 20 nt, Artificial Sequence
  Synthetic
aauuacacauggagaaaagg

SEQ ID NO: 319682 - RNA, 21 nt, Artificial Sequence
  Synthetic
aaauuacacauggagaaaagg

SEQ ID NO: 319683 - RNA, 22 nt, Artificial Sequence
  Synthetic
uaaauuacacauggagaaaagg

SEQ ID NO: 319684 - RNA, 23 nt, Artificial Sequence
  Synthetic
guaaauuacacauggagaaaagg

SEQ ID NO: 319685 - RNA, 24 nt, Artificial Sequence
  Synthetic
aguaaauuacacauggagaaaagg

SEQ ID NO: 319686 - RNA, 18 nt, Artificial Sequence
  Synthetic
ucucuggugccgaaaagg

SEQ ID NO: 319687 - RNA, 19 nt, Artificial Sequence
  Synthetic
gucucuggugccgaaaagg

SEQ ID NO: 319688 - RNA, 20 nt, Artificial Sequence
  Synthetic
agucucuggugccgaaaagg

SEQ ID NO: 319689 - RNA, 21 nt, Artificial Sequence
  Synthetic
cagucucuggugccgaaaagg

SEQ ID NO: 319690 - RNA, 22 nt, Artificial Sequence
  Synthetic
ccagucucuggugccgaaaagg

SEQ ID NO: 319691 - RNA, 23 nt, Artificial Sequence
  Synthetic
accagucucuggugccgaaaagg

SEQ ID NO: 319692 - RNA, 24 nt, Artificial Sequence
  Synthetic
aaccagucucuggugccgaaaagg

SEQ ID NO: 319693 - RNA, 18 nt, Artificial Sequence
  Synthetic
aaaagaaaaaggaaaagg

SEQ ID NO: 319694 - RNA, 19 nt, Artificial Sequence
  Synthetic
uaaaagaaaaaggaaaagg

SEQ ID NO: 319695 - RNA, 20 nt, Artificial Sequence
  Synthetic
auaaaagaaaaaggaaaagg

SEQ ID NO: 319696 - RNA, 21 nt, Artificial Sequence
  Synthetic
gauaaaagaaaaaggaaaagg

SEQ ID NO: 319697 - RNA, 22 nt, Artificial Sequence
  Synthetic
ggauaaaagaaaaaggaaaagg

SEQ ID NO: 319698 - RNA, 23 nt, Artificial Sequence
  Synthetic
aggauaaaagaaaaaggaaaagg

SEQ ID NO: 319699 - RNA, 24 nt, Artificial Sequence
  Synthetic
caggauaaaagaaaaaggaaaagg

SEQ ID NO: 319700 - RNA, 18 nt, Artificial Sequence
  Synthetic
aaaaaaaagaggaaaagg

SEQ ID NO: 319701 - RNA, 19 nt, Artificial Sequence
  Synthetic
aaaaaaaaagaggaaaagg

SEQ ID NO: 319702 - RNA, 20 nt, Artificial Sequence
  Synthetic
gaaaaaaaaagaggaaaagg

SEQ ID NO: 319703 - RNA, 21 nt, Artificial Sequence
  Synthetic
agaaaaaaaaagaggaaaagg

SEQ ID NO: 319704 - RNA, 22 nt, Artificial Sequence
  Synthetic
aagaaaaaaaaagaggaaaagg

SEQ ID NO: 319705 - RNA, 23 nt, Artificial Sequence
  Synthetic
aaagaaaaaaaaagaggaaaagg

SEQ ID NO: 319706 - RNA, 24 nt, Artificial Sequence
  Synthetic
aaaagaaaaaaaaagaggaaaagg

SEQ ID NO: 319707 - RNA, 18 nt, Artificial Sequence
  Synthetic
acuacauuggggaaaagg

SEQ ID NO: 319708 - RNA, 19 nt, Artificial Sequence
  Synthetic
cacuacauuggggaaaagg

SEQ ID NO: 319709 - RNA, 20 nt, Artificial Sequence
  Synthetic
ucacuacauuggggaaaagg

SEQ ID NO: 319710 - RNA, 21 nt, Artificial Sequence
  Synthetic
aucacuacauuggggaaaagg

SEQ ID NO: 319711 - RNA, 22 nt, Artificial Sequence
  Synthetic
aaucacuacauuggggaaaagg

SEQ ID NO: 319712 - RNA, 23 nt, Artificial Sequence
  Synthetic
aaaucacuacauuggggaaaagg

SEQ ID NO: 319713 - RNA, 24 nt, Artificial Sequence
  Synthetic
caaaucacuacauuggggaaaagg

SEQ ID NO: 319714 - RNA, 18 nt, Artificial Sequence
  Synthetic
aucuaaugcuggaaaagg

SEQ ID NO: 319715 - RNA, 19 nt, Artificial Sequence
  Synthetic
caucuaaugcuggaaaagg

SEQ ID NO: 319716 - RNA, 20 nt, Artificial Sequence
  Synthetic
gcaucuaaugcuggaaaagg

SEQ ID NO: 319717 - RNA, 21 nt, Artificial Sequence
  Synthetic
agcaucuaaugcuggaaaagg

SEQ ID NO: 319718 - RNA, 22 nt, Artificial Sequence
  Synthetic
uagcaucuaaugcuggaaaagg

SEQ ID NO: 319719 - RNA, 23 nt, Artificial Sequence
  Synthetic
guagcaucuaaugcuggaaaagg

SEQ ID NO: 319720 - RNA, 24 nt, Artificial Sequence
  Synthetic
gguagcaucuaaugcuggaaaagg

SEQ ID NO: 319721 - RNA, 18 nt, Artificial Sequence
  Synthetic
acaaggcaaaugaaaagg

SEQ ID NO: 319722 - RNA, 19 nt, Artificial Sequence
  Synthetic
gacaaggcaaaugaaaagg

SEQ ID NO: 319723 - RNA, 20 nt, Artificial Sequence
  Synthetic
ggacaaggcaaaugaaaagg

SEQ ID NO: 319724 - RNA, 21 nt, Artificial Sequence
  Synthetic
uggacaaggcaaaugaaaagg

SEQ ID NO: 319725 - RNA, 22 nt, Artificial Sequence
  Synthetic
auggacaaggcaaaugaaaagg

SEQ ID NO: 319726 - RNA, 23 nt, Artificial Sequence
  Synthetic
cauggacaaggcaaaugaaaagg

SEQ ID NO: 319727 - RNA, 24 nt, Artificial Sequence
  Synthetic
acauggacaaggcaaaugaaaagg

SEQ ID NO: 319728 - RNA, 18 nt, Artificial Sequence
  Synthetic
ugcugcaaacugaaaagg

SEQ ID NO: 319729 - RNA, 19 nt, Artificial Sequence
  Synthetic
gugcugcaaacugaaaagg

SEQ ID NO: 319730 - RNA, 20 nt, Artificial Sequence
  Synthetic
agugcugcaaacugaaaagg

SEQ ID NO: 319731 - RNA, 21 nt, Artificial Sequence
  Synthetic
gagugcugcaaacugaaaagg

SEQ ID NO: 319732 - RNA, 22 nt, Artificial Sequence
  Synthetic
agagugcugcaaacugaaaagg

SEQ ID NO: 319733 - RNA, 23 nt, Artificial Sequence
  Synthetic
cagagugcugcaaacugaaaagg

SEQ ID NO: 319734 - RNA, 24 nt, Artificial Sequence
  Synthetic
gcagagugcugcaaacugaaaagg

SEQ ID NO: 319735 - RNA, 18 nt, Artificial Sequence
  Synthetic
uugaaacuucugaaaagg

SEQ ID NO: 319736 - RNA, 19 nt, Artificial Sequence
  Synthetic
uuugaaacuucugaaaagg

SEQ ID NO: 319737 - RNA, 20 nt, Artificial Sequence
  Synthetic
cuuugaaacuucugaaaagg

SEQ ID NO: 319738 - RNA, 21 nt, Artificial Sequence
  Synthetic
ccuuugaaacuucugaaaagg

SEQ ID NO: 319739 - RNA, 22 nt, Artificial Sequence
  Synthetic
gccuuugaaacuucugaaaagg

SEQ ID NO: 319740 - RNA, 23 nt, Artificial Sequence
  Synthetic
cgccuuugaaacuucugaaaagg

SEQ ID NO: 319741 - RNA, 24 nt, Artificial Sequence
  Synthetic
ccgccuuugaaacuucugaaaagg

SEQ ID NO: 319742 - RNA, 18 nt, Artificial Sequence
  Synthetic
uucugcugaaauaaaagg

SEQ ID NO: 319743 - RNA, 19 nt, Artificial Sequence
  Synthetic
auucugcugaaauaaaagg

SEQ ID NO: 319744 - RNA, 20 nt, Artificial Sequence
  Synthetic
aauucugcugaaauaaaagg

SEQ ID NO: 319745 - RNA, 21 nt, Artificial Sequence
  Synthetic
caauucugcugaaauaaaagg

SEQ ID NO: 319746 - RNA, 22 nt, Artificial Sequence
  Synthetic
ucaauucugcugaaauaaaagg

SEQ ID NO: 319747 - RNA, 23 nt, Artificial Sequence
  Synthetic
cucaauucugcugaaauaaaagg

SEQ ID NO: 319748 - RNA, 24 nt, Artificial Sequence
  Synthetic
acucaauucugcugaaauaaaagg

SEQ ID NO: 319749 - RNA, 18 nt, Artificial Sequence
  Synthetic
uuuaauucuucuaaaagg

SEQ ID NO: 319750 - RNA, 19 nt, Artificial Sequence
  Synthetic
guuuaauucuucuaaaagg

SEQ ID NO: 319751 - RNA, 20 nt, Artificial Sequence
  Synthetic
uguuuaauucuucuaaaagg

SEQ ID NO: 319752 - RNA, 21 nt, Artificial Sequence
  Synthetic
auguuuaauucuucuaaaagg

SEQ ID NO: 319753 - RNA, 22 nt, Artificial Sequence
  Synthetic
aauguuuaauucuucuaaaagg

SEQ ID NO: 319754 - RNA, 23 nt, Artificial Sequence
  Synthetic
caauguuuaauucuucuaaaagg

SEQ ID NO: 319755 - RNA, 24 nt, Artificial Sequence
  Synthetic
acaauguuuaauucuucuaaaagg

SEQ ID NO: 319756 - RNA, 18 nt, Artificial Sequence
  Synthetic
cugcugcguaguaaaagg

SEQ ID NO: 319757 - RNA, 19 nt, Artificial Sequence
  Synthetic
ccugcugcguaguaaaagg

SEQ ID NO: 319758 - RNA, 20 nt, Artificial Sequence
  Synthetic
gccugcugcguaguaaaagg

SEQ ID NO: 319759 - RNA, 21 nt, Artificial Sequence
  Synthetic
ugccugcugcguaguaaaagg

SEQ ID NO: 319760 - RNA, 22 nt, Artificial Sequence
  Synthetic
augccugcugcguaguaaaagg

SEQ ID NO: 319761 - RNA, 23 nt, Artificial Sequence
  Synthetic
uaugccugcugcguaguaaaagg

SEQ ID NO: 319762 - RNA, 24 nt, Artificial Sequence
  Synthetic
guaugccugcugcguaguaaaagg

SEQ ID NO: 319763 - RNA, 18 nt, Artificial Sequence
  Synthetic
aagugaauguguaaaagg

SEQ ID NO: 319764 - RNA, 19 nt, Artificial Sequence
  Synthetic
aaagugaauguguaaaagg

SEQ ID NO: 319765 - RNA, 20 nt, Artificial Sequence
  Synthetic
aaaagugaauguguaaaagg

SEQ ID NO: 319766 - RNA, 21 nt, Artificial Sequence
  Synthetic
aaaaagugaauguguaaaagg

SEQ ID NO: 319767 - RNA, 22 nt, Artificial Sequence
  Synthetic
caaaaagugaauguguaaaagg

SEQ ID NO: 319768 - RNA, 23 nt, Artificial Sequence
  Synthetic
ucaaaaagugaauguguaaaagg

SEQ ID NO: 319769 - RNA, 24 nt, Artificial Sequence
  Synthetic
aucaaaaagugaauguguaaaagg

SEQ ID NO: 319770 - RNA, 18 nt, Artificial Sequence
  Synthetic
ccuugcccuuuuaaaagg

SEQ ID NO: 319771 - RNA, 19 nt, Artificial Sequence
  Synthetic
uccuugcccuuuuaaaagg

SEQ ID NO: 319772 - RNA, 20 nt, Artificial Sequence
  Synthetic
uuccuugcccuuuuaaaagg

SEQ ID NO: 319773 - RNA, 21 nt, Artificial Sequence
  Synthetic
cuuccuugcccuuuuaaaagg

SEQ ID NO: 319774 - RNA, 22 nt, Artificial Sequence
  Synthetic
ucuuccuugcccuuuuaaaagg

SEQ ID NO: 319775 - RNA, 23 nt, Artificial Sequence
  Synthetic
cucuuccuugcccuuuuaaaagg

SEQ ID NO: 319776 - RNA, 24 nt, Artificial Sequence
  Synthetic
gcucuuccuugcccuuuuaaaagg

SEQ ID NO: 319777 - RNA, 18 nt, Artificial Sequence
  Synthetic
gcugcaccacaacaaagg

SEQ ID NO: 319778 - RNA, 19 nt, Artificial Sequence
  Synthetic
agcugcaccacaacaaagg

SEQ ID NO: 319779 - RNA, 20 nt, Artificial Sequence
  Synthetic
cagcugcaccacaacaaagg

SEQ ID NO: 319780 - RNA, 21 nt, Artificial Sequence
  Synthetic
acagcugcaccacaacaaagg

SEQ ID NO: 319781 - RNA, 22 nt, Artificial Sequence
  Synthetic
uacagcugcaccacaacaaagg

SEQ ID NO: 319782 - RNA, 23 nt, Artificial Sequence
  Synthetic
cuacagcugcaccacaacaaagg

SEQ ID NO: 319783 - RNA, 24 nt, Artificial Sequence
  Synthetic
ucuacagcugcaccacaacaaagg

SEQ ID NO: 319784 - RNA, 18 nt, Artificial Sequence
  Synthetic
gccacucucccacaaagg

SEQ ID NO: 319785 - RNA, 19 nt, Artificial Sequence
  Synthetic
agccacucucccacaaagg

SEQ ID NO: 319786 - RNA, 20 nt, Artificial Sequence
  Synthetic
aagccacucucccacaaagg

SEQ ID NO: 319787 - RNA, 21 nt, Artificial Sequence
  Synthetic
uaagccacucucccacaaagg

SEQ ID NO: 319788 - RNA, 22 nt, Artificial Sequence
  Synthetic
guaagccacucucccacaaagg

SEQ ID NO: 319789 - RNA, 23 nt, Artificial Sequence
  Synthetic
uguaagccacucucccacaaagg

SEQ ID NO: 319790 - RNA, 24 nt, Artificial Sequence
  Synthetic
guguaagccacucucccacaaagg

SEQ ID NO: 319791 - RNA, 18 nt, Artificial Sequence
  Synthetic
auuguuggcagacaaagg

SEQ ID NO: 319792 - RNA, 19 nt, Artificial Sequence
  Synthetic
aauuguuggcagacaaagg

SEQ ID NO: 319793 - RNA, 20 nt, Artificial Sequence
  Synthetic
gaauuguuggcagacaaagg

SEQ ID NO: 319794 - RNA, 21 nt, Artificial Sequence
  Synthetic
agaauuguuggcagacaaagg

SEQ ID NO: 319795 - RNA, 22 nt, Artificial Sequence
  Synthetic
uagaauuguuggcagacaaagg

SEQ ID NO: 319796 - RNA, 23 nt, Artificial Sequence
  Synthetic
guagaauuguuggcagacaaagg

SEQ ID NO: 319797 - RNA, 24 nt, Artificial Sequence
  Synthetic
gguagaauuguuggcagacaaagg

SEQ ID NO: 319798 - RNA, 18 nt, Artificial Sequence
  Synthetic
uaaauaccuauacaaagg

SEQ ID NO: 319799 - RNA, 19 nt, Artificial Sequence
  Synthetic
auaaauaccuauacaaagg

SEQ ID NO: 319800 - RNA, 20 nt, Artificial Sequence
  Synthetic
uauaaauaccuauacaaagg

SEQ ID NO: 319801 - RNA, 21 nt, Artificial Sequence
  Synthetic
uuauaaauaccuauacaaagg

SEQ ID NO: 319802 - RNA, 22 nt, Artificial Sequence
  Synthetic
uuuauaaauaccuauacaaagg

SEQ ID NO: 319803 - RNA, 23 nt, Artificial Sequence
  Synthetic
uuuuauaaauaccuauacaaagg

SEQ ID NO: 319804 - RNA, 24 nt, Artificial Sequence
  Synthetic
auuuuauaaauaccuauacaaagg

SEQ ID NO: 319805 - RNA, 18 nt, Artificial Sequence
  Synthetic
ugccucagaggccaaagg

SEQ ID NO: 319806 - RNA, 19 nt, Artificial Sequence
  Synthetic
gugccucagaggccaaagg

SEQ ID NO: 319807 - RNA, 20 nt, Artificial Sequence
  Synthetic
ggugccucagaggccaaagg

SEQ ID NO: 319808 - RNA, 21 nt, Artificial Sequence
  Synthetic
aggugccucagaggccaaagg

SEQ ID NO: 319809 - RNA, 22 nt, Artificial Sequence
  Synthetic
aaggugccucagaggccaaagg

SEQ ID NO: 319810 - RNA, 23 nt, Artificial Sequence
  Synthetic
caaggugccucagaggccaaagg

SEQ ID NO: 319811 - RNA, 24 nt, Artificial Sequence
  Synthetic
gcaaggugccucagaggccaaagg

SEQ ID NO: 319812 - RNA, 18 nt, Artificial Sequence
  Synthetic
aauucuaccuuccaaagg

SEQ ID NO: 319813 - RNA, 19 nt, Artificial Sequence
  Synthetic
gaauucuaccuuccaaagg

SEQ ID NO: 319814 - RNA, 20 nt, Artificial Sequence
  Synthetic
ugaauucuaccuuccaaagg

SEQ ID NO: 319815 - RNA, 21 nt, Artificial Sequence
  Synthetic
cugaauucuaccuuccaaagg

SEQ ID NO: 319816 - RNA, 22 nt, Artificial Sequence
  Synthetic
ccugaauucuaccuuccaaagg

SEQ ID NO: 319817 - RNA, 23 nt, Artificial Sequence
  Synthetic
uccugaauucuaccuuccaaagg

SEQ ID NO: 319818 - RNA, 24 nt, Artificial Sequence
  Synthetic
uuccugaauucuaccuuccaaagg

SEQ ID NO: 319819 - RNA, 18 nt, Artificial Sequence
  Synthetic
cuuaaaaccaagcaaagg

SEQ ID NO: 319820 - RNA, 19 nt, Artificial Sequence
  Synthetic
ccuuaaaaccaagcaaagg

SEQ ID NO: 319821 - RNA, 20 nt, Artificial Sequence
  Synthetic
uccuuaaaaccaagcaaagg

SEQ ID NO: 319822 - RNA, 21 nt, Artificial Sequence
  Synthetic
auccuuaaaaccaagcaaagg

SEQ ID NO: 319823 - RNA, 22 nt, Artificial Sequence
  Synthetic
cauccuuaaaaccaagcaaagg

SEQ ID NO: 319824 - RNA, 23 nt, Artificial Sequence
  Synthetic
acauccuuaaaaccaagcaaagg

SEQ ID NO: 319825 - RNA, 24 nt, Artificial Sequence
  Synthetic
uacauccuuaaaaccaagcaaagg

SEQ ID NO: 319826 - RNA, 18 nt, Artificial Sequence
  Synthetic
gucaaaauacagcaaagg

SEQ ID NO: 319827 - RNA, 19 nt, Artificial Sequence
  Synthetic
ugucaaaauacagcaaagg

SEQ ID NO: 319828 - RNA, 20 nt, Artificial Sequence
  Synthetic
augucaaaauacagcaaagg

SEQ ID NO: 319829 - RNA, 21 nt, Artificial Sequence
  Synthetic
aaugucaaaauacagcaaagg

SEQ ID NO: 319830 - RNA, 22 nt, Artificial Sequence
  Synthetic
aaaugucaaaauacagcaaagg

SEQ ID NO: 319831 - RNA, 23 nt, Artificial Sequence
  Synthetic
gaaaugucaaaauacagcaaagg

SEQ ID NO: 319832 - RNA, 24 nt, Artificial Sequence
  Synthetic
agaaaugucaaaauacagcaaagg

SEQ ID NO: 319833 - RNA, 18 nt, Artificial Sequence
  Synthetic
agaagugccgagcaaagg

SEQ ID NO: 319834 - RNA, 19 nt, Artificial Sequence
  Synthetic
gagaagugccgagcaaagg

SEQ ID NO: 319835 - RNA, 20 nt, Artificial Sequence
  Synthetic
ggagaagugccgagcaaagg

SEQ ID NO: 319836 - RNA, 21 nt, Artificial Sequence
  Synthetic
aggagaagugccgagcaaagg

SEQ ID NO: 319837 - RNA, 22 nt, Artificial Sequence
  Synthetic
aaggagaagugccgagcaaagg

SEQ ID NO: 319838 - RNA, 23 nt, Artificial Sequence
  Synthetic
gaaggagaagugccgagcaaagg

SEQ ID NO: 319839 - RNA, 24 nt, Artificial Sequence
  Synthetic
agaaggagaagugccgagcaaagg

SEQ ID NO: 319840 - RNA, 18 nt, Artificial Sequence
  Synthetic
agaagugcugagcaaagg

SEQ ID NO: 319841 - RNA, 19 nt, Artificial Sequence
  Synthetic
gagaagugcugagcaaagg

SEQ ID NO: 319842 - RNA, 20 nt, Artificial Sequence
  Synthetic
ggagaagugcugagcaaagg

SEQ ID NO: 319843 - RNA, 21 nt, Artificial Sequence
  Synthetic
aggagaagugcugagcaaagg

SEQ ID NO: 319844 - RNA, 22 nt, Artificial Sequence
  Synthetic
aaggagaagugcugagcaaagg

SEQ ID NO: 319845 - RNA, 23 nt, Artificial Sequence
  Synthetic
aaaggagaagugcugagcaaagg

SEQ ID NO: 319846 - RNA, 24 nt, Artificial Sequence
  Synthetic
gaaaggagaagugcugagcaaagg

SEQ ID NO: 319847 - RNA, 18 nt, Artificial Sequence
  Synthetic
auucccauuuagcaaagg

SEQ ID NO: 319848 - RNA, 19 nt, Artificial Sequence
  Synthetic
uauucccauuuagcaaagg

SEQ ID NO: 319849 - RNA, 20 nt, Artificial Sequence
  Synthetic
auauucccauuuagcaaagg

SEQ ID NO: 319850 - RNA, 21 nt, Artificial Sequence
  Synthetic
aauauucccauuuagcaaagg

SEQ ID NO: 319851 - RNA, 22 nt, Artificial Sequence
  Synthetic
uaauauucccauuuagcaaagg

SEQ ID NO: 319852 - RNA, 23 nt, Artificial Sequence
  Synthetic
uuaauauucccauuuagcaaagg

SEQ ID NO: 319853 - RNA, 24 nt, Artificial Sequence
  Synthetic
guuaauauucccauuuagcaaagg

SEQ ID NO: 319854 - RNA, 18 nt, Artificial Sequence
  Synthetic
aucaaaaguagucaaagg

SEQ ID NO: 319855 - RNA, 19 nt, Artificial Sequence
  Synthetic
gaucaaaaguagucaaagg

SEQ ID NO: 319856 - RNA, 20 nt, Artificial Sequence
  Synthetic
agaucaaaaguagucaaagg

SEQ ID NO: 319857 - RNA, 21 nt, Artificial Sequence
  Synthetic
aagaucaaaaguagucaaagg

SEQ ID NO: 319858 - RNA, 22 nt, Artificial Sequence
  Synthetic
gaagaucaaaaguagucaaagg

SEQ ID NO: 319859 - RNA, 23 nt, Artificial Sequence
  Synthetic
ggaagaucaaaaguagucaaagg

SEQ ID NO: 319860 - RNA, 24 nt, Artificial Sequence
  Synthetic
gggaagaucaaaaguagucaaagg

SEQ ID NO: 319861 - RNA, 18 nt, Artificial Sequence
  Synthetic
ucuugaaaaaaagaaagg

SEQ ID NO: 319862 - RNA, 19 nt, Artificial Sequence
  Synthetic
cucuugaaaaaaagaaagg

SEQ ID NO: 319863 - RNA, 20 nt, Artificial Sequence
  Synthetic
ucucuugaaaaaaagaaagg

SEQ ID NO: 319864 - RNA, 21 nt, Artificial Sequence
  Synthetic
gucucuugaaaaaaagaaagg

SEQ ID NO: 319865 - RNA, 22 nt, Artificial Sequence
  Synthetic
agucucuugaaaaaaagaaagg

SEQ ID NO: 319866 - RNA, 23 nt, Artificial Sequence
  Synthetic
aagucucuugaaaaaaagaaagg

SEQ ID NO: 319867 - RNA, 24 nt, Artificial Sequence
  Synthetic
gaagucucuugaaaaaaagaaagg

SEQ ID NO: 319868 - RNA, 18 nt, Artificial Sequence
  Synthetic
gaggaagacaaagaaagg

SEQ ID NO: 319869 - RNA, 19 nt, Artificial Sequence
  Synthetic
agaggaagacaaagaaagg

SEQ ID NO: 319870 - RNA, 20 nt, Artificial Sequence
  Synthetic
gagaggaagacaaagaaagg

SEQ ID NO: 319871 - RNA, 21 nt, Artificial Sequence
  Synthetic
agagaggaagacaaagaaagg

SEQ ID NO: 319872 - RNA, 22 nt, Artificial Sequence
  Synthetic
gagagaggaagacaaagaaagg

SEQ ID NO: 319873 - RNA, 23 nt, Artificial Sequence
  Synthetic
agagagaggaagacaaagaaagg

SEQ ID NO: 319874 - RNA, 24 nt, Artificial Sequence
  Synthetic
gagagagaggaagacaaagaaagg

SEQ ID NO: 319875 - RNA, 18 nt, Artificial Sequence
  Synthetic
aaaaaaaggaaagaaagg

SEQ ID NO: 319876 - RNA, 19 nt, Artificial Sequence
  Synthetic
aaaaaaaaggaaagaaagg

SEQ ID NO: 319877 - RNA, 20 nt, Artificial Sequence
  Synthetic
aaaaaaaaaggaaagaaagg

SEQ ID NO: 319878 - RNA, 21 nt, Artificial Sequence
  Synthetic
aaaaaaaaaaggaaagaaagg

SEQ ID NO: 319879 - RNA, 22 nt, Artificial Sequence
  Synthetic
aaaaaaaaaaaggaaagaaagg

SEQ ID NO: 319880 - RNA, 23 nt, Artificial Sequence
  Synthetic
aaaaaaaaaaaaggaaagaaagg

SEQ ID NO: 319881 - RNA, 24 nt, Artificial Sequence
  Synthetic
aaaaaaaaaaaaaggaaagaaagg

SEQ ID NO: 319882 - RNA, 18 nt, Artificial Sequence
  Synthetic
augaugaaaagagaaagg

SEQ ID NO: 319883 - RNA, 19 nt, Artificial Sequence
  Synthetic
gaugaugaaaagagaaagg

SEQ ID NO: 319884 - RNA, 20 nt, Artificial Sequence
  Synthetic
ugaugaugaaaagagaaagg

SEQ ID NO: 319885 - RNA, 21 nt, Artificial Sequence
  Synthetic
augaugaugaaaagagaaagg

SEQ ID NO: 319886 - RNA, 22 nt, Artificial Sequence
  Synthetic
aaugaugaugaaaagagaaagg

SEQ ID NO: 319887 - RNA, 23 nt, Artificial Sequence
  Synthetic
aaaugaugaugaaaagagaaagg

SEQ ID NO: 319888 - RNA, 24 nt, Artificial Sequence
  Synthetic
uaaaugaugaugaaaagagaaagg

SEQ ID NO: 319889 - RNA, 18 nt, Artificial Sequence
  Synthetic
uuguauauaagagaaagg

SEQ ID NO: 319890 - RNA, 19 nt, Artificial Sequence
  Synthetic
guuguauauaagagaaagg

SEQ ID NO: 319891 - RNA, 20 nt, Artificial Sequence
  Synthetic
uguuguauauaagagaaagg

SEQ ID NO: 319892 - RNA, 21 nt, Artificial Sequence
  Synthetic
auguuguauauaagagaaagg

SEQ ID NO: 319893 - RNA, 22 nt, Artificial Sequence
  Synthetic
aauguuguauauaagagaaagg

SEQ ID NO: 319894 - RNA, 23 nt, Artificial Sequence
  Synthetic
caauguuguauauaagagaaagg

SEQ ID NO: 319895 - RNA, 24 nt, Artificial Sequence
  Synthetic
acaauguuguauauaagagaaagg

SEQ ID NO: 319896 - RNA, 18 nt, Artificial Sequence
  Synthetic
agacaggagggagaaagg

SEQ ID NO: 319897 - RNA, 19 nt, Artificial Sequence
  Synthetic
gagacaggagggagaaagg

SEQ ID NO: 319898 - RNA, 20 nt, Artificial Sequence
  Synthetic
ggagacaggagggagaaagg

SEQ ID NO: 319899 - RNA, 21 nt, Artificial Sequence
  Synthetic
gggagacaggagggagaaagg

SEQ ID NO: 319900 - RNA, 22 nt, Artificial Sequence
  Synthetic
ugggagacaggagggagaaagg

SEQ ID NO: 319901 - RNA, 23 nt, Artificial Sequence
  Synthetic
gugggagacaggagggagaaagg

SEQ ID NO: 319902 - RNA, 24 nt, Artificial Sequence
  Synthetic
ggugggagacaggagggagaaagg

SEQ ID NO: 319903 - RNA, 18 nt, Artificial Sequence
  Synthetic
ucccagcuacccgaaagg

SEQ ID NO: 319904 - RNA, 19 nt, Artificial Sequence
  Synthetic
gucccagcuacccgaaagg

SEQ ID NO: 319905 - RNA, 20 nt, Artificial Sequence
  Synthetic
agucccagcuacccgaaagg

SEQ ID NO: 319906 - RNA, 21 nt, Artificial Sequence
  Synthetic
uagucccagcuacccgaaagg

SEQ ID NO: 319907 - RNA, 22 nt, Artificial Sequence
  Synthetic
guagucccagcuacccgaaagg

SEQ ID NO: 319908 - RNA, 23 nt, Artificial Sequence
  Synthetic
uguagucccagcuacccgaaagg

SEQ ID NO: 319909 - RNA, 24 nt, Artificial Sequence
  Synthetic
cuguagucccagcuacccgaaagg

SEQ ID NO: 319910 - RNA, 18 nt, Artificial Sequence
  Synthetic
auuaggcacuccgaaagg

SEQ ID NO: 319911 - RNA, 19 nt, Artificial Sequence
  Synthetic
aauuaggcacuccgaaagg

SEQ ID NO: 319912 - RNA, 20 nt, Artificial Sequence
  Synthetic
gaauuaggcacuccgaaagg

SEQ ID NO: 319913 - RNA, 21 nt, Artificial Sequence
  Synthetic
cgaauuaggcacuccgaaagg

SEQ ID NO: 319914 - RNA, 22 nt, Artificial Sequence
  Synthetic
acgaauuaggcacuccgaaagg

SEQ ID NO: 319915 - RNA, 23 nt, Artificial Sequence
  Synthetic
cacgaauuaggcacuccgaaagg

SEQ ID NO: 319916 - RNA, 24 nt, Artificial Sequence
  Synthetic
acacgaauuaggcacuccgaaagg

SEQ ID NO: 319917 - RNA, 18 nt, Artificial Sequence
  Synthetic
ggucgaggaaaggaaagg

SEQ ID NO: 319918 - RNA, 19 nt, Artificial Sequence
  Synthetic
uggucgaggaaaggaaagg

SEQ ID NO: 319919 - RNA, 20 nt, Artificial Sequence
  Synthetic
cuggucgaggaaaggaaagg

SEQ ID NO: 319920 - RNA, 21 nt, Artificial Sequence
  Synthetic
acuggucgaggaaaggaaagg

SEQ ID NO: 319921 - RNA, 22 nt, Artificial Sequence
  Synthetic
aacuggucgaggaaaggaaagg

SEQ ID NO: 319922 - RNA, 23 nt, Artificial Sequence
  Synthetic
gaacuggucgaggaaaggaaagg

SEQ ID NO: 319923 - RNA, 24 nt, Artificial Sequence
  Synthetic
agaacuggucgaggaaaggaaagg

SEQ ID NO: 319924 - RNA, 18 nt, Artificial Sequence
  Synthetic
agaaggggaaaggaaagg

SEQ ID NO: 319925 - RNA, 19 nt, Artificial Sequence
  Synthetic
uagaaggggaaaggaaagg

SEQ ID NO: 319926 - RNA, 20 nt, Artificial Sequence
  Synthetic
auagaaggggaaaggaaagg

SEQ ID NO: 319927 - RNA, 21 nt, Artificial Sequence
  Synthetic
aauagaaggggaaaggaaagg

SEQ ID NO: 319928 - RNA, 22 nt, Artificial Sequence
  Synthetic
uaauagaaggggaaaggaaagg

SEQ ID NO: 319929 - RNA, 23 nt, Artificial Sequence
  Synthetic
cuaauagaaggggaaaggaaagg

SEQ ID NO: 319930 - RNA, 24 nt, Artificial Sequence
  Synthetic
acuaauagaaggggaaaggaaagg

SEQ ID NO: 319931 - RNA, 18 nt, Artificial Sequence
  Synthetic
aaagaaaggaaggaaagg

SEQ ID NO: 319932 - RNA, 19 nt, Artificial Sequence
  Synthetic
gaaagaaaggaaggaaagg

SEQ ID NO: 319933 - RNA, 20 nt, Artificial Sequence
  Synthetic
ggaaagaaaggaaggaaagg

SEQ ID NO: 319934 - RNA, 21 nt, Artificial Sequence
  Synthetic
aggaaagaaaggaaggaaagg

SEQ ID NO: 319935 - RNA, 22 nt, Artificial Sequence
  Synthetic
aaggaaagaaaggaaggaaagg

SEQ ID NO: 319936 - RNA, 23 nt, Artificial Sequence
  Synthetic
aaaggaaagaaaggaaggaaagg

SEQ ID NO: 319937 - RNA, 24 nt, Artificial Sequence
  Synthetic
aaaaggaaagaaaggaaggaaagg

SEQ ID NO: 319938 - RNA, 18 nt, Artificial Sequence
  Synthetic
cugacccuuaaggaaagg

SEQ ID NO: 319939 - RNA, 19 nt, Artificial Sequence
  Synthetic
ucugacccuuaaggaaagg

SEQ ID NO: 319940 - RNA, 20 nt, Artificial Sequence
  Synthetic
aucugacccuuaaggaaagg

SEQ ID NO: 319941 - RNA, 21 nt, Artificial Sequence
  Synthetic
aaucugacccuuaaggaaagg

SEQ ID NO: 319942 - RNA, 22 nt, Artificial Sequence
  Synthetic
aaaucugacccuuaaggaaagg

SEQ ID NO: 319943 - RNA, 23 nt, Artificial Sequence
  Synthetic
uaaaucugacccuuaaggaaagg

SEQ ID NO: 319944 - RNA, 24 nt, Artificial Sequence
  Synthetic
cuaaaucugacccuuaaggaaagg

SEQ ID NO: 319945 - RNA, 18 nt, Artificial Sequence
  Synthetic
guaaaagaggaggaaagg

SEQ ID NO: 319946 - RNA, 19 nt, Artificial Sequence
  Synthetic
uguaaaagaggaggaaagg

SEQ ID NO: 319947 - RNA, 20 nt, Artificial Sequence
  Synthetic
uuguaaaagaggaggaaagg

SEQ ID NO: 319948 - RNA, 21 nt, Artificial Sequence
  Synthetic
auuguaaaagaggaggaaagg

SEQ ID NO: 319949 - RNA, 22 nt, Artificial Sequence
  Synthetic
cauuguaaaagaggaggaaagg

SEQ ID NO: 319950 - RNA, 23 nt, Artificial Sequence
  Synthetic
gcauuguaaaagaggaggaaagg

SEQ ID NO: 319951 - RNA, 24 nt, Artificial Sequence
  Synthetic
ggcauuguaaaagaggaggaaagg

SEQ ID NO: 319952 - RNA, 18 nt, Artificial Sequence
  Synthetic
agaaguacugaggaaagg

SEQ ID NO: 319953 - RNA, 19 nt, Artificial Sequence
  Synthetic
gagaaguacugaggaaagg

SEQ ID NO: 319954 - RNA, 20 nt, Artificial Sequence
  Synthetic
ggagaaguacugaggaaagg

SEQ ID NO: 319955 - RNA, 21 nt, Artificial Sequence
  Synthetic
aggagaaguacugaggaaagg

SEQ ID NO: 319956 - RNA, 22 nt, Artificial Sequence
  Synthetic
aaggagaaguacugaggaaagg

SEQ ID NO: 319957 - RNA, 23 nt, Artificial Sequence
  Synthetic
gaaggagaaguacugaggaaagg

SEQ ID NO: 319958 - RNA, 24 nt, Artificial Sequence
  Synthetic
ggaaggagaaguacugaggaaagg

SEQ ID NO: 319959 - RNA, 18 nt, Artificial Sequence
  Synthetic
aagaggagugaggaaagg

SEQ ID NO: 319960 - RNA, 19 nt, Artificial Sequence
  Synthetic
aaagaggagugaggaaagg

SEQ ID NO: 319961 - RNA, 20 nt, Artificial Sequence
  Synthetic
aaaagaggagugaggaaagg

SEQ ID NO: 319962 - RNA, 21 nt, Artificial Sequence
  Synthetic
caaaagaggagugaggaaagg

SEQ ID NO: 319963 - RNA, 22 nt, Artificial Sequence
  Synthetic
acaaaagaggagugaggaaagg

SEQ ID NO: 319964 - RNA, 23 nt, Artificial Sequence
  Synthetic
gacaaaagaggagugaggaaagg

SEQ ID NO: 319965 - RNA, 24 nt, Artificial Sequence
  Synthetic
ggacaaaagaggagugaggaaagg

SEQ ID NO: 319966 - RNA, 18 nt, Artificial Sequence
  Synthetic
auuuggauuuaggaaagg

SEQ ID NO: 319967 - RNA, 19 nt, Artificial Sequence
  Synthetic
uauuuggauuuaggaaagg

SEQ ID NO: 319968 - RNA, 20 nt, Artificial Sequence
  Synthetic
uuauuuggauuuaggaaagg

SEQ ID NO: 319969 - RNA, 21 nt, Artificial Sequence
  Synthetic
uuuauuuggauuuaggaaagg

SEQ ID NO: 319970 - RNA, 22 nt, Artificial Sequence
  Synthetic
uuuuauuuggauuuaggaaagg

SEQ ID NO: 319971 - RNA, 23 nt, Artificial Sequence
  Synthetic
guuuuauuuggauuuaggaaagg

SEQ ID NO: 319972 - RNA, 24 nt, Artificial Sequence
  Synthetic
uguuuuauuuggauuuaggaaagg

SEQ ID NO: 319973 - RNA, 18 nt, Artificial Sequence
  Synthetic
ggaagcaggagggaaagg

SEQ ID NO: 319974 - RNA, 19 nt, Artificial Sequence
  Synthetic
cggaagcaggagggaaagg

SEQ ID NO: 319975 - RNA, 20 nt, Artificial Sequence
  Synthetic
ccggaagcaggagggaaagg

SEQ ID NO: 319976 - RNA, 21 nt, Artificial Sequence
  Synthetic
cccggaagcaggagggaaagg

SEQ ID NO: 319977 - RNA, 22 nt, Artificial Sequence
  Synthetic
acccggaagcaggagggaaagg

SEQ ID NO: 319978 - RNA, 23 nt, Artificial Sequence
  Synthetic
gacccggaagcaggagggaaagg

SEQ ID NO: 319979 - RNA, 24 nt, Artificial Sequence
  Synthetic
ugacccggaagcaggagggaaagg

SEQ ID NO: 319980 - RNA, 18 nt, Artificial Sequence
  Synthetic
uuucaaaucacugaaagg

SEQ ID NO: 319981 - RNA, 19 nt, Artificial Sequence
  Synthetic
guuucaaaucacugaaagg

SEQ ID NO: 319982 - RNA, 20 nt, Artificial Sequence
  Synthetic
aguuucaaaucacugaaagg

SEQ ID NO: 319983 - RNA, 21 nt, Artificial Sequence
  Synthetic
gaguuucaaaucacugaaagg

SEQ ID NO: 319984 - RNA, 22 nt, Artificial Sequence
  Synthetic
ggaguuucaaaucacugaaagg

SEQ ID NO: 319985 - RNA, 23 nt, Artificial Sequence
  Synthetic
uggaguuucaaaucacugaaagg

SEQ ID NO: 319986 - RNA, 24 nt, Artificial Sequence
  Synthetic
cuggaguuucaaaucacugaaagg

SEQ ID NO: 319987 - RNA, 18 nt, Artificial Sequence
  Synthetic
acuucaucucgugaaagg

SEQ ID NO: 319988 - RNA, 19 nt, Artificial Sequence
  Synthetic
uacuucaucucgugaaagg

SEQ ID NO: 319989 - RNA, 20 nt, Artificial Sequence
  Synthetic
uuacuucaucucgugaaagg

SEQ ID NO: 319990 - RNA, 21 nt, Artificial Sequence
  Synthetic
auuacuucaucucgugaaagg

SEQ ID NO: 319991 - RNA, 22 nt, Artificial Sequence
  Synthetic
aauuacuucaucucgugaaagg

SEQ ID NO: 319992 - RNA, 23 nt, Artificial Sequence
  Synthetic
aaauuacuucaucucgugaaagg

SEQ ID NO: 319993 - RNA, 24 nt, Artificial Sequence
  Synthetic
gaaauuacuucaucucgugaaagg

SEQ ID NO: 319994 - RNA, 18 nt, Artificial Sequence
  Synthetic
ugcauacuaauugaaagg

SEQ ID NO: 319995 - RNA, 19 nt, Artificial Sequence
  Synthetic
augcauacuaauugaaagg

SEQ ID NO: 319996 - RNA, 20 nt, Artificial Sequence
  Synthetic
aaugcauacuaauugaaagg

SEQ ID NO: 319997 - RNA, 21 nt, Artificial Sequence
  Synthetic
aaaugcauacuaauugaaagg

SEQ ID NO: 319998 - RNA, 22 nt, Artificial Sequence
  Synthetic
gaaaugcauacuaauugaaagg

SEQ ID NO: 319999 - RNA, 23 nt, Artificial Sequence
  Synthetic
agaaaugcauacuaauugaaagg

SEQ ID NO: 320000 - RNA, 24 nt, Artificial Sequence
  Synthetic
aagaaaugcauacuaauugaaagg

SEQ ID NO: 320001 - RNA, 18 nt, Artificial Sequence
  Synthetic
guaguaacuguugaaagg

SEQ ID NO: 320002 - RNA, 19 nt, Artificial Sequence
  Synthetic
aguaguaacuguugaaagg

SEQ ID NO: 320003 - RNA, 20 nt, Artificial Sequence
  Synthetic
gaguaguaacuguugaaagg

SEQ ID NO: 320004 - RNA, 21 nt, Artificial Sequence
  Synthetic
agaguaguaacuguugaaagg

SEQ ID NO: 320005 - RNA, 22 nt, Artificial Sequence
  Synthetic
cagaguaguaacuguugaaagg

SEQ ID NO: 320006 - RNA, 23 nt, Artificial Sequence
  Synthetic
ucagaguaguaacuguugaaagg

SEQ ID NO: 320007 - RNA, 24 nt, Artificial Sequence
  Synthetic
aucagaguaguaacuguugaaagg

SEQ ID NO: 320008 - RNA, 18 nt, Artificial Sequence
  Synthetic
uuuucuuguuuugaaagg

SEQ ID NO: 320009 - RNA, 19 nt, Artificial Sequence
  Synthetic
uuuuucuuguuuugaaagg

SEQ ID NO: 320010 - RNA, 20 nt, Artificial Sequence
  Synthetic
guuuuucuuguuuugaaagg

SEQ ID NO: 320011 - RNA, 21 nt, Artificial Sequence
  Synthetic
cguuuuucuuguuuugaaagg

SEQ ID NO: 320012 - RNA, 22 nt, Artificial Sequence
  Synthetic
gcguuuuucuuguuuugaaagg

SEQ ID NO: 320013 - RNA, 23 nt, Artificial Sequence
  Synthetic
ggcguuuuucuuguuuugaaagg

SEQ ID NO: 320014 - RNA, 24 nt, Artificial Sequence
  Synthetic
uggcguuuuucuuguuuugaaagg

SEQ ID NO: 320015 - RNA, 18 nt, Artificial Sequence
  Synthetic
aagaaauaucgauaaagg

SEQ ID NO: 320016 - RNA, 19 nt, Artificial Sequence
  Synthetic
uaagaaauaucgauaaagg

SEQ ID NO: 320017 - RNA, 20 nt, Artificial Sequence
  Synthetic
uuaagaaauaucgauaaagg

SEQ ID NO: 320018 - RNA, 21 nt, Artificial Sequence
  Synthetic
uuuaagaaauaucgauaaagg

SEQ ID NO: 320019 - RNA, 22 nt, Artificial Sequence
  Synthetic
uuuuaagaaauaucgauaaagg

SEQ ID NO: 320020 - RNA, 23 nt, Artificial Sequence
  Synthetic
auuuuaagaaauaucgauaaagg

SEQ ID NO: 320021 - RNA, 24 nt, Artificial Sequence
  Synthetic
cauuuuaagaaauaucgauaaagg

SEQ ID NO: 320022 - RNA, 18 nt, Artificial Sequence
  Synthetic
gggcagaaacuauaaagg

SEQ ID NO: 320023 - RNA, 19 nt, Artificial Sequence
  Synthetic
ugggcagaaacuauaaagg

SEQ ID NO: 320024 - RNA, 20 nt, Artificial Sequence
  Synthetic
augggcagaaacuauaaagg

SEQ ID NO: 320025 - RNA, 21 nt, Artificial Sequence
  Synthetic
aaugggcagaaacuauaaagg

SEQ ID NO: 320026 - RNA, 22 nt, Artificial Sequence
  Synthetic
caaugggcagaaacuauaaagg

SEQ ID NO: 320027 - RNA, 23 nt, Artificial Sequence
  Synthetic
acaaugggcagaaacuauaaagg

SEQ ID NO: 320028 - RNA, 24 nt, Artificial Sequence
  Synthetic
aacaaugggcagaaacuauaaagg

SEQ ID NO: 320029 - RNA, 18 nt, Artificial Sequence
  Synthetic
uuuuuuuuuguauaaagg

SEQ ID NO: 320030 - RNA, 19 nt, Artificial Sequence
  Synthetic
uuuuuuuuuuguauaaagg

SEQ ID NO: 320031 - RNA, 20 nt, Artificial Sequence
  Synthetic
auuuuuuuuuuguauaaagg

SEQ ID NO: 320032 - RNA, 21 nt, Artificial Sequence
  Synthetic
aauuuuuuuuuuguauaaagg

SEQ ID NO: 320033 - RNA, 22 nt, Artificial Sequence
  Synthetic
caauuuuuuuuuuguauaaagg

SEQ ID NO: 320034 - RNA, 23 nt, Artificial Sequence
  Synthetic
ucaauuuuuuuuuuguauaaagg

SEQ ID NO: 320035 - RNA, 24 nt, Artificial Sequence
  Synthetic
cucaauuuuuuuuuuguauaaagg

SEQ ID NO: 320036 - RNA, 18 nt, Artificial Sequence
  Synthetic
aauaugaauaacuaaagg

SEQ ID NO: 320037 - RNA, 19 nt, Artificial Sequence
  Synthetic
aaauaugaauaacuaaagg

SEQ ID NO: 320038 - RNA, 20 nt, Artificial Sequence
  Synthetic
aaaauaugaauaacuaaagg

SEQ ID NO: 320039 - RNA, 21 nt, Artificial Sequence
  Synthetic
uaaaauaugaauaacuaaagg

SEQ ID NO: 320040 - RNA, 22 nt, Artificial Sequence
  Synthetic
cuaaaauaugaauaacuaaagg

SEQ ID NO: 320041 - RNA, 23 nt, Artificial Sequence
  Synthetic
acuaaaauaugaauaacuaaagg

SEQ ID NO: 320042 - RNA, 24 nt, Artificial Sequence
  Synthetic
gacuaaaauaugaauaacuaaagg

SEQ ID NO: 320043 - RNA, 18 nt, Artificial Sequence
  Synthetic
cauaagugauacuaaagg

SEQ ID NO: 320044 - RNA, 19 nt, Artificial Sequence
  Synthetic
gcauaagugauacuaaagg

SEQ ID NO: 320045 - RNA, 20 nt, Artificial Sequence
  Synthetic
agcauaagugauacuaaagg

SEQ ID NO: 320046 - RNA, 21 nt, Artificial Sequence
  Synthetic
aagcauaagugauacuaaagg

SEQ ID NO: 320047 - RNA, 22 nt, Artificial Sequence
  Synthetic
gaagcauaagugauacuaaagg

SEQ ID NO: 320048 - RNA, 23 nt, Artificial Sequence
  Synthetic
agaagcauaagugauacuaaagg

SEQ ID NO: 320049 - RNA, 24 nt, Artificial Sequence
  Synthetic
cagaagcauaagugauacuaaagg

SEQ ID NO: 320050 - RNA, 18 nt, Artificial Sequence
  Synthetic
uguuuucguuacuaaagg

SEQ ID NO: 320051 - RNA, 19 nt, Artificial Sequence
  Synthetic
uuguuuucguuacuaaagg

SEQ ID NO: 320052 - RNA, 20 nt, Artificial Sequence
  Synthetic
cuuguuuucguuacuaaagg

SEQ ID NO: 320053 - RNA, 21 nt, Artificial Sequence
  Synthetic
ucuuguuuucguuacuaaagg

SEQ ID NO: 320054 - RNA, 22 nt, Artificial Sequence
  Synthetic
cucuuguuuucguuacuaaagg

SEQ ID NO: 320055 - RNA, 23 nt, Artificial Sequence
  Synthetic
gcucuuguuuucguuacuaaagg

SEQ ID NO: 320056 - RNA, 24 nt, Artificial Sequence
  Synthetic
ggcucuuguuuucguuacuaaagg

SEQ ID NO: 320057 - RNA, 18 nt, Artificial Sequence
  Synthetic
ccaguuagagucuaaagg

SEQ ID NO: 320058 - RNA, 19 nt, Artificial Sequence
  Synthetic
uccaguuagagucuaaagg

SEQ ID NO: 320059 - RNA, 20 nt, Artificial Sequence
  Synthetic
cuccaguuagagucuaaagg

SEQ ID NO: 320060 - RNA, 21 nt, Artificial Sequence
  Synthetic
ucuccaguuagagucuaaagg

SEQ ID NO: 320061 - RNA, 22 nt, Artificial Sequence
  Synthetic
uucuccaguuagagucuaaagg

SEQ ID NO: 320062 - RNA, 23 nt, Artificial Sequence
  Synthetic
cuucuccaguuagagucuaaagg

SEQ ID NO: 320063 - RNA, 24 nt, Artificial Sequence
  Synthetic
ucuucuccaguuagagucuaaagg

SEQ ID NO: 320064 - RNA, 18 nt, Artificial Sequence
  Synthetic
uuucugcauuucuaaagg

SEQ ID NO: 320065 - RNA, 19 nt, Artificial Sequence
  Synthetic
auuucugcauuucuaaagg

SEQ ID NO: 320066 - RNA, 20 nt, Artificial Sequence
  Synthetic
cauuucugcauuucuaaagg

SEQ ID NO: 320067 - RNA, 21 nt, Artificial Sequence
  Synthetic
ccauuucugcauuucuaaagg

SEQ ID NO: 320068 - RNA, 22 nt, Artificial Sequence
  Synthetic
gccauuucugcauuucuaaagg

SEQ ID NO: 320069 - RNA, 23 nt, Artificial Sequence
  Synthetic
agccauuucugcauuucuaaagg

SEQ ID NO: 320070 - RNA, 24 nt, Artificial Sequence
  Synthetic
uagccauuucugcauuucuaaagg

SEQ ID NO: 320071 - RNA, 18 nt, Artificial Sequence
  Synthetic
augguagagggguaaagg

SEQ ID NO: 320072 - RNA, 19 nt, Artificial Sequence
  Synthetic
gaugguagagggguaaagg

SEQ ID NO: 320073 - RNA, 20 nt, Artificial Sequence
  Synthetic
agaugguagagggguaaagg

SEQ ID NO: 320074 - RNA, 21 nt, Artificial Sequence
  Synthetic
uagaugguagagggguaaagg

SEQ ID NO: 320075 - RNA, 22 nt, Artificial Sequence
  Synthetic
uuagaugguagagggguaaagg

SEQ ID NO: 320076 - RNA, 23 nt, Artificial Sequence
  Synthetic
guuagaugguagagggguaaagg

SEQ ID NO: 320077 - RNA, 24 nt, Artificial Sequence
  Synthetic
aguuagaugguagagggguaaagg

SEQ ID NO: 320078 - RNA, 18 nt, Artificial Sequence
  Synthetic
cguaaauguacuuaaagg

SEQ ID NO: 320079 - RNA, 19 nt, Artificial Sequence
  Synthetic
ucguaaauguacuuaaagg

SEQ ID NO: 320080 - RNA, 20 nt, Artificial Sequence
  Synthetic
uucguaaauguacuuaaagg

SEQ ID NO: 320081 - RNA, 21 nt, Artificial Sequence
  Synthetic
auucguaaauguacuuaaagg

SEQ ID NO: 320082 - RNA, 22 nt, Artificial Sequence
  Synthetic
cauucguaaauguacuuaaagg

SEQ ID NO: 320083 - RNA, 23 nt, Artificial Sequence
  Synthetic
gcauucguaaauguacuuaaagg

SEQ ID NO: 320084 - RNA, 24 nt, Artificial Sequence
  Synthetic
ggcauucguaaauguacuuaaagg

SEQ ID NO: 320085 - RNA, 18 nt, Artificial Sequence
  Synthetic
auaguuguugcuuaaagg

SEQ ID NO: 320086 - RNA, 19 nt, Artificial Sequence
  Synthetic
uauaguuguugcuuaaagg

SEQ ID NO: 320087 - RNA, 20 nt, Artificial Sequence
  Synthetic
uuauaguuguugcuuaaagg

SEQ ID NO: 320088 - RNA, 21 nt, Artificial Sequence
  Synthetic
auuauaguuguugcuuaaagg

SEQ ID NO: 320089 - RNA, 22 nt, Artificial Sequence
  Synthetic
uauuauaguuguugcuuaaagg

SEQ ID NO: 320090 - RNA, 23 nt, Artificial Sequence
  Synthetic
auauuauaguuguugcuuaaagg

SEQ ID NO: 320091 - RNA, 24 nt, Artificial Sequence
  Synthetic
aauauuauaguuguugcuuaaagg

SEQ ID NO: 320092 - RNA, 18 nt, Artificial Sequence
  Synthetic
ugggaugggucuuaaagg

SEQ ID NO: 320093 - RNA, 19 nt, Artificial Sequence
  Synthetic
cugggaugggucuuaaagg

SEQ ID NO: 320094 - RNA, 20 nt, Artificial Sequence
  Synthetic
ucugggaugggucuuaaagg

SEQ ID NO: 320095 - RNA, 21 nt, Artificial Sequence
  Synthetic
cucugggaugggucuuaaagg

SEQ ID NO: 320096 - RNA, 22 nt, Artificial Sequence
  Synthetic
ucucugggaugggucuuaaagg

SEQ ID NO: 320097 - RNA, 23 nt, Artificial Sequence
  Synthetic
aucucugggaugggucuuaaagg

SEQ ID NO: 320098 - RNA, 24 nt, Artificial Sequence
  Synthetic
gaucucugggaugggucuuaaagg

SEQ ID NO: 320099 - RNA, 18 nt, Artificial Sequence
  Synthetic
cuugaacagauuuaaagg

SEQ ID NO: 320100 - RNA, 19 nt, Artificial Sequence
  Synthetic
acuugaacagauuuaaagg

SEQ ID NO: 320101 - RNA, 20 nt, Artificial Sequence
  Synthetic
uacuugaacagauuuaaagg

SEQ ID NO: 320102 - RNA, 21 nt, Artificial Sequence
  Synthetic
cuacuugaacagauuuaaagg

SEQ ID NO: 320103 - RNA, 22 nt, Artificial Sequence
  Synthetic
ccuacuugaacagauuuaaagg

SEQ ID NO: 320104 - RNA, 23 nt, Artificial Sequence
  Synthetic
accuacuugaacagauuuaaagg

SEQ ID NO: 320105 - RNA, 24 nt, Artificial Sequence
  Synthetic
aaccuacuugaacagauuuaaagg

SEQ ID NO: 320106 - RNA, 18 nt, Artificial Sequence
  Synthetic
gacacugaaguuuaaagg

SEQ ID NO: 320107 - RNA, 19 nt, Artificial Sequence
  Synthetic
ggacacugaaguuuaaagg

SEQ ID NO: 320108 - RNA, 20 nt, Artificial Sequence
  Synthetic
aggacacugaaguuuaaagg

SEQ ID NO: 320109 - RNA, 21 nt, Artificial Sequence
  Synthetic
aaggacacugaaguuuaaagg

SEQ ID NO: 320110 - RNA, 22 nt, Artificial Sequence
  Synthetic
caaggacacugaaguuuaaagg

SEQ ID NO: 320111 - RNA, 23 nt, Artificial Sequence
  Synthetic
ccaaggacacugaaguuuaaagg

SEQ ID NO: 320112 - RNA, 24 nt, Artificial Sequence
  Synthetic
accaaggacacugaaguuuaaagg

SEQ ID NO: 320113 - RNA, 18 nt, Artificial Sequence
  Synthetic
uguaagcaauuuuaaagg

SEQ ID NO: 320114 - RNA, 19 nt, Artificial Sequence
  Synthetic
uuguaagcaauuuuaaagg

SEQ ID NO: 320115 - RNA, 20 nt, Artificial Sequence
  Synthetic
cuuguaagcaauuuuaaagg

SEQ ID NO: 320116 - RNA, 21 nt, Artificial Sequence
  Synthetic
acuuguaagcaauuuuaaagg

SEQ ID NO: 320117 - RNA, 22 nt, Artificial Sequence
  Synthetic
uacuuguaagcaauuuuaaagg

SEQ ID NO: 320118 - RNA, 23 nt, Artificial Sequence
  Synthetic
guacuuguaagcaauuuuaaagg

SEQ ID NO: 320119 - RNA, 24 nt, Artificial Sequence
  Synthetic
uguacuuguaagcaauuuuaaagg

SEQ ID NO: 320120 - RNA, 18 nt, Artificial Sequence
  Synthetic
auaaaucuuuuuuaaagg

SEQ ID NO: 320121 - RNA, 19 nt, Artificial Sequence
  Synthetic
uauaaaucuuuuuuaaagg

SEQ ID NO: 320122 - RNA, 20 nt, Artificial Sequence
  Synthetic
auauaaaucuuuuuuaaagg

SEQ ID NO: 320123 - RNA, 21 nt, Artificial Sequence
  Synthetic
aauauaaaucuuuuuuaaagg

SEQ ID NO: 320124 - RNA, 22 nt, Artificial Sequence
  Synthetic
aaauauaaaucuuuuuuaaagg

SEQ ID NO: 320125 - RNA, 23 nt, Artificial Sequence
  Synthetic
gaaauauaaaucuuuuuuaaagg

SEQ ID NO: 320126 - RNA, 24 nt, Artificial Sequence
  Synthetic
agaaauauaaaucuuuuuuaaagg

SEQ ID NO: 320127 - RNA, 18 nt, Artificial Sequence
  Synthetic
aacaagacaaaaacaagg

SEQ ID NO: 320128 - RNA, 19 nt, Artificial Sequence
  Synthetic
aaacaagacaaaaacaagg

SEQ ID NO: 320129 - RNA, 20 nt, Artificial Sequence
  Synthetic
uaaacaagacaaaaacaagg

SEQ ID NO: 320130 - RNA, 21 nt, Artificial Sequence
  Synthetic
guaaacaagacaaaaacaagg

SEQ ID NO: 320131 - RNA, 22 nt, Artificial Sequence
  Synthetic
uguaaacaagacaaaaacaagg

SEQ ID NO: 320132 - RNA, 23 nt, Artificial Sequence
  Synthetic
auguaaacaagacaaaaacaagg

SEQ ID NO: 320133 - RNA, 24 nt, Artificial Sequence
  Synthetic
gauguaaacaagacaaaaacaagg

SEQ ID NO: 320134 - RNA, 18 nt, Artificial Sequence
  Synthetic
auaaggagagaaacaagg

SEQ ID NO: 320135 - RNA, 19 nt, Artificial Sequence
  Synthetic
aauaaggagagaaacaagg

SEQ ID NO: 320136 - RNA, 20 nt, Artificial Sequence
  Synthetic
aaauaaggagagaaacaagg

SEQ ID NO: 320137 - RNA, 21 nt, Artificial Sequence
  Synthetic
aaaauaaggagagaaacaagg

SEQ ID NO: 320138 - RNA, 22 nt, Artificial Sequence
  Synthetic
uaaaauaaggagagaaacaagg

SEQ ID NO: 320139 - RNA, 23 nt, Artificial Sequence
  Synthetic
auaaaauaaggagagaaacaagg

SEQ ID NO: 320140 - RNA, 24 nt, Artificial Sequence
  Synthetic
aauaaaauaaggagagaaacaagg

SEQ ID NO: 320141 - RNA, 18 nt, Artificial Sequence
  Synthetic
guacuaaguuaaacaagg

SEQ ID NO: 320142 - RNA, 19 nt, Artificial Sequence
  Synthetic
aguacuaaguuaaacaagg

SEQ ID NO: 320143 - RNA, 20 nt, Artificial Sequence
  Synthetic
caguacuaaguuaaacaagg

SEQ ID NO: 320144 - RNA, 21 nt, Artificial Sequence
  Synthetic
ccaguacuaaguuaaacaagg

SEQ ID NO: 320145 - RNA, 22 nt, Artificial Sequence
  Synthetic
cccaguacuaaguuaaacaagg

SEQ ID NO: 320146 - RNA, 23 nt, Artificial Sequence
  Synthetic
ucccaguacuaaguuaaacaagg

SEQ ID NO: 320147 - RNA, 24 nt, Artificial Sequence
  Synthetic
cucccaguacuaaguuaaacaagg

SEQ ID NO: 320148 - RNA, 18 nt, Artificial Sequence
  Synthetic
cauaaaaagagaacaagg

SEQ ID NO: 320149 - RNA, 19 nt, Artificial Sequence
  Synthetic
ucauaaaaagagaacaagg

SEQ ID NO: 320150 - RNA, 20 nt, Artificial Sequence
  Synthetic
cucauaaaaagagaacaagg

SEQ ID NO: 320151 - RNA, 21 nt, Artificial Sequence
  Synthetic
ccucauaaaaagagaacaagg

SEQ ID NO: 320152 - RNA, 22 nt, Artificial Sequence
  Synthetic
cccucauaaaaagagaacaagg

SEQ ID NO: 320153 - RNA, 23 nt, Artificial Sequence
  Synthetic
ucccucauaaaaagagaacaagg

SEQ ID NO: 320154 - RNA, 24 nt, Artificial Sequence
  Synthetic
aucccucauaaaaagagaacaagg

SEQ ID NO: 320155 - RNA, 18 nt, Artificial Sequence
  Synthetic
gggagguaaggaacaagg

SEQ ID NO: 320156 - RNA, 19 nt, Artificial Sequence
  Synthetic
cgggagguaaggaacaagg

SEQ ID NO: 320157 - RNA, 20 nt, Artificial Sequence
  Synthetic
ucgggagguaaggaacaagg

SEQ ID NO: 320158 - RNA, 21 nt, Artificial Sequence
  Synthetic
uucgggagguaaggaacaagg

SEQ ID NO: 320159 - RNA, 22 nt, Artificial Sequence
  Synthetic
guucgggagguaaggaacaagg

SEQ ID NO: 320160 - RNA, 23 nt, Artificial Sequence
  Synthetic
uguucgggagguaaggaacaagg

SEQ ID NO: 320161 - RNA, 24 nt, Artificial Sequence
  Synthetic
guguucgggagguaaggaacaagg

SEQ ID NO: 320162 - RNA, 18 nt, Artificial Sequence
  Synthetic
auucugcugggaacaagg

SEQ ID NO: 320163 - RNA, 19 nt, Artificial Sequence
  Synthetic
uauucugcugggaacaagg

SEQ ID NO: 320164 - RNA, 20 nt, Artificial Sequence
  Synthetic
cuauucugcugggaacaagg

SEQ ID NO: 320165 - RNA, 21 nt, Artificial Sequence
  Synthetic
acuauucugcugggaacaagg

SEQ ID NO: 320166 - RNA, 22 nt, Artificial Sequence
  Synthetic
gacuauucugcugggaacaagg

SEQ ID NO: 320167 - RNA, 23 nt, Artificial Sequence
  Synthetic
ugacuauucugcugggaacaagg

SEQ ID NO: 320168 - RNA, 24 nt, Artificial Sequence
  Synthetic
uugacuauucugcugggaacaagg

SEQ ID NO: 320169 - RNA, 18 nt, Artificial Sequence
  Synthetic
agauuaacuggaacaagg

SEQ ID NO: 320170 - RNA, 19 nt, Artificial Sequence
  Synthetic
uagauuaacuggaacaagg

SEQ ID NO: 320171 - RNA, 20 nt, Artificial Sequence
  Synthetic
auagauuaacuggaacaagg

SEQ ID NO: 320172 - RNA, 21 nt, Artificial Sequence
  Synthetic
aauagauuaacuggaacaagg

SEQ ID NO: 320173 - RNA, 22 nt, Artificial Sequence
  Synthetic
gaauagauuaacuggaacaagg

SEQ ID NO: 320174 - RNA, 23 nt, Artificial Sequence
  Synthetic
ugaauagauuaacuggaacaagg

SEQ ID NO: 320175 - RNA, 24 nt, Artificial Sequence
  Synthetic
augaauagauuaacuggaacaagg

SEQ ID NO: 320176 - RNA, 18 nt, Artificial Sequence
  Synthetic
gcuguggggaacacaagg

SEQ ID NO: 320177 - RNA, 19 nt, Artificial Sequence
  Synthetic
ugcuguggggaacacaagg

SEQ ID NO: 320178 - RNA, 20 nt, Artificial Sequence
  Synthetic
gugcuguggggaacacaagg

SEQ ID NO: 320179 - RNA, 21 nt, Artificial Sequence
  Synthetic
ugugcuguggggaacacaagg

SEQ ID NO: 320180 - RNA, 22 nt, Artificial Sequence
  Synthetic
uugugcuguggggaacacaagg

SEQ ID NO: 320181 - RNA, 23 nt, Artificial Sequence
  Synthetic
auugugcuguggggaacacaagg

SEQ ID NO: 320182 - RNA, 24 nt, Artificial Sequence
  Synthetic
gauugugcuguggggaacacaagg

SEQ ID NO: 320183 - RNA, 18 nt, Artificial Sequence
  Synthetic
guuuuaauucacacaagg

SEQ ID NO: 320184 - RNA, 19 nt, Artificial Sequence
  Synthetic
cguuuuaauucacacaagg

SEQ ID NO: 320185 - RNA, 20 nt, Artificial Sequence
  Synthetic
ucguuuuaauucacacaagg

SEQ ID NO: 320186 - RNA, 21 nt, Artificial Sequence
  Synthetic
gucguuuuaauucacacaagg

SEQ ID NO: 320187 - RNA, 22 nt, Artificial Sequence
  Synthetic
ggucguuuuaauucacacaagg

SEQ ID NO: 320188 - RNA, 23 nt, Artificial Sequence
  Synthetic
aggucguuuuaauucacacaagg

SEQ ID NO: 320189 - RNA, 24 nt, Artificial Sequence
  Synthetic
uaggucguuuuaauucacacaagg

SEQ ID NO: 320190 - RNA, 18 nt, Artificial Sequence
  Synthetic
ggagauacacccacaagg

SEQ ID NO: 320191 - RNA, 19 nt, Artificial Sequence
  Synthetic
uggagauacacccacaagg

SEQ ID NO: 320192 - RNA, 20 nt, Artificial Sequence
  Synthetic
cuggagauacacccacaagg

SEQ ID NO: 320193 - RNA, 21 nt, Artificial Sequence
  Synthetic
ucuggagauacacccacaagg

SEQ ID NO: 320194 - RNA, 22 nt, Artificial Sequence
  Synthetic
cucuggagauacacccacaagg

SEQ ID NO: 320195 - RNA, 23 nt, Artificial Sequence
  Synthetic
ucucuggagauacacccacaagg

SEQ ID NO: 320196 - RNA, 24 nt, Artificial Sequence
  Synthetic
uucucuggagauacacccacaagg

SEQ ID NO: 320197 - RNA, 18 nt, Artificial Sequence
  Synthetic
gauaagaaggagacaagg

SEQ ID NO: 320198 - RNA, 19 nt, Artificial Sequence
  Synthetic
ggauaagaaggagacaagg

SEQ ID NO: 320199 - RNA, 20 nt, Artificial Sequence
  Synthetic
uggauaagaaggagacaagg

SEQ ID NO: 320200 - RNA, 21 nt, Artificial Sequence
  Synthetic
guggauaagaaggagacaagg

SEQ ID NO: 320201 - RNA, 22 nt, Artificial Sequence
  Synthetic
aguggauaagaaggagacaagg

SEQ ID NO: 320202 - RNA, 23 nt, Artificial Sequence
  Synthetic
gaguggauaagaaggagacaagg

SEQ ID NO: 320203 - RNA, 24 nt, Artificial Sequence
  Synthetic
agaguggauaagaaggagacaagg

SEQ ID NO: 320204 - RNA, 18 nt, Artificial Sequence
  Synthetic
guuuuuugaaggacaagg

SEQ ID NO: 320205 - RNA, 19 nt, Artificial Sequence
  Synthetic
uguuuuuugaaggacaagg

SEQ ID NO: 320206 - RNA, 20 nt, Artificial Sequence
  Synthetic
cuguuuuuugaaggacaagg

SEQ ID NO: 320207 - RNA, 21 nt, Artificial Sequence
  Synthetic
ccuguuuuuugaaggacaagg

SEQ ID NO: 320208 - RNA, 22 nt, Artificial Sequence
  Synthetic
cccuguuuuuugaaggacaagg

SEQ ID NO: 320209 - RNA, 23 nt, Artificial Sequence
  Synthetic
acccuguuuuuugaaggacaagg

SEQ ID NO: 320210 - RNA, 24 nt, Artificial Sequence
  Synthetic
gacccuguuuuuugaaggacaagg

SEQ ID NO: 320211 - RNA, 18 nt, Artificial Sequence
  Synthetic
uucgguauuuggacaagg

SEQ ID NO: 320212 - RNA, 19 nt, Artificial Sequence
  Synthetic
uuucgguauuuggacaagg

SEQ ID NO: 320213 - RNA, 20 nt, Artificial Sequence
  Synthetic
auuucgguauuuggacaagg

SEQ ID NO: 320214 - RNA, 21 nt, Artificial Sequence
  Synthetic
uauuucgguauuuggacaagg

SEQ ID NO: 320215 - RNA, 22 nt, Artificial Sequence
  Synthetic
guauuucgguauuuggacaagg

SEQ ID NO: 320216 - RNA, 23 nt, Artificial Sequence
  Synthetic
uguauuucgguauuuggacaagg

SEQ ID NO: 320217 - RNA, 24 nt, Artificial Sequence
  Synthetic
auguauuucgguauuuggacaagg

SEQ ID NO: 320218 - RNA, 18 nt, Artificial Sequence
  Synthetic
acacccagcaauacaagg

SEQ ID NO: 320219 - RNA, 19 nt, Artificial Sequence
  Synthetic
gacacccagcaauacaagg

SEQ ID NO: 320220 - RNA, 20 nt, Artificial Sequence
  Synthetic
ugacacccagcaauacaagg

SEQ ID NO: 320221 - RNA, 21 nt, Artificial Sequence
  Synthetic
augacacccagcaauacaagg

SEQ ID NO: 320222 - RNA, 22 nt, Artificial Sequence
  Synthetic
caugacacccagcaauacaagg

SEQ ID NO: 320223 - RNA, 23 nt, Artificial Sequence
  Synthetic
acaugacacccagcaauacaagg

SEQ ID NO: 320224 - RNA, 24 nt, Artificial Sequence
  Synthetic
aacaugacacccagcaauacaagg

SEQ ID NO: 320225 - RNA, 18 nt, Artificial Sequence
  Synthetic
ucuaccagagguacaagg

SEQ ID NO: 320226 - RNA, 19 nt, Artificial Sequence
  Synthetic
uucuaccagagguacaagg

SEQ ID NO: 320227 - RNA, 20 nt, Artificial Sequence
  Synthetic
auucuaccagagguacaagg

SEQ ID NO: 320228 - RNA, 21 nt, Artificial Sequence
  Synthetic
aauucuaccagagguacaagg

SEQ ID NO: 320229 - RNA, 22 nt, Artificial Sequence
  Synthetic
gaauucuaccagagguacaagg

SEQ ID NO: 320230 - RNA, 23 nt, Artificial Sequence
  Synthetic
cgaauucuaccagagguacaagg

SEQ ID NO: 320231 - RNA, 24 nt, Artificial Sequence
  Synthetic
ccgaauucuaccagagguacaagg

SEQ ID NO: 320232 - RNA, 18 nt, Artificial Sequence
  Synthetic
uuuaccucuauuacaagg

SEQ ID NO: 320233 - RNA, 19 nt, Artificial Sequence
  Synthetic
uuuuaccucuauuacaagg

SEQ ID NO: 320234 - RNA, 20 nt, Artificial Sequence
  Synthetic
guuuuaccucuauuacaagg

SEQ ID NO: 320235 - RNA, 21 nt, Artificial Sequence
  Synthetic
uguuuuaccucuauuacaagg

SEQ ID NO: 320236 - RNA, 22 nt, Artificial Sequence
  Synthetic
uuguuuuaccucuauuacaagg

SEQ ID NO: 320237 - RNA, 23 nt, Artificial Sequence
  Synthetic
auuguuuuaccucuauuacaagg

SEQ ID NO: 320238 - RNA, 24 nt, Artificial Sequence
  Synthetic
aauuguuuuaccucuauuacaagg

SEQ ID NO: 320239 - RNA, 18 nt, Artificial Sequence
  Synthetic
uaaucggauucaccaagg

SEQ ID NO: 320240 - RNA, 19 nt, Artificial Sequence
  Synthetic
auaaucggauucaccaagg

SEQ ID NO: 320241 - RNA, 20 nt, Artificial Sequence
  Synthetic
aauaaucggauucaccaagg

SEQ ID NO: 320242 - RNA, 21 nt, Artificial Sequence
  Synthetic
uaauaaucggauucaccaagg

SEQ ID NO: 320243 - RNA, 22 nt, Artificial Sequence
  Synthetic
auaauaaucggauucaccaagg

SEQ ID NO: 320244 - RNA, 23 nt, Artificial Sequence
  Synthetic
cauaauaaucggauucaccaagg

SEQ ID NO: 320245 - RNA, 24 nt, Artificial Sequence
  Synthetic
acauaauaaucggauucaccaagg

SEQ ID NO: 320246 - RNA, 18 nt, Artificial Sequence
  Synthetic
cuccaaauaguaccaagg

SEQ ID NO: 320247 - RNA, 19 nt, Artificial Sequence
  Synthetic
ccuccaaauaguaccaagg

SEQ ID NO: 320248 - RNA, 20 nt, Artificial Sequence
  Synthetic
uccuccaaauaguaccaagg

SEQ ID NO: 320249 - RNA, 21 nt, Artificial Sequence
  Synthetic
cuccuccaaauaguaccaagg

SEQ ID NO: 320250 - RNA, 22 nt, Artificial Sequence
  Synthetic
acuccuccaaauaguaccaagg

SEQ ID NO: 320251 - RNA, 23 nt, Artificial Sequence
  Synthetic
aacuccuccaaauaguaccaagg

SEQ ID NO: 320252 - RNA, 24 nt, Artificial Sequence
  Synthetic
gaacuccuccaaauaguaccaagg

SEQ ID NO: 320253 - RNA, 18 nt, Artificial Sequence
  Synthetic
uaacuuugcaacccaagg

SEQ ID NO: 320254 - RNA, 19 nt, Artificial Sequence
  Synthetic
cuaacuuugcaacccaagg

SEQ ID NO: 320255 - RNA, 20 nt, Artificial Sequence
  Synthetic
acuaacuuugcaacccaagg

SEQ ID NO: 320256 - RNA, 21 nt, Artificial Sequence
  Synthetic
uacuaacuuugcaacccaagg

SEQ ID NO: 320257 - RNA, 22 nt, Artificial Sequence
  Synthetic
uuacuaacuuugcaacccaagg

SEQ ID NO: 320258 - RNA, 23 nt, Artificial Sequence
  Synthetic
uuuacuaacuuugcaacccaagg

SEQ ID NO: 320259 - RNA, 24 nt, Artificial Sequence
  Synthetic
auuuacuaacuuugcaacccaagg

SEQ ID NO: 320260 - RNA, 18 nt, Artificial Sequence
  Synthetic
aagucugauaacccaagg

SEQ ID NO: 320261 - RNA, 19 nt, Artificial Sequence
  Synthetic
aaagucugauaacccaagg

SEQ ID NO: 320262 - RNA, 20 nt, Artificial Sequence
  Synthetic
uaaagucugauaacccaagg

SEQ ID NO: 320263 - RNA, 21 nt, Artificial Sequence
  Synthetic
guaaagucugauaacccaagg

SEQ ID NO: 320264 - RNA, 22 nt, Artificial Sequence
  Synthetic
uguaaagucugauaacccaagg

SEQ ID NO: 320265 - RNA, 23 nt, Artificial Sequence
  Synthetic
guguaaagucugauaacccaagg

SEQ ID NO: 320266 - RNA, 24 nt, Artificial Sequence
  Synthetic
uguguaaagucugauaacccaagg

SEQ ID NO: 320267 - RNA, 18 nt, Artificial Sequence
  Synthetic
auuaugugguccccaagg

SEQ ID NO: 320268 - RNA, 19 nt, Artificial Sequence
  Synthetic
gauuaugugguccccaagg

SEQ ID NO: 320269 - RNA, 20 nt, Artificial Sequence
  Synthetic
agauuaugugguccccaagg

SEQ ID NO: 320270 - RNA, 21 nt, Artificial Sequence
  Synthetic
uagauuaugugguccccaagg

SEQ ID NO: 320271 - RNA, 22 nt, Artificial Sequence
  Synthetic
guagauuaugugguccccaagg

SEQ ID NO: 320272 - RNA, 23 nt, Artificial Sequence
  Synthetic
uguagauuaugugguccccaagg

SEQ ID NO: 320273 - RNA, 24 nt, Artificial Sequence
  Synthetic
auguagauuaugugguccccaagg

SEQ ID NO: 320274 - RNA, 18 nt, Artificial Sequence
  Synthetic
cuccccucuggcccaagg

SEQ ID NO: 320275 - RNA, 19 nt, Artificial Sequence
  Synthetic
gcuccccucuggcccaagg

SEQ ID NO: 320276 - RNA, 20 nt, Artificial Sequence
  Synthetic
ggcuccccucuggcccaagg

SEQ ID NO: 320277 - RNA, 21 nt, Artificial Sequence
  Synthetic
gggcuccccucuggcccaagg

SEQ ID NO: 320278 - RNA, 22 nt, Artificial Sequence
  Synthetic
ugggcuccccucuggcccaagg

SEQ ID NO: 320279 - RNA, 23 nt, Artificial Sequence
  Synthetic
uugggcuccccucuggcccaagg

SEQ ID NO: 320280 - RNA, 24 nt, Artificial Sequence
  Synthetic
cuugggcuccccucuggcccaagg

SEQ ID NO: 320281 - RNA, 18 nt, Artificial Sequence
  Synthetic
cucuuugccaagccaagg

SEQ ID NO: 320282 - RNA, 19 nt, Artificial Sequence
  Synthetic
ccucuuugccaagccaagg

SEQ ID NO: 320283 - RNA, 20 nt, Artificial Sequence
  Synthetic
uccucuuugccaagccaagg

SEQ ID NO: 320284 - RNA, 21 nt, Artificial Sequence
  Synthetic
uuccucuuugccaagccaagg

SEQ ID NO: 320285 - RNA, 22 nt, Artificial Sequence
  Synthetic
uuuccucuuugccaagccaagg

SEQ ID NO: 320286 - RNA, 23 nt, Artificial Sequence
  Synthetic
uuuuccucuuugccaagccaagg

SEQ ID NO: 320287 - RNA, 24 nt, Artificial Sequence
  Synthetic
cuuuuccucuuugccaagccaagg

SEQ ID NO: 320288 - RNA, 18 nt, Artificial Sequence
  Synthetic
agagagaccuagccaagg

SEQ ID NO: 320289 - RNA, 19 nt, Artificial Sequence
  Synthetic
cagagagaccuagccaagg

SEQ ID NO: 320290 - RNA, 20 nt, Artificial Sequence
  Synthetic
acagagagaccuagccaagg

SEQ ID NO: 320291 - RNA, 21 nt, Artificial Sequence
  Synthetic
gacagagagaccuagccaagg

SEQ ID NO: 320292 - RNA, 22 nt, Artificial Sequence
  Synthetic
ggacagagagaccuagccaagg

SEQ ID NO: 320293 - RNA, 23 nt, Artificial Sequence
  Synthetic
aggacagagagaccuagccaagg

SEQ ID NO: 320294 - RNA, 24 nt, Artificial Sequence
  Synthetic
gaggacagagagaccuagccaagg

SEQ ID NO: 320295 - RNA, 18 nt, Artificial Sequence
  Synthetic
uuuguauuaaggccaagg

SEQ ID NO: 320296 - RNA, 19 nt, Artificial Sequence
  Synthetic
uuuuguauuaaggccaagg

SEQ ID NO: 320297 - RNA, 20 nt, Artificial Sequence
  Synthetic
guuuuguauuaaggccaagg

SEQ ID NO: 320298 - RNA, 21 nt, Artificial Sequence
  Synthetic
aguuuuguauuaaggccaagg

SEQ ID NO: 320299 - RNA, 22 nt, Artificial Sequence
  Synthetic
gaguuuuguauuaaggccaagg

SEQ ID NO: 320300 - RNA, 23 nt, Artificial Sequence
  Synthetic
ugaguuuuguauuaaggccaagg

SEQ ID NO: 320301 - RNA, 24 nt, Artificial Sequence
  Synthetic
uugaguuuuguauuaaggccaagg

SEQ ID NO: 320302 - RNA, 18 nt, Artificial Sequence
  Synthetic
cacuuugggaggccaagg

SEQ ID NO: 320303 - RNA, 19 nt, Artificial Sequence
  Synthetic
acacuuugggaggccaagg

SEQ ID NO: 320304 - RNA, 20 nt, Artificial Sequence
  Synthetic
aacacuuugggaggccaagg

SEQ ID NO: 320305 - RNA, 21 nt, Artificial Sequence
  Synthetic
uaacacuuugggaggccaagg

SEQ ID NO: 320306 - RNA, 22 nt, Artificial Sequence
  Synthetic
cuaacacuuugggaggccaagg

SEQ ID NO: 320307 - RNA, 23 nt, Artificial Sequence
  Synthetic
ccuaacacuuugggaggccaagg

SEQ ID NO: 320308 - RNA, 24 nt, Artificial Sequence
  Synthetic
uccuaacacuuugggaggccaagg

SEQ ID NO: 320309 - RNA, 18 nt, Artificial Sequence
  Synthetic
uacugaauccugccaagg

SEQ ID NO: 320310 - RNA, 19 nt, Artificial Sequence
  Synthetic
guacugaauccugccaagg

SEQ ID NO: 320311 - RNA, 20 nt, Artificial Sequence
  Synthetic
uguacugaauccugccaagg

SEQ ID NO: 320312 - RNA, 21 nt, Artificial Sequence
  Synthetic
cuguacugaauccugccaagg

SEQ ID NO: 320313 - RNA, 22 nt, Artificial Sequence
  Synthetic
acuguacugaauccugccaagg

SEQ ID NO: 320314 - RNA, 23 nt, Artificial Sequence
  Synthetic
aacuguacugaauccugccaagg

SEQ ID NO: 320315 - RNA, 24 nt, Artificial Sequence
  Synthetic
uaacuguacugaauccugccaagg

SEQ ID NO: 320316 - RNA, 18 nt, Artificial Sequence
  Synthetic
aaucaguaaaauccaagg

SEQ ID NO: 320317 - RNA, 19 nt, Artificial Sequence
  Synthetic
uaaucaguaaaauccaagg

SEQ ID NO: 320318 - RNA, 20 nt, Artificial Sequence
  Synthetic
auaaucaguaaaauccaagg

SEQ ID NO: 320319 - RNA, 21 nt, Artificial Sequence
  Synthetic
uauaaucaguaaaauccaagg

SEQ ID NO: 320320 - RNA, 22 nt, Artificial Sequence
  Synthetic
uuauaaucaguaaaauccaagg

SEQ ID NO: 320321 - RNA, 23 nt, Artificial Sequence
  Synthetic
uuuauaaucaguaaaauccaagg

SEQ ID NO: 320322 - RNA, 24 nt, Artificial Sequence
  Synthetic
uuuuauaaucaguaaaauccaagg

SEQ ID NO: 320323 - RNA, 18 nt, Artificial Sequence
  Synthetic
aggcugagaaguccaagg

SEQ ID NO: 320324 - RNA, 19 nt, Artificial Sequence
  Synthetic
gaggcugagaaguccaagg

SEQ ID NO: 320325 - RNA, 20 nt, Artificial Sequence
  Synthetic
ggaggcugagaaguccaagg

SEQ ID NO: 320326 - RNA, 21 nt, Artificial Sequence
  Synthetic
cggaggcugagaaguccaagg

SEQ ID NO: 320327 - RNA, 22 nt, Artificial Sequence
  Synthetic
acggaggcugagaaguccaagg

SEQ ID NO: 320328 - RNA, 23 nt, Artificial Sequence
  Synthetic
uacggaggcugagaaguccaagg

SEQ ID NO: 320329 - RNA, 24 nt, Artificial Sequence
  Synthetic
uuacggaggcugagaaguccaagg

SEQ ID NO: 320330 - RNA, 18 nt, Artificial Sequence
  Synthetic
aaguaacuaauuccaagg

SEQ ID NO: 320331 - RNA, 19 nt, Artificial Sequence
  Synthetic
gaaguaacuaauuccaagg

SEQ ID NO: 320332 - RNA, 20 nt, Artificial Sequence
  Synthetic
ugaaguaacuaauuccaagg

SEQ ID NO: 320333 - RNA, 21 nt, Artificial Sequence
  Synthetic
augaaguaacuaauuccaagg

SEQ ID NO: 320334 - RNA, 22 nt, Artificial Sequence
  Synthetic
uaugaaguaacuaauuccaagg

SEQ ID NO: 320335 - RNA, 23 nt, Artificial Sequence
  Synthetic
uuaugaaguaacuaauuccaagg

SEQ ID NO: 320336 - RNA, 24 nt, Artificial Sequence
  Synthetic
cuuaugaaguaacuaauuccaagg

SEQ ID NO: 320337 - RNA, 18 nt, Artificial Sequence
  Synthetic
gauggggcuaaagcaagg

SEQ ID NO: 320338 - RNA, 19 nt, Artificial Sequence
  Synthetic
ggauggggcuaaagcaagg

SEQ ID NO: 320339 - RNA, 20 nt, Artificial Sequence
  Synthetic
gggauggggcuaaagcaagg

SEQ ID NO: 320340 - RNA, 21 nt, Artificial Sequence
  Synthetic
agggauggggcuaaagcaagg

SEQ ID NO: 320341 - RNA, 22 nt, Artificial Sequence
  Synthetic
cagggauggggcuaaagcaagg

SEQ ID NO: 320342 - RNA, 23 nt, Artificial Sequence
  Synthetic
gcagggauggggcuaaagcaagg

SEQ ID NO: 320343 - RNA, 24 nt, Artificial Sequence
  Synthetic
agcagggauggggcuaaagcaagg

SEQ ID NO: 320344 - RNA, 18 nt, Artificial Sequence
  Synthetic
ccaucauuagaagcaagg

SEQ ID NO: 320345 - RNA, 19 nt, Artificial Sequence
  Synthetic
gccaucauuagaagcaagg

SEQ ID NO: 320346 - RNA, 20 nt, Artificial Sequence
  Synthetic
ggccaucauuagaagcaagg

SEQ ID NO: 320347 - RNA, 21 nt, Artificial Sequence
  Synthetic
cggccaucauuagaagcaagg

SEQ ID NO: 320348 - RNA, 22 nt, Artificial Sequence
  Synthetic
acggccaucauuagaagcaagg

SEQ ID NO: 320349 - RNA, 23 nt, Artificial Sequence
  Synthetic
aacggccaucauuagaagcaagg

SEQ ID NO: 320350 - RNA, 24 nt, Artificial Sequence
  Synthetic
uaacggccaucauuagaagcaagg

SEQ ID NO: 320351 - RNA, 18 nt, Artificial Sequence
  Synthetic
gaacauaugucagcaagg

SEQ ID NO: 320352 - RNA, 19 nt, Artificial Sequence
  Synthetic
agaacauaugucagcaagg

SEQ ID NO: 320353 - RNA, 20 nt, Artificial Sequence
  Synthetic
uagaacauaugucagcaagg

SEQ ID NO: 320354 - RNA, 21 nt, Artificial Sequence
  Synthetic
auagaacauaugucagcaagg

SEQ ID NO: 320355 - RNA, 22 nt, Artificial Sequence
  Synthetic
aauagaacauaugucagcaagg

SEQ ID NO: 320356 - RNA, 23 nt, Artificial Sequence
  Synthetic
caauagaacauaugucagcaagg

SEQ ID NO: 320357 - RNA, 24 nt, Artificial Sequence
  Synthetic
ucaauagaacauaugucagcaagg

SEQ ID NO: 320358 - RNA, 18 nt, Artificial Sequence
  Synthetic
ugguugaagugagcaagg

SEQ ID NO: 320359 - RNA, 19 nt, Artificial Sequence
  Synthetic
uugguugaagugagcaagg

SEQ ID NO: 320360 - RNA, 20 nt, Artificial Sequence
  Synthetic
auugguugaagugagcaagg

SEQ ID NO: 320361 - RNA, 21 nt, Artificial Sequence
  Synthetic
aauugguugaagugagcaagg

SEQ ID NO: 320362 - RNA, 22 nt, Artificial Sequence
  Synthetic
uaauugguugaagugagcaagg

SEQ ID NO: 320363 - RNA, 23 nt, Artificial Sequence
  Synthetic
uuaauugguugaagugagcaagg

SEQ ID NO: 320364 - RNA, 24 nt, Artificial Sequence
  Synthetic
cuuaauugguugaagugagcaagg

SEQ ID NO: 320365 - RNA, 18 nt, Artificial Sequence
  Synthetic
uuaaaugaucuagcaagg

SEQ ID NO: 320366 - RNA, 19 nt, Artificial Sequence
  Synthetic
cuuaaaugaucuagcaagg

SEQ ID NO: 320367 - RNA, 20 nt, Artificial Sequence
  Synthetic
acuuaaaugaucuagcaagg

SEQ ID NO: 320368 - RNA, 21 nt, Artificial Sequence
  Synthetic
aacuuaaaugaucuagcaagg

SEQ ID NO: 320369 - RNA, 22 nt, Artificial Sequence
  Synthetic
uaacuuaaaugaucuagcaagg

SEQ ID NO: 320370 - RNA, 23 nt, Artificial Sequence
  Synthetic
guaacuuaaaugaucuagcaagg

SEQ ID NO: 320371 - RNA, 24 nt, Artificial Sequence
  Synthetic
uguaacuuaaaugaucuagcaagg

SEQ ID NO: 320372 - RNA, 18 nt, Artificial Sequence
  Synthetic
gaaauuuucaaggcaagg

SEQ ID NO: 320373 - RNA, 19 nt, Artificial Sequence
  Synthetic
ggaaauuuucaaggcaagg

SEQ ID NO: 320374 - RNA, 20 nt, Artificial Sequence
  Synthetic
gggaaauuuucaaggcaagg

SEQ ID NO: 320375 - RNA, 21 nt, Artificial Sequence
  Synthetic
agggaaauuuucaaggcaagg

SEQ ID NO: 320376 - RNA, 22 nt, Artificial Sequence
  Synthetic
gagggaaauuuucaaggcaagg

SEQ ID NO: 320377 - RNA, 23 nt, Artificial Sequence
  Synthetic
ggagggaaauuuucaaggcaagg

SEQ ID NO: 320378 - RNA, 24 nt, Artificial Sequence
  Synthetic
aggagggaaauuuucaaggcaagg

SEQ ID NO: 320379 - RNA, 18 nt, Artificial Sequence
  Synthetic
ucuuggcagaaggcaagg

SEQ ID NO: 320380 - RNA, 19 nt, Artificial Sequence
  Synthetic
aucuuggcagaaggcaagg

SEQ ID NO: 320381 - RNA, 20 nt, Artificial Sequence
  Synthetic
aaucuuggcagaaggcaagg

SEQ ID NO: 320382 - RNA, 21 nt, Artificial Sequence
  Synthetic
caaucuuggcagaaggcaagg

SEQ ID NO: 320383 - RNA, 22 nt, Artificial Sequence
  Synthetic
acaaucuuggcagaaggcaagg

SEQ ID NO: 320384 - RNA, 23 nt, Artificial Sequence
  Synthetic
cacaaucuuggcagaaggcaagg

SEQ ID NO: 320385 - RNA, 24 nt, Artificial Sequence
  Synthetic
ucacaaucuuggcagaaggcaagg

SEQ ID NO: 320386 - RNA, 18 nt, Artificial Sequence
  Synthetic
cuauggcaccaggcaagg

SEQ ID NO: 320387 - RNA, 19 nt, Artificial Sequence
  Synthetic
acuauggcaccaggcaagg

SEQ ID NO: 320388 - RNA, 20 nt, Artificial Sequence
  Synthetic
aacuauggcaccaggcaagg

SEQ ID NO: 320389 - RNA, 21 nt, Artificial Sequence
  Synthetic
caacuauggcaccaggcaagg

SEQ ID NO: 320390 - RNA, 22 nt, Artificial Sequence
  Synthetic
acaacuauggcaccaggcaagg

SEQ ID NO: 320391 - RNA, 23 nt, Artificial Sequence
  Synthetic
cacaacuauggcaccaggcaagg

SEQ ID NO: 320392 - RNA, 24 nt, Artificial Sequence
  Synthetic
ucacaacuauggcaccaggcaagg

SEQ ID NO: 320393 - RNA, 18 nt, Artificial Sequence
  Synthetic
ggugcugaaguggcaagg

SEQ ID NO: 320394 - RNA, 19 nt, Artificial Sequence
  Synthetic
gggugcugaaguggcaagg

SEQ ID NO: 320395 - RNA, 20 nt, Artificial Sequence
  Synthetic
ugggugcugaaguggcaagg

SEQ ID NO: 320396 - RNA, 21 nt, Artificial Sequence
  Synthetic
augggugcugaaguggcaagg

SEQ ID NO: 320397 - RNA, 22 nt, Artificial Sequence
  Synthetic
gaugggugcugaaguggcaagg

SEQ ID NO: 320398 - RNA, 23 nt, Artificial Sequence
  Synthetic
ugaugggugcugaaguggcaagg

SEQ ID NO: 320399 - RNA, 24 nt, Artificial Sequence
  Synthetic
cugaugggugcugaaguggcaagg

SEQ ID NO: 320400 - RNA, 18 nt, Artificial Sequence
  Synthetic
aauucugacucugcaagg

SEQ ID NO: 320401 - RNA, 19 nt, Artificial Sequence
  Synthetic
caauucugacucugcaagg

SEQ ID NO: 320402 - RNA, 20 nt, Artificial Sequence
  Synthetic
gcaauucugacucugcaagg

SEQ ID NO: 320403 - RNA, 21 nt, Artificial Sequence
  Synthetic
ugcaauucugacucugcaagg

SEQ ID NO: 320404 - RNA, 22 nt, Artificial Sequence
  Synthetic
augcaauucugacucugcaagg

SEQ ID NO: 320405 - RNA, 23 nt, Artificial Sequence
  Synthetic
gaugcaauucugacucugcaagg

SEQ ID NO: 320406 - RNA, 24 nt, Artificial Sequence
  Synthetic
agaugcaauucugacucugcaagg

SEQ ID NO: 320407 - RNA, 18 nt, Artificial Sequence
  Synthetic
uaacauaaaagugcaagg

SEQ ID NO: 320408 - RNA, 19 nt, Artificial Sequence
  Synthetic
auaacauaaaagugcaagg

SEQ ID NO: 320409 - RNA, 20 nt, Artificial Sequence
  Synthetic
uauaacauaaaagugcaagg

SEQ ID NO: 320410 - RNA, 21 nt, Artificial Sequence
  Synthetic
cuauaacauaaaagugcaagg

SEQ ID NO: 320411 - RNA, 22 nt, Artificial Sequence
  Synthetic
ucuauaacauaaaagugcaagg

SEQ ID NO: 320412 - RNA, 23 nt, Artificial Sequence
  Synthetic
cucuauaacauaaaagugcaagg

SEQ ID NO: 320413 - RNA, 24 nt, Artificial Sequence
  Synthetic
ucucuauaacauaaaagugcaagg

SEQ ID NO: 320414 - RNA, 18 nt, Artificial Sequence
  Synthetic
aagaguaauguugcaagg

SEQ ID NO: 320415 - RNA, 19 nt, Artificial Sequence
  Synthetic
uaagaguaauguugcaagg

SEQ ID NO: 320416 - RNA, 20 nt, Artificial Sequence
  Synthetic
uuaagaguaauguugcaagg

SEQ ID NO: 320417 - RNA, 21 nt, Artificial Sequence
  Synthetic
guuaagaguaauguugcaagg

SEQ ID NO: 320418 - RNA, 22 nt, Artificial Sequence
  Synthetic
gguuaagaguaauguugcaagg

SEQ ID NO: 320419 - RNA, 23 nt, Artificial Sequence
  Synthetic
ugguuaagaguaauguugcaagg

SEQ ID NO: 320420 - RNA, 24 nt, Artificial Sequence
  Synthetic
uugguuaagaguaauguugcaagg

SEQ ID NO: 320421 - RNA, 18 nt, Artificial Sequence
  Synthetic
auaauaguucuaucaagg

SEQ ID NO: 320422 - RNA, 19 nt, Artificial Sequence
  Synthetic
cauaauaguucuaucaagg

SEQ ID NO: 320423 - RNA, 20 nt, Artificial Sequence
  Synthetic
gcauaauaguucuaucaagg

SEQ ID NO: 320424 - RNA, 21 nt, Artificial Sequence
  Synthetic
agcauaauaguucuaucaagg

SEQ ID NO: 320425 - RNA, 22 nt, Artificial Sequence
  Synthetic
aagcauaauaguucuaucaagg

SEQ ID NO: 320426 - RNA, 23 nt, Artificial Sequence
  Synthetic
caagcauaauaguucuaucaagg

SEQ ID NO: 320427 - RNA, 24 nt, Artificial Sequence
  Synthetic
ucaagcauaauaguucuaucaagg

SEQ ID NO: 320428 - RNA, 18 nt, Artificial Sequence
  Synthetic
uguuacagaagcucaagg

SEQ ID NO: 320429 - RNA, 19 nt, Artificial Sequence
  Synthetic
guguuacagaagcucaagg

SEQ ID NO: 320430 - RNA, 20 nt, Artificial Sequence
  Synthetic
aguguuacagaagcucaagg

SEQ ID NO: 320431 - RNA, 21 nt, Artificial Sequence
  Synthetic
aaguguuacagaagcucaagg

SEQ ID NO: 320432 - RNA, 22 nt, Artificial Sequence
  Synthetic
uaaguguuacagaagcucaagg

SEQ ID NO: 320433 - RNA, 23 nt, Artificial Sequence
  Synthetic
cuaaguguuacagaagcucaagg

SEQ ID NO: 320434 - RNA, 24 nt, Artificial Sequence
  Synthetic
gcuaaguguuacagaagcucaagg

SEQ ID NO: 320435 - RNA, 18 nt, Artificial Sequence
  Synthetic
gucucagugggcucaagg

SEQ ID NO: 320436 - RNA, 19 nt, Artificial Sequence
  Synthetic
ggucucagugggcucaagg

SEQ ID NO: 320437 - RNA, 20 nt, Artificial Sequence
  Synthetic
uggucucagugggcucaagg

SEQ ID NO: 320438 - RNA, 21 nt, Artificial Sequence
  Synthetic
guggucucagugggcucaagg

SEQ ID NO: 320439 - RNA, 22 nt, Artificial Sequence
  Synthetic
cguggucucagugggcucaagg

SEQ ID NO: 320440 - RNA, 23 nt, Artificial Sequence
  Synthetic
gcguggucucagugggcucaagg

SEQ ID NO: 320441 - RNA, 24 nt, Artificial Sequence
  Synthetic
cgcguggucucagugggcucaagg

SEQ ID NO: 320442 - RNA, 18 nt, Artificial Sequence
  Synthetic
guacuuccuggcucaagg

SEQ ID NO: 320443 - RNA, 19 nt, Artificial Sequence
  Synthetic
uguacuuccuggcucaagg

SEQ ID NO: 320444 - RNA, 20 nt, Artificial Sequence
  Synthetic
uuguacuuccuggcucaagg

SEQ ID NO: 320445 - RNA, 21 nt, Artificial Sequence
  Synthetic
auuguacuuccuggcucaagg

SEQ ID NO: 320446 - RNA, 22 nt, Artificial Sequence
  Synthetic
aauuguacuuccuggcucaagg

SEQ ID NO: 320447 - RNA, 23 nt, Artificial Sequence
  Synthetic
aaauuguacuuccuggcucaagg

SEQ ID NO: 320448 - RNA, 24 nt, Artificial Sequence
  Synthetic
caaauuguacuuccuggcucaagg

SEQ ID NO: 320449 - RNA, 18 nt, Artificial Sequence
  Synthetic
ugaacagaaaucucaagg

SEQ ID NO: 320450 - RNA, 19 nt, Artificial Sequence
  Synthetic
uugaacagaaaucucaagg

SEQ ID NO: 320451 - RNA, 20 nt, Artificial Sequence
  Synthetic
uuugaacagaaaucucaagg

SEQ ID NO: 320452 - RNA, 21 nt, Artificial Sequence
  Synthetic
auuugaacagaaaucucaagg

SEQ ID NO: 320453 - RNA, 22 nt, Artificial Sequence
  Synthetic
cauuugaacagaaaucucaagg

SEQ ID NO: 320454 - RNA, 23 nt, Artificial Sequence
  Synthetic
acauuugaacagaaaucucaagg

SEQ ID NO: 320455 - RNA, 24 nt, Artificial Sequence
  Synthetic
gacauuugaacagaaaucucaagg

SEQ ID NO: 320456 - RNA, 18 nt, Artificial Sequence
  Synthetic
ucacucuaaaagucaagg

SEQ ID NO: 320457 - RNA, 19 nt, Artificial Sequence
  Synthetic
gucacucuaaaagucaagg

SEQ ID NO: 320458 - RNA, 20 nt, Artificial Sequence
  Synthetic
agucacucuaaaagucaagg

SEQ ID NO: 320459 - RNA, 21 nt, Artificial Sequence
  Synthetic
uagucacucuaaaagucaagg

SEQ ID NO: 320460 - RNA, 22 nt, Artificial Sequence
  Synthetic
uuagucacucuaaaagucaagg

SEQ ID NO: 320461 - RNA, 23 nt, Artificial Sequence
  Synthetic
uuuagucacucuaaaagucaagg

SEQ ID NO: 320462 - RNA, 24 nt, Artificial Sequence
  Synthetic
guuuagucacucuaaaagucaagg

SEQ ID NO: 320463 - RNA, 18 nt, Artificial Sequence
  Synthetic
agcuuuuugaagucaagg

SEQ ID NO: 320464 - RNA, 19 nt, Artificial Sequence
  Synthetic
aagcuuuuugaagucaagg

SEQ ID NO: 320465 - RNA, 20 nt, Artificial Sequence
  Synthetic
aaagcuuuuugaagucaagg

SEQ ID NO: 320466 - RNA, 21 nt, Artificial Sequence
  Synthetic
uaaagcuuuuugaagucaagg

SEQ ID NO: 320467 - RNA, 22 nt, Artificial Sequence
  Synthetic
auaaagcuuuuugaagucaagg

SEQ ID NO: 320468 - RNA, 23 nt, Artificial Sequence
  Synthetic
aauaaagcuuuuugaagucaagg

SEQ ID NO: 320469 - RNA, 24 nt, Artificial Sequence
  Synthetic
caauaaagcuuuuugaagucaagg

SEQ ID NO: 320470 - RNA, 18 nt, Artificial Sequence
  Synthetic
uagacuuuugagucaagg

SEQ ID NO: 320471 - RNA, 19 nt, Artificial Sequence
  Synthetic
guagacuuuugagucaagg

SEQ ID NO: 320472 - RNA, 20 nt, Artificial Sequence
  Synthetic
aguagacuuuugagucaagg

SEQ ID NO: 320473 - RNA, 21 nt, Artificial Sequence
  Synthetic
caguagacuuuugagucaagg

SEQ ID NO: 320474 - RNA, 22 nt, Artificial Sequence
  Synthetic
ccaguagacuuuugagucaagg

SEQ ID NO: 320475 - RNA, 23 nt, Artificial Sequence
  Synthetic
gccaguagacuuuugagucaagg

SEQ ID NO: 320476 - RNA, 24 nt, Artificial Sequence
  Synthetic
agccaguagacuuuugagucaagg

SEQ ID NO: 320477 - RNA, 18 nt, Artificial Sequence
  Synthetic
uacaguugaaggucaagg

SEQ ID NO: 320478 - RNA, 19 nt, Artificial Sequence
  Synthetic
guacaguugaaggucaagg

SEQ ID NO: 320479 - RNA, 20 nt, Artificial Sequence
  Synthetic
uguacaguugaaggucaagg

SEQ ID NO: 320480 - RNA, 21 nt, Artificial Sequence
  Synthetic
auguacaguugaaggucaagg

SEQ ID NO: 320481 - RNA, 22 nt, Artificial Sequence
  Synthetic
aauguacaguugaaggucaagg

SEQ ID NO: 320482 - RNA, 23 nt, Artificial Sequence
  Synthetic
uaauguacaguugaaggucaagg

SEQ ID NO: 320483 - RNA, 24 nt, Artificial Sequence
  Synthetic
auaauguacaguugaaggucaagg

SEQ ID NO: 320484 - RNA, 18 nt, Artificial Sequence
  Synthetic
auuuuccccaggucaagg

SEQ ID NO: 320485 - RNA, 19 nt, Artificial Sequence
  Synthetic
cauuuuccccaggucaagg

SEQ ID NO: 320486 - RNA, 20 nt, Artificial Sequence
  Synthetic
ucauuuuccccaggucaagg

SEQ ID NO: 320487 - RNA, 21 nt, Artificial Sequence
  Synthetic
aucauuuuccccaggucaagg

SEQ ID NO: 320488 - RNA, 22 nt, Artificial Sequence
  Synthetic
aaucauuuuccccaggucaagg

SEQ ID NO: 320489 - RNA, 23 nt, Artificial Sequence
  Synthetic
aaaucauuuuccccaggucaagg

SEQ ID NO: 320490 - RNA, 24 nt, Artificial Sequence
  Synthetic
uaaaucauuuuccccaggucaagg

SEQ ID NO: 320491 - RNA, 18 nt, Artificial Sequence
  Synthetic
aauccccacaugucaagg

SEQ ID NO: 320492 - RNA, 19 nt, Artificial Sequence
  Synthetic
caauccccacaugucaagg

SEQ ID NO: 320493 - RNA, 20 nt, Artificial Sequence
  Synthetic
acaauccccacaugucaagg

SEQ ID NO: 320494 - RNA, 21 nt, Artificial Sequence
  Synthetic
cacaauccccacaugucaagg

SEQ ID NO: 320495 - RNA, 22 nt, Artificial Sequence
  Synthetic
ccacaauccccacaugucaagg

SEQ ID NO: 320496 - RNA, 23 nt, Artificial Sequence
  Synthetic
cccacaauccccacaugucaagg

SEQ ID NO: 320497 - RNA, 24 nt, Artificial Sequence
  Synthetic
ccccacaauccccacaugucaagg

SEQ ID NO: 320498 - RNA, 19 nt, Artificial Sequence
  Synthetic
uaauccccacaugucaagg

SEQ ID NO: 320499 - RNA, 20 nt, Artificial Sequence
  Synthetic
guaauccccacaugucaagg

SEQ ID NO: 320500 - RNA, 21 nt, Artificial Sequence
  Synthetic
gguaauccccacaugucaagg

SEQ ID NO: 320501 - RNA, 22 nt, Artificial Sequence
  Synthetic
ugguaauccccacaugucaagg

SEQ ID NO: 320502 - RNA, 23 nt, Artificial Sequence
  Synthetic
augguaauccccacaugucaagg

SEQ ID NO: 320503 - RNA, 24 nt, Artificial Sequence
  Synthetic
uaugguaauccccacaugucaagg

SEQ ID NO: 320504 - RNA, 18 nt, Artificial Sequence
  Synthetic
aauccccgugugucaagg

SEQ ID NO: 320505 - RNA, 19 nt, Artificial Sequence
  Synthetic
uaauccccgugugucaagg

SEQ ID NO: 320506 - RNA, 20 nt, Artificial Sequence
  Synthetic
auaauccccgugugucaagg

SEQ ID NO: 320507 - RNA, 21 nt, Artificial Sequence
  Synthetic
uauaauccccgugugucaagg

SEQ ID NO: 320508 - RNA, 22 nt, Artificial Sequence
  Synthetic
uuauaauccccgugugucaagg

SEQ ID NO: 320509 - RNA, 23 nt, Artificial Sequence
  Synthetic
auuauaauccccgugugucaagg

SEQ ID NO: 320510 - RNA, 24 nt, Artificial Sequence
  Synthetic
aauuauaauccccgugugucaagg

SEQ ID NO: 320511 - RNA, 18 nt, Artificial Sequence
  Synthetic
aaaugauguuauucaagg

SEQ ID NO: 320512 - RNA, 19 nt, Artificial Sequence
  Synthetic
aaaaugauguuauucaagg

SEQ ID NO: 320513 - RNA, 20 nt, Artificial Sequence
  Synthetic
caaaaugauguuauucaagg

SEQ ID NO: 320514 - RNA, 21 nt, Artificial Sequence
  Synthetic
ccaaaaugauguuauucaagg

SEQ ID NO: 320515 - RNA, 22 nt, Artificial Sequence
  Synthetic
uccaaaaugauguuauucaagg

SEQ ID NO: 320516 - RNA, 23 nt, Artificial Sequence
  Synthetic
uuccaaaaugauguuauucaagg

SEQ ID NO: 320517 - RNA, 24 nt, Artificial Sequence
  Synthetic
auuccaaaaugauguuauucaagg

SEQ ID NO: 320518 - RNA, 18 nt, Artificial Sequence
  Synthetic
aauguuaagacuucaagg

SEQ ID NO: 320519 - RNA, 19 nt, Artificial Sequence
  Synthetic
uaauguuaagacuucaagg

SEQ ID NO: 320520 - RNA, 20 nt, Artificial Sequence
  Synthetic
auaauguuaagacuucaagg

SEQ ID NO: 320521 - RNA, 21 nt, Artificial Sequence
  Synthetic
cauaauguuaagacuucaagg

SEQ ID NO: 320522 - RNA, 22 nt, Artificial Sequence
  Synthetic
ucauaauguuaagacuucaagg

SEQ ID NO: 320523 - RNA, 23 nt, Artificial Sequence
  Synthetic
uucauaauguuaagacuucaagg

SEQ ID NO: 320524 - RNA, 24 nt, Artificial Sequence
  Synthetic
guucauaauguuaagacuucaagg

SEQ ID NO: 320525 - RNA, 18 nt, Artificial Sequence
  Synthetic
gguuuucuuucuucaagg

SEQ ID NO: 320526 - RNA, 19 nt, Artificial Sequence
  Synthetic
ugguuuucuuucuucaagg

SEQ ID NO: 320527 - RNA, 20 nt, Artificial Sequence
  Synthetic
cugguuuucuuucuucaagg

SEQ ID NO: 320528 - RNA, 21 nt, Artificial Sequence
  Synthetic
ccugguuuucuuucuucaagg

SEQ ID NO: 320529 - RNA, 22 nt, Artificial Sequence
  Synthetic
gccugguuuucuuucuucaagg

SEQ ID NO: 320530 - RNA, 23 nt, Artificial Sequence
  Synthetic
agccugguuuucuuucuucaagg

SEQ ID NO: 320531 - RNA, 24 nt, Artificial Sequence
  Synthetic
gagccugguuuucuuucuucaagg

SEQ ID NO: 320532 - RNA, 18 nt, Artificial Sequence
  Synthetic
cgggaaagauguucaagg

SEQ ID NO: 320533 - RNA, 19 nt, Artificial Sequence
  Synthetic
acgggaaagauguucaagg

SEQ ID NO: 320534 - RNA, 20 nt, Artificial Sequence
  Synthetic
gacgggaaagauguucaagg

SEQ ID NO: 320535 - RNA, 21 nt, Artificial Sequence
  Synthetic
agacgggaaagauguucaagg

SEQ ID NO: 320536 - RNA, 22 nt, Artificial Sequence
  Synthetic
aagacgggaaagauguucaagg

SEQ ID NO: 320537 - RNA, 23 nt, Artificial Sequence
  Synthetic
aaagacgggaaagauguucaagg

SEQ ID NO: 320538 - RNA, 24 nt, Artificial Sequence
  Synthetic
gaaagacgggaaagauguucaagg

SEQ ID NO: 320539 - RNA, 18 nt, Artificial Sequence
  Synthetic
uuguggcuguguucaagg

SEQ ID NO: 320540 - RNA, 19 nt, Artificial Sequence
  Synthetic
cuuguggcuguguucaagg

SEQ ID NO: 320541 - RNA, 20 nt, Artificial Sequence
  Synthetic
gcuuguggcuguguucaagg

SEQ ID NO: 320542 - RNA, 21 nt, Artificial Sequence
  Synthetic
ugcuuguggcuguguucaagg

SEQ ID NO: 320543 - RNA, 22 nt, Artificial Sequence
  Synthetic
cugcuuguggcuguguucaagg

SEQ ID NO: 320544 - RNA, 23 nt, Artificial Sequence
  Synthetic
ucugcuuguggcuguguucaagg

SEQ ID NO: 320545 - RNA, 24 nt, Artificial Sequence
  Synthetic
uucugcuuguggcuguguucaagg

SEQ ID NO: 320546 - RNA, 18 nt, Artificial Sequence
  Synthetic
auuuagcuauuuucaagg

SEQ ID NO: 320547 - RNA, 19 nt, Artificial Sequence
  Synthetic
uauuuagcuauuuucaagg

SEQ ID NO: 320548 - RNA, 20 nt, Artificial Sequence
  Synthetic
uuauuuagcuauuuucaagg

SEQ ID NO: 320549 - RNA, 21 nt, Artificial Sequence
  Synthetic
guuauuuagcuauuuucaagg

SEQ ID NO: 320550 - RNA, 22 nt, Artificial Sequence
  Synthetic
uguuauuuagcuauuuucaagg

SEQ ID NO: 320551 - RNA, 23 nt, Artificial Sequence
  Synthetic
cuguuauuuagcuauuuucaagg

SEQ ID NO: 320552 - RNA, 24 nt, Artificial Sequence
  Synthetic
gcuguuauuuagcuauuuucaagg

SEQ ID NO: 320553 - RNA, 18 nt, Artificial Sequence
  Synthetic
aaagggaaaaaaagaagg

SEQ ID NO: 320554 - RNA, 19 nt, Artificial Sequence
  Synthetic
gaaagggaaaaaaagaagg

SEQ ID NO: 320555 - RNA, 20 nt, Artificial Sequence
  Synthetic
ggaaagggaaaaaaagaagg

SEQ ID NO: 320556 - RNA, 21 nt, Artificial Sequence
  Synthetic
aggaaagggaaaaaaagaagg

SEQ ID NO: 320557 - RNA, 22 nt, Artificial Sequence
  Synthetic
gaggaaagggaaaaaaagaagg

SEQ ID NO: 320558 - RNA, 23 nt, Artificial Sequence
  Synthetic
ggaggaaagggaaaaaaagaagg

SEQ ID NO: 320559 - RNA, 24 nt, Artificial Sequence
  Synthetic
aggaggaaagggaaaaaaagaagg

SEQ ID NO: 320560 - RNA, 18 nt, Artificial Sequence
  Synthetic
gaaagaaagaaaagaagg

SEQ ID NO: 320561 - RNA, 19 nt, Artificial Sequence
  Synthetic
ggaaagaaagaaaagaagg

SEQ ID NO: 320562 - RNA, 20 nt, Artificial Sequence
  Synthetic
aggaaagaaagaaaagaagg

SEQ ID NO: 320563 - RNA, 21 nt, Artificial Sequence
  Synthetic
aaggaaagaaagaaaagaagg

SEQ ID NO: 320564 - RNA, 22 nt, Artificial Sequence
  Synthetic
aaaggaaagaaagaaaagaagg

SEQ ID NO: 320565 - RNA, 23 nt, Artificial Sequence
  Synthetic
aaaaggaaagaaagaaaagaagg

SEQ ID NO: 320566 - RNA, 24 nt, Artificial Sequence
  Synthetic
aaaaaggaaagaaagaaaagaagg

SEQ ID NO: 320567 - RNA, 18 nt, Artificial Sequence
  Synthetic
augugaaagaaaagaagg

SEQ ID NO: 320568 - RNA, 19 nt, Artificial Sequence
  Synthetic
uaugugaaagaaaagaagg

SEQ ID NO: 320569 - RNA, 20 nt, Artificial Sequence
  Synthetic
cuaugugaaagaaaagaagg

SEQ ID NO: 320570 - RNA, 21 nt, Artificial Sequence
  Synthetic
ucuaugugaaagaaaagaagg

SEQ ID NO: 320571 - RNA, 22 nt, Artificial Sequence
  Synthetic
aucuaugugaaagaaaagaagg

SEQ ID NO: 320572 - RNA, 23 nt, Artificial Sequence
  Synthetic
uaucuaugugaaagaaaagaagg

SEQ ID NO: 320573 - RNA, 24 nt, Artificial Sequence
  Synthetic
auaucuaugugaaagaaaagaagg

SEQ ID NO: 320574 - RNA, 18 nt, Artificial Sequence
  Synthetic
aggagagaacaaagaagg

SEQ ID NO: 320575 - RNA, 19 nt, Artificial Sequence
  Synthetic
aaggagagaacaaagaagg

SEQ ID NO: 320576 - RNA, 20 nt, Artificial Sequence
  Synthetic
gaaggagagaacaaagaagg

SEQ ID NO: 320577 - RNA, 21 nt, Artificial Sequence
  Synthetic
ggaaggagagaacaaagaagg

SEQ ID NO: 320578 - RNA, 22 nt, Artificial Sequence
  Synthetic
aggaaggagagaacaaagaagg

SEQ ID NO: 320579 - RNA, 23 nt, Artificial Sequence
  Synthetic
aaggaaggagagaacaaagaagg

SEQ ID NO: 320580 - RNA, 24 nt, Artificial Sequence
  Synthetic
aaaggaaggagagaacaaagaagg

SEQ ID NO: 320581 - RNA, 18 nt, Artificial Sequence
  Synthetic
cuagaguuuuaaagaagg

SEQ ID NO: 320582 - RNA, 19 nt, Artificial Sequence
  Synthetic
acuagaguuuuaaagaagg

SEQ ID NO: 320583 - RNA, 20 nt, Artificial Sequence
  Synthetic
gacuagaguuuuaaagaagg

SEQ ID NO: 320584 - RNA, 21 nt, Artificial Sequence
  Synthetic
ugacuagaguuuuaaagaagg

SEQ ID NO: 320585 - RNA, 22 nt, Artificial Sequence
  Synthetic
cugacuagaguuuuaaagaagg

SEQ ID NO: 320586 - RNA, 23 nt, Artificial Sequence
  Synthetic
ucugacuagaguuuuaaagaagg

SEQ ID NO: 320587 - RNA, 24 nt, Artificial Sequence
  Synthetic
cucugacuagaguuuuaaagaagg

SEQ ID NO: 320588 - RNA, 18 nt, Artificial Sequence
  Synthetic
auaugcaaaacaagaagg

SEQ ID NO: 320589 - RNA, 19 nt, Artificial Sequence
  Synthetic
cauaugcaaaacaagaagg

SEQ ID NO: 320590 - RNA, 20 nt, Artificial Sequence
  Synthetic
acauaugcaaaacaagaagg

SEQ ID NO: 320591 - RNA, 21 nt, Artificial Sequence
  Synthetic
uacauaugcaaaacaagaagg

SEQ ID NO: 320592 - RNA, 22 nt, Artificial Sequence
  Synthetic
cuacauaugcaaaacaagaagg

SEQ ID NO: 320593 - RNA, 23 nt, Artificial Sequence
  Synthetic
ucuacauaugcaaaacaagaagg

SEQ ID NO: 320594 - RNA, 24 nt, Artificial Sequence
  Synthetic
uucuacauaugcaaaacaagaagg

SEQ ID NO: 320595 - RNA, 18 nt, Artificial Sequence
  Synthetic
uguuuuaaggcaagaagg

SEQ ID NO: 320596 - RNA, 19 nt, Artificial Sequence
  Synthetic
uuguuuuaaggcaagaagg

SEQ ID NO: 320597 - RNA, 20 nt, Artificial Sequence
  Synthetic
guuguuuuaaggcaagaagg

SEQ ID NO: 320598 - RNA, 21 nt, Artificial Sequence
  Synthetic
gguuguuuuaaggcaagaagg

SEQ ID NO: 320599 - RNA, 22 nt, Artificial Sequence
  Synthetic
ugguuguuuuaaggcaagaagg

SEQ ID NO: 320600 - RNA, 23 nt, Artificial Sequence
  Synthetic
uugguuguuuuaaggcaagaagg

SEQ ID NO: 320601 - RNA, 24 nt, Artificial Sequence
  Synthetic
cuugguuguuuuaaggcaagaagg

SEQ ID NO: 320602 - RNA, 18 nt, Artificial Sequence
  Synthetic
ggaaugucuuuaagaagg

SEQ ID NO: 320603 - RNA, 19 nt, Artificial Sequence
  Synthetic
gggaaugucuuuaagaagg

SEQ ID NO: 320604 - RNA, 20 nt, Artificial Sequence
  Synthetic
ggggaaugucuuuaagaagg

SEQ ID NO: 320605 - RNA, 21 nt, Artificial Sequence
  Synthetic
uggggaaugucuuuaagaagg

SEQ ID NO: 320606 - RNA, 22 nt, Artificial Sequence
  Synthetic
guggggaaugucuuuaagaagg

SEQ ID NO: 320607 - RNA, 23 nt, Artificial Sequence
  Synthetic
uguggggaaugucuuuaagaagg

SEQ ID NO: 320608 - RNA, 24 nt, Artificial Sequence
  Synthetic
guguggggaaugucuuuaagaagg

SEQ ID NO: 320609 - RNA, 18 nt, Artificial Sequence
  Synthetic
aauaugggcaccagaagg

SEQ ID NO: 320610 - RNA, 19 nt, Artificial Sequence
  Synthetic
aaauaugggcaccagaagg

SEQ ID NO: 320611 - RNA, 20 nt, Artificial Sequence
  Synthetic
aaaauaugggcaccagaagg

SEQ ID NO: 320612 - RNA, 21 nt, Artificial Sequence
  Synthetic
gaaaauaugggcaccagaagg

SEQ ID NO: 320613 - RNA, 22 nt, Artificial Sequence
  Synthetic
agaaaauaugggcaccagaagg

SEQ ID NO: 320614 - RNA, 23 nt, Artificial Sequence
  Synthetic
uagaaaauaugggcaccagaagg

SEQ ID NO: 320615 - RNA, 24 nt, Artificial Sequence
  Synthetic
guagaaaauaugggcaccagaagg

SEQ ID NO: 320616 - RNA, 18 nt, Artificial Sequence
  Synthetic
agaaggaaucccagaagg

SEQ ID NO: 320617 - RNA, 19 nt, Artificial Sequence
  Synthetic
cagaaggaaucccagaagg

SEQ ID NO: 320618 - RNA, 20 nt, Artificial Sequence
  Synthetic
ucagaaggaaucccagaagg

SEQ ID NO: 320619 - RNA, 21 nt, Artificial Sequence
  Synthetic
gucagaaggaaucccagaagg

SEQ ID NO: 320620 - RNA, 22 nt, Artificial Sequence
  Synthetic
ugucagaaggaaucccagaagg

SEQ ID NO: 320621 - RNA, 23 nt, Artificial Sequence
  Synthetic
gugucagaaggaaucccagaagg

SEQ ID NO: 320622 - RNA, 24 nt, Artificial Sequence
  Synthetic
agugucagaaggaaucccagaagg

SEQ ID NO: 320623 - RNA, 18 nt, Artificial Sequence
  Synthetic
uccagucguggcagaagg

SEQ ID NO: 320624 - RNA, 19 nt, Artificial Sequence
  Synthetic
uuccagucguggcagaagg

SEQ ID NO: 320625 - RNA, 20 nt, Artificial Sequence
  Synthetic
cuuccagucguggcagaagg

SEQ ID NO: 320626 - RNA, 21 nt, Artificial Sequence
  Synthetic
gcuuccagucguggcagaagg

SEQ ID NO: 320627 - RNA, 22 nt, Artificial Sequence
  Synthetic
agcuuccagucguggcagaagg

SEQ ID NO: 320628 - RNA, 23 nt, Artificial Sequence
  Synthetic
aagcuuccagucguggcagaagg

SEQ ID NO: 320629 - RNA, 24 nt, Artificial Sequence
  Synthetic
gaagcuuccagucguggcagaagg

SEQ ID NO: 320630 - RNA, 18 nt, Artificial Sequence
  Synthetic
accagcuacugcagaagg

SEQ ID NO: 320631 - RNA, 19 nt, Artificial Sequence
  Synthetic
caccagcuacugcagaagg

SEQ ID NO: 320632 - RNA, 20 nt, Artificial Sequence
  Synthetic
gcaccagcuacugcagaagg

SEQ ID NO: 320633 - RNA, 21 nt, Artificial Sequence
  Synthetic
agcaccagcuacugcagaagg

SEQ ID NO: 320634 - RNA, 22 nt, Artificial Sequence
  Synthetic
aagcaccagcuacugcagaagg

SEQ ID NO: 320635 - RNA, 23 nt, Artificial Sequence
  Synthetic
gaagcaccagcuacugcagaagg

SEQ ID NO: 320636 - RNA, 24 nt, Artificial Sequence
  Synthetic
ugaagcaccagcuacugcagaagg

SEQ ID NO: 320637 - RNA, 18 nt, Artificial Sequence
  Synthetic
uuuggcaaaaucagaagg

SEQ ID NO: 320638 - RNA, 19 nt, Artificial Sequence
  Synthetic
auuuggcaaaaucagaagg

SEQ ID NO: 320639 - RNA, 20 nt, Artificial Sequence
  Synthetic
aauuuggcaaaaucagaagg

SEQ ID NO: 320640 - RNA, 21 nt, Artificial Sequence
  Synthetic
gaauuuggcaaaaucagaagg

SEQ ID NO: 320641 - RNA, 22 nt, Artificial Sequence
  Synthetic
agaauuuggcaaaaucagaagg

SEQ ID NO: 320642 - RNA, 23 nt, Artificial Sequence
  Synthetic
cagaauuuggcaaaaucagaagg

SEQ ID NO: 320643 - RNA, 24 nt, Artificial Sequence
  Synthetic
ucagaauuuggcaaaaucagaagg

SEQ ID NO: 320644 - RNA, 18 nt, Artificial Sequence
  Synthetic
agguaggacaagagaagg

SEQ ID NO: 320645 - RNA, 19 nt, Artificial Sequence
  Synthetic
aagguaggacaagagaagg

SEQ ID NO: 320646 - RNA, 20 nt, Artificial Sequence
  Synthetic
aaagguaggacaagagaagg

SEQ ID NO: 320647 - RNA, 21 nt, Artificial Sequence
  Synthetic
caaagguaggacaagagaagg

SEQ ID NO: 320648 - RNA, 22 nt, Artificial Sequence
  Synthetic
ccaaagguaggacaagagaagg

SEQ ID NO: 320649 - RNA, 23 nt, Artificial Sequence
  Synthetic
uccaaagguaggacaagagaagg

SEQ ID NO: 320650 - RNA, 24 nt, Artificial Sequence
  Synthetic
uuccaaagguaggacaagagaagg

SEQ ID NO: 320651 - RNA, 18 nt, Artificial Sequence
  Synthetic
uuccaguguaagagaagg

SEQ ID NO: 320652 - RNA, 19 nt, Artificial Sequence
  Synthetic
auuccaguguaagagaagg

SEQ ID NO: 320653 - RNA, 20 nt, Artificial Sequence
  Synthetic
gauuccaguguaagagaagg

SEQ ID NO: 320654 - RNA, 21 nt, Artificial Sequence
  Synthetic
ggauuccaguguaagagaagg

SEQ ID NO: 320655 - RNA, 22 nt, Artificial Sequence
  Synthetic
aggauuccaguguaagagaagg

SEQ ID NO: 320656 - RNA, 23 nt, Artificial Sequence
  Synthetic
aaggauuccaguguaagagaagg

SEQ ID NO: 320657 - RNA, 24 nt, Artificial Sequence
  Synthetic
caaggauuccaguguaagagaagg

SEQ ID NO: 320658 - RNA, 18 nt, Artificial Sequence
  Synthetic
cucacuguugagagaagg

SEQ ID NO: 320659 - RNA, 19 nt, Artificial Sequence
  Synthetic
acucacuguugagagaagg

SEQ ID NO: 320660 - RNA, 20 nt, Artificial Sequence
  Synthetic
gacucacuguugagagaagg

SEQ ID NO: 320661 - RNA, 21 nt, Artificial Sequence
  Synthetic
agacucacuguugagagaagg

SEQ ID NO: 320662 - RNA, 22 nt, Artificial Sequence
  Synthetic
aagacucacuguugagagaagg

SEQ ID NO: 320663 - RNA, 23 nt, Artificial Sequence
  Synthetic
uaagacucacuguugagagaagg

SEQ ID NO: 320664 - RNA, 24 nt, Artificial Sequence
  Synthetic
auaagacucacuguugagagaagg

SEQ ID NO: 320665 - RNA, 18 nt, Artificial Sequence
  Synthetic
aucugggagaggagaagg

SEQ ID NO: 320666 - RNA, 19 nt, Artificial Sequence
  Synthetic
aaucugggagaggagaagg

SEQ ID NO: 320667 - RNA, 20 nt, Artificial Sequence
  Synthetic
gaaucugggagaggagaagg

SEQ ID NO: 320668 - RNA, 21 nt, Artificial Sequence
  Synthetic
agaaucugggagaggagaagg

SEQ ID NO: 320669 - RNA, 22 nt, Artificial Sequence
  Synthetic
uagaaucugggagaggagaagg

SEQ ID NO: 320670 - RNA, 23 nt, Artificial Sequence
  Synthetic
cuagaaucugggagaggagaagg

SEQ ID NO: 320671 - RNA, 24 nt, Artificial Sequence
  Synthetic
ccuagaaucugggagaggagaagg

SEQ ID NO: 320672 - RNA, 18 nt, Artificial Sequence
  Synthetic
cugcuucaggggagaagg

SEQ ID NO: 320673 - RNA, 19 nt, Artificial Sequence
  Synthetic
ccugcuucaggggagaagg

SEQ ID NO: 320674 - RNA, 20 nt, Artificial Sequence
  Synthetic
accugcuucaggggagaagg

SEQ ID NO: 320675 - RNA, 21 nt, Artificial Sequence
  Synthetic
gaccugcuucaggggagaagg

SEQ ID NO: 320676 - RNA, 22 nt, Artificial Sequence
  Synthetic
ugaccugcuucaggggagaagg

SEQ ID NO: 320677 - RNA, 23 nt, Artificial Sequence
  Synthetic
augaccugcuucaggggagaagg

SEQ ID NO: 320678 - RNA, 24 nt, Artificial Sequence
  Synthetic
caugaccugcuucaggggagaagg

SEQ ID NO: 320679 - RNA, 18 nt, Artificial Sequence
  Synthetic
ucgugucagcugagaagg

SEQ ID NO: 320680 - RNA, 19 nt, Artificial Sequence
  Synthetic
cucgugucagcugagaagg

SEQ ID NO: 320681 - RNA, 20 nt, Artificial Sequence
  Synthetic
ucucgugucagcugagaagg

SEQ ID NO: 320682 - RNA, 21 nt, Artificial Sequence
  Synthetic
gucucgugucagcugagaagg

SEQ ID NO: 320683 - RNA, 22 nt, Artificial Sequence
  Synthetic
ugucucgugucagcugagaagg

SEQ ID NO: 320684 - RNA, 23 nt, Artificial Sequence
  Synthetic
cugucucgugucagcugagaagg

SEQ ID NO: 320685 - RNA, 24 nt, Artificial Sequence
  Synthetic
ucugucucgugucagcugagaagg

SEQ ID NO: 320686 - RNA, 18 nt, Artificial Sequence
  Synthetic
augaaaacauugagaagg

SEQ ID NO: 320687 - RNA, 19 nt, Artificial Sequence
  Synthetic
aaugaaaacauugagaagg

SEQ ID NO: 320688 - RNA, 20 nt, Artificial Sequence
  Synthetic
caaugaaaacauugagaagg

SEQ ID NO: 320689 - RNA, 21 nt, Artificial Sequence
  Synthetic
gcaaugaaaacauugagaagg

SEQ ID NO: 320690 - RNA, 22 nt, Artificial Sequence
  Synthetic
ggcaaugaaaacauugagaagg

SEQ ID NO: 320691 - RNA, 23 nt, Artificial Sequence
  Synthetic
uggcaaugaaaacauugagaagg

SEQ ID NO: 320692 - RNA, 24 nt, Artificial Sequence
  Synthetic
guggcaaugaaaacauugagaagg

SEQ ID NO: 320693 - RNA, 18 nt, Artificial Sequence
  Synthetic
aagcacucauugagaagg

SEQ ID NO: 320694 - RNA, 19 nt, Artificial Sequence
  Synthetic
aaagcacucauugagaagg

SEQ ID NO: 320695 - RNA, 20 nt, Artificial Sequence
  Synthetic
aaaagcacucauugagaagg

SEQ ID NO: 320696 - RNA, 21 nt, Artificial Sequence
  Synthetic
gaaaagcacucauugagaagg

SEQ ID NO: 320697 - RNA, 22 nt, Artificial Sequence
  Synthetic
agaaaagcacucauugagaagg

SEQ ID NO: 320698 - RNA, 23 nt, Artificial Sequence
  Synthetic
uagaaaagcacucauugagaagg

SEQ ID NO: 320699 - RNA, 24 nt, Artificial Sequence
  Synthetic
auagaaaagcacucauugagaagg

SEQ ID NO: 320700 - RNA, 18 nt, Artificial Sequence
  Synthetic
cacagguacuugagaagg

SEQ ID NO: 320701 - RNA, 19 nt, Artificial Sequence
  Synthetic
gcacagguacuugagaagg

SEQ ID NO: 320702 - RNA, 20 nt, Artificial Sequence
  Synthetic
agcacagguacuugagaagg

SEQ ID NO: 320703 - RNA, 21 nt, Artificial Sequence
  Synthetic
uagcacagguacuugagaagg

SEQ ID NO: 320704 - RNA, 22 nt, Artificial Sequence
  Synthetic
auagcacagguacuugagaagg

SEQ ID NO: 320705 - RNA, 23 nt, Artificial Sequence
  Synthetic
aauagcacagguacuugagaagg

SEQ ID NO: 320706 - RNA, 24 nt, Artificial Sequence
  Synthetic
caauagcacagguacuugagaagg

SEQ ID NO: 320707 - RNA, 18 nt, Artificial Sequence
  Synthetic
auaaguguucauagaagg

SEQ ID NO: 320708 - RNA, 19 nt, Artificial Sequence
  Synthetic
aauaaguguucauagaagg

SEQ ID NO: 320709 - RNA, 20 nt, Artificial Sequence
  Synthetic
gaauaaguguucauagaagg

SEQ ID NO: 320710 - RNA, 21 nt, Artificial Sequence
  Synthetic
agaauaaguguucauagaagg

SEQ ID NO: 320711 - RNA, 22 nt, Artificial Sequence
  Synthetic
cagaauaaguguucauagaagg

SEQ ID NO: 320712 - RNA, 23 nt, Artificial Sequence
  Synthetic
ccagaauaaguguucauagaagg

SEQ ID NO: 320713 - RNA, 24 nt, Artificial Sequence
  Synthetic
uccagaauaaguguucauagaagg

SEQ ID NO: 320714 - RNA, 18 nt, Artificial Sequence
  Synthetic
uaaaaugaaacuagaagg

SEQ ID NO: 320715 - RNA, 19 nt, Artificial Sequence
  Synthetic
auaaaaugaaacuagaagg

SEQ ID NO: 320716 - RNA, 20 nt, Artificial Sequence
  Synthetic
aauaaaaugaaacuagaagg

SEQ ID NO: 320717 - RNA, 21 nt, Artificial Sequence
  Synthetic
aaauaaaaugaaacuagaagg

SEQ ID NO: 320718 - RNA, 22 nt, Artificial Sequence
  Synthetic
aaaauaaaaugaaacuagaagg

SEQ ID NO: 320719 - RNA, 23 nt, Artificial Sequence
  Synthetic
uaaaauaaaaugaaacuagaagg

SEQ ID NO: 320720 - RNA, 24 nt, Artificial Sequence
  Synthetic
guaaaauaaaaugaaacuagaagg

SEQ ID NO: 320721 - RNA, 18 nt, Artificial Sequence
  Synthetic
uuggggacuacuagaagg

SEQ ID NO: 320722 - RNA, 19 nt, Artificial Sequence
  Synthetic
auuggggacuacuagaagg

SEQ ID NO: 320723 - RNA, 20 nt, Artificial Sequence
  Synthetic
cauuggggacuacuagaagg

SEQ ID NO: 320724 - RNA, 21 nt, Artificial Sequence
  Synthetic
acauuggggacuacuagaagg

SEQ ID NO: 320725 - RNA, 22 nt, Artificial Sequence
  Synthetic
gacauuggggacuacuagaagg

SEQ ID NO: 320726 - RNA, 23 nt, Artificial Sequence
  Synthetic
agacauuggggacuacuagaagg

SEQ ID NO: 320727 - RNA, 24 nt, Artificial Sequence
  Synthetic
uagacauuggggacuacuagaagg

SEQ ID NO: 320728 - RNA, 18 nt, Artificial Sequence
  Synthetic
aacucaaagccuagaagg

SEQ ID NO: 320729 - RNA, 19 nt, Artificial Sequence
  Synthetic
gaacucaaagccuagaagg

SEQ ID NO: 320730 - RNA, 20 nt, Artificial Sequence
  Synthetic
ugaacucaaagccuagaagg

SEQ ID NO: 320731 - RNA, 21 nt, Artificial Sequence
  Synthetic
augaacucaaagccuagaagg

SEQ ID NO: 320732 - RNA, 22 nt, Artificial Sequence
  Synthetic
aaugaacucaaagccuagaagg

SEQ ID NO: 320733 - RNA, 23 nt, Artificial Sequence
  Synthetic
aaaugaacucaaagccuagaagg

SEQ ID NO: 320734 - RNA, 24 nt, Artificial Sequence
  Synthetic
uaaaugaacucaaagccuagaagg

SEQ ID NO: 320735 - RNA, 18 nt, Artificial Sequence
  Synthetic
gcucugggagguagaagg

SEQ ID NO: 320736 - RNA, 19 nt, Artificial Sequence
  Synthetic
agcucugggagguagaagg

SEQ ID NO: 320737 - RNA, 20 nt, Artificial Sequence
  Synthetic
cagcucugggagguagaagg

SEQ ID NO: 320738 - RNA, 21 nt, Artificial Sequence
  Synthetic
ucagcucugggagguagaagg

SEQ ID NO: 320739 - RNA, 22 nt, Artificial Sequence
  Synthetic
aucagcucugggagguagaagg

SEQ ID NO: 320740 - RNA, 23 nt, Artificial Sequence
  Synthetic
caucagcucugggagguagaagg

SEQ ID NO: 320741 - RNA, 24 nt, Artificial Sequence
  Synthetic
acaucagcucugggagguagaagg

SEQ ID NO: 320742 - RNA, 18 nt, Artificial Sequence
  Synthetic
uuguauaguauuagaagg

SEQ ID NO: 320743 - RNA, 19 nt, Artificial Sequence
  Synthetic
auuguauaguauuagaagg

SEQ ID NO: 320744 - RNA, 20 nt, Artificial Sequence
  Synthetic
uauuguauaguauuagaagg

SEQ ID NO: 320745 - RNA, 21 nt, Artificial Sequence
  Synthetic
auauuguauaguauuagaagg

SEQ ID NO: 320746 - RNA, 22 nt, Artificial Sequence
  Synthetic
aauauuguauaguauuagaagg

SEQ ID NO: 320747 - RNA, 23 nt, Artificial Sequence
  Synthetic
uaauauuguauaguauuagaagg

SEQ ID NO: 320748 - RNA, 24 nt, Artificial Sequence
  Synthetic
cuaauauuguauaguauuagaagg

SEQ ID NO: 320749 - RNA, 18 nt, Artificial Sequence
  Synthetic
ggugaugguauuagaagg

SEQ ID NO: 320750 - RNA, 19 nt, Artificial Sequence
  Synthetic
aggugaugguauuagaagg

SEQ ID NO: 320751 - RNA, 20 nt, Artificial Sequence
  Synthetic
aaggugaugguauuagaagg

SEQ ID NO: 320752 - RNA, 21 nt, Artificial Sequence
  Synthetic
caaggugaugguauuagaagg

SEQ ID NO: 320753 - RNA, 22 nt, Artificial Sequence
  Synthetic
ucaaggugaugguauuagaagg

SEQ ID NO: 320754 - RNA, 23 nt, Artificial Sequence
  Synthetic
cucaaggugaugguauuagaagg

SEQ ID NO: 320755 - RNA, 24 nt, Artificial Sequence
  Synthetic
acucaaggugaugguauuagaagg

SEQ ID NO: 320756 - RNA, 18 nt, Artificial Sequence
  Synthetic
uaagagacagaacgaagg

SEQ ID NO: 320757 - RNA, 19 nt, Artificial Sequence
  Synthetic
cuaagagacagaacgaagg

SEQ ID NO: 320758 - RNA, 20 nt, Artificial Sequence
  Synthetic
ucuaagagacagaacgaagg

SEQ ID NO: 320759 - RNA, 21 nt, Artificial Sequence
  Synthetic
uucuaagagacagaacgaagg

SEQ ID NO: 320760 - RNA, 22 nt, Artificial Sequence
  Synthetic
guucuaagagacagaacgaagg

SEQ ID NO: 320761 - RNA, 23 nt, Artificial Sequence
  Synthetic
aguucuaagagacagaacgaagg

SEQ ID NO: 320762 - RNA, 24 nt, Artificial Sequence
  Synthetic
gaguucuaagagacagaacgaagg

SEQ ID NO: 320763 - RNA, 18 nt, Artificial Sequence
  Synthetic
cauggcagaaggcgaagg

SEQ ID NO: 320764 - RNA, 19 nt, Artificial Sequence
  Synthetic
ucauggcagaaggcgaagg

SEQ ID NO: 320765 - RNA, 20 nt, Artificial Sequence
  Synthetic
aucauggcagaaggcgaagg

SEQ ID NO: 320766 - RNA, 21 nt, Artificial Sequence
  Synthetic
aaucauggcagaaggcgaagg

SEQ ID NO: 320767 - RNA, 22 nt, Artificial Sequence
  Synthetic
caaucauggcagaaggcgaagg

SEQ ID NO: 320768 - RNA, 23 nt, Artificial Sequence
  Synthetic
acaaucauggcagaaggcgaagg

SEQ ID NO: 320769 - RNA, 24 nt, Artificial Sequence
  Synthetic
cacaaucauggcagaaggcgaagg

SEQ ID NO: 320770 - RNA, 18 nt, Artificial Sequence
  Synthetic
ccaggggcugggcgaagg

SEQ ID NO: 320771 - RNA, 19 nt, Artificial Sequence
  Synthetic
accaggggcugggcgaagg

SEQ ID NO: 320772 - RNA, 20 nt, Artificial Sequence
  Synthetic
aaccaggggcugggcgaagg

SEQ ID NO: 320773 - RNA, 21 nt, Artificial Sequence
  Synthetic
uaaccaggggcugggcgaagg

SEQ ID NO: 320774 - RNA, 22 nt, Artificial Sequence
  Synthetic
guaaccaggggcugggcgaagg

SEQ ID NO: 320775 - RNA, 23 nt, Artificial Sequence
  Synthetic
aguaaccaggggcugggcgaagg

SEQ ID NO: 320776 - RNA, 24 nt, Artificial Sequence
  Synthetic
uaguaaccaggggcugggcgaagg

SEQ ID NO: 320777 - RNA, 18 nt, Artificial Sequence
  Synthetic
aagacaaagaaaggaagg

SEQ ID NO: 320778 - RNA, 19 nt, Artificial Sequence
  Synthetic
gaagacaaagaaaggaagg

SEQ ID NO: 320779 - RNA, 20 nt, Artificial Sequence
  Synthetic
ggaagacaaagaaaggaagg

SEQ ID NO: 320780 - RNA, 21 nt, Artificial Sequence
  Synthetic
aggaagacaaagaaaggaagg

SEQ ID NO: 320781 - RNA, 22 nt, Artificial Sequence
  Synthetic
gaggaagacaaagaaaggaagg

SEQ ID NO: 320782 - RNA, 23 nt, Artificial Sequence
  Synthetic
agaggaagacaaagaaaggaagg

SEQ ID NO: 320783 - RNA, 24 nt, Artificial Sequence
  Synthetic
gagaggaagacaaagaaaggaagg

SEQ ID NO: 320784 - RNA, 18 nt, Artificial Sequence
  Synthetic
aaaggaaggaaaggaagg

SEQ ID NO: 320785 - RNA, 19 nt, Artificial Sequence
  Synthetic
gaaaggaaggaaaggaagg

SEQ ID NO: 320786 - RNA, 20 nt, Artificial Sequence
  Synthetic
agaaaggaaggaaaggaagg

SEQ ID NO: 320787 - RNA, 21 nt, Artificial Sequence
  Synthetic
aagaaaggaaggaaaggaagg

SEQ ID NO: 320788 - RNA, 22 nt, Artificial Sequence
  Synthetic
aaagaaaggaaggaaaggaagg

SEQ ID NO: 320789 - RNA, 23 nt, Artificial Sequence
  Synthetic
gaaagaaaggaaggaaaggaagg

SEQ ID NO: 320790 - RNA, 24 nt, Artificial Sequence
  Synthetic
ggaaagaaaggaaggaaaggaagg

SEQ ID NO: 320791 - RNA, 18 nt, Artificial Sequence
  Synthetic
agaccuagccaaggaagg

SEQ ID NO: 320792 - RNA, 19 nt, Artificial Sequence
  Synthetic
gagaccuagccaaggaagg

SEQ ID NO: 320793 - RNA, 20 nt, Artificial Sequence
  Synthetic
agagaccuagccaaggaagg

SEQ ID NO: 320794 - RNA, 21 nt, Artificial Sequence
  Synthetic
gagagaccuagccaaggaagg

SEQ ID NO: 320795 - RNA, 22 nt, Artificial Sequence
  Synthetic
agagagaccuagccaaggaagg

SEQ ID NO: 320796 - RNA, 23 nt, Artificial Sequence
  Synthetic
cagagagaccuagccaaggaagg

SEQ ID NO: 320797 - RNA, 24 nt, Artificial Sequence
  Synthetic
acagagagaccuagccaaggaagg

SEQ ID NO: 320798 - RNA, 18 nt, Artificial Sequence
  Synthetic
gaaagaaaagaaggaagg

SEQ ID NO: 320799 - RNA, 19 nt, Artificial Sequence
  Synthetic
agaaagaaaagaaggaagg

SEQ ID NO: 320800 - RNA, 20 nt, Artificial Sequence
  Synthetic
aagaaagaaaagaaggaagg

SEQ ID NO: 320801 - RNA, 21 nt, Artificial Sequence
  Synthetic
aaagaaagaaaagaaggaagg

SEQ ID NO: 320802 - RNA, 22 nt, Artificial Sequence
  Synthetic
gaaagaaagaaaagaaggaagg

SEQ ID NO: 320803 - RNA, 23 nt, Artificial Sequence
  Synthetic
ggaaagaaagaaaagaaggaagg

SEQ ID NO: 320804 - RNA, 24 nt, Artificial Sequence
  Synthetic
aggaaagaaagaaaagaaggaagg

SEQ ID NO: 320805 - RNA, 18 nt, Artificial Sequence
  Synthetic
caaagaaaggaaggaagg

SEQ ID NO: 320806 - RNA, 19 nt, Artificial Sequence
  Synthetic
acaaagaaaggaaggaagg

SEQ ID NO: 320807 - RNA, 20 nt, Artificial Sequence
  Synthetic
gacaaagaaaggaaggaagg

SEQ ID NO: 320808 - RNA, 21 nt, Artificial Sequence
  Synthetic
agacaaagaaaggaaggaagg

SEQ ID NO: 320809 - RNA, 22 nt, Artificial Sequence
  Synthetic
aagacaaagaaaggaaggaagg

SEQ ID NO: 320810 - RNA, 23 nt, Artificial Sequence
  Synthetic
gaagacaaagaaaggaaggaagg

SEQ ID NO: 320811 - RNA, 24 nt, Artificial Sequence
  Synthetic
ggaagacaaagaaaggaaggaagg

SEQ ID NO: 320812 - RNA, 18 nt, Artificial Sequence
  Synthetic
gaaggaaaggaaggaagg

SEQ ID NO: 320813 - RNA, 19 nt, Artificial Sequence
  Synthetic
ggaaggaaaggaaggaagg

SEQ ID NO: 320814 - RNA, 20 nt, Artificial Sequence
  Synthetic
aggaaggaaaggaaggaagg

SEQ ID NO: 320815 - RNA, 21 nt, Artificial Sequence
  Synthetic
aaggaaggaaaggaaggaagg

SEQ ID NO: 320816 - RNA, 22 nt, Artificial Sequence
  Synthetic
aaaggaaggaaaggaaggaagg

SEQ ID NO: 320817 - RNA, 23 nt, Artificial Sequence
  Synthetic
gaaaggaaggaaaggaaggaagg

SEQ ID NO: 320818 - RNA, 24 nt, Artificial Sequence
  Synthetic
agaaaggaaggaaaggaaggaagg

SEQ ID NO: 320819 - RNA, 18 nt, Artificial Sequence
  Synthetic
gaaaagaaggaaggaagg

SEQ ID NO: 320820 - RNA, 19 nt, Artificial Sequence
  Synthetic
agaaaagaaggaaggaagg

SEQ ID NO: 320821 - RNA, 20 nt, Artificial Sequence
  Synthetic
aagaaaagaaggaaggaagg

SEQ ID NO: 320822 - RNA, 21 nt, Artificial Sequence
  Synthetic
aaagaaaagaaggaaggaagg

SEQ ID NO: 320823 - RNA, 22 nt, Artificial Sequence
  Synthetic
gaaagaaaagaaggaaggaagg

SEQ ID NO: 320824 - RNA, 23 nt, Artificial Sequence
  Synthetic
agaaagaaaagaaggaaggaagg

SEQ ID NO: 320825 - RNA, 24 nt, Artificial Sequence
  Synthetic
aagaaagaaaagaaggaaggaagg

SEQ ID NO: 320826 - RNA, 18 nt, Artificial Sequence
  Synthetic
gaaaggaaggaaggaagg

SEQ ID NO: 320827 - RNA, 19 nt, Artificial Sequence
  Synthetic
ggaaaggaaggaaggaagg

SEQ ID NO: 320828 - RNA, 20 nt, Artificial Sequence
  Synthetic
aggaaaggaaggaaggaagg

SEQ ID NO: 320829 - RNA, 21 nt, Artificial Sequence
  Synthetic
aaggaaaggaaggaaggaagg

SEQ ID NO: 320830 - RNA, 22 nt, Artificial Sequence
  Synthetic
gaaggaaaggaaggaaggaagg

SEQ ID NO: 320831 - RNA, 23 nt, Artificial Sequence
  Synthetic
ggaaggaaaggaaggaaggaagg

SEQ ID NO: 320832 - RNA, 24 nt, Artificial Sequence
  Synthetic
aggaaggaaaggaaggaaggaagg

SEQ ID NO: 320833 - RNA, 18 nt, Artificial Sequence
  Synthetic
aaggaggaggaaggaagg

SEQ ID NO: 320834 - RNA, 19 nt, Artificial Sequence
  Synthetic
aaaggaggaggaaggaagg

SEQ ID NO: 320835 - RNA, 20 nt, Artificial Sequence
  Synthetic
gaaaggaggaggaaggaagg

SEQ ID NO: 320836 - RNA, 21 nt, Artificial Sequence
  Synthetic
ugaaaggaggaggaaggaagg

SEQ ID NO: 320837 - RNA, 22 nt, Artificial Sequence
  Synthetic
cugaaaggaggaggaaggaagg

SEQ ID NO: 320838 - RNA, 23 nt, Artificial Sequence
  Synthetic
acugaaaggaggaggaaggaagg

SEQ ID NO: 320839 - RNA, 24 nt, Artificial Sequence
  Synthetic
cacugaaaggaggaggaaggaagg

SEQ ID NO: 320840 - RNA, 18 nt, Artificial Sequence
  Synthetic
aaagaaagggaaggaagg

SEQ ID NO: 320841 - RNA, 19 nt, Artificial Sequence
  Synthetic
gaaagaaagggaaggaagg

SEQ ID NO: 320842 - RNA, 20 nt, Artificial Sequence
  Synthetic
ggaaagaaagggaaggaagg

SEQ ID NO: 320843 - RNA, 21 nt, Artificial Sequence
  Synthetic
aggaaagaaagggaaggaagg

SEQ ID NO: 320844 - RNA, 22 nt, Artificial Sequence
  Synthetic
gaggaaagaaagggaaggaagg

SEQ ID NO: 320845 - RNA, 23 nt, Artificial Sequence
  Synthetic
ggaggaaagaaagggaaggaagg

SEQ ID NO: 320846 - RNA, 24 nt, Artificial Sequence
  Synthetic
gggaggaaagaaagggaaggaagg

SEQ ID NO: 320847 - RNA, 18 nt, Artificial Sequence
  Synthetic
uggagaucaccaggaagg

SEQ ID NO: 320848 - RNA, 19 nt, Artificial Sequence
  Synthetic
guggagaucaccaggaagg

SEQ ID NO: 320849 - RNA, 20 nt, Artificial Sequence
  Synthetic
uguggagaucaccaggaagg

SEQ ID NO: 320850 - RNA, 21 nt, Artificial Sequence
  Synthetic
uuguggagaucaccaggaagg

SEQ ID NO: 320851 - RNA, 22 nt, Artificial Sequence
  Synthetic
cuuguggagaucaccaggaagg

SEQ ID NO: 320852 - RNA, 23 nt, Artificial Sequence
  Synthetic
acuuguggagaucaccaggaagg

SEQ ID NO: 320853 - RNA, 24 nt, Artificial Sequence
  Synthetic
cacuuguggagaucaccaggaagg

SEQ ID NO: 320854 - RNA, 18 nt, Artificial Sequence
  Synthetic
cacauggcagcaggaagg

SEQ ID NO: 320855 - RNA, 19 nt, Artificial Sequence
  Synthetic
ucacauggcagcaggaagg

SEQ ID NO: 320856 - RNA, 20 nt, Artificial Sequence
  Synthetic
uucacauggcagcaggaagg

SEQ ID NO: 320857 - RNA, 21 nt, Artificial Sequence
  Synthetic
cuucacauggcagcaggaagg

SEQ ID NO: 320858 - RNA, 22 nt, Artificial Sequence
  Synthetic
ucuucacauggcagcaggaagg

SEQ ID NO: 320859 - RNA, 23 nt, Artificial Sequence
  Synthetic
uucuucacauggcagcaggaagg

SEQ ID NO: 320860 - RNA, 24 nt, Artificial Sequence
  Synthetic
cuucuucacauggcagcaggaagg

SEQ ID NO: 320861 - RNA, 18 nt, Artificial Sequence
  Synthetic
cuuuguagugcaggaagg

SEQ ID NO: 320862 - RNA, 19 nt, Artificial Sequence
  Synthetic
ccuuuguagugcaggaagg

SEQ ID NO: 320863 - RNA, 20 nt, Artificial Sequence
  Synthetic
uccuuuguagugcaggaagg

SEQ ID NO: 320864 - RNA, 21 nt, Artificial Sequence
  Synthetic
auccuuuguagugcaggaagg

SEQ ID NO: 320865 - RNA, 22 nt, Artificial Sequence
  Synthetic
aauccuuuguagugcaggaagg

SEQ ID NO: 320866 - RNA, 23 nt, Artificial Sequence
  Synthetic
gaauccuuuguagugcaggaagg

SEQ ID NO: 320867 - RNA, 24 nt, Artificial Sequence
  Synthetic
agaauccuuuguagugcaggaagg

SEQ ID NO: 320868 - RNA, 18 nt, Artificial Sequence
  Synthetic
gaaacagauucaggaagg

SEQ ID NO: 320869 - RNA, 19 nt, Artificial Sequence
  Synthetic
agaaacagauucaggaagg

SEQ ID NO: 320870 - RNA, 20 nt, Artificial Sequence
  Synthetic
aagaaacagauucaggaagg

SEQ ID NO: 320871 - RNA, 21 nt, Artificial Sequence
  Synthetic
gaagaaacagauucaggaagg

SEQ ID NO: 320872 - RNA, 22 nt, Artificial Sequence
  Synthetic
ugaagaaacagauucaggaagg

SEQ ID NO: 320873 - RNA, 23 nt, Artificial Sequence
  Synthetic
gugaagaaacagauucaggaagg

SEQ ID NO: 320874 - RNA, 24 nt, Artificial Sequence
  Synthetic
ugugaagaaacagauucaggaagg

SEQ ID NO: 320875 - RNA, 18 nt, Artificial Sequence
  Synthetic
guuacuuuaagaggaagg

SEQ ID NO: 320876 - RNA, 19 nt, Artificial Sequence
  Synthetic
aguuacuuuaagaggaagg

SEQ ID NO: 320877 - RNA, 20 nt, Artificial Sequence
  Synthetic
gaguuacuuuaagaggaagg

SEQ ID NO: 320878 - RNA, 21 nt, Artificial Sequence
  Synthetic
agaguuacuuuaagaggaagg

SEQ ID NO: 320879 - RNA, 22 nt, Artificial Sequence
  Synthetic
uagaguuacuuuaagaggaagg

SEQ ID NO: 320880 - RNA, 23 nt, Artificial Sequence
  Synthetic
uuagaguuacuuuaagaggaagg

SEQ ID NO: 320881 - RNA, 24 nt, Artificial Sequence
  Synthetic
uuuagaguuacuuuaagaggaagg

SEQ ID NO: 320882 - RNA, 18 nt, Artificial Sequence
  Synthetic
cugaaaggaggaggaagg

SEQ ID NO: 320883 - RNA, 19 nt, Artificial Sequence
  Synthetic
acugaaaggaggaggaagg

SEQ ID NO: 320884 - RNA, 20 nt, Artificial Sequence
  Synthetic
cacugaaaggaggaggaagg

SEQ ID NO: 320885 - RNA, 21 nt, Artificial Sequence
  Synthetic
ucacugaaaggaggaggaagg

SEQ ID NO: 320886 - RNA, 22 nt, Artificial Sequence
  Synthetic
aucacugaaaggaggaggaagg

SEQ ID NO: 320887 - RNA, 23 nt, Artificial Sequence
  Synthetic
aaucacugaaaggaggaggaagg

SEQ ID NO: 320888 - RNA, 24 nt, Artificial Sequence
  Synthetic
aaaucacugaaaggaggaggaagg

SEQ ID NO: 320889 - RNA, 18 nt, Artificial Sequence
  Synthetic
gagagagagggaggaagg

SEQ ID NO: 320890 - RNA, 19 nt, Artificial Sequence
  Synthetic
agagagagagggaggaagg

SEQ ID NO: 320891 - RNA, 20 nt, Artificial Sequence
  Synthetic
gagagagagagggaggaagg

SEQ ID NO: 320892 - RNA, 21 nt, Artificial Sequence
  Synthetic
agagagagagagggaggaagg

SEQ ID NO: 320893 - RNA, 22 nt, Artificial Sequence
  Synthetic
gagagagagagagggaggaagg

SEQ ID NO: 320894 - RNA, 23 nt, Artificial Sequence
  Synthetic
agagagagagagagggaggaagg

SEQ ID NO: 320895 - RNA, 24 nt, Artificial Sequence
  Synthetic
gagagagagagagagggaggaagg

SEQ ID NO: 320896 - RNA, 18 nt, Artificial Sequence
  Synthetic
gggaaugaaugaggaagg

SEQ ID NO: 320897 - RNA, 19 nt, Artificial Sequence
  Synthetic
ugggaaugaaugaggaagg

SEQ ID NO: 320898 - RNA, 20 nt, Artificial Sequence
  Synthetic
cugggaaugaaugaggaagg

SEQ ID NO: 320899 - RNA, 21 nt, Artificial Sequence
  Synthetic
ccugggaaugaaugaggaagg

SEQ ID NO: 320900 - RNA, 22 nt, Artificial Sequence
  Synthetic
accugggaaugaaugaggaagg

SEQ ID NO: 320901 - RNA, 23 nt, Artificial Sequence
  Synthetic
uaccugggaaugaaugaggaagg

SEQ ID NO: 320902 - RNA, 24 nt, Artificial Sequence
  Synthetic
uuaccugggaaugaaugaggaagg

SEQ ID NO: 320903 - RNA, 18 nt, Artificial Sequence
  Synthetic
aaagguuggugaggaagg

SEQ ID NO: 320904 - RNA, 19 nt, Artificial Sequence
  Synthetic
uaaagguuggugaggaagg

SEQ ID NO: 320905 - RNA, 20 nt, Artificial Sequence
  Synthetic
guaaagguuggugaggaagg

SEQ ID NO: 320906 - RNA, 21 nt, Artificial Sequence
  Synthetic
cguaaagguuggugaggaagg

SEQ ID NO: 320907 - RNA, 22 nt, Artificial Sequence
  Synthetic
ccguaaagguuggugaggaagg

SEQ ID NO: 320908 - RNA, 23 nt, Artificial Sequence
  Synthetic
gccguaaagguuggugaggaagg

SEQ ID NO: 320909 - RNA, 24 nt, Artificial Sequence
  Synthetic
ggccguaaagguuggugaggaagg

SEQ ID NO: 320910 - RNA, 18 nt, Artificial Sequence
  Synthetic
gaugaugcaauaggaagg

SEQ ID NO: 320911 - RNA, 19 nt, Artificial Sequence
  Synthetic
agaugaugcaauaggaagg

SEQ ID NO: 320912 - RNA, 20 nt, Artificial Sequence
  Synthetic
uagaugaugcaauaggaagg

SEQ ID NO: 320913 - RNA, 21 nt, Artificial Sequence
  Synthetic
uuagaugaugcaauaggaagg

SEQ ID NO: 320914 - RNA, 22 nt, Artificial Sequence
  Synthetic
uuuagaugaugcaauaggaagg

SEQ ID NO: 320915 - RNA, 23 nt, Artificial Sequence
  Synthetic
uuuuagaugaugcaauaggaagg

SEQ ID NO: 320916 - RNA, 24 nt, Artificial Sequence
  Synthetic
uuuuuagaugaugcaauaggaagg

SEQ ID NO: 320917 - RNA, 18 nt, Artificial Sequence
  Synthetic
uucuuagcuauaggaagg

SEQ ID NO: 320918 - RNA, 19 nt, Artificial Sequence
  Synthetic
uuucuuagcuauaggaagg

SEQ ID NO: 320919 - RNA, 20 nt, Artificial Sequence
  Synthetic
guuucuuagcuauaggaagg

SEQ ID NO: 320920 - RNA, 21 nt, Artificial Sequence
  Synthetic
gguuucuuagcuauaggaagg

SEQ ID NO: 320921 - RNA, 22 nt, Artificial Sequence
  Synthetic
ugguuucuuagcuauaggaagg

SEQ ID NO: 320922 - RNA, 23 nt, Artificial Sequence
  Synthetic
uugguuucuuagcuauaggaagg

SEQ ID NO: 320923 - RNA, 24 nt, Artificial Sequence
  Synthetic
auugguuucuuagcuauaggaagg

SEQ ID NO: 320924 - RNA, 18 nt, Artificial Sequence
  Synthetic
cuuuuauauguaggaagg

SEQ ID NO: 320925 - RNA, 19 nt, Artificial Sequence
  Synthetic
ccuuuuauauguaggaagg

SEQ ID NO: 320926 - RNA, 20 nt, Artificial Sequence
  Synthetic
uccuuuuauauguaggaagg

SEQ ID NO: 320927 - RNA, 21 nt, Artificial Sequence
  Synthetic
uuccuuuuauauguaggaagg

SEQ ID NO: 320928 - RNA, 22 nt, Artificial Sequence
  Synthetic
cuuccuuuuauauguaggaagg

SEQ ID NO: 320929 - RNA, 23 nt, Artificial Sequence
  Synthetic
acuuccuuuuauauguaggaagg

SEQ ID NO: 320930 - RNA, 24 nt, Artificial Sequence
  Synthetic
gacuuccuuuuauauguaggaagg

SEQ ID NO: 320931 - RNA, 18 nt, Artificial Sequence
  Synthetic
gaggaaagaaagggaagg

SEQ ID NO: 320932 - RNA, 19 nt, Artificial Sequence
  Synthetic
ggaggaaagaaagggaagg

SEQ ID NO: 320933 - RNA, 20 nt, Artificial Sequence
  Synthetic
gggaggaaagaaagggaagg

SEQ ID NO: 320934 - RNA, 21 nt, Artificial Sequence
  Synthetic
agggaggaaagaaagggaagg

SEQ ID NO: 320935 - RNA, 22 nt, Artificial Sequence
  Synthetic
aagggaggaaagaaagggaagg

SEQ ID NO: 320936 - RNA, 23 nt, Artificial Sequence
  Synthetic
gaagggaggaaagaaagggaagg

SEQ ID NO: 320937 - RNA, 24 nt, Artificial Sequence
  Synthetic
agaagggaggaaagaaagggaagg

SEQ ID NO: 320938 - RNA, 18 nt, Artificial Sequence
  Synthetic
aaagagagugagggaagg

SEQ ID NO: 320939 - RNA, 19 nt, Artificial Sequence
  Synthetic
gaaagagagugagggaagg

SEQ ID NO: 320940 - RNA, 20 nt, Artificial Sequence
  Synthetic
agaaagagagugagggaagg

SEQ ID NO: 320941 - RNA, 21 nt, Artificial Sequence
  Synthetic
aagaaagagagugagggaagg

SEQ ID NO: 320942 - RNA, 22 nt, Artificial Sequence
  Synthetic
gaagaaagagagugagggaagg

SEQ ID NO: 320943 - RNA, 23 nt, Artificial Sequence
  Synthetic
ggaagaaagagagugagggaagg

SEQ ID NO: 320944 - RNA, 24 nt, Artificial Sequence
  Synthetic
aggaagaaagagagugagggaagg

SEQ ID NO: 320945 - RNA, 18 nt, Artificial Sequence
  Synthetic
uuguggggugggggaagg

SEQ ID NO: 320946 - RNA, 19 nt, Artificial Sequence
  Synthetic
guuguggggugggggaagg

SEQ ID NO: 320947 - RNA, 20 nt, Artificial Sequence
  Synthetic
uguuguggggugggggaagg

SEQ ID NO: 320948 - RNA, 21 nt, Artificial Sequence
  Synthetic
cuguuguggggugggggaagg

SEQ ID NO: 320949 - RNA, 22 nt, Artificial Sequence
  Synthetic
acuguuguggggugggggaagg

SEQ ID NO: 320950 - RNA, 23 nt, Artificial Sequence
  Synthetic
gacuguuguggggugggggaagg

SEQ ID NO: 320951 - RNA, 24 nt, Artificial Sequence
  Synthetic
ggacuguuguggggugggggaagg

SEQ ID NO: 320952 - RNA, 18 nt, Artificial Sequence
  Synthetic
aagagaagguggggaagg

SEQ ID NO: 320953 - RNA, 19 nt, Artificial Sequence
  Synthetic
uaagagaagguggggaagg

SEQ ID NO: 320954 - RNA, 20 nt, Artificial Sequence
  Synthetic
guaagagaagguggggaagg

SEQ ID NO: 320955 - RNA, 21 nt, Artificial Sequence
  Synthetic
uguaagagaagguggggaagg

SEQ ID NO: 320956 - RNA, 22 nt, Artificial Sequence
  Synthetic
guguaagagaagguggggaagg

SEQ ID NO: 320957 - RNA, 23 nt, Artificial Sequence
  Synthetic
aguguaagagaagguggggaagg

SEQ ID NO: 320958 - RNA, 24 nt, Artificial Sequence
  Synthetic
caguguaagagaagguggggaagg

SEQ ID NO: 320959 - RNA, 18 nt, Artificial Sequence
  Synthetic
augguggugaugggaagg

SEQ ID NO: 320960 - RNA, 19 nt, Artificial Sequence
  Synthetic
aaugguggugaugggaagg

SEQ ID NO: 320961 - RNA, 20 nt, Artificial Sequence
  Synthetic
gaaugguggugaugggaagg

SEQ ID NO: 320962 - RNA, 21 nt, Artificial Sequence
  Synthetic
ggaaugguggugaugggaagg

SEQ ID NO: 320963 - RNA, 22 nt, Artificial Sequence
  Synthetic
aggaaugguggugaugggaagg

SEQ ID NO: 320964 - RNA, 23 nt, Artificial Sequence
  Synthetic
gaggaaugguggugaugggaagg

SEQ ID NO: 320965 - RNA, 24 nt, Artificial Sequence
  Synthetic
ggaggaaugguggugaugggaagg

SEQ ID NO: 320966 - RNA, 18 nt, Artificial Sequence
  Synthetic
gaugugugugugggaagg

SEQ ID NO: 320967 - RNA, 19 nt, Artificial Sequence
  Synthetic
ggaugugugugugggaagg

SEQ ID NO: 320968 - RNA, 20 nt, Artificial Sequence
  Synthetic
uggaugugugugugggaagg

SEQ ID NO: 320969 - RNA, 21 nt, Artificial Sequence
  Synthetic
uuggaugugugugugggaagg

SEQ ID NO: 320970 - RNA, 22 nt, Artificial Sequence
  Synthetic
guuggaugugugugugggaagg

SEQ ID NO: 320971 - RNA, 23 nt, Artificial Sequence
  Synthetic
uguuggaugugugugugggaagg

SEQ ID NO: 320972 - RNA, 24 nt, Artificial Sequence
  Synthetic
guguuggaugugugugugggaagg

SEQ ID NO: 320973 - RNA, 18 nt, Artificial Sequence
  Synthetic
ugauuccaugauggaagg

SEQ ID NO: 320974 - RNA, 19 nt, Artificial Sequence
  Synthetic
augauuccaugauggaagg

SEQ ID NO: 320975 - RNA, 20 nt, Artificial Sequence
  Synthetic
caugauuccaugauggaagg

SEQ ID NO: 320976 - RNA, 21 nt, Artificial Sequence
  Synthetic
ucaugauuccaugauggaagg

SEQ ID NO: 320977 - RNA, 22 nt, Artificial Sequence
  Synthetic
gucaugauuccaugauggaagg

SEQ ID NO: 320978 - RNA, 23 nt, Artificial Sequence
  Synthetic
ugucaugauuccaugauggaagg

SEQ ID NO: 320979 - RNA, 24 nt, Artificial Sequence
  Synthetic
gugucaugauuccaugauggaagg

SEQ ID NO: 320980 - RNA, 18 nt, Artificial Sequence
  Synthetic
agucagcccccuggaagg

SEQ ID NO: 320981 - RNA, 19 nt, Artificial Sequence
  Synthetic
aagucagcccccuggaagg

SEQ ID NO: 320982 - RNA, 20 nt, Artificial Sequence
  Synthetic
caagucagcccccuggaagg

SEQ ID NO: 320983 - RNA, 21 nt, Artificial Sequence
  Synthetic
ccaagucagcccccuggaagg

SEQ ID NO: 320984 - RNA, 22 nt, Artificial Sequence
  Synthetic
uccaagucagcccccuggaagg

SEQ ID NO: 320985 - RNA, 23 nt, Artificial Sequence
  Synthetic
auccaagucagcccccuggaagg

SEQ ID NO: 320986 - RNA, 24 nt, Artificial Sequence
  Synthetic
aauccaagucagcccccuggaagg

SEQ ID NO: 320987 - RNA, 18 nt, Artificial Sequence
  Synthetic
ucuuccuacaguggaagg

SEQ ID NO: 320988 - RNA, 19 nt, Artificial Sequence
  Synthetic
cucuuccuacaguggaagg

SEQ ID NO: 320989 - RNA, 20 nt, Artificial Sequence
  Synthetic
acucuuccuacaguggaagg

SEQ ID NO: 320990 - RNA, 21 nt, Artificial Sequence
  Synthetic
gacucuuccuacaguggaagg

SEQ ID NO: 320991 - RNA, 22 nt, Artificial Sequence
  Synthetic
agacucuuccuacaguggaagg

SEQ ID NO: 320992 - RNA, 23 nt, Artificial Sequence
  Synthetic
uagacucuuccuacaguggaagg

SEQ ID NO: 320993 - RNA, 24 nt, Artificial Sequence
  Synthetic
guagacucuuccuacaguggaagg

SEQ ID NO: 320994 - RNA, 18 nt, Artificial Sequence
  Synthetic
uuuacucaugguggaagg

SEQ ID NO: 320995 - RNA, 19 nt, Artificial Sequence
  Synthetic
uuuuacucaugguggaagg

SEQ ID NO: 320996 - RNA, 20 nt, Artificial Sequence
  Synthetic
cuuuuacucaugguggaagg

SEQ ID NO: 320997 - RNA, 21 nt, Artificial Sequence
  Synthetic
gcuuuuacucaugguggaagg

SEQ ID NO: 320998 - RNA, 22 nt, Artificial Sequence
  Synthetic
agcuuuuacucaugguggaagg

SEQ ID NO: 320999 - RNA, 23 nt, Artificial Sequence
  Synthetic
gagcuuuuacucaugguggaagg

SEQ ID NO: 321000 - RNA, 24 nt, Artificial Sequence
  Synthetic
ggagcuuuuacucaugguggaagg

SEQ ID NO: 321001 - RNA, 18 nt, Artificial Sequence
  Synthetic
uaaauuccugaaugaagg

SEQ ID NO: 321002 - RNA, 19 nt, Artificial Sequence
  Synthetic
uuaaauuccugaaugaagg

SEQ ID NO: 321003 - RNA, 20 nt, Artificial Sequence
  Synthetic
uuuaaauuccugaaugaagg

SEQ ID NO: 321004 - RNA, 21 nt, Artificial Sequence
  Synthetic
cuuuaaauuccugaaugaagg

SEQ ID NO: 321005 - RNA, 22 nt, Artificial Sequence
  Synthetic
acuuuaaauuccugaaugaagg

SEQ ID NO: 321006 - RNA, 23 nt, Artificial Sequence
  Synthetic
uacuuuaaauuccugaaugaagg

SEQ ID NO: 321007 - RNA, 24 nt, Artificial Sequence
  Synthetic
uuacuuuaaauuccugaaugaagg

SEQ ID NO: 321008 - RNA, 18 nt, Artificial Sequence
  Synthetic
cuaauccguucaugaagg

SEQ ID NO: 321009 - RNA, 19 nt, Artificial Sequence
  Synthetic
gcuaauccguucaugaagg

SEQ ID NO: 321010 - RNA, 20 nt, Artificial Sequence
  Synthetic
ugcuaauccguucaugaagg

SEQ ID NO: 321011 - RNA, 21 nt, Artificial Sequence
  Synthetic
augcuaauccguucaugaagg

SEQ ID NO: 321012 - RNA, 22 nt, Artificial Sequence
  Synthetic
gaugcuaauccguucaugaagg

SEQ ID NO: 321013 - RNA, 23 nt, Artificial Sequence
  Synthetic
ugaugcuaauccguucaugaagg

SEQ ID NO: 321014 - RNA, 24 nt, Artificial Sequence
  Synthetic
augaugcuaauccguucaugaagg

SEQ ID NO: 321015 - RNA, 18 nt, Artificial Sequence
  Synthetic
agugccaggagaugaagg

SEQ ID NO: 321016 - RNA, 19 nt, Artificial Sequence
  Synthetic
aagugccaggagaugaagg

SEQ ID NO: 321017 - RNA, 20 nt, Artificial Sequence
  Synthetic
uaagugccaggagaugaagg

SEQ ID NO: 321018 - RNA, 21 nt, Artificial Sequence
  Synthetic
guaagugccaggagaugaagg

SEQ ID NO: 321019 - RNA, 22 nt, Artificial Sequence
  Synthetic
gguaagugccaggagaugaagg

SEQ ID NO: 321020 - RNA, 23 nt, Artificial Sequence
  Synthetic
agguaagugccaggagaugaagg

SEQ ID NO: 321021 - RNA, 24 nt, Artificial Sequence
  Synthetic
gagguaagugccaggagaugaagg

SEQ ID NO: 321022 - RNA, 18 nt, Artificial Sequence
  Synthetic
ggucugaacugaugaagg

SEQ ID NO: 321023 - RNA, 19 nt, Artificial Sequence
  Synthetic
gggucugaacugaugaagg

SEQ ID NO: 321024 - RNA, 20 nt, Artificial Sequence
  Synthetic
ggggucugaacugaugaagg

SEQ ID NO: 321025 - RNA, 21 nt, Artificial Sequence
  Synthetic
uggggucugaacugaugaagg

SEQ ID NO: 321026 - RNA, 22 nt, Artificial Sequence
  Synthetic
uuggggucugaacugaugaagg

SEQ ID NO: 321027 - RNA, 23 nt, Artificial Sequence
  Synthetic
uuuggggucugaacugaugaagg

SEQ ID NO: 321028 - RNA, 24 nt, Artificial Sequence
  Synthetic
cuuuggggucugaacugaugaagg

SEQ ID NO: 321029 - RNA, 18 nt, Artificial Sequence
  Synthetic
uccaguaaagacugaagg

SEQ ID NO: 321030 - RNA, 19 nt, Artificial Sequence
  Synthetic
auccaguaaagacugaagg

SEQ ID NO: 321031 - RNA, 20 nt, Artificial Sequence
  Synthetic
cauccaguaaagacugaagg

SEQ ID NO: 321032 - RNA, 21 nt, Artificial Sequence
  Synthetic
acauccaguaaagacugaagg

SEQ ID NO: 321033 - RNA, 22 nt, Artificial Sequence
  Synthetic
aacauccaguaaagacugaagg

SEQ ID NO: 321034 - RNA, 23 nt, Artificial Sequence
  Synthetic
aaacauccaguaaagacugaagg

SEQ ID NO: 321035 - RNA, 24 nt, Artificial Sequence
  Synthetic
aaaacauccaguaaagacugaagg

SEQ ID NO: 321036 - RNA, 18 nt, Artificial Sequence
  Synthetic
uauuucuccuggugaagg

SEQ ID NO: 321037 - RNA, 19 nt, Artificial Sequence
  Synthetic
auauuucuccuggugaagg

SEQ ID NO: 321038 - RNA, 20 nt, Artificial Sequence
  Synthetic
cauauuucuccuggugaagg

SEQ ID NO: 321039 - RNA, 21 nt, Artificial Sequence
  Synthetic
ccauauuucuccuggugaagg

SEQ ID NO: 321040 - RNA, 22 nt, Artificial Sequence
  Synthetic
accauauuucuccuggugaagg

SEQ ID NO: 321041 - RNA, 23 nt, Artificial Sequence
  Synthetic
caccauauuucuccuggugaagg

SEQ ID NO: 321042 - RNA, 24 nt, Artificial Sequence
  Synthetic
acaccauauuucuccuggugaagg

SEQ ID NO: 321043 - RNA, 18 nt, Artificial Sequence
  Synthetic
auuuuauaguggugaagg

SEQ ID NO: 321044 - RNA, 19 nt, Artificial Sequence
  Synthetic
uauuuuauaguggugaagg

SEQ ID NO: 321045 - RNA, 20 nt, Artificial Sequence
  Synthetic
auauuuuauaguggugaagg

SEQ ID NO: 321046 - RNA, 21 nt, Artificial Sequence
  Synthetic
uauauuuuauaguggugaagg

SEQ ID NO: 321047 - RNA, 22 nt, Artificial Sequence
  Synthetic
auauauuuuauaguggugaagg

SEQ ID NO: 321048 - RNA, 23 nt, Artificial Sequence
  Synthetic
aauauauuuuauaguggugaagg

SEQ ID NO: 321049 - RNA, 24 nt, Artificial Sequence
  Synthetic
gaauauauuuuauaguggugaagg

SEQ ID NO: 321050 - RNA, 18 nt, Artificial Sequence
  Synthetic
gucucggaagugugaagg

SEQ ID NO: 321051 - RNA, 19 nt, Artificial Sequence
  Synthetic
ugucucggaagugugaagg

SEQ ID NO: 321052 - RNA, 20 nt, Artificial Sequence
  Synthetic
cugucucggaagugugaagg

SEQ ID NO: 321053 - RNA, 21 nt, Artificial Sequence
  Synthetic
ccugucucggaagugugaagg

SEQ ID NO: 321054 - RNA, 22 nt, Artificial Sequence
  Synthetic
cccugucucggaagugugaagg

SEQ ID NO: 321055 - RNA, 23 nt, Artificial Sequence
  Synthetic
ccccugucucggaagugugaagg

SEQ ID NO: 321056 - RNA, 24 nt, Artificial Sequence
  Synthetic
uccccugucucggaagugugaagg

SEQ ID NO: 321057 - RNA, 18 nt, Artificial Sequence
  Synthetic
ugaaaccaggugugaagg

SEQ ID NO: 321058 - RNA, 19 nt, Artificial Sequence
  Synthetic
uugaaaccaggugugaagg

SEQ ID NO: 321059 - RNA, 20 nt, Artificial Sequence
  Synthetic
cuugaaaccaggugugaagg

SEQ ID NO: 321060 - RNA, 21 nt, Artificial Sequence
  Synthetic
ucuugaaaccaggugugaagg

SEQ ID NO: 321061 - RNA, 22 nt, Artificial Sequence
  Synthetic
aucuugaaaccaggugugaagg

SEQ ID NO: 321062 - RNA, 23 nt, Artificial Sequence
  Synthetic
aaucuugaaaccaggugugaagg

SEQ ID NO: 321063 - RNA, 24 nt, Artificial Sequence
  Synthetic
gaaucuugaaaccaggugugaagg

SEQ ID NO: 321064 - RNA, 18 nt, Artificial Sequence
  Synthetic
aaguccuuuuugugaagg

SEQ ID NO: 321065 - RNA, 19 nt, Artificial Sequence
  Synthetic
caaguccuuuuugugaagg

SEQ ID NO: 321066 - RNA, 20 nt, Artificial Sequence
  Synthetic
gcaaguccuuuuugugaagg

SEQ ID NO: 321067 - RNA, 21 nt, Artificial Sequence
  Synthetic
agcaaguccuuuuugugaagg

SEQ ID NO: 321068 - RNA, 22 nt, Artificial Sequence
  Synthetic
gagcaaguccuuuuugugaagg

SEQ ID NO: 321069 - RNA, 23 nt, Artificial Sequence
  Synthetic
cgagcaaguccuuuuugugaagg

SEQ ID NO: 321070 - RNA, 24 nt, Artificial Sequence
  Synthetic
ccgagcaaguccuuuuugugaagg

SEQ ID NO: 321071 - RNA, 18 nt, Artificial Sequence
  Synthetic
guacuaugucauugaagg

SEQ ID NO: 321072 - RNA, 19 nt, Artificial Sequence
  Synthetic
uguacuaugucauugaagg

SEQ ID NO: 321073 - RNA, 20 nt, Artificial Sequence
  Synthetic
cuguacuaugucauugaagg

SEQ ID NO: 321074 - RNA, 21 nt, Artificial Sequence
  Synthetic
ucuguacuaugucauugaagg

SEQ ID NO: 321075 - RNA, 22 nt, Artificial Sequence
  Synthetic
aucuguacuaugucauugaagg

SEQ ID NO: 321076 - RNA, 23 nt, Artificial Sequence
  Synthetic
aaucuguacuaugucauugaagg

SEQ ID NO: 321077 - RNA, 24 nt, Artificial Sequence
  Synthetic
aaaucuguacuaugucauugaagg

SEQ ID NO: 321078 - RNA, 18 nt, Artificial Sequence
  Synthetic
uuaggagcaccuugaagg

SEQ ID NO: 321079 - RNA, 19 nt, Artificial Sequence
  Synthetic
auuaggagcaccuugaagg

SEQ ID NO: 321080 - RNA, 20 nt, Artificial Sequence
  Synthetic
uauuaggagcaccuugaagg

SEQ ID NO: 321081 - RNA, 21 nt, Artificial Sequence
  Synthetic
auauuaggagcaccuugaagg

SEQ ID NO: 321082 - RNA, 22 nt, Artificial Sequence
  Synthetic
cauauuaggagcaccuugaagg

SEQ ID NO: 321083 - RNA, 23 nt, Artificial Sequence
  Synthetic
ccauauuaggagcaccuugaagg

SEQ ID NO: 321084 - RNA, 24 nt, Artificial Sequence
  Synthetic
accauauuaggagcaccuugaagg

SEQ ID NO: 321085 - RNA, 18 nt, Artificial Sequence
  Synthetic
gugcucuucucuugaagg

SEQ ID NO: 321086 - RNA, 19 nt, Artificial Sequence
  Synthetic
ugugcucuucucuugaagg

SEQ ID NO: 321087 - RNA, 20 nt, Artificial Sequence
  Synthetic
augugcucuucucuugaagg

SEQ ID NO: 321088 - RNA, 21 nt, Artificial Sequence
  Synthetic
gaugugcucuucucuugaagg

SEQ ID NO: 321089 - RNA, 22 nt, Artificial Sequence
  Synthetic
agaugugcucuucucuugaagg

SEQ ID NO: 321090 - RNA, 23 nt, Artificial Sequence
  Synthetic
uagaugugcucuucucuugaagg

SEQ ID NO: 321091 - RNA, 24 nt, Artificial Sequence
  Synthetic
uuagaugugcucuucucuugaagg

SEQ ID NO: 321092 - RNA, 18 nt, Artificial Sequence
  Synthetic
gguaaaagagguugaagg

SEQ ID NO: 321093 - RNA, 19 nt, Artificial Sequence
  Synthetic
agguaaaagagguugaagg

SEQ ID NO: 321094 - RNA, 20 nt, Artificial Sequence
  Synthetic
cagguaaaagagguugaagg

SEQ ID NO: 321095 - RNA, 21 nt, Artificial Sequence
  Synthetic
gcagguaaaagagguugaagg

SEQ ID NO: 321096 - RNA, 22 nt, Artificial Sequence
  Synthetic
ugcagguaaaagagguugaagg

SEQ ID NO: 321097 - RNA, 23 nt, Artificial Sequence
  Synthetic
gugcagguaaaagagguugaagg

SEQ ID NO: 321098 - RNA, 24 nt, Artificial Sequence
  Synthetic
ugugcagguaaaagagguugaagg

SEQ ID NO: 321099 - RNA, 18 nt, Artificial Sequence
  Synthetic
ucuuaaugcuguugaagg

SEQ ID NO: 321100 - RNA, 19 nt, Artificial Sequence
  Synthetic
uucuuaaugcuguugaagg

SEQ ID NO: 321101 - RNA, 20 nt, Artificial Sequence
  Synthetic
uuucuuaaugcuguugaagg

SEQ ID NO: 321102 - RNA, 21 nt, Artificial Sequence
  Synthetic
auuucuuaaugcuguugaagg

SEQ ID NO: 321103 - RNA, 22 nt, Artificial Sequence
  Synthetic
uauuucuuaaugcuguugaagg

SEQ ID NO: 321104 - RNA, 23 nt, Artificial Sequence
  Synthetic
guauuucuuaaugcuguugaagg

SEQ ID NO: 321105 - RNA, 24 nt, Artificial Sequence
  Synthetic
uguauuucuuaaugcuguugaagg

SEQ ID NO: 321106 - RNA, 18 nt, Artificial Sequence
  Synthetic
caaaaagaguguugaagg

SEQ ID NO: 321107 - RNA, 19 nt, Artificial Sequence
  Synthetic
acaaaaagaguguugaagg

SEQ ID NO: 321108 - RNA, 20 nt, Artificial Sequence
  Synthetic
uacaaaaagaguguugaagg

SEQ ID NO: 321109 - RNA, 21 nt, Artificial Sequence
  Synthetic
auacaaaaagaguguugaagg

SEQ ID NO: 321110 - RNA, 22 nt, Artificial Sequence
  Synthetic
gauacaaaaagaguguugaagg

SEQ ID NO: 321111 - RNA, 23 nt, Artificial Sequence
  Synthetic
agauacaaaaagaguguugaagg

SEQ ID NO: 321112 - RNA, 24 nt, Artificial Sequence
  Synthetic
aagauacaaaaagaguguugaagg

SEQ ID NO: 321113 - RNA, 18 nt, Artificial Sequence
  Synthetic
ugugauguguuuugaagg

SEQ ID NO: 321114 - RNA, 19 nt, Artificial Sequence
  Synthetic
uugugauguguuuugaagg

SEQ ID NO: 321115 - RNA, 20 nt, Artificial Sequence
  Synthetic
auugugauguguuuugaagg

SEQ ID NO: 321116 - RNA, 21 nt, Artificial Sequence
  Synthetic
aauugugauguguuuugaagg

SEQ ID NO: 321117 - RNA, 22 nt, Artificial Sequence
  Synthetic
uaauugugauguguuuugaagg

SEQ ID NO: 321118 - RNA, 23 nt, Artificial Sequence
  Synthetic
uuaauugugauguguuuugaagg

SEQ ID NO: 321119 - RNA, 24 nt, Artificial Sequence
  Synthetic
auuaauugugauguguuuugaagg

SEQ ID NO: 321120 - RNA, 18 nt, Artificial Sequence
  Synthetic
cuagaaacuuuuugaagg

SEQ ID NO: 321121 - RNA, 19 nt, Artificial Sequence
  Synthetic
ucuagaaacuuuuugaagg

SEQ ID NO: 321122 - RNA, 20 nt, Artificial Sequence
  Synthetic
aucuagaaacuuuuugaagg

SEQ ID NO: 321123 - RNA, 21 nt, Artificial Sequence
  Synthetic
gaucuagaaacuuuuugaagg

SEQ ID NO: 321124 - RNA, 22 nt, Artificial Sequence
  Synthetic
ggaucuagaaacuuuuugaagg

SEQ ID NO: 321125 - RNA, 23 nt, Artificial Sequence
  Synthetic
uggaucuagaaacuuuuugaagg

SEQ ID NO: 321126 - RNA, 24 nt, Artificial Sequence
  Synthetic
uuggaucuagaaacuuuuugaagg

SEQ ID NO: 321127 - RNA, 18 nt, Artificial Sequence
  Synthetic
gagacauaaaaaauaagg

SEQ ID NO: 321128 - RNA, 19 nt, Artificial Sequence
  Synthetic
ggagacauaaaaaauaagg

SEQ ID NO: 321129 - RNA, 20 nt, Artificial Sequence
  Synthetic
aggagacauaaaaaauaagg

SEQ ID NO: 321130 - RNA, 21 nt, Artificial Sequence
  Synthetic
caggagacauaaaaaauaagg

SEQ ID NO: 321131 - RNA, 22 nt, Artificial Sequence
  Synthetic
acaggagacauaaaaaauaagg

SEQ ID NO: 321132 - RNA, 23 nt, Artificial Sequence
  Synthetic
uacaggagacauaaaaaauaagg

SEQ ID NO: 321133 - RNA, 24 nt, Artificial Sequence
  Synthetic
auacaggagacauaaaaaauaagg

SEQ ID NO: 321134 - RNA, 18 nt, Artificial Sequence
  Synthetic
cauaagaggaaaauaagg

SEQ ID NO: 321135 - RNA, 19 nt, Artificial Sequence
  Synthetic
gcauaagaggaaaauaagg

SEQ ID NO: 321136 - RNA, 20 nt, Artificial Sequence
  Synthetic
agcauaagaggaaaauaagg

SEQ ID NO: 321137 - RNA, 21 nt, Artificial Sequence
  Synthetic
aagcauaagaggaaaauaagg

SEQ ID NO: 321138 - RNA, 22 nt, Artificial Sequence
  Synthetic
uaagcauaagaggaaaauaagg

SEQ ID NO: 321139 - RNA, 23 nt, Artificial Sequence
  Synthetic
auaagcauaagaggaaaauaagg

SEQ ID NO: 321140 - RNA, 24 nt, Artificial Sequence
  Synthetic
cauaagcauaagaggaaaauaagg

SEQ ID NO: 321141 - RNA, 18 nt, Artificial Sequence
  Synthetic
agcgauaugaaaauaagg

SEQ ID NO: 321142 - RNA, 19 nt, Artificial Sequence
  Synthetic
gagcgauaugaaaauaagg

SEQ ID NO: 321143 - RNA, 20 nt, Artificial Sequence
  Synthetic
agagcgauaugaaaauaagg

SEQ ID NO: 321144 - RNA, 21 nt, Artificial Sequence
  Synthetic
gagagcgauaugaaaauaagg

SEQ ID NO: 321145 - RNA, 22 nt, Artificial Sequence
  Synthetic
agagagcgauaugaaaauaagg

SEQ ID NO: 321146 - RNA, 23 nt, Artificial Sequence
  Synthetic
gagagagcgauaugaaaauaagg

SEQ ID NO: 321147 - RNA, 24 nt, Artificial Sequence
  Synthetic
agagagagcgauaugaaaauaagg

SEQ ID NO: 321148 - RNA, 18 nt, Artificial Sequence
  Synthetic
aguggagugaaaauaagg

SEQ ID NO: 321149 - RNA, 19 nt, Artificial Sequence
  Synthetic
aaguggagugaaaauaagg

SEQ ID NO: 321150 - RNA, 20 nt, Artificial Sequence
  Synthetic
gaaguggagugaaaauaagg

SEQ ID NO: 321151 - RNA, 21 nt, Artificial Sequence
  Synthetic
agaaguggagugaaaauaagg

SEQ ID NO: 321152 - RNA, 22 nt, Artificial Sequence
  Synthetic
cagaaguggagugaaaauaagg

SEQ ID NO: 321153 - RNA, 23 nt, Artificial Sequence
  Synthetic
ucagaaguggagugaaaauaagg

SEQ ID NO: 321154 - RNA, 24 nt, Artificial Sequence
  Synthetic
uucagaaguggagugaaaauaagg

SEQ ID NO: 321155 - RNA, 18 nt, Artificial Sequence
  Synthetic
ugaaaucuuagaauaagg

SEQ ID NO: 321156 - RNA, 19 nt, Artificial Sequence
  Synthetic
gugaaaucuuagaauaagg

SEQ ID NO: 321157 - RNA, 20 nt, Artificial Sequence
  Synthetic
cgugaaaucuuagaauaagg

SEQ ID NO: 321158 - RNA, 21 nt, Artificial Sequence
  Synthetic
acgugaaaucuuagaauaagg

SEQ ID NO: 321159 - RNA, 22 nt, Artificial Sequence
  Synthetic
aacgugaaaucuuagaauaagg

SEQ ID NO: 321160 - RNA, 23 nt, Artificial Sequence
  Synthetic
aaacgugaaaucuuagaauaagg

SEQ ID NO: 321161 - RNA, 24 nt, Artificial Sequence
  Synthetic
caaacgugaaaucuuagaauaagg

SEQ ID NO: 321162 - RNA, 18 nt, Artificial Sequence
  Synthetic
gagagcuugggaauaagg

SEQ ID NO: 321163 - RNA, 19 nt, Artificial Sequence
  Synthetic
agagagcuugggaauaagg

SEQ ID NO: 321164 - RNA, 20 nt, Artificial Sequence
  Synthetic
gagagagcuugggaauaagg

SEQ ID NO: 321165 - RNA, 21 nt, Artificial Sequence
  Synthetic
agagagagcuugggaauaagg

SEQ ID NO: 321166 - RNA, 22 nt, Artificial Sequence
  Synthetic
aagagagagcuugggaauaagg

SEQ ID NO: 321167 - RNA, 23 nt, Artificial Sequence
  Synthetic
aaagagagagcuugggaauaagg

SEQ ID NO: 321168 - RNA, 24 nt, Artificial Sequence
  Synthetic
aaaagagagagcuugggaauaagg

SEQ ID NO: 321169 - RNA, 18 nt, Artificial Sequence
  Synthetic
ucugcaucaauaauaagg

SEQ ID NO: 321170 - RNA, 19 nt, Artificial Sequence
  Synthetic
cucugcaucaauaauaagg

SEQ ID NO: 321171 - RNA, 20 nt, Artificial Sequence
  Synthetic
ucucugcaucaauaauaagg

SEQ ID NO: 321172 - RNA, 21 nt, Artificial Sequence
  Synthetic
gucucugcaucaauaauaagg

SEQ ID NO: 321173 - RNA, 22 nt, Artificial Sequence
  Synthetic
ugucucugcaucaauaauaagg

SEQ ID NO: 321174 - RNA, 23 nt, Artificial Sequence
  Synthetic
augucucugcaucaauaauaagg

SEQ ID NO: 321175 - RNA, 24 nt, Artificial Sequence
  Synthetic
aaugucucugcaucaauaauaagg

SEQ ID NO: 321176 - RNA, 18 nt, Artificial Sequence
  Synthetic
ugaaauugagacauaagg

SEQ ID NO: 321177 - RNA, 19 nt, Artificial Sequence
  Synthetic
gugaaauugagacauaagg

SEQ ID NO: 321178 - RNA, 20 nt, Artificial Sequence
  Synthetic
agugaaauugagacauaagg

SEQ ID NO: 321179 - RNA, 21 nt, Artificial Sequence
  Synthetic
aagugaaauugagacauaagg

SEQ ID NO: 321180 - RNA, 22 nt, Artificial Sequence
  Synthetic
gaagugaaauugagacauaagg

SEQ ID NO: 321181 - RNA, 23 nt, Artificial Sequence
  Synthetic
agaagugaaauugagacauaagg

SEQ ID NO: 321182 - RNA, 24 nt, Artificial Sequence
  Synthetic
aagaagugaaauugagacauaagg

SEQ ID NO: 321183 - RNA, 18 nt, Artificial Sequence
  Synthetic
acaggcuauuacauaagg

SEQ ID NO: 321184 - RNA, 19 nt, Artificial Sequence
  Synthetic
cacaggcuauuacauaagg

SEQ ID NO: 321185 - RNA, 20 nt, Artificial Sequence
  Synthetic
ucacaggcuauuacauaagg

SEQ ID NO: 321186 - RNA, 21 nt, Artificial Sequence
  Synthetic
uucacaggcuauuacauaagg

SEQ ID NO: 321187 - RNA, 22 nt, Artificial Sequence
  Synthetic
auucacaggcuauuacauaagg

SEQ ID NO: 321188 - RNA, 23 nt, Artificial Sequence
  Synthetic
uauucacaggcuauuacauaagg

SEQ ID NO: 321189 - RNA, 24 nt, Artificial Sequence
  Synthetic
uuauucacaggcuauuacauaagg

SEQ ID NO: 321190 - RNA, 18 nt, Artificial Sequence
  Synthetic
cucgaaggaagcauaagg

SEQ ID NO: 321191 - RNA, 19 nt, Artificial Sequence
  Synthetic
gcucgaaggaagcauaagg

SEQ ID NO: 321192 - RNA, 20 nt, Artificial Sequence
  Synthetic
agcucgaaggaagcauaagg

SEQ ID NO: 321193 - RNA, 21 nt, Artificial Sequence
  Synthetic
aagcucgaaggaagcauaagg

SEQ ID NO: 321194 - RNA, 22 nt, Artificial Sequence
  Synthetic
uaagcucgaaggaagcauaagg

SEQ ID NO: 321195 - RNA, 23 nt, Artificial Sequence
  Synthetic
guaagcucgaaggaagcauaagg

SEQ ID NO: 321196 - RNA, 24 nt, Artificial Sequence
  Synthetic
aguaagcucgaaggaagcauaagg

SEQ ID NO: 321197 - RNA, 18 nt, Artificial Sequence
  Synthetic
gaccaaggaggcauaagg

SEQ ID NO: 321198 - RNA, 19 nt, Artificial Sequence
  Synthetic
cgaccaaggaggcauaagg

SEQ ID NO: 321199 - RNA, 20 nt, Artificial Sequence
  Synthetic
ucgaccaaggaggcauaagg

SEQ ID NO: 321200 - RNA, 21 nt, Artificial Sequence
  Synthetic
uucgaccaaggaggcauaagg

SEQ ID NO: 321201 - RNA, 22 nt, Artificial Sequence
  Synthetic
auucgaccaaggaggcauaagg

SEQ ID NO: 321202 - RNA, 23 nt, Artificial Sequence
  Synthetic
aauucgaccaaggaggcauaagg

SEQ ID NO: 321203 - RNA, 24 nt, Artificial Sequence
  Synthetic
gaauucgaccaaggaggcauaagg

SEQ ID NO: 321204 - RNA, 18 nt, Artificial Sequence
  Synthetic
acuaagaaaaucauaagg

SEQ ID NO: 321205 - RNA, 19 nt, Artificial Sequence
  Synthetic
uacuaagaaaaucauaagg

SEQ ID NO: 321206 - RNA, 20 nt, Artificial Sequence
  Synthetic
uuacuaagaaaaucauaagg

SEQ ID NO: 321207 - RNA, 21 nt, Artificial Sequence
  Synthetic
guuacuaagaaaaucauaagg

SEQ ID NO: 321208 - RNA, 22 nt, Artificial Sequence
  Synthetic
uguuacuaagaaaaucauaagg

SEQ ID NO: 321209 - RNA, 23 nt, Artificial Sequence
  Synthetic
auguuacuaagaaaaucauaagg

SEQ ID NO: 321210 - RNA, 24 nt, Artificial Sequence
  Synthetic
gauguuacuaagaaaaucauaagg

SEQ ID NO: 321211 - RNA, 18 nt, Artificial Sequence
  Synthetic
cuucccagucagauaagg

SEQ ID NO: 321212 - RNA, 19 nt, Artificial Sequence
  Synthetic
ucuucccagucagauaagg

SEQ ID NO: 321213 - RNA, 20 nt, Artificial Sequence
  Synthetic
aucuucccagucagauaagg

SEQ ID NO: 321214 - RNA, 21 nt, Artificial Sequence
  Synthetic
caucuucccagucagauaagg

SEQ ID NO: 321215 - RNA, 22 nt, Artificial Sequence
  Synthetic
ucaucuucccagucagauaagg

SEQ ID NO: 321216 - RNA, 23 nt, Artificial Sequence
  Synthetic
uucaucuucccagucagauaagg

SEQ ID NO: 321217 - RNA, 24 nt, Artificial Sequence
  Synthetic
auucaucuucccagucagauaagg

SEQ ID NO: 321218 - RNA, 18 nt, Artificial Sequence
  Synthetic
guaggggaagagauaagg

SEQ ID NO: 321219 - RNA, 19 nt, Artificial Sequence
  Synthetic
aguaggggaagagauaagg

SEQ ID NO: 321220 - RNA, 20 nt, Artificial Sequence
  Synthetic
uaguaggggaagagauaagg

SEQ ID NO: 321221 - RNA, 21 nt, Artificial Sequence
  Synthetic
cuaguaggggaagagauaagg

SEQ ID NO: 321222 - RNA, 22 nt, Artificial Sequence
  Synthetic
acuaguaggggaagagauaagg

SEQ ID NO: 321223 - RNA, 23 nt, Artificial Sequence
  Synthetic
aacuaguaggggaagagauaagg

SEQ ID NO: 321224 - RNA, 24 nt, Artificial Sequence
  Synthetic
aaacuaguaggggaagagauaagg

SEQ ID NO: 321225 - RNA, 18 nt, Artificial Sequence
  Synthetic
ugacauggaaugauaagg

SEQ ID NO: 321226 - RNA, 19 nt, Artificial Sequence
  Synthetic
uugacauggaaugauaagg

SEQ ID NO: 321227 - RNA, 20 nt, Artificial Sequence
  Synthetic
guugacauggaaugauaagg

SEQ ID NO: 321228 - RNA, 21 nt, Artificial Sequence
  Synthetic
uguugacauggaaugauaagg

SEQ ID NO: 321229 - RNA, 22 nt, Artificial Sequence
  Synthetic
cuguugacauggaaugauaagg

SEQ ID NO: 321230 - RNA, 23 nt, Artificial Sequence
  Synthetic
ccuguugacauggaaugauaagg

SEQ ID NO: 321231 - RNA, 24 nt, Artificial Sequence
  Synthetic
uccuguugacauggaaugauaagg

SEQ ID NO: 321232 - RNA, 18 nt, Artificial Sequence
  Synthetic
ugaguaaauaauauaagg

SEQ ID NO: 321233 - RNA, 19 nt, Artificial Sequence
  Synthetic
cugaguaaauaauauaagg

SEQ ID NO: 321234 - RNA, 20 nt, Artificial Sequence
  Synthetic
gcugaguaaauaauauaagg

SEQ ID NO: 321235 - RNA, 21 nt, Artificial Sequence
  Synthetic
ggcugaguaaauaauauaagg

SEQ ID NO: 321236 - RNA, 22 nt, Artificial Sequence
  Synthetic
aggcugaguaaauaauauaagg

SEQ ID NO: 321237 - RNA, 23 nt, Artificial Sequence
  Synthetic
uaggcugaguaaauaauauaagg

SEQ ID NO: 321238 - RNA, 24 nt, Artificial Sequence
  Synthetic
guaggcugaguaaauaauauaagg

SEQ ID NO: 321239 - RNA, 18 nt, Artificial Sequence
  Synthetic
ugucggauugauauaagg

SEQ ID NO: 321240 - RNA, 19 nt, Artificial Sequence
  Synthetic
uugucggauugauauaagg

SEQ ID NO: 321241 - RNA, 20 nt, Artificial Sequence
  Synthetic
auugucggauugauauaagg

SEQ ID NO: 321242 - RNA, 21 nt, Artificial Sequence
  Synthetic
aauugucggauugauauaagg

SEQ ID NO: 321243 - RNA, 22 nt, Artificial Sequence
  Synthetic
aaauugucggauugauauaagg

SEQ ID NO: 321244 - RNA, 23 nt, Artificial Sequence
  Synthetic
uaaauugucggauugauauaagg

SEQ ID NO: 321245 - RNA, 24 nt, Artificial Sequence
  Synthetic
uuaaauugucggauugauauaagg

SEQ ID NO: 321246 - RNA, 18 nt, Artificial Sequence
  Synthetic
auaguacaguauauaagg

SEQ ID NO: 321247 - RNA, 19 nt, Artificial Sequence
  Synthetic
gauaguacaguauauaagg

SEQ ID NO: 321248 - RNA, 20 nt, Artificial Sequence
  Synthetic
ugauaguacaguauauaagg

SEQ ID NO: 321249 - RNA, 21 nt, Artificial Sequence
  Synthetic
gugauaguacaguauauaagg

SEQ ID NO: 321250 - RNA, 22 nt, Artificial Sequence
  Synthetic
ggugauaguacaguauauaagg

SEQ ID NO: 321251 - RNA, 23 nt, Artificial Sequence
  Synthetic
uggugauaguacaguauauaagg

SEQ ID NO: 321252 - RNA, 24 nt, Artificial Sequence
  Synthetic
guggugauaguacaguauauaagg

SEQ ID NO: 321253 - RNA, 18 nt, Artificial Sequence
  Synthetic
auauauacuucuauaagg

SEQ ID NO: 321254 - RNA, 19 nt, Artificial Sequence
  Synthetic
cauauauacuucuauaagg

SEQ ID NO: 321255 - RNA, 20 nt, Artificial Sequence
  Synthetic
acauauauacuucuauaagg

SEQ ID NO: 321256 - RNA, 21 nt, Artificial Sequence
  Synthetic
aacauauauacuucuauaagg

SEQ ID NO: 321257 - RNA, 22 nt, Artificial Sequence
  Synthetic
uaacauauauacuucuauaagg

SEQ ID NO: 321258 - RNA, 23 nt, Artificial Sequence
  Synthetic
uuaacauauauacuucuauaagg

SEQ ID NO: 321259 - RNA, 24 nt, Artificial Sequence
  Synthetic
uuuaacauauauacuucuauaagg

SEQ ID NO: 321260 - RNA, 18 nt, Artificial Sequence
  Synthetic
cuugguuaaaguauaagg

SEQ ID NO: 321261 - RNA, 19 nt, Artificial Sequence
  Synthetic
ucuugguuaaaguauaagg

SEQ ID NO: 321262 - RNA, 20 nt, Artificial Sequence
  Synthetic
uucuugguuaaaguauaagg

SEQ ID NO: 321263 - RNA, 21 nt, Artificial Sequence
  Synthetic
cuucuugguuaaaguauaagg

SEQ ID NO: 321264 - RNA, 22 nt, Artificial Sequence
  Synthetic
ucuucuugguuaaaguauaagg

SEQ ID NO: 321265 - RNA, 23 nt, Artificial Sequence
  Synthetic
aucuucuugguuaaaguauaagg

SEQ ID NO: 321266 - RNA, 24 nt, Artificial Sequence
  Synthetic
caucuucuugguuaaaguauaagg

SEQ ID NO: 321267 - RNA, 18 nt, Artificial Sequence
  Synthetic
uggccaagagguauaagg

SEQ ID NO: 321268 - RNA, 19 nt, Artificial Sequence
  Synthetic
uuggccaagagguauaagg

SEQ ID NO: 321269 - RNA, 20 nt, Artificial Sequence
  Synthetic
guuggccaagagguauaagg

SEQ ID NO: 321270 - RNA, 21 nt, Artificial Sequence
  Synthetic
uguuggccaagagguauaagg

SEQ ID NO: 321271 - RNA, 22 nt, Artificial Sequence
  Synthetic
auguuggccaagagguauaagg

SEQ ID NO: 321272 - RNA, 23 nt, Artificial Sequence
  Synthetic
cauguuggccaagagguauaagg

SEQ ID NO: 321273 - RNA, 24 nt, Artificial Sequence
  Synthetic
acauguuggccaagagguauaagg

SEQ ID NO: 321274 - RNA, 18 nt, Artificial Sequence
  Synthetic
uuuguauaugguauaagg

SEQ ID NO: 321275 - RNA, 19 nt, Artificial Sequence
  Synthetic
uuuuguauaugguauaagg

SEQ ID NO: 321276 - RNA, 20 nt, Artificial Sequence
  Synthetic
uuuuuguauaugguauaagg

SEQ ID NO: 321277 - RNA, 21 nt, Artificial Sequence
  Synthetic
auuuuuguauaugguauaagg

SEQ ID NO: 321278 - RNA, 22 nt, Artificial Sequence
  Synthetic
aauuuuuguauaugguauaagg

SEQ ID NO: 321279 - RNA, 23 nt, Artificial Sequence
  Synthetic
uaauuuuuguauaugguauaagg

SEQ ID NO: 321280 - RNA, 24 nt, Artificial Sequence
  Synthetic
uuaauuuuuguauaugguauaagg

SEQ ID NO: 321281 - RNA, 18 nt, Artificial Sequence
  Synthetic
cuucauuauuuuauaagg

SEQ ID NO: 321282 - RNA, 19 nt, Artificial Sequence
  Synthetic
gcuucauuauuuuauaagg

SEQ ID NO: 321283 - RNA, 20 nt, Artificial Sequence
  Synthetic
ugcuucauuauuuuauaagg

SEQ ID NO: 321284 - RNA, 21 nt, Artificial Sequence
  Synthetic
cugcuucauuauuuuauaagg

SEQ ID NO: 321285 - RNA, 22 nt, Artificial Sequence
  Synthetic
ccugcuucauuauuuuauaagg

SEQ ID NO: 321286 - RNA, 23 nt, Artificial Sequence
  Synthetic
cccugcuucauuauuuuauaagg

SEQ ID NO: 321287 - RNA, 24 nt, Artificial Sequence
  Synthetic
gcccugcuucauuauuuuauaagg

SEQ ID NO: 321288 - RNA, 18 nt, Artificial Sequence
  Synthetic
caaaaacacuagcuaagg

SEQ ID NO: 321289 - RNA, 19 nt, Artificial Sequence
  Synthetic
gcaaaaacacuagcuaagg

SEQ ID NO: 321290 - RNA, 20 nt, Artificial Sequence
  Synthetic
agcaaaaacacuagcuaagg

SEQ ID NO: 321291 - RNA, 21 nt, Artificial Sequence
  Synthetic
uagcaaaaacacuagcuaagg

SEQ ID NO: 321292 - RNA, 22 nt, Artificial Sequence
  Synthetic
auagcaaaaacacuagcuaagg

SEQ ID NO: 321293 - RNA, 23 nt, Artificial Sequence
  Synthetic
aauagcaaaaacacuagcuaagg

SEQ ID NO: 321294 - RNA, 24 nt, Artificial Sequence
  Synthetic
uaauagcaaaaacacuagcuaagg

SEQ ID NO: 321295 - RNA, 18 nt, Artificial Sequence
  Synthetic
cccagaguguagcuaagg

SEQ ID NO: 321296 - RNA, 19 nt, Artificial Sequence
  Synthetic
ucccagaguguagcuaagg

SEQ ID NO: 321297 - RNA, 20 nt, Artificial Sequence
  Synthetic
aucccagaguguagcuaagg

SEQ ID NO: 321298 - RNA, 21 nt, Artificial Sequence
  Synthetic
gaucccagaguguagcuaagg

SEQ ID NO: 321299 - RNA, 22 nt, Artificial Sequence
  Synthetic
ugaucccagaguguagcuaagg

SEQ ID NO: 321300 - RNA, 23 nt, Artificial Sequence
  Synthetic
augaucccagaguguagcuaagg

SEQ ID NO: 321301 - RNA, 24 nt, Artificial Sequence
  Synthetic
aaugaucccagaguguagcuaagg

SEQ ID NO: 321302 - RNA, 18 nt, Artificial Sequence
  Synthetic
cacuuuggaaggcuaagg

SEQ ID NO: 321303 - RNA, 19 nt, Artificial Sequence
  Synthetic
gcacuuuggaaggcuaagg

SEQ ID NO: 321304 - RNA, 20 nt, Artificial Sequence
  Synthetic
agcacuuuggaaggcuaagg

SEQ ID NO: 321305 - RNA, 21 nt, Artificial Sequence
  Synthetic
uagcacuuuggaaggcuaagg

SEQ ID NO: 321306 - RNA, 22 nt, Artificial Sequence
  Synthetic
cuagcacuuuggaaggcuaagg

SEQ ID NO: 321307 - RNA, 23 nt, Artificial Sequence
  Synthetic
ccuagcacuuuggaaggcuaagg

SEQ ID NO: 321308 - RNA, 24 nt, Artificial Sequence
  Synthetic
uccuagcacuuuggaaggcuaagg

SEQ ID NO: 321309 - RNA, 18 nt, Artificial Sequence
  Synthetic
caauuugggaggcuaagg

SEQ ID NO: 321310 - RNA, 19 nt, Artificial Sequence
  Synthetic
gcaauuugggaggcuaagg

SEQ ID NO: 321311 - RNA, 20 nt, Artificial Sequence
  Synthetic
agcaauuugggaggcuaagg

SEQ ID NO: 321312 - RNA, 21 nt, Artificial Sequence
  Synthetic
cagcaauuugggaggcuaagg

SEQ ID NO: 321313 - RNA, 22 nt, Artificial Sequence
  Synthetic
ccagcaauuugggaggcuaagg

SEQ ID NO: 321314 - RNA, 23 nt, Artificial Sequence
  Synthetic
cccagcaauuugggaggcuaagg

SEQ ID NO: 321315 - RNA, 24 nt, Artificial Sequence
  Synthetic
ucccagcaauuugggaggcuaagg

SEQ ID NO: 321316 - RNA, 18 nt, Artificial Sequence
  Synthetic
auucagugugugcuaagg

SEQ ID NO: 321317 - RNA, 19 nt, Artificial Sequence
  Synthetic
aauucagugugugcuaagg

SEQ ID NO: 321318 - RNA, 20 nt, Artificial Sequence
  Synthetic
aaauucagugugugcuaagg

SEQ ID NO: 321319 - RNA, 21 nt, Artificial Sequence
  Synthetic
gaaauucagugugugcuaagg

SEQ ID NO: 321320 - RNA, 22 nt, Artificial Sequence
  Synthetic
ugaaauucagugugugcuaagg

SEQ ID NO: 321321 - RNA, 23 nt, Artificial Sequence
  Synthetic
augaaauucagugugugcuaagg

SEQ ID NO: 321322 - RNA, 24 nt, Artificial Sequence
  Synthetic
uaugaaauucagugugugcuaagg

SEQ ID NO: 321323 - RNA, 18 nt, Artificial Sequence
  Synthetic
ggaagggaggaaguaagg

SEQ ID NO: 321324 - RNA, 19 nt, Artificial Sequence
  Synthetic
aggaagggaggaaguaagg

SEQ ID NO: 321325 - RNA, 20 nt, Artificial Sequence
  Synthetic
aaggaagggaggaaguaagg

SEQ ID NO: 321326 - RNA, 21 nt, Artificial Sequence
  Synthetic
gaaggaagggaggaaguaagg

SEQ ID NO: 321327 - RNA, 22 nt, Artificial Sequence
  Synthetic
ggaaggaagggaggaaguaagg

SEQ ID NO: 321328 - RNA, 23 nt, Artificial Sequence
  Synthetic
aggaaggaagggaggaaguaagg

SEQ ID NO: 321329 - RNA, 24 nt, Artificial Sequence
  Synthetic
gaggaaggaagggaggaaguaagg

SEQ ID NO: 321330 - RNA, 18 nt, Artificial Sequence
  Synthetic
uaaaaauuaucaguaagg

SEQ ID NO: 321331 - RNA, 19 nt, Artificial Sequence
  Synthetic
auaaaaauuaucaguaagg

SEQ ID NO: 321332 - RNA, 20 nt, Artificial Sequence
  Synthetic
gauaaaaauuaucaguaagg

SEQ ID NO: 321333 - RNA, 21 nt, Artificial Sequence
  Synthetic
agauaaaaauuaucaguaagg

SEQ ID NO: 321334 - RNA, 22 nt, Artificial Sequence
  Synthetic
uagauaaaaauuaucaguaagg

SEQ ID NO: 321335 - RNA, 23 nt, Artificial Sequence
  Synthetic
uuagauaaaaauuaucaguaagg

SEQ ID NO: 321336 - RNA, 24 nt, Artificial Sequence
  Synthetic
auuagauaaaaauuaucaguaagg

SEQ ID NO: 321337 - RNA, 18 nt, Artificial Sequence
  Synthetic
ccucaaaggaacguaagg

SEQ ID NO: 321338 - RNA, 19 nt, Artificial Sequence
  Synthetic
uccucaaaggaacguaagg

SEQ ID NO: 321339 - RNA, 20 nt, Artificial Sequence
  Synthetic
uuccucaaaggaacguaagg

SEQ ID NO: 321340 - RNA, 21 nt, Artificial Sequence
  Synthetic
guuccucaaaggaacguaagg

SEQ ID NO: 321341 - RNA, 22 nt, Artificial Sequence
  Synthetic
aguuccucaaaggaacguaagg

SEQ ID NO: 321342 - RNA, 23 nt, Artificial Sequence
  Synthetic
aaguuccucaaaggaacguaagg

SEQ ID NO: 321343 - RNA, 24 nt, Artificial Sequence
  Synthetic
aaaguuccucaaaggaacguaagg

SEQ ID NO: 321344 - RNA, 18 nt, Artificial Sequence
  Synthetic
cugcaacgcuacguaagg

SEQ ID NO: 321345 - RNA, 19 nt, Artificial Sequence
  Synthetic
ccugcaacgcuacguaagg

SEQ ID NO: 321346 - RNA, 20 nt, Artificial Sequence
  Synthetic
gccugcaacgcuacguaagg

SEQ ID NO: 321347 - RNA, 21 nt, Artificial Sequence
  Synthetic
ugccugcaacgcuacguaagg

SEQ ID NO: 321348 - RNA, 22 nt, Artificial Sequence
  Synthetic
augccugcaacgcuacguaagg

SEQ ID NO: 321349 - RNA, 23 nt, Artificial Sequence
  Synthetic
uaugccugcaacgcuacguaagg

SEQ ID NO: 321350 - RNA, 24 nt, Artificial Sequence
  Synthetic
auaugccugcaacgcuacguaagg

SEQ ID NO: 321351 - RNA, 18 nt, Artificial Sequence
  Synthetic
caaagcuaaagcguaagg

SEQ ID NO: 321352 - RNA, 19 nt, Artificial Sequence
  Synthetic
gcaaagcuaaagcguaagg

SEQ ID NO: 321353 - RNA, 20 nt, Artificial Sequence
  Synthetic
agcaaagcuaaagcguaagg

SEQ ID NO: 321354 - RNA, 21 nt, Artificial Sequence
  Synthetic
gagcaaagcuaaagcguaagg

SEQ ID NO: 321355 - RNA, 22 nt, Artificial Sequence
  Synthetic
agagcaaagcuaaagcguaagg

SEQ ID NO: 321356 - RNA, 23 nt, Artificial Sequence
  Synthetic
aagagcaaagcuaaagcguaagg

SEQ ID NO: 321357 - RNA, 24 nt, Artificial Sequence
  Synthetic
aaagagcaaagcuaaagcguaagg

SEQ ID NO: 321358 - RNA, 18 nt, Artificial Sequence
  Synthetic
uuuguauaagggguaagg

SEQ ID NO: 321359 - RNA, 19 nt, Artificial Sequence
  Synthetic
uuuuguauaagggguaagg

SEQ ID NO: 321360 - RNA, 20 nt, Artificial Sequence
  Synthetic
uuuuuguauaagggguaagg

SEQ ID NO: 321361 - RNA, 21 nt, Artificial Sequence
  Synthetic
auuuuuguauaagggguaagg

SEQ ID NO: 321362 - RNA, 22 nt, Artificial Sequence
  Synthetic
gauuuuuguauaagggguaagg

SEQ ID NO: 321363 - RNA, 23 nt, Artificial Sequence
  Synthetic
ugauuuuuguauaagggguaagg

SEQ ID NO: 321364 - RNA, 24 nt, Artificial Sequence
  Synthetic
uugauuuuuguauaagggguaagg

SEQ ID NO: 321365 - RNA, 18 nt, Artificial Sequence
  Synthetic
gagcauuauaugguaagg

SEQ ID NO: 321366 - RNA, 19 nt, Artificial Sequence
  Synthetic
agagcauuauaugguaagg

SEQ ID NO: 321367 - RNA, 20 nt, Artificial Sequence
  Synthetic
aagagcauuauaugguaagg

SEQ ID NO: 321368 - RNA, 21 nt, Artificial Sequence
  Synthetic
uaagagcauuauaugguaagg

SEQ ID NO: 321369 - RNA, 22 nt, Artificial Sequence
  Synthetic
auaagagcauuauaugguaagg

SEQ ID NO: 321370 - RNA, 23 nt, Artificial Sequence
  Synthetic
cauaagagcauuauaugguaagg

SEQ ID NO: 321371 - RNA, 24 nt, Artificial Sequence
  Synthetic
gcauaagagcauuauaugguaagg

SEQ ID NO: 321372 - RNA, 18 nt, Artificial Sequence
  Synthetic
aacugaaaauugguaagg

SEQ ID NO: 321373 - RNA, 19 nt, Artificial Sequence
  Synthetic
aaacugaaaauugguaagg

SEQ ID NO: 321374 - RNA, 20 nt, Artificial Sequence
  Synthetic
uaaacugaaaauugguaagg

SEQ ID NO: 321375 - RNA, 21 nt, Artificial Sequence
  Synthetic
auaaacugaaaauugguaagg

SEQ ID NO: 321376 - RNA, 22 nt, Artificial Sequence
  Synthetic
aauaaacugaaaauugguaagg

SEQ ID NO: 321377 - RNA, 23 nt, Artificial Sequence
  Synthetic
aaauaaacugaaaauugguaagg

SEQ ID NO: 321378 - RNA, 24 nt, Artificial Sequence
  Synthetic
gaaauaaacugaaaauugguaagg

SEQ ID NO: 321379 - RNA, 18 nt, Artificial Sequence
  Synthetic
acucuaguagcuguaagg

SEQ ID NO: 321380 - RNA, 19 nt, Artificial Sequence
  Synthetic
cacucuaguagcuguaagg

SEQ ID NO: 321381 - RNA, 20 nt, Artificial Sequence
  Synthetic
ccacucuaguagcuguaagg

SEQ ID NO: 321382 - RNA, 21 nt, Artificial Sequence
  Synthetic
accacucuaguagcuguaagg

SEQ ID NO: 321383 - RNA, 22 nt, Artificial Sequence
  Synthetic
gaccacucuaguagcuguaagg

SEQ ID NO: 321384 - RNA, 23 nt, Artificial Sequence
  Synthetic
ugaccacucuaguagcuguaagg

SEQ ID NO: 321385 - RNA, 24 nt, Artificial Sequence
  Synthetic
uugaccacucuaguagcuguaagg

SEQ ID NO: 321386 - RNA, 18 nt, Artificial Sequence
  Synthetic
uuuguauaagguguaagg

SEQ ID NO: 321387 - RNA, 19 nt, Artificial Sequence
  Synthetic
uuuuguauaagguguaagg

SEQ ID NO: 321388 - RNA, 20 nt, Artificial Sequence
  Synthetic
uuuuuguauaagguguaagg

SEQ ID NO: 321389 - RNA, 24 nt, Artificial Sequence
  Synthetic
uuaauuuuuguauaagguguaagg

SEQ ID NO: 321390 - RNA, 18 nt, Artificial Sequence
  Synthetic
uuuguauaugguguaagg

SEQ ID NO: 321391 - RNA, 19 nt, Artificial Sequence
  Synthetic
uuuuguauaugguguaagg

SEQ ID NO: 321392 - RNA, 20 nt, Artificial Sequence
  Synthetic
uuuuuguauaugguguaagg

SEQ ID NO: 321393 - RNA, 21 nt, Artificial Sequence
  Synthetic
auuuuuguauaugguguaagg

SEQ ID NO: 321394 - RNA, 22 nt, Artificial Sequence
  Synthetic
aauuuuuguauaugguguaagg

SEQ ID NO: 321395 - RNA, 23 nt, Artificial Sequence
  Synthetic
uaauuuuuguauaugguguaagg

SEQ ID NO: 321396 - RNA, 24 nt, Artificial Sequence
  Synthetic
uuaauuuuuguauaugguguaagg

SEQ ID NO: 321397 - RNA, 18 nt, Artificial Sequence
  Synthetic
uaaauaaggaaauuaagg

SEQ ID NO: 321398 - RNA, 19 nt, Artificial Sequence
  Synthetic
auaaauaaggaaauuaagg

SEQ ID NO: 321399 - RNA, 20 nt, Artificial Sequence
  Synthetic
gauaaauaaggaaauuaagg

SEQ ID NO: 321400 - RNA, 21 nt, Artificial Sequence
  Synthetic
ggauaaauaaggaaauuaagg

SEQ ID NO: 321401 - RNA, 22 nt, Artificial Sequence
  Synthetic
uggauaaauaaggaaauuaagg

SEQ ID NO: 321402 - RNA, 23 nt, Artificial Sequence
  Synthetic
cuggauaaauaaggaaauuaagg

SEQ ID NO: 321403 - RNA, 24 nt, Artificial Sequence
  Synthetic
gcuggauaaauaaggaaauuaagg

SEQ ID NO: 321404 - RNA, 18 nt, Artificial Sequence
  Synthetic
ccucuuccccuauuaagg

SEQ ID NO: 321405 - RNA, 19 nt, Artificial Sequence
  Synthetic
cccucuuccccuauuaagg

SEQ ID NO: 321406 - RNA, 20 nt, Artificial Sequence
  Synthetic
ccccucuuccccuauuaagg

SEQ ID NO: 321407 - RNA, 21 nt, Artificial Sequence
  Synthetic
gccccucuuccccuauuaagg

SEQ ID NO: 321408 - RNA, 22 nt, Artificial Sequence
  Synthetic
ugccccucuuccccuauuaagg

SEQ ID NO: 321409 - RNA, 23 nt, Artificial Sequence
  Synthetic
uugccccucuuccccuauuaagg

SEQ ID NO: 321410 - RNA, 24 nt, Artificial Sequence
  Synthetic
uuugccccucuuccccuauuaagg

SEQ ID NO: 321411 - RNA, 18 nt, Artificial Sequence
  Synthetic
cuccuuuuauccuuaagg

SEQ ID NO: 321412 - RNA, 19 nt, Artificial Sequence
  Synthetic
acuccuuuuauccuuaagg

SEQ ID NO: 321413 - RNA, 20 nt, Artificial Sequence
  Synthetic
uacuccuuuuauccuuaagg

SEQ ID NO: 321414 - RNA, 21 nt, Artificial Sequence
  Synthetic
cuacuccuuuuauccuuaagg

SEQ ID NO: 321415 - RNA, 22 nt, Artificial Sequence
  Synthetic
acuacuccuuuuauccuuaagg

SEQ ID NO: 321416 - RNA, 23 nt, Artificial Sequence
  Synthetic
aacuacuccuuuuauccuuaagg

SEQ ID NO: 321417 - RNA, 24 nt, Artificial Sequence
  Synthetic
aaacuacuccuuuuauccuuaagg

SEQ ID NO: 321418 - RNA, 18 nt, Artificial Sequence
  Synthetic
ccaauuaucuucuuaagg

SEQ ID NO: 321419 - RNA, 19 nt, Artificial Sequence
  Synthetic
accaauuaucuucuuaagg

SEQ ID NO: 321420 - RNA, 20 nt, Artificial Sequence
  Synthetic
aaccaauuaucuucuuaagg

SEQ ID NO: 321421 - RNA, 21 nt, Artificial Sequence
  Synthetic
aaaccaauuaucuucuuaagg

SEQ ID NO: 321422 - RNA, 22 nt, Artificial Sequence
  Synthetic
aaaaccaauuaucuucuuaagg

SEQ ID NO: 321423 - RNA, 23 nt, Artificial Sequence
  Synthetic
aaaaaccaauuaucuucuuaagg

SEQ ID NO: 321424 - RNA, 24 nt, Artificial Sequence
  Synthetic
uaaaaaccaauuaucuucuuaagg

SEQ ID NO: 321425 - RNA, 18 nt, Artificial Sequence
  Synthetic
gaccauuugacguuaagg

SEQ ID NO: 321426 - RNA, 19 nt, Artificial Sequence
  Synthetic
ggaccauuugacguuaagg

SEQ ID NO: 321427 - RNA, 20 nt, Artificial Sequence
  Synthetic
aggaccauuugacguuaagg

SEQ ID NO: 321428 - RNA, 21 nt, Artificial Sequence
  Synthetic
aaggaccauuugacguuaagg

SEQ ID NO: 321429 - RNA, 22 nt, Artificial Sequence
  Synthetic
gaaggaccauuugacguuaagg

SEQ ID NO: 321430 - RNA, 23 nt, Artificial Sequence
  Synthetic
agaaggaccauuugacguuaagg

SEQ ID NO: 321431 - RNA, 24 nt, Artificial Sequence
  Synthetic
aagaaggaccauuugacguuaagg

SEQ ID NO: 321432 - RNA, 18 nt, Artificial Sequence
  Synthetic
cuacucgggagguuaagg

SEQ ID NO: 321433 - RNA, 19 nt, Artificial Sequence
  Synthetic
gcuacucgggagguuaagg

SEQ ID NO: 321434 - RNA, 20 nt, Artificial Sequence
  Synthetic
agcuacucgggagguuaagg

SEQ ID NO: 321435 - RNA, 21 nt, Artificial Sequence
  Synthetic
cagcuacucgggagguuaagg

SEQ ID NO: 321436 - RNA, 22 nt, Artificial Sequence
  Synthetic
ccagcuacucgggagguuaagg

SEQ ID NO: 321437 - RNA, 23 nt, Artificial Sequence
  Synthetic
cccagcuacucgggagguuaagg

SEQ ID NO: 321438 - RNA, 24 nt, Artificial Sequence
  Synthetic
ucccagcuacucgggagguuaagg

SEQ ID NO: 321439 - RNA, 18 nt, Artificial Sequence
  Synthetic
cugagcugcugguuaagg

SEQ ID NO: 321440 - RNA, 19 nt, Artificial Sequence
  Synthetic
acugagcugcugguuaagg

SEQ ID NO: 321441 - RNA, 20 nt, Artificial Sequence
  Synthetic
cacugagcugcugguuaagg

SEQ ID NO: 321442 - RNA, 21 nt, Artificial Sequence
  Synthetic
ucacugagcugcugguuaagg

SEQ ID NO: 321443 - RNA, 22 nt, Artificial Sequence
  Synthetic
aucacugagcugcugguuaagg

SEQ ID NO: 321444 - RNA, 23 nt, Artificial Sequence
  Synthetic
aaucacugagcugcugguuaagg

SEQ ID NO: 321445 - RNA, 24 nt, Artificial Sequence
  Synthetic
gaaucacugagcugcugguuaagg

SEQ ID NO: 321446 - RNA, 18 nt, Artificial Sequence
  Synthetic
aauauuuggaauuuaagg

SEQ ID NO: 321447 - RNA, 19 nt, Artificial Sequence
  Synthetic
gaauauuuggaauuuaagg

SEQ ID NO: 321448 - RNA, 20 nt, Artificial Sequence
  Synthetic
agaauauuuggaauuuaagg

SEQ ID NO: 321449 - RNA, 21 nt, Artificial Sequence
  Synthetic
cagaauauuuggaauuuaagg

SEQ ID NO: 321450 - RNA, 22 nt, Artificial Sequence
  Synthetic
ucagaauauuuggaauuuaagg

SEQ ID NO: 321451 - RNA, 23 nt, Artificial Sequence
  Synthetic
uucagaauauuuggaauuuaagg

SEQ ID NO: 321452 - RNA, 24 nt, Artificial Sequence
  Synthetic
auucagaauauuuggaauuuaagg

SEQ ID NO: 321453 - RNA, 18 nt, Artificial Sequence
  Synthetic
uaauugcuagauuuaagg

SEQ ID NO: 321454 - RNA, 19 nt, Artificial Sequence
  Synthetic
cuaauugcuagauuuaagg

SEQ ID NO: 321455 - RNA, 20 nt, Artificial Sequence
  Synthetic
acuaauugcuagauuuaagg

SEQ ID NO: 321456 - RNA, 21 nt, Artificial Sequence
  Synthetic
uacuaauugcuagauuuaagg

SEQ ID NO: 321457 - RNA, 22 nt, Artificial Sequence
  Synthetic
guacuaauugcuagauuuaagg

SEQ ID NO: 321458 - RNA, 23 nt, Artificial Sequence
  Synthetic
uguacuaauugcuagauuuaagg

SEQ ID NO: 321459 - RNA, 24 nt, Artificial Sequence
  Synthetic
auguacuaauugcuagauuuaagg

SEQ ID NO: 321460 - RNA, 18 nt, Artificial Sequence
  Synthetic
gaaacccccacuuuaagg

SEQ ID NO: 321461 - RNA, 19 nt, Artificial Sequence
  Synthetic
ugaaacccccacuuuaagg

SEQ ID NO: 321462 - RNA, 20 nt, Artificial Sequence
  Synthetic
uugaaacccccacuuuaagg

SEQ ID NO: 321463 - RNA, 21 nt, Artificial Sequence
  Synthetic
uuugaaacccccacuuuaagg

SEQ ID NO: 321464 - RNA, 22 nt, Artificial Sequence
  Synthetic
cuuugaaacccccacuuuaagg

SEQ ID NO: 321465 - RNA, 23 nt, Artificial Sequence
  Synthetic
acuuugaaacccccacuuuaagg

SEQ ID NO: 321466 - RNA, 24 nt, Artificial Sequence
  Synthetic
gacuuugaaacccccacuuuaagg

SEQ ID NO: 321467 - RNA, 18 nt, Artificial Sequence
  Synthetic
gcuggauguaguuuaagg

SEQ ID NO: 321468 - RNA, 19 nt, Artificial Sequence
  Synthetic
ggcuggauguaguuuaagg

SEQ ID NO: 321469 - RNA, 20 nt, Artificial Sequence
  Synthetic
aggcuggauguaguuuaagg

SEQ ID NO: 321470 - RNA, 21 nt, Artificial Sequence
  Synthetic
aaggcuggauguaguuuaagg

SEQ ID NO: 321471 - RNA, 22 nt, Artificial Sequence
  Synthetic
caaggcuggauguaguuuaagg

SEQ ID NO: 321472 - RNA, 23 nt, Artificial Sequence
  Synthetic
acaaggcuggauguaguuuaagg

SEQ ID NO: 321473 - RNA, 24 nt, Artificial Sequence
  Synthetic
aacaaggcuggauguaguuuaagg

SEQ ID NO: 321474 - RNA, 18 nt, Artificial Sequence
  Synthetic
ucuucuacauguuuaagg

SEQ ID NO: 321475 - RNA, 19 nt, Artificial Sequence
  Synthetic
gucuucuacauguuuaagg

SEQ ID NO: 321476 - RNA, 20 nt, Artificial Sequence
  Synthetic
ugucuucuacauguuuaagg

SEQ ID NO: 321477 - RNA, 21 nt, Artificial Sequence
  Synthetic
uugucuucuacauguuuaagg

SEQ ID NO: 321478 - RNA, 22 nt, Artificial Sequence
  Synthetic
uuugucuucuacauguuuaagg

SEQ ID NO: 321479 - RNA, 23 nt, Artificial Sequence
  Synthetic
cuuugucuucuacauguuuaagg

SEQ ID NO: 321480 - RNA, 24 nt, Artificial Sequence
  Synthetic
acuuugucuucuacauguuuaagg

SEQ ID NO: 321481 - RNA, 18 nt, Artificial Sequence
  Synthetic
ugcaccuuucaaaacagg

SEQ ID NO: 321482 - RNA, 19 nt, Artificial Sequence
  Synthetic
cugcaccuuucaaaacagg

SEQ ID NO: 321483 - RNA, 20 nt, Artificial Sequence
  Synthetic
acugcaccuuucaaaacagg

SEQ ID NO: 321484 - RNA, 21 nt, Artificial Sequence
  Synthetic
gacugcaccuuucaaaacagg

SEQ ID NO: 321485 - RNA, 22 nt, Artificial Sequence
  Synthetic
ugacugcaccuuucaaaacagg

SEQ ID NO: 321486 - RNA, 23 nt, Artificial Sequence
  Synthetic
uugacugcaccuuucaaaacagg

SEQ ID NO: 321487 - RNA, 24 nt, Artificial Sequence
  Synthetic
auugacugcaccuuucaaaacagg

SEQ ID NO: 321488 - RNA, 18 nt, Artificial Sequence
  Synthetic
auaagagcaggaaacagg

SEQ ID NO: 321489 - RNA, 19 nt, Artificial Sequence
  Synthetic
cauaagagcaggaaacagg

SEQ ID NO: 321490 - RNA, 20 nt, Artificial Sequence
  Synthetic
acauaagagcaggaaacagg

SEQ ID NO: 321491 - RNA, 21 nt, Artificial Sequence
  Synthetic
cacauaagagcaggaaacagg

SEQ ID NO: 321492 - RNA, 22 nt, Artificial Sequence
  Synthetic
ucacauaagagcaggaaacagg

SEQ ID NO: 321493 - RNA, 23 nt, Artificial Sequence
  Synthetic
uucacauaagagcaggaaacagg

SEQ ID NO: 321494 - RNA, 24 nt, Artificial Sequence
  Synthetic
auucacauaagagcaggaaacagg

SEQ ID NO: 321495 - RNA, 18 nt, Artificial Sequence
  Synthetic
uagaacaaaugaaacagg

SEQ ID NO: 321496 - RNA, 19 nt, Artificial Sequence
  Synthetic
cuagaacaaaugaaacagg

SEQ ID NO: 321497 - RNA, 20 nt, Artificial Sequence
  Synthetic
acuagaacaaaugaaacagg

SEQ ID NO: 321498 - RNA, 21 nt, Artificial Sequence
  Synthetic
cacuagaacaaaugaaacagg

SEQ ID NO: 321499 - RNA, 22 nt, Artificial Sequence
  Synthetic
ucacuagaacaaaugaaacagg

SEQ ID NO: 321500 - RNA, 23 nt, Artificial Sequence
  Synthetic
cucacuagaacaaaugaaacagg

SEQ ID NO: 321501 - RNA, 24 nt, Artificial Sequence
  Synthetic
acucacuagaacaaaugaaacagg

SEQ ID NO: 321502 - RNA, 18 nt, Artificial Sequence
  Synthetic
agagauguccuaaacagg

SEQ ID NO: 321503 - RNA, 19 nt, Artificial Sequence
  Synthetic
aagagauguccuaaacagg

SEQ ID NO: 321504 - RNA, 20 nt, Artificial Sequence
  Synthetic
aaagagauguccuaaacagg

SEQ ID NO: 321505 - RNA, 21 nt, Artificial Sequence
  Synthetic
gaaagagauguccuaaacagg

SEQ ID NO: 321506 - RNA, 22 nt, Artificial Sequence
  Synthetic
ugaaagagauguccuaaacagg

SEQ ID NO: 321507 - RNA, 23 nt, Artificial Sequence
  Synthetic
augaaagagauguccuaaacagg

SEQ ID NO: 321508 - RNA, 24 nt, Artificial Sequence
  Synthetic
uaugaaagagauguccuaaacagg

SEQ ID NO: 321509 - RNA, 18 nt, Artificial Sequence
  Synthetic
uacugauaaaccaacagg

SEQ ID NO: 321510 - RNA, 19 nt, Artificial Sequence
  Synthetic
uuacugauaaaccaacagg

SEQ ID NO: 321511 - RNA, 20 nt, Artificial Sequence
  Synthetic
auuacugauaaaccaacagg

SEQ ID NO: 321512 - RNA, 21 nt, Artificial Sequence
  Synthetic
cauuacugauaaaccaacagg

SEQ ID NO: 321513 - RNA, 22 nt, Artificial Sequence
  Synthetic
acauuacugauaaaccaacagg

SEQ ID NO: 321514 - RNA, 23 nt, Artificial Sequence
  Synthetic
uacauuacugauaaaccaacagg

SEQ ID NO: 321515 - RNA, 24 nt, Artificial Sequence
  Synthetic
uuacauuacugauaaaccaacagg

SEQ ID NO: 321516 - RNA, 18 nt, Artificial Sequence
  Synthetic
uguugcaaccccaacagg

SEQ ID NO: 321517 - RNA, 19 nt, Artificial Sequence
  Synthetic
guguugcaaccccaacagg

SEQ ID NO: 321518 - RNA, 20 nt, Artificial Sequence
  Synthetic
uguguugcaaccccaacagg

SEQ ID NO: 321519 - RNA, 21 nt, Artificial Sequence
  Synthetic
auguguugcaaccccaacagg

SEQ ID NO: 321520 - RNA, 22 nt, Artificial Sequence
  Synthetic
cauguguugcaaccccaacagg

SEQ ID NO: 321521 - RNA, 23 nt, Artificial Sequence
  Synthetic
gcauguguugcaaccccaacagg

SEQ ID NO: 321522 - RNA, 24 nt, Artificial Sequence
  Synthetic
agcauguguugcaaccccaacagg

SEQ ID NO: 321523 - RNA, 18 nt, Artificial Sequence
  Synthetic
aaugaagagaucaacagg

SEQ ID NO: 321524 - RNA, 19 nt, Artificial Sequence
  Synthetic
caaugaagagaucaacagg

SEQ ID NO: 321525 - RNA, 20 nt, Artificial Sequence
  Synthetic
gcaaugaagagaucaacagg

SEQ ID NO: 321526 - RNA, 21 nt, Artificial Sequence
  Synthetic
ugcaaugaagagaucaacagg

SEQ ID NO: 321527 - RNA, 22 nt, Artificial Sequence
  Synthetic
uugcaaugaagagaucaacagg

SEQ ID NO: 321528 - RNA, 23 nt, Artificial Sequence
  Synthetic
auugcaaugaagagaucaacagg

SEQ ID NO: 321529 - RNA, 24 nt, Artificial Sequence
  Synthetic
gauugcaaugaagagaucaacagg

SEQ ID NO: 321530 - RNA, 18 nt, Artificial Sequence
  Synthetic
uagaugcuagagaacagg

SEQ ID NO: 321531 - RNA, 19 nt, Artificial Sequence
  Synthetic
uuagaugcuagagaacagg

SEQ ID NO: 321532 - RNA, 20 nt, Artificial Sequence
  Synthetic
cuuagaugcuagagaacagg

SEQ ID NO: 321533 - RNA, 21 nt, Artificial Sequence
  Synthetic
acuuagaugcuagagaacagg

SEQ ID NO: 321534 - RNA, 22 nt, Artificial Sequence
  Synthetic
uacuuagaugcuagagaacagg

SEQ ID NO: 321535 - RNA, 23 nt, Artificial Sequence
  Synthetic
uuacuuagaugcuagagaacagg

SEQ ID NO: 321536 - RNA, 24 nt, Artificial Sequence
  Synthetic
uuuacuuagaugcuagagaacagg

SEQ ID NO: 321537 - RNA, 18 nt, Artificial Sequence
  Synthetic
ggagagagggagaacagg

SEQ ID NO: 321538 - RNA, 19 nt, Artificial Sequence
  Synthetic
aggagagagggagaacagg

SEQ ID NO: 321539 - RNA, 20 nt, Artificial Sequence
  Synthetic
aaggagagagggagaacagg

SEQ ID NO: 321540 - RNA, 21 nt, Artificial Sequence
  Synthetic
aaaggagagagggagaacagg

SEQ ID NO: 321541 - RNA, 22 nt, Artificial Sequence
  Synthetic
gaaaggagagagggagaacagg

SEQ ID NO: 321542 - RNA, 23 nt, Artificial Sequence
  Synthetic
agaaaggagagagggagaacagg

SEQ ID NO: 321543 - RNA, 24 nt, Artificial Sequence
  Synthetic
uagaaaggagagagggagaacagg

SEQ ID NO: 321544 - RNA, 18 nt, Artificial Sequence
  Synthetic
agaacacauggacacagg

SEQ ID NO: 321545 - RNA, 19 nt, Artificial Sequence
  Synthetic
gagaacacauggacacagg

SEQ ID NO: 321546 - RNA, 20 nt, Artificial Sequence
  Synthetic
ugagaacacauggacacagg

SEQ ID NO: 321547 - RNA, 21 nt, Artificial Sequence
  Synthetic
augagaacacauggacacagg

SEQ ID NO: 321548 - RNA, 22 nt, Artificial Sequence
  Synthetic
aaugagaacacauggacacagg

SEQ ID NO: 321549 - RNA, 23 nt, Artificial Sequence
  Synthetic
caaugagaacacauggacacagg

SEQ ID NO: 321550 - RNA, 24 nt, Artificial Sequence
  Synthetic
acaaugagaacacauggacacagg

SEQ ID NO: 321551 - RNA, 18 nt, Artificial Sequence
  Synthetic
agaucacauggacacagg

SEQ ID NO: 321552 - RNA, 19 nt, Artificial Sequence
  Synthetic
gagaucacauggacacagg

SEQ ID NO: 321553 - RNA, 20 nt, Artificial Sequence
  Synthetic
ugagaucacauggacacagg

SEQ ID NO: 321554 - RNA, 21 nt, Artificial Sequence
  Synthetic
augagaucacauggacacagg

SEQ ID NO: 321555 - RNA, 22 nt, Artificial Sequence
  Synthetic
aaugagaucacauggacacagg

SEQ ID NO: 321556 - RNA, 23 nt, Artificial Sequence
  Synthetic
caaugagaucacauggacacagg

SEQ ID NO: 321557 - RNA, 24 nt, Artificial Sequence
  Synthetic
acaaugagaucacauggacacagg

SEQ ID NO: 321558 - RNA, 18 nt, Artificial Sequence
  Synthetic
agaacacuuggacacagg

SEQ ID NO: 321559 - RNA, 19 nt, Artificial Sequence
  Synthetic
gagaacacuuggacacagg

SEQ ID NO: 321560 - RNA, 20 nt, Artificial Sequence
  Synthetic
ugagaacacuuggacacagg

SEQ ID NO: 321561 - RNA, 21 nt, Artificial Sequence
  Synthetic
augagaacacuuggacacagg

SEQ ID NO: 321562 - RNA, 22 nt, Artificial Sequence
  Synthetic
aaugagaacacuuggacacagg

SEQ ID NO: 321563 - RNA, 23 nt, Artificial Sequence
  Synthetic
caaugagaacacuuggacacagg

SEQ ID NO: 321564 - RNA, 24 nt, Artificial Sequence
  Synthetic
gcaaugagaacacuuggacacagg

SEQ ID NO: 321565 - RNA, 18 nt, Artificial Sequence
  Synthetic
gcaccaucaauacacagg

SEQ ID NO: 321566 - RNA, 19 nt, Artificial Sequence
  Synthetic
agcaccaucaauacacagg

SEQ ID NO: 321567 - RNA, 20 nt, Artificial Sequence
  Synthetic
aagcaccaucaauacacagg

SEQ ID NO: 321568 - RNA, 21 nt, Artificial Sequence
  Synthetic
aaagcaccaucaauacacagg

SEQ ID NO: 321569 - RNA, 22 nt, Artificial Sequence
  Synthetic
aaaagcaccaucaauacacagg

SEQ ID NO: 321570 - RNA, 23 nt, Artificial Sequence
  Synthetic
uaaaagcaccaucaauacacagg

SEQ ID NO: 321571 - RNA, 24 nt, Artificial Sequence
  Synthetic
cuaaaagcaccaucaauacacagg

SEQ ID NO: 321572 - RNA, 18 nt, Artificial Sequence
  Synthetic
aggaccugcaaccacagg

SEQ ID NO: 321573 - RNA, 19 nt, Artificial Sequence
  Synthetic
caggaccugcaaccacagg

SEQ ID NO: 321574 - RNA, 20 nt, Artificial Sequence
  Synthetic
gcaggaccugcaaccacagg

SEQ ID NO: 321575 - RNA, 21 nt, Artificial Sequence
  Synthetic
ggcaggaccugcaaccacagg

SEQ ID NO: 321576 - RNA, 22 nt, Artificial Sequence
  Synthetic
cggcaggaccugcaaccacagg

SEQ ID NO: 321577 - RNA, 23 nt, Artificial Sequence
  Synthetic
ucggcaggaccugcaaccacagg

SEQ ID NO: 321578 - RNA, 24 nt, Artificial Sequence
  Synthetic
uucggcaggaccugcaaccacagg

SEQ ID NO: 321579 - RNA, 18 nt, Artificial Sequence
  Synthetic
aaauacauuugccacagg

SEQ ID NO: 321580 - RNA, 19 nt, Artificial Sequence
  Synthetic
gaaauacauuugccacagg

SEQ ID NO: 321581 - RNA, 20 nt, Artificial Sequence
  Synthetic
ugaaauacauuugccacagg

SEQ ID NO: 321582 - RNA, 21 nt, Artificial Sequence
  Synthetic
uugaaauacauuugccacagg

SEQ ID NO: 321583 - RNA, 22 nt, Artificial Sequence
  Synthetic
uuugaaauacauuugccacagg

SEQ ID NO: 321584 - RNA, 23 nt, Artificial Sequence
  Synthetic
auuugaaauacauuugccacagg

SEQ ID NO: 321585 - RNA, 24 nt, Artificial Sequence
  Synthetic
uauuugaaauacauuugccacagg

SEQ ID NO: 321586 - RNA, 18 nt, Artificial Sequence
  Synthetic
ugcugcuuuaagcacagg

SEQ ID NO: 321587 - RNA, 19 nt, Artificial Sequence
  Synthetic
uugcugcuuuaagcacagg

SEQ ID NO: 321588 - RNA, 20 nt, Artificial Sequence
  Synthetic
guugcugcuuuaagcacagg

SEQ ID NO: 321589 - RNA, 21 nt, Artificial Sequence
  Synthetic
uguugcugcuuuaagcacagg

SEQ ID NO: 321590 - RNA, 22 nt, Artificial Sequence
  Synthetic
cuguugcugcuuuaagcacagg

SEQ ID NO: 321591 - RNA, 23 nt, Artificial Sequence
  Synthetic
gcuguugcugcuuuaagcacagg

SEQ ID NO: 321592 - RNA, 24 nt, Artificial Sequence
  Synthetic
agcuguugcugcuuuaagcacagg

SEQ ID NO: 321593 - RNA, 18 nt, Artificial Sequence
  Synthetic
cuggguaagaggcacagg

SEQ ID NO: 321594 - RNA, 19 nt, Artificial Sequence
  Synthetic
acuggguaagaggcacagg

SEQ ID NO: 321595 - RNA, 20 nt, Artificial Sequence
  Synthetic
aacuggguaagaggcacagg

SEQ ID NO: 321596 - RNA, 21 nt, Artificial Sequence
  Synthetic
gaacuggguaagaggcacagg

SEQ ID NO: 321597 - RNA, 22 nt, Artificial Sequence
  Synthetic
ggaacuggguaagaggcacagg

SEQ ID NO: 321598 - RNA, 23 nt, Artificial Sequence
  Synthetic
uggaacuggguaagaggcacagg

SEQ ID NO: 321599 - RNA, 24 nt, Artificial Sequence
  Synthetic
uuggaacuggguaagaggcacagg

SEQ ID NO: 321600 - RNA, 18 nt, Artificial Sequence
  Synthetic
uaugacugaaugcacagg

SEQ ID NO: 321601 - RNA, 19 nt, Artificial Sequence
  Synthetic
guaugacugaaugcacagg

SEQ ID NO: 321602 - RNA, 20 nt, Artificial Sequence
  Synthetic
aguaugacugaaugcacagg

SEQ ID NO: 321603 - RNA, 21 nt, Artificial Sequence
  Synthetic
gaguaugacugaaugcacagg

SEQ ID NO: 321604 - RNA, 22 nt, Artificial Sequence
  Synthetic
agaguaugacugaaugcacagg

SEQ ID NO: 321605 - RNA, 23 nt, Artificial Sequence
  Synthetic
uagaguaugacugaaugcacagg

SEQ ID NO: 321606 - RNA, 24 nt, Artificial Sequence
  Synthetic
auagaguaugacugaaugcacagg

SEQ ID NO: 321607 - RNA, 18 nt, Artificial Sequence
  Synthetic
agagauuggaugcacagg

SEQ ID NO: 321608 - RNA, 19 nt, Artificial Sequence
  Synthetic
cagagauuggaugcacagg

SEQ ID NO: 321609 - RNA, 20 nt, Artificial Sequence
  Synthetic
ucagagauuggaugcacagg

SEQ ID NO: 321610 - RNA, 21 nt, Artificial Sequence
  Synthetic
aucagagauuggaugcacagg

SEQ ID NO: 321611 - RNA, 22 nt, Artificial Sequence
  Synthetic
gaucagagauuggaugcacagg

SEQ ID NO: 321612 - RNA, 23 nt, Artificial Sequence
  Synthetic
ggaucagagauuggaugcacagg

SEQ ID NO: 321613 - RNA, 24 nt, Artificial Sequence
  Synthetic
gggaucagagauuggaugcacagg

SEQ ID NO: 321614 - RNA, 18 nt, Artificial Sequence
  Synthetic
acaucucaggugcacagg

SEQ ID NO: 321615 - RNA, 19 nt, Artificial Sequence
  Synthetic
gacaucucaggugcacagg

SEQ ID NO: 321616 - RNA, 20 nt, Artificial Sequence
  Synthetic
ugacaucucaggugcacagg

SEQ ID NO: 321617 - RNA, 21 nt, Artificial Sequence
  Synthetic
augacaucucaggugcacagg

SEQ ID NO: 321618 - RNA, 22 nt, Artificial Sequence
  Synthetic
caugacaucucaggugcacagg

SEQ ID NO: 321619 - RNA, 23 nt, Artificial Sequence
  Synthetic
ucaugacaucucaggugcacagg

SEQ ID NO: 321620 - RNA, 24 nt, Artificial Sequence
  Synthetic
cucaugacaucucaggugcacagg

SEQ ID NO: 321621 - RNA, 18 nt, Artificial Sequence
  Synthetic
uuucaucuuaaucacagg

SEQ ID NO: 321622 - RNA, 19 nt, Artificial Sequence
  Synthetic
cuuucaucuuaaucacagg

SEQ ID NO: 321623 - RNA, 20 nt, Artificial Sequence
  Synthetic
acuuucaucuuaaucacagg

SEQ ID NO: 321624 - RNA, 21 nt, Artificial Sequence
  Synthetic
uacuuucaucuuaaucacagg

SEQ ID NO: 321625 - RNA, 22 nt, Artificial Sequence
  Synthetic
auacuuucaucuuaaucacagg

SEQ ID NO: 321626 - RNA, 23 nt, Artificial Sequence
  Synthetic
aauacuuucaucuuaaucacagg

SEQ ID NO: 321627 - RNA, 24 nt, Artificial Sequence
  Synthetic
aaauacuuucaucuuaaucacagg

SEQ ID NO: 321628 - RNA, 18 nt, Artificial Sequence
  Synthetic
cauguucucacucacagg

SEQ ID NO: 321629 - RNA, 19 nt, Artificial Sequence
  Synthetic
acauguucucacucacagg

SEQ ID NO: 321630 - RNA, 20 nt, Artificial Sequence
  Synthetic
cacauguucucacucacagg

SEQ ID NO: 321631 - RNA, 21 nt, Artificial Sequence
  Synthetic
ccacauguucucacucacagg

SEQ ID NO: 321632 - RNA, 22 nt, Artificial Sequence
  Synthetic
accacauguucucacucacagg

SEQ ID NO: 321633 - RNA, 23 nt, Artificial Sequence
  Synthetic
caccacauguucucacucacagg

SEQ ID NO: 321634 - RNA, 24 nt, Artificial Sequence
  Synthetic
acaccacauguucucacucacagg

SEQ ID NO: 321635 - RNA, 18 nt, Artificial Sequence
  Synthetic
cauguucuuacucacagg

SEQ ID NO: 321636 - RNA, 19 nt, Artificial Sequence
  Synthetic
acauguucuuacucacagg

SEQ ID NO: 321637 - RNA, 20 nt, Artificial Sequence
  Synthetic
cacauguucuuacucacagg

SEQ ID NO: 321638 - RNA, 21 nt, Artificial Sequence
  Synthetic
ccacauguucuuacucacagg

SEQ ID NO: 321639 - RNA, 22 nt, Artificial Sequence
  Synthetic
accacauguucuuacucacagg

SEQ ID NO: 321640 - RNA, 23 nt, Artificial Sequence
  Synthetic
caccacauguucuuacucacagg

SEQ ID NO: 321641 - RNA, 24 nt, Artificial Sequence
  Synthetic
acaccacauguucuuacucacagg

SEQ ID NO: 321642 - RNA, 18 nt, Artificial Sequence
  Synthetic
uauuaaauuguucacagg

SEQ ID NO: 321643 - RNA, 19 nt, Artificial Sequence
  Synthetic
auauuaaauuguucacagg

SEQ ID NO: 321644 - RNA, 20 nt, Artificial Sequence
  Synthetic
aauauuaaauuguucacagg

SEQ ID NO: 321645 - RNA, 21 nt, Artificial Sequence
  Synthetic
aaauauuaaauuguucacagg

SEQ ID NO: 321646 - RNA, 22 nt, Artificial Sequence
  Synthetic
caaauauuaaauuguucacagg

SEQ ID NO: 321647 - RNA, 23 nt, Artificial Sequence
  Synthetic
ccaaauauuaaauuguucacagg

SEQ ID NO: 321648 - RNA, 24 nt, Artificial Sequence
  Synthetic
gccaaauauuaaauuguucacagg

SEQ ID NO: 321649 - RNA, 18 nt, Artificial Sequence
  Synthetic
gucaaaagccaagacagg

SEQ ID NO: 321650 - RNA, 19 nt, Artificial Sequence
  Synthetic
ugucaaaagccaagacagg

SEQ ID NO: 321651 - RNA, 20 nt, Artificial Sequence
  Synthetic
augucaaaagccaagacagg

SEQ ID NO: 321652 - RNA, 21 nt, Artificial Sequence
  Synthetic
caugucaaaagccaagacagg

SEQ ID NO: 321653 - RNA, 22 nt, Artificial Sequence
  Synthetic
gcaugucaaaagccaagacagg

SEQ ID NO: 321654 - RNA, 23 nt, Artificial Sequence
  Synthetic
ggcaugucaaaagccaagacagg

SEQ ID NO: 321655 - RNA, 24 nt, Artificial Sequence
  Synthetic
aggcaugucaaaagccaagacagg

SEQ ID NO: 321656 - RNA, 18 nt, Artificial Sequence
  Synthetic
gacuauuagcaagacagg

SEQ ID NO: 321657 - RNA, 19 nt, Artificial Sequence
  Synthetic
ggacuauuagcaagacagg

SEQ ID NO: 321658 - RNA, 20 nt, Artificial Sequence
  Synthetic
uggacuauuagcaagacagg

SEQ ID NO: 321659 - RNA, 21 nt, Artificial Sequence
  Synthetic
cuggacuauuagcaagacagg

SEQ ID NO: 321660 - RNA, 22 nt, Artificial Sequence
  Synthetic
acuggacuauuagcaagacagg

SEQ ID NO: 321661 - RNA, 23 nt, Artificial Sequence
  Synthetic
aacuggacuauuagcaagacagg

SEQ ID NO: 321662 - RNA, 24 nt, Artificial Sequence
  Synthetic
aaacuggacuauuagcaagacagg

SEQ ID NO: 321663 - RNA, 18 nt, Artificial Sequence
  Synthetic
uaucuggaguaagacagg

SEQ ID NO: 321664 - RNA, 19 nt, Artificial Sequence
  Synthetic
uuaucuggaguaagacagg

SEQ ID NO: 321665 - RNA, 20 nt, Artificial Sequence
  Synthetic
uuuaucuggaguaagacagg

SEQ ID NO: 321666 - RNA, 21 nt, Artificial Sequence
  Synthetic
cuuuaucuggaguaagacagg

SEQ ID NO: 321667 - RNA, 22 nt, Artificial Sequence
  Synthetic
ucuuuaucuggaguaagacagg

SEQ ID NO: 321668 - RNA, 23 nt, Artificial Sequence
  Synthetic
gucuuuaucuggaguaagacagg

SEQ ID NO: 321669 - RNA, 24 nt, Artificial Sequence
  Synthetic
ggucuuuaucuggaguaagacagg

SEQ ID NO: 321670 - RNA, 18 nt, Artificial Sequence
  Synthetic
agccuuggcccagacagg

SEQ ID NO: 321671 - RNA, 19 nt, Artificial Sequence
  Synthetic
uagccuuggcccagacagg

SEQ ID NO: 321672 - RNA, 20 nt, Artificial Sequence
  Synthetic
auagccuuggcccagacagg

SEQ ID NO: 321673 - RNA, 21 nt, Artificial Sequence
  Synthetic
aauagccuuggcccagacagg

SEQ ID NO: 321674 - RNA, 22 nt, Artificial Sequence
  Synthetic
aaauagccuuggcccagacagg

SEQ ID NO: 321675 - RNA, 23 nt, Artificial Sequence
  Synthetic
aaaauagccuuggcccagacagg

SEQ ID NO: 321676 - RNA, 24 nt, Artificial Sequence
  Synthetic
aaaaauagccuuggcccagacagg

SEQ ID NO: 321677 - RNA, 18 nt, Artificial Sequence
  Synthetic
cacaaagugagagacagg

SEQ ID NO: 321678 - RNA, 19 nt, Artificial Sequence
  Synthetic
ccacaaagugagagacagg

SEQ ID NO: 321679 - RNA, 20 nt, Artificial Sequence
  Synthetic
accacaaagugagagacagg

SEQ ID NO: 321680 - RNA, 21 nt, Artificial Sequence
  Synthetic
caccacaaagugagagacagg

SEQ ID NO: 321681 - RNA, 22 nt, Artificial Sequence
  Synthetic
ucaccacaaagugagagacagg

SEQ ID NO: 321682 - RNA, 23 nt, Artificial Sequence
  Synthetic
gucaccacaaagugagagacagg

SEQ ID NO: 321683 - RNA, 24 nt, Artificial Sequence
  Synthetic
agucaccacaaagugagagacagg

SEQ ID NO: 321684 - RNA, 18 nt, Artificial Sequence
  Synthetic
gggauggugggagacagg

SEQ ID NO: 321685 - RNA, 19 nt, Artificial Sequence
  Synthetic
agggauggugggagacagg

SEQ ID NO: 321686 - RNA, 20 nt, Artificial Sequence
  Synthetic
gagggauggugggagacagg

SEQ ID NO: 321687 - RNA, 21 nt, Artificial Sequence
  Synthetic
agagggauggugggagacagg

SEQ ID NO: 321688 - RNA, 22 nt, Artificial Sequence
  Synthetic
aagagggauggugggagacagg

SEQ ID NO: 321689 - RNA, 23 nt, Artificial Sequence
  Synthetic
gaagagggauggugggagacagg

SEQ ID NO: 321690 - RNA, 24 nt, Artificial Sequence
  Synthetic
ggaagagggauggugggagacagg

SEQ ID NO: 321691 - RNA, 18 nt, Artificial Sequence
  Synthetic
agugugaaaauagacagg

SEQ ID NO: 321692 - RNA, 19 nt, Artificial Sequence
  Synthetic
aagugugaaaauagacagg

SEQ ID NO: 321693 - RNA, 20 nt, Artificial Sequence
  Synthetic
aaagugugaaaauagacagg

SEQ ID NO: 321694 - RNA, 21 nt, Artificial Sequence
  Synthetic
aaaagugugaaaauagacagg

SEQ ID NO: 321695 - RNA, 22 nt, Artificial Sequence
  Synthetic
aaaaagugugaaaauagacagg

SEQ ID NO: 321696 - RNA, 23 nt, Artificial Sequence
  Synthetic
aaaaaagugugaaaauagacagg

SEQ ID NO: 321697 - RNA, 24 nt, Artificial Sequence
  Synthetic
gaaaaaagugugaaaauagacagg

SEQ ID NO: 321698 - RNA, 18 nt, Artificial Sequence
  Synthetic
gcggcucugaaauacagg

SEQ ID NO: 321699 - RNA, 19 nt, Artificial Sequence
  Synthetic
agcggcucugaaauacagg

SEQ ID NO: 321700 - RNA, 20 nt, Artificial Sequence
  Synthetic
aagcggcucugaaauacagg

SEQ ID NO: 321701 - RNA, 21 nt, Artificial Sequence
  Synthetic
aaagcggcucugaaauacagg

SEQ ID NO: 321702 - RNA, 22 nt, Artificial Sequence
  Synthetic
uaaagcggcucugaaauacagg

SEQ ID NO: 321703 - RNA, 23 nt, Artificial Sequence
  Synthetic
uuaaagcggcucugaaauacagg

SEQ ID NO: 321704 - RNA, 24 nt, Artificial Sequence
  Synthetic
guuaaagcggcucugaaauacagg

SEQ ID NO: 321705 - RNA, 18 nt, Artificial Sequence
  Synthetic
uaagaauugaaauacagg

SEQ ID NO: 321706 - RNA, 19 nt, Artificial Sequence
  Synthetic
auaagaauugaaauacagg

SEQ ID NO: 321707 - RNA, 20 nt, Artificial Sequence
  Synthetic
aauaagaauugaaauacagg

SEQ ID NO: 321708 - RNA, 21 nt, Artificial Sequence
  Synthetic
uaauaagaauugaaauacagg

SEQ ID NO: 321709 - RNA, 22 nt, Artificial Sequence
  Synthetic
uuaauaagaauugaaauacagg

SEQ ID NO: 321710 - RNA, 23 nt, Artificial Sequence
  Synthetic
uuuaauaagaauugaaauacagg

SEQ ID NO: 321711 - RNA, 24 nt, Artificial Sequence
  Synthetic
uuuuaauaagaauugaaauacagg

SEQ ID NO: 321712 - RNA, 18 nt, Artificial Sequence
  Synthetic
aaagggcauggauacagg

SEQ ID NO: 321713 - RNA, 19 nt, Artificial Sequence
  Synthetic
caaagggcauggauacagg

SEQ ID NO: 321714 - RNA, 20 nt, Artificial Sequence
  Synthetic
gcaaagggcauggauacagg

SEQ ID NO: 321715 - RNA, 21 nt, Artificial Sequence
  Synthetic
agcaaagggcauggauacagg

SEQ ID NO: 321716 - RNA, 22 nt, Artificial Sequence
  Synthetic
uagcaaagggcauggauacagg

SEQ ID NO: 321717 - RNA, 23 nt, Artificial Sequence
  Synthetic
uuagcaaagggcauggauacagg

SEQ ID NO: 321718 - RNA, 24 nt, Artificial Sequence
  Synthetic
cuuagcaaagggcauggauacagg

SEQ ID NO: 321719 - RNA, 18 nt, Artificial Sequence
  Synthetic
acaaguaacuacuacagg

SEQ ID NO: 321720 - RNA, 19 nt, Artificial Sequence
  Synthetic
aacaaguaacuacuacagg

SEQ ID NO: 321721 - RNA, 20 nt, Artificial Sequence
  Synthetic
aaacaaguaacuacuacagg

SEQ ID NO: 321722 - RNA, 21 nt, Artificial Sequence
  Synthetic
uaaacaaguaacuacuacagg

SEQ ID NO: 321723 - RNA, 22 nt, Artificial Sequence
  Synthetic
uuaaacaaguaacuacuacagg

SEQ ID NO: 321724 - RNA, 23 nt, Artificial Sequence
  Synthetic
auuaaacaaguaacuacuacagg

SEQ ID NO: 321725 - RNA, 24 nt, Artificial Sequence
  Synthetic
aauuaaacaaguaacuacuacagg

SEQ ID NO: 321726 - RNA, 18 nt, Artificial Sequence
  Synthetic
ucuagccuggccuacagg

SEQ ID NO: 321727 - RNA, 19 nt, Artificial Sequence
  Synthetic
gucuagccuggccuacagg

SEQ ID NO: 321728 - RNA, 20 nt, Artificial Sequence
  Synthetic
agucuagccuggccuacagg

SEQ ID NO: 321729 - RNA, 21 nt, Artificial Sequence
  Synthetic
gagucuagccuggccuacagg

SEQ ID NO: 321730 - RNA, 22 nt, Artificial Sequence
  Synthetic
ugagucuagccuggccuacagg

SEQ ID NO: 321731 - RNA, 23 nt, Artificial Sequence
  Synthetic
uugagucuagccuggccuacagg

SEQ ID NO: 321732 - RNA, 24 nt, Artificial Sequence
  Synthetic
uuugagucuagccuggccuacagg

SEQ ID NO: 321733 - RNA, 18 nt, Artificial Sequence
  Synthetic
auguacuuuaaguacagg

SEQ ID NO: 321734 - RNA, 19 nt, Artificial Sequence
  Synthetic
uauguacuuuaaguacagg

SEQ ID NO: 321735 - RNA, 20 nt, Artificial Sequence
  Synthetic
auauguacuuuaaguacagg

SEQ ID NO: 321736 - RNA, 21 nt, Artificial Sequence
  Synthetic
aauauguacuuuaaguacagg

SEQ ID NO: 321737 - RNA, 22 nt, Artificial Sequence
  Synthetic
aaauauguacuuuaaguacagg

SEQ ID NO: 321738 - RNA, 23 nt, Artificial Sequence
  Synthetic
uaaauauguacuuuaaguacagg

SEQ ID NO: 321739 - RNA, 24 nt, Artificial Sequence
  Synthetic
auaaauauguacuuuaaguacagg

SEQ ID NO: 321740 - RNA, 18 nt, Artificial Sequence
  Synthetic
uuuuauauugaguacagg

SEQ ID NO: 321741 - RNA, 19 nt, Artificial Sequence
  Synthetic
uuuuuauauugaguacagg

SEQ ID NO: 321742 - RNA, 20 nt, Artificial Sequence
  Synthetic
cuuuuuauauugaguacagg

SEQ ID NO: 321743 - RNA, 21 nt, Artificial Sequence
  Synthetic
acuuuuuauauugaguacagg

SEQ ID NO: 321744 - RNA, 22 nt, Artificial Sequence
  Synthetic
uacuuuuuauauugaguacagg

SEQ ID NO: 321745 - RNA, 23 nt, Artificial Sequence
  Synthetic
guacuuuuuauauugaguacagg

SEQ ID NO: 321746 - RNA, 24 nt, Artificial Sequence
  Synthetic
gguacuuuuuauauugaguacagg

SEQ ID NO: 321747 - RNA, 18 nt, Artificial Sequence
  Synthetic
cucaguaaguuguacagg

SEQ ID NO: 321748 - RNA, 19 nt, Artificial Sequence
  Synthetic
ucucaguaaguuguacagg

SEQ ID NO: 321749 - RNA, 20 nt, Artificial Sequence
  Synthetic
cucucaguaaguuguacagg

SEQ ID NO: 321750 - RNA, 21 nt, Artificial Sequence
  Synthetic
ucucucaguaaguuguacagg

SEQ ID NO: 321751 - RNA, 22 nt, Artificial Sequence
  Synthetic
aucucucaguaaguuguacagg

SEQ ID NO: 321752 - RNA, 23 nt, Artificial Sequence
  Synthetic
aaucucucaguaaguuguacagg

SEQ ID NO: 321753 - RNA, 24 nt, Artificial Sequence
  Synthetic
aaaucucucaguaaguuguacagg

SEQ ID NO: 321754 - RNA, 18 nt, Artificial Sequence
  Synthetic
uggucuuuugguuacagg

SEQ ID NO: 321755 - RNA, 19 nt, Artificial Sequence
  Synthetic
auggucuuuugguuacagg

SEQ ID NO: 321756 - RNA, 20 nt, Artificial Sequence
  Synthetic
aauggucuuuugguuacagg

SEQ ID NO: 321757 - RNA, 21 nt, Artificial Sequence
  Synthetic
aaauggucuuuugguuacagg

SEQ ID NO: 321758 - RNA, 22 nt, Artificial Sequence
  Synthetic
caaauggucuuuugguuacagg

SEQ ID NO: 321759 - RNA, 23 nt, Artificial Sequence
  Synthetic
ucaaauggucuuuugguuacagg

SEQ ID NO: 321760 - RNA, 24 nt, Artificial Sequence
  Synthetic
uucaaauggucuuuugguuacagg

SEQ ID NO: 321761 - RNA, 18 nt, Artificial Sequence
  Synthetic
guguucacccuuuacagg

SEQ ID NO: 321762 - RNA, 19 nt, Artificial Sequence
  Synthetic
uguguucacccuuuacagg

SEQ ID NO: 321763 - RNA, 20 nt, Artificial Sequence
  Synthetic
cuguguucacccuuuacagg

SEQ ID NO: 321764 - RNA, 21 nt, Artificial Sequence
  Synthetic
ccuguguucacccuuuacagg

SEQ ID NO: 321765 - RNA, 22 nt, Artificial Sequence
  Synthetic
accuguguucacccuuuacagg

SEQ ID NO: 321766 - RNA, 23 nt, Artificial Sequence
  Synthetic
uaccuguguucacccuuuacagg

SEQ ID NO: 321767 - RNA, 24 nt, Artificial Sequence
  Synthetic
guaccuguguucacccuuuacagg

SEQ ID NO: 321768 - RNA, 18 nt, Artificial Sequence
  Synthetic
gaacuugguguuuacagg

SEQ ID NO: 321769 - RNA, 19 nt, Artificial Sequence
  Synthetic
ugaacuugguguuuacagg

SEQ ID NO: 321770 - RNA, 20 nt, Artificial Sequence
  Synthetic
gugaacuugguguuuacagg

SEQ ID NO: 321771 - RNA, 21 nt, Artificial Sequence
  Synthetic
agugaacuugguguuuacagg

SEQ ID NO: 321772 - RNA, 22 nt, Artificial Sequence
  Synthetic
gagugaacuugguguuuacagg

SEQ ID NO: 321773 - RNA, 23 nt, Artificial Sequence
  Synthetic
ggagugaacuugguguuuacagg

SEQ ID NO: 321774 - RNA, 24 nt, Artificial Sequence
  Synthetic
gggagugaacuugguguuuacagg

SEQ ID NO: 321775 - RNA, 18 nt, Artificial Sequence
  Synthetic
aacucugacaaaaccagg

SEQ ID NO: 321776 - RNA, 19 nt, Artificial Sequence
  Synthetic
gaacucugacaaaaccagg

SEQ ID NO: 321777 - RNA, 20 nt, Artificial Sequence
  Synthetic
agaacucugacaaaaccagg

SEQ ID NO: 321778 - RNA, 21 nt, Artificial Sequence
  Synthetic
gagaacucugacaaaaccagg

SEQ ID NO: 321779 - RNA, 22 nt, Artificial Sequence
  Synthetic
agagaacucugacaaaaccagg

SEQ ID NO: 321780 - RNA, 23 nt, Artificial Sequence
  Synthetic
aagagaacucugacaaaaccagg

SEQ ID NO: 321781 - RNA, 24 nt, Artificial Sequence
  Synthetic
gaagagaacucugacaaaaccagg

SEQ ID NO: 321782 - RNA, 19 nt, Artificial Sequence
  Synthetic
cucccaagacuaaaccagg

SEQ ID NO: 321783 - RNA, 20 nt, Artificial Sequence
  Synthetic
ccucccaagacuaaaccagg

SEQ ID NO: 321784 - RNA, 24 nt, Artificial Sequence
  Synthetic
acacccucccaagacuaaaccagg

SEQ ID NO: 321785 - RNA, 20 nt, Artificial Sequence
  Synthetic
ucucccaagacuaaaccagg

SEQ ID NO: 321786 - RNA, 18 nt, Artificial Sequence
  Synthetic
guguaaugaauaaccagg

SEQ ID NO: 321787 - RNA, 19 nt, Artificial Sequence
  Synthetic
aguguaaugaauaaccagg

SEQ ID NO: 321788 - RNA, 20 nt, Artificial Sequence
  Synthetic
aaguguaaugaauaaccagg

SEQ ID NO: 321789 - RNA, 21 nt, Artificial Sequence
  Synthetic
gaaguguaaugaauaaccagg

SEQ ID NO: 321790 - RNA, 22 nt, Artificial Sequence
  Synthetic
ugaaguguaaugaauaaccagg

SEQ ID NO: 321791 - RNA, 23 nt, Artificial Sequence
  Synthetic
gugaaguguaaugaauaaccagg

SEQ ID NO: 321792 - RNA, 24 nt, Artificial Sequence
  Synthetic
ggugaaguguaaugaauaaccagg

SEQ ID NO: 321793 - RNA, 18 nt, Artificial Sequence
  Synthetic
auccaaguacuaaccagg

SEQ ID NO: 321794 - RNA, 19 nt, Artificial Sequence
  Synthetic
cauccaaguacuaaccagg

SEQ ID NO: 321795 - RNA, 20 nt, Artificial Sequence
  Synthetic
ccauccaaguacuaaccagg

SEQ ID NO: 321796 - RNA, 21 nt, Artificial Sequence
  Synthetic
cccauccaaguacuaaccagg

SEQ ID NO: 321797 - RNA, 22 nt, Artificial Sequence
  Synthetic
ucccauccaaguacuaaccagg

SEQ ID NO: 321798 - RNA, 23 nt, Artificial Sequence
  Synthetic
cucccauccaaguacuaaccagg

SEQ ID NO: 321799 - RNA, 24 nt, Artificial Sequence
  Synthetic
ucucccauccaaguacuaaccagg

SEQ ID NO: 321800 - RNA, 18 nt, Artificial Sequence
  Synthetic
auacacacagccaccagg

SEQ ID NO: 321801 - RNA, 19 nt, Artificial Sequence
  Synthetic
cauacacacagccaccagg

SEQ ID NO: 321802 - RNA, 20 nt, Artificial Sequence
  Synthetic
acauacacacagccaccagg

SEQ ID NO: 321803 - RNA, 21 nt, Artificial Sequence
  Synthetic
uacauacacacagccaccagg

SEQ ID NO: 321804 - RNA, 22 nt, Artificial Sequence
  Synthetic
auacauacacacagccaccagg

SEQ ID NO: 321805 - RNA, 23 nt, Artificial Sequence
  Synthetic
gauacauacacacagccaccagg

SEQ ID NO: 321806 - RNA, 24 nt, Artificial Sequence
  Synthetic
ugauacauacacacagccaccagg

SEQ ID NO: 321807 - RNA, 18 nt, Artificial Sequence
  Synthetic
ccaagagcaggcaccagg

SEQ ID NO: 321808 - RNA, 19 nt, Artificial Sequence
  Synthetic
gccaagagcaggcaccagg

SEQ ID NO: 321809 - RNA, 20 nt, Artificial Sequence
  Synthetic
agccaagagcaggcaccagg

SEQ ID NO: 321810 - RNA, 21 nt, Artificial Sequence
  Synthetic
uagccaagagcaggcaccagg

SEQ ID NO: 321811 - RNA, 22 nt, Artificial Sequence
  Synthetic
cuagccaagagcaggcaccagg

SEQ ID NO: 321812 - RNA, 23 nt, Artificial Sequence
  Synthetic
acuagccaagagcaggcaccagg

SEQ ID NO: 321813 - RNA, 24 nt, Artificial Sequence
  Synthetic
cacuagccaagagcaggcaccagg

SEQ ID NO: 321814 - RNA, 18 nt, Artificial Sequence
  Synthetic
cuuguggagaucaccagg

SEQ ID NO: 321815 - RNA, 19 nt, Artificial Sequence
  Synthetic
acuuguggagaucaccagg

SEQ ID NO: 321816 - RNA, 20 nt, Artificial Sequence
  Synthetic
cacuuguggagaucaccagg

SEQ ID NO: 321817 - RNA, 21 nt, Artificial Sequence
  Synthetic
acacuuguggagaucaccagg

SEQ ID NO: 321818 - RNA, 22 nt, Artificial Sequence
  Synthetic
aacacuuguggagaucaccagg

SEQ ID NO: 321819 - RNA, 23 nt, Artificial Sequence
  Synthetic
caacacuuguggagaucaccagg

SEQ ID NO: 321820 - RNA, 24 nt, Artificial Sequence
  Synthetic
ccaacacuuguggagaucaccagg

SEQ ID NO: 321821 - RNA, 18 nt, Artificial Sequence
  Synthetic
ucucacucugucaccagg

SEQ ID NO: 321822 - RNA, 19 nt, Artificial Sequence
  Synthetic
gucucacucugucaccagg

SEQ ID NO: 321823 - RNA, 20 nt, Artificial Sequence
  Synthetic
agucucacucugucaccagg

SEQ ID NO: 321824 - RNA, 21 nt, Artificial Sequence
  Synthetic
gagucucacucugucaccagg

SEQ ID NO: 321825 - RNA, 22 nt, Artificial Sequence
  Synthetic
agagucucacucugucaccagg

SEQ ID NO: 321826 - RNA, 23 nt, Artificial Sequence
  Synthetic
cagagucucacucugucaccagg

SEQ ID NO: 321827 - RNA, 24 nt, Artificial Sequence
  Synthetic
acagagucucacucugucaccagg

SEQ ID NO: 321828 - RNA, 18 nt, Artificial Sequence
  Synthetic
ucuugcucugucaccagg

SEQ ID NO: 321829 - RNA, 19 nt, Artificial Sequence
  Synthetic
gucuugcucugucaccagg

SEQ ID NO: 321830 - RNA, 20 nt, Artificial Sequence
  Synthetic
ggucuugcucugucaccagg

SEQ ID NO: 321831 - RNA, 21 nt, Artificial Sequence
  Synthetic
gggucuugcucugucaccagg

SEQ ID NO: 321832 - RNA, 22 nt, Artificial Sequence
  Synthetic
ugggucuugcucugucaccagg

SEQ ID NO: 321833 - RNA, 23 nt, Artificial Sequence
  Synthetic
cugggucuugcucugucaccagg

SEQ ID NO: 321834 - RNA, 24 nt, Artificial Sequence
  Synthetic
acugggucuugcucugucaccagg

SEQ ID NO: 321835 - RNA, 18 nt, Artificial Sequence
  Synthetic
caagggagagagaccagg

SEQ ID NO: 321836 - RNA, 19 nt, Artificial Sequence
  Synthetic
ucaagggagagagaccagg

SEQ ID NO: 321837 - RNA, 20 nt, Artificial Sequence
  Synthetic
gucaagggagagagaccagg

SEQ ID NO: 321838 - RNA, 21 nt, Artificial Sequence
  Synthetic
ugucaagggagagagaccagg

SEQ ID NO: 321839 - RNA, 22 nt, Artificial Sequence
  Synthetic
augucaagggagagagaccagg

SEQ ID NO: 321840 - RNA, 23 nt, Artificial Sequence
  Synthetic
caugucaagggagagagaccagg

SEQ ID NO: 321841 - RNA, 24 nt, Artificial Sequence
  Synthetic
acaugucaagggagagagaccagg

SEQ ID NO: 321842 - RNA, 18 nt, Artificial Sequence
  Synthetic
gucaagggagagaccagg

SEQ ID NO: 321843 - RNA, 19 nt, Artificial Sequence
  Synthetic
ugucaagggagagaccagg

SEQ ID NO: 321844 - RNA, 20 nt, Artificial Sequence
  Synthetic
gugucaagggagagaccagg

SEQ ID NO: 321845 - RNA, 21 nt, Artificial Sequence
  Synthetic
ugugucaagggagagaccagg

SEQ ID NO: 321846 - RNA, 22 nt, Artificial Sequence
  Synthetic
gugugucaagggagagaccagg

SEQ ID NO: 321847 - RNA, 23 nt, Artificial Sequence
  Synthetic
cgugugucaagggagagaccagg

SEQ ID NO: 321848 - RNA, 24 nt, Artificial Sequence
  Synthetic
ccgugugucaagggagagaccagg

SEQ ID NO: 321849 - RNA, 18 nt, Artificial Sequence
  Synthetic
ugguugccagggaccagg

SEQ ID NO: 321850 - RNA, 19 nt, Artificial Sequence
  Synthetic
augguugccagggaccagg

SEQ ID NO: 321851 - RNA, 20 nt, Artificial Sequence
  Synthetic
caugguugccagggaccagg

SEQ ID NO: 321852 - RNA, 21 nt, Artificial Sequence
  Synthetic
gcaugguugccagggaccagg

SEQ ID NO: 321853 - RNA, 22 nt, Artificial Sequence
  Synthetic
ugcaugguugccagggaccagg

SEQ ID NO: 321854 - RNA, 23 nt, Artificial Sequence
  Synthetic
uugcaugguugccagggaccagg

SEQ ID NO: 321855 - RNA, 24 nt, Artificial Sequence
  Synthetic
guugcaugguugccagggaccagg

SEQ ID NO: 321856 - RNA, 18 nt, Artificial Sequence
  Synthetic
ugggagugugguaccagg

SEQ ID NO: 321857 - RNA, 19 nt, Artificial Sequence
  Synthetic
cugggagugugguaccagg

SEQ ID NO: 321858 - RNA, 20 nt, Artificial Sequence
  Synthetic
acugggagugugguaccagg

SEQ ID NO: 321859 - RNA, 21 nt, Artificial Sequence
  Synthetic
uacugggagugugguaccagg

SEQ ID NO: 321860 - RNA, 22 nt, Artificial Sequence
  Synthetic
uuacugggagugugguaccagg

SEQ ID NO: 321861 - RNA, 23 nt, Artificial Sequence
  Synthetic
uuuacugggagugugguaccagg

SEQ ID NO: 321862 - RNA, 24 nt, Artificial Sequence
  Synthetic
auuuacugggagugugguaccagg

SEQ ID NO: 321863 - RNA, 18 nt, Artificial Sequence
  Synthetic
gugcccuuauguaccagg

SEQ ID NO: 321864 - RNA, 19 nt, Artificial Sequence
  Synthetic
ugugcccuuauguaccagg

SEQ ID NO: 321865 - RNA, 20 nt, Artificial Sequence
  Synthetic
uugugcccuuauguaccagg

SEQ ID NO: 321866 - RNA, 21 nt, Artificial Sequence
  Synthetic
uuugugcccuuauguaccagg

SEQ ID NO: 321867 - RNA, 22 nt, Artificial Sequence
  Synthetic
uuuugugcccuuauguaccagg

SEQ ID NO: 321868 - RNA, 23 nt, Artificial Sequence
  Synthetic
uuuuugugcccuuauguaccagg

SEQ ID NO: 321869 - RNA, 24 nt, Artificial Sequence
  Synthetic
auuuuugugcccuuauguaccagg

SEQ ID NO: 321870 - RNA, 18 nt, Artificial Sequence
  Synthetic
gaaucgcuugaacccagg

SEQ ID NO: 321871 - RNA, 19 nt, Artificial Sequence
  Synthetic
agaaucgcuugaacccagg

SEQ ID NO: 321872 - RNA, 20 nt, Artificial Sequence
  Synthetic
gagaaucgcuugaacccagg

SEQ ID NO: 321873 - RNA, 21 nt, Artificial Sequence
  Synthetic
ggagaaucgcuugaacccagg

SEQ ID NO: 321874 - RNA, 22 nt, Artificial Sequence
  Synthetic
aggagaaucgcuugaacccagg

SEQ ID NO: 321875 - RNA, 23 nt, Artificial Sequence
  Synthetic
caggagaaucgcuugaacccagg

SEQ ID NO: 321876 - RNA, 24 nt, Artificial Sequence
  Synthetic
gcaggagaaucgcuugaacccagg

SEQ ID NO: 321877 - RNA, 18 nt, Artificial Sequence
  Synthetic
cucacccuguaacccagg

SEQ ID NO: 321878 - RNA, 19 nt, Artificial Sequence
  Synthetic
ucucacccuguaacccagg

SEQ ID NO: 321879 - RNA, 20 nt, Artificial Sequence
  Synthetic
gucucacccuguaacccagg

SEQ ID NO: 321880 - RNA, 21 nt, Artificial Sequence
  Synthetic
agucucacccuguaacccagg

SEQ ID NO: 321881 - RNA, 22 nt, Artificial Sequence
  Synthetic
gagucucacccuguaacccagg

SEQ ID NO: 321882 - RNA, 23 nt, Artificial Sequence
  Synthetic
ggagucucacccuguaacccagg

SEQ ID NO: 321883 - RNA, 24 nt, Artificial Sequence
  Synthetic
cggagucucacccuguaacccagg

SEQ ID NO: 321884 - RNA, 18 nt, Artificial Sequence
  Synthetic
cuugcuccaucacccagg

SEQ ID NO: 321885 - RNA, 19 nt, Artificial Sequence
  Synthetic
ucuugcuccaucacccagg

SEQ ID NO: 321886 - RNA, 20 nt, Artificial Sequence
  Synthetic
gucuugcuccaucacccagg

SEQ ID NO: 321887 - RNA, 21 nt, Artificial Sequence
  Synthetic
agucuugcuccaucacccagg

SEQ ID NO: 321888 - RNA, 22 nt, Artificial Sequence
  Synthetic
gagucuugcuccaucacccagg

SEQ ID NO: 321889 - RNA, 23 nt, Artificial Sequence
  Synthetic
ggagucuugcuccaucacccagg

SEQ ID NO: 321890 - RNA, 24 nt, Artificial Sequence
  Synthetic
uggagucuugcuccaucacccagg

SEQ ID NO: 321891 - RNA, 18 nt, Artificial Sequence
  Synthetic
cuugcugggucacccagg

SEQ ID NO: 321892 - RNA, 19 nt, Artificial Sequence
  Synthetic
ucuugcugggucacccagg

SEQ ID NO: 321893 - RNA, 20 nt, Artificial Sequence
  Synthetic
gucuugcugggucacccagg

SEQ ID NO: 321894 - RNA, 21 nt, Artificial Sequence
  Synthetic
agucuugcugggucacccagg

SEQ ID NO: 321895 - RNA, 22 nt, Artificial Sequence
  Synthetic
gagucuugcugggucacccagg

SEQ ID NO: 321896 - RNA, 23 nt, Artificial Sequence
  Synthetic
agagucuugcugggucacccagg

SEQ ID NO: 321897 - RNA, 24 nt, Artificial Sequence
  Synthetic
cagagucuugcugggucacccagg

SEQ ID NO: 321898 - RNA, 18 nt, Artificial Sequence
  Synthetic
cucacccugucacccagg

SEQ ID NO: 321899 - RNA, 19 nt, Artificial Sequence
  Synthetic
ucucacccugucacccagg

SEQ ID NO: 321900 - RNA, 20 nt, Artificial Sequence
  Synthetic
uucucacccugucacccagg

SEQ ID NO: 321901 - RNA, 21 nt, Artificial Sequence
  Synthetic
auucucacccugucacccagg

SEQ ID NO: 321902 - RNA, 22 nt, Artificial Sequence
  Synthetic
gauucucacccugucacccagg

SEQ ID NO: 321903 - RNA, 23 nt, Artificial Sequence
  Synthetic
agauucucacccugucacccagg

SEQ ID NO: 321904 - RNA, 24 nt, Artificial Sequence
  Synthetic
cagauucucacccugucacccagg

SEQ ID NO: 321905 - RNA, 18 nt, Artificial Sequence
  Synthetic
cauacccugucacccagg

SEQ ID NO: 321906 - RNA, 19 nt, Artificial Sequence
  Synthetic
ucauacccugucacccagg

SEQ ID NO: 321907 - RNA, 20 nt, Artificial Sequence
  Synthetic
gucauacccugucacccagg

SEQ ID NO: 321908 - RNA, 21 nt, Artificial Sequence
  Synthetic
ggucauacccugucacccagg

SEQ ID NO: 321909 - RNA, 22 nt, Artificial Sequence
  Synthetic
gggucauacccugucacccagg

SEQ ID NO: 321910 - RNA, 23 nt, Artificial Sequence
  Synthetic
agggucauacccugucacccagg

SEQ ID NO: 321911 - RNA, 24 nt, Artificial Sequence
  Synthetic
cagggucauacccugucacccagg

SEQ ID NO: 321912 - RNA, 20 nt, Artificial Sequence
  Synthetic
gucucacucugucacccagg

SEQ ID NO: 321913 - RNA, 21 nt, Artificial Sequence
  Synthetic
agucucacucugucacccagg

SEQ ID NO: 321914 - RNA, 22 nt, Artificial Sequence
  Synthetic
cagucucacucugucacccagg

SEQ ID NO: 321915 - RNA, 23 nt, Artificial Sequence
  Synthetic
acagucucacucugucacccagg

SEQ ID NO: 321916 - RNA, 24 nt, Artificial Sequence
  Synthetic
gacagucucacucugucacccagg

SEQ ID NO: 321917 - RNA, 24 nt, Artificial Sequence
  Synthetic
cagagucucacucugucacccagg

SEQ ID NO: 321918 - RNA, 22 nt, Artificial Sequence
  Synthetic
cagucucgcucugucacccagg

SEQ ID NO: 321919 - RNA, 23 nt, Artificial Sequence
  Synthetic
acagucucgcucugucacccagg

SEQ ID NO: 321920 - RNA, 24 nt, Artificial Sequence
  Synthetic
gacagucucgcucugucacccagg

SEQ ID NO: 321921 - RNA, 23 nt, Artificial Sequence
  Synthetic
ggagucucgcucugucacccagg

SEQ ID NO: 321922 - RNA, 24 nt, Artificial Sequence
  Synthetic
cggagucucgcucugucacccagg

SEQ ID NO: 321923 - RNA, 19 nt, Artificial Sequence
  Synthetic
ucuugcucugucacccagg

SEQ ID NO: 321924 - RNA, 20 nt, Artificial Sequence
  Synthetic
gucuugcucugucacccagg

SEQ ID NO: 321925 - RNA, 23 nt, Artificial Sequence
  Synthetic
ugagucuugcucugucacccagg

SEQ ID NO: 321926 - RNA, 24 nt, Artificial Sequence
  Synthetic
cugagucuugcucugucacccagg

SEQ ID NO: 321927 - RNA, 18 nt, Artificial Sequence
  Synthetic
uuugcucugucacccagg

SEQ ID NO: 321928 - RNA, 19 nt, Artificial Sequence
  Synthetic
uuuugcucugucacccagg

SEQ ID NO: 321929 - RNA, 20 nt, Artificial Sequence
  Synthetic
guuuugcucugucacccagg

SEQ ID NO: 321930 - RNA, 21 nt, Artificial Sequence
  Synthetic
aguuuugcucugucacccagg

SEQ ID NO: 321931 - RNA, 22 nt, Artificial Sequence
  Synthetic
gaguuuugcucugucacccagg

SEQ ID NO: 321932 - RNA, 23 nt, Artificial Sequence
  Synthetic
ggaguuuugcucugucacccagg

SEQ ID NO: 321933 - RNA, 24 nt, Artificial Sequence
  Synthetic
uggaguuuugcucugucacccagg

SEQ ID NO: 321934 - RNA, 18 nt, Artificial Sequence
  Synthetic
cucguucugucacccagg

SEQ ID NO: 321935 - RNA, 19 nt, Artificial Sequence
  Synthetic
ucucguucugucacccagg

SEQ ID NO: 321936 - RNA, 20 nt, Artificial Sequence
  Synthetic
gucucguucugucacccagg

SEQ ID NO: 321937 - RNA, 21 nt, Artificial Sequence
  Synthetic
agucucguucugucacccagg

SEQ ID NO: 321938 - RNA, 22 nt, Artificial Sequence
  Synthetic
gagucucguucugucacccagg

SEQ ID NO: 321939 - RNA, 23 nt, Artificial Sequence
  Synthetic
agagucucguucugucacccagg

SEQ ID NO: 321940 - RNA, 24 nt, Artificial Sequence
  Synthetic
cagagucucguucugucacccagg

SEQ ID NO: 321941 - RNA, 18 nt, Artificial Sequence
  Synthetic
uugcuuuugucacccagg

SEQ ID NO: 321942 - RNA, 19 nt, Artificial Sequence
  Synthetic
uuugcuuuugucacccagg

SEQ ID NO: 321943 - RNA, 20 nt, Artificial Sequence
  Synthetic
uuuugcuuuugucacccagg

SEQ ID NO: 321944 - RNA, 21 nt, Artificial Sequence
  Synthetic
auuuugcuuuugucacccagg

SEQ ID NO: 321945 - RNA, 22 nt, Artificial Sequence
  Synthetic
aauuuugcuuuugucacccagg

SEQ ID NO: 321946 - RNA, 23 nt, Artificial Sequence
  Synthetic
gaauuuugcuuuugucacccagg

SEQ ID NO: 321947 - RNA, 24 nt, Artificial Sequence
  Synthetic
ggaauuuugcuuuugucacccagg

SEQ ID NO: 321948 - RNA, 18 nt, Artificial Sequence
  Synthetic
uugugggagggacccagg

SEQ ID NO: 321949 - RNA, 19 nt, Artificial Sequence
  Synthetic
guugugggagggacccagg

SEQ ID NO: 321950 - RNA, 20 nt, Artificial Sequence
  Synthetic
uguugugggagggacccagg

SEQ ID NO: 321951 - RNA, 21 nt, Artificial Sequence
  Synthetic
guguugugggagggacccagg

SEQ ID NO: 321952 - RNA, 22 nt, Artificial Sequence
  Synthetic
uguguugugggagggacccagg

SEQ ID NO: 321953 - RNA, 23 nt, Artificial Sequence
  Synthetic
auguguugugggagggacccagg

SEQ ID NO: 321954 - RNA, 24 nt, Artificial Sequence
  Synthetic
cauguguugugggagggacccagg

SEQ ID NO: 321955 - RNA, 18 nt, Artificial Sequence
  Synthetic
cgugcagugaaccccagg

SEQ ID NO: 321956 - RNA, 19 nt, Artificial Sequence
  Synthetic
gcgugcagugaaccccagg

SEQ ID NO: 321957 - RNA, 20 nt, Artificial Sequence
  Synthetic
ugcgugcagugaaccccagg

SEQ ID NO: 321958 - RNA, 21 nt, Artificial Sequence
  Synthetic
cugcgugcagugaaccccagg

SEQ ID NO: 321959 - RNA, 22 nt, Artificial Sequence
  Synthetic
acugcgugcagugaaccccagg

SEQ ID NO: 321960 - RNA, 23 nt, Artificial Sequence
  Synthetic
cacugcgugcagugaaccccagg

SEQ ID NO: 321961 - RNA, 24 nt, Artificial Sequence
  Synthetic
ucacugcgugcagugaaccccagg

SEQ ID NO: 321962 - RNA, 18 nt, Artificial Sequence
  Synthetic
ucgcucugucaccccagg

SEQ ID NO: 321963 - RNA, 19 nt, Artificial Sequence
  Synthetic
cucgcucugucaccccagg

SEQ ID NO: 321964 - RNA, 20 nt, Artificial Sequence
  Synthetic
ucucgcucugucaccccagg

SEQ ID NO: 321965 - RNA, 21 nt, Artificial Sequence
  Synthetic
gucucgcucugucaccccagg

SEQ ID NO: 321966 - RNA, 22 nt, Artificial Sequence
  Synthetic
agucucgcucugucaccccagg

SEQ ID NO: 321967 - RNA, 23 nt, Artificial Sequence
  Synthetic
gagucucgcucugucaccccagg

SEQ ID NO: 321968 - RNA, 24 nt, Artificial Sequence
  Synthetic
ggagucucgcucugucaccccagg

SEQ ID NO: 321969 - RNA, 18 nt, Artificial Sequence
  Synthetic
acucaaccugcccccagg

SEQ ID NO: 321970 - RNA, 19 nt, Artificial Sequence
  Synthetic
cacucaaccugcccccagg

SEQ ID NO: 321971 - RNA, 20 nt, Artificial Sequence
  Synthetic
ucacucaaccugcccccagg

SEQ ID NO: 321972 - RNA, 21 nt, Artificial Sequence
  Synthetic
gucacucaaccugcccccagg

SEQ ID NO: 321973 - RNA, 22 nt, Artificial Sequence
  Synthetic
agucacucaaccugcccccagg

SEQ ID NO: 321974 - RNA, 23 nt, Artificial Sequence
  Synthetic
cagucacucaaccugcccccagg

SEQ ID NO: 321975 - RNA, 24 nt, Artificial Sequence
  Synthetic
gcagucacucaaccugcccccagg

SEQ ID NO: 321976 - RNA, 18 nt, Artificial Sequence
  Synthetic
ucgcucuugucccccagg

SEQ ID NO: 321977 - RNA, 19 nt, Artificial Sequence
  Synthetic
cucgcucuugucccccagg

SEQ ID NO: 321978 - RNA, 20 nt, Artificial Sequence
  Synthetic
ucucgcucuugucccccagg

SEQ ID NO: 321979 - RNA, 21 nt, Artificial Sequence
  Synthetic
gucucgcucuugucccccagg

SEQ ID NO: 321980 - RNA, 22 nt, Artificial Sequence
  Synthetic
agucucgcucuugucccccagg

SEQ ID NO: 321981 - RNA, 23 nt, Artificial Sequence
  Synthetic
aagucucgcucuugucccccagg

SEQ ID NO: 321982 - RNA, 24 nt, Artificial Sequence
  Synthetic
gaagucucgcucuugucccccagg

SEQ ID NO: 321983 - RNA, 18 nt, Artificial Sequence
  Synthetic
ucucgccugcagcccagg

SEQ ID NO: 321984 - RNA, 19 nt, Artificial Sequence
  Synthetic
gucucgccugcagcccagg

SEQ ID NO: 321985 - RNA, 20 nt, Artificial Sequence
  Synthetic
agucucgccugcagcccagg

SEQ ID NO: 321986 - RNA, 21 nt, Artificial Sequence
  Synthetic
gagucucgccugcagcccagg

SEQ ID NO: 321987 - RNA, 22 nt, Artificial Sequence
  Synthetic
ggagucucgccugcagcccagg

SEQ ID NO: 321988 - RNA, 23 nt, Artificial Sequence
  Synthetic
uggagucucgccugcagcccagg

SEQ ID NO: 321989 - RNA, 24 nt, Artificial Sequence
  Synthetic
auggagucucgccugcagcccagg

SEQ ID NO: 321990 - RNA, 18 nt, Artificial Sequence
  Synthetic
cuugcucagucgcccagg

SEQ ID NO: 321991 - RNA, 19 nt, Artificial Sequence
  Synthetic
ucuugcucagucgcccagg

SEQ ID NO: 321992 - RNA, 20 nt, Artificial Sequence
  Synthetic
gucuugcucagucgcccagg

SEQ ID NO: 321993 - RNA, 21 nt, Artificial Sequence
  Synthetic
agucuugcucagucgcccagg

SEQ ID NO: 321994 - RNA, 22 nt, Artificial Sequence
  Synthetic
gagucuugcucagucgcccagg

SEQ ID NO: 321995 - RNA, 23 nt, Artificial Sequence
  Synthetic
ggagucuugcucagucgcccagg

SEQ ID NO: 321996 - RNA, 24 nt, Artificial Sequence
  Synthetic
cggagucuugcucagucgcccagg

SEQ ID NO: 321997 - RNA, 18 nt, Artificial Sequence
  Synthetic
cucacucugucgcccagg

SEQ ID NO: 321998 - RNA, 19 nt, Artificial Sequence
  Synthetic
ucucacucugucgcccagg

SEQ ID NO: 321999 - RNA, 20 nt, Artificial Sequence
  Synthetic
gucucacucugucgcccagg

SEQ ID NO: 322000 - RNA, 21 nt, Artificial Sequence
  Synthetic
agucucacucugucgcccagg

SEQ ID NO: 322001 - RNA, 22 nt, Artificial Sequence
  Synthetic
gagucucacucugucgcccagg

SEQ ID NO: 322002 - RNA, 23 nt, Artificial Sequence
  Synthetic
ggagucucacucugucgcccagg

SEQ ID NO: 322003 - RNA, 24 nt, Artificial Sequence
  Synthetic
cggagucucacucugucgcccagg

SEQ ID NO: 322004 - RNA, 24 nt, Artificial Sequence
  Synthetic
uggagucucacucugucgcccagg

SEQ ID NO: 322005 - RNA, 18 nt, Artificial Sequence
  Synthetic
cucgcucugucgcccagg

SEQ ID NO: 322006 - RNA, 19 nt, Artificial Sequence
  Synthetic
ucucgcucugucgcccagg

SEQ ID NO: 322007 - RNA, 20 nt, Artificial Sequence
  Synthetic
gucucgcucugucgcccagg

SEQ ID NO: 322008 - RNA, 24 nt, Artificial Sequence
  Synthetic
cggagucucgcucugucgcccagg

SEQ ID NO: 322009 - RNA, 18 nt, Artificial Sequence
  Synthetic
uucgcucugucgcccagg

SEQ ID NO: 322010 - RNA, 19 nt, Artificial Sequence
  Synthetic
uuucgcucugucgcccagg

SEQ ID NO: 322011 - RNA, 20 nt, Artificial Sequence
  Synthetic
guuucgcucugucgcccagg

SEQ ID NO: 322012 - RNA, 21 nt, Artificial Sequence
  Synthetic
aguuucgcucugucgcccagg

SEQ ID NO: 322013 - RNA, 22 nt, Artificial Sequence
  Synthetic
gaguuucgcucugucgcccagg

SEQ ID NO: 322014 - RNA, 23 nt, Artificial Sequence
  Synthetic
ggaguuucgcucugucgcccagg

SEQ ID NO: 322015 - RNA, 24 nt, Artificial Sequence
  Synthetic
cggaguuucgcucugucgcccagg

SEQ ID NO: 322016 - RNA, 18 nt, Artificial Sequence
  Synthetic
uuugcucugucgcccagg

SEQ ID NO: 322017 - RNA, 19 nt, Artificial Sequence
  Synthetic
uuuugcucugucgcccagg

SEQ ID NO: 322018 - RNA, 20 nt, Artificial Sequence
  Synthetic
guuuugcucugucgcccagg

SEQ ID NO: 322019 - RNA, 21 nt, Artificial Sequence
  Synthetic
aguuuugcucugucgcccagg

SEQ ID NO: 322020 - RNA, 22 nt, Artificial Sequence
  Synthetic
gaguuuugcucugucgcccagg

SEQ ID NO: 322021 - RNA, 23 nt, Artificial Sequence
  Synthetic
agaguuuugcucugucgcccagg

SEQ ID NO: 322022 - RNA, 24 nt, Artificial Sequence
  Synthetic
cagaguuuugcucugucgcccagg

SEQ ID NO: 322023 - RNA, 18 nt, Artificial Sequence
  Synthetic
uucgcucuuucgcccagg

SEQ ID NO: 322024 - RNA, 19 nt, Artificial Sequence
  Synthetic
uuucgcucuuucgcccagg

SEQ ID NO: 322025 - RNA, 20 nt, Artificial Sequence
  Synthetic
guuucgcucuuucgcccagg

SEQ ID NO: 322026 - RNA, 21 nt, Artificial Sequence
  Synthetic
aguuucgcucuuucgcccagg

SEQ ID NO: 322027 - RNA, 22 nt, Artificial Sequence
  Synthetic
gaguuucgcucuuucgcccagg

SEQ ID NO: 322028 - RNA, 23 nt, Artificial Sequence
  Synthetic
ggaguuucgcucuuucgcccagg

SEQ ID NO: 322029 - RNA, 24 nt, Artificial Sequence
  Synthetic
gggaguuucgcucuuucgcccagg

SEQ ID NO: 322030 - RNA, 18 nt, Artificial Sequence
  Synthetic
augcuagaucugcccagg

SEQ ID NO: 322031 - RNA, 19 nt, Artificial Sequence
  Synthetic
aaugcuagaucugcccagg

SEQ ID NO: 322032 - RNA, 20 nt, Artificial Sequence
  Synthetic
aaaugcuagaucugcccagg

SEQ ID NO: 322033 - RNA, 21 nt, Artificial Sequence
  Synthetic
caaaugcuagaucugcccagg

SEQ ID NO: 322034 - RNA, 22 nt, Artificial Sequence
  Synthetic
ucaaaugcuagaucugcccagg

SEQ ID NO: 322035 - RNA, 23 nt, Artificial Sequence
  Synthetic
cucaaaugcuagaucugcccagg

SEQ ID NO: 322036 - RNA, 24 nt, Artificial Sequence
  Synthetic
ucucaaaugcuagaucugcccagg

SEQ ID NO: 322037 - RNA, 18 nt, Artificial Sequence
  Synthetic
ucuguaaaugugcccagg

SEQ ID NO: 322038 - RNA, 19 nt, Artificial Sequence
  Synthetic
cucuguaaaugugcccagg

SEQ ID NO: 322039 - RNA, 20 nt, Artificial Sequence
  Synthetic
gcucuguaaaugugcccagg

SEQ ID NO: 322040 - RNA, 21 nt, Artificial Sequence
  Synthetic
ugcucuguaaaugugcccagg

SEQ ID NO: 322041 - RNA, 22 nt, Artificial Sequence
  Synthetic
uugcucuguaaaugugcccagg

SEQ ID NO: 322042 - RNA, 23 nt, Artificial Sequence
  Synthetic
auugcucuguaaaugugcccagg

SEQ ID NO: 322043 - RNA, 24 nt, Artificial Sequence
  Synthetic
aauugcucuguaaaugugcccagg

SEQ ID NO: 322044 - RNA, 18 nt, Artificial Sequence
  Synthetic
ccugcuccauugcccagg

SEQ ID NO: 322045 - RNA, 19 nt, Artificial Sequence
  Synthetic
uccugcuccauugcccagg

SEQ ID NO: 322046 - RNA, 20 nt, Artificial Sequence
  Synthetic
guccugcuccauugcccagg

SEQ ID NO: 322047 - RNA, 21 nt, Artificial Sequence
  Synthetic
aguccugcuccauugcccagg

SEQ ID NO: 322048 - RNA, 22 nt, Artificial Sequence
  Synthetic
gaguccugcuccauugcccagg

SEQ ID NO: 322049 - RNA, 23 nt, Artificial Sequence
  Synthetic
agaguccugcuccauugcccagg

SEQ ID NO: 322050 - RNA, 24 nt, Artificial Sequence
  Synthetic
cagaguccugcuccauugcccagg

SEQ ID NO: 322051 - RNA, 18 nt, Artificial Sequence
  Synthetic
cucacucuguugcccagg

SEQ ID NO: 322052 - RNA, 19 nt, Artificial Sequence
  Synthetic
ucucacucuguugcccagg

SEQ ID NO: 322053 - RNA, 20 nt, Artificial Sequence
  Synthetic
aucucacucuguugcccagg

SEQ ID NO: 322054 - RNA, 21 nt, Artificial Sequence
  Synthetic
aaucucacucuguugcccagg

SEQ ID NO: 322055 - RNA, 22 nt, Artificial Sequence
  Synthetic
caaucucacucuguugcccagg

SEQ ID NO: 322056 - RNA, 23 nt, Artificial Sequence
  Synthetic
acaaucucacucuguugcccagg

SEQ ID NO: 322057 - RNA, 24 nt, Artificial Sequence
  Synthetic
cacaaucucacucuguugcccagg

SEQ ID NO: 322058 - RNA, 21 nt, Artificial Sequence
  Synthetic
caucucacucuguugcccagg

SEQ ID NO: 322059 - RNA, 22 nt, Artificial Sequence
  Synthetic
gcaucucacucuguugcccagg

SEQ ID NO: 322060 - RNA, 23 nt, Artificial Sequence
  Synthetic
agcaucucacucuguugcccagg

SEQ ID NO: 322061 - RNA, 24 nt, Artificial Sequence
  Synthetic
cagcaucucacucuguugcccagg

SEQ ID NO: 322062 - RNA, 20 nt, Artificial Sequence
  Synthetic
gucucacucuguugcccagg

SEQ ID NO: 322063 - RNA, 21 nt, Artificial Sequence
  Synthetic
agucucacucuguugcccagg

SEQ ID NO: 322064 - RNA, 22 nt, Artificial Sequence
  Synthetic
gagucucacucuguugcccagg

SEQ ID NO: 322065 - RNA, 23 nt, Artificial Sequence
  Synthetic
ggagucucacucuguugcccagg

SEQ ID NO: 322066 - RNA, 24 nt, Artificial Sequence
  Synthetic
uggagucucacucuguugcccagg

SEQ ID NO: 322067 - RNA, 18 nt, Artificial Sequence
  Synthetic
cuugcucuguugcccagg

SEQ ID NO: 322068 - RNA, 19 nt, Artificial Sequence
  Synthetic
ucuugcucuguugcccagg

SEQ ID NO: 322069 - RNA, 20 nt, Artificial Sequence
  Synthetic
aucuugcucuguugcccagg

SEQ ID NO: 322070 - RNA, 21 nt, Artificial Sequence
  Synthetic
aaucuugcucuguugcccagg

SEQ ID NO: 322071 - RNA, 22 nt, Artificial Sequence
  Synthetic
gaaucuugcucuguugcccagg

SEQ ID NO: 322072 - RNA, 23 nt, Artificial Sequence
  Synthetic
agaaucuugcucuguugcccagg

SEQ ID NO: 322073 - RNA, 24 nt, Artificial Sequence
  Synthetic
cagaaucuugcucuguugcccagg

SEQ ID NO: 322074 - RNA, 20 nt, Artificial Sequence
  Synthetic
gucuugcucuguugcccagg

SEQ ID NO: 322075 - RNA, 24 nt, Artificial Sequence
  Synthetic
agaguuucacucuuguugcccagg

SEQ ID NO: 322076 - RNA, 22 nt, Artificial Sequence
  Synthetic
uguuucacucuuguugcccagg

SEQ ID NO: 322077 - RNA, 23 nt, Artificial Sequence
  Synthetic
guguuucacucuuguugcccagg

SEQ ID NO: 322078 - RNA, 24 nt, Artificial Sequence
  Synthetic
gguguuucacucuuguugcccagg

SEQ ID NO: 322079 - RNA, 18 nt, Artificial Sequence
  Synthetic
ucgcucuuguugcccagg

SEQ ID NO: 322080 - RNA, 19 nt, Artificial Sequence
  Synthetic
uucgcucuuguugcccagg

SEQ ID NO: 322081 - RNA, 20 nt, Artificial Sequence
  Synthetic
uuucgcucuuguugcccagg

SEQ ID NO: 322082 - RNA, 21 nt, Artificial Sequence
  Synthetic
guuucgcucuuguugcccagg

SEQ ID NO: 322083 - RNA, 22 nt, Artificial Sequence
  Synthetic
aguuucgcucuuguugcccagg

SEQ ID NO: 322084 - RNA, 23 nt, Artificial Sequence
  Synthetic
gaguuucgcucuuguugcccagg

SEQ ID NO: 322085 - RNA, 24 nt, Artificial Sequence
  Synthetic
ggaguuucgcucuuguugcccagg

SEQ ID NO: 322086 - RNA, 18 nt, Artificial Sequence
  Synthetic
uugcucuuguugcccagg

SEQ ID NO: 322087 - RNA, 19 nt, Artificial Sequence
  Synthetic
uuugcucuuguugcccagg

SEQ ID NO: 322088 - RNA, 20 nt, Artificial Sequence
  Synthetic
uuuugcucuuguugcccagg

SEQ ID NO: 322089 - RNA, 21 nt, Artificial Sequence
  Synthetic
guuuugcucuuguugcccagg

SEQ ID NO: 322090 - RNA, 22 nt, Artificial Sequence
  Synthetic
aguuuugcucuuguugcccagg

SEQ ID NO: 322091 - RNA, 23 nt, Artificial Sequence
  Synthetic
gaguuuugcucuuguugcccagg

SEQ ID NO: 322092 - RNA, 24 nt, Artificial Sequence
  Synthetic
agaguuuugcucuuguugcccagg

SEQ ID NO: 322093 - RNA, 24 nt, Artificial Sequence
  Synthetic
ggaguuuugcucuuguugcccagg

SEQ ID NO: 322094 - RNA, 18 nt, Artificial Sequence
  Synthetic
auggaaggacaucccagg

SEQ ID NO: 322095 - RNA, 19 nt, Artificial Sequence
  Synthetic
uauggaaggacaucccagg

SEQ ID NO: 322096 - RNA, 20 nt, Artificial Sequence
  Synthetic
guauggaaggacaucccagg

SEQ ID NO: 322097 - RNA, 21 nt, Artificial Sequence
  Synthetic
uguauggaaggacaucccagg

SEQ ID NO: 322098 - RNA, 22 nt, Artificial Sequence
  Synthetic
auguauggaaggacaucccagg

SEQ ID NO: 322099 - RNA, 23 nt, Artificial Sequence
  Synthetic
gauguauggaaggacaucccagg

SEQ ID NO: 322100 - RNA, 24 nt, Artificial Sequence
  Synthetic
agauguauggaaggacaucccagg

SEQ ID NO: 322101 - RNA, 18 nt, Artificial Sequence
  Synthetic
cuugcuuugucucccagg

SEQ ID NO: 322102 - RNA, 19 nt, Artificial Sequence
  Synthetic
ucuugcuuugucucccagg

SEQ ID NO: 322103 - RNA, 20 nt, Artificial Sequence
  Synthetic
uucuugcuuugucucccagg

SEQ ID NO: 322104 - RNA, 21 nt, Artificial Sequence
  Synthetic
auucuugcuuugucucccagg

SEQ ID NO: 322105 - RNA, 22 nt, Artificial Sequence
  Synthetic
gauucuugcuuugucucccagg

SEQ ID NO: 322106 - RNA, 23 nt, Artificial Sequence
  Synthetic
ugauucuugcuuugucucccagg

SEQ ID NO: 322107 - RNA, 24 nt, Artificial Sequence
  Synthetic
augauucuugcuuugucucccagg

SEQ ID NO: 322108 - RNA, 18 nt, Artificial Sequence
  Synthetic
gccagagcagaagccagg

SEQ ID NO: 322109 - RNA, 19 nt, Artificial Sequence
  Synthetic
ggccagagcagaagccagg

SEQ ID NO: 322110 - RNA, 20 nt, Artificial Sequence
  Synthetic
uggccagagcagaagccagg

SEQ ID NO: 322111 - RNA, 21 nt, Artificial Sequence
  Synthetic
auggccagagcagaagccagg

SEQ ID NO: 322112 - RNA, 22 nt, Artificial Sequence
  Synthetic
cauggccagagcagaagccagg

SEQ ID NO: 322113 - RNA, 23 nt, Artificial Sequence
  Synthetic
acauggccagagcagaagccagg

SEQ ID NO: 322114 - RNA, 24 nt, Artificial Sequence
  Synthetic
cacauggccagagcagaagccagg

SEQ ID NO: 322115 - RNA, 18 nt, Artificial Sequence
  Synthetic
guacuucacagagccagg

SEQ ID NO: 322116 - RNA, 19 nt, Artificial Sequence
  Synthetic
uguacuucacagagccagg

SEQ ID NO: 322117 - RNA, 20 nt, Artificial Sequence
  Synthetic
auguacuucacagagccagg

SEQ ID NO: 322118 - RNA, 21 nt, Artificial Sequence
  Synthetic
gauguacuucacagagccagg

SEQ ID NO: 322119 - RNA, 22 nt, Artificial Sequence
  Synthetic
ugauguacuucacagagccagg

SEQ ID NO: 322120 - RNA, 23 nt, Artificial Sequence
  Synthetic
gugauguacuucacagagccagg

SEQ ID NO: 322121 - RNA, 24 nt, Artificial Sequence
  Synthetic
ugugauguacuucacagagccagg

SEQ ID NO: 322122 - RNA, 18 nt, Artificial Sequence
  Synthetic
ucucgcucugucgccagg

SEQ ID NO: 322123 - RNA, 19 nt, Artificial Sequence
  Synthetic
gucucgcucugucgccagg

SEQ ID NO: 322124 - RNA, 20 nt, Artificial Sequence
  Synthetic
agucucgcucugucgccagg

SEQ ID NO: 322125 - RNA, 21 nt, Artificial Sequence
  Synthetic
aagucucgcucugucgccagg

SEQ ID NO: 322126 - RNA, 22 nt, Artificial Sequence
  Synthetic
gaagucucgcucugucgccagg

SEQ ID NO: 322127 - RNA, 23 nt, Artificial Sequence
  Synthetic
cgaagucucgcucugucgccagg

SEQ ID NO: 322128 - RNA, 24 nt, Artificial Sequence
  Synthetic
acgaagucucgcucugucgccagg

SEQ ID NO: 322129 - RNA, 18 nt, Artificial Sequence
  Synthetic
ggagucucugucgccagg

SEQ ID NO: 322130 - RNA, 19 nt, Artificial Sequence
  Synthetic
uggagucucugucgccagg

SEQ ID NO: 322131 - RNA, 20 nt, Artificial Sequence
  Synthetic
auggagucucugucgccagg

SEQ ID NO: 322132 - RNA, 21 nt, Artificial Sequence
  Synthetic
gauggagucucugucgccagg

SEQ ID NO: 322133 - RNA, 22 nt, Artificial Sequence
  Synthetic
agauggagucucugucgccagg

SEQ ID NO: 322134 - RNA, 23 nt, Artificial Sequence
  Synthetic
gagauggagucucugucgccagg

SEQ ID NO: 322135 - RNA, 24 nt, Artificial Sequence
  Synthetic
ugagauggagucucugucgccagg

SEQ ID NO: 322136 - RNA, 18 nt, Artificial Sequence
  Synthetic
uguaauaucagugccagg

SEQ ID NO: 322137 - RNA, 19 nt, Artificial Sequence
  Synthetic
uuguaauaucagugccagg

SEQ ID NO: 322138 - RNA, 20 nt, Artificial Sequence
  Synthetic
cuuguaauaucagugccagg

SEQ ID NO: 322139 - RNA, 21 nt, Artificial Sequence
  Synthetic
acuuguaauaucagugccagg

SEQ ID NO: 322140 - RNA, 22 nt, Artificial Sequence
  Synthetic
cacuuguaauaucagugccagg

SEQ ID NO: 322141 - RNA, 23 nt, Artificial Sequence
  Synthetic
acacuuguaauaucagugccagg

SEQ ID NO: 322142 - RNA, 24 nt, Artificial Sequence
  Synthetic
cacacuuguaauaucagugccagg

SEQ ID NO: 322143 - RNA, 18 nt, Artificial Sequence
  Synthetic
aaccuuuguugugccagg

SEQ ID NO: 322144 - RNA, 19 nt, Artificial Sequence
  Synthetic
gaaccuuuguugugccagg

SEQ ID NO: 322145 - RNA, 20 nt, Artificial Sequence
  Synthetic
ugaaccuuuguugugccagg

SEQ ID NO: 322146 - RNA, 21 nt, Artificial Sequence
  Synthetic
cugaaccuuuguugugccagg

SEQ ID NO: 322147 - RNA, 22 nt, Artificial Sequence
  Synthetic
gcugaaccuuuguugugccagg

SEQ ID NO: 322148 - RNA, 23 nt, Artificial Sequence
  Synthetic
ugcugaaccuuuguugugccagg

SEQ ID NO: 322149 - RNA, 24 nt, Artificial Sequence
  Synthetic
uugcugaaccuuuguugugccagg

SEQ ID NO: 322150 - RNA, 18 nt, Artificial Sequence
  Synthetic
gugcucugaguugccagg

SEQ ID NO: 322151 - RNA, 19 nt, Artificial Sequence
  Synthetic
ggugcucugaguugccagg

SEQ ID NO: 322152 - RNA, 20 nt, Artificial Sequence
  Synthetic
uggugcucugaguugccagg

SEQ ID NO: 322153 - RNA, 21 nt, Artificial Sequence
  Synthetic
cuggugcucugaguugccagg

SEQ ID NO: 322154 - RNA, 22 nt, Artificial Sequence
  Synthetic
ucuggugcucugaguugccagg

SEQ ID NO: 322155 - RNA, 23 nt, Artificial Sequence
  Synthetic
gucuggugcucugaguugccagg

SEQ ID NO: 322156 - RNA, 24 nt, Artificial Sequence
  Synthetic
ugucuggugcucugaguugccagg

SEQ ID NO: 322157 - RNA, 18 nt, Artificial Sequence
  Synthetic
cgagaagggcaauccagg

SEQ ID NO: 322158 - RNA, 19 nt, Artificial Sequence
  Synthetic
acgagaagggcaauccagg

SEQ ID NO: 322159 - RNA, 20 nt, Artificial Sequence
  Synthetic
aacgagaagggcaauccagg

SEQ ID NO: 322160 - RNA, 21 nt, Artificial Sequence
  Synthetic
aaacgagaagggcaauccagg

SEQ ID NO: 322161 - RNA, 22 nt, Artificial Sequence
  Synthetic
aaaacgagaagggcaauccagg

SEQ ID NO: 322162 - RNA, 23 nt, Artificial Sequence
  Synthetic
uaaaacgagaagggcaauccagg

SEQ ID NO: 322163 - RNA, 24 nt, Artificial Sequence
  Synthetic
auaaaacgagaagggcaauccagg

SEQ ID NO: 322164 - RNA, 18 nt, Artificial Sequence
  Synthetic
uggacgaugaaguccagg

SEQ ID NO: 322165 - RNA, 19 nt, Artificial Sequence
  Synthetic
guggacgaugaaguccagg

SEQ ID NO: 322166 - RNA, 20 nt, Artificial Sequence
  Synthetic
uguggacgaugaaguccagg

SEQ ID NO: 322167 - RNA, 21 nt, Artificial Sequence
  Synthetic
auguggacgaugaaguccagg

SEQ ID NO: 322168 - RNA, 22 nt, Artificial Sequence
  Synthetic
gauguggacgaugaaguccagg

SEQ ID NO: 322169 - RNA, 23 nt, Artificial Sequence
  Synthetic
ugauguggacgaugaaguccagg

SEQ ID NO: 322170 - RNA, 24 nt, Artificial Sequence
  Synthetic
gugauguggacgaugaaguccagg

SEQ ID NO: 322171 - RNA, 18 nt, Artificial Sequence
  Synthetic
cagcaaaaaagguccagg

SEQ ID NO: 322172 - RNA, 19 nt, Artificial Sequence
  Synthetic
ucagcaaaaaagguccagg

SEQ ID NO: 322173 - RNA, 20 nt, Artificial Sequence
  Synthetic
uucagcaaaaaagguccagg

SEQ ID NO: 322174 - RNA, 21 nt, Artificial Sequence
  Synthetic
guucagcaaaaaagguccagg

SEQ ID NO: 322175 - RNA, 22 nt, Artificial Sequence
  Synthetic
aguucagcaaaaaagguccagg

SEQ ID NO: 322176 - RNA, 23 nt, Artificial Sequence
  Synthetic
gaguucagcaaaaaagguccagg

SEQ ID NO: 322177 - RNA, 24 nt, Artificial Sequence
  Synthetic
agaguucagcaaaaaagguccagg

SEQ ID NO: 322178 - RNA, 18 nt, Artificial Sequence
  Synthetic
aaagccuagguguccagg

SEQ ID NO: 322179 - RNA, 19 nt, Artificial Sequence
  Synthetic
aaaagccuagguguccagg

SEQ ID NO: 322180 - RNA, 20 nt, Artificial Sequence
  Synthetic
gaaaagccuagguguccagg

SEQ ID NO: 322181 - RNA, 21 nt, Artificial Sequence
  Synthetic
ggaaaagccuagguguccagg

SEQ ID NO: 322182 - RNA, 22 nt, Artificial Sequence
  Synthetic
uggaaaagccuagguguccagg

SEQ ID NO: 322183 - RNA, 23 nt, Artificial Sequence
  Synthetic
auggaaaagccuagguguccagg

SEQ ID NO: 322184 - RNA, 24 nt, Artificial Sequence
  Synthetic
uauggaaaagccuagguguccagg

SEQ ID NO: 322185 - RNA, 18 nt, Artificial Sequence
  Synthetic
gggcaaaaacauuccagg

SEQ ID NO: 322186 - RNA, 19 nt, Artificial Sequence
  Synthetic
ugggcaaaaacauuccagg

SEQ ID NO: 322187 - RNA, 20 nt, Artificial Sequence
  Synthetic
uugggcaaaaacauuccagg

SEQ ID NO: 322188 - RNA, 21 nt, Artificial Sequence
  Synthetic
uuugggcaaaaacauuccagg

SEQ ID NO: 322189 - RNA, 22 nt, Artificial Sequence
  Synthetic
auuugggcaaaaacauuccagg

SEQ ID NO: 322190 - RNA, 23 nt, Artificial Sequence
  Synthetic
aauuugggcaaaaacauuccagg

SEQ ID NO: 322191 - RNA, 24 nt, Artificial Sequence
  Synthetic
caauuugggcaaaaacauuccagg

SEQ ID NO: 322192 - RNA, 18 nt, Artificial Sequence
  Synthetic
gggaaagagcauuccagg

SEQ ID NO: 322193 - RNA, 19 nt, Artificial Sequence
  Synthetic
ggggaaagagcauuccagg

SEQ ID NO: 322194 - RNA, 20 nt, Artificial Sequence
  Synthetic
uggggaaagagcauuccagg

SEQ ID NO: 322195 - RNA, 21 nt, Artificial Sequence
  Synthetic
uuggggaaagagcauuccagg

SEQ ID NO: 322196 - RNA, 22 nt, Artificial Sequence
  Synthetic
uuuggggaaagagcauuccagg

SEQ ID NO: 322197 - RNA, 23 nt, Artificial Sequence
  Synthetic
auuuggggaaagagcauuccagg

SEQ ID NO: 322198 - RNA, 24 nt, Artificial Sequence
  Synthetic
uauuuggggaaagagcauuccagg

SEQ ID NO: 322199 - RNA, 18 nt, Artificial Sequence
  Synthetic
ugggaaaauuauuccagg

SEQ ID NO: 322200 - RNA, 19 nt, Artificial Sequence
  Synthetic
cugggaaaauuauuccagg

SEQ ID NO: 322201 - RNA, 20 nt, Artificial Sequence
  Synthetic
ucugggaaaauuauuccagg

SEQ ID NO: 322202 - RNA, 21 nt, Artificial Sequence
  Synthetic
uucugggaaaauuauuccagg

SEQ ID NO: 322203 - RNA, 22 nt, Artificial Sequence
  Synthetic
uuucugggaaaauuauuccagg

SEQ ID NO: 322204 - RNA, 23 nt, Artificial Sequence
  Synthetic
auuucugggaaaauuauuccagg

SEQ ID NO: 322205 - RNA, 24 nt, Artificial Sequence
  Synthetic
uauuucugggaaaauuauuccagg

SEQ ID NO: 322206 - RNA, 18 nt, Artificial Sequence
  Synthetic
uaguggaaugcuuccagg

SEQ ID NO: 322207 - RNA, 19 nt, Artificial Sequence
  Synthetic
uuaguggaaugcuuccagg

SEQ ID NO: 322208 - RNA, 20 nt, Artificial Sequence
  Synthetic
cuuaguggaaugcuuccagg

SEQ ID NO: 322209 - RNA, 21 nt, Artificial Sequence
  Synthetic
gcuuaguggaaugcuuccagg

SEQ ID NO: 322210 - RNA, 22 nt, Artificial Sequence
  Synthetic
ggcuuaguggaaugcuuccagg

SEQ ID NO: 322211 - RNA, 23 nt, Artificial Sequence
  Synthetic
gggcuuaguggaaugcuuccagg

SEQ ID NO: 322212 - RNA, 24 nt, Artificial Sequence
  Synthetic
agggcuuaguggaaugcuuccagg

SEQ ID NO: 322213 - RNA, 18 nt, Artificial Sequence
  Synthetic
cugaaggcaauuuccagg

SEQ ID NO: 322214 - RNA, 19 nt, Artificial Sequence
  Synthetic
gcugaaggcaauuuccagg

SEQ ID NO: 322215 - RNA, 20 nt, Artificial Sequence
  Synthetic
agcugaaggcaauuuccagg

SEQ ID NO: 322216 - RNA, 21 nt, Artificial Sequence
  Synthetic
cagcugaaggcaauuuccagg

SEQ ID NO: 322217 - RNA, 22 nt, Artificial Sequence
  Synthetic
acagcugaaggcaauuuccagg

SEQ ID NO: 322218 - RNA, 23 nt, Artificial Sequence
  Synthetic
uacagcugaaggcaauuuccagg

SEQ ID NO: 322219 - RNA, 24 nt, Artificial Sequence
  Synthetic
cuacagcugaaggcaauuuccagg

SEQ ID NO: 322220 - RNA, 18 nt, Artificial Sequence
  Synthetic
ugggugauaaaaagcagg

SEQ ID NO: 322221 - RNA, 19 nt, Artificial Sequence
  Synthetic
augggugauaaaaagcagg

SEQ ID NO: 322222 - RNA, 20 nt, Artificial Sequence
  Synthetic
uaugggugauaaaaagcagg

SEQ ID NO: 322223 - RNA, 21 nt, Artificial Sequence
  Synthetic
uuaugggugauaaaaagcagg

SEQ ID NO: 322224 - RNA, 22 nt, Artificial Sequence
  Synthetic
cuuaugggugauaaaaagcagg

SEQ ID NO: 322225 - RNA, 23 nt, Artificial Sequence
  Synthetic
acuuaugggugauaaaaagcagg

SEQ ID NO: 322226 - RNA, 24 nt, Artificial Sequence
  Synthetic
aacuuaugggugauaaaaagcagg

SEQ ID NO: 322227 - RNA, 18 nt, Artificial Sequence
  Synthetic
ucaaugccacaaagcagg

SEQ ID NO: 322228 - RNA, 19 nt, Artificial Sequence
  Synthetic
aucaaugccacaaagcagg

SEQ ID NO: 322229 - RNA, 20 nt, Artificial Sequence
  Synthetic
aaucaaugccacaaagcagg

SEQ ID NO: 322230 - RNA, 21 nt, Artificial Sequence
  Synthetic
aaaucaaugccacaaagcagg

SEQ ID NO: 322231 - RNA, 22 nt, Artificial Sequence
  Synthetic
caaaucaaugccacaaagcagg

SEQ ID NO: 322232 - RNA, 23 nt, Artificial Sequence
  Synthetic
ucaaaucaaugccacaaagcagg

SEQ ID NO: 322233 - RNA, 24 nt, Artificial Sequence
  Synthetic
aucaaaucaaugccacaaagcagg

SEQ ID NO: 322234 - RNA, 18 nt, Artificial Sequence
  Synthetic
cacagaccugcaagcagg

SEQ ID NO: 322235 - RNA, 19 nt, Artificial Sequence
  Synthetic
ucacagaccugcaagcagg

SEQ ID NO: 322236 - RNA, 20 nt, Artificial Sequence
  Synthetic
aucacagaccugcaagcagg

SEQ ID NO: 322237 - RNA, 21 nt, Artificial Sequence
  Synthetic
uaucacagaccugcaagcagg

SEQ ID NO: 322238 - RNA, 22 nt, Artificial Sequence
  Synthetic
guaucacagaccugcaagcagg

SEQ ID NO: 322239 - RNA, 23 nt, Artificial Sequence
  Synthetic
aguaucacagaccugcaagcagg

SEQ ID NO: 322240 - RNA, 24 nt, Artificial Sequence
  Synthetic
uaguaucacagaccugcaagcagg

SEQ ID NO: 322241 - RNA, 18 nt, Artificial Sequence
  Synthetic
ugaaaguuugcaagcagg

SEQ ID NO: 322242 - RNA, 19 nt, Artificial Sequence
  Synthetic
augaaaguuugcaagcagg

SEQ ID NO: 322243 - RNA, 20 nt, Artificial Sequence
  Synthetic
aaugaaaguuugcaagcagg

SEQ ID NO: 322244 - RNA, 21 nt, Artificial Sequence
  Synthetic
aaaugaaaguuugcaagcagg

SEQ ID NO: 322245 - RNA, 22 nt, Artificial Sequence
  Synthetic
caaaugaaaguuugcaagcagg

SEQ ID NO: 322246 - RNA, 23 nt, Artificial Sequence
  Synthetic
ucaaaugaaaguuugcaagcagg

SEQ ID NO: 322247 - RNA, 24 nt, Artificial Sequence
  Synthetic
gucaaaugaaaguuugcaagcagg

SEQ ID NO: 322248 - RNA, 18 nt, Artificial Sequence
  Synthetic
gggugacccggaagcagg

SEQ ID NO: 322249 - RNA, 19 nt, Artificial Sequence
  Synthetic
agggugacccggaagcagg

SEQ ID NO: 322250 - RNA, 20 nt, Artificial Sequence
  Synthetic
aagggugacccggaagcagg

SEQ ID NO: 322251 - RNA, 21 nt, Artificial Sequence
  Synthetic
uaagggugacccggaagcagg

SEQ ID NO: 322252 - RNA, 22 nt, Artificial Sequence
  Synthetic
guaagggugacccggaagcagg

SEQ ID NO: 322253 - RNA, 23 nt, Artificial Sequence
  Synthetic
aguaagggugacccggaagcagg

SEQ ID NO: 322254 - RNA, 24 nt, Artificial Sequence
  Synthetic
gaguaagggugacccggaagcagg

SEQ ID NO: 322255 - RNA, 18 nt, Artificial Sequence
  Synthetic
ugagagauuauaagcagg

SEQ ID NO: 322256 - RNA, 19 nt, Artificial Sequence
  Synthetic
augagagauuauaagcagg

SEQ ID NO: 322257 - RNA, 20 nt, Artificial Sequence
  Synthetic
caugagagauuauaagcagg

SEQ ID NO: 322258 - RNA, 21 nt, Artificial Sequence
  Synthetic
ucaugagagauuauaagcagg

SEQ ID NO: 322259 - RNA, 22 nt, Artificial Sequence
  Synthetic
uucaugagagauuauaagcagg

SEQ ID NO: 322260 - RNA, 23 nt, Artificial Sequence
  Synthetic
uuucaugagagauuauaagcagg

SEQ ID NO: 322261 - RNA, 24 nt, Artificial Sequence
  Synthetic
auuucaugagagauuauaagcagg

SEQ ID NO: 322262 - RNA, 18 nt, Artificial Sequence
  Synthetic
auuguguuuauaagcagg

SEQ ID NO: 322263 - RNA, 19 nt, Artificial Sequence
  Synthetic
uauuguguuuauaagcagg

SEQ ID NO: 322264 - RNA, 20 nt, Artificial Sequence
  Synthetic
uuauuguguuuauaagcagg

SEQ ID NO: 322265 - RNA, 21 nt, Artificial Sequence
  Synthetic
guuauuguguuuauaagcagg

SEQ ID NO: 322266 - RNA, 22 nt, Artificial Sequence
  Synthetic
uguuauuguguuuauaagcagg

SEQ ID NO: 322267 - RNA, 23 nt, Artificial Sequence
  Synthetic
guguuauuguguuuauaagcagg

SEQ ID NO: 322268 - RNA, 24 nt, Artificial Sequence
  Synthetic
uguguuauuguguuuauaagcagg

SEQ ID NO: 322269 - RNA, 18 nt, Artificial Sequence
  Synthetic
gccuuaguguuaagcagg

SEQ ID NO: 322270 - RNA, 19 nt, Artificial Sequence
  Synthetic
agccuuaguguuaagcagg

SEQ ID NO: 322271 - RNA, 20 nt, Artificial Sequence
  Synthetic
cagccuuaguguuaagcagg

SEQ ID NO: 322272 - RNA, 21 nt, Artificial Sequence
  Synthetic
acagccuuaguguuaagcagg

SEQ ID NO: 322273 - RNA, 22 nt, Artificial Sequence
  Synthetic
aacagccuuaguguuaagcagg

SEQ ID NO: 322274 - RNA, 23 nt, Artificial Sequence
  Synthetic
uaacagccuuaguguuaagcagg

SEQ ID NO: 322275 - RNA, 24 nt, Artificial Sequence
  Synthetic
auaacagccuuaguguuaagcagg

SEQ ID NO: 322276 - RNA, 18 nt, Artificial Sequence
  Synthetic
ggguugaauuacagcagg

SEQ ID NO: 322277 - RNA, 19 nt, Artificial Sequence
  Synthetic
gggguugaauuacagcagg

SEQ ID NO: 322278 - RNA, 20 nt, Artificial Sequence
  Synthetic
agggguugaauuacagcagg

SEQ ID NO: 322279 - RNA, 21 nt, Artificial Sequence
  Synthetic
cagggguugaauuacagcagg

SEQ ID NO: 322280 - RNA, 22 nt, Artificial Sequence
  Synthetic
gcagggguugaauuacagcagg

SEQ ID NO: 322281 - RNA, 23 nt, Artificial Sequence
  Synthetic
ugcagggguugaauuacagcagg

SEQ ID NO: 322282 - RNA, 24 nt, Artificial Sequence
  Synthetic
augcagggguugaauuacagcagg

SEQ ID NO: 322283 - RNA, 18 nt, Artificial Sequence
  Synthetic
ucuccugaacccagcagg

SEQ ID NO: 322284 - RNA, 19 nt, Artificial Sequence
  Synthetic
aucuccugaacccagcagg

SEQ ID NO: 322285 - RNA, 20 nt, Artificial Sequence
  Synthetic
aaucuccugaacccagcagg

SEQ ID NO: 322286 - RNA, 21 nt, Artificial Sequence
  Synthetic
gaaucuccugaacccagcagg

SEQ ID NO: 322287 - RNA, 22 nt, Artificial Sequence
  Synthetic
agaaucuccugaacccagcagg

SEQ ID NO: 322288 - RNA, 23 nt, Artificial Sequence
  Synthetic
aagaaucuccugaacccagcagg

SEQ ID NO: 322289 - RNA, 24 nt, Artificial Sequence
  Synthetic
gaagaaucuccugaacccagcagg

SEQ ID NO: 322290 - RNA, 18 nt, Artificial Sequence
  Synthetic
ucucuucuggccagcagg

SEQ ID NO: 322291 - RNA, 19 nt, Artificial Sequence
  Synthetic
uucucuucuggccagcagg

SEQ ID NO: 322292 - RNA, 20 nt, Artificial Sequence
  Synthetic
cuucucuucuggccagcagg

SEQ ID NO: 322293 - RNA, 21 nt, Artificial Sequence
  Synthetic
ucuucucuucuggccagcagg

SEQ ID NO: 322294 - RNA, 22 nt, Artificial Sequence
  Synthetic
cucuucucuucuggccagcagg

SEQ ID NO: 322295 - RNA, 23 nt, Artificial Sequence
  Synthetic
ucucuucucuucuggccagcagg

SEQ ID NO: 322296 - RNA, 24 nt, Artificial Sequence
  Synthetic
cucucuucucuucuggccagcagg

SEQ ID NO: 322297 - RNA, 18 nt, Artificial Sequence
  Synthetic
uccagcuugggcagcagg

SEQ ID NO: 322298 - RNA, 19 nt, Artificial Sequence
  Synthetic
cuccagcuugggcagcagg

SEQ ID NO: 322299 - RNA, 20 nt, Artificial Sequence
  Synthetic
acuccagcuugggcagcagg

SEQ ID NO: 322300 - RNA, 21 nt, Artificial Sequence
  Synthetic
cacuccagcuugggcagcagg

SEQ ID NO: 322301 - RNA, 22 nt, Artificial Sequence
  Synthetic
gcacuccagcuugggcagcagg

SEQ ID NO: 322302 - RNA, 23 nt, Artificial Sequence
  Synthetic
ugcacuccagcuugggcagcagg

SEQ ID NO: 322303 - RNA, 24 nt, Artificial Sequence
  Synthetic
cugcacuccagcuugggcagcagg

SEQ ID NO: 322304 - RNA, 18 nt, Artificial Sequence
  Synthetic
ucuucacauggcagcagg

SEQ ID NO: 322305 - RNA, 19 nt, Artificial Sequence
  Synthetic
uucuucacauggcagcagg

SEQ ID NO: 322306 - RNA, 20 nt, Artificial Sequence
  Synthetic
cuucuucacauggcagcagg

SEQ ID NO: 322307 - RNA, 21 nt, Artificial Sequence
  Synthetic
ucuucuucacauggcagcagg

SEQ ID NO: 322308 - RNA, 22 nt, Artificial Sequence
  Synthetic
uucuucuucacauggcagcagg

SEQ ID NO: 322309 - RNA, 23 nt, Artificial Sequence
  Synthetic
cuucuucuucacauggcagcagg

SEQ ID NO: 322310 - RNA, 24 nt, Artificial Sequence
  Synthetic
ccuucuucuucacauggcagcagg

SEQ ID NO: 322311 - RNA, 18 nt, Artificial Sequence
  Synthetic
ccagagucggucagcagg

SEQ ID NO: 322312 - RNA, 19 nt, Artificial Sequence
  Synthetic
uccagagucggucagcagg

SEQ ID NO: 322313 - RNA, 20 nt, Artificial Sequence
  Synthetic
uuccagagucggucagcagg

SEQ ID NO: 322314 - RNA, 21 nt, Artificial Sequence
  Synthetic
guuccagagucggucagcagg

SEQ ID NO: 322315 - RNA, 22 nt, Artificial Sequence
  Synthetic
aguuccagagucggucagcagg

SEQ ID NO: 322316 - RNA, 23 nt, Artificial Sequence
  Synthetic
aaguuccagagucggucagcagg

SEQ ID NO: 322317 - RNA, 24 nt, Artificial Sequence
  Synthetic
aaaguuccagagucggucagcagg

SEQ ID NO: 322318 - RNA, 18 nt, Artificial Sequence
  Synthetic
cuagaacagaagagcagg

SEQ ID NO: 322319 - RNA, 19 nt, Artificial Sequence
  Synthetic
gcuagaacagaagagcagg

SEQ ID NO: 322320 - RNA, 20 nt, Artificial Sequence
  Synthetic
ggcuagaacagaagagcagg

SEQ ID NO: 322321 - RNA, 21 nt, Artificial Sequence
  Synthetic
aggcuagaacagaagagcagg

SEQ ID NO: 322322 - RNA, 22 nt, Artificial Sequence
  Synthetic
gaggcuagaacagaagagcagg

SEQ ID NO: 322323 - RNA, 23 nt, Artificial Sequence
  Synthetic
ggaggcuagaacagaagagcagg

SEQ ID NO: 322324 - RNA, 24 nt, Artificial Sequence
  Synthetic
aggaggcuagaacagaagagcagg

SEQ ID NO: 322325 - RNA, 18 nt, Artificial Sequence
  Synthetic
ucccacuugcagagcagg

SEQ ID NO: 322326 - RNA, 19 nt, Artificial Sequence
  Synthetic
cucccacuugcagagcagg

SEQ ID NO: 322327 - RNA, 20 nt, Artificial Sequence
  Synthetic
ucucccacuugcagagcagg

SEQ ID NO: 322328 - RNA, 21 nt, Artificial Sequence
  Synthetic
cucucccacuugcagagcagg

SEQ ID NO: 322329 - RNA, 22 nt, Artificial Sequence
  Synthetic
gcucucccacuugcagagcagg

SEQ ID NO: 322330 - RNA, 23 nt, Artificial Sequence
  Synthetic
agcucucccacuugcagagcagg

SEQ ID NO: 322331 - RNA, 24 nt, Artificial Sequence
  Synthetic
uagcucucccacuugcagagcagg

SEQ ID NO: 322332 - RNA, 18 nt, Artificial Sequence
  Synthetic
uuaaccaaucagagcagg

SEQ ID NO: 322333 - RNA, 19 nt, Artificial Sequence
  Synthetic
auuaaccaaucagagcagg

SEQ ID NO: 322334 - RNA, 20 nt, Artificial Sequence
  Synthetic
gauuaaccaaucagagcagg

SEQ ID NO: 322335 - RNA, 21 nt, Artificial Sequence
  Synthetic
agauuaaccaaucagagcagg

SEQ ID NO: 322336 - RNA, 22 nt, Artificial Sequence
  Synthetic
aagauuaaccaaucagagcagg

SEQ ID NO: 322337 - RNA, 23 nt, Artificial Sequence
  Synthetic
aaagauuaaccaaucagagcagg

SEQ ID NO: 322338 - RNA, 24 nt, Artificial Sequence
  Synthetic
caaagauuaaccaaucagagcagg

SEQ ID NO: 322339 - RNA, 18 nt, Artificial Sequence
  Synthetic
aggaggaggaggagcagg

SEQ ID NO: 322340 - RNA, 19 nt, Artificial Sequence
  Synthetic
caggaggaggaggagcagg

SEQ ID NO: 322341 - RNA, 20 nt, Artificial Sequence
  Synthetic
gcaggaggaggaggagcagg

SEQ ID NO: 322342 - RNA, 21 nt, Artificial Sequence
  Synthetic
ggcaggaggaggaggagcagg

SEQ ID NO: 322343 - RNA, 22 nt, Artificial Sequence
  Synthetic
aggcaggaggaggaggagcagg

SEQ ID NO: 322344 - RNA, 23 nt, Artificial Sequence
  Synthetic
uaggcaggaggaggaggagcagg

SEQ ID NO: 322345 - RNA, 24 nt, Artificial Sequence
  Synthetic
guaggcaggaggaggaggagcagg

SEQ ID NO: 322346 - RNA, 18 nt, Artificial Sequence
  Synthetic
gaaggagaugauagcagg

SEQ ID NO: 322347 - RNA, 19 nt, Artificial Sequence
  Synthetic
agaaggagaugauagcagg

SEQ ID NO: 322348 - RNA, 20 nt, Artificial Sequence
  Synthetic
uagaaggagaugauagcagg

SEQ ID NO: 322349 - RNA, 21 nt, Artificial Sequence
  Synthetic
uuagaaggagaugauagcagg

SEQ ID NO: 322350 - RNA, 22 nt, Artificial Sequence
  Synthetic
cuuagaaggagaugauagcagg

SEQ ID NO: 322351 - RNA, 23 nt, Artificial Sequence
  Synthetic
gcuuagaaggagaugauagcagg

SEQ ID NO: 322352 - RNA, 24 nt, Artificial Sequence
  Synthetic
ugcuuagaaggagaugauagcagg

SEQ ID NO: 322353 - RNA, 18 nt, Artificial Sequence
  Synthetic
ucagacugugguagcagg

SEQ ID NO: 322354 - RNA, 19 nt, Artificial Sequence
  Synthetic
cucagacugugguagcagg

SEQ ID NO: 322355 - RNA, 20 nt, Artificial Sequence
  Synthetic
ucucagacugugguagcagg

SEQ ID NO: 322356 - RNA, 21 nt, Artificial Sequence
  Synthetic
uucucagacugugguagcagg

SEQ ID NO: 322357 - RNA, 22 nt, Artificial Sequence
  Synthetic
uuucucagacugugguagcagg

SEQ ID NO: 322358 - RNA, 23 nt, Artificial Sequence
  Synthetic
guuucucagacugugguagcagg

SEQ ID NO: 322359 - RNA, 24 nt, Artificial Sequence
  Synthetic
uguuucucagacugugguagcagg

SEQ ID NO: 322360 - RNA, 18 nt, Artificial Sequence
  Synthetic
ucccagcuacuuagcagg

SEQ ID NO: 322361 - RNA, 19 nt, Artificial Sequence
  Synthetic
aucccagcuacuuagcagg

SEQ ID NO: 322362 - RNA, 20 nt, Artificial Sequence
  Synthetic
aaucccagcuacuuagcagg

SEQ ID NO: 322363 - RNA, 21 nt, Artificial Sequence
  Synthetic
uaaucccagcuacuuagcagg

SEQ ID NO: 322364 - RNA, 22 nt, Artificial Sequence
  Synthetic
guaaucccagcuacuuagcagg

SEQ ID NO: 322365 - RNA, 23 nt, Artificial Sequence
  Synthetic
uguaaucccagcuacuuagcagg

SEQ ID NO: 322366 - RNA, 24 nt, Artificial Sequence
  Synthetic
cuguaaucccagcuacuuagcagg

SEQ ID NO: 322367 - RNA, 18 nt, Artificial Sequence
  Synthetic
cuagggaaguuuagcagg

SEQ ID NO: 322368 - RNA, 19 nt, Artificial Sequence
  Synthetic
ucuagggaaguuuagcagg

SEQ ID NO: 322369 - RNA, 20 nt, Artificial Sequence
  Synthetic
aucuagggaaguuuagcagg

SEQ ID NO: 322370 - RNA, 21 nt, Artificial Sequence
  Synthetic
gaucuagggaaguuuagcagg

SEQ ID NO: 322371 - RNA, 22 nt, Artificial Sequence
  Synthetic
agaucuagggaaguuuagcagg

SEQ ID NO: 322372 - RNA, 23 nt, Artificial Sequence
  Synthetic
aagaucuagggaaguuuagcagg

SEQ ID NO: 322373 - RNA, 24 nt, Artificial Sequence
  Synthetic
aaagaucuagggaaguuuagcagg

SEQ ID NO: 322374 - RNA, 18 nt, Artificial Sequence
  Synthetic
ucuucacaaggccgcagg

SEQ ID NO: 322375 - RNA, 19 nt, Artificial Sequence
  Synthetic
uucuucacaaggccgcagg

SEQ ID NO: 322376 - RNA, 20 nt, Artificial Sequence
  Synthetic
cuucuucacaaggccgcagg

SEQ ID NO: 322377 - RNA, 21 nt, Artificial Sequence
  Synthetic
ucuucuucacaaggccgcagg

SEQ ID NO: 322378 - RNA, 22 nt, Artificial Sequence
  Synthetic
aucuucuucacaaggccgcagg

SEQ ID NO: 322379 - RNA, 23 nt, Artificial Sequence
  Synthetic
caucuucuucacaaggccgcagg

SEQ ID NO: 322380 - RNA, 24 nt, Artificial Sequence
  Synthetic
gcaucuucuucacaaggccgcagg

SEQ ID NO: 322381 - RNA, 18 nt, Artificial Sequence
  Synthetic
aaaauuauuccaggcagg

SEQ ID NO: 322382 - RNA, 19 nt, Artificial Sequence
  Synthetic
gaaaauuauuccaggcagg

SEQ ID NO: 322383 - RNA, 20 nt, Artificial Sequence
  Synthetic
ggaaaauuauuccaggcagg

SEQ ID NO: 322384 - RNA, 21 nt, Artificial Sequence
  Synthetic
gggaaaauuauuccaggcagg

SEQ ID NO: 322385 - RNA, 22 nt, Artificial Sequence
  Synthetic
ugggaaaauuauuccaggcagg

SEQ ID NO: 322386 - RNA, 23 nt, Artificial Sequence
  Synthetic
cugggaaaauuauuccaggcagg

SEQ ID NO: 322387 - RNA, 24 nt, Artificial Sequence
  Synthetic
ucugggaaaauuauuccaggcagg

SEQ ID NO: 322388 - RNA, 18 nt, Artificial Sequence
  Synthetic
aaaaauuagggaggcagg

SEQ ID NO: 322389 - RNA, 19 nt, Artificial Sequence
  Synthetic
caaaaauuagggaggcagg

SEQ ID NO: 322390 - RNA, 20 nt, Artificial Sequence
  Synthetic
ccaaaaauuagggaggcagg

SEQ ID NO: 322391 - RNA, 21 nt, Artificial Sequence
  Synthetic
cccaaaaauuagggaggcagg

SEQ ID NO: 322392 - RNA, 22 nt, Artificial Sequence
  Synthetic
gcccaaaaauuagggaggcagg

SEQ ID NO: 322393 - RNA, 23 nt, Artificial Sequence
  Synthetic
agcccaaaaauuagggaggcagg

SEQ ID NO: 322394 - RNA, 24 nt, Artificial Sequence
  Synthetic
aagcccaaaaauuagggaggcagg

SEQ ID NO: 322395 - RNA, 18 nt, Artificial Sequence
  Synthetic
ugaccugugugaggcagg

SEQ ID NO: 322396 - RNA, 19 nt, Artificial Sequence
  Synthetic
cugaccugugugaggcagg

SEQ ID NO: 322397 - RNA, 20 nt, Artificial Sequence
  Synthetic
acugaccugugugaggcagg

SEQ ID NO: 322398 - RNA, 21 nt, Artificial Sequence
  Synthetic
aacugaccugugugaggcagg

SEQ ID NO: 322399 - RNA, 22 nt, Artificial Sequence
  Synthetic
caacugaccugugugaggcagg

SEQ ID NO: 322400 - RNA, 23 nt, Artificial Sequence
  Synthetic
acaacugaccugugugaggcagg

SEQ ID NO: 322401 - RNA, 24 nt, Artificial Sequence
  Synthetic
aacaacugaccugugugaggcagg

SEQ ID NO: 322402 - RNA, 18 nt, Artificial Sequence
  Synthetic
gagagagauguaggcagg

SEQ ID NO: 322403 - RNA, 19 nt, Artificial Sequence
  Synthetic
agagagagauguaggcagg

SEQ ID NO: 322404 - RNA, 20 nt, Artificial Sequence
  Synthetic
gagagagagauguaggcagg

SEQ ID NO: 322405 - RNA, 21 nt, Artificial Sequence
  Synthetic
ggagagagagauguaggcagg

SEQ ID NO: 322406 - RNA, 22 nt, Artificial Sequence
  Synthetic
gggagagagagauguaggcagg

SEQ ID NO: 322407 - RNA, 23 nt, Artificial Sequence
  Synthetic
agggagagagagauguaggcagg

SEQ ID NO: 322408 - RNA, 24 nt, Artificial Sequence
  Synthetic
aagggagagagagauguaggcagg

SEQ ID NO: 322409 - RNA, 18 nt, Artificial Sequence
  Synthetic
gauggauguaggggcagg

SEQ ID NO: 322410 - RNA, 19 nt, Artificial Sequence
  Synthetic
agauggauguaggggcagg

SEQ ID NO: 322411 - RNA, 20 nt, Artificial Sequence
  Synthetic
aagauggauguaggggcagg

SEQ ID NO: 322412 - RNA, 21 nt, Artificial Sequence
  Synthetic
gaagauggauguaggggcagg

SEQ ID NO: 322413 - RNA, 22 nt, Artificial Sequence
  Synthetic
agaagauggauguaggggcagg

SEQ ID NO: 322414 - RNA, 23 nt, Artificial Sequence
  Synthetic
cagaagauggauguaggggcagg

SEQ ID NO: 322415 - RNA, 24 nt, Artificial Sequence
  Synthetic
gcagaagauggauguaggggcagg

SEQ ID NO: 322416 - RNA, 18 nt, Artificial Sequence
  Synthetic
accaaggcagauggcagg

SEQ ID NO: 322417 - RNA, 19 nt, Artificial Sequence
  Synthetic
uaccaaggcagauggcagg

SEQ ID NO: 322418 - RNA, 20 nt, Artificial Sequence
  Synthetic
uuaccaaggcagauggcagg

SEQ ID NO: 322419 - RNA, 21 nt, Artificial Sequence
  Synthetic
uuuaccaaggcagauggcagg

SEQ ID NO: 322420 - RNA, 22 nt, Artificial Sequence
  Synthetic
auuuaccaaggcagauggcagg

SEQ ID NO: 322421 - RNA, 23 nt, Artificial Sequence
  Synthetic
uauuuaccaaggcagauggcagg

SEQ ID NO: 322422 - RNA, 24 nt, Artificial Sequence
  Synthetic
uuauuuaccaaggcagauggcagg

SEQ ID NO: 322423 - RNA, 18 nt, Artificial Sequence
  Synthetic
auccaaaagccuggcagg

SEQ ID NO: 322424 - RNA, 19 nt, Artificial Sequence
  Synthetic
aauccaaaagccuggcagg

SEQ ID NO: 322425 - RNA, 20 nt, Artificial Sequence
  Synthetic
aaauccaaaagccuggcagg

SEQ ID NO: 322426 - RNA, 21 nt, Artificial Sequence
  Synthetic
aaaauccaaaagccuggcagg

SEQ ID NO: 322427 - RNA, 22 nt, Artificial Sequence
  Synthetic
uaaaauccaaaagccuggcagg

SEQ ID NO: 322428 - RNA, 23 nt, Artificial Sequence
  Synthetic
guaaaauccaaaagccuggcagg

SEQ ID NO: 322429 - RNA, 24 nt, Artificial Sequence
  Synthetic
uguaaaauccaaaagccuggcagg

SEQ ID NO: 322430 - RNA, 18 nt, Artificial Sequence
  Synthetic
ucuucacaagguggcagg

SEQ ID NO: 322431 - RNA, 19 nt, Artificial Sequence
  Synthetic
uucuucacaagguggcagg

SEQ ID NO: 322432 - RNA, 20 nt, Artificial Sequence
  Synthetic
cuucuucacaagguggcagg

SEQ ID NO: 322433 - RNA, 21 nt, Artificial Sequence
  Synthetic
ccuucuucacaagguggcagg

SEQ ID NO: 322434 - RNA, 22 nt, Artificial Sequence
  Synthetic
accuucuucacaagguggcagg

SEQ ID NO: 322435 - RNA, 23 nt, Artificial Sequence
  Synthetic
caccuucuucacaagguggcagg

SEQ ID NO: 322436 - RNA, 24 nt, Artificial Sequence
  Synthetic
gcaccuucuucacaagguggcagg

SEQ ID NO: 322437 - RNA, 18 nt, Artificial Sequence
  Synthetic
aaaacuauuuuuggcagg

SEQ ID NO: 322438 - RNA, 19 nt, Artificial Sequence
  Synthetic
gaaaacuauuuuuggcagg

SEQ ID NO: 322439 - RNA, 20 nt, Artificial Sequence
  Synthetic
ggaaaacuauuuuuggcagg

SEQ ID NO: 322440 - RNA, 21 nt, Artificial Sequence
  Synthetic
aggaaaacuauuuuuggcagg

SEQ ID NO: 322441 - RNA, 22 nt, Artificial Sequence
  Synthetic
uaggaaaacuauuuuuggcagg

SEQ ID NO: 322442 - RNA, 23 nt, Artificial Sequence
  Synthetic
uuaggaaaacuauuuuuggcagg

SEQ ID NO: 322443 - RNA, 24 nt, Artificial Sequence
  Synthetic
guuaggaaaacuauuuuuggcagg

SEQ ID NO: 322444 - RNA, 18 nt, Artificial Sequence
  Synthetic
agugccaccaccugcagg

SEQ ID NO: 322445 - RNA, 19 nt, Artificial Sequence
  Synthetic
cagugccaccaccugcagg

SEQ ID NO: 322446 - RNA, 20 nt, Artificial Sequence
  Synthetic
ccagugccaccaccugcagg

SEQ ID NO: 322447 - RNA, 21 nt, Artificial Sequence
  Synthetic
gccagugccaccaccugcagg

SEQ ID NO: 322448 - RNA, 22 nt, Artificial Sequence
  Synthetic
ggccagugccaccaccugcagg

SEQ ID NO: 322449 - RNA, 23 nt, Artificial Sequence
  Synthetic
gggccagugccaccaccugcagg

SEQ ID NO: 322450 - RNA, 24 nt, Artificial Sequence
  Synthetic
ggggccagugccaccaccugcagg

SEQ ID NO: 322451 - RNA, 18 nt, Artificial Sequence
  Synthetic
ucuuuuaucuccugcagg

SEQ ID NO: 322452 - RNA, 19 nt, Artificial Sequence
  Synthetic
gucuuuuaucuccugcagg

SEQ ID NO: 322453 - RNA, 20 nt, Artificial Sequence
  Synthetic
ggucuuuuaucuccugcagg

SEQ ID NO: 322454 - RNA, 21 nt, Artificial Sequence
  Synthetic
uggucuuuuaucuccugcagg

SEQ ID NO: 322455 - RNA, 22 nt, Artificial Sequence
  Synthetic
cuggucuuuuaucuccugcagg

SEQ ID NO: 322456 - RNA, 23 nt, Artificial Sequence
  Synthetic
acuggucuuuuaucuccugcagg

SEQ ID NO: 322457 - RNA, 24 nt, Artificial Sequence
  Synthetic
gacuggucuuuuaucuccugcagg

SEQ ID NO: 322458 - RNA, 18 nt, Artificial Sequence
  Synthetic
cagcccaccagcugcagg

SEQ ID NO: 322459 - RNA, 19 nt, Artificial Sequence
  Synthetic
gcagcccaccagcugcagg

SEQ ID NO: 322460 - RNA, 20 nt, Artificial Sequence
  Synthetic
agcagcccaccagcugcagg

SEQ ID NO: 322461 - RNA, 21 nt, Artificial Sequence
  Synthetic
aagcagcccaccagcugcagg

SEQ ID NO: 322462 - RNA, 22 nt, Artificial Sequence
  Synthetic
gaagcagcccaccagcugcagg

SEQ ID NO: 322463 - RNA, 23 nt, Artificial Sequence
  Synthetic
ggaagcagcccaccagcugcagg

SEQ ID NO: 322464 - RNA, 24 nt, Artificial Sequence
  Synthetic
aggaagcagcccaccagcugcagg

SEQ ID NO: 322465 - RNA, 18 nt, Artificial Sequence
  Synthetic
aagccagucuagugcagg

SEQ ID NO: 322466 - RNA, 19 nt, Artificial Sequence
  Synthetic
aaagccagucuagugcagg

SEQ ID NO: 322467 - RNA, 20 nt, Artificial Sequence
  Synthetic
gaaagccagucuagugcagg

SEQ ID NO: 322468 - RNA, 21 nt, Artificial Sequence
  Synthetic
agaaagccagucuagugcagg

SEQ ID NO: 322469 - RNA, 22 nt, Artificial Sequence
  Synthetic
aagaaagccagucuagugcagg

SEQ ID NO: 322470 - RNA, 23 nt, Artificial Sequence
  Synthetic
caagaaagccagucuagugcagg

SEQ ID NO: 322471 - RNA, 24 nt, Artificial Sequence
  Synthetic
ucaagaaagccagucuagugcagg

SEQ ID NO: 322472 - RNA, 18 nt, Artificial Sequence
  Synthetic
aauccuuuguagugcagg

SEQ ID NO: 322473 - RNA, 19 nt, Artificial Sequence
  Synthetic
gaauccuuuguagugcagg

SEQ ID NO: 322474 - RNA, 20 nt, Artificial Sequence
  Synthetic
agaauccuuuguagugcagg

SEQ ID NO: 322475 - RNA, 21 nt, Artificial Sequence
  Synthetic
aagaauccuuuguagugcagg

SEQ ID NO: 322476 - RNA, 22 nt, Artificial Sequence
  Synthetic
gaagaauccuuuguagugcagg

SEQ ID NO: 322477 - RNA, 23 nt, Artificial Sequence
  Synthetic
cgaagaauccuuuguagugcagg

SEQ ID NO: 322478 - RNA, 24 nt, Artificial Sequence
  Synthetic
ccgaagaauccuuuguagugcagg

SEQ ID NO: 322479 - RNA, 18 nt, Artificial Sequence
  Synthetic
uggcauacacaaaucagg

SEQ ID NO: 322480 - RNA, 19 nt, Artificial Sequence
  Synthetic
auggcauacacaaaucagg

SEQ ID NO: 322481 - RNA, 20 nt, Artificial Sequence
  Synthetic
gauggcauacacaaaucagg

SEQ ID NO: 322482 - RNA, 21 nt, Artificial Sequence
  Synthetic
cgauggcauacacaaaucagg

SEQ ID NO: 322483 - RNA, 22 nt, Artificial Sequence
  Synthetic
gcgauggcauacacaaaucagg

SEQ ID NO: 322484 - RNA, 23 nt, Artificial Sequence
  Synthetic
ggcgauggcauacacaaaucagg

SEQ ID NO: 322485 - RNA, 24 nt, Artificial Sequence
  Synthetic
uggcgauggcauacacaaaucagg

SEQ ID NO: 322486 - RNA, 18 nt, Artificial Sequence
  Synthetic
uucucugauuaaaucagg

SEQ ID NO: 322487 - RNA, 19 nt, Artificial Sequence
  Synthetic
auucucugauuaaaucagg

SEQ ID NO: 322488 - RNA, 20 nt, Artificial Sequence
  Synthetic
cauucucugauuaaaucagg

SEQ ID NO: 322489 - RNA, 21 nt, Artificial Sequence
  Synthetic
ucauucucugauuaaaucagg

SEQ ID NO: 322490 - RNA, 22 nt, Artificial Sequence
  Synthetic
aucauucucugauuaaaucagg

SEQ ID NO: 322491 - RNA, 23 nt, Artificial Sequence
  Synthetic
aaucauucucugauuaaaucagg

SEQ ID NO: 322492 - RNA, 24 nt, Artificial Sequence
  Synthetic
aaaucauucucugauuaaaucagg

SEQ ID NO: 322493 - RNA, 18 nt, Artificial Sequence
  Synthetic
cuggccagggcaaucagg

SEQ ID NO: 322494 - RNA, 19 nt, Artificial Sequence
  Synthetic
ucuggccagggcaaucagg

SEQ ID NO: 322495 - RNA, 20 nt, Artificial Sequence
  Synthetic
uucuggccagggcaaucagg

SEQ ID NO: 322496 - RNA, 18 nt, Artificial Sequence
  Synthetic
uugcugucauuaaucagg

SEQ ID NO: 322497 - RNA, 19 nt, Artificial Sequence
  Synthetic
cuugcugucauuaaucagg

SEQ ID NO: 322498 - RNA, 20 nt, Artificial Sequence
  Synthetic
ucuugcugucauuaaucagg

SEQ ID NO: 322499 - RNA, 21 nt, Artificial Sequence
  Synthetic
uucuugcugucauuaaucagg

SEQ ID NO: 322500 - RNA, 22 nt, Artificial Sequence
  Synthetic
auucuugcugucauuaaucagg

SEQ ID NO: 322501 - RNA, 23 nt, Artificial Sequence
  Synthetic
gauucuugcugucauuaaucagg

SEQ ID NO: 322502 - RNA, 24 nt, Artificial Sequence
  Synthetic
ugauucuugcugucauuaaucagg

SEQ ID NO: 322503 - RNA, 18 nt, Artificial Sequence
  Synthetic
guaagucugaacaucagg

SEQ ID NO: 322504 - RNA, 19 nt, Artificial Sequence
  Synthetic
gguaagucugaacaucagg

SEQ ID NO: 322505 - RNA, 20 nt, Artificial Sequence
  Synthetic
agguaagucugaacaucagg

SEQ ID NO: 322506 - RNA, 21 nt, Artificial Sequence
  Synthetic
uagguaagucugaacaucagg

SEQ ID NO: 322507 - RNA, 22 nt, Artificial Sequence
  Synthetic
auagguaagucugaacaucagg

SEQ ID NO: 322508 - RNA, 23 nt, Artificial Sequence
  Synthetic
aauagguaagucugaacaucagg

SEQ ID NO: 322509 - RNA, 24 nt, Artificial Sequence
  Synthetic
gaauagguaagucugaacaucagg

SEQ ID NO: 322510 - RNA, 18 nt, Artificial Sequence
  Synthetic
ucuaauauuaagaucagg

SEQ ID NO: 322511 - RNA, 19 nt, Artificial Sequence
  Synthetic
cucuaauauuaagaucagg

SEQ ID NO: 322512 - RNA, 20 nt, Artificial Sequence
  Synthetic
acucuaauauuaagaucagg

SEQ ID NO: 322513 - RNA, 21 nt, Artificial Sequence
  Synthetic
cacucuaauauuaagaucagg

SEQ ID NO: 322514 - RNA, 22 nt, Artificial Sequence
  Synthetic
gcacucuaauauuaagaucagg

SEQ ID NO: 322515 - RNA, 23 nt, Artificial Sequence
  Synthetic
agcacucuaauauuaagaucagg

SEQ ID NO: 322516 - RNA, 24 nt, Artificial Sequence
  Synthetic
gagcacucuaauauuaagaucagg

SEQ ID NO: 322517 - RNA, 18 nt, Artificial Sequence
  Synthetic
gaggcagcuaggaucagg

SEQ ID NO: 322518 - RNA, 19 nt, Artificial Sequence
  Synthetic
ggaggcagcuaggaucagg

SEQ ID NO: 322519 - RNA, 20 nt, Artificial Sequence
  Synthetic
uggaggcagcuaggaucagg

SEQ ID NO: 322520 - RNA, 21 nt, Artificial Sequence
  Synthetic
cuggaggcagcuaggaucagg

SEQ ID NO: 322521 - RNA, 22 nt, Artificial Sequence
  Synthetic
ucuggaggcagcuaggaucagg

SEQ ID NO: 322522 - RNA, 23 nt, Artificial Sequence
  Synthetic
gucuggaggcagcuaggaucagg

SEQ ID NO: 322523 - RNA, 24 nt, Artificial Sequence
  Synthetic
cgucuggaggcagcuaggaucagg

SEQ ID NO: 322524 - RNA, 18 nt, Artificial Sequence
  Synthetic
aauuuuacagggaucagg

SEQ ID NO: 322525 - RNA, 19 nt, Artificial Sequence
  Synthetic
gaauuuuacagggaucagg

SEQ ID NO: 322526 - RNA, 20 nt, Artificial Sequence
  Synthetic
ugaauuuuacagggaucagg

SEQ ID NO: 322527 - RNA, 21 nt, Artificial Sequence
  Synthetic
cugaauuuuacagggaucagg

SEQ ID NO: 322528 - RNA, 22 nt, Artificial Sequence
  Synthetic
ucugaauuuuacagggaucagg

SEQ ID NO: 322529 - RNA, 23 nt, Artificial Sequence
  Synthetic
uucugaauuuuacagggaucagg

SEQ ID NO: 322530 - RNA, 24 nt, Artificial Sequence
  Synthetic
uuucugaauuuuacagggaucagg

SEQ ID NO: 322531 - RNA, 18 nt, Artificial Sequence
  Synthetic
aaaguacuagauaucagg

SEQ ID NO: 322532 - RNA, 19 nt, Artificial Sequence
  Synthetic
gaaaguacuagauaucagg

SEQ ID NO: 322533 - RNA, 20 nt, Artificial Sequence
  Synthetic
agaaaguacuagauaucagg

SEQ ID NO: 322534 - RNA, 21 nt, Artificial Sequence
  Synthetic
gagaaaguacuagauaucagg

SEQ ID NO: 322535 - RNA, 22 nt, Artificial Sequence
  Synthetic
ugagaaaguacuagauaucagg

SEQ ID NO: 322536 - RNA, 23 nt, Artificial Sequence
  Synthetic
gugagaaaguacuagauaucagg

SEQ ID NO: 322537 - RNA, 24 nt, Artificial Sequence
  Synthetic
agugagaaaguacuagauaucagg

SEQ ID NO: 322538 - RNA, 18 nt, Artificial Sequence
  Synthetic
uggagucuugguaucagg

SEQ ID NO: 322539 - RNA, 19 nt, Artificial Sequence
  Synthetic
cuggagucuugguaucagg

SEQ ID NO: 322540 - RNA, 20 nt, Artificial Sequence
  Synthetic
gcuggagucuugguaucagg

SEQ ID NO: 322541 - RNA, 21 nt, Artificial Sequence
  Synthetic
agcuggagucuugguaucagg

SEQ ID NO: 322542 - RNA, 22 nt, Artificial Sequence
  Synthetic
cagcuggagucuugguaucagg

SEQ ID NO: 322543 - RNA, 23 nt, Artificial Sequence
  Synthetic
ucagcuggagucuugguaucagg

SEQ ID NO: 322544 - RNA, 24 nt, Artificial Sequence
  Synthetic
uucagcuggagucuugguaucagg

SEQ ID NO: 322545 - RNA, 18 nt, Artificial Sequence
  Synthetic
agcaccugauguaucagg

SEQ ID NO: 322546 - RNA, 19 nt, Artificial Sequence
  Synthetic
gagcaccugauguaucagg

SEQ ID NO: 322547 - RNA, 20 nt, Artificial Sequence
  Synthetic
agagcaccugauguaucagg

SEQ ID NO: 322548 - RNA, 21 nt, Artificial Sequence
  Synthetic
uagagcaccugauguaucagg

SEQ ID NO: 322549 - RNA, 22 nt, Artificial Sequence
  Synthetic
auagagcaccugauguaucagg

SEQ ID NO: 322550 - RNA, 23 nt, Artificial Sequence
  Synthetic
uauagagcaccugauguaucagg

SEQ ID NO: 322551 - RNA, 24 nt, Artificial Sequence
  Synthetic
auauagagcaccugauguaucagg

SEQ ID NO: 322552 - RNA, 18 nt, Artificial Sequence
  Synthetic
acuuugcuaacacucagg

SEQ ID NO: 322553 - RNA, 19 nt, Artificial Sequence
  Synthetic
cacuuugcuaacacucagg

SEQ ID NO: 322554 - RNA, 20 nt, Artificial Sequence
  Synthetic
ucacuuugcuaacacucagg

SEQ ID NO: 322555 - RNA, 21 nt, Artificial Sequence
  Synthetic
aucacuuugcuaacacucagg

SEQ ID NO: 322556 - RNA, 22 nt, Artificial Sequence
  Synthetic
caucacuuugcuaacacucagg

SEQ ID NO: 322557 - RNA, 23 nt, Artificial Sequence
  Synthetic
ccaucacuuugcuaacacucagg

SEQ ID NO: 322558 - RNA, 24 nt, Artificial Sequence
  Synthetic
cccaucacuuugcuaacacucagg

SEQ ID NO: 322559 - RNA, 18 nt, Artificial Sequence
  Synthetic
cuggcucugucacucagg

SEQ ID NO: 322560 - RNA, 19 nt, Artificial Sequence
  Synthetic
ucuggcucugucacucagg

SEQ ID NO: 322561 - RNA, 20 nt, Artificial Sequence
  Synthetic
uucuggcucugucacucagg

SEQ ID NO: 322562 - RNA, 21 nt, Artificial Sequence
  Synthetic
guucuggcucugucacucagg

SEQ ID NO: 322563 - RNA, 22 nt, Artificial Sequence
  Synthetic
gguucuggcucugucacucagg

SEQ ID NO: 322564 - RNA, 23 nt, Artificial Sequence
  Synthetic
ggguucuggcucugucacucagg

SEQ ID NO: 322565 - RNA, 24 nt, Artificial Sequence
  Synthetic
gggguucuggcucugucacucagg

SEQ ID NO: 322566 - RNA, 18 nt, Artificial Sequence
  Synthetic
agauuaaaaagacucagg

SEQ ID NO: 322567 - RNA, 19 nt, Artificial Sequence
  Synthetic
aagauuaaaaagacucagg

SEQ ID NO: 322568 - RNA, 20 nt, Artificial Sequence
  Synthetic
caagauuaaaaagacucagg

SEQ ID NO: 322569 - RNA, 21 nt, Artificial Sequence
  Synthetic
gcaagauuaaaaagacucagg

SEQ ID NO: 322570 - RNA, 22 nt, Artificial Sequence
  Synthetic
ggcaagauuaaaaagacucagg

SEQ ID NO: 322571 - RNA, 23 nt, Artificial Sequence
  Synthetic
aggcaagauuaaaaagacucagg

SEQ ID NO: 322572 - RNA, 24 nt, Artificial Sequence
  Synthetic
caggcaagauuaaaaagacucagg

SEQ ID NO: 322573 - RNA, 18 nt, Artificial Sequence
  Synthetic
aggucacacggccucagg

SEQ ID NO: 322574 - RNA, 19 nt, Artificial Sequence
  Synthetic
caggucacacggccucagg

SEQ ID NO: 322575 - RNA, 20 nt, Artificial Sequence
  Synthetic
ucaggucacacggccucagg

SEQ ID NO: 322576 - RNA, 21 nt, Artificial Sequence
  Synthetic
aucaggucacacggccucagg

SEQ ID NO: 322577 - RNA, 22 nt, Artificial Sequence
  Synthetic
aaucaggucacacggccucagg

SEQ ID NO: 322578 - RNA, 23 nt, Artificial Sequence
  Synthetic
gaaucaggucacacggccucagg

SEQ ID NO: 322579 - RNA, 24 nt, Artificial Sequence
  Synthetic
ugaaucaggucacacggccucagg

SEQ ID NO: 322580 - RNA, 18 nt, Artificial Sequence
  Synthetic
cucgcugugucgcucagg

SEQ ID NO: 322581 - RNA, 19 nt, Artificial Sequence
  Synthetic
ucucgcugugucgcucagg

SEQ ID NO: 322582 - RNA, 20 nt, Artificial Sequence
  Synthetic
gucucgcugugucgcucagg

SEQ ID NO: 322583 - RNA, 21 nt, Artificial Sequence
  Synthetic
agucucgcugugucgcucagg

SEQ ID NO: 322584 - RNA, 22 nt, Artificial Sequence
  Synthetic
gagucucgcugugucgcucagg

SEQ ID NO: 322585 - RNA, 23 nt, Artificial Sequence
  Synthetic
agagucucgcugugucgcucagg

SEQ ID NO: 322586 - RNA, 24 nt, Artificial Sequence
  Synthetic
cagagucucgcugugucgcucagg

SEQ ID NO: 322587 - RNA, 18 nt, Artificial Sequence
  Synthetic
aggucauaagcucucagg

SEQ ID NO: 322588 - RNA, 19 nt, Artificial Sequence
  Synthetic
gaggucauaagcucucagg

SEQ ID NO: 322589 - RNA, 20 nt, Artificial Sequence
  Synthetic
agaggucauaagcucucagg

SEQ ID NO: 322590 - RNA, 21 nt, Artificial Sequence
  Synthetic
aagaggucauaagcucucagg

SEQ ID NO: 322591 - RNA, 22 nt, Artificial Sequence
  Synthetic
aaagaggucauaagcucucagg

SEQ ID NO: 322592 - RNA, 23 nt, Artificial Sequence
  Synthetic
gaaagaggucauaagcucucagg

SEQ ID NO: 322593 - RNA, 24 nt, Artificial Sequence
  Synthetic
agaaagaggucauaagcucucagg

SEQ ID NO: 322594 - RNA, 18 nt, Artificial Sequence
  Synthetic
gcgauccacucucucagg

SEQ ID NO: 322595 - RNA, 19 nt, Artificial Sequence
  Synthetic
agcgauccacucucucagg

SEQ ID NO: 322596 - RNA, 20 nt, Artificial Sequence
  Synthetic
gagcgauccacucucucagg

SEQ ID NO: 322597 - RNA, 21 nt, Artificial Sequence
  Synthetic
ggagcgauccacucucucagg

SEQ ID NO: 322598 - RNA, 22 nt, Artificial Sequence
  Synthetic
gggagcgauccacucucucagg

SEQ ID NO: 322599 - RNA, 23 nt, Artificial Sequence
  Synthetic
agggagcgauccacucucucagg

SEQ ID NO: 322600 - RNA, 24 nt, Artificial Sequence
  Synthetic
uagggagcgauccacucucucagg

SEQ ID NO: 322601 - RNA, 18 nt, Artificial Sequence
  Synthetic
auauaugacugucucagg

SEQ ID NO: 322602 - RNA, 19 nt, Artificial Sequence
  Synthetic
aauauaugacugucucagg

SEQ ID NO: 322603 - RNA, 20 nt, Artificial Sequence
  Synthetic
uaauauaugacugucucagg

SEQ ID NO: 322604 - RNA, 21 nt, Artificial Sequence
  Synthetic
auaauauaugacugucucagg

SEQ ID NO: 322605 - RNA, 22 nt, Artificial Sequence
  Synthetic
uauaauauaugacugucucagg

SEQ ID NO: 322606 - RNA, 23 nt, Artificial Sequence
  Synthetic
auauaauauaugacugucucagg

SEQ ID NO: 322607 - RNA, 24 nt, Artificial Sequence
  Synthetic
gauauaauauaugacugucucagg

SEQ ID NO: 322608 - RNA, 18 nt, Artificial Sequence
  Synthetic
agccauguaauucucagg

SEQ ID NO: 322609 - RNA, 19 nt, Artificial Sequence
  Synthetic
uagccauguaauucucagg

SEQ ID NO: 322610 - RNA, 20 nt, Artificial Sequence
  Synthetic
cuagccauguaauucucagg

SEQ ID NO: 322611 - RNA, 21 nt, Artificial Sequence
  Synthetic
acuagccauguaauucucagg

SEQ ID NO: 322612 - RNA, 22 nt, Artificial Sequence
  Synthetic
gacuagccauguaauucucagg

SEQ ID NO: 322613 - RNA, 23 nt, Artificial Sequence
  Synthetic
ugacuagccauguaauucucagg

SEQ ID NO: 322614 - RNA, 24 nt, Artificial Sequence
  Synthetic
augacuagccauguaauucucagg

SEQ ID NO: 322615 - RNA, 18 nt, Artificial Sequence
  Synthetic
gucaggucuaaagucagg

SEQ ID NO: 322616 - RNA, 19 nt, Artificial Sequence
  Synthetic
ggucaggucuaaagucagg

SEQ ID NO: 322617 - RNA, 20 nt, Artificial Sequence
  Synthetic
aggucaggucuaaagucagg

SEQ ID NO: 322618 - RNA, 21 nt, Artificial Sequence
  Synthetic
aaggucaggucuaaagucagg

SEQ ID NO: 322619 - RNA, 22 nt, Artificial Sequence
  Synthetic
gaaggucaggucuaaagucagg

SEQ ID NO: 322620 - RNA, 23 nt, Artificial Sequence
  Synthetic
ggaaggucaggucuaaagucagg

SEQ ID NO: 322621 - RNA, 24 nt, Artificial Sequence
  Synthetic
aggaaggucaggucuaaagucagg

SEQ ID NO: 322622 - RNA, 18 nt, Artificial Sequence
  Synthetic
gauauguuuaaagucagg

SEQ ID NO: 322623 - RNA, 19 nt, Artificial Sequence
  Synthetic
ggauauguuuaaagucagg

SEQ ID NO: 322624 - RNA, 20 nt, Artificial Sequence
  Synthetic
aggauauguuuaaagucagg

SEQ ID NO: 322625 - RNA, 21 nt, Artificial Sequence
  Synthetic
aaggauauguuuaaagucagg

SEQ ID NO: 322626 - RNA, 22 nt, Artificial Sequence
  Synthetic
gaaggauauguuuaaagucagg

SEQ ID NO: 322627 - RNA, 23 nt, Artificial Sequence
  Synthetic
ggaaggauauguuuaaagucagg

SEQ ID NO: 322628 - RNA, 24 nt, Artificial Sequence
  Synthetic
aggaaggauauguuuaaagucagg

SEQ ID NO: 322629 - RNA, 18 nt, Artificial Sequence
  Synthetic
aagcacucuagagucagg

SEQ ID NO: 322630 - RNA, 19 nt, Artificial Sequence
  Synthetic
aaagcacucuagagucagg

SEQ ID NO: 322631 - RNA, 20 nt, Artificial Sequence
  Synthetic
caaagcacucuagagucagg

SEQ ID NO: 322632 - RNA, 21 nt, Artificial Sequence
  Synthetic
acaaagcacucuagagucagg

SEQ ID NO: 322633 - RNA, 22 nt, Artificial Sequence
  Synthetic
uacaaagcacucuagagucagg

SEQ ID NO: 322634 - RNA, 23 nt, Artificial Sequence
  Synthetic
uuacaaagcacucuagagucagg

SEQ ID NO: 322635 - RNA, 24 nt, Artificial Sequence
  Synthetic
guuacaaagcacucuagagucagg

SEQ ID NO: 322636 - RNA, 18 nt, Artificial Sequence
  Synthetic
cagcuggguuuagucagg

SEQ ID NO: 322637 - RNA, 19 nt, Artificial Sequence
  Synthetic
acagcuggguuuagucagg

SEQ ID NO: 322638 - RNA, 20 nt, Artificial Sequence
  Synthetic
aacagcuggguuuagucagg

SEQ ID NO: 322639 - RNA, 21 nt, Artificial Sequence
  Synthetic
uaacagcuggguuuagucagg

SEQ ID NO: 322640 - RNA, 22 nt, Artificial Sequence
  Synthetic
guaacagcuggguuuagucagg

SEQ ID NO: 322641 - RNA, 23 nt, Artificial Sequence
  Synthetic
aguaacagcuggguuuagucagg

SEQ ID NO: 322642 - RNA, 24 nt, Artificial Sequence
  Synthetic
uaguaacagcuggguuuagucagg

SEQ ID NO: 322643 - RNA, 18 nt, Artificial Sequence
  Synthetic
uagacacauggggucagg

SEQ ID NO: 322644 - RNA, 19 nt, Artificial Sequence
  Synthetic
guagacacauggggucagg

SEQ ID NO: 322645 - RNA, 20 nt, Artificial Sequence
  Synthetic
gguagacacauggggucagg

SEQ ID NO: 322646 - RNA, 21 nt, Artificial Sequence
  Synthetic
ugguagacacauggggucagg

SEQ ID NO: 322647 - RNA, 22 nt, Artificial Sequence
  Synthetic
augguagacacauggggucagg

SEQ ID NO: 322648 - RNA, 23 nt, Artificial Sequence
  Synthetic
uaugguagacacauggggucagg

SEQ ID NO: 322649 - RNA, 24 nt, Artificial Sequence
  Synthetic
cuaugguagacacauggggucagg

SEQ ID NO: 322650 - RNA, 18 nt, Artificial Sequence
  Synthetic
agagauggguuggucagg

SEQ ID NO: 322651 - RNA, 19 nt, Artificial Sequence
  Synthetic
aagagauggguuggucagg

SEQ ID NO: 322652 - RNA, 20 nt, Artificial Sequence
  Synthetic
uaagagauggguuggucagg

SEQ ID NO: 322653 - RNA, 21 nt, Artificial Sequence
  Synthetic
cuaagagauggguuggucagg

SEQ ID NO: 322654 - RNA, 22 nt, Artificial Sequence
  Synthetic
ccuaagagauggguuggucagg

SEQ ID NO: 322655 - RNA, 23 nt, Artificial Sequence
  Synthetic
accuaagagauggguuggucagg

SEQ ID NO: 322656 - RNA, 24 nt, Artificial Sequence
  Synthetic
gaccuaagagauggguuggucagg

SEQ ID NO: 322657 - RNA, 18 nt, Artificial Sequence
  Synthetic
augaauguggaugucagg

SEQ ID NO: 322658 - RNA, 19 nt, Artificial Sequence
  Synthetic
aaugaauguggaugucagg

SEQ ID NO: 322659 - RNA, 20 nt, Artificial Sequence
  Synthetic
aaaugaauguggaugucagg

SEQ ID NO: 322660 - RNA, 21 nt, Artificial Sequence
  Synthetic
gaaaugaauguggaugucagg

SEQ ID NO: 322661 - RNA, 22 nt, Artificial Sequence
  Synthetic
agaaaugaauguggaugucagg

SEQ ID NO: 322662 - RNA, 23 nt, Artificial Sequence
  Synthetic
gagaaaugaauguggaugucagg

SEQ ID NO: 322663 - RNA, 24 nt, Artificial Sequence
  Synthetic
agagaaaugaauguggaugucagg

SEQ ID NO: 322664 - RNA, 18 nt, Artificial Sequence
  Synthetic
gaggagcgaugugucagg

SEQ ID NO: 322665 - RNA, 19 nt, Artificial Sequence
  Synthetic
ugaggagcgaugugucagg

SEQ ID NO: 322666 - RNA, 20 nt, Artificial Sequence
  Synthetic
gugaggagcgaugugucagg

SEQ ID NO: 322667 - RNA, 21 nt, Artificial Sequence
  Synthetic
ggugaggagcgaugugucagg

SEQ ID NO: 322668 - RNA, 22 nt, Artificial Sequence
  Synthetic
gggugaggagcgaugugucagg

SEQ ID NO: 322669 - RNA, 23 nt, Artificial Sequence
  Synthetic
ugggugaggagcgaugugucagg

SEQ ID NO: 322670 - RNA, 24 nt, Artificial Sequence
  Synthetic
augggugaggagcgaugugucagg

SEQ ID NO: 322671 - RNA, 18 nt, Artificial Sequence
  Synthetic
uggacuuuuugugucagg

SEQ ID NO: 322672 - RNA, 19 nt, Artificial Sequence
  Synthetic
auggacuuuuugugucagg

SEQ ID NO: 322673 - RNA, 20 nt, Artificial Sequence
  Synthetic
uauggacuuuuugugucagg

SEQ ID NO: 322674 - RNA, 21 nt, Artificial Sequence
  Synthetic
cuauggacuuuuugugucagg

SEQ ID NO: 322675 - RNA, 22 nt, Artificial Sequence
  Synthetic
gcuauggacuuuuugugucagg

SEQ ID NO: 322676 - RNA, 23 nt, Artificial Sequence
  Synthetic
ugcuauggacuuuuugugucagg

SEQ ID NO: 322677 - RNA, 24 nt, Artificial Sequence
  Synthetic
gugcuauggacuuuuugugucagg

SEQ ID NO: 322678 - RNA, 18 nt, Artificial Sequence
  Synthetic
aaaggaaaagaauucagg

SEQ ID NO: 322679 - RNA, 19 nt, Artificial Sequence
  Synthetic
aaaaggaaaagaauucagg

SEQ ID NO: 322680 - RNA, 20 nt, Artificial Sequence
  Synthetic
aaaaaggaaaagaauucagg

SEQ ID NO: 322681 - RNA, 21 nt, Artificial Sequence
  Synthetic
uaaaaaggaaaagaauucagg

SEQ ID NO: 322682 - RNA, 22 nt, Artificial Sequence
  Synthetic
guaaaaaggaaaagaauucagg

SEQ ID NO: 322683 - RNA, 23 nt, Artificial Sequence
  Synthetic
uguaaaaaggaaaagaauucagg

SEQ ID NO: 322684 - RNA, 24 nt, Artificial Sequence
  Synthetic
uuguaaaaaggaaaagaauucagg

SEQ ID NO: 322685 - RNA, 18 nt, Artificial Sequence
  Synthetic
uugucucuaacauucagg

SEQ ID NO: 322686 - RNA, 19 nt, Artificial Sequence
  Synthetic
cuugucucuaacauucagg

SEQ ID NO: 322687 - RNA, 20 nt, Artificial Sequence
  Synthetic
ucuugucucuaacauucagg

SEQ ID NO: 322688 - RNA, 21 nt, Artificial Sequence
  Synthetic
gucuugucucuaacauucagg

SEQ ID NO: 322689 - RNA, 22 nt, Artificial Sequence
  Synthetic
agucuugucucuaacauucagg

SEQ ID NO: 322690 - RNA, 23 nt, Artificial Sequence
  Synthetic
gagucuugucucuaacauucagg

SEQ ID NO: 322691 - RNA, 24 nt, Artificial Sequence
  Synthetic
agagucuugucucuaacauucagg

SEQ ID NO: 322692 - RNA, 18 nt, Artificial Sequence
  Synthetic
uaaauaaagucauucagg

SEQ ID NO: 322693 - RNA, 19 nt, Artificial Sequence
  Synthetic
cuaaauaaagucauucagg

SEQ ID NO: 322694 - RNA, 20 nt, Artificial Sequence
  Synthetic
acuaaauaaagucauucagg

SEQ ID NO: 322695 - RNA, 21 nt, Artificial Sequence
  Synthetic
aacuaaauaaagucauucagg

SEQ ID NO: 322696 - RNA, 22 nt, Artificial Sequence
  Synthetic
aaacuaaauaaagucauucagg

SEQ ID NO: 322697 - RNA, 23 nt, Artificial Sequence
  Synthetic
aaaacuaaauaaagucauucagg

SEQ ID NO: 322698 - RNA, 24 nt, Artificial Sequence
  Synthetic
aaaaacuaaauaaagucauucagg

SEQ ID NO: 322699 - RNA, 18 nt, Artificial Sequence
  Synthetic
gauaaggaacuauucagg

SEQ ID NO: 322700 - RNA, 19 nt, Artificial Sequence
  Synthetic
agauaaggaacuauucagg

SEQ ID NO: 322701 - RNA, 20 nt, Artificial Sequence
  Synthetic
aagauaaggaacuauucagg

SEQ ID NO: 322702 - RNA, 21 nt, Artificial Sequence
  Synthetic
uaagauaaggaacuauucagg

SEQ ID NO: 322703 - RNA, 22 nt, Artificial Sequence
  Synthetic
auaagauaaggaacuauucagg

SEQ ID NO: 322704 - RNA, 23 nt, Artificial Sequence
  Synthetic
gauaagauaaggaacuauucagg

SEQ ID NO: 322705 - RNA, 24 nt, Artificial Sequence
  Synthetic
agauaagauaaggaacuauucagg

SEQ ID NO: 322706 - RNA, 18 nt, Artificial Sequence
  Synthetic
uauugacauuuauucagg

SEQ ID NO: 322707 - RNA, 19 nt, Artificial Sequence
  Synthetic
cuauugacauuuauucagg

SEQ ID NO: 322708 - RNA, 20 nt, Artificial Sequence
  Synthetic
ccuauugacauuuauucagg

SEQ ID NO: 322709 - RNA, 21 nt, Artificial Sequence
  Synthetic
uccuauugacauuuauucagg

SEQ ID NO: 322710 - RNA, 22 nt, Artificial Sequence
  Synthetic
uuccuauugacauuuauucagg

SEQ ID NO: 322711 - RNA, 23 nt, Artificial Sequence
  Synthetic
uuuccuauugacauuuauucagg

SEQ ID NO: 322712 - RNA, 24 nt, Artificial Sequence
  Synthetic
uuuuccuauugacauuuauucagg

SEQ ID NO: 322713 - RNA, 18 nt, Artificial Sequence
  Synthetic
ugaggcucuguguucagg

SEQ ID NO: 322714 - RNA, 19 nt, Artificial Sequence
  Synthetic
uugaggcucuguguucagg

SEQ ID NO: 322715 - RNA, 20 nt, Artificial Sequence
  Synthetic
cuugaggcucuguguucagg

SEQ ID NO: 322716 - RNA, 21 nt, Artificial Sequence
  Synthetic
ccuugaggcucuguguucagg

SEQ ID NO: 322717 - RNA, 22 nt, Artificial Sequence
  Synthetic
cccuugaggcucuguguucagg

SEQ ID NO: 322718 - RNA, 23 nt, Artificial Sequence
  Synthetic
ccccuugaggcucuguguucagg

SEQ ID NO: 322719 - RNA, 24 nt, Artificial Sequence
  Synthetic
accccuugaggcucuguguucagg

SEQ ID NO: 322720 - RNA, 18 nt, Artificial Sequence
  Synthetic
gauauaaaucauuucagg

SEQ ID NO: 322721 - RNA, 19 nt, Artificial Sequence
  Synthetic
ugauauaaaucauuucagg

SEQ ID NO: 322722 - RNA, 20 nt, Artificial Sequence
  Synthetic
augauauaaaucauuucagg

SEQ ID NO: 322723 - RNA, 21 nt, Artificial Sequence
  Synthetic
gaugauauaaaucauuucagg

SEQ ID NO: 322724 - RNA, 22 nt, Artificial Sequence
  Synthetic
ugaugauauaaaucauuucagg

SEQ ID NO: 322725 - RNA, 23 nt, Artificial Sequence
  Synthetic
augaugauauaaaucauuucagg

SEQ ID NO: 322726 - RNA, 24 nt, Artificial Sequence
  Synthetic
aaugaugauauaaaucauuucagg

SEQ ID NO: 322727 - RNA, 18 nt, Artificial Sequence
  Synthetic
uuacuucucccuuucagg

SEQ ID NO: 322728 - RNA, 19 nt, Artificial Sequence
  Synthetic
uuuacuucucccuuucagg

SEQ ID NO: 322729 - RNA, 20 nt, Artificial Sequence
  Synthetic
uuuuacuucucccuuucagg

SEQ ID NO: 322730 - RNA, 21 nt, Artificial Sequence
  Synthetic
uuuuuacuucucccuuucagg

SEQ ID NO: 322731 - RNA, 22 nt, Artificial Sequence
  Synthetic
cuuuuuacuucucccuuucagg

SEQ ID NO: 322732 - RNA, 23 nt, Artificial Sequence
  Synthetic
ccuuuuuacuucucccuuucagg

SEQ ID NO: 322733 - RNA, 24 nt, Artificial Sequence
  Synthetic
uccuuuuuacuucucccuuucagg

SEQ ID NO: 322734 - RNA, 18 nt, Artificial Sequence
  Synthetic
uguuucagguguuucagg

SEQ ID NO: 322735 - RNA, 19 nt, Artificial Sequence
  Synthetic
guguuucagguguuucagg

SEQ ID NO: 322736 - RNA, 20 nt, Artificial Sequence
  Synthetic
aguguuucagguguuucagg

SEQ ID NO: 322737 - RNA, 21 nt, Artificial Sequence
  Synthetic
aaguguuucagguguuucagg

SEQ ID NO: 322738 - RNA, 22 nt, Artificial Sequence
  Synthetic
uaaguguuucagguguuucagg

SEQ ID NO: 322739 - RNA, 23 nt, Artificial Sequence
  Synthetic
uuaaguguuucagguguuucagg

SEQ ID NO: 322740 - RNA, 24 nt, Artificial Sequence
  Synthetic
uuuaaguguuucagguguuucagg

SEQ ID NO: 322741 - RNA, 18 nt, Artificial Sequence
  Synthetic
caaagaaacauuuucagg

SEQ ID NO: 322742 - RNA, 19 nt, Artificial Sequence
  Synthetic
acaaagaaacauuuucagg

SEQ ID NO: 322743 - RNA, 20 nt, Artificial Sequence
  Synthetic
uacaaagaaacauuuucagg

SEQ ID NO: 322744 - RNA, 21 nt, Artificial Sequence
  Synthetic
auacaaagaaacauuuucagg

SEQ ID NO: 322745 - RNA, 22 nt, Artificial Sequence
  Synthetic
aauacaaagaaacauuuucagg

SEQ ID NO: 322746 - RNA, 23 nt, Artificial Sequence
  Synthetic
aaauacaaagaaacauuuucagg

SEQ ID NO: 322747 - RNA, 24 nt, Artificial Sequence
  Synthetic
caaauacaaagaaacauuuucagg

SEQ ID NO: 322748 - RNA, 18 nt, Artificial Sequence
  Synthetic
ucagacagaaaaaagagg

SEQ ID NO: 322749 - RNA, 19 nt, Artificial Sequence
  Synthetic
gucagacagaaaaaagagg

SEQ ID NO: 322750 - RNA, 20 nt, Artificial Sequence
  Synthetic
ugucagacagaaaaaagagg

SEQ ID NO: 322751 - RNA, 21 nt, Artificial Sequence
  Synthetic
cugucagacagaaaaaagagg

SEQ ID NO: 322752 - RNA, 22 nt, Artificial Sequence
  Synthetic
gcugucagacagaaaaaagagg

SEQ ID NO: 322753 - RNA, 23 nt, Artificial Sequence
  Synthetic
agcugucagacagaaaaaagagg

SEQ ID NO: 322754 - RNA, 24 nt, Artificial Sequence
  Synthetic
cagcugucagacagaaaaaagagg

SEQ ID NO: 322755 - RNA, 18 nt, Artificial Sequence
  Synthetic
aaaugcaggaaaaagagg

SEQ ID NO: 322756 - RNA, 19 nt, Artificial Sequence
  Synthetic
gaaaugcaggaaaaagagg

SEQ ID NO: 322757 - RNA, 20 nt, Artificial Sequence
  Synthetic
agaaaugcaggaaaaagagg

SEQ ID NO: 322758 - RNA, 21 nt, Artificial Sequence
  Synthetic
gagaaaugcaggaaaaagagg

SEQ ID NO: 322759 - RNA, 22 nt, Artificial Sequence
  Synthetic
ugagaaaugcaggaaaaagagg

SEQ ID NO: 322760 - RNA, 23 nt, Artificial Sequence
  Synthetic
gugagaaaugcaggaaaaagagg

SEQ ID NO: 322761 - RNA, 24 nt, Artificial Sequence
  Synthetic
ugugagaaaugcaggaaaaagagg

SEQ ID NO: 322762 - RNA, 18 nt, Artificial Sequence
  Synthetic
auuaccugggaaaagagg

SEQ ID NO: 322763 - RNA, 19 nt, Artificial Sequence
  Synthetic
uauuaccugggaaaagagg

SEQ ID NO: 322764 - RNA, 20 nt, Artificial Sequence
  Synthetic
cuauuaccugggaaaagagg

SEQ ID NO: 322765 - RNA, 21 nt, Artificial Sequence
  Synthetic
gcuauuaccugggaaaagagg

SEQ ID NO: 322766 - RNA, 22 nt, Artificial Sequence
  Synthetic
ugcuauuaccugggaaaagagg

SEQ ID NO: 322767 - RNA, 23 nt, Artificial Sequence
  Synthetic
augcuauuaccugggaaaagagg

SEQ ID NO: 322768 - RNA, 24 nt, Artificial Sequence
  Synthetic
aaugcuauuaccugggaaaagagg

SEQ ID NO: 322769 - RNA, 18 nt, Artificial Sequence
  Synthetic
augugcagguaaaagagg

SEQ ID NO: 322770 - RNA, 19 nt, Artificial Sequence
  Synthetic
aaugugcagguaaaagagg

SEQ ID NO: 322771 - RNA, 20 nt, Artificial Sequence
  Synthetic
gaaugugcagguaaaagagg

SEQ ID NO: 322772 - RNA, 21 nt, Artificial Sequence
  Synthetic
agaaugugcagguaaaagagg

SEQ ID NO: 322773 - RNA, 22 nt, Artificial Sequence
  Synthetic
uagaaugugcagguaaaagagg

SEQ ID NO: 322774 - RNA, 23 nt, Artificial Sequence
  Synthetic
auagaaugugcagguaaaagagg

SEQ ID NO: 322775 - RNA, 24 nt, Artificial Sequence
  Synthetic
cauagaaugugcagguaaaagagg

SEQ ID NO: 322776 - RNA, 18 nt, Artificial Sequence
  Synthetic
caggcauuguaaaagagg

SEQ ID NO: 322777 - RNA, 19 nt, Artificial Sequence
  Synthetic
ccaggcauuguaaaagagg

SEQ ID NO: 322778 - RNA, 20 nt, Artificial Sequence
  Synthetic
accaggcauuguaaaagagg

SEQ ID NO: 322779 - RNA, 21 nt, Artificial Sequence
  Synthetic
gaccaggcauuguaaaagagg

SEQ ID NO: 322780 - RNA, 22 nt, Artificial Sequence
  Synthetic
agaccaggcauuguaaaagagg

SEQ ID NO: 322781 - RNA, 23 nt, Artificial Sequence
  Synthetic
aagaccaggcauuguaaaagagg

SEQ ID NO: 322782 - RNA, 24 nt, Artificial Sequence
  Synthetic
caagaccaggcauuguaaaagagg

SEQ ID NO: 322783 - RNA, 18 nt, Artificial Sequence
  Synthetic
aacuacaaagcaaagagg

SEQ ID NO: 322784 - RNA, 19 nt, Artificial Sequence
  Synthetic
aaacuacaaagcaaagagg

SEQ ID NO: 322785 - RNA, 20 nt, Artificial Sequence
  Synthetic
aaaacuacaaagcaaagagg

SEQ ID NO: 322786 - RNA, 21 nt, Artificial Sequence
  Synthetic
caaaacuacaaagcaaagagg

SEQ ID NO: 322787 - RNA, 22 nt, Artificial Sequence
  Synthetic
ucaaaacuacaaagcaaagagg

SEQ ID NO: 322788 - RNA, 23 nt, Artificial Sequence
  Synthetic
aucaaaacuacaaagcaaagagg

SEQ ID NO: 322789 - RNA, 24 nt, Artificial Sequence
  Synthetic
gaucaaaacuacaaagcaaagagg

SEQ ID NO: 322790 - RNA, 18 nt, Artificial Sequence
  Synthetic
agaauguuguuaaagagg

SEQ ID NO: 322791 - RNA, 19 nt, Artificial Sequence
  Synthetic
gagaauguuguuaaagagg

SEQ ID NO: 322792 - RNA, 20 nt, Artificial Sequence
  Synthetic
agagaauguuguuaaagagg

SEQ ID NO: 322793 - RNA, 21 nt, Artificial Sequence
  Synthetic
aagagaauguuguuaaagagg

SEQ ID NO: 322794 - RNA, 22 nt, Artificial Sequence
  Synthetic
aaagagaauguuguuaaagagg

SEQ ID NO: 322795 - RNA, 23 nt, Artificial Sequence
  Synthetic
aaaagagaauguuguuaaagagg

SEQ ID NO: 322796 - RNA, 24 nt, Artificial Sequence
  Synthetic
aaaaagagaauguuguuaaagagg

SEQ ID NO: 322797 - RNA, 18 nt, Artificial Sequence
  Synthetic
ucuuccugaaccaagagg

SEQ ID NO: 322798 - RNA, 19 nt, Artificial Sequence
  Synthetic
uucuuccugaaccaagagg

SEQ ID NO: 322799 - RNA, 20 nt, Artificial Sequence
  Synthetic
uuucuuccugaaccaagagg

SEQ ID NO: 322800 - RNA, 21 nt, Artificial Sequence
  Synthetic
uuuucuuccugaaccaagagg

SEQ ID NO: 322801 - RNA, 22 nt, Artificial Sequence
  Synthetic
cuuuucuuccugaaccaagagg

SEQ ID NO: 322802 - RNA, 23 nt, Artificial Sequence
  Synthetic
acuuuucuuccugaaccaagagg

SEQ ID NO: 322803 - RNA, 24 nt, Artificial Sequence
  Synthetic
aacuuuucuuccugaaccaagagg

SEQ ID NO: 322804 - RNA, 18 nt, Artificial Sequence
  Synthetic
uagcuugaacccaagagg

SEQ ID NO: 322805 - RNA, 19 nt, Artificial Sequence
  Synthetic
auagcuugaacccaagagg

SEQ ID NO: 322806 - RNA, 20 nt, Artificial Sequence
  Synthetic
aauagcuugaacccaagagg

SEQ ID NO: 322807 - RNA, 21 nt, Artificial Sequence
  Synthetic
gaauagcuugaacccaagagg

SEQ ID NO: 322808 - RNA, 22 nt, Artificial Sequence
  Synthetic
agaauagcuugaacccaagagg

SEQ ID NO: 322809 - RNA, 23 nt, Artificial Sequence
  Synthetic
gagaauagcuugaacccaagagg

SEQ ID NO: 322810 - RNA, 24 nt, Artificial Sequence
  Synthetic
ggagaauagcuugaacccaagagg

SEQ ID NO: 322811 - RNA, 18 nt, Artificial Sequence
  Synthetic
ccuuagccccccaagagg

SEQ ID NO: 322812 - RNA, 19 nt, Artificial Sequence
  Synthetic
gccuuagccccccaagagg

SEQ ID NO: 322813 - RNA, 20 nt, Artificial Sequence
  Synthetic
ugccuuagccccccaagagg

SEQ ID NO: 322814 - RNA, 21 nt, Artificial Sequence
  Synthetic
gugccuuagccccccaagagg

SEQ ID NO: 322815 - RNA, 22 nt, Artificial Sequence
  Synthetic
ugugccuuagccccccaagagg

SEQ ID NO: 322816 - RNA, 23 nt, Artificial Sequence
  Synthetic
uugugccuuagccccccaagagg

SEQ ID NO: 322817 - RNA, 24 nt, Artificial Sequence
  Synthetic
cuugugccuuagccccccaagagg

SEQ ID NO: 322818 - RNA, 18 nt, Artificial Sequence
  Synthetic
uuauuaaacagcaagagg

SEQ ID NO: 322819 - RNA, 19 nt, Artificial Sequence
  Synthetic
cuuauuaaacagcaagagg

SEQ ID NO: 322820 - RNA, 20 nt, Artificial Sequence
  Synthetic
gcuuauuaaacagcaagagg

SEQ ID NO: 322821 - RNA, 21 nt, Artificial Sequence
  Synthetic
agcuuauuaaacagcaagagg

SEQ ID NO: 322822 - RNA, 22 nt, Artificial Sequence
  Synthetic
uagcuuauuaaacagcaagagg

SEQ ID NO: 322823 - RNA, 23 nt, Artificial Sequence
  Synthetic
uuagcuuauuaaacagcaagagg

SEQ ID NO: 322824 - RNA, 24 nt, Artificial Sequence
  Synthetic
guuagcuuauuaaacagcaagagg

SEQ ID NO: 322825 - RNA, 18 nt, Artificial Sequence
  Synthetic
cucggguuucgcaagagg

SEQ ID NO: 322826 - RNA, 19 nt, Artificial Sequence
  Synthetic
gcucggguuucgcaagagg

SEQ ID NO: 322827 - RNA, 20 nt, Artificial Sequence
  Synthetic
ugcucggguuucgcaagagg

SEQ ID NO: 322828 - RNA, 21 nt, Artificial Sequence
  Synthetic
cugcucggguuucgcaagagg

SEQ ID NO: 322829 - RNA, 22 nt, Artificial Sequence
  Synthetic
ucugcucggguuucgcaagagg

SEQ ID NO: 322830 - RNA, 23 nt, Artificial Sequence
  Synthetic
cucugcucggguuucgcaagagg

SEQ ID NO: 322831 - RNA, 24 nt, Artificial Sequence
  Synthetic
ucucugcucggguuucgcaagagg

SEQ ID NO: 322832 - RNA, 18 nt, Artificial Sequence
  Synthetic
ucucagcuacucaagagg

SEQ ID NO: 322833 - RNA, 19 nt, Artificial Sequence
  Synthetic
gucucagcuacucaagagg

SEQ ID NO: 322834 - RNA, 20 nt, Artificial Sequence
  Synthetic
ggucucagcuacucaagagg

SEQ ID NO: 322835 - RNA, 21 nt, Artificial Sequence
  Synthetic
uggucucagcuacucaagagg

SEQ ID NO: 322836 - RNA, 22 nt, Artificial Sequence
  Synthetic
guggucucagcuacucaagagg

SEQ ID NO: 322837 - RNA, 23 nt, Artificial Sequence
  Synthetic
gguggucucagcuacucaagagg

SEQ ID NO: 322838 - RNA, 24 nt, Artificial Sequence
  Synthetic
cgguggucucagcuacucaagagg

SEQ ID NO: 322839 - RNA, 18 nt, Artificial Sequence
  Synthetic
guauuugaguucaagagg

SEQ ID NO: 322840 - RNA, 19 nt, Artificial Sequence
  Synthetic
uguauuugaguucaagagg

SEQ ID NO: 322841 - RNA, 20 nt, Artificial Sequence
  Synthetic
auguauuugaguucaagagg

SEQ ID NO: 322842 - RNA, 21 nt, Artificial Sequence
  Synthetic
aauguauuugaguucaagagg

SEQ ID NO: 322843 - RNA, 22 nt, Artificial Sequence
  Synthetic
gaauguauuugaguucaagagg

SEQ ID NO: 322844 - RNA, 23 nt, Artificial Sequence
  Synthetic
agaauguauuugaguucaagagg

SEQ ID NO: 322845 - RNA, 24 nt, Artificial Sequence
  Synthetic
uagaauguauuugaguucaagagg

SEQ ID NO: 322846 - RNA, 18 nt, Artificial Sequence
  Synthetic
aacauguguuucaagagg

SEQ ID NO: 322847 - RNA, 19 nt, Artificial Sequence
  Synthetic
uaacauguguuucaagagg

SEQ ID NO: 322848 - RNA, 20 nt, Artificial Sequence
  Synthetic
uuaacauguguuucaagagg

SEQ ID NO: 322849 - RNA, 21 nt, Artificial Sequence
  Synthetic
cuuaacauguguuucaagagg

SEQ ID NO: 322850 - RNA, 22 nt, Artificial Sequence
  Synthetic
ucuuaacauguguuucaagagg

SEQ ID NO: 322851 - RNA, 23 nt, Artificial Sequence
  Synthetic
uucuuaacauguguuucaagagg

SEQ ID NO: 322852 - RNA, 24 nt, Artificial Sequence
  Synthetic
auucuuaacauguguuucaagagg

SEQ ID NO: 322853 - RNA, 18 nt, Artificial Sequence
  Synthetic
uagagaauuuucaagagg

SEQ ID NO: 322854 - RNA, 19 nt, Artificial Sequence
  Synthetic
cuagagaauuuucaagagg

SEQ ID NO: 322855 - RNA, 20 nt, Artificial Sequence
  Synthetic
ccuagagaauuuucaagagg

SEQ ID NO: 322856 - RNA, 21 nt, Artificial Sequence
  Synthetic
gccuagagaauuuucaagagg

SEQ ID NO: 322857 - RNA, 22 nt, Artificial Sequence
  Synthetic
ggccuagagaauuuucaagagg

SEQ ID NO: 322858 - RNA, 23 nt, Artificial Sequence
  Synthetic
gggccuagagaauuuucaagagg

SEQ ID NO: 322859 - RNA, 24 nt, Artificial Sequence
  Synthetic
agggccuagagaauuuucaagagg

SEQ ID NO: 322860 - RNA, 18 nt, Artificial Sequence
  Synthetic
auagaguagaagaagagg

SEQ ID NO: 322861 - RNA, 19 nt, Artificial Sequence
  Synthetic
cauagaguagaagaagagg

SEQ ID NO: 322862 - RNA, 20 nt, Artificial Sequence
  Synthetic
acauagaguagaagaagagg

SEQ ID NO: 322863 - RNA, 21 nt, Artificial Sequence
  Synthetic
cacauagaguagaagaagagg

SEQ ID NO: 322864 - RNA, 22 nt, Artificial Sequence
  Synthetic
gcacauagaguagaagaagagg

SEQ ID NO: 322865 - RNA, 23 nt, Artificial Sequence
  Synthetic
agcacauagaguagaagaagagg

SEQ ID NO: 322866 - RNA, 24 nt, Artificial Sequence
  Synthetic
aagcacauagaguagaagaagagg

SEQ ID NO: 322867 - RNA, 18 nt, Artificial Sequence
  Synthetic
auccauuaagagaagagg

SEQ ID NO: 322868 - RNA, 19 nt, Artificial Sequence
  Synthetic
uauccauuaagagaagagg

SEQ ID NO: 322869 - RNA, 20 nt, Artificial Sequence
  Synthetic
uuauccauuaagagaagagg

SEQ ID NO: 322870 - RNA, 21 nt, Artificial Sequence
  Synthetic
auuauccauuaagagaagagg

SEQ ID NO: 322871 - RNA, 22 nt, Artificial Sequence
  Synthetic
aauuauccauuaagagaagagg

SEQ ID NO: 322872 - RNA, 23 nt, Artificial Sequence
  Synthetic
uaauuauccauuaagagaagagg

SEQ ID NO: 322873 - RNA, 24 nt, Artificial Sequence
  Synthetic
auaauuauccauuaagagaagagg

SEQ ID NO: 322874 - RNA, 18 nt, Artificial Sequence
  Synthetic
aaugucagcucgaagagg

SEQ ID NO: 322875 - RNA, 19 nt, Artificial Sequence
  Synthetic
uaaugucagcucgaagagg

SEQ ID NO: 322876 - RNA, 20 nt, Artificial Sequence
  Synthetic
uuaaugucagcucgaagagg

SEQ ID NO: 322877 - RNA, 21 nt, Artificial Sequence
  Synthetic
cuuaaugucagcucgaagagg

SEQ ID NO: 322878 - RNA, 22 nt, Artificial Sequence
  Synthetic
acuuaaugucagcucgaagagg

SEQ ID NO: 322879 - RNA, 23 nt, Artificial Sequence
  Synthetic
uacuuaaugucagcucgaagagg

SEQ ID NO: 322880 - RNA, 24 nt, Artificial Sequence
  Synthetic
cuacuuaaugucagcucgaagagg

SEQ ID NO: 322881 - RNA, 18 nt, Artificial Sequence
  Synthetic
agcauggcacggaagagg

SEQ ID NO: 322882 - RNA, 19 nt, Artificial Sequence
  Synthetic
gagcauggcacggaagagg

SEQ ID NO: 322883 - RNA, 20 nt, Artificial Sequence
  Synthetic
ggagcauggcacggaagagg

SEQ ID NO: 322884 - RNA, 21 nt, Artificial Sequence
  Synthetic
uggagcauggcacggaagagg

SEQ ID NO: 322885 - RNA, 22 nt, Artificial Sequence
  Synthetic
uuggagcauggcacggaagagg

SEQ ID NO: 322886 - RNA, 23 nt, Artificial Sequence
  Synthetic
cuuggagcauggcacggaagagg

SEQ ID NO: 322887 - RNA, 24 nt, Artificial Sequence
  Synthetic
ucuuggagcauggcacggaagagg

SEQ ID NO: 322888 - RNA, 18 nt, Artificial Sequence
  Synthetic
uuaggggccaugaagagg

SEQ ID NO: 322889 - RNA, 19 nt, Artificial Sequence
  Synthetic
uuuaggggccaugaagagg

SEQ ID NO: 322890 - RNA, 20 nt, Artificial Sequence
  Synthetic
guuuaggggccaugaagagg

SEQ ID NO: 322891 - RNA, 21 nt, Artificial Sequence
  Synthetic
cguuuaggggccaugaagagg

SEQ ID NO: 322892 - RNA, 22 nt, Artificial Sequence
  Synthetic
gcguuuaggggccaugaagagg

SEQ ID NO: 322893 - RNA, 23 nt, Artificial Sequence
  Synthetic
agcguuuaggggccaugaagagg

SEQ ID NO: 322894 - RNA, 24 nt, Artificial Sequence
  Synthetic
cagcguuuaggggccaugaagagg

SEQ ID NO: 322895 - RNA, 18 nt, Artificial Sequence
  Synthetic
uagaguuacuuuaagagg

SEQ ID NO: 322896 - RNA, 19 nt, Artificial Sequence
  Synthetic
uuagaguuacuuuaagagg

SEQ ID NO: 322897 - RNA, 20 nt, Artificial Sequence
  Synthetic
uuuagaguuacuuuaagagg

SEQ ID NO: 322898 - RNA, 21 nt, Artificial Sequence
  Synthetic
uuuuagaguuacuuuaagagg

SEQ ID NO: 322899 - RNA, 22 nt, Artificial Sequence
  Synthetic
auuuuagaguuacuuuaagagg

SEQ ID NO: 322900 - RNA, 23 nt, Artificial Sequence
  Synthetic
uauuuuagaguuacuuuaagagg

SEQ ID NO: 322901 - RNA, 24 nt, Artificial Sequence
  Synthetic
auauuuuagaguuacuuuaagagg

SEQ ID NO: 322902 - RNA, 18 nt, Artificial Sequence
  Synthetic
gaaccagagucacagagg

SEQ ID NO: 322903 - RNA, 19 nt, Artificial Sequence
  Synthetic
agaaccagagucacagagg

SEQ ID NO: 322904 - RNA, 20 nt, Artificial Sequence
  Synthetic
gagaaccagagucacagagg

SEQ ID NO: 322905 - RNA, 21 nt, Artificial Sequence
  Synthetic
ugagaaccagagucacagagg

SEQ ID NO: 322906 - RNA, 22 nt, Artificial Sequence
  Synthetic
augagaaccagagucacagagg

SEQ ID NO: 322907 - RNA, 23 nt, Artificial Sequence
  Synthetic
caugagaaccagagucacagagg

SEQ ID NO: 322908 - RNA, 24 nt, Artificial Sequence
  Synthetic
gcaugagaaccagagucacagagg

SEQ ID NO: 322909 - RNA, 18 nt, Artificial Sequence
  Synthetic
uugcauuauuuacagagg

SEQ ID NO: 322910 - RNA, 19 nt, Artificial Sequence
  Synthetic
cuugcauuauuuacagagg

SEQ ID NO: 322911 - RNA, 20 nt, Artificial Sequence
  Synthetic
gcuugcauuauuuacagagg

SEQ ID NO: 322912 - RNA, 21 nt, Artificial Sequence
  Synthetic
agcuugcauuauuuacagagg

SEQ ID NO: 322913 - RNA, 22 nt, Artificial Sequence
  Synthetic
gagcuugcauuauuuacagagg

SEQ ID NO: 322914 - RNA, 23 nt, Artificial Sequence
  Synthetic
agagcuugcauuauuuacagagg

SEQ ID NO: 322915 - RNA, 24 nt, Artificial Sequence
  Synthetic
aagagcuugcauuauuuacagagg

SEQ ID NO: 322916 - RNA, 18 nt, Artificial Sequence
  Synthetic
aguauucaaaaccagagg

SEQ ID NO: 322917 - RNA, 19 nt, Artificial Sequence
  Synthetic
caguauucaaaaccagagg

SEQ ID NO: 322918 - RNA, 20 nt, Artificial Sequence
  Synthetic
ucaguauucaaaaccagagg

SEQ ID NO: 322919 - RNA, 21 nt, Artificial Sequence
  Synthetic
cucaguauucaaaaccagagg

SEQ ID NO: 322920 - RNA, 22 nt, Artificial Sequence
  Synthetic
acucaguauucaaaaccagagg

SEQ ID NO: 322921 - RNA, 23 nt, Artificial Sequence
  Synthetic
aacucaguauucaaaaccagagg

SEQ ID NO: 322922 - RNA, 24 nt, Artificial Sequence
  Synthetic
aaacucaguauucaaaaccagagg

SEQ ID NO: 322923 - RNA, 18 nt, Artificial Sequence
  Synthetic
cagaugagcccccagagg

SEQ ID NO: 322924 - RNA, 19 nt, Artificial Sequence
  Synthetic
ucagaugagcccccagagg

SEQ ID NO: 322925 - RNA, 20 nt, Artificial Sequence
  Synthetic
cucagaugagcccccagagg

SEQ ID NO: 322926 - RNA, 21 nt, Artificial Sequence
  Synthetic
gcucagaugagcccccagagg

SEQ ID NO: 322927 - RNA, 22 nt, Artificial Sequence
  Synthetic
agcucagaugagcccccagagg

SEQ ID NO: 322928 - RNA, 23 nt, Artificial Sequence
  Synthetic
cagcucagaugagcccccagagg

SEQ ID NO: 322929 - RNA, 24 nt, Artificial Sequence
  Synthetic
gcagcucagaugagcccccagagg

SEQ ID NO: 322930 - RNA, 18 nt, Artificial Sequence
  Synthetic
cagggaaaaggccagagg

SEQ ID NO: 322931 - RNA, 19 nt, Artificial Sequence
  Synthetic
acagggaaaaggccagagg

SEQ ID NO: 322932 - RNA, 20 nt, Artificial Sequence
  Synthetic
uacagggaaaaggccagagg

SEQ ID NO: 322933 - RNA, 21 nt, Artificial Sequence
  Synthetic
uuacagggaaaaggccagagg

SEQ ID NO: 322934 - RNA, 22 nt, Artificial Sequence
  Synthetic
cuuacagggaaaaggccagagg

SEQ ID NO: 322935 - RNA, 23 nt, Artificial Sequence
  Synthetic
acuuacagggaaaaggccagagg

SEQ ID NO: 322936 - RNA, 24 nt, Artificial Sequence
  Synthetic
uacuuacagggaaaaggccagagg

SEQ ID NO: 322937 - RNA, 18 nt, Artificial Sequence
  Synthetic
ccuguccuuauccagagg

SEQ ID NO: 322938 - RNA, 19 nt, Artificial Sequence
  Synthetic
cccuguccuuauccagagg

SEQ ID NO: 322939 - RNA, 20 nt, Artificial Sequence
  Synthetic
acccuguccuuauccagagg

SEQ ID NO: 322940 - RNA, 21 nt, Artificial Sequence
  Synthetic
cacccuguccuuauccagagg

SEQ ID NO: 322941 - RNA, 22 nt, Artificial Sequence
  Synthetic
ccacccuguccuuauccagagg

SEQ ID NO: 322942 - RNA, 23 nt, Artificial Sequence
  Synthetic
uccacccuguccuuauccagagg

SEQ ID NO: 322943 - RNA, 24 nt, Artificial Sequence
  Synthetic
auccacccuguccuuauccagagg

SEQ ID NO: 322944 - RNA, 18 nt, Artificial Sequence
  Synthetic
ggaugaagcuuccagagg

SEQ ID NO: 322945 - RNA, 19 nt, Artificial Sequence
  Synthetic
gggaugaagcuuccagagg

SEQ ID NO: 322946 - RNA, 20 nt, Artificial Sequence
  Synthetic
ugggaugaagcuuccagagg

SEQ ID NO: 322947 - RNA, 21 nt, Artificial Sequence
  Synthetic
cugggaugaagcuuccagagg

SEQ ID NO: 322948 - RNA, 22 nt, Artificial Sequence
  Synthetic
ucugggaugaagcuuccagagg

SEQ ID NO: 322949 - RNA, 23 nt, Artificial Sequence
  Synthetic
cucugggaugaagcuuccagagg

SEQ ID NO: 322950 - RNA, 24 nt, Artificial Sequence
  Synthetic
ccucugggaugaagcuuccagagg

SEQ ID NO: 322951 - RNA, 18 nt, Artificial Sequence
  Synthetic
ggaggagagaggcagagg

SEQ ID NO: 322952 - RNA, 19 nt, Artificial Sequence
  Synthetic
aggaggagagaggcagagg

SEQ ID NO: 322953 - RNA, 20 nt, Artificial Sequence
  Synthetic
aaggaggagagaggcagagg

SEQ ID NO: 322954 - RNA, 21 nt, Artificial Sequence
  Synthetic
caaggaggagagaggcagagg

SEQ ID NO: 322955 - RNA, 22 nt, Artificial Sequence
  Synthetic
acaaggaggagagaggcagagg

SEQ ID NO: 322956 - RNA, 23 nt, Artificial Sequence
  Synthetic
gacaaggaggagagaggcagagg

SEQ ID NO: 322957 - RNA, 24 nt, Artificial Sequence
  Synthetic
ggacaaggaggagagaggcagagg

SEQ ID NO: 322958 - RNA, 18 nt, Artificial Sequence
  Synthetic
cuacucgggaggcagagg

SEQ ID NO: 322959 - RNA, 19 nt, Artificial Sequence
  Synthetic
acuacucgggaggcagagg

SEQ ID NO: 322960 - RNA, 20 nt, Artificial Sequence
  Synthetic
aacuacucgggaggcagagg

SEQ ID NO: 322961 - RNA, 21 nt, Artificial Sequence
  Synthetic
caacuacucgggaggcagagg

SEQ ID NO: 322962 - RNA, 22 nt, Artificial Sequence
  Synthetic
ccaacuacucgggaggcagagg

SEQ ID NO: 322963 - RNA, 23 nt, Artificial Sequence
  Synthetic
cccaacuacucgggaggcagagg

SEQ ID NO: 322964 - RNA, 24 nt, Artificial Sequence
  Synthetic
ucccaacuacucgggaggcagagg

SEQ ID NO: 322965 - RNA, 18 nt, Artificial Sequence
  Synthetic
aacguguaggggcagagg

SEQ ID NO: 322966 - RNA, 19 nt, Artificial Sequence
  Synthetic
caacguguaggggcagagg

SEQ ID NO: 322967 - RNA, 20 nt, Artificial Sequence
  Synthetic
ucaacguguaggggcagagg

SEQ ID NO: 322968 - RNA, 21 nt, Artificial Sequence
  Synthetic
gucaacguguaggggcagagg

SEQ ID NO: 322969 - RNA, 22 nt, Artificial Sequence
  Synthetic
ggucaacguguaggggcagagg

SEQ ID NO: 322970 - RNA, 23 nt, Artificial Sequence
  Synthetic
gggucaacguguaggggcagagg

SEQ ID NO: 322971 - RNA, 24 nt, Artificial Sequence
  Synthetic
ggggucaacguguaggggcagagg

SEQ ID NO: 322972 - RNA, 18 nt, Artificial Sequence
  Synthetic
gggauuggggggcagagg

SEQ ID NO: 322973 - RNA, 19 nt, Artificial Sequence
  Synthetic
ggggauuggggggcagagg

SEQ ID NO: 322974 - RNA, 20 nt, Artificial Sequence
  Synthetic
gggggauuggggggcagagg

SEQ ID NO: 322975 - RNA, 21 nt, Artificial Sequence
  Synthetic
ugggggauuggggggcagagg

SEQ ID NO: 322976 - RNA, 22 nt, Artificial Sequence
  Synthetic
uugggggauuggggggcagagg

SEQ ID NO: 322977 - RNA, 23 nt, Artificial Sequence
  Synthetic
guugggggauuggggggcagagg

SEQ ID NO: 322978 - RNA, 24 nt, Artificial Sequence
  Synthetic
aguugggggauuggggggcagagg

SEQ ID NO: 322979 - RNA, 18 nt, Artificial Sequence
  Synthetic
aggcaacuguggcagagg

SEQ ID NO: 322980 - RNA, 19 nt, Artificial Sequence
  Synthetic
aaggcaacuguggcagagg

SEQ ID NO: 322981 - RNA, 20 nt, Artificial Sequence
  Synthetic
gaaggcaacuguggcagagg

SEQ ID NO: 322982 - RNA, 21 nt, Artificial Sequence
  Synthetic
agaaggcaacuguggcagagg

SEQ ID NO: 322983 - RNA, 22 nt, Artificial Sequence
  Synthetic
aagaaggcaacuguggcagagg

SEQ ID NO: 322984 - RNA, 23 nt, Artificial Sequence
  Synthetic
aaagaaggcaacuguggcagagg

SEQ ID NO: 322985 - RNA, 24 nt, Artificial Sequence
  Synthetic
aaaagaaggcaacuguggcagagg

SEQ ID NO: 322986 - RNA, 18 nt, Artificial Sequence
  Synthetic
aauggggccuaucagagg

SEQ ID NO: 322987 - RNA, 19 nt, Artificial Sequence
  Synthetic
caauggggccuaucagagg

SEQ ID NO: 322988 - RNA, 20 nt, Artificial Sequence
  Synthetic
acaauggggccuaucagagg

SEQ ID NO: 322989 - RNA, 21 nt, Artificial Sequence
  Synthetic
cacaauggggccuaucagagg

SEQ ID NO: 322990 - RNA, 22 nt, Artificial Sequence
  Synthetic
acacaauggggccuaucagagg

SEQ ID NO: 322991 - RNA, 23 nt, Artificial Sequence
  Synthetic
cacacaauggggccuaucagagg

SEQ ID NO: 322992 - RNA, 24 nt, Artificial Sequence
  Synthetic
acacacaauggggccuaucagagg

SEQ ID NO: 322993 - RNA, 18 nt, Artificial Sequence
  Synthetic
auccaagcuucucagagg

SEQ ID NO: 322994 - RNA, 19 nt, Artificial Sequence
  Synthetic
aauccaagcuucucagagg

SEQ ID NO: 322995 - RNA, 20 nt, Artificial Sequence
  Synthetic
uaauccaagcuucucagagg

SEQ ID NO: 322996 - RNA, 21 nt, Artificial Sequence
  Synthetic
guaauccaagcuucucagagg

SEQ ID NO: 322997 - RNA, 22 nt, Artificial Sequence
  Synthetic
uguaauccaagcuucucagagg

SEQ ID NO: 322998 - RNA, 23 nt, Artificial Sequence
  Synthetic
uuguaauccaagcuucucagagg

SEQ ID NO: 322999 - RNA, 24 nt, Artificial Sequence
  Synthetic
cuuguaauccaagcuucucagagg

SEQ ID NO: 323000 - RNA, 18 nt, Artificial Sequence
  Synthetic
cucucuuuuucucagagg

SEQ ID NO: 323001 - RNA, 19 nt, Artificial Sequence
  Synthetic
ccucucuuuuucucagagg

SEQ ID NO: 323002 - RNA, 20 nt, Artificial Sequence
  Synthetic
accucucuuuuucucagagg

SEQ ID NO: 323003 - RNA, 21 nt, Artificial Sequence
  Synthetic
aaccucucuuuuucucagagg

SEQ ID NO: 323004 - RNA, 22 nt, Artificial Sequence
  Synthetic
aaaccucucuuuuucucagagg

SEQ ID NO: 323005 - RNA, 23 nt, Artificial Sequence
  Synthetic
aaaaccucucuuuuucucagagg

SEQ ID NO: 323006 - RNA, 24 nt, Artificial Sequence
  Synthetic
caaaaccucucuuuuucucagagg

SEQ ID NO: 323007 - RNA, 18 nt, Artificial Sequence
  Synthetic
agcaguagucuucagagg

SEQ ID NO: 323008 - RNA, 19 nt, Artificial Sequence
  Synthetic
cagcaguagucuucagagg

SEQ ID NO: 323009 - RNA, 20 nt, Artificial Sequence
  Synthetic
ucagcaguagucuucagagg

SEQ ID NO: 323010 - RNA, 21 nt, Artificial Sequence
  Synthetic
aucagcaguagucuucagagg

SEQ ID NO: 323011 - RNA, 22 nt, Artificial Sequence
  Synthetic
aaucagcaguagucuucagagg

SEQ ID NO: 323012 - RNA, 23 nt, Artificial Sequence
  Synthetic
uaaucagcaguagucuucagagg

SEQ ID NO: 323013 - RNA, 24 nt, Artificial Sequence
  Synthetic
cuaaucagcaguagucuucagagg

SEQ ID NO: 323014 - RNA, 18 nt, Artificial Sequence
  Synthetic
ucuggaguguuucagagg

SEQ ID NO: 323015 - RNA, 19 nt, Artificial Sequence
  Synthetic
uucuggaguguuucagagg

SEQ ID NO: 323016 - RNA, 20 nt, Artificial Sequence
  Synthetic
uuucuggaguguuucagagg

SEQ ID NO: 323017 - RNA, 21 nt, Artificial Sequence
  Synthetic
guuucuggaguguuucagagg

SEQ ID NO: 323018 - RNA, 22 nt, Artificial Sequence
  Synthetic
gguuucuggaguguuucagagg

SEQ ID NO: 323019 - RNA, 23 nt, Artificial Sequence
  Synthetic
cgguuucuggaguguuucagagg

SEQ ID NO: 323020 - RNA, 24 nt, Artificial Sequence
  Synthetic
acgguuucuggaguguuucagagg

SEQ ID NO: 323021 - RNA, 18 nt, Artificial Sequence
  Synthetic
gauccucauuuucagagg

SEQ ID NO: 323022 - RNA, 19 nt, Artificial Sequence
  Synthetic
ugauccucauuuucagagg

SEQ ID NO: 323023 - RNA, 20 nt, Artificial Sequence
  Synthetic
gugauccucauuuucagagg

SEQ ID NO: 323024 - RNA, 21 nt, Artificial Sequence
  Synthetic
ugugauccucauuuucagagg

SEQ ID NO: 323025 - RNA, 22 nt, Artificial Sequence
  Synthetic
cugugauccucauuuucagagg

SEQ ID NO: 323026 - RNA, 23 nt, Artificial Sequence
  Synthetic
ucugugauccucauuuucagagg

SEQ ID NO: 323027 - RNA, 24 nt, Artificial Sequence
  Synthetic
cucugugauccucauuuucagagg

SEQ ID NO: 323028 - RNA, 18 nt, Artificial Sequence
  Synthetic
aaaaagaaggaagagagg

SEQ ID NO: 323029 - RNA, 19 nt, Artificial Sequence
  Synthetic
aaaaaagaaggaagagagg

SEQ ID NO: 323030 - RNA, 20 nt, Artificial Sequence
  Synthetic
aaaaaaagaaggaagagagg

SEQ ID NO: 323031 - RNA, 21 nt, Artificial Sequence
  Synthetic
gaaaaaaagaaggaagagagg

SEQ ID NO: 323032 - RNA, 22 nt, Artificial Sequence
  Synthetic
ggaaaaaaagaaggaagagagg

SEQ ID NO: 323033 - RNA, 23 nt, Artificial Sequence
  Synthetic
gggaaaaaaagaaggaagagagg

SEQ ID NO: 323034 - RNA, 24 nt, Artificial Sequence
  Synthetic
agggaaaaaaagaaggaagagagg

SEQ ID NO: 323035 - RNA, 18 nt, Artificial Sequence
  Synthetic
caaggagaggaagagagg

SEQ ID NO: 323036 - RNA, 19 nt, Artificial Sequence
  Synthetic
ccaaggagaggaagagagg

SEQ ID NO: 323037 - RNA, 20 nt, Artificial Sequence
  Synthetic
cccaaggagaggaagagagg

SEQ ID NO: 323038 - RNA, 21 nt, Artificial Sequence
  Synthetic
gcccaaggagaggaagagagg

SEQ ID NO: 323039 - RNA, 22 nt, Artificial Sequence
  Synthetic
ggcccaaggagaggaagagagg

SEQ ID NO: 323040 - RNA, 23 nt, Artificial Sequence
  Synthetic
aggcccaaggagaggaagagagg

SEQ ID NO: 323041 - RNA, 24 nt, Artificial Sequence
  Synthetic
gaggcccaaggagaggaagagagg

SEQ ID NO: 323042 - RNA, 18 nt, Artificial Sequence
  Synthetic
aauggucucuaagagagg

SEQ ID NO: 323043 - RNA, 19 nt, Artificial Sequence
  Synthetic
caauggucucuaagagagg

SEQ ID NO: 323044 - RNA, 20 nt, Artificial Sequence
  Synthetic
acaauggucucuaagagagg

SEQ ID NO: 323045 - RNA, 21 nt, Artificial Sequence
  Synthetic
aacaauggucucuaagagagg

SEQ ID NO: 323046 - RNA, 22 nt, Artificial Sequence
  Synthetic
gaacaauggucucuaagagagg

SEQ ID NO: 323047 - RNA, 23 nt, Artificial Sequence
  Synthetic
ugaacaauggucucuaagagagg

SEQ ID NO: 323048 - RNA, 24 nt, Artificial Sequence
  Synthetic
augaacaauggucucuaagagagg

SEQ ID NO: 323049 - RNA, 18 nt, Artificial Sequence
  Synthetic
ucucuauuaucagagagg

SEQ ID NO: 323050 - RNA, 19 nt, Artificial Sequence
  Synthetic
uucucuauuaucagagagg

SEQ ID NO: 323051 - RNA, 20 nt, Artificial Sequence
  Synthetic
auucucuauuaucagagagg

SEQ ID NO: 323052 - RNA, 21 nt, Artificial Sequence
  Synthetic
gauucucuauuaucagagagg

SEQ ID NO: 323053 - RNA, 22 nt, Artificial Sequence
  Synthetic
ugauucucuauuaucagagagg

SEQ ID NO: 323054 - RNA, 23 nt, Artificial Sequence
  Synthetic
gugauucucuauuaucagagagg

SEQ ID NO: 323055 - RNA, 24 nt, Artificial Sequence
  Synthetic
agugauucucuauuaucagagagg

SEQ ID NO: 323056 - RNA, 18 nt, Artificial Sequence
  Synthetic
cugcaaggaagagagagg

SEQ ID NO: 323057 - RNA, 19 nt, Artificial Sequence
  Synthetic
ucugcaaggaagagagagg

SEQ ID NO: 323058 - RNA, 20 nt, Artificial Sequence
  Synthetic
cucugcaaggaagagagagg

SEQ ID NO: 323059 - RNA, 21 nt, Artificial Sequence
  Synthetic
acucugcaaggaagagagagg

SEQ ID NO: 323060 - RNA, 22 nt, Artificial Sequence
  Synthetic
gacucugcaaggaagagagagg

SEQ ID NO: 323061 - RNA, 23 nt, Artificial Sequence
  Synthetic
ugacucugcaaggaagagagagg

SEQ ID NO: 323062 - RNA, 24 nt, Artificial Sequence
  Synthetic
cugacucugcaaggaagagagagg

SEQ ID NO: 323063 - RNA, 18 nt, Artificial Sequence
  Synthetic
agugaaugaagagagagg

SEQ ID NO: 323064 - RNA, 19 nt, Artificial Sequence
  Synthetic
uagugaaugaagagagagg

SEQ ID NO: 323065 - RNA, 20 nt, Artificial Sequence
  Synthetic
cuagugaaugaagagagagg

SEQ ID NO: 323066 - RNA, 21 nt, Artificial Sequence
  Synthetic
gcuagugaaugaagagagagg

SEQ ID NO: 323067 - RNA, 22 nt, Artificial Sequence
  Synthetic
ugcuagugaaugaagagagagg

SEQ ID NO: 323068 - RNA, 23 nt, Artificial Sequence
  Synthetic
augcuagugaaugaagagagagg

SEQ ID NO: 323069 - RNA, 24 nt, Artificial Sequence
  Synthetic
aaugcuagugaaugaagagagagg

SEQ ID NO: 323070 - RNA, 19 nt, Artificial Sequence
  Synthetic
agagagagagagagagagg

SEQ ID NO: 323071 - RNA, 20 nt, Artificial Sequence
  Synthetic
cagagagagagagagagagg

SEQ ID NO: 323072 - RNA, 21 nt, Artificial Sequence
  Synthetic
acagagagagagagagagagg

SEQ ID NO: 323073 - RNA, 22 nt, Artificial Sequence
  Synthetic
aacagagagagagagagagagg

SEQ ID NO: 323074 - RNA, 23 nt, Artificial Sequence
  Synthetic
gaacagagagagagagagagagg

SEQ ID NO: 323075 - RNA, 24 nt, Artificial Sequence
  Synthetic
ugaacagagagagagagagagagg

SEQ ID NO: 323076 - RNA, 18 nt, Artificial Sequence
  Synthetic
cauugcauuagagagagg

SEQ ID NO: 323077 - RNA, 19 nt, Artificial Sequence
  Synthetic
acauugcauuagagagagg

SEQ ID NO: 323078 - RNA, 20 nt, Artificial Sequence
  Synthetic
gacauugcauuagagagagg

SEQ ID NO: 323079 - RNA, 21 nt, Artificial Sequence
  Synthetic
ugacauugcauuagagagagg

SEQ ID NO: 323080 - RNA, 22 nt, Artificial Sequence
  Synthetic
cugacauugcauuagagagagg

SEQ ID NO: 323081 - RNA, 23 nt, Artificial Sequence
  Synthetic
ucugacauugcauuagagagagg

SEQ ID NO: 323082 - RNA, 24 nt, Artificial Sequence
  Synthetic
uucugacauugcauuagagagagg

SEQ ID NO: 323083 - RNA, 18 nt, Artificial Sequence
  Synthetic
ggauagaaaggagagagg

SEQ ID NO: 323084 - RNA, 19 nt, Artificial Sequence
  Synthetic
aggauagaaaggagagagg

SEQ ID NO: 323085 - RNA, 20 nt, Artificial Sequence
  Synthetic
gaggauagaaaggagagagg

SEQ ID NO: 323086 - RNA, 21 nt, Artificial Sequence
  Synthetic
ggaggauagaaaggagagagg

SEQ ID NO: 323087 - RNA, 22 nt, Artificial Sequence
  Synthetic
gggaggauagaaaggagagagg

SEQ ID NO: 323088 - RNA, 23 nt, Artificial Sequence
  Synthetic
agggaggauagaaaggagagagg

SEQ ID NO: 323089 - RNA, 24 nt, Artificial Sequence
  Synthetic
gagggaggauagaaaggagagagg

SEQ ID NO: 323090 - RNA, 18 nt, Artificial Sequence
  Synthetic
ggacaaggaggagagagg

SEQ ID NO: 323091 - RNA, 19 nt, Artificial Sequence
  Synthetic
uggacaaggaggagagagg

SEQ ID NO: 323092 - RNA, 20 nt, Artificial Sequence
  Synthetic
uuggacaaggaggagagagg

SEQ ID NO: 323093 - RNA, 21 nt, Artificial Sequence
  Synthetic
uuuggacaaggaggagagagg

SEQ ID NO: 323094 - RNA, 22 nt, Artificial Sequence
  Synthetic
auuuggacaaggaggagagagg

SEQ ID NO: 323095 - RNA, 23 nt, Artificial Sequence
  Synthetic
uauuuggacaaggaggagagagg

SEQ ID NO: 323096 - RNA, 24 nt, Artificial Sequence
  Synthetic
guauuuggacaaggaggagagagg

SEQ ID NO: 323097 - RNA, 18 nt, Artificial Sequence
  Synthetic
gggaggaagggagagagg

SEQ ID NO: 323098 - RNA, 19 nt, Artificial Sequence
  Synthetic
agggaggaagggagagagg

SEQ ID NO: 323099 - RNA, 20 nt, Artificial Sequence
  Synthetic
gagggaggaagggagagagg

SEQ ID NO: 323100 - RNA, 21 nt, Artificial Sequence
  Synthetic
agagggaggaagggagagagg

SEQ ID NO: 323101 - RNA, 22 nt, Artificial Sequence
  Synthetic
gagagggaggaagggagagagg

SEQ ID NO: 323102 - RNA, 23 nt, Artificial Sequence
  Synthetic
agagagggaggaagggagagagg

SEQ ID NO: 323103 - RNA, 24 nt, Artificial Sequence
  Synthetic
gagagagggaggaagggagagagg

SEQ ID NO: 323104 - RNA, 18 nt, Artificial Sequence
  Synthetic
gggagggagggagagagg

SEQ ID NO: 323105 - RNA, 19 nt, Artificial Sequence
  Synthetic
ugggagggagggagagagg

SEQ ID NO: 323106 - RNA, 20 nt, Artificial Sequence
  Synthetic
cugggagggagggagagagg

SEQ ID NO: 323107 - RNA, 21 nt, Artificial Sequence
  Synthetic
gcugggagggagggagagagg

SEQ ID NO: 323108 - RNA, 22 nt, Artificial Sequence
  Synthetic
ggcugggagggagggagagagg

SEQ ID NO: 323109 - RNA, 23 nt, Artificial Sequence
  Synthetic
cggcugggagggagggagagagg

SEQ ID NO: 323110 - RNA, 24 nt, Artificial Sequence
  Synthetic
acggcugggagggagggagagagg

SEQ ID NO: 323111 - RNA, 18 nt, Artificial Sequence
  Synthetic
caacacagaugagagagg

SEQ ID NO: 323112 - RNA, 19 nt, Artificial Sequence
  Synthetic
gcaacacagaugagagagg

SEQ ID NO: 323113 - RNA, 20 nt, Artificial Sequence
  Synthetic
ggcaacacagaugagagagg

SEQ ID NO: 323114 - RNA, 21 nt, Artificial Sequence
  Synthetic
gggcaacacagaugagagagg

SEQ ID NO: 323115 - RNA, 22 nt, Artificial Sequence
  Synthetic
agggcaacacagaugagagagg

SEQ ID NO: 323116 - RNA, 23 nt, Artificial Sequence
  Synthetic
cagggcaacacagaugagagagg

SEQ ID NO: 323117 - RNA, 24 nt, Artificial Sequence
  Synthetic
acagggcaacacagaugagagagg

SEQ ID NO: 323118 - RNA, 18 nt, Artificial Sequence
  Synthetic
gggguauggugagagagg

SEQ ID NO: 323119 - RNA, 19 nt, Artificial Sequence
  Synthetic
ugggguauggugagagagg

SEQ ID NO: 323120 - RNA, 20 nt, Artificial Sequence
  Synthetic
augggguauggugagagagg

SEQ ID NO: 323121 - RNA, 21 nt, Artificial Sequence
  Synthetic
uaugggguauggugagagagg

SEQ ID NO: 323122 - RNA, 22 nt, Artificial Sequence
  Synthetic
guaugggguauggugagagagg

SEQ ID NO: 323123 - RNA, 23 nt, Artificial Sequence
  Synthetic
uguaugggguauggugagagagg

SEQ ID NO: 323124 - RNA, 24 nt, Artificial Sequence
  Synthetic
guguaugggguauggugagagagg

SEQ ID NO: 323125 - RNA, 18 nt, Artificial Sequence
  Synthetic
uaugugaucauagagagg

SEQ ID NO: 323126 - RNA, 19 nt, Artificial Sequence
  Synthetic
auaugugaucauagagagg

SEQ ID NO: 323127 - RNA, 20 nt, Artificial Sequence
  Synthetic
cauaugugaucauagagagg

SEQ ID NO: 323128 - RNA, 21 nt, Artificial Sequence
  Synthetic
ccauaugugaucauagagagg

SEQ ID NO: 323129 - RNA, 22 nt, Artificial Sequence
  Synthetic
accauaugugaucauagagagg

SEQ ID NO: 323130 - RNA, 23 nt, Artificial Sequence
  Synthetic
gaccauaugugaucauagagagg

SEQ ID NO: 323131 - RNA, 24 nt, Artificial Sequence
  Synthetic
ggaccauaugugaucauagagagg

SEQ ID NO: 323132 - RNA, 18 nt, Artificial Sequence
  Synthetic
aagaagaugguagagagg

SEQ ID NO: 323133 - RNA, 19 nt, Artificial Sequence
  Synthetic
gaagaagaugguagagagg

SEQ ID NO: 323134 - RNA, 20 nt, Artificial Sequence
  Synthetic
agaagaagaugguagagagg

SEQ ID NO: 323135 - RNA, 21 nt, Artificial Sequence
  Synthetic
gagaagaagaugguagagagg

SEQ ID NO: 323136 - RNA, 22 nt, Artificial Sequence
  Synthetic
ugagaagaagaugguagagagg

SEQ ID NO: 323137 - RNA, 23 nt, Artificial Sequence
  Synthetic
augagaagaagaugguagagagg

SEQ ID NO: 323138 - RNA, 24 nt, Artificial Sequence
  Synthetic
aaugagaagaagaugguagagagg

SEQ ID NO: 323139 - RNA, 18 nt, Artificial Sequence
  Synthetic
cugaggugguuagagagg

SEQ ID NO: 323140 - RNA, 19 nt, Artificial Sequence
  Synthetic
ucugaggugguuagagagg

SEQ ID NO: 323141 - RNA, 20 nt, Artificial Sequence
  Synthetic
cucugaggugguuagagagg

SEQ ID NO: 323142 - RNA, 21 nt, Artificial Sequence
  Synthetic
ucucugaggugguuagagagg

SEQ ID NO: 323143 - RNA, 22 nt, Artificial Sequence
  Synthetic
gucucugaggugguuagagagg

SEQ ID NO: 323144 - RNA, 23 nt, Artificial Sequence
  Synthetic
agucucugaggugguuagagagg

SEQ ID NO: 323145 - RNA, 24 nt, Artificial Sequence
  Synthetic
uagucucugaggugguuagagagg

SEQ ID NO: 323146 - RNA, 18 nt, Artificial Sequence
  Synthetic
ucacuugaacccgagagg

SEQ ID NO: 323147 - RNA, 19 nt, Artificial Sequence
  Synthetic
aucacuugaacccgagagg

SEQ ID NO: 323148 - RNA, 20 nt, Artificial Sequence
  Synthetic
aaucacuugaacccgagagg

SEQ ID NO: 323149 - RNA, 21 nt, Artificial Sequence
  Synthetic
gaaucacuugaacccgagagg

SEQ ID NO: 323150 - RNA, 22 nt, Artificial Sequence
  Synthetic
agaaucacuugaacccgagagg

SEQ ID NO: 323151 - RNA, 23 nt, Artificial Sequence
  Synthetic
gagaaucacuugaacccgagagg

SEQ ID NO: 323152 - RNA, 24 nt, Artificial Sequence
  Synthetic
ggagaaucacuugaacccgagagg

SEQ ID NO: 323153 - RNA, 18 nt, Artificial Sequence
  Synthetic
ucgcuugaacccgagagg

SEQ ID NO: 323154 - RNA, 19 nt, Artificial Sequence
  Synthetic
aucgcuugaacccgagagg

SEQ ID NO: 323155 - RNA, 20 nt, Artificial Sequence
  Synthetic
uaucgcuugaacccgagagg

SEQ ID NO: 323156 - RNA, 21 nt, Artificial Sequence
  Synthetic
guaucgcuugaacccgagagg

SEQ ID NO: 323157 - RNA, 22 nt, Artificial Sequence
  Synthetic
aguaucgcuugaacccgagagg

SEQ ID NO: 323158 - RNA, 23 nt, Artificial Sequence
  Synthetic
gaguaucgcuugaacccgagagg

SEQ ID NO: 323159 - RNA, 24 nt, Artificial Sequence
  Synthetic
ggaguaucgcuugaacccgagagg

SEQ ID NO: 323160 - RNA, 18 nt, Artificial Sequence
  Synthetic
uuuaagaucuccgagagg

SEQ ID NO: 323161 - RNA, 19 nt, Artificial Sequence
  Synthetic
uuuuaagaucuccgagagg

SEQ ID NO: 323162 - RNA, 20 nt, Artificial Sequence
  Synthetic
uuuuuaagaucuccgagagg

SEQ ID NO: 323163 - RNA, 21 nt, Artificial Sequence
  Synthetic
auuuuuaagaucuccgagagg

SEQ ID NO: 323164 - RNA, 22 nt, Artificial Sequence
  Synthetic
cauuuuuaagaucuccgagagg

SEQ ID NO: 323165 - RNA, 23 nt, Artificial Sequence
  Synthetic
ucauuuuuaagaucuccgagagg

SEQ ID NO: 323166 - RNA, 24 nt, Artificial Sequence
  Synthetic
uucauuuuuaagaucuccgagagg

SEQ ID NO: 323167 - RNA, 18 nt, Artificial Sequence
  Synthetic
gggaggcccaaggagagg

SEQ ID NO: 323168 - RNA, 19 nt, Artificial Sequence
  Synthetic
agggaggcccaaggagagg

SEQ ID NO: 323169 - RNA, 20 nt, Artificial Sequence
  Synthetic
uagggaggcccaaggagagg

SEQ ID NO: 323170 - RNA, 24 nt, Artificial Sequence
  Synthetic
agaauagggaggcccaaggagagg

SEQ ID NO: 323171 - RNA, 18 nt, Artificial Sequence
  Synthetic
gagaaugggaaggagagg

SEQ ID NO: 323172 - RNA, 19 nt, Artificial Sequence
  Synthetic
ggagaaugggaaggagagg

SEQ ID NO: 323173 - RNA, 20 nt, Artificial Sequence
  Synthetic
gggagaaugggaaggagagg

SEQ ID NO: 323174 - RNA, 21 nt, Artificial Sequence
  Synthetic
agggagaaugggaaggagagg

SEQ ID NO: 323175 - RNA, 22 nt, Artificial Sequence
  Synthetic
gagggagaaugggaaggagagg

SEQ ID NO: 323176 - RNA, 23 nt, Artificial Sequence
  Synthetic
agagggagaaugggaaggagagg

SEQ ID NO: 323177 - RNA, 24 nt, Artificial Sequence
  Synthetic
cagagggagaaugggaaggagagg

SEQ ID NO: 323178 - RNA, 18 nt, Artificial Sequence
  Synthetic
gaggagcaggaggagagg

SEQ ID NO: 323179 - RNA, 19 nt, Artificial Sequence
  Synthetic
ggaggagcaggaggagagg

SEQ ID NO: 323180 - RNA, 20 nt, Artificial Sequence
  Synthetic
aggaggagcaggaggagagg

SEQ ID NO: 323181 - RNA, 21 nt, Artificial Sequence
  Synthetic
gaggaggagcaggaggagagg

SEQ ID NO: 323182 - RNA, 22 nt, Artificial Sequence
  Synthetic
ggaggaggagcaggaggagagg

SEQ ID NO: 323183 - RNA, 23 nt, Artificial Sequence
  Synthetic
aggaggaggagcaggaggagagg

SEQ ID NO: 323184 - RNA, 24 nt, Artificial Sequence
  Synthetic
gaggaggaggagcaggaggagagg

SEQ ID NO: 323185 - RNA, 18 nt, Artificial Sequence
  Synthetic
gagggacgggaggagagg

SEQ ID NO: 323186 - RNA, 19 nt, Artificial Sequence
  Synthetic
agagggacgggaggagagg

SEQ ID NO: 323187 - RNA, 20 nt, Artificial Sequence
  Synthetic
gagagggacgggaggagagg

SEQ ID NO: 323188 - RNA, 21 nt, Artificial Sequence
  Synthetic
agagagggacgggaggagagg

SEQ ID NO: 323189 - RNA, 22 nt, Artificial Sequence
  Synthetic
aagagagggacgggaggagagg

SEQ ID NO: 323190 - RNA, 23 nt, Artificial Sequence
  Synthetic
aaagagagggacgggaggagagg

SEQ ID NO: 323191 - RNA, 24 nt, Artificial Sequence
  Synthetic
gaaagagagggacgggaggagagg

SEQ ID NO: 323192 - RNA, 18 nt, Artificial Sequence
  Synthetic
guugagagaagggagagg

SEQ ID NO: 323193 - RNA, 19 nt, Artificial Sequence
  Synthetic
uguugagagaagggagagg

SEQ ID NO: 323194 - RNA, 20 nt, Artificial Sequence
  Synthetic
cuguugagagaagggagagg

SEQ ID NO: 323195 - RNA, 21 nt, Artificial Sequence
  Synthetic
acuguugagagaagggagagg

SEQ ID NO: 323196 - RNA, 22 nt, Artificial Sequence
  Synthetic
cacuguugagagaagggagagg

SEQ ID NO: 323197 - RNA, 23 nt, Artificial Sequence
  Synthetic
ucacuguugagagaagggagagg

SEQ ID NO: 323198 - RNA, 24 nt, Artificial Sequence
  Synthetic
cucacuguugagagaagggagagg

SEQ ID NO: 323199 - RNA, 18 nt, Artificial Sequence
  Synthetic
augguagagagggagagg

SEQ ID NO: 323200 - RNA, 19 nt, Artificial Sequence
  Synthetic
gaugguagagagggagagg

SEQ ID NO: 323201 - RNA, 20 nt, Artificial Sequence
  Synthetic
agaugguagagagggagagg

SEQ ID NO: 323202 - RNA, 21 nt, Artificial Sequence
  Synthetic
aagaugguagagagggagagg

SEQ ID NO: 323203 - RNA, 22 nt, Artificial Sequence
  Synthetic
gaagaugguagagagggagagg

SEQ ID NO: 323204 - RNA, 23 nt, Artificial Sequence
  Synthetic
agaagaugguagagagggagagg

SEQ ID NO: 323205 - RNA, 24 nt, Artificial Sequence
  Synthetic
aagaagaugguagagagggagagg

SEQ ID NO: 323206 - RNA, 18 nt, Artificial Sequence
  Synthetic
agacuuauuugggagagg

SEQ ID NO: 323207 - RNA, 19 nt, Artificial Sequence
  Synthetic
cagacuuauuugggagagg

SEQ ID NO: 323208 - RNA, 20 nt, Artificial Sequence
  Synthetic
acagacuuauuugggagagg

SEQ ID NO: 323209 - RNA, 21 nt, Artificial Sequence
  Synthetic
aacagacuuauuugggagagg

SEQ ID NO: 323210 - RNA, 22 nt, Artificial Sequence
  Synthetic
aaacagacuuauuugggagagg

SEQ ID NO: 323211 - RNA, 23 nt, Artificial Sequence
  Synthetic
gaaacagacuuauuugggagagg

SEQ ID NO: 323212 - RNA, 24 nt, Artificial Sequence
  Synthetic
ugaaacagacuuauuugggagagg

SEQ ID NO: 323213 - RNA, 18 nt, Artificial Sequence
  Synthetic
caacaggugcuggagagg

SEQ ID NO: 323214 - RNA, 19 nt, Artificial Sequence
  Synthetic
acaacaggugcuggagagg

SEQ ID NO: 323215 - RNA, 20 nt, Artificial Sequence
  Synthetic
aacaacaggugcuggagagg

SEQ ID NO: 323216 - RNA, 21 nt, Artificial Sequence
  Synthetic
aaacaacaggugcuggagagg

SEQ ID NO: 323217 - RNA, 22 nt, Artificial Sequence
  Synthetic
gaaacaacaggugcuggagagg

SEQ ID NO: 323218 - RNA, 23 nt, Artificial Sequence
  Synthetic
ggaaacaacaggugcuggagagg

SEQ ID NO: 323219 - RNA, 24 nt, Artificial Sequence
  Synthetic
aggaaacaacaggugcuggagagg

SEQ ID NO: 323220 - RNA, 18 nt, Artificial Sequence
  Synthetic
uaaaaucaaguggagagg

SEQ ID NO: 323221 - RNA, 19 nt, Artificial Sequence
  Synthetic
guaaaaucaaguggagagg

SEQ ID NO: 323222 - RNA, 20 nt, Artificial Sequence
  Synthetic
cguaaaaucaaguggagagg

SEQ ID NO: 323223 - RNA, 21 nt, Artificial Sequence
  Synthetic
acguaaaaucaaguggagagg

SEQ ID NO: 323224 - RNA, 22 nt, Artificial Sequence
  Synthetic
cacguaaaaucaaguggagagg

SEQ ID NO: 323225 - RNA, 23 nt, Artificial Sequence
  Synthetic
gcacguaaaaucaaguggagagg

SEQ ID NO: 323226 - RNA, 24 nt, Artificial Sequence
  Synthetic
ggcacguaaaaucaaguggagagg

SEQ ID NO: 323227 - RNA, 18 nt, Artificial Sequence
  Synthetic
gcacuucuguaugagagg

SEQ ID NO: 323228 - RNA, 19 nt, Artificial Sequence
  Synthetic
ggcacuucuguaugagagg

SEQ ID NO: 323229 - RNA, 20 nt, Artificial Sequence
  Synthetic
uggcacuucuguaugagagg

SEQ ID NO: 323230 - RNA, 21 nt, Artificial Sequence
  Synthetic
cuggcacuucuguaugagagg

SEQ ID NO: 323231 - RNA, 22 nt, Artificial Sequence
  Synthetic
ucuggcacuucuguaugagagg

SEQ ID NO: 323232 - RNA, 23 nt, Artificial Sequence
  Synthetic
cucuggcacuucuguaugagagg

SEQ ID NO: 323233 - RNA, 24 nt, Artificial Sequence
  Synthetic
acucuggcacuucuguaugagagg

SEQ ID NO: 323234 - RNA, 18 nt, Artificial Sequence
  Synthetic
ggguuucugccugagagg

SEQ ID NO: 323235 - RNA, 19 nt, Artificial Sequence
  Synthetic
gggguuucugccugagagg

SEQ ID NO: 323236 - RNA, 20 nt, Artificial Sequence
  Synthetic
ugggguuucugccugagagg

SEQ ID NO: 323237 - RNA, 21 nt, Artificial Sequence
  Synthetic
augggguuucugccugagagg

SEQ ID NO: 323238 - RNA, 22 nt, Artificial Sequence
  Synthetic
aaugggguuucugccugagagg

SEQ ID NO: 323239 - RNA, 23 nt, Artificial Sequence
  Synthetic
uaaugggguuucugccugagagg

SEQ ID NO: 323240 - RNA, 24 nt, Artificial Sequence
  Synthetic
auaaugggguuucugccugagagg

SEQ ID NO: 323241 - RNA, 18 nt, Artificial Sequence
  Synthetic
cauaaugaaucugagagg

SEQ ID NO: 323242 - RNA, 19 nt, Artificial Sequence
  Synthetic
ucauaaugaaucugagagg

SEQ ID NO: 323243 - RNA, 20 nt, Artificial Sequence
  Synthetic
cucauaaugaaucugagagg

SEQ ID NO: 323244 - RNA, 21 nt, Artificial Sequence
  Synthetic
ucucauaaugaaucugagagg

SEQ ID NO: 323245 - RNA, 22 nt, Artificial Sequence
  Synthetic
uucucauaaugaaucugagagg

SEQ ID NO: 323246 - RNA, 23 nt, Artificial Sequence
  Synthetic
auucucauaaugaaucugagagg

SEQ ID NO: 323247 - RNA, 24 nt, Artificial Sequence
  Synthetic
aauucucauaaugaaucugagagg

SEQ ID NO: 323248 - RNA, 18 nt, Artificial Sequence
  Synthetic
uaauuugugucugagagg

SEQ ID NO: 323249 - RNA, 19 nt, Artificial Sequence
  Synthetic
auaauuugugucugagagg

SEQ ID NO: 323250 - RNA, 20 nt, Artificial Sequence
  Synthetic
uauaauuugugucugagagg

SEQ ID NO: 323251 - RNA, 21 nt, Artificial Sequence
  Synthetic
auauaauuugugucugagagg

SEQ ID NO: 323252 - RNA, 22 nt, Artificial Sequence
  Synthetic
aauauaauuugugucugagagg

SEQ ID NO: 323253 - RNA, 23 nt, Artificial Sequence
  Synthetic
uaauauaauuugugucugagagg

SEQ ID NO: 323254 - RNA, 24 nt, Artificial Sequence
  Synthetic
auaauauaauuugugucugagagg

SEQ ID NO: 323255 - RNA, 18 nt, Artificial Sequence
  Synthetic
guuaugcaccuugagagg

SEQ ID NO: 323256 - RNA, 19 nt, Artificial Sequence
  Synthetic
aguuaugcaccuugagagg

SEQ ID NO: 323257 - RNA, 20 nt, Artificial Sequence
  Synthetic
aaguuaugcaccuugagagg

SEQ ID NO: 323258 - RNA, 21 nt, Artificial Sequence
  Synthetic
uaaguuaugcaccuugagagg

SEQ ID NO: 323259 - RNA, 22 nt, Artificial Sequence
  Synthetic
uuaaguuaugcaccuugagagg

SEQ ID NO: 323260 - RNA, 23 nt, Artificial Sequence
  Synthetic
auuaaguuaugcaccuugagagg

SEQ ID NO: 323261 - RNA, 24 nt, Artificial Sequence
  Synthetic
uauuaaguuaugcaccuugagagg

SEQ ID NO: 323262 - RNA, 18 nt, Artificial Sequence
  Synthetic
ucccagcaauuugagagg

SEQ ID NO: 323263 - RNA, 19 nt, Artificial Sequence
  Synthetic
aucccagcaauuugagagg

SEQ ID NO: 323264 - RNA, 20 nt, Artificial Sequence
  Synthetic
aaucccagcaauuugagagg

SEQ ID NO: 323265 - RNA, 21 nt, Artificial Sequence
  Synthetic
uaaucccagcaauuugagagg

SEQ ID NO: 323266 - RNA, 22 nt, Artificial Sequence
  Synthetic
guaaucccagcaauuugagagg

SEQ ID NO: 323267 - RNA, 23 nt, Artificial Sequence
  Synthetic
uguaaucccagcaauuugagagg

SEQ ID NO: 323268 - RNA, 24 nt, Artificial Sequence
  Synthetic
cuguaaucccagcaauuugagagg

SEQ ID NO: 323269 - RNA, 18 nt, Artificial Sequence
  Synthetic
ucccagcacuuugagagg

SEQ ID NO: 323270 - RNA, 19 nt, Artificial Sequence
  Synthetic
aucccagcacuuugagagg

SEQ ID NO: 323271 - RNA, 20 nt, Artificial Sequence
  Synthetic
aaucccagcacuuugagagg

SEQ ID NO: 323272 - RNA, 24 nt, Artificial Sequence
  Synthetic
cuguaaucccagcacuuugagagg

SEQ ID NO: 323273 - RNA, 18 nt, Artificial Sequence
  Synthetic
gcgaauauuuuugagagg

SEQ ID NO: 323274 - RNA, 19 nt, Artificial Sequence
  Synthetic
ugcgaauauuuuugagagg

SEQ ID NO: 323275 - RNA, 20 nt, Artificial Sequence
  Synthetic
uugcgaauauuuuugagagg

SEQ ID NO: 323276 - RNA, 21 nt, Artificial Sequence
  Synthetic
auugcgaauauuuuugagagg

SEQ ID NO: 323277 - RNA, 22 nt, Artificial Sequence
  Synthetic
uauugcgaauauuuuugagagg

SEQ ID NO: 323278 - RNA, 23 nt, Artificial Sequence
  Synthetic
auauugcgaauauuuuugagagg

SEQ ID NO: 323279 - RNA, 24 nt, Artificial Sequence
  Synthetic
aauauugcgaauauuuuugagagg

SEQ ID NO: 323280 - RNA, 18 nt, Artificial Sequence
  Synthetic
aguauuuuauaauagagg

SEQ ID NO: 323281 - RNA, 19 nt, Artificial Sequence
  Synthetic
uaguauuuuauaauagagg

SEQ ID NO: 323282 - RNA, 20 nt, Artificial Sequence
  Synthetic
guaguauuuuauaauagagg

SEQ ID NO: 323283 - RNA, 21 nt, Artificial Sequence
  Synthetic
gguaguauuuuauaauagagg

SEQ ID NO: 323284 - RNA, 22 nt, Artificial Sequence
  Synthetic
ugguaguauuuuauaauagagg

SEQ ID NO: 323285 - RNA, 23 nt, Artificial Sequence
  Synthetic
augguaguauuuuauaauagagg

SEQ ID NO: 323286 - RNA, 24 nt, Artificial Sequence
  Synthetic
aaugguaguauuuuauaauagagg

SEQ ID NO: 323287 - RNA, 18 nt, Artificial Sequence
  Synthetic
accaaagccacauagagg

SEQ ID NO: 323288 - RNA, 19 nt, Artificial Sequence
  Synthetic
aaccaaagccacauagagg

SEQ ID NO: 323289 - RNA, 20 nt, Artificial Sequence
  Synthetic
uaaccaaagccacauagagg

SEQ ID NO: 323290 - RNA, 21 nt, Artificial Sequence
  Synthetic
auaaccaaagccacauagagg

SEQ ID NO: 323291 - RNA, 22 nt, Artificial Sequence
  Synthetic
uauaaccaaagccacauagagg

SEQ ID NO: 323292 - RNA, 23 nt, Artificial Sequence
  Synthetic
auauaaccaaagccacauagagg

SEQ ID NO: 323293 - RNA, 24 nt, Artificial Sequence
  Synthetic
uauauaaccaaagccacauagagg

SEQ ID NO: 323294 - RNA, 18 nt, Artificial Sequence
  Synthetic
aaaaaaaucagauagagg

SEQ ID NO: 323295 - RNA, 19 nt, Artificial Sequence
  Synthetic
gaaaaaaaucagauagagg

SEQ ID NO: 323296 - RNA, 20 nt, Artificial Sequence
  Synthetic
ugaaaaaaaucagauagagg

SEQ ID NO: 323297 - RNA, 21 nt, Artificial Sequence
  Synthetic
gugaaaaaaaucagauagagg

SEQ ID NO: 323298 - RNA, 22 nt, Artificial Sequence
  Synthetic
ugugaaaaaaaucagauagagg

SEQ ID NO: 323299 - RNA, 23 nt, Artificial Sequence
  Synthetic
gugugaaaaaaaucagauagagg

SEQ ID NO: 323300 - RNA, 24 nt, Artificial Sequence
  Synthetic
agugugaaaaaaaucagauagagg

SEQ ID NO: 323301 - RNA, 18 nt, Artificial Sequence
  Synthetic
agcuugucauuauagagg

SEQ ID NO: 323302 - RNA, 19 nt, Artificial Sequence
  Synthetic
aagcuugucauuauagagg

SEQ ID NO: 323303 - RNA, 20 nt, Artificial Sequence
  Synthetic
gaagcuugucauuauagagg

SEQ ID NO: 323304 - RNA, 21 nt, Artificial Sequence
  Synthetic
agaagcuugucauuauagagg

SEQ ID NO: 323305 - RNA, 22 nt, Artificial Sequence
  Synthetic
uagaagcuugucauuauagagg

SEQ ID NO: 323306 - RNA, 23 nt, Artificial Sequence
  Synthetic
guagaagcuugucauuauagagg

SEQ ID NO: 323307 - RNA, 24 nt, Artificial Sequence
  Synthetic
aguagaagcuugucauuauagagg

SEQ ID NO: 323308 - RNA, 18 nt, Artificial Sequence
  Synthetic
cgauuauguaccuagagg

SEQ ID NO: 323309 - RNA, 19 nt, Artificial Sequence
  Synthetic
ccgauuauguaccuagagg

SEQ ID NO: 323310 - RNA, 20 nt, Artificial Sequence
  Synthetic
accgauuauguaccuagagg

SEQ ID NO: 323311 - RNA, 21 nt, Artificial Sequence
  Synthetic
uaccgauuauguaccuagagg

SEQ ID NO: 323312 - RNA, 22 nt, Artificial Sequence
  Synthetic
cuaccgauuauguaccuagagg

SEQ ID NO: 323313 - RNA, 23 nt, Artificial Sequence
  Synthetic
acuaccgauuauguaccuagagg

SEQ ID NO: 323314 - RNA, 24 nt, Artificial Sequence
  Synthetic
cacuaccgauuauguaccuagagg

SEQ ID NO: 323315 - RNA, 18 nt, Artificial Sequence
  Synthetic
uggaagaaaagcuagagg

SEQ ID NO: 323316 - RNA, 19 nt, Artificial Sequence
  Synthetic
guggaagaaaagcuagagg

SEQ ID NO: 323317 - RNA, 20 nt, Artificial Sequence
  Synthetic
aguggaagaaaagcuagagg

SEQ ID NO: 323318 - RNA, 21 nt, Artificial Sequence
  Synthetic
caguggaagaaaagcuagagg

SEQ ID NO: 323319 - RNA, 22 nt, Artificial Sequence
  Synthetic
acaguggaagaaaagcuagagg

SEQ ID NO: 323320 - RNA, 23 nt, Artificial Sequence
  Synthetic
gacaguggaagaaaagcuagagg

SEQ ID NO: 323321 - RNA, 24 nt, Artificial Sequence
  Synthetic
ugacaguggaagaaaagcuagagg

SEQ ID NO: 323322 - RNA, 18 nt, Artificial Sequence
  Synthetic
gagaucgugauguagagg

SEQ ID NO: 323323 - RNA, 19 nt, Artificial Sequence
  Synthetic
ugagaucgugauguagagg

SEQ ID NO: 323324 - RNA, 20 nt, Artificial Sequence
  Synthetic
augagaucgugauguagagg

SEQ ID NO: 323325 - RNA, 21 nt, Artificial Sequence
  Synthetic
aaugagaucgugauguagagg

SEQ ID NO: 323326 - RNA, 22 nt, Artificial Sequence
  Synthetic
caaugagaucgugauguagagg

SEQ ID NO: 323327 - RNA, 23 nt, Artificial Sequence
  Synthetic
ucaaugagaucgugauguagagg

SEQ ID NO: 323328 - RNA, 24 nt, Artificial Sequence
  Synthetic
aucaaugagaucgugauguagagg

SEQ ID NO: 323329 - RNA, 18 nt, Artificial Sequence
  Synthetic
ugaaagaguauguagagg

SEQ ID NO: 323330 - RNA, 19 nt, Artificial Sequence
  Synthetic
cugaaagaguauguagagg

SEQ ID NO: 323331 - RNA, 20 nt, Artificial Sequence
  Synthetic
ucugaaagaguauguagagg

SEQ ID NO: 323332 - RNA, 21 nt, Artificial Sequence
  Synthetic
gucugaaagaguauguagagg

SEQ ID NO: 323333 - RNA, 22 nt, Artificial Sequence
  Synthetic
agucugaaagaguauguagagg

SEQ ID NO: 323334 - RNA, 23 nt, Artificial Sequence
  Synthetic
cagucugaaagaguauguagagg

SEQ ID NO: 323335 - RNA, 24 nt, Artificial Sequence
  Synthetic
ucagucugaaagaguauguagagg

SEQ ID NO: 323336 - RNA, 18 nt, Artificial Sequence
  Synthetic
cauuuugccaauuagagg

SEQ ID NO: 323337 - RNA, 19 nt, Artificial Sequence
  Synthetic
gcauuuugccaauuagagg

SEQ ID NO: 323338 - RNA, 20 nt, Artificial Sequence
  Synthetic
agcauuuugccaauuagagg

SEQ ID NO: 323339 - RNA, 21 nt, Artificial Sequence
  Synthetic
cagcauuuugccaauuagagg

SEQ ID NO: 323340 - RNA, 22 nt, Artificial Sequence
  Synthetic
gcagcauuuugccaauuagagg

SEQ ID NO: 323341 - RNA, 23 nt, Artificial Sequence
  Synthetic
ugcagcauuuugccaauuagagg

SEQ ID NO: 323342 - RNA, 24 nt, Artificial Sequence
  Synthetic
cugcagcauuuugccaauuagagg

SEQ ID NO: 323343 - RNA, 18 nt, Artificial Sequence
  Synthetic
agguacugagauuagagg

SEQ ID NO: 323344 - RNA, 19 nt, Artificial Sequence
  Synthetic
aagguacugagauuagagg

SEQ ID NO: 323345 - RNA, 20 nt, Artificial Sequence
  Synthetic
uaagguacugagauuagagg

SEQ ID NO: 323346 - RNA, 21 nt, Artificial Sequence
  Synthetic
cuaagguacugagauuagagg

SEQ ID NO: 323347 - RNA, 22 nt, Artificial Sequence
  Synthetic
gcuaagguacugagauuagagg

SEQ ID NO: 323348 - RNA, 23 nt, Artificial Sequence
  Synthetic
ggcuaagguacugagauuagagg

SEQ ID NO: 323349 - RNA, 24 nt, Artificial Sequence
  Synthetic
uggcuaagguacugagauuagagg

SEQ ID NO: 323350 - RNA, 18 nt, Artificial Sequence
  Synthetic
cccuagucauuuuagagg

SEQ ID NO: 323351 - RNA, 19 nt, Artificial Sequence
  Synthetic
acccuagucauuuuagagg

SEQ ID NO: 323352 - RNA, 20 nt, Artificial Sequence
  Synthetic
aacccuagucauuuuagagg

SEQ ID NO: 323353 - RNA, 21 nt, Artificial Sequence
  Synthetic
gaacccuagucauuuuagagg

SEQ ID NO: 323354 - RNA, 22 nt, Artificial Sequence
  Synthetic
ggaacccuagucauuuuagagg

SEQ ID NO: 323355 - RNA, 23 nt, Artificial Sequence
  Synthetic
uggaacccuagucauuuuagagg

SEQ ID NO: 323356 - RNA, 24 nt, Artificial Sequence
  Synthetic
auggaacccuagucauuuuagagg

SEQ ID NO: 323357 - RNA, 18 nt, Artificial Sequence
  Synthetic
ggcaaggcuuuuuagagg

SEQ ID NO: 323358 - RNA, 19 nt, Artificial Sequence
  Synthetic
aggcaaggcuuuuuagagg

SEQ ID NO: 323359 - RNA, 20 nt, Artificial Sequence
  Synthetic
caggcaaggcuuuuuagagg

SEQ ID NO: 323360 - RNA, 21 nt, Artificial Sequence
  Synthetic
ccaggcaaggcuuuuuagagg

SEQ ID NO: 323361 - RNA, 22 nt, Artificial Sequence
  Synthetic
accaggcaaggcuuuuuagagg

SEQ ID NO: 323362 - RNA, 23 nt, Artificial Sequence
  Synthetic
gaccaggcaaggcuuuuuagagg

SEQ ID NO: 323363 - RNA, 24 nt, Artificial Sequence
  Synthetic
ggaccaggcaaggcuuuuuagagg

SEQ ID NO: 323364 - RNA, 18 nt, Artificial Sequence
  Synthetic
cuucccugaaccacgagg

SEQ ID NO: 323365 - RNA, 19 nt, Artificial Sequence
  Synthetic
gcuucccugaaccacgagg

SEQ ID NO: 323366 - RNA, 20 nt, Artificial Sequence
  Synthetic
ggcuucccugaaccacgagg

SEQ ID NO: 323367 - RNA, 21 nt, Artificial Sequence
  Synthetic
gggcuucccugaaccacgagg

SEQ ID NO: 323368 - RNA, 22 nt, Artificial Sequence
  Synthetic
agggcuucccugaaccacgagg

SEQ ID NO: 323369 - RNA, 23 nt, Artificial Sequence
  Synthetic
gagggcuucccugaaccacgagg

SEQ ID NO: 323370 - RNA, 24 nt, Artificial Sequence
  Synthetic
ugagggcuucccugaaccacgagg

SEQ ID NO: 323371 - RNA, 18 nt, Artificial Sequence
  Synthetic
ucgcuugaacccacgagg

SEQ ID NO: 323372 - RNA, 19 nt, Artificial Sequence
  Synthetic
aucgcuugaacccacgagg

SEQ ID NO: 323373 - RNA, 20 nt, Artificial Sequence
  Synthetic
aaucgcuugaacccacgagg

SEQ ID NO: 323374 - RNA, 21 nt, Artificial Sequence
  Synthetic
gaaucgcuugaacccacgagg

SEQ ID NO: 323375 - RNA, 22 nt, Artificial Sequence
  Synthetic
agaaucgcuugaacccacgagg

SEQ ID NO: 323376 - RNA, 23 nt, Artificial Sequence
  Synthetic
gagaaucgcuugaacccacgagg

SEQ ID NO: 323377 - RNA, 24 nt, Artificial Sequence
  Synthetic
ggagaaucgcuugaacccacgagg

SEQ ID NO: 323378 - RNA, 18 nt, Artificial Sequence
  Synthetic
ggcgggcagaucacgagg

SEQ ID NO: 323379 - RNA, 19 nt, Artificial Sequence
  Synthetic
aggcgggcagaucacgagg

SEQ ID NO: 323380 - RNA, 20 nt, Artificial Sequence
  Synthetic
aaggcgggcagaucacgagg

SEQ ID NO: 323381 - RNA, 21 nt, Artificial Sequence
  Synthetic
caaggcgggcagaucacgagg

SEQ ID NO: 323382 - RNA, 22 nt, Artificial Sequence
  Synthetic
ccaaggcgggcagaucacgagg

SEQ ID NO: 323383 - RNA, 23 nt, Artificial Sequence
  Synthetic
gccaaggcgggcagaucacgagg

SEQ ID NO: 323384 - RNA, 24 nt, Artificial Sequence
  Synthetic
ggccaaggcgggcagaucacgagg

SEQ ID NO: 323385 - RNA, 18 nt, Artificial Sequence
  Synthetic
cuuucaguguacccgagg

SEQ ID NO: 323386 - RNA, 19 nt, Artificial Sequence
  Synthetic
acuuucaguguacccgagg

SEQ ID NO: 323387 - RNA, 20 nt, Artificial Sequence
  Synthetic
aacuuucaguguacccgagg

SEQ ID NO: 323388 - RNA, 21 nt, Artificial Sequence
  Synthetic
uaacuuucaguguacccgagg

SEQ ID NO: 323389 - RNA, 22 nt, Artificial Sequence
  Synthetic
auaacuuucaguguacccgagg

SEQ ID NO: 323390 - RNA, 23 nt, Artificial Sequence
  Synthetic
cauaacuuucaguguacccgagg

SEQ ID NO: 323391 - RNA, 24 nt, Artificial Sequence
  Synthetic
acauaacuuucaguguacccgagg

SEQ ID NO: 323392 - RNA, 18 nt, Artificial Sequence
  Synthetic
auacucaggaggccgagg

SEQ ID NO: 323393 - RNA, 19 nt, Artificial Sequence
  Synthetic
gauacucaggaggccgagg

SEQ ID NO: 323394 - RNA, 20 nt, Artificial Sequence
  Synthetic
agauacucaggaggccgagg

SEQ ID NO: 323395 - RNA, 21 nt, Artificial Sequence
  Synthetic
cagauacucaggaggccgagg

SEQ ID NO: 323396 - RNA, 22 nt, Artificial Sequence
  Synthetic
ccagauacucaggaggccgagg

SEQ ID NO: 323397 - RNA, 23 nt, Artificial Sequence
  Synthetic
cccagauacucaggaggccgagg

SEQ ID NO: 323398 - RNA, 24 nt, Artificial Sequence
  Synthetic
ucccagauacucaggaggccgagg

SEQ ID NO: 323399 - RNA, 18 nt, Artificial Sequence
  Synthetic
ucgcuugaacccgcgagg

SEQ ID NO: 323400 - RNA, 19 nt, Artificial Sequence
  Synthetic
aucgcuugaacccgcgagg

SEQ ID NO: 323401 - RNA, 20 nt, Artificial Sequence
  Synthetic
aaucgcuugaacccgcgagg

SEQ ID NO: 323402 - RNA, 21 nt, Artificial Sequence
  Synthetic
gaaucgcuugaacccgcgagg

SEQ ID NO: 323403 - RNA, 22 nt, Artificial Sequence
  Synthetic
ggaaucgcuugaacccgcgagg

SEQ ID NO: 323404 - RNA, 23 nt, Artificial Sequence
  Synthetic
gggaaucgcuugaacccgcgagg

SEQ ID NO: 323405 - RNA, 24 nt, Artificial Sequence
  Synthetic
ggggaaucgcuugaacccgcgagg

SEQ ID NO: 323406 - RNA, 18 nt, Artificial Sequence
  Synthetic
ccgaggccugucgcgagg

SEQ ID NO: 323407 - RNA, 19 nt, Artificial Sequence
  Synthetic
accgaggccugucgcgagg

SEQ ID NO: 323408 - RNA, 20 nt, Artificial Sequence
  Synthetic
caccgaggccugucgcgagg

SEQ ID NO: 323409 - RNA, 21 nt, Artificial Sequence
  Synthetic
acaccgaggccugucgcgagg

SEQ ID NO: 323410 - RNA, 22 nt, Artificial Sequence
  Synthetic
cacaccgaggccugucgcgagg

SEQ ID NO: 323411 - RNA, 23 nt, Artificial Sequence
  Synthetic
acacaccgaggccugucgcgagg

SEQ ID NO: 323412 - RNA, 24 nt, Artificial Sequence
  Synthetic
cacacaccgaggccugucgcgagg

SEQ ID NO: 323413 - RNA, 18 nt, Artificial Sequence
  Synthetic
ucccagcacuuugcgagg

SEQ ID NO: 323414 - RNA, 19 nt, Artificial Sequence
  Synthetic
aucccagcacuuugcgagg

SEQ ID NO: 323415 - RNA, 20 nt, Artificial Sequence
  Synthetic
aaucccagcacuuugcgagg

SEQ ID NO: 323416 - RNA, 21 nt, Artificial Sequence
  Synthetic
uaaucccagcacuuugcgagg

SEQ ID NO: 323417 - RNA, 22 nt, Artificial Sequence
  Synthetic
auaaucccagcacuuugcgagg

SEQ ID NO: 323418 - RNA, 23 nt, Artificial Sequence
  Synthetic
uauaaucccagcacuuugcgagg

SEQ ID NO: 323419 - RNA, 24 nt, Artificial Sequence
  Synthetic
cuauaaucccagcacuuugcgagg

SEQ ID NO: 323420 - RNA, 22 nt, Artificial Sequence
  Synthetic
guaaucccagcacuuugcgagg

SEQ ID NO: 323421 - RNA, 23 nt, Artificial Sequence
  Synthetic
uguaaucccagcacuuugcgagg

SEQ ID NO: 323422 - RNA, 24 nt, Artificial Sequence
  Synthetic
uuguaaucccagcacuuugcgagg

SEQ ID NO: 323423 - RNA, 18 nt, Artificial Sequence
  Synthetic
accugccugagaucgagg

SEQ ID NO: 323424 - RNA, 19 nt, Artificial Sequence
  Synthetic
aaccugccugagaucgagg

SEQ ID NO: 323425 - RNA, 20 nt, Artificial Sequence
  Synthetic
uaaccugccugagaucgagg

SEQ ID NO: 323426 - RNA, 21 nt, Artificial Sequence
  Synthetic
auaaccugccugagaucgagg

SEQ ID NO: 323427 - RNA, 22 nt, Artificial Sequence
  Synthetic
aauaaccugccugagaucgagg

SEQ ID NO: 323428 - RNA, 23 nt, Artificial Sequence
  Synthetic
uaauaaccugccugagaucgagg

SEQ ID NO: 323429 - RNA, 24 nt, Artificial Sequence
  Synthetic
auaauaaccugccugagaucgagg

SEQ ID NO: 323430 - RNA, 18 nt, Artificial Sequence
  Synthetic
aggcacuccgaaaggagg

SEQ ID NO: 323431 - RNA, 19 nt, Artificial Sequence
  Synthetic
uaggcacuccgaaaggagg

SEQ ID NO: 323432 - RNA, 20 nt, Artificial Sequence
  Synthetic
uuaggcacuccgaaaggagg

SEQ ID NO: 323433 - RNA, 21 nt, Artificial Sequence
  Synthetic
auuaggcacuccgaaaggagg

SEQ ID NO: 323434 - RNA, 22 nt, Artificial Sequence
  Synthetic
aauuaggcacuccgaaaggagg

SEQ ID NO: 323435 - RNA, 23 nt, Artificial Sequence
  Synthetic
gaauuaggcacuccgaaaggagg

SEQ ID NO: 323436 - RNA, 24 nt, Artificial Sequence
  Synthetic
cgaauuaggcacuccgaaaggagg

SEQ ID NO: 323437 - RNA, 18 nt, Artificial Sequence
  Synthetic
caaaucacugaaaggagg

SEQ ID NO: 323438 - RNA, 19 nt, Artificial Sequence
  Synthetic
ucaaaucacugaaaggagg

SEQ ID NO: 323439 - RNA, 20 nt, Artificial Sequence
  Synthetic
uucaaaucacugaaaggagg

SEQ ID NO: 323440 - RNA, 21 nt, Artificial Sequence
  Synthetic
uuucaaaucacugaaaggagg

SEQ ID NO: 323441 - RNA, 22 nt, Artificial Sequence
  Synthetic
guuucaaaucacugaaaggagg

SEQ ID NO: 323442 - RNA, 23 nt, Artificial Sequence
  Synthetic
aguuucaaaucacugaaaggagg

SEQ ID NO: 323443 - RNA, 24 nt, Artificial Sequence
  Synthetic
gaguuucaaaucacugaaaggagg

SEQ ID NO: 323444 - RNA, 18 nt, Artificial Sequence
  Synthetic
agacuucccacaaggagg

SEQ ID NO: 323445 - RNA, 19 nt, Artificial Sequence
  Synthetic
gagacuucccacaaggagg

SEQ ID NO: 323446 - RNA, 20 nt, Artificial Sequence
  Synthetic
ugagacuucccacaaggagg

SEQ ID NO: 323447 - RNA, 21 nt, Artificial Sequence
  Synthetic
cugagacuucccacaaggagg

SEQ ID NO: 323448 - RNA, 22 nt, Artificial Sequence
  Synthetic
ccugagacuucccacaaggagg

SEQ ID NO: 323449 - RNA, 23 nt, Artificial Sequence
  Synthetic
uccugagacuucccacaaggagg

SEQ ID NO: 323450 - RNA, 24 nt, Artificial Sequence
  Synthetic
uuccugagacuucccacaaggagg

SEQ ID NO: 323451 - RNA, 18 nt, Artificial Sequence
  Synthetic
uuuaaggcaagaaggagg

SEQ ID NO: 323452 - RNA, 19 nt, Artificial Sequence
  Synthetic
uuuuaaggcaagaaggagg

SEQ ID NO: 323453 - RNA, 20 nt, Artificial Sequence
  Synthetic
guuuuaaggcaagaaggagg

SEQ ID NO: 323454 - RNA, 21 nt, Artificial Sequence
  Synthetic
uguuuuaaggcaagaaggagg

SEQ ID NO: 323455 - RNA, 22 nt, Artificial Sequence
  Synthetic
uuguuuuaaggcaagaaggagg

SEQ ID NO: 323456 - RNA, 23 nt, Artificial Sequence
  Synthetic
guuguuuuaaggcaagaaggagg

SEQ ID NO: 323457 - RNA, 24 nt, Artificial Sequence
  Synthetic
gguuguuuuaaggcaagaaggagg

SEQ ID NO: 323458 - RNA, 18 nt, Artificial Sequence
  Synthetic
gaaagggaaggaaggagg

SEQ ID NO: 323459 - RNA, 19 nt, Artificial Sequence
  Synthetic
agaaagggaaggaaggagg

SEQ ID NO: 323460 - RNA, 20 nt, Artificial Sequence
  Synthetic
aagaaagggaaggaaggagg

SEQ ID NO: 323461 - RNA, 21 nt, Artificial Sequence
  Synthetic
aaagaaagggaaggaaggagg

SEQ ID NO: 323462 - RNA, 22 nt, Artificial Sequence
  Synthetic
gaaagaaagggaaggaaggagg

SEQ ID NO: 323463 - RNA, 23 nt, Artificial Sequence
  Synthetic
ggaaagaaagggaaggaaggagg

SEQ ID NO: 323464 - RNA, 24 nt, Artificial Sequence
  Synthetic
aggaaagaaagggaaggaaggagg

SEQ ID NO: 323465 - RNA, 18 nt, Artificial Sequence
  Synthetic
ggggagaagggaaggagg

SEQ ID NO: 323466 - RNA, 19 nt, Artificial Sequence
  Synthetic
aggggagaagggaaggagg

SEQ ID NO: 323467 - RNA, 20 nt, Artificial Sequence
  Synthetic
caggggagaagggaaggagg

SEQ ID NO: 323468 - RNA, 21 nt, Artificial Sequence
  Synthetic
ucaggggagaagggaaggagg

SEQ ID NO: 323469 - RNA, 22 nt, Artificial Sequence
  Synthetic
aucaggggagaagggaaggagg

SEQ ID NO: 323470 - RNA, 23 nt, Artificial Sequence
  Synthetic
caucaggggagaagggaaggagg

SEQ ID NO: 323471 - RNA, 24 nt, Artificial Sequence
  Synthetic
acaucaggggagaagggaaggagg

SEQ ID NO: 323472 - RNA, 18 nt, Artificial Sequence
  Synthetic
gagagugagggaaggagg

SEQ ID NO: 323473 - RNA, 19 nt, Artificial Sequence
  Synthetic
agagagugagggaaggagg

SEQ ID NO: 323474 - RNA, 20 nt, Artificial Sequence
  Synthetic
aagagagugagggaaggagg

SEQ ID NO: 323475 - RNA, 21 nt, Artificial Sequence
  Synthetic
aaagagagugagggaaggagg

SEQ ID NO: 323476 - RNA, 22 nt, Artificial Sequence
  Synthetic
gaaagagagugagggaaggagg

SEQ ID NO: 323477 - RNA, 23 nt, Artificial Sequence
  Synthetic
agaaagagagugagggaaggagg

SEQ ID NO: 323478 - RNA, 24 nt, Artificial Sequence
  Synthetic
aagaaagagagugagggaaggagg

SEQ ID NO: 323479 - RNA, 18 nt, Artificial Sequence
  Synthetic
aguaaagacugaaggagg

SEQ ID NO: 323480 - RNA, 19 nt, Artificial Sequence
  Synthetic
caguaaagacugaaggagg

SEQ ID NO: 323481 - RNA, 20 nt, Artificial Sequence
  Synthetic
ccaguaaagacugaaggagg

SEQ ID NO: 323482 - RNA, 21 nt, Artificial Sequence
  Synthetic
uccaguaaagacugaaggagg

SEQ ID NO: 323483 - RNA, 22 nt, Artificial Sequence
  Synthetic
auccaguaaagacugaaggagg

SEQ ID NO: 323484 - RNA, 23 nt, Artificial Sequence
  Synthetic
cauccaguaaagacugaaggagg

SEQ ID NO: 323485 - RNA, 24 nt, Artificial Sequence
  Synthetic
acauccaguaaagacugaaggagg

SEQ ID NO: 323486 - RNA, 18 nt, Artificial Sequence
  Synthetic
cauggaaugauaaggagg

SEQ ID NO: 323487 - RNA, 19 nt, Artificial Sequence
  Synthetic
acauggaaugauaaggagg

SEQ ID NO: 323488 - RNA, 20 nt, Artificial Sequence
  Synthetic
gacauggaaugauaaggagg

SEQ ID NO: 323489 - RNA, 21 nt, Artificial Sequence
  Synthetic
ugacauggaaugauaaggagg

SEQ ID NO: 323490 - RNA, 22 nt, Artificial Sequence
  Synthetic
uugacauggaaugauaaggagg

SEQ ID NO: 323491 - RNA, 23 nt, Artificial Sequence
  Synthetic
guugacauggaaugauaaggagg

SEQ ID NO: 323492 - RNA, 24 nt, Artificial Sequence
  Synthetic
uguugacauggaaugauaaggagg

SEQ ID NO: 323493 - RNA, 18 nt, Artificial Sequence
  Synthetic
accuuucaaaacaggagg

SEQ ID NO: 323494 - RNA, 19 nt, Artificial Sequence
  Synthetic
caccuuucaaaacaggagg

SEQ ID NO: 323495 - RNA, 20 nt, Artificial Sequence
  Synthetic
gcaccuuucaaaacaggagg

SEQ ID NO: 323496 - RNA, 21 nt, Artificial Sequence
  Synthetic
ugcaccuuucaaaacaggagg

SEQ ID NO: 323497 - RNA, 22 nt, Artificial Sequence
  Synthetic
cugcaccuuucaaaacaggagg

SEQ ID NO: 323498 - RNA, 23 nt, Artificial Sequence
  Synthetic
acugcaccuuucaaaacaggagg

SEQ ID NO: 323499 - RNA, 24 nt, Artificial Sequence
  Synthetic
gacugcaccuuucaaaacaggagg

SEQ ID NO: 323500 - RNA, 18 nt, Artificial Sequence
  Synthetic
uuggccuuaaacaggagg

SEQ ID NO: 323501 - RNA, 19 nt, Artificial Sequence
  Synthetic
auuggccuuaaacaggagg

SEQ ID NO: 323502 - RNA, 20 nt, Artificial Sequence
  Synthetic
uauuggccuuaaacaggagg

SEQ ID NO: 323503 - RNA, 21 nt, Artificial Sequence
  Synthetic
uuauuggccuuaaacaggagg

SEQ ID NO: 323504 - RNA, 22 nt, Artificial Sequence
  Synthetic
guuauuggccuuaaacaggagg

SEQ ID NO: 323505 - RNA, 23 nt, Artificial Sequence
  Synthetic
aguuauuggccuuaaacaggagg

SEQ ID NO: 323506 - RNA, 24 nt, Artificial Sequence
  Synthetic
gaguuauuggccuuaaacaggagg

SEQ ID NO: 323507 - RNA, 18 nt, Artificial Sequence
  Synthetic
cuguuugagcacaggagg

SEQ ID NO: 323508 - RNA, 19 nt, Artificial Sequence
  Synthetic
acuguuugagcacaggagg

SEQ ID NO: 323509 - RNA, 20 nt, Artificial Sequence
  Synthetic
gacuguuugagcacaggagg

SEQ ID NO: 323510 - RNA, 21 nt, Artificial Sequence
  Synthetic
ggacuguuugagcacaggagg

SEQ ID NO: 323511 - RNA, 22 nt, Artificial Sequence
  Synthetic
aggacuguuugagcacaggagg

SEQ ID NO: 323512 - RNA, 23 nt, Artificial Sequence
  Synthetic
gaggacuguuugagcacaggagg

SEQ ID NO: 323513 - RNA, 24 nt, Artificial Sequence
  Synthetic
ggaggacuguuugagcacaggagg

SEQ ID NO: 323514 - RNA, 18 nt, Artificial Sequence
  Synthetic
auggugggagacaggagg

SEQ ID NO: 323515 - RNA, 19 nt, Artificial Sequence
  Synthetic
gauggugggagacaggagg

SEQ ID NO: 323516 - RNA, 20 nt, Artificial Sequence
  Synthetic
ggauggugggagacaggagg

SEQ ID NO: 323517 - RNA, 21 nt, Artificial Sequence
  Synthetic
gggauggugggagacaggagg

SEQ ID NO: 323518 - RNA, 22 nt, Artificial Sequence
  Synthetic
agggauggugggagacaggagg

SEQ ID NO: 323519 - RNA, 23 nt, Artificial Sequence
  Synthetic
gagggauggugggagacaggagg

SEQ ID NO: 323520 - RNA, 24 nt, Artificial Sequence
  Synthetic
agagggauggugggagacaggagg

SEQ ID NO: 323521 - RNA, 18 nt, Artificial Sequence
  Synthetic
ggagacagcgacaggagg

SEQ ID NO: 323522 - RNA, 19 nt, Artificial Sequence
  Synthetic
aggagacagcgacaggagg

SEQ ID NO: 323523 - RNA, 20 nt, Artificial Sequence
  Synthetic
aaggagacagcgacaggagg

SEQ ID NO: 323524 - RNA, 21 nt, Artificial Sequence
  Synthetic
gaaggagacagcgacaggagg

SEQ ID NO: 323525 - RNA, 22 nt, Artificial Sequence
  Synthetic
cgaaggagacagcgacaggagg

SEQ ID NO: 323526 - RNA, 23 nt, Artificial Sequence
  Synthetic
gcgaaggagacagcgacaggagg

SEQ ID NO: 323527 - RNA, 24 nt, Artificial Sequence
  Synthetic
agcgaaggagacagcgacaggagg

SEQ ID NO: 323528 - RNA, 18 nt, Artificial Sequence
  Synthetic
gaacuaggaaccaggagg

SEQ ID NO: 323529 - RNA, 19 nt, Artificial Sequence
  Synthetic
ggaacuaggaaccaggagg

SEQ ID NO: 323530 - RNA, 20 nt, Artificial Sequence
  Synthetic
aggaacuaggaaccaggagg

SEQ ID NO: 323531 - RNA, 21 nt, Artificial Sequence
  Synthetic
uaggaacuaggaaccaggagg

SEQ ID NO: 323532 - RNA, 22 nt, Artificial Sequence
  Synthetic
auaggaacuaggaaccaggagg

SEQ ID NO: 323533 - RNA, 23 nt, Artificial Sequence
  Synthetic
aauaggaacuaggaaccaggagg

SEQ ID NO: 323534 - RNA, 24 nt, Artificial Sequence
  Synthetic
aaauaggaacuaggaaccaggagg

SEQ ID NO: 323535 - RNA, 18 nt, Artificial Sequence
  Synthetic
ucacuggaacccaggagg

SEQ ID NO: 323536 - RNA, 19 nt, Artificial Sequence
  Synthetic
aucacuggaacccaggagg

SEQ ID NO: 323537 - RNA, 20 nt, Artificial Sequence
  Synthetic
aaucacuggaacccaggagg

SEQ ID NO: 323538 - RNA, 21 nt, Artificial Sequence
  Synthetic
gaaucacuggaacccaggagg

SEQ ID NO: 323539 - RNA, 22 nt, Artificial Sequence
  Synthetic
agaaucacuggaacccaggagg

SEQ ID NO: 323540 - RNA, 23 nt, Artificial Sequence
  Synthetic
gagaaucacuggaacccaggagg

SEQ ID NO: 323541 - RNA, 24 nt, Artificial Sequence
  Synthetic
ggagaaucacuggaacccaggagg

SEQ ID NO: 323542 - RNA, 18 nt, Artificial Sequence
  Synthetic
ucccuugaacccaggagg

SEQ ID NO: 323543 - RNA, 19 nt, Artificial Sequence
  Synthetic
aucccuugaacccaggagg

SEQ ID NO: 323544 - RNA, 20 nt, Artificial Sequence
  Synthetic
aaucccuugaacccaggagg

SEQ ID NO: 323545 - RNA, 24 nt, Artificial Sequence
  Synthetic
ggagaaucccuugaacccaggagg

SEQ ID NO: 323546 - RNA, 21 nt, Artificial Sequence
  Synthetic
gaauugcuugaacccaggagg

SEQ ID NO: 323547 - RNA, 22 nt, Artificial Sequence
  Synthetic
agaauugcuugaacccaggagg

SEQ ID NO: 323548 - RNA, 23 nt, Artificial Sequence
  Synthetic
gagaauugcuugaacccaggagg

SEQ ID NO: 323549 - RNA, 24 nt, Artificial Sequence
  Synthetic
ggagaauugcuugaacccaggagg

SEQ ID NO: 323550 - RNA, 24 nt, Artificial Sequence
  Synthetic
ugagaauugcuugaacccaggagg

SEQ ID NO: 323551 - RNA, 18 nt, Artificial Sequence
  Synthetic
ucauuugaacccaggagg

SEQ ID NO: 323552 - RNA, 19 nt, Artificial Sequence
  Synthetic
aucauuugaacccaggagg

SEQ ID NO: 323553 - RNA, 20 nt, Artificial Sequence
  Synthetic
aaucauuugaacccaggagg

SEQ ID NO: 323554 - RNA, 21 nt, Artificial Sequence
  Synthetic
gaaucauuugaacccaggagg

SEQ ID NO: 323555 - RNA, 22 nt, Artificial Sequence
  Synthetic
agaaucauuugaacccaggagg

SEQ ID NO: 323556 - RNA, 23 nt, Artificial Sequence
  Synthetic
gagaaucauuugaacccaggagg

SEQ ID NO: 323557 - RNA, 24 nt, Artificial Sequence
  Synthetic
ggagaaucauuugaacccaggagg

SEQ ID NO: 323558 - RNA, 18 nt, Artificial Sequence
  Synthetic
ucguuugaacccaggagg

SEQ ID NO: 323559 - RNA, 19 nt, Artificial Sequence
  Synthetic
aucguuugaacccaggagg

SEQ ID NO: 323560 - RNA, 20 nt, Artificial Sequence
  Synthetic
aaucguuugaacccaggagg

SEQ ID NO: 323561 - RNA, 21 nt, Artificial Sequence
  Synthetic
gaaucguuugaacccaggagg

SEQ ID NO: 323562 - RNA, 22 nt, Artificial Sequence
  Synthetic
agaaucguuugaacccaggagg

SEQ ID NO: 323563 - RNA, 23 nt, Artificial Sequence
  Synthetic
gagaaucguuugaacccaggagg

SEQ ID NO: 323564 - RNA, 24 nt, Artificial Sequence
  Synthetic
ggagaaucguuugaacccaggagg

SEQ ID NO: 323565 - RNA, 18 nt, Artificial Sequence
  Synthetic
ucccagcuacccaggagg

SEQ ID NO: 323566 - RNA, 19 nt, Artificial Sequence
  Synthetic
gucccagcuacccaggagg

SEQ ID NO: 323567 - RNA, 20 nt, Artificial Sequence
  Synthetic
agucccagcuacccaggagg

SEQ ID NO: 323568 - RNA, 21 nt, Artificial Sequence
  Synthetic
uagucccagcuacccaggagg

SEQ ID NO: 323569 - RNA, 22 nt, Artificial Sequence
  Synthetic
guagucccagcuacccaggagg

SEQ ID NO: 323570 - RNA, 23 nt, Artificial Sequence
  Synthetic
uguagucccagcuacccaggagg

SEQ ID NO: 323571 - RNA, 24 nt, Artificial Sequence
  Synthetic
cuguagucccagcuacccaggagg

SEQ ID NO: 323572 - RNA, 18 nt, Artificial Sequence
  Synthetic
agagauguaggcaggagg

SEQ ID NO: 323573 - RNA, 19 nt, Artificial Sequence
  Synthetic
gagagauguaggcaggagg

SEQ ID NO: 323574 - RNA, 20 nt, Artificial Sequence
  Synthetic
agagagauguaggcaggagg

SEQ ID NO: 323575 - RNA, 21 nt, Artificial Sequence
  Synthetic
gagagagauguaggcaggagg

SEQ ID NO: 323576 - RNA, 22 nt, Artificial Sequence
  Synthetic
agagagagauguaggcaggagg

SEQ ID NO: 323577 - RNA, 23 nt, Artificial Sequence
  Synthetic
gagagagagauguaggcaggagg

SEQ ID NO: 323578 - RNA, 24 nt, Artificial Sequence
  Synthetic
ggagagagagauguaggcaggagg

SEQ ID NO: 323579 - RNA, 18 nt, Artificial Sequence
  Synthetic
acugauagcggcaggagg

SEQ ID NO: 323580 - RNA, 19 nt, Artificial Sequence
  Synthetic
uacugauagcggcaggagg

SEQ ID NO: 323581 - RNA, 20 nt, Artificial Sequence
  Synthetic
guacugauagcggcaggagg

SEQ ID NO: 323582 - RNA, 21 nt, Artificial Sequence
  Synthetic
cguacugauagcggcaggagg

SEQ ID NO: 323583 - RNA, 22 nt, Artificial Sequence
  Synthetic
ucguacugauagcggcaggagg

SEQ ID NO: 323584 - RNA, 23 nt, Artificial Sequence
  Synthetic
cucguacugauagcggcaggagg

SEQ ID NO: 323585 - RNA, 24 nt, Artificial Sequence
  Synthetic
ucucguacugauagcggcaggagg

SEQ ID NO: 323586 - RNA, 18 nt, Artificial Sequence
  Synthetic
ucccaacuacucaggagg

SEQ ID NO: 323587 - RNA, 19 nt, Artificial Sequence
  Synthetic
aucccaacuacucaggagg

SEQ ID NO: 323588 - RNA, 20 nt, Artificial Sequence
  Synthetic
aaucccaacuacucaggagg

SEQ ID NO: 323589 - RNA, 21 nt, Artificial Sequence
  Synthetic
uaaucccaacuacucaggagg

SEQ ID NO: 323590 - RNA, 22 nt, Artificial Sequence
  Synthetic
auaaucccaacuacucaggagg

SEQ ID NO: 323591 - RNA, 23 nt, Artificial Sequence
  Synthetic
uauaaucccaacuacucaggagg

SEQ ID NO: 323592 - RNA, 24 nt, Artificial Sequence
  Synthetic
cuauaaucccaacuacucaggagg

SEQ ID NO: 323593 - RNA, 18 nt, Artificial Sequence
  Synthetic
gucccacuacucaggagg

SEQ ID NO: 323594 - RNA, 19 nt, Artificial Sequence
  Synthetic
agucccacuacucaggagg

SEQ ID NO: 323595 - RNA, 20 nt, Artificial Sequence
  Synthetic
uagucccacuacucaggagg

SEQ ID NO: 323596 - RNA, 21 nt, Artificial Sequence
  Synthetic
guagucccacuacucaggagg

SEQ ID NO: 323597 - RNA, 22 nt, Artificial Sequence
  Synthetic
uguagucccacuacucaggagg

SEQ ID NO: 323598 - RNA, 23 nt, Artificial Sequence
  Synthetic
cuguagucccacuacucaggagg

SEQ ID NO: 323599 - RNA, 24 nt, Artificial Sequence
  Synthetic
ccuguagucccacuacucaggagg

SEQ ID NO: 323600 - RNA, 18 nt, Artificial Sequence
  Synthetic
ccccagcuacucaggagg

SEQ ID NO: 323601 - RNA, 19 nt, Artificial Sequence
  Synthetic
gccccagcuacucaggagg

SEQ ID NO: 323602 - RNA, 20 nt, Artificial Sequence
  Synthetic
agccccagcuacucaggagg

SEQ ID NO: 323603 - RNA, 21 nt, Artificial Sequence
  Synthetic
uagccccagcuacucaggagg

SEQ ID NO: 323604 - RNA, 22 nt, Artificial Sequence
  Synthetic
guagccccagcuacucaggagg

SEQ ID NO: 323605 - RNA, 23 nt, Artificial Sequence
  Synthetic
uguagccccagcuacucaggagg

SEQ ID NO: 323606 - RNA, 24 nt, Artificial Sequence
  Synthetic
cuguagccccagcuacucaggagg

SEQ ID NO: 323607 - RNA, 18 nt, Artificial Sequence
  Synthetic
ucccagcuacucaggagg

SEQ ID NO: 323608 - RNA, 19 nt, Artificial Sequence
  Synthetic
aucccagcuacucaggagg

SEQ ID NO: 323609 - RNA, 20 nt, Artificial Sequence
  Synthetic
aaucccagcuacucaggagg

SEQ ID NO: 323610 - RNA, 19 nt, Artificial Sequence
  Synthetic
gucccagcuacucaggagg

SEQ ID NO: 323611 - RNA, 20 nt, Artificial Sequence
  Synthetic
agucccagcuacucaggagg

SEQ ID NO: 323612 - RNA, 21 nt, Artificial Sequence
  Synthetic
uagucccagcuacucaggagg

SEQ ID NO: 323613 - RNA, 22 nt, Artificial Sequence
  Synthetic
auagucccagcuacucaggagg

SEQ ID NO: 323614 - RNA, 23 nt, Artificial Sequence
  Synthetic
gauagucccagcuacucaggagg

SEQ ID NO: 323615 - RNA, 24 nt, Artificial Sequence
  Synthetic
ugauagucccagcuacucaggagg

SEQ ID NO: 323616 - RNA, 22 nt, Artificial Sequence
  Synthetic
guagucccagcuacucaggagg

SEQ ID NO: 323617 - RNA, 23 nt, Artificial Sequence
  Synthetic
uguagucccagcuacucaggagg

SEQ ID NO: 323618 - RNA, 24 nt, Artificial Sequence
  Synthetic
cuguagucccagcuacucaggagg

SEQ ID NO: 323619 - RNA, 20 nt, Artificial Sequence
  Synthetic
ggucccagcuacucaggagg

SEQ ID NO: 323620 - RNA, 18 nt, Artificial Sequence
  Synthetic
gaguagcuacucaggagg

SEQ ID NO: 323621 - RNA, 19 nt, Artificial Sequence
  Synthetic
ugaguagcuacucaggagg

SEQ ID NO: 323622 - RNA, 20 nt, Artificial Sequence
  Synthetic
cugaguagcuacucaggagg

SEQ ID NO: 323623 - RNA, 21 nt, Artificial Sequence
  Synthetic
acugaguagcuacucaggagg

SEQ ID NO: 323624 - RNA, 22 nt, Artificial Sequence
  Synthetic
uacugaguagcuacucaggagg

SEQ ID NO: 323625 - RNA, 23 nt, Artificial Sequence
  Synthetic
guacugaguagcuacucaggagg

SEQ ID NO: 323626 - RNA, 24 nt, Artificial Sequence
  Synthetic
aguacugaguagcuacucaggagg

SEQ ID NO: 323627 - RNA, 18 nt, Artificial Sequence
  Synthetic
ccuuagcuacucaggagg

SEQ ID NO: 323628 - RNA, 19 nt, Artificial Sequence
  Synthetic
gccuuagcuacucaggagg

SEQ ID NO: 323629 - RNA, 20 nt, Artificial Sequence
  Synthetic
agccuuagcuacucaggagg

SEQ ID NO: 323630 - RNA, 21 nt, Artificial Sequence
  Synthetic
uagccuuagcuacucaggagg

SEQ ID NO: 323631 - RNA, 22 nt, Artificial Sequence
  Synthetic
guagccuuagcuacucaggagg

SEQ ID NO: 323632 - RNA, 23 nt, Artificial Sequence
  Synthetic
uguagccuuagcuacucaggagg

SEQ ID NO: 323633 - RNA, 24 nt, Artificial Sequence
  Synthetic
uuguagccuuagcuacucaggagg

SEQ ID NO: 323634 - RNA, 18 nt, Artificial Sequence
  Synthetic
ucccaucuacucaggagg

SEQ ID NO: 323635 - RNA, 19 nt, Artificial Sequence
  Synthetic
gucccaucuacucaggagg

SEQ ID NO: 323636 - RNA, 20 nt, Artificial Sequence
  Synthetic
agucccaucuacucaggagg

SEQ ID NO: 323637 - RNA, 21 nt, Artificial Sequence
  Synthetic
uagucccaucuacucaggagg

SEQ ID NO: 323638 - RNA, 22 nt, Artificial Sequence
  Synthetic
guagucccaucuacucaggagg

SEQ ID NO: 323639 - RNA, 23 nt, Artificial Sequence
  Synthetic
uguagucccaucuacucaggagg

SEQ ID NO: 323640 - RNA, 24 nt, Artificial Sequence
  Synthetic
cuguagucccaucuacucaggagg

SEQ ID NO: 323641 - RNA, 18 nt, Artificial Sequence
  Synthetic
ucucagcgcuucaggagg

SEQ ID NO: 323642 - RNA, 19 nt, Artificial Sequence
  Synthetic
aucucagcgcuucaggagg

SEQ ID NO: 323643 - RNA, 20 nt, Artificial Sequence
  Synthetic
aaucucagcgcuucaggagg

SEQ ID NO: 323644 - RNA, 21 nt, Artificial Sequence
  Synthetic
uaaucucagcgcuucaggagg

SEQ ID NO: 323645 - RNA, 22 nt, Artificial Sequence
  Synthetic
guaaucucagcgcuucaggagg

SEQ ID NO: 323646 - RNA, 23 nt, Artificial Sequence
  Synthetic
uguaaucucagcgcuucaggagg

SEQ ID NO: 323647 - RNA, 24 nt, Artificial Sequence
  Synthetic
cuguaaucucagcgcuucaggagg

SEQ ID NO: 323648 - RNA, 18 nt, Artificial Sequence
  Synthetic
aguggugaagagaggagg

SEQ ID NO: 323649 - RNA, 19 nt, Artificial Sequence
  Synthetic
gaguggugaagagaggagg

SEQ ID NO: 323650 - RNA, 20 nt, Artificial Sequence
  Synthetic
agaguggugaagagaggagg

SEQ ID NO: 323651 - RNA, 21 nt, Artificial Sequence
  Synthetic
aagaguggugaagagaggagg

SEQ ID NO: 323652 - RNA, 22 nt, Artificial Sequence
  Synthetic
caagaguggugaagagaggagg

SEQ ID NO: 323653 - RNA, 23 nt, Artificial Sequence
  Synthetic
gcaagaguggugaagagaggagg

SEQ ID NO: 323654 - RNA, 24 nt, Artificial Sequence
  Synthetic
agcaagaguggugaagagaggagg

SEQ ID NO: 323655 - RNA, 18 nt, Artificial Sequence
  Synthetic
aucacugaaaggaggagg

SEQ ID NO: 323656 - RNA, 19 nt, Artificial Sequence
  Synthetic
aaucacugaaaggaggagg

SEQ ID NO: 323657 - RNA, 20 nt, Artificial Sequence
  Synthetic
aaaucacugaaaggaggagg

SEQ ID NO: 323658 - RNA, 21 nt, Artificial Sequence
  Synthetic
caaaucacugaaaggaggagg

SEQ ID NO: 323659 - RNA, 22 nt, Artificial Sequence
  Synthetic
ucaaaucacugaaaggaggagg

SEQ ID NO: 323660 - RNA, 23 nt, Artificial Sequence
  Synthetic
uucaaaucacugaaaggaggagg

SEQ ID NO: 323661 - RNA, 24 nt, Artificial Sequence
  Synthetic
uuucaaaucacugaaaggaggagg

SEQ ID NO: 323662 - RNA, 18 nt, Artificial Sequence
  Synthetic
gauguaggcaggaggagg

SEQ ID NO: 323663 - RNA, 19 nt, Artificial Sequence
  Synthetic
agauguaggcaggaggagg

SEQ ID NO: 323664 - RNA, 20 nt, Artificial Sequence
  Synthetic
gagauguaggcaggaggagg

SEQ ID NO: 323665 - RNA, 21 nt, Artificial Sequence
  Synthetic
agagauguaggcaggaggagg

SEQ ID NO: 323666 - RNA, 22 nt, Artificial Sequence
  Synthetic
gagagauguaggcaggaggagg

SEQ ID NO: 323667 - RNA, 23 nt, Artificial Sequence
  Synthetic
agagagauguaggcaggaggagg

SEQ ID NO: 323668 - RNA, 24 nt, Artificial Sequence
  Synthetic
gagagagauguaggcaggaggagg

SEQ ID NO: 323669 - RNA, 18 nt, Artificial Sequence
  Synthetic
cagcuacucgggaggagg

SEQ ID NO: 323670 - RNA, 19 nt, Artificial Sequence
  Synthetic
ccagcuacucgggaggagg

SEQ ID NO: 323671 - RNA, 20 nt, Artificial Sequence
  Synthetic
cccagcuacucgggaggagg

SEQ ID NO: 323672 - RNA, 21 nt, Artificial Sequence
  Synthetic
ucccagcuacucgggaggagg

SEQ ID NO: 323673 - RNA, 22 nt, Artificial Sequence
  Synthetic
gucccagcuacucgggaggagg

SEQ ID NO: 323674 - RNA, 23 nt, Artificial Sequence
  Synthetic
agucccagcuacucgggaggagg

SEQ ID NO: 323675 - RNA, 24 nt, Artificial Sequence
  Synthetic
uagucccagcuacucgggaggagg

SEQ ID NO: 323676 - RNA, 18 nt, Artificial Sequence
  Synthetic
aaaacuuaugggaggagg

SEQ ID NO: 323677 - RNA, 19 nt, Artificial Sequence
  Synthetic
caaaacuuaugggaggagg

SEQ ID NO: 323678 - RNA, 20 nt, Artificial Sequence
  Synthetic
ccaaaacuuaugggaggagg

SEQ ID NO: 323679 - RNA, 21 nt, Artificial Sequence
  Synthetic
accaaaacuuaugggaggagg

SEQ ID NO: 323680 - RNA, 22 nt, Artificial Sequence
  Synthetic
uaccaaaacuuaugggaggagg

SEQ ID NO: 323681 - RNA, 23 nt, Artificial Sequence
  Synthetic
auaccaaaacuuaugggaggagg

SEQ ID NO: 323682 - RNA, 24 nt, Artificial Sequence
  Synthetic
uauaccaaaacuuaugggaggagg

SEQ ID NO: 323683 - RNA, 18 nt, Artificial Sequence
  Synthetic
uuaaguaggcugaggagg

SEQ ID NO: 323684 - RNA, 19 nt, Artificial Sequence
  Synthetic
guuaaguaggcugaggagg

SEQ ID NO: 323685 - RNA, 20 nt, Artificial Sequence
  Synthetic
cguuaaguaggcugaggagg

SEQ ID NO: 323686 - RNA, 21 nt, Artificial Sequence
  Synthetic
acguuaaguaggcugaggagg

SEQ ID NO: 323687 - RNA, 22 nt, Artificial Sequence
  Synthetic
cacguuaaguaggcugaggagg

SEQ ID NO: 323688 - RNA, 23 nt, Artificial Sequence
  Synthetic
ucacguuaaguaggcugaggagg

SEQ ID NO: 323689 - RNA, 24 nt, Artificial Sequence
  Synthetic
uucacguuaaguaggcugaggagg

SEQ ID NO: 323690 - RNA, 18 nt, Artificial Sequence
  Synthetic
caaucuucucugaggagg

SEQ ID NO: 323691 - RNA, 19 nt, Artificial Sequence
  Synthetic
gcaaucuucucugaggagg

SEQ ID NO: 323692 - RNA, 20 nt, Artificial Sequence
  Synthetic
agcaaucuucucugaggagg

SEQ ID NO: 323693 - RNA, 21 nt, Artificial Sequence
  Synthetic
aagcaaucuucucugaggagg

SEQ ID NO: 323694 - RNA, 22 nt, Artificial Sequence
  Synthetic
uaagcaaucuucucugaggagg

SEQ ID NO: 323695 - RNA, 23 nt, Artificial Sequence
  Synthetic
uuaagcaaucuucucugaggagg

SEQ ID NO: 323696 - RNA, 24 nt, Artificial Sequence
  Synthetic
auuaagcaaucuucucugaggagg

SEQ ID NO: 323697 - RNA, 18 nt, Artificial Sequence
  Synthetic
uaaaagcgauauaggagg

SEQ ID NO: 323698 - RNA, 19 nt, Artificial Sequence
  Synthetic
uuaaaagcgauauaggagg

SEQ ID NO: 323699 - RNA, 20 nt, Artificial Sequence
  Synthetic
guuaaaagcgauauaggagg

SEQ ID NO: 323700 - RNA, 21 nt, Artificial Sequence
  Synthetic
aguuaaaagcgauauaggagg

SEQ ID NO: 323701 - RNA, 22 nt, Artificial Sequence
  Synthetic
aaguuaaaagcgauauaggagg

SEQ ID NO: 323702 - RNA, 23 nt, Artificial Sequence
  Synthetic
gaaguuaaaagcgauauaggagg

SEQ ID NO: 323703 - RNA, 24 nt, Artificial Sequence
  Synthetic
agaaguuaaaagcgauauaggagg

SEQ ID NO: 323704 - RNA, 18 nt, Artificial Sequence
  Synthetic
ucgcuugaacguaggagg

SEQ ID NO: 323705 - RNA, 19 nt, Artificial Sequence
  Synthetic
aucgcuugaacguaggagg

SEQ ID NO: 323706 - RNA, 20 nt, Artificial Sequence
  Synthetic
aaucgcuugaacguaggagg

SEQ ID NO: 323707 - RNA, 21 nt, Artificial Sequence
  Synthetic
gaaucgcuugaacguaggagg

SEQ ID NO: 323708 - RNA, 22 nt, Artificial Sequence
  Synthetic
agaaucgcuugaacguaggagg

SEQ ID NO: 323709 - RNA, 23 nt, Artificial Sequence
  Synthetic
gagaaucgcuugaacguaggagg

SEQ ID NO: 323710 - RNA, 24 nt, Artificial Sequence
  Synthetic
ggagaaucgcuugaacguaggagg

SEQ ID NO: 323711 - RNA, 18 nt, Artificial Sequence
  Synthetic
uuauaaauuauuaggagg

SEQ ID NO: 323712 - RNA, 19 nt, Artificial Sequence
  Synthetic
guuauaaauuauuaggagg

SEQ ID NO: 323713 - RNA, 20 nt, Artificial Sequence
  Synthetic
uguuauaaauuauuaggagg

SEQ ID NO: 323714 - RNA, 21 nt, Artificial Sequence
  Synthetic
auguuauaaauuauuaggagg

SEQ ID NO: 323715 - RNA, 22 nt, Artificial Sequence
  Synthetic
gauguuauaaauuauuaggagg

SEQ ID NO: 323716 - RNA, 23 nt, Artificial Sequence
  Synthetic
agauguuauaaauuauuaggagg

SEQ ID NO: 323717 - RNA, 24 nt, Artificial Sequence
  Synthetic
aagauguuauaaauuauuaggagg

SEQ ID NO: 323718 - RNA, 18 nt, Artificial Sequence
  Synthetic
uucuuacaguuacggagg

SEQ ID NO: 323719 - RNA, 19 nt, Artificial Sequence
  Synthetic
cuucuuacaguuacggagg

SEQ ID NO: 323720 - RNA, 20 nt, Artificial Sequence
  Synthetic
acuucuuacaguuacggagg

SEQ ID NO: 323721 - RNA, 21 nt, Artificial Sequence
  Synthetic
uacuucuuacaguuacggagg

SEQ ID NO: 323722 - RNA, 22 nt, Artificial Sequence
  Synthetic
uuacuucuuacaguuacggagg

SEQ ID NO: 323723 - RNA, 23 nt, Artificial Sequence
  Synthetic
uuuacuucuuacaguuacggagg

SEQ ID NO: 323724 - RNA, 24 nt, Artificial Sequence
  Synthetic
guuuacuucuuacaguuacggagg

SEQ ID NO: 323725 - RNA, 18 nt, Artificial Sequence
  Synthetic
gaacuugggaggcggagg

SEQ ID NO: 323726 - RNA, 19 nt, Artificial Sequence
  Synthetic
ugaacuugggaggcggagg

SEQ ID NO: 323727 - RNA, 20 nt, Artificial Sequence
  Synthetic
uugaacuugggaggcggagg

SEQ ID NO: 323728 - RNA, 21 nt, Artificial Sequence
  Synthetic
cuugaacuugggaggcggagg

SEQ ID NO: 323729 - RNA, 22 nt, Artificial Sequence
  Synthetic
gcuugaacuugggaggcggagg

SEQ ID NO: 323730 - RNA, 23 nt, Artificial Sequence
  Synthetic
cgcuugaacuugggaggcggagg

SEQ ID NO: 323731 - RNA, 24 nt, Artificial Sequence
  Synthetic
ucgcuugaacuugggaggcggagg

SEQ ID NO: 323732 - RNA, 18 nt, Artificial Sequence
  Synthetic
guggagguugggcggagg

SEQ ID NO: 323733 - RNA, 19 nt, Artificial Sequence
  Synthetic
gguggagguugggcggagg

SEQ ID NO: 323734 - RNA, 20 nt, Artificial Sequence
  Synthetic
ggguggagguugggcggagg

SEQ ID NO: 323735 - RNA, 21 nt, Artificial Sequence
  Synthetic
aggguggagguugggcggagg

SEQ ID NO: 323736 - RNA, 22 nt, Artificial Sequence
  Synthetic
gaggguggagguugggcggagg

SEQ ID NO: 323737 - RNA, 23 nt, Artificial Sequence
  Synthetic
agaggguggagguugggcggagg

SEQ ID NO: 323738 - RNA, 24 nt, Artificial Sequence
  Synthetic
cagaggguggagguugggcggagg

SEQ ID NO: 323739 - RNA, 18 nt, Artificial Sequence
  Synthetic
ugauggauggaucggagg

SEQ ID NO: 323740 - RNA, 19 nt, Artificial Sequence
  Synthetic
uugauggauggaucggagg

SEQ ID NO: 323741 - RNA, 20 nt, Artificial Sequence
  Synthetic
auugauggauggaucggagg

SEQ ID NO: 323742 - RNA, 21 nt, Artificial Sequence
  Synthetic
gauugauggauggaucggagg

SEQ ID NO: 323743 - RNA, 22 nt, Artificial Sequence
  Synthetic
ugauugauggauggaucggagg

SEQ ID NO: 323744 - RNA, 23 nt, Artificial Sequence
  Synthetic
uugauugauggauggaucggagg

SEQ ID NO: 323745 - RNA, 24 nt, Artificial Sequence
  Synthetic
auugauugauggauggaucggagg

SEQ ID NO: 323746 - RNA, 18 nt, Artificial Sequence
  Synthetic
aucccagcuacucggagg

SEQ ID NO: 323747 - RNA, 19 nt, Artificial Sequence
  Synthetic
aaucccagcuacucggagg

SEQ ID NO: 323748 - RNA, 20 nt, Artificial Sequence
  Synthetic
uaaucccagcuacucggagg

SEQ ID NO: 323749 - RNA, 21 nt, Artificial Sequence
  Synthetic
uuaaucccagcuacucggagg

SEQ ID NO: 323750 - RNA, 22 nt, Artificial Sequence
  Synthetic
uuuaaucccagcuacucggagg

SEQ ID NO: 323751 - RNA, 23 nt, Artificial Sequence
  Synthetic
uuuuaaucccagcuacucggagg

SEQ ID NO: 323752 - RNA, 24 nt, Artificial Sequence
  Synthetic
auuuuaaucccagcuacucggagg

SEQ ID NO: 323753 - RNA, 18 nt, Artificial Sequence
  Synthetic
gaaaggaaggaagggagg

SEQ ID NO: 323754 - RNA, 19 nt, Artificial Sequence
  Synthetic
agaaaggaaggaagggagg

SEQ ID NO: 323755 - RNA, 20 nt, Artificial Sequence
  Synthetic
aagaaaggaaggaagggagg

SEQ ID NO: 323756 - RNA, 21 nt, Artificial Sequence
  Synthetic
aaagaaaggaaggaagggagg

SEQ ID NO: 323757 - RNA, 22 nt, Artificial Sequence
  Synthetic
caaagaaaggaaggaagggagg

SEQ ID NO: 323758 - RNA, 23 nt, Artificial Sequence
  Synthetic
acaaagaaaggaaggaagggagg

SEQ ID NO: 323759 - RNA, 24 nt, Artificial Sequence
  Synthetic
gacaaagaaaggaaggaagggagg

SEQ ID NO: 323760 - RNA, 18 nt, Artificial Sequence
  Synthetic
agugauaaugaagggagg

SEQ ID NO: 323761 - RNA, 19 nt, Artificial Sequence
  Synthetic
aagugauaaugaagggagg

SEQ ID NO: 323762 - RNA, 20 nt, Artificial Sequence
  Synthetic
aaagugauaaugaagggagg

SEQ ID NO: 323763 - RNA, 21 nt, Artificial Sequence
  Synthetic
aaaagugauaaugaagggagg

SEQ ID NO: 323764 - RNA, 22 nt, Artificial Sequence
  Synthetic
aaaaagugauaaugaagggagg

SEQ ID NO: 323765 - RNA, 23 nt, Artificial Sequence
  Synthetic
gaaaaagugauaaugaagggagg

SEQ ID NO: 323766 - RNA, 24 nt, Artificial Sequence
  Synthetic
agaaaaagugauaaugaagggagg

SEQ ID NO: 323767 - RNA, 18 nt, Artificial Sequence
  Synthetic
gagagagagagagggagg

SEQ ID NO: 323768 - RNA, 19 nt, Artificial Sequence
  Synthetic
agagagagagagagggagg

SEQ ID NO: 323769 - RNA, 20 nt, Artificial Sequence
  Synthetic
gagagagagagagagggagg

SEQ ID NO: 323770 - RNA, 21 nt, Artificial Sequence
  Synthetic
agagagagagagagagggagg

SEQ ID NO: 323771 - RNA, 22 nt, Artificial Sequence
  Synthetic
gagagagagagagagagggagg

SEQ ID NO: 323772 - RNA, 23 nt, Artificial Sequence
  Synthetic
agagagagagagagagagggagg

SEQ ID NO: 323773 - RNA, 24 nt, Artificial Sequence
  Synthetic
cagagagagagagagagagggagg

SEQ ID NO: 323774 - RNA, 18 nt, Artificial Sequence
  Synthetic
uggagagagagagggagg

SEQ ID NO: 323775 - RNA, 19 nt, Artificial Sequence
  Synthetic
guggagagagagagggagg

SEQ ID NO: 323776 - RNA, 20 nt, Artificial Sequence
  Synthetic
aguggagagagagagggagg

SEQ ID NO: 323777 - RNA, 21 nt, Artificial Sequence
  Synthetic
aaguggagagagagagggagg

SEQ ID NO: 323778 - RNA, 22 nt, Artificial Sequence
  Synthetic
caaguggagagagagagggagg

SEQ ID NO: 323779 - RNA, 23 nt, Artificial Sequence
  Synthetic
acaaguggagagagagagggagg

SEQ ID NO: 323780 - RNA, 24 nt, Artificial Sequence
  Synthetic
aacaaguggagagagagagggagg

SEQ ID NO: 323781 - RNA, 18 nt, Artificial Sequence
  Synthetic
ggaaggaagggagggagg

SEQ ID NO: 323782 - RNA, 19 nt, Artificial Sequence
  Synthetic
aggaaggaagggagggagg

SEQ ID NO: 323783 - RNA, 20 nt, Artificial Sequence
  Synthetic
aaggaaggaagggagggagg

SEQ ID NO: 323784 - RNA, 21 nt, Artificial Sequence
  Synthetic
aaaggaaggaagggagggagg

SEQ ID NO: 323785 - RNA, 22 nt, Artificial Sequence
  Synthetic
gaaaggaaggaagggagggagg

SEQ ID NO: 323786 - RNA, 23 nt, Artificial Sequence
  Synthetic
agaaaggaaggaagggagggagg

SEQ ID NO: 323787 - RNA, 24 nt, Artificial Sequence
  Synthetic
aagaaaggaaggaagggagggagg

SEQ ID NO: 323788 - RNA, 18 nt, Artificial Sequence
  Synthetic
ggaagggagggagggagg

SEQ ID NO: 323789 - RNA, 19 nt, Artificial Sequence
  Synthetic
aggaagggagggagggagg

SEQ ID NO: 323790 - RNA, 20 nt, Artificial Sequence
  Synthetic
aaggaagggagggagggagg

SEQ ID NO: 323791 - RNA, 21 nt, Artificial Sequence
  Synthetic
gaaggaagggagggagggagg

SEQ ID NO: 323792 - RNA, 22 nt, Artificial Sequence
  Synthetic
ggaaggaagggagggagggagg

SEQ ID NO: 323793 - RNA, 23 nt, Artificial Sequence
  Synthetic
aggaaggaagggagggagggagg

SEQ ID NO: 323794 - RNA, 24 nt, Artificial Sequence
  Synthetic
aaggaaggaagggagggagggagg

SEQ ID NO: 323795 - RNA, 18 nt, Artificial Sequence
  Synthetic
gggagggagggagggagg

SEQ ID NO: 323796 - RNA, 19 nt, Artificial Sequence
  Synthetic
agggagggagggagggagg

SEQ ID NO: 323797 - RNA, 20 nt, Artificial Sequence
  Synthetic
aagggagggagggagggagg

SEQ ID NO: 323798 - RNA, 21 nt, Artificial Sequence
  Synthetic
gaagggagggagggagggagg

SEQ ID NO: 323799 - RNA, 22 nt, Artificial Sequence
  Synthetic
ggaagggagggagggagggagg

SEQ ID NO: 323800 - RNA, 23 nt, Artificial Sequence
  Synthetic
aggaagggagggagggagggagg

SEQ ID NO: 323801 - RNA, 24 nt, Artificial Sequence
  Synthetic
aaggaagggagggagggagggagg

SEQ ID NO: 323802 - RNA, 20 nt, Artificial Sequence
  Synthetic
gagggagggagggagggagg

SEQ ID NO: 323803 - RNA, 21 nt, Artificial Sequence
  Synthetic
ggagggagggagggagggagg

SEQ ID NO: 323804 - RNA, 22 nt, Artificial Sequence
  Synthetic
gggagggagggagggagggagg

SEQ ID NO: 323805 - RNA, 23 nt, Artificial Sequence
  Synthetic
agggagggagggagggagggagg

SEQ ID NO: 323806 - RNA, 24 nt, Artificial Sequence
  Synthetic
aagggagggagggagggagggagg

SEQ ID NO: 323807 - RNA, 18 nt, Artificial Sequence
  Synthetic
cgggguaggggagggagg

SEQ ID NO: 323808 - RNA, 19 nt, Artificial Sequence
  Synthetic
ccgggguaggggagggagg

SEQ ID NO: 323809 - RNA, 20 nt, Artificial Sequence
  Synthetic
uccgggguaggggagggagg

SEQ ID NO: 323810 - RNA, 21 nt, Artificial Sequence
  Synthetic
cuccgggguaggggagggagg

SEQ ID NO: 323811 - RNA, 22 nt, Artificial Sequence
  Synthetic
gcuccgggguaggggagggagg

SEQ ID NO: 323812 - RNA, 23 nt, Artificial Sequence
  Synthetic
ggcuccgggguaggggagggagg

SEQ ID NO: 323813 - RNA, 24 nt, Artificial Sequence
  Synthetic
aggcuccgggguaggggagggagg

SEQ ID NO: 323814 - RNA, 18 nt, Artificial Sequence
  Synthetic
guacggcugggagggagg

SEQ ID NO: 323815 - RNA, 19 nt, Artificial Sequence
  Synthetic
aguacggcugggagggagg

SEQ ID NO: 323816 - RNA, 20 nt, Artificial Sequence
  Synthetic
gaguacggcugggagggagg

SEQ ID NO: 323817 - RNA, 21 nt, Artificial Sequence
  Synthetic
agaguacggcugggagggagg

SEQ ID NO: 323818 - RNA, 22 nt, Artificial Sequence
  Synthetic
uagaguacggcugggagggagg

SEQ ID NO: 323819 - RNA, 23 nt, Artificial Sequence
  Synthetic
uuagaguacggcugggagggagg

SEQ ID NO: 323820 - RNA, 24 nt, Artificial Sequence
  Synthetic
uuuagaguacggcugggagggagg

SEQ ID NO: 323821 - RNA, 18 nt, Artificial Sequence
  Synthetic
aaagaccugugagggagg

SEQ ID NO: 323822 - RNA, 19 nt, Artificial Sequence
  Synthetic
aaaagaccugugagggagg

SEQ ID NO: 323823 - RNA, 20 nt, Artificial Sequence
  Synthetic
caaaagaccugugagggagg

SEQ ID NO: 323824 - RNA, 21 nt, Artificial Sequence
  Synthetic
gcaaaagaccugugagggagg

SEQ ID NO: 323825 - RNA, 22 nt, Artificial Sequence
  Synthetic
ugcaaaagaccugugagggagg

SEQ ID NO: 323826 - RNA, 23 nt, Artificial Sequence
  Synthetic
cugcaaaagaccugugagggagg

SEQ ID NO: 323827 - RNA, 24 nt, Artificial Sequence
  Synthetic
acugcaaaagaccugugagggagg

SEQ ID NO: 323828 - RNA, 19 nt, Artificial Sequence
  Synthetic
aucccagcuacuagggagg

SEQ ID NO: 323829 - RNA, 20 nt, Artificial Sequence
  Synthetic
aaucccagcuacuagggagg

SEQ ID NO: 323830 - RNA, 22 nt, Artificial Sequence
  Synthetic
auaaucccagcuacuagggagg

SEQ ID NO: 323831 - RNA, 23 nt, Artificial Sequence
  Synthetic
uauaaucccagcuacuagggagg

SEQ ID NO: 323832 - RNA, 24 nt, Artificial Sequence
  Synthetic
cuauaaucccagcuacuagggagg

SEQ ID NO: 323833 - RNA, 18 nt, Artificial Sequence
  Synthetic
aguugagaaguagggagg

SEQ ID NO: 323834 - RNA, 19 nt, Artificial Sequence
  Synthetic
gaguugagaaguagggagg

SEQ ID NO: 323835 - RNA, 20 nt, Artificial Sequence
  Synthetic
ugaguugagaaguagggagg

SEQ ID NO: 323836 - RNA, 21 nt, Artificial Sequence
  Synthetic
gugaguugagaaguagggagg

SEQ ID NO: 323837 - RNA, 22 nt, Artificial Sequence
  Synthetic
ggugaguugagaaguagggagg

SEQ ID NO: 323838 - RNA, 23 nt, Artificial Sequence
  Synthetic
uggugaguugagaaguagggagg

SEQ ID NO: 323839 - RNA, 24 nt, Artificial Sequence
  Synthetic
guggugaguugagaaguagggagg

SEQ ID NO: 323840 - RNA, 18 nt, Artificial Sequence
  Synthetic
ugggaaugaguagggagg

SEQ ID NO: 323841 - RNA, 19 nt, Artificial Sequence
  Synthetic
gugggaaugaguagggagg

SEQ ID NO: 323842 - RNA, 20 nt, Artificial Sequence
  Synthetic
agugggaaugaguagggagg

SEQ ID NO: 323843 - RNA, 21 nt, Artificial Sequence
  Synthetic
gagugggaaugaguagggagg

SEQ ID NO: 323844 - RNA, 22 nt, Artificial Sequence
  Synthetic
ggagugggaaugaguagggagg

SEQ ID NO: 323845 - RNA, 23 nt, Artificial Sequence
  Synthetic
gggagugggaaugaguagggagg

SEQ ID NO: 323846 - RNA, 24 nt, Artificial Sequence
  Synthetic
ugggagugggaaugaguagggagg

SEQ ID NO: 323847 - RNA, 18 nt, Artificial Sequence
  Synthetic
ucuuaaaugguagggagg

SEQ ID NO: 323848 - RNA, 19 nt, Artificial Sequence
  Synthetic
uucuuaaaugguagggagg

SEQ ID NO: 323849 - RNA, 20 nt, Artificial Sequence
  Synthetic
cuucuuaaaugguagggagg

SEQ ID NO: 323850 - RNA, 21 nt, Artificial Sequence
  Synthetic
acuucuuaaaugguagggagg

SEQ ID NO: 323851 - RNA, 22 nt, Artificial Sequence
  Synthetic
uacuucuuaaaugguagggagg

SEQ ID NO: 323852 - RNA, 23 nt, Artificial Sequence
  Synthetic
cuacuucuuaaaugguagggagg

SEQ ID NO: 323853 - RNA, 24 nt, Artificial Sequence
  Synthetic
ucuacuucuuaaaugguagggagg

SEQ ID NO: 323854 - RNA, 18 nt, Artificial Sequence
  Synthetic
gcccaaaaauuagggagg

SEQ ID NO: 323855 - RNA, 19 nt, Artificial Sequence
  Synthetic
agcccaaaaauuagggagg

SEQ ID NO: 323856 - RNA, 20 nt, Artificial Sequence
  Synthetic
aagcccaaaaauuagggagg

SEQ ID NO: 323857 - RNA, 21 nt, Artificial Sequence
  Synthetic
aaagcccaaaaauuagggagg

SEQ ID NO: 323858 - RNA, 22 nt, Artificial Sequence
  Synthetic
aaaagcccaaaaauuagggagg

SEQ ID NO: 323859 - RNA, 23 nt, Artificial Sequence
  Synthetic
gaaaagcccaaaaauuagggagg

SEQ ID NO: 323860 - RNA, 24 nt, Artificial Sequence
  Synthetic
ggaaaagcccaaaaauuagggagg

SEQ ID NO: 323861 - RNA, 18 nt, Artificial Sequence
  Synthetic
aucccagcuaccgggagg

SEQ ID NO: 323862 - RNA, 19 nt, Artificial Sequence
  Synthetic
aaucccagcuaccgggagg

SEQ ID NO: 323863 - RNA, 20 nt, Artificial Sequence
  Synthetic
uaaucccagcuaccgggagg

SEQ ID NO: 323864 - RNA, 21 nt, Artificial Sequence
  Synthetic
guaaucccagcuaccgggagg

SEQ ID NO: 323865 - RNA, 22 nt, Artificial Sequence
  Synthetic
uguaaucccagcuaccgggagg

SEQ ID NO: 323866 - RNA, 23 nt, Artificial Sequence
  Synthetic
cuguaaucccagcuaccgggagg

SEQ ID NO: 323867 - RNA, 24 nt, Artificial Sequence
  Synthetic
ccuguaaucccagcuaccgggagg

SEQ ID NO: 323868 - RNA, 18 nt, Artificial Sequence
  Synthetic
guaaguaaacccgggagg

SEQ ID NO: 323869 - RNA, 19 nt, Artificial Sequence
  Synthetic
uguaaguaaacccgggagg

SEQ ID NO: 323870 - RNA, 20 nt, Artificial Sequence
  Synthetic
guguaaguaaacccgggagg

SEQ ID NO: 323871 - RNA, 21 nt, Artificial Sequence
  Synthetic
gguguaaguaaacccgggagg

SEQ ID NO: 323872 - RNA, 22 nt, Artificial Sequence
  Synthetic
ugguguaaguaaacccgggagg

SEQ ID NO: 323873 - RNA, 23 nt, Artificial Sequence
  Synthetic
augguguaaguaaacccgggagg

SEQ ID NO: 323874 - RNA, 24 nt, Artificial Sequence
  Synthetic
aaugguguaaguaaacccgggagg

SEQ ID NO: 323875 - RNA, 18 nt, Artificial Sequence
  Synthetic
uugcucgaacccgggagg

SEQ ID NO: 323876 - RNA, 19 nt, Artificial Sequence
  Synthetic
auugcucgaacccgggagg

SEQ ID NO: 323877 - RNA, 20 nt, Artificial Sequence
  Synthetic
aauugcucgaacccgggagg

SEQ ID NO: 323878 - RNA, 21 nt, Artificial Sequence
  Synthetic
gaauugcucgaacccgggagg

SEQ ID NO: 323879 - RNA, 22 nt, Artificial Sequence
  Synthetic
agaauugcucgaacccgggagg

SEQ ID NO: 323880 - RNA, 23 nt, Artificial Sequence
  Synthetic
aagaauugcucgaacccgggagg

SEQ ID NO: 323881 - RNA, 24 nt, Artificial Sequence
  Synthetic
gaagaauugcucgaacccgggagg

SEQ ID NO: 323882 - RNA, 19 nt, Artificial Sequence
  Synthetic
guugcucgaacccgggagg

SEQ ID NO: 323883 - RNA, 20 nt, Artificial Sequence
  Synthetic
aguugcucgaacccgggagg

SEQ ID NO: 323884 - RNA, 21 nt, Artificial Sequence
  Synthetic
gaguugcucgaacccgggagg

SEQ ID NO: 323885 - RNA, 22 nt, Artificial Sequence
  Synthetic
agaguugcucgaacccgggagg

SEQ ID NO: 323886 - RNA, 23 nt, Artificial Sequence
  Synthetic
gagaguugcucgaacccgggagg

SEQ ID NO: 323887 - RNA, 24 nt, Artificial Sequence
  Synthetic
ggagaguugcucgaacccgggagg

SEQ ID NO: 323888 - RNA, 18 nt, Artificial Sequence
  Synthetic
uggcaugaacccgggagg

SEQ ID NO: 323889 - RNA, 19 nt, Artificial Sequence
  Synthetic
auggcaugaacccgggagg

SEQ ID NO: 323890 - RNA, 20 nt, Artificial Sequence
  Synthetic
aauggcaugaacccgggagg

SEQ ID NO: 323891 - RNA, 21 nt, Artificial Sequence
  Synthetic
gaauggcaugaacccgggagg

SEQ ID NO: 323892 - RNA, 22 nt, Artificial Sequence
  Synthetic
agaauggcaugaacccgggagg

SEQ ID NO: 323893 - RNA, 23 nt, Artificial Sequence
  Synthetic
gagaauggcaugaacccgggagg

SEQ ID NO: 323894 - RNA, 24 nt, Artificial Sequence
  Synthetic
ggagaauggcaugaacccgggagg

SEQ ID NO: 323895 - RNA, 18 nt, Artificial Sequence
  Synthetic
uggugugaacccgggagg

SEQ ID NO: 323896 - RNA, 19 nt, Artificial Sequence
  Synthetic
auggugugaacccgggagg

SEQ ID NO: 323897 - RNA, 20 nt, Artificial Sequence
  Synthetic
aauggugugaacccgggagg

SEQ ID NO: 323898 - RNA, 21 nt, Artificial Sequence
  Synthetic
aaauggugugaacccgggagg

SEQ ID NO: 323899 - RNA, 22 nt, Artificial Sequence
  Synthetic
aaaauggugugaacccgggagg

SEQ ID NO: 323900 - RNA, 23 nt, Artificial Sequence
  Synthetic
gaaaauggugugaacccgggagg

SEQ ID NO: 323901 - RNA, 24 nt, Artificial Sequence
  Synthetic
ggaaaauggugugaacccgggagg

SEQ ID NO: 323902 - RNA, 18 nt, Artificial Sequence
  Synthetic
uagcuugaacccgggagg

SEQ ID NO: 323903 - RNA, 19 nt, Artificial Sequence
  Synthetic
auagcuugaacccgggagg

SEQ ID NO: 323904 - RNA, 20 nt, Artificial Sequence
  Synthetic
gauagcuugaacccgggagg

SEQ ID NO: 323905 - RNA, 21 nt, Artificial Sequence
  Synthetic
ggauagcuugaacccgggagg

SEQ ID NO: 323906 - RNA, 22 nt, Artificial Sequence
  Synthetic
aggauagcuugaacccgggagg

SEQ ID NO: 323907 - RNA, 23 nt, Artificial Sequence
  Synthetic
gaggauagcuugaacccgggagg

SEQ ID NO: 323908 - RNA, 24 nt, Artificial Sequence
  Synthetic
ggaggauagcuugaacccgggagg

SEQ ID NO: 323909 - RNA, 22 nt, Artificial Sequence
  Synthetic
ggaaucgcuugaacccgggagg

SEQ ID NO: 323910 - RNA, 23 nt, Artificial Sequence
  Synthetic
gggaaucgcuugaacccgggagg

SEQ ID NO: 323911 - RNA, 24 nt, Artificial Sequence
  Synthetic
ggggaaucgcuugaacccgggagg

SEQ ID NO: 323912 - RNA, 18 nt, Artificial Sequence
  Synthetic
ucacuugaagccgggagg

SEQ ID NO: 323913 - RNA, 19 nt, Artificial Sequence
  Synthetic
aucacuugaagccgggagg

SEQ ID NO: 323914 - RNA, 20 nt, Artificial Sequence
  Synthetic
aaucacuugaagccgggagg

SEQ ID NO: 323915 - RNA, 21 nt, Artificial Sequence
  Synthetic
gaaucacuugaagccgggagg

SEQ ID NO: 323916 - RNA, 22 nt, Artificial Sequence
  Synthetic
agaaucacuugaagccgggagg

SEQ ID NO: 323917 - RNA, 23 nt, Artificial Sequence
  Synthetic
gagaaucacuugaagccgggagg

SEQ ID NO: 323918 - RNA, 24 nt, Artificial Sequence
  Synthetic
ggagaaucacuugaagccgggagg

SEQ ID NO: 323919 - RNA, 18 nt, Artificial Sequence
  Synthetic
uggcaugaauccgggagg

SEQ ID NO: 323920 - RNA, 19 nt, Artificial Sequence
  Synthetic
auggcaugaauccgggagg

SEQ ID NO: 323921 - RNA, 20 nt, Artificial Sequence
  Synthetic
gauggcaugaauccgggagg

SEQ ID NO: 323922 - RNA, 21 nt, Artificial Sequence
  Synthetic
ggauggcaugaauccgggagg

SEQ ID NO: 323923 - RNA, 22 nt, Artificial Sequence
  Synthetic
aggauggcaugaauccgggagg

SEQ ID NO: 323924 - RNA, 23 nt, Artificial Sequence
  Synthetic
gaggauggcaugaauccgggagg

SEQ ID NO: 323925 - RNA, 24 nt, Artificial Sequence
  Synthetic
ggaggauggcaugaauccgggagg

SEQ ID NO: 323926 - RNA, 18 nt, Artificial Sequence
  Synthetic
ucacuugaacucgggagg

SEQ ID NO: 323927 - RNA, 19 nt, Artificial Sequence
  Synthetic
aucacuugaacucgggagg

SEQ ID NO: 323928 - RNA, 20 nt, Artificial Sequence
  Synthetic
aaucacuugaacucgggagg

SEQ ID NO: 323929 - RNA, 24 nt, Artificial Sequence
  Synthetic
cgagaaucacuugaacucgggagg

SEQ ID NO: 323930 - RNA, 18 nt, Artificial Sequence
  Synthetic
ucccaacuacucgggagg

SEQ ID NO: 323931 - RNA, 19 nt, Artificial Sequence
  Synthetic
aucccaacuacucgggagg

SEQ ID NO: 323932 - RNA, 20 nt, Artificial Sequence
  Synthetic
aaucccaacuacucgggagg

SEQ ID NO: 323933 - RNA, 21 nt, Artificial Sequence
  Synthetic
uaaucccaacuacucgggagg

SEQ ID NO: 323934 - RNA, 22 nt, Artificial Sequence
  Synthetic
guaaucccaacuacucgggagg

SEQ ID NO: 323935 - RNA, 23 nt, Artificial Sequence
  Synthetic
uguaaucccaacuacucgggagg

SEQ ID NO: 323936 - RNA, 24 nt, Artificial Sequence
  Synthetic
cuguaaucccaacuacucgggagg

SEQ ID NO: 323937 - RNA, 18 nt, Artificial Sequence
  Synthetic
ucccagcuacucgggagg

SEQ ID NO: 323938 - RNA, 19 nt, Artificial Sequence
  Synthetic
aucccagcuacucgggagg

SEQ ID NO: 323939 - RNA, 20 nt, Artificial Sequence
  Synthetic
aaucccagcuacucgggagg

SEQ ID NO: 323940 - RNA, 21 nt, Artificial Sequence
  Synthetic
uaaucccagcuacucgggagg

SEQ ID NO: 323941 - RNA, 22 nt, Artificial Sequence
  Synthetic
cuaaucccagcuacucgggagg

SEQ ID NO: 323942 - RNA, 23 nt, Artificial Sequence
  Synthetic
ucuaaucccagcuacucgggagg

SEQ ID NO: 323943 - RNA, 24 nt, Artificial Sequence
  Synthetic
cucuaaucccagcuacucgggagg

SEQ ID NO: 323944 - RNA, 22 nt, Artificial Sequence
  Synthetic
guaaucccagcuacucgggagg

SEQ ID NO: 323945 - RNA, 23 nt, Artificial Sequence
  Synthetic
uguaaucccagcuacucgggagg

SEQ ID NO: 323946 - RNA, 24 nt, Artificial Sequence
  Synthetic
cuguaaucccagcuacucgggagg

SEQ ID NO: 323947 - RNA, 21 nt, Artificial Sequence
  Synthetic
uagucccagcuacucgggagg

SEQ ID NO: 323948 - RNA, 22 nt, Artificial Sequence
  Synthetic
guagucccagcuacucgggagg

SEQ ID NO: 323949 - RNA, 23 nt, Artificial Sequence
  Synthetic
gguagucccagcuacucgggagg

SEQ ID NO: 323950 - RNA, 24 nt, Artificial Sequence
  Synthetic
cgguagucccagcuacucgggagg

SEQ ID NO: 323951 - RNA, 23 nt, Artificial Sequence
  Synthetic
uguagucccagcuacucgggagg

SEQ ID NO: 323952 - RNA, 24 nt, Artificial Sequence
  Synthetic
uuguagucccagcuacucgggagg

SEQ ID NO: 323953 - RNA, 18 nt, Artificial Sequence
  Synthetic
ucucagcuacucgggagg

SEQ ID NO: 323954 - RNA, 19 nt, Artificial Sequence
  Synthetic
aucucagcuacucgggagg

SEQ ID NO: 323955 - RNA, 20 nt, Artificial Sequence
  Synthetic
aaucucagcuacucgggagg

SEQ ID NO: 323956 - RNA, 18 nt, Artificial Sequence
  Synthetic
uuccugcuacucgggagg

SEQ ID NO: 323957 - RNA, 19 nt, Artificial Sequence
  Synthetic
guuccugcuacucgggagg

SEQ ID NO: 323958 - RNA, 20 nt, Artificial Sequence
  Synthetic
aguuccugcuacucgggagg

SEQ ID NO: 323959 - RNA, 21 nt, Artificial Sequence
  Synthetic
uaguuccugcuacucgggagg

SEQ ID NO: 323960 - RNA, 22 nt, Artificial Sequence
  Synthetic
guaguuccugcuacucgggagg

SEQ ID NO: 323961 - RNA, 23 nt, Artificial Sequence
  Synthetic
uguaguuccugcuacucgggagg

SEQ ID NO: 323962 - RNA, 24 nt, Artificial Sequence
  Synthetic
cuguaguuccugcuacucgggagg

SEQ ID NO: 323963 - RNA, 18 nt, Artificial Sequence
  Synthetic
guggggggcaaggggagg

SEQ ID NO: 323964 - RNA, 19 nt, Artificial Sequence
  Synthetic
gguggggggcaaggggagg

SEQ ID NO: 323965 - RNA, 20 nt, Artificial Sequence
  Synthetic
agguggggggcaaggggagg

SEQ ID NO: 323966 - RNA, 21 nt, Artificial Sequence
  Synthetic
gagguggggggcaaggggagg

SEQ ID NO: 323967 - RNA, 22 nt, Artificial Sequence
  Synthetic
cgagguggggggcaaggggagg

SEQ ID NO: 323968 - RNA, 23 nt, Artificial Sequence
  Synthetic
gcgagguggggggcaaggggagg

SEQ ID NO: 323969 - RNA, 24 nt, Artificial Sequence
  Synthetic
cgcgagguggggggcaaggggagg

SEQ ID NO: 323970 - RNA, 18 nt, Artificial Sequence
  Synthetic
ggguggggcgaggggagg

SEQ ID NO: 323971 - RNA, 19 nt, Artificial Sequence
  Synthetic
gggguggggcgaggggagg

SEQ ID NO: 323972 - RNA, 20 nt, Artificial Sequence
  Synthetic
ggggguggggcgaggggagg

SEQ ID NO: 323973 - RNA, 21 nt, Artificial Sequence
  Synthetic
gggggguggggcgaggggagg

SEQ ID NO: 323974 - RNA, 22 nt, Artificial Sequence
  Synthetic
cgggggguggggcgaggggagg

SEQ ID NO: 323975 - RNA, 23 nt, Artificial Sequence
  Synthetic
ucgggggguggggcgaggggagg

SEQ ID NO: 323976 - RNA, 24 nt, Artificial Sequence
  Synthetic
gucgggggguggggcgaggggagg

SEQ ID NO: 323977 - RNA, 18 nt, Artificial Sequence
  Synthetic
cgaaaggaggaggggagg

SEQ ID NO: 323978 - RNA, 19 nt, Artificial Sequence
  Synthetic
ccgaaaggaggaggggagg

SEQ ID NO: 323979 - RNA, 20 nt, Artificial Sequence
  Synthetic
uccgaaaggaggaggggagg

SEQ ID NO: 323980 - RNA, 21 nt, Artificial Sequence
  Synthetic
cuccgaaaggaggaggggagg

SEQ ID NO: 323981 - RNA, 22 nt, Artificial Sequence
  Synthetic
acuccgaaaggaggaggggagg

SEQ ID NO: 323982 - RNA, 23 nt, Artificial Sequence
  Synthetic
cacuccgaaaggaggaggggagg

SEQ ID NO: 323983 - RNA, 24 nt, Artificial Sequence
  Synthetic
gcacuccgaaaggaggaggggagg

SEQ ID NO: 323984 - RNA, 18 nt, Artificial Sequence
  Synthetic
gcuccgggguaggggagg

SEQ ID NO: 323985 - RNA, 19 nt, Artificial Sequence
  Synthetic
ggcuccgggguaggggagg

SEQ ID NO: 323986 - RNA, 20 nt, Artificial Sequence
  Synthetic
aggcuccgggguaggggagg

SEQ ID NO: 323987 - RNA, 21 nt, Artificial Sequence
  Synthetic
gaggcuccgggguaggggagg

SEQ ID NO: 323988 - RNA, 22 nt, Artificial Sequence
  Synthetic
ggaggcuccgggguaggggagg

SEQ ID NO: 323989 - RNA, 23 nt, Artificial Sequence
  Synthetic
gggaggcuccgggguaggggagg

SEQ ID NO: 323990 - RNA, 24 nt, Artificial Sequence
  Synthetic
ugggaggcuccgggguaggggagg

SEQ ID NO: 323991 - RNA, 18 nt, Artificial Sequence
  Synthetic
ugagcuauuuaggggagg

SEQ ID NO: 323992 - RNA, 19 nt, Artificial Sequence
  Synthetic
uugagcuauuuaggggagg

SEQ ID NO: 323993 - RNA, 20 nt, Artificial Sequence
  Synthetic
uuugagcuauuuaggggagg

SEQ ID NO: 323994 - RNA, 21 nt, Artificial Sequence
  Synthetic
uuuugagcuauuuaggggagg

SEQ ID NO: 323995 - RNA, 22 nt, Artificial Sequence
  Synthetic
guuuugagcuauuuaggggagg

SEQ ID NO: 323996 - RNA, 23 nt, Artificial Sequence
  Synthetic
uguuuugagcuauuuaggggagg

SEQ ID NO: 323997 - RNA, 24 nt, Artificial Sequence
  Synthetic
auguuuugagcuauuuaggggagg

SEQ ID NO: 323998 - RNA, 18 nt, Artificial Sequence
  Synthetic
acuacuagaagggggagg

SEQ ID NO: 323999 - RNA, 19 nt, Artificial Sequence
  Synthetic
gacuacuagaagggggagg

SEQ ID NO: 324000 - RNA, 20 nt, Artificial Sequence
  Synthetic
ggacuacuagaagggggagg

SEQ ID NO: 324001 - RNA, 21 nt, Artificial Sequence
  Synthetic
gggacuacuagaagggggagg

SEQ ID NO: 324002 - RNA, 22 nt, Artificial Sequence
  Synthetic
ggggacuacuagaagggggagg

SEQ ID NO: 324003 - RNA, 23 nt, Artificial Sequence
  Synthetic
uggggacuacuagaagggggagg

SEQ ID NO: 324004 - RNA, 24 nt, Artificial Sequence
  Synthetic
uuggggacuacuagaagggggagg

SEQ ID NO: 324005 - RNA, 18 nt, Artificial Sequence
  Synthetic
ugguggggucgggggagg

SEQ ID NO: 324006 - RNA, 19 nt, Artificial Sequence
  Synthetic
gugguggggucgggggagg

SEQ ID NO: 324007 - RNA, 20 nt, Artificial Sequence
  Synthetic
ugugguggggucgggggagg

SEQ ID NO: 324008 - RNA, 21 nt, Artificial Sequence
  Synthetic
cugugguggggucgggggagg

SEQ ID NO: 324009 - RNA, 22 nt, Artificial Sequence
  Synthetic
acugugguggggucgggggagg

SEQ ID NO: 324010 - RNA, 23 nt, Artificial Sequence
  Synthetic
gacugugguggggucgggggagg

SEQ ID NO: 324011 - RNA, 24 nt, Artificial Sequence
  Synthetic
ggacugugguggggucgggggagg

SEQ ID NO: 324012 - RNA, 18 nt, Artificial Sequence
  Synthetic
uuguggggucgggggagg

SEQ ID NO: 324013 - RNA, 19 nt, Artificial Sequence
  Synthetic
guuguggggucgggggagg

SEQ ID NO: 324014 - RNA, 20 nt, Artificial Sequence
  Synthetic
uguuguggggucgggggagg

SEQ ID NO: 324015 - RNA, 21 nt, Artificial Sequence
  Synthetic
cuguuguggggucgggggagg

SEQ ID NO: 324016 - RNA, 22 nt, Artificial Sequence
  Synthetic
ccuguuguggggucgggggagg

SEQ ID NO: 324017 - RNA, 23 nt, Artificial Sequence
  Synthetic
gccuguuguggggucgggggagg

SEQ ID NO: 324018 - RNA, 24 nt, Artificial Sequence
  Synthetic
ggccuguuguggggucgggggagg

SEQ ID NO: 324019 - RNA, 18 nt, Artificial Sequence
  Synthetic
ucgugggguggggggagg

SEQ ID NO: 324020 - RNA, 19 nt, Artificial Sequence
  Synthetic
gucgugggguggggggagg

SEQ ID NO: 324021 - RNA, 20 nt, Artificial Sequence
  Synthetic
ugucgugggguggggggagg

SEQ ID NO: 324022 - RNA, 21 nt, Artificial Sequence
  Synthetic
cugucgugggguggggggagg

SEQ ID NO: 324023 - RNA, 22 nt, Artificial Sequence
  Synthetic
ccugucgugggguggggggagg

SEQ ID NO: 324024 - RNA, 23 nt, Artificial Sequence
  Synthetic
gccugucgugggguggggggagg

SEQ ID NO: 324025 - RNA, 24 nt, Artificial Sequence
  Synthetic
ggccugucgugggguggggggagg

SEQ ID NO: 324026 - RNA, 18 nt, Artificial Sequence
  Synthetic
uggugggguggggggagg

SEQ ID NO: 324027 - RNA, 19 nt, Artificial Sequence
  Synthetic
guggugggguggggggagg

SEQ ID NO: 324028 - RNA, 20 nt, Artificial Sequence
  Synthetic
uguggugggguggggggagg

SEQ ID NO: 324029 - RNA, 21 nt, Artificial Sequence
  Synthetic
cuguggugggguggggggagg

SEQ ID NO: 324030 - RNA, 22 nt, Artificial Sequence
  Synthetic
acuguggugggguggggggagg

SEQ ID NO: 324031 - RNA, 23 nt, Artificial Sequence
  Synthetic
gacuguggugggguggggggagg

SEQ ID NO: 324032 - RNA, 24 nt, Artificial Sequence
  Synthetic
ggacuguggugggguggggggagg

SEQ ID NO: 324033 - RNA, 24 nt, Artificial Sequence
  Synthetic
ggacuguugugggguggggggagg

SEQ ID NO: 324034 - RNA, 18 nt, Artificial Sequence
  Synthetic
gagagaaagugggggagg

SEQ ID NO: 324035 - RNA, 19 nt, Artificial Sequence
  Synthetic
ugagagaaagugggggagg

SEQ ID NO: 324036 - RNA, 20 nt, Artificial Sequence
  Synthetic
gugagagaaagugggggagg

SEQ ID NO: 324037 - RNA, 21 nt, Artificial Sequence
  Synthetic
agugagagaaagugggggagg

SEQ ID NO: 324038 - RNA, 22 nt, Artificial Sequence
  Synthetic
cagugagagaaagugggggagg

SEQ ID NO: 324039 - RNA, 23 nt, Artificial Sequence
  Synthetic
ucagugagagaaagugggggagg

SEQ ID NO: 324040 - RNA, 24 nt, Artificial Sequence
  Synthetic
aucagugagagaaagugggggagg

SEQ ID NO: 324041 - RNA, 18 nt, Artificial Sequence
  Synthetic
guaguuuagugggggagg

SEQ ID NO: 324042 - RNA, 19 nt, Artificial Sequence
  Synthetic
uguaguuuagugggggagg

SEQ ID NO: 324043 - RNA, 20 nt, Artificial Sequence
  Synthetic
cuguaguuuagugggggagg

SEQ ID NO: 324044 - RNA, 21 nt, Artificial Sequence
  Synthetic
ucuguaguuuagugggggagg

SEQ ID NO: 324045 - RNA, 22 nt, Artificial Sequence
  Synthetic
aucuguaguuuagugggggagg

SEQ ID NO: 324046 - RNA, 23 nt, Artificial Sequence
  Synthetic
gaucuguaguuuagugggggagg

SEQ ID NO: 324047 - RNA, 24 nt, Artificial Sequence
  Synthetic
ugaucuguaguuuagugggggagg

SEQ ID NO: 324048 - RNA, 18 nt, Artificial Sequence
  Synthetic
gugaaaacacuggggagg

SEQ ID NO: 324049 - RNA, 19 nt, Artificial Sequence
  Synthetic
agugaaaacacuggggagg

SEQ ID NO: 324050 - RNA, 20 nt, Artificial Sequence
  Synthetic
gagugaaaacacuggggagg

SEQ ID NO: 324051 - RNA, 21 nt, Artificial Sequence
  Synthetic
agagugaaaacacuggggagg

SEQ ID NO: 324052 - RNA, 22 nt, Artificial Sequence
  Synthetic
cagagugaaaacacuggggagg

SEQ ID NO: 324053 - RNA, 23 nt, Artificial Sequence
  Synthetic
ccagagugaaaacacuggggagg

SEQ ID NO: 324054 - RNA, 24 nt, Artificial Sequence
  Synthetic
uccagagugaaaacacuggggagg

SEQ ID NO: 324055 - RNA, 18 nt, Artificial Sequence
  Synthetic
ccgcuugagcuggggagg

SEQ ID NO: 324056 - RNA, 19 nt, Artificial Sequence
  Synthetic
accgcuugagcuggggagg

SEQ ID NO: 324057 - RNA, 20 nt, Artificial Sequence
  Synthetic
aaccgcuugagcuggggagg

SEQ ID NO: 324058 - RNA, 21 nt, Artificial Sequence
  Synthetic
gaaccgcuugagcuggggagg

SEQ ID NO: 324059 - RNA, 22 nt, Artificial Sequence
  Synthetic
agaaccgcuugagcuggggagg

SEQ ID NO: 324060 - RNA, 23 nt, Artificial Sequence
  Synthetic
aagaaccgcuugagcuggggagg

SEQ ID NO: 324061 - RNA, 24 nt, Artificial Sequence
  Synthetic
caagaaccgcuugagcuggggagg

SEQ ID NO: 324062 - RNA, 18 nt, Artificial Sequence
  Synthetic
ucccagcacuuggggagg

SEQ ID NO: 324063 - RNA, 19 nt, Artificial Sequence
  Synthetic
aucccagcacuuggggagg

SEQ ID NO: 324064 - RNA, 20 nt, Artificial Sequence
  Synthetic
aaucccagcacuuggggagg

SEQ ID NO: 324065 - RNA, 21 nt, Artificial Sequence
  Synthetic
uaaucccagcacuuggggagg

SEQ ID NO: 324066 - RNA, 22 nt, Artificial Sequence
  Synthetic
guaaucccagcacuuggggagg

SEQ ID NO: 324067 - RNA, 23 nt, Artificial Sequence
  Synthetic
uguaaucccagcacuuggggagg

SEQ ID NO: 324068 - RNA, 24 nt, Artificial Sequence
  Synthetic
cuguaaucccagcacuuggggagg

SEQ ID NO: 324069 - RNA, 18 nt, Artificial Sequence
  Synthetic
acuugccauuaugggagg

SEQ ID NO: 324070 - RNA, 19 nt, Artificial Sequence
  Synthetic
uacuugccauuaugggagg

SEQ ID NO: 324071 - RNA, 20 nt, Artificial Sequence
  Synthetic
cuacuugccauuaugggagg

SEQ ID NO: 324072 - RNA, 21 nt, Artificial Sequence
  Synthetic
ucuacuugccauuaugggagg

SEQ ID NO: 324073 - RNA, 22 nt, Artificial Sequence
  Synthetic
aucuacuugccauuaugggagg

SEQ ID NO: 324074 - RNA, 23 nt, Artificial Sequence
  Synthetic
uaucuacuugccauuaugggagg

SEQ ID NO: 324075 - RNA, 24 nt, Artificial Sequence
  Synthetic
auaucuacuugccauuaugggagg

SEQ ID NO: 324076 - RNA, 18 nt, Artificial Sequence
  Synthetic
uggcaugaaccugggagg

SEQ ID NO: 324077 - RNA, 19 nt, Artificial Sequence
  Synthetic
auggcaugaaccugggagg

SEQ ID NO: 324078 - RNA, 20 nt, Artificial Sequence
  Synthetic
aauggcaugaaccugggagg

SEQ ID NO: 324079 - RNA, 21 nt, Artificial Sequence
  Synthetic
gaauggcaugaaccugggagg

SEQ ID NO: 324080 - RNA, 22 nt, Artificial Sequence
  Synthetic
agaauggcaugaaccugggagg

SEQ ID NO: 324081 - RNA, 23 nt, Artificial Sequence
  Synthetic
gagaauggcaugaaccugggagg

SEQ ID NO: 324082 - RNA, 24 nt, Artificial Sequence
  Synthetic
ggagaauggcaugaaccugggagg

SEQ ID NO: 324083 - RNA, 18 nt, Artificial Sequence
  Synthetic
aggcgugaaccugggagg

SEQ ID NO: 324084 - RNA, 19 nt, Artificial Sequence
  Synthetic
aaggcgugaaccugggagg

SEQ ID NO: 324085 - RNA, 20 nt, Artificial Sequence
  Synthetic
aaaggcgugaaccugggagg

SEQ ID NO: 324086 - RNA, 21 nt, Artificial Sequence
  Synthetic
gaaaggcgugaaccugggagg

SEQ ID NO: 324087 - RNA, 22 nt, Artificial Sequence
  Synthetic
agaaaggcgugaaccugggagg

SEQ ID NO: 324088 - RNA, 23 nt, Artificial Sequence
  Synthetic
gagaaaggcgugaaccugggagg

SEQ ID NO: 324089 - RNA, 24 nt, Artificial Sequence
  Synthetic
ggagaaaggcgugaaccugggagg

SEQ ID NO: 324090 - RNA, 18 nt, Artificial Sequence
  Synthetic
uggcgugaaccugggagg

SEQ ID NO: 324091 - RNA, 19 nt, Artificial Sequence
  Synthetic
auggcgugaaccugggagg

SEQ ID NO: 324092 - RNA, 20 nt, Artificial Sequence
  Synthetic
aauggcgugaaccugggagg

SEQ ID NO: 324093 - RNA, 21 nt, Artificial Sequence
  Synthetic
gaauggcgugaaccugggagg

SEQ ID NO: 324094 - RNA, 22 nt, Artificial Sequence
  Synthetic
agaauggcgugaaccugggagg

SEQ ID NO: 324095 - RNA, 23 nt, Artificial Sequence
  Synthetic
gagaauggcgugaaccugggagg

SEQ ID NO: 324096 - RNA, 24 nt, Artificial Sequence
  Synthetic
ggagaauggcgugaaccugggagg

SEQ ID NO: 324097 - RNA, 18 nt, Artificial Sequence
  Synthetic
ucacuugaaccugggagg

SEQ ID NO: 324098 - RNA, 19 nt, Artificial Sequence
  Synthetic
aucacuugaaccugggagg

SEQ ID NO: 324099 - RNA, 20 nt, Artificial Sequence
  Synthetic
aaucacuugaaccugggagg

SEQ ID NO: 324100 - RNA, 21 nt, Artificial Sequence
  Synthetic
gaauugcuugaaccugggagg

SEQ ID NO: 324101 - RNA, 22 nt, Artificial Sequence
  Synthetic
agaauugcuugaaccugggagg

SEQ ID NO: 324102 - RNA, 23 nt, Artificial Sequence
  Synthetic
cagaauugcuugaaccugggagg

SEQ ID NO: 324103 - RNA, 24 nt, Artificial Sequence
  Synthetic
gcagaauugcuugaaccugggagg

SEQ ID NO: 324104 - RNA, 23 nt, Artificial Sequence
  Synthetic
gagaauugcuugaaccugggagg

SEQ ID NO: 324105 - RNA, 24 nt, Artificial Sequence
  Synthetic
ggagaauugcuugaaccugggagg

SEQ ID NO: 324106 - RNA, 18 nt, Artificial Sequence
  Synthetic
uuguuugaaccugggagg

SEQ ID NO: 324107 - RNA, 19 nt, Artificial Sequence
  Synthetic
auuguuugaaccugggagg

SEQ ID NO: 324108 - RNA, 20 nt, Artificial Sequence
  Synthetic
aauuguuugaaccugggagg

SEQ ID NO: 324109 - RNA, 21 nt, Artificial Sequence
  Synthetic
gaauuguuugaaccugggagg

SEQ ID NO: 324110 - RNA, 22 nt, Artificial Sequence
  Synthetic
agaauuguuugaaccugggagg

SEQ ID NO: 324111 - RNA, 23 nt, Artificial Sequence
  Synthetic
gagaauuguuugaaccugggagg

SEQ ID NO: 324112 - RNA, 24 nt, Artificial Sequence
  Synthetic
ggagaauuguuugaaccugggagg

SEQ ID NO: 324113 - RNA, 18 nt, Artificial Sequence
  Synthetic
ucccagcuaccugggagg

SEQ ID NO: 324114 - RNA, 19 nt, Artificial Sequence
  Synthetic
gucccagcuaccugggagg

SEQ ID NO: 324115 - RNA, 20 nt, Artificial Sequence
  Synthetic
agucccagcuaccugggagg

SEQ ID NO: 324116 - RNA, 21 nt, Artificial Sequence
  Synthetic
uagucccagcuaccugggagg

SEQ ID NO: 324117 - RNA, 22 nt, Artificial Sequence
  Synthetic
guagucccagcuaccugggagg

SEQ ID NO: 324118 - RNA, 23 nt, Artificial Sequence
  Synthetic
uguagucccagcuaccugggagg

SEQ ID NO: 324119 - RNA, 24 nt, Artificial Sequence
  Synthetic
cuguagucccagcuaccugggagg

SEQ ID NO: 324120 - RNA, 18 nt, Artificial Sequence
  Synthetic
uagaguacggcugggagg

SEQ ID NO: 324121 - RNA, 19 nt, Artificial Sequence
  Synthetic
uuagaguacggcugggagg

SEQ ID NO: 324122 - RNA, 20 nt, Artificial Sequence
  Synthetic
uuuagaguacggcugggagg

SEQ ID NO: 324123 - RNA, 21 nt, Artificial Sequence
  Synthetic
guuuagaguacggcugggagg

SEQ ID NO: 324124 - RNA, 22 nt, Artificial Sequence
  Synthetic
uguuuagaguacggcugggagg

SEQ ID NO: 324125 - RNA, 23 nt, Artificial Sequence
  Synthetic
uuguuuagaguacggcugggagg

SEQ ID NO: 324126 - RNA, 24 nt, Artificial Sequence
  Synthetic
uuuguuuagaguacggcugggagg

SEQ ID NO: 324127 - RNA, 18 nt, Artificial Sequence
  Synthetic
ucccagcacucugggagg

SEQ ID NO: 324128 - RNA, 19 nt, Artificial Sequence
  Synthetic
aucccagcacucugggagg

SEQ ID NO: 324129 - RNA, 20 nt, Artificial Sequence
  Synthetic
aaucccagcacucugggagg

SEQ ID NO: 324130 - RNA, 18 nt, Artificial Sequence
  Synthetic
cacaucagcucugggagg

SEQ ID NO: 324131 - RNA, 19 nt, Artificial Sequence
  Synthetic
ucacaucagcucugggagg

SEQ ID NO: 324132 - RNA, 20 nt, Artificial Sequence
  Synthetic
aucacaucagcucugggagg

SEQ ID NO: 324133 - RNA, 21 nt, Artificial Sequence
  Synthetic
aaucacaucagcucugggagg

SEQ ID NO: 324134 - RNA, 22 nt, Artificial Sequence
  Synthetic
uaaucacaucagcucugggagg

SEQ ID NO: 324135 - RNA, 23 nt, Artificial Sequence
  Synthetic
auaaucacaucagcucugggagg

SEQ ID NO: 324136 - RNA, 24 nt, Artificial Sequence
  Synthetic
aauaaucacaucagcucugggagg

SEQ ID NO: 324137 - RNA, 18 nt, Artificial Sequence
  Synthetic
cauauguuuugugggagg

SEQ ID NO: 324138 - RNA, 19 nt, Artificial Sequence
  Synthetic
ucauauguuuugugggagg

SEQ ID NO: 324139 - RNA, 20 nt, Artificial Sequence
  Synthetic
gucauauguuuugugggagg

SEQ ID NO: 324140 - RNA, 21 nt, Artificial Sequence
  Synthetic
ugucauauguuuugugggagg

SEQ ID NO: 324141 - RNA, 22 nt, Artificial Sequence
  Synthetic
cugucauauguuuugugggagg

SEQ ID NO: 324142 - RNA, 23 nt, Artificial Sequence
  Synthetic
acugucauauguuuugugggagg

SEQ ID NO: 324143 - RNA, 24 nt, Artificial Sequence
  Synthetic
cacugucauauguuuugugggagg

SEQ ID NO: 324144 - RNA, 18 nt, Artificial Sequence
  Synthetic
ucgcuugaacuugggagg

SEQ ID NO: 324145 - RNA, 19 nt, Artificial Sequence
  Synthetic
aucgcuugaacuugggagg

SEQ ID NO: 324146 - RNA, 20 nt, Artificial Sequence
  Synthetic
aaucgcuugaacuugggagg

SEQ ID NO: 324147 - RNA, 21 nt, Artificial Sequence
  Synthetic
gaaucgcuugaacuugggagg

SEQ ID NO: 324148 - RNA, 22 nt, Artificial Sequence
  Synthetic
agaaucgcuugaacuugggagg

SEQ ID NO: 324149 - RNA, 23 nt, Artificial Sequence
  Synthetic
cagaaucgcuugaacuugggagg

SEQ ID NO: 324150 - RNA, 24 nt, Artificial Sequence
  Synthetic
ccagaaucgcuugaacuugggagg

SEQ ID NO: 324151 - RNA, 18 nt, Artificial Sequence
  Synthetic
ccuggcuaacuugggagg

SEQ ID NO: 324152 - RNA, 19 nt, Artificial Sequence
  Synthetic
uccuggcuaacuugggagg

SEQ ID NO: 324153 - RNA, 20 nt, Artificial Sequence
  Synthetic
guccuggcuaacuugggagg

SEQ ID NO: 324154 - RNA, 21 nt, Artificial Sequence
  Synthetic
aguccuggcuaacuugggagg

SEQ ID NO: 324155 - RNA, 22 nt, Artificial Sequence
  Synthetic
uaguccuggcuaacuugggagg

SEQ ID NO: 324156 - RNA, 23 nt, Artificial Sequence
  Synthetic
guaguccuggcuaacuugggagg

SEQ ID NO: 324157 - RNA, 24 nt, Artificial Sequence
  Synthetic
uguaguccuggcuaacuugggagg

SEQ ID NO: 324158 - RNA, 18 nt, Artificial Sequence
  Synthetic
ucacagcuacuugggagg

SEQ ID NO: 324159 - RNA, 19 nt, Artificial Sequence
  Synthetic
aucacagcuacuugggagg

SEQ ID NO: 324160 - RNA, 20 nt, Artificial Sequence
  Synthetic
aaucacagcuacuugggagg

SEQ ID NO: 324161 - RNA, 21 nt, Artificial Sequence
  Synthetic
gaaucacagcuacuugggagg

SEQ ID NO: 324162 - RNA, 22 nt, Artificial Sequence
  Synthetic
ugaaucacagcuacuugggagg

SEQ ID NO: 324163 - RNA, 23 nt, Artificial Sequence
  Synthetic
uugaaucacagcuacuugggagg

SEQ ID NO: 324164 - RNA, 24 nt, Artificial Sequence
  Synthetic
cuugaaucacagcuacuugggagg

SEQ ID NO: 324165 - RNA, 21 nt, Artificial Sequence
  Synthetic
uaaucccagcuacuugggagg

SEQ ID NO: 324166 - RNA, 22 nt, Artificial Sequence
  Synthetic
guaaucccagcuacuugggagg

SEQ ID NO: 324167 - RNA, 23 nt, Artificial Sequence
  Synthetic
uguaaucccagcuacuugggagg

SEQ ID NO: 324168 - RNA, 24 nt, Artificial Sequence
  Synthetic
uuguaaucccagcuacuugggagg

SEQ ID NO: 324169 - RNA, 19 nt, Artificial Sequence
  Synthetic
gucccagcuacuugggagg

SEQ ID NO: 324170 - RNA, 20 nt, Artificial Sequence
  Synthetic
agucccagcuacuugggagg

SEQ ID NO: 324171 - RNA, 21 nt, Artificial Sequence
  Synthetic
gagucccagcuacuugggagg

SEQ ID NO: 324172 - RNA, 22 nt, Artificial Sequence
  Synthetic
agagucccagcuacuugggagg

SEQ ID NO: 324173 - RNA, 23 nt, Artificial Sequence
  Synthetic
uagagucccagcuacuugggagg

SEQ ID NO: 324174 - RNA, 24 nt, Artificial Sequence
  Synthetic
cuagagucccagcuacuugggagg

SEQ ID NO: 324175 - RNA, 21 nt, Artificial Sequence
  Synthetic
uagucccagcuacuugggagg

SEQ ID NO: 324176 - RNA, 22 nt, Artificial Sequence
  Synthetic
auagucccagcuacuugggagg

SEQ ID NO: 324177 - RNA, 23 nt, Artificial Sequence
  Synthetic
uauagucccagcuacuugggagg

SEQ ID NO: 324178 - RNA, 24 nt, Artificial Sequence
  Synthetic
cuauagucccagcuacuugggagg

SEQ ID NO: 324179 - RNA, 22 nt, Artificial Sequence
  Synthetic
guagucccagcuacuugggagg

SEQ ID NO: 324180 - RNA, 23 nt, Artificial Sequence
  Synthetic
uguagucccagcuacuugggagg

SEQ ID NO: 324181 - RNA, 24 nt, Artificial Sequence
  Synthetic
cuguagucccagcuacuugggagg

SEQ ID NO: 324182 - RNA, 18 nt, Artificial Sequence
  Synthetic
ucucagcuacuugggagg

SEQ ID NO: 324183 - RNA, 19 nt, Artificial Sequence
  Synthetic
gucucagcuacuugggagg

SEQ ID NO: 324184 - RNA, 20 nt, Artificial Sequence
  Synthetic
agucucagcuacuugggagg

SEQ ID NO: 324185 - RNA, 21 nt, Artificial Sequence
  Synthetic
uagucucagcuacuugggagg

SEQ ID NO: 324186 - RNA, 22 nt, Artificial Sequence
  Synthetic
guagucucagcuacuugggagg

SEQ ID NO: 324187 - RNA, 23 nt, Artificial Sequence
  Synthetic
uguagucucagcuacuugggagg

SEQ ID NO: 324188 - RNA, 24 nt, Artificial Sequence
  Synthetic
cuguagucucagcuacuugggagg

SEQ ID NO: 324189 - RNA, 18 nt, Artificial Sequence
  Synthetic
uccuagcuacuugggagg

SEQ ID NO: 324190 - RNA, 19 nt, Artificial Sequence
  Synthetic
auccuagcuacuugggagg

SEQ ID NO: 324191 - RNA, 20 nt, Artificial Sequence
  Synthetic
aauccuagcuacuugggagg

SEQ ID NO: 324192 - RNA, 21 nt, Artificial Sequence
  Synthetic
uaauccuagcuacuugggagg

SEQ ID NO: 324193 - RNA, 22 nt, Artificial Sequence
  Synthetic
guaauccuagcuacuugggagg

SEQ ID NO: 324194 - RNA, 23 nt, Artificial Sequence
  Synthetic
uguaauccuagcuacuugggagg

SEQ ID NO: 324195 - RNA, 24 nt, Artificial Sequence
  Synthetic
cuguaauccuagcuacuugggagg

SEQ ID NO: 324196 - RNA, 18 nt, Artificial Sequence
  Synthetic
ucccagguacuugggagg

SEQ ID NO: 324197 - RNA, 19 nt, Artificial Sequence
  Synthetic
aucccagguacuugggagg

SEQ ID NO: 324198 - RNA, 20 nt, Artificial Sequence
  Synthetic
aaucccagguacuugggagg

SEQ ID NO: 324199 - RNA, 21 nt, Artificial Sequence
  Synthetic
uaaucccagguacuugggagg

SEQ ID NO: 324200 - RNA, 22 nt, Artificial Sequence
  Synthetic
guaaucccagguacuugggagg

SEQ ID NO: 324201 - RNA, 23 nt, Artificial Sequence
  Synthetic
uguaaucccagguacuugggagg

SEQ ID NO: 324202 - RNA, 24 nt, Artificial Sequence
  Synthetic
cuguaaucccagguacuugggagg

SEQ ID NO: 324203 - RNA, 19 nt, Artificial Sequence
  Synthetic
aucccagcuauuugggagg

SEQ ID NO: 324204 - RNA, 20 nt, Artificial Sequence
  Synthetic
aaucccagcuauuugggagg

SEQ ID NO: 324205 - RNA, 21 nt, Artificial Sequence
  Synthetic
uaaucccagcuauuugggagg

SEQ ID NO: 324206 - RNA, 22 nt, Artificial Sequence
  Synthetic
guaaucccagcuauuugggagg

SEQ ID NO: 324207 - RNA, 23 nt, Artificial Sequence
  Synthetic
uguaaucccagcuauuugggagg

SEQ ID NO: 324208 - RNA, 24 nt, Artificial Sequence
  Synthetic
cuguaaucccagcuauuugggagg

SEQ ID NO: 324209 - RNA, 18 nt, Artificial Sequence
  Synthetic
ucccaacacuuugggagg

SEQ ID NO: 324210 - RNA, 19 nt, Artificial Sequence
  Synthetic
aucccaacacuuugggagg

SEQ ID NO: 324211 - RNA, 20 nt, Artificial Sequence
  Synthetic
aaucccaacacuuugggagg

SEQ ID NO: 324212 - RNA, 21 nt, Artificial Sequence
  Synthetic
uaaucccaacacuuugggagg

SEQ ID NO: 324213 - RNA, 22 nt, Artificial Sequence
  Synthetic
guaaucccaacacuuugggagg

SEQ ID NO: 324214 - RNA, 23 nt, Artificial Sequence
  Synthetic
uguaaucccaacacuuugggagg

SEQ ID NO: 324215 - RNA, 24 nt, Artificial Sequence
  Synthetic
uuguaaucccaacacuuugggagg

SEQ ID NO: 324216 - RNA, 19 nt, Artificial Sequence
  Synthetic
cucccaacacuuugggagg

SEQ ID NO: 324217 - RNA, 20 nt, Artificial Sequence
  Synthetic
acucccaacacuuugggagg

SEQ ID NO: 324218 - RNA, 21 nt, Artificial Sequence
  Synthetic
uacucccaacacuuugggagg

SEQ ID NO: 324219 - RNA, 22 nt, Artificial Sequence
  Synthetic
cuacucccaacacuuugggagg

SEQ ID NO: 324220 - RNA, 23 nt, Artificial Sequence
  Synthetic
ucuacucccaacacuuugggagg

SEQ ID NO: 324221 - RNA, 24 nt, Artificial Sequence
  Synthetic
cucuacucccaacacuuugggagg

SEQ ID NO: 324222 - RNA, 18 nt, Artificial Sequence
  Synthetic
ccccagcacuuugggagg

SEQ ID NO: 324223 - RNA, 19 nt, Artificial Sequence
  Synthetic
accccagcacuuugggagg

SEQ ID NO: 324224 - RNA, 20 nt, Artificial Sequence
  Synthetic
aaccccagcacuuugggagg

SEQ ID NO: 324225 - RNA, 21 nt, Artificial Sequence
  Synthetic
uaaccccagcacuuugggagg

SEQ ID NO: 324226 - RNA, 22 nt, Artificial Sequence
  Synthetic
guaaccccagcacuuugggagg

SEQ ID NO: 324227 - RNA, 23 nt, Artificial Sequence
  Synthetic
uguaaccccagcacuuugggagg

SEQ ID NO: 324228 - RNA, 24 nt, Artificial Sequence
  Synthetic
cuguaaccccagcacuuugggagg

SEQ ID NO: 324229 - RNA, 21 nt, Artificial Sequence
  Synthetic
uaaucccagcacuuugggagg

SEQ ID NO: 324230 - RNA, 22 nt, Artificial Sequence
  Synthetic
auaaucccagcacuuugggagg

SEQ ID NO: 324231 - RNA, 23 nt, Artificial Sequence
  Synthetic
cauaaucccagcacuuugggagg

SEQ ID NO: 324232 - RNA, 24 nt, Artificial Sequence
  Synthetic
ccauaaucccagcacuuugggagg

SEQ ID NO: 324233 - RNA, 23 nt, Artificial Sequence
  Synthetic
uauaaucccagcacuuugggagg

SEQ ID NO: 324234 - RNA, 24 nt, Artificial Sequence
  Synthetic
auauaaucccagcacuuugggagg

SEQ ID NO: 324235 - RNA, 24 nt, Artificial Sequence
  Synthetic
cuauaaucccagcacuuugggagg

SEQ ID NO: 324236 - RNA, 19 nt, Artificial Sequence
  Synthetic
cucccagcacuuugggagg

SEQ ID NO: 324237 - RNA, 20 nt, Artificial Sequence
  Synthetic
acucccagcacuuugggagg

SEQ ID NO: 324238 - RNA, 21 nt, Artificial Sequence
  Synthetic
uacucccagcacuuugggagg

SEQ ID NO: 324239 - RNA, 22 nt, Artificial Sequence
  Synthetic
guacucccagcacuuugggagg

SEQ ID NO: 324240 - RNA, 23 nt, Artificial Sequence
  Synthetic
uguacucccagcacuuugggagg

SEQ ID NO: 324241 - RNA, 24 nt, Artificial Sequence
  Synthetic
cuguacucccagcacuuugggagg

SEQ ID NO: 324242 - RNA, 18 nt, Artificial Sequence
  Synthetic
uuccagcacuuugggagg

SEQ ID NO: 324243 - RNA, 19 nt, Artificial Sequence
  Synthetic
auuccagcacuuugggagg

SEQ ID NO: 324244 - RNA, 20 nt, Artificial Sequence
  Synthetic
aauuccagcacuuugggagg

SEQ ID NO: 324245 - RNA, 21 nt, Artificial Sequence
  Synthetic
uaauuccagcacuuugggagg

SEQ ID NO: 324246 - RNA, 22 nt, Artificial Sequence
  Synthetic
guaauuccagcacuuugggagg

SEQ ID NO: 324247 - RNA, 23 nt, Artificial Sequence
  Synthetic
uguaauuccagcacuuugggagg

SEQ ID NO: 324248 - RNA, 24 nt, Artificial Sequence
  Synthetic
cuguaauuccagcacuuugggagg

SEQ ID NO: 324249 - RNA, 18 nt, Artificial Sequence
  Synthetic
ucgcagcacuuugggagg

SEQ ID NO: 324250 - RNA, 19 nt, Artificial Sequence
  Synthetic
aucgcagcacuuugggagg

SEQ ID NO: 324251 - RNA, 20 nt, Artificial Sequence
  Synthetic
aaucgcagcacuuugggagg

SEQ ID NO: 324252 - RNA, 21 nt, Artificial Sequence
  Synthetic
uaaucgcagcacuuugggagg

SEQ ID NO: 324253 - RNA, 22 nt, Artificial Sequence
  Synthetic
guaaucgcagcacuuugggagg

SEQ ID NO: 324254 - RNA, 23 nt, Artificial Sequence
  Synthetic
uguaaucgcagcacuuugggagg

SEQ ID NO: 324255 - RNA, 24 nt, Artificial Sequence
  Synthetic
cuguaaucgcagcacuuugggagg

SEQ ID NO: 324256 - RNA, 18 nt, Artificial Sequence
  Synthetic
ucccaguacuuugggagg

SEQ ID NO: 324257 - RNA, 19 nt, Artificial Sequence
  Synthetic
aucccaguacuuugggagg

SEQ ID NO: 324258 - RNA, 20 nt, Artificial Sequence
  Synthetic
aaucccaguacuuugggagg

SEQ ID NO: 324259 - RNA, 21 nt, Artificial Sequence
  Synthetic
uaaucccaguacuuugggagg

SEQ ID NO: 324260 - RNA, 22 nt, Artificial Sequence
  Synthetic
guaaucccaguacuuugggagg

SEQ ID NO: 324261 - RNA, 23 nt, Artificial Sequence
  Synthetic
uguaaucccaguacuuugggagg

SEQ ID NO: 324262 - RNA, 24 nt, Artificial Sequence
  Synthetic
cuguaaucccaguacuuugggagg

SEQ ID NO: 324263 - RNA, 18 nt, Artificial Sequence
  Synthetic
uccuaguacuuugggagg

SEQ ID NO: 324264 - RNA, 19 nt, Artificial Sequence
  Synthetic
auccuaguacuuugggagg

SEQ ID NO: 324265 - RNA, 20 nt, Artificial Sequence
  Synthetic
aauccuaguacuuugggagg

SEQ ID NO: 324266 - RNA, 21 nt, Artificial Sequence
  Synthetic
uaauccuaguacuuugggagg

SEQ ID NO: 324267 - RNA, 22 nt, Artificial Sequence
  Synthetic
guaauccuaguacuuugggagg

SEQ ID NO: 324268 - RNA, 23 nt, Artificial Sequence
  Synthetic
uguaauccuaguacuuugggagg

SEQ ID NO: 324269 - RNA, 24 nt, Artificial Sequence
  Synthetic
cuguaauccuaguacuuugggagg

SEQ ID NO: 324270 - RNA, 18 nt, Artificial Sequence
  Synthetic
ucccagcgcuuugggagg

SEQ ID NO: 324271 - RNA, 19 nt, Artificial Sequence
  Synthetic
cucccagcgcuuugggagg

SEQ ID NO: 324272 - RNA, 20 nt, Artificial Sequence
  Synthetic
acucccagcgcuuugggagg

SEQ ID NO: 324273 - RNA, 21 nt, Artificial Sequence
  Synthetic
cacucccagcgcuuugggagg

SEQ ID NO: 324274 - RNA, 22 nt, Artificial Sequence
  Synthetic
gcacucccagcgcuuugggagg

SEQ ID NO: 324275 - RNA, 23 nt, Artificial Sequence
  Synthetic
ugcacucccagcgcuuugggagg

SEQ ID NO: 324276 - RNA, 24 nt, Artificial Sequence
  Synthetic
cugcacucccagcgcuuugggagg

SEQ ID NO: 324277 - RNA, 18 nt, Artificial Sequence
  Synthetic
uuccagcgcuuugggagg

SEQ ID NO: 324278 - RNA, 19 nt, Artificial Sequence
  Synthetic
auuccagcgcuuugggagg

SEQ ID NO: 324279 - RNA, 20 nt, Artificial Sequence
  Synthetic
aauuccagcgcuuugggagg

SEQ ID NO: 324280 - RNA, 21 nt, Artificial Sequence
  Synthetic
uaauuccagcgcuuugggagg

SEQ ID NO: 324281 - RNA, 22 nt, Artificial Sequence
  Synthetic
guaauuccagcgcuuugggagg

SEQ ID NO: 324282 - RNA, 23 nt, Artificial Sequence
  Synthetic
uguaauuccagcgcuuugggagg

SEQ ID NO: 324283 - RNA, 24 nt, Artificial Sequence
  Synthetic
cuguaauuccagcgcuuugggagg

SEQ ID NO: 324284 - RNA, 18 nt, Artificial Sequence
  Synthetic
ucccagugcuuugggagg

SEQ ID NO: 324285 - RNA, 19 nt, Artificial Sequence
  Synthetic
aucccagugcuuugggagg

SEQ ID NO: 324286 - RNA, 20 nt, Artificial Sequence
  Synthetic
aaucccagugcuuugggagg

SEQ ID NO: 324287 - RNA, 21 nt, Artificial Sequence
  Synthetic
uaaucccagugcuuugggagg

SEQ ID NO: 324288 - RNA, 22 nt, Artificial Sequence
  Synthetic
guaaucccagugcuuugggagg

SEQ ID NO: 324289 - RNA, 23 nt, Artificial Sequence
  Synthetic
uguaaucccagugcuuugggagg

SEQ ID NO: 324290 - RNA, 24 nt, Artificial Sequence
  Synthetic
uuguaaucccagugcuuugggagg

SEQ ID NO: 324291 - RNA, 18 nt, Artificial Sequence
  Synthetic
ucccugugcuuugggagg

SEQ ID NO: 324292 - RNA, 19 nt, Artificial Sequence
  Synthetic
aucccugugcuuugggagg

SEQ ID NO: 324293 - RNA, 20 nt, Artificial Sequence
  Synthetic
aaucccugugcuuugggagg

SEQ ID NO: 324294 - RNA, 21 nt, Artificial Sequence
  Synthetic
uaaucccugugcuuugggagg

SEQ ID NO: 324295 - RNA, 22 nt, Artificial Sequence
  Synthetic
guaaucccugugcuuugggagg

SEQ ID NO: 324296 - RNA, 23 nt, Artificial Sequence
  Synthetic
uguaaucccugugcuuugggagg

SEQ ID NO: 324297 - RNA, 24 nt, Artificial Sequence
  Synthetic
cuguaaucccugugcuuugggagg

SEQ ID NO: 324298 - RNA, 18 nt, Artificial Sequence
  Synthetic
ucccuuuguuuugggagg

SEQ ID NO: 324299 - RNA, 19 nt, Artificial Sequence
  Synthetic
uucccuuuguuuugggagg

SEQ ID NO: 324300 - RNA, 20 nt, Artificial Sequence
  Synthetic
auucccuuuguuuugggagg

SEQ ID NO: 324301 - RNA, 21 nt, Artificial Sequence
  Synthetic
uauucccuuuguuuugggagg

SEQ ID NO: 324302 - RNA, 22 nt, Artificial Sequence
  Synthetic
auauucccuuuguuuugggagg

SEQ ID NO: 324303 - RNA, 23 nt, Artificial Sequence
  Synthetic
aauauucccuuuguuuugggagg

SEQ ID NO: 324304 - RNA, 24 nt, Artificial Sequence
  Synthetic
gaauauucccuuuguuuugggagg

SEQ ID NO: 324305 - RNA, 18 nt, Artificial Sequence
  Synthetic
aagaagauuuuugggagg

SEQ ID NO: 324306 - RNA, 19 nt, Artificial Sequence
  Synthetic
caagaagauuuuugggagg

SEQ ID NO: 324307 - RNA, 20 nt, Artificial Sequence
  Synthetic
ucaagaagauuuuugggagg

SEQ ID NO: 324308 - RNA, 21 nt, Artificial Sequence
  Synthetic
uucaagaagauuuuugggagg

SEQ ID NO: 324309 - RNA, 22 nt, Artificial Sequence
  Synthetic
cuucaagaagauuuuugggagg

SEQ ID NO: 324310 - RNA, 23 nt, Artificial Sequence
  Synthetic
ccuucaagaagauuuuugggagg

SEQ ID NO: 324311 - RNA, 24 nt, Artificial Sequence
  Synthetic
uccuucaagaagauuuuugggagg

SEQ ID NO: 324312 - RNA, 18 nt, Artificial Sequence
  Synthetic
gagagggagggauggagg

SEQ ID NO: 324313 - RNA, 19 nt, Artificial Sequence
  Synthetic
agagagggagggauggagg

SEQ ID NO: 324314 - RNA, 20 nt, Artificial Sequence
  Synthetic
gagagagggagggauggagg

SEQ ID NO: 324315 - RNA, 21 nt, Artificial Sequence
  Synthetic
ugagagagggagggauggagg

SEQ ID NO: 324316 - RNA, 22 nt, Artificial Sequence
  Synthetic
augagagagggagggauggagg

SEQ ID NO: 324317 - RNA, 23 nt, Artificial Sequence
  Synthetic
gaugagagagggagggauggagg

SEQ ID NO: 324318 - RNA, 24 nt, Artificial Sequence
  Synthetic
agaugagagagggagggauggagg

SEQ ID NO: 324319 - RNA, 18 nt, Artificial Sequence
  Synthetic
agacacacaugauggagg

SEQ ID NO: 324320 - RNA, 19 nt, Artificial Sequence
  Synthetic
aagacacacaugauggagg

SEQ ID NO: 324321 - RNA, 20 nt, Artificial Sequence
  Synthetic
aaagacacacaugauggagg

SEQ ID NO: 324322 - RNA, 21 nt, Artificial Sequence
  Synthetic
uaaagacacacaugauggagg

SEQ ID NO: 324323 - RNA, 22 nt, Artificial Sequence
  Synthetic
guaaagacacacaugauggagg

SEQ ID NO: 324324 - RNA, 23 nt, Artificial Sequence
  Synthetic
gguaaagacacacaugauggagg

SEQ ID NO: 324325 - RNA, 24 nt, Artificial Sequence
  Synthetic
agguaaagacacacaugauggagg

SEQ ID NO: 324326 - RNA, 18 nt, Artificial Sequence
  Synthetic
aaucagaaucuauggagg

SEQ ID NO: 324327 - RNA, 19 nt, Artificial Sequence
  Synthetic
gaaucagaaucuauggagg

SEQ ID NO: 324328 - RNA, 20 nt, Artificial Sequence
  Synthetic
ugaaucagaaucuauggagg

SEQ ID NO: 324329 - RNA, 21 nt, Artificial Sequence
  Synthetic
uugaaucagaaucuauggagg

SEQ ID NO: 324330 - RNA, 22 nt, Artificial Sequence
  Synthetic
auugaaucagaaucuauggagg

SEQ ID NO: 324331 - RNA, 23 nt, Artificial Sequence
  Synthetic
aauugaaucagaaucuauggagg

SEQ ID NO: 324332 - RNA, 24 nt, Artificial Sequence
  Synthetic
caauugaaucagaaucuauggagg

SEQ ID NO: 324333 - RNA, 18 nt, Artificial Sequence
  Synthetic
ucccagacacacuggagg

SEQ ID NO: 324334 - RNA, 19 nt, Artificial Sequence
  Synthetic
gucccagacacacuggagg

SEQ ID NO: 324335 - RNA, 20 nt, Artificial Sequence
  Synthetic
agucccagacacacuggagg

SEQ ID NO: 324336 - RNA, 21 nt, Artificial Sequence
  Synthetic
uagucccagacacacuggagg

SEQ ID NO: 324337 - RNA, 22 nt, Artificial Sequence
  Synthetic
guagucccagacacacuggagg

SEQ ID NO: 324338 - RNA, 23 nt, Artificial Sequence
  Synthetic
uguagucccagacacacuggagg

SEQ ID NO: 324339 - RNA, 24 nt, Artificial Sequence
  Synthetic
uuguagucccagacacacuggagg

SEQ ID NO: 324340 - RNA, 18 nt, Artificial Sequence
  Synthetic
acuuagauggacuggagg

SEQ ID NO: 324341 - RNA, 19 nt, Artificial Sequence
  Synthetic
gacuuagauggacuggagg

SEQ ID NO: 324342 - RNA, 20 nt, Artificial Sequence
  Synthetic
agacuuagauggacuggagg

SEQ ID NO: 324343 - RNA, 21 nt, Artificial Sequence
  Synthetic
aagacuuagauggacuggagg

SEQ ID NO: 324344 - RNA, 22 nt, Artificial Sequence
  Synthetic
caagacuuagauggacuggagg

SEQ ID NO: 324345 - RNA, 23 nt, Artificial Sequence
  Synthetic
ccaagacuuagauggacuggagg

SEQ ID NO: 324346 - RNA, 24 nt, Artificial Sequence
  Synthetic
accaagacuuagauggacuggagg

SEQ ID NO: 324347 - RNA, 18 nt, Artificial Sequence
  Synthetic
acuggggccuacuggagg

SEQ ID NO: 324348 - RNA, 19 nt, Artificial Sequence
  Synthetic
cacuggggccuacuggagg

SEQ ID NO: 324349 - RNA, 20 nt, Artificial Sequence
  Synthetic
acacuggggccuacuggagg

SEQ ID NO: 324350 - RNA, 21 nt, Artificial Sequence
  Synthetic
cacacuggggccuacuggagg

SEQ ID NO: 324351 - RNA, 22 nt, Artificial Sequence
  Synthetic
acacacuggggccuacuggagg

SEQ ID NO: 324352 - RNA, 23 nt, Artificial Sequence
  Synthetic
cacacacuggggccuacuggagg

SEQ ID NO: 324353 - RNA, 24 nt, Artificial Sequence
  Synthetic
acacacacuggggccuacuggagg

SEQ ID NO: 324354 - RNA, 18 nt, Artificial Sequence
  Synthetic
aucccuugaaccuggagg

SEQ ID NO: 324355 - RNA, 19 nt, Artificial Sequence
  Synthetic
aaucccuugaaccuggagg

SEQ ID NO: 324356 - RNA, 20 nt, Artificial Sequence
  Synthetic
gaaucccuugaaccuggagg

SEQ ID NO: 324357 - RNA, 21 nt, Artificial Sequence
  Synthetic
agaaucccuugaaccuggagg

SEQ ID NO: 324358 - RNA, 22 nt, Artificial Sequence
  Synthetic
gagaaucccuugaaccuggagg

SEQ ID NO: 324359 - RNA, 23 nt, Artificial Sequence
  Synthetic
ggagaaucccuugaaccuggagg

SEQ ID NO: 324360 - RNA, 24 nt, Artificial Sequence
  Synthetic
aggagaaucccuugaaccuggagg

SEQ ID NO: 324361 - RNA, 18 nt, Artificial Sequence
  Synthetic
guuaccaggagcuggagg

SEQ ID NO: 324362 - RNA, 19 nt, Artificial Sequence
  Synthetic
uguuaccaggagcuggagg

SEQ ID NO: 324363 - RNA, 20 nt, Artificial Sequence
  Synthetic
auguuaccaggagcuggagg

SEQ ID NO: 324364 - RNA, 21 nt, Artificial Sequence
  Synthetic
gauguuaccaggagcuggagg

SEQ ID NO: 324365 - RNA, 22 nt, Artificial Sequence
  Synthetic
ggauguuaccaggagcuggagg

SEQ ID NO: 324366 - RNA, 23 nt, Artificial Sequence
  Synthetic
aggauguuaccaggagcuggagg

SEQ ID NO: 324367 - RNA, 24 nt, Artificial Sequence
  Synthetic
aaggauguuaccaggagcuggagg

SEQ ID NO: 324368 - RNA, 18 nt, Artificial Sequence
  Synthetic
ucucagcuacucuggagg

SEQ ID NO: 324369 - RNA, 19 nt, Artificial Sequence
  Synthetic
aucucagcuacucuggagg

SEQ ID NO: 324370 - RNA, 20 nt, Artificial Sequence
  Synthetic
aaucucagcuacucuggagg

SEQ ID NO: 324371 - RNA, 21 nt, Artificial Sequence
  Synthetic
uaaucucagcuacucuggagg

SEQ ID NO: 324372 - RNA, 22 nt, Artificial Sequence
  Synthetic
guaaucucagcuacucuggagg

SEQ ID NO: 324373 - RNA, 23 nt, Artificial Sequence
  Synthetic
uguaaucucagcuacucuggagg

SEQ ID NO: 324374 - RNA, 24 nt, Artificial Sequence
  Synthetic
cuguaaucucagcuacucuggagg

SEQ ID NO: 324375 - RNA, 18 nt, Artificial Sequence
  Synthetic
ucccagcugcucuggagg

SEQ ID NO: 324376 - RNA, 19 nt, Artificial Sequence
  Synthetic
gucccagcugcucuggagg

SEQ ID NO: 324377 - RNA, 20 nt, Artificial Sequence
  Synthetic
agucccagcugcucuggagg

SEQ ID NO: 324378 - RNA, 21 nt, Artificial Sequence
  Synthetic
uagucccagcugcucuggagg

SEQ ID NO: 324379 - RNA, 22 nt, Artificial Sequence
  Synthetic
guagucccagcugcucuggagg

SEQ ID NO: 324380 - RNA, 23 nt, Artificial Sequence
  Synthetic
uguagucccagcugcucuggagg

SEQ ID NO: 324381 - RNA, 24 nt, Artificial Sequence
  Synthetic
cuguagucccagcugcucuggagg

SEQ ID NO: 324382 - RNA, 18 nt, Artificial Sequence
  Synthetic
uucucacaguucuggagg

SEQ ID NO: 324383 - RNA, 19 nt, Artificial Sequence
  Synthetic
uuucucacaguucuggagg

SEQ ID NO: 324384 - RNA, 20 nt, Artificial Sequence
  Synthetic
auuucucacaguucuggagg

SEQ ID NO: 324385 - RNA, 21 nt, Artificial Sequence
  Synthetic
uauuucucacaguucuggagg

SEQ ID NO: 324386 - RNA, 22 nt, Artificial Sequence
  Synthetic
uuauuucucacaguucuggagg

SEQ ID NO: 324387 - RNA, 23 nt, Artificial Sequence
  Synthetic
cuuauuucucacaguucuggagg

SEQ ID NO: 324388 - RNA, 24 nt, Artificial Sequence
  Synthetic
ucuuauuucucacaguucuggagg

SEQ ID NO: 324389 - RNA, 18 nt, Artificial Sequence
  Synthetic
uucucaccguucuggagg

SEQ ID NO: 324390 - RNA, 19 nt, Artificial Sequence
  Synthetic
uuucucaccguucuggagg

SEQ ID NO: 324391 - RNA, 20 nt, Artificial Sequence
  Synthetic
auuucucaccguucuggagg

SEQ ID NO: 324392 - RNA, 21 nt, Artificial Sequence
  Synthetic
uauuucucaccguucuggagg

SEQ ID NO: 324393 - RNA, 22 nt, Artificial Sequence
  Synthetic
uuauuucucaccguucuggagg

SEQ ID NO: 324394 - RNA, 23 nt, Artificial Sequence
  Synthetic
uuuauuucucaccguucuggagg

SEQ ID NO: 324395 - RNA, 24 nt, Artificial Sequence
  Synthetic
cuuuauuucucaccguucuggagg

SEQ ID NO: 324396 - RNA, 18 nt, Artificial Sequence
  Synthetic
uuuucacgguucuggagg

SEQ ID NO: 324397 - RNA, 19 nt, Artificial Sequence
  Synthetic
uuuuucacgguucuggagg

SEQ ID NO: 324398 - RNA, 20 nt, Artificial Sequence
  Synthetic
guuuuucacgguucuggagg

SEQ ID NO: 324399 - RNA, 21 nt, Artificial Sequence
  Synthetic
uguuuuucacgguucuggagg

SEQ ID NO: 324400 - RNA, 22 nt, Artificial Sequence
  Synthetic
uuguuuuucacgguucuggagg

SEQ ID NO: 324401 - RNA, 23 nt, Artificial Sequence
  Synthetic
guuguuuuucacgguucuggagg

SEQ ID NO: 324402 - RNA, 24 nt, Artificial Sequence
  Synthetic
aguuguuuuucacgguucuggagg

SEQ ID NO: 324403 - RNA, 18 nt, Artificial Sequence
  Synthetic
uucucacuguucuggagg

SEQ ID NO: 324404 - RNA, 19 nt, Artificial Sequence
  Synthetic
uuucucacuguucuggagg

SEQ ID NO: 324405 - RNA, 20 nt, Artificial Sequence
  Synthetic
auuucucacuguucuggagg

SEQ ID NO: 324406 - RNA, 21 nt, Artificial Sequence
  Synthetic
uauuucucacuguucuggagg

SEQ ID NO: 324407 - RNA, 22 nt, Artificial Sequence
  Synthetic
uuauuucucacuguucuggagg

SEQ ID NO: 324408 - RNA, 23 nt, Artificial Sequence
  Synthetic
cuuauuucucacuguucuggagg

SEQ ID NO: 324409 - RNA, 24 nt, Artificial Sequence
  Synthetic
acuuauuucucacuguucuggagg

SEQ ID NO: 324410 - RNA, 18 nt, Artificial Sequence
  Synthetic
aaaguaaguuucuggagg

SEQ ID NO: 324411 - RNA, 19 nt, Artificial Sequence
  Synthetic
aaaaguaaguuucuggagg

SEQ ID NO: 324412 - RNA, 20 nt, Artificial Sequence
  Synthetic
caaaaguaaguuucuggagg

SEQ ID NO: 324413 - RNA, 21 nt, Artificial Sequence
  Synthetic
acaaaaguaaguuucuggagg

SEQ ID NO: 324414 - RNA, 22 nt, Artificial Sequence
  Synthetic
gacaaaaguaaguuucuggagg

SEQ ID NO: 324415 - RNA, 23 nt, Artificial Sequence
  Synthetic
agacaaaaguaaguuucuggagg

SEQ ID NO: 324416 - RNA, 24 nt, Artificial Sequence
  Synthetic
aagacaaaaguaaguuucuggagg

SEQ ID NO: 324417 - RNA, 18 nt, Artificial Sequence
  Synthetic
gcuggggaaaaguggagg

SEQ ID NO: 324418 - RNA, 19 nt, Artificial Sequence
  Synthetic
ugcuggggaaaaguggagg

SEQ ID NO: 324419 - RNA, 20 nt, Artificial Sequence
  Synthetic
uugcuggggaaaaguggagg

SEQ ID NO: 324420 - RNA, 21 nt, Artificial Sequence
  Synthetic
uuugcuggggaaaaguggagg

SEQ ID NO: 324421 - RNA, 22 nt, Artificial Sequence
  Synthetic
cuuugcuggggaaaaguggagg

SEQ ID NO: 324422 - RNA, 23 nt, Artificial Sequence
  Synthetic
ucuuugcuggggaaaaguggagg

SEQ ID NO: 324423 - RNA, 24 nt, Artificial Sequence
  Synthetic
uucuuugcuggggaaaaguggagg

SEQ ID NO: 324424 - RNA, 18 nt, Artificial Sequence
  Synthetic
guggaacacaaguggagg

SEQ ID NO: 324425 - RNA, 19 nt, Artificial Sequence
  Synthetic
gguggaacacaaguggagg

SEQ ID NO: 324426 - RNA, 20 nt, Artificial Sequence
  Synthetic
ggguggaacacaaguggagg

SEQ ID NO: 324427 - RNA, 21 nt, Artificial Sequence
  Synthetic
aggguggaacacaaguggagg

SEQ ID NO: 324428 - RNA, 22 nt, Artificial Sequence
  Synthetic
gaggguggaacacaaguggagg

SEQ ID NO: 324429 - RNA, 23 nt, Artificial Sequence
  Synthetic
ggaggguggaacacaaguggagg

SEQ ID NO: 324430 - RNA, 24 nt, Artificial Sequence
  Synthetic
uggaggguggaacacaaguggagg

SEQ ID NO: 324431 - RNA, 18 nt, Artificial Sequence
  Synthetic
gugguuugagaguggagg

SEQ ID NO: 324432 - RNA, 19 nt, Artificial Sequence
  Synthetic
ggugguuugagaguggagg

SEQ ID NO: 324433 - RNA, 20 nt, Artificial Sequence
  Synthetic
gggugguuugagaguggagg

SEQ ID NO: 324434 - RNA, 21 nt, Artificial Sequence
  Synthetic
agggugguuugagaguggagg

SEQ ID NO: 324435 - RNA, 22 nt, Artificial Sequence
  Synthetic
aagggugguuugagaguggagg

SEQ ID NO: 324436 - RNA, 23 nt, Artificial Sequence
  Synthetic
gaagggugguuugagaguggagg

SEQ ID NO: 324437 - RNA, 24 nt, Artificial Sequence
  Synthetic
ggaagggugguuugagaguggagg

SEQ ID NO: 324438 - RNA, 18 nt, Artificial Sequence
  Synthetic
auugucauuuaguggagg

SEQ ID NO: 324439 - RNA, 19 nt, Artificial Sequence
  Synthetic
cauugucauuuaguggagg

SEQ ID NO: 324440 - RNA, 20 nt, Artificial Sequence
  Synthetic
acauugucauuuaguggagg

SEQ ID NO: 324441 - RNA, 21 nt, Artificial Sequence
  Synthetic
uacauugucauuuaguggagg

SEQ ID NO: 324442 - RNA, 22 nt, Artificial Sequence
  Synthetic
uuacauugucauuuaguggagg

SEQ ID NO: 324443 - RNA, 23 nt, Artificial Sequence
  Synthetic
guuacauugucauuuaguggagg

SEQ ID NO: 324444 - RNA, 24 nt, Artificial Sequence
  Synthetic
uguuacauugucauuuaguggagg

SEQ ID NO: 324445 - RNA, 18 nt, Artificial Sequence
  Synthetic
gagggagaaagguggagg

SEQ ID NO: 324446 - RNA, 19 nt, Artificial Sequence
  Synthetic
ggagggagaaagguggagg

SEQ ID NO: 324447 - RNA, 20 nt, Artificial Sequence
  Synthetic
aggagggagaaagguggagg

SEQ ID NO: 324448 - RNA, 21 nt, Artificial Sequence
  Synthetic
caggagggagaaagguggagg

SEQ ID NO: 324449 - RNA, 22 nt, Artificial Sequence
  Synthetic
acaggagggagaaagguggagg

SEQ ID NO: 324450 - RNA, 23 nt, Artificial Sequence
  Synthetic
gacaggagggagaaagguggagg

SEQ ID NO: 324451 - RNA, 24 nt, Artificial Sequence
  Synthetic
agacaggagggagaaagguggagg

SEQ ID NO: 324452 - RNA, 18 nt, Artificial Sequence
  Synthetic
aggcugaggagguggagg

SEQ ID NO: 324453 - RNA, 19 nt, Artificial Sequence
  Synthetic
uaggcugaggagguggagg

SEQ ID NO: 324454 - RNA, 20 nt, Artificial Sequence
  Synthetic
guaggcugaggagguggagg

SEQ ID NO: 324455 - RNA, 21 nt, Artificial Sequence
  Synthetic
aguaggcugaggagguggagg

SEQ ID NO: 324456 - RNA, 22 nt, Artificial Sequence
  Synthetic
aaguaggcugaggagguggagg

SEQ ID NO: 324457 - RNA, 23 nt, Artificial Sequence
  Synthetic
uaaguaggcugaggagguggagg

SEQ ID NO: 324458 - RNA, 24 nt, Artificial Sequence
  Synthetic
uuaaguaggcugaggagguggagg

SEQ ID NO: 324459 - RNA, 18 nt, Artificial Sequence
  Synthetic
ccuaucagaggguggagg

SEQ ID NO: 324460 - RNA, 19 nt, Artificial Sequence
  Synthetic
gccuaucagaggguggagg

SEQ ID NO: 324461 - RNA, 20 nt, Artificial Sequence
  Synthetic
ggccuaucagaggguggagg

SEQ ID NO: 324462 - RNA, 21 nt, Artificial Sequence
  Synthetic
gggccuaucagaggguggagg

SEQ ID NO: 324463 - RNA, 22 nt, Artificial Sequence
  Synthetic
ggggccuaucagaggguggagg

SEQ ID NO: 324464 - RNA, 23 nt, Artificial Sequence
  Synthetic
uggggccuaucagaggguggagg

SEQ ID NO: 324465 - RNA, 24 nt, Artificial Sequence
  Synthetic
auggggccuaucagaggguggagg

SEQ ID NO: 324466 - RNA, 18 nt, Artificial Sequence
  Synthetic
augucccggggguggagg

SEQ ID NO: 324467 - RNA, 19 nt, Artificial Sequence
  Synthetic
uaugucccggggguggagg

SEQ ID NO: 324468 - RNA, 20 nt, Artificial Sequence
  Synthetic
guaugucccggggguggagg

SEQ ID NO: 324469 - RNA, 21 nt, Artificial Sequence
  Synthetic
uguaugucccggggguggagg

SEQ ID NO: 324470 - RNA, 22 nt, Artificial Sequence
  Synthetic
uuguaugucccggggguggagg

SEQ ID NO: 324471 - RNA, 23 nt, Artificial Sequence
  Synthetic
auuguaugucccggggguggagg

SEQ ID NO: 324472 - RNA, 24 nt, Artificial Sequence
  Synthetic
cauuguaugucccggggguggagg

SEQ ID NO: 324473 - RNA, 18 nt, Artificial Sequence
  Synthetic
guuuguuguggguggagg

SEQ ID NO: 324474 - RNA, 19 nt, Artificial Sequence
  Synthetic
gguuuguuguggguggagg

SEQ ID NO: 324475 - RNA, 20 nt, Artificial Sequence
  Synthetic
agguuuguuguggguggagg

SEQ ID NO: 324476 - RNA, 21 nt, Artificial Sequence
  Synthetic
aagguuuguuguggguggagg

SEQ ID NO: 324477 - RNA, 22 nt, Artificial Sequence
  Synthetic
gaagguuuguuguggguggagg

SEQ ID NO: 324478 - RNA, 23 nt, Artificial Sequence
  Synthetic
ggaagguuuguuguggguggagg

SEQ ID NO: 324479 - RNA, 24 nt, Artificial Sequence
  Synthetic
aggaagguuuguuguggguggagg

SEQ ID NO: 324480 - RNA, 18 nt, Artificial Sequence
  Synthetic
aaaaaacaauuguggagg

SEQ ID NO: 324481 - RNA, 19 nt, Artificial Sequence
  Synthetic
uaaaaaacaauuguggagg

SEQ ID NO: 324482 - RNA, 20 nt, Artificial Sequence
  Synthetic
cuaaaaaacaauuguggagg

SEQ ID NO: 324483 - RNA, 21 nt, Artificial Sequence
  Synthetic
ucuaaaaaacaauuguggagg

SEQ ID NO: 324484 - RNA, 22 nt, Artificial Sequence
  Synthetic
aucuaaaaaacaauuguggagg

SEQ ID NO: 324485 - RNA, 23 nt, Artificial Sequence
  Synthetic
aaucuaaaaaacaauuguggagg

SEQ ID NO: 324486 - RNA, 24 nt, Artificial Sequence
  Synthetic
aaaucuaaaaaacaauuguggagg

SEQ ID NO: 324487 - RNA, 18 nt, Artificial Sequence
  Synthetic
aacuuggaagauuggagg

SEQ ID NO: 324488 - RNA, 19 nt, Artificial Sequence
  Synthetic
uaacuuggaagauuggagg

SEQ ID NO: 324489 - RNA, 20 nt, Artificial Sequence
  Synthetic
guaacuuggaagauuggagg

SEQ ID NO: 324490 - RNA, 21 nt, Artificial Sequence
  Synthetic
uguaacuuggaagauuggagg

SEQ ID NO: 324491 - RNA, 22 nt, Artificial Sequence
  Synthetic
cuguaacuuggaagauuggagg

SEQ ID NO: 324492 - RNA, 23 nt, Artificial Sequence
  Synthetic
gcuguaacuuggaagauuggagg

SEQ ID NO: 324493 - RNA, 24 nt, Artificial Sequence
  Synthetic
ugcuguaacuuggaagauuggagg

SEQ ID NO: 324494 - RNA, 18 nt, Artificial Sequence
  Synthetic
caucaguuuuauuggagg

SEQ ID NO: 324495 - RNA, 19 nt, Artificial Sequence
  Synthetic
gcaucaguuuuauuggagg

SEQ ID NO: 324496 - RNA, 20 nt, Artificial Sequence
  Synthetic
agcaucaguuuuauuggagg

SEQ ID NO: 324497 - RNA, 21 nt, Artificial Sequence
  Synthetic
aagcaucaguuuuauuggagg

SEQ ID NO: 324498 - RNA, 22 nt, Artificial Sequence
  Synthetic
aaagcaucaguuuuauuggagg

SEQ ID NO: 324499 - RNA, 23 nt, Artificial Sequence
  Synthetic
gaaagcaucaguuuuauuggagg

SEQ ID NO: 324500 - RNA, 24 nt, Artificial Sequence
  Synthetic
ugaaagcaucaguuuuauuggagg

SEQ ID NO: 324501 - RNA, 18 nt, Artificial Sequence
  Synthetic
agaaggugagguuggagg

SEQ ID NO: 324502 - RNA, 19 nt, Artificial Sequence
  Synthetic
uagaaggugagguuggagg

SEQ ID NO: 324503 - RNA, 20 nt, Artificial Sequence
  Synthetic
guagaaggugagguuggagg

SEQ ID NO: 324504 - RNA, 21 nt, Artificial Sequence
  Synthetic
aguagaaggugagguuggagg

SEQ ID NO: 324505 - RNA, 22 nt, Artificial Sequence
  Synthetic
aaguagaaggugagguuggagg

SEQ ID NO: 324506 - RNA, 23 nt, Artificial Sequence
  Synthetic
aaaguagaaggugagguuggagg

SEQ ID NO: 324507 - RNA, 24 nt, Artificial Sequence
  Synthetic
uaaaguagaaggugagguuggagg

SEQ ID NO: 324508 - RNA, 18 nt, Artificial Sequence
  Synthetic
gauuuccaauguuggagg

SEQ ID NO: 324509 - RNA, 19 nt, Artificial Sequence
  Synthetic
ugauuuccaauguuggagg

SEQ ID NO: 324510 - RNA, 20 nt, Artificial Sequence
  Synthetic
gugauuuccaauguuggagg

SEQ ID NO: 324511 - RNA, 21 nt, Artificial Sequence
  Synthetic
ugugauuuccaauguuggagg

SEQ ID NO: 324512 - RNA, 22 nt, Artificial Sequence
  Synthetic
augugauuuccaauguuggagg

SEQ ID NO: 324513 - RNA, 23 nt, Artificial Sequence
  Synthetic
aaugugauuuccaauguuggagg

SEQ ID NO: 324514 - RNA, 24 nt, Artificial Sequence
  Synthetic
aaaugugauuuccaauguuggagg

SEQ ID NO: 324515 - RNA, 18 nt, Artificial Sequence
  Synthetic
aaggggcagauuuggagg

SEQ ID NO: 324516 - RNA, 19 nt, Artificial Sequence
  Synthetic
gaaggggcagauuuggagg

SEQ ID NO: 324517 - RNA, 20 nt, Artificial Sequence
  Synthetic
agaaggggcagauuuggagg

SEQ ID NO: 324518 - RNA, 21 nt, Artificial Sequence
  Synthetic
aagaaggggcagauuuggagg

SEQ ID NO: 324519 - RNA, 22 nt, Artificial Sequence
  Synthetic
aaagaaggggcagauuuggagg

SEQ ID NO: 324520 - RNA, 23 nt, Artificial Sequence
  Synthetic
aaaagaaggggcagauuuggagg

SEQ ID NO: 324521 - RNA, 24 nt, Artificial Sequence
  Synthetic
gaaaagaaggggcagauuuggagg

SEQ ID NO: 324522 - RNA, 18 nt, Artificial Sequence
  Synthetic
ucagauuguuuuuggagg

SEQ ID NO: 324523 - RNA, 19 nt, Artificial Sequence
  Synthetic
aucagauuguuuuuggagg

SEQ ID NO: 324524 - RNA, 20 nt, Artificial Sequence
  Synthetic
gaucagauuguuuuuggagg

SEQ ID NO: 324525 - RNA, 21 nt, Artificial Sequence
  Synthetic
agaucagauuguuuuuggagg

SEQ ID NO: 324526 - RNA, 22 nt, Artificial Sequence
  Synthetic
cagaucagauuguuuuuggagg

SEQ ID NO: 324527 - RNA, 23 nt, Artificial Sequence
  Synthetic
gcagaucagauuguuuuuggagg

SEQ ID NO: 324528 - RNA, 24 nt, Artificial Sequence
  Synthetic
agcagaucagauuguuuuuggagg

SEQ ID NO: 324529 - RNA, 18 nt, Artificial Sequence
  Synthetic
auugaagagaaaaugagg

SEQ ID NO: 324530 - RNA, 19 nt, Artificial Sequence
  Synthetic
cauugaagagaaaaugagg

SEQ ID NO: 324531 - RNA, 20 nt, Artificial Sequence
  Synthetic
ucauugaagagaaaaugagg

SEQ ID NO: 324532 - RNA, 21 nt, Artificial Sequence
  Synthetic
aucauugaagagaaaaugagg

SEQ ID NO: 324533 - RNA, 22 nt, Artificial Sequence
  Synthetic
uaucauugaagagaaaaugagg

SEQ ID NO: 324534 - RNA, 23 nt, Artificial Sequence
  Synthetic
auaucauugaagagaaaaugagg

SEQ ID NO: 324535 - RNA, 24 nt, Artificial Sequence
  Synthetic
cauaucauugaagagaaaaugagg

SEQ ID NO: 324536 - RNA, 18 nt, Artificial Sequence
  Synthetic
aauagugcugaaaugagg

SEQ ID NO: 324537 - RNA, 19 nt, Artificial Sequence
  Synthetic
gaauagugcugaaaugagg

SEQ ID NO: 324538 - RNA, 20 nt, Artificial Sequence
  Synthetic
ugaauagugcugaaaugagg

SEQ ID NO: 324539 - RNA, 21 nt, Artificial Sequence
  Synthetic
gugaauagugcugaaaugagg

SEQ ID NO: 324540 - RNA, 22 nt, Artificial Sequence
  Synthetic
ugugaauagugcugaaaugagg

SEQ ID NO: 324541 - RNA, 23 nt, Artificial Sequence
  Synthetic
uugugaauagugcugaaaugagg

SEQ ID NO: 324542 - RNA, 24 nt, Artificial Sequence
  Synthetic
auugugaauagugcugaaaugagg

SEQ ID NO: 324543 - RNA, 18 nt, Artificial Sequence
  Synthetic
cuuuucaguuaaaugagg

SEQ ID NO: 324544 - RNA, 19 nt, Artificial Sequence
  Synthetic
gcuuuucaguuaaaugagg

SEQ ID NO: 324545 - RNA, 20 nt, Artificial Sequence
  Synthetic
agcuuuucaguuaaaugagg

SEQ ID NO: 324546 - RNA, 21 nt, Artificial Sequence
  Synthetic
aagcuuuucaguuaaaugagg

SEQ ID NO: 324547 - RNA, 22 nt, Artificial Sequence
  Synthetic
aaagcuuuucaguuaaaugagg

SEQ ID NO: 324548 - RNA, 23 nt, Artificial Sequence
  Synthetic
gaaagcuuuucaguuaaaugagg

SEQ ID NO: 324549 - RNA, 24 nt, Artificial Sequence
  Synthetic
ugaaagcuuuucaguuaaaugagg

SEQ ID NO: 324550 - RNA, 18 nt, Artificial Sequence
  Synthetic
guggaacguuaaaugagg

SEQ ID NO: 324551 - RNA, 19 nt, Artificial Sequence
  Synthetic
gguggaacguuaaaugagg

SEQ ID NO: 324552 - RNA, 20 nt, Artificial Sequence
  Synthetic
ugguggaacguuaaaugagg

SEQ ID NO: 324553 - RNA, 21 nt, Artificial Sequence
  Synthetic
gugguggaacguuaaaugagg

SEQ ID NO: 324554 - RNA, 22 nt, Artificial Sequence
  Synthetic
ggugguggaacguuaaaugagg

SEQ ID NO: 324555 - RNA, 23 nt, Artificial Sequence
  Synthetic
aggugguggaacguuaaaugagg

SEQ ID NO: 324556 - RNA, 24 nt, Artificial Sequence
  Synthetic
aaggugguggaacguuaaaugagg

SEQ ID NO: 324557 - RNA, 18 nt, Artificial Sequence
  Synthetic
cucuuaaccagaaugagg

SEQ ID NO: 324558 - RNA, 19 nt, Artificial Sequence
  Synthetic
ucucuuaaccagaaugagg

SEQ ID NO: 324559 - RNA, 20 nt, Artificial Sequence
  Synthetic
uucucuuaaccagaaugagg

SEQ ID NO: 324560 - RNA, 21 nt, Artificial Sequence
  Synthetic
auucucuuaaccagaaugagg

SEQ ID NO: 324561 - RNA, 22 nt, Artificial Sequence
  Synthetic
aauucucuuaaccagaaugagg

SEQ ID NO: 324562 - RNA, 23 nt, Artificial Sequence
  Synthetic
aaauucucuuaaccagaaugagg

SEQ ID NO: 324563 - RNA, 24 nt, Artificial Sequence
  Synthetic
caaauucucuuaaccagaaugagg

SEQ ID NO: 324564 - RNA, 18 nt, Artificial Sequence
  Synthetic
ugaaguuucagaaugagg

SEQ ID NO: 324565 - RNA, 19 nt, Artificial Sequence
  Synthetic
uugaaguuucagaaugagg

SEQ ID NO: 324566 - RNA, 20 nt, Artificial Sequence
  Synthetic
cuugaaguuucagaaugagg

SEQ ID NO: 324567 - RNA, 21 nt, Artificial Sequence
  Synthetic
gcuugaaguuucagaaugagg

SEQ ID NO: 324568 - RNA, 22 nt, Artificial Sequence
  Synthetic
ugcuugaaguuucagaaugagg

SEQ ID NO: 324569 - RNA, 23 nt, Artificial Sequence
  Synthetic
uugcuugaaguuucagaaugagg

SEQ ID NO: 324570 - RNA, 24 nt, Artificial Sequence
  Synthetic
guugcuugaaguuucagaaugagg

SEQ ID NO: 324571 - RNA, 18 nt, Artificial Sequence
  Synthetic
gcaauaaaccuaaugagg

SEQ ID NO: 324572 - RNA, 19 nt, Artificial Sequence
  Synthetic
ugcaauaaaccuaaugagg

SEQ ID NO: 324573 - RNA, 20 nt, Artificial Sequence
  Synthetic
augcaauaaaccuaaugagg

SEQ ID NO: 324574 - RNA, 21 nt, Artificial Sequence
  Synthetic
aaugcaauaaaccuaaugagg

SEQ ID NO: 324575 - RNA, 22 nt, Artificial Sequence
  Synthetic
uaaugcaauaaaccuaaugagg

SEQ ID NO: 324576 - RNA, 23 nt, Artificial Sequence
  Synthetic
guaaugcaauaaaccuaaugagg

SEQ ID NO: 324577 - RNA, 24 nt, Artificial Sequence
  Synthetic
aguaaugcaauaaaccuaaugagg

SEQ ID NO: 324578 - RNA, 18 nt, Artificial Sequence
  Synthetic
aggcuguguguaaugagg

SEQ ID NO: 324579 - RNA, 19 nt, Artificial Sequence
  Synthetic
uaggcuguguguaaugagg

SEQ ID NO: 324580 - RNA, 20 nt, Artificial Sequence
  Synthetic
guaggcuguguguaaugagg

SEQ ID NO: 324581 - RNA, 21 nt, Artificial Sequence
  Synthetic
gguaggcuguguguaaugagg

SEQ ID NO: 324582 - RNA, 22 nt, Artificial Sequence
  Synthetic
ggguaggcuguguguaaugagg

SEQ ID NO: 324583 - RNA, 23 nt, Artificial Sequence
  Synthetic
gggguaggcuguguguaaugagg

SEQ ID NO: 324584 - RNA, 24 nt, Artificial Sequence
  Synthetic
cgggguaggcuguguguaaugagg

SEQ ID NO: 324585 - RNA, 18 nt, Artificial Sequence
  Synthetic
guaaagauuaacaugagg

SEQ ID NO: 324586 - RNA, 19 nt, Artificial Sequence
  Synthetic
gguaaagauuaacaugagg

SEQ ID NO: 324587 - RNA, 20 nt, Artificial Sequence
  Synthetic
ggguaaagauuaacaugagg

SEQ ID NO: 324588 - RNA, 21 nt, Artificial Sequence
  Synthetic
cggguaaagauuaacaugagg

SEQ ID NO: 324589 - RNA, 22 nt, Artificial Sequence
  Synthetic
acggguaaagauuaacaugagg

SEQ ID NO: 324590 - RNA, 23 nt, Artificial Sequence
  Synthetic
cacggguaaagauuaacaugagg

SEQ ID NO: 324591 - RNA, 24 nt, Artificial Sequence
  Synthetic
acacggguaaagauuaacaugagg

SEQ ID NO: 324592 - RNA, 18 nt, Artificial Sequence
  Synthetic
gauguaagguccaugagg

SEQ ID NO: 324593 - RNA, 19 nt, Artificial Sequence
  Synthetic
ggauguaagguccaugagg

SEQ ID NO: 324594 - RNA, 20 nt, Artificial Sequence
  Synthetic
cggauguaagguccaugagg

SEQ ID NO: 324595 - RNA, 21 nt, Artificial Sequence
  Synthetic
ucggauguaagguccaugagg

SEQ ID NO: 324596 - RNA, 22 nt, Artificial Sequence
  Synthetic
aucggauguaagguccaugagg

SEQ ID NO: 324597 - RNA, 23 nt, Artificial Sequence
  Synthetic
aaucggauguaagguccaugagg

SEQ ID NO: 324598 - RNA, 24 nt, Artificial Sequence
  Synthetic
caaucggauguaagguccaugagg

SEQ ID NO: 324599 - RNA, 18 nt, Artificial Sequence
  Synthetic
acugccugcuucaugagg

SEQ ID NO: 324600 - RNA, 19 nt, Artificial Sequence
  Synthetic
uacugccugcuucaugagg

SEQ ID NO: 324601 - RNA, 20 nt, Artificial Sequence
  Synthetic
auacugccugcuucaugagg

SEQ ID NO: 324602 - RNA, 21 nt, Artificial Sequence
  Synthetic
aauacugccugcuucaugagg

SEQ ID NO: 324603 - RNA, 22 nt, Artificial Sequence
  Synthetic
caauacugccugcuucaugagg

SEQ ID NO: 324604 - RNA, 23 nt, Artificial Sequence
  Synthetic
ucaauacugccugcuucaugagg

SEQ ID NO: 324605 - RNA, 24 nt, Artificial Sequence
  Synthetic
cucaauacugccugcuucaugagg

SEQ ID NO: 324606 - RNA, 18 nt, Artificial Sequence
  Synthetic
aggaaaaagaagaugagg

SEQ ID NO: 324607 - RNA, 19 nt, Artificial Sequence
  Synthetic
gaggaaaaagaagaugagg

SEQ ID NO: 324608 - RNA, 20 nt, Artificial Sequence
  Synthetic
agaggaaaaagaagaugagg

SEQ ID NO: 324609 - RNA, 21 nt, Artificial Sequence
  Synthetic
uagaggaaaaagaagaugagg

SEQ ID NO: 324610 - RNA, 22 nt, Artificial Sequence
  Synthetic
auagaggaaaaagaagaugagg

SEQ ID NO: 324611 - RNA, 23 nt, Artificial Sequence
  Synthetic
cauagaggaaaaagaagaugagg

SEQ ID NO: 324612 - RNA, 24 nt, Artificial Sequence
  Synthetic
acauagaggaaaaagaagaugagg

SEQ ID NO: 324613 - RNA, 18 nt, Artificial Sequence
  Synthetic
uaaggguauaugaugagg

SEQ ID NO: 324614 - RNA, 19 nt, Artificial Sequence
  Synthetic
uuaaggguauaugaugagg

SEQ ID NO: 324615 - RNA, 20 nt, Artificial Sequence
  Synthetic
guuaaggguauaugaugagg

SEQ ID NO: 324616 - RNA, 21 nt, Artificial Sequence
  Synthetic
aguuaaggguauaugaugagg

SEQ ID NO: 324617 - RNA, 22 nt, Artificial Sequence
  Synthetic
aaguuaaggguauaugaugagg

SEQ ID NO: 324618 - RNA, 23 nt, Artificial Sequence
  Synthetic
gaaguuaaggguauaugaugagg

SEQ ID NO: 324619 - RNA, 24 nt, Artificial Sequence
  Synthetic
ugaaguuaaggguauaugaugagg

SEQ ID NO: 324620 - RNA, 18 nt, Artificial Sequence
  Synthetic
aauguucugaauaugagg

SEQ ID NO: 324621 - RNA, 19 nt, Artificial Sequence
  Synthetic
aaauguucugaauaugagg

SEQ ID NO: 324622 - RNA, 20 nt, Artificial Sequence
  Synthetic
gaaauguucugaauaugagg

SEQ ID NO: 324623 - RNA, 21 nt, Artificial Sequence
  Synthetic
ugaaauguucugaauaugagg

SEQ ID NO: 324624 - RNA, 22 nt, Artificial Sequence
  Synthetic
cugaaauguucugaauaugagg

SEQ ID NO: 324625 - RNA, 23 nt, Artificial Sequence
  Synthetic
acugaaauguucugaauaugagg

SEQ ID NO: 324626 - RNA, 24 nt, Artificial Sequence
  Synthetic
cacugaaauguucugaauaugagg

SEQ ID NO: 324627 - RNA, 18 nt, Artificial Sequence
  Synthetic
accagaggucauaugagg

SEQ ID NO: 324628 - RNA, 19 nt, Artificial Sequence
  Synthetic
gaccagaggucauaugagg

SEQ ID NO: 324629 - RNA, 20 nt, Artificial Sequence
  Synthetic
ggaccagaggucauaugagg

SEQ ID NO: 324630 - RNA, 21 nt, Artificial Sequence
  Synthetic
aggaccagaggucauaugagg

SEQ ID NO: 324631 - RNA, 22 nt, Artificial Sequence
  Synthetic
aaggaccagaggucauaugagg

SEQ ID NO: 324632 - RNA, 23 nt, Artificial Sequence
  Synthetic
aaaggaccagaggucauaugagg

SEQ ID NO: 324633 - RNA, 24 nt, Artificial Sequence
  Synthetic
aaaaggaccagaggucauaugagg

SEQ ID NO: 324634 - RNA, 18 nt, Artificial Sequence
  Synthetic
caauucagaauuaugagg

SEQ ID NO: 324635 - RNA, 19 nt, Artificial Sequence
  Synthetic
acaauucagaauuaugagg

SEQ ID NO: 324636 - RNA, 20 nt, Artificial Sequence
  Synthetic
uacaauucagaauuaugagg

SEQ ID NO: 324637 - RNA, 21 nt, Artificial Sequence
  Synthetic
guacaauucagaauuaugagg

SEQ ID NO: 324638 - RNA, 22 nt, Artificial Sequence
  Synthetic
uguacaauucagaauuaugagg

SEQ ID NO: 324639 - RNA, 23 nt, Artificial Sequence
  Synthetic
auguacaauucagaauuaugagg

SEQ ID NO: 324640 - RNA, 24 nt, Artificial Sequence
  Synthetic
uauguacaauucagaauuaugagg

SEQ ID NO: 324641 - RNA, 18 nt, Artificial Sequence
  Synthetic
guucccuuucuuaugagg

SEQ ID NO: 324642 - RNA, 19 nt, Artificial Sequence
  Synthetic
uguucccuuucuuaugagg

SEQ ID NO: 324643 - RNA, 20 nt, Artificial Sequence
  Synthetic
cuguucccuuucuuaugagg

SEQ ID NO: 324644 - RNA, 21 nt, Artificial Sequence
  Synthetic
acuguucccuuucuuaugagg

SEQ ID NO: 324645 - RNA, 22 nt, Artificial Sequence
  Synthetic
uacuguucccuuucuuaugagg

SEQ ID NO: 324646 - RNA, 23 nt, Artificial Sequence
  Synthetic
uuacuguucccuuucuuaugagg

SEQ ID NO: 324647 - RNA, 24 nt, Artificial Sequence
  Synthetic
uuuacuguucccuuucuuaugagg

SEQ ID NO: 324648 - RNA, 18 nt, Artificial Sequence
  Synthetic
auucccauugcacugagg

SEQ ID NO: 324649 - RNA, 19 nt, Artificial Sequence
  Synthetic
gauucccauugcacugagg

SEQ ID NO: 324650 - RNA, 20 nt, Artificial Sequence
  Synthetic
ggauucccauugcacugagg

SEQ ID NO: 324651 - RNA, 21 nt, Artificial Sequence
  Synthetic
uggauucccauugcacugagg

SEQ ID NO: 324652 - RNA, 22 nt, Artificial Sequence
  Synthetic
guggauucccauugcacugagg

SEQ ID NO: 324653 - RNA, 23 nt, Artificial Sequence
  Synthetic
aguggauucccauugcacugagg

SEQ ID NO: 324654 - RNA, 24 nt, Artificial Sequence
  Synthetic
caguggauucccauugcacugagg

SEQ ID NO: 324655 - RNA, 18 nt, Artificial Sequence
  Synthetic
cugugcuuuucacugagg

SEQ ID NO: 324656 - RNA, 19 nt, Artificial Sequence
  Synthetic
acugugcuuuucacugagg

SEQ ID NO: 324657 - RNA, 20 nt, Artificial Sequence
  Synthetic
gacugugcuuuucacugagg

SEQ ID NO: 324658 - RNA, 21 nt, Artificial Sequence
  Synthetic
agacugugcuuuucacugagg

SEQ ID NO: 324659 - RNA, 22 nt, Artificial Sequence
  Synthetic
cagacugugcuuuucacugagg

SEQ ID NO: 324660 - RNA, 23 nt, Artificial Sequence
  Synthetic
acagacugugcuuuucacugagg

SEQ ID NO: 324661 - RNA, 24 nt, Artificial Sequence
  Synthetic
aacagacugugcuuuucacugagg

SEQ ID NO: 324662 - RNA, 18 nt, Artificial Sequence
  Synthetic
ugggcagaucaccugagg

SEQ ID NO: 324663 - RNA, 19 nt, Artificial Sequence
  Synthetic
gugggcagaucaccugagg

SEQ ID NO: 324664 - RNA, 20 nt, Artificial Sequence
  Synthetic
ggugggcagaucaccugagg

SEQ ID NO: 324665 - RNA, 23 nt, Artificial Sequence
  Synthetic
ugaggugggcagaucaccugagg

SEQ ID NO: 324666 - RNA, 24 nt, Artificial Sequence
  Synthetic
cugaggugggcagaucaccugagg

SEQ ID NO: 324667 - RNA, 18 nt, Artificial Sequence
  Synthetic
ugggcggaucaccugagg

SEQ ID NO: 324668 - RNA, 19 nt, Artificial Sequence
  Synthetic
gugggcggaucaccugagg

SEQ ID NO: 324669 - RNA, 20 nt, Artificial Sequence
  Synthetic
ggugggcggaucaccugagg

SEQ ID NO: 324670 - RNA, 21 nt, Artificial Sequence
  Synthetic
aggugggcggaucaccugagg

SEQ ID NO: 324671 - RNA, 22 nt, Artificial Sequence
  Synthetic
aaggugggcggaucaccugagg

SEQ ID NO: 324672 - RNA, 23 nt, Artificial Sequence
  Synthetic
caaggugggcggaucaccugagg

SEQ ID NO: 324673 - RNA, 24 nt, Artificial Sequence
  Synthetic
ccaaggugggcggaucaccugagg

SEQ ID NO: 324674 - RNA, 18 nt, Artificial Sequence
  Synthetic
uggguggaucaccugagg

SEQ ID NO: 324675 - RNA, 19 nt, Artificial Sequence
  Synthetic
guggguggaucaccugagg

SEQ ID NO: 324676 - RNA, 20 nt, Artificial Sequence
  Synthetic
gguggguggaucaccugagg

SEQ ID NO: 324677 - RNA, 21 nt, Artificial Sequence
  Synthetic
agguggguggaucaccugagg

SEQ ID NO: 324678 - RNA, 22 nt, Artificial Sequence
  Synthetic
gagguggguggaucaccugagg

SEQ ID NO: 324679 - RNA, 23 nt, Artificial Sequence
  Synthetic
cgagguggguggaucaccugagg

SEQ ID NO: 324680 - RNA, 24 nt, Artificial Sequence
  Synthetic
ccgagguggguggaucaccugagg

SEQ ID NO: 324681 - RNA, 18 nt, Artificial Sequence
  Synthetic
cuacucgggagccugagg

SEQ ID NO: 324682 - RNA, 19 nt, Artificial Sequence
  Synthetic
gcuacucgggagccugagg

SEQ ID NO: 324683 - RNA, 20 nt, Artificial Sequence
  Synthetic
agcuacucgggagccugagg

SEQ ID NO: 324684 - RNA, 21 nt, Artificial Sequence
  Synthetic
cagcuacucgggagccugagg

SEQ ID NO: 324685 - RNA, 22 nt, Artificial Sequence
  Synthetic
ccagcuacucgggagccugagg

SEQ ID NO: 324686 - RNA, 23 nt, Artificial Sequence
  Synthetic
cccagcuacucgggagccugagg

SEQ ID NO: 324687 - RNA, 24 nt, Artificial Sequence
  Synthetic
ucccagcuacucgggagccugagg

SEQ ID NO: 324688 - RNA, 18 nt, Artificial Sequence
  Synthetic
ccccagcuacuccugagg

SEQ ID NO: 324689 - RNA, 19 nt, Artificial Sequence
  Synthetic
gccccagcuacuccugagg

SEQ ID NO: 324690 - RNA, 20 nt, Artificial Sequence
  Synthetic
agccccagcuacuccugagg

SEQ ID NO: 324691 - RNA, 21 nt, Artificial Sequence
  Synthetic
uagccccagcuacuccugagg

SEQ ID NO: 324692 - RNA, 22 nt, Artificial Sequence
  Synthetic
guagccccagcuacuccugagg

SEQ ID NO: 324693 - RNA, 23 nt, Artificial Sequence
  Synthetic
uguagccccagcuacuccugagg

SEQ ID NO: 324694 - RNA, 24 nt, Artificial Sequence
  Synthetic
cuguagccccagcuacuccugagg

SEQ ID NO: 324695 - RNA, 18 nt, Artificial Sequence
  Synthetic
cuacucgggaagcugagg

SEQ ID NO: 324696 - RNA, 19 nt, Artificial Sequence
  Synthetic
gcuacucgggaagcugagg

SEQ ID NO: 324697 - RNA, 20 nt, Artificial Sequence
  Synthetic
agcuacucgggaagcugagg

SEQ ID NO: 324698 - RNA, 21 nt, Artificial Sequence
  Synthetic
cagcuacucgggaagcugagg

SEQ ID NO: 324699 - RNA, 22 nt, Artificial Sequence
  Synthetic
ccagcuacucgggaagcugagg

SEQ ID NO: 324700 - RNA, 23 nt, Artificial Sequence
  Synthetic
cccagcuacucgggaagcugagg

SEQ ID NO: 324701 - RNA, 24 nt, Artificial Sequence
  Synthetic
ucccagcuacucgggaagcugagg

SEQ ID NO: 324702 - RNA, 18 nt, Artificial Sequence
  Synthetic
cuacucaggacgcugagg

SEQ ID NO: 324703 - RNA, 19 nt, Artificial Sequence
  Synthetic
gcuacucaggacgcugagg

SEQ ID NO: 324704 - RNA, 20 nt, Artificial Sequence
  Synthetic
agcuacucaggacgcugagg

SEQ ID NO: 324705 - RNA, 21 nt, Artificial Sequence
  Synthetic
cagcuacucaggacgcugagg

SEQ ID NO: 324706 - RNA, 22 nt, Artificial Sequence
  Synthetic
ccagcuacucaggacgcugagg

SEQ ID NO: 324707 - RNA, 23 nt, Artificial Sequence
  Synthetic
cccagcuacucaggacgcugagg

SEQ ID NO: 324708 - RNA, 24 nt, Artificial Sequence
  Synthetic
ucccagcuacucaggacgcugagg

SEQ ID NO: 324709 - RNA, 18 nt, Artificial Sequence
  Synthetic
cuacuuagcaggcugagg

SEQ ID NO: 324710 - RNA, 19 nt, Artificial Sequence
  Synthetic
gcuacuuagcaggcugagg

SEQ ID NO: 324711 - RNA, 20 nt, Artificial Sequence
  Synthetic
agcuacuuagcaggcugagg

SEQ ID NO: 324712 - RNA, 21 nt, Artificial Sequence
  Synthetic
cagcuacuuagcaggcugagg

SEQ ID NO: 324713 - RNA, 22 nt, Artificial Sequence
  Synthetic
ccagcuacuuagcaggcugagg

SEQ ID NO: 324714 - RNA, 23 nt, Artificial Sequence
  Synthetic
cccagcuacuuagcaggcugagg

SEQ ID NO: 324715 - RNA, 24 nt, Artificial Sequence
  Synthetic
ucccagcuacuuagcaggcugagg

SEQ ID NO: 324716 - RNA, 18 nt, Artificial Sequence
  Synthetic
cuacucaagaggcugagg

SEQ ID NO: 324717 - RNA, 19 nt, Artificial Sequence
  Synthetic
gcuacucaagaggcugagg

SEQ ID NO: 324718 - RNA, 20 nt, Artificial Sequence
  Synthetic
agcuacucaagaggcugagg

SEQ ID NO: 324719 - RNA, 21 nt, Artificial Sequence
  Synthetic
cagcuacucaagaggcugagg

SEQ ID NO: 324720 - RNA, 22 nt, Artificial Sequence
  Synthetic
ucagcuacucaagaggcugagg

SEQ ID NO: 324721 - RNA, 23 nt, Artificial Sequence
  Synthetic
cucagcuacucaagaggcugagg

SEQ ID NO: 324722 - RNA, 24 nt, Artificial Sequence
  Synthetic
ucucagcuacucaagaggcugagg

SEQ ID NO: 324723 - RNA, 18 nt, Artificial Sequence
  Synthetic
auacucaggaggcugagg

SEQ ID NO: 324724 - RNA, 19 nt, Artificial Sequence
  Synthetic
gauacucaggaggcugagg

SEQ ID NO: 324725 - RNA, 20 nt, Artificial Sequence
  Synthetic
agauacucaggaggcugagg

SEQ ID NO: 324726 - RNA, 21 nt, Artificial Sequence
  Synthetic
cagauacucaggaggcugagg

SEQ ID NO: 324727 - RNA, 22 nt, Artificial Sequence
  Synthetic
ccagauacucaggaggcugagg

SEQ ID NO: 324728 - RNA, 23 nt, Artificial Sequence
  Synthetic
cccagauacucaggaggcugagg

SEQ ID NO: 324729 - RNA, 24 nt, Artificial Sequence
  Synthetic
ucccagauacucaggaggcugagg

SEQ ID NO: 324730 - RNA, 18 nt, Artificial Sequence
  Synthetic
cuacucaggaggcugagg

SEQ ID NO: 324731 - RNA, 19 nt, Artificial Sequence
  Synthetic
acuacucaggaggcugagg

SEQ ID NO: 324732 - RNA, 20 nt, Artificial Sequence
  Synthetic
aacuacucaggaggcugagg

SEQ ID NO: 324733 - RNA, 21 nt, Artificial Sequence
  Synthetic
caacuacucaggaggcugagg

SEQ ID NO: 324734 - RNA, 22 nt, Artificial Sequence
  Synthetic
ccaacuacucaggaggcugagg

SEQ ID NO: 324735 - RNA, 23 nt, Artificial Sequence
  Synthetic
cccaacuacucaggaggcugagg

SEQ ID NO: 324736 - RNA, 24 nt, Artificial Sequence
  Synthetic
ucccaacuacucaggaggcugagg

SEQ ID NO: 324737 - RNA, 21 nt, Artificial Sequence
  Synthetic
uagcuacucaggaggcugagg

SEQ ID NO: 324738 - RNA, 22 nt, Artificial Sequence
  Synthetic
guagcuacucaggaggcugagg

SEQ ID NO: 324739 - RNA, 23 nt, Artificial Sequence
  Synthetic
aguagcuacucaggaggcugagg

SEQ ID NO: 324740 - RNA, 24 nt, Artificial Sequence
  Synthetic
gaguagcuacucaggaggcugagg

SEQ ID NO: 324741 - RNA, 19 nt, Artificial Sequence
  Synthetic
ucuacucaggaggcugagg

SEQ ID NO: 324742 - RNA, 20 nt, Artificial Sequence
  Synthetic
aucuacucaggaggcugagg

SEQ ID NO: 324743 - RNA, 21 nt, Artificial Sequence
  Synthetic
caucuacucaggaggcugagg

SEQ ID NO: 324744 - RNA, 22 nt, Artificial Sequence
  Synthetic
ccaucuacucaggaggcugagg

SEQ ID NO: 324745 - RNA, 23 nt, Artificial Sequence
  Synthetic
cccaucuacucaggaggcugagg

SEQ ID NO: 324746 - RNA, 24 nt, Artificial Sequence
  Synthetic
ucccaucuacucaggaggcugagg

SEQ ID NO: 324747 - RNA, 18 nt, Artificial Sequence
  Synthetic
gcuacucggaggcugagg

SEQ ID NO: 324748 - RNA, 19 nt, Artificial Sequence
  Synthetic
agcuacucggaggcugagg

SEQ ID NO: 324749 - RNA, 20 nt, Artificial Sequence
  Synthetic
cagcuacucggaggcugagg

SEQ ID NO: 324750 - RNA, 21 nt, Artificial Sequence
  Synthetic
ccagcuacucggaggcugagg

SEQ ID NO: 324751 - RNA, 22 nt, Artificial Sequence
  Synthetic
cccagcuacucggaggcugagg

SEQ ID NO: 324752 - RNA, 23 nt, Artificial Sequence
  Synthetic
ucccagcuacucggaggcugagg

SEQ ID NO: 324753 - RNA, 24 nt, Artificial Sequence
  Synthetic
aucccagcuacucggaggcugagg

SEQ ID NO: 324754 - RNA, 18 nt, Artificial Sequence
  Synthetic
cuacuagggaggcugagg

SEQ ID NO: 324755 - RNA, 19 nt, Artificial Sequence
  Synthetic
gcuacuagggaggcugagg

SEQ ID NO: 324756 - RNA, 20 nt, Artificial Sequence
  Synthetic
agcuacuagggaggcugagg

SEQ ID NO: 324757 - RNA, 18 nt, Artificial Sequence
  Synthetic
gcuaccgggaggcugagg

SEQ ID NO: 324758 - RNA, 19 nt, Artificial Sequence
  Synthetic
agcuaccgggaggcugagg

SEQ ID NO: 324759 - RNA, 20 nt, Artificial Sequence
  Synthetic
cagcuaccgggaggcugagg

SEQ ID NO: 324760 - RNA, 21 nt, Artificial Sequence
  Synthetic
ccagcuaccgggaggcugagg

SEQ ID NO: 324761 - RNA, 22 nt, Artificial Sequence
  Synthetic
cccagcuaccgggaggcugagg

SEQ ID NO: 324762 - RNA, 23 nt, Artificial Sequence
  Synthetic
ucccagcuaccgggaggcugagg

SEQ ID NO: 324763 - RNA, 24 nt, Artificial Sequence
  Synthetic
aucccagcuaccgggaggcugagg

SEQ ID NO: 324764 - RNA, 23 nt, Artificial Sequence
  Synthetic
cccagcuacucgggaggcugagg

SEQ ID NO: 324765 - RNA, 24 nt, Artificial Sequence
  Synthetic
ucccagcuacucgggaggcugagg

SEQ ID NO: 324766 - RNA, 22 nt, Artificial Sequence
  Synthetic
acagcuacuugggaggcugagg

SEQ ID NO: 324767 - RNA, 23 nt, Artificial Sequence
  Synthetic
cacagcuacuugggaggcugagg

SEQ ID NO: 324768 - RNA, 24 nt, Artificial Sequence
  Synthetic
ucacagcuacuugggaggcugagg

SEQ ID NO: 324769 - RNA, 21 nt, Artificial Sequence
  Synthetic
uagcuacuugggaggcugagg

SEQ ID NO: 324770 - RNA, 22 nt, Artificial Sequence
  Synthetic
cuagcuacuugggaggcugagg

SEQ ID NO: 324771 - RNA, 23 nt, Artificial Sequence
  Synthetic
ccuagcuacuugggaggcugagg

SEQ ID NO: 324772 - RNA, 24 nt, Artificial Sequence
  Synthetic
uccuagcuacuugggaggcugagg

SEQ ID NO: 324773 - RNA, 18 nt, Artificial Sequence
  Synthetic
guacuugggaggcugagg

SEQ ID NO: 324774 - RNA, 19 nt, Artificial Sequence
  Synthetic
gguacuugggaggcugagg

SEQ ID NO: 324775 - RNA, 20 nt, Artificial Sequence
  Synthetic
agguacuugggaggcugagg

SEQ ID NO: 324776 - RNA, 21 nt, Artificial Sequence
  Synthetic
cagguacuugggaggcugagg

SEQ ID NO: 324777 - RNA, 22 nt, Artificial Sequence
  Synthetic
ccagguacuugggaggcugagg

SEQ ID NO: 324778 - RNA, 23 nt, Artificial Sequence
  Synthetic
cccagguacuugggaggcugagg

SEQ ID NO: 324779 - RNA, 24 nt, Artificial Sequence
  Synthetic
ucccagguacuugggaggcugagg

SEQ ID NO: 324780 - RNA, 18 nt, Artificial Sequence
  Synthetic
cuauuugggaggcugagg

SEQ ID NO: 324781 - RNA, 19 nt, Artificial Sequence
  Synthetic
gcuauuugggaggcugagg

SEQ ID NO: 324782 - RNA, 20 nt, Artificial Sequence
  Synthetic
agcuauuugggaggcugagg

SEQ ID NO: 324783 - RNA, 21 nt, Artificial Sequence
  Synthetic
cagcuauuugggaggcugagg

SEQ ID NO: 324784 - RNA, 22 nt, Artificial Sequence
  Synthetic
ccagcuauuugggaggcugagg

SEQ ID NO: 324785 - RNA, 23 nt, Artificial Sequence
  Synthetic
cccagcuauuugggaggcugagg

SEQ ID NO: 324786 - RNA, 24 nt, Artificial Sequence
  Synthetic
ucccagcuauuugggaggcugagg

SEQ ID NO: 324787 - RNA, 18 nt, Artificial Sequence
  Synthetic
ugcuuugggaggcugagg

SEQ ID NO: 324788 - RNA, 19 nt, Artificial Sequence
  Synthetic
gugcuuugggaggcugagg

SEQ ID NO: 324789 - RNA, 20 nt, Artificial Sequence
  Synthetic
agugcuuugggaggcugagg

SEQ ID NO: 324790 - RNA, 21 nt, Artificial Sequence
  Synthetic
cagugcuuugggaggcugagg

SEQ ID NO: 324791 - RNA, 22 nt, Artificial Sequence
  Synthetic
ccagugcuuugggaggcugagg

SEQ ID NO: 324792 - RNA, 23 nt, Artificial Sequence
  Synthetic
cccagugcuuugggaggcugagg

SEQ ID NO: 324793 - RNA, 24 nt, Artificial Sequence
  Synthetic
ucccagugcuuugggaggcugagg

SEQ ID NO: 324794 - RNA, 20 nt, Artificial Sequence
  Synthetic
ugugcuuugggaggcugagg

SEQ ID NO: 324795 - RNA, 21 nt, Artificial Sequence
  Synthetic
cugugcuuugggaggcugagg

SEQ ID NO: 324796 - RNA, 22 nt, Artificial Sequence
  Synthetic
ccugugcuuugggaggcugagg

SEQ ID NO: 324797 - RNA, 23 nt, Artificial Sequence
  Synthetic
cccugugcuuugggaggcugagg

SEQ ID NO: 324798 - RNA, 24 nt, Artificial Sequence
  Synthetic
ucccugugcuuugggaggcugagg

SEQ ID NO: 324799 - RNA, 18 nt, Artificial Sequence
  Synthetic
acacacuggaggcugagg

SEQ ID NO: 324800 - RNA, 19 nt, Artificial Sequence
  Synthetic
gacacacuggaggcugagg

SEQ ID NO: 324801 - RNA, 20 nt, Artificial Sequence
  Synthetic
agacacacuggaggcugagg

SEQ ID NO: 324802 - RNA, 21 nt, Artificial Sequence
  Synthetic
cagacacacuggaggcugagg

SEQ ID NO: 324803 - RNA, 22 nt, Artificial Sequence
  Synthetic
ccagacacacuggaggcugagg

SEQ ID NO: 324804 - RNA, 23 nt, Artificial Sequence
  Synthetic
cccagacacacuggaggcugagg

SEQ ID NO: 324805 - RNA, 24 nt, Artificial Sequence
  Synthetic
ucccagacacacuggaggcugagg

SEQ ID NO: 324806 - RNA, 18 nt, Artificial Sequence
  Synthetic
cugcucuggaggcugagg

SEQ ID NO: 324807 - RNA, 19 nt, Artificial Sequence
  Synthetic
gcugcucuggaggcugagg

SEQ ID NO: 324808 - RNA, 20 nt, Artificial Sequence
  Synthetic
agcugcucuggaggcugagg

SEQ ID NO: 324809 - RNA, 21 nt, Artificial Sequence
  Synthetic
cagcugcucuggaggcugagg

SEQ ID NO: 324810 - RNA, 22 nt, Artificial Sequence
  Synthetic
ccagcugcucuggaggcugagg

SEQ ID NO: 324811 - RNA, 23 nt, Artificial Sequence
  Synthetic
cccagcugcucuggaggcugagg

SEQ ID NO: 324812 - RNA, 24 nt, Artificial Sequence
  Synthetic
ucccagcugcucuggaggcugagg

SEQ ID NO: 324813 - RNA, 18 nt, Artificial Sequence
  Synthetic
cuacuccugaggcugagg

SEQ ID NO: 324814 - RNA, 19 nt, Artificial Sequence
  Synthetic
gcuacuccugaggcugagg

SEQ ID NO: 324815 - RNA, 20 nt, Artificial Sequence
  Synthetic
agcuacuccugaggcugagg

SEQ ID NO: 324816 - RNA, 21 nt, Artificial Sequence
  Synthetic
cagcuacuccugaggcugagg

SEQ ID NO: 324817 - RNA, 22 nt, Artificial Sequence
  Synthetic
ccagcuacuccugaggcugagg

SEQ ID NO: 324818 - RNA, 23 nt, Artificial Sequence
  Synthetic
cccagcuacuccugaggcugagg

SEQ ID NO: 324819 - RNA, 24 nt, Artificial Sequence
  Synthetic
ccccagcuacuccugaggcugagg

SEQ ID NO: 324820 - RNA, 18 nt, Artificial Sequence
  Synthetic
gucauuaggaugcugagg

SEQ ID NO: 324821 - RNA, 19 nt, Artificial Sequence
  Synthetic
ggucauuaggaugcugagg

SEQ ID NO: 324822 - RNA, 20 nt, Artificial Sequence
  Synthetic
aggucauuaggaugcugagg

SEQ ID NO: 324823 - RNA, 21 nt, Artificial Sequence
  Synthetic
caggucauuaggaugcugagg

SEQ ID NO: 324824 - RNA, 22 nt, Artificial Sequence
  Synthetic
acaggucauuaggaugcugagg

SEQ ID NO: 324825 - RNA, 23 nt, Artificial Sequence
  Synthetic
cacaggucauuaggaugcugagg

SEQ ID NO: 324826 - RNA, 24 nt, Artificial Sequence
  Synthetic
ccacaggucauuaggaugcugagg

SEQ ID NO: 324827 - RNA, 18 nt, Artificial Sequence
  Synthetic
agauuuucauugcugagg

SEQ ID NO: 324828 - RNA, 19 nt, Artificial Sequence
  Synthetic
aagauuuucauugcugagg

SEQ ID NO: 324829 - RNA, 20 nt, Artificial Sequence
  Synthetic
uaagauuuucauugcugagg

SEQ ID NO: 324830 - RNA, 21 nt, Artificial Sequence
  Synthetic
guaagauuuucauugcugagg

SEQ ID NO: 324831 - RNA, 22 nt, Artificial Sequence
  Synthetic
uguaagauuuucauugcugagg

SEQ ID NO: 324832 - RNA, 23 nt, Artificial Sequence
  Synthetic
auguaagauuuucauugcugagg

SEQ ID NO: 324833 - RNA, 24 nt, Artificial Sequence
  Synthetic
uauguaagauuuucauugcugagg

SEQ ID NO: 324834 - RNA, 18 nt, Artificial Sequence
  Synthetic
cuacaugggagucugagg

SEQ ID NO: 324835 - RNA, 19 nt, Artificial Sequence
  Synthetic
gcuacaugggagucugagg

SEQ ID NO: 324836 - RNA, 20 nt, Artificial Sequence
  Synthetic
agcuacaugggagucugagg

SEQ ID NO: 324837 - RNA, 21 nt, Artificial Sequence
  Synthetic
cagcuacaugggagucugagg

SEQ ID NO: 324838 - RNA, 22 nt, Artificial Sequence
  Synthetic
ccagcuacaugggagucugagg

SEQ ID NO: 324839 - RNA, 23 nt, Artificial Sequence
  Synthetic
cccagcuacaugggagucugagg

SEQ ID NO: 324840 - RNA, 24 nt, Artificial Sequence
  Synthetic
ucccagcuacaugggagucugagg

SEQ ID NO: 324841 - RNA, 18 nt, Artificial Sequence
  Synthetic
uggacaaguuuucugagg

SEQ ID NO: 324842 - RNA, 19 nt, Artificial Sequence
  Synthetic
uuggacaaguuuucugagg

SEQ ID NO: 324843 - RNA, 20 nt, Artificial Sequence
  Synthetic
cuuggacaaguuuucugagg

SEQ ID NO: 324844 - RNA, 21 nt, Artificial Sequence
  Synthetic
acuuggacaaguuuucugagg

SEQ ID NO: 324845 - RNA, 22 nt, Artificial Sequence
  Synthetic
aacuuggacaaguuuucugagg

SEQ ID NO: 324846 - RNA, 23 nt, Artificial Sequence
  Synthetic
caacuuggacaaguuuucugagg

SEQ ID NO: 324847 - RNA, 24 nt, Artificial Sequence
  Synthetic
acaacuuggacaaguuuucugagg

SEQ ID NO: 324848 - RNA, 18 nt, Artificial Sequence
  Synthetic
guauaaaaaaaagugagg

SEQ ID NO: 324849 - RNA, 19 nt, Artificial Sequence
  Synthetic
gguauaaaaaaaagugagg

SEQ ID NO: 324850 - RNA, 20 nt, Artificial Sequence
  Synthetic
ggguauaaaaaaaagugagg

SEQ ID NO: 324851 - RNA, 21 nt, Artificial Sequence
  Synthetic
uggguauaaaaaaaagugagg

SEQ ID NO: 324852 - RNA, 22 nt, Artificial Sequence
  Synthetic
auggguauaaaaaaaagugagg

SEQ ID NO: 324853 - RNA, 23 nt, Artificial Sequence
  Synthetic
gauggguauaaaaaaaagugagg

SEQ ID NO: 324854 - RNA, 24 nt, Artificial Sequence
  Synthetic
ggauggguauaaaaaaaagugagg

SEQ ID NO: 324855 - RNA, 18 nt, Artificial Sequence
  Synthetic
aagacaagaaaagugagg

SEQ ID NO: 324856 - RNA, 19 nt, Artificial Sequence
  Synthetic
caagacaagaaaagugagg

SEQ ID NO: 324857 - RNA, 20 nt, Artificial Sequence
  Synthetic
ccaagacaagaaaagugagg

SEQ ID NO: 324858 - RNA, 21 nt, Artificial Sequence
  Synthetic
gccaagacaagaaaagugagg

SEQ ID NO: 324859 - RNA, 22 nt, Artificial Sequence
  Synthetic
agccaagacaagaaaagugagg

SEQ ID NO: 324860 - RNA, 23 nt, Artificial Sequence
  Synthetic
aagccaagacaagaaaagugagg

SEQ ID NO: 324861 - RNA, 24 nt, Artificial Sequence
  Synthetic
aaagccaagacaagaaaagugagg

SEQ ID NO: 324862 - RNA, 18 nt, Artificial Sequence
  Synthetic
cuaagcuugaaagugagg

SEQ ID NO: 324863 - RNA, 19 nt, Artificial Sequence
  Synthetic
gcuaagcuugaaagugagg

SEQ ID NO: 324864 - RNA, 20 nt, Artificial Sequence
  Synthetic
agcuaagcuugaaagugagg

SEQ ID NO: 324865 - RNA, 21 nt, Artificial Sequence
  Synthetic
gagcuaagcuugaaagugagg

SEQ ID NO: 324866 - RNA, 22 nt, Artificial Sequence
  Synthetic
ggagcuaagcuugaaagugagg

SEQ ID NO: 324867 - RNA, 23 nt, Artificial Sequence
  Synthetic
uggagcuaagcuugaaagugagg

SEQ ID NO: 324868 - RNA, 24 nt, Artificial Sequence
  Synthetic
uuggagcuaagcuugaaagugagg

SEQ ID NO: 324869 - RNA, 18 nt, Artificial Sequence
  Synthetic
gguuuggcuuaagugagg

SEQ ID NO: 324870 - RNA, 19 nt, Artificial Sequence
  Synthetic
agguuuggcuuaagugagg

SEQ ID NO: 324871 - RNA, 20 nt, Artificial Sequence
  Synthetic
uagguuuggcuuaagugagg

SEQ ID NO: 324872 - RNA, 21 nt, Artificial Sequence
  Synthetic
uuagguuuggcuuaagugagg

SEQ ID NO: 324873 - RNA, 22 nt, Artificial Sequence
  Synthetic
uuuagguuuggcuuaagugagg

SEQ ID NO: 324874 - RNA, 23 nt, Artificial Sequence
  Synthetic
cuuuagguuuggcuuaagugagg

SEQ ID NO: 324875 - RNA, 24 nt, Artificial Sequence
  Synthetic
acuuuagguuuggcuuaagugagg

SEQ ID NO: 324876 - RNA, 18 nt, Artificial Sequence
  Synthetic
cugagggcagcagugagg

SEQ ID NO: 324877 - RNA, 19 nt, Artificial Sequence
  Synthetic
gcugagggcagcagugagg

SEQ ID NO: 324878 - RNA, 20 nt, Artificial Sequence
  Synthetic
ggcugagggcagcagugagg

SEQ ID NO: 324879 - RNA, 21 nt, Artificial Sequence
  Synthetic
aggcugagggcagcagugagg

SEQ ID NO: 324880 - RNA, 22 nt, Artificial Sequence
  Synthetic
gaggcugagggcagcagugagg

SEQ ID NO: 324881 - RNA, 23 nt, Artificial Sequence
  Synthetic
ugaggcugagggcagcagugagg

SEQ ID NO: 324882 - RNA, 24 nt, Artificial Sequence
  Synthetic
augaggcugagggcagcagugagg

SEQ ID NO: 324883 - RNA, 18 nt, Artificial Sequence
  Synthetic
uacgcucugggagugagg

SEQ ID NO: 324884 - RNA, 19 nt, Artificial Sequence
  Synthetic
auacgcucugggagugagg

SEQ ID NO: 324885 - RNA, 20 nt, Artificial Sequence
  Synthetic
gauacgcucugggagugagg

SEQ ID NO: 324886 - RNA, 21 nt, Artificial Sequence
  Synthetic
ugauacgcucugggagugagg

SEQ ID NO: 324887 - RNA, 22 nt, Artificial Sequence
  Synthetic
uugauacgcucugggagugagg

SEQ ID NO: 324888 - RNA, 23 nt, Artificial Sequence
  Synthetic
auugauacgcucugggagugagg

SEQ ID NO: 324889 - RNA, 24 nt, Artificial Sequence
  Synthetic
uauugauacgcucugggagugagg

SEQ ID NO: 324890 - RNA, 18 nt, Artificial Sequence
  Synthetic
ccaaacccacucgugagg

SEQ ID NO: 324891 - RNA, 19 nt, Artificial Sequence
  Synthetic
accaaacccacucgugagg

SEQ ID NO: 324892 - RNA, 20 nt, Artificial Sequence
  Synthetic
aaccaaacccacucgugagg

SEQ ID NO: 324893 - RNA, 21 nt, Artificial Sequence
  Synthetic
gaaccaaacccacucgugagg

SEQ ID NO: 324894 - RNA, 22 nt, Artificial Sequence
  Synthetic
ggaaccaaacccacucgugagg

SEQ ID NO: 324895 - RNA, 23 nt, Artificial Sequence
  Synthetic
gggaaccaaacccacucgugagg

SEQ ID NO: 324896 - RNA, 24 nt, Artificial Sequence
  Synthetic
agggaaccaaacccacucgugagg

SEQ ID NO: 324897 - RNA, 18 nt, Artificial Sequence
  Synthetic
auaaaguagaaggugagg

SEQ ID NO: 324898 - RNA, 19 nt, Artificial Sequence
  Synthetic
cauaaaguagaaggugagg

SEQ ID NO: 324899 - RNA, 20 nt, Artificial Sequence
  Synthetic
gcauaaaguagaaggugagg

SEQ ID NO: 324900 - RNA, 21 nt, Artificial Sequence
  Synthetic
agcauaaaguagaaggugagg

SEQ ID NO: 324901 - RNA, 22 nt, Artificial Sequence
  Synthetic
gagcauaaaguagaaggugagg

SEQ ID NO: 324902 - RNA, 23 nt, Artificial Sequence
  Synthetic
ugagcauaaaguagaaggugagg

SEQ ID NO: 324903 - RNA, 24 nt, Artificial Sequence
  Synthetic
gugagcauaaaguagaaggugagg

SEQ ID NO: 324904 - RNA, 18 nt, Artificial Sequence
  Synthetic
aauguuagugaggugagg

SEQ ID NO: 324905 - RNA, 19 nt, Artificial Sequence
  Synthetic
gaauguuagugaggugagg

SEQ ID NO: 324906 - RNA, 20 nt, Artificial Sequence
  Synthetic
agaauguuagugaggugagg

SEQ ID NO: 324907 - RNA, 21 nt, Artificial Sequence
  Synthetic
gagaauguuagugaggugagg

SEQ ID NO: 324908 - RNA, 22 nt, Artificial Sequence
  Synthetic
agagaauguuagugaggugagg

SEQ ID NO: 324909 - RNA, 23 nt, Artificial Sequence
  Synthetic
gagagaauguuagugaggugagg

SEQ ID NO: 324910 - RNA, 24 nt, Artificial Sequence
  Synthetic
ggagagaauguuagugaggugagg

SEQ ID NO: 324911 - RNA, 18 nt, Artificial Sequence
  Synthetic
acaauagcaauggugagg

SEQ ID NO: 324912 - RNA, 19 nt, Artificial Sequence
  Synthetic
uacaauagcaauggugagg

SEQ ID NO: 324913 - RNA, 20 nt, Artificial Sequence
  Synthetic
uuacaauagcaauggugagg

SEQ ID NO: 324914 - RNA, 21 nt, Artificial Sequence
  Synthetic
guuacaauagcaauggugagg

SEQ ID NO: 324915 - RNA, 22 nt, Artificial Sequence
  Synthetic
aguuacaauagcaauggugagg

SEQ ID NO: 324916 - RNA, 23 nt, Artificial Sequence
  Synthetic
uaguuacaauagcaauggugagg

SEQ ID NO: 324917 - RNA, 24 nt, Artificial Sequence
  Synthetic
auaguuacaauagcaauggugagg

SEQ ID NO: 324918 - RNA, 18 nt, Artificial Sequence
  Synthetic
aaaaaaagaauggugagg

SEQ ID NO: 324919 - RNA, 19 nt, Artificial Sequence
  Synthetic
gaaaaaaagaauggugagg

SEQ ID NO: 324920 - RNA, 20 nt, Artificial Sequence
  Synthetic
agaaaaaaagaauggugagg

SEQ ID NO: 324921 - RNA, 21 nt, Artificial Sequence
  Synthetic
uagaaaaaaagaauggugagg

SEQ ID NO: 324922 - RNA, 22 nt, Artificial Sequence
  Synthetic
uuagaaaaaaagaauggugagg

SEQ ID NO: 324923 - RNA, 23 nt, Artificial Sequence
  Synthetic
uuuagaaaaaaagaauggugagg

SEQ ID NO: 324924 - RNA, 24 nt, Artificial Sequence
  Synthetic
auuuagaaaaaaagaauggugagg

SEQ ID NO: 324925 - RNA, 18 nt, Artificial Sequence
  Synthetic
guuugcuuucuggugagg

SEQ ID NO: 324926 - RNA, 19 nt, Artificial Sequence
  Synthetic
gguuugcuuucuggugagg

SEQ ID NO: 324927 - RNA, 20 nt, Artificial Sequence
  Synthetic
ugguuugcuuucuggugagg

SEQ ID NO: 324928 - RNA, 21 nt, Artificial Sequence
  Synthetic
gugguuugcuuucuggugagg

SEQ ID NO: 324929 - RNA, 22 nt, Artificial Sequence
  Synthetic
agugguuugcuuucuggugagg

SEQ ID NO: 324930 - RNA, 23 nt, Artificial Sequence
  Synthetic
gagugguuugcuuucuggugagg

SEQ ID NO: 324931 - RNA, 24 nt, Artificial Sequence
  Synthetic
ugagugguuugcuuucuggugagg

SEQ ID NO: 324932 - RNA, 18 nt, Artificial Sequence
  Synthetic
augaucaaaguggugagg

SEQ ID NO: 324933 - RNA, 19 nt, Artificial Sequence
  Synthetic
gaugaucaaaguggugagg

SEQ ID NO: 324934 - RNA, 20 nt, Artificial Sequence
  Synthetic
ugaugaucaaaguggugagg

SEQ ID NO: 324935 - RNA, 21 nt, Artificial Sequence
  Synthetic
uugaugaucaaaguggugagg

SEQ ID NO: 324936 - RNA, 22 nt, Artificial Sequence
  Synthetic
auugaugaucaaaguggugagg

SEQ ID NO: 324937 - RNA, 23 nt, Artificial Sequence
  Synthetic
aauugaugaucaaaguggugagg

SEQ ID NO: 324938 - RNA, 24 nt, Artificial Sequence
  Synthetic
gaauugaugaucaaaguggugagg

SEQ ID NO: 324939 - RNA, 18 nt, Artificial Sequence
  Synthetic
augucaguuguggugagg

SEQ ID NO: 324940 - RNA, 19 nt, Artificial Sequence
  Synthetic
aaugucaguuguggugagg

SEQ ID NO: 324941 - RNA, 20 nt, Artificial Sequence
  Synthetic
aaaugucaguuguggugagg

SEQ ID NO: 324942 - RNA, 21 nt, Artificial Sequence
  Synthetic
aaaaugucaguuguggugagg

SEQ ID NO: 324943 - RNA, 22 nt, Artificial Sequence
  Synthetic
caaaaugucaguuguggugagg

SEQ ID NO: 324944 - RNA, 23 nt, Artificial Sequence
  Synthetic
ccaaaaugucaguuguggugagg

SEQ ID NO: 324945 - RNA, 24 nt, Artificial Sequence
  Synthetic
uccaaaaugucaguuguggugagg

SEQ ID NO: 324946 - RNA, 18 nt, Artificial Sequence
  Synthetic
aucuguggcaaugugagg

SEQ ID NO: 324947 - RNA, 19 nt, Artificial Sequence
  Synthetic
gaucuguggcaaugugagg

SEQ ID NO: 324948 - RNA, 20 nt, Artificial Sequence
  Synthetic
ggaucuguggcaaugugagg

SEQ ID NO: 324949 - RNA, 21 nt, Artificial Sequence
  Synthetic
uggaucuguggcaaugugagg

SEQ ID NO: 324950 - RNA, 22 nt, Artificial Sequence
  Synthetic
cuggaucuguggcaaugugagg

SEQ ID NO: 324951 - RNA, 23 nt, Artificial Sequence
  Synthetic
ccuggaucuguggcaaugugagg

SEQ ID NO: 324952 - RNA, 24 nt, Artificial Sequence
  Synthetic
accuggaucuguggcaaugugagg

SEQ ID NO: 324953 - RNA, 18 nt, Artificial Sequence
  Synthetic
ccuguucauaaugugagg

SEQ ID NO: 324954 - RNA, 19 nt, Artificial Sequence
  Synthetic
cccuguucauaaugugagg

SEQ ID NO: 324955 - RNA, 20 nt, Artificial Sequence
  Synthetic
ucccuguucauaaugugagg

SEQ ID NO: 324956 - RNA, 21 nt, Artificial Sequence
  Synthetic
uucccuguucauaaugugagg

SEQ ID NO: 324957 - RNA, 22 nt, Artificial Sequence
  Synthetic
cuucccuguucauaaugugagg

SEQ ID NO: 324958 - RNA, 23 nt, Artificial Sequence
  Synthetic
acuucccuguucauaaugugagg

SEQ ID NO: 324959 - RNA, 24 nt, Artificial Sequence
  Synthetic
aacuucccuguucauaaugugagg

SEQ ID NO: 324960 - RNA, 18 nt, Artificial Sequence
  Synthetic
gaaaauguguaugugagg

SEQ ID NO: 324961 - RNA, 19 nt, Artificial Sequence
  Synthetic
ugaaaauguguaugugagg

SEQ ID NO: 324962 - RNA, 20 nt, Artificial Sequence
  Synthetic
augaaaauguguaugugagg

SEQ ID NO: 324963 - RNA, 21 nt, Artificial Sequence
  Synthetic
aaugaaaauguguaugugagg

SEQ ID NO: 324964 - RNA, 22 nt, Artificial Sequence
  Synthetic
aaaugaaaauguguaugugagg

SEQ ID NO: 324965 - RNA, 23 nt, Artificial Sequence
  Synthetic
aaaaugaaaauguguaugugagg

SEQ ID NO: 324966 - RNA, 24 nt, Artificial Sequence
  Synthetic
uaaaaugaaaauguguaugugagg

SEQ ID NO: 324967 - RNA, 18 nt, Artificial Sequence
  Synthetic
gauagcuguuaugugagg

SEQ ID NO: 324968 - RNA, 19 nt, Artificial Sequence
  Synthetic
ugauagcuguuaugugagg

SEQ ID NO: 324969 - RNA, 20 nt, Artificial Sequence
  Synthetic
cugauagcuguuaugugagg

SEQ ID NO: 324970 - RNA, 21 nt, Artificial Sequence
  Synthetic
ccugauagcuguuaugugagg

SEQ ID NO: 324971 - RNA, 22 nt, Artificial Sequence
  Synthetic
uccugauagcuguuaugugagg

SEQ ID NO: 324972 - RNA, 23 nt, Artificial Sequence
  Synthetic
auccugauagcuguuaugugagg

SEQ ID NO: 324973 - RNA, 24 nt, Artificial Sequence
  Synthetic
cauccugauagcuguuaugugagg

SEQ ID NO: 324974 - RNA, 18 nt, Artificial Sequence
  Synthetic
caacugaccugugugagg

SEQ ID NO: 324975 - RNA, 19 nt, Artificial Sequence
  Synthetic
acaacugaccugugugagg

SEQ ID NO: 324976 - RNA, 20 nt, Artificial Sequence
  Synthetic
aacaacugaccugugugagg

SEQ ID NO: 324977 - RNA, 21 nt, Artificial Sequence
  Synthetic
caacaacugaccugugugagg

SEQ ID NO: 324978 - RNA, 22 nt, Artificial Sequence
  Synthetic
gcaacaacugaccugugugagg

SEQ ID NO: 324979 - RNA, 23 nt, Artificial Sequence
  Synthetic
ugcaacaacugaccugugugagg

SEQ ID NO: 324980 - RNA, 24 nt, Artificial Sequence
  Synthetic
gugcaacaacugaccugugugagg

SEQ ID NO: 324981 - RNA, 18 nt, Artificial Sequence
  Synthetic
auaaguaugugugugagg

SEQ ID NO: 324982 - RNA, 19 nt, Artificial Sequence
  Synthetic
uauaaguaugugugugagg

SEQ ID NO: 324983 - RNA, 20 nt, Artificial Sequence
  Synthetic
guauaaguaugugugugagg

SEQ ID NO: 324984 - RNA, 21 nt, Artificial Sequence
  Synthetic
aguauaaguaugugugugagg

SEQ ID NO: 324985 - RNA, 22 nt, Artificial Sequence
  Synthetic
aaguauaaguaugugugugagg

SEQ ID NO: 324986 - RNA, 23 nt, Artificial Sequence
  Synthetic
uaaguauaaguaugugugugagg

SEQ ID NO: 324987 - RNA, 24 nt, Artificial Sequence
  Synthetic
uuaaguauaaguaugugugugagg

SEQ ID NO: 324988 - RNA, 18 nt, Artificial Sequence
  Synthetic
accuuuggucuugugagg

SEQ ID NO: 324989 - RNA, 19 nt, Artificial Sequence
  Synthetic
gaccuuuggucuugugagg

SEQ ID NO: 324990 - RNA, 20 nt, Artificial Sequence
  Synthetic
agaccuuuggucuugugagg

SEQ ID NO: 324991 - RNA, 21 nt, Artificial Sequence
  Synthetic
cagaccuuuggucuugugagg

SEQ ID NO: 324992 - RNA, 22 nt, Artificial Sequence
  Synthetic
ucagaccuuuggucuugugagg

SEQ ID NO: 324993 - RNA, 23 nt, Artificial Sequence
  Synthetic
uucagaccuuuggucuugugagg

SEQ ID NO: 324994 - RNA, 24 nt, Artificial Sequence
  Synthetic
uuucagaccuuuggucuugugagg

SEQ ID NO: 324995 - RNA, 18 nt, Artificial Sequence
  Synthetic
ucccagcucuuugugagg

SEQ ID NO: 324996 - RNA, 19 nt, Artificial Sequence
  Synthetic
aucccagcucuuugugagg

SEQ ID NO: 324997 - RNA, 20 nt, Artificial Sequence
  Synthetic
aaucccagcucuuugugagg

SEQ ID NO: 324998 - RNA, 21 nt, Artificial Sequence
  Synthetic
uaaucccagcucuuugugagg

SEQ ID NO: 324999 - RNA, 22 nt, Artificial Sequence
  Synthetic
guaaucccagcucuuugugagg

SEQ ID NO: 325000 - RNA, 23 nt, Artificial Sequence
  Synthetic
uguaaucccagcucuuugugagg

SEQ ID NO: 325001 - RNA, 24 nt, Artificial Sequence
  Synthetic
cuguaaucccagcucuuugugagg

SEQ ID NO: 325002 - RNA, 18 nt, Artificial Sequence
  Synthetic
auccucuucuaauugagg

SEQ ID NO: 325003 - RNA, 19 nt, Artificial Sequence
  Synthetic
cauccucuucuaauugagg

SEQ ID NO: 325004 - RNA, 20 nt, Artificial Sequence
  Synthetic
ccauccucuucuaauugagg

SEQ ID NO: 325005 - RNA, 21 nt, Artificial Sequence
  Synthetic
uccauccucuucuaauugagg

SEQ ID NO: 325006 - RNA, 22 nt, Artificial Sequence
  Synthetic
uuccauccucuucuaauugagg

SEQ ID NO: 325007 - RNA, 23 nt, Artificial Sequence
  Synthetic
cuuccauccucuucuaauugagg

SEQ ID NO: 325008 - RNA, 24 nt, Artificial Sequence
  Synthetic
acuuccauccucuucuaauugagg

SEQ ID NO: 325009 - RNA, 18 nt, Artificial Sequence
  Synthetic
guugggaagucauugagg

SEQ ID NO: 325010 - RNA, 19 nt, Artificial Sequence
  Synthetic
uguugggaagucauugagg

SEQ ID NO: 325011 - RNA, 20 nt, Artificial Sequence
  Synthetic
cuguugggaagucauugagg

SEQ ID NO: 325012 - RNA, 21 nt, Artificial Sequence
  Synthetic
gcuguugggaagucauugagg

SEQ ID NO: 325013 - RNA, 22 nt, Artificial Sequence
  Synthetic
agcuguugggaagucauugagg

SEQ ID NO: 325014 - RNA, 23 nt, Artificial Sequence
  Synthetic
aagcuguugggaagucauugagg

SEQ ID NO: 325015 - RNA, 24 nt, Artificial Sequence
  Synthetic
aaagcuguugggaagucauugagg

SEQ ID NO: 325016 - RNA, 18 nt, Artificial Sequence
  Synthetic
aggcaagauauauugagg

SEQ ID NO: 325017 - RNA, 19 nt, Artificial Sequence
  Synthetic
aaggcaagauauauugagg

SEQ ID NO: 325018 - RNA, 20 nt, Artificial Sequence
  Synthetic
gaaggcaagauauauugagg

SEQ ID NO: 325019 - RNA, 21 nt, Artificial Sequence
  Synthetic
ugaaggcaagauauauugagg

SEQ ID NO: 325020 - RNA, 22 nt, Artificial Sequence
  Synthetic
uugaaggcaagauauauugagg

SEQ ID NO: 325021 - RNA, 23 nt, Artificial Sequence
  Synthetic
cuugaaggcaagauauauugagg

SEQ ID NO: 325022 - RNA, 24 nt, Artificial Sequence
  Synthetic
ccuugaaggcaagauauauugagg

SEQ ID NO: 325023 - RNA, 18 nt, Artificial Sequence
  Synthetic
ugucauuugguauugagg

SEQ ID NO: 325024 - RNA, 19 nt, Artificial Sequence
  Synthetic
augucauuugguauugagg

SEQ ID NO: 325025 - RNA, 20 nt, Artificial Sequence
  Synthetic
aaugucauuugguauugagg

SEQ ID NO: 325026 - RNA, 21 nt, Artificial Sequence
  Synthetic
aaaugucauuugguauugagg

SEQ ID NO: 325027 - RNA, 22 nt, Artificial Sequence
  Synthetic
gaaaugucauuugguauugagg

SEQ ID NO: 325028 - RNA, 23 nt, Artificial Sequence
  Synthetic
agaaaugucauuugguauugagg

SEQ ID NO: 325029 - RNA, 24 nt, Artificial Sequence
  Synthetic
cagaaaugucauuugguauugagg

SEQ ID NO: 325030 - RNA, 18 nt, Artificial Sequence
  Synthetic
aaugucaucaccuugagg

SEQ ID NO: 325031 - RNA, 19 nt, Artificial Sequence
  Synthetic
uaaugucaucaccuugagg

SEQ ID NO: 325032 - RNA, 20 nt, Artificial Sequence
  Synthetic
cuaaugucaucaccuugagg

SEQ ID NO: 325033 - RNA, 21 nt, Artificial Sequence
  Synthetic
ccuaaugucaucaccuugagg

SEQ ID NO: 325034 - RNA, 22 nt, Artificial Sequence
  Synthetic
uccuaaugucaucaccuugagg

SEQ ID NO: 325035 - RNA, 23 nt, Artificial Sequence
  Synthetic
uuccuaaugucaucaccuugagg

SEQ ID NO: 325036 - RNA, 24 nt, Artificial Sequence
  Synthetic
cuuccuaaugucaucaccuugagg

SEQ ID NO: 325037 - RNA, 18 nt, Artificial Sequence
  Synthetic
gccuuucaggccuugagg

SEQ ID NO: 325038 - RNA, 19 nt, Artificial Sequence
  Synthetic
agccuuucaggccuugagg

SEQ ID NO: 325039 - RNA, 20 nt, Artificial Sequence
  Synthetic
uagccuuucaggccuugagg

SEQ ID NO: 325040 - RNA, 21 nt, Artificial Sequence
  Synthetic
uuagccuuucaggccuugagg

SEQ ID NO: 325041 - RNA, 22 nt, Artificial Sequence
  Synthetic
cuuagccuuucaggccuugagg

SEQ ID NO: 325042 - RNA, 23 nt, Artificial Sequence
  Synthetic
ccuuagccuuucaggccuugagg

SEQ ID NO: 325043 - RNA, 24 nt, Artificial Sequence
  Synthetic
cccuuagccuuucaggccuugagg

SEQ ID NO: 325044 - RNA, 18 nt, Artificial Sequence
  Synthetic
gggcugcacugcuugagg

SEQ ID NO: 325045 - RNA, 19 nt, Artificial Sequence
  Synthetic
ugggcugcacugcuugagg

SEQ ID NO: 325046 - RNA, 20 nt, Artificial Sequence
  Synthetic
gugggcugcacugcuugagg

SEQ ID NO: 325047 - RNA, 21 nt, Artificial Sequence
  Synthetic
ugugggcugcacugcuugagg

SEQ ID NO: 325048 - RNA, 22 nt, Artificial Sequence
  Synthetic
cugugggcugcacugcuugagg

SEQ ID NO: 325049 - RNA, 23 nt, Artificial Sequence
  Synthetic
acugugggcugcacugcuugagg

SEQ ID NO: 325050 - RNA, 24 nt, Artificial Sequence
  Synthetic
uacugugggcugcacugcuugagg

SEQ ID NO: 325051 - RNA, 18 nt, Artificial Sequence
  Synthetic
uucauauacuucuugagg

SEQ ID NO: 325052 - RNA, 19 nt, Artificial Sequence
  Synthetic
auucauauacuucuugagg

SEQ ID NO: 325053 - RNA, 20 nt, Artificial Sequence
  Synthetic
uauucauauacuucuugagg

SEQ ID NO: 325054 - RNA, 21 nt, Artificial Sequence
  Synthetic
uuauucauauacuucuugagg

SEQ ID NO: 325055 - RNA, 22 nt, Artificial Sequence
  Synthetic
cuuauucauauacuucuugagg

SEQ ID NO: 325056 - RNA, 23 nt, Artificial Sequence
  Synthetic
ccuuauucauauacuucuugagg

SEQ ID NO: 325057 - RNA, 24 nt, Artificial Sequence
  Synthetic
cccuuauucauauacuucuugagg

SEQ ID NO: 325058 - RNA, 18 nt, Artificial Sequence
  Synthetic
uagcugaagugguugagg

SEQ ID NO: 325059 - RNA, 19 nt, Artificial Sequence
  Synthetic
uuagcugaagugguugagg

SEQ ID NO: 325060 - RNA, 20 nt, Artificial Sequence
  Synthetic
cuuagcugaagugguugagg

SEQ ID NO: 325061 - RNA, 21 nt, Artificial Sequence
  Synthetic
ucuuagcugaagugguugagg

SEQ ID NO: 325062 - RNA, 22 nt, Artificial Sequence
  Synthetic
gucuuagcugaagugguugagg

SEQ ID NO: 325063 - RNA, 23 nt, Artificial Sequence
  Synthetic
agucuuagcugaagugguugagg

SEQ ID NO: 325064 - RNA, 24 nt, Artificial Sequence
  Synthetic
gagucuuagcugaagugguugagg

SEQ ID NO: 325065 - RNA, 18 nt, Artificial Sequence
  Synthetic
uuaagaaagauguugagg

SEQ ID NO: 325066 - RNA, 19 nt, Artificial Sequence
  Synthetic
auuaagaaagauguugagg

SEQ ID NO: 325067 - RNA, 20 nt, Artificial Sequence
  Synthetic
aauuaagaaagauguugagg

SEQ ID NO: 325068 - RNA, 21 nt, Artificial Sequence
  Synthetic
uaauuaagaaagauguugagg

SEQ ID NO: 325069 - RNA, 22 nt, Artificial Sequence
  Synthetic
auaauuaagaaagauguugagg

SEQ ID NO: 325070 - RNA, 23 nt, Artificial Sequence
  Synthetic
aauaauuaagaaagauguugagg

SEQ ID NO: 325071 - RNA, 24 nt, Artificial Sequence
  Synthetic
aaauaauuaagaaagauguugagg

SEQ ID NO: 325072 - RNA, 18 nt, Artificial Sequence
  Synthetic
caacauaggaauuugagg

SEQ ID NO: 325073 - RNA, 19 nt, Artificial Sequence
  Synthetic
ucaacauaggaauuugagg

SEQ ID NO: 325074 - RNA, 20 nt, Artificial Sequence
  Synthetic
uucaacauaggaauuugagg

SEQ ID NO: 325075 - RNA, 21 nt, Artificial Sequence
  Synthetic
uuucaacauaggaauuugagg

SEQ ID NO: 325076 - RNA, 22 nt, Artificial Sequence
  Synthetic
auuucaacauaggaauuugagg

SEQ ID NO: 325077 - RNA, 23 nt, Artificial Sequence
  Synthetic
gauuucaacauaggaauuugagg

SEQ ID NO: 325078 - RNA, 24 nt, Artificial Sequence
  Synthetic
ggauuucaacauaggaauuugagg

SEQ ID NO: 325079 - RNA, 18 nt, Artificial Sequence
  Synthetic
uuuucuaagucuuugagg

SEQ ID NO: 325080 - RNA, 19 nt, Artificial Sequence
  Synthetic
uuuuucuaagucuuugagg

SEQ ID NO: 325081 - RNA, 20 nt, Artificial Sequence
  Synthetic
cuuuuucuaagucuuugagg

SEQ ID NO: 325082 - RNA, 21 nt, Artificial Sequence
  Synthetic
ucuuuuucuaagucuuugagg

SEQ ID NO: 325083 - RNA, 22 nt, Artificial Sequence
  Synthetic
uucuuuuucuaagucuuugagg

SEQ ID NO: 325084 - RNA, 23 nt, Artificial Sequence
  Synthetic
cuucuuuuucuaagucuuugagg

SEQ ID NO: 325085 - RNA, 24 nt, Artificial Sequence
  Synthetic
ccuucuuuuucuaagucuuugagg

SEQ ID NO: 325086 - RNA, 18 nt, Artificial Sequence
  Synthetic
ggggcuauguuuuugagg

SEQ ID NO: 325087 - RNA, 19 nt, Artificial Sequence
  Synthetic
gggggcuauguuuuugagg

SEQ ID NO: 325088 - RNA, 20 nt, Artificial Sequence
  Synthetic
agggggcuauguuuuugagg

SEQ ID NO: 325089 - RNA, 21 nt, Artificial Sequence
  Synthetic
uagggggcuauguuuuugagg

SEQ ID NO: 325090 - RNA, 22 nt, Artificial Sequence
  Synthetic
auagggggcuauguuuuugagg

SEQ ID NO: 325091 - RNA, 23 nt, Artificial Sequence
  Synthetic
uauagggggcuauguuuuugagg

SEQ ID NO: 325092 - RNA, 24 nt, Artificial Sequence
  Synthetic
guauagggggcuauguuuuugagg

SEQ ID NO: 325093 - RNA, 18 nt, Artificial Sequence
  Synthetic
gaagaaaagcaaaauagg

SEQ ID NO: 325094 - RNA, 19 nt, Artificial Sequence
  Synthetic
agaagaaaagcaaaauagg

SEQ ID NO: 325095 - RNA, 20 nt, Artificial Sequence
  Synthetic
gagaagaaaagcaaaauagg

SEQ ID NO: 325096 - RNA, 21 nt, Artificial Sequence
  Synthetic
agagaagaaaagcaaaauagg

SEQ ID NO: 325097 - RNA, 22 nt, Artificial Sequence
  Synthetic
aagagaagaaaagcaaaauagg

SEQ ID NO: 325098 - RNA, 23 nt, Artificial Sequence
  Synthetic
uaagagaagaaaagcaaaauagg

SEQ ID NO: 325099 - RNA, 24 nt, Artificial Sequence
  Synthetic
auaagagaagaaaagcaaaauagg

SEQ ID NO: 325100 - RNA, 18 nt, Artificial Sequence
  Synthetic
ugagaaaccgaaaauagg

SEQ ID NO: 325101 - RNA, 19 nt, Artificial Sequence
  Synthetic
cugagaaaccgaaaauagg

SEQ ID NO: 325102 - RNA, 20 nt, Artificial Sequence
  Synthetic
gcugagaaaccgaaaauagg

SEQ ID NO: 325103 - RNA, 21 nt, Artificial Sequence
  Synthetic
cgcugagaaaccgaaaauagg

SEQ ID NO: 325104 - RNA, 22 nt, Artificial Sequence
  Synthetic
gcgcugagaaaccgaaaauagg

SEQ ID NO: 325105 - RNA, 23 nt, Artificial Sequence
  Synthetic
agcgcugagaaaccgaaaauagg

SEQ ID NO: 325106 - RNA, 24 nt, Artificial Sequence
  Synthetic
gagcgcugagaaaccgaaaauagg

SEQ ID NO: 325107 - RNA, 18 nt, Artificial Sequence
  Synthetic
aaaggguauucaaauagg

SEQ ID NO: 325108 - RNA, 19 nt, Artificial Sequence
  Synthetic
uaaaggguauucaaauagg

SEQ ID NO: 325109 - RNA, 20 nt, Artificial Sequence
  Synthetic
auaaaggguauucaaauagg

SEQ ID NO: 325110 - RNA, 21 nt, Artificial Sequence
  Synthetic
aauaaaggguauucaaauagg

SEQ ID NO: 325111 - RNA, 22 nt, Artificial Sequence
  Synthetic
aaauaaaggguauucaaauagg

SEQ ID NO: 325112 - RNA, 23 nt, Artificial Sequence
  Synthetic
gaaauaaaggguauucaaauagg

SEQ ID NO: 325113 - RNA, 24 nt, Artificial Sequence
  Synthetic
agaaauaaaggguauucaaauagg

SEQ ID NO: 325114 - RNA, 18 nt, Artificial Sequence
  Synthetic
uaaaauaagauaaauagg

SEQ ID NO: 325115 - RNA, 19 nt, Artificial Sequence
  Synthetic
auaaaauaagauaaauagg

SEQ ID NO: 325116 - RNA, 20 nt, Artificial Sequence
  Synthetic
aauaaaauaagauaaauagg

SEQ ID NO: 325117 - RNA, 21 nt, Artificial Sequence
  Synthetic
caauaaaauaagauaaauagg

SEQ ID NO: 325118 - RNA, 22 nt, Artificial Sequence
  Synthetic
acaauaaaauaagauaaauagg

SEQ ID NO: 325119 - RNA, 23 nt, Artificial Sequence
  Synthetic
uacaauaaaauaagauaaauagg

SEQ ID NO: 325120 - RNA, 24 nt, Artificial Sequence
  Synthetic
auacaauaaaauaagauaaauagg

SEQ ID NO: 325121 - RNA, 18 nt, Artificial Sequence
  Synthetic
cgacugcuuuuaaauagg

SEQ ID NO: 325122 - RNA, 19 nt, Artificial Sequence
  Synthetic
gcgacugcuuuuaaauagg

SEQ ID NO: 325123 - RNA, 20 nt, Artificial Sequence
  Synthetic
ggcgacugcuuuuaaauagg

SEQ ID NO: 325124 - RNA, 21 nt, Artificial Sequence
  Synthetic
aggcgacugcuuuuaaauagg

SEQ ID NO: 325125 - RNA, 22 nt, Artificial Sequence
  Synthetic
aaggcgacugcuuuuaaauagg

SEQ ID NO: 325126 - RNA, 23 nt, Artificial Sequence
  Synthetic
uaaggcgacugcuuuuaaauagg

SEQ ID NO: 325127 - RNA, 24 nt, Artificial Sequence
  Synthetic
uuaaggcgacugcuuuuaaauagg

SEQ ID NO: 325128 - RNA, 18 nt, Artificial Sequence
  Synthetic
uuuagaugaugcaauagg

SEQ ID NO: 325129 - RNA, 19 nt, Artificial Sequence
  Synthetic
uuuuagaugaugcaauagg

SEQ ID NO: 325130 - RNA, 20 nt, Artificial Sequence
  Synthetic
uuuuuagaugaugcaauagg

SEQ ID NO: 325131 - RNA, 21 nt, Artificial Sequence
  Synthetic
uuuuuuagaugaugcaauagg

SEQ ID NO: 325132 - RNA, 22 nt, Artificial Sequence
  Synthetic
auuuuuuagaugaugcaauagg

SEQ ID NO: 325133 - RNA, 23 nt, Artificial Sequence
  Synthetic
aauuuuuuagaugaugcaauagg

SEQ ID NO: 325134 - RNA, 24 nt, Artificial Sequence
  Synthetic
caauuuuuuagaugaugcaauagg

SEQ ID NO: 325135 - RNA, 18 nt, Artificial Sequence
  Synthetic
cuuagccccaugaauagg

SEQ ID NO: 325136 - RNA, 19 nt, Artificial Sequence
  Synthetic
acuuagccccaugaauagg

SEQ ID NO: 325137 - RNA, 20 nt, Artificial Sequence
  Synthetic
aacuuagccccaugaauagg

SEQ ID NO: 325138 - RNA, 21 nt, Artificial Sequence
  Synthetic
caacuuagccccaugaauagg

SEQ ID NO: 325139 - RNA, 22 nt, Artificial Sequence
  Synthetic
ucaacuuagccccaugaauagg

SEQ ID NO: 325140 - RNA, 23 nt, Artificial Sequence
  Synthetic
uucaacuuagccccaugaauagg

SEQ ID NO: 325141 - RNA, 24 nt, Artificial Sequence
  Synthetic
auucaacuuagccccaugaauagg

SEQ ID NO: 325142 - RNA, 18 nt, Artificial Sequence
  Synthetic
cauccccuauugaauagg

SEQ ID NO: 325143 - RNA, 19 nt, Artificial Sequence
  Synthetic
acauccccuauugaauagg

SEQ ID NO: 325144 - RNA, 20 nt, Artificial Sequence
  Synthetic
gacauccccuauugaauagg

SEQ ID NO: 325145 - RNA, 21 nt, Artificial Sequence
  Synthetic
agacauccccuauugaauagg

SEQ ID NO: 325146 - RNA, 22 nt, Artificial Sequence
  Synthetic
aagacauccccuauugaauagg

SEQ ID NO: 325147 - RNA, 23 nt, Artificial Sequence
  Synthetic
uaagacauccccuauugaauagg

SEQ ID NO: 325148 - RNA, 24 nt, Artificial Sequence
  Synthetic
cuaagacauccccuauugaauagg

SEQ ID NO: 325149 - RNA, 18 nt, Artificial Sequence
  Synthetic
aucuuccuacauaauagg

SEQ ID NO: 325150 - RNA, 19 nt, Artificial Sequence
  Synthetic
uaucuuccuacauaauagg

SEQ ID NO: 325151 - RNA, 20 nt, Artificial Sequence
  Synthetic
uuaucuuccuacauaauagg

SEQ ID NO: 325152 - RNA, 21 nt, Artificial Sequence
  Synthetic
auuaucuuccuacauaauagg

SEQ ID NO: 325153 - RNA, 22 nt, Artificial Sequence
  Synthetic
aauuaucuuccuacauaauagg

SEQ ID NO: 325154 - RNA, 23 nt, Artificial Sequence
  Synthetic
aaauuaucuuccuacauaauagg

SEQ ID NO: 325155 - RNA, 24 nt, Artificial Sequence
  Synthetic
aaaauuaucuuccuacauaauagg

SEQ ID NO: 325156 - RNA, 18 nt, Artificial Sequence
  Synthetic
gcagcaauuccacauagg

SEQ ID NO: 325157 - RNA, 19 nt, Artificial Sequence
  Synthetic
ugcagcaauuccacauagg

SEQ ID NO: 325158 - RNA, 20 nt, Artificial Sequence
  Synthetic
cugcagcaauuccacauagg

SEQ ID NO: 325159 - RNA, 21 nt, Artificial Sequence
  Synthetic
gcugcagcaauuccacauagg

SEQ ID NO: 325160 - RNA, 22 nt, Artificial Sequence
  Synthetic
ggcugcagcaauuccacauagg

SEQ ID NO: 325161 - RNA, 23 nt, Artificial Sequence
  Synthetic
uggcugcagcaauuccacauagg

SEQ ID NO: 325162 - RNA, 24 nt, Artificial Sequence
  Synthetic
cuggcugcagcaauuccacauagg

SEQ ID NO: 325163 - RNA, 18 nt, Artificial Sequence
  Synthetic
gaugaagagaugcauagg

SEQ ID NO: 325164 - RNA, 19 nt, Artificial Sequence
  Synthetic
agaugaagagaugcauagg

SEQ ID NO: 325165 - RNA, 20 nt, Artificial Sequence
  Synthetic
cagaugaagagaugcauagg

SEQ ID NO: 325166 - RNA, 21 nt, Artificial Sequence
  Synthetic
acagaugaagagaugcauagg

SEQ ID NO: 325167 - RNA, 22 nt, Artificial Sequence
  Synthetic
cacagaugaagagaugcauagg

SEQ ID NO: 325168 - RNA, 23 nt, Artificial Sequence
  Synthetic
acacagaugaagagaugcauagg

SEQ ID NO: 325169 - RNA, 24 nt, Artificial Sequence
  Synthetic
gacacagaugaagagaugcauagg

SEQ ID NO: 325170 - RNA, 18 nt, Artificial Sequence
  Synthetic
cauauucucacucauagg

SEQ ID NO: 325171 - RNA, 19 nt, Artificial Sequence
  Synthetic
gcauauucucacucauagg

SEQ ID NO: 325172 - RNA, 20 nt, Artificial Sequence
  Synthetic
cgcauauucucacucauagg

SEQ ID NO: 325173 - RNA, 21 nt, Artificial Sequence
  Synthetic
ccgcauauucucacucauagg

SEQ ID NO: 325174 - RNA, 22 nt, Artificial Sequence
  Synthetic
accgcauauucucacucauagg

SEQ ID NO: 325175 - RNA, 23 nt, Artificial Sequence
  Synthetic
caccgcauauucucacucauagg

SEQ ID NO: 325176 - RNA, 24 nt, Artificial Sequence
  Synthetic
acaccgcauauucucacucauagg

SEQ ID NO: 325177 - RNA, 18 nt, Artificial Sequence
  Synthetic
cauguucucacucauagg

SEQ ID NO: 325178 - RNA, 19 nt, Artificial Sequence
  Synthetic
gcauguucucacucauagg

SEQ ID NO: 325179 - RNA, 20 nt, Artificial Sequence
  Synthetic
cgcauguucucacucauagg

SEQ ID NO: 325180 - RNA, 18 nt, Artificial Sequence
  Synthetic
cauauucucauucauagg

SEQ ID NO: 325181 - RNA, 19 nt, Artificial Sequence
  Synthetic
gcauauucucauucauagg

SEQ ID NO: 325182 - RNA, 20 nt, Artificial Sequence
  Synthetic
cgcauauucucauucauagg

SEQ ID NO: 325183 - RNA, 21 nt, Artificial Sequence
  Synthetic
ccgcauauucucauucauagg

SEQ ID NO: 325184 - RNA, 22 nt, Artificial Sequence
  Synthetic
accgcauauucucauucauagg

SEQ ID NO: 325185 - RNA, 23 nt, Artificial Sequence
  Synthetic
caccgcauauucucauucauagg

SEQ ID NO: 325186 - RNA, 24 nt, Artificial Sequence
  Synthetic
acaccgcauauucucauucauagg

SEQ ID NO: 325187 - RNA, 18 nt, Artificial Sequence
  Synthetic
uacucccagcaagauagg

SEQ ID NO: 325188 - RNA, 19 nt, Artificial Sequence
  Synthetic
auacucccagcaagauagg

SEQ ID NO: 325189 - RNA, 20 nt, Artificial Sequence
  Synthetic
aauacucccagcaagauagg

SEQ ID NO: 325190 - RNA, 21 nt, Artificial Sequence
  Synthetic
aaauacucccagcaagauagg

SEQ ID NO: 325191 - RNA, 22 nt, Artificial Sequence
  Synthetic
gaaauacucccagcaagauagg

SEQ ID NO: 325192 - RNA, 23 nt, Artificial Sequence
  Synthetic
ugaaauacucccagcaagauagg

SEQ ID NO: 325193 - RNA, 24 nt, Artificial Sequence
  Synthetic
uugaaauacucccagcaagauagg

SEQ ID NO: 325194 - RNA, 18 nt, Artificial Sequence
  Synthetic
aaauuagcuucagauagg

SEQ ID NO: 325195 - RNA, 19 nt, Artificial Sequence
  Synthetic
gaaauuagcuucagauagg

SEQ ID NO: 325196 - RNA, 20 nt, Artificial Sequence
  Synthetic
agaaauuagcuucagauagg

SEQ ID NO: 325197 - RNA, 21 nt, Artificial Sequence
  Synthetic
uagaaauuagcuucagauagg

SEQ ID NO: 325198 - RNA, 22 nt, Artificial Sequence
  Synthetic
uuagaaauuagcuucagauagg

SEQ ID NO: 325199 - RNA, 23 nt, Artificial Sequence
  Synthetic
uuuagaaauuagcuucagauagg

SEQ ID NO: 325200 - RNA, 24 nt, Artificial Sequence
  Synthetic
auuuagaaauuagcuucagauagg

SEQ ID NO: 325201 - RNA, 18 nt, Artificial Sequence
  Synthetic
ugcaaauccagagauagg

SEQ ID NO: 325202 - RNA, 19 nt, Artificial Sequence
  Synthetic
augcaaauccagagauagg

SEQ ID NO: 325203 - RNA, 20 nt, Artificial Sequence
  Synthetic
uaugcaaauccagagauagg

SEQ ID NO: 325204 - RNA, 21 nt, Artificial Sequence
  Synthetic
guaugcaaauccagagauagg

SEQ ID NO: 325205 - RNA, 22 nt, Artificial Sequence
  Synthetic
uguaugcaaauccagagauagg

SEQ ID NO: 325206 - RNA, 23 nt, Artificial Sequence
  Synthetic
guguaugcaaauccagagauagg

SEQ ID NO: 325207 - RNA, 24 nt, Artificial Sequence
  Synthetic
aguguaugcaaauccagagauagg

SEQ ID NO: 325208 - RNA, 18 nt, Artificial Sequence
  Synthetic
uugauuuuuuuagauagg

SEQ ID NO: 325209 - RNA, 19 nt, Artificial Sequence
  Synthetic
uuugauuuuuuuagauagg

SEQ ID NO: 325210 - RNA, 20 nt, Artificial Sequence
  Synthetic
auuugauuuuuuuagauagg

SEQ ID NO: 325211 - RNA, 21 nt, Artificial Sequence
  Synthetic
cauuugauuuuuuuagauagg

SEQ ID NO: 325212 - RNA, 22 nt, Artificial Sequence
  Synthetic
acauuugauuuuuuuagauagg

SEQ ID NO: 325213 - RNA, 23 nt, Artificial Sequence
  Synthetic
aacauuugauuuuuuuagauagg

SEQ ID NO: 325214 - RNA, 24 nt, Artificial Sequence
  Synthetic
aaacauuugauuuuuuuagauagg

SEQ ID NO: 325215 - RNA, 18 nt, Artificial Sequence
  Synthetic
aaacaaggcuuugauagg

SEQ ID NO: 325216 - RNA, 19 nt, Artificial Sequence
  Synthetic
uaaacaaggcuuugauagg

SEQ ID NO: 325217 - RNA, 20 nt, Artificial Sequence
  Synthetic
guaaacaaggcuuugauagg

SEQ ID NO: 325218 - RNA, 21 nt, Artificial Sequence
  Synthetic
cguaaacaaggcuuugauagg

SEQ ID NO: 325219 - RNA, 22 nt, Artificial Sequence
  Synthetic
acguaaacaaggcuuugauagg

SEQ ID NO: 325220 - RNA, 23 nt, Artificial Sequence
  Synthetic
cacguaaacaaggcuuugauagg

SEQ ID NO: 325221 - RNA, 24 nt, Artificial Sequence
  Synthetic
gcacguaaacaaggcuuugauagg

SEQ ID NO: 325222 - RNA, 18 nt, Artificial Sequence
  Synthetic
uauacuauuugauauagg

SEQ ID NO: 325223 - RNA, 19 nt, Artificial Sequence
  Synthetic
cuauacuauuugauauagg

SEQ ID NO: 325224 - RNA, 20 nt, Artificial Sequence
  Synthetic
ccuauacuauuugauauagg

SEQ ID NO: 325225 - RNA, 21 nt, Artificial Sequence
  Synthetic
cccuauacuauuugauauagg

SEQ ID NO: 325226 - RNA, 22 nt, Artificial Sequence
  Synthetic
ccccuauacuauuugauauagg

SEQ ID NO: 325227 - RNA, 23 nt, Artificial Sequence
  Synthetic
accccuauacuauuugauauagg

SEQ ID NO: 325228 - RNA, 24 nt, Artificial Sequence
  Synthetic
gaccccuauacuauuugauauagg

SEQ ID NO: 325229 - RNA, 18 nt, Artificial Sequence
  Synthetic
ucaacuaucaacuauagg

SEQ ID NO: 325230 - RNA, 19 nt, Artificial Sequence
  Synthetic
aucaacuaucaacuauagg

SEQ ID NO: 325231 - RNA, 20 nt, Artificial Sequence
  Synthetic
uaucaacuaucaacuauagg

SEQ ID NO: 325232 - RNA, 21 nt, Artificial Sequence
  Synthetic
uuaucaacuaucaacuauagg

SEQ ID NO: 325233 - RNA, 22 nt, Artificial Sequence
  Synthetic
guuaucaacuaucaacuauagg

SEQ ID NO: 325234 - RNA, 23 nt, Artificial Sequence
  Synthetic
aguuaucaacuaucaacuauagg

SEQ ID NO: 325235 - RNA, 24 nt, Artificial Sequence
  Synthetic
aaguuaucaacuaucaacuauagg

SEQ ID NO: 325236 - RNA, 18 nt, Artificial Sequence
  Synthetic
ugucauuaaugguauagg

SEQ ID NO: 325237 - RNA, 19 nt, Artificial Sequence
  Synthetic
gugucauuaaugguauagg

SEQ ID NO: 325238 - RNA, 20 nt, Artificial Sequence
  Synthetic
ggugucauuaaugguauagg

SEQ ID NO: 325239 - RNA, 21 nt, Artificial Sequence
  Synthetic
gggugucauuaaugguauagg

SEQ ID NO: 325240 - RNA, 22 nt, Artificial Sequence
  Synthetic
ugggugucauuaaugguauagg

SEQ ID NO: 325241 - RNA, 23 nt, Artificial Sequence
  Synthetic
gugggugucauuaaugguauagg

SEQ ID NO: 325242 - RNA, 24 nt, Artificial Sequence
  Synthetic
ugugggugucauuaaugguauagg

SEQ ID NO: 325243 - RNA, 18 nt, Artificial Sequence
  Synthetic
aaaugauaaauguauagg

SEQ ID NO: 325244 - RNA, 19 nt, Artificial Sequence
  Synthetic
uaaaugauaaauguauagg

SEQ ID NO: 325245 - RNA, 20 nt, Artificial Sequence
  Synthetic
auaaaugauaaauguauagg

SEQ ID NO: 325246 - RNA, 21 nt, Artificial Sequence
  Synthetic
cauaaaugauaaauguauagg

SEQ ID NO: 325247 - RNA, 22 nt, Artificial Sequence
  Synthetic
acauaaaugauaaauguauagg

SEQ ID NO: 325248 - RNA, 23 nt, Artificial Sequence
  Synthetic
uacauaaaugauaaauguauagg

SEQ ID NO: 325249 - RNA, 24 nt, Artificial Sequence
  Synthetic
auacauaaaugauaaauguauagg

SEQ ID NO: 325250 - RNA, 18 nt, Artificial Sequence
  Synthetic
aagcauuccaauuauagg

SEQ ID NO: 325251 - RNA, 19 nt, Artificial Sequence
  Synthetic
uaagcauuccaauuauagg

SEQ ID NO: 325252 - RNA, 20 nt, Artificial Sequence
  Synthetic
cuaagcauuccaauuauagg

SEQ ID NO: 325253 - RNA, 21 nt, Artificial Sequence
  Synthetic
acuaagcauuccaauuauagg

SEQ ID NO: 325254 - RNA, 22 nt, Artificial Sequence
  Synthetic
aacuaagcauuccaauuauagg

SEQ ID NO: 325255 - RNA, 23 nt, Artificial Sequence
  Synthetic
gaacuaagcauuccaauuauagg

SEQ ID NO: 325256 - RNA, 24 nt, Artificial Sequence
  Synthetic
ugaacuaagcauuccaauuauagg

SEQ ID NO: 325257 - RNA, 18 nt, Artificial Sequence
  Synthetic
aggaaagauuauuauagg

SEQ ID NO: 325258 - RNA, 19 nt, Artificial Sequence
  Synthetic
gaggaaagauuauuauagg

SEQ ID NO: 325259 - RNA, 20 nt, Artificial Sequence
  Synthetic
agaggaaagauuauuauagg

SEQ ID NO: 325260 - RNA, 21 nt, Artificial Sequence
  Synthetic
aagaggaaagauuauuauagg

SEQ ID NO: 325261 - RNA, 22 nt, Artificial Sequence
  Synthetic
gaagaggaaagauuauuauagg

SEQ ID NO: 325262 - RNA, 23 nt, Artificial Sequence
  Synthetic
agaagaggaaagauuauuauagg

SEQ ID NO: 325263 - RNA, 24 nt, Artificial Sequence
  Synthetic
gagaagaggaaagauuauuauagg

SEQ ID NO: 325264 - RNA, 18 nt, Artificial Sequence
  Synthetic
aauugcaaauaaacuagg

SEQ ID NO: 325265 - RNA, 19 nt, Artificial Sequence
  Synthetic
aaauugcaaauaaacuagg

SEQ ID NO: 325266 - RNA, 20 nt, Artificial Sequence
  Synthetic
uaaauugcaaauaaacuagg

SEQ ID NO: 325267 - RNA, 21 nt, Artificial Sequence
  Synthetic
cuaaauugcaaauaaacuagg

SEQ ID NO: 325268 - RNA, 22 nt, Artificial Sequence
  Synthetic
gcuaaauugcaaauaaacuagg

SEQ ID NO: 325269 - RNA, 23 nt, Artificial Sequence
  Synthetic
ggcuaaauugcaaauaaacuagg

SEQ ID NO: 325270 - RNA, 24 nt, Artificial Sequence
  Synthetic
uggcuaaauugcaaauaaacuagg

SEQ ID NO: 325271 - RNA, 18 nt, Artificial Sequence
  Synthetic
aagguuuacagaacuagg

SEQ ID NO: 325272 - RNA, 19 nt, Artificial Sequence
  Synthetic
aaagguuuacagaacuagg

SEQ ID NO: 325273 - RNA, 20 nt, Artificial Sequence
  Synthetic
aaaagguuuacagaacuagg

SEQ ID NO: 325274 - RNA, 21 nt, Artificial Sequence
  Synthetic
caaaagguuuacagaacuagg

SEQ ID NO: 325275 - RNA, 22 nt, Artificial Sequence
  Synthetic
ucaaaagguuuacagaacuagg

SEQ ID NO: 325276 - RNA, 23 nt, Artificial Sequence
  Synthetic
uucaaaagguuuacagaacuagg

SEQ ID NO: 325277 - RNA, 24 nt, Artificial Sequence
  Synthetic
uuucaaaagguuuacagaacuagg

SEQ ID NO: 325278 - RNA, 18 nt, Artificial Sequence
  Synthetic
acauuaagaaacacuagg

SEQ ID NO: 325279 - RNA, 19 nt, Artificial Sequence
  Synthetic
cacauuaagaaacacuagg

SEQ ID NO: 325280 - RNA, 20 nt, Artificial Sequence
  Synthetic
ucacauuaagaaacacuagg

SEQ ID NO: 325281 - RNA, 21 nt, Artificial Sequence
  Synthetic
gucacauuaagaaacacuagg

SEQ ID NO: 325282 - RNA, 22 nt, Artificial Sequence
  Synthetic
ugucacauuaagaaacacuagg

SEQ ID NO: 325283 - RNA, 23 nt, Artificial Sequence
  Synthetic
gugucacauuaagaaacacuagg

SEQ ID NO: 325284 - RNA, 24 nt, Artificial Sequence
  Synthetic
ugugucacauuaagaaacacuagg

SEQ ID NO: 325285 - RNA, 18 nt, Artificial Sequence
  Synthetic
cuuuaagaaaucacuagg

SEQ ID NO: 325286 - RNA, 19 nt, Artificial Sequence
  Synthetic
ccuuuaagaaaucacuagg

SEQ ID NO: 325287 - RNA, 20 nt, Artificial Sequence
  Synthetic
uccuuuaagaaaucacuagg

SEQ ID NO: 325288 - RNA, 21 nt, Artificial Sequence
  Synthetic
cuccuuuaagaaaucacuagg

SEQ ID NO: 325289 - RNA, 22 nt, Artificial Sequence
  Synthetic
ucuccuuuaagaaaucacuagg

SEQ ID NO: 325290 - RNA, 23 nt, Artificial Sequence
  Synthetic
aucuccuuuaagaaaucacuagg

SEQ ID NO: 325291 - RNA, 24 nt, Artificial Sequence
  Synthetic
aaucuccuuuaagaaaucacuagg

SEQ ID NO: 325292 - RNA, 18 nt, Artificial Sequence
  Synthetic
aguaaugggaucacuagg

SEQ ID NO: 325293 - RNA, 19 nt, Artificial Sequence
  Synthetic
caguaaugggaucacuagg

SEQ ID NO: 325294 - RNA, 20 nt, Artificial Sequence
  Synthetic
ccaguaaugggaucacuagg

SEQ ID NO: 325295 - RNA, 21 nt, Artificial Sequence
  Synthetic
cccaguaaugggaucacuagg

SEQ ID NO: 325296 - RNA, 22 nt, Artificial Sequence
  Synthetic
gcccaguaaugggaucacuagg

SEQ ID NO: 325297 - RNA, 23 nt, Artificial Sequence
  Synthetic
ugcccaguaaugggaucacuagg

SEQ ID NO: 325298 - RNA, 24 nt, Artificial Sequence
  Synthetic
augcccaguaaugggaucacuagg

SEQ ID NO: 325299 - RNA, 18 nt, Artificial Sequence
  Synthetic
gaggugguucagacuagg

SEQ ID NO: 325300 - RNA, 19 nt, Artificial Sequence
  Synthetic
agaggugguucagacuagg

SEQ ID NO: 325301 - RNA, 20 nt, Artificial Sequence
  Synthetic
cagaggugguucagacuagg

SEQ ID NO: 325302 - RNA, 21 nt, Artificial Sequence
  Synthetic
ucagaggugguucagacuagg

SEQ ID NO: 325303 - RNA, 22 nt, Artificial Sequence
  Synthetic
aucagaggugguucagacuagg

SEQ ID NO: 325304 - RNA, 23 nt, Artificial Sequence
  Synthetic
caucagaggugguucagacuagg

SEQ ID NO: 325305 - RNA, 24 nt, Artificial Sequence
  Synthetic
acaucagaggugguucagacuagg

SEQ ID NO: 325306 - RNA, 18 nt, Artificial Sequence
  Synthetic
uggcugguauauacuagg

SEQ ID NO: 325307 - RNA, 19 nt, Artificial Sequence
  Synthetic
cuggcugguauauacuagg

SEQ ID NO: 325308 - RNA, 20 nt, Artificial Sequence
  Synthetic
ccuggcugguauauacuagg

SEQ ID NO: 325309 - RNA, 21 nt, Artificial Sequence
  Synthetic
gccuggcugguauauacuagg

SEQ ID NO: 325310 - RNA, 22 nt, Artificial Sequence
  Synthetic
ggccuggcugguauauacuagg

SEQ ID NO: 325311 - RNA, 23 nt, Artificial Sequence
  Synthetic
aggccuggcugguauauacuagg

SEQ ID NO: 325312 - RNA, 24 nt, Artificial Sequence
  Synthetic
aaggccuggcugguauauacuagg

SEQ ID NO: 325313 - RNA, 18 nt, Artificial Sequence
  Synthetic
ugagaccaaucuacuagg

SEQ ID NO: 325314 - RNA, 19 nt, Artificial Sequence
  Synthetic
augagaccaaucuacuagg

SEQ ID NO: 325315 - RNA, 20 nt, Artificial Sequence
  Synthetic
aaugagaccaaucuacuagg

SEQ ID NO: 325316 - RNA, 21 nt, Artificial Sequence
  Synthetic
aaaugagaccaaucuacuagg

SEQ ID NO: 325317 - RNA, 22 nt, Artificial Sequence
  Synthetic
aaaaugagaccaaucuacuagg

SEQ ID NO: 325318 - RNA, 23 nt, Artificial Sequence
  Synthetic
uaaaaugagaccaaucuacuagg

SEQ ID NO: 325319 - RNA, 24 nt, Artificial Sequence
  Synthetic
uuaaaaugagaccaaucuacuagg

SEQ ID NO: 325320 - RNA, 18 nt, Artificial Sequence
  Synthetic
uucaguaaggacccuagg

SEQ ID NO: 325321 - RNA, 19 nt, Artificial Sequence
  Synthetic
uuucaguaaggacccuagg

SEQ ID NO: 325322 - RNA, 20 nt, Artificial Sequence
  Synthetic
uuuucaguaaggacccuagg

SEQ ID NO: 325323 - RNA, 21 nt, Artificial Sequence
  Synthetic
auuuucaguaaggacccuagg

SEQ ID NO: 325324 - RNA, 22 nt, Artificial Sequence
  Synthetic
uauuuucaguaaggacccuagg

SEQ ID NO: 325325 - RNA, 23 nt, Artificial Sequence
  Synthetic
cuauuuucaguaaggacccuagg

SEQ ID NO: 325326 - RNA, 24 nt, Artificial Sequence
  Synthetic
acuauuuucaguaaggacccuagg

SEQ ID NO: 325327 - RNA, 18 nt, Artificial Sequence
  Synthetic
cugguaccaagcccuagg

SEQ ID NO: 325328 - RNA, 19 nt, Artificial Sequence
  Synthetic
ucugguaccaagcccuagg

SEQ ID NO: 325329 - RNA, 20 nt, Artificial Sequence
  Synthetic
gucugguaccaagcccuagg

SEQ ID NO: 325330 - RNA, 21 nt, Artificial Sequence
  Synthetic
ugucugguaccaagcccuagg

SEQ ID NO: 325331 - RNA, 22 nt, Artificial Sequence
  Synthetic
uugucugguaccaagcccuagg

SEQ ID NO: 325332 - RNA, 23 nt, Artificial Sequence
  Synthetic
guugucugguaccaagcccuagg

SEQ ID NO: 325333 - RNA, 24 nt, Artificial Sequence
  Synthetic
gguugucugguaccaagcccuagg

SEQ ID NO: 325334 - RNA, 18 nt, Artificial Sequence
  Synthetic
uacacuguugagccuagg

SEQ ID NO: 325335 - RNA, 19 nt, Artificial Sequence
  Synthetic
guacacuguugagccuagg

SEQ ID NO: 325336 - RNA, 20 nt, Artificial Sequence
  Synthetic
uguacacuguugagccuagg

SEQ ID NO: 325337 - RNA, 21 nt, Artificial Sequence
  Synthetic
guguacacuguugagccuagg

SEQ ID NO: 325338 - RNA, 22 nt, Artificial Sequence
  Synthetic
aguguacacuguugagccuagg

SEQ ID NO: 325339 - RNA, 23 nt, Artificial Sequence
  Synthetic
uaguguacacuguugagccuagg

SEQ ID NO: 325340 - RNA, 24 nt, Artificial Sequence
  Synthetic
auaguguacacuguugagccuagg

SEQ ID NO: 325341 - RNA, 18 nt, Artificial Sequence
  Synthetic
cucacuauguugccuagg

SEQ ID NO: 325342 - RNA, 19 nt, Artificial Sequence
  Synthetic
ucucacuauguugccuagg

SEQ ID NO: 325343 - RNA, 20 nt, Artificial Sequence
  Synthetic
gucucacuauguugccuagg

SEQ ID NO: 325344 - RNA, 21 nt, Artificial Sequence
  Synthetic
agucucacuauguugccuagg

SEQ ID NO: 325345 - RNA, 22 nt, Artificial Sequence
  Synthetic
gagucucacuauguugccuagg

SEQ ID NO: 325346 - RNA, 23 nt, Artificial Sequence
  Synthetic
agagucucacuauguugccuagg

SEQ ID NO: 325347 - RNA, 24 nt, Artificial Sequence
  Synthetic
cagagucucacuauguugccuagg

SEQ ID NO: 325348 - RNA, 18 nt, Artificial Sequence
  Synthetic
cucacucuguugccuagg

SEQ ID NO: 325349 - RNA, 19 nt, Artificial Sequence
  Synthetic
ucucacucuguugccuagg

SEQ ID NO: 325350 - RNA, 20 nt, Artificial Sequence
  Synthetic
gucucacucuguugccuagg

SEQ ID NO: 325351 - RNA, 21 nt, Artificial Sequence
  Synthetic
ggucucacucuguugccuagg

SEQ ID NO: 325352 - RNA, 22 nt, Artificial Sequence
  Synthetic
gggucucacucuguugccuagg

SEQ ID NO: 325353 - RNA, 23 nt, Artificial Sequence
  Synthetic
agggucucacucuguugccuagg

SEQ ID NO: 325354 - RNA, 24 nt, Artificial Sequence
  Synthetic
cagggucucacucuguugccuagg

SEQ ID NO: 325355 - RNA, 18 nt, Artificial Sequence
  Synthetic
aaugagaauucuccuagg

SEQ ID NO: 325356 - RNA, 19 nt, Artificial Sequence
  Synthetic
gaaugagaauucuccuagg

SEQ ID NO: 325357 - RNA, 20 nt, Artificial Sequence
  Synthetic
ugaaugagaauucuccuagg

SEQ ID NO: 325358 - RNA, 21 nt, Artificial Sequence
  Synthetic
augaaugagaauucuccuagg

SEQ ID NO: 325359 - RNA, 22 nt, Artificial Sequence
  Synthetic
aaugaaugagaauucuccuagg

SEQ ID NO: 325360 - RNA, 23 nt, Artificial Sequence
  Synthetic
gaaugaaugagaauucuccuagg

SEQ ID NO: 325361 - RNA, 24 nt, Artificial Sequence
  Synthetic
ggaaugaaugagaauucuccuagg

SEQ ID NO: 325362 - RNA, 18 nt, Artificial Sequence
  Synthetic
guuaugacuaaagcuagg

SEQ ID NO: 325363 - RNA, 19 nt, Artificial Sequence
  Synthetic
uguuaugacuaaagcuagg

SEQ ID NO: 325364 - RNA, 20 nt, Artificial Sequence
  Synthetic
uuguuaugacuaaagcuagg

SEQ ID NO: 325365 - RNA, 21 nt, Artificial Sequence
  Synthetic
uuuguuaugacuaaagcuagg

SEQ ID NO: 325366 - RNA, 22 nt, Artificial Sequence
  Synthetic
guuuguuaugacuaaagcuagg

SEQ ID NO: 325367 - RNA, 23 nt, Artificial Sequence
  Synthetic
uguuuguuaugacuaaagcuagg

SEQ ID NO: 325368 - RNA, 24 nt, Artificial Sequence
  Synthetic
uuguuuguuaugacuaaagcuagg

SEQ ID NO: 325369 - RNA, 18 nt, Artificial Sequence
  Synthetic
ugauucaguagagcuagg

SEQ ID NO: 325370 - RNA, 19 nt, Artificial Sequence
  Synthetic
cugauucaguagagcuagg

SEQ ID NO: 325371 - RNA, 20 nt, Artificial Sequence
  Synthetic
ucugauucaguagagcuagg

SEQ ID NO: 325372 - RNA, 21 nt, Artificial Sequence
  Synthetic
cucugauucaguagagcuagg

SEQ ID NO: 325373 - RNA, 22 nt, Artificial Sequence
  Synthetic
ucucugauucaguagagcuagg

SEQ ID NO: 325374 - RNA, 23 nt, Artificial Sequence
  Synthetic
gucucugauucaguagagcuagg

SEQ ID NO: 325375 - RNA, 24 nt, Artificial Sequence
  Synthetic
agucucugauucaguagagcuagg

SEQ ID NO: 325376 - RNA, 18 nt, Artificial Sequence
  Synthetic
gagggagagaaggcuagg

SEQ ID NO: 325377 - RNA, 19 nt, Artificial Sequence
  Synthetic
agagggagagaaggcuagg

SEQ ID NO: 325378 - RNA, 20 nt, Artificial Sequence
  Synthetic
gagagggagagaaggcuagg

SEQ ID NO: 325379 - RNA, 21 nt, Artificial Sequence
  Synthetic
agagagggagagaaggcuagg

SEQ ID NO: 325380 - RNA, 22 nt, Artificial Sequence
  Synthetic
gagagagggagagaaggcuagg

SEQ ID NO: 325381 - RNA, 23 nt, Artificial Sequence
  Synthetic
agagagagggagagaaggcuagg

SEQ ID NO: 325382 - RNA, 24 nt, Artificial Sequence
  Synthetic
aagagagagggagagaaggcuagg

SEQ ID NO: 325383 - RNA, 18 nt, Artificial Sequence
  Synthetic
gagagccuaauggcuagg

SEQ ID NO: 325384 - RNA, 19 nt, Artificial Sequence
  Synthetic
ugagagccuaauggcuagg

SEQ ID NO: 325385 - RNA, 20 nt, Artificial Sequence
  Synthetic
uugagagccuaauggcuagg

SEQ ID NO: 325386 - RNA, 21 nt, Artificial Sequence
  Synthetic
auugagagccuaauggcuagg

SEQ ID NO: 325387 - RNA, 22 nt, Artificial Sequence
  Synthetic
gauugagagccuaauggcuagg

SEQ ID NO: 325388 - RNA, 23 nt, Artificial Sequence
  Synthetic
ggauugagagccuaauggcuagg

SEQ ID NO: 325389 - RNA, 24 nt, Artificial Sequence
  Synthetic
uggauugagagccuaauggcuagg

SEQ ID NO: 325390 - RNA, 18 nt, Artificial Sequence
  Synthetic
cauccucugaaaucuagg

SEQ ID NO: 325391 - RNA, 19 nt, Artificial Sequence
  Synthetic
acauccucugaaaucuagg

SEQ ID NO: 325392 - RNA, 20 nt, Artificial Sequence
  Synthetic
uacauccucugaaaucuagg

SEQ ID NO: 325393 - RNA, 21 nt, Artificial Sequence
  Synthetic
auacauccucugaaaucuagg

SEQ ID NO: 325394 - RNA, 22 nt, Artificial Sequence
  Synthetic
cauacauccucugaaaucuagg

SEQ ID NO: 325395 - RNA, 23 nt, Artificial Sequence
  Synthetic
ccauacauccucugaaaucuagg

SEQ ID NO: 325396 - RNA, 24 nt, Artificial Sequence
  Synthetic
uccauacauccucugaaaucuagg

SEQ ID NO: 325397 - RNA, 18 nt, Artificial Sequence
  Synthetic
uauccucugaaaucuagg

SEQ ID NO: 325398 - RNA, 19 nt, Artificial Sequence
  Synthetic
auauccucugaaaucuagg

SEQ ID NO: 325399 - RNA, 20 nt, Artificial Sequence
  Synthetic
uauauccucugaaaucuagg

SEQ ID NO: 325400 - RNA, 21 nt, Artificial Sequence
  Synthetic
auauauccucugaaaucuagg

SEQ ID NO: 325401 - RNA, 22 nt, Artificial Sequence
  Synthetic
cauauauccucugaaaucuagg

SEQ ID NO: 325402 - RNA, 23 nt, Artificial Sequence
  Synthetic
ccauauauccucugaaaucuagg

SEQ ID NO: 325403 - RNA, 24 nt, Artificial Sequence
  Synthetic
uccauauauccucugaaaucuagg

SEQ ID NO: 325404 - RNA, 18 nt, Artificial Sequence
  Synthetic
aacaccuaaacaucuagg

SEQ ID NO: 325405 - RNA, 19 nt, Artificial Sequence
  Synthetic
gaacaccuaaacaucuagg

SEQ ID NO: 325406 - RNA, 20 nt, Artificial Sequence
  Synthetic
agaacaccuaaacaucuagg

SEQ ID NO: 325407 - RNA, 21 nt, Artificial Sequence
  Synthetic
aagaacaccuaaacaucuagg

SEQ ID NO: 325408 - RNA, 22 nt, Artificial Sequence
  Synthetic
uaagaacaccuaaacaucuagg

SEQ ID NO: 325409 - RNA, 23 nt, Artificial Sequence
  Synthetic
guaagaacaccuaaacaucuagg

SEQ ID NO: 325410 - RNA, 24 nt, Artificial Sequence
  Synthetic
gguaagaacaccuaaacaucuagg

SEQ ID NO: 325411 - RNA, 18 nt, Artificial Sequence
  Synthetic
uuugguuguacaucuagg

SEQ ID NO: 325412 - RNA, 19 nt, Artificial Sequence
  Synthetic
uuuugguuguacaucuagg

SEQ ID NO: 325413 - RNA, 20 nt, Artificial Sequence
  Synthetic
uuuuugguuguacaucuagg

SEQ ID NO: 325414 - RNA, 21 nt, Artificial Sequence
  Synthetic
auuuuugguuguacaucuagg

SEQ ID NO: 325415 - RNA, 22 nt, Artificial Sequence
  Synthetic
cauuuuugguuguacaucuagg

SEQ ID NO: 325416 - RNA, 23 nt, Artificial Sequence
  Synthetic
acauuuuugguuguacaucuagg

SEQ ID NO: 325417 - RNA, 24 nt, Artificial Sequence
  Synthetic
gacauuuuugguuguacaucuagg

SEQ ID NO: 325418 - RNA, 18 nt, Artificial Sequence
  Synthetic
guaguuacuaccucuagg

SEQ ID NO: 325419 - RNA, 19 nt, Artificial Sequence
  Synthetic
aguaguuacuaccucuagg

SEQ ID NO: 325420 - RNA, 20 nt, Artificial Sequence
  Synthetic
gaguaguuacuaccucuagg

SEQ ID NO: 325421 - RNA, 21 nt, Artificial Sequence
  Synthetic
ggaguaguuacuaccucuagg

SEQ ID NO: 325422 - RNA, 22 nt, Artificial Sequence
  Synthetic
gggaguaguuacuaccucuagg

SEQ ID NO: 325423 - RNA, 23 nt, Artificial Sequence
  Synthetic
cgggaguaguuacuaccucuagg

SEQ ID NO: 325424 - RNA, 24 nt, Artificial Sequence
  Synthetic
acgggaguaguuacuaccucuagg

SEQ ID NO: 325425 - RNA, 18 nt, Artificial Sequence
  Synthetic
aggcagagaagcucuagg

SEQ ID NO: 325426 - RNA, 19 nt, Artificial Sequence
  Synthetic
gaggcagagaagcucuagg

SEQ ID NO: 325427 - RNA, 20 nt, Artificial Sequence
  Synthetic
ggaggcagagaagcucuagg

SEQ ID NO: 325428 - RNA, 21 nt, Artificial Sequence
  Synthetic
aggaggcagagaagcucuagg

SEQ ID NO: 325429 - RNA, 22 nt, Artificial Sequence
  Synthetic
caggaggcagagaagcucuagg

SEQ ID NO: 325430 - RNA, 23 nt, Artificial Sequence
  Synthetic
gcaggaggcagagaagcucuagg

SEQ ID NO: 325431 - RNA, 24 nt, Artificial Sequence
  Synthetic
ggcaggaggcagagaagcucuagg

SEQ ID NO: 325432 - RNA, 18 nt, Artificial Sequence
  Synthetic
gaaaaucacuggucuagg

SEQ ID NO: 325433 - RNA, 19 nt, Artificial Sequence
  Synthetic
ugaaaaucacuggucuagg

SEQ ID NO: 325434 - RNA, 20 nt, Artificial Sequence
  Synthetic
uugaaaaucacuggucuagg

SEQ ID NO: 325435 - RNA, 21 nt, Artificial Sequence
  Synthetic
guugaaaaucacuggucuagg

SEQ ID NO: 325436 - RNA, 22 nt, Artificial Sequence
  Synthetic
aguugaaaaucacuggucuagg

SEQ ID NO: 325437 - RNA, 23 nt, Artificial Sequence
  Synthetic
uaguugaaaaucacuggucuagg

SEQ ID NO: 325438 - RNA, 24 nt, Artificial Sequence
  Synthetic
cuaguugaaaaucacuggucuagg

SEQ ID NO: 325439 - RNA, 18 nt, Artificial Sequence
  Synthetic
caguuagaaaugucuagg

SEQ ID NO: 325440 - RNA, 19 nt, Artificial Sequence
  Synthetic
acaguuagaaaugucuagg

SEQ ID NO: 325441 - RNA, 20 nt, Artificial Sequence
  Synthetic
uacaguuagaaaugucuagg

SEQ ID NO: 325442 - RNA, 21 nt, Artificial Sequence
  Synthetic
auacaguuagaaaugucuagg

SEQ ID NO: 325443 - RNA, 22 nt, Artificial Sequence
  Synthetic
gauacaguuagaaaugucuagg

SEQ ID NO: 325444 - RNA, 23 nt, Artificial Sequence
  Synthetic
agauacaguuagaaaugucuagg

SEQ ID NO: 325445 - RNA, 24 nt, Artificial Sequence
  Synthetic
uagauacaguuagaaaugucuagg

SEQ ID NO: 325446 - RNA, 18 nt, Artificial Sequence
  Synthetic
uucuugcuuuugucuagg

SEQ ID NO: 325447 - RNA, 19 nt, Artificial Sequence
  Synthetic
uuucuugcuuuugucuagg

SEQ ID NO: 325448 - RNA, 20 nt, Artificial Sequence
  Synthetic
auuucuugcuuuugucuagg

SEQ ID NO: 325449 - RNA, 21 nt, Artificial Sequence
  Synthetic
uauuucuugcuuuugucuagg

SEQ ID NO: 325450 - RNA, 22 nt, Artificial Sequence
  Synthetic
auauuucuugcuuuugucuagg

SEQ ID NO: 325451 - RNA, 23 nt, Artificial Sequence
  Synthetic
uauauuucuugcuuuugucuagg

SEQ ID NO: 325452 - RNA, 24 nt, Artificial Sequence
  Synthetic
auauauuucuugcuuuugucuagg

SEQ ID NO: 325453 - RNA, 18 nt, Artificial Sequence
  Synthetic
cagaugaugcauucuagg

SEQ ID NO: 325454 - RNA, 19 nt, Artificial Sequence
  Synthetic
ccagaugaugcauucuagg

SEQ ID NO: 325455 - RNA, 20 nt, Artificial Sequence
  Synthetic
accagaugaugcauucuagg

SEQ ID NO: 325456 - RNA, 21 nt, Artificial Sequence
  Synthetic
uaccagaugaugcauucuagg

SEQ ID NO: 325457 - RNA, 22 nt, Artificial Sequence
  Synthetic
guaccagaugaugcauucuagg

SEQ ID NO: 325458 - RNA, 23 nt, Artificial Sequence
  Synthetic
uguaccagaugaugcauucuagg

SEQ ID NO: 325459 - RNA, 24 nt, Artificial Sequence
  Synthetic
auguaccagaugaugcauucuagg

SEQ ID NO: 325460 - RNA, 18 nt, Artificial Sequence
  Synthetic
aaugaagaggauucuagg

SEQ ID NO: 325461 - RNA, 19 nt, Artificial Sequence
  Synthetic
gaaugaagaggauucuagg

SEQ ID NO: 325462 - RNA, 20 nt, Artificial Sequence
  Synthetic
ugaaugaagaggauucuagg

SEQ ID NO: 325463 - RNA, 21 nt, Artificial Sequence
  Synthetic
uugaaugaagaggauucuagg

SEQ ID NO: 325464 - RNA, 22 nt, Artificial Sequence
  Synthetic
cuugaaugaagaggauucuagg

SEQ ID NO: 325465 - RNA, 23 nt, Artificial Sequence
  Synthetic
ccuugaaugaagaggauucuagg

SEQ ID NO: 325466 - RNA, 24 nt, Artificial Sequence
  Synthetic
accuugaaugaagaggauucuagg

SEQ ID NO: 325467 - RNA, 18 nt, Artificial Sequence
  Synthetic
aaggaacaguauucuagg

SEQ ID NO: 325468 - RNA, 19 nt, Artificial Sequence
  Synthetic
aaaggaacaguauucuagg

SEQ ID NO: 325469 - RNA, 20 nt, Artificial Sequence
  Synthetic
aaaaggaacaguauucuagg

SEQ ID NO: 325470 - RNA, 21 nt, Artificial Sequence
  Synthetic
caaaaggaacaguauucuagg

SEQ ID NO: 325471 - RNA, 22 nt, Artificial Sequence
  Synthetic
ucaaaaggaacaguauucuagg

SEQ ID NO: 325472 - RNA, 23 nt, Artificial Sequence
  Synthetic
aucaaaaggaacaguauucuagg

SEQ ID NO: 325473 - RNA, 24 nt, Artificial Sequence
  Synthetic
aaucaaaaggaacaguauucuagg

SEQ ID NO: 325474 - RNA, 18 nt, Artificial Sequence
  Synthetic
cuaaguuugccuucuagg

SEQ ID NO: 325475 - RNA, 19 nt, Artificial Sequence
  Synthetic
ucuaaguuugccuucuagg

SEQ ID NO: 325476 - RNA, 20 nt, Artificial Sequence
  Synthetic
gucuaaguuugccuucuagg

SEQ ID NO: 325477 - RNA, 21 nt, Artificial Sequence
  Synthetic
ugucuaaguuugccuucuagg

SEQ ID NO: 325478 - RNA, 22 nt, Artificial Sequence
  Synthetic
augucuaaguuugccuucuagg

SEQ ID NO: 325479 - RNA, 23 nt, Artificial Sequence
  Synthetic
aaugucuaaguuugccuucuagg

SEQ ID NO: 325480 - RNA, 24 nt, Artificial Sequence
  Synthetic
aaaugucuaaguuugccuucuagg

SEQ ID NO: 325481 - RNA, 18 nt, Artificial Sequence
  Synthetic
uggaugaagucuucuagg

SEQ ID NO: 325482 - RNA, 19 nt, Artificial Sequence
  Synthetic
cuggaugaagucuucuagg

SEQ ID NO: 325483 - RNA, 20 nt, Artificial Sequence
  Synthetic
acuggaugaagucuucuagg

SEQ ID NO: 325484 - RNA, 21 nt, Artificial Sequence
  Synthetic
gacuggaugaagucuucuagg

SEQ ID NO: 325485 - RNA, 22 nt, Artificial Sequence
  Synthetic
ggacuggaugaagucuucuagg

SEQ ID NO: 325486 - RNA, 23 nt, Artificial Sequence
  Synthetic
gggacuggaugaagucuucuagg

SEQ ID NO: 325487 - RNA, 24 nt, Artificial Sequence
  Synthetic
ugggacuggaugaagucuucuagg

SEQ ID NO: 325488 - RNA, 18 nt, Artificial Sequence
  Synthetic
augauacguauuucuagg

SEQ ID NO: 325489 - RNA, 19 nt, Artificial Sequence
  Synthetic
caugauacguauuucuagg

SEQ ID NO: 325490 - RNA, 20 nt, Artificial Sequence
  Synthetic
acaugauacguauuucuagg

SEQ ID NO: 325491 - RNA, 21 nt, Artificial Sequence
  Synthetic
gacaugauacguauuucuagg

SEQ ID NO: 325492 - RNA, 22 nt, Artificial Sequence
  Synthetic
agacaugauacguauuucuagg

SEQ ID NO: 325493 - RNA, 23 nt, Artificial Sequence
  Synthetic
aagacaugauacguauuucuagg

SEQ ID NO: 325494 - RNA, 24 nt, Artificial Sequence
  Synthetic
uaagacaugauacguauuucuagg

SEQ ID NO: 325495 - RNA, 18 nt, Artificial Sequence
  Synthetic
cuuuaucaguuuucuagg

SEQ ID NO: 325496 - RNA, 19 nt, Artificial Sequence
  Synthetic
acuuuaucaguuuucuagg

SEQ ID NO: 325497 - RNA, 20 nt, Artificial Sequence
  Synthetic
aacuuuaucaguuuucuagg

SEQ ID NO: 325498 - RNA, 21 nt, Artificial Sequence
  Synthetic
caacuuuaucaguuuucuagg

SEQ ID NO: 325499 - RNA, 22 nt, Artificial Sequence
  Synthetic
ccaacuuuaucaguuuucuagg

SEQ ID NO: 325500 - RNA, 23 nt, Artificial Sequence
  Synthetic
uccaacuuuaucaguuuucuagg

SEQ ID NO: 325501 - RNA, 24 nt, Artificial Sequence
  Synthetic
uuccaacuuuaucaguuuucuagg

SEQ ID NO: 325502 - RNA, 18 nt, Artificial Sequence
  Synthetic
agcgcccagcgaaguagg

SEQ ID NO: 325503 - RNA, 19 nt, Artificial Sequence
  Synthetic
aagcgcccagcgaaguagg

SEQ ID NO: 325504 - RNA, 20 nt, Artificial Sequence
  Synthetic
gaagcgcccagcgaaguagg

SEQ ID NO: 325505 - RNA, 21 nt, Artificial Sequence
  Synthetic
agaagcgcccagcgaaguagg

SEQ ID NO: 325506 - RNA, 22 nt, Artificial Sequence
  Synthetic
gagaagcgcccagcgaaguagg

SEQ ID NO: 325507 - RNA, 23 nt, Artificial Sequence
  Synthetic
ggagaagcgcccagcgaaguagg

SEQ ID NO: 325508 - RNA, 24 nt, Artificial Sequence
  Synthetic
aggagaagcgcccagcgaaguagg

SEQ ID NO: 325509 - RNA, 18 nt, Artificial Sequence
  Synthetic
aucuucacguuaaguagg

SEQ ID NO: 325510 - RNA, 19 nt, Artificial Sequence
  Synthetic
uaucuucacguuaaguagg

SEQ ID NO: 325511 - RNA, 20 nt, Artificial Sequence
  Synthetic
uuaucuucacguuaaguagg

SEQ ID NO: 325512 - RNA, 21 nt, Artificial Sequence
  Synthetic
auuaucuucacguuaaguagg

SEQ ID NO: 325513 - RNA, 22 nt, Artificial Sequence
  Synthetic
cauuaucuucacguuaaguagg

SEQ ID NO: 325514 - RNA, 23 nt, Artificial Sequence
  Synthetic
ucauuaucuucacguuaaguagg

SEQ ID NO: 325515 - RNA, 24 nt, Artificial Sequence
  Synthetic
cucauuaucuucacguuaaguagg

SEQ ID NO: 325516 - RNA, 18 nt, Artificial Sequence
  Synthetic
ugaucuccuuuaaguagg

SEQ ID NO: 325517 - RNA, 19 nt, Artificial Sequence
  Synthetic
augaucuccuuuaaguagg

SEQ ID NO: 325518 - RNA, 20 nt, Artificial Sequence
  Synthetic
uaugaucuccuuuaaguagg

SEQ ID NO: 325519 - RNA, 21 nt, Artificial Sequence
  Synthetic
uuaugaucuccuuuaaguagg

SEQ ID NO: 325520 - RNA, 22 nt, Artificial Sequence
  Synthetic
guuaugaucuccuuuaaguagg

SEQ ID NO: 325521 - RNA, 23 nt, Artificial Sequence
  Synthetic
cguuaugaucuccuuuaaguagg

SEQ ID NO: 325522 - RNA, 24 nt, Artificial Sequence
  Synthetic
ucguuaugaucuccuuuaaguagg

SEQ ID NO: 325523 - RNA, 18 nt, Artificial Sequence
  Synthetic
ggagaauuauccaguagg

SEQ ID NO: 325524 - RNA, 19 nt, Artificial Sequence
  Synthetic
uggagaauuauccaguagg

SEQ ID NO: 325525 - RNA, 20 nt, Artificial Sequence
  Synthetic
guggagaauuauccaguagg

SEQ ID NO: 325526 - RNA, 21 nt, Artificial Sequence
  Synthetic
uguggagaauuauccaguagg

SEQ ID NO: 325527 - RNA, 22 nt, Artificial Sequence
  Synthetic
guguggagaauuauccaguagg

SEQ ID NO: 325528 - RNA, 23 nt, Artificial Sequence
  Synthetic
uguguggagaauuauccaguagg

SEQ ID NO: 325529 - RNA, 24 nt, Artificial Sequence
  Synthetic
uuguguggagaauuauccaguagg

SEQ ID NO: 325530 - RNA, 18 nt, Artificial Sequence
  Synthetic
uugaaaacaaucaguagg

SEQ ID NO: 325531 - RNA, 19 nt, Artificial Sequence
  Synthetic
uuugaaaacaaucaguagg

SEQ ID NO: 325532 - RNA, 20 nt, Artificial Sequence
  Synthetic
auuugaaaacaaucaguagg

SEQ ID NO: 325533 - RNA, 21 nt, Artificial Sequence
  Synthetic
cauuugaaaacaaucaguagg

SEQ ID NO: 325534 - RNA, 22 nt, Artificial Sequence
  Synthetic
acauuugaaaacaaucaguagg

SEQ ID NO: 325535 - RNA, 23 nt, Artificial Sequence
  Synthetic
uacauuugaaaacaaucaguagg

SEQ ID NO: 325536 - RNA, 24 nt, Artificial Sequence
  Synthetic
uuacauuugaaaacaaucaguagg

SEQ ID NO: 325537 - RNA, 18 nt, Artificial Sequence
  Synthetic
agguaguuugucaguagg

SEQ ID NO: 325538 - RNA, 19 nt, Artificial Sequence
  Synthetic
aagguaguuugucaguagg

SEQ ID NO: 325539 - RNA, 20 nt, Artificial Sequence
  Synthetic
caagguaguuugucaguagg

SEQ ID NO: 325540 - RNA, 21 nt, Artificial Sequence
  Synthetic
ucaagguaguuugucaguagg

SEQ ID NO: 325541 - RNA, 22 nt, Artificial Sequence
  Synthetic
gucaagguaguuugucaguagg

SEQ ID NO: 325542 - RNA, 23 nt, Artificial Sequence
  Synthetic
ugucaagguaguuugucaguagg

SEQ ID NO: 325543 - RNA, 24 nt, Artificial Sequence
  Synthetic
uugucaagguaguuugucaguagg

SEQ ID NO: 325544 - RNA, 18 nt, Artificial Sequence
  Synthetic
uugagagacuggaguagg

SEQ ID NO: 325545 - RNA, 19 nt, Artificial Sequence
  Synthetic
guugagagacuggaguagg

SEQ ID NO: 325546 - RNA, 20 nt, Artificial Sequence
  Synthetic
aguugagagacuggaguagg

SEQ ID NO: 325547 - RNA, 21 nt, Artificial Sequence
  Synthetic
gaguugagagacuggaguagg

SEQ ID NO: 325548 - RNA, 22 nt, Artificial Sequence
  Synthetic
agaguugagagacuggaguagg

SEQ ID NO: 325549 - RNA, 23 nt, Artificial Sequence
  Synthetic
gagaguugagagacuggaguagg

SEQ ID NO: 325550 - RNA, 24 nt, Artificial Sequence
  Synthetic
agagaguugagagacuggaguagg

SEQ ID NO: 325551 - RNA, 18 nt, Artificial Sequence
  Synthetic
ggagugggaaugaguagg

SEQ ID NO: 325552 - RNA, 19 nt, Artificial Sequence
  Synthetic
gggagugggaaugaguagg

SEQ ID NO: 325553 - RNA, 20 nt, Artificial Sequence
  Synthetic
ugggagugggaaugaguagg

SEQ ID NO: 325554 - RNA, 21 nt, Artificial Sequence
  Synthetic
uugggagugggaaugaguagg

SEQ ID NO: 325555 - RNA, 22 nt, Artificial Sequence
  Synthetic
uuugggagugggaaugaguagg

SEQ ID NO: 325556 - RNA, 23 nt, Artificial Sequence
  Synthetic
guuugggagugggaaugaguagg

SEQ ID NO: 325557 - RNA, 24 nt, Artificial Sequence
  Synthetic
gguuugggagugggaaugaguagg

SEQ ID NO: 325558 - RNA, 18 nt, Artificial Sequence
  Synthetic
uauacugccuauaguagg

SEQ ID NO: 325559 - RNA, 19 nt, Artificial Sequence
  Synthetic
guauacugccuauaguagg

SEQ ID NO: 325560 - RNA, 20 nt, Artificial Sequence
  Synthetic
gguauacugccuauaguagg

SEQ ID NO: 325561 - RNA, 21 nt, Artificial Sequence
  Synthetic
agguauacugccuauaguagg

SEQ ID NO: 325562 - RNA, 22 nt, Artificial Sequence
  Synthetic
aagguauacugccuauaguagg

SEQ ID NO: 325563 - RNA, 23 nt, Artificial Sequence
  Synthetic
uaagguauacugccuauaguagg

SEQ ID NO: 325564 - RNA, 24 nt, Artificial Sequence
  Synthetic
auaagguauacugccuauaguagg

SEQ ID NO: 325565 - RNA, 18 nt, Artificial Sequence
  Synthetic
accuuaugccguaguagg

SEQ ID NO: 325566 - RNA, 19 nt, Artificial Sequence
  Synthetic
uaccuuaugccguaguagg

SEQ ID NO: 325567 - RNA, 20 nt, Artificial Sequence
  Synthetic
guaccuuaugccguaguagg

SEQ ID NO: 325568 - RNA, 21 nt, Artificial Sequence
  Synthetic
uguaccuuaugccguaguagg

SEQ ID NO: 325569 - RNA, 22 nt, Artificial Sequence
  Synthetic
cuguaccuuaugccguaguagg

SEQ ID NO: 325570 - RNA, 23 nt, Artificial Sequence
  Synthetic
acuguaccuuaugccguaguagg

SEQ ID NO: 325571 - RNA, 24 nt, Artificial Sequence
  Synthetic
uacuguaccuuaugccguaguagg

SEQ ID NO: 325572 - RNA, 18 nt, Artificial Sequence
  Synthetic
gcaagauuccuuaguagg

SEQ ID NO: 325573 - RNA, 19 nt, Artificial Sequence
  Synthetic
agcaagauuccuuaguagg

SEQ ID NO: 325574 - RNA, 20 nt, Artificial Sequence
  Synthetic
cagcaagauuccuuaguagg

SEQ ID NO: 325575 - RNA, 21 nt, Artificial Sequence
  Synthetic
gcagcaagauuccuuaguagg

SEQ ID NO: 325576 - RNA, 22 nt, Artificial Sequence
  Synthetic
agcagcaagauuccuuaguagg

SEQ ID NO: 325577 - RNA, 23 nt, Artificial Sequence
  Synthetic
uagcagcaagauuccuuaguagg

SEQ ID NO: 325578 - RNA, 24 nt, Artificial Sequence
  Synthetic
uuagcagcaagauuccuuaguagg

SEQ ID NO: 325579 - RNA, 18 nt, Artificial Sequence
  Synthetic
uuuuucuggacacguagg

SEQ ID NO: 325580 - RNA, 19 nt, Artificial Sequence
  Synthetic
cuuuuucuggacacguagg

SEQ ID NO: 325581 - RNA, 20 nt, Artificial Sequence
  Synthetic
acuuuuucuggacacguagg

SEQ ID NO: 325582 - RNA, 21 nt, Artificial Sequence
  Synthetic
uacuuuuucuggacacguagg

SEQ ID NO: 325583 - RNA, 22 nt, Artificial Sequence
  Synthetic
uuacuuuuucuggacacguagg

SEQ ID NO: 325584 - RNA, 23 nt, Artificial Sequence
  Synthetic
auuacuuuuucuggacacguagg

SEQ ID NO: 325585 - RNA, 24 nt, Artificial Sequence
  Synthetic
cauuacuuuuucuggacacguagg

SEQ ID NO: 325586 - RNA, 18 nt, Artificial Sequence
  Synthetic
auagaaaaagaagguagg

SEQ ID NO: 325587 - RNA, 19 nt, Artificial Sequence
  Synthetic
cauagaaaaagaagguagg

SEQ ID NO: 325588 - RNA, 20 nt, Artificial Sequence
  Synthetic
acauagaaaaagaagguagg

SEQ ID NO: 325589 - RNA, 21 nt, Artificial Sequence
  Synthetic
uacauagaaaaagaagguagg

SEQ ID NO: 325590 - RNA, 22 nt, Artificial Sequence
  Synthetic
auacauagaaaaagaagguagg

SEQ ID NO: 325591 - RNA, 23 nt, Artificial Sequence
  Synthetic
uauacauagaaaaagaagguagg

SEQ ID NO: 325592 - RNA, 24 nt, Artificial Sequence
  Synthetic
guauacauagaaaaagaagguagg

SEQ ID NO: 325593 - RNA, 18 nt, Artificial Sequence
  Synthetic
uaaaaagacucagguagg

SEQ ID NO: 325594 - RNA, 19 nt, Artificial Sequence
  Synthetic
uuaaaaagacucagguagg

SEQ ID NO: 325595 - RNA, 20 nt, Artificial Sequence
  Synthetic
auuaaaaagacucagguagg

SEQ ID NO: 325596 - RNA, 21 nt, Artificial Sequence
  Synthetic
gauuaaaaagacucagguagg

SEQ ID NO: 325597 - RNA, 22 nt, Artificial Sequence
  Synthetic
agauuaaaaagacucagguagg

SEQ ID NO: 325598 - RNA, 23 nt, Artificial Sequence
  Synthetic
aagauuaaaaagacucagguagg

SEQ ID NO: 325599 - RNA, 24 nt, Artificial Sequence
  Synthetic
caagauuaaaaagacucagguagg

SEQ ID NO: 325600 - RNA, 18 nt, Artificial Sequence
  Synthetic
auggguuggucagguagg

SEQ ID NO: 325601 - RNA, 19 nt, Artificial Sequence
  Synthetic
gauggguuggucagguagg

SEQ ID NO: 325602 - RNA, 20 nt, Artificial Sequence
  Synthetic
agauggguuggucagguagg

SEQ ID NO: 325603 - RNA, 21 nt, Artificial Sequence
  Synthetic
gagauggguuggucagguagg

SEQ ID NO: 325604 - RNA, 22 nt, Artificial Sequence
  Synthetic
agagauggguuggucagguagg

SEQ ID NO: 325605 - RNA, 23 nt, Artificial Sequence
  Synthetic
aagagauggguuggucagguagg

SEQ ID NO: 325606 - RNA, 24 nt, Artificial Sequence
  Synthetic
uaagagauggguuggucagguagg

SEQ ID NO: 325607 - RNA, 18 nt, Artificial Sequence
  Synthetic
cucuaacauucagguagg

SEQ ID NO: 325608 - RNA, 19 nt, Artificial Sequence
  Synthetic
ucucuaacauucagguagg

SEQ ID NO: 325609 - RNA, 20 nt, Artificial Sequence
  Synthetic
gucucuaacauucagguagg

SEQ ID NO: 325610 - RNA, 21 nt, Artificial Sequence
  Synthetic
ugucucuaacauucagguagg

SEQ ID NO: 325611 - RNA, 22 nt, Artificial Sequence
  Synthetic
uugucucuaacauucagguagg

SEQ ID NO: 325612 - RNA, 23 nt, Artificial Sequence
  Synthetic
cuugucucuaacauucagguagg

SEQ ID NO: 325613 - RNA, 24 nt, Artificial Sequence
  Synthetic
ucuugucucuaacauucagguagg

SEQ ID NO: 325614 - RNA, 18 nt, Artificial Sequence
  Synthetic
caaauaaagaaggguagg

SEQ ID NO: 325615 - RNA, 19 nt, Artificial Sequence
  Synthetic
acaaauaaagaaggguagg

SEQ ID NO: 325616 - RNA, 20 nt, Artificial Sequence
  Synthetic
cacaaauaaagaaggguagg

SEQ ID NO: 325617 - RNA, 21 nt, Artificial Sequence
  Synthetic
acacaaauaaagaaggguagg

SEQ ID NO: 325618 - RNA, 22 nt, Artificial Sequence
  Synthetic
cacacaaauaaagaaggguagg

SEQ ID NO: 325619 - RNA, 23 nt, Artificial Sequence
  Synthetic
gcacacaaauaaagaaggguagg

SEQ ID NO: 325620 - RNA, 24 nt, Artificial Sequence
  Synthetic
ugcacacaaauaaagaaggguagg

SEQ ID NO: 325621 - RNA, 18 nt, Artificial Sequence
  Synthetic
gaauuaggcauggguagg

SEQ ID NO: 325622 - RNA, 19 nt, Artificial Sequence
  Synthetic
ggaauuaggcauggguagg

SEQ ID NO: 325623 - RNA, 20 nt, Artificial Sequence
  Synthetic
gggaauuaggcauggguagg

SEQ ID NO: 325624 - RNA, 21 nt, Artificial Sequence
  Synthetic
agggaauuaggcauggguagg

SEQ ID NO: 325625 - RNA, 22 nt, Artificial Sequence
  Synthetic
gagggaauuaggcauggguagg

SEQ ID NO: 325626 - RNA, 23 nt, Artificial Sequence
  Synthetic
cgagggaauuaggcauggguagg

SEQ ID NO: 325627 - RNA, 24 nt, Artificial Sequence
  Synthetic
gcgagggaauuaggcauggguagg

SEQ ID NO: 325628 - RNA, 18 nt, Artificial Sequence
  Synthetic
aguuuaggcauggguagg

SEQ ID NO: 325629 - RNA, 19 nt, Artificial Sequence
  Synthetic
caguuuaggcauggguagg

SEQ ID NO: 325630 - RNA, 20 nt, Artificial Sequence
  Synthetic
acaguuuaggcauggguagg

SEQ ID NO: 325631 - RNA, 21 nt, Artificial Sequence
  Synthetic
uacaguuuaggcauggguagg

SEQ ID NO: 325632 - RNA, 22 nt, Artificial Sequence
  Synthetic
uuacaguuuaggcauggguagg

SEQ ID NO: 325633 - RNA, 23 nt, Artificial Sequence
  Synthetic
uuuacaguuuaggcauggguagg

SEQ ID NO: 325634 - RNA, 24 nt, Artificial Sequence
  Synthetic
uuuuacaguuuaggcauggguagg

SEQ ID NO: 325635 - RNA, 18 nt, Artificial Sequence
  Synthetic
gagagguggguggguagg

SEQ ID NO: 325636 - RNA, 19 nt, Artificial Sequence
  Synthetic
ugagagguggguggguagg

SEQ ID NO: 325637 - RNA, 20 nt, Artificial Sequence
  Synthetic
uugagagguggguggguagg

SEQ ID NO: 325638 - RNA, 21 nt, Artificial Sequence
  Synthetic
uuugagagguggguggguagg

SEQ ID NO: 325639 - RNA, 22 nt, Artificial Sequence
  Synthetic
auuugagagguggguggguagg

SEQ ID NO: 325640 - RNA, 23 nt, Artificial Sequence
  Synthetic
uauuugagagguggguggguagg

SEQ ID NO: 325641 - RNA, 24 nt, Artificial Sequence
  Synthetic
cuauuugagagguggguggguagg

SEQ ID NO: 325642 - RNA, 18 nt, Artificial Sequence
  Synthetic
auuagcuuuugugguagg

SEQ ID NO: 325643 - RNA, 19 nt, Artificial Sequence
  Synthetic
aauuagcuuuugugguagg

SEQ ID NO: 325644 - RNA, 20 nt, Artificial Sequence
  Synthetic
aaauuagcuuuugugguagg

SEQ ID NO: 325645 - RNA, 21 nt, Artificial Sequence
  Synthetic
uaaauuagcuuuugugguagg

SEQ ID NO: 325646 - RNA, 22 nt, Artificial Sequence
  Synthetic
uuaaauuagcuuuugugguagg

SEQ ID NO: 325647 - RNA, 23 nt, Artificial Sequence
  Synthetic
auuaaauuagcuuuugugguagg

SEQ ID NO: 325648 - RNA, 24 nt, Artificial Sequence
  Synthetic
uauuaaauuagcuuuugugguagg

SEQ ID NO: 325649 - RNA, 18 nt, Artificial Sequence
  Synthetic
cccagguuuucauguagg

SEQ ID NO: 325650 - RNA, 19 nt, Artificial Sequence
  Synthetic
ucccagguuuucauguagg

SEQ ID NO: 325651 - RNA, 20 nt, Artificial Sequence
  Synthetic
uucccagguuuucauguagg

SEQ ID NO: 325652 - RNA, 21 nt, Artificial Sequence
  Synthetic
uuucccagguuuucauguagg

SEQ ID NO: 325653 - RNA, 22 nt, Artificial Sequence
  Synthetic
auuucccagguuuucauguagg

SEQ ID NO: 325654 - RNA, 23 nt, Artificial Sequence
  Synthetic
cauuucccagguuuucauguagg

SEQ ID NO: 325655 - RNA, 24 nt, Artificial Sequence
  Synthetic
ccauuucccagguuuucauguagg

SEQ ID NO: 325656 - RNA, 18 nt, Artificial Sequence
  Synthetic
gggagagagagauguagg

SEQ ID NO: 325657 - RNA, 19 nt, Artificial Sequence
  Synthetic
agggagagagagauguagg

SEQ ID NO: 325658 - RNA, 20 nt, Artificial Sequence
  Synthetic
aagggagagagagauguagg

SEQ ID NO: 325659 - RNA, 21 nt, Artificial Sequence
  Synthetic
gaagggagagagagauguagg

SEQ ID NO: 325660 - RNA, 22 nt, Artificial Sequence
  Synthetic
ggaagggagagagagauguagg

SEQ ID NO: 325661 - RNA, 23 nt, Artificial Sequence
  Synthetic
aggaagggagagagagauguagg

SEQ ID NO: 325662 - RNA, 24 nt, Artificial Sequence
  Synthetic
gaggaagggagagagagauguagg

SEQ ID NO: 325663 - RNA, 18 nt, Artificial Sequence
  Synthetic
ugaaagugaauauguagg

SEQ ID NO: 325664 - RNA, 19 nt, Artificial Sequence
  Synthetic
augaaagugaauauguagg

SEQ ID NO: 325665 - RNA, 20 nt, Artificial Sequence
  Synthetic
gaugaaagugaauauguagg

SEQ ID NO: 325666 - RNA, 21 nt, Artificial Sequence
  Synthetic
agaugaaagugaauauguagg

SEQ ID NO: 325667 - RNA, 22 nt, Artificial Sequence
  Synthetic
aagaugaaagugaauauguagg

SEQ ID NO: 325668 - RNA, 23 nt, Artificial Sequence
  Synthetic
aaagaugaaagugaauauguagg

SEQ ID NO: 325669 - RNA, 24 nt, Artificial Sequence
  Synthetic
aaaagaugaaagugaauauguagg

SEQ ID NO: 325670 - RNA, 18 nt, Artificial Sequence
  Synthetic
uuuucuauaauauguagg

SEQ ID NO: 325671 - RNA, 19 nt, Artificial Sequence
  Synthetic
auuuucuauaauauguagg

SEQ ID NO: 325672 - RNA, 20 nt, Artificial Sequence
  Synthetic
aauuuucuauaauauguagg

SEQ ID NO: 325673 - RNA, 21 nt, Artificial Sequence
  Synthetic
gaauuuucuauaauauguagg

SEQ ID NO: 325674 - RNA, 22 nt, Artificial Sequence
  Synthetic
ggaauuuucuauaauauguagg

SEQ ID NO: 325675 - RNA, 23 nt, Artificial Sequence
  Synthetic
aggaauuuucuauaauauguagg

SEQ ID NO: 325676 - RNA, 24 nt, Artificial Sequence
  Synthetic
aaggaauuuucuauaauauguagg

SEQ ID NO: 325677 - RNA, 18 nt, Artificial Sequence
  Synthetic
uguuuucucauauguagg

SEQ ID NO: 325678 - RNA, 19 nt, Artificial Sequence
  Synthetic
uuguuuucucauauguagg

SEQ ID NO: 325679 - RNA, 20 nt, Artificial Sequence
  Synthetic
cuuguuuucucauauguagg

SEQ ID NO: 325680 - RNA, 21 nt, Artificial Sequence
  Synthetic
ccuuguuuucucauauguagg

SEQ ID NO: 325681 - RNA, 22 nt, Artificial Sequence
  Synthetic
uccuuguuuucucauauguagg

SEQ ID NO: 325682 - RNA, 23 nt, Artificial Sequence
  Synthetic
uuccuuguuuucucauauguagg

SEQ ID NO: 325683 - RNA, 24 nt, Artificial Sequence
  Synthetic
uuuccuuguuuucucauauguagg

SEQ ID NO: 325684 - RNA, 18 nt, Artificial Sequence
  Synthetic
uacgcaguuguauguagg

SEQ ID NO: 325685 - RNA, 19 nt, Artificial Sequence
  Synthetic
uuacgcaguuguauguagg

SEQ ID NO: 325686 - RNA, 20 nt, Artificial Sequence
  Synthetic
uuuacgcaguuguauguagg

SEQ ID NO: 325687 - RNA, 21 nt, Artificial Sequence
  Synthetic
auuuacgcaguuguauguagg

SEQ ID NO: 325688 - RNA, 22 nt, Artificial Sequence
  Synthetic
cauuuacgcaguuguauguagg

SEQ ID NO: 325689 - RNA, 23 nt, Artificial Sequence
  Synthetic
ucauuuacgcaguuguauguagg

SEQ ID NO: 325690 - RNA, 24 nt, Artificial Sequence
  Synthetic
aucauuuacgcaguuguauguagg

SEQ ID NO: 325691 - RNA, 18 nt, Artificial Sequence
  Synthetic
cuaaagagagacuguagg

SEQ ID NO: 325692 - RNA, 19 nt, Artificial Sequence
  Synthetic
ccuaaagagagacuguagg

SEQ ID NO: 325693 - RNA, 20 nt, Artificial Sequence
  Synthetic
accuaaagagagacuguagg

SEQ ID NO: 325694 - RNA, 21 nt, Artificial Sequence
  Synthetic
aaccuaaagagagacuguagg

SEQ ID NO: 325695 - RNA, 22 nt, Artificial Sequence
  Synthetic
uaaccuaaagagagacuguagg

SEQ ID NO: 325696 - RNA, 23 nt, Artificial Sequence
  Synthetic
auaaccuaaagagagacuguagg

SEQ ID NO: 325697 - RNA, 24 nt, Artificial Sequence
  Synthetic
aauaaccuaaagagagacuguagg

SEQ ID NO: 325698 - RNA, 18 nt, Artificial Sequence
  Synthetic
uaaauuaaaugguguagg

SEQ ID NO: 325699 - RNA, 19 nt, Artificial Sequence
  Synthetic
auaaauuaaaugguguagg

SEQ ID NO: 325700 - RNA, 20 nt, Artificial Sequence
  Synthetic
uauaaauuaaaugguguagg

SEQ ID NO: 325701 - RNA, 21 nt, Artificial Sequence
  Synthetic
cuauaaauuaaaugguguagg

SEQ ID NO: 325702 - RNA, 22 nt, Artificial Sequence
  Synthetic
ccuauaaauuaaaugguguagg

SEQ ID NO: 325703 - RNA, 23 nt, Artificial Sequence
  Synthetic
uccuauaaauuaaaugguguagg

SEQ ID NO: 325704 - RNA, 24 nt, Artificial Sequence
  Synthetic
uuccuauaaauuaaaugguguagg

SEQ ID NO: 325705 - RNA, 18 nt, Artificial Sequence
  Synthetic
cuccauucauuguguagg

SEQ ID NO: 325706 - RNA, 19 nt, Artificial Sequence
  Synthetic
ccuccauucauuguguagg

SEQ ID NO: 325707 - RNA, 20 nt, Artificial Sequence
  Synthetic
gccuccauucauuguguagg

SEQ ID NO: 325708 - RNA, 21 nt, Artificial Sequence
  Synthetic
agccuccauucauuguguagg

SEQ ID NO: 325709 - RNA, 22 nt, Artificial Sequence
  Synthetic
aagccuccauucauuguguagg

SEQ ID NO: 325710 - RNA, 23 nt, Artificial Sequence
  Synthetic
aaagccuccauucauuguguagg

SEQ ID NO: 325711 - RNA, 24 nt, Artificial Sequence
  Synthetic
caaagccuccauucauuguguagg

SEQ ID NO: 325712 - RNA, 18 nt, Artificial Sequence
  Synthetic
ggcagagagcauuguagg

SEQ ID NO: 325713 - RNA, 19 nt, Artificial Sequence
  Synthetic
aggcagagagcauuguagg

SEQ ID NO: 325714 - RNA, 20 nt, Artificial Sequence
  Synthetic
aaggcagagagcauuguagg

SEQ ID NO: 325715 - RNA, 21 nt, Artificial Sequence
  Synthetic
aaaggcagagagcauuguagg

SEQ ID NO: 325716 - RNA, 22 nt, Artificial Sequence
  Synthetic
aaaaggcagagagcauuguagg

SEQ ID NO: 325717 - RNA, 23 nt, Artificial Sequence
  Synthetic
gaaaaggcagagagcauuguagg

SEQ ID NO: 325718 - RNA, 24 nt, Artificial Sequence
  Synthetic
ugaaaaggcagagagcauuguagg

SEQ ID NO: 325719 - RNA, 18 nt, Artificial Sequence
  Synthetic
auaaauagaaaaauuagg

SEQ ID NO: 325720 - RNA, 19 nt, Artificial Sequence
  Synthetic
uauaaauagaaaaauuagg

SEQ ID NO: 325721 - RNA, 20 nt, Artificial Sequence
  Synthetic
uuauaaauagaaaaauuagg

SEQ ID NO: 325722 - RNA, 21 nt, Artificial Sequence
  Synthetic
auuauaaauagaaaaauuagg

SEQ ID NO: 325723 - RNA, 22 nt, Artificial Sequence
  Synthetic
uauuauaaauagaaaaauuagg

SEQ ID NO: 325724 - RNA, 23 nt, Artificial Sequence
  Synthetic
auauuauaaauagaaaaauuagg

SEQ ID NO: 325725 - RNA, 24 nt, Artificial Sequence
  Synthetic
uauauuauaaauagaaaaauuagg

SEQ ID NO: 325726 - RNA, 18 nt, Artificial Sequence
  Synthetic
uuuugguucaaaauuagg

SEQ ID NO: 325727 - RNA, 19 nt, Artificial Sequence
  Synthetic
auuuugguucaaaauuagg

SEQ ID NO: 325728 - RNA, 20 nt, Artificial Sequence
  Synthetic
aauuuugguucaaaauuagg

SEQ ID NO: 325729 - RNA, 21 nt, Artificial Sequence
  Synthetic
caauuuugguucaaaauuagg

SEQ ID NO: 325730 - RNA, 22 nt, Artificial Sequence
  Synthetic
gcaauuuugguucaaaauuagg

SEQ ID NO: 325731 - RNA, 23 nt, Artificial Sequence
  Synthetic
ggcaauuuugguucaaaauuagg

SEQ ID NO: 325732 - RNA, 24 nt, Artificial Sequence
  Synthetic
aggcaauuuugguucaaaauuagg

SEQ ID NO: 325733 - RNA, 18 nt, Artificial Sequence
  Synthetic
agaauaccaagaauuagg

SEQ ID NO: 325734 - RNA, 19 nt, Artificial Sequence
  Synthetic
uagaauaccaagaauuagg

SEQ ID NO: 325735 - RNA, 20 nt, Artificial Sequence
  Synthetic
auagaauaccaagaauuagg

SEQ ID NO: 325736 - RNA, 21 nt, Artificial Sequence
  Synthetic
uauagaauaccaagaauuagg

SEQ ID NO: 325737 - RNA, 22 nt, Artificial Sequence
  Synthetic
auauagaauaccaagaauuagg

SEQ ID NO: 325738 - RNA, 23 nt, Artificial Sequence
  Synthetic
aauauagaauaccaagaauuagg

SEQ ID NO: 325739 - RNA, 24 nt, Artificial Sequence
  Synthetic
caauauagaauaccaagaauuagg

SEQ ID NO: 325740 - RNA, 18 nt, Artificial Sequence
  Synthetic
uaccauuccauaauuagg

SEQ ID NO: 325741 - RNA, 19 nt, Artificial Sequence
  Synthetic
guaccauuccauaauuagg

SEQ ID NO: 325742 - RNA, 20 nt, Artificial Sequence
  Synthetic
uguaccauuccauaauuagg

SEQ ID NO: 325743 - RNA, 21 nt, Artificial Sequence
  Synthetic
cuguaccauuccauaauuagg

SEQ ID NO: 325744 - RNA, 22 nt, Artificial Sequence
  Synthetic
gcuguaccauuccauaauuagg

SEQ ID NO: 325745 - RNA, 23 nt, Artificial Sequence
  Synthetic
ugcuguaccauuccauaauuagg

SEQ ID NO: 325746 - RNA, 24 nt, Artificial Sequence
  Synthetic
uugcuguaccauuccauaauuagg

SEQ ID NO: 325747 - RNA, 18 nt, Artificial Sequence
  Synthetic
aucuauaagguaauuagg

SEQ ID NO: 325748 - RNA, 19 nt, Artificial Sequence
  Synthetic
uaucuauaagguaauuagg

SEQ ID NO: 325749 - RNA, 20 nt, Artificial Sequence
  Synthetic
guaucuauaagguaauuagg

SEQ ID NO: 325750 - RNA, 21 nt, Artificial Sequence
  Synthetic
gguaucuauaagguaauuagg

SEQ ID NO: 325751 - RNA, 22 nt, Artificial Sequence
  Synthetic
agguaucuauaagguaauuagg

SEQ ID NO: 325752 - RNA, 23 nt, Artificial Sequence
  Synthetic
aagguaucuauaagguaauuagg

SEQ ID NO: 325753 - RNA, 24 nt, Artificial Sequence
  Synthetic
uaagguaucuauaagguaauuagg

SEQ ID NO: 325754 - RNA, 18 nt, Artificial Sequence
  Synthetic
aagucucucaacauuagg

SEQ ID NO: 325755 - RNA, 19 nt, Artificial Sequence
  Synthetic
aaagucucucaacauuagg

SEQ ID NO: 325756 - RNA, 20 nt, Artificial Sequence
  Synthetic
aaaagucucucaacauuagg

SEQ ID NO: 325757 - RNA, 21 nt, Artificial Sequence
  Synthetic
aaaaagucucucaacauuagg

SEQ ID NO: 325758 - RNA, 22 nt, Artificial Sequence
  Synthetic
gaaaaagucucucaacauuagg

SEQ ID NO: 325759 - RNA, 23 nt, Artificial Sequence
  Synthetic
ggaaaaagucucucaacauuagg

SEQ ID NO: 325760 - RNA, 24 nt, Artificial Sequence
  Synthetic
cggaaaaagucucucaacauuagg

SEQ ID NO: 325761 - RNA, 18 nt, Artificial Sequence
  Synthetic
gagccugucucuauuagg

SEQ ID NO: 325762 - RNA, 19 nt, Artificial Sequence
  Synthetic
agagccugucucuauuagg

SEQ ID NO: 325763 - RNA, 20 nt, Artificial Sequence
  Synthetic
gagagccugucucuauuagg

SEQ ID NO: 325764 - RNA, 21 nt, Artificial Sequence
  Synthetic
ugagagccugucucuauuagg

SEQ ID NO: 325765 - RNA, 22 nt, Artificial Sequence
  Synthetic
gugagagccugucucuauuagg

SEQ ID NO: 325766 - RNA, 23 nt, Artificial Sequence
  Synthetic
agugagagccugucucuauuagg

SEQ ID NO: 325767 - RNA, 24 nt, Artificial Sequence
  Synthetic
cagugagagccugucucuauuagg

SEQ ID NO: 325768 - RNA, 18 nt, Artificial Sequence
  Synthetic
acaguguuuauuauuagg

SEQ ID NO: 325769 - RNA, 19 nt, Artificial Sequence
  Synthetic
uacaguguuuauuauuagg

SEQ ID NO: 325770 - RNA, 20 nt, Artificial Sequence
  Synthetic
uuacaguguuuauuauuagg

SEQ ID NO: 325771 - RNA, 21 nt, Artificial Sequence
  Synthetic
auuacaguguuuauuauuagg

SEQ ID NO: 325772 - RNA, 22 nt, Artificial Sequence
  Synthetic
cauuacaguguuuauuauuagg

SEQ ID NO: 325773 - RNA, 23 nt, Artificial Sequence
  Synthetic
ucauuacaguguuuauuauuagg

SEQ ID NO: 325774 - RNA, 24 nt, Artificial Sequence
  Synthetic
uucauuacaguguuuauuauuagg

SEQ ID NO: 325775 - RNA, 18 nt, Artificial Sequence
  Synthetic
uggauuuaucuuauuagg

SEQ ID NO: 325776 - RNA, 19 nt, Artificial Sequence
  Synthetic
auggauuuaucuuauuagg

SEQ ID NO: 325777 - RNA, 20 nt, Artificial Sequence
  Synthetic
cauggauuuaucuuauuagg

SEQ ID NO: 325778 - RNA, 21 nt, Artificial Sequence
  Synthetic
ucauggauuuaucuuauuagg

SEQ ID NO: 325779 - RNA, 22 nt, Artificial Sequence
  Synthetic
cucauggauuuaucuuauuagg

SEQ ID NO: 325780 - RNA, 23 nt, Artificial Sequence
  Synthetic
ccucauggauuuaucuuauuagg

SEQ ID NO: 325781 - RNA, 24 nt, Artificial Sequence
  Synthetic
cccucauggauuuaucuuauuagg

SEQ ID NO: 325782 - RNA, 18 nt, Artificial Sequence
  Synthetic
uggaaggugguuauuagg

SEQ ID NO: 325783 - RNA, 19 nt, Artificial Sequence
  Synthetic
uuggaaggugguuauuagg

SEQ ID NO: 325784 - RNA, 20 nt, Artificial Sequence
  Synthetic
cuuggaaggugguuauuagg

SEQ ID NO: 325785 - RNA, 21 nt, Artificial Sequence
  Synthetic
ucuuggaaggugguuauuagg

SEQ ID NO: 325786 - RNA, 22 nt, Artificial Sequence
  Synthetic
aucuuggaaggugguuauuagg

SEQ ID NO: 325787 - RNA, 23 nt, Artificial Sequence
  Synthetic
uaucuuggaaggugguuauuagg

SEQ ID NO: 325788 - RNA, 24 nt, Artificial Sequence
  Synthetic
uuaucuuggaaggugguuauuagg

SEQ ID NO: 325789 - RNA, 18 nt, Artificial Sequence
  Synthetic
uaccacauuuuuauuagg

SEQ ID NO: 325790 - RNA, 19 nt, Artificial Sequence
  Synthetic
uuaccacauuuuuauuagg

SEQ ID NO: 325791 - RNA, 20 nt, Artificial Sequence
  Synthetic
cuuaccacauuuuuauuagg

SEQ ID NO: 325792 - RNA, 21 nt, Artificial Sequence
  Synthetic
ucuuaccacauuuuuauuagg

SEQ ID NO: 325793 - RNA, 22 nt, Artificial Sequence
  Synthetic
aucuuaccacauuuuuauuagg

SEQ ID NO: 325794 - RNA, 23 nt, Artificial Sequence
  Synthetic
aaucuuaccacauuuuuauuagg

SEQ ID NO: 325795 - RNA, 24 nt, Artificial Sequence
  Synthetic
aaaucuuaccacauuuuuauuagg

SEQ ID NO: 325796 - RNA, 18 nt, Artificial Sequence
  Synthetic
uggcaggacgcacuuagg

SEQ ID NO: 325797 - RNA, 19 nt, Artificial Sequence
  Synthetic
guggcaggacgcacuuagg

SEQ ID NO: 325798 - RNA, 20 nt, Artificial Sequence
  Synthetic
gguggcaggacgcacuuagg

SEQ ID NO: 325799 - RNA, 21 nt, Artificial Sequence
  Synthetic
agguggcaggacgcacuuagg

SEQ ID NO: 325800 - RNA, 22 nt, Artificial Sequence
  Synthetic
cagguggcaggacgcacuuagg

SEQ ID NO: 325801 - RNA, 23 nt, Artificial Sequence
  Synthetic
ucagguggcaggacgcacuuagg

SEQ ID NO: 325802 - RNA, 24 nt, Artificial Sequence
  Synthetic
aucagguggcaggacgcacuuagg

SEQ ID NO: 325803 - RNA, 18 nt, Artificial Sequence
  Synthetic
gaugcuccucaccuuagg

SEQ ID NO: 325804 - RNA, 19 nt, Artificial Sequence
  Synthetic
agaugcuccucaccuuagg

SEQ ID NO: 325805 - RNA, 20 nt, Artificial Sequence
  Synthetic
cagaugcuccucaccuuagg

SEQ ID NO: 325806 - RNA, 21 nt, Artificial Sequence
  Synthetic
acagaugcuccucaccuuagg

SEQ ID NO: 325807 - RNA, 22 nt, Artificial Sequence
  Synthetic
uacagaugcuccucaccuuagg

SEQ ID NO: 325808 - RNA, 23 nt, Artificial Sequence
  Synthetic
auacagaugcuccucaccuuagg

SEQ ID NO: 325809 - RNA, 24 nt, Artificial Sequence
  Synthetic
uauacagaugcuccucaccuuagg

SEQ ID NO: 325810 - RNA, 18 nt, Artificial Sequence
  Synthetic
ggaaggaucauccuuagg

SEQ ID NO: 325811 - RNA, 19 nt, Artificial Sequence
  Synthetic
aggaaggaucauccuuagg

SEQ ID NO: 325812 - RNA, 20 nt, Artificial Sequence
  Synthetic
caggaaggaucauccuuagg

SEQ ID NO: 325813 - RNA, 21 nt, Artificial Sequence
  Synthetic
ccaggaaggaucauccuuagg

SEQ ID NO: 325814 - RNA, 22 nt, Artificial Sequence
  Synthetic
accaggaaggaucauccuuagg

SEQ ID NO: 325815 - RNA, 23 nt, Artificial Sequence
  Synthetic
caccaggaaggaucauccuuagg

SEQ ID NO: 325816 - RNA, 24 nt, Artificial Sequence
  Synthetic
ccaccaggaaggaucauccuuagg

SEQ ID NO: 325817 - RNA, 18 nt, Artificial Sequence
  Synthetic
ugagauaaacuccuuagg

SEQ ID NO: 325818 - RNA, 19 nt, Artificial Sequence
  Synthetic
uugagauaaacuccuuagg

SEQ ID NO: 325819 - RNA, 20 nt, Artificial Sequence
  Synthetic
guugagauaaacuccuuagg

SEQ ID NO: 325820 - RNA, 21 nt, Artificial Sequence
  Synthetic
gguugagauaaacuccuuagg

SEQ ID NO: 325821 - RNA, 22 nt, Artificial Sequence
  Synthetic
ugguugagauaaacuccuuagg

SEQ ID NO: 325822 - RNA, 23 nt, Artificial Sequence
  Synthetic
cugguugagauaaacuccuuagg

SEQ ID NO: 325823 - RNA, 24 nt, Artificial Sequence
  Synthetic
acugguugagauaaacuccuuagg

SEQ ID NO: 325824 - RNA, 18 nt, Artificial Sequence
  Synthetic
ggugacagucaucuuagg

SEQ ID NO: 325825 - RNA, 19 nt, Artificial Sequence
  Synthetic
gggugacagucaucuuagg

SEQ ID NO: 325826 - RNA, 20 nt, Artificial Sequence
  Synthetic
ugggugacagucaucuuagg

SEQ ID NO: 325827 - RNA, 21 nt, Artificial Sequence
  Synthetic
uugggugacagucaucuuagg

SEQ ID NO: 325828 - RNA, 22 nt, Artificial Sequence
  Synthetic
guugggugacagucaucuuagg

SEQ ID NO: 325829 - RNA, 23 nt, Artificial Sequence
  Synthetic
gguugggugacagucaucuuagg

SEQ ID NO: 325830 - RNA, 24 nt, Artificial Sequence
  Synthetic
agguugggugacagucaucuuagg

SEQ ID NO: 325831 - RNA, 18 nt, Artificial Sequence
  Synthetic
ugaggggaaaaaguuagg

SEQ ID NO: 325832 - RNA, 19 nt, Artificial Sequence
  Synthetic
gugaggggaaaaaguuagg

SEQ ID NO: 325833 - RNA, 20 nt, Artificial Sequence
  Synthetic
ggugaggggaaaaaguuagg

SEQ ID NO: 325834 - RNA, 21 nt, Artificial Sequence
  Synthetic
gggugaggggaaaaaguuagg

SEQ ID NO: 325835 - RNA, 22 nt, Artificial Sequence
  Synthetic
agggugaggggaaaaaguuagg

SEQ ID NO: 325836 - RNA, 23 nt, Artificial Sequence
  Synthetic
uagggugaggggaaaaaguuagg

SEQ ID NO: 325837 - RNA, 24 nt, Artificial Sequence
  Synthetic
cuagggugaggggaaaaaguuagg

SEQ ID NO: 325838 - RNA, 18 nt, Artificial Sequence
  Synthetic
aaagggagaucaguuagg

SEQ ID NO: 325839 - RNA, 19 nt, Artificial Sequence
  Synthetic
aaaagggagaucaguuagg

SEQ ID NO: 325840 - RNA, 20 nt, Artificial Sequence
  Synthetic
uaaaagggagaucaguuagg

SEQ ID NO: 325841 - RNA, 21 nt, Artificial Sequence
  Synthetic
uuaaaagggagaucaguuagg

SEQ ID NO: 325842 - RNA, 22 nt, Artificial Sequence
  Synthetic
cuuaaaagggagaucaguuagg

SEQ ID NO: 325843 - RNA, 23 nt, Artificial Sequence
  Synthetic
ccuuaaaagggagaucaguuagg

SEQ ID NO: 325844 - RNA, 24 nt, Artificial Sequence
  Synthetic
accuuaaaagggagaucaguuagg

SEQ ID NO: 325845 - RNA, 18 nt, Artificial Sequence
  Synthetic
aguugguuguggguuagg

SEQ ID NO: 325846 - RNA, 19 nt, Artificial Sequence
  Synthetic
aaguugguuguggguuagg

SEQ ID NO: 325847 - RNA, 20 nt, Artificial Sequence
  Synthetic
aaaguugguuguggguuagg

SEQ ID NO: 325848 - RNA, 21 nt, Artificial Sequence
  Synthetic
uaaaguugguuguggguuagg

SEQ ID NO: 325849 - RNA, 22 nt, Artificial Sequence
  Synthetic
auaaaguugguuguggguuagg

SEQ ID NO: 325850 - RNA, 23 nt, Artificial Sequence
  Synthetic
gauaaaguugguuguggguuagg

SEQ ID NO: 325851 - RNA, 24 nt, Artificial Sequence
  Synthetic
ugauaaaguugguuguggguuagg

SEQ ID NO: 325852 - RNA, 18 nt, Artificial Sequence
  Synthetic
uuauugguacuuguuagg

SEQ ID NO: 325853 - RNA, 19 nt, Artificial Sequence
  Synthetic
uuuauugguacuuguuagg

SEQ ID NO: 325854 - RNA, 20 nt, Artificial Sequence
  Synthetic
auuuauugguacuuguuagg

SEQ ID NO: 325855 - RNA, 21 nt, Artificial Sequence
  Synthetic
uauuuauugguacuuguuagg

SEQ ID NO: 325856 - RNA, 22 nt, Artificial Sequence
  Synthetic
cuauuuauugguacuuguuagg

SEQ ID NO: 325857 - RNA, 23 nt, Artificial Sequence
  Synthetic
gcuauuuauugguacuuguuagg

SEQ ID NO: 325858 - RNA, 24 nt, Artificial Sequence
  Synthetic
ugcuauuuauugguacuuguuagg

SEQ ID NO: 325859 - RNA, 18 nt, Artificial Sequence
  Synthetic
ccauuaacccuuguuagg

SEQ ID NO: 325860 - RNA, 19 nt, Artificial Sequence
  Synthetic
cccauuaacccuuguuagg

SEQ ID NO: 325861 - RNA, 20 nt, Artificial Sequence
  Synthetic
ucccauuaacccuuguuagg

SEQ ID NO: 325862 - RNA, 21 nt, Artificial Sequence
  Synthetic
cucccauuaacccuuguuagg

SEQ ID NO: 325863 - RNA, 22 nt, Artificial Sequence
  Synthetic
acucccauuaacccuuguuagg

SEQ ID NO: 325864 - RNA, 23 nt, Artificial Sequence
  Synthetic
cacucccauuaacccuuguuagg

SEQ ID NO: 325865 - RNA, 24 nt, Artificial Sequence
  Synthetic
ccacucccauuaacccuuguuagg

SEQ ID NO: 325866 - RNA, 18 nt, Artificial Sequence
  Synthetic
gaaaaaaaaaaauuuagg

SEQ ID NO: 325867 - RNA, 19 nt, Artificial Sequence
  Synthetic
agaaaaaaaaaaauuuagg

SEQ ID NO: 325868 - RNA, 20 nt, Artificial Sequence
  Synthetic
cagaaaaaaaaaaauuuagg

SEQ ID NO: 325869 - RNA, 21 nt, Artificial Sequence
  Synthetic
ucagaaaaaaaaaaauuuagg

SEQ ID NO: 325870 - RNA, 22 nt, Artificial Sequence
  Synthetic
cucagaaaaaaaaaaauuuagg

SEQ ID NO: 325871 - RNA, 23 nt, Artificial Sequence
  Synthetic
ucucagaaaaaaaaaaauuuagg

SEQ ID NO: 325872 - RNA, 24 nt, Artificial Sequence
  Synthetic
aucucagaaaaaaaaaaauuuagg

SEQ ID NO: 325873 - RNA, 18 nt, Artificial Sequence
  Synthetic
aaaauaaugaaauuuagg

SEQ ID NO: 325874 - RNA, 19 nt, Artificial Sequence
  Synthetic
caaaauaaugaaauuuagg

SEQ ID NO: 325875 - RNA, 20 nt, Artificial Sequence
  Synthetic
ucaaaauaaugaaauuuagg

SEQ ID NO: 325876 - RNA, 21 nt, Artificial Sequence
  Synthetic
aucaaaauaaugaaauuuagg

SEQ ID NO: 325877 - RNA, 22 nt, Artificial Sequence
  Synthetic
aaucaaaauaaugaaauuuagg

SEQ ID NO: 325878 - RNA, 23 nt, Artificial Sequence
  Synthetic
caaucaaaauaaugaaauuuagg

SEQ ID NO: 325879 - RNA, 24 nt, Artificial Sequence
  Synthetic
ucaaucaaaauaaugaaauuuagg

SEQ ID NO: 325880 - RNA, 18 nt, Artificial Sequence
  Synthetic
ccuccuugucaauuuagg

SEQ ID NO: 325881 - RNA, 19 nt, Artificial Sequence
  Synthetic
uccuccuugucaauuuagg

SEQ ID NO: 325882 - RNA, 20 nt, Artificial Sequence
  Synthetic
guccuccuugucaauuuagg

SEQ ID NO: 325883 - RNA, 21 nt, Artificial Sequence
  Synthetic
uguccuccuugucaauuuagg

SEQ ID NO: 325884 - RNA, 22 nt, Artificial Sequence
  Synthetic
auguccuccuugucaauuuagg

SEQ ID NO: 325885 - RNA, 23 nt, Artificial Sequence
  Synthetic
aauguccuccuugucaauuuagg

SEQ ID NO: 325886 - RNA, 24 nt, Artificial Sequence
  Synthetic
uaauguccuccuugucaauuuagg

SEQ ID NO: 325887 - RNA, 18 nt, Artificial Sequence
  Synthetic
gacagccuaccauuuagg

SEQ ID NO: 325888 - RNA, 19 nt, Artificial Sequence
  Synthetic
ggacagccuaccauuuagg

SEQ ID NO: 325889 - RNA, 20 nt, Artificial Sequence
  Synthetic
aggacagccuaccauuuagg

SEQ ID NO: 325890 - RNA, 21 nt, Artificial Sequence
  Synthetic
uaggacagccuaccauuuagg

SEQ ID NO: 325891 - RNA, 22 nt, Artificial Sequence
  Synthetic
uuaggacagccuaccauuuagg

SEQ ID NO: 325892 - RNA, 23 nt, Artificial Sequence
  Synthetic
cuuaggacagccuaccauuuagg

SEQ ID NO: 325893 - RNA, 24 nt, Artificial Sequence
  Synthetic
ucuuaggacagccuaccauuuagg

SEQ ID NO: 325894 - RNA, 18 nt, Artificial Sequence
  Synthetic
gaaagaaacauauuuagg

SEQ ID NO: 325895 - RNA, 19 nt, Artificial Sequence
  Synthetic
agaaagaaacauauuuagg

SEQ ID NO: 325896 - RNA, 20 nt, Artificial Sequence
  Synthetic
gagaaagaaacauauuuagg

SEQ ID NO: 325897 - RNA, 21 nt, Artificial Sequence
  Synthetic
ggagaaagaaacauauuuagg

SEQ ID NO: 325898 - RNA, 22 nt, Artificial Sequence
  Synthetic
gggagaaagaaacauauuuagg

SEQ ID NO: 325899 - RNA, 23 nt, Artificial Sequence
  Synthetic
ggggagaaagaaacauauuuagg

SEQ ID NO: 325900 - RNA, 24 nt, Artificial Sequence
  Synthetic
aggggagaaagaaacauauuuagg

SEQ ID NO: 325901 - RNA, 18 nt, Artificial Sequence
  Synthetic
aguauuucuguauuuagg

SEQ ID NO: 325902 - RNA, 19 nt, Artificial Sequence
  Synthetic
aaguauuucuguauuuagg

SEQ ID NO: 325903 - RNA, 20 nt, Artificial Sequence
  Synthetic
aaaguauuucuguauuuagg

SEQ ID NO: 325904 - RNA, 21 nt, Artificial Sequence
  Synthetic
uaaaguauuucuguauuuagg

SEQ ID NO: 325905 - RNA, 22 nt, Artificial Sequence
  Synthetic
guaaaguauuucuguauuuagg

SEQ ID NO: 325906 - RNA, 23 nt, Artificial Sequence
  Synthetic
uguaaaguauuucuguauuuagg

SEQ ID NO: 325907 - RNA, 24 nt, Artificial Sequence
  Synthetic
cuguaaaguauuucuguauuuagg

SEQ ID NO: 325908 - RNA, 18 nt, Artificial Sequence
  Synthetic
cuuggcuuccacuuuagg

SEQ ID NO: 325909 - RNA, 19 nt, Artificial Sequence
  Synthetic
acuuggcuuccacuuuagg

SEQ ID NO: 325910 - RNA, 20 nt, Artificial Sequence
  Synthetic
aacuuggcuuccacuuuagg

SEQ ID NO: 325911 - RNA, 21 nt, Artificial Sequence
  Synthetic
gaacuuggcuuccacuuuagg

SEQ ID NO: 325912 - RNA, 22 nt, Artificial Sequence
  Synthetic
ugaacuuggcuuccacuuuagg

SEQ ID NO: 325913 - RNA, 23 nt, Artificial Sequence
  Synthetic
augaacuuggcuuccacuuuagg

SEQ ID NO: 325914 - RNA, 24 nt, Artificial Sequence
  Synthetic
caugaacuuggcuuccacuuuagg

SEQ ID NO: 325915 - RNA, 18 nt, Artificial Sequence
  Synthetic
ucucaaaaugaguuuagg

SEQ ID NO: 325916 - RNA, 19 nt, Artificial Sequence
  Synthetic
gucucaaaaugaguuuagg

SEQ ID NO: 325917 - RNA, 20 nt, Artificial Sequence
  Synthetic
agucucaaaaugaguuuagg

SEQ ID NO: 325918 - RNA, 21 nt, Artificial Sequence
  Synthetic
gagucucaaaaugaguuuagg

SEQ ID NO: 325919 - RNA, 22 nt, Artificial Sequence
  Synthetic
agagucucaaaaugaguuuagg

SEQ ID NO: 325920 - RNA, 23 nt, Artificial Sequence
  Synthetic
gagagucucaaaaugaguuuagg

SEQ ID NO: 325921 - RNA, 24 nt, Artificial Sequence
  Synthetic
ugagagucucaaaaugaguuuagg

SEQ ID NO: 325922 - RNA, 18 nt, Artificial Sequence
  Synthetic
cagaggagcacguuuagg

SEQ ID NO: 325923 - RNA, 19 nt, Artificial Sequence
  Synthetic
acagaggagcacguuuagg

SEQ ID NO: 325924 - RNA, 20 nt, Artificial Sequence
  Synthetic
gacagaggagcacguuuagg

SEQ ID NO: 325925 - RNA, 21 nt, Artificial Sequence
  Synthetic
ugacagaggagcacguuuagg

SEQ ID NO: 325926 - RNA, 22 nt, Artificial Sequence
  Synthetic
uugacagaggagcacguuuagg

SEQ ID NO: 325927 - RNA, 23 nt, Artificial Sequence
  Synthetic
cuugacagaggagcacguuuagg

SEQ ID NO: 325928 - RNA, 24 nt, Artificial Sequence
  Synthetic
acuugacagaggagcacguuuagg

SEQ ID NO: 325929 - RNA, 18 nt, Artificial Sequence
  Synthetic
gauaggguauauuuuagg

SEQ ID NO: 325930 - RNA, 19 nt, Artificial Sequence
  Synthetic
ugauaggguauauuuuagg

SEQ ID NO: 325931 - RNA, 20 nt, Artificial Sequence
  Synthetic
uugauaggguauauuuuagg

SEQ ID NO: 325932 - RNA, 21 nt, Artificial Sequence
  Synthetic
cuugauaggguauauuuuagg

SEQ ID NO: 325933 - RNA, 22 nt, Artificial Sequence
  Synthetic
gcuugauaggguauauuuuagg

SEQ ID NO: 325934 - RNA, 23 nt, Artificial Sequence
  Synthetic
ugcuugauaggguauauuuuagg

SEQ ID NO: 325935 - RNA, 24 nt, Artificial Sequence
  Synthetic
augcuugauaggguauauuuuagg

SEQ ID NO: 325936 - RNA, 18 nt, Artificial Sequence
  Synthetic
auuuguucaaguuuuagg

SEQ ID NO: 325937 - RNA, 19 nt, Artificial Sequence
  Synthetic
gauuuguucaaguuuuagg

SEQ ID NO: 325938 - RNA, 20 nt, Artificial Sequence
  Synthetic
ugauuuguucaaguuuuagg

SEQ ID NO: 325939 - RNA, 21 nt, Artificial Sequence
  Synthetic
uugauuuguucaaguuuuagg

SEQ ID NO: 325940 - RNA, 22 nt, Artificial Sequence
  Synthetic
uuugauuuguucaaguuuuagg

SEQ ID NO: 325941 - RNA, 23 nt, Artificial Sequence
  Synthetic
guuugauuuguucaaguuuuagg

SEQ ID NO: 325942 - RNA, 24 nt, Artificial Sequence
  Synthetic
aguuugauuuguucaaguuuuagg

SEQ ID NO: 325943 - RNA, 18 nt, Artificial Sequence
  Synthetic
caacucugcuguuuuagg

SEQ ID NO: 325944 - RNA, 19 nt, Artificial Sequence
  Synthetic
ucaacucugcuguuuuagg

SEQ ID NO: 325945 - RNA, 20 nt, Artificial Sequence
  Synthetic
cucaacucugcuguuuuagg

SEQ ID NO: 325946 - RNA, 21 nt, Artificial Sequence
  Synthetic
acucaacucugcuguuuuagg

SEQ ID NO: 325947 - RNA, 22 nt, Artificial Sequence
  Synthetic
uacucaacucugcuguuuuagg

SEQ ID NO: 325948 - RNA, 23 nt, Artificial Sequence
  Synthetic
cuacucaacucugcuguuuuagg

SEQ ID NO: 325949 - RNA, 24 nt, Artificial Sequence
  Synthetic
acuacucaacucugcuguuuuagg

SEQ ID NO: 325950 - RNA, 18 nt, Artificial Sequence
  Synthetic
uaacuauagcuuuuuagg

SEQ ID NO: 325951 - RNA, 19 nt, Artificial Sequence
  Synthetic
guaacuauagcuuuuuagg

SEQ ID NO: 325952 - RNA, 20 nt, Artificial Sequence
  Synthetic
uguaacuauagcuuuuuagg

SEQ ID NO: 325953 - RNA, 21 nt, Artificial Sequence
  Synthetic
cuguaacuauagcuuuuuagg

SEQ ID NO: 325954 - RNA, 22 nt, Artificial Sequence
  Synthetic
ucuguaacuauagcuuuuuagg

SEQ ID NO: 325955 - RNA, 23 nt, Artificial Sequence
  Synthetic
uucuguaacuauagcuuuuuagg

SEQ ID NO: 325956 - RNA, 24 nt, Artificial Sequence
  Synthetic
guucuguaacuauagcuuuuuagg

SEQ ID NO: 325957 - RNA, 18 nt, Artificial Sequence
  Synthetic
ccuuuuauucacaaacgg

SEQ ID NO: 325958 - RNA, 19 nt, Artificial Sequence
  Synthetic
uccuuuuauucacaaacgg

SEQ ID NO: 325959 - RNA, 20 nt, Artificial Sequence
  Synthetic
uuccuuuuauucacaaacgg

SEQ ID NO: 325960 - RNA, 21 nt, Artificial Sequence
  Synthetic
uuuccuuuuauucacaaacgg

SEQ ID NO: 325961 - RNA, 22 nt, Artificial Sequence
  Synthetic
uuuuccuuuuauucacaaacgg

SEQ ID NO: 325962 - RNA, 23 nt, Artificial Sequence
  Synthetic
guuuuccuuuuauucacaaacgg

SEQ ID NO: 325963 - RNA, 24 nt, Artificial Sequence
  Synthetic
gguuuuccuuuuauucacaaacgg

SEQ ID NO: 325964 - RNA, 18 nt, Artificial Sequence
  Synthetic
gcccugaaaacugaacgg

SEQ ID NO: 325965 - RNA, 19 nt, Artificial Sequence
  Synthetic
ugcccugaaaacugaacgg

SEQ ID NO: 325966 - RNA, 20 nt, Artificial Sequence
  Synthetic
uugcccugaaaacugaacgg

SEQ ID NO: 325967 - RNA, 21 nt, Artificial Sequence
  Synthetic
auugcccugaaaacugaacgg

SEQ ID NO: 325968 - RNA, 22 nt, Artificial Sequence
  Synthetic
aauugcccugaaaacugaacgg

SEQ ID NO: 325969 - RNA, 23 nt, Artificial Sequence
  Synthetic
gaauugcccugaaaacugaacgg

SEQ ID NO: 325970 - RNA, 24 nt, Artificial Sequence
  Synthetic
agaauugcccugaaaacugaacgg

SEQ ID NO: 325971 - RNA, 18 nt, Artificial Sequence
  Synthetic
aagcauugucaguaacgg

SEQ ID NO: 325972 - RNA, 19 nt, Artificial Sequence
  Synthetic
gaagcauugucaguaacgg

SEQ ID NO: 325973 - RNA, 20 nt, Artificial Sequence
  Synthetic
agaagcauugucaguaacgg

SEQ ID NO: 325974 - RNA, 21 nt, Artificial Sequence
  Synthetic
cagaagcauugucaguaacgg

SEQ ID NO: 325975 - RNA, 22 nt, Artificial Sequence
  Synthetic
ccagaagcauugucaguaacgg

SEQ ID NO: 325976 - RNA, 23 nt, Artificial Sequence
  Synthetic
uccagaagcauugucaguaacgg

SEQ ID NO: 325977 - RNA, 24 nt, Artificial Sequence
  Synthetic
guccagaagcauugucaguaacgg

SEQ ID NO: 325978 - RNA, 18 nt, Artificial Sequence
  Synthetic
uagaaccaaccuuaacgg

SEQ ID NO: 325979 - RNA, 19 nt, Artificial Sequence
  Synthetic
uuagaaccaaccuuaacgg

SEQ ID NO: 325980 - RNA, 20 nt, Artificial Sequence
  Synthetic
auuagaaccaaccuuaacgg

SEQ ID NO: 325981 - RNA, 21 nt, Artificial Sequence
  Synthetic
cauuagaaccaaccuuaacgg

SEQ ID NO: 325982 - RNA, 22 nt, Artificial Sequence
  Synthetic
ucauuagaaccaaccuuaacgg

SEQ ID NO: 325983 - RNA, 23 nt, Artificial Sequence
  Synthetic
gucauuagaaccaaccuuaacgg

SEQ ID NO: 325984 - RNA, 24 nt, Artificial Sequence
  Synthetic
ugucauuagaaccaaccuuaacgg

SEQ ID NO: 325985 - RNA, 18 nt, Artificial Sequence
  Synthetic
ucuuggagcauggcacgg

SEQ ID NO: 325986 - RNA, 19 nt, Artificial Sequence
  Synthetic
uucuuggagcauggcacgg

SEQ ID NO: 325987 - RNA, 20 nt, Artificial Sequence
  Synthetic
uuucuuggagcauggcacgg

SEQ ID NO: 325988 - RNA, 21 nt, Artificial Sequence
  Synthetic
auuucuuggagcauggcacgg

SEQ ID NO: 325989 - RNA, 22 nt, Artificial Sequence
  Synthetic
gauuucuuggagcauggcacgg

SEQ ID NO: 325990 - RNA, 23 nt, Artificial Sequence
  Synthetic
ggauuucuuggagcauggcacgg

SEQ ID NO: 325991 - RNA, 24 nt, Artificial Sequence
  Synthetic
uggauuucuuggagcauggcacgg

SEQ ID NO: 325992 - RNA, 18 nt, Artificial Sequence
  Synthetic
uccagaggcaaaagacgg

SEQ ID NO: 325993 - RNA, 19 nt, Artificial Sequence
  Synthetic
cuccagaggcaaaagacgg

SEQ ID NO: 325994 - RNA, 20 nt, Artificial Sequence
  Synthetic
ccuccagaggcaaaagacgg

SEQ ID NO: 325995 - RNA, 21 nt, Artificial Sequence
  Synthetic
gccuccagaggcaaaagacgg

SEQ ID NO: 325996 - RNA, 22 nt, Artificial Sequence
  Synthetic
ugccuccagaggcaaaagacgg

SEQ ID NO: 325997 - RNA, 23 nt, Artificial Sequence
  Synthetic
uugccuccagaggcaaaagacgg

SEQ ID NO: 325998 - RNA, 24 nt, Artificial Sequence
  Synthetic
uuugccuccagaggcaaaagacgg

SEQ ID NO: 325999 - RNA, 18 nt, Artificial Sequence
  Synthetic
agagaaagagagggacgg

SEQ ID NO: 326000 - RNA, 19 nt, Artificial Sequence
  Synthetic
gagagaaagagagggacgg

SEQ ID NO: 326001 - RNA, 20 nt, Artificial Sequence
  Synthetic
ugagagaaagagagggacgg

SEQ ID NO: 326002 - RNA, 21 nt, Artificial Sequence
  Synthetic
uugagagaaagagagggacgg

SEQ ID NO: 326003 - RNA, 22 nt, Artificial Sequence
  Synthetic
cuugagagaaagagagggacgg

SEQ ID NO: 326004 - RNA, 23 nt, Artificial Sequence
  Synthetic
acuugagagaaagagagggacgg

SEQ ID NO: 326005 - RNA, 24 nt, Artificial Sequence
  Synthetic
aacuugagagaaagagagggacgg

SEQ ID NO: 326006 - RNA, 18 nt, Artificial Sequence
  Synthetic
acaucucauagaugacgg

SEQ ID NO: 326007 - RNA, 19 nt, Artificial Sequence
  Synthetic
cacaucucauagaugacgg

SEQ ID NO: 326008 - RNA, 20 nt, Artificial Sequence
  Synthetic
acacaucucauagaugacgg

SEQ ID NO: 326009 - RNA, 21 nt, Artificial Sequence
  Synthetic
aacacaucucauagaugacgg

SEQ ID NO: 326010 - RNA, 22 nt, Artificial Sequence
  Synthetic
uaacacaucucauagaugacgg

SEQ ID NO: 326011 - RNA, 23 nt, Artificial Sequence
  Synthetic
guaacacaucucauagaugacgg

SEQ ID NO: 326012 - RNA, 24 nt, Artificial Sequence
  Synthetic
uguaacacaucucauagaugacgg

SEQ ID NO: 326013 - RNA, 18 nt, Artificial Sequence
  Synthetic
gaaauacugagaguacgg

SEQ ID NO: 326014 - RNA, 19 nt, Artificial Sequence
  Synthetic
ugaaauacugagaguacgg

SEQ ID NO: 326015 - RNA, 20 nt, Artificial Sequence
  Synthetic
uugaaauacugagaguacgg

SEQ ID NO: 326016 - RNA, 21 nt, Artificial Sequence
  Synthetic
auugaaauacugagaguacgg

SEQ ID NO: 326017 - RNA, 22 nt, Artificial Sequence
  Synthetic
aauugaaauacugagaguacgg

SEQ ID NO: 326018 - RNA, 23 nt, Artificial Sequence
  Synthetic
uaauugaaauacugagaguacgg

SEQ ID NO: 326019 - RNA, 24 nt, Artificial Sequence
  Synthetic
auaauugaaauacugagaguacgg

SEQ ID NO: 326020 - RNA, 18 nt, Artificial Sequence
  Synthetic
ccuuuguuuagaguacgg

SEQ ID NO: 326021 - RNA, 19 nt, Artificial Sequence
  Synthetic
gccuuuguuuagaguacgg

SEQ ID NO: 326022 - RNA, 20 nt, Artificial Sequence
  Synthetic
agccuuuguuuagaguacgg

SEQ ID NO: 326023 - RNA, 21 nt, Artificial Sequence
  Synthetic
gagccuuuguuuagaguacgg

SEQ ID NO: 326024 - RNA, 22 nt, Artificial Sequence
  Synthetic
agagccuuuguuuagaguacgg

SEQ ID NO: 326025 - RNA, 23 nt, Artificial Sequence
  Synthetic
uagagccuuuguuuagaguacgg

SEQ ID NO: 326026 - RNA, 24 nt, Artificial Sequence
  Synthetic
guagagccuuuguuuagaguacgg

SEQ ID NO: 326027 - RNA, 18 nt, Artificial Sequence
  Synthetic
agaacacauggacaccgg

SEQ ID NO: 326028 - RNA, 19 nt, Artificial Sequence
  Synthetic
gagaacacauggacaccgg

SEQ ID NO: 326029 - RNA, 20 nt, Artificial Sequence
  Synthetic
ugagaacacauggacaccgg

SEQ ID NO: 326030 - RNA, 21 nt, Artificial Sequence
  Synthetic
augagaacacauggacaccgg

SEQ ID NO: 326031 - RNA, 22 nt, Artificial Sequence
  Synthetic
aaugagaacacauggacaccgg

SEQ ID NO: 326032 - RNA, 23 nt, Artificial Sequence
  Synthetic
caaugagaacacauggacaccgg

SEQ ID NO: 326033 - RNA, 24 nt, Artificial Sequence
  Synthetic
gcaaugagaacacauggacaccgg

SEQ ID NO: 326034 - RNA, 18 nt, Artificial Sequence
  Synthetic
uuaagcuuucaggcccgg

SEQ ID NO: 326035 - RNA, 19 nt, Artificial Sequence
  Synthetic
cuuaagcuuucaggcccgg

SEQ ID NO: 326036 - RNA, 20 nt, Artificial Sequence
  Synthetic
ccuuaagcuuucaggcccgg

SEQ ID NO: 326037 - RNA, 21 nt, Artificial Sequence
  Synthetic
uccuuaagcuuucaggcccgg

SEQ ID NO: 326038 - RNA, 22 nt, Artificial Sequence
  Synthetic
cuccuuaagcuuucaggcccgg

SEQ ID NO: 326039 - RNA, 23 nt, Artificial Sequence
  Synthetic
ucuccuuaagcuuucaggcccgg

SEQ ID NO: 326040 - RNA, 24 nt, Artificial Sequence
  Synthetic
aucuccuuaagcuuucaggcccgg

SEQ ID NO: 326041 - RNA, 18 nt, Artificial Sequence
  Synthetic
agauagauagauagccgg

SEQ ID NO: 326042 - RNA, 19 nt, Artificial Sequence
  Synthetic
uagauagauagauagccgg

SEQ ID NO: 326043 - RNA, 20 nt, Artificial Sequence
  Synthetic
auagauagauagauagccgg

SEQ ID NO: 326044 - RNA, 21 nt, Artificial Sequence
  Synthetic
gauagauagauagauagccgg

SEQ ID NO: 326045 - RNA, 22 nt, Artificial Sequence
  Synthetic
agauagauagauagauagccgg

SEQ ID NO: 326046 - RNA, 23 nt, Artificial Sequence
  Synthetic
uagauagauagauagauagccgg

SEQ ID NO: 326047 - RNA, 24 nt, Artificial Sequence
  Synthetic
auagauagauagauagauagccgg

SEQ ID NO: 326048 - RNA, 18 nt, Artificial Sequence
  Synthetic
cauacaaauuuuagccgg

SEQ ID NO: 326049 - RNA, 19 nt, Artificial Sequence
  Synthetic
acauacaaauuuuagccgg

SEQ ID NO: 326050 - RNA, 20 nt, Artificial Sequence
  Synthetic
aacauacaaauuuuagccgg

SEQ ID NO: 326051 - RNA, 21 nt, Artificial Sequence
  Synthetic
caacauacaaauuuuagccgg

SEQ ID NO: 326052 - RNA, 22 nt, Artificial Sequence
  Synthetic
ucaacauacaaauuuuagccgg

SEQ ID NO: 326053 - RNA, 23 nt, Artificial Sequence
  Synthetic
uucaacauacaaauuuuagccgg

SEQ ID NO: 326054 - RNA, 24 nt, Artificial Sequence
  Synthetic
cuucaacauacaaauuuuagccgg

SEQ ID NO: 326055 - RNA, 18 nt, Artificial Sequence
  Synthetic
cuuuagagaagaauccgg

SEQ ID NO: 326056 - RNA, 19 nt, Artificial Sequence
  Synthetic
acuuuagagaagaauccgg

SEQ ID NO: 326057 - RNA, 20 nt, Artificial Sequence
  Synthetic
aacuuuagagaagaauccgg

SEQ ID NO: 326058 - RNA, 21 nt, Artificial Sequence
  Synthetic
uaacuuuagagaagaauccgg

SEQ ID NO: 326059 - RNA, 22 nt, Artificial Sequence
  Synthetic
auaacuuuagagaagaauccgg

SEQ ID NO: 326060 - RNA, 23 nt, Artificial Sequence
  Synthetic
cauaacuuuagagaagaauccgg

SEQ ID NO: 326061 - RNA, 24 nt, Artificial Sequence
  Synthetic
gcauaacuuuagagaagaauccgg

SEQ ID NO: 326062 - RNA, 18 nt, Artificial Sequence
  Synthetic
cagucuggaaggauccgg

SEQ ID NO: 326063 - RNA, 19 nt, Artificial Sequence
  Synthetic
ucagucuggaaggauccgg

SEQ ID NO: 326064 - RNA, 20 nt, Artificial Sequence
  Synthetic
cucagucuggaaggauccgg

SEQ ID NO: 326065 - RNA, 21 nt, Artificial Sequence
  Synthetic
ucucagucuggaaggauccgg

SEQ ID NO: 326066 - RNA, 22 nt, Artificial Sequence
  Synthetic
gucucagucuggaaggauccgg

SEQ ID NO: 326067 - RNA, 23 nt, Artificial Sequence
  Synthetic
ggucucagucuggaaggauccgg

SEQ ID NO: 326068 - RNA, 24 nt, Artificial Sequence
  Synthetic
gggucucagucuggaaggauccgg

SEQ ID NO: 326069 - RNA, 18 nt, Artificial Sequence
  Synthetic
uuuaagauccauuuccgg

SEQ ID NO: 326070 - RNA, 19 nt, Artificial Sequence
  Synthetic
cuuuaagauccauuuccgg

SEQ ID NO: 326071 - RNA, 20 nt, Artificial Sequence
  Synthetic
ccuuuaagauccauuuccgg

SEQ ID NO: 326072 - RNA, 21 nt, Artificial Sequence
  Synthetic
accuuuaagauccauuuccgg

SEQ ID NO: 326073 - RNA, 22 nt, Artificial Sequence
  Synthetic
gaccuuuaagauccauuuccgg

SEQ ID NO: 326074 - RNA, 23 nt, Artificial Sequence
  Synthetic
agaccuuuaagauccauuuccgg

SEQ ID NO: 326075 - RNA, 24 nt, Artificial Sequence
  Synthetic
gagaccuuuaagauccauuuccgg

SEQ ID NO: 326076 - RNA, 18 nt, Artificial Sequence
  Synthetic
uuuuauuuuguaaagcgg

SEQ ID NO: 326077 - RNA, 19 nt, Artificial Sequence
  Synthetic
cuuuuauuuuguaaagcgg

SEQ ID NO: 326078 - RNA, 20 nt, Artificial Sequence
  Synthetic
gcuuuuauuuuguaaagcgg

SEQ ID NO: 326079 - RNA, 21 nt, Artificial Sequence
  Synthetic
ugcuuuuauuuuguaaagcgg

SEQ ID NO: 326080 - RNA, 22 nt, Artificial Sequence
  Synthetic
gugcuuuuauuuuguaaagcgg

SEQ ID NO: 326081 - RNA, 23 nt, Artificial Sequence
  Synthetic
ugugcuuuuauuuuguaaagcgg

SEQ ID NO: 326082 - RNA, 24 nt, Artificial Sequence
  Synthetic
gugugcuuuuauuuuguaaagcgg

SEQ ID NO: 326083 - RNA, 18 nt, Artificial Sequence
  Synthetic
agugaggaggagaagcgg

SEQ ID NO: 326084 - RNA, 19 nt, Artificial Sequence
  Synthetic
aagugaggaggagaagcgg

SEQ ID NO: 326085 - RNA, 20 nt, Artificial Sequence
  Synthetic
aaagugaggaggagaagcgg

SEQ ID NO: 326086 - RNA, 21 nt, Artificial Sequence
  Synthetic
gaaagugaggaggagaagcgg

SEQ ID NO: 326087 - RNA, 22 nt, Artificial Sequence
  Synthetic
ugaaagugaggaggagaagcgg

SEQ ID NO: 326088 - RNA, 23 nt, Artificial Sequence
  Synthetic
uugaaagugaggaggagaagcgg

SEQ ID NO: 326089 - RNA, 24 nt, Artificial Sequence
  Synthetic
cuugaaagugaggaggagaagcgg

SEQ ID NO: 326090 - RNA, 18 nt, Artificial Sequence
  Synthetic
gaaauuacagugaagcgg

SEQ ID NO: 326091 - RNA, 19 nt, Artificial Sequence
  Synthetic
agaaauuacagugaagcgg

SEQ ID NO: 326092 - RNA, 20 nt, Artificial Sequence
  Synthetic
uagaaauuacagugaagcgg

SEQ ID NO: 326093 - RNA, 21 nt, Artificial Sequence
  Synthetic
auagaaauuacagugaagcgg

SEQ ID NO: 326094 - RNA, 22 nt, Artificial Sequence
  Synthetic
aauagaaauuacagugaagcgg

SEQ ID NO: 326095 - RNA, 23 nt, Artificial Sequence
  Synthetic
gaauagaaauuacagugaagcgg

SEQ ID NO: 326096 - RNA, 24 nt, Artificial Sequence
  Synthetic
agaauagaaauuacagugaagcgg

SEQ ID NO: 326097 - RNA, 18 nt, Artificial Sequence
  Synthetic
agcaauacagggcagcgg

SEQ ID NO: 326098 - RNA, 19 nt, Artificial Sequence
  Synthetic
aagcaauacagggcagcgg

SEQ ID NO: 326099 - RNA, 20 nt, Artificial Sequence
  Synthetic
gaagcaauacagggcagcgg

SEQ ID NO: 326100 - RNA, 21 nt, Artificial Sequence
  Synthetic
agaagcaauacagggcagcgg

SEQ ID NO: 326101 - RNA, 22 nt, Artificial Sequence
  Synthetic
cagaagcaauacagggcagcgg

SEQ ID NO: 326102 - RNA, 23 nt, Artificial Sequence
  Synthetic
acagaagcaauacagggcagcgg

SEQ ID NO: 326103 - RNA, 24 nt, Artificial Sequence
  Synthetic
uacagaagcaauacagggcagcgg

SEQ ID NO: 326104 - RNA, 18 nt, Artificial Sequence
  Synthetic
agcuggagcagggagcgg

SEQ ID NO: 326105 - RNA, 19 nt, Artificial Sequence
  Synthetic
gagcuggagcagggagcgg

SEQ ID NO: 326106 - RNA, 20 nt, Artificial Sequence
  Synthetic
ugagcuggagcagggagcgg

SEQ ID NO: 326107 - RNA, 21 nt, Artificial Sequence
  Synthetic
gugagcuggagcagggagcgg

SEQ ID NO: 326108 - RNA, 22 nt, Artificial Sequence
  Synthetic
agugagcuggagcagggagcgg

SEQ ID NO: 326109 - RNA, 23 nt, Artificial Sequence
  Synthetic
aagugagcuggagcagggagcgg

SEQ ID NO: 326110 - RNA, 24 nt, Artificial Sequence
  Synthetic
aaagugagcuggagcagggagcgg

SEQ ID NO: 326111 - RNA, 18 nt, Artificial Sequence
  Synthetic
auuaacaccugugagcgg

SEQ ID NO: 326112 - RNA, 19 nt, Artificial Sequence
  Synthetic
gauuaacaccugugagcgg

SEQ ID NO: 326113 - RNA, 20 nt, Artificial Sequence
  Synthetic
ggauuaacaccugugagcgg

SEQ ID NO: 326114 - RNA, 21 nt, Artificial Sequence
  Synthetic
aggauuaacaccugugagcgg

SEQ ID NO: 326115 - RNA, 22 nt, Artificial Sequence
  Synthetic
caggauuaacaccugugagcgg

SEQ ID NO: 326116 - RNA, 23 nt, Artificial Sequence
  Synthetic
ucaggauuaacaccugugagcgg

SEQ ID NO: 326117 - RNA, 24 nt, Artificial Sequence
  Synthetic
cucaggauuaacaccugugagcgg

SEQ ID NO: 326118 - RNA, 18 nt, Artificial Sequence
  Synthetic
agcauaguuccauagcgg

SEQ ID NO: 326119 - RNA, 19 nt, Artificial Sequence
  Synthetic
uagcauaguuccauagcgg

SEQ ID NO: 326120 - RNA, 20 nt, Artificial Sequence
  Synthetic
cuagcauaguuccauagcgg

SEQ ID NO: 326121 - RNA, 21 nt, Artificial Sequence
  Synthetic
gcuagcauaguuccauagcgg

SEQ ID NO: 326122 - RNA, 22 nt, Artificial Sequence
  Synthetic
ggcuagcauaguuccauagcgg

SEQ ID NO: 326123 - RNA, 23 nt, Artificial Sequence
  Synthetic
aggcuagcauaguuccauagcgg

SEQ ID NO: 326124 - RNA, 24 nt, Artificial Sequence
  Synthetic
caggcuagcauaguuccauagcgg

SEQ ID NO: 326125 - RNA, 18 nt, Artificial Sequence
  Synthetic
cucucguacugauagcgg

SEQ ID NO: 326126 - RNA, 19 nt, Artificial Sequence
  Synthetic
acucucguacugauagcgg

SEQ ID NO: 326127 - RNA, 20 nt, Artificial Sequence
  Synthetic
aacucucguacugauagcgg

SEQ ID NO: 326128 - RNA, 21 nt, Artificial Sequence
  Synthetic
caacucucguacugauagcgg

SEQ ID NO: 326129 - RNA, 22 nt, Artificial Sequence
  Synthetic
acaacucucguacugauagcgg

SEQ ID NO: 326130 - RNA, 23 nt, Artificial Sequence
  Synthetic
cacaacucucguacugauagcgg

SEQ ID NO: 326131 - RNA, 24 nt, Artificial Sequence
  Synthetic
acacaacucucguacugauagcgg

SEQ ID NO: 326132 - RNA, 18 nt, Artificial Sequence
  Synthetic
ggauucuauaaguagcgg

SEQ ID NO: 326133 - RNA, 19 nt, Artificial Sequence
  Synthetic
cggauucuauaaguagcgg

SEQ ID NO: 326134 - RNA, 20 nt, Artificial Sequence
  Synthetic
ucggauucuauaaguagcgg

SEQ ID NO: 326135 - RNA, 21 nt, Artificial Sequence
  Synthetic
cucggauucuauaaguagcgg

SEQ ID NO: 326136 - RNA, 22 nt, Artificial Sequence
  Synthetic
ccucggauucuauaaguagcgg

SEQ ID NO: 326137 - RNA, 23 nt, Artificial Sequence
  Synthetic
cccucggauucuauaaguagcgg

SEQ ID NO: 326138 - RNA, 24 nt, Artificial Sequence
  Synthetic
gcccucggauucuauaaguagcgg

SEQ ID NO: 326139 - RNA, 18 nt, Artificial Sequence
  Synthetic
cucgggaagcugaggcgg

SEQ ID NO: 326140 - RNA, 19 nt, Artificial Sequence
  Synthetic
acucgggaagcugaggcgg

SEQ ID NO: 326141 - RNA, 20 nt, Artificial Sequence
  Synthetic
uacucgggaagcugaggcgg

SEQ ID NO: 326142 - RNA, 21 nt, Artificial Sequence
  Synthetic
cuacucgggaagcugaggcgg

SEQ ID NO: 326143 - RNA, 22 nt, Artificial Sequence
  Synthetic
gcuacucgggaagcugaggcgg

SEQ ID NO: 326144 - RNA, 23 nt, Artificial Sequence
  Synthetic
agcuacucgggaagcugaggcgg

SEQ ID NO: 326145 - RNA, 24 nt, Artificial Sequence
  Synthetic
cagcuacucgggaagcugaggcgg

SEQ ID NO: 326146 - RNA, 18 nt, Artificial Sequence
  Synthetic
uuucaggcucauaggcgg

SEQ ID NO: 326147 - RNA, 19 nt, Artificial Sequence
  Synthetic
uuuucaggcucauaggcgg

SEQ ID NO: 326148 - RNA, 20 nt, Artificial Sequence
  Synthetic
auuuucaggcucauaggcgg

SEQ ID NO: 326149 - RNA, 21 nt, Artificial Sequence
  Synthetic
gauuuucaggcucauaggcgg

SEQ ID NO: 326150 - RNA, 22 nt, Artificial Sequence
  Synthetic
ggauuuucaggcucauaggcgg

SEQ ID NO: 326151 - RNA, 23 nt, Artificial Sequence
  Synthetic
uggauuuucaggcucauaggcgg

SEQ ID NO: 326152 - RNA, 24 nt, Artificial Sequence
  Synthetic
uuggauuuucaggcucauaggcgg

SEQ ID NO: 326153 - RNA, 18 nt, Artificial Sequence
  Synthetic
acaaauuuuagccggcgg

SEQ ID NO: 326154 - RNA, 19 nt, Artificial Sequence
  Synthetic
uacaaauuuuagccggcgg

SEQ ID NO: 326155 - RNA, 20 nt, Artificial Sequence
  Synthetic
auacaaauuuuagccggcgg

SEQ ID NO: 326156 - RNA, 21 nt, Artificial Sequence
  Synthetic
cauacaaauuuuagccggcgg

SEQ ID NO: 326157 - RNA, 22 nt, Artificial Sequence
  Synthetic
acauacaaauuuuagccggcgg

SEQ ID NO: 326158 - RNA, 23 nt, Artificial Sequence
  Synthetic
aacauacaaauuuuagccggcgg

SEQ ID NO: 326159 - RNA, 24 nt, Artificial Sequence
  Synthetic
caacauacaaauuuuagccggcgg

SEQ ID NO: 326160 - RNA, 18 nt, Artificial Sequence
  Synthetic
uuuuccaagagagggcgg

SEQ ID NO: 326161 - RNA, 19 nt, Artificial Sequence
  Synthetic
guuuuccaagagagggcgg

SEQ ID NO: 326162 - RNA, 20 nt, Artificial Sequence
  Synthetic
aguuuuccaagagagggcgg

SEQ ID NO: 326163 - RNA, 21 nt, Artificial Sequence
  Synthetic
caguuuuccaagagagggcgg

SEQ ID NO: 326164 - RNA, 22 nt, Artificial Sequence
  Synthetic
gcaguuuuccaagagagggcgg

SEQ ID NO: 326165 - RNA, 23 nt, Artificial Sequence
  Synthetic
ggcaguuuuccaagagagggcgg

SEQ ID NO: 326166 - RNA, 24 nt, Artificial Sequence
  Synthetic
gggcaguuuuccaagagagggcgg

SEQ ID NO: 326167 - RNA, 18 nt, Artificial Sequence
  Synthetic
aggguggagguugggcgg

SEQ ID NO: 326168 - RNA, 19 nt, Artificial Sequence
  Synthetic
gaggguggagguugggcgg

SEQ ID NO: 326169 - RNA, 20 nt, Artificial Sequence
  Synthetic
agaggguggagguugggcgg

SEQ ID NO: 326170 - RNA, 21 nt, Artificial Sequence
  Synthetic
cagaggguggagguugggcgg

SEQ ID NO: 326171 - RNA, 22 nt, Artificial Sequence
  Synthetic
ucagaggguggagguugggcgg

SEQ ID NO: 326172 - RNA, 23 nt, Artificial Sequence
  Synthetic
aucagaggguggagguugggcgg

SEQ ID NO: 326173 - RNA, 24 nt, Artificial Sequence
  Synthetic
uaucagaggguggagguugggcgg

SEQ ID NO: 326174 - RNA, 18 nt, Artificial Sequence
  Synthetic
uugauuguuucacugcgg

SEQ ID NO: 326175 - RNA, 19 nt, Artificial Sequence
  Synthetic
auugauuguuucacugcgg

SEQ ID NO: 326176 - RNA, 20 nt, Artificial Sequence
  Synthetic
uauugauuguuucacugcgg

SEQ ID NO: 326177 - RNA, 21 nt, Artificial Sequence
  Synthetic
uuauugauuguuucacugcgg

SEQ ID NO: 326178 - RNA, 22 nt, Artificial Sequence
  Synthetic
uuuauugauuguuucacugcgg

SEQ ID NO: 326179 - RNA, 23 nt, Artificial Sequence
  Synthetic
cuuuauugauuguuucacugcgg

SEQ ID NO: 326180 - RNA, 24 nt, Artificial Sequence
  Synthetic
acuuuauugauuguuucacugcgg

SEQ ID NO: 326181 - RNA, 18 nt, Artificial Sequence
  Synthetic
ugguugugcgacgugcgg

SEQ ID NO: 326182 - RNA, 19 nt, Artificial Sequence
  Synthetic
uugguugugcgacgugcgg

SEQ ID NO: 326183 - RNA, 20 nt, Artificial Sequence
  Synthetic
guugguugugcgacgugcgg

SEQ ID NO: 326184 - RNA, 21 nt, Artificial Sequence
  Synthetic
cguugguugugcgacgugcgg

SEQ ID NO: 326185 - RNA, 22 nt, Artificial Sequence
  Synthetic
gcguugguugugcgacgugcgg

SEQ ID NO: 326186 - RNA, 23 nt, Artificial Sequence
  Synthetic
agcguugguugugcgacgugcgg

SEQ ID NO: 326187 - RNA, 24 nt, Artificial Sequence
  Synthetic
aagcguugguugugcgacgugcgg

SEQ ID NO: 326188 - RNA, 18 nt, Artificial Sequence
  Synthetic
gagccaugcuaggugcgg

SEQ ID NO: 326189 - RNA, 19 nt, Artificial Sequence
  Synthetic
agagccaugcuaggugcgg

SEQ ID NO: 326190 - RNA, 20 nt, Artificial Sequence
  Synthetic
uagagccaugcuaggugcgg

SEQ ID NO: 326191 - RNA, 21 nt, Artificial Sequence
  Synthetic
uuagagccaugcuaggugcgg

SEQ ID NO: 326192 - RNA, 22 nt, Artificial Sequence
  Synthetic
cuuagagccaugcuaggugcgg

SEQ ID NO: 326193 - RNA, 23 nt, Artificial Sequence
  Synthetic
acuuagagccaugcuaggugcgg

SEQ ID NO: 326194 - RNA, 24 nt, Artificial Sequence
  Synthetic
uacuuagagccaugcuaggugcgg

SEQ ID NO: 326195 - RNA, 18 nt, Artificial Sequence
  Synthetic
uugaaaagagcauugcgg

SEQ ID NO: 326196 - RNA, 19 nt, Artificial Sequence
  Synthetic
guugaaaagagcauugcgg

SEQ ID NO: 326197 - RNA, 20 nt, Artificial Sequence
  Synthetic
aguugaaaagagcauugcgg

SEQ ID NO: 326198 - RNA, 21 nt, Artificial Sequence
  Synthetic
caguugaaaagagcauugcgg

SEQ ID NO: 326199 - RNA, 22 nt, Artificial Sequence
  Synthetic
ucaguugaaaagagcauugcgg

SEQ ID NO: 326200 - RNA, 23 nt, Artificial Sequence
  Synthetic
cucaguugaaaagagcauugcgg

SEQ ID NO: 326201 - RNA, 24 nt, Artificial Sequence
  Synthetic
ucucaguugaaaagagcauugcgg

SEQ ID NO: 326202 - RNA, 18 nt, Artificial Sequence
  Synthetic
uagucagaucaaaaucgg

SEQ ID NO: 326203 - RNA, 19 nt, Artificial Sequence
  Synthetic
auagucagaucaaaaucgg

SEQ ID NO: 326204 - RNA, 20 nt, Artificial Sequence
  Synthetic
gauagucagaucaaaaucgg

SEQ ID NO: 326205 - RNA, 21 nt, Artificial Sequence
  Synthetic
agauagucagaucaaaaucgg

SEQ ID NO: 326206 - RNA, 22 nt, Artificial Sequence
  Synthetic
cagauagucagaucaaaaucgg

SEQ ID NO: 326207 - RNA, 23 nt, Artificial Sequence
  Synthetic
acagauagucagaucaaaaucgg

SEQ ID NO: 326208 - RNA, 24 nt, Artificial Sequence
  Synthetic
aacagauagucagaucaaaaucgg

SEQ ID NO: 326209 - RNA, 18 nt, Artificial Sequence
  Synthetic
caauaggaauaaaaucgg

SEQ ID NO: 326210 - RNA, 19 nt, Artificial Sequence
  Synthetic
acaauaggaauaaaaucgg

SEQ ID NO: 326211 - RNA, 20 nt, Artificial Sequence
  Synthetic
uacaauaggaauaaaaucgg

SEQ ID NO: 326212 - RNA, 21 nt, Artificial Sequence
  Synthetic
auacaauaggaauaaaaucgg

SEQ ID NO: 326213 - RNA, 22 nt, Artificial Sequence
  Synthetic
gauacaauaggaauaaaaucgg

SEQ ID NO: 326214 - RNA, 23 nt, Artificial Sequence
  Synthetic
agauacaauaggaauaaaaucgg

SEQ ID NO: 326215 - RNA, 24 nt, Artificial Sequence
  Synthetic
uagauacaauaggaauaaaaucgg

SEQ ID NO: 326216 - RNA, 18 nt, Artificial Sequence
  Synthetic
uauauaauaacucaucgg

SEQ ID NO: 326217 - RNA, 19 nt, Artificial Sequence
  Synthetic
auauauaauaacucaucgg

SEQ ID NO: 326218 - RNA, 20 nt, Artificial Sequence
  Synthetic
uauauauaauaacucaucgg

SEQ ID NO: 326219 - RNA, 21 nt, Artificial Sequence
  Synthetic
cuauauauaauaacucaucgg

SEQ ID NO: 326220 - RNA, 22 nt, Artificial Sequence
  Synthetic
acuauauauaauaacucaucgg

SEQ ID NO: 326221 - RNA, 23 nt, Artificial Sequence
  Synthetic
cacuauauauaauaacucaucgg

SEQ ID NO: 326222 - RNA, 24 nt, Artificial Sequence
  Synthetic
gcacuauauauaauaacucaucgg

SEQ ID NO: 326223 - RNA, 18 nt, Artificial Sequence
  Synthetic
gauugauggauggaucgg

SEQ ID NO: 326224 - RNA, 19 nt, Artificial Sequence
  Synthetic
ugauugauggauggaucgg

SEQ ID NO: 326225 - RNA, 20 nt, Artificial Sequence
  Synthetic
uugauugauggauggaucgg

SEQ ID NO: 326226 - RNA, 21 nt, Artificial Sequence
  Synthetic
auugauugauggauggaucgg

SEQ ID NO: 326227 - RNA, 22 nt, Artificial Sequence
  Synthetic
gauugauugauggauggaucgg

SEQ ID NO: 326228 - RNA, 23 nt, Artificial Sequence
  Synthetic
ugauugauugauggauggaucgg

SEQ ID NO: 326229 - RNA, 24 nt, Artificial Sequence
  Synthetic
augauugauugauggauggaucgg

SEQ ID NO: 326230 - RNA, 18 nt, Artificial Sequence
  Synthetic
auagucccagcuacucgg

SEQ ID NO: 326231 - RNA, 19 nt, Artificial Sequence
  Synthetic
uauagucccagcuacucgg

SEQ ID NO: 326232 - RNA, 20 nt, Artificial Sequence
  Synthetic
cuauagucccagcuacucgg

SEQ ID NO: 326233 - RNA, 21 nt, Artificial Sequence
  Synthetic
ccuauagucccagcuacucgg

SEQ ID NO: 326234 - RNA, 22 nt, Artificial Sequence
  Synthetic
gccuauagucccagcuacucgg

SEQ ID NO: 326235 - RNA, 23 nt, Artificial Sequence
  Synthetic
cgccuauagucccagcuacucgg

SEQ ID NO: 326236 - RNA, 24 nt, Artificial Sequence
  Synthetic
gcgccuauagucccagcuacucgg

SEQ ID NO: 326237 - RNA, 18 nt, Artificial Sequence
  Synthetic
ccaagaacaguuacucgg

SEQ ID NO: 326238 - RNA, 19 nt, Artificial Sequence
  Synthetic
uccaagaacaguuacucgg

SEQ ID NO: 326239 - RNA, 20 nt, Artificial Sequence
  Synthetic
uuccaagaacaguuacucgg

SEQ ID NO: 326240 - RNA, 21 nt, Artificial Sequence
  Synthetic
guuccaagaacaguuacucgg

SEQ ID NO: 326241 - RNA, 22 nt, Artificial Sequence
  Synthetic
gguuccaagaacaguuacucgg

SEQ ID NO: 326242 - RNA, 23 nt, Artificial Sequence
  Synthetic
agguuccaagaacaguuacucgg

SEQ ID NO: 326243 - RNA, 24 nt, Artificial Sequence
  Synthetic
cagguuccaagaacaguuacucgg

SEQ ID NO: 326244 - RNA, 18 nt, Artificial Sequence
  Synthetic
uuccuucugagggcucgg

SEQ ID NO: 326245 - RNA, 19 nt, Artificial Sequence
  Synthetic
guuccuucugagggcucgg

SEQ ID NO: 326246 - RNA, 20 nt, Artificial Sequence
  Synthetic
gguuccuucugagggcucgg

SEQ ID NO: 326247 - RNA, 21 nt, Artificial Sequence
  Synthetic
ugguuccuucugagggcucgg

SEQ ID NO: 326248 - RNA, 22 nt, Artificial Sequence
  Synthetic
uugguuccuucugagggcucgg

SEQ ID NO: 326249 - RNA, 23 nt, Artificial Sequence
  Synthetic
guugguuccuucugagggcucgg

SEQ ID NO: 326250 - RNA, 24 nt, Artificial Sequence
  Synthetic
gguugguuccuucugagggcucgg

SEQ ID NO: 326251 - RNA, 18 nt, Artificial Sequence
  Synthetic
uugcugccgcuggcucgg

SEQ ID NO: 326252 - RNA, 19 nt, Artificial Sequence
  Synthetic
uuugcugccgcuggcucgg

SEQ ID NO: 326253 - RNA, 20 nt, Artificial Sequence
  Synthetic
cuuugcugccgcuggcucgg

SEQ ID NO: 326254 - RNA, 21 nt, Artificial Sequence
  Synthetic
gcuuugcugccgcuggcucgg

SEQ ID NO: 326255 - RNA, 22 nt, Artificial Sequence
  Synthetic
ggcuuugcugccgcuggcucgg

SEQ ID NO: 326256 - RNA, 23 nt, Artificial Sequence
  Synthetic
gggcuuugcugccgcuggcucgg

SEQ ID NO: 326257 - RNA, 24 nt, Artificial Sequence
  Synthetic
ggggcuuugcugccgcuggcucgg

SEQ ID NO: 326258 - RNA, 18 nt, Artificial Sequence
  Synthetic
aaaaucacauugucucgg

SEQ ID NO: 326259 - RNA, 19 nt, Artificial Sequence
  Synthetic
gaaaaucacauugucucgg

SEQ ID NO: 326260 - RNA, 20 nt, Artificial Sequence
  Synthetic
ugaaaaucacauugucucgg

SEQ ID NO: 326261 - RNA, 21 nt, Artificial Sequence
  Synthetic
cugaaaaucacauugucucgg

SEQ ID NO: 326262 - RNA, 22 nt, Artificial Sequence
  Synthetic
gcugaaaaucacauugucucgg

SEQ ID NO: 326263 - RNA, 23 nt, Artificial Sequence
  Synthetic
ggcugaaaaucacauugucucgg

SEQ ID NO: 326264 - RNA, 24 nt, Artificial Sequence
  Synthetic
uggcugaaaaucacauugucucgg

SEQ ID NO: 326265 - RNA, 18 nt, Artificial Sequence
  Synthetic
ggacugugguggggucgg

SEQ ID NO: 326266 - RNA, 19 nt, Artificial Sequence
  Synthetic
gggacugugguggggucgg

SEQ ID NO: 326267 - RNA, 20 nt, Artificial Sequence
  Synthetic
ggggacugugguggggucgg

SEQ ID NO: 326268 - RNA, 21 nt, Artificial Sequence
  Synthetic
uggggacugugguggggucgg

SEQ ID NO: 326269 - RNA, 22 nt, Artificial Sequence
  Synthetic
cuggggacugugguggggucgg

SEQ ID NO: 326270 - RNA, 23 nt, Artificial Sequence
  Synthetic
ucuggggacugugguggggucgg

SEQ ID NO: 326271 - RNA, 24 nt, Artificial Sequence
  Synthetic
cucuggggacugugguggggucgg

SEQ ID NO: 326272 - RNA, 18 nt, Artificial Sequence
  Synthetic
ggccuguuguggggucgg

SEQ ID NO: 326273 - RNA, 19 nt, Artificial Sequence
  Synthetic
gggccuguuguggggucgg

SEQ ID NO: 326274 - RNA, 20 nt, Artificial Sequence
  Synthetic
agggccuguuguggggucgg

SEQ ID NO: 326275 - RNA, 21 nt, Artificial Sequence
  Synthetic
cagggccuguuguggggucgg

SEQ ID NO: 326276 - RNA, 22 nt, Artificial Sequence
  Synthetic
ccagggccuguuguggggucgg

SEQ ID NO: 326277 - RNA, 23 nt, Artificial Sequence
  Synthetic
accagggccuguuguggggucgg

SEQ ID NO: 326278 - RNA, 24 nt, Artificial Sequence
  Synthetic
caccagggccuguuguggggucgg

SEQ ID NO: 326279 - RNA, 18 nt, Artificial Sequence
  Synthetic
uaaucauuucuacuucgg

SEQ ID NO: 326280 - RNA, 19 nt, Artificial Sequence
  Synthetic
auaaucauuucuacuucgg

SEQ ID NO: 326281 - RNA, 20 nt, Artificial Sequence
  Synthetic
aauaaucauuucuacuucgg

SEQ ID NO: 326282 - RNA, 21 nt, Artificial Sequence
  Synthetic
aaauaaucauuucuacuucgg

SEQ ID NO: 326283 - RNA, 22 nt, Artificial Sequence
  Synthetic
uaaauaaucauuucuacuucgg

SEQ ID NO: 326284 - RNA, 23 nt, Artificial Sequence
  Synthetic
uuaaauaaucauuucuacuucgg

SEQ ID NO: 326285 - RNA, 24 nt, Artificial Sequence
  Synthetic
auuaaauaaucauuucuacuucgg

SEQ ID NO: 326286 - RNA, 18 nt, Artificial Sequence
  Synthetic
uguuagacuggaguucgg

SEQ ID NO: 326287 - RNA, 19 nt, Artificial Sequence
  Synthetic
uuguuagacuggaguucgg

SEQ ID NO: 326288 - RNA, 20 nt, Artificial Sequence
  Synthetic
uuuguuagacuggaguucgg

SEQ ID NO: 326289 - RNA, 21 nt, Artificial Sequence
  Synthetic
auuuguuagacuggaguucgg

SEQ ID NO: 326290 - RNA, 22 nt, Artificial Sequence
  Synthetic
cauuuguuagacuggaguucgg

SEQ ID NO: 326291 - RNA, 23 nt, Artificial Sequence
  Synthetic
gcauuuguuagacuggaguucgg

SEQ ID NO: 326292 - RNA, 24 nt, Artificial Sequence
  Synthetic
agcauuuguuagacuggaguucgg

SEQ ID NO: 326293 - RNA, 18 nt, Artificial Sequence
  Synthetic
uaaauuauucauguucgg

SEQ ID NO: 326294 - RNA, 19 nt, Artificial Sequence
  Synthetic
cuaaauuauucauguucgg

SEQ ID NO: 326295 - RNA, 20 nt, Artificial Sequence
  Synthetic
ccuaaauuauucauguucgg

SEQ ID NO: 326296 - RNA, 21 nt, Artificial Sequence
  Synthetic
gccuaaauuauucauguucgg

SEQ ID NO: 326297 - RNA, 22 nt, Artificial Sequence
  Synthetic
ugccuaaauuauucauguucgg

SEQ ID NO: 326298 - RNA, 23 nt, Artificial Sequence
  Synthetic
cugccuaaauuauucauguucgg

SEQ ID NO: 326299 - RNA, 24 nt, Artificial Sequence
  Synthetic
ccugccuaaauuauucauguucgg

SEQ ID NO: 326300 - RNA, 18 nt, Artificial Sequence
  Synthetic
ggggccuguccuguucgg

SEQ ID NO: 326301 - RNA, 19 nt, Artificial Sequence
  Synthetic
uggggccuguccuguucgg

SEQ ID NO: 326302 - RNA, 20 nt, Artificial Sequence
  Synthetic
guggggccuguccuguucgg

SEQ ID NO: 326303 - RNA, 21 nt, Artificial Sequence
  Synthetic
gguggggccuguccuguucgg

SEQ ID NO: 326304 - RNA, 22 nt, Artificial Sequence
  Synthetic
agguggggccuguccuguucgg

SEQ ID NO: 326305 - RNA, 23 nt, Artificial Sequence
  Synthetic
cagguggggccuguccuguucgg

SEQ ID NO: 326306 - RNA, 24 nt, Artificial Sequence
  Synthetic
ucagguggggccuguccuguucgg

SEQ ID NO: 326307 - RNA, 18 nt, Artificial Sequence
  Synthetic
uuauuaacauuauuucgg

SEQ ID NO: 326308 - RNA, 19 nt, Artificial Sequence
  Synthetic
auuauuaacauuauuucgg

SEQ ID NO: 326309 - RNA, 20 nt, Artificial Sequence
  Synthetic
aauuauuaacauuauuucgg

SEQ ID NO: 326310 - RNA, 21 nt, Artificial Sequence
  Synthetic
caauuauuaacauuauuucgg

SEQ ID NO: 326311 - RNA, 22 nt, Artificial Sequence
  Synthetic
ucaauuauuaacauuauuucgg

SEQ ID NO: 326312 - RNA, 23 nt, Artificial Sequence
  Synthetic
uucaauuauuaacauuauuucgg

SEQ ID NO: 326313 - RNA, 24 nt, Artificial Sequence
  Synthetic
cuucaauuauuaacauuauuucgg

SEQ ID NO: 326314 - RNA, 18 nt, Artificial Sequence
  Synthetic
ugaaaagaaagcuuucgg

SEQ ID NO: 326315 - RNA, 19 nt, Artificial Sequence
  Synthetic
uugaaaagaaagcuuucgg

SEQ ID NO: 326316 - RNA, 20 nt, Artificial Sequence
  Synthetic
uuugaaaagaaagcuuucgg

SEQ ID NO: 326317 - RNA, 21 nt, Artificial Sequence
  Synthetic
auuugaaaagaaagcuuucgg

SEQ ID NO: 326318 - RNA, 22 nt, Artificial Sequence
  Synthetic
uauuugaaaagaaagcuuucgg

SEQ ID NO: 326319 - RNA, 23 nt, Artificial Sequence
  Synthetic
uuauuugaaaagaaagcuuucgg

SEQ ID NO: 326320 - RNA, 24 nt, Artificial Sequence
  Synthetic
cuuauuugaaaagaaagcuuucgg

SEQ ID NO: 326321 - RNA, 18 nt, Artificial Sequence
  Synthetic
gagugcuuauguuuucgg

SEQ ID NO: 326322 - RNA, 19 nt, Artificial Sequence
  Synthetic
ggagugcuuauguuuucgg

SEQ ID NO: 326323 - RNA, 20 nt, Artificial Sequence
  Synthetic
gggagugcuuauguuuucgg

SEQ ID NO: 326324 - RNA, 21 nt, Artificial Sequence
  Synthetic
agggagugcuuauguuuucgg

SEQ ID NO: 326325 - RNA, 22 nt, Artificial Sequence
  Synthetic
uagggagugcuuauguuuucgg

SEQ ID NO: 326326 - RNA, 23 nt, Artificial Sequence
  Synthetic
uuagggagugcuuauguuuucgg

SEQ ID NO: 326327 - RNA, 24 nt, Artificial Sequence
  Synthetic
cuuagggagugcuuauguuuucgg

SEQ ID NO: 326328 - RNA, 18 nt, Artificial Sequence
  Synthetic
uggcagcagauuuuucgg

SEQ ID NO: 326329 - RNA, 19 nt, Artificial Sequence
  Synthetic
cuggcagcagauuuuucgg

SEQ ID NO: 326330 - RNA, 20 nt, Artificial Sequence
  Synthetic
ucuggcagcagauuuuucgg

SEQ ID NO: 326331 - RNA, 21 nt, Artificial Sequence
  Synthetic
aucuggcagcagauuuuucgg

SEQ ID NO: 326332 - RNA, 22 nt, Artificial Sequence
  Synthetic
caucuggcagcagauuuuucgg

SEQ ID NO: 326333 - RNA, 23 nt, Artificial Sequence
  Synthetic
acaucuggcagcagauuuuucgg

SEQ ID NO: 326334 - RNA, 24 nt, Artificial Sequence
  Synthetic
uacaucuggcagcagauuuuucgg

SEQ ID NO: 326335 - RNA, 18 nt, Artificial Sequence
  Synthetic
gagacgagagaaaaaggg

SEQ ID NO: 326336 - RNA, 19 nt, Artificial Sequence
  Synthetic
ggagacgagagaaaaaggg

SEQ ID NO: 326337 - RNA, 20 nt, Artificial Sequence
  Synthetic
aggagacgagagaaaaaggg

SEQ ID NO: 326338 - RNA, 21 nt, Artificial Sequence
  Synthetic
gaggagacgagagaaaaaggg

SEQ ID NO: 326339 - RNA, 22 nt, Artificial Sequence
  Synthetic
cgaggagacgagagaaaaaggg

SEQ ID NO: 326340 - RNA, 23 nt, Artificial Sequence
  Synthetic
acgaggagacgagagaaaaaggg

SEQ ID NO: 326341 - RNA, 24 nt, Artificial Sequence
  Synthetic
uacgaggagacgagagaaaaaggg

SEQ ID NO: 326342 - RNA, 18 nt, Artificial Sequence
  Synthetic
aggaaauuauaaaaaggg

SEQ ID NO: 326343 - RNA, 19 nt, Artificial Sequence
  Synthetic
uaggaaauuauaaaaaggg

SEQ ID NO: 326344 - RNA, 20 nt, Artificial Sequence
  Synthetic
auaggaaauuauaaaaaggg

SEQ ID NO: 326345 - RNA, 21 nt, Artificial Sequence
  Synthetic
uauaggaaauuauaaaaaggg

SEQ ID NO: 326346 - RNA, 22 nt, Artificial Sequence
  Synthetic
auauaggaaauuauaaaaaggg

SEQ ID NO: 326347 - RNA, 23 nt, Artificial Sequence
  Synthetic
gauauaggaaauuauaaaaaggg

SEQ ID NO: 326348 - RNA, 24 nt, Artificial Sequence
  Synthetic
ggauauaggaaauuauaaaaaggg

SEQ ID NO: 326349 - RNA, 18 nt, Artificial Sequence
  Synthetic
gcaucuuuguaaaaaggg

SEQ ID NO: 326350 - RNA, 19 nt, Artificial Sequence
  Synthetic
agcaucuuuguaaaaaggg

SEQ ID NO: 326351 - RNA, 20 nt, Artificial Sequence
  Synthetic
uagcaucuuuguaaaaaggg

SEQ ID NO: 326352 - RNA, 21 nt, Artificial Sequence
  Synthetic
auagcaucuuuguaaaaaggg

SEQ ID NO: 326353 - RNA, 22 nt, Artificial Sequence
  Synthetic
cauagcaucuuuguaaaaaggg

SEQ ID NO: 326354 - RNA, 23 nt, Artificial Sequence
  Synthetic
ucauagcaucuuuguaaaaaggg

SEQ ID NO: 326355 - RNA, 24 nt, Artificial Sequence
  Synthetic
aucauagcaucuuuguaaaaaggg

SEQ ID NO: 326356 - RNA, 18 nt, Artificial Sequence
  Synthetic
uauuuggccuuaaaaggg

SEQ ID NO: 326357 - RNA, 19 nt, Artificial Sequence
  Synthetic
uuauuuggccuuaaaaggg

SEQ ID NO: 326358 - RNA, 20 nt, Artificial Sequence
  Synthetic
auuauuuggccuuaaaaggg

SEQ ID NO: 326359 - RNA, 21 nt, Artificial Sequence
  Synthetic
uauuauuuggccuuaaaaggg

SEQ ID NO: 326360 - RNA, 22 nt, Artificial Sequence
  Synthetic
auauuauuuggccuuaaaaggg

SEQ ID NO: 326361 - RNA, 23 nt, Artificial Sequence
  Synthetic
aauauuauuuggccuuaaaaggg

SEQ ID NO: 326362 - RNA, 24 nt, Artificial Sequence
  Synthetic
gaauauuauuuggccuuaaaaggg

SEQ ID NO: 326363 - RNA, 18 nt, Artificial Sequence
  Synthetic
gcagaaagagacaaaggg

SEQ ID NO: 326364 - RNA, 19 nt, Artificial Sequence
  Synthetic
agcagaaagagacaaaggg

SEQ ID NO: 326365 - RNA, 20 nt, Artificial Sequence
  Synthetic
uagcagaaagagacaaaggg

SEQ ID NO: 326366 - RNA, 21 nt, Artificial Sequence
  Synthetic
auagcagaaagagacaaaggg

SEQ ID NO: 326367 - RNA, 22 nt, Artificial Sequence
  Synthetic
uauagcagaaagagacaaaggg

SEQ ID NO: 326368 - RNA, 23 nt, Artificial Sequence
  Synthetic
auauagcagaaagagacaaaggg

SEQ ID NO: 326369 - RNA, 24 nt, Artificial Sequence
  Synthetic
aauauagcagaaagagacaaaggg

SEQ ID NO: 326370 - RNA, 18 nt, Artificial Sequence
  Synthetic
guaaaaaaguacaaaggg

SEQ ID NO: 326371 - RNA, 19 nt, Artificial Sequence
  Synthetic
aguaaaaaaguacaaaggg

SEQ ID NO: 326372 - RNA, 20 nt, Artificial Sequence
  Synthetic
aaguaaaaaaguacaaaggg

SEQ ID NO: 326373 - RNA, 21 nt, Artificial Sequence
  Synthetic
gaaguaaaaaaguacaaaggg

SEQ ID NO: 326374 - RNA, 22 nt, Artificial Sequence
  Synthetic
agaaguaaaaaaguacaaaggg

SEQ ID NO: 326375 - RNA, 23 nt, Artificial Sequence
  Synthetic
gagaaguaaaaaaguacaaaggg

SEQ ID NO: 326376 - RNA, 24 nt, Artificial Sequence
  Synthetic
agagaaguaaaaaaguacaaaggg

SEQ ID NO: 326377 - RNA, 18 nt, Artificial Sequence
  Synthetic
aauauugcuuacaaaggg

SEQ ID NO: 326378 - RNA, 19 nt, Artificial Sequence
  Synthetic
aaauauugcuuacaaaggg

SEQ ID NO: 326379 - RNA, 20 nt, Artificial Sequence
  Synthetic
aaaauauugcuuacaaaggg

SEQ ID NO: 326380 - RNA, 21 nt, Artificial Sequence
  Synthetic
gaaaauauugcuuacaaaggg

SEQ ID NO: 326381 - RNA, 22 nt, Artificial Sequence
  Synthetic
agaaaauauugcuuacaaaggg

SEQ ID NO: 326382 - RNA, 23 nt, Artificial Sequence
  Synthetic
gagaaaauauugcuuacaaaggg

SEQ ID NO: 326383 - RNA, 24 nt, Artificial Sequence
  Synthetic
agagaaaauauugcuuacaaaggg

SEQ ID NO: 326384 - RNA, 18 nt, Artificial Sequence
  Synthetic
ugcauaugacucaaaggg

SEQ ID NO: 326385 - RNA, 19 nt, Artificial Sequence
  Synthetic
gugcauaugacucaaaggg

SEQ ID NO: 326386 - RNA, 20 nt, Artificial Sequence
  Synthetic
agugcauaugacucaaaggg

SEQ ID NO: 326387 - RNA, 21 nt, Artificial Sequence
  Synthetic
gagugcauaugacucaaaggg

SEQ ID NO: 326388 - RNA, 22 nt, Artificial Sequence
  Synthetic
ugagugcauaugacucaaaggg

SEQ ID NO: 326389 - RNA, 23 nt, Artificial Sequence
  Synthetic
uugagugcauaugacucaaaggg

SEQ ID NO: 326390 - RNA, 24 nt, Artificial Sequence
  Synthetic
cuugagugcauaugacucaaaggg

SEQ ID NO: 326391 - RNA, 18 nt, Artificial Sequence
  Synthetic
uaucagcaaaagaaaggg

SEQ ID NO: 326392 - RNA, 19 nt, Artificial Sequence
  Synthetic
uuaucagcaaaagaaaggg

SEQ ID NO: 326393 - RNA, 20 nt, Artificial Sequence
  Synthetic
auuaucagcaaaagaaaggg

SEQ ID NO: 326394 - RNA, 21 nt, Artificial Sequence
  Synthetic
uauuaucagcaaaagaaaggg

SEQ ID NO: 326395 - RNA, 22 nt, Artificial Sequence
  Synthetic
uuauuaucagcaaaagaaaggg

SEQ ID NO: 326396 - RNA, 23 nt, Artificial Sequence
  Synthetic
uuuauuaucagcaaaagaaaggg

SEQ ID NO: 326397 - RNA, 24 nt, Artificial Sequence
  Synthetic
auuuauuaucagcaaaagaaaggg

SEQ ID NO: 326398 - RNA, 18 nt, Artificial Sequence
  Synthetic
aagggaggaaagaaaggg

SEQ ID NO: 326399 - RNA, 19 nt, Artificial Sequence
  Synthetic
gaagggaggaaagaaaggg

SEQ ID NO: 326400 - RNA, 20 nt, Artificial Sequence
  Synthetic
agaagggaggaaagaaaggg

SEQ ID NO: 326401 - RNA, 21 nt, Artificial Sequence
  Synthetic
aagaagggaggaaagaaaggg

SEQ ID NO: 326402 - RNA, 22 nt, Artificial Sequence
  Synthetic
aaagaagggaggaaagaaaggg

SEQ ID NO: 326403 - RNA, 23 nt, Artificial Sequence
  Synthetic
caaagaagggaggaaagaaaggg

SEQ ID NO: 326404 - RNA, 24 nt, Artificial Sequence
  Synthetic
acaaagaagggaggaaagaaaggg

SEQ ID NO: 326405 - RNA, 18 nt, Artificial Sequence
  Synthetic
gaagcaggagggaaaggg

SEQ ID NO: 326406 - RNA, 19 nt, Artificial Sequence
  Synthetic
ggaagcaggagggaaaggg

SEQ ID NO: 326407 - RNA, 20 nt, Artificial Sequence
  Synthetic
cggaagcaggagggaaaggg

SEQ ID NO: 326408 - RNA, 21 nt, Artificial Sequence
  Synthetic
ccggaagcaggagggaaaggg

SEQ ID NO: 326409 - RNA, 22 nt, Artificial Sequence
  Synthetic
cccggaagcaggagggaaaggg

SEQ ID NO: 326410 - RNA, 23 nt, Artificial Sequence
  Synthetic
acccggaagcaggagggaaaggg

SEQ ID NO: 326411 - RNA, 24 nt, Artificial Sequence
  Synthetic
gacccggaagcaggagggaaaggg

SEQ ID NO: 326412 - RNA, 18 nt, Artificial Sequence
  Synthetic
uuuuaaucguugaaaggg

SEQ ID NO: 326413 - RNA, 19 nt, Artificial Sequence
  Synthetic
uuuuuaaucguugaaaggg

SEQ ID NO: 326414 - RNA, 20 nt, Artificial Sequence
  Synthetic
uuuuuuaaucguugaaaggg

SEQ ID NO: 326415 - RNA, 21 nt, Artificial Sequence
  Synthetic
auuuuuuaaucguugaaaggg

SEQ ID NO: 326416 - RNA, 22 nt, Artificial Sequence
  Synthetic
cauuuuuuaaucguugaaaggg

SEQ ID NO: 326417 - RNA, 23 nt, Artificial Sequence
  Synthetic
acauuuuuuaaucguugaaaggg

SEQ ID NO: 326418 - RNA, 24 nt, Artificial Sequence
  Synthetic
uacauuuuuuaaucguugaaaggg

SEQ ID NO: 326419 - RNA, 18 nt, Artificial Sequence
  Synthetic
acuagaaaaaguaaaggg

SEQ ID NO: 326420 - RNA, 19 nt, Artificial Sequence
  Synthetic
uacuagaaaaaguaaaggg

SEQ ID NO: 326421 - RNA, 20 nt, Artificial Sequence
  Synthetic
uuacuagaaaaaguaaaggg

SEQ ID NO: 326422 - RNA, 21 nt, Artificial Sequence
  Synthetic
uuuacuagaaaaaguaaaggg

SEQ ID NO: 326423 - RNA, 22 nt, Artificial Sequence
  Synthetic
cuuuacuagaaaaaguaaaggg

SEQ ID NO: 326424 - RNA, 23 nt, Artificial Sequence
  Synthetic
ccuuuacuagaaaaaguaaaggg

SEQ ID NO: 326425 - RNA, 24 nt, Artificial Sequence
  Synthetic
uccuuuacuagaaaaaguaaaggg

SEQ ID NO: 326426 - RNA, 18 nt, Artificial Sequence
  Synthetic
acaagacaaaaacaaggg

SEQ ID NO: 326427 - RNA, 19 nt, Artificial Sequence
  Synthetic
aacaagacaaaaacaaggg

SEQ ID NO: 326428 - RNA, 20 nt, Artificial Sequence
  Synthetic
aaacaagacaaaaacaaggg

SEQ ID NO: 326429 - RNA, 21 nt, Artificial Sequence
  Synthetic
uaaacaagacaaaaacaaggg

SEQ ID NO: 326430 - RNA, 22 nt, Artificial Sequence
  Synthetic
guaaacaagacaaaaacaaggg

SEQ ID NO: 326431 - RNA, 23 nt, Artificial Sequence
  Synthetic
uguaaacaagacaaaaacaaggg

SEQ ID NO: 326432 - RNA, 24 nt, Artificial Sequence
  Synthetic
auguaaacaagacaaaaacaaggg

SEQ ID NO: 326433 - RNA, 18 nt, Artificial Sequence
  Synthetic
uacuaaguuaaacaaggg

SEQ ID NO: 326434 - RNA, 19 nt, Artificial Sequence
  Synthetic
guacuaaguuaaacaaggg

SEQ ID NO: 326435 - RNA, 20 nt, Artificial Sequence
  Synthetic
aguacuaaguuaaacaaggg

SEQ ID NO: 326436 - RNA, 21 nt, Artificial Sequence
  Synthetic
caguacuaaguuaaacaaggg

SEQ ID NO: 326437 - RNA, 22 nt, Artificial Sequence
  Synthetic
ccaguacuaaguuaaacaaggg

SEQ ID NO: 326438 - RNA, 23 nt, Artificial Sequence
  Synthetic
cccaguacuaaguuaaacaaggg

SEQ ID NO: 326439 - RNA, 24 nt, Artificial Sequence
  Synthetic
ucccaguacuaaguuaaacaaggg

SEQ ID NO: 326440 - RNA, 18 nt, Artificial Sequence
  Synthetic
aguugugauuaacaaggg

SEQ ID NO: 326441 - RNA, 19 nt, Artificial Sequence
  Synthetic
gaguugugauuaacaaggg

SEQ ID NO: 326442 - RNA, 20 nt, Artificial Sequence
  Synthetic
ugaguugugauuaacaaggg

SEQ ID NO: 326443 - RNA, 21 nt, Artificial Sequence
  Synthetic
gugaguugugauuaacaaggg

SEQ ID NO: 326444 - RNA, 22 nt, Artificial Sequence
  Synthetic
ugugaguugugauuaacaaggg

SEQ ID NO: 326445 - RNA, 23 nt, Artificial Sequence
  Synthetic
uugugaguugugauuaacaaggg

SEQ ID NO: 326446 - RNA, 24 nt, Artificial Sequence
  Synthetic
uuugugaguugugauuaacaaggg

SEQ ID NO: 326447 - RNA, 18 nt, Artificial Sequence
  Synthetic
ccugcaaagccacaaggg

SEQ ID NO: 326448 - RNA, 19 nt, Artificial Sequence
  Synthetic
cccugcaaagccacaaggg

SEQ ID NO: 326449 - RNA, 20 nt, Artificial Sequence
  Synthetic
acccugcaaagccacaaggg

SEQ ID NO: 326450 - RNA, 21 nt, Artificial Sequence
  Synthetic
uacccugcaaagccacaaggg

SEQ ID NO: 326451 - RNA, 22 nt, Artificial Sequence
  Synthetic
guacccugcaaagccacaaggg

SEQ ID NO: 326452 - RNA, 23 nt, Artificial Sequence
  Synthetic
uguacccugcaaagccacaaggg

SEQ ID NO: 326453 - RNA, 24 nt, Artificial Sequence
  Synthetic
cuguacccugcaaagccacaaggg

SEQ ID NO: 326454 - RNA, 18 nt, Artificial Sequence
  Synthetic
ucaggaggaagacaaggg

SEQ ID NO: 326455 - RNA, 19 nt, Artificial Sequence
  Synthetic
aucaggaggaagacaaggg

SEQ ID NO: 326456 - RNA, 20 nt, Artificial Sequence
  Synthetic
caucaggaggaagacaaggg

SEQ ID NO: 326457 - RNA, 21 nt, Artificial Sequence
  Synthetic
acaucaggaggaagacaaggg

SEQ ID NO: 326458 - RNA, 22 nt, Artificial Sequence
  Synthetic
aacaucaggaggaagacaaggg

SEQ ID NO: 326459 - RNA, 23 nt, Artificial Sequence
  Synthetic
gaacaucaggaggaagacaaggg

SEQ ID NO: 326460 - RNA, 24 nt, Artificial Sequence
  Synthetic
ugaacaucaggaggaagacaaggg

SEQ ID NO: 326461 - RNA, 18 nt, Artificial Sequence
  Synthetic
gaaagggggagacaaggg

SEQ ID NO: 326462 - RNA, 19 nt, Artificial Sequence
  Synthetic
ggaaagggggagacaaggg

SEQ ID NO: 326463 - RNA, 20 nt, Artificial Sequence
  Synthetic
aggaaagggggagacaaggg

SEQ ID NO: 326464 - RNA, 21 nt, Artificial Sequence
  Synthetic
aaggaaagggggagacaaggg

SEQ ID NO: 326465 - RNA, 22 nt, Artificial Sequence
  Synthetic
aaaggaaagggggagacaaggg

SEQ ID NO: 326466 - RNA, 23 nt, Artificial Sequence
  Synthetic
gaaaggaaagggggagacaaggg

SEQ ID NO: 326467 - RNA, 24 nt, Artificial Sequence
  Synthetic
ggaaaggaaagggggagacaaggg

SEQ ID NO: 326468 - RNA, 18 nt, Artificial Sequence
  Synthetic
ugaucucauggacaaggg

SEQ ID NO: 326469 - RNA, 19 nt, Artificial Sequence
  Synthetic
cugaucucauggacaaggg

SEQ ID NO: 326470 - RNA, 20 nt, Artificial Sequence
  Synthetic
ucugaucucauggacaaggg

SEQ ID NO: 326471 - RNA, 21 nt, Artificial Sequence
  Synthetic
cucugaucucauggacaaggg

SEQ ID NO: 326472 - RNA, 22 nt, Artificial Sequence
  Synthetic
ucucugaucucauggacaaggg

SEQ ID NO: 326473 - RNA, 23 nt, Artificial Sequence
  Synthetic
aucucugaucucauggacaaggg

SEQ ID NO: 326474 - RNA, 24 nt, Artificial Sequence
  Synthetic
caucucugaucucauggacaaggg

SEQ ID NO: 326475 - RNA, 18 nt, Artificial Sequence
  Synthetic
uauuagcuaaaccaaggg

SEQ ID NO: 326476 - RNA, 19 nt, Artificial Sequence
  Synthetic
uuauuagcuaaaccaaggg

SEQ ID NO: 326477 - RNA, 20 nt, Artificial Sequence
  Synthetic
uuuauuagcuaaaccaaggg

SEQ ID NO: 326478 - RNA, 21 nt, Artificial Sequence
  Synthetic
uuuuauuagcuaaaccaaggg

SEQ ID NO: 326479 - RNA, 22 nt, Artificial Sequence
  Synthetic
cuuuuauuagcuaaaccaaggg

SEQ ID NO: 326480 - RNA, 23 nt, Artificial Sequence
  Synthetic
ccuuuuauuagcuaaaccaaggg

SEQ ID NO: 326481 - RNA, 24 nt, Artificial Sequence
  Synthetic
gccuuuuauuagcuaaaccaaggg

SEQ ID NO: 326482 - RNA, 18 nt, Artificial Sequence
  Synthetic
uccaaauaguaccaaggg

SEQ ID NO: 326483 - RNA, 19 nt, Artificial Sequence
  Synthetic
cuccaaauaguaccaaggg

SEQ ID NO: 326484 - RNA, 20 nt, Artificial Sequence
  Synthetic
ccuccaaauaguaccaaggg

SEQ ID NO: 326485 - RNA, 21 nt, Artificial Sequence
  Synthetic
uccuccaaauaguaccaaggg

SEQ ID NO: 326486 - RNA, 22 nt, Artificial Sequence
  Synthetic
cuccuccaaauaguaccaaggg

SEQ ID NO: 326487 - RNA, 23 nt, Artificial Sequence
  Synthetic
acuccuccaaauaguaccaaggg

SEQ ID NO: 326488 - RNA, 24 nt, Artificial Sequence
  Synthetic
aacuccuccaaauaguaccaaggg

SEQ ID NO: 326489 - RNA, 18 nt, Artificial Sequence
  Synthetic
auucagcauccccaaggg

SEQ ID NO: 326490 - RNA, 19 nt, Artificial Sequence
  Synthetic
uauucagcauccccaaggg

SEQ ID NO: 326491 - RNA, 20 nt, Artificial Sequence
  Synthetic
uuauucagcauccccaaggg

SEQ ID NO: 326492 - RNA, 21 nt, Artificial Sequence
  Synthetic
uuuauucagcauccccaaggg

SEQ ID NO: 326493 - RNA, 22 nt, Artificial Sequence
  Synthetic
guuuauucagcauccccaaggg

SEQ ID NO: 326494 - RNA, 23 nt, Artificial Sequence
  Synthetic
aguuuauucagcauccccaaggg

SEQ ID NO: 326495 - RNA, 24 nt, Artificial Sequence
  Synthetic
gaguuuauucagcauccccaaggg

SEQ ID NO: 326496 - RNA, 18 nt, Artificial Sequence
  Synthetic
ugucacagaauccaaggg

SEQ ID NO: 326497 - RNA, 19 nt, Artificial Sequence
  Synthetic
augucacagaauccaaggg

SEQ ID NO: 326498 - RNA, 20 nt, Artificial Sequence
  Synthetic
gaugucacagaauccaaggg

SEQ ID NO: 326499 - RNA, 21 nt, Artificial Sequence
  Synthetic
ugaugucacagaauccaaggg

SEQ ID NO: 326500 - RNA, 22 nt, Artificial Sequence
  Synthetic
gugaugucacagaauccaaggg

SEQ ID NO: 326501 - RNA, 23 nt, Artificial Sequence
  Synthetic
ugugaugucacagaauccaaggg

SEQ ID NO: 326502 - RNA, 24 nt, Artificial Sequence
  Synthetic
gugugaugucacagaauccaaggg

SEQ ID NO: 326503 - RNA, 18 nt, Artificial Sequence
  Synthetic
cagguagaacagcaaggg

SEQ ID NO: 326504 - RNA, 19 nt, Artificial Sequence
  Synthetic
gcagguagaacagcaaggg

SEQ ID NO: 326505 - RNA, 20 nt, Artificial Sequence
  Synthetic
ggcagguagaacagcaaggg

SEQ ID NO: 326506 - RNA, 21 nt, Artificial Sequence
  Synthetic
uggcagguagaacagcaaggg

SEQ ID NO: 326507 - RNA, 22 nt, Artificial Sequence
  Synthetic
uuggcagguagaacagcaaggg

SEQ ID NO: 326508 - RNA, 23 nt, Artificial Sequence
  Synthetic
uuuggcagguagaacagcaaggg

SEQ ID NO: 326509 - RNA, 24 nt, Artificial Sequence
  Synthetic
uuuuggcagguagaacagcaaggg

SEQ ID NO: 326510 - RNA, 18 nt, Artificial Sequence
  Synthetic
ccagcaacccagcaaggg

SEQ ID NO: 326511 - RNA, 19 nt, Artificial Sequence
  Synthetic
uccagcaacccagcaaggg

SEQ ID NO: 326512 - RNA, 20 nt, Artificial Sequence
  Synthetic
auccagcaacccagcaaggg

SEQ ID NO: 326513 - RNA, 21 nt, Artificial Sequence
  Synthetic
gauccagcaacccagcaaggg

SEQ ID NO: 326514 - RNA, 22 nt, Artificial Sequence
  Synthetic
agauccagcaacccagcaaggg

SEQ ID NO: 326515 - RNA, 23 nt, Artificial Sequence
  Synthetic
cagauccagcaacccagcaaggg

SEQ ID NO: 326516 - RNA, 24 nt, Artificial Sequence
  Synthetic
acagauccagcaacccagcaaggg

SEQ ID NO: 326517 - RNA, 18 nt, Artificial Sequence
  Synthetic
uaaaugaucuagcaaggg

SEQ ID NO: 326518 - RNA, 19 nt, Artificial Sequence
  Synthetic
uuaaaugaucuagcaaggg

SEQ ID NO: 326519 - RNA, 20 nt, Artificial Sequence
  Synthetic
cuuaaaugaucuagcaaggg

SEQ ID NO: 326520 - RNA, 21 nt, Artificial Sequence
  Synthetic
acuuaaaugaucuagcaaggg

SEQ ID NO: 326521 - RNA, 22 nt, Artificial Sequence
  Synthetic
aacuuaaaugaucuagcaaggg

SEQ ID NO: 326522 - RNA, 23 nt, Artificial Sequence
  Synthetic
uaacuuaaaugaucuagcaaggg

SEQ ID NO: 326523 - RNA, 24 nt, Artificial Sequence
  Synthetic
guaacuuaaaugaucuagcaaggg

SEQ ID NO: 326524 - RNA, 18 nt, Artificial Sequence
  Synthetic
gaaggagaggggcaaggg

SEQ ID NO: 326525 - RNA, 19 nt, Artificial Sequence
  Synthetic
ggaaggagaggggcaaggg

SEQ ID NO: 326526 - RNA, 20 nt, Artificial Sequence
  Synthetic
aggaaggagaggggcaaggg

SEQ ID NO: 326527 - RNA, 21 nt, Artificial Sequence
  Synthetic
gaggaaggagaggggcaaggg

SEQ ID NO: 326528 - RNA, 22 nt, Artificial Sequence
  Synthetic
ggaggaaggagaggggcaaggg

SEQ ID NO: 326529 - RNA, 23 nt, Artificial Sequence
  Synthetic
gggaggaaggagaggggcaaggg

SEQ ID NO: 326530 - RNA, 24 nt, Artificial Sequence
  Synthetic
ggggaggaaggagaggggcaaggg

SEQ ID NO: 326531 - RNA, 18 nt, Artificial Sequence
  Synthetic
cgagguggggggcaaggg

SEQ ID NO: 326532 - RNA, 19 nt, Artificial Sequence
  Synthetic
gcgagguggggggcaaggg

SEQ ID NO: 326533 - RNA, 20 nt, Artificial Sequence
  Synthetic
cgcgagguggggggcaaggg

SEQ ID NO: 326534 - RNA, 21 nt, Artificial Sequence
  Synthetic
ucgcgagguggggggcaaggg

SEQ ID NO: 326535 - RNA, 22 nt, Artificial Sequence
  Synthetic
gucgcgagguggggggcaaggg

SEQ ID NO: 326536 - RNA, 23 nt, Artificial Sequence
  Synthetic
ugucgcgagguggggggcaaggg

SEQ ID NO: 326537 - RNA, 24 nt, Artificial Sequence
  Synthetic
cugucgcgagguggggggcaaggg

SEQ ID NO: 326538 - RNA, 18 nt, Artificial Sequence
  Synthetic
gggaaccaauugcaaggg

SEQ ID NO: 326539 - RNA, 19 nt, Artificial Sequence
  Synthetic
ugggaaccaauugcaaggg

SEQ ID NO: 326540 - RNA, 20 nt, Artificial Sequence
  Synthetic
cugggaaccaauugcaaggg

SEQ ID NO: 326541 - RNA, 21 nt, Artificial Sequence
  Synthetic
ucugggaaccaauugcaaggg

SEQ ID NO: 326542 - RNA, 22 nt, Artificial Sequence
  Synthetic
uucugggaaccaauugcaaggg

SEQ ID NO: 326543 - RNA, 23 nt, Artificial Sequence
  Synthetic
auucugggaaccaauugcaaggg

SEQ ID NO: 326544 - RNA, 24 nt, Artificial Sequence
  Synthetic
aauucugggaaccaauugcaaggg

SEQ ID NO: 326545 - RNA, 18 nt, Artificial Sequence
  Synthetic
cuauuaccaccucaaggg

SEQ ID NO: 326546 - RNA, 19 nt, Artificial Sequence
  Synthetic
acuauuaccaccucaaggg

SEQ ID NO: 326547 - RNA, 20 nt, Artificial Sequence
  Synthetic
aacuauuaccaccucaaggg

SEQ ID NO: 326548 - RNA, 21 nt, Artificial Sequence
  Synthetic
aaacuauuaccaccucaaggg

SEQ ID NO: 326549 - RNA, 22 nt, Artificial Sequence
  Synthetic
gaaacuauuaccaccucaaggg

SEQ ID NO: 326550 - RNA, 23 nt, Artificial Sequence
  Synthetic
ggaaacuauuaccaccucaaggg

SEQ ID NO: 326551 - RNA, 24 nt, Artificial Sequence
  Synthetic
aggaaacuauuaccaccucaaggg

SEQ ID NO: 326552 - RNA, 18 nt, Artificial Sequence
  Synthetic
uacuuccuggcucaaggg

SEQ ID NO: 326553 - RNA, 19 nt, Artificial Sequence
  Synthetic
guacuuccuggcucaaggg

SEQ ID NO: 326554 - RNA, 20 nt, Artificial Sequence
  Synthetic
uguacuuccuggcucaaggg

SEQ ID NO: 326555 - RNA, 21 nt, Artificial Sequence
  Synthetic
uuguacuuccuggcucaaggg

SEQ ID NO: 326556 - RNA, 22 nt, Artificial Sequence
  Synthetic
auuguacuuccuggcucaaggg

SEQ ID NO: 326557 - RNA, 23 nt, Artificial Sequence
  Synthetic
aauuguacuuccuggcucaaggg

SEQ ID NO: 326558 - RNA, 24 nt, Artificial Sequence
  Synthetic
aaauuguacuuccuggcucaaggg

SEQ ID NO: 326559 - RNA, 18 nt, Artificial Sequence
  Synthetic
cuugaccacucucaaggg

SEQ ID NO: 326560 - RNA, 19 nt, Artificial Sequence
  Synthetic
ucuugaccacucucaaggg

SEQ ID NO: 326561 - RNA, 20 nt, Artificial Sequence
  Synthetic
gucuugaccacucucaaggg

SEQ ID NO: 326562 - RNA, 21 nt, Artificial Sequence
  Synthetic
agucuugaccacucucaaggg

SEQ ID NO: 326563 - RNA, 22 nt, Artificial Sequence
  Synthetic
aagucuugaccacucucaaggg

SEQ ID NO: 326564 - RNA, 23 nt, Artificial Sequence
  Synthetic
aaagucuugaccacucucaaggg

SEQ ID NO: 326565 - RNA, 24 nt, Artificial Sequence
  Synthetic
aaaagucuugaccacucucaaggg

SEQ ID NO: 326566 - RNA, 18 nt, Artificial Sequence
  Synthetic
auccccacaugucaaggg

SEQ ID NO: 326567 - RNA, 19 nt, Artificial Sequence
  Synthetic
aauccccacaugucaaggg

SEQ ID NO: 326568 - RNA, 20 nt, Artificial Sequence
  Synthetic
uaauccccacaugucaaggg

SEQ ID NO: 326569 - RNA, 21 nt, Artificial Sequence
  Synthetic
guaauccccacaugucaaggg

SEQ ID NO: 326570 - RNA, 22 nt, Artificial Sequence
  Synthetic
gguaauccccacaugucaaggg

SEQ ID NO: 326571 - RNA, 23 nt, Artificial Sequence
  Synthetic
ugguaauccccacaugucaaggg

SEQ ID NO: 326572 - RNA, 24 nt, Artificial Sequence
  Synthetic
augguaauccccacaugucaaggg

SEQ ID NO: 326573 - RNA, 18 nt, Artificial Sequence
  Synthetic
ucaugauuguuucaaggg

SEQ ID NO: 326574 - RNA, 19 nt, Artificial Sequence
  Synthetic
cucaugauuguuucaaggg

SEQ ID NO: 326575 - RNA, 20 nt, Artificial Sequence
  Synthetic
gcucaugauuguuucaaggg

SEQ ID NO: 326576 - RNA, 21 nt, Artificial Sequence
  Synthetic
ugcucaugauuguuucaaggg

SEQ ID NO: 326577 - RNA, 22 nt, Artificial Sequence
  Synthetic
gugcucaugauuguuucaaggg

SEQ ID NO: 326578 - RNA, 23 nt, Artificial Sequence
  Synthetic
agugcucaugauuguuucaaggg

SEQ ID NO: 326579 - RNA, 24 nt, Artificial Sequence
  Synthetic
aagugcucaugauuguuucaaggg

SEQ ID NO: 326580 - RNA, 18 nt, Artificial Sequence
  Synthetic
ggagagaacaaagaaggg

SEQ ID NO: 326581 - RNA, 19 nt, Artificial Sequence
  Synthetic
aggagagaacaaagaaggg

SEQ ID NO: 326582 - RNA, 20 nt, Artificial Sequence
  Synthetic
aaggagagaacaaagaaggg

SEQ ID NO: 326583 - RNA, 21 nt, Artificial Sequence
  Synthetic
gaaggagagaacaaagaaggg

SEQ ID NO: 326584 - RNA, 22 nt, Artificial Sequence
  Synthetic
ggaaggagagaacaaagaaggg

SEQ ID NO: 326585 - RNA, 23 nt, Artificial Sequence
  Synthetic
aggaaggagagaacaaagaaggg

SEQ ID NO: 326586 - RNA, 24 nt, Artificial Sequence
  Synthetic
aaggaaggagagaacaaagaaggg

SEQ ID NO: 326587 - RNA, 18 nt, Artificial Sequence
  Synthetic
cacacaaauaaagaaggg

SEQ ID NO: 326588 - RNA, 19 nt, Artificial Sequence
  Synthetic
gcacacaaauaaagaaggg

SEQ ID NO: 326589 - RNA, 20 nt, Artificial Sequence
  Synthetic
ugcacacaaauaaagaaggg

SEQ ID NO: 326590 - RNA, 21 nt, Artificial Sequence
  Synthetic
gugcacacaaauaaagaaggg

SEQ ID NO: 326591 - RNA, 22 nt, Artificial Sequence
  Synthetic
ggugcacacaaauaaagaaggg

SEQ ID NO: 326592 - RNA, 23 nt, Artificial Sequence
  Synthetic
aggugcacacaaauaaagaaggg

SEQ ID NO: 326593 - RNA, 24 nt, Artificial Sequence
  Synthetic
caggugcacacaaauaaagaaggg

SEQ ID NO: 326594 - RNA, 18 nt, Artificial Sequence
  Synthetic
aacaucaggggagaaggg

SEQ ID NO: 326595 - RNA, 19 nt, Artificial Sequence
  Synthetic
caacaucaggggagaaggg

SEQ ID NO: 326596 - RNA, 20 nt, Artificial Sequence
  Synthetic
acaacaucaggggagaaggg

SEQ ID NO: 326597 - RNA, 21 nt, Artificial Sequence
  Synthetic
uacaacaucaggggagaaggg

SEQ ID NO: 326598 - RNA, 22 nt, Artificial Sequence
  Synthetic
uuacaacaucaggggagaaggg

SEQ ID NO: 326599 - RNA, 23 nt, Artificial Sequence
  Synthetic
auuacaacaucaggggagaaggg

SEQ ID NO: 326600 - RNA, 24 nt, Artificial Sequence
  Synthetic
uauuacaacaucaggggagaaggg

SEQ ID NO: 326601 - RNA, 18 nt, Artificial Sequence
  Synthetic
agaaaucucaaggaaggg

SEQ ID NO: 326602 - RNA, 19 nt, Artificial Sequence
  Synthetic
cagaaaucucaaggaaggg

SEQ ID NO: 326603 - RNA, 20 nt, Artificial Sequence
  Synthetic
acagaaaucucaaggaaggg

SEQ ID NO: 326604 - RNA, 21 nt, Artificial Sequence
  Synthetic
aacagaaaucucaaggaaggg

SEQ ID NO: 326605 - RNA, 22 nt, Artificial Sequence
  Synthetic
gaacagaaaucucaaggaaggg

SEQ ID NO: 326606 - RNA, 23 nt, Artificial Sequence
  Synthetic
ugaacagaaaucucaaggaaggg

SEQ ID NO: 326607 - RNA, 24 nt, Artificial Sequence
  Synthetic
uugaacagaaaucucaaggaaggg

SEQ ID NO: 326608 - RNA, 18 nt, Artificial Sequence
  Synthetic
aaagaaaggaaggaaggg

SEQ ID NO: 326609 - RNA, 19 nt, Artificial Sequence
  Synthetic
caaagaaaggaaggaaggg

SEQ ID NO: 326610 - RNA, 20 nt, Artificial Sequence
  Synthetic
acaaagaaaggaaggaaggg

SEQ ID NO: 326611 - RNA, 21 nt, Artificial Sequence
  Synthetic
gacaaagaaaggaaggaaggg

SEQ ID NO: 326612 - RNA, 22 nt, Artificial Sequence
  Synthetic
agacaaagaaaggaaggaaggg

SEQ ID NO: 326613 - RNA, 23 nt, Artificial Sequence
  Synthetic
aagacaaagaaaggaaggaaggg

SEQ ID NO: 326614 - RNA, 24 nt, Artificial Sequence
  Synthetic
gaagacaaagaaaggaaggaaggg

SEQ ID NO: 326615 - RNA, 18 nt, Artificial Sequence
  Synthetic
aggaggaggaaggaaggg

SEQ ID NO: 326616 - RNA, 19 nt, Artificial Sequence
  Synthetic
aaggaggaggaaggaaggg

SEQ ID NO: 326617 - RNA, 20 nt, Artificial Sequence
  Synthetic
aaaggaggaggaaggaaggg

SEQ ID NO: 326618 - RNA, 21 nt, Artificial Sequence
  Synthetic
gaaaggaggaggaaggaaggg

SEQ ID NO: 326619 - RNA, 22 nt, Artificial Sequence
  Synthetic
ugaaaggaggaggaaggaaggg

SEQ ID NO: 326620 - RNA, 23 nt, Artificial Sequence
  Synthetic
cugaaaggaggaggaaggaaggg

SEQ ID NO: 326621 - RNA, 24 nt, Artificial Sequence
  Synthetic
acugaaaggaggaggaaggaaggg

SEQ ID NO: 326622 - RNA, 18 nt, Artificial Sequence
  Synthetic
ggagaucaccaggaaggg

SEQ ID NO: 326623 - RNA, 19 nt, Artificial Sequence
  Synthetic
uggagaucaccaggaaggg

SEQ ID NO: 326624 - RNA, 20 nt, Artificial Sequence
  Synthetic
guggagaucaccaggaaggg

SEQ ID NO: 326625 - RNA, 21 nt, Artificial Sequence
  Synthetic
uguggagaucaccaggaaggg

SEQ ID NO: 326626 - RNA, 22 nt, Artificial Sequence
  Synthetic
uuguggagaucaccaggaaggg

SEQ ID NO: 326627 - RNA, 23 nt, Artificial Sequence
  Synthetic
cuuguggagaucaccaggaaggg

SEQ ID NO: 326628 - RNA, 24 nt, Artificial Sequence
  Synthetic
acuuguggagaucaccaggaaggg

SEQ ID NO: 326629 - RNA, 18 nt, Artificial Sequence
  Synthetic
uguggggugggggaaggg

SEQ ID NO: 326630 - RNA, 19 nt, Artificial Sequence
  Synthetic
uuguggggugggggaaggg

SEQ ID NO: 326631 - RNA, 20 nt, Artificial Sequence
  Synthetic
guuguggggugggggaaggg

SEQ ID NO: 326632 - RNA, 21 nt, Artificial Sequence
  Synthetic
uguuguggggugggggaaggg

SEQ ID NO: 326633 - RNA, 22 nt, Artificial Sequence
  Synthetic
cuguuguggggugggggaaggg

SEQ ID NO: 326634 - RNA, 23 nt, Artificial Sequence
  Synthetic
acuguuguggggugggggaaggg

SEQ ID NO: 326635 - RNA, 24 nt, Artificial Sequence
  Synthetic
gacuguuguggggugggggaaggg

SEQ ID NO: 326636 - RNA, 18 nt, Artificial Sequence
  Synthetic
cuuccuacaguggaaggg

SEQ ID NO: 326637 - RNA, 19 nt, Artificial Sequence
  Synthetic
ucuuccuacaguggaaggg

SEQ ID NO: 326638 - RNA, 20 nt, Artificial Sequence
  Synthetic
cucuuccuacaguggaaggg

SEQ ID NO: 326639 - RNA, 21 nt, Artificial Sequence
  Synthetic
acucuuccuacaguggaaggg

SEQ ID NO: 326640 - RNA, 22 nt, Artificial Sequence
  Synthetic
gacucuuccuacaguggaaggg

SEQ ID NO: 326641 - RNA, 23 nt, Artificial Sequence
  Synthetic
agacucuuccuacaguggaaggg

SEQ ID NO: 326642 - RNA, 24 nt, Artificial Sequence
  Synthetic
uagacucuuccuacaguggaaggg

SEQ ID NO: 326643 - RNA, 18 nt, Artificial Sequence
  Synthetic
aacaagccaguggaaggg

SEQ ID NO: 326644 - RNA, 19 nt, Artificial Sequence
  Synthetic
aaacaagccaguggaaggg

SEQ ID NO: 326645 - RNA, 20 nt, Artificial Sequence
  Synthetic
aaaacaagccaguggaaggg

SEQ ID NO: 326646 - RNA, 21 nt, Artificial Sequence
  Synthetic
caaaacaagccaguggaaggg

SEQ ID NO: 326647 - RNA, 22 nt, Artificial Sequence
  Synthetic
gcaaaacaagccaguggaaggg

SEQ ID NO: 326648 - RNA, 23 nt, Artificial Sequence
  Synthetic
agcaaaacaagccaguggaaggg

SEQ ID NO: 326649 - RNA, 24 nt, Artificial Sequence
  Synthetic
aagcaaaacaagccaguggaaggg

SEQ ID NO: 326650 - RNA, 18 nt, Artificial Sequence
  Synthetic
aaaaagaguguugaaggg

SEQ ID NO: 326651 - RNA, 19 nt, Artificial Sequence
  Synthetic
caaaaagaguguugaaggg

SEQ ID NO: 326652 - RNA, 20 nt, Artificial Sequence
  Synthetic
acaaaaagaguguugaaggg

SEQ ID NO: 326653 - RNA, 21 nt, Artificial Sequence
  Synthetic
uacaaaaagaguguugaaggg

SEQ ID NO: 326654 - RNA, 22 nt, Artificial Sequence
  Synthetic
auacaaaaagaguguugaaggg

SEQ ID NO: 326655 - RNA, 23 nt, Artificial Sequence
  Synthetic
gauacaaaaagaguguugaaggg

SEQ ID NO: 326656 - RNA, 24 nt, Artificial Sequence
  Synthetic
agauacaaaaagaguguugaaggg

SEQ ID NO: 326657 - RNA, 18 nt, Artificial Sequence
  Synthetic
cugcaucaauaauaaggg

SEQ ID NO: 326658 - RNA, 19 nt, Artificial Sequence
  Synthetic
ucugcaucaauaauaaggg

SEQ ID NO: 326659 - RNA, 20 nt, Artificial Sequence
  Synthetic
cucugcaucaauaauaaggg

SEQ ID NO: 326660 - RNA, 21 nt, Artificial Sequence
  Synthetic
ucucugcaucaauaauaaggg

SEQ ID NO: 326661 - RNA, 22 nt, Artificial Sequence
  Synthetic
gucucugcaucaauaauaaggg

SEQ ID NO: 326662 - RNA, 23 nt, Artificial Sequence
  Synthetic
ugucucugcaucaauaauaaggg

SEQ ID NO: 326663 - RNA, 24 nt, Artificial Sequence
  Synthetic
augucucugcaucaauaauaaggg

SEQ ID NO: 326664 - RNA, 18 nt, Artificial Sequence
  Synthetic
ugguuaaaugcauaaggg

SEQ ID NO: 326665 - RNA, 19 nt, Artificial Sequence
  Synthetic
augguuaaaugcauaaggg

SEQ ID NO: 326666 - RNA, 20 nt, Artificial Sequence
  Synthetic
aaugguuaaaugcauaaggg

SEQ ID NO: 326667 - RNA, 21 nt, Artificial Sequence
  Synthetic
gaaugguuaaaugcauaaggg

SEQ ID NO: 326668 - RNA, 22 nt, Artificial Sequence
  Synthetic
ugaaugguuaaaugcauaaggg

SEQ ID NO: 326669 - RNA, 23 nt, Artificial Sequence
  Synthetic
augaaugguuaaaugcauaaggg

SEQ ID NO: 326670 - RNA, 24 nt, Artificial Sequence
  Synthetic
aaugaaugguuaaaugcauaaggg

SEQ ID NO: 326671 - RNA, 18 nt, Artificial Sequence
  Synthetic
ugaauccauucauaaggg

SEQ ID NO: 326672 - RNA, 19 nt, Artificial Sequence
  Synthetic
augaauccauucauaaggg

SEQ ID NO: 326673 - RNA, 20 nt, Artificial Sequence
  Synthetic
gaugaauccauucauaaggg

SEQ ID NO: 326674 - RNA, 21 nt, Artificial Sequence
  Synthetic
ggaugaauccauucauaaggg

SEQ ID NO: 326675 - RNA, 22 nt, Artificial Sequence
  Synthetic
uggaugaauccauucauaaggg

SEQ ID NO: 326676 - RNA, 23 nt, Artificial Sequence
  Synthetic
auggaugaauccauucauaaggg

SEQ ID NO: 326677 - RNA, 24 nt, Artificial Sequence
  Synthetic
aauggaugaauccauucauaaggg

SEQ ID NO: 326678 - RNA, 18 nt, Artificial Sequence
  Synthetic
auauaccucagauaaggg

SEQ ID NO: 326679 - RNA, 19 nt, Artificial Sequence
  Synthetic
uauauaccucagauaaggg

SEQ ID NO: 326680 - RNA, 20 nt, Artificial Sequence
  Synthetic
cuauauaccucagauaaggg

SEQ ID NO: 326681 - RNA, 21 nt, Artificial Sequence
  Synthetic
gcuauauaccucagauaaggg

SEQ ID NO: 326682 - RNA, 22 nt, Artificial Sequence
  Synthetic
ggcuauauaccucagauaaggg

SEQ ID NO: 326683 - RNA, 23 nt, Artificial Sequence
  Synthetic
uggcuauauaccucagauaaggg

SEQ ID NO: 326684 - RNA, 24 nt, Artificial Sequence
  Synthetic
uuggcuauauaccucagauaaggg

SEQ ID NO: 326685 - RNA, 18 nt, Artificial Sequence
  Synthetic
acacaggauggauaaggg

SEQ ID NO: 326686 - RNA, 19 nt, Artificial Sequence
  Synthetic
uacacaggauggauaaggg

SEQ ID NO: 326687 - RNA, 20 nt, Artificial Sequence
  Synthetic
cuacacaggauggauaaggg

SEQ ID NO: 326688 - RNA, 21 nt, Artificial Sequence
  Synthetic
gcuacacaggauggauaaggg

SEQ ID NO: 326689 - RNA, 22 nt, Artificial Sequence
  Synthetic
ggcuacacaggauggauaaggg

SEQ ID NO: 326690 - RNA, 23 nt, Artificial Sequence
  Synthetic
gggcuacacaggauggauaaggg

SEQ ID NO: 326691 - RNA, 24 nt, Artificial Sequence
  Synthetic
agggcuacacaggauggauaaggg

SEQ ID NO: 326692 - RNA, 18 nt, Artificial Sequence
  Synthetic
uugagucugauauaaggg

SEQ ID NO: 326693 - RNA, 19 nt, Artificial Sequence
  Synthetic
auugagucugauauaaggg

SEQ ID NO: 326694 - RNA, 20 nt, Artificial Sequence
  Synthetic
gauugagucugauauaaggg

SEQ ID NO: 326695 - RNA, 21 nt, Artificial Sequence
  Synthetic
agauugagucugauauaaggg

SEQ ID NO: 326696 - RNA, 22 nt, Artificial Sequence
  Synthetic
gagauugagucugauauaaggg

SEQ ID NO: 326697 - RNA, 23 nt, Artificial Sequence
  Synthetic
ggagauugagucugauauaaggg

SEQ ID NO: 326698 - RNA, 24 nt, Artificial Sequence
  Synthetic
aggagauugagucugauauaaggg

SEQ ID NO: 326699 - RNA, 18 nt, Artificial Sequence
  Synthetic
uugauucuuguauaaggg

SEQ ID NO: 326700 - RNA, 19 nt, Artificial Sequence
  Synthetic
guugauucuuguauaaggg

SEQ ID NO: 326701 - RNA, 20 nt, Artificial Sequence
  Synthetic
aguugauucuuguauaaggg

SEQ ID NO: 326702 - RNA, 21 nt, Artificial Sequence
  Synthetic
gaguugauucuuguauaaggg

SEQ ID NO: 326703 - RNA, 22 nt, Artificial Sequence
  Synthetic
ugaguugauucuuguauaaggg

SEQ ID NO: 326704 - RNA, 23 nt, Artificial Sequence
  Synthetic
uugaguugauucuuguauaaggg

SEQ ID NO: 326705 - RNA, 24 nt, Artificial Sequence
  Synthetic
uuugaguugauucuuguauaaggg

SEQ ID NO: 326706 - RNA, 18 nt, Artificial Sequence
  Synthetic
uagaaaaccgauuaaggg

SEQ ID NO: 326707 - RNA, 19 nt, Artificial Sequence
  Synthetic
uuagaaaaccgauuaaggg

SEQ ID NO: 326708 - RNA, 20 nt, Artificial Sequence
  Synthetic
uuuagaaaaccgauuaaggg

SEQ ID NO: 326709 - RNA, 21 nt, Artificial Sequence
  Synthetic
uuuuagaaaaccgauuaaggg

SEQ ID NO: 326710 - RNA, 22 nt, Artificial Sequence
  Synthetic
guuuuagaaaaccgauuaaggg

SEQ ID NO: 326711 - RNA, 23 nt, Artificial Sequence
  Synthetic
uguuuuagaaaaccgauuaaggg

SEQ ID NO: 326712 - RNA, 24 nt, Artificial Sequence
  Synthetic
guguuuuagaaaaccgauuaaggg

SEQ ID NO: 326713 - RNA, 18 nt, Artificial Sequence
  Synthetic
guuucaguuccuuaaggg

SEQ ID NO: 326714 - RNA, 19 nt, Artificial Sequence
  Synthetic
gguuucaguuccuuaaggg

SEQ ID NO: 326715 - RNA, 20 nt, Artificial Sequence
  Synthetic
agguuucaguuccuuaaggg

SEQ ID NO: 326716 - RNA, 21 nt, Artificial Sequence
  Synthetic
uagguuucaguuccuuaaggg

SEQ ID NO: 326717 - RNA, 22 nt, Artificial Sequence
  Synthetic
cuagguuucaguuccuuaaggg

SEQ ID NO: 326718 - RNA, 23 nt, Artificial Sequence
  Synthetic
gcuagguuucaguuccuuaaggg

SEQ ID NO: 326719 - RNA, 24 nt, Artificial Sequence
  Synthetic
agcuagguuucaguuccuuaaggg

SEQ ID NO: 326720 - RNA, 18 nt, Artificial Sequence
  Synthetic
ggcauuguuugaacaggg

SEQ ID NO: 326721 - RNA, 19 nt, Artificial Sequence
  Synthetic
uggcauuguuugaacaggg

SEQ ID NO: 326722 - RNA, 20 nt, Artificial Sequence
  Synthetic
auggcauuguuugaacaggg

SEQ ID NO: 326723 - RNA, 21 nt, Artificial Sequence
  Synthetic
aauggcauuguuugaacaggg

SEQ ID NO: 326724 - RNA, 22 nt, Artificial Sequence
  Synthetic
aaauggcauuguuugaacaggg

SEQ ID NO: 326725 - RNA, 23 nt, Artificial Sequence
  Synthetic
aaaauggcauuguuugaacaggg

SEQ ID NO: 326726 - RNA, 24 nt, Artificial Sequence
  Synthetic
uaaaauggcauuguuugaacaggg

SEQ ID NO: 326727 - RNA, 18 nt, Artificial Sequence
  Synthetic
gagcccauggacacaggg

SEQ ID NO: 326728 - RNA, 19 nt, Artificial Sequence
  Synthetic
agagcccauggacacaggg

SEQ ID NO: 326729 - RNA, 20 nt, Artificial Sequence
  Synthetic
gagagcccauggacacaggg

SEQ ID NO: 326730 - RNA, 21 nt, Artificial Sequence
  Synthetic
cgagagcccauggacacaggg

SEQ ID NO: 326731 - RNA, 22 nt, Artificial Sequence
  Synthetic
acgagagcccauggacacaggg

SEQ ID NO: 326732 - RNA, 23 nt, Artificial Sequence
  Synthetic
aacgagagcccauggacacaggg

SEQ ID NO: 326733 - RNA, 24 nt, Artificial Sequence
  Synthetic
caacgagagcccauggacacaggg

SEQ ID NO: 326734 - RNA, 18 nt, Artificial Sequence
  Synthetic
gaacacuuggacacaggg

SEQ ID NO: 326735 - RNA, 19 nt, Artificial Sequence
  Synthetic
agaacacuuggacacaggg

SEQ ID NO: 326736 - RNA, 20 nt, Artificial Sequence
  Synthetic
gagaacacuuggacacaggg

SEQ ID NO: 326737 - RNA, 21 nt, Artificial Sequence
  Synthetic
ugagaacacuuggacacaggg

SEQ ID NO: 326738 - RNA, 22 nt, Artificial Sequence
  Synthetic
augagaacacuuggacacaggg

SEQ ID NO: 326739 - RNA, 23 nt, Artificial Sequence
  Synthetic
aaugagaacacuuggacacaggg

SEQ ID NO: 326740 - RNA, 24 nt, Artificial Sequence
  Synthetic
caaugagaacacuuggacacaggg

SEQ ID NO: 326741 - RNA, 18 nt, Artificial Sequence
  Synthetic
cucuugguuuccacaggg

SEQ ID NO: 326742 - RNA, 19 nt, Artificial Sequence
  Synthetic
ccucuugguuuccacaggg

SEQ ID NO: 326743 - RNA, 20 nt, Artificial Sequence
  Synthetic
gccucuugguuuccacaggg

SEQ ID NO: 326744 - RNA, 21 nt, Artificial Sequence
  Synthetic
agccucuugguuuccacaggg

SEQ ID NO: 326745 - RNA, 22 nt, Artificial Sequence
  Synthetic
aagccucuugguuuccacaggg

SEQ ID NO: 326746 - RNA, 23 nt, Artificial Sequence
  Synthetic
aaagccucuugguuuccacaggg

SEQ ID NO: 326747 - RNA, 24 nt, Artificial Sequence
  Synthetic
gaaagccucuugguuuccacaggg

SEQ ID NO: 326748 - RNA, 18 nt, Artificial Sequence
  Synthetic
gagauuggaugcacaggg

SEQ ID NO: 326749 - RNA, 19 nt, Artificial Sequence
  Synthetic
agagauuggaugcacaggg

SEQ ID NO: 326750 - RNA, 20 nt, Artificial Sequence
  Synthetic
cagagauuggaugcacaggg

SEQ ID NO: 326751 - RNA, 21 nt, Artificial Sequence
  Synthetic
ucagagauuggaugcacaggg

SEQ ID NO: 326752 - RNA, 22 nt, Artificial Sequence
  Synthetic
aucagagauuggaugcacaggg

SEQ ID NO: 326753 - RNA, 23 nt, Artificial Sequence
  Synthetic
gaucagagauuggaugcacaggg

SEQ ID NO: 326754 - RNA, 24 nt, Artificial Sequence
  Synthetic
ggaucagagauuggaugcacaggg

SEQ ID NO: 326755 - RNA, 18 nt, Artificial Sequence
  Synthetic
uucaucuuaaucacaggg

SEQ ID NO: 326756 - RNA, 19 nt, Artificial Sequence
  Synthetic
uuucaucuuaaucacaggg

SEQ ID NO: 326757 - RNA, 20 nt, Artificial Sequence
  Synthetic
cuuucaucuuaaucacaggg

SEQ ID NO: 326758 - RNA, 21 nt, Artificial Sequence
  Synthetic
acuuucaucuuaaucacaggg

SEQ ID NO: 326759 - RNA, 22 nt, Artificial Sequence
  Synthetic
uacuuucaucuuaaucacaggg

SEQ ID NO: 326760 - RNA, 23 nt, Artificial Sequence
  Synthetic
auacuuucaucuuaaucacaggg

SEQ ID NO: 326761 - RNA, 24 nt, Artificial Sequence
  Synthetic
aauacuuucaucuuaaucacaggg

SEQ ID NO: 326762 - RNA, 18 nt, Artificial Sequence
  Synthetic
gauaauccacucacaggg

SEQ ID NO: 326763 - RNA, 19 nt, Artificial Sequence
  Synthetic
ugauaauccacucacaggg

SEQ ID NO: 326764 - RNA, 20 nt, Artificial Sequence
  Synthetic
cugauaauccacucacaggg

SEQ ID NO: 326765 - RNA, 21 nt, Artificial Sequence
  Synthetic
acugauaauccacucacaggg

SEQ ID NO: 326766 - RNA, 22 nt, Artificial Sequence
  Synthetic
uacugauaauccacucacaggg

SEQ ID NO: 326767 - RNA, 23 nt, Artificial Sequence
  Synthetic
auacugauaauccacucacaggg

SEQ ID NO: 326768 - RNA, 24 nt, Artificial Sequence
  Synthetic
aauacugauaauccacucacaggg

SEQ ID NO: 326769 - RNA, 18 nt, Artificial Sequence
  Synthetic
cuaauagugacgacaggg

SEQ ID NO: 326770 - RNA, 19 nt, Artificial Sequence
  Synthetic
gcuaauagugacgacaggg

SEQ ID NO: 326771 - RNA, 20 nt, Artificial Sequence
  Synthetic
agcuaauagugacgacaggg

SEQ ID NO: 326772 - RNA, 21 nt, Artificial Sequence
  Synthetic
cagcuaauagugacgacaggg

SEQ ID NO: 326773 - RNA, 22 nt, Artificial Sequence
  Synthetic
gcagcuaauagugacgacaggg

SEQ ID NO: 326774 - RNA, 23 nt, Artificial Sequence
  Synthetic
agcagcuaauagugacgacaggg

SEQ ID NO: 326775 - RNA, 24 nt, Artificial Sequence
  Synthetic
aagcagcuaauagugacgacaggg

SEQ ID NO: 326776 - RNA, 18 nt, Artificial Sequence
  Synthetic
guacuuuuuccuacaggg

SEQ ID NO: 326777 - RNA, 19 nt, Artificial Sequence
  Synthetic
aguacuuuuuccuacaggg

SEQ ID NO: 326778 - RNA, 20 nt, Artificial Sequence
  Synthetic
gaguacuuuuuccuacaggg

SEQ ID NO: 326779 - RNA, 21 nt, Artificial Sequence
  Synthetic
ggaguacuuuuuccuacaggg

SEQ ID NO: 326780 - RNA, 22 nt, Artificial Sequence
  Synthetic
uggaguacuuuuuccuacaggg

SEQ ID NO: 326781 - RNA, 23 nt, Artificial Sequence
  Synthetic
guggaguacuuuuuccuacaggg

SEQ ID NO: 326782 - RNA, 24 nt, Artificial Sequence
  Synthetic
aguggaguacuuuuuccuacaggg

SEQ ID NO: 326783 - RNA, 18 nt, Artificial Sequence
  Synthetic
uacuugacucuuacaggg

SEQ ID NO: 326784 - RNA, 19 nt, Artificial Sequence
  Synthetic
cuacuugacucuuacaggg

SEQ ID NO: 326785 - RNA, 20 nt, Artificial Sequence
  Synthetic
ucuacuugacucuuacaggg

SEQ ID NO: 326786 - RNA, 21 nt, Artificial Sequence
  Synthetic
aucuacuugacucuuacaggg

SEQ ID NO: 326787 - RNA, 22 nt, Artificial Sequence
  Synthetic
aaucuacuugacucuuacaggg

SEQ ID NO: 326788 - RNA, 23 nt, Artificial Sequence
  Synthetic
gaaucuacuugacucuuacaggg

SEQ ID NO: 326789 - RNA, 24 nt, Artificial Sequence
  Synthetic
agaaucuacuugacucuuacaggg

SEQ ID NO: 326790 - RNA, 18 nt, Artificial Sequence
  Synthetic
acauggcugcaaccaggg

SEQ ID NO: 326791 - RNA, 19 nt, Artificial Sequence
  Synthetic
aacauggcugcaaccaggg

SEQ ID NO: 326792 - RNA, 20 nt, Artificial Sequence
  Synthetic
aaacauggcugcaaccaggg

SEQ ID NO: 326793 - RNA, 21 nt, Artificial Sequence
  Synthetic
aaaacauggcugcaaccaggg

SEQ ID NO: 326794 - RNA, 22 nt, Artificial Sequence
  Synthetic
caaaacauggcugcaaccaggg

SEQ ID NO: 326795 - RNA, 23 nt, Artificial Sequence
  Synthetic
ucaaaacauggcugcaaccaggg

SEQ ID NO: 326796 - RNA, 24 nt, Artificial Sequence
  Synthetic
cucaaaacauggcugcaaccaggg

SEQ ID NO: 326797 - RNA, 18 nt, Artificial Sequence
  Synthetic
gaaaauagauacccaggg

SEQ ID NO: 326798 - RNA, 19 nt, Artificial Sequence
  Synthetic
ugaaaauagauacccaggg

SEQ ID NO: 326799 - RNA, 20 nt, Artificial Sequence
  Synthetic
gugaaaauagauacccaggg

SEQ ID NO: 326800 - RNA, 21 nt, Artificial Sequence
  Synthetic
ugugaaaauagauacccaggg

SEQ ID NO: 326801 - RNA, 22 nt, Artificial Sequence
  Synthetic
cugugaaaauagauacccaggg

SEQ ID NO: 326802 - RNA, 23 nt, Artificial Sequence
  Synthetic
ucugugaaaauagauacccaggg

SEQ ID NO: 326803 - RNA, 24 nt, Artificial Sequence
  Synthetic
uucugugaaaauagauacccaggg

SEQ ID NO: 326804 - RNA, 18 nt, Artificial Sequence
  Synthetic
ugccuaaccaucccaggg

SEQ ID NO: 326805 - RNA, 19 nt, Artificial Sequence
  Synthetic
cugccuaaccaucccaggg

SEQ ID NO: 326806 - RNA, 20 nt, Artificial Sequence
  Synthetic
gcugccuaaccaucccaggg

SEQ ID NO: 326807 - RNA, 21 nt, Artificial Sequence
  Synthetic
agcugccuaaccaucccaggg

SEQ ID NO: 326808 - RNA, 22 nt, Artificial Sequence
  Synthetic
aagcugccuaaccaucccaggg

SEQ ID NO: 326809 - RNA, 23 nt, Artificial Sequence
  Synthetic
uaagcugccuaaccaucccaggg

SEQ ID NO: 326810 - RNA, 24 nt, Artificial Sequence
  Synthetic
cuaagcugccuaaccaucccaggg

SEQ ID NO: 326811 - RNA, 18 nt, Artificial Sequence
  Synthetic
cagccuugcaucccaggg

SEQ ID NO: 326812 - RNA, 19 nt, Artificial Sequence
  Synthetic
ccagccuugcaucccaggg

SEQ ID NO: 326813 - RNA, 20 nt, Artificial Sequence
  Synthetic
accagccuugcaucccaggg

SEQ ID NO: 326814 - RNA, 21 nt, Artificial Sequence
  Synthetic
aaccagccuugcaucccaggg

SEQ ID NO: 326815 - RNA, 22 nt, Artificial Sequence
  Synthetic
gaaccagccuugcaucccaggg

SEQ ID NO: 326816 - RNA, 23 nt, Artificial Sequence
  Synthetic
ugaaccagccuugcaucccaggg

SEQ ID NO: 326817 - RNA, 24 nt, Artificial Sequence
  Synthetic
uugaaccagccuugcaucccaggg

SEQ ID NO: 326818 - RNA, 18 nt, Artificial Sequence
  Synthetic
cagcuuugcaucccaggg

SEQ ID NO: 326819 - RNA, 19 nt, Artificial Sequence
  Synthetic
ccagcuuugcaucccaggg

SEQ ID NO: 326820 - RNA, 20 nt, Artificial Sequence
  Synthetic
accagcuuugcaucccaggg

SEQ ID NO: 326821 - RNA, 21 nt, Artificial Sequence
  Synthetic
aaccagcuuugcaucccaggg

SEQ ID NO: 326822 - RNA, 22 nt, Artificial Sequence
  Synthetic
gaaccagcuuugcaucccaggg

SEQ ID NO: 326823 - RNA, 23 nt, Artificial Sequence
  Synthetic
ugaaccagcuuugcaucccaggg

SEQ ID NO: 326824 - RNA, 24 nt, Artificial Sequence
  Synthetic
uugaaccagcuuugcaucccaggg

SEQ ID NO: 326825 - RNA, 18 nt, Artificial Sequence
  Synthetic
ugaaggcaauuuccaggg

SEQ ID NO: 326826 - RNA, 19 nt, Artificial Sequence
  Synthetic
cugaaggcaauuuccaggg

SEQ ID NO: 326827 - RNA, 20 nt, Artificial Sequence
  Synthetic
gcugaaggcaauuuccaggg

SEQ ID NO: 326828 - RNA, 21 nt, Artificial Sequence
  Synthetic
agcugaaggcaauuuccaggg

SEQ ID NO: 326829 - RNA, 22 nt, Artificial Sequence
  Synthetic
cagcugaaggcaauuuccaggg

SEQ ID NO: 326830 - RNA, 23 nt, Artificial Sequence
  Synthetic
acagcugaaggcaauuuccaggg

SEQ ID NO: 326831 - RNA, 24 nt, Artificial Sequence
  Synthetic
uacagcugaaggcaauuuccaggg

SEQ ID NO: 326832 - RNA, 18 nt, Artificial Sequence
  Synthetic
uguuuguaguuuccaggg

SEQ ID NO: 326833 - RNA, 19 nt, Artificial Sequence
  Synthetic
guguuuguaguuuccaggg

SEQ ID NO: 326834 - RNA, 20 nt, Artificial Sequence
  Synthetic
aguguuuguaguuuccaggg

SEQ ID NO: 326835 - RNA, 21 nt, Artificial Sequence
  Synthetic
uaguguuuguaguuuccaggg

SEQ ID NO: 326836 - RNA, 22 nt, Artificial Sequence
  Synthetic
guaguguuuguaguuuccaggg

SEQ ID NO: 326837 - RNA, 23 nt, Artificial Sequence
  Synthetic
aguaguguuuguaguuuccaggg

SEQ ID NO: 326838 - RNA, 24 nt, Artificial Sequence
  Synthetic
caguaguguuuguaguuuccaggg

SEQ ID NO: 326839 - RNA, 18 nt, Artificial Sequence
  Synthetic
cacauguuucuagcaggg

SEQ ID NO: 326840 - RNA, 19 nt, Artificial Sequence
  Synthetic
ucacauguuucuagcaggg

SEQ ID NO: 326841 - RNA, 20 nt, Artificial Sequence
  Synthetic
uucacauguuucuagcaggg

SEQ ID NO: 326842 - RNA, 21 nt, Artificial Sequence
  Synthetic
cuucacauguuucuagcaggg

SEQ ID NO: 326843 - RNA, 22 nt, Artificial Sequence
  Synthetic
ucuucacauguuucuagcaggg

SEQ ID NO: 326844 - RNA, 23 nt, Artificial Sequence
  Synthetic
gucuucacauguuucuagcaggg

SEQ ID NO: 326845 - RNA, 24 nt, Artificial Sequence
  Synthetic
ggucuucacauguuucuagcaggg

SEQ ID NO: 326846 - RNA, 18 nt, Artificial Sequence
  Synthetic
aauagaaacauggcaggg

SEQ ID NO: 326847 - RNA, 19 nt, Artificial Sequence
  Synthetic
uaauagaaacauggcaggg

SEQ ID NO: 326848 - RNA, 20 nt, Artificial Sequence
  Synthetic
uuaauagaaacauggcaggg

SEQ ID NO: 326849 - RNA, 21 nt, Artificial Sequence
  Synthetic
auuaauagaaacauggcaggg

SEQ ID NO: 326850 - RNA, 22 nt, Artificial Sequence
  Synthetic
cauuaauagaaacauggcaggg

SEQ ID NO: 326851 - RNA, 23 nt, Artificial Sequence
  Synthetic
ucauuaauagaaacauggcaggg

SEQ ID NO: 326852 - RNA, 24 nt, Artificial Sequence
  Synthetic
cucauuaauagaaacauggcaggg

SEQ ID NO: 326853 - RNA, 18 nt, Artificial Sequence
  Synthetic
cccuguggguuugcaggg

SEQ ID NO: 326854 - RNA, 19 nt, Artificial Sequence
  Synthetic
ccccuguggguuugcaggg

SEQ ID NO: 326855 - RNA, 20 nt, Artificial Sequence
  Synthetic
accccuguggguuugcaggg

SEQ ID NO: 326856 - RNA, 21 nt, Artificial Sequence
  Synthetic
caccccuguggguuugcaggg

SEQ ID NO: 326857 - RNA, 22 nt, Artificial Sequence
  Synthetic
ccaccccuguggguuugcaggg

SEQ ID NO: 326858 - RNA, 23 nt, Artificial Sequence
  Synthetic
uccaccccuguggguuugcaggg

SEQ ID NO: 326859 - RNA, 24 nt, Artificial Sequence
  Synthetic
cuccaccccuguggguuugcaggg

SEQ ID NO: 326860 - RNA, 18 nt, Artificial Sequence
  Synthetic
aaucuguuggaaucaggg

SEQ ID NO: 326861 - RNA, 19 nt, Artificial Sequence
  Synthetic
caaucuguuggaaucaggg

SEQ ID NO: 326862 - RNA, 20 nt, Artificial Sequence
  Synthetic
gcaaucuguuggaaucaggg

SEQ ID NO: 326863 - RNA, 21 nt, Artificial Sequence
  Synthetic
ggcaaucuguuggaaucaggg

SEQ ID NO: 326864 - RNA, 22 nt, Artificial Sequence
  Synthetic
uggcaaucuguuggaaucaggg

SEQ ID NO: 326865 - RNA, 23 nt, Artificial Sequence
  Synthetic
guggcaaucuguuggaaucaggg

SEQ ID NO: 326866 - RNA, 24 nt, Artificial Sequence
  Synthetic
aguggcaaucuguuggaaucaggg

SEQ ID NO: 326867 - RNA, 18 nt, Artificial Sequence
  Synthetic
ucuauuacaacaucaggg

SEQ ID NO: 326868 - RNA, 19 nt, Artificial Sequence
  Synthetic
uucuauuacaacaucaggg

SEQ ID NO: 326869 - RNA, 20 nt, Artificial Sequence
  Synthetic
cuucuauuacaacaucaggg

SEQ ID NO: 326870 - RNA, 21 nt, Artificial Sequence
  Synthetic
gcuucuauuacaacaucaggg

SEQ ID NO: 326871 - RNA, 22 nt, Artificial Sequence
  Synthetic
agcuucuauuacaacaucaggg

SEQ ID NO: 326872 - RNA, 23 nt, Artificial Sequence
  Synthetic
cagcuucuauuacaacaucaggg

SEQ ID NO: 326873 - RNA, 24 nt, Artificial Sequence
  Synthetic
acagcuucuauuacaacaucaggg

SEQ ID NO: 326874 - RNA, 18 nt, Artificial Sequence
  Synthetic
gguugucacagcucaggg

SEQ ID NO: 326875 - RNA, 19 nt, Artificial Sequence
  Synthetic
ugguugucacagcucaggg

SEQ ID NO: 326876 - RNA, 20 nt, Artificial Sequence
  Synthetic
uugguugucacagcucaggg

SEQ ID NO: 326877 - RNA, 21 nt, Artificial Sequence
  Synthetic
uuugguugucacagcucaggg

SEQ ID NO: 326878 - RNA, 22 nt, Artificial Sequence
  Synthetic
auuugguugucacagcucaggg

SEQ ID NO: 326879 - RNA, 23 nt, Artificial Sequence
  Synthetic
uauuugguugucacagcucaggg

SEQ ID NO: 326880 - RNA, 24 nt, Artificial Sequence
  Synthetic
auauuugguugucacagcucaggg

SEQ ID NO: 326881 - RNA, 18 nt, Artificial Sequence
  Synthetic
uacugugaaaagucaggg

SEQ ID NO: 326882 - RNA, 19 nt, Artificial Sequence
  Synthetic
uuacugugaaaagucaggg

SEQ ID NO: 326883 - RNA, 20 nt, Artificial Sequence
  Synthetic
cuuacugugaaaagucaggg

SEQ ID NO: 326884 - RNA, 21 nt, Artificial Sequence
  Synthetic
ucuuacugugaaaagucaggg

SEQ ID NO: 326885 - RNA, 22 nt, Artificial Sequence
  Synthetic
uucuuacugugaaaagucaggg

SEQ ID NO: 326886 - RNA, 23 nt, Artificial Sequence
  Synthetic
uuucuuacugugaaaagucaggg

SEQ ID NO: 326887 - RNA, 24 nt, Artificial Sequence
  Synthetic
auuucuuacugugaaaagucaggg

SEQ ID NO: 326888 - RNA, 18 nt, Artificial Sequence
  Synthetic
ccauuuguguugucaggg

SEQ ID NO: 326889 - RNA, 19 nt, Artificial Sequence
  Synthetic
uccauuuguguugucaggg

SEQ ID NO: 326890 - RNA, 20 nt, Artificial Sequence
  Synthetic
guccauuuguguugucaggg

SEQ ID NO: 326891 - RNA, 21 nt, Artificial Sequence
  Synthetic
uguccauuuguguugucaggg

SEQ ID NO: 326892 - RNA, 22 nt, Artificial Sequence
  Synthetic
guguccauuuguguugucaggg

SEQ ID NO: 326893 - RNA, 23 nt, Artificial Sequence
  Synthetic
uguguccauuuguguugucaggg

SEQ ID NO: 326894 - RNA, 24 nt, Artificial Sequence
  Synthetic
auguguccauuuguguugucaggg

SEQ ID NO: 326895 - RNA, 18 nt, Artificial Sequence
  Synthetic
aaaguaugggauucaggg

SEQ ID NO: 326896 - RNA, 19 nt, Artificial Sequence
  Synthetic
gaaaguaugggauucaggg

SEQ ID NO: 326897 - RNA, 20 nt, Artificial Sequence
  Synthetic
ugaaaguaugggauucaggg

SEQ ID NO: 326898 - RNA, 21 nt, Artificial Sequence
  Synthetic
augaaaguaugggauucaggg

SEQ ID NO: 326899 - RNA, 22 nt, Artificial Sequence
  Synthetic
gaugaaaguaugggauucaggg

SEQ ID NO: 326900 - RNA, 23 nt, Artificial Sequence
  Synthetic
ggaugaaaguaugggauucaggg

SEQ ID NO: 326901 - RNA, 24 nt, Artificial Sequence
  Synthetic
uggaugaaaguaugggauucaggg

SEQ ID NO: 326902 - RNA, 18 nt, Artificial Sequence
  Synthetic
ggucucuuguauucaggg

SEQ ID NO: 326903 - RNA, 19 nt, Artificial Sequence
  Synthetic
gggucucuuguauucaggg

SEQ ID NO: 326904 - RNA, 20 nt, Artificial Sequence
  Synthetic
agggucucuuguauucaggg

SEQ ID NO: 326905 - RNA, 21 nt, Artificial Sequence
  Synthetic
uagggucucuuguauucaggg

SEQ ID NO: 326906 - RNA, 22 nt, Artificial Sequence
  Synthetic
uuagggucucuuguauucaggg

SEQ ID NO: 326907 - RNA, 23 nt, Artificial Sequence
  Synthetic
auuagggucucuuguauucaggg

SEQ ID NO: 326908 - RNA, 24 nt, Artificial Sequence
  Synthetic
uauuagggucucuuguauucaggg

SEQ ID NO: 326909 - RNA, 18 nt, Artificial Sequence
  Synthetic
ucaugaccugcuucaggg

SEQ ID NO: 326910 - RNA, 19 nt, Artificial Sequence
  Synthetic
cucaugaccugcuucaggg

SEQ ID NO: 326911 - RNA, 20 nt, Artificial Sequence
  Synthetic
ucucaugaccugcuucaggg

SEQ ID NO: 326912 - RNA, 21 nt, Artificial Sequence
  Synthetic
gucucaugaccugcuucaggg

SEQ ID NO: 326913 - RNA, 22 nt, Artificial Sequence
  Synthetic
agucucaugaccugcuucaggg

SEQ ID NO: 326914 - RNA, 23 nt, Artificial Sequence
  Synthetic
uagucucaugaccugcuucaggg

SEQ ID NO: 326915 - RNA, 24 nt, Artificial Sequence
  Synthetic
auagucucaugaccugcuucaggg

SEQ ID NO: 326916 - RNA, 18 nt, Artificial Sequence
  Synthetic
gaguguuauuaaagaggg

SEQ ID NO: 326917 - RNA, 19 nt, Artificial Sequence
  Synthetic
agaguguuauuaaagaggg

SEQ ID NO: 326918 - RNA, 20 nt, Artificial Sequence
  Synthetic
aagaguguuauuaaagaggg

SEQ ID NO: 326919 - RNA, 21 nt, Artificial Sequence
  Synthetic
aaagaguguuauuaaagaggg

SEQ ID NO: 326920 - RNA, 22 nt, Artificial Sequence
  Synthetic
aaaagaguguuauuaaagaggg

SEQ ID NO: 326921 - RNA, 23 nt, Artificial Sequence
  Synthetic
aaaaagaguguuauuaaagaggg

SEQ ID NO: 326922 - RNA, 24 nt, Artificial Sequence
  Synthetic
uaaaaagaguguuauuaaagaggg

SEQ ID NO: 326923 - RNA, 18 nt, Artificial Sequence
  Synthetic
uuuugggagggaagaggg

SEQ ID NO: 326924 - RNA, 19 nt, Artificial Sequence
  Synthetic
guuuugggagggaagaggg

SEQ ID NO: 326925 - RNA, 20 nt, Artificial Sequence
  Synthetic
uguuuugggagggaagaggg

SEQ ID NO: 326926 - RNA, 21 nt, Artificial Sequence
  Synthetic
auguuuugggagggaagaggg

SEQ ID NO: 326927 - RNA, 22 nt, Artificial Sequence
  Synthetic
uauguuuugggagggaagaggg

SEQ ID NO: 326928 - RNA, 23 nt, Artificial Sequence
  Synthetic
guauguuuugggagggaagaggg

SEQ ID NO: 326929 - RNA, 24 nt, Artificial Sequence
  Synthetic
aguauguuuugggagggaagaggg

SEQ ID NO: 326930 - RNA, 18 nt, Artificial Sequence
  Synthetic
uucuguuagugaagaggg

SEQ ID NO: 326931 - RNA, 19 nt, Artificial Sequence
  Synthetic
auucuguuagugaagaggg

SEQ ID NO: 326932 - RNA, 20 nt, Artificial Sequence
  Synthetic
aauucuguuagugaagaggg

SEQ ID NO: 326933 - RNA, 21 nt, Artificial Sequence
  Synthetic
aaauucuguuagugaagaggg

SEQ ID NO: 326934 - RNA, 22 nt, Artificial Sequence
  Synthetic
caaauucuguuagugaagaggg

SEQ ID NO: 326935 - RNA, 23 nt, Artificial Sequence
  Synthetic
ucaaauucuguuagugaagaggg

SEQ ID NO: 326936 - RNA, 24 nt, Artificial Sequence
  Synthetic
aucaaauucuguuagugaagaggg

SEQ ID NO: 326937 - RNA, 18 nt, Artificial Sequence
  Synthetic
ucccaaagacuaagaggg

SEQ ID NO: 326938 - RNA, 19 nt, Artificial Sequence
  Synthetic
uucccaaagacuaagaggg

SEQ ID NO: 326939 - RNA, 20 nt, Artificial Sequence
  Synthetic
cuucccaaagacuaagaggg

SEQ ID NO: 326940 - RNA, 21 nt, Artificial Sequence
  Synthetic
acuucccaaagacuaagaggg

SEQ ID NO: 326941 - RNA, 22 nt, Artificial Sequence
  Synthetic
gacuucccaaagacuaagaggg

SEQ ID NO: 326942 - RNA, 23 nt, Artificial Sequence
  Synthetic
ugacuucccaaagacuaagaggg

SEQ ID NO: 326943 - RNA, 24 nt, Artificial Sequence
  Synthetic
augacuucccaaagacuaagaggg

SEQ ID NO: 326944 - RNA, 18 nt, Artificial Sequence
  Synthetic
agaugagcccccagaggg

SEQ ID NO: 326945 - RNA, 19 nt, Artificial Sequence
  Synthetic
cagaugagcccccagaggg

SEQ ID NO: 326946 - RNA, 20 nt, Artificial Sequence
  Synthetic
ucagaugagcccccagaggg

SEQ ID NO: 326947 - RNA, 21 nt, Artificial Sequence
  Synthetic
cucagaugagcccccagaggg

SEQ ID NO: 326948 - RNA, 22 nt, Artificial Sequence
  Synthetic
gcucagaugagcccccagaggg

SEQ ID NO: 326949 - RNA, 23 nt, Artificial Sequence
  Synthetic
agcucagaugagcccccagaggg

SEQ ID NO: 326950 - RNA, 24 nt, Artificial Sequence
  Synthetic
cagcucagaugagcccccagaggg

SEQ ID NO: 326951 - RNA, 18 nt, Artificial Sequence
  Synthetic
ugcauucuaggcagaggg

SEQ ID NO: 326952 - RNA, 19 nt, Artificial Sequence
  Synthetic
augcauucuaggcagaggg

SEQ ID NO: 326953 - RNA, 20 nt, Artificial Sequence
  Synthetic
gaugcauucuaggcagaggg

SEQ ID NO: 326954 - RNA, 21 nt, Artificial Sequence
  Synthetic
ugaugcauucuaggcagaggg

SEQ ID NO: 326955 - RNA, 22 nt, Artificial Sequence
  Synthetic
augaugcauucuaggcagaggg

SEQ ID NO: 326956 - RNA, 23 nt, Artificial Sequence
  Synthetic
gaugaugcauucuaggcagaggg

SEQ ID NO: 326957 - RNA, 24 nt, Artificial Sequence
  Synthetic
agaugaugcauucuaggcagaggg

SEQ ID NO: 326958 - RNA, 18 nt, Artificial Sequence
  Synthetic
aaauaauuaugcagaggg

SEQ ID NO: 326959 - RNA, 19 nt, Artificial Sequence
  Synthetic
aaaauaauuaugcagaggg

SEQ ID NO: 326960 - RNA, 20 nt, Artificial Sequence
  Synthetic
caaaauaauuaugcagaggg

SEQ ID NO: 326961 - RNA, 21 nt, Artificial Sequence
  Synthetic
acaaaauaauuaugcagaggg

SEQ ID NO: 326962 - RNA, 22 nt, Artificial Sequence
  Synthetic
aacaaaauaauuaugcagaggg

SEQ ID NO: 326963 - RNA, 23 nt, Artificial Sequence
  Synthetic
aaacaaaauaauuaugcagaggg

SEQ ID NO: 326964 - RNA, 24 nt, Artificial Sequence
  Synthetic
gaaacaaaauaauuaugcagaggg

SEQ ID NO: 326965 - RNA, 18 nt, Artificial Sequence
  Synthetic
auggggccuaucagaggg

SEQ ID NO: 326966 - RNA, 19 nt, Artificial Sequence
  Synthetic
aauggggccuaucagaggg

SEQ ID NO: 326967 - RNA, 20 nt, Artificial Sequence
  Synthetic
caauggggccuaucagaggg

SEQ ID NO: 326968 - RNA, 21 nt, Artificial Sequence
  Synthetic
acaauggggccuaucagaggg

SEQ ID NO: 326969 - RNA, 22 nt, Artificial Sequence
  Synthetic
cacaauggggccuaucagaggg

SEQ ID NO: 326970 - RNA, 23 nt, Artificial Sequence
  Synthetic
acacaauggggccuaucagaggg

SEQ ID NO: 326971 - RNA, 24 nt, Artificial Sequence
  Synthetic
cacacaauggggccuaucagaggg

SEQ ID NO: 326972 - RNA, 18 nt, Artificial Sequence
  Synthetic
cuugagagaaagagaggg

SEQ ID NO: 326973 - RNA, 19 nt, Artificial Sequence
  Synthetic
acuugagagaaagagaggg

SEQ ID NO: 326974 - RNA, 20 nt, Artificial Sequence
  Synthetic
aacuugagagaaagagaggg

SEQ ID NO: 326975 - RNA, 21 nt, Artificial Sequence
  Synthetic
caacuugagagaaagagaggg

SEQ ID NO: 326976 - RNA, 22 nt, Artificial Sequence
  Synthetic
ucaacuugagagaaagagaggg

SEQ ID NO: 326977 - RNA, 23 nt, Artificial Sequence
  Synthetic
aucaacuugagagaaagagaggg

SEQ ID NO: 326978 - RNA, 24 nt, Artificial Sequence
  Synthetic
aaucaacuugagagaaagagaggg

SEQ ID NO: 326979 - RNA, 20 nt, Artificial Sequence
  Synthetic
agagagagagagagagaggg

SEQ ID NO: 326980 - RNA, 21 nt, Artificial Sequence
  Synthetic
cagagagagagagagagaggg

SEQ ID NO: 326981 - RNA, 22 nt, Artificial Sequence
  Synthetic
acagagagagagagagagaggg

SEQ ID NO: 326982 - RNA, 23 nt, Artificial Sequence
  Synthetic
aacagagagagagagagagaggg

SEQ ID NO: 326983 - RNA, 24 nt, Artificial Sequence
  Synthetic
gaacagagagagagagagagaggg

SEQ ID NO: 326984 - RNA, 18 nt, Artificial Sequence
  Synthetic
ggaggaagggagagaggg

SEQ ID NO: 326985 - RNA, 19 nt, Artificial Sequence
  Synthetic
gggaggaagggagagaggg

SEQ ID NO: 326986 - RNA, 20 nt, Artificial Sequence
  Synthetic
agggaggaagggagagaggg

SEQ ID NO: 326987 - RNA, 21 nt, Artificial Sequence
  Synthetic
gagggaggaagggagagaggg

SEQ ID NO: 326988 - RNA, 22 nt, Artificial Sequence
  Synthetic
agagggaggaagggagagaggg

SEQ ID NO: 326989 - RNA, 23 nt, Artificial Sequence
  Synthetic
gagagggaggaagggagagaggg

SEQ ID NO: 326990 - RNA, 24 nt, Artificial Sequence
  Synthetic
agagagggaggaagggagagaggg

SEQ ID NO: 326991 - RNA, 18 nt, Artificial Sequence
  Synthetic
cgggggguggggcgaggg

SEQ ID NO: 326992 - RNA, 19 nt, Artificial Sequence
  Synthetic
ucgggggguggggcgaggg

SEQ ID NO: 326993 - RNA, 20 nt, Artificial Sequence
  Synthetic
gucgggggguggggcgaggg

SEQ ID NO: 326994 - RNA, 21 nt, Artificial Sequence
  Synthetic
ugucgggggguggggcgaggg

SEQ ID NO: 326995 - RNA, 22 nt, Artificial Sequence
  Synthetic
cugucgggggguggggcgaggg

SEQ ID NO: 326996 - RNA, 23 nt, Artificial Sequence
  Synthetic
ccugucgggggguggggcgaggg

SEQ ID NO: 326997 - RNA, 24 nt, Artificial Sequence
  Synthetic
gccugucgggggguggggcgaggg

SEQ ID NO: 326998 - RNA, 18 nt, Artificial Sequence
  Synthetic
uccuuggcuuggcgaggg

SEQ ID NO: 326999 - RNA, 19 nt, Artificial Sequence
  Synthetic
uuccuuggcuuggcgaggg

SEQ ID NO: 327000 - RNA, 20 nt, Artificial Sequence
  Synthetic
uuuccuuggcuuggcgaggg

SEQ ID NO: 327001 - RNA, 21 nt, Artificial Sequence
  Synthetic
uuuuccuuggcuuggcgaggg

SEQ ID NO: 327002 - RNA, 22 nt, Artificial Sequence
  Synthetic
cuuuuccuuggcuuggcgaggg

SEQ ID NO: 327003 - RNA, 23 nt, Artificial Sequence
  Synthetic
ccuuuuccuuggcuuggcgaggg

SEQ ID NO: 327004 - RNA, 24 nt, Artificial Sequence
  Synthetic
cccuuuuccuuggcuuggcgaggg

SEQ ID NO: 327005 - RNA, 18 nt, Artificial Sequence
  Synthetic
accggggccugucgaggg

SEQ ID NO: 327006 - RNA, 19 nt, Artificial Sequence
  Synthetic
caccggggccugucgaggg

SEQ ID NO: 327007 - RNA, 20 nt, Artificial Sequence
  Synthetic
acaccggggccugucgaggg

SEQ ID NO: 327008 - RNA, 21 nt, Artificial Sequence
  Synthetic
cacaccggggccugucgaggg

SEQ ID NO: 327009 - RNA, 22 nt, Artificial Sequence
  Synthetic
acacaccggggccugucgaggg

SEQ ID NO: 327010 - RNA, 23 nt, Artificial Sequence
  Synthetic
cacacaccggggccugucgaggg

SEQ ID NO: 327011 - RNA, 24 nt, Artificial Sequence
  Synthetic
ucacacaccggggccugucgaggg

SEQ ID NO: 327012 - RNA, 18 nt, Artificial Sequence
  Synthetic
uuagaaugaauucgaggg

SEQ ID NO: 327013 - RNA, 19 nt, Artificial Sequence
  Synthetic
auuagaaugaauucgaggg

SEQ ID NO: 327014 - RNA, 20 nt, Artificial Sequence
  Synthetic
uauuagaaugaauucgaggg

SEQ ID NO: 327015 - RNA, 21 nt, Artificial Sequence
  Synthetic
uuauuagaaugaauucgaggg

SEQ ID NO: 327016 - RNA, 22 nt, Artificial Sequence
  Synthetic
auuauuagaaugaauucgaggg

SEQ ID NO: 327017 - RNA, 23 nt, Artificial Sequence
  Synthetic
aauuauuagaaugaauucgaggg

SEQ ID NO: 327018 - RNA, 24 nt, Artificial Sequence
  Synthetic
aaauuauuagaaugaauucgaggg

SEQ ID NO: 327019 - RNA, 18 nt, Artificial Sequence
  Synthetic
uaauucacacaaggaggg

SEQ ID NO: 327020 - RNA, 19 nt, Artificial Sequence
  Synthetic
uuaauucacacaaggaggg

SEQ ID NO: 327021 - RNA, 20 nt, Artificial Sequence
  Synthetic
uuuaauucacacaaggaggg

SEQ ID NO: 327022 - RNA, 21 nt, Artificial Sequence
  Synthetic
uuuuaauucacacaaggaggg

SEQ ID NO: 327023 - RNA, 22 nt, Artificial Sequence
  Synthetic
guuuuaauucacacaaggaggg

SEQ ID NO: 327024 - RNA, 23 nt, Artificial Sequence
  Synthetic
cguuuuaauucacacaaggaggg

SEQ ID NO: 327025 - RNA, 24 nt, Artificial Sequence
  Synthetic
ucguuuuaauucacacaaggaggg

SEQ ID NO: 327026 - RNA, 18 nt, Artificial Sequence
  Synthetic
agagugagggaaggaggg

SEQ ID NO: 327027 - RNA, 19 nt, Artificial Sequence
  Synthetic
gagagugagggaaggaggg

SEQ ID NO: 327028 - RNA, 20 nt, Artificial Sequence
  Synthetic
agagagugagggaaggaggg

SEQ ID NO: 327029 - RNA, 21 nt, Artificial Sequence
  Synthetic
aagagagugagggaaggaggg

SEQ ID NO: 327030 - RNA, 22 nt, Artificial Sequence
  Synthetic
aaagagagugagggaaggaggg

SEQ ID NO: 327031 - RNA, 23 nt, Artificial Sequence
  Synthetic
gaaagagagugagggaaggaggg

SEQ ID NO: 327032 - RNA, 24 nt, Artificial Sequence
  Synthetic
agaaagagagugagggaaggaggg

SEQ ID NO: 327033 - RNA, 18 nt, Artificial Sequence
  Synthetic
uuacuuauuacaggaggg

SEQ ID NO: 327034 - RNA, 19 nt, Artificial Sequence
  Synthetic
cuuacuuauuacaggaggg

SEQ ID NO: 327035 - RNA, 20 nt, Artificial Sequence
  Synthetic
ucuuacuuauuacaggaggg

SEQ ID NO: 327036 - RNA, 21 nt, Artificial Sequence
  Synthetic
cucuuacuuauuacaggaggg

SEQ ID NO: 327037 - RNA, 22 nt, Artificial Sequence
  Synthetic
gcucuuacuuauuacaggaggg

SEQ ID NO: 327038 - RNA, 23 nt, Artificial Sequence
  Synthetic
agcucuuacuuauuacaggaggg

SEQ ID NO: 327039 - RNA, 24 nt, Artificial Sequence
  Synthetic
aagcucuuacuuauuacaggaggg

SEQ ID NO: 327040 - RNA, 18 nt, Artificial Sequence
  Synthetic
acuccgaaaggaggaggg

SEQ ID NO: 327041 - RNA, 19 nt, Artificial Sequence
  Synthetic
cacuccgaaaggaggaggg

SEQ ID NO: 327042 - RNA, 20 nt, Artificial Sequence
  Synthetic
gcacuccgaaaggaggaggg

SEQ ID NO: 327043 - RNA, 21 nt, Artificial Sequence
  Synthetic
ggcacuccgaaaggaggaggg

SEQ ID NO: 327044 - RNA, 22 nt, Artificial Sequence
  Synthetic
aggcacuccgaaaggaggaggg

SEQ ID NO: 327045 - RNA, 23 nt, Artificial Sequence
  Synthetic
uaggcacuccgaaaggaggaggg

SEQ ID NO: 327046 - RNA, 24 nt, Artificial Sequence
  Synthetic
uuaggcacuccgaaaggaggaggg

SEQ ID NO: 327047 - RNA, 18 nt, Artificial Sequence
  Synthetic
gugguagcaggaggaggg

SEQ ID NO: 327048 - RNA, 19 nt, Artificial Sequence
  Synthetic
ugugguagcaggaggaggg

SEQ ID NO: 327049 - RNA, 20 nt, Artificial Sequence
  Synthetic
cugugguagcaggaggaggg

SEQ ID NO: 327050 - RNA, 21 nt, Artificial Sequence
  Synthetic
acugugguagcaggaggaggg

SEQ ID NO: 327051 - RNA, 22 nt, Artificial Sequence
  Synthetic
gacugugguagcaggaggaggg

SEQ ID NO: 327052 - RNA, 23 nt, Artificial Sequence
  Synthetic
agacugugguagcaggaggaggg

SEQ ID NO: 327053 - RNA, 24 nt, Artificial Sequence
  Synthetic
cagacugugguagcaggaggaggg

SEQ ID NO: 327054 - RNA, 18 nt, Artificial Sequence
  Synthetic
aaaggaaggaagggaggg

SEQ ID NO: 327055 - RNA, 19 nt, Artificial Sequence
  Synthetic
gaaaggaaggaagggaggg

SEQ ID NO: 327056 - RNA, 20 nt, Artificial Sequence
  Synthetic
agaaaggaaggaagggaggg

SEQ ID NO: 327057 - RNA, 21 nt, Artificial Sequence
  Synthetic
aagaaaggaaggaagggaggg

SEQ ID NO: 327058 - RNA, 22 nt, Artificial Sequence
  Synthetic
aaagaaaggaaggaagggaggg

SEQ ID NO: 327059 - RNA, 23 nt, Artificial Sequence
  Synthetic
caaagaaaggaaggaagggaggg

SEQ ID NO: 327060 - RNA, 24 nt, Artificial Sequence
  Synthetic
acaaagaaaggaaggaagggaggg

SEQ ID NO: 327061 - RNA, 18 nt, Artificial Sequence
  Synthetic
gauaaaaagcagggaggg

SEQ ID NO: 327062 - RNA, 19 nt, Artificial Sequence
  Synthetic
ugauaaaaagcagggaggg

SEQ ID NO: 327063 - RNA, 20 nt, Artificial Sequence
  Synthetic
gugauaaaaagcagggaggg

SEQ ID NO: 327064 - RNA, 21 nt, Artificial Sequence
  Synthetic
ggugauaaaaagcagggaggg

SEQ ID NO: 327065 - RNA, 22 nt, Artificial Sequence
  Synthetic
gggugauaaaaagcagggaggg

SEQ ID NO: 327066 - RNA, 23 nt, Artificial Sequence
  Synthetic
ugggugauaaaaagcagggaggg

SEQ ID NO: 327067 - RNA, 24 nt, Artificial Sequence
  Synthetic
augggugauaaaaagcagggaggg

SEQ ID NO: 327068 - RNA, 18 nt, Artificial Sequence
  Synthetic
cagaugagagagggaggg

SEQ ID NO: 327069 - RNA, 19 nt, Artificial Sequence
  Synthetic
acagaugagagagggaggg

SEQ ID NO: 327070 - RNA, 20 nt, Artificial Sequence
  Synthetic
cacagaugagagagggaggg

SEQ ID NO: 327071 - RNA, 21 nt, Artificial Sequence
  Synthetic
acacagaugagagagggaggg

SEQ ID NO: 327072 - RNA, 22 nt, Artificial Sequence
  Synthetic
aacacagaugagagagggaggg

SEQ ID NO: 327073 - RNA, 23 nt, Artificial Sequence
  Synthetic
caacacagaugagagagggaggg

SEQ ID NO: 327074 - RNA, 24 nt, Artificial Sequence
  Synthetic
gcaacacagaugagagagggaggg

SEQ ID NO: 327075 - RNA, 18 nt, Artificial Sequence
  Synthetic
gaaggaagggagggaggg

SEQ ID NO: 327076 - RNA, 19 nt, Artificial Sequence
  Synthetic
ggaaggaagggagggaggg

SEQ ID NO: 327077 - RNA, 20 nt, Artificial Sequence
  Synthetic
aggaaggaagggagggaggg

SEQ ID NO: 327078 - RNA, 21 nt, Artificial Sequence
  Synthetic
aaggaaggaagggagggaggg

SEQ ID NO: 327079 - RNA, 22 nt, Artificial Sequence
  Synthetic
aaaggaaggaagggagggaggg

SEQ ID NO: 327080 - RNA, 23 nt, Artificial Sequence
  Synthetic
gaaaggaaggaagggagggaggg

SEQ ID NO: 327081 - RNA, 24 nt, Artificial Sequence
  Synthetic
agaaaggaaggaagggagggaggg

SEQ ID NO: 327082 - RNA, 18 nt, Artificial Sequence
  Synthetic
gaagggagggagggaggg

SEQ ID NO: 327083 - RNA, 19 nt, Artificial Sequence
  Synthetic
ggaagggagggagggaggg

SEQ ID NO: 327084 - RNA, 20 nt, Artificial Sequence
  Synthetic
aggaagggagggagggaggg

SEQ ID NO: 327085 - RNA, 21 nt, Artificial Sequence
  Synthetic
aaggaagggagggagggaggg

SEQ ID NO: 327086 - RNA, 22 nt, Artificial Sequence
  Synthetic
gaaggaagggagggagggaggg

SEQ ID NO: 327087 - RNA, 23 nt, Artificial Sequence
  Synthetic
ggaaggaagggagggagggaggg

SEQ ID NO: 327088 - RNA, 24 nt, Artificial Sequence
  Synthetic
aggaaggaagggagggagggaggg

SEQ ID NO: 327089 - RNA, 19 nt, Artificial Sequence
  Synthetic
gggagggagggagggaggg

SEQ ID NO: 327090 - RNA, 20 nt, Artificial Sequence
  Synthetic
agggagggagggagggaggg

SEQ ID NO: 327091 - RNA, 21 nt, Artificial Sequence
  Synthetic
aagggagggagggagggaggg

SEQ ID NO: 327092 - RNA, 22 nt, Artificial Sequence
  Synthetic
gaagggagggagggagggaggg

SEQ ID NO: 327093 - RNA, 23 nt, Artificial Sequence
  Synthetic
ggaagggagggagggagggaggg

SEQ ID NO: 327094 - RNA, 24 nt, Artificial Sequence
  Synthetic
aggaagggagggagggagggaggg

SEQ ID NO: 327095 - RNA, 21 nt, Artificial Sequence
  Synthetic
gagggagggagggagggaggg

SEQ ID NO: 327096 - RNA, 22 nt, Artificial Sequence
  Synthetic
ggagggagggagggagggaggg

SEQ ID NO: 327097 - RNA, 23 nt, Artificial Sequence
  Synthetic
gggagggagggagggagggaggg

SEQ ID NO: 327098 - RNA, 24 nt, Artificial Sequence
  Synthetic
agggagggagggagggagggaggg

SEQ ID NO: 327099 - RNA, 18 nt, Artificial Sequence
  Synthetic
cuuucuuaugagggaggg

SEQ ID NO: 327100 - RNA, 19 nt, Artificial Sequence
  Synthetic
ccuuucuuaugagggaggg

SEQ ID NO: 327101 - RNA, 20 nt, Artificial Sequence
  Synthetic
cccuuucuuaugagggaggg

SEQ ID NO: 327102 - RNA, 21 nt, Artificial Sequence
  Synthetic
ucccuuucuuaugagggaggg

SEQ ID NO: 327103 - RNA, 22 nt, Artificial Sequence
  Synthetic
uucccuuucuuaugagggaggg

SEQ ID NO: 327104 - RNA, 23 nt, Artificial Sequence
  Synthetic
guucccuuucuuaugagggaggg

SEQ ID NO: 327105 - RNA, 24 nt, Artificial Sequence
  Synthetic
uguucccuuucuuaugagggaggg

SEQ ID NO: 327106 - RNA, 18 nt, Artificial Sequence
  Synthetic
gaaaggaggaggggaggg

SEQ ID NO: 327107 - RNA, 19 nt, Artificial Sequence
  Synthetic
cgaaaggaggaggggaggg

SEQ ID NO: 327108 - RNA, 20 nt, Artificial Sequence
  Synthetic
ccgaaaggaggaggggaggg

SEQ ID NO: 327109 - RNA, 21 nt, Artificial Sequence
  Synthetic
uccgaaaggaggaggggaggg

SEQ ID NO: 327110 - RNA, 22 nt, Artificial Sequence
  Synthetic
cuccgaaaggaggaggggaggg

SEQ ID NO: 327111 - RNA, 23 nt, Artificial Sequence
  Synthetic
acuccgaaaggaggaggggaggg

SEQ ID NO: 327112 - RNA, 24 nt, Artificial Sequence
  Synthetic
cacuccgaaaggaggaggggaggg

SEQ ID NO: 327113 - RNA, 18 nt, Artificial Sequence
  Synthetic
cuccgggguaggggaggg

SEQ ID NO: 327114 - RNA, 19 nt, Artificial Sequence
  Synthetic
gcuccgggguaggggaggg

SEQ ID NO: 327115 - RNA, 20 nt, Artificial Sequence
  Synthetic
ggcuccgggguaggggaggg

SEQ ID NO: 327116 - RNA, 21 nt, Artificial Sequence
  Synthetic
aggcuccgggguaggggaggg

SEQ ID NO: 327117 - RNA, 22 nt, Artificial Sequence
  Synthetic
gaggcuccgggguaggggaggg

SEQ ID NO: 327118 - RNA, 23 nt, Artificial Sequence
  Synthetic
ggaggcuccgggguaggggaggg

SEQ ID NO: 327119 - RNA, 24 nt, Artificial Sequence
  Synthetic
gggaggcuccgggguaggggaggg

SEQ ID NO: 327120 - RNA, 18 nt, Artificial Sequence
  Synthetic
gguggggucgggggaggg

SEQ ID NO: 327121 - RNA, 19 nt, Artificial Sequence
  Synthetic
ugguggggucgggggaggg

SEQ ID NO: 327122 - RNA, 20 nt, Artificial Sequence
  Synthetic
gugguggggucgggggaggg

SEQ ID NO: 327123 - RNA, 21 nt, Artificial Sequence
  Synthetic
ugugguggggucgggggaggg

SEQ ID NO: 327124 - RNA, 22 nt, Artificial Sequence
  Synthetic
cugugguggggucgggggaggg

SEQ ID NO: 327125 - RNA, 23 nt, Artificial Sequence
  Synthetic
acugugguggggucgggggaggg

SEQ ID NO: 327126 - RNA, 24 nt, Artificial Sequence
  Synthetic
gacugugguggggucgggggaggg

SEQ ID NO: 327127 - RNA, 18 nt, Artificial Sequence
  Synthetic
uguggggucgggggaggg

SEQ ID NO: 327128 - RNA, 19 nt, Artificial Sequence
  Synthetic
uuguggggucgggggaggg

SEQ ID NO: 327129 - RNA, 20 nt, Artificial Sequence
  Synthetic
guuguggggucgggggaggg

SEQ ID NO: 327130 - RNA, 21 nt, Artificial Sequence
  Synthetic
uguuguggggucgggggaggg

SEQ ID NO: 327131 - RNA, 22 nt, Artificial Sequence
  Synthetic
cuguuguggggucgggggaggg

SEQ ID NO: 327132 - RNA, 23 nt, Artificial Sequence
  Synthetic
ccuguuguggggucgggggaggg

SEQ ID NO: 327133 - RNA, 24 nt, Artificial Sequence
  Synthetic
gccuguuguggggucgggggaggg

SEQ ID NO: 327134 - RNA, 18 nt, Artificial Sequence
  Synthetic
cgugggguggggggaggg

SEQ ID NO: 327135 - RNA, 19 nt, Artificial Sequence
  Synthetic
ucgugggguggggggaggg

SEQ ID NO: 327136 - RNA, 20 nt, Artificial Sequence
  Synthetic
gucgugggguggggggaggg

SEQ ID NO: 327137 - RNA, 21 nt, Artificial Sequence
  Synthetic
ugucgugggguggggggaggg

SEQ ID NO: 327138 - RNA, 22 nt, Artificial Sequence
  Synthetic
cugucgugggguggggggaggg

SEQ ID NO: 327139 - RNA, 23 nt, Artificial Sequence
  Synthetic
ccugucgugggguggggggaggg

SEQ ID NO: 327140 - RNA, 24 nt, Artificial Sequence
  Synthetic
gccugucgugggguggggggaggg

SEQ ID NO: 327141 - RNA, 18 nt, Artificial Sequence
  Synthetic
ggugggguggggggaggg

SEQ ID NO: 327142 - RNA, 19 nt, Artificial Sequence
  Synthetic
uggugggguggggggaggg

SEQ ID NO: 327143 - RNA, 20 nt, Artificial Sequence
  Synthetic
guggugggguggggggaggg

SEQ ID NO: 327144 - RNA, 21 nt, Artificial Sequence
  Synthetic
uguggugggguggggggaggg

SEQ ID NO: 327145 - RNA, 22 nt, Artificial Sequence
  Synthetic
cuguggugggguggggggaggg

SEQ ID NO: 327146 - RNA, 23 nt, Artificial Sequence
  Synthetic
acuguggugggguggggggaggg

SEQ ID NO: 327147 - RNA, 24 nt, Artificial Sequence
  Synthetic
gacuguggugggguggggggaggg

SEQ ID NO: 327148 - RNA, 24 nt, Artificial Sequence
  Synthetic
gacuguugugggguggggggaggg

SEQ ID NO: 327149 - RNA, 18 nt, Artificial Sequence
  Synthetic
agagaaagugggggaggg

SEQ ID NO: 327150 - RNA, 19 nt, Artificial Sequence
  Synthetic
gagagaaagugggggaggg

SEQ ID NO: 327151 - RNA, 20 nt, Artificial Sequence
  Synthetic
ugagagaaagugggggaggg

SEQ ID NO: 327152 - RNA, 21 nt, Artificial Sequence
  Synthetic
gugagagaaagugggggaggg

SEQ ID NO: 327153 - RNA, 22 nt, Artificial Sequence
  Synthetic
agugagagaaagugggggaggg

SEQ ID NO: 327154 - RNA, 23 nt, Artificial Sequence
  Synthetic
cagugagagaaagugggggaggg

SEQ ID NO: 327155 - RNA, 24 nt, Artificial Sequence
  Synthetic
ucagugagagaaagugggggaggg

SEQ ID NO: 327156 - RNA, 18 nt, Artificial Sequence
  Synthetic
agaguacggcugggaggg

SEQ ID NO: 327157 - RNA, 19 nt, Artificial Sequence
  Synthetic
uagaguacggcugggaggg

SEQ ID NO: 327158 - RNA, 20 nt, Artificial Sequence
  Synthetic
uuagaguacggcugggaggg

SEQ ID NO: 327159 - RNA, 21 nt, Artificial Sequence
  Synthetic
uuuagaguacggcugggaggg

SEQ ID NO: 327160 - RNA, 22 nt, Artificial Sequence
  Synthetic
guuuagaguacggcugggaggg

SEQ ID NO: 327161 - RNA, 23 nt, Artificial Sequence
  Synthetic
uguuuagaguacggcugggaggg

SEQ ID NO: 327162 - RNA, 24 nt, Artificial Sequence
  Synthetic
uuguuuagaguacggcugggaggg

SEQ ID NO: 327163 - RNA, 18 nt, Artificial Sequence
  Synthetic
aaguauguuuugggaggg

SEQ ID NO: 327164 - RNA, 19 nt, Artificial Sequence
  Synthetic
aaaguauguuuugggaggg

SEQ ID NO: 327165 - RNA, 20 nt, Artificial Sequence
  Synthetic
gaaaguauguuuugggaggg

SEQ ID NO: 327166 - RNA, 21 nt, Artificial Sequence
  Synthetic
ggaaaguauguuuugggaggg

SEQ ID NO: 327167 - RNA, 22 nt, Artificial Sequence
  Synthetic
uggaaaguauguuuugggaggg

SEQ ID NO: 327168 - RNA, 23 nt, Artificial Sequence
  Synthetic
cuggaaaguauguuuugggaggg

SEQ ID NO: 327169 - RNA, 24 nt, Artificial Sequence
  Synthetic
acuggaaaguauguuuugggaggg

SEQ ID NO: 327170 - RNA, 18 nt, Artificial Sequence
  Synthetic
cuggggccuacuggaggg

SEQ ID NO: 327171 - RNA, 19 nt, Artificial Sequence
  Synthetic
acuggggccuacuggaggg

SEQ ID NO: 327172 - RNA, 20 nt, Artificial Sequence
  Synthetic
cacuggggccuacuggaggg

SEQ ID NO: 327173 - RNA, 21 nt, Artificial Sequence
  Synthetic
acacuggggccuacuggaggg

SEQ ID NO: 327174 - RNA, 22 nt, Artificial Sequence
  Synthetic
cacacuggggccuacuggaggg

SEQ ID NO: 327175 - RNA, 23 nt, Artificial Sequence
  Synthetic
acacacuggggccuacuggaggg

SEQ ID NO: 327176 - RNA, 24 nt, Artificial Sequence
  Synthetic
cacacacuggggccuacuggaggg

SEQ ID NO: 327177 - RNA, 18 nt, Artificial Sequence
  Synthetic
ugguuugagaguggaggg

SEQ ID NO: 327178 - RNA, 19 nt, Artificial Sequence
  Synthetic
gugguuugagaguggaggg

SEQ ID NO: 327179 - RNA, 20 nt, Artificial Sequence
  Synthetic
ggugguuugagaguggaggg

SEQ ID NO: 327180 - RNA, 21 nt, Artificial Sequence
  Synthetic
gggugguuugagaguggaggg

SEQ ID NO: 327181 - RNA, 22 nt, Artificial Sequence
  Synthetic
agggugguuugagaguggaggg

SEQ ID NO: 327182 - RNA, 23 nt, Artificial Sequence
  Synthetic
aagggugguuugagaguggaggg

SEQ ID NO: 327183 - RNA, 24 nt, Artificial Sequence
  Synthetic
gaagggugguuugagaguggaggg

SEQ ID NO: 327184 - RNA, 18 nt, Artificial Sequence
  Synthetic
uaugguugggguggaggg

SEQ ID NO: 327185 - RNA, 19 nt, Artificial Sequence
  Synthetic
guaugguugggguggaggg

SEQ ID NO: 327186 - RNA, 20 nt, Artificial Sequence
  Synthetic
gguaugguugggguggaggg

SEQ ID NO: 327187 - RNA, 21 nt, Artificial Sequence
  Synthetic
agguaugguugggguggaggg

SEQ ID NO: 327188 - RNA, 22 nt, Artificial Sequence
  Synthetic
gagguaugguugggguggaggg

SEQ ID NO: 327189 - RNA, 23 nt, Artificial Sequence
  Synthetic
ugagguaugguugggguggaggg

SEQ ID NO: 327190 - RNA, 24 nt, Artificial Sequence
  Synthetic
gugagguaugguugggguggaggg

SEQ ID NO: 327191 - RNA, 18 nt, Artificial Sequence
  Synthetic
gggggugagauuggaggg

SEQ ID NO: 327192 - RNA, 19 nt, Artificial Sequence
  Synthetic
ugggggugagauuggaggg

SEQ ID NO: 327193 - RNA, 20 nt, Artificial Sequence
  Synthetic
gugggggugagauuggaggg

SEQ ID NO: 327194 - RNA, 21 nt, Artificial Sequence
  Synthetic
ggugggggugagauuggaggg

SEQ ID NO: 327195 - RNA, 22 nt, Artificial Sequence
  Synthetic
gggugggggugagauuggaggg

SEQ ID NO: 327196 - RNA, 23 nt, Artificial Sequence
  Synthetic
ggggugggggugagauuggaggg

SEQ ID NO: 327197 - RNA, 24 nt, Artificial Sequence
  Synthetic
uggggugggggugagauuggaggg

SEQ ID NO: 327198 - RNA, 18 nt, Artificial Sequence
  Synthetic
acacuggagcuuggaggg

SEQ ID NO: 327199 - RNA, 19 nt, Artificial Sequence
  Synthetic
gacacuggagcuuggaggg

SEQ ID NO: 327200 - RNA, 20 nt, Artificial Sequence
  Synthetic
agacacuggagcuuggaggg

SEQ ID NO: 327201 - RNA, 21 nt, Artificial Sequence
  Synthetic
aagacacuggagcuuggaggg

SEQ ID NO: 327202 - RNA, 22 nt, Artificial Sequence
  Synthetic
gaagacacuggagcuuggaggg

SEQ ID NO: 327203 - RNA, 23 nt, Artificial Sequence
  Synthetic
ggaagacacuggagcuuggaggg

SEQ ID NO: 327204 - RNA, 24 nt, Artificial Sequence
  Synthetic
gggaagacacuggagcuuggaggg

SEQ ID NO: 327205 - RNA, 18 nt, Artificial Sequence
  Synthetic
aucuaaaugccaugaggg

SEQ ID NO: 327206 - RNA, 19 nt, Artificial Sequence
  Synthetic
aaucuaaaugccaugaggg

SEQ ID NO: 327207 - RNA, 20 nt, Artificial Sequence
  Synthetic
uaaucuaaaugccaugaggg

SEQ ID NO: 327208 - RNA, 21 nt, Artificial Sequence
  Synthetic
uuaaucuaaaugccaugaggg

SEQ ID NO: 327209 - RNA, 22 nt, Artificial Sequence
  Synthetic
auuaaucuaaaugccaugaggg

SEQ ID NO: 327210 - RNA, 23 nt, Artificial Sequence
  Synthetic
aauuaaucuaaaugccaugaggg

SEQ ID NO: 327211 - RNA, 24 nt, Artificial Sequence
  Synthetic
aaauuaaucuaaaugccaugaggg

SEQ ID NO: 327212 - RNA, 18 nt, Artificial Sequence
  Synthetic
cauaggcauucaugaggg

SEQ ID NO: 327213 - RNA, 19 nt, Artificial Sequence
  Synthetic
ucauaggcauucaugaggg

SEQ ID NO: 327214 - RNA, 20 nt, Artificial Sequence
  Synthetic
cucauaggcauucaugaggg

SEQ ID NO: 327215 - RNA, 21 nt, Artificial Sequence
  Synthetic
ccucauaggcauucaugaggg

SEQ ID NO: 327216 - RNA, 22 nt, Artificial Sequence
  Synthetic
cccucauaggcauucaugaggg

SEQ ID NO: 327217 - RNA, 23 nt, Artificial Sequence
  Synthetic
acccucauaggcauucaugaggg

SEQ ID NO: 327218 - RNA, 24 nt, Artificial Sequence
  Synthetic
gacccucauaggcauucaugaggg

SEQ ID NO: 327219 - RNA, 18 nt, Artificial Sequence
  Synthetic
uuaaaagcuucaugaggg

SEQ ID NO: 327220 - RNA, 19 nt, Artificial Sequence
  Synthetic
auuaaaagcuucaugaggg

SEQ ID NO: 327221 - RNA, 20 nt, Artificial Sequence
  Synthetic
gauuaaaagcuucaugaggg

SEQ ID NO: 327222 - RNA, 21 nt, Artificial Sequence
  Synthetic
agauuaaaagcuucaugaggg

SEQ ID NO: 327223 - RNA, 22 nt, Artificial Sequence
  Synthetic
aagauuaaaagcuucaugaggg

SEQ ID NO: 327224 - RNA, 23 nt, Artificial Sequence
  Synthetic
caagauuaaaagcuucaugaggg

SEQ ID NO: 327225 - RNA, 24 nt, Artificial Sequence
  Synthetic
gcaagauuaaaagcuucaugaggg

SEQ ID NO: 327226 - RNA, 18 nt, Artificial Sequence
  Synthetic
agaauucagugaugaggg

SEQ ID NO: 327227 - RNA, 19 nt, Artificial Sequence
  Synthetic
cagaauucagugaugaggg

SEQ ID NO: 327228 - RNA, 20 nt, Artificial Sequence
  Synthetic
acagaauucagugaugaggg

SEQ ID NO: 327229 - RNA, 21 nt, Artificial Sequence
  Synthetic
uacagaauucagugaugaggg

SEQ ID NO: 327230 - RNA, 22 nt, Artificial Sequence
  Synthetic
cuacagaauucagugaugaggg

SEQ ID NO: 327231 - RNA, 23 nt, Artificial Sequence
  Synthetic
ucuacagaauucagugaugaggg

SEQ ID NO: 327232 - RNA, 24 nt, Artificial Sequence
  Synthetic
aucuacagaauucagugaugaggg

SEQ ID NO: 327233 - RNA, 18 nt, Artificial Sequence
  Synthetic
uucccuuucuuaugaggg

SEQ ID NO: 327234 - RNA, 19 nt, Artificial Sequence
  Synthetic
guucccuuucuuaugaggg

SEQ ID NO: 327235 - RNA, 20 nt, Artificial Sequence
  Synthetic
uguucccuuucuuaugaggg

SEQ ID NO: 327236 - RNA, 21 nt, Artificial Sequence
  Synthetic
cuguucccuuucuuaugaggg

SEQ ID NO: 327237 - RNA, 22 nt, Artificial Sequence
  Synthetic
acuguucccuuucuuaugaggg

SEQ ID NO: 327238 - RNA, 23 nt, Artificial Sequence
  Synthetic
uacuguucccuuucuuaugaggg

SEQ ID NO: 327239 - RNA, 24 nt, Artificial Sequence
  Synthetic
uuacuguucccuuucuuaugaggg

SEQ ID NO: 327240 - RNA, 18 nt, Artificial Sequence
  Synthetic
agauggagaaacugaggg

SEQ ID NO: 327241 - RNA, 19 nt, Artificial Sequence
  Synthetic
aagauggagaaacugaggg

SEQ ID NO: 327242 - RNA, 20 nt, Artificial Sequence
  Synthetic
caagauggagaaacugaggg

SEQ ID NO: 327243 - RNA, 21 nt, Artificial Sequence
  Synthetic
ccaagauggagaaacugaggg

SEQ ID NO: 327244 - RNA, 22 nt, Artificial Sequence
  Synthetic
uccaagauggagaaacugaggg

SEQ ID NO: 327245 - RNA, 23 nt, Artificial Sequence
  Synthetic
uuccaagauggagaaacugaggg

SEQ ID NO: 327246 - RNA, 24 nt, Artificial Sequence
  Synthetic
uuuccaagauggagaaacugaggg

SEQ ID NO: 327247 - RNA, 18 nt, Artificial Sequence
  Synthetic
guuuuaaaucacugaggg

SEQ ID NO: 327248 - RNA, 19 nt, Artificial Sequence
  Synthetic
uguuuuaaaucacugaggg

SEQ ID NO: 327249 - RNA, 20 nt, Artificial Sequence
  Synthetic
uuguuuuaaaucacugaggg

SEQ ID NO: 327250 - RNA, 21 nt, Artificial Sequence
  Synthetic
cuuguuuuaaaucacugaggg

SEQ ID NO: 327251 - RNA, 22 nt, Artificial Sequence
  Synthetic
gcuuguuuuaaaucacugaggg

SEQ ID NO: 327252 - RNA, 23 nt, Artificial Sequence
  Synthetic
agcuuguuuuaaaucacugaggg

SEQ ID NO: 327253 - RNA, 24 nt, Artificial Sequence
  Synthetic
cagcuuguuuuaaaucacugaggg

SEQ ID NO: 327254 - RNA, 18 nt, Artificial Sequence
  Synthetic
acaguuugaagcugaggg

SEQ ID NO: 327255 - RNA, 19 nt, Artificial Sequence
  Synthetic
aacaguuugaagcugaggg

SEQ ID NO: 327256 - RNA, 20 nt, Artificial Sequence
  Synthetic
aaacaguuugaagcugaggg

SEQ ID NO: 327257 - RNA, 21 nt, Artificial Sequence
  Synthetic
uaaacaguuugaagcugaggg

SEQ ID NO: 327258 - RNA, 22 nt, Artificial Sequence
  Synthetic
cuaaacaguuugaagcugaggg

SEQ ID NO: 327259 - RNA, 23 nt, Artificial Sequence
  Synthetic
gcuaaacaguuugaagcugaggg

SEQ ID NO: 327260 - RNA, 24 nt, Artificial Sequence
  Synthetic
ugcuaaacaguuugaagcugaggg

SEQ ID NO: 327261 - RNA, 18 nt, Artificial Sequence
  Synthetic
ucauuaggaugcugaggg

SEQ ID NO: 327262 - RNA, 19 nt, Artificial Sequence
  Synthetic
gucauuaggaugcugaggg

SEQ ID NO: 327263 - RNA, 20 nt, Artificial Sequence
  Synthetic
ggucauuaggaugcugaggg

SEQ ID NO: 327264 - RNA, 21 nt, Artificial Sequence
  Synthetic
aggucauuaggaugcugaggg

SEQ ID NO: 327265 - RNA, 22 nt, Artificial Sequence
  Synthetic
caggucauuaggaugcugaggg

SEQ ID NO: 327266 - RNA, 23 nt, Artificial Sequence
  Synthetic
acaggucauuaggaugcugaggg

SEQ ID NO: 327267 - RNA, 24 nt, Artificial Sequence
  Synthetic
cacaggucauuaggaugcugaggg

SEQ ID NO: 327268 - RNA, 18 nt, Artificial Sequence
  Synthetic
gaagaaagagagugaggg

SEQ ID NO: 327269 - RNA, 19 nt, Artificial Sequence
  Synthetic
ggaagaaagagagugaggg

SEQ ID NO: 327270 - RNA, 20 nt, Artificial Sequence
  Synthetic
aggaagaaagagagugaggg

SEQ ID NO: 327271 - RNA, 21 nt, Artificial Sequence
  Synthetic
aaggaagaaagagagugaggg

SEQ ID NO: 327272 - RNA, 22 nt, Artificial Sequence
  Synthetic
uaaggaagaaagagagugaggg

SEQ ID NO: 327273 - RNA, 23 nt, Artificial Sequence
  Synthetic
guaaggaagaaagagagugaggg

SEQ ID NO: 327274 - RNA, 24 nt, Artificial Sequence
  Synthetic
aguaaggaagaaagagagugaggg

SEQ ID NO: 327275 - RNA, 18 nt, Artificial Sequence
  Synthetic
caaacccacucgugaggg

SEQ ID NO: 327276 - RNA, 19 nt, Artificial Sequence
  Synthetic
ccaaacccacucgugaggg

SEQ ID NO: 327277 - RNA, 20 nt, Artificial Sequence
  Synthetic
accaaacccacucgugaggg

SEQ ID NO: 327278 - RNA, 21 nt, Artificial Sequence
  Synthetic
aaccaaacccacucgugaggg

SEQ ID NO: 327279 - RNA, 22 nt, Artificial Sequence
  Synthetic
gaaccaaacccacucgugaggg

SEQ ID NO: 327280 - RNA, 23 nt, Artificial Sequence
  Synthetic
ggaaccaaacccacucgugaggg

SEQ ID NO: 327281 - RNA, 24 nt, Artificial Sequence
  Synthetic
gggaaccaaacccacucgugaggg

SEQ ID NO: 327282 - RNA, 18 nt, Artificial Sequence
  Synthetic
guuaccucugggugaggg

SEQ ID NO: 327283 - RNA, 19 nt, Artificial Sequence
  Synthetic
gguuaccucugggugaggg

SEQ ID NO: 327284 - RNA, 20 nt, Artificial Sequence
  Synthetic
ugguuaccucugggugaggg

SEQ ID NO: 327285 - RNA, 21 nt, Artificial Sequence
  Synthetic
gugguuaccucugggugaggg

SEQ ID NO: 327286 - RNA, 22 nt, Artificial Sequence
  Synthetic
agugguuaccucugggugaggg

SEQ ID NO: 327287 - RNA, 23 nt, Artificial Sequence
  Synthetic
aagugguuaccucugggugaggg

SEQ ID NO: 327288 - RNA, 24 nt, Artificial Sequence
  Synthetic
aaagugguuaccucugggugaggg

SEQ ID NO: 327289 - RNA, 18 nt, Artificial Sequence
  Synthetic
ucuguggcaaugugaggg

SEQ ID NO: 327290 - RNA, 19 nt, Artificial Sequence
  Synthetic
aucuguggcaaugugaggg

SEQ ID NO: 327291 - RNA, 20 nt, Artificial Sequence
  Synthetic
gaucuguggcaaugugaggg

SEQ ID NO: 327292 - RNA, 21 nt, Artificial Sequence
  Synthetic
ggaucuguggcaaugugaggg

SEQ ID NO: 327293 - RNA, 22 nt, Artificial Sequence
  Synthetic
uggaucuguggcaaugugaggg

SEQ ID NO: 327294 - RNA, 23 nt, Artificial Sequence
  Synthetic
cuggaucuguggcaaugugaggg

SEQ ID NO: 327295 - RNA, 24 nt, Artificial Sequence
  Synthetic
ccuggaucuguggcaaugugaggg

SEQ ID NO: 327296 - RNA, 18 nt, Artificial Sequence
  Synthetic
aaaauucaugauugaggg

SEQ ID NO: 327297 - RNA, 19 nt, Artificial Sequence
  Synthetic
gaaaauucaugauugaggg

SEQ ID NO: 327298 - RNA, 20 nt, Artificial Sequence
  Synthetic
agaaaauucaugauugaggg

SEQ ID NO: 327299 - RNA, 21 nt, Artificial Sequence
  Synthetic
aagaaaauucaugauugaggg

SEQ ID NO: 327300 - RNA, 22 nt, Artificial Sequence
  Synthetic
gaagaaaauucaugauugaggg

SEQ ID NO: 327301 - RNA, 23 nt, Artificial Sequence
  Synthetic
ugaagaaaauucaugauugaggg

SEQ ID NO: 327302 - RNA, 24 nt, Artificial Sequence
  Synthetic
augaagaaaauucaugauugaggg

SEQ ID NO: 327303 - RNA, 18 nt, Artificial Sequence
  Synthetic
uacuugggaaguugaggg

SEQ ID NO: 327304 - RNA, 19 nt, Artificial Sequence
  Synthetic
uuacuugggaaguugaggg

SEQ ID NO: 327305 - RNA, 20 nt, Artificial Sequence
  Synthetic
auuacuugggaaguugaggg

SEQ ID NO: 327306 - RNA, 21 nt, Artificial Sequence
  Synthetic
uauuacuugggaaguugaggg

SEQ ID NO: 327307 - RNA, 22 nt, Artificial Sequence
  Synthetic
guauuacuugggaaguugaggg

SEQ ID NO: 327308 - RNA, 23 nt, Artificial Sequence
  Synthetic
uguauuacuugggaaguugaggg

SEQ ID NO: 327309 - RNA, 24 nt, Artificial Sequence
  Synthetic
uuguauuacuugggaaguugaggg

SEQ ID NO: 327310 - RNA, 18 nt, Artificial Sequence
  Synthetic
ucacauccuaaaauaggg

SEQ ID NO: 327311 - RNA, 19 nt, Artificial Sequence
  Synthetic
gucacauccuaaaauaggg

SEQ ID NO: 327312 - RNA, 20 nt, Artificial Sequence
  Synthetic
ugucacauccuaaaauaggg

SEQ ID NO: 327313 - RNA, 21 nt, Artificial Sequence
  Synthetic
cugucacauccuaaaauaggg

SEQ ID NO: 327314 - RNA, 22 nt, Artificial Sequence
  Synthetic
ucugucacauccuaaaauaggg

SEQ ID NO: 327315 - RNA, 23 nt, Artificial Sequence
  Synthetic
uucugucacauccuaaaauaggg

SEQ ID NO: 327316 - RNA, 24 nt, Artificial Sequence
  Synthetic
auucugucacauccuaaaauaggg

SEQ ID NO: 327317 - RNA, 18 nt, Artificial Sequence
  Synthetic
cugugauuuaaaauaggg

SEQ ID NO: 327318 - RNA, 19 nt, Artificial Sequence
  Synthetic
acugugauuuaaaauaggg

SEQ ID NO: 327319 - RNA, 20 nt, Artificial Sequence
  Synthetic
gacugugauuuaaaauaggg

SEQ ID NO: 327320 - RNA, 21 nt, Artificial Sequence
  Synthetic
ggacugugauuuaaaauaggg

SEQ ID NO: 327321 - RNA, 22 nt, Artificial Sequence
  Synthetic
uggacugugauuuaaaauaggg

SEQ ID NO: 327322 - RNA, 23 nt, Artificial Sequence
  Synthetic
guggacugugauuuaaaauaggg

SEQ ID NO: 327323 - RNA, 24 nt, Artificial Sequence
  Synthetic
uguggacugugauuuaaaauaggg

SEQ ID NO: 327324 - RNA, 18 nt, Artificial Sequence
  Synthetic
uugccauuucaaauaggg

SEQ ID NO: 327325 - RNA, 19 nt, Artificial Sequence
  Synthetic
auugccauuucaaauaggg

SEQ ID NO: 327326 - RNA, 20 nt, Artificial Sequence
  Synthetic
aauugccauuucaaauaggg

SEQ ID NO: 327327 - RNA, 21 nt, Artificial Sequence
  Synthetic
gaauugccauuucaaauaggg

SEQ ID NO: 327328 - RNA, 22 nt, Artificial Sequence
  Synthetic
ggaauugccauuucaaauaggg

SEQ ID NO: 327329 - RNA, 23 nt, Artificial Sequence
  Synthetic
cggaauugccauuucaaauaggg

SEQ ID NO: 327330 - RNA, 24 nt, Artificial Sequence
  Synthetic
gcggaauugccauuucaaauaggg

SEQ ID NO: 327331 - RNA, 18 nt, Artificial Sequence
  Synthetic
ucccaaauggcaauaggg

SEQ ID NO: 327332 - RNA, 19 nt, Artificial Sequence
  Synthetic
gucccaaauggcaauaggg

SEQ ID NO: 327333 - RNA, 20 nt, Artificial Sequence
  Synthetic
agucccaaauggcaauaggg

SEQ ID NO: 327334 - RNA, 21 nt, Artificial Sequence
  Synthetic
cagucccaaauggcaauaggg

SEQ ID NO: 327335 - RNA, 22 nt, Artificial Sequence
  Synthetic
ccagucccaaauggcaauaggg

SEQ ID NO: 327336 - RNA, 23 nt, Artificial Sequence
  Synthetic
uccagucccaaauggcaauaggg

SEQ ID NO: 327337 - RNA, 24 nt, Artificial Sequence
  Synthetic
auccagucccaaauggcaauaggg

SEQ ID NO: 327338 - RNA, 18 nt, Artificial Sequence
  Synthetic
uccucuccaugaauaggg

SEQ ID NO: 327339 - RNA, 19 nt, Artificial Sequence
  Synthetic
auccucuccaugaauaggg

SEQ ID NO: 327340 - RNA, 20 nt, Artificial Sequence
  Synthetic
uauccucuccaugaauaggg

SEQ ID NO: 327341 - RNA, 21 nt, Artificial Sequence
  Synthetic
auauccucuccaugaauaggg

SEQ ID NO: 327342 - RNA, 22 nt, Artificial Sequence
  Synthetic
cauauccucuccaugaauaggg

SEQ ID NO: 327343 - RNA, 23 nt, Artificial Sequence
  Synthetic
ucauauccucuccaugaauaggg

SEQ ID NO: 327344 - RNA, 24 nt, Artificial Sequence
  Synthetic
aucauauccucuccaugaauaggg

SEQ ID NO: 327345 - RNA, 18 nt, Artificial Sequence
  Synthetic
agaacgauguacauaggg

SEQ ID NO: 327346 - RNA, 19 nt, Artificial Sequence
  Synthetic
cagaacgauguacauaggg

SEQ ID NO: 327347 - RNA, 20 nt, Artificial Sequence
  Synthetic
gcagaacgauguacauaggg

SEQ ID NO: 327348 - RNA, 21 nt, Artificial Sequence
  Synthetic
agcagaacgauguacauaggg

SEQ ID NO: 327349 - RNA, 22 nt, Artificial Sequence
  Synthetic
aagcagaacgauguacauaggg

SEQ ID NO: 327350 - RNA, 23 nt, Artificial Sequence
  Synthetic
gaagcagaacgauguacauaggg

SEQ ID NO: 327351 - RNA, 24 nt, Artificial Sequence
  Synthetic
agaagcagaacgauguacauaggg

SEQ ID NO: 327352 - RNA, 18 nt, Artificial Sequence
  Synthetic
auucaguuacagauaggg

SEQ ID NO: 327353 - RNA, 19 nt, Artificial Sequence
  Synthetic
cauucaguuacagauaggg

SEQ ID NO: 327354 - RNA, 20 nt, Artificial Sequence
  Synthetic
acauucaguuacagauaggg

SEQ ID NO: 327355 - RNA, 21 nt, Artificial Sequence
  Synthetic
uacauucaguuacagauaggg

SEQ ID NO: 327356 - RNA, 22 nt, Artificial Sequence
  Synthetic
uuacauucaguuacagauaggg

SEQ ID NO: 327357 - RNA, 23 nt, Artificial Sequence
  Synthetic
uuuacauucaguuacagauaggg

SEQ ID NO: 327358 - RNA, 24 nt, Artificial Sequence
  Synthetic
uuuuacauucaguuacagauaggg

SEQ ID NO: 327359 - RNA, 18 nt, Artificial Sequence
  Synthetic
guaauuaaaaauauaggg

SEQ ID NO: 327360 - RNA, 19 nt, Artificial Sequence
  Synthetic
uguaauuaaaaauauaggg

SEQ ID NO: 327361 - RNA, 20 nt, Artificial Sequence
  Synthetic
cuguaauuaaaaauauaggg

SEQ ID NO: 327362 - RNA, 21 nt, Artificial Sequence
  Synthetic
acuguaauuaaaaauauaggg

SEQ ID NO: 327363 - RNA, 22 nt, Artificial Sequence
  Synthetic
uacuguaauuaaaaauauaggg

SEQ ID NO: 327364 - RNA, 23 nt, Artificial Sequence
  Synthetic
uuacuguaauuaaaaauauaggg

SEQ ID NO: 327365 - RNA, 24 nt, Artificial Sequence
  Synthetic
auuacuguaauuaaaaauauaggg

SEQ ID NO: 327366 - RNA, 18 nt, Artificial Sequence
  Synthetic
gucccagaguuccuaggg

SEQ ID NO: 327367 - RNA, 19 nt, Artificial Sequence
  Synthetic
ggucccagaguuccuaggg

SEQ ID NO: 327368 - RNA, 20 nt, Artificial Sequence
  Synthetic
aggucccagaguuccuaggg

SEQ ID NO: 327369 - RNA, 21 nt, Artificial Sequence
  Synthetic
aaggucccagaguuccuaggg

SEQ ID NO: 327370 - RNA, 22 nt, Artificial Sequence
  Synthetic
caaggucccagaguuccuaggg

SEQ ID NO: 327371 - RNA, 23 nt, Artificial Sequence
  Synthetic
ccaaggucccagaguuccuaggg

SEQ ID NO: 327372 - RNA, 24 nt, Artificial Sequence
  Synthetic
accaaggucccagaguuccuaggg

SEQ ID NO: 327373 - RNA, 18 nt, Artificial Sequence
  Synthetic
agcagcagcgggcuaggg

SEQ ID NO: 327374 - RNA, 19 nt, Artificial Sequence
  Synthetic
gagcagcagcgggcuaggg

SEQ ID NO: 327375 - RNA, 20 nt, Artificial Sequence
  Synthetic
ugagcagcagcgggcuaggg

SEQ ID NO: 327376 - RNA, 21 nt, Artificial Sequence
  Synthetic
gugagcagcagcgggcuaggg

SEQ ID NO: 327377 - RNA, 22 nt, Artificial Sequence
  Synthetic
ggugagcagcagcgggcuaggg

SEQ ID NO: 327378 - RNA, 23 nt, Artificial Sequence
  Synthetic
aggugagcagcagcgggcuaggg

SEQ ID NO: 327379 - RNA, 24 nt, Artificial Sequence
  Synthetic
uaggugagcagcagcgggcuaggg

SEQ ID NO: 327380 - RNA, 18 nt, Artificial Sequence
  Synthetic
ggcuucagaaaucuaggg

SEQ ID NO: 327381 - RNA, 19 nt, Artificial Sequence
  Synthetic
uggcuucagaaaucuaggg

SEQ ID NO: 327382 - RNA, 20 nt, Artificial Sequence
  Synthetic
uuggcuucagaaaucuaggg

SEQ ID NO: 327383 - RNA, 21 nt, Artificial Sequence
  Synthetic
guuggcuucagaaaucuaggg

SEQ ID NO: 327384 - RNA, 22 nt, Artificial Sequence
  Synthetic
gguuggcuucagaaaucuaggg

SEQ ID NO: 327385 - RNA, 23 nt, Artificial Sequence
  Synthetic
ugguuggcuucagaaaucuaggg

SEQ ID NO: 327386 - RNA, 24 nt, Artificial Sequence
  Synthetic
gugguuggcuucagaaaucuaggg

SEQ ID NO: 327387 - RNA, 18 nt, Artificial Sequence
  Synthetic
aacuaaagcaaucuaggg

SEQ ID NO: 327388 - RNA, 19 nt, Artificial Sequence
  Synthetic
uaacuaaagcaaucuaggg

SEQ ID NO: 327389 - RNA, 20 nt, Artificial Sequence
  Synthetic
uuaacuaaagcaaucuaggg

SEQ ID NO: 327390 - RNA, 21 nt, Artificial Sequence
  Synthetic
uuuaacuaaagcaaucuaggg

SEQ ID NO: 327391 - RNA, 22 nt, Artificial Sequence
  Synthetic
uuuuaacuaaagcaaucuaggg

SEQ ID NO: 327392 - RNA, 23 nt, Artificial Sequence
  Synthetic
cuuuuaacuaaagcaaucuaggg

SEQ ID NO: 327393 - RNA, 24 nt, Artificial Sequence
  Synthetic
gcuuuuaacuaaagcaaucuaggg

SEQ ID NO: 327394 - RNA, 18 nt, Artificial Sequence
  Synthetic
ucagcugugaaaguaggg

SEQ ID NO: 327395 - RNA, 19 nt, Artificial Sequence
  Synthetic
cucagcugugaaaguaggg

SEQ ID NO: 327396 - RNA, 20 nt, Artificial Sequence
  Synthetic
ucucagcugugaaaguaggg

SEQ ID NO: 327397 - RNA, 21 nt, Artificial Sequence
  Synthetic
aucucagcugugaaaguaggg

SEQ ID NO: 327398 - RNA, 22 nt, Artificial Sequence
  Synthetic
gaucucagcugugaaaguaggg

SEQ ID NO: 327399 - RNA, 23 nt, Artificial Sequence
  Synthetic
agaucucagcugugaaaguaggg

SEQ ID NO: 327400 - RNA, 24 nt, Artificial Sequence
  Synthetic
uagaucucagcugugaaaguaggg

SEQ ID NO: 327401 - RNA, 18 nt, Artificial Sequence
  Synthetic
gagaauuauccaguaggg

SEQ ID NO: 327402 - RNA, 19 nt, Artificial Sequence
  Synthetic
ggagaauuauccaguaggg

SEQ ID NO: 327403 - RNA, 20 nt, Artificial Sequence
  Synthetic
uggagaauuauccaguaggg

SEQ ID NO: 327404 - RNA, 21 nt, Artificial Sequence
  Synthetic
guggagaauuauccaguaggg

SEQ ID NO: 327405 - RNA, 22 nt, Artificial Sequence
  Synthetic
uguggagaauuauccaguaggg

SEQ ID NO: 327406 - RNA, 23 nt, Artificial Sequence
  Synthetic
guguggagaauuauccaguaggg

SEQ ID NO: 327407 - RNA, 24 nt, Artificial Sequence
  Synthetic
uguguggagaauuauccaguaggg

SEQ ID NO: 327408 - RNA, 18 nt, Artificial Sequence
  Synthetic
gagugggaaugaguaggg

SEQ ID NO: 327409 - RNA, 19 nt, Artificial Sequence
  Synthetic
ggagugggaaugaguaggg

SEQ ID NO: 327410 - RNA, 20 nt, Artificial Sequence
  Synthetic
gggagugggaaugaguaggg

SEQ ID NO: 327411 - RNA, 21 nt, Artificial Sequence
  Synthetic
ugggagugggaaugaguaggg

SEQ ID NO: 327412 - RNA, 22 nt, Artificial Sequence
  Synthetic
uugggagugggaaugaguaggg

SEQ ID NO: 327413 - RNA, 23 nt, Artificial Sequence
  Synthetic
uuugggagugggaaugaguaggg

SEQ ID NO: 327414 - RNA, 24 nt, Artificial Sequence
  Synthetic
guuugggagugggaaugaguaggg

SEQ ID NO: 327415 - RNA, 18 nt, Artificial Sequence
  Synthetic
uuuguauuuuuaguaggg

SEQ ID NO: 327416 - RNA, 19 nt, Artificial Sequence
  Synthetic
uuuuguauuuuuaguaggg

SEQ ID NO: 327417 - RNA, 20 nt, Artificial Sequence
  Synthetic
uuuuuguauuuuuaguaggg

SEQ ID NO: 327418 - RNA, 21 nt, Artificial Sequence
  Synthetic
uuuuuuguauuuuuaguaggg

SEQ ID NO: 327419 - RNA, 22 nt, Artificial Sequence
  Synthetic
uuuuuuuguauuuuuaguaggg

SEQ ID NO: 327420 - RNA, 23 nt, Artificial Sequence
  Synthetic
auuuuuuuguauuuuuaguaggg

SEQ ID NO: 327421 - RNA, 24 nt, Artificial Sequence
  Synthetic
aauuuuuuuguauuuuuaguaggg

SEQ ID NO: 327422 - RNA, 18 nt, Artificial Sequence
  Synthetic
cugaaugcacagguaggg

SEQ ID NO: 327423 - RNA, 19 nt, Artificial Sequence
  Synthetic
acugaaugcacagguaggg

SEQ ID NO: 327424 - RNA, 20 nt, Artificial Sequence
  Synthetic
gacugaaugcacagguaggg

SEQ ID NO: 327425 - RNA, 21 nt, Artificial Sequence
  Synthetic
ugacugaaugcacagguaggg

SEQ ID NO: 327426 - RNA, 22 nt, Artificial Sequence
  Synthetic
augacugaaugcacagguaggg

SEQ ID NO: 327427 - RNA, 23 nt, Artificial Sequence
  Synthetic
uaugacugaaugcacagguaggg

SEQ ID NO: 327428 - RNA, 24 nt, Artificial Sequence
  Synthetic
guaugacugaaugcacagguaggg

SEQ ID NO: 327429 - RNA, 18 nt, Artificial Sequence
  Synthetic
ggaggcuccgggguaggg

SEQ ID NO: 327430 - RNA, 19 nt, Artificial Sequence
  Synthetic
gggaggcuccgggguaggg

SEQ ID NO: 327431 - RNA, 20 nt, Artificial Sequence
  Synthetic
ugggaggcuccgggguaggg

SEQ ID NO: 327432 - RNA, 21 nt, Artificial Sequence
  Synthetic
cugggaggcuccgggguaggg

SEQ ID NO: 327433 - RNA, 22 nt, Artificial Sequence
  Synthetic
gcugggaggcuccgggguaggg

SEQ ID NO: 327434 - RNA, 23 nt, Artificial Sequence
  Synthetic
ugcugggaggcuccgggguaggg

SEQ ID NO: 327435 - RNA, 24 nt, Artificial Sequence
  Synthetic
gugcugggaggcuccgggguaggg

SEQ ID NO: 327436 - RNA, 18 nt, Artificial Sequence
  Synthetic
ugaucacuaacuguaggg

SEQ ID NO: 327437 - RNA, 19 nt, Artificial Sequence
  Synthetic
cugaucacuaacuguaggg

SEQ ID NO: 327438 - RNA, 20 nt, Artificial Sequence
  Synthetic
acugaucacuaacuguaggg

SEQ ID NO: 327439 - RNA, 21 nt, Artificial Sequence
  Synthetic
uacugaucacuaacuguaggg

SEQ ID NO: 327440 - RNA, 22 nt, Artificial Sequence
  Synthetic
auacugaucacuaacuguaggg

SEQ ID NO: 327441 - RNA, 23 nt, Artificial Sequence
  Synthetic
aauacugaucacuaacuguaggg

SEQ ID NO: 327442 - RNA, 24 nt, Artificial Sequence
  Synthetic
caauacugaucacuaacuguaggg

SEQ ID NO: 327443 - RNA, 18 nt, Artificial Sequence
  Synthetic
uaccucgugaaauuaggg

SEQ ID NO: 327444 - RNA, 19 nt, Artificial Sequence
  Synthetic
auaccucgugaaauuaggg

SEQ ID NO: 327445 - RNA, 20 nt, Artificial Sequence
  Synthetic
aauaccucgugaaauuaggg

SEQ ID NO: 327446 - RNA, 21 nt, Artificial Sequence
  Synthetic
caauaccucgugaaauuaggg

SEQ ID NO: 327447 - RNA, 22 nt, Artificial Sequence
  Synthetic
ucaauaccucgugaaauuaggg

SEQ ID NO: 327448 - RNA, 23 nt, Artificial Sequence
  Synthetic
uucaauaccucgugaaauuaggg

SEQ ID NO: 327449 - RNA, 24 nt, Artificial Sequence
  Synthetic
auucaauaccucgugaaauuaggg

SEQ ID NO: 327450 - RNA, 18 nt, Artificial Sequence
  Synthetic
guguaucagugauuaggg

SEQ ID NO: 327451 - RNA, 19 nt, Artificial Sequence
  Synthetic
uguguaucagugauuaggg

SEQ ID NO: 327452 - RNA, 20 nt, Artificial Sequence
  Synthetic
auguguaucagugauuaggg

SEQ ID NO: 327453 - RNA, 21 nt, Artificial Sequence
  Synthetic
gauguguaucagugauuaggg

SEQ ID NO: 327454 - RNA, 22 nt, Artificial Sequence
  Synthetic
agauguguaucagugauuaggg

SEQ ID NO: 327455 - RNA, 23 nt, Artificial Sequence
  Synthetic
cagauguguaucagugauuaggg

SEQ ID NO: 327456 - RNA, 24 nt, Artificial Sequence
  Synthetic
acagauguguaucagugauuaggg

SEQ ID NO: 327457 - RNA, 18 nt, Artificial Sequence
  Synthetic
ucuccacuaaccuuaggg

SEQ ID NO: 327458 - RNA, 19 nt, Artificial Sequence
  Synthetic
uucuccacuaaccuuaggg

SEQ ID NO: 327459 - RNA, 20 nt, Artificial Sequence
  Synthetic
auucuccacuaaccuuaggg

SEQ ID NO: 327460 - RNA, 21 nt, Artificial Sequence
  Synthetic
uauucuccacuaaccuuaggg

SEQ ID NO: 327461 - RNA, 22 nt, Artificial Sequence
  Synthetic
uuauucuccacuaaccuuaggg

SEQ ID NO: 327462 - RNA, 23 nt, Artificial Sequence
  Synthetic
uuuauucuccacuaaccuuaggg

SEQ ID NO: 327463 - RNA, 24 nt, Artificial Sequence
  Synthetic
uuuuauucuccacuaaccuuaggg

SEQ ID NO: 327464 - RNA, 18 nt, Artificial Sequence
  Synthetic
aguagcauuuucuuaggg

SEQ ID NO: 327465 - RNA, 19 nt, Artificial Sequence
  Synthetic
aaguagcauuuucuuaggg

SEQ ID NO: 327466 - RNA, 20 nt, Artificial Sequence
  Synthetic
aaaguagcauuuucuuaggg

SEQ ID NO: 327467 - RNA, 21 nt, Artificial Sequence
  Synthetic
aaaaguagcauuuucuuaggg

SEQ ID NO: 327468 - RNA, 22 nt, Artificial Sequence
  Synthetic
aaaaaguagcauuuucuuaggg

SEQ ID NO: 327469 - RNA, 23 nt, Artificial Sequence
  Synthetic
gaaaaaguagcauuuucuuaggg

SEQ ID NO: 327470 - RNA, 24 nt, Artificial Sequence
  Synthetic
ugaaaaaguagcauuuucuuaggg

SEQ ID NO: 327471 - RNA, 18 nt, Artificial Sequence
  Synthetic
gaggggaaaaaguuaggg

SEQ ID NO: 327472 - RNA, 19 nt, Artificial Sequence
  Synthetic
ugaggggaaaaaguuaggg

SEQ ID NO: 327473 - RNA, 20 nt, Artificial Sequence
  Synthetic
gugaggggaaaaaguuaggg

SEQ ID NO: 327474 - RNA, 21 nt, Artificial Sequence
  Synthetic
ggugaggggaaaaaguuaggg

SEQ ID NO: 327475 - RNA, 22 nt, Artificial Sequence
  Synthetic
gggugaggggaaaaaguuaggg

SEQ ID NO: 327476 - RNA, 23 nt, Artificial Sequence
  Synthetic
agggugaggggaaaaaguuaggg

SEQ ID NO: 327477 - RNA, 24 nt, Artificial Sequence
  Synthetic
uagggugaggggaaaaaguuaggg

SEQ ID NO: 327478 - RNA, 18 nt, Artificial Sequence
  Synthetic
ggugggugggaguuaggg

SEQ ID NO: 327479 - RNA, 19 nt, Artificial Sequence
  Synthetic
aggugggugggaguuaggg

SEQ ID NO: 327480 - RNA, 20 nt, Artificial Sequence
  Synthetic
uaggugggugggaguuaggg

SEQ ID NO: 327481 - RNA, 21 nt, Artificial Sequence
  Synthetic
auaggugggugggaguuaggg

SEQ ID NO: 327482 - RNA, 22 nt, Artificial Sequence
  Synthetic
aauaggugggugggaguuaggg

SEQ ID NO: 327483 - RNA, 23 nt, Artificial Sequence
  Synthetic
uaauaggugggugggaguuaggg

SEQ ID NO: 327484 - RNA, 24 nt, Artificial Sequence
  Synthetic
cuaauaggugggugggaguuaggg

SEQ ID NO: 327485 - RNA, 18 nt, Artificial Sequence
  Synthetic
aggggugggagguuaggg

SEQ ID NO: 327486 - RNA, 19 nt, Artificial Sequence
  Synthetic
gaggggugggagguuaggg

SEQ ID NO: 327487 - RNA, 20 nt, Artificial Sequence
  Synthetic
cgaggggugggagguuaggg

SEQ ID NO: 327488 - RNA, 21 nt, Artificial Sequence
  Synthetic
ucgaggggugggagguuaggg

SEQ ID NO: 327489 - RNA, 22 nt, Artificial Sequence
  Synthetic
gucgaggggugggagguuaggg

SEQ ID NO: 327490 - RNA, 23 nt, Artificial Sequence
  Synthetic
ugucgaggggugggagguuaggg

SEQ ID NO: 327491 - RNA, 24 nt, Artificial Sequence
  Synthetic
cugucgaggggugggagguuaggg

SEQ ID NO: 327492 - RNA, 18 nt, Artificial Sequence
  Synthetic
gaggcuguggauuuaggg

SEQ ID NO: 327493 - RNA, 19 nt, Artificial Sequence
  Synthetic
agaggcuguggauuuaggg

SEQ ID NO: 327494 - RNA, 20 nt, Artificial Sequence
  Synthetic
cagaggcuguggauuuaggg

SEQ ID NO: 327495 - RNA, 21 nt, Artificial Sequence
  Synthetic
ccagaggcuguggauuuaggg

SEQ ID NO: 327496 - RNA, 22 nt, Artificial Sequence
  Synthetic
accagaggcuguggauuuaggg

SEQ ID NO: 327497 - RNA, 23 nt, Artificial Sequence
  Synthetic
uaccagaggcuguggauuuaggg

SEQ ID NO: 327498 - RNA, 24 nt, Artificial Sequence
  Synthetic
uuaccagaggcuguggauuuaggg

SEQ ID NO: 327499 - RNA, 18 nt, Artificial Sequence
  Synthetic
guuuugagcuauuuaggg

SEQ ID NO: 327500 - RNA, 19 nt, Artificial Sequence
  Synthetic
uguuuugagcuauuuaggg

SEQ ID NO: 327501 - RNA, 20 nt, Artificial Sequence
  Synthetic
auguuuugagcuauuuaggg

SEQ ID NO: 327502 - RNA, 21 nt, Artificial Sequence
  Synthetic
gauguuuugagcuauuuaggg

SEQ ID NO: 327503 - RNA, 22 nt, Artificial Sequence
  Synthetic
ugauguuuugagcuauuuaggg

SEQ ID NO: 327504 - RNA, 23 nt, Artificial Sequence
  Synthetic
cugauguuuugagcuauuuaggg

SEQ ID NO: 327505 - RNA, 24 nt, Artificial Sequence
  Synthetic
acugauguuuugagcuauuuaggg

SEQ ID NO: 327506 - RNA, 18 nt, Artificial Sequence
  Synthetic
cauacaaagccuuuaggg

SEQ ID NO: 327507 - RNA, 19 nt, Artificial Sequence
  Synthetic
ccauacaaagccuuuaggg

SEQ ID NO: 327508 - RNA, 20 nt, Artificial Sequence
  Synthetic
gccauacaaagccuuuaggg

SEQ ID NO: 327509 - RNA, 21 nt, Artificial Sequence
  Synthetic
cgccauacaaagccuuuaggg

SEQ ID NO: 327510 - RNA, 22 nt, Artificial Sequence
  Synthetic
acgccauacaaagccuuuaggg

SEQ ID NO: 327511 - RNA, 23 nt, Artificial Sequence
  Synthetic
aacgccauacaaagccuuuaggg

SEQ ID NO: 327512 - RNA, 24 nt, Artificial Sequence
  Synthetic
gaacgccauacaaagccuuuaggg

SEQ ID NO: 327513 - RNA, 18 nt, Artificial Sequence
  Synthetic
gauucaguaaguuuaggg

SEQ ID NO: 327514 - RNA, 19 nt, Artificial Sequence
  Synthetic
ugauucaguaaguuuaggg

SEQ ID NO: 327515 - RNA, 20 nt, Artificial Sequence
  Synthetic
cugauucaguaaguuuaggg

SEQ ID NO: 327516 - RNA, 21 nt, Artificial Sequence
  Synthetic
ucugauucaguaaguuuaggg

SEQ ID NO: 327517 - RNA, 22 nt, Artificial Sequence
  Synthetic
cucugauucaguaaguuuaggg

SEQ ID NO: 327518 - RNA, 23 nt, Artificial Sequence
  Synthetic
acucugauucaguaaguuuaggg

SEQ ID NO: 327519 - RNA, 24 nt, Artificial Sequence
  Synthetic
gacucugauucaguaaguuuaggg

SEQ ID NO: 327520 - RNA, 18 nt, Artificial Sequence
  Synthetic
aaguuaaagaaccacggg

SEQ ID NO: 327521 - RNA, 19 nt, Artificial Sequence
  Synthetic
caaguuaaagaaccacggg

SEQ ID NO: 327522 - RNA, 20 nt, Artificial Sequence
  Synthetic
ucaaguuaaagaaccacggg

SEQ ID NO: 327523 - RNA, 21 nt, Artificial Sequence
  Synthetic
cucaaguuaaagaaccacggg

SEQ ID NO: 327524 - RNA, 22 nt, Artificial Sequence
  Synthetic
acucaaguuaaagaaccacggg

SEQ ID NO: 327525 - RNA, 23 nt, Artificial Sequence
  Synthetic
cacucaaguuaaagaaccacggg

SEQ ID NO: 327526 - RNA, 24 nt, Artificial Sequence
  Synthetic
acacucaaguuaaagaaccacggg

SEQ ID NO: 327527 - RNA, 18 nt, Artificial Sequence
  Synthetic
augaagaaagcucacggg

SEQ ID NO: 327528 - RNA, 19 nt, Artificial Sequence
  Synthetic
uaugaagaaagcucacggg

SEQ ID NO: 327529 - RNA, 20 nt, Artificial Sequence
  Synthetic
auaugaagaaagcucacggg

SEQ ID NO: 327530 - RNA, 21 nt, Artificial Sequence
  Synthetic
cauaugaagaaagcucacggg

SEQ ID NO: 327531 - RNA, 22 nt, Artificial Sequence
  Synthetic
ccauaugaagaaagcucacggg

SEQ ID NO: 327532 - RNA, 23 nt, Artificial Sequence
  Synthetic
gccauaugaagaaagcucacggg

SEQ ID NO: 327533 - RNA, 24 nt, Artificial Sequence
  Synthetic
ggccauaugaagaaagcucacggg

SEQ ID NO: 327534 - RNA, 18 nt, Artificial Sequence
  Synthetic
gagaaagagagggacggg

SEQ ID NO: 327535 - RNA, 19 nt, Artificial Sequence
  Synthetic
agagaaagagagggacggg

SEQ ID NO: 327536 - RNA, 20 nt, Artificial Sequence
  Synthetic
gagagaaagagagggacggg

SEQ ID NO: 327537 - RNA, 21 nt, Artificial Sequence
  Synthetic
ugagagaaagagagggacggg

SEQ ID NO: 327538 - RNA, 22 nt, Artificial Sequence
  Synthetic
uugagagaaagagagggacggg

SEQ ID NO: 327539 - RNA, 23 nt, Artificial Sequence
  Synthetic
cuugagagaaagagagggacggg

SEQ ID NO: 327540 - RNA, 24 nt, Artificial Sequence
  Synthetic
acuugagagaaagagagggacggg

SEQ ID NO: 327541 - RNA, 18 nt, Artificial Sequence
  Synthetic
aaauacugagaguacggg

SEQ ID NO: 327542 - RNA, 19 nt, Artificial Sequence
  Synthetic
gaaauacugagaguacggg

SEQ ID NO: 327543 - RNA, 20 nt, Artificial Sequence
  Synthetic
ugaaauacugagaguacggg

SEQ ID NO: 327544 - RNA, 21 nt, Artificial Sequence
  Synthetic
uugaaauacugagaguacggg

SEQ ID NO: 327545 - RNA, 22 nt, Artificial Sequence
  Synthetic
auugaaauacugagaguacggg

SEQ ID NO: 327546 - RNA, 23 nt, Artificial Sequence
  Synthetic
aauugaaauacugagaguacggg

SEQ ID NO: 327547 - RNA, 24 nt, Artificial Sequence
  Synthetic
uaauugaaauacugagaguacggg

SEQ ID NO: 327548 - RNA, 18 nt, Artificial Sequence
  Synthetic
aaaggcaaugaaaccggg

SEQ ID NO: 327549 - RNA, 19 nt, Artificial Sequence
  Synthetic
aaaaggcaaugaaaccggg

SEQ ID NO: 327550 - RNA, 20 nt, Artificial Sequence
  Synthetic
uaaaaggcaaugaaaccggg

SEQ ID NO: 327551 - RNA, 21 nt, Artificial Sequence
  Synthetic
uuaaaaggcaaugaaaccggg

SEQ ID NO: 327552 - RNA, 22 nt, Artificial Sequence
  Synthetic
auuaaaaggcaaugaaaccggg

SEQ ID NO: 327553 - RNA, 23 nt, Artificial Sequence
  Synthetic
cauuaaaaggcaaugaaaccggg

SEQ ID NO: 327554 - RNA, 24 nt, Artificial Sequence
  Synthetic
acauuaaaaggcaaugaaaccggg

SEQ ID NO: 327555 - RNA, 18 nt, Artificial Sequence
  Synthetic
aaagcugaaguaaccggg

SEQ ID NO: 327556 - RNA, 19 nt, Artificial Sequence
  Synthetic
aaaagcugaaguaaccggg

SEQ ID NO: 327557 - RNA, 20 nt, Artificial Sequence
  Synthetic
aaaaagcugaaguaaccggg

SEQ ID NO: 327558 - RNA, 21 nt, Artificial Sequence
  Synthetic
aaaaaagcugaaguaaccggg

SEQ ID NO: 327559 - RNA, 22 nt, Artificial Sequence
  Synthetic
aaaaaaagcugaaguaaccggg

SEQ ID NO: 327560 - RNA, 23 nt, Artificial Sequence
  Synthetic
uaaaaaaagcugaaguaaccggg

SEQ ID NO: 327561 - RNA, 24 nt, Artificial Sequence
  Synthetic
uuaaaaaaagcugaaguaaccggg

SEQ ID NO: 327562 - RNA, 18 nt, Artificial Sequence
  Synthetic
gaacacauggacaccggg

SEQ ID NO: 327563 - RNA, 19 nt, Artificial Sequence
  Synthetic
agaacacauggacaccggg

SEQ ID NO: 327564 - RNA, 20 nt, Artificial Sequence
  Synthetic
gagaacacauggacaccggg

SEQ ID NO: 327565 - RNA, 21 nt, Artificial Sequence
  Synthetic
ugagaacacauggacaccggg

SEQ ID NO: 327566 - RNA, 22 nt, Artificial Sequence
  Synthetic
augagaacacauggacaccggg

SEQ ID NO: 327567 - RNA, 23 nt, Artificial Sequence
  Synthetic
aaugagaacacauggacaccggg

SEQ ID NO: 327568 - RNA, 24 nt, Artificial Sequence
  Synthetic
caaugagaacacauggacaccggg

SEQ ID NO: 327569 - RNA, 18 nt, Artificial Sequence
  Synthetic
cucgcacuguugcccggg

SEQ ID NO: 327570 - RNA, 19 nt, Artificial Sequence
  Synthetic
ucucgcacuguugcccggg

SEQ ID NO: 327571 - RNA, 20 nt, Artificial Sequence
  Synthetic
gucucgcacuguugcccggg

SEQ ID NO: 327572 - RNA, 21 nt, Artificial Sequence
  Synthetic
agucucgcacuguugcccggg

SEQ ID NO: 327573 - RNA, 22 nt, Artificial Sequence
  Synthetic
gagucucgcacuguugcccggg

SEQ ID NO: 327574 - RNA, 23 nt, Artificial Sequence
  Synthetic
ggagucucgcacuguugcccggg

SEQ ID NO: 327575 - RNA, 24 nt, Artificial Sequence
  Synthetic
uggagucucgcacuguugcccggg

SEQ ID NO: 327576 - RNA, 18 nt, Artificial Sequence
  Synthetic
uucgcucuguugcccggg

SEQ ID NO: 327577 - RNA, 19 nt, Artificial Sequence
  Synthetic
uuucgcucuguugcccggg

SEQ ID NO: 327578 - RNA, 20 nt, Artificial Sequence
  Synthetic
guuucgcucuguugcccggg

SEQ ID NO: 327579 - RNA, 21 nt, Artificial Sequence
  Synthetic
aguuucgcucuguugcccggg

SEQ ID NO: 327580 - RNA, 22 nt, Artificial Sequence
  Synthetic
gaguuucgcucuguugcccggg

SEQ ID NO: 327581 - RNA, 23 nt, Artificial Sequence
  Synthetic
ggaguuucgcucuguugcccggg

SEQ ID NO: 327582 - RNA, 24 nt, Artificial Sequence
  Synthetic
uggaguuucgcucuguugcccggg

SEQ ID NO: 327583 - RNA, 18 nt, Artificial Sequence
  Synthetic
cuuucucuguugcccggg

SEQ ID NO: 327584 - RNA, 19 nt, Artificial Sequence
  Synthetic
ucuuucucuguugcccggg

SEQ ID NO: 327585 - RNA, 20 nt, Artificial Sequence
  Synthetic
gucuuucucuguugcccggg

SEQ ID NO: 327586 - RNA, 21 nt, Artificial Sequence
  Synthetic
agucuuucucuguugcccggg

SEQ ID NO: 327587 - RNA, 22 nt, Artificial Sequence
  Synthetic
gagucuuucucuguugcccggg

SEQ ID NO: 327588 - RNA, 23 nt, Artificial Sequence
  Synthetic
ggagucuuucucuguugcccggg

SEQ ID NO: 327589 - RNA, 24 nt, Artificial Sequence
  Synthetic
uggagucuuucucuguugcccggg

SEQ ID NO: 327590 - RNA, 18 nt, Artificial Sequence
  Synthetic
ucugauaccaaagccggg

SEQ ID NO: 327591 - RNA, 19 nt, Artificial Sequence
  Synthetic
uucugauaccaaagccggg

SEQ ID NO: 327592 - RNA, 20 nt, Artificial Sequence
  Synthetic
auucugauaccaaagccggg

SEQ ID NO: 327593 - RNA, 18 nt, Artificial Sequence
  Synthetic
uuggagagaaugagcggg

SEQ ID NO: 327594 - RNA, 19 nt, Artificial Sequence
  Synthetic
cuuggagagaaugagcggg

SEQ ID NO: 327595 - RNA, 20 nt, Artificial Sequence
  Synthetic
acuuggagagaaugagcggg

SEQ ID NO: 327596 - RNA, 21 nt, Artificial Sequence
  Synthetic
uacuuggagagaaugagcggg

SEQ ID NO: 327597 - RNA, 22 nt, Artificial Sequence
  Synthetic
uuacuuggagagaaugagcggg

SEQ ID NO: 327598 - RNA, 23 nt, Artificial Sequence
  Synthetic
guuacuuggagagaaugagcggg

SEQ ID NO: 327599 - RNA, 24 nt, Artificial Sequence
  Synthetic
uguuacuuggagagaaugagcggg

SEQ ID NO: 327600 - RNA, 18 nt, Artificial Sequence
  Synthetic
cucagcaguuugagcggg

SEQ ID NO: 327601 - RNA, 19 nt, Artificial Sequence
  Synthetic
ccucagcaguuugagcggg

SEQ ID NO: 327602 - RNA, 20 nt, Artificial Sequence
  Synthetic
uccucagcaguuugagcggg

SEQ ID NO: 327603 - RNA, 21 nt, Artificial Sequence
  Synthetic
uuccucagcaguuugagcggg

SEQ ID NO: 327604 - RNA, 22 nt, Artificial Sequence
  Synthetic
cuuccucagcaguuugagcggg

SEQ ID NO: 327605 - RNA, 23 nt, Artificial Sequence
  Synthetic
ccuuccucagcaguuugagcggg

SEQ ID NO: 327606 - RNA, 24 nt, Artificial Sequence
  Synthetic
accuuccucagcaguuugagcggg

SEQ ID NO: 327607 - RNA, 18 nt, Artificial Sequence
  Synthetic
uuuccaagagagggcggg

SEQ ID NO: 327608 - RNA, 19 nt, Artificial Sequence
  Synthetic
uuuuccaagagagggcggg

SEQ ID NO: 327609 - RNA, 20 nt, Artificial Sequence
  Synthetic
guuuuccaagagagggcggg

SEQ ID NO: 327610 - RNA, 21 nt, Artificial Sequence
  Synthetic
aguuuuccaagagagggcggg

SEQ ID NO: 327611 - RNA, 22 nt, Artificial Sequence
  Synthetic
caguuuuccaagagagggcggg

SEQ ID NO: 327612 - RNA, 23 nt, Artificial Sequence
  Synthetic
gcaguuuuccaagagagggcggg

SEQ ID NO: 327613 - RNA, 24 nt, Artificial Sequence
  Synthetic
ggcaguuuuccaagagagggcggg

SEQ ID NO: 327614 - RNA, 18 nt, Artificial Sequence
  Synthetic
caagaggcucuuggcggg

SEQ ID NO: 327615 - RNA, 19 nt, Artificial Sequence
  Synthetic
acaagaggcucuuggcggg

SEQ ID NO: 327616 - RNA, 20 nt, Artificial Sequence
  Synthetic
aacaagaggcucuuggcggg

SEQ ID NO: 327617 - RNA, 21 nt, Artificial Sequence
  Synthetic
uaacaagaggcucuuggcggg

SEQ ID NO: 327618 - RNA, 22 nt, Artificial Sequence
  Synthetic
uuaacaagaggcucuuggcggg

SEQ ID NO: 327619 - RNA, 23 nt, Artificial Sequence
  Synthetic
uuuaacaagaggcucuuggcggg

SEQ ID NO: 327620 - RNA, 24 nt, Artificial Sequence
  Synthetic
guuuaacaagaggcucuuggcggg

SEQ ID NO: 327621 - RNA, 18 nt, Artificial Sequence
  Synthetic
uagucccagcuacucggg

SEQ ID NO: 327622 - RNA, 19 nt, Artificial Sequence
  Synthetic
auagucccagcuacucggg

SEQ ID NO: 327623 - RNA, 20 nt, Artificial Sequence
  Synthetic
uauagucccagcuacucggg

SEQ ID NO: 327624 - RNA, 21 nt, Artificial Sequence
  Synthetic
cuauagucccagcuacucggg

SEQ ID NO: 327625 - RNA, 22 nt, Artificial Sequence
  Synthetic
ccuauagucccagcuacucggg

SEQ ID NO: 327626 - RNA, 23 nt, Artificial Sequence
  Synthetic
gccuauagucccagcuacucggg

SEQ ID NO: 327627 - RNA, 24 nt, Artificial Sequence
  Synthetic
cgccuauagucccagcuacucggg

SEQ ID NO: 327628 - RNA, 18 nt, Artificial Sequence
  Synthetic
ugcaguuagagagucggg

SEQ ID NO: 327629 - RNA, 19 nt, Artificial Sequence
  Synthetic
cugcaguuagagagucggg

SEQ ID NO: 327630 - RNA, 20 nt, Artificial Sequence
  Synthetic
ucugcaguuagagagucggg

SEQ ID NO: 327631 - RNA, 21 nt, Artificial Sequence
  Synthetic
aucugcaguuagagagucggg

SEQ ID NO: 327632 - RNA, 22 nt, Artificial Sequence
  Synthetic
aaucugcaguuagagagucggg

SEQ ID NO: 327633 - RNA, 23 nt, Artificial Sequence
  Synthetic
aaaucugcaguuagagagucggg

SEQ ID NO: 327634 - RNA, 24 nt, Artificial Sequence
  Synthetic
aaaaucugcaguuagagagucggg

SEQ ID NO: 327635 - RNA, 18 nt, Artificial Sequence
  Synthetic
acaguagcaggggucggg

SEQ ID NO: 327636 - RNA, 19 nt, Artificial Sequence
  Synthetic
gacaguagcaggggucggg

SEQ ID NO: 327637 - RNA, 20 nt, Artificial Sequence
  Synthetic
agacaguagcaggggucggg

SEQ ID NO: 327638 - RNA, 21 nt, Artificial Sequence
  Synthetic
aagacaguagcaggggucggg

SEQ ID NO: 327639 - RNA, 22 nt, Artificial Sequence
  Synthetic
uaagacaguagcaggggucggg

SEQ ID NO: 327640 - RNA, 23 nt, Artificial Sequence
  Synthetic
cuaagacaguagcaggggucggg

SEQ ID NO: 327641 - RNA, 24 nt, Artificial Sequence
  Synthetic
ccuaagacaguagcaggggucggg

SEQ ID NO: 327642 - RNA, 18 nt, Artificial Sequence
  Synthetic
ggugcuucauuggucggg

SEQ ID NO: 327643 - RNA, 19 nt, Artificial Sequence
  Synthetic
gggugcuucauuggucggg

SEQ ID NO: 327644 - RNA, 20 nt, Artificial Sequence
  Synthetic
ugggugcuucauuggucggg

SEQ ID NO: 327645 - RNA, 21 nt, Artificial Sequence
  Synthetic
cugggugcuucauuggucggg

SEQ ID NO: 327646 - RNA, 22 nt, Artificial Sequence
  Synthetic
ccugggugcuucauuggucggg

SEQ ID NO: 327647 - RNA, 23 nt, Artificial Sequence
  Synthetic
uccugggugcuucauuggucggg

SEQ ID NO: 327648 - RNA, 24 nt, Artificial Sequence
  Synthetic
uuccugggugcuucauuggucggg

SEQ ID NO: 327649 - RNA, 18 nt, Artificial Sequence
  Synthetic
gaaagcaggaaaaagggg

SEQ ID NO: 327650 - RNA, 19 nt, Artificial Sequence
  Synthetic
ggaaagcaggaaaaagggg

SEQ ID NO: 327651 - RNA, 20 nt, Artificial Sequence
  Synthetic
aggaaagcaggaaaaagggg

SEQ ID NO: 327652 - RNA, 21 nt, Artificial Sequence
  Synthetic
aaggaaagcaggaaaaagggg

SEQ ID NO: 327653 - RNA, 22 nt, Artificial Sequence
  Synthetic
gaaggaaagcaggaaaaagggg

SEQ ID NO: 327654 - RNA, 23 nt, Artificial Sequence
  Synthetic
ggaaggaaagcaggaaaaagggg

SEQ ID NO: 327655 - RNA, 24 nt, Artificial Sequence
  Synthetic
aggaaggaaagcaggaaaaagggg

SEQ ID NO: 327656 - RNA, 18 nt, Artificial Sequence
  Synthetic
agaaauagccaaaagggg

SEQ ID NO: 327657 - RNA, 19 nt, Artificial Sequence
  Synthetic
cagaaauagccaaaagggg

SEQ ID NO: 327658 - RNA, 20 nt, Artificial Sequence
  Synthetic
acagaaauagccaaaagggg

SEQ ID NO: 327659 - RNA, 21 nt, Artificial Sequence
  Synthetic
aacagaaauagccaaaagggg

SEQ ID NO: 327660 - RNA, 22 nt, Artificial Sequence
  Synthetic
caacagaaauagccaaaagggg

SEQ ID NO: 327661 - RNA, 23 nt, Artificial Sequence
  Synthetic
ccaacagaaauagccaaaagggg

SEQ ID NO: 327662 - RNA, 24 nt, Artificial Sequence
  Synthetic
gccaacagaaauagccaaaagggg

SEQ ID NO: 327663 - RNA, 18 nt, Artificial Sequence
  Synthetic
aguuucagcccaaagggg

SEQ ID NO: 327664 - RNA, 19 nt, Artificial Sequence
  Synthetic
caguuucagcccaaagggg

SEQ ID NO: 327665 - RNA, 20 nt, Artificial Sequence
  Synthetic
ucaguuucagcccaaagggg

SEQ ID NO: 327666 - RNA, 21 nt, Artificial Sequence
  Synthetic
uucaguuucagcccaaagggg

SEQ ID NO: 327667 - RNA, 22 nt, Artificial Sequence
  Synthetic
uuucaguuucagcccaaagggg

SEQ ID NO: 327668 - RNA, 23 nt, Artificial Sequence
  Synthetic
uuuucaguuucagcccaaagggg

SEQ ID NO: 327669 - RNA, 24 nt, Artificial Sequence
  Synthetic
uuuuucaguuucagcccaaagggg

SEQ ID NO: 327670 - RNA, 18 nt, Artificial Sequence
  Synthetic
ugguggaaagcaaagggg

SEQ ID NO: 327671 - RNA, 19 nt, Artificial Sequence
  Synthetic
augguggaaagcaaagggg

SEQ ID NO: 327672 - RNA, 20 nt, Artificial Sequence
  Synthetic
caugguggaaagcaaagggg

SEQ ID NO: 327673 - RNA, 21 nt, Artificial Sequence
  Synthetic
ucaugguggaaagcaaagggg

SEQ ID NO: 327674 - RNA, 22 nt, Artificial Sequence
  Synthetic
aucaugguggaaagcaaagggg

SEQ ID NO: 327675 - RNA, 23 nt, Artificial Sequence
  Synthetic
aaucaugguggaaagcaaagggg

SEQ ID NO: 327676 - RNA, 24 nt, Artificial Sequence
  Synthetic
uaaucaugguggaaagcaaagggg

SEQ ID NO: 327677 - RNA, 18 nt, Artificial Sequence
  Synthetic
agcagaaggugaaagggg

SEQ ID NO: 327678 - RNA, 19 nt, Artificial Sequence
  Synthetic
aagcagaaggugaaagggg

SEQ ID NO: 327679 - RNA, 20 nt, Artificial Sequence
  Synthetic
caagcagaaggugaaagggg

SEQ ID NO: 327680 - RNA, 21 nt, Artificial Sequence
  Synthetic
ucaagcagaaggugaaagggg

SEQ ID NO: 327681 - RNA, 22 nt, Artificial Sequence
  Synthetic
gucaagcagaaggugaaagggg

SEQ ID NO: 327682 - RNA, 23 nt, Artificial Sequence
  Synthetic
ugucaagcagaaggugaaagggg

SEQ ID NO: 327683 - RNA, 24 nt, Artificial Sequence
  Synthetic
uugucaagcagaaggugaaagggg

SEQ ID NO: 327684 - RNA, 18 nt, Artificial Sequence
  Synthetic
gaucucauggacaagggg

SEQ ID NO: 327685 - RNA, 19 nt, Artificial Sequence
  Synthetic
ugaucucauggacaagggg

SEQ ID NO: 327686 - RNA, 20 nt, Artificial Sequence
  Synthetic
cugaucucauggacaagggg

SEQ ID NO: 327687 - RNA, 21 nt, Artificial Sequence
  Synthetic
ucugaucucauggacaagggg

SEQ ID NO: 327688 - RNA, 22 nt, Artificial Sequence
  Synthetic
cucugaucucauggacaagggg

SEQ ID NO: 327689 - RNA, 23 nt, Artificial Sequence
  Synthetic
ucucugaucucauggacaagggg

SEQ ID NO: 327690 - RNA, 24 nt, Artificial Sequence
  Synthetic
aucucugaucucauggacaagggg

SEQ ID NO: 327691 - RNA, 18 nt, Artificial Sequence
  Synthetic
gagguggggggcaagggg

SEQ ID NO: 327692 - RNA, 19 nt, Artificial Sequence
  Synthetic
cgagguggggggcaagggg

SEQ ID NO: 327693 - RNA, 20 nt, Artificial Sequence
  Synthetic
gcgagguggggggcaagggg

SEQ ID NO: 327694 - RNA, 21 nt, Artificial Sequence
  Synthetic
cgcgagguggggggcaagggg

SEQ ID NO: 327695 - RNA, 22 nt, Artificial Sequence
  Synthetic
ucgcgagguggggggcaagggg

SEQ ID NO: 327696 - RNA, 23 nt, Artificial Sequence
  Synthetic
gucgcgagguggggggcaagggg

SEQ ID NO: 327697 - RNA, 24 nt, Artificial Sequence
  Synthetic
ugucgcgagguggggggcaagggg

SEQ ID NO: 327698 - RNA, 18 nt, Artificial Sequence
  Synthetic
aaguccaagaucaagggg

SEQ ID NO: 327699 - RNA, 19 nt, Artificial Sequence
  Synthetic
gaaguccaagaucaagggg

SEQ ID NO: 327700 - RNA, 20 nt, Artificial Sequence
  Synthetic
cgaaguccaagaucaagggg

SEQ ID NO: 327701 - RNA, 21 nt, Artificial Sequence
  Synthetic
gcgaaguccaagaucaagggg

SEQ ID NO: 327702 - RNA, 22 nt, Artificial Sequence
  Synthetic
ugcgaaguccaagaucaagggg

SEQ ID NO: 327703 - RNA, 23 nt, Artificial Sequence
  Synthetic
cugcgaaguccaagaucaagggg

SEQ ID NO: 327704 - RNA, 24 nt, Artificial Sequence
  Synthetic
gcugcgaaguccaagaucaagggg

SEQ ID NO: 327705 - RNA, 18 nt, Artificial Sequence
  Synthetic
uugaccacucucaagggg

SEQ ID NO: 327706 - RNA, 19 nt, Artificial Sequence
  Synthetic
cuugaccacucucaagggg

SEQ ID NO: 327707 - RNA, 20 nt, Artificial Sequence
  Synthetic
ucuugaccacucucaagggg

SEQ ID NO: 327708 - RNA, 21 nt, Artificial Sequence
  Synthetic
gucuugaccacucucaagggg

SEQ ID NO: 327709 - RNA, 22 nt, Artificial Sequence
  Synthetic
agucuugaccacucucaagggg

SEQ ID NO: 327710 - RNA, 23 nt, Artificial Sequence
  Synthetic
aagucuugaccacucucaagggg

SEQ ID NO: 327711 - RNA, 24 nt, Artificial Sequence
  Synthetic
aaagucuugaccacucucaagggg

SEQ ID NO: 327712 - RNA, 18 nt, Artificial Sequence
  Synthetic
aagcccaaagucaagggg

SEQ ID NO: 327713 - RNA, 19 nt, Artificial Sequence
  Synthetic
caagcccaaagucaagggg

SEQ ID NO: 327714 - RNA, 20 nt, Artificial Sequence
  Synthetic
ccaagcccaaagucaagggg

SEQ ID NO: 327715 - RNA, 21 nt, Artificial Sequence
  Synthetic
gccaagcccaaagucaagggg

SEQ ID NO: 327716 - RNA, 22 nt, Artificial Sequence
  Synthetic
ggccaagcccaaagucaagggg

SEQ ID NO: 327717 - RNA, 23 nt, Artificial Sequence
  Synthetic
uggccaagcccaaagucaagggg

SEQ ID NO: 327718 - RNA, 24 nt, Artificial Sequence
  Synthetic
guggccaagcccaaagucaagggg

SEQ ID NO: 327719 - RNA, 18 nt, Artificial Sequence
  Synthetic
gagcucugauucaagggg

SEQ ID NO: 327720 - RNA, 19 nt, Artificial Sequence
  Synthetic
agagcucugauucaagggg

SEQ ID NO: 327721 - RNA, 20 nt, Artificial Sequence
  Synthetic
cagagcucugauucaagggg

SEQ ID NO: 327722 - RNA, 21 nt, Artificial Sequence
  Synthetic
acagagcucugauucaagggg

SEQ ID NO: 327723 - RNA, 22 nt, Artificial Sequence
  Synthetic
gacagagcucugauucaagggg

SEQ ID NO: 327724 - RNA, 23 nt, Artificial Sequence
  Synthetic
ugacagagcucugauucaagggg

SEQ ID NO: 327725 - RNA, 24 nt, Artificial Sequence
  Synthetic
gugacagagcucugauucaagggg

SEQ ID NO: 327726 - RNA, 18 nt, Artificial Sequence
  Synthetic
guggguauugagaagggg

SEQ ID NO: 327727 - RNA, 19 nt, Artificial Sequence
  Synthetic
aguggguauugagaagggg

SEQ ID NO: 327728 - RNA, 20 nt, Artificial Sequence
  Synthetic
gaguggguauugagaagggg

SEQ ID NO: 327729 - RNA, 21 nt, Artificial Sequence
  Synthetic
agaguggguauugagaagggg

SEQ ID NO: 327730 - RNA, 22 nt, Artificial Sequence
  Synthetic
uagaguggguauugagaagggg

SEQ ID NO: 327731 - RNA, 23 nt, Artificial Sequence
  Synthetic
cuagaguggguauugagaagggg

SEQ ID NO: 327732 - RNA, 24 nt, Artificial Sequence
  Synthetic
gcuagaguggguauugagaagggg

SEQ ID NO: 327733 - RNA, 18 nt, Artificial Sequence
  Synthetic
ggggacuacuagaagggg

SEQ ID NO: 327734 - RNA, 19 nt, Artificial Sequence
  Synthetic
uggggacuacuagaagggg

SEQ ID NO: 327735 - RNA, 20 nt, Artificial Sequence
  Synthetic
uuggggacuacuagaagggg

SEQ ID NO: 327736 - RNA, 21 nt, Artificial Sequence
  Synthetic
auuggggacuacuagaagggg

SEQ ID NO: 327737 - RNA, 22 nt, Artificial Sequence
  Synthetic
cauuggggacuacuagaagggg

SEQ ID NO: 327738 - RNA, 23 nt, Artificial Sequence
  Synthetic
acauuggggacuacuagaagggg

SEQ ID NO: 327739 - RNA, 24 nt, Artificial Sequence
  Synthetic
gacauuggggacuacuagaagggg

SEQ ID NO: 327740 - RNA, 18 nt, Artificial Sequence
  Synthetic
caaguggagaggaagggg

SEQ ID NO: 327741 - RNA, 19 nt, Artificial Sequence
  Synthetic
ucaaguggagaggaagggg

SEQ ID NO: 327742 - RNA, 20 nt, Artificial Sequence
  Synthetic
aucaaguggagaggaagggg

SEQ ID NO: 327743 - RNA, 21 nt, Artificial Sequence
  Synthetic
aaucaaguggagaggaagggg

SEQ ID NO: 327744 - RNA, 22 nt, Artificial Sequence
  Synthetic
aaaucaaguggagaggaagggg

SEQ ID NO: 327745 - RNA, 23 nt, Artificial Sequence
  Synthetic
aaaaucaaguggagaggaagggg

SEQ ID NO: 327746 - RNA, 24 nt, Artificial Sequence
  Synthetic
uaaaaucaaguggagaggaagggg

SEQ ID NO: 327747 - RNA, 18 nt, Artificial Sequence
  Synthetic
auaauccacucacagggg

SEQ ID NO: 327748 - RNA, 19 nt, Artificial Sequence
  Synthetic
gauaauccacucacagggg

SEQ ID NO: 327749 - RNA, 20 nt, Artificial Sequence
  Synthetic
ugauaauccacucacagggg

SEQ ID NO: 327750 - RNA, 21 nt, Artificial Sequence
  Synthetic
cugauaauccacucacagggg

SEQ ID NO: 327751 - RNA, 22 nt, Artificial Sequence
  Synthetic
acugauaauccacucacagggg

SEQ ID NO: 327752 - RNA, 23 nt, Artificial Sequence
  Synthetic
uacugauaauccacucacagggg

SEQ ID NO: 327753 - RNA, 24 nt, Artificial Sequence
  Synthetic
auacugauaauccacucacagggg

SEQ ID NO: 327754 - RNA, 18 nt, Artificial Sequence
  Synthetic
aaugauaguaaccagggg

SEQ ID NO: 327755 - RNA, 19 nt, Artificial Sequence
  Synthetic
gaaugauaguaaccagggg

SEQ ID NO: 327756 - RNA, 20 nt, Artificial Sequence
  Synthetic
agaaugauaguaaccagggg

SEQ ID NO: 327757 - RNA, 21 nt, Artificial Sequence
  Synthetic
uagaaugauaguaaccagggg

SEQ ID NO: 327758 - RNA, 22 nt, Artificial Sequence
  Synthetic
guagaaugauaguaaccagggg

SEQ ID NO: 327759 - RNA, 23 nt, Artificial Sequence
  Synthetic
aguagaaugauaguaaccagggg

SEQ ID NO: 327760 - RNA, 24 nt, Artificial Sequence
  Synthetic
gaguagaaugauaguaaccagggg

SEQ ID NO: 327761 - RNA, 18 nt, Artificial Sequence
  Synthetic
acuucacagagccagggg

SEQ ID NO: 327762 - RNA, 19 nt, Artificial Sequence
  Synthetic
uacuucacagagccagggg

SEQ ID NO: 327763 - RNA, 20 nt, Artificial Sequence
  Synthetic
guacuucacagagccagggg

SEQ ID NO: 327764 - RNA, 21 nt, Artificial Sequence
  Synthetic
uguacuucacagagccagggg

SEQ ID NO: 327765 - RNA, 22 nt, Artificial Sequence
  Synthetic
auguacuucacagagccagggg

SEQ ID NO: 327766 - RNA, 23 nt, Artificial Sequence
  Synthetic
gauguacuucacagagccagggg

SEQ ID NO: 327767 - RNA, 24 nt, Artificial Sequence
  Synthetic
ugauguacuucacagagccagggg

SEQ ID NO: 327768 - RNA, 18 nt, Artificial Sequence
  Synthetic
cuaagacaguagcagggg

SEQ ID NO: 327769 - RNA, 19 nt, Artificial Sequence
  Synthetic
ccuaagacaguagcagggg

SEQ ID NO: 327770 - RNA, 20 nt, Artificial Sequence
  Synthetic
uccuaagacaguagcagggg

SEQ ID NO: 327771 - RNA, 21 nt, Artificial Sequence
  Synthetic
guccuaagacaguagcagggg

SEQ ID NO: 327772 - RNA, 22 nt, Artificial Sequence
  Synthetic
aguccuaagacaguagcagggg

SEQ ID NO: 327773 - RNA, 23 nt, Artificial Sequence
  Synthetic
aaguccuaagacaguagcagggg

SEQ ID NO: 327774 - RNA, 24 nt, Artificial Sequence
  Synthetic
caaguccuaagacaguagcagggg

SEQ ID NO: 327775 - RNA, 18 nt, Artificial Sequence
  Synthetic
agaaguuugcugcagggg

SEQ ID NO: 327776 - RNA, 19 nt, Artificial Sequence
  Synthetic
cagaaguuugcugcagggg

SEQ ID NO: 327777 - RNA, 20 nt, Artificial Sequence
  Synthetic
gcagaaguuugcugcagggg

SEQ ID NO: 327778 - RNA, 21 nt, Artificial Sequence
  Synthetic
ggcagaaguuugcugcagggg

SEQ ID NO: 327779 - RNA, 22 nt, Artificial Sequence
  Synthetic
aggcagaaguuugcugcagggg

SEQ ID NO: 327780 - RNA, 23 nt, Artificial Sequence
  Synthetic
caggcagaaguuugcugcagggg

SEQ ID NO: 327781 - RNA, 24 nt, Artificial Sequence
  Synthetic
ccaggcagaaguuugcugcagggg

SEQ ID NO: 327782 - RNA, 18 nt, Artificial Sequence
  Synthetic
aucaccagagcucagggg

SEQ ID NO: 327783 - RNA, 19 nt, Artificial Sequence
  Synthetic
gaucaccagagcucagggg

SEQ ID NO: 327784 - RNA, 20 nt, Artificial Sequence
  Synthetic
ggaucaccagagcucagggg

SEQ ID NO: 327785 - RNA, 21 nt, Artificial Sequence
  Synthetic
aggaucaccagagcucagggg

SEQ ID NO: 327786 - RNA, 22 nt, Artificial Sequence
  Synthetic
gaggaucaccagagcucagggg

SEQ ID NO: 327787 - RNA, 23 nt, Artificial Sequence
  Synthetic
ggaggaucaccagagcucagggg

SEQ ID NO: 327788 - RNA, 24 nt, Artificial Sequence
  Synthetic
uggaggaucaccagagcucagggg

SEQ ID NO: 327789 - RNA, 18 nt, Artificial Sequence
  Synthetic
cauguaacagcagagggg

SEQ ID NO: 327790 - RNA, 19 nt, Artificial Sequence
  Synthetic
acauguaacagcagagggg

SEQ ID NO: 327791 - RNA, 20 nt, Artificial Sequence
  Synthetic
cacauguaacagcagagggg

SEQ ID NO: 327792 - RNA, 21 nt, Artificial Sequence
  Synthetic
ccacauguaacagcagagggg

SEQ ID NO: 327793 - RNA, 22 nt, Artificial Sequence
  Synthetic
gccacauguaacagcagagggg

SEQ ID NO: 327794 - RNA, 23 nt, Artificial Sequence
  Synthetic
ggccacauguaacagcagagggg

SEQ ID NO: 327795 - RNA, 24 nt, Artificial Sequence
  Synthetic
uggccacauguaacagcagagggg

SEQ ID NO: 327796 - RNA, 18 nt, Artificial Sequence
  Synthetic
gaccucaagagagagggg

SEQ ID NO: 327797 - RNA, 19 nt, Artificial Sequence
  Synthetic
agaccucaagagagagggg

SEQ ID NO: 327798 - RNA, 20 nt, Artificial Sequence
  Synthetic
cagaccucaagagagagggg

SEQ ID NO: 327799 - RNA, 21 nt, Artificial Sequence
  Synthetic
ccagaccucaagagagagggg

SEQ ID NO: 327800 - RNA, 22 nt, Artificial Sequence
  Synthetic
accagaccucaagagagagggg

SEQ ID NO: 327801 - RNA, 23 nt, Artificial Sequence
  Synthetic
uaccagaccucaagagagagggg

SEQ ID NO: 327802 - RNA, 24 nt, Artificial Sequence
  Synthetic
guaccagaccucaagagagagggg

SEQ ID NO: 327803 - RNA, 18 nt, Artificial Sequence
  Synthetic
auauauucccgagagggg

SEQ ID NO: 327804 - RNA, 19 nt, Artificial Sequence
  Synthetic
cauauauucccgagagggg

SEQ ID NO: 327805 - RNA, 20 nt, Artificial Sequence
  Synthetic
ccauauauucccgagagggg

SEQ ID NO: 327806 - RNA, 21 nt, Artificial Sequence
  Synthetic
gccauauauucccgagagggg

SEQ ID NO: 327807 - RNA, 22 nt, Artificial Sequence
  Synthetic
ggccauauauucccgagagggg

SEQ ID NO: 327808 - RNA, 23 nt, Artificial Sequence
  Synthetic
aggccauauauucccgagagggg

SEQ ID NO: 327809 - RNA, 24 nt, Artificial Sequence
  Synthetic
aaggccauauauucccgagagggg

SEQ ID NO: 327810 - RNA, 18 nt, Artificial Sequence
  Synthetic
caaagccacauagagggg

SEQ ID NO: 327811 - RNA, 19 nt, Artificial Sequence
  Synthetic
ccaaagccacauagagggg

SEQ ID NO: 327812 - RNA, 20 nt, Artificial Sequence
  Synthetic
accaaagccacauagagggg

SEQ ID NO: 327813 - RNA, 21 nt, Artificial Sequence
  Synthetic
aaccaaagccacauagagggg

SEQ ID NO: 327814 - RNA, 22 nt, Artificial Sequence
  Synthetic
uaaccaaagccacauagagggg

SEQ ID NO: 327815 - RNA, 23 nt, Artificial Sequence
  Synthetic
auaaccaaagccacauagagggg

SEQ ID NO: 327816 - RNA, 24 nt, Artificial Sequence
  Synthetic
uauaaccaaagccacauagagggg

SEQ ID NO: 327817 - RNA, 18 nt, Artificial Sequence
  Synthetic
gggggguggggcgagggg

SEQ ID NO: 327818 - RNA, 19 nt, Artificial Sequence
  Synthetic
cgggggguggggcgagggg

SEQ ID NO: 327819 - RNA, 20 nt, Artificial Sequence
  Synthetic
ucgggggguggggcgagggg

SEQ ID NO: 327820 - RNA, 21 nt, Artificial Sequence
  Synthetic
gucgggggguggggcgagggg

SEQ ID NO: 327821 - RNA, 22 nt, Artificial Sequence
  Synthetic
ugucgggggguggggcgagggg

SEQ ID NO: 327822 - RNA, 23 nt, Artificial Sequence
  Synthetic
cugucgggggguggggcgagggg

SEQ ID NO: 327823 - RNA, 24 nt, Artificial Sequence
  Synthetic
ccugucgggggguggggcgagggg

SEQ ID NO: 327824 - RNA, 18 nt, Artificial Sequence
  Synthetic
ccggggccugucgagggg

SEQ ID NO: 327825 - RNA, 19 nt, Artificial Sequence
  Synthetic
accggggccugucgagggg

SEQ ID NO: 327826 - RNA, 20 nt, Artificial Sequence
  Synthetic
caccggggccugucgagggg

SEQ ID NO: 327827 - RNA, 21 nt, Artificial Sequence
  Synthetic
acaccggggccugucgagggg

SEQ ID NO: 327828 - RNA, 22 nt, Artificial Sequence
  Synthetic
cacaccggggccugucgagggg

SEQ ID NO: 327829 - RNA, 23 nt, Artificial Sequence
  Synthetic
acacaccggggccugucgagggg

SEQ ID NO: 327830 - RNA, 24 nt, Artificial Sequence
  Synthetic
cacacaccggggccugucgagggg

SEQ ID NO: 327831 - RNA, 18 nt, Artificial Sequence
  Synthetic
cuccgaaaggaggagggg

SEQ ID NO: 327832 - RNA, 19 nt, Artificial Sequence
  Synthetic
acuccgaaaggaggagggg

SEQ ID NO: 327833 - RNA, 20 nt, Artificial Sequence
  Synthetic
cacuccgaaaggaggagggg

SEQ ID NO: 327834 - RNA, 21 nt, Artificial Sequence
  Synthetic
gcacuccgaaaggaggagggg

SEQ ID NO: 327835 - RNA, 22 nt, Artificial Sequence
  Synthetic
ggcacuccgaaaggaggagggg

SEQ ID NO: 327836 - RNA, 23 nt, Artificial Sequence
  Synthetic
aggcacuccgaaaggaggagggg

SEQ ID NO: 327837 - RNA, 24 nt, Artificial Sequence
  Synthetic
uaggcacuccgaaaggaggagggg

SEQ ID NO: 327838 - RNA, 18 nt, Artificial Sequence
  Synthetic
ccagggaccagggagggg

SEQ ID NO: 327839 - RNA, 19 nt, Artificial Sequence
  Synthetic
gccagggaccagggagggg

SEQ ID NO: 327840 - RNA, 20 nt, Artificial Sequence
  Synthetic
ugccagggaccagggagggg

SEQ ID NO: 327841 - RNA, 21 nt, Artificial Sequence
  Synthetic
uugccagggaccagggagggg

SEQ ID NO: 327842 - RNA, 22 nt, Artificial Sequence
  Synthetic
guugccagggaccagggagggg

SEQ ID NO: 327843 - RNA, 23 nt, Artificial Sequence
  Synthetic
gguugccagggaccagggagggg

SEQ ID NO: 327844 - RNA, 24 nt, Artificial Sequence
  Synthetic
ugguugccagggaccagggagggg

SEQ ID NO: 327845 - RNA, 18 nt, Artificial Sequence
  Synthetic
ugaacuaugauggagggg

SEQ ID NO: 327846 - RNA, 19 nt, Artificial Sequence
  Synthetic
uugaacuaugauggagggg

SEQ ID NO: 327847 - RNA, 20 nt, Artificial Sequence
  Synthetic
uuugaacuaugauggagggg

SEQ ID NO: 327848 - RNA, 21 nt, Artificial Sequence
  Synthetic
uuuugaacuaugauggagggg

SEQ ID NO: 327849 - RNA, 22 nt, Artificial Sequence
  Synthetic
cuuuugaacuaugauggagggg

SEQ ID NO: 327850 - RNA, 23 nt, Artificial Sequence
  Synthetic
ccuuuugaacuaugauggagggg

SEQ ID NO: 327851 - RNA, 24 nt, Artificial Sequence
  Synthetic
accuuuugaacuaugauggagggg

SEQ ID NO: 327852 - RNA, 18 nt, Artificial Sequence
  Synthetic
ugaguggguguggagggg

SEQ ID NO: 327853 - RNA, 19 nt, Artificial Sequence
  Synthetic
augaguggguguggagggg

SEQ ID NO: 327854 - RNA, 20 nt, Artificial Sequence
  Synthetic
uaugaguggguguggagggg

SEQ ID NO: 327855 - RNA, 21 nt, Artificial Sequence
  Synthetic
uuaugaguggguguggagggg

SEQ ID NO: 327856 - RNA, 22 nt, Artificial Sequence
  Synthetic
uuuaugaguggguguggagggg

SEQ ID NO: 327857 - RNA, 23 nt, Artificial Sequence
  Synthetic
guuuaugaguggguguggagggg

SEQ ID NO: 327858 - RNA, 24 nt, Artificial Sequence
  Synthetic
uguuuaugaguggguguggagggg

SEQ ID NO: 327859 - RNA, 18 nt, Artificial Sequence
  Synthetic
aaauucaugauugagggg

SEQ ID NO: 327860 - RNA, 19 nt, Artificial Sequence
  Synthetic
aaaauucaugauugagggg

SEQ ID NO: 327861 - RNA, 20 nt, Artificial Sequence
  Synthetic
gaaaauucaugauugagggg

SEQ ID NO: 327862 - RNA, 21 nt, Artificial Sequence
  Synthetic
agaaaauucaugauugagggg

SEQ ID NO: 327863 - RNA, 22 nt, Artificial Sequence
  Synthetic
aagaaaauucaugauugagggg

SEQ ID NO: 327864 - RNA, 23 nt, Artificial Sequence
  Synthetic
gaagaaaauucaugauugagggg

SEQ ID NO: 327865 - RNA, 24 nt, Artificial Sequence
  Synthetic
ugaagaaaauucaugauugagggg

SEQ ID NO: 327866 - RNA, 18 nt, Artificial Sequence
  Synthetic
acuggaaacuaguagggg

SEQ ID NO: 327867 - RNA, 19 nt, Artificial Sequence
  Synthetic
uacuggaaacuaguagggg

SEQ ID NO: 327868 - RNA, 20 nt, Artificial Sequence
  Synthetic
auacuggaaacuaguagggg

SEQ ID NO: 327869 - RNA, 21 nt, Artificial Sequence
  Synthetic
cauacuggaaacuaguagggg

SEQ ID NO: 327870 - RNA, 22 nt, Artificial Sequence
  Synthetic
acauacuggaaacuaguagggg

SEQ ID NO: 327871 - RNA, 23 nt, Artificial Sequence
  Synthetic
uacauacuggaaacuaguagggg

SEQ ID NO: 327872 - RNA, 24 nt, Artificial Sequence
  Synthetic
guacauacuggaaacuaguagggg

SEQ ID NO: 327873 - RNA, 18 nt, Artificial Sequence
  Synthetic
aaugaguuuagguagggg

SEQ ID NO: 327874 - RNA, 19 nt, Artificial Sequence
  Synthetic
aaaugaguuuagguagggg

SEQ ID NO: 327875 - RNA, 20 nt, Artificial Sequence
  Synthetic
aaaaugaguuuagguagggg

SEQ ID NO: 327876 - RNA, 21 nt, Artificial Sequence
  Synthetic
caaaaugaguuuagguagggg

SEQ ID NO: 327877 - RNA, 22 nt, Artificial Sequence
  Synthetic
ucaaaaugaguuuagguagggg

SEQ ID NO: 327878 - RNA, 23 nt, Artificial Sequence
  Synthetic
cucaaaaugaguuuagguagggg

SEQ ID NO: 327879 - RNA, 24 nt, Artificial Sequence
  Synthetic
ucucaaaaugaguuuagguagggg

SEQ ID NO: 327880 - RNA, 18 nt, Artificial Sequence
  Synthetic
gaggcuccgggguagggg

SEQ ID NO: 327881 - RNA, 19 nt, Artificial Sequence
  Synthetic
ggaggcuccgggguagggg

SEQ ID NO: 327882 - RNA, 20 nt, Artificial Sequence
  Synthetic
gggaggcuccgggguagggg

SEQ ID NO: 327883 - RNA, 21 nt, Artificial Sequence
  Synthetic
ugggaggcuccgggguagggg

SEQ ID NO: 327884 - RNA, 22 nt, Artificial Sequence
  Synthetic
cugggaggcuccgggguagggg

SEQ ID NO: 327885 - RNA, 23 nt, Artificial Sequence
  Synthetic
gcugggaggcuccgggguagggg

SEQ ID NO: 327886 - RNA, 24 nt, Artificial Sequence
  Synthetic
ugcugggaggcuccgggguagggg

SEQ ID NO: 327887 - RNA, 18 nt, Artificial Sequence
  Synthetic
gaaaacggaauguagggg

SEQ ID NO: 327888 - RNA, 19 nt, Artificial Sequence
  Synthetic
cgaaaacggaauguagggg

SEQ ID NO: 327889 - RNA, 20 nt, Artificial Sequence
  Synthetic
ucgaaaacggaauguagggg

SEQ ID NO: 327890 - RNA, 21 nt, Artificial Sequence
  Synthetic
aucgaaaacggaauguagggg

SEQ ID NO: 327891 - RNA, 22 nt, Artificial Sequence
  Synthetic
uaucgaaaacggaauguagggg

SEQ ID NO: 327892 - RNA, 23 nt, Artificial Sequence
  Synthetic
uuaucgaaaacggaauguagggg

SEQ ID NO: 327893 - RNA, 24 nt, Artificial Sequence
  Synthetic
cuuaucgaaaacggaauguagggg

SEQ ID NO: 327894 - RNA, 18 nt, Artificial Sequence
  Synthetic
agaagauggauguagggg

SEQ ID NO: 327895 - RNA, 19 nt, Artificial Sequence
  Synthetic
cagaagauggauguagggg

SEQ ID NO: 327896 - RNA, 20 nt, Artificial Sequence
  Synthetic
gcagaagauggauguagggg

SEQ ID NO: 327897 - RNA, 21 nt, Artificial Sequence
  Synthetic
agcagaagauggauguagggg

SEQ ID NO: 327898 - RNA, 22 nt, Artificial Sequence
  Synthetic
uagcagaagauggauguagggg

SEQ ID NO: 327899 - RNA, 23 nt, Artificial Sequence
  Synthetic
guagcagaagauggauguagggg

SEQ ID NO: 327900 - RNA, 24 nt, Artificial Sequence
  Synthetic
aguagcagaagauggauguagggg

SEQ ID NO: 327901 - RNA, 18 nt, Artificial Sequence
  Synthetic
agcucugugauguagggg

SEQ ID NO: 327902 - RNA, 19 nt, Artificial Sequence
  Synthetic
cagcucugugauguagggg

SEQ ID NO: 327903 - RNA, 20 nt, Artificial Sequence
  Synthetic
ccagcucugugauguagggg

SEQ ID NO: 327904 - RNA, 21 nt, Artificial Sequence
  Synthetic
gccagcucugugauguagggg

SEQ ID NO: 327905 - RNA, 22 nt, Artificial Sequence
  Synthetic
ggccagcucugugauguagggg

SEQ ID NO: 327906 - RNA, 23 nt, Artificial Sequence
  Synthetic
gggccagcucugugauguagggg

SEQ ID NO: 327907 - RNA, 24 nt, Artificial Sequence
  Synthetic
ggggccagcucugugauguagggg

SEQ ID NO: 327908 - RNA, 18 nt, Artificial Sequence
  Synthetic
ggggucaacguguagggg

SEQ ID NO: 327909 - RNA, 19 nt, Artificial Sequence
  Synthetic
uggggucaacguguagggg

SEQ ID NO: 327910 - RNA, 20 nt, Artificial Sequence
  Synthetic
uuggggucaacguguagggg

SEQ ID NO: 327911 - RNA, 21 nt, Artificial Sequence
  Synthetic
cuuggggucaacguguagggg

SEQ ID NO: 327912 - RNA, 22 nt, Artificial Sequence
  Synthetic
ucuuggggucaacguguagggg

SEQ ID NO: 327913 - RNA, 23 nt, Artificial Sequence
  Synthetic
uucuuggggucaacguguagggg

SEQ ID NO: 327914 - RNA, 24 nt, Artificial Sequence
  Synthetic
guucuuggggucaacguguagggg

SEQ ID NO: 327915 - RNA, 18 nt, Artificial Sequence
  Synthetic
aggcuguggauuuagggg

SEQ ID NO: 327916 - RNA, 19 nt, Artificial Sequence
  Synthetic
gaggcuguggauuuagggg

SEQ ID NO: 327917 - RNA, 20 nt, Artificial Sequence
  Synthetic
agaggcuguggauuuagggg

SEQ ID NO: 327918 - RNA, 21 nt, Artificial Sequence
  Synthetic
cagaggcuguggauuuagggg

SEQ ID NO: 327919 - RNA, 22 nt, Artificial Sequence
  Synthetic
ccagaggcuguggauuuagggg

SEQ ID NO: 327920 - RNA, 23 nt, Artificial Sequence
  Synthetic
accagaggcuguggauuuagggg

SEQ ID NO: 327921 - RNA, 24 nt, Artificial Sequence
  Synthetic
uaccagaggcuguggauuuagggg

SEQ ID NO: 327922 - RNA, 18 nt, Artificial Sequence
  Synthetic
uuuugagcuauuuagggg

SEQ ID NO: 327923 - RNA, 19 nt, Artificial Sequence
  Synthetic
guuuugagcuauuuagggg

SEQ ID NO: 327924 - RNA, 20 nt, Artificial Sequence
  Synthetic
uguuuugagcuauuuagggg

SEQ ID NO: 327925 - RNA, 21 nt, Artificial Sequence
  Synthetic
auguuuugagcuauuuagggg

SEQ ID NO: 327926 - RNA, 22 nt, Artificial Sequence
  Synthetic
gauguuuugagcuauuuagggg

SEQ ID NO: 327927 - RNA, 23 nt, Artificial Sequence
  Synthetic
ugauguuuugagcuauuuagggg

SEQ ID NO: 327928 - RNA, 24 nt, Artificial Sequence
  Synthetic
cugauguuuugagcuauuuagggg

SEQ ID NO: 327929 - RNA, 18 nt, Artificial Sequence
  Synthetic
ggacagagcaccacgggg

SEQ ID NO: 327930 - RNA, 19 nt, Artificial Sequence
  Synthetic
gggacagagcaccacgggg

SEQ ID NO: 327931 - RNA, 20 nt, Artificial Sequence
  Synthetic
ugggacagagcaccacgggg

SEQ ID NO: 327932 - RNA, 21 nt, Artificial Sequence
  Synthetic
cugggacagagcaccacgggg

SEQ ID NO: 327933 - RNA, 22 nt, Artificial Sequence
  Synthetic
ccugggacagagcaccacgggg

SEQ ID NO: 327934 - RNA, 23 nt, Artificial Sequence
  Synthetic
cccugggacagagcaccacgggg

SEQ ID NO: 327935 - RNA, 24 nt, Artificial Sequence
  Synthetic
ucccugggacagagcaccacgggg

SEQ ID NO: 327936 - RNA, 18 nt, Artificial Sequence
  Synthetic
ccauuguaugucccgggg

SEQ ID NO: 327937 - RNA, 19 nt, Artificial Sequence
  Synthetic
uccauuguaugucccgggg

SEQ ID NO: 327938 - RNA, 20 nt, Artificial Sequence
  Synthetic
auccauuguaugucccgggg

SEQ ID NO: 327939 - RNA, 21 nt, Artificial Sequence
  Synthetic
aauccauuguaugucccgggg

SEQ ID NO: 327940 - RNA, 22 nt, Artificial Sequence
  Synthetic
uaauccauuguaugucccgggg

SEQ ID NO: 327941 - RNA, 23 nt, Artificial Sequence
  Synthetic
uuaauccauuguaugucccgggg

SEQ ID NO: 327942 - RNA, 24 nt, Artificial Sequence
  Synthetic
auuaauccauuguaugucccgggg

SEQ ID NO: 327943 - RNA, 18 nt, Artificial Sequence
  Synthetic
ugcugggaggcuccgggg

SEQ ID NO: 327944 - RNA, 19 nt, Artificial Sequence
  Synthetic
gugcugggaggcuccgggg

SEQ ID NO: 327945 - RNA, 20 nt, Artificial Sequence
  Synthetic
agugcugggaggcuccgggg

SEQ ID NO: 327946 - RNA, 21 nt, Artificial Sequence
  Synthetic
cagugcugggaggcuccgggg

SEQ ID NO: 327947 - RNA, 22 nt, Artificial Sequence
  Synthetic
gcagugcugggaggcuccgggg

SEQ ID NO: 327948 - RNA, 23 nt, Artificial Sequence
  Synthetic
agcagugcugggaggcuccgggg

SEQ ID NO: 327949 - RNA, 24 nt, Artificial Sequence
  Synthetic
cagcagugcugggaggcuccgggg

SEQ ID NO: 327950 - RNA, 18 nt, Artificial Sequence
  Synthetic
ucagcaguuugagcgggg

SEQ ID NO: 327951 - RNA, 19 nt, Artificial Sequence
  Synthetic
cucagcaguuugagcgggg

SEQ ID NO: 327952 - RNA, 20 nt, Artificial Sequence
  Synthetic
ccucagcaguuugagcgggg

SEQ ID NO: 327953 - RNA, 21 nt, Artificial Sequence
  Synthetic
uccucagcaguuugagcgggg

SEQ ID NO: 327954 - RNA, 22 nt, Artificial Sequence
  Synthetic
uuccucagcaguuugagcgggg

SEQ ID NO: 327955 - RNA, 23 nt, Artificial Sequence
  Synthetic
cuuccucagcaguuugagcgggg

SEQ ID NO: 327956 - RNA, 24 nt, Artificial Sequence
  Synthetic
ccuuccucagcaguuugagcgggg

SEQ ID NO: 327957 - RNA, 18 nt, Artificial Sequence
  Synthetic
guaaaauauuuagcgggg

SEQ ID NO: 327958 - RNA, 19 nt, Artificial Sequence
  Synthetic
aguaaaauauuuagcgggg

SEQ ID NO: 327959 - RNA, 20 nt, Artificial Sequence
  Synthetic
aaguaaaauauuuagcgggg

SEQ ID NO: 327960 - RNA, 21 nt, Artificial Sequence
  Synthetic
gaaguaaaauauuuagcgggg

SEQ ID NO: 327961 - RNA, 22 nt, Artificial Sequence
  Synthetic
ggaaguaaaauauuuagcgggg

SEQ ID NO: 327962 - RNA, 23 nt, Artificial Sequence
  Synthetic
cggaaguaaaauauuuagcgggg

SEQ ID NO: 327963 - RNA, 24 nt, Artificial Sequence
  Synthetic
gcggaaguaaaauauuuagcgggg

SEQ ID NO: 327964 - RNA, 18 nt, Artificial Sequence
  Synthetic
cugguugggguggcgggg

SEQ ID NO: 327965 - RNA, 19 nt, Artificial Sequence
  Synthetic
ccugguugggguggcgggg

SEQ ID NO: 327966 - RNA, 20 nt, Artificial Sequence
  Synthetic
uccugguugggguggcgggg

SEQ ID NO: 327967 - RNA, 21 nt, Artificial Sequence
  Synthetic
uuccugguugggguggcgggg

SEQ ID NO: 327968 - RNA, 22 nt, Artificial Sequence
  Synthetic
auuccugguugggguggcgggg

SEQ ID NO: 327969 - RNA, 23 nt, Artificial Sequence
  Synthetic
cauuccugguugggguggcgggg

SEQ ID NO: 327970 - RNA, 24 nt, Artificial Sequence
  Synthetic
acauuccugguugggguggcgggg

SEQ ID NO: 327971 - RNA, 18 nt, Artificial Sequence
  Synthetic
acugugguggggucgggg

SEQ ID NO: 327972 - RNA, 19 nt, Artificial Sequence
  Synthetic
gacugugguggggucgggg

SEQ ID NO: 327973 - RNA, 20 nt, Artificial Sequence
  Synthetic
ggacugugguggggucgggg

SEQ ID NO: 327974 - RNA, 21 nt, Artificial Sequence
  Synthetic
gggacugugguggggucgggg

SEQ ID NO: 327975 - RNA, 22 nt, Artificial Sequence
  Synthetic
ggggacugugguggggucgggg

SEQ ID NO: 327976 - RNA, 23 nt, Artificial Sequence
  Synthetic
uggggacugugguggggucgggg

SEQ ID NO: 327977 - RNA, 24 nt, Artificial Sequence
  Synthetic
cuggggacugugguggggucgggg

SEQ ID NO: 327978 - RNA, 18 nt, Artificial Sequence
  Synthetic
ccuguuguggggucgggg

SEQ ID NO: 327979 - RNA, 19 nt, Artificial Sequence
  Synthetic
gccuguuguggggucgggg

SEQ ID NO: 327980 - RNA, 20 nt, Artificial Sequence
  Synthetic
ggccuguuguggggucgggg

SEQ ID NO: 327981 - RNA, 21 nt, Artificial Sequence
  Synthetic
gggccuguuguggggucgggg

SEQ ID NO: 327982 - RNA, 22 nt, Artificial Sequence
  Synthetic
agggccuguuguggggucgggg

SEQ ID NO: 327983 - RNA, 23 nt, Artificial Sequence
  Synthetic
cagggccuguuguggggucgggg

SEQ ID NO: 327984 - RNA, 24 nt, Artificial Sequence
  Synthetic
ccagggccuguuguggggucgggg

SEQ ID NO: 327985 - RNA, 18 nt, Artificial Sequence
  Synthetic
gugcuucauuggucgggg

SEQ ID NO: 327986 - RNA, 19 nt, Artificial Sequence
  Synthetic
ggugcuucauuggucgggg

SEQ ID NO: 327987 - RNA, 20 nt, Artificial Sequence
  Synthetic
gggugcuucauuggucgggg

SEQ ID NO: 327988 - RNA, 21 nt, Artificial Sequence
  Synthetic
ugggugcuucauuggucgggg

SEQ ID NO: 327989 - RNA, 22 nt, Artificial Sequence
  Synthetic
cugggugcuucauuggucgggg

SEQ ID NO: 327990 - RNA, 23 nt, Artificial Sequence
  Synthetic
ccugggugcuucauuggucgggg

SEQ ID NO: 327991 - RNA, 24 nt, Artificial Sequence
  Synthetic
uccugggugcuucauuggucgggg

SEQ ID NO: 327992 - RNA, 18 nt, Artificial Sequence
  Synthetic
agaaagaucaaaaggggg

SEQ ID NO: 327993 - RNA, 19 nt, Artificial Sequence
  Synthetic
aagaaagaucaaaaggggg

SEQ ID NO: 327994 - RNA, 20 nt, Artificial Sequence
  Synthetic
caagaaagaucaaaaggggg

SEQ ID NO: 327995 - RNA, 21 nt, Artificial Sequence
  Synthetic
gcaagaaagaucaaaaggggg

SEQ ID NO: 327996 - RNA, 22 nt, Artificial Sequence
  Synthetic
ggcaagaaagaucaaaaggggg

SEQ ID NO: 327997 - RNA, 23 nt, Artificial Sequence
  Synthetic
gggcaagaaagaucaaaaggggg

SEQ ID NO: 327998 - RNA, 24 nt, Artificial Sequence
  Synthetic
agggcaagaaagaucaaaaggggg

SEQ ID NO: 327999 - RNA, 18 nt, Artificial Sequence
  Synthetic
agaaauuuuaaaaggggg

SEQ ID NO: 328000 - RNA, 19 nt, Artificial Sequence
  Synthetic
uagaaauuuuaaaaggggg

SEQ ID NO: 328001 - RNA, 20 nt, Artificial Sequence
  Synthetic
auagaaauuuuaaaaggggg

SEQ ID NO: 328002 - RNA, 21 nt, Artificial Sequence
  Synthetic
cauagaaauuuuaaaaggggg

SEQ ID NO: 328003 - RNA, 22 nt, Artificial Sequence
  Synthetic
ccauagaaauuuuaaaaggggg

SEQ ID NO: 328004 - RNA, 23 nt, Artificial Sequence
  Synthetic
accauagaaauuuuaaaaggggg

SEQ ID NO: 328005 - RNA, 24 nt, Artificial Sequence
  Synthetic
uaccauagaaauuuuaaaaggggg

SEQ ID NO: 328006 - RNA, 18 nt, Artificial Sequence
  Synthetic
aguacugaggaaaggggg

SEQ ID NO: 328007 - RNA, 19 nt, Artificial Sequence
  Synthetic
aaguacugaggaaaggggg

SEQ ID NO: 328008 - RNA, 20 nt, Artificial Sequence
  Synthetic
gaaguacugaggaaaggggg

SEQ ID NO: 328009 - RNA, 21 nt, Artificial Sequence
  Synthetic
agaaguacugaggaaaggggg

SEQ ID NO: 328010 - RNA, 22 nt, Artificial Sequence
  Synthetic
gagaaguacugaggaaaggggg

SEQ ID NO: 328011 - RNA, 23 nt, Artificial Sequence
  Synthetic
ggagaaguacugaggaaaggggg

SEQ ID NO: 328012 - RNA, 24 nt, Artificial Sequence
  Synthetic
aggagaaguacugaggaaaggggg

SEQ ID NO: 328013 - RNA, 18 nt, Artificial Sequence
  Synthetic
cuucaggggagaaggggg

SEQ ID NO: 328014 - RNA, 19 nt, Artificial Sequence
  Synthetic
gcuucaggggagaaggggg

SEQ ID NO: 328015 - RNA, 20 nt, Artificial Sequence
  Synthetic
ugcuucaggggagaaggggg

SEQ ID NO: 328016 - RNA, 21 nt, Artificial Sequence
  Synthetic
cugcuucaggggagaaggggg

SEQ ID NO: 328017 - RNA, 22 nt, Artificial Sequence
  Synthetic
ccugcuucaggggagaaggggg

SEQ ID NO: 328018 - RNA, 23 nt, Artificial Sequence
  Synthetic
accugcuucaggggagaaggggg

SEQ ID NO: 328019 - RNA, 24 nt, Artificial Sequence
  Synthetic
gaccugcuucaggggagaaggggg

SEQ ID NO: 328020 - RNA, 18 nt, Artificial Sequence
  Synthetic
gggacuacuagaaggggg

SEQ ID NO: 328021 - RNA, 19 nt, Artificial Sequence
  Synthetic
ggggacuacuagaaggggg

SEQ ID NO: 328022 - RNA, 20 nt, Artificial Sequence
  Synthetic
uggggacuacuagaaggggg

SEQ ID NO: 328023 - RNA, 21 nt, Artificial Sequence
  Synthetic
uuggggacuacuagaaggggg

SEQ ID NO: 328024 - RNA, 22 nt, Artificial Sequence
  Synthetic
auuggggacuacuagaaggggg

SEQ ID NO: 328025 - RNA, 23 nt, Artificial Sequence
  Synthetic
cauuggggacuacuagaaggggg

SEQ ID NO: 328026 - RNA, 24 nt, Artificial Sequence
  Synthetic
acauuggggacuacuagaaggggg

SEQ ID NO: 328027 - RNA, 18 nt, Artificial Sequence
  Synthetic
agaucaccaggaaggggg

SEQ ID NO: 328028 - RNA, 19 nt, Artificial Sequence
  Synthetic
gagaucaccaggaaggggg

SEQ ID NO: 328029 - RNA, 20 nt, Artificial Sequence
  Synthetic
ggagaucaccaggaaggggg

SEQ ID NO: 328030 - RNA, 21 nt, Artificial Sequence
  Synthetic
uggagaucaccaggaaggggg

SEQ ID NO: 328031 - RNA, 22 nt, Artificial Sequence
  Synthetic
guggagaucaccaggaaggggg

SEQ ID NO: 328032 - RNA, 23 nt, Artificial Sequence
  Synthetic
uguggagaucaccaggaaggggg

SEQ ID NO: 328033 - RNA, 24 nt, Artificial Sequence
  Synthetic
uuguggagaucaccaggaaggggg

SEQ ID NO: 328034 - RNA, 18 nt, Artificial Sequence
  Synthetic
uggggugggggaaggggg

SEQ ID NO: 328035 - RNA, 19 nt, Artificial Sequence
  Synthetic
guggggugggggaaggggg

SEQ ID NO: 328036 - RNA, 20 nt, Artificial Sequence
  Synthetic
uguggggugggggaaggggg

SEQ ID NO: 328037 - RNA, 21 nt, Artificial Sequence
  Synthetic
uuguggggugggggaaggggg

SEQ ID NO: 328038 - RNA, 22 nt, Artificial Sequence
  Synthetic
guuguggggugggggaaggggg

SEQ ID NO: 328039 - RNA, 23 nt, Artificial Sequence
  Synthetic
uguuguggggugggggaaggggg

SEQ ID NO: 328040 - RNA, 24 nt, Artificial Sequence
  Synthetic
cuguuguggggugggggaaggggg

SEQ ID NO: 328041 - RNA, 18 nt, Artificial Sequence
  Synthetic
uccuacaguggaaggggg

SEQ ID NO: 328042 - RNA, 19 nt, Artificial Sequence
  Synthetic
uuccuacaguggaaggggg

SEQ ID NO: 328043 - RNA, 20 nt, Artificial Sequence
  Synthetic
cuuccuacaguggaaggggg

SEQ ID NO: 328044 - RNA, 21 nt, Artificial Sequence
  Synthetic
ucuuccuacaguggaaggggg

SEQ ID NO: 328045 - RNA, 22 nt, Artificial Sequence
  Synthetic
cucuuccuacaguggaaggggg

SEQ ID NO: 328046 - RNA, 23 nt, Artificial Sequence
  Synthetic
acucuuccuacaguggaaggggg

SEQ ID NO: 328047 - RNA, 24 nt, Artificial Sequence
  Synthetic
gacucuuccuacaguggaaggggg

SEQ ID NO: 328048 - RNA, 18 nt, Artificial Sequence
  Synthetic
aaaguuugggacaggggg

SEQ ID NO: 328049 - RNA, 19 nt, Artificial Sequence
  Synthetic
uaaaguuugggacaggggg

SEQ ID NO: 328050 - RNA, 20 nt, Artificial Sequence
  Synthetic
uuaaaguuugggacaggggg

SEQ ID NO: 328051 - RNA, 21 nt, Artificial Sequence
  Synthetic
uuuaaaguuugggacaggggg

SEQ ID NO: 328052 - RNA, 22 nt, Artificial Sequence
  Synthetic
uuuuaaaguuugggacaggggg

SEQ ID NO: 328053 - RNA, 23 nt, Artificial Sequence
  Synthetic
uuuuuaaaguuugggacaggggg

SEQ ID NO: 328054 - RNA, 24 nt, Artificial Sequence
  Synthetic
uuuuuuaaaguuugggacaggggg

SEQ ID NO: 328055 - RNA, 18 nt, Artificial Sequence
  Synthetic
uggcacuguuccaggggg

SEQ ID NO: 328056 - RNA, 19 nt, Artificial Sequence
  Synthetic
guggcacuguuccaggggg

SEQ ID NO: 328057 - RNA, 20 nt, Artificial Sequence
  Synthetic
aguggcacuguuccaggggg

SEQ ID NO: 328058 - RNA, 21 nt, Artificial Sequence
  Synthetic
gaguggcacuguuccaggggg

SEQ ID NO: 328059 - RNA, 22 nt, Artificial Sequence
  Synthetic
ugaguggcacuguuccaggggg

SEQ ID NO: 328060 - RNA, 23 nt, Artificial Sequence
  Synthetic
uugaguggcacuguuccaggggg

SEQ ID NO: 328061 - RNA, 24 nt, Artificial Sequence
  Synthetic
auugaguggcacuguuccaggggg

SEQ ID NO: 328062 - RNA, 18 nt, Artificial Sequence
  Synthetic
uggggucgggggaggggg

SEQ ID NO: 328063 - RNA, 19 nt, Artificial Sequence
  Synthetic
guggggucgggggaggggg

SEQ ID NO: 328064 - RNA, 20 nt, Artificial Sequence
  Synthetic
gguggggucgggggaggggg

SEQ ID NO: 328065 - RNA, 21 nt, Artificial Sequence
  Synthetic
ugguggggucgggggaggggg

SEQ ID NO: 328066 - RNA, 22 nt, Artificial Sequence
  Synthetic
gugguggggucgggggaggggg

SEQ ID NO: 328067 - RNA, 23 nt, Artificial Sequence
  Synthetic
ugugguggggucgggggaggggg

SEQ ID NO: 328068 - RNA, 24 nt, Artificial Sequence
  Synthetic
cugugguggggucgggggaggggg

SEQ ID NO: 328069 - RNA, 20 nt, Artificial Sequence
  Synthetic
uguggggucgggggaggggg

SEQ ID NO: 328070 - RNA, 21 nt, Artificial Sequence
  Synthetic
uuguggggucgggggaggggg

SEQ ID NO: 328071 - RNA, 22 nt, Artificial Sequence
  Synthetic
guuguggggucgggggaggggg

SEQ ID NO: 328072 - RNA, 23 nt, Artificial Sequence
  Synthetic
uguuguggggucgggggaggggg

SEQ ID NO: 328073 - RNA, 24 nt, Artificial Sequence
  Synthetic
cuguuguggggucgggggaggggg

SEQ ID NO: 328074 - RNA, 18 nt, Artificial Sequence
  Synthetic
ugggguggggggaggggg

SEQ ID NO: 328075 - RNA, 19 nt, Artificial Sequence
  Synthetic
gugggguggggggaggggg

SEQ ID NO: 328076 - RNA, 20 nt, Artificial Sequence
  Synthetic
cgugggguggggggaggggg

SEQ ID NO: 328077 - RNA, 21 nt, Artificial Sequence
  Synthetic
ucgugggguggggggaggggg

SEQ ID NO: 328078 - RNA, 22 nt, Artificial Sequence
  Synthetic
gucgugggguggggggaggggg

SEQ ID NO: 328079 - RNA, 23 nt, Artificial Sequence
  Synthetic
ugucgugggguggggggaggggg

SEQ ID NO: 328080 - RNA, 24 nt, Artificial Sequence
  Synthetic
cugucgugggguggggggaggggg

SEQ ID NO: 328081 - RNA, 20 nt, Artificial Sequence
  Synthetic
ggugggguggggggaggggg

SEQ ID NO: 328082 - RNA, 21 nt, Artificial Sequence
  Synthetic
uggugggguggggggaggggg

SEQ ID NO: 328083 - RNA, 22 nt, Artificial Sequence
  Synthetic
guggugggguggggggaggggg

SEQ ID NO: 328084 - RNA, 23 nt, Artificial Sequence
  Synthetic
uguggugggguggggggaggggg

SEQ ID NO: 328085 - RNA, 24 nt, Artificial Sequence
  Synthetic
cuguggugggguggggggaggggg

SEQ ID NO: 328086 - RNA, 20 nt, Artificial Sequence
  Synthetic
ugugggguggggggaggggg

SEQ ID NO: 328087 - RNA, 21 nt, Artificial Sequence
  Synthetic
uugugggguggggggaggggg

SEQ ID NO: 328088 - RNA, 22 nt, Artificial Sequence
  Synthetic
guugugggguggggggaggggg

SEQ ID NO: 328089 - RNA, 23 nt, Artificial Sequence
  Synthetic
uguugugggguggggggaggggg

SEQ ID NO: 328090 - RNA, 24 nt, Artificial Sequence
  Synthetic
cuguugugggguggggggaggggg

SEQ ID NO: 328091 - RNA, 18 nt, Artificial Sequence
  Synthetic
gguuggucagguaggggg

SEQ ID NO: 328092 - RNA, 19 nt, Artificial Sequence
  Synthetic
ggguuggucagguaggggg

SEQ ID NO: 328093 - RNA, 20 nt, Artificial Sequence
  Synthetic
uggguuggucagguaggggg

SEQ ID NO: 328094 - RNA, 21 nt, Artificial Sequence
  Synthetic
auggguuggucagguaggggg

SEQ ID NO: 328095 - RNA, 22 nt, Artificial Sequence
  Synthetic
gauggguuggucagguaggggg

SEQ ID NO: 328096 - RNA, 23 nt, Artificial Sequence
  Synthetic
agauggguuggucagguaggggg

SEQ ID NO: 328097 - RNA, 24 nt, Artificial Sequence
  Synthetic
gagauggguuggucagguaggggg

SEQ ID NO: 328098 - RNA, 18 nt, Artificial Sequence
  Synthetic
auacugagaguacggggg

SEQ ID NO: 328099 - RNA, 19 nt, Artificial Sequence
  Synthetic
aauacugagaguacggggg

SEQ ID NO: 328100 - RNA, 20 nt, Artificial Sequence
  Synthetic
aaauacugagaguacggggg

SEQ ID NO: 328101 - RNA, 21 nt, Artificial Sequence
  Synthetic
gaaauacugagaguacggggg

SEQ ID NO: 328102 - RNA, 22 nt, Artificial Sequence
  Synthetic
ugaaauacugagaguacggggg

SEQ ID NO: 328103 - RNA, 23 nt, Artificial Sequence
  Synthetic
uugaaauacugagaguacggggg

SEQ ID NO: 328104 - RNA, 24 nt, Artificial Sequence
  Synthetic
auugaaauacugagaguacggggg

SEQ ID NO: 328105 - RNA, 18 nt, Artificial Sequence
  Synthetic
cauuguaugucccggggg

SEQ ID NO: 328106 - RNA, 19 nt, Artificial Sequence
  Synthetic
ccauuguaugucccggggg

SEQ ID NO: 328107 - RNA, 20 nt, Artificial Sequence
  Synthetic
uccauuguaugucccggggg

SEQ ID NO: 328108 - RNA, 21 nt, Artificial Sequence
  Synthetic
auccauuguaugucccggggg

SEQ ID NO: 328109 - RNA, 22 nt, Artificial Sequence
  Synthetic
aauccauuguaugucccggggg

SEQ ID NO: 328110 - RNA, 23 nt, Artificial Sequence
  Synthetic
uaauccauuguaugucccggggg

SEQ ID NO: 328111 - RNA, 24 nt, Artificial Sequence
  Synthetic
uuaauccauuguaugucccggggg

SEQ ID NO: 328112 - RNA, 18 nt, Artificial Sequence
  Synthetic
ugguugggguggcggggg

SEQ ID NO: 328113 - RNA, 19 nt, Artificial Sequence
  Synthetic
cugguugggguggcggggg

SEQ ID NO: 328114 - RNA, 20 nt, Artificial Sequence
  Synthetic
ccugguugggguggcggggg

SEQ ID NO: 328115 - RNA, 21 nt, Artificial Sequence
  Synthetic
uccugguugggguggcggggg

SEQ ID NO: 328116 - RNA, 22 nt, Artificial Sequence
  Synthetic
uuccugguugggguggcggggg

SEQ ID NO: 328117 - RNA, 23 nt, Artificial Sequence
  Synthetic
auuccugguugggguggcggggg

SEQ ID NO: 328118 - RNA, 24 nt, Artificial Sequence
  Synthetic
cauuccugguugggguggcggggg

SEQ ID NO: 328119 - RNA, 18 nt, Artificial Sequence
  Synthetic
cugugguggggucggggg

SEQ ID NO: 328120 - RNA, 19 nt, Artificial Sequence
  Synthetic
acugugguggggucggggg

SEQ ID NO: 328121 - RNA, 20 nt, Artificial Sequence
  Synthetic
gacugugguggggucggggg

SEQ ID NO: 328122 - RNA, 21 nt, Artificial Sequence
  Synthetic
ggacugugguggggucggggg

SEQ ID NO: 328123 - RNA, 22 nt, Artificial Sequence
  Synthetic
gggacugugguggggucggggg

SEQ ID NO: 328124 - RNA, 23 nt, Artificial Sequence
  Synthetic
ggggacugugguggggucggggg

SEQ ID NO: 328125 - RNA, 24 nt, Artificial Sequence
  Synthetic
uggggacugugguggggucggggg

SEQ ID NO: 328126 - RNA, 18 nt, Artificial Sequence
  Synthetic
cuguuguggggucggggg

SEQ ID NO: 328127 - RNA, 19 nt, Artificial Sequence
  Synthetic
ccuguuguggggucggggg

SEQ ID NO: 328128 - RNA, 20 nt, Artificial Sequence
  Synthetic
gccuguuguggggucggggg

SEQ ID NO: 328129 - RNA, 21 nt, Artificial Sequence
  Synthetic
ggccuguuguggggucggggg

SEQ ID NO: 328130 - RNA, 22 nt, Artificial Sequence
  Synthetic
gggccuguuguggggucggggg

SEQ ID NO: 328131 - RNA, 23 nt, Artificial Sequence
  Synthetic
agggccuguuguggggucggggg

SEQ ID NO: 328132 - RNA, 24 nt, Artificial Sequence
  Synthetic
cagggccuguuguggggucggggg

SEQ ID NO: 328133 - RNA, 18 nt, Artificial Sequence
  Synthetic
acugaggccugucggggg

SEQ ID NO: 328134 - RNA, 19 nt, Artificial Sequence
  Synthetic
cacugaggccugucggggg

SEQ ID NO: 328135 - RNA, 20 nt, Artificial Sequence
  Synthetic
acacugaggccugucggggg

SEQ ID NO: 328136 - RNA, 21 nt, Artificial Sequence
  Synthetic
cacacugaggccugucggggg

SEQ ID NO: 328137 - RNA, 22 nt, Artificial Sequence
  Synthetic
acacacugaggccugucggggg

SEQ ID NO: 328138 - RNA, 23 nt, Artificial Sequence
  Synthetic
cacacacugaggccugucggggg

SEQ ID NO: 328139 - RNA, 24 nt, Artificial Sequence
  Synthetic
acacacacugaggccugucggggg

SEQ ID NO: 328140 - RNA, 18 nt, Artificial Sequence
  Synthetic
cugaggccugucgggggg

SEQ ID NO: 328141 - RNA, 19 nt, Artificial Sequence
  Synthetic
acugaggccugucgggggg

SEQ ID NO: 328142 - RNA, 20 nt, Artificial Sequence
  Synthetic
cacugaggccugucgggggg

SEQ ID NO: 328143 - RNA, 21 nt, Artificial Sequence
  Synthetic
acacugaggccugucgggggg

SEQ ID NO: 328144 - RNA, 22 nt, Artificial Sequence
  Synthetic
cacacugaggccugucgggggg

SEQ ID NO: 328145 - RNA, 23 nt, Artificial Sequence
  Synthetic
acacacugaggccugucgggggg

SEQ ID NO: 328146 - RNA, 24 nt, Artificial Sequence
  Synthetic
cacacacugaggccugucgggggg

SEQ ID NO: 328147 - RNA, 18 nt, Artificial Sequence
  Synthetic
guguguuggggggggggg

SEQ ID NO: 328148 - RNA, 19 nt, Artificial Sequence
  Synthetic
uguguguuggggggggggg

SEQ ID NO: 328149 - RNA, 20 nt, Artificial Sequence
  Synthetic
guguguguuggggggggggg

SEQ ID NO: 328150 - RNA, 21 nt, Artificial Sequence
  Synthetic
uguguguguuggggggggggg

SEQ ID NO: 328151 - RNA, 22 nt, Artificial Sequence
  Synthetic
guguguguguuggggggggggg

SEQ ID NO: 328152 - RNA, 23 nt, Artificial Sequence
  Synthetic
uguguguguguuggggggggggg

SEQ ID NO: 328153 - RNA, 24 nt, Artificial Sequence
  Synthetic
uuguguguguguuggggggggggg

SEQ ID NO: 328154 - RNA, 18 nt, Artificial Sequence
  Synthetic
ccuccuuguugggggggg

SEQ ID NO: 328155 - RNA, 19 nt, Artificial Sequence
  Synthetic
gccuccuuguugggggggg

SEQ ID NO: 328156 - RNA, 20 nt, Artificial Sequence
  Synthetic
ggccuccuuguugggggggg

SEQ ID NO: 328157 - RNA, 21 nt, Artificial Sequence
  Synthetic
uggccuccuuguugggggggg

SEQ ID NO: 328158 - RNA, 22 nt, Artificial Sequence
  Synthetic
auggccuccuuguugggggggg

SEQ ID NO: 328159 - RNA, 23 nt, Artificial Sequence
  Synthetic
uauggccuccuuguugggggggg

SEQ ID NO: 328160 - RNA, 24 nt, Artificial Sequence
  Synthetic
auauggccuccuuguugggggggg

SEQ ID NO: 328161 - RNA, 18 nt, Artificial Sequence
  Synthetic
gccuccuuguuggggggg

SEQ ID NO: 328162 - RNA, 19 nt, Artificial Sequence
  Synthetic
ggccuccuuguuggggggg

SEQ ID NO: 328163 - RNA, 20 nt, Artificial Sequence
  Synthetic
uggccuccuuguuggggggg

SEQ ID NO: 328164 - RNA, 21 nt, Artificial Sequence
  Synthetic
auggccuccuuguuggggggg

SEQ ID NO: 328165 - RNA, 22 nt, Artificial Sequence
  Synthetic
uauggccuccuuguuggggggg

SEQ ID NO: 328166 - RNA, 23 nt, Artificial Sequence
  Synthetic
auauggccuccuuguuggggggg

SEQ ID NO: 328167 - RNA, 24 nt, Artificial Sequence
  Synthetic
aauauggccuccuuguuggggggg

SEQ ID NO: 328168 - RNA, 18 nt, Artificial Sequence
  Synthetic
gguucucaaaaugggggg

SEQ ID NO: 328169 - RNA, 19 nt, Artificial Sequence
  Synthetic
ugguucucaaaaugggggg

SEQ ID NO: 328170 - RNA, 20 nt, Artificial Sequence
  Synthetic
augguucucaaaaugggggg

SEQ ID NO: 328171 - RNA, 21 nt, Artificial Sequence
  Synthetic
aaugguucucaaaaugggggg

SEQ ID NO: 328172 - RNA, 22 nt, Artificial Sequence
  Synthetic
caaugguucucaaaaugggggg

SEQ ID NO: 328173 - RNA, 23 nt, Artificial Sequence
  Synthetic
gcaaugguucucaaaaugggggg

SEQ ID NO: 328174 - RNA, 24 nt, Artificial Sequence
  Synthetic
ugcaaugguucucaaaaugggggg

SEQ ID NO: 328175 - RNA, 18 nt, Artificial Sequence
  Synthetic
uuaugaaaguaugggggg

SEQ ID NO: 328176 - RNA, 19 nt, Artificial Sequence
  Synthetic
uuuaugaaaguaugggggg

SEQ ID NO: 328177 - RNA, 20 nt, Artificial Sequence
  Synthetic
auuuaugaaaguaugggggg

SEQ ID NO: 328178 - RNA, 21 nt, Artificial Sequence
  Synthetic
uauuuaugaaaguaugggggg

SEQ ID NO: 328179 - RNA, 22 nt, Artificial Sequence
  Synthetic
guauuuaugaaaguaugggggg

SEQ ID NO: 328180 - RNA, 23 nt, Artificial Sequence
  Synthetic
uguauuuaugaaaguaugggggg

SEQ ID NO: 328181 - RNA, 24 nt, Artificial Sequence
  Synthetic
guguauuuaugaaaguaugggggg

SEQ ID NO: 328182 - RNA, 18 nt, Artificial Sequence
  Synthetic
uuccacagaccugggggg

SEQ ID NO: 328183 - RNA, 19 nt, Artificial Sequence
  Synthetic
auuccacagaccugggggg

SEQ ID NO: 328184 - RNA, 20 nt, Artificial Sequence
  Synthetic
uauuccacagaccugggggg

SEQ ID NO: 328185 - RNA, 21 nt, Artificial Sequence
  Synthetic
uuauuccacagaccugggggg

SEQ ID NO: 328186 - RNA, 22 nt, Artificial Sequence
  Synthetic
auuauuccacagaccugggggg

SEQ ID NO: 328187 - RNA, 23 nt, Artificial Sequence
  Synthetic
cauuauuccacagaccugggggg

SEQ ID NO: 328188 - RNA, 24 nt, Artificial Sequence
  Synthetic
acauuauuccacagaccugggggg

SEQ ID NO: 328189 - RNA, 18 nt, Artificial Sequence
  Synthetic
uguguucaaggugggggg

SEQ ID NO: 328190 - RNA, 19 nt, Artificial Sequence
  Synthetic
cuguguucaaggugggggg

SEQ ID NO: 328191 - RNA, 20 nt, Artificial Sequence
  Synthetic
gcuguguucaaggugggggg

SEQ ID NO: 328192 - RNA, 21 nt, Artificial Sequence
  Synthetic
ggcuguguucaaggugggggg

SEQ ID NO: 328193 - RNA, 22 nt, Artificial Sequence
  Synthetic
uggcuguguucaaggugggggg

SEQ ID NO: 328194 - RNA, 23 nt, Artificial Sequence
  Synthetic
guggcuguguucaaggugggggg

SEQ ID NO: 328195 - RNA, 24 nt, Artificial Sequence
  Synthetic
uguggcuguguucaaggugggggg

SEQ ID NO: 328196 - RNA, 18 nt, Artificial Sequence
  Synthetic
cugucguggggugggggg

SEQ ID NO: 328197 - RNA, 19 nt, Artificial Sequence
  Synthetic
ccugucguggggugggggg

SEQ ID NO: 328198 - RNA, 20 nt, Artificial Sequence
  Synthetic
gccugucguggggugggggg

SEQ ID NO: 328199 - RNA, 21 nt, Artificial Sequence
  Synthetic
ggccugucguggggugggggg

SEQ ID NO: 328200 - RNA, 22 nt, Artificial Sequence
  Synthetic
gggccugucguggggugggggg

SEQ ID NO: 328201 - RNA, 23 nt, Artificial Sequence
  Synthetic
agggccugucguggggugggggg

SEQ ID NO: 328202 - RNA, 24 nt, Artificial Sequence
  Synthetic
cagggccugucguggggugggggg

SEQ ID NO: 328203 - RNA, 18 nt, Artificial Sequence
  Synthetic
cugugguggggugggggg

SEQ ID NO: 328204 - RNA, 19 nt, Artificial Sequence
  Synthetic
acugugguggggugggggg

SEQ ID NO: 328205 - RNA, 20 nt, Artificial Sequence
  Synthetic
gacugugguggggugggggg

SEQ ID NO: 328206 - RNA, 21 nt, Artificial Sequence
  Synthetic
ggacugugguggggugggggg

SEQ ID NO: 328207 - RNA, 22 nt, Artificial Sequence
  Synthetic
gggacugugguggggugggggg

SEQ ID NO: 328208 - RNA, 23 nt, Artificial Sequence
  Synthetic
ggggacugugguggggugggggg

SEQ ID NO: 328209 - RNA, 24 nt, Artificial Sequence
  Synthetic
uggggacugugguggggugggggg

SEQ ID NO: 328210 - RNA, 20 nt, Artificial Sequence
  Synthetic
gacuguuguggggugggggg

SEQ ID NO: 328211 - RNA, 21 nt, Artificial Sequence
  Synthetic
ggacuguuguggggugggggg

SEQ ID NO: 328212 - RNA, 22 nt, Artificial Sequence
  Synthetic
gggacuguuguggggugggggg

SEQ ID NO: 328213 - RNA, 23 nt, Artificial Sequence
  Synthetic
ggggacuguuguggggugggggg

SEQ ID NO: 328214 - RNA, 24 nt, Artificial Sequence
  Synthetic
uggggacuguuguggggugggggg

SEQ ID NO: 328215 - RNA, 18 nt, Artificial Sequence
  Synthetic
aguugggggauugggggg

SEQ ID NO: 328216 - RNA, 19 nt, Artificial Sequence
  Synthetic
caguugggggauugggggg

SEQ ID NO: 328217 - RNA, 20 nt, Artificial Sequence
  Synthetic
ccaguugggggauugggggg

SEQ ID NO: 328218 - RNA, 21 nt, Artificial Sequence
  Synthetic
accaguugggggauugggggg

SEQ ID NO: 328219 - RNA, 22 nt, Artificial Sequence
  Synthetic
caccaguugggggauugggggg

SEQ ID NO: 328220 - RNA, 23 nt, Artificial Sequence
  Synthetic
acaccaguugggggauugggggg

SEQ ID NO: 328221 - RNA, 24 nt, Artificial Sequence
  Synthetic
cacaccaguugggggauugggggg

SEQ ID NO: 328222 - RNA, 18 nt, Artificial Sequence
  Synthetic
uguguguguguugggggg

SEQ ID NO: 328223 - RNA, 19 nt, Artificial Sequence
  Synthetic
uuguguguguguugggggg

SEQ ID NO: 328224 - RNA, 20 nt, Artificial Sequence
  Synthetic
auuguguguguguugggggg

SEQ ID NO: 328225 - RNA, 21 nt, Artificial Sequence
  Synthetic
uauuguguguguguugggggg

SEQ ID NO: 328226 - RNA, 22 nt, Artificial Sequence
  Synthetic
cuauuguguguguguugggggg

SEQ ID NO: 328227 - RNA, 23 nt, Artificial Sequence
  Synthetic
acuauuguguguguguugggggg

SEQ ID NO: 328228 - RNA, 24 nt, Artificial Sequence
  Synthetic
uacuauuguguguguguugggggg

SEQ ID NO: 328229 - RNA, 18 nt, Artificial Sequence
  Synthetic
ggccuccuuguugggggg

SEQ ID NO: 328230 - RNA, 19 nt, Artificial Sequence
  Synthetic
uggccuccuuguugggggg

SEQ ID NO: 328231 - RNA, 20 nt, Artificial Sequence
  Synthetic
auggccuccuuguugggggg

SEQ ID NO: 328232 - RNA, 21 nt, Artificial Sequence
  Synthetic
uauggccuccuuguugggggg

SEQ ID NO: 328233 - RNA, 22 nt, Artificial Sequence
  Synthetic
auauggccuccuuguugggggg

SEQ ID NO: 328234 - RNA, 23 nt, Artificial Sequence
  Synthetic
aauauggccuccuuguugggggg

SEQ ID NO: 328235 - RNA, 24 nt, Artificial Sequence
  Synthetic
aaauauggccuccuuguugggggg

SEQ ID NO: 328236 - RNA, 18 nt, Artificial Sequence
  Synthetic
ucccaacacuuugggggg

SEQ ID NO: 328237 - RNA, 19 nt, Artificial Sequence
  Synthetic
aucccaacacuuugggggg

SEQ ID NO: 328238 - RNA, 20 nt, Artificial Sequence
  Synthetic
aaucccaacacuuugggggg

SEQ ID NO: 328239 - RNA, 21 nt, Artificial Sequence
  Synthetic
uaaucccaacacuuugggggg

SEQ ID NO: 328240 - RNA, 22 nt, Artificial Sequence
  Synthetic
guaaucccaacacuuugggggg

SEQ ID NO: 328241 - RNA, 23 nt, Artificial Sequence
  Synthetic
uguaaucccaacacuuugggggg

SEQ ID NO: 328242 - RNA, 24 nt, Artificial Sequence
  Synthetic
cuguaaucccaacacuuugggggg

SEQ ID NO: 328243 - RNA, 18 nt, Artificial Sequence
  Synthetic
ugguucucaaaauggggg

SEQ ID NO: 328244 - RNA, 19 nt, Artificial Sequence
  Synthetic
augguucucaaaauggggg

SEQ ID NO: 328245 - RNA, 20 nt, Artificial Sequence
  Synthetic
aaugguucucaaaauggggg

SEQ ID NO: 328246 - RNA, 21 nt, Artificial Sequence
  Synthetic
caaugguucucaaaauggggg

SEQ ID NO: 328247 - RNA, 22 nt, Artificial Sequence
  Synthetic
gcaaugguucucaaaauggggg

SEQ ID NO: 328248 - RNA, 23 nt, Artificial Sequence
  Synthetic
ugcaaugguucucaaaauggggg

SEQ ID NO: 328249 - RNA, 24 nt, Artificial Sequence
  Synthetic
uugcaaugguucucaaaauggggg

SEQ ID NO: 328250 - RNA, 18 nt, Artificial Sequence
  Synthetic
gguugucacacauggggg

SEQ ID NO: 328251 - RNA, 19 nt, Artificial Sequence
  Synthetic
ugguugucacacauggggg

SEQ ID NO: 328252 - RNA, 20 nt, Artificial Sequence
  Synthetic
gugguugucacacauggggg

SEQ ID NO: 328253 - RNA, 21 nt, Artificial Sequence
  Synthetic
ugugguugucacacauggggg

SEQ ID NO: 328254 - RNA, 22 nt, Artificial Sequence
  Synthetic
uugugguugucacacauggggg

SEQ ID NO: 328255 - RNA, 23 nt, Artificial Sequence
  Synthetic
uuugugguugucacacauggggg

SEQ ID NO: 328256 - RNA, 24 nt, Artificial Sequence
  Synthetic
auuugugguugucacacauggggg

SEQ ID NO: 328257 - RNA, 18 nt, Artificial Sequence
  Synthetic
aacacauggagauggggg

SEQ ID NO: 328258 - RNA, 19 nt, Artificial Sequence
  Synthetic
gaacacauggagauggggg

SEQ ID NO: 328259 - RNA, 20 nt, Artificial Sequence
  Synthetic
agaacacauggagauggggg

SEQ ID NO: 328260 - RNA, 21 nt, Artificial Sequence
  Synthetic
gagaacacauggagauggggg

SEQ ID NO: 328261 - RNA, 22 nt, Artificial Sequence
  Synthetic
ugagaacacauggagauggggg

SEQ ID NO: 328262 - RNA, 23 nt, Artificial Sequence
  Synthetic
augagaacacauggagauggggg

SEQ ID NO: 328263 - RNA, 24 nt, Artificial Sequence
  Synthetic
gaugagaacacauggagauggggg

SEQ ID NO: 328264 - RNA, 18 nt, Artificial Sequence
  Synthetic
auuccacagaccuggggg

SEQ ID NO: 328265 - RNA, 19 nt, Artificial Sequence
  Synthetic
uauuccacagaccuggggg

SEQ ID NO: 328266 - RNA, 20 nt, Artificial Sequence
  Synthetic
uuauuccacagaccuggggg

SEQ ID NO: 328267 - RNA, 21 nt, Artificial Sequence
  Synthetic
auuauuccacagaccuggggg

SEQ ID NO: 328268 - RNA, 22 nt, Artificial Sequence
  Synthetic
cauuauuccacagaccuggggg

SEQ ID NO: 328269 - RNA, 23 nt, Artificial Sequence
  Synthetic
acauuauuccacagaccuggggg

SEQ ID NO: 328270 - RNA, 24 nt, Artificial Sequence
  Synthetic
uacauuauuccacagaccuggggg

SEQ ID NO: 328271 - RNA, 18 nt, Artificial Sequence
  Synthetic
ugacauuuuuucuggggg

SEQ ID NO: 328272 - RNA, 19 nt, Artificial Sequence
  Synthetic
augacauuuuuucuggggg

SEQ ID NO: 328273 - RNA, 20 nt, Artificial Sequence
  Synthetic
gaugacauuuuuucuggggg

SEQ ID NO: 328274 - RNA, 21 nt, Artificial Sequence
  Synthetic
agaugacauuuuuucuggggg

SEQ ID NO: 328275 - RNA, 22 nt, Artificial Sequence
  Synthetic
cagaugacauuuuuucuggggg

SEQ ID NO: 328276 - RNA, 23 nt, Artificial Sequence
  Synthetic
acagaugacauuuuuucuggggg

SEQ ID NO: 328277 - RNA, 24 nt, Artificial Sequence
  Synthetic
aacagaugacauuuuuucuggggg

SEQ ID NO: 328278 - RNA, 18 nt, Artificial Sequence
  Synthetic
agugagagaaaguggggg

SEQ ID NO: 328279 - RNA, 19 nt, Artificial Sequence
  Synthetic
cagugagagaaaguggggg

SEQ ID NO: 328280 - RNA, 20 nt, Artificial Sequence
  Synthetic
ucagugagagaaaguggggg

SEQ ID NO: 328281 - RNA, 21 nt, Artificial Sequence
  Synthetic
aucagugagagaaaguggggg

SEQ ID NO: 328282 - RNA, 22 nt, Artificial Sequence
  Synthetic
aaucagugagagaaaguggggg

SEQ ID NO: 328283 - RNA, 23 nt, Artificial Sequence
  Synthetic
aaaucagugagagaaaguggggg

SEQ ID NO: 328284 - RNA, 24 nt, Artificial Sequence
  Synthetic
aaaaucagugagagaaaguggggg

SEQ ID NO: 328285 - RNA, 18 nt, Artificial Sequence
  Synthetic
ucuguaguuuaguggggg

SEQ ID NO: 328286 - RNA, 19 nt, Artificial Sequence
  Synthetic
aucuguaguuuaguggggg

SEQ ID NO: 328287 - RNA, 20 nt, Artificial Sequence
  Synthetic
gaucuguaguuuaguggggg

SEQ ID NO: 328288 - RNA, 21 nt, Artificial Sequence
  Synthetic
ugaucuguaguuuaguggggg

SEQ ID NO: 328289 - RNA, 22 nt, Artificial Sequence
  Synthetic
uugaucuguaguuuaguggggg

SEQ ID NO: 328290 - RNA, 23 nt, Artificial Sequence
  Synthetic
uuugaucuguaguuuaguggggg

SEQ ID NO: 328291 - RNA, 24 nt, Artificial Sequence
  Synthetic
cuuugaucuguaguuuaguggggg

SEQ ID NO: 328292 - RNA, 18 nt, Artificial Sequence
  Synthetic
cuguguucaagguggggg

SEQ ID NO: 328293 - RNA, 19 nt, Artificial Sequence
  Synthetic
gcuguguucaagguggggg

SEQ ID NO: 328294 - RNA, 20 nt, Artificial Sequence
  Synthetic
ggcuguguucaagguggggg

SEQ ID NO: 328295 - RNA, 21 nt, Artificial Sequence
  Synthetic
uggcuguguucaagguggggg

SEQ ID NO: 328296 - RNA, 22 nt, Artificial Sequence
  Synthetic
guggcuguguucaagguggggg

SEQ ID NO: 328297 - RNA, 23 nt, Artificial Sequence
  Synthetic
uguggcuguguucaagguggggg

SEQ ID NO: 328298 - RNA, 24 nt, Artificial Sequence
  Synthetic
uuguggcuguguucaagguggggg

SEQ ID NO: 328299 - RNA, 18 nt, Artificial Sequence
  Synthetic
gggaggccgagguggggg

SEQ ID NO: 328300 - RNA, 19 nt, Artificial Sequence
  Synthetic
ugggaggccgagguggggg

SEQ ID NO: 328301 - RNA, 20 nt, Artificial Sequence
  Synthetic
uugggaggccgagguggggg

SEQ ID NO: 328302 - RNA, 21 nt, Artificial Sequence
  Synthetic
uuugggaggccgagguggggg

SEQ ID NO: 328303 - RNA, 22 nt, Artificial Sequence
  Synthetic
cuuugggaggccgagguggggg

SEQ ID NO: 328304 - RNA, 23 nt, Artificial Sequence
  Synthetic
acuuugggaggccgagguggggg

SEQ ID NO: 328305 - RNA, 24 nt, Artificial Sequence
  Synthetic
cacuuugggaggccgagguggggg

SEQ ID NO: 328306 - RNA, 18 nt, Artificial Sequence
  Synthetic
ccugucgugggguggggg

SEQ ID NO: 328307 - RNA, 19 nt, Artificial Sequence
  Synthetic
gccugucgugggguggggg

SEQ ID NO: 328308 - RNA, 20 nt, Artificial Sequence
  Synthetic
ggccugucgugggguggggg

SEQ ID NO: 328309 - RNA, 21 nt, Artificial Sequence
  Synthetic
gggccugucgugggguggggg

SEQ ID NO: 328310 - RNA, 22 nt, Artificial Sequence
  Synthetic
agggccugucgugggguggggg

SEQ ID NO: 328311 - RNA, 23 nt, Artificial Sequence
  Synthetic
cagggccugucgugggguggggg

SEQ ID NO: 328312 - RNA, 24 nt, Artificial Sequence
  Synthetic
ccagggccugucgugggguggggg

SEQ ID NO: 328313 - RNA, 18 nt, Artificial Sequence
  Synthetic
acuguggugggguggggg

SEQ ID NO: 328314 - RNA, 19 nt, Artificial Sequence
  Synthetic
gacuguggugggguggggg

SEQ ID NO: 328315 - RNA, 20 nt, Artificial Sequence
  Synthetic
ggacuguggugggguggggg

SEQ ID NO: 328316 - RNA, 21 nt, Artificial Sequence
  Synthetic
gggacuguggugggguggggg

SEQ ID NO: 328317 - RNA, 22 nt, Artificial Sequence
  Synthetic
ggggacuguggugggguggggg

SEQ ID NO: 328318 - RNA, 23 nt, Artificial Sequence
  Synthetic
uggggacuguggugggguggggg

SEQ ID NO: 328319 - RNA, 24 nt, Artificial Sequence
  Synthetic
cuggggacuguggugggguggggg

SEQ ID NO: 328320 - RNA, 18 nt, Artificial Sequence
  Synthetic
ugguugucacauuggggg

SEQ ID NO: 328321 - RNA, 19 nt, Artificial Sequence
  Synthetic
uugguugucacauuggggg

SEQ ID NO: 328322 - RNA, 20 nt, Artificial Sequence
  Synthetic
cuugguugucacauuggggg

SEQ ID NO: 328323 - RNA, 21 nt, Artificial Sequence
  Synthetic
ucuugguugucacauuggggg

SEQ ID NO: 328324 - RNA, 22 nt, Artificial Sequence
  Synthetic
uucuugguugucacauuggggg

SEQ ID NO: 328325 - RNA, 23 nt, Artificial Sequence
  Synthetic
auucuugguugucacauuggggg

SEQ ID NO: 328326 - RNA, 24 nt, Artificial Sequence
  Synthetic
aauucuugguugucacauuggggg

SEQ ID NO: 328327 - RNA, 18 nt, Artificial Sequence
  Synthetic
gggguagcagauuggggg

SEQ ID NO: 328328 - RNA, 19 nt, Artificial Sequence
  Synthetic
agggguagcagauuggggg

SEQ ID NO: 328329 - RNA, 20 nt, Artificial Sequence
  Synthetic
uagggguagcagauuggggg

SEQ ID NO: 328330 - RNA, 21 nt, Artificial Sequence
  Synthetic
guagggguagcagauuggggg

SEQ ID NO: 328331 - RNA, 22 nt, Artificial Sequence
  Synthetic
gguagggguagcagauuggggg

SEQ ID NO: 328332 - RNA, 23 nt, Artificial Sequence
  Synthetic
ugguagggguagcagauuggggg

SEQ ID NO: 328333 - RNA, 24 nt, Artificial Sequence
  Synthetic
cugguagggguagcagauuggggg

SEQ ID NO: 328334 - RNA, 18 nt, Artificial Sequence
  Synthetic
ucccccgaggauuggggg

SEQ ID NO: 328335 - RNA, 19 nt, Artificial Sequence
  Synthetic
cucccccgaggauuggggg

SEQ ID NO: 328336 - RNA, 20 nt, Artificial Sequence
  Synthetic
ucucccccgaggauuggggg

SEQ ID NO: 328337 - RNA, 21 nt, Artificial Sequence
  Synthetic
aucucccccgaggauuggggg

SEQ ID NO: 328338 - RNA, 22 nt, Artificial Sequence
  Synthetic
aaucucccccgaggauuggggg

SEQ ID NO: 328339 - RNA, 23 nt, Artificial Sequence
  Synthetic
gaaucucccccgaggauuggggg

SEQ ID NO: 328340 - RNA, 24 nt, Artificial Sequence
  Synthetic
agaaucucccccgaggauuggggg

SEQ ID NO: 328341 - RNA, 18 nt, Artificial Sequence
  Synthetic
gaagcugaggguuggggg

SEQ ID NO: 328342 - RNA, 19 nt, Artificial Sequence
  Synthetic
ugaagcugaggguuggggg

SEQ ID NO: 328343 - RNA, 20 nt, Artificial Sequence
  Synthetic
uugaagcugaggguuggggg

SEQ ID NO: 328344 - RNA, 21 nt, Artificial Sequence
  Synthetic
uuugaagcugaggguuggggg

SEQ ID NO: 328345 - RNA, 22 nt, Artificial Sequence
  Synthetic
guuugaagcugaggguuggggg

SEQ ID NO: 328346 - RNA, 23 nt, Artificial Sequence
  Synthetic
aguuugaagcugaggguuggggg

SEQ ID NO: 328347 - RNA, 24 nt, Artificial Sequence
  Synthetic
caguuugaagcugaggguuggggg

SEQ ID NO: 328348 - RNA, 18 nt, Artificial Sequence
  Synthetic
caguggugggguuggggg

SEQ ID NO: 328349 - RNA, 19 nt, Artificial Sequence
  Synthetic
acaguggugggguuggggg

SEQ ID NO: 328350 - RNA, 20 nt, Artificial Sequence
  Synthetic
cacaguggugggguuggggg

SEQ ID NO: 328351 - RNA, 21 nt, Artificial Sequence
  Synthetic
acacaguggugggguuggggg

SEQ ID NO: 328352 - RNA, 22 nt, Artificial Sequence
  Synthetic
cacacaguggugggguuggggg

SEQ ID NO: 328353 - RNA, 23 nt, Artificial Sequence
  Synthetic
gcacacaguggugggguuggggg

SEQ ID NO: 328354 - RNA, 24 nt, Artificial Sequence
  Synthetic
cgcacacaguggugggguuggggg

SEQ ID NO: 328355 - RNA, 18 nt, Artificial Sequence
  Synthetic
uuguguguguguuggggg

SEQ ID NO: 328356 - RNA, 19 nt, Artificial Sequence
  Synthetic
auuguguguguguuggggg

SEQ ID NO: 328357 - RNA, 20 nt, Artificial Sequence
  Synthetic
uauuguguguguguuggggg

SEQ ID NO: 328358 - RNA, 21 nt, Artificial Sequence
  Synthetic
cuauuguguguguguuggggg

SEQ ID NO: 328359 - RNA, 22 nt, Artificial Sequence
  Synthetic
acuauuguguguguguuggggg

SEQ ID NO: 328360 - RNA, 23 nt, Artificial Sequence
  Synthetic
uacuauuguguguguguuggggg

SEQ ID NO: 328361 - RNA, 24 nt, Artificial Sequence
  Synthetic
uuacuauuguguguguguuggggg

SEQ ID NO: 328362 - RNA, 18 nt, Artificial Sequence
  Synthetic
uggccuccuuguuggggg

SEQ ID NO: 328363 - RNA, 19 nt, Artificial Sequence
  Synthetic
auggccuccuuguuggggg

SEQ ID NO: 328364 - RNA, 20 nt, Artificial Sequence
  Synthetic
uauggccuccuuguuggggg

SEQ ID NO: 328365 - RNA, 21 nt, Artificial Sequence
  Synthetic
auauggccuccuuguuggggg

SEQ ID NO: 328366 - RNA, 22 nt, Artificial Sequence
  Synthetic
aauauggccuccuuguuggggg

SEQ ID NO: 328367 - RNA, 23 nt, Artificial Sequence
  Synthetic
aaauauggccuccuuguuggggg

SEQ ID NO: 328368 - RNA, 24 nt, Artificial Sequence
  Synthetic
uaaauauggccuccuuguuggggg

SEQ ID NO: 328369 - RNA, 18 nt, Artificial Sequence
  Synthetic
auccaaugugaaaugggg

SEQ ID NO: 328370 - RNA, 19 nt, Artificial Sequence
  Synthetic
uauccaaugugaaaugggg

SEQ ID NO: 328371 - RNA, 20 nt, Artificial Sequence
  Synthetic
uuauccaaugugaaaugggg

SEQ ID NO: 328372 - RNA, 21 nt, Artificial Sequence
  Synthetic
uuuauccaaugugaaaugggg

SEQ ID NO: 328373 - RNA, 22 nt, Artificial Sequence
  Synthetic
uuuuauccaaugugaaaugggg

SEQ ID NO: 328374 - RNA, 23 nt, Artificial Sequence
  Synthetic
guuuuauccaaugugaaaugggg

SEQ ID NO: 328375 - RNA, 24 nt, Artificial Sequence
  Synthetic
aguuuuauccaaugugaaaugggg

SEQ ID NO: 328376 - RNA, 18 nt, Artificial Sequence
  Synthetic
guaaagcagagaaugggg

SEQ ID NO: 328377 - RNA, 19 nt, Artificial Sequence
  Synthetic
uguaaagcagagaaugggg

SEQ ID NO: 328378 - RNA, 20 nt, Artificial Sequence
  Synthetic
auguaaagcagagaaugggg

SEQ ID NO: 328379 - RNA, 21 nt, Artificial Sequence
  Synthetic
aauguaaagcagagaaugggg

SEQ ID NO: 328380 - RNA, 22 nt, Artificial Sequence
  Synthetic
aaauguaaagcagagaaugggg

SEQ ID NO: 328381 - RNA, 23 nt, Artificial Sequence
  Synthetic
gaaauguaaagcagagaaugggg

SEQ ID NO: 328382 - RNA, 24 nt, Artificial Sequence
  Synthetic
agaaauguaaagcagagaaugggg

SEQ ID NO: 328383 - RNA, 18 nt, Artificial Sequence
  Synthetic
uucaacauaugaaugggg

SEQ ID NO: 328384 - RNA, 19 nt, Artificial Sequence
  Synthetic
cuucaacauaugaaugggg

SEQ ID NO: 328385 - RNA, 20 nt, Artificial Sequence
  Synthetic
acuucaacauaugaaugggg

SEQ ID NO: 328386 - RNA, 21 nt, Artificial Sequence
  Synthetic
aacuucaacauaugaaugggg

SEQ ID NO: 328387 - RNA, 22 nt, Artificial Sequence
  Synthetic
aaacuucaacauaugaaugggg

SEQ ID NO: 328388 - RNA, 23 nt, Artificial Sequence
  Synthetic
aaaacuucaacauaugaaugggg

SEQ ID NO: 328389 - RNA, 24 nt, Artificial Sequence
  Synthetic
uaaaacuucaacauaugaaugggg

SEQ ID NO: 328390 - RNA, 18 nt, Artificial Sequence
  Synthetic
ugguugucacacaugggg

SEQ ID NO: 328391 - RNA, 19 nt, Artificial Sequence
  Synthetic
gugguugucacacaugggg

SEQ ID NO: 328392 - RNA, 20 nt, Artificial Sequence
  Synthetic
ugugguugucacacaugggg

SEQ ID NO: 328393 - RNA, 21 nt, Artificial Sequence
  Synthetic
uugugguugucacacaugggg

SEQ ID NO: 328394 - RNA, 22 nt, Artificial Sequence
  Synthetic
uuugugguugucacacaugggg

SEQ ID NO: 328395 - RNA, 23 nt, Artificial Sequence
  Synthetic
auuugugguugucacacaugggg

SEQ ID NO: 328396 - RNA, 24 nt, Artificial Sequence
  Synthetic
uauuugugguugucacacaugggg

SEQ ID NO: 328397 - RNA, 18 nt, Artificial Sequence
  Synthetic
uucaaaaaguacaugggg

SEQ ID NO: 328398 - RNA, 19 nt, Artificial Sequence
  Synthetic
uuucaaaaaguacaugggg

SEQ ID NO: 328399 - RNA, 20 nt, Artificial Sequence
  Synthetic
auuucaaaaaguacaugggg

SEQ ID NO: 328400 - RNA, 21 nt, Artificial Sequence
  Synthetic
uauuucaaaaaguacaugggg

SEQ ID NO: 328401 - RNA, 22 nt, Artificial Sequence
  Synthetic
auauuucaaaaaguacaugggg

SEQ ID NO: 328402 - RNA, 23 nt, Artificial Sequence
  Synthetic
cauauuucaaaaaguacaugggg

SEQ ID NO: 328403 - RNA, 24 nt, Artificial Sequence
  Synthetic
ucauauuucaaaaaguacaugggg

SEQ ID NO: 328404 - RNA, 18 nt, Artificial Sequence
  Synthetic
gacuauuucuccaugggg

SEQ ID NO: 328405 - RNA, 19 nt, Artificial Sequence
  Synthetic
agacuauuucuccaugggg

SEQ ID NO: 328406 - RNA, 20 nt, Artificial Sequence
  Synthetic
gagacuauuucuccaugggg

SEQ ID NO: 328407 - RNA, 21 nt, Artificial Sequence
  Synthetic
ugagacuauuucuccaugggg

SEQ ID NO: 328408 - RNA, 22 nt, Artificial Sequence
  Synthetic
uugagacuauuucuccaugggg

SEQ ID NO: 328409 - RNA, 23 nt, Artificial Sequence
  Synthetic
auugagacuauuucuccaugggg

SEQ ID NO: 328410 - RNA, 24 nt, Artificial Sequence
  Synthetic
aauugagacuauuucuccaugggg

SEQ ID NO: 328411 - RNA, 18 nt, Artificial Sequence
  Synthetic
uuauuuagguucaugggg

SEQ ID NO: 328412 - RNA, 19 nt, Artificial Sequence
  Synthetic
guuauuuagguucaugggg

SEQ ID NO: 328413 - RNA, 20 nt, Artificial Sequence
  Synthetic
aguuauuuagguucaugggg

SEQ ID NO: 328414 - RNA, 21 nt, Artificial Sequence
  Synthetic
gaguuauuuagguucaugggg

SEQ ID NO: 328415 - RNA, 22 nt, Artificial Sequence
  Synthetic
ggaguuauuuagguucaugggg

SEQ ID NO: 328416 - RNA, 23 nt, Artificial Sequence
  Synthetic
aggaguuauuuagguucaugggg

SEQ ID NO: 328417 - RNA, 24 nt, Artificial Sequence
  Synthetic
uaggaguuauuuagguucaugggg

SEQ ID NO: 328418 - RNA, 18 nt, Artificial Sequence
  Synthetic
gaacacauggagaugggg

SEQ ID NO: 328419 - RNA, 19 nt, Artificial Sequence
  Synthetic
agaacacauggagaugggg

SEQ ID NO: 328420 - RNA, 20 nt, Artificial Sequence
  Synthetic
gagaacacauggagaugggg

SEQ ID NO: 328421 - RNA, 21 nt, Artificial Sequence
  Synthetic
ugagaacacauggagaugggg

SEQ ID NO: 328422 - RNA, 22 nt, Artificial Sequence
  Synthetic
augagaacacauggagaugggg

SEQ ID NO: 328423 - RNA, 23 nt, Artificial Sequence
  Synthetic
gaugagaacacauggagaugggg

SEQ ID NO: 328424 - RNA, 24 nt, Artificial Sequence
  Synthetic
cgaugagaacacauggagaugggg

SEQ ID NO: 328425 - RNA, 18 nt, Artificial Sequence
  Synthetic
gaaaagaaagguaugggg

SEQ ID NO: 328426 - RNA, 19 nt, Artificial Sequence
  Synthetic
ugaaaagaaagguaugggg

SEQ ID NO: 328427 - RNA, 20 nt, Artificial Sequence
  Synthetic
gugaaaagaaagguaugggg

SEQ ID NO: 328428 - RNA, 21 nt, Artificial Sequence
  Synthetic
ggugaaaagaaagguaugggg

SEQ ID NO: 328429 - RNA, 22 nt, Artificial Sequence
  Synthetic
aggugaaaagaaagguaugggg

SEQ ID NO: 328430 - RNA, 23 nt, Artificial Sequence
  Synthetic
aaggugaaaagaaagguaugggg

SEQ ID NO: 328431 - RNA, 24 nt, Artificial Sequence
  Synthetic
aaaggugaaaagaaagguaugggg

SEQ ID NO: 328432 - RNA, 18 nt, Artificial Sequence
  Synthetic
gaugaaugggguaugggg

SEQ ID NO: 328433 - RNA, 19 nt, Artificial Sequence
  Synthetic
ugaugaaugggguaugggg

SEQ ID NO: 328434 - RNA, 20 nt, Artificial Sequence
  Synthetic
cugaugaaugggguaugggg

SEQ ID NO: 328435 - RNA, 21 nt, Artificial Sequence
  Synthetic
gcugaugaaugggguaugggg

SEQ ID NO: 328436 - RNA, 22 nt, Artificial Sequence
  Synthetic
ugcugaugaaugggguaugggg

SEQ ID NO: 328437 - RNA, 23 nt, Artificial Sequence
  Synthetic
uugcugaugaaugggguaugggg

SEQ ID NO: 328438 - RNA, 24 nt, Artificial Sequence
  Synthetic
uuugcugaugaaugggguaugggg

SEQ ID NO: 328439 - RNA, 18 nt, Artificial Sequence
  Synthetic
aaaauagggauuaugggg

SEQ ID NO: 328440 - RNA, 19 nt, Artificial Sequence
  Synthetic
aaaaauagggauuaugggg

SEQ ID NO: 328441 - RNA, 20 nt, Artificial Sequence
  Synthetic
aaaaaauagggauuaugggg

SEQ ID NO: 328442 - RNA, 21 nt, Artificial Sequence
  Synthetic
aaaaaaauagggauuaugggg

SEQ ID NO: 328443 - RNA, 22 nt, Artificial Sequence
  Synthetic
gaaaaaaauagggauuaugggg

SEQ ID NO: 328444 - RNA, 23 nt, Artificial Sequence
  Synthetic
ugaaaaaaauagggauuaugggg

SEQ ID NO: 328445 - RNA, 24 nt, Artificial Sequence
  Synthetic
uugaaaaaaauagggauuaugggg

SEQ ID NO: 328446 - RNA, 18 nt, Artificial Sequence
  Synthetic
ugauauaauugacugggg

SEQ ID NO: 328447 - RNA, 19 nt, Artificial Sequence
  Synthetic
cugauauaauugacugggg

SEQ ID NO: 328448 - RNA, 20 nt, Artificial Sequence
  Synthetic
ucugauauaauugacugggg

SEQ ID NO: 328449 - RNA, 21 nt, Artificial Sequence
  Synthetic
cucugauauaauugacugggg

SEQ ID NO: 328450 - RNA, 22 nt, Artificial Sequence
  Synthetic
acucugauauaauugacugggg

SEQ ID NO: 328451 - RNA, 23 nt, Artificial Sequence
  Synthetic
gacucugauauaauugacugggg

SEQ ID NO: 328452 - RNA, 24 nt, Artificial Sequence
  Synthetic
agacucugauauaauugacugggg

SEQ ID NO: 328453 - RNA, 18 nt, Artificial Sequence
  Synthetic
augauggcuugacugggg

SEQ ID NO: 328454 - RNA, 19 nt, Artificial Sequence
  Synthetic
uaugauggcuugacugggg

SEQ ID NO: 328455 - RNA, 20 nt, Artificial Sequence
  Synthetic
auaugauggcuugacugggg

SEQ ID NO: 328456 - RNA, 21 nt, Artificial Sequence
  Synthetic
cauaugauggcuugacugggg

SEQ ID NO: 328457 - RNA, 22 nt, Artificial Sequence
  Synthetic
ucauaugauggcuugacugggg

SEQ ID NO: 328458 - RNA, 23 nt, Artificial Sequence
  Synthetic
gucauaugauggcuugacugggg

SEQ ID NO: 328459 - RNA, 24 nt, Artificial Sequence
  Synthetic
agucauaugauggcuugacugggg

SEQ ID NO: 328460 - RNA, 18 nt, Artificial Sequence
  Synthetic
gugguguugggccugggg

SEQ ID NO: 328461 - RNA, 19 nt, Artificial Sequence
  Synthetic
ugugguguugggccugggg

SEQ ID NO: 328462 - RNA, 20 nt, Artificial Sequence
  Synthetic
augugguguugggccugggg

SEQ ID NO: 328463 - RNA, 21 nt, Artificial Sequence
  Synthetic
caugugguguugggccugggg

SEQ ID NO: 328464 - RNA, 22 nt, Artificial Sequence
  Synthetic
acaugugguguugggccugggg

SEQ ID NO: 328465 - RNA, 23 nt, Artificial Sequence
  Synthetic
uacaugugguguugggccugggg

SEQ ID NO: 328466 - RNA, 24 nt, Artificial Sequence
  Synthetic
uuacaugugguguugggccugggg

SEQ ID NO: 328467 - RNA, 18 nt, Artificial Sequence
  Synthetic
auguguauuggccugggg

SEQ ID NO: 328468 - RNA, 19 nt, Artificial Sequence
  Synthetic
gauguguauuggccugggg

SEQ ID NO: 328469 - RNA, 20 nt, Artificial Sequence
  Synthetic
ugauguguauuggccugggg

SEQ ID NO: 328470 - RNA, 21 nt, Artificial Sequence
  Synthetic
augauguguauuggccugggg

SEQ ID NO: 328471 - RNA, 22 nt, Artificial Sequence
  Synthetic
uaugauguguauuggccugggg

SEQ ID NO: 328472 - RNA, 23 nt, Artificial Sequence
  Synthetic
auaugauguguauuggccugggg

SEQ ID NO: 328473 - RNA, 24 nt, Artificial Sequence
  Synthetic
aauaugauguguauuggccugggg

SEQ ID NO: 328474 - RNA, 18 nt, Artificial Sequence
  Synthetic
gcaggcuggaagcugggg

SEQ ID NO: 328475 - RNA, 19 nt, Artificial Sequence
  Synthetic
agcaggcuggaagcugggg

SEQ ID NO: 328476 - RNA, 20 nt, Artificial Sequence
  Synthetic
gagcaggcuggaagcugggg

SEQ ID NO: 328477 - RNA, 21 nt, Artificial Sequence
  Synthetic
agagcaggcuggaagcugggg

SEQ ID NO: 328478 - RNA, 22 nt, Artificial Sequence
  Synthetic
cagagcaggcuggaagcugggg

SEQ ID NO: 328479 - RNA, 23 nt, Artificial Sequence
  Synthetic
gcagagcaggcuggaagcugggg

SEQ ID NO: 328480 - RNA, 24 nt, Artificial Sequence
  Synthetic
ugcagagcaggcuggaagcugggg

SEQ ID NO: 328481 - RNA, 18 nt, Artificial Sequence
  Synthetic
cuacccgaaaggcugggg

SEQ ID NO: 328482 - RNA, 19 nt, Artificial Sequence
  Synthetic
gcuacccgaaaggcugggg

SEQ ID NO: 328483 - RNA, 20 nt, Artificial Sequence
  Synthetic
agcuacccgaaaggcugggg

SEQ ID NO: 328484 - RNA, 21 nt, Artificial Sequence
  Synthetic
cagcuacccgaaaggcugggg

SEQ ID NO: 328485 - RNA, 22 nt, Artificial Sequence
  Synthetic
ccagcuacccgaaaggcugggg

SEQ ID NO: 328486 - RNA, 23 nt, Artificial Sequence
  Synthetic
cccagcuacccgaaaggcugggg

SEQ ID NO: 328487 - RNA, 24 nt, Artificial Sequence
  Synthetic
ucccagcuacccgaaaggcugggg

SEQ ID NO: 328488 - RNA, 18 nt, Artificial Sequence
  Synthetic
aaaucagaaucucugggg

SEQ ID NO: 328489 - RNA, 19 nt, Artificial Sequence
  Synthetic
uaaaucagaaucucugggg

SEQ ID NO: 328490 - RNA, 20 nt, Artificial Sequence
  Synthetic
cuaaaucagaaucucugggg

SEQ ID NO: 328491 - RNA, 21 nt, Artificial Sequence
  Synthetic
acuaaaucagaaucucugggg

SEQ ID NO: 328492 - RNA, 22 nt, Artificial Sequence
  Synthetic
aacuaaaucagaaucucugggg

SEQ ID NO: 328493 - RNA, 23 nt, Artificial Sequence
  Synthetic
caacuaaaucagaaucucugggg

SEQ ID NO: 328494 - RNA, 24 nt, Artificial Sequence
  Synthetic
ccaacuaaaucagaaucucugggg

SEQ ID NO: 328495 - RNA, 18 nt, Artificial Sequence
  Synthetic
aauguaucaugucugggg

SEQ ID NO: 328496 - RNA, 19 nt, Artificial Sequence
  Synthetic
caauguaucaugucugggg

SEQ ID NO: 328497 - RNA, 20 nt, Artificial Sequence
  Synthetic
acaauguaucaugucugggg

SEQ ID NO: 328498 - RNA, 21 nt, Artificial Sequence
  Synthetic
cacaauguaucaugucugggg

SEQ ID NO: 328499 - RNA, 22 nt, Artificial Sequence
  Synthetic
acacaauguaucaugucugggg

SEQ ID NO: 328500 - RNA, 23 nt, Artificial Sequence
  Synthetic
aacacaauguaucaugucugggg

SEQ ID NO: 328501 - RNA, 24 nt, Artificial Sequence
  Synthetic
aaacacaauguaucaugucugggg

SEQ ID NO: 328502 - RNA, 18 nt, Artificial Sequence
  Synthetic
uagcaguuucuucugggg

SEQ ID NO: 328503 - RNA, 19 nt, Artificial Sequence
  Synthetic
auagcaguuucuucugggg

SEQ ID NO: 328504 - RNA, 20 nt, Artificial Sequence
  Synthetic
aauagcaguuucuucugggg

SEQ ID NO: 328505 - RNA, 21 nt, Artificial Sequence
  Synthetic
uaauagcaguuucuucugggg

SEQ ID NO: 328506 - RNA, 22 nt, Artificial Sequence
  Synthetic
uuaauagcaguuucuucugggg

SEQ ID NO: 328507 - RNA, 23 nt, Artificial Sequence
  Synthetic
uuuaauagcaguuucuucugggg

SEQ ID NO: 328508 - RNA, 24 nt, Artificial Sequence
  Synthetic
cuuuaauagcaguuucuucugggg

SEQ ID NO: 328509 - RNA, 18 nt, Artificial Sequence
  Synthetic
aagccuccaguucugggg

SEQ ID NO: 328510 - RNA, 19 nt, Artificial Sequence
  Synthetic
uaagccuccaguucugggg

SEQ ID NO: 328511 - RNA, 20 nt, Artificial Sequence
  Synthetic
uuaagccuccaguucugggg

SEQ ID NO: 328512 - RNA, 21 nt, Artificial Sequence
  Synthetic
cuuaagccuccaguucugggg

SEQ ID NO: 328513 - RNA, 22 nt, Artificial Sequence
  Synthetic
ucuuaagccuccaguucugggg

SEQ ID NO: 328514 - RNA, 23 nt, Artificial Sequence
  Synthetic
gucuuaagccuccaguucugggg

SEQ ID NO: 328515 - RNA, 24 nt, Artificial Sequence
  Synthetic
agucuuaagccuccaguucugggg

SEQ ID NO: 328516 - RNA, 18 nt, Artificial Sequence
  Synthetic
augacauuuuuucugggg

SEQ ID NO: 328517 - RNA, 19 nt, Artificial Sequence
  Synthetic
gaugacauuuuuucugggg

SEQ ID NO: 328518 - RNA, 20 nt, Artificial Sequence
  Synthetic
agaugacauuuuuucugggg

SEQ ID NO: 328519 - RNA, 21 nt, Artificial Sequence
  Synthetic
cagaugacauuuuuucugggg

SEQ ID NO: 328520 - RNA, 22 nt, Artificial Sequence
  Synthetic
acagaugacauuuuuucugggg

SEQ ID NO: 328521 - RNA, 23 nt, Artificial Sequence
  Synthetic
aacagaugacauuuuuucugggg

SEQ ID NO: 328522 - RNA, 24 nt, Artificial Sequence
  Synthetic
aaacagaugacauuuuuucugggg

SEQ ID NO: 328523 - RNA, 18 nt, Artificial Sequence
  Synthetic
cagugagagaaagugggg

SEQ ID NO: 328524 - RNA, 19 nt, Artificial Sequence
  Synthetic
ucagugagagaaagugggg

SEQ ID NO: 328525 - RNA, 20 nt, Artificial Sequence
  Synthetic
aucagugagagaaagugggg

SEQ ID NO: 328526 - RNA, 21 nt, Artificial Sequence
  Synthetic
aaucagugagagaaagugggg

SEQ ID NO: 328527 - RNA, 22 nt, Artificial Sequence
  Synthetic
aaaucagugagagaaagugggg

SEQ ID NO: 328528 - RNA, 23 nt, Artificial Sequence
  Synthetic
aaaaucagugagagaaagugggg

SEQ ID NO: 328529 - RNA, 24 nt, Artificial Sequence
  Synthetic
caaaaucagugagagaaagugggg

SEQ ID NO: 328530 - RNA, 18 nt, Artificial Sequence
  Synthetic
ucuaagcugcaagugggg

SEQ ID NO: 328531 - RNA, 19 nt, Artificial Sequence
  Synthetic
aucuaagcugcaagugggg

SEQ ID NO: 328532 - RNA, 20 nt, Artificial Sequence
  Synthetic
caucuaagcugcaagugggg

SEQ ID NO: 328533 - RNA, 21 nt, Artificial Sequence
  Synthetic
acaucuaagcugcaagugggg

SEQ ID NO: 328534 - RNA, 22 nt, Artificial Sequence
  Synthetic
cacaucuaagcugcaagugggg

SEQ ID NO: 328535 - RNA, 23 nt, Artificial Sequence
  Synthetic
ccacaucuaagcugcaagugggg

SEQ ID NO: 328536 - RNA, 24 nt, Artificial Sequence
  Synthetic
gccacaucuaagcugcaagugggg

SEQ ID NO: 328537 - RNA, 18 nt, Artificial Sequence
  Synthetic
gaccuguuaacagugggg

SEQ ID NO: 328538 - RNA, 19 nt, Artificial Sequence
  Synthetic
agaccuguuaacagugggg

SEQ ID NO: 328539 - RNA, 20 nt, Artificial Sequence
  Synthetic
uagaccuguuaacagugggg

SEQ ID NO: 328540 - RNA, 21 nt, Artificial Sequence
  Synthetic
uuagaccuguuaacagugggg

SEQ ID NO: 328541 - RNA, 22 nt, Artificial Sequence
  Synthetic
auuagaccuguuaacagugggg

SEQ ID NO: 328542 - RNA, 23 nt, Artificial Sequence
  Synthetic
aauuagaccuguuaacagugggg

SEQ ID NO: 328543 - RNA, 24 nt, Artificial Sequence
  Synthetic
uaauuagaccuguuaacagugggg

SEQ ID NO: 328544 - RNA, 18 nt, Artificial Sequence
  Synthetic
agaccacugacagugggg

SEQ ID NO: 328545 - RNA, 19 nt, Artificial Sequence
  Synthetic
aagaccacugacagugggg

SEQ ID NO: 328546 - RNA, 20 nt, Artificial Sequence
  Synthetic
aaagaccacugacagugggg

SEQ ID NO: 328547 - RNA, 21 nt, Artificial Sequence
  Synthetic
caaagaccacugacagugggg

SEQ ID NO: 328548 - RNA, 22 nt, Artificial Sequence
  Synthetic
ucaaagaccacugacagugggg

SEQ ID NO: 328549 - RNA, 23 nt, Artificial Sequence
  Synthetic
cucaaagaccacugacagugggg

SEQ ID NO: 328550 - RNA, 24 nt, Artificial Sequence
  Synthetic
ccucaaagaccacugacagugggg

SEQ ID NO: 328551 - RNA, 18 nt, Artificial Sequence
  Synthetic
auggcuucugcagugggg

SEQ ID NO: 328552 - RNA, 19 nt, Artificial Sequence
  Synthetic
gauggcuucugcagugggg

SEQ ID NO: 328553 - RNA, 20 nt, Artificial Sequence
  Synthetic
agauggcuucugcagugggg

SEQ ID NO: 328554 - RNA, 21 nt, Artificial Sequence
  Synthetic
cagauggcuucugcagugggg

SEQ ID NO: 328555 - RNA, 22 nt, Artificial Sequence
  Synthetic
ucagauggcuucugcagugggg

SEQ ID NO: 328556 - RNA, 23 nt, Artificial Sequence
  Synthetic
cucagauggcuucugcagugggg

SEQ ID NO: 328557 - RNA, 24 nt, Artificial Sequence
  Synthetic
gcucagauggcuucugcagugggg

SEQ ID NO: 328558 - RNA, 18 nt, Artificial Sequence
  Synthetic
auuagagaaucagugggg

SEQ ID NO: 328559 - RNA, 19 nt, Artificial Sequence
  Synthetic
gauuagagaaucagugggg

SEQ ID NO: 328560 - RNA, 20 nt, Artificial Sequence
  Synthetic
ugauuagagaaucagugggg

SEQ ID NO: 328561 - RNA, 21 nt, Artificial Sequence
  Synthetic
gugauuagagaaucagugggg

SEQ ID NO: 328562 - RNA, 22 nt, Artificial Sequence
  Synthetic
agugauuagagaaucagugggg

SEQ ID NO: 328563 - RNA, 23 nt, Artificial Sequence
  Synthetic
aagugauuagagaaucagugggg

SEQ ID NO: 328564 - RNA, 24 nt, Artificial Sequence
  Synthetic
aaagugauuagagaaucagugggg

SEQ ID NO: 328565 - RNA, 18 nt, Artificial Sequence
  Synthetic
gaguggguaggagugggg

SEQ ID NO: 328566 - RNA, 19 nt, Artificial Sequence
  Synthetic
ggaguggguaggagugggg

SEQ ID NO: 328567 - RNA, 20 nt, Artificial Sequence
  Synthetic
gggaguggguaggagugggg

SEQ ID NO: 328568 - RNA, 21 nt, Artificial Sequence
  Synthetic
agggaguggguaggagugggg

SEQ ID NO: 328569 - RNA, 22 nt, Artificial Sequence
  Synthetic
uagggaguggguaggagugggg

SEQ ID NO: 328570 - RNA, 23 nt, Artificial Sequence
  Synthetic
cuagggaguggguaggagugggg

SEQ ID NO: 328571 - RNA, 24 nt, Artificial Sequence
  Synthetic
gcuagggaguggguaggagugggg

SEQ ID NO: 328572 - RNA, 18 nt, Artificial Sequence
  Synthetic
aucuguaguuuagugggg

SEQ ID NO: 328573 - RNA, 19 nt, Artificial Sequence
  Synthetic
gaucuguaguuuagugggg

SEQ ID NO: 328574 - RNA, 20 nt, Artificial Sequence
  Synthetic
ugaucuguaguuuagugggg

SEQ ID NO: 328575 - RNA, 21 nt, Artificial Sequence
  Synthetic
uugaucuguaguuuagugggg

SEQ ID NO: 328576 - RNA, 22 nt, Artificial Sequence
  Synthetic
uuugaucuguaguuuagugggg

SEQ ID NO: 328577 - RNA, 23 nt, Artificial Sequence
  Synthetic
cuuugaucuguaguuuagugggg

SEQ ID NO: 328578 - RNA, 24 nt, Artificial Sequence
  Synthetic
ucuuugaucuguaguuuagugggg

SEQ ID NO: 328579 - RNA, 18 nt, Artificial Sequence
  Synthetic
ccagggccugucgugggg

SEQ ID NO: 328580 - RNA, 19 nt, Artificial Sequence
  Synthetic
accagggccugucgugggg

SEQ ID NO: 328581 - RNA, 20 nt, Artificial Sequence
  Synthetic
caccagggccugucgugggg

SEQ ID NO: 328582 - RNA, 21 nt, Artificial Sequence
  Synthetic
acaccagggccugucgugggg

SEQ ID NO: 328583 - RNA, 22 nt, Artificial Sequence
  Synthetic
cacaccagggccugucgugggg

SEQ ID NO: 328584 - RNA, 23 nt, Artificial Sequence
  Synthetic
acacaccagggccugucgugggg

SEQ ID NO: 328585 - RNA, 24 nt, Artificial Sequence
  Synthetic
cacacaccagggccugucgugggg

SEQ ID NO: 328586 - RNA, 18 nt, Artificial Sequence
  Synthetic
guguaagagaaggugggg

SEQ ID NO: 328587 - RNA, 19 nt, Artificial Sequence
  Synthetic
aguguaagagaaggugggg

SEQ ID NO: 328588 - RNA, 20 nt, Artificial Sequence
  Synthetic
caguguaagagaaggugggg

SEQ ID NO: 328589 - RNA, 21 nt, Artificial Sequence
  Synthetic
ccaguguaagagaaggugggg

SEQ ID NO: 328590 - RNA, 22 nt, Artificial Sequence
  Synthetic
uccaguguaagagaaggugggg

SEQ ID NO: 328591 - RNA, 23 nt, Artificial Sequence
  Synthetic
uuccaguguaagagaaggugggg

SEQ ID NO: 328592 - RNA, 24 nt, Artificial Sequence
  Synthetic
auuccaguguaagagaaggugggg

SEQ ID NO: 328593 - RNA, 18 nt, Artificial Sequence
  Synthetic
ugggaggccgaggugggg

SEQ ID NO: 328594 - RNA, 19 nt, Artificial Sequence
  Synthetic
uugggaggccgaggugggg

SEQ ID NO: 328595 - RNA, 20 nt, Artificial Sequence
  Synthetic
uuugggaggccgaggugggg

SEQ ID NO: 328596 - RNA, 21 nt, Artificial Sequence
  Synthetic
cuuugggaggccgaggugggg

SEQ ID NO: 328597 - RNA, 22 nt, Artificial Sequence
  Synthetic
acuuugggaggccgaggugggg

SEQ ID NO: 328598 - RNA, 23 nt, Artificial Sequence
  Synthetic
cacuuugggaggccgaggugggg

SEQ ID NO: 328599 - RNA, 24 nt, Artificial Sequence
  Synthetic
gcacuuugggaggccgaggugggg

SEQ ID NO: 328600 - RNA, 18 nt, Artificial Sequence
  Synthetic
gcacugcuugaggugggg

SEQ ID NO: 328601 - RNA, 19 nt, Artificial Sequence
  Synthetic
ugcacugcuugaggugggg

SEQ ID NO: 328602 - RNA, 20 nt, Artificial Sequence
  Synthetic
cugcacugcuugaggugggg

SEQ ID NO: 328603 - RNA, 21 nt, Artificial Sequence
  Synthetic
gcugcacugcuugaggugggg

SEQ ID NO: 328604 - RNA, 22 nt, Artificial Sequence
  Synthetic
ggcugcacugcuugaggugggg

SEQ ID NO: 328605 - RNA, 23 nt, Artificial Sequence
  Synthetic
gggcugcacugcuugaggugggg

SEQ ID NO: 328606 - RNA, 24 nt, Artificial Sequence
  Synthetic
ugggcugcacugcuugaggugggg

SEQ ID NO: 328607 - RNA, 18 nt, Artificial Sequence
  Synthetic
ucucacucauaggugggg

SEQ ID NO: 328608 - RNA, 19 nt, Artificial Sequence
  Synthetic
uucucacucauaggugggg

SEQ ID NO: 328609 - RNA, 20 nt, Artificial Sequence
  Synthetic
auucucacucauaggugggg

SEQ ID NO: 328610 - RNA, 21 nt, Artificial Sequence
  Synthetic
uauucucacucauaggugggg

SEQ ID NO: 328611 - RNA, 22 nt, Artificial Sequence
  Synthetic
auauucucacucauaggugggg

SEQ ID NO: 328612 - RNA, 23 nt, Artificial Sequence
  Synthetic
cauauucucacucauaggugggg

SEQ ID NO: 328613 - RNA, 24 nt, Artificial Sequence
  Synthetic
gcauauucucacucauaggugggg

SEQ ID NO: 328614 - RNA, 18 nt, Artificial Sequence
  Synthetic
agaaucaguggggugggg

SEQ ID NO: 328615 - RNA, 19 nt, Artificial Sequence
  Synthetic
gagaaucaguggggugggg

SEQ ID NO: 328616 - RNA, 20 nt, Artificial Sequence
  Synthetic
agagaaucaguggggugggg

SEQ ID NO: 328617 - RNA, 21 nt, Artificial Sequence
  Synthetic
uagagaaucaguggggugggg

SEQ ID NO: 328618 - RNA, 22 nt, Artificial Sequence
  Synthetic
uuagagaaucaguggggugggg

SEQ ID NO: 328619 - RNA, 23 nt, Artificial Sequence
  Synthetic
auuagagaaucaguggggugggg

SEQ ID NO: 328620 - RNA, 24 nt, Artificial Sequence
  Synthetic
gauuagagaaucaguggggugggg

SEQ ID NO: 328621 - RNA, 18 nt, Artificial Sequence
  Synthetic
ccgcacacaguggugggg

SEQ ID NO: 328622 - RNA, 19 nt, Artificial Sequence
  Synthetic
gccgcacacaguggugggg

SEQ ID NO: 328623 - RNA, 20 nt, Artificial Sequence
  Synthetic
ugccgcacacaguggugggg

SEQ ID NO: 328624 - RNA, 21 nt, Artificial Sequence
  Synthetic
augccgcacacaguggugggg

SEQ ID NO: 328625 - RNA, 22 nt, Artificial Sequence
  Synthetic
gaugccgcacacaguggugggg

SEQ ID NO: 328626 - RNA, 23 nt, Artificial Sequence
  Synthetic
ugaugccgcacacaguggugggg

SEQ ID NO: 328627 - RNA, 24 nt, Artificial Sequence
  Synthetic
cugaugccgcacacaguggugggg

SEQ ID NO: 328628 - RNA, 18 nt, Artificial Sequence
  Synthetic
cagaaggaaaaugugggg

SEQ ID NO: 328629 - RNA, 19 nt, Artificial Sequence
  Synthetic
gcagaaggaaaaugugggg

SEQ ID NO: 328630 - RNA, 20 nt, Artificial Sequence
  Synthetic
ugcagaaggaaaaugugggg

SEQ ID NO: 328631 - RNA, 21 nt, Artificial Sequence
  Synthetic
gugcagaaggaaaaugugggg

SEQ ID NO: 328632 - RNA, 22 nt, Artificial Sequence
  Synthetic
agugcagaaggaaaaugugggg

SEQ ID NO: 328633 - RNA, 23 nt, Artificial Sequence
  Synthetic
cagugcagaaggaaaaugugggg

SEQ ID NO: 328634 - RNA, 24 nt, Artificial Sequence
  Synthetic
acagugcagaaggaaaaugugggg

SEQ ID NO: 328635 - RNA, 18 nt, Artificial Sequence
  Synthetic
aucuggucccaugugggg

SEQ ID NO: 328636 - RNA, 19 nt, Artificial Sequence
  Synthetic
uaucuggucccaugugggg

SEQ ID NO: 328637 - RNA, 20 nt, Artificial Sequence
  Synthetic
uuaucuggucccaugugggg

SEQ ID NO: 328638 - RNA, 21 nt, Artificial Sequence
  Synthetic
cuuaucuggucccaugugggg

SEQ ID NO: 328639 - RNA, 22 nt, Artificial Sequence
  Synthetic
ucuuaucuggucccaugugggg

SEQ ID NO: 328640 - RNA, 23 nt, Artificial Sequence
  Synthetic
aucuuaucuggucccaugugggg

SEQ ID NO: 328641 - RNA, 24 nt, Artificial Sequence
  Synthetic
gaucuuaucuggucccaugugggg

SEQ ID NO: 328642 - RNA, 18 nt, Artificial Sequence
  Synthetic
ccugaaagcagugugggg

SEQ ID NO: 328643 - RNA, 19 nt, Artificial Sequence
  Synthetic
uccugaaagcagugugggg

SEQ ID NO: 328644 - RNA, 20 nt, Artificial Sequence
  Synthetic
auccugaaagcagugugggg

SEQ ID NO: 328645 - RNA, 21 nt, Artificial Sequence
  Synthetic
uauccugaaagcagugugggg

SEQ ID NO: 328646 - RNA, 22 nt, Artificial Sequence
  Synthetic
cuauccugaaagcagugugggg

SEQ ID NO: 328647 - RNA, 23 nt, Artificial Sequence
  Synthetic
acuauccugaaagcagugugggg

SEQ ID NO: 328648 - RNA, 24 nt, Artificial Sequence
  Synthetic
uacuauccugaaagcagugugggg

SEQ ID NO: 328649 - RNA, 18 nt, Artificial Sequence
  Synthetic
cucaagcuuagugugggg

SEQ ID NO: 328650 - RNA, 19 nt, Artificial Sequence
  Synthetic
acucaagcuuagugugggg

SEQ ID NO: 328651 - RNA, 20 nt, Artificial Sequence
  Synthetic
uacucaagcuuagugugggg

SEQ ID NO: 328652 - RNA, 21 nt, Artificial Sequence
  Synthetic
auacucaagcuuagugugggg

SEQ ID NO: 328653 - RNA, 22 nt, Artificial Sequence
  Synthetic
gauacucaagcuuagugugggg

SEQ ID NO: 328654 - RNA, 23 nt, Artificial Sequence
  Synthetic
ggauacucaagcuuagugugggg

SEQ ID NO: 328655 - RNA, 24 nt, Artificial Sequence
  Synthetic
gggauacucaagcuuagugugggg

SEQ ID NO: 328656 - RNA, 18 nt, Artificial Sequence
  Synthetic
aaauguaugugugugggg

SEQ ID NO: 328657 - RNA, 19 nt, Artificial Sequence
  Synthetic
aaaauguaugugugugggg

SEQ ID NO: 328658 - RNA, 20 nt, Artificial Sequence
  Synthetic
aaaaauguaugugugugggg

SEQ ID NO: 328659 - RNA, 21 nt, Artificial Sequence
  Synthetic
aaaaaauguaugugugugggg

SEQ ID NO: 328660 - RNA, 22 nt, Artificial Sequence
  Synthetic
aaaaaaauguaugugugugggg

SEQ ID NO: 328661 - RNA, 23 nt, Artificial Sequence
  Synthetic
aaaaaaaauguaugugugugggg

SEQ ID NO: 328662 - RNA, 24 nt, Artificial Sequence
  Synthetic
gaaaaaaaauguaugugugugggg

SEQ ID NO: 328663 - RNA, 18 nt, Artificial Sequence
  Synthetic
auugcacacauugugggg

SEQ ID NO: 328664 - RNA, 19 nt, Artificial Sequence
  Synthetic
uauugcacacauugugggg

SEQ ID NO: 328665 - RNA, 20 nt, Artificial Sequence
  Synthetic
auauugcacacauugugggg

SEQ ID NO: 328666 - RNA, 21 nt, Artificial Sequence
  Synthetic
aauauugcacacauugugggg

SEQ ID NO: 328667 - RNA, 22 nt, Artificial Sequence
  Synthetic
aaauauugcacacauugugggg

SEQ ID NO: 328668 - RNA, 23 nt, Artificial Sequence
  Synthetic
aaaauauugcacacauugugggg

SEQ ID NO: 328669 - RNA, 24 nt, Artificial Sequence
  Synthetic
uaaaauauugcacacauugugggg

SEQ ID NO: 328670 - RNA, 18 nt, Artificial Sequence
  Synthetic
uacaaggagauugugggg

SEQ ID NO: 328671 - RNA, 19 nt, Artificial Sequence
  Synthetic
uuacaaggagauugugggg

SEQ ID NO: 328672 - RNA, 20 nt, Artificial Sequence
  Synthetic
uuuacaaggagauugugggg

SEQ ID NO: 328673 - RNA, 21 nt, Artificial Sequence
  Synthetic
uuuuacaaggagauugugggg

SEQ ID NO: 328674 - RNA, 22 nt, Artificial Sequence
  Synthetic
cuuuuacaaggagauugugggg

SEQ ID NO: 328675 - RNA, 23 nt, Artificial Sequence
  Synthetic
gcuuuuacaaggagauugugggg

SEQ ID NO: 328676 - RNA, 24 nt, Artificial Sequence
  Synthetic
ugcuuuuacaaggagauugugggg

SEQ ID NO: 328677 - RNA, 18 nt, Artificial Sequence
  Synthetic
uaagaugagauugugggg

SEQ ID NO: 328678 - RNA, 19 nt, Artificial Sequence
  Synthetic
uuaagaugagauugugggg

SEQ ID NO: 328679 - RNA, 20 nt, Artificial Sequence
  Synthetic
uuuaagaugagauugugggg

SEQ ID NO: 328680 - RNA, 21 nt, Artificial Sequence
  Synthetic
auuuaagaugagauugugggg

SEQ ID NO: 328681 - RNA, 22 nt, Artificial Sequence
  Synthetic
aauuuaagaugagauugugggg

SEQ ID NO: 328682 - RNA, 23 nt, Artificial Sequence
  Synthetic
caauuuaagaugagauugugggg

SEQ ID NO: 328683 - RNA, 24 nt, Artificial Sequence
  Synthetic
acaauuuaagaugagauugugggg

SEQ ID NO: 328684 - RNA, 18 nt, Artificial Sequence
  Synthetic
cuggggacuguugugggg

SEQ ID NO: 328685 - RNA, 19 nt, Artificial Sequence
  Synthetic
ucuggggacuguugugggg

SEQ ID NO: 328686 - RNA, 20 nt, Artificial Sequence
  Synthetic
cucuggggacuguugugggg

SEQ ID NO: 328687 - RNA, 18 nt, Artificial Sequence
  Synthetic
ccagggccuguugugggg

SEQ ID NO: 328688 - RNA, 19 nt, Artificial Sequence
  Synthetic
accagggccuguugugggg

SEQ ID NO: 328689 - RNA, 20 nt, Artificial Sequence
  Synthetic
caccagggccuguugugggg

SEQ ID NO: 328690 - RNA, 21 nt, Artificial Sequence
  Synthetic
acaccagggccuguugugggg

SEQ ID NO: 328691 - RNA, 22 nt, Artificial Sequence
  Synthetic
cacaccagggccuguugugggg

SEQ ID NO: 328692 - RNA, 23 nt, Artificial Sequence
  Synthetic
acacaccagggccuguugugggg

SEQ ID NO: 328693 - RNA, 24 nt, Artificial Sequence
  Synthetic
cacacaccagggccuguugugggg

SEQ ID NO: 328694 - RNA, 18 nt, Artificial Sequence
  Synthetic
ccggggccuguugugggg

SEQ ID NO: 328695 - RNA, 19 nt, Artificial Sequence
  Synthetic
accggggccuguugugggg

SEQ ID NO: 328696 - RNA, 20 nt, Artificial Sequence
  Synthetic
caccggggccuguugugggg

SEQ ID NO: 328697 - RNA, 18 nt, Artificial Sequence
  Synthetic
ccauauguauaauugggg

SEQ ID NO: 328698 - RNA, 19 nt, Artificial Sequence
  Synthetic
gccauauguauaauugggg

SEQ ID NO: 328699 - RNA, 20 nt, Artificial Sequence
  Synthetic
ggccauauguauaauugggg

SEQ ID NO: 328700 - RNA, 21 nt, Artificial Sequence
  Synthetic
gggccauauguauaauugggg

SEQ ID NO: 328701 - RNA, 22 nt, Artificial Sequence
  Synthetic
ugggccauauguauaauugggg

SEQ ID NO: 328702 - RNA, 23 nt, Artificial Sequence
  Synthetic
gugggccauauguauaauugggg

SEQ ID NO: 328703 - RNA, 24 nt, Artificial Sequence
  Synthetic
ugugggccauauguauaauugggg

SEQ ID NO: 328704 - RNA, 18 nt, Artificial Sequence
  Synthetic
uugguugucacauugggg

SEQ ID NO: 328705 - RNA, 19 nt, Artificial Sequence
  Synthetic
cuugguugucacauugggg

SEQ ID NO: 328706 - RNA, 20 nt, Artificial Sequence
  Synthetic
ucuugguugucacauugggg

SEQ ID NO: 328707 - RNA, 21 nt, Artificial Sequence
  Synthetic
uucuugguugucacauugggg

SEQ ID NO: 328708 - RNA, 22 nt, Artificial Sequence
  Synthetic
auucuugguugucacauugggg

SEQ ID NO: 328709 - RNA, 23 nt, Artificial Sequence
  Synthetic
aauucuugguugucacauugggg

SEQ ID NO: 328710 - RNA, 24 nt, Artificial Sequence
  Synthetic
aaauucuugguugucacauugggg

SEQ ID NO: 328711 - RNA, 18 nt, Artificial Sequence
  Synthetic
gaccuuuccagauugggg

SEQ ID NO: 328712 - RNA, 19 nt, Artificial Sequence
  Synthetic
agaccuuuccagauugggg

SEQ ID NO: 328713 - RNA, 20 nt, Artificial Sequence
  Synthetic
aagaccuuuccagauugggg

SEQ ID NO: 328714 - RNA, 21 nt, Artificial Sequence
  Synthetic
uaagaccuuuccagauugggg

SEQ ID NO: 328715 - RNA, 22 nt, Artificial Sequence
  Synthetic
guaagaccuuuccagauugggg

SEQ ID NO: 328716 - RNA, 23 nt, Artificial Sequence
  Synthetic
aguaagaccuuuccagauugggg

SEQ ID NO: 328717 - RNA, 24 nt, Artificial Sequence
  Synthetic
caguaagaccuuuccagauugggg

SEQ ID NO: 328718 - RNA, 18 nt, Artificial Sequence
  Synthetic
ccacaagcugacuugggg

SEQ ID NO: 328719 - RNA, 19 nt, Artificial Sequence
  Synthetic
accacaagcugacuugggg

SEQ ID NO: 328720 - RNA, 20 nt, Artificial Sequence
  Synthetic
gaccacaagcugacuugggg

SEQ ID NO: 328721 - RNA, 21 nt, Artificial Sequence
  Synthetic
ggaccacaagcugacuugggg

SEQ ID NO: 328722 - RNA, 22 nt, Artificial Sequence
  Synthetic
aggaccacaagcugacuugggg

SEQ ID NO: 328723 - RNA, 23 nt, Artificial Sequence
  Synthetic
gaggaccacaagcugacuugggg

SEQ ID NO: 328724 - RNA, 24 nt, Artificial Sequence
  Synthetic
ggaggaccacaagcugacuugggg

SEQ ID NO: 328725 - RNA, 18 nt, Artificial Sequence
  Synthetic
ccaauucuucccuugggg

SEQ ID NO: 328726 - RNA, 19 nt, Artificial Sequence
  Synthetic
cccaauucuucccuugggg

SEQ ID NO: 328727 - RNA, 20 nt, Artificial Sequence
  Synthetic
ccccaauucuucccuugggg

SEQ ID NO: 328728 - RNA, 21 nt, Artificial Sequence
  Synthetic
uccccaauucuucccuugggg

SEQ ID NO: 328729 - RNA, 22 nt, Artificial Sequence
  Synthetic
cuccccaauucuucccuugggg

SEQ ID NO: 328730 - RNA, 23 nt, Artificial Sequence
  Synthetic
ucuccccaauucuucccuugggg

SEQ ID NO: 328731 - RNA, 24 nt, Artificial Sequence
  Synthetic
uucuccccaauucuucccuugggg

SEQ ID NO: 328732 - RNA, 18 nt, Artificial Sequence
  Synthetic
uagugguggggcuugggg

SEQ ID NO: 328733 - RNA, 19 nt, Artificial Sequence
  Synthetic
auagugguggggcuugggg

SEQ ID NO: 328734 - RNA, 20 nt, Artificial Sequence
  Synthetic
aauagugguggggcuugggg

SEQ ID NO: 328735 - RNA, 21 nt, Artificial Sequence
  Synthetic
uaauagugguggggcuugggg

SEQ ID NO: 328736 - RNA, 22 nt, Artificial Sequence
  Synthetic
uuaauagugguggggcuugggg

SEQ ID NO: 328737 - RNA, 23 nt, Artificial Sequence
  Synthetic
auuaauagugguggggcuugggg

SEQ ID NO: 328738 - RNA, 24 nt, Artificial Sequence
  Synthetic
aauuaauagugguggggcuugggg

SEQ ID NO: 328739 - RNA, 18 nt, Artificial Sequence
  Synthetic
ugaagcacugaguugggg

SEQ ID NO: 328740 - RNA, 19 nt, Artificial Sequence
  Synthetic
cugaagcacugaguugggg

SEQ ID NO: 328741 - RNA, 20 nt, Artificial Sequence
  Synthetic
gcugaagcacugaguugggg

SEQ ID NO: 328742 - RNA, 21 nt, Artificial Sequence
  Synthetic
ggcugaagcacugaguugggg

SEQ ID NO: 328743 - RNA, 22 nt, Artificial Sequence
  Synthetic
uggcugaagcacugaguugggg

SEQ ID NO: 328744 - RNA, 23 nt, Artificial Sequence
  Synthetic
auggcugaagcacugaguugggg

SEQ ID NO: 328745 - RNA, 24 nt, Artificial Sequence
  Synthetic
uauggcugaagcacugaguugggg

SEQ ID NO: 328746 - RNA, 18 nt, Artificial Sequence
  Synthetic
uaagagaagagguugggg

SEQ ID NO: 328747 - RNA, 19 nt, Artificial Sequence
  Synthetic
uuaagagaagagguugggg

SEQ ID NO: 328748 - RNA, 20 nt, Artificial Sequence
  Synthetic
auuaagagaagagguugggg

SEQ ID NO: 328749 - RNA, 21 nt, Artificial Sequence
  Synthetic
cauuaagagaagagguugggg

SEQ ID NO: 328750 - RNA, 22 nt, Artificial Sequence
  Synthetic
ccauuaagagaagagguugggg

SEQ ID NO: 328751 - RNA, 23 nt, Artificial Sequence
  Synthetic
uccauuaagagaagagguugggg

SEQ ID NO: 328752 - RNA, 24 nt, Artificial Sequence
  Synthetic
auccauuaagagaagagguugggg

SEQ ID NO: 328753 - RNA, 18 nt, Artificial Sequence
  Synthetic
acaguggugggguugggg

SEQ ID NO: 328754 - RNA, 19 nt, Artificial Sequence
  Synthetic
cacaguggugggguugggg

SEQ ID NO: 328755 - RNA, 20 nt, Artificial Sequence
  Synthetic
acacaguggugggguugggg

SEQ ID NO: 328756 - RNA, 21 nt, Artificial Sequence
  Synthetic
cacacaguggugggguugggg

SEQ ID NO: 328757 - RNA, 22 nt, Artificial Sequence
  Synthetic
gcacacaguggugggguugggg

SEQ ID NO: 328758 - RNA, 23 nt, Artificial Sequence
  Synthetic
cgcacacaguggugggguugggg

SEQ ID NO: 328759 - RNA, 24 nt, Artificial Sequence
  Synthetic
ccgcacacaguggugggguugggg

SEQ ID NO: 328760 - RNA, 18 nt, Artificial Sequence
  Synthetic
ggugagguaugguugggg

SEQ ID NO: 328761 - RNA, 19 nt, Artificial Sequence
  Synthetic
gggugagguaugguugggg

SEQ ID NO: 328762 - RNA, 20 nt, Artificial Sequence
  Synthetic
agggugagguaugguugggg

SEQ ID NO: 328763 - RNA, 21 nt, Artificial Sequence
  Synthetic
uagggugagguaugguugggg

SEQ ID NO: 328764 - RNA, 22 nt, Artificial Sequence
  Synthetic
auagggugagguaugguugggg

SEQ ID NO: 328765 - RNA, 23 nt, Artificial Sequence
  Synthetic
cauagggugagguaugguugggg

SEQ ID NO: 328766 - RNA, 24 nt, Artificial Sequence
  Synthetic
gcauagggugagguaugguugggg

SEQ ID NO: 328767 - RNA, 18 nt, Artificial Sequence
  Synthetic
auuguguguguguugggg

SEQ ID NO: 328768 - RNA, 19 nt, Artificial Sequence
  Synthetic
uauuguguguguguugggg

SEQ ID NO: 328769 - RNA, 20 nt, Artificial Sequence
  Synthetic
cuauuguguguguguugggg

SEQ ID NO: 328770 - RNA, 21 nt, Artificial Sequence
  Synthetic
acuauuguguguguguugggg

SEQ ID NO: 328771 - RNA, 22 nt, Artificial Sequence
  Synthetic
uacuauuguguguguguugggg

SEQ ID NO: 328772 - RNA, 23 nt, Artificial Sequence
  Synthetic
uuacuauuguguguguguugggg

SEQ ID NO: 328773 - RNA, 24 nt, Artificial Sequence
  Synthetic
guuacuauuguguguguguugggg

SEQ ID NO: 328774 - RNA, 18 nt, Artificial Sequence
  Synthetic
auggccuccuuguugggg

SEQ ID NO: 328775 - RNA, 19 nt, Artificial Sequence
  Synthetic
uauggccuccuuguugggg

SEQ ID NO: 328776 - RNA, 20 nt, Artificial Sequence
  Synthetic
auauggccuccuuguugggg

SEQ ID NO: 328777 - RNA, 21 nt, Artificial Sequence
  Synthetic
aauauggccuccuuguugggg

SEQ ID NO: 328778 - RNA, 22 nt, Artificial Sequence
  Synthetic
aaauauggccuccuuguugggg

SEQ ID NO: 328779 - RNA, 23 nt, Artificial Sequence
  Synthetic
uaaauauggccuccuuguugggg

SEQ ID NO: 328780 - RNA, 24 nt, Artificial Sequence
  Synthetic
cuaaauauggccuccuuguugggg

SEQ ID NO: 328781 - RNA, 18 nt, Artificial Sequence
  Synthetic
uauucuguugauuugggg

SEQ ID NO: 328782 - RNA, 19 nt, Artificial Sequence
  Synthetic
auauucuguugauuugggg

SEQ ID NO: 328783 - RNA, 20 nt, Artificial Sequence
  Synthetic
uauauucuguugauuugggg

SEQ ID NO: 328784 - RNA, 21 nt, Artificial Sequence
  Synthetic
guauauucuguugauuugggg

SEQ ID NO: 328785 - RNA, 22 nt, Artificial Sequence
  Synthetic
uguauauucuguugauuugggg

SEQ ID NO: 328786 - RNA, 23 nt, Artificial Sequence
  Synthetic
auguauauucuguugauuugggg

SEQ ID NO: 328787 - RNA, 24 nt, Artificial Sequence
  Synthetic
aauguauauucuguugauuugggg

SEQ ID NO: 328788 - RNA, 18 nt, Artificial Sequence
  Synthetic
uuaagauuuucuuugggg

SEQ ID NO: 328789 - RNA, 19 nt, Artificial Sequence
  Synthetic
uuuaagauuuucuuugggg

SEQ ID NO: 328790 - RNA, 20 nt, Artificial Sequence
  Synthetic
auuuaagauuuucuuugggg

SEQ ID NO: 328791 - RNA, 21 nt, Artificial Sequence
  Synthetic
aauuuaagauuuucuuugggg

SEQ ID NO: 328792 - RNA, 22 nt, Artificial Sequence
  Synthetic
gaauuuaagauuuucuuugggg

SEQ ID NO: 328793 - RNA, 23 nt, Artificial Sequence
  Synthetic
ggaauuuaagauuuucuuugggg

SEQ ID NO: 328794 - RNA, 24 nt, Artificial Sequence
  Synthetic
aggaauuuaagauuuucuuugggg

SEQ ID NO: 328795 - RNA, 18 nt, Artificial Sequence
  Synthetic
gagcaaaggcuuuugggg

SEQ ID NO: 328796 - RNA, 19 nt, Artificial Sequence
  Synthetic
ugagcaaaggcuuuugggg

SEQ ID NO: 328797 - RNA, 20 nt, Artificial Sequence
  Synthetic
uugagcaaaggcuuuugggg

SEQ ID NO: 328798 - RNA, 21 nt, Artificial Sequence
  Synthetic
uuugagcaaaggcuuuugggg

SEQ ID NO: 328799 - RNA, 22 nt, Artificial Sequence
  Synthetic
guuugagcaaaggcuuuugggg

SEQ ID NO: 328800 - RNA, 23 nt, Artificial Sequence
  Synthetic
uguuugagcaaaggcuuuugggg

SEQ ID NO: 328801 - RNA, 24 nt, Artificial Sequence
  Synthetic
guguuugagcaaaggcuuuugggg

SEQ ID NO: 328802 - RNA, 18 nt, Artificial Sequence
  Synthetic
ucuuuagaaaaaaauggg

SEQ ID NO: 328803 - RNA, 19 nt, Artificial Sequence
  Synthetic
uucuuuagaaaaaaauggg

SEQ ID NO: 328804 - RNA, 20 nt, Artificial Sequence
  Synthetic
auucuuuagaaaaaaauggg

SEQ ID NO: 328805 - RNA, 21 nt, Artificial Sequence
  Synthetic
uauucuuuagaaaaaaauggg

SEQ ID NO: 328806 - RNA, 22 nt, Artificial Sequence
  Synthetic
auauucuuuagaaaaaaauggg

SEQ ID NO: 328807 - RNA, 23 nt, Artificial Sequence
  Synthetic
aauauucuuuagaaaaaaauggg

SEQ ID NO: 328808 - RNA, 24 nt, Artificial Sequence
  Synthetic
gaauauucuuuagaaaaaaauggg

SEQ ID NO: 328809 - RNA, 18 nt, Artificial Sequence
  Synthetic
aaaccagcucaaaauggg

SEQ ID NO: 328810 - RNA, 19 nt, Artificial Sequence
  Synthetic
aaaaccagcucaaaauggg

SEQ ID NO: 328811 - RNA, 20 nt, Artificial Sequence
  Synthetic
gaaaaccagcucaaaauggg

SEQ ID NO: 328812 - RNA, 21 nt, Artificial Sequence
  Synthetic
agaaaaccagcucaaaauggg

SEQ ID NO: 328813 - RNA, 22 nt, Artificial Sequence
  Synthetic
uagaaaaccagcucaaaauggg

SEQ ID NO: 328814 - RNA, 23 nt, Artificial Sequence
  Synthetic
auagaaaaccagcucaaaauggg

SEQ ID NO: 328815 - RNA, 24 nt, Artificial Sequence
  Synthetic
gauagaaaaccagcucaaaauggg

SEQ ID NO: 328816 - RNA, 18 nt, Artificial Sequence
  Synthetic
ugauuaguucaaaauggg

SEQ ID NO: 328817 - RNA, 19 nt, Artificial Sequence
  Synthetic
uugauuaguucaaaauggg

SEQ ID NO: 328818 - RNA, 20 nt, Artificial Sequence
  Synthetic
cuugauuaguucaaaauggg

SEQ ID NO: 328819 - RNA, 21 nt, Artificial Sequence
  Synthetic
ccuugauuaguucaaaauggg

SEQ ID NO: 328820 - RNA, 22 nt, Artificial Sequence
  Synthetic
cccuugauuaguucaaaauggg

SEQ ID NO: 328821 - RNA, 23 nt, Artificial Sequence
  Synthetic
gcccuugauuaguucaaaauggg

SEQ ID NO: 328822 - RNA, 24 nt, Artificial Sequence
  Synthetic
ugcccuugauuaguucaaaauggg

SEQ ID NO: 328823 - RNA, 18 nt, Artificial Sequence
  Synthetic
ugaaaucuauaaaauggg

SEQ ID NO: 328824 - RNA, 19 nt, Artificial Sequence
  Synthetic
uugaaaucuauaaaauggg

SEQ ID NO: 328825 - RNA, 20 nt, Artificial Sequence
  Synthetic
uuugaaaucuauaaaauggg

SEQ ID NO: 328826 - RNA, 21 nt, Artificial Sequence
  Synthetic
cuuugaaaucuauaaaauggg

SEQ ID NO: 328827 - RNA, 22 nt, Artificial Sequence
  Synthetic
ccuuugaaaucuauaaaauggg

SEQ ID NO: 328828 - RNA, 23 nt, Artificial Sequence
  Synthetic
cccuuugaaaucuauaaaauggg

SEQ ID NO: 328829 - RNA, 24 nt, Artificial Sequence
  Synthetic
ucccuuugaaaucuauaaaauggg

SEQ ID NO: 328830 - RNA, 18 nt, Artificial Sequence
  Synthetic
ucucaucuguaaaauggg

SEQ ID NO: 328831 - RNA, 19 nt, Artificial Sequence
  Synthetic
gucucaucuguaaaauggg

SEQ ID NO: 328832 - RNA, 20 nt, Artificial Sequence
  Synthetic
ugucucaucuguaaaauggg

SEQ ID NO: 328833 - RNA, 21 nt, Artificial Sequence
  Synthetic
uugucucaucuguaaaauggg

SEQ ID NO: 328834 - RNA, 22 nt, Artificial Sequence
  Synthetic
guugucucaucuguaaaauggg

SEQ ID NO: 328835 - RNA, 23 nt, Artificial Sequence
  Synthetic
gguugucucaucuguaaaauggg

SEQ ID NO: 328836 - RNA, 24 nt, Artificial Sequence
  Synthetic
ugguugucucaucuguaaaauggg

SEQ ID NO: 328837 - RNA, 18 nt, Artificial Sequence
  Synthetic
auuuauuucccaaauggg

SEQ ID NO: 328838 - RNA, 19 nt, Artificial Sequence
  Synthetic
aauuuauuucccaaauggg

SEQ ID NO: 328839 - RNA, 20 nt, Artificial Sequence
  Synthetic
caauuuauuucccaaauggg

SEQ ID NO: 328840 - RNA, 21 nt, Artificial Sequence
  Synthetic
ucaauuuauuucccaaauggg

SEQ ID NO: 328841 - RNA, 22 nt, Artificial Sequence
  Synthetic
aucaauuuauuucccaaauggg

SEQ ID NO: 328842 - RNA, 23 nt, Artificial Sequence
  Synthetic
uaucaauuuauuucccaaauggg

SEQ ID NO: 328843 - RNA, 24 nt, Artificial Sequence
  Synthetic
auaucaauuuauuucccaaauggg

SEQ ID NO: 328844 - RNA, 18 nt, Artificial Sequence
  Synthetic
gauggaccagcaaauggg

SEQ ID NO: 328845 - RNA, 19 nt, Artificial Sequence
  Synthetic
agauggaccagcaaauggg

SEQ ID NO: 328846 - RNA, 20 nt, Artificial Sequence
  Synthetic
gagauggaccagcaaauggg

SEQ ID NO: 328847 - RNA, 21 nt, Artificial Sequence
  Synthetic
agagauggaccagcaaauggg

SEQ ID NO: 328848 - RNA, 22 nt, Artificial Sequence
  Synthetic
aagagauggaccagcaaauggg

SEQ ID NO: 328849 - RNA, 23 nt, Artificial Sequence
  Synthetic
aaagagauggaccagcaaauggg

SEQ ID NO: 328850 - RNA, 24 nt, Artificial Sequence
  Synthetic
aaaagagauggaccagcaaauggg

SEQ ID NO: 328851 - RNA, 18 nt, Artificial Sequence
  Synthetic
aguggaguaggaaauggg

SEQ ID NO: 328852 - RNA, 19 nt, Artificial Sequence
  Synthetic
gaguggaguaggaaauggg

SEQ ID NO: 328853 - RNA, 20 nt, Artificial Sequence
  Synthetic
ugaguggaguaggaaauggg

SEQ ID NO: 328854 - RNA, 21 nt, Artificial Sequence
  Synthetic
cugaguggaguaggaaauggg

SEQ ID NO: 328855 - RNA, 22 nt, Artificial Sequence
  Synthetic
acugaguggaguaggaaauggg

SEQ ID NO: 328856 - RNA, 23 nt, Artificial Sequence
  Synthetic
uacugaguggaguaggaaauggg

SEQ ID NO: 328857 - RNA, 24 nt, Artificial Sequence
  Synthetic
auacugaguggaguaggaaauggg

SEQ ID NO: 328858 - RNA, 18 nt, Artificial Sequence
  Synthetic
gcuagguuuaacaauggg

SEQ ID NO: 328859 - RNA, 19 nt, Artificial Sequence
  Synthetic
agcuagguuuaacaauggg

SEQ ID NO: 328860 - RNA, 20 nt, Artificial Sequence
  Synthetic
gagcuagguuuaacaauggg

SEQ ID NO: 328861 - RNA, 21 nt, Artificial Sequence
  Synthetic
agagcuagguuuaacaauggg

SEQ ID NO: 328862 - RNA, 22 nt, Artificial Sequence
  Synthetic
gagagcuagguuuaacaauggg

SEQ ID NO: 328863 - RNA, 23 nt, Artificial Sequence
  Synthetic
ugagagcuagguuuaacaauggg

SEQ ID NO: 328864 - RNA, 24 nt, Artificial Sequence
  Synthetic
cugagagcuagguuuaacaauggg

SEQ ID NO: 328865 - RNA, 18 nt, Artificial Sequence
  Synthetic
acuuuauuucccaauggg

SEQ ID NO: 328866 - RNA, 19 nt, Artificial Sequence
  Synthetic
uacuuuauuucccaauggg

SEQ ID NO: 328867 - RNA, 20 nt, Artificial Sequence
  Synthetic
uuacuuuauuucccaauggg

SEQ ID NO: 328868 - RNA, 21 nt, Artificial Sequence
  Synthetic
guuacuuuauuucccaauggg

SEQ ID NO: 328869 - RNA, 22 nt, Artificial Sequence
  Synthetic
uguuacuuuauuucccaauggg

SEQ ID NO: 328870 - RNA, 23 nt, Artificial Sequence
  Synthetic
uuguuacuuuauuucccaauggg

SEQ ID NO: 328871 - RNA, 24 nt, Artificial Sequence
  Synthetic
uuuguuacuuuauuucccaauggg

SEQ ID NO: 328872 - RNA, 18 nt, Artificial Sequence
  Synthetic
ugauaaaggagcaauggg

SEQ ID NO: 328873 - RNA, 19 nt, Artificial Sequence
  Synthetic
uugauaaaggagcaauggg

SEQ ID NO: 328874 - RNA, 20 nt, Artificial Sequence
  Synthetic
cuugauaaaggagcaauggg

SEQ ID NO: 328875 - RNA, 21 nt, Artificial Sequence
  Synthetic
acuugauaaaggagcaauggg

SEQ ID NO: 328876 - RNA, 22 nt, Artificial Sequence
  Synthetic
uacuugauaaaggagcaauggg

SEQ ID NO: 328877 - RNA, 23 nt, Artificial Sequence
  Synthetic
guacuugauaaaggagcaauggg

SEQ ID NO: 328878 - RNA, 24 nt, Artificial Sequence
  Synthetic
aguacuugauaaaggagcaauggg

SEQ ID NO: 328879 - RNA, 18 nt, Artificial Sequence
  Synthetic
aagcccaaagucaauggg

SEQ ID NO: 328880 - RNA, 19 nt, Artificial Sequence
  Synthetic
caagcccaaagucaauggg

SEQ ID NO: 328881 - RNA, 20 nt, Artificial Sequence
  Synthetic
ucaagcccaaagucaauggg

SEQ ID NO: 328882 - RNA, 21 nt, Artificial Sequence
  Synthetic
gucaagcccaaagucaauggg

SEQ ID NO: 328883 - RNA, 22 nt, Artificial Sequence
  Synthetic
agucaagcccaaagucaauggg

SEQ ID NO: 328884 - RNA, 23 nt, Artificial Sequence
  Synthetic
cagucaagcccaaagucaauggg

SEQ ID NO: 328885 - RNA, 24 nt, Artificial Sequence
  Synthetic
acagucaagcccaaagucaauggg

SEQ ID NO: 328886 - RNA, 18 nt, Artificial Sequence
  Synthetic
uguaaagcagagaauggg

SEQ ID NO: 328887 - RNA, 19 nt, Artificial Sequence
  Synthetic
auguaaagcagagaauggg

SEQ ID NO: 328888 - RNA, 20 nt, Artificial Sequence
  Synthetic
aauguaaagcagagaauggg

SEQ ID NO: 328889 - RNA, 21 nt, Artificial Sequence
  Synthetic
aaauguaaagcagagaauggg

SEQ ID NO: 328890 - RNA, 22 nt, Artificial Sequence
  Synthetic
gaaauguaaagcagagaauggg

SEQ ID NO: 328891 - RNA, 23 nt, Artificial Sequence
  Synthetic
agaaauguaaagcagagaauggg

SEQ ID NO: 328892 - RNA, 24 nt, Artificial Sequence
  Synthetic
cagaaauguaaagcagagaauggg

SEQ ID NO: 328893 - RNA, 18 nt, Artificial Sequence
  Synthetic
gggaaaagcgagaauggg

SEQ ID NO: 328894 - RNA, 19 nt, Artificial Sequence
  Synthetic
ggggaaaagcgagaauggg

SEQ ID NO: 328895 - RNA, 20 nt, Artificial Sequence
  Synthetic
aggggaaaagcgagaauggg

SEQ ID NO: 328896 - RNA, 21 nt, Artificial Sequence
  Synthetic
uaggggaaaagcgagaauggg

SEQ ID NO: 328897 - RNA, 22 nt, Artificial Sequence
  Synthetic
guaggggaaaagcgagaauggg

SEQ ID NO: 328898 - RNA, 23 nt, Artificial Sequence
  Synthetic
aguaggggaaaagcgagaauggg

SEQ ID NO: 328899 - RNA, 24 nt, Artificial Sequence
  Synthetic
aaguaggggaaaagcgagaauggg

SEQ ID NO: 328900 - RNA, 18 nt, Artificial Sequence
  Synthetic
ggacagagggagaauggg

SEQ ID NO: 328901 - RNA, 19 nt, Artificial Sequence
  Synthetic
aggacagagggagaauggg

SEQ ID NO: 328902 - RNA, 20 nt, Artificial Sequence
  Synthetic
aaggacagagggagaauggg

SEQ ID NO: 328903 - RNA, 21 nt, Artificial Sequence
  Synthetic
gaaggacagagggagaauggg

SEQ ID NO: 328904 - RNA, 22 nt, Artificial Sequence
  Synthetic
ggaaggacagagggagaauggg

SEQ ID NO: 328905 - RNA, 23 nt, Artificial Sequence
  Synthetic
aggaaggacagagggagaauggg

SEQ ID NO: 328906 - RNA, 24 nt, Artificial Sequence
  Synthetic
caggaaggacagagggagaauggg

SEQ ID NO: 328907 - RNA, 18 nt, Artificial Sequence
  Synthetic
agagaaagagugaauggg

SEQ ID NO: 328908 - RNA, 19 nt, Artificial Sequence
  Synthetic
gagagaaagagugaauggg

SEQ ID NO: 328909 - RNA, 20 nt, Artificial Sequence
  Synthetic
agagagaaagagugaauggg

SEQ ID NO: 328910 - RNA, 21 nt, Artificial Sequence
  Synthetic
gagagagaaagagugaauggg

SEQ ID NO: 328911 - RNA, 22 nt, Artificial Sequence
  Synthetic
agagagagaaagagugaauggg

SEQ ID NO: 328912 - RNA, 23 nt, Artificial Sequence
  Synthetic
gagagagagaaagagugaauggg

SEQ ID NO: 328913 - RNA, 24 nt, Artificial Sequence
  Synthetic
agagagagagaaagagugaauggg

SEQ ID NO: 328914 - RNA, 18 nt, Artificial Sequence
  Synthetic
gaauuagaagguaauggg

SEQ ID NO: 328915 - RNA, 19 nt, Artificial Sequence
  Synthetic
agaauuagaagguaauggg

SEQ ID NO: 328916 - RNA, 20 nt, Artificial Sequence
  Synthetic
gagaauuagaagguaauggg

SEQ ID NO: 328917 - RNA, 21 nt, Artificial Sequence
  Synthetic
agagaauuagaagguaauggg

SEQ ID NO: 328918 - RNA, 22 nt, Artificial Sequence
  Synthetic
uagagaauuagaagguaauggg

SEQ ID NO: 328919 - RNA, 23 nt, Artificial Sequence
  Synthetic
guagagaauuagaagguaauggg

SEQ ID NO: 328920 - RNA, 24 nt, Artificial Sequence
  Synthetic
aguagagaauuagaagguaauggg

SEQ ID NO: 328921 - RNA, 18 nt, Artificial Sequence
  Synthetic
aauuucugugguaauggg

SEQ ID NO: 328922 - RNA, 19 nt, Artificial Sequence
  Synthetic
uaauuucugugguaauggg

SEQ ID NO: 328923 - RNA, 20 nt, Artificial Sequence
  Synthetic
uuaauuucugugguaauggg

SEQ ID NO: 328924 - RNA, 21 nt, Artificial Sequence
  Synthetic
uuuaauuucugugguaauggg

SEQ ID NO: 328925 - RNA, 22 nt, Artificial Sequence
  Synthetic
uuuuaauuucugugguaauggg

SEQ ID NO: 328926 - RNA, 23 nt, Artificial Sequence
  Synthetic
cuuuuaauuucugugguaauggg

SEQ ID NO: 328927 - RNA, 24 nt, Artificial Sequence
  Synthetic
ucuuuuaauuucugugguaauggg

SEQ ID NO: 328928 - RNA, 18 nt, Artificial Sequence
  Synthetic
uuuacaaagaaacauggg

SEQ ID NO: 328929 - RNA, 19 nt, Artificial Sequence
  Synthetic
uuuuacaaagaaacauggg

SEQ ID NO: 328930 - RNA, 20 nt, Artificial Sequence
  Synthetic
guuuuacaaagaaacauggg

SEQ ID NO: 328931 - RNA, 21 nt, Artificial Sequence
  Synthetic
uguuuuacaaagaaacauggg

SEQ ID NO: 328932 - RNA, 22 nt, Artificial Sequence
  Synthetic
guguuuuacaaagaaacauggg

SEQ ID NO: 328933 - RNA, 23 nt, Artificial Sequence
  Synthetic
uguguuuuacaaagaaacauggg

SEQ ID NO: 328934 - RNA, 24 nt, Artificial Sequence
  Synthetic
uuguguuuuacaaagaaacauggg

SEQ ID NO: 328935 - RNA, 18 nt, Artificial Sequence
  Synthetic
uugcuccuuacacauggg

SEQ ID NO: 328936 - RNA, 19 nt, Artificial Sequence
  Synthetic
auugcuccuuacacauggg

SEQ ID NO: 328937 - RNA, 20 nt, Artificial Sequence
  Synthetic
uauugcuccuuacacauggg

SEQ ID NO: 328938 - RNA, 21 nt, Artificial Sequence
  Synthetic
auauugcuccuuacacauggg

SEQ ID NO: 328939 - RNA, 22 nt, Artificial Sequence
  Synthetic
uauauugcuccuuacacauggg

SEQ ID NO: 328940 - RNA, 23 nt, Artificial Sequence
  Synthetic
cuauauugcuccuuacacauggg

SEQ ID NO: 328941 - RNA, 24 nt, Artificial Sequence
  Synthetic
gcuauauugcuccuuacacauggg

SEQ ID NO: 328942 - RNA, 18 nt, Artificial Sequence
  Synthetic
augcuaaaauuacauggg

SEQ ID NO: 328943 - RNA, 19 nt, Artificial Sequence
  Synthetic
aaugcuaaaauuacauggg

SEQ ID NO: 328944 - RNA, 20 nt, Artificial Sequence
  Synthetic
caaugcuaaaauuacauggg

SEQ ID NO: 328945 - RNA, 21 nt, Artificial Sequence
  Synthetic
gcaaugcuaaaauuacauggg

SEQ ID NO: 328946 - RNA, 22 nt, Artificial Sequence
  Synthetic
agcaaugcuaaaauuacauggg

SEQ ID NO: 328947 - RNA, 23 nt, Artificial Sequence
  Synthetic
aagcaaugcuaaaauuacauggg

SEQ ID NO: 328948 - RNA, 24 nt, Artificial Sequence
  Synthetic
caagcaaugcuaaaauuacauggg

SEQ ID NO: 328949 - RNA, 18 nt, Artificial Sequence
  Synthetic
acucgcaaagcccauggg

SEQ ID NO: 328950 - RNA, 19 nt, Artificial Sequence
  Synthetic
cacucgcaaagcccauggg

SEQ ID NO: 328951 - RNA, 20 nt, Artificial Sequence
  Synthetic
ccacucgcaaagcccauggg

SEQ ID NO: 328952 - RNA, 21 nt, Artificial Sequence
  Synthetic
cccacucgcaaagcccauggg

SEQ ID NO: 328953 - RNA, 22 nt, Artificial Sequence
  Synthetic
ccccacucgcaaagcccauggg

SEQ ID NO: 328954 - RNA, 23 nt, Artificial Sequence
  Synthetic
gccccacucgcaaagcccauggg

SEQ ID NO: 328955 - RNA, 24 nt, Artificial Sequence
  Synthetic
agccccacucgcaaagcccauggg

SEQ ID NO: 328956 - RNA, 18 nt, Artificial Sequence
  Synthetic
acccucuguagccauggg

SEQ ID NO: 328957 - RNA, 19 nt, Artificial Sequence
  Synthetic
cacccucuguagccauggg

SEQ ID NO: 328958 - RNA, 20 nt, Artificial Sequence
  Synthetic
gcacccucuguagccauggg

SEQ ID NO: 328959 - RNA, 21 nt, Artificial Sequence
  Synthetic
ugcacccucuguagccauggg

SEQ ID NO: 328960 - RNA, 22 nt, Artificial Sequence
  Synthetic
uugcacccucuguagccauggg

SEQ ID NO: 328961 - RNA, 23 nt, Artificial Sequence
  Synthetic
cuugcacccucuguagccauggg

SEQ ID NO: 328962 - RNA, 24 nt, Artificial Sequence
  Synthetic
gcuugcacccucuguagccauggg

SEQ ID NO: 328963 - RNA, 18 nt, Artificial Sequence
  Synthetic
uauguauugguccauggg

SEQ ID NO: 328964 - RNA, 19 nt, Artificial Sequence
  Synthetic
auauguauugguccauggg

SEQ ID NO: 328965 - RNA, 20 nt, Artificial Sequence
  Synthetic
aauauguauugguccauggg

SEQ ID NO: 328966 - RNA, 21 nt, Artificial Sequence
  Synthetic
aaauauguauugguccauggg

SEQ ID NO: 328967 - RNA, 22 nt, Artificial Sequence
  Synthetic
caaauauguauugguccauggg

SEQ ID NO: 328968 - RNA, 23 nt, Artificial Sequence
  Synthetic
ccaaauauguauugguccauggg

SEQ ID NO: 328969 - RNA, 24 nt, Artificial Sequence
  Synthetic
accaaauauguauugguccauggg

SEQ ID NO: 328970 - RNA, 18 nt, Artificial Sequence
  Synthetic
uacauaaaacagcauggg

SEQ ID NO: 328971 - RNA, 19 nt, Artificial Sequence
  Synthetic
uuacauaaaacagcauggg

SEQ ID NO: 328972 - RNA, 20 nt, Artificial Sequence
  Synthetic
cuuacauaaaacagcauggg

SEQ ID NO: 328973 - RNA, 21 nt, Artificial Sequence
  Synthetic
gcuuacauaaaacagcauggg

SEQ ID NO: 328974 - RNA, 22 nt, Artificial Sequence
  Synthetic
ggcuuacauaaaacagcauggg

SEQ ID NO: 328975 - RNA, 23 nt, Artificial Sequence
  Synthetic
uggcuuacauaaaacagcauggg

SEQ ID NO: 328976 - RNA, 24 nt, Artificial Sequence
  Synthetic
auggcuuacauaaaacagcauggg

SEQ ID NO: 328977 - RNA, 18 nt, Artificial Sequence
  Synthetic
ucacgagaacagcauggg

SEQ ID NO: 328978 - RNA, 19 nt, Artificial Sequence
  Synthetic
aucacgagaacagcauggg

SEQ ID NO: 328979 - RNA, 20 nt, Artificial Sequence
  Synthetic
uaucacgagaacagcauggg

SEQ ID NO: 328980 - RNA, 21 nt, Artificial Sequence
  Synthetic
cuaucacgagaacagcauggg

SEQ ID NO: 328981 - RNA, 22 nt, Artificial Sequence
  Synthetic
acuaucacgagaacagcauggg

SEQ ID NO: 328982 - RNA, 23 nt, Artificial Sequence
  Synthetic
uacuaucacgagaacagcauggg

SEQ ID NO: 328983 - RNA, 24 nt, Artificial Sequence
  Synthetic
uuacuaucacgagaacagcauggg

SEQ ID NO: 328984 - RNA, 18 nt, Artificial Sequence
  Synthetic
gagggaauuaggcauggg

SEQ ID NO: 328985 - RNA, 19 nt, Artificial Sequence
  Synthetic
cgagggaauuaggcauggg

SEQ ID NO: 328986 - RNA, 20 nt, Artificial Sequence
  Synthetic
gcgagggaauuaggcauggg

SEQ ID NO: 328987 - RNA, 21 nt, Artificial Sequence
  Synthetic
agcgagggaauuaggcauggg

SEQ ID NO: 328988 - RNA, 22 nt, Artificial Sequence
  Synthetic
cagcgagggaauuaggcauggg

SEQ ID NO: 328989 - RNA, 23 nt, Artificial Sequence
  Synthetic
acagcgagggaauuaggcauggg

SEQ ID NO: 328990 - RNA, 24 nt, Artificial Sequence
  Synthetic
uacagcgagggaauuaggcauggg

SEQ ID NO: 328991 - RNA, 18 nt, Artificial Sequence
  Synthetic
uuacaguuuaggcauggg

SEQ ID NO: 328992 - RNA, 19 nt, Artificial Sequence
  Synthetic
uuuacaguuuaggcauggg

SEQ ID NO: 328993 - RNA, 20 nt, Artificial Sequence
  Synthetic
uuuuacaguuuaggcauggg

SEQ ID NO: 328994 - RNA, 21 nt, Artificial Sequence
  Synthetic
cuuuuacaguuuaggcauggg

SEQ ID NO: 328995 - RNA, 22 nt, Artificial Sequence
  Synthetic
acuuuuacaguuuaggcauggg

SEQ ID NO: 328996 - RNA, 23 nt, Artificial Sequence
  Synthetic
cacuuuuacaguuuaggcauggg

SEQ ID NO: 328997 - RNA, 24 nt, Artificial Sequence
  Synthetic
ucacuuuuacaguuuaggcauggg

SEQ ID NO: 328998 - RNA, 18 nt, Artificial Sequence
  Synthetic
acauuccaugcucauggg

SEQ ID NO: 328999 - RNA, 19 nt, Artificial Sequence
  Synthetic
aacauuccaugcucauggg

SEQ ID NO: 329000 - RNA, 20 nt, Artificial Sequence
  Synthetic
gaacauuccaugcucauggg

SEQ ID NO: 329001 - RNA, 18 nt, Artificial Sequence
  Synthetic
uuauaacuaucucauggg

SEQ ID NO: 329002 - RNA, 19 nt, Artificial Sequence
  Synthetic
cuuauaacuaucucauggg

SEQ ID NO: 329003 - RNA, 20 nt, Artificial Sequence
  Synthetic
acuuauaacuaucucauggg

SEQ ID NO: 329004 - RNA, 21 nt, Artificial Sequence
  Synthetic
cacuuauaacuaucucauggg

SEQ ID NO: 329005 - RNA, 22 nt, Artificial Sequence
  Synthetic
ucacuuauaacuaucucauggg

SEQ ID NO: 329006 - RNA, 23 nt, Artificial Sequence
  Synthetic
cucacuuauaacuaucucauggg

SEQ ID NO: 329007 - RNA, 24 nt, Artificial Sequence
  Synthetic
gcucacuuauaacuaucucauggg

SEQ ID NO: 329008 - RNA, 18 nt, Artificial Sequence
  Synthetic
auccccaggugucauggg

SEQ ID NO: 329009 - RNA, 19 nt, Artificial Sequence
  Synthetic
aauccccaggugucauggg

SEQ ID NO: 329010 - RNA, 20 nt, Artificial Sequence
  Synthetic
aaauccccaggugucauggg

SEQ ID NO: 329011 - RNA, 21 nt, Artificial Sequence
  Synthetic
aaaauccccaggugucauggg

SEQ ID NO: 329012 - RNA, 22 nt, Artificial Sequence
  Synthetic
caaaauccccaggugucauggg

SEQ ID NO: 329013 - RNA, 23 nt, Artificial Sequence
  Synthetic
ccaaaauccccaggugucauggg

SEQ ID NO: 329014 - RNA, 24 nt, Artificial Sequence
  Synthetic
uccaaaauccccaggugucauggg

SEQ ID NO: 329015 - RNA, 18 nt, Artificial Sequence
  Synthetic
uaaacucccuaagauggg

SEQ ID NO: 329016 - RNA, 19 nt, Artificial Sequence
  Synthetic
uuaaacucccuaagauggg

SEQ ID NO: 329017 - RNA, 20 nt, Artificial Sequence
  Synthetic
cuuaaacucccuaagauggg

SEQ ID NO: 329018 - RNA, 21 nt, Artificial Sequence
  Synthetic
ucuuaaacucccuaagauggg

SEQ ID NO: 329019 - RNA, 22 nt, Artificial Sequence
  Synthetic
uucuuaaacucccuaagauggg

SEQ ID NO: 329020 - RNA, 23 nt, Artificial Sequence
  Synthetic
cuucuuaaacucccuaagauggg

SEQ ID NO: 329021 - RNA, 24 nt, Artificial Sequence
  Synthetic
gcuucuuaaacucccuaagauggg

SEQ ID NO: 329022 - RNA, 18 nt, Artificial Sequence
  Synthetic
aaaaauuucacagauggg

SEQ ID NO: 329023 - RNA, 19 nt, Artificial Sequence
  Synthetic
aaaaaauuucacagauggg

SEQ ID NO: 329024 - RNA, 20 nt, Artificial Sequence
  Synthetic
caaaaaauuucacagauggg

SEQ ID NO: 329025 - RNA, 21 nt, Artificial Sequence
  Synthetic
ucaaaaaauuucacagauggg

SEQ ID NO: 329026 - RNA, 22 nt, Artificial Sequence
  Synthetic
cucaaaaaauuucacagauggg

SEQ ID NO: 329027 - RNA, 23 nt, Artificial Sequence
  Synthetic
ucucaaaaaauuucacagauggg

SEQ ID NO: 329028 - RNA, 24 nt, Artificial Sequence
  Synthetic
aucucaaaaaauuucacagauggg

SEQ ID NO: 329029 - RNA, 18 nt, Artificial Sequence
  Synthetic
gccaaagggagagauggg

SEQ ID NO: 329030 - RNA, 19 nt, Artificial Sequence
  Synthetic
ggccaaagggagagauggg

SEQ ID NO: 329031 - RNA, 20 nt, Artificial Sequence
  Synthetic
aggccaaagggagagauggg

SEQ ID NO: 329032 - RNA, 21 nt, Artificial Sequence
  Synthetic
gaggccaaagggagagauggg

SEQ ID NO: 329033 - RNA, 22 nt, Artificial Sequence
  Synthetic
agaggccaaagggagagauggg

SEQ ID NO: 329034 - RNA, 23 nt, Artificial Sequence
  Synthetic
cagaggccaaagggagagauggg

SEQ ID NO: 329035 - RNA, 24 nt, Artificial Sequence
  Synthetic
ucagaggccaaagggagagauggg

SEQ ID NO: 329036 - RNA, 18 nt, Artificial Sequence
  Synthetic
acuaagcagggagauggg

SEQ ID NO: 329037 - RNA, 19 nt, Artificial Sequence
  Synthetic
aacuaagcagggagauggg

SEQ ID NO: 329038 - RNA, 20 nt, Artificial Sequence
  Synthetic
caacuaagcagggagauggg

SEQ ID NO: 329039 - RNA, 21 nt, Artificial Sequence
  Synthetic
acaacuaagcagggagauggg

SEQ ID NO: 329040 - RNA, 22 nt, Artificial Sequence
  Synthetic
aacaacuaagcagggagauggg

SEQ ID NO: 329041 - RNA, 23 nt, Artificial Sequence
  Synthetic
gaacaacuaagcagggagauggg

SEQ ID NO: 329042 - RNA, 24 nt, Artificial Sequence
  Synthetic
agaacaacuaagcagggagauggg

SEQ ID NO: 329043 - RNA, 18 nt, Artificial Sequence
  Synthetic
agugaucaaugagauggg

SEQ ID NO: 329044 - RNA, 19 nt, Artificial Sequence
  Synthetic
gagugaucaaugagauggg

SEQ ID NO: 329045 - RNA, 20 nt, Artificial Sequence
  Synthetic
ggagugaucaaugagauggg

SEQ ID NO: 329046 - RNA, 21 nt, Artificial Sequence
  Synthetic
aggagugaucaaugagauggg

SEQ ID NO: 329047 - RNA, 22 nt, Artificial Sequence
  Synthetic
aaggagugaucaaugagauggg

SEQ ID NO: 329048 - RNA, 23 nt, Artificial Sequence
  Synthetic
aaaggagugaucaaugagauggg

SEQ ID NO: 329049 - RNA, 24 nt, Artificial Sequence
  Synthetic
aaaaggagugaucaaugagauggg

SEQ ID NO: 329050 - RNA, 18 nt, Artificial Sequence
  Synthetic
uaauaacuuuuagauggg

SEQ ID NO: 329051 - RNA, 19 nt, Artificial Sequence
  Synthetic
uuaauaacuuuuagauggg

SEQ ID NO: 329052 - RNA, 20 nt, Artificial Sequence
  Synthetic
cuuaauaacuuuuagauggg

SEQ ID NO: 329053 - RNA, 21 nt, Artificial Sequence
  Synthetic
ccuuaauaacuuuuagauggg

SEQ ID NO: 329054 - RNA, 22 nt, Artificial Sequence
  Synthetic
uccuuaauaacuuuuagauggg

SEQ ID NO: 329055 - RNA, 23 nt, Artificial Sequence
  Synthetic
uuccuuaauaacuuuuagauggg

SEQ ID NO: 329056 - RNA, 24 nt, Artificial Sequence
  Synthetic
cuuccuuaauaacuuuuagauggg

SEQ ID NO: 329057 - RNA, 18 nt, Artificial Sequence
  Synthetic
acuuuuggcugcgauggg

SEQ ID NO: 329058 - RNA, 19 nt, Artificial Sequence
  Synthetic
gacuuuuggcugcgauggg

SEQ ID NO: 329059 - RNA, 20 nt, Artificial Sequence
  Synthetic
agacuuuuggcugcgauggg

SEQ ID NO: 329060 - RNA, 21 nt, Artificial Sequence
  Synthetic
aagacuuuuggcugcgauggg

SEQ ID NO: 329061 - RNA, 22 nt, Artificial Sequence
  Synthetic
uaagacuuuuggcugcgauggg

SEQ ID NO: 329062 - RNA, 23 nt, Artificial Sequence
  Synthetic
uuaagacuuuuggcugcgauggg

SEQ ID NO: 329063 - RNA, 24 nt, Artificial Sequence
  Synthetic
uuuaagacuuuuggcugcgauggg

SEQ ID NO: 329064 - RNA, 18 nt, Artificial Sequence
  Synthetic
ggugcuggagaggauggg

SEQ ID NO: 329065 - RNA, 19 nt, Artificial Sequence
  Synthetic
aggugcuggagaggauggg

SEQ ID NO: 329066 - RNA, 20 nt, Artificial Sequence
  Synthetic
caggugcuggagaggauggg

SEQ ID NO: 329067 - RNA, 21 nt, Artificial Sequence
  Synthetic
acaggugcuggagaggauggg

SEQ ID NO: 329068 - RNA, 22 nt, Artificial Sequence
  Synthetic
aacaggugcuggagaggauggg

SEQ ID NO: 329069 - RNA, 23 nt, Artificial Sequence
  Synthetic
caacaggugcuggagaggauggg

SEQ ID NO: 329070 - RNA, 24 nt, Artificial Sequence
  Synthetic
acaacaggugcuggagaggauggg

SEQ ID NO: 329071 - RNA, 18 nt, Artificial Sequence
  Synthetic
ugaaaaaggugggauggg

SEQ ID NO: 329072 - RNA, 19 nt, Artificial Sequence
  Synthetic
uugaaaaaggugggauggg

SEQ ID NO: 329073 - RNA, 20 nt, Artificial Sequence
  Synthetic
uuugaaaaaggugggauggg

SEQ ID NO: 329074 - RNA, 21 nt, Artificial Sequence
  Synthetic
uuuugaaaaaggugggauggg

SEQ ID NO: 329075 - RNA, 22 nt, Artificial Sequence
  Synthetic
cuuuugaaaaaggugggauggg

SEQ ID NO: 329076 - RNA, 23 nt, Artificial Sequence
  Synthetic
acuuuugaaaaaggugggauggg

SEQ ID NO: 329077 - RNA, 24 nt, Artificial Sequence
  Synthetic
uacuuuugaaaaaggugggauggg

SEQ ID NO: 329078 - RNA, 18 nt, Artificial Sequence
  Synthetic
ugaaauaugugggauggg

SEQ ID NO: 329079 - RNA, 19 nt, Artificial Sequence
  Synthetic
augaaauaugugggauggg

SEQ ID NO: 329080 - RNA, 20 nt, Artificial Sequence
  Synthetic
gaugaaauaugugggauggg

SEQ ID NO: 329081 - RNA, 21 nt, Artificial Sequence
  Synthetic
agaugaaauaugugggauggg

SEQ ID NO: 329082 - RNA, 22 nt, Artificial Sequence
  Synthetic
aagaugaaauaugugggauggg

SEQ ID NO: 329083 - RNA, 23 nt, Artificial Sequence
  Synthetic
aaagaugaaauaugugggauggg

SEQ ID NO: 329084 - RNA, 24 nt, Artificial Sequence
  Synthetic
caaagaugaaauaugugggauggg

SEQ ID NO: 329085 - RNA, 18 nt, Artificial Sequence
  Synthetic
cucugguccuaugauggg

SEQ ID NO: 329086 - RNA, 19 nt, Artificial Sequence
  Synthetic
ccucugguccuaugauggg

SEQ ID NO: 329087 - RNA, 20 nt, Artificial Sequence
  Synthetic
gccucugguccuaugauggg

SEQ ID NO: 329088 - RNA, 21 nt, Artificial Sequence
  Synthetic
ggccucugguccuaugauggg

SEQ ID NO: 329089 - RNA, 22 nt, Artificial Sequence
  Synthetic
aggccucugguccuaugauggg

SEQ ID NO: 329090 - RNA, 23 nt, Artificial Sequence
  Synthetic
uaggccucugguccuaugauggg

SEQ ID NO: 329091 - RNA, 24 nt, Artificial Sequence
  Synthetic
cuaggccucugguccuaugauggg

SEQ ID NO: 329092 - RNA, 18 nt, Artificial Sequence
  Synthetic
aggaaugguggugauggg

SEQ ID NO: 329093 - RNA, 19 nt, Artificial Sequence
  Synthetic
gaggaaugguggugauggg

SEQ ID NO: 329094 - RNA, 20 nt, Artificial Sequence
  Synthetic
ggaggaaugguggugauggg

SEQ ID NO: 329095 - RNA, 21 nt, Artificial Sequence
  Synthetic
aggaggaaugguggugauggg

SEQ ID NO: 329096 - RNA, 22 nt, Artificial Sequence
  Synthetic
aaggaggaaugguggugauggg

SEQ ID NO: 329097 - RNA, 23 nt, Artificial Sequence
  Synthetic
gaaggaggaaugguggugauggg

SEQ ID NO: 329098 - RNA, 24 nt, Artificial Sequence
  Synthetic
agaaggaggaaugguggugauggg

SEQ ID NO: 329099 - RNA, 18 nt, Artificial Sequence
  Synthetic
cucugggucugugauggg

SEQ ID NO: 329100 - RNA, 19 nt, Artificial Sequence
  Synthetic
ccucugggucugugauggg

SEQ ID NO: 329101 - RNA, 20 nt, Artificial Sequence
  Synthetic
accucugggucugugauggg

SEQ ID NO: 329102 - RNA, 21 nt, Artificial Sequence
  Synthetic
gaccucugggucugugauggg

SEQ ID NO: 329103 - RNA, 22 nt, Artificial Sequence
  Synthetic
agaccucugggucugugauggg

SEQ ID NO: 329104 - RNA, 23 nt, Artificial Sequence
  Synthetic
uagaccucugggucugugauggg

SEQ ID NO: 329105 - RNA, 24 nt, Artificial Sequence
  Synthetic
cuagaccucugggucugugauggg

SEQ ID NO: 329106 - RNA, 18 nt, Artificial Sequence
  Synthetic
cguagaaaugaauauggg

SEQ ID NO: 329107 - RNA, 19 nt, Artificial Sequence
  Synthetic
ucguagaaaugaauauggg

SEQ ID NO: 329108 - RNA, 20 nt, Artificial Sequence
  Synthetic
aucguagaaaugaauauggg

SEQ ID NO: 329109 - RNA, 21 nt, Artificial Sequence
  Synthetic
aaucguagaaaugaauauggg

SEQ ID NO: 329110 - RNA, 22 nt, Artificial Sequence
  Synthetic
aaaucguagaaaugaauauggg

SEQ ID NO: 329111 - RNA, 23 nt, Artificial Sequence
  Synthetic
gaaaucguagaaaugaauauggg

SEQ ID NO: 329112 - RNA, 24 nt, Artificial Sequence
  Synthetic
ugaaaucguagaaaugaauauggg

SEQ ID NO: 329113 - RNA, 18 nt, Artificial Sequence
  Synthetic
ggggaaaugggauauggg

SEQ ID NO: 329114 - RNA, 19 nt, Artificial Sequence
  Synthetic
uggggaaaugggauauggg

SEQ ID NO: 329115 - RNA, 20 nt, Artificial Sequence
  Synthetic
auggggaaaugggauauggg

SEQ ID NO: 329116 - RNA, 21 nt, Artificial Sequence
  Synthetic
aauggggaaaugggauauggg

SEQ ID NO: 329117 - RNA, 22 nt, Artificial Sequence
  Synthetic
gaauggggaaaugggauauggg

SEQ ID NO: 329118 - RNA, 23 nt, Artificial Sequence
  Synthetic
ggaauggggaaaugggauauggg

SEQ ID NO: 329119 - RNA, 24 nt, Artificial Sequence
  Synthetic
aggaauggggaaaugggauauggg

SEQ ID NO: 329120 - RNA, 18 nt, Artificial Sequence
  Synthetic
aaugagggaaucuauggg

SEQ ID NO: 329121 - RNA, 19 nt, Artificial Sequence
  Synthetic
aaaugagggaaucuauggg

SEQ ID NO: 329122 - RNA, 20 nt, Artificial Sequence
  Synthetic
gaaaugagggaaucuauggg

SEQ ID NO: 329123 - RNA, 21 nt, Artificial Sequence
  Synthetic
ugaaaugagggaaucuauggg

SEQ ID NO: 329124 - RNA, 22 nt, Artificial Sequence
  Synthetic
cugaaaugagggaaucuauggg

SEQ ID NO: 329125 - RNA, 23 nt, Artificial Sequence
  Synthetic
acugaaaugagggaaucuauggg

SEQ ID NO: 329126 - RNA, 24 nt, Artificial Sequence
  Synthetic
uacugaaaugagggaaucuauggg

SEQ ID NO: 329127 - RNA, 18 nt, Artificial Sequence
  Synthetic
uauuuaugaaaguauggg

SEQ ID NO: 329128 - RNA, 19 nt, Artificial Sequence
  Synthetic
guauuuaugaaaguauggg

SEQ ID NO: 329129 - RNA, 20 nt, Artificial Sequence
  Synthetic
uguauuuaugaaaguauggg

SEQ ID NO: 329130 - RNA, 21 nt, Artificial Sequence
  Synthetic
guguauuuaugaaaguauggg

SEQ ID NO: 329131 - RNA, 22 nt, Artificial Sequence
  Synthetic
uguguauuuaugaaaguauggg

SEQ ID NO: 329132 - RNA, 23 nt, Artificial Sequence
  Synthetic
auguguauuuaugaaaguauggg

SEQ ID NO: 329133 - RNA, 24 nt, Artificial Sequence
  Synthetic
uauguguauuuaugaaaguauggg

SEQ ID NO: 329134 - RNA, 18 nt, Artificial Sequence
  Synthetic
ugaugaaugggguauggg

SEQ ID NO: 329135 - RNA, 19 nt, Artificial Sequence
  Synthetic
cugaugaaugggguauggg

SEQ ID NO: 329136 - RNA, 20 nt, Artificial Sequence
  Synthetic
gcugaugaaugggguauggg

SEQ ID NO: 329137 - RNA, 21 nt, Artificial Sequence
  Synthetic
ugcugaugaaugggguauggg

SEQ ID NO: 329138 - RNA, 22 nt, Artificial Sequence
  Synthetic
uugcugaugaaugggguauggg

SEQ ID NO: 329139 - RNA, 23 nt, Artificial Sequence
  Synthetic
uuugcugaugaaugggguauggg

SEQ ID NO: 329140 - RNA, 24 nt, Artificial Sequence
  Synthetic
guuugcugaugaaugggguauggg

SEQ ID NO: 329141 - RNA, 18 nt, Artificial Sequence
  Synthetic
ucuacuugccauuauggg

SEQ ID NO: 329142 - RNA, 19 nt, Artificial Sequence
  Synthetic
aucuacuugccauuauggg

SEQ ID NO: 329143 - RNA, 20 nt, Artificial Sequence
  Synthetic
uaucuacuugccauuauggg

SEQ ID NO: 329144 - RNA, 21 nt, Artificial Sequence
  Synthetic
auaucuacuugccauuauggg

SEQ ID NO: 329145 - RNA, 22 nt, Artificial Sequence
  Synthetic
gauaucuacuugccauuauggg

SEQ ID NO: 329146 - RNA, 23 nt, Artificial Sequence
  Synthetic
agauaucuacuugccauuauggg

SEQ ID NO: 329147 - RNA, 24 nt, Artificial Sequence
  Synthetic
cagauaucuacuugccauuauggg

SEQ ID NO: 329148 - RNA, 18 nt, Artificial Sequence
  Synthetic
uauaccaaaacuuauggg

SEQ ID NO: 329149 - RNA, 19 nt, Artificial Sequence
  Synthetic
auauaccaaaacuuauggg

SEQ ID NO: 329150 - RNA, 20 nt, Artificial Sequence
  Synthetic
aauauaccaaaacuuauggg

SEQ ID NO: 329151 - RNA, 21 nt, Artificial Sequence
  Synthetic
caauauaccaaaacuuauggg

SEQ ID NO: 329152 - RNA, 22 nt, Artificial Sequence
  Synthetic
acaauauaccaaaacuuauggg

SEQ ID NO: 329153 - RNA, 23 nt, Artificial Sequence
  Synthetic
uacaauauaccaaaacuuauggg

SEQ ID NO: 329154 - RNA, 24 nt, Artificial Sequence
  Synthetic
auacaauauaccaaaacuuauggg

SEQ ID NO: 329155 - RNA, 18 nt, Artificial Sequence
  Synthetic
uuaaagaaaucuuauggg

SEQ ID NO: 329156 - RNA, 19 nt, Artificial Sequence
  Synthetic
auuaaagaaaucuuauggg

SEQ ID NO: 329157 - RNA, 20 nt, Artificial Sequence
  Synthetic
uauuaaagaaaucuuauggg

SEQ ID NO: 329158 - RNA, 21 nt, Artificial Sequence
  Synthetic
uuauuaaagaaaucuuauggg

SEQ ID NO: 329159 - RNA, 22 nt, Artificial Sequence
  Synthetic
cuuauuaaagaaaucuuauggg

SEQ ID NO: 329160 - RNA, 23 nt, Artificial Sequence
  Synthetic
ucuuauuaaagaaaucuuauggg

SEQ ID NO: 329161 - RNA, 24 nt, Artificial Sequence
  Synthetic
cucuuauuaaagaaaucuuauggg

SEQ ID NO: 329162 - RNA, 18 nt, Artificial Sequence
  Synthetic
ugaaauuaugguuauggg

SEQ ID NO: 329163 - RNA, 19 nt, Artificial Sequence
  Synthetic
augaaauuaugguuauggg

SEQ ID NO: 329164 - RNA, 20 nt, Artificial Sequence
  Synthetic
uaugaaauuaugguuauggg

SEQ ID NO: 329165 - RNA, 21 nt, Artificial Sequence
  Synthetic
cuaugaaauuaugguuauggg

SEQ ID NO: 329166 - RNA, 22 nt, Artificial Sequence
  Synthetic
acuaugaaauuaugguuauggg

SEQ ID NO: 329167 - RNA, 23 nt, Artificial Sequence
  Synthetic
uacuaugaaauuaugguuauggg

SEQ ID NO: 329168 - RNA, 24 nt, Artificial Sequence
  Synthetic
cuacuaugaaauuaugguuauggg

SEQ ID NO: 329169 - RNA, 18 nt, Artificial Sequence
  Synthetic
ccagucucuuuuuauggg

SEQ ID NO: 329170 - RNA, 19 nt, Artificial Sequence
  Synthetic
accagucucuuuuuauggg

SEQ ID NO: 329171 - RNA, 20 nt, Artificial Sequence
  Synthetic
caccagucucuuuuuauggg

SEQ ID NO: 329172 - RNA, 21 nt, Artificial Sequence
  Synthetic
ucaccagucucuuuuuauggg

SEQ ID NO: 329173 - RNA, 22 nt, Artificial Sequence
  Synthetic
uucaccagucucuuuuuauggg

SEQ ID NO: 329174 - RNA, 23 nt, Artificial Sequence
  Synthetic
uuucaccagucucuuuuuauggg

SEQ ID NO: 329175 - RNA, 24 nt, Artificial Sequence
  Synthetic
auuucaccagucucuuuuuauggg

SEQ ID NO: 329176 - RNA, 18 nt, Artificial Sequence
  Synthetic
cuacaguccugaacuggg

SEQ ID NO: 329177 - RNA, 19 nt, Artificial Sequence
  Synthetic
ccuacaguccugaacuggg

SEQ ID NO: 329178 - RNA, 20 nt, Artificial Sequence
  Synthetic
uccuacaguccugaacuggg

SEQ ID NO: 329179 - RNA, 21 nt, Artificial Sequence
  Synthetic
guccuacaguccugaacuggg

SEQ ID NO: 329180 - RNA, 22 nt, Artificial Sequence
  Synthetic
aguccuacaguccugaacuggg

SEQ ID NO: 329181 - RNA, 23 nt, Artificial Sequence
  Synthetic
caguccuacaguccugaacuggg

SEQ ID NO: 329182 - RNA, 24 nt, Artificial Sequence
  Synthetic
ccaguccuacaguccugaacuggg

SEQ ID NO: 329183 - RNA, 18 nt, Artificial Sequence
  Synthetic
caagaaguucuaacuggg

SEQ ID NO: 329184 - RNA, 19 nt, Artificial Sequence
  Synthetic
ucaagaaguucuaacuggg

SEQ ID NO: 329185 - RNA, 20 nt, Artificial Sequence
  Synthetic
gucaagaaguucuaacuggg

SEQ ID NO: 329186 - RNA, 21 nt, Artificial Sequence
  Synthetic
cgucaagaaguucuaacuggg

SEQ ID NO: 329187 - RNA, 22 nt, Artificial Sequence
  Synthetic
ccgucaagaaguucuaacuggg

SEQ ID NO: 329188 - RNA, 23 nt, Artificial Sequence
  Synthetic
gccgucaagaaguucuaacuggg

SEQ ID NO: 329189 - RNA, 24 nt, Artificial Sequence
  Synthetic
agccgucaagaaguucuaacuggg

SEQ ID NO: 329190 - RNA, 18 nt, Artificial Sequence
  Synthetic
aaaugaauagccacuggg

SEQ ID NO: 329191 - RNA, 19 nt, Artificial Sequence
  Synthetic
uaaaugaauagccacuggg

SEQ ID NO: 329192 - RNA, 20 nt, Artificial Sequence
  Synthetic
cuaaaugaauagccacuggg

SEQ ID NO: 329193 - RNA, 21 nt, Artificial Sequence
  Synthetic
ccuaaaugaauagccacuggg

SEQ ID NO: 329194 - RNA, 22 nt, Artificial Sequence
  Synthetic
uccuaaaugaauagccacuggg

SEQ ID NO: 329195 - RNA, 23 nt, Artificial Sequence
  Synthetic
auccuaaaugaauagccacuggg

SEQ ID NO: 329196 - RNA, 24 nt, Artificial Sequence
  Synthetic
uauccuaaaugaauagccacuggg

SEQ ID NO: 329197 - RNA, 18 nt, Artificial Sequence
  Synthetic
uagacuuguaagacuggg

SEQ ID NO: 329198 - RNA, 19 nt, Artificial Sequence
  Synthetic
uuagacuuguaagacuggg

SEQ ID NO: 329199 - RNA, 20 nt, Artificial Sequence
  Synthetic
auuagacuuguaagacuggg

SEQ ID NO: 329200 - RNA, 21 nt, Artificial Sequence
  Synthetic
aauuagacuuguaagacuggg

SEQ ID NO: 329201 - RNA, 22 nt, Artificial Sequence
  Synthetic
caauuagacuuguaagacuggg

SEQ ID NO: 329202 - RNA, 23 nt, Artificial Sequence
  Synthetic
ccaauuagacuuguaagacuggg

SEQ ID NO: 329203 - RNA, 24 nt, Artificial Sequence
  Synthetic
cccaauuagacuuguaagacuggg

SEQ ID NO: 329204 - RNA, 18 nt, Artificial Sequence
  Synthetic
gacuaugaagagacuggg

SEQ ID NO: 329205 - RNA, 19 nt, Artificial Sequence
  Synthetic
ggacuaugaagagacuggg

SEQ ID NO: 329206 - RNA, 20 nt, Artificial Sequence
  Synthetic
uggacuaugaagagacuggg

SEQ ID NO: 329207 - RNA, 21 nt, Artificial Sequence
  Synthetic
guggacuaugaagagacuggg

SEQ ID NO: 329208 - RNA, 22 nt, Artificial Sequence
  Synthetic
uguggacuaugaagagacuggg

SEQ ID NO: 329209 - RNA, 23 nt, Artificial Sequence
  Synthetic
uuguggacuaugaagagacuggg

SEQ ID NO: 329210 - RNA, 24 nt, Artificial Sequence
  Synthetic
guuguggacuaugaagagacuggg

SEQ ID NO: 329211 - RNA, 18 nt, Artificial Sequence
  Synthetic
uacugggaaacuacuggg

SEQ ID NO: 329212 - RNA, 19 nt, Artificial Sequence
  Synthetic
guacugggaaacuacuggg

SEQ ID NO: 329213 - RNA, 20 nt, Artificial Sequence
  Synthetic
uguacugggaaacuacuggg

SEQ ID NO: 329214 - RNA, 21 nt, Artificial Sequence
  Synthetic
auguacugggaaacuacuggg

SEQ ID NO: 329215 - RNA, 22 nt, Artificial Sequence
  Synthetic
cauguacugggaaacuacuggg

SEQ ID NO: 329216 - RNA, 23 nt, Artificial Sequence
  Synthetic
ucauguacugggaaacuacuggg

SEQ ID NO: 329217 - RNA, 24 nt, Artificial Sequence
  Synthetic
uucauguacugggaaacuacuggg

SEQ ID NO: 329218 - RNA, 18 nt, Artificial Sequence
  Synthetic
uacauuugagcuacuggg

SEQ ID NO: 329219 - RNA, 19 nt, Artificial Sequence
  Synthetic
uuacauuugagcuacuggg

SEQ ID NO: 329220 - RNA, 20 nt, Artificial Sequence
  Synthetic
guuacauuugagcuacuggg

SEQ ID NO: 329221 - RNA, 21 nt, Artificial Sequence
  Synthetic
uguuacauuugagcuacuggg

SEQ ID NO: 329222 - RNA, 22 nt, Artificial Sequence
  Synthetic
auguuacauuugagcuacuggg

SEQ ID NO: 329223 - RNA, 23 nt, Artificial Sequence
  Synthetic
uauguuacauuugagcuacuggg

SEQ ID NO: 329224 - RNA, 24 nt, Artificial Sequence
  Synthetic
auauguuacauuugagcuacuggg

SEQ ID NO: 329225 - RNA, 18 nt, Artificial Sequence
  Synthetic
agucccugaauuacuggg

SEQ ID NO: 329226 - RNA, 19 nt, Artificial Sequence
  Synthetic
gagucccugaauuacuggg

SEQ ID NO: 329227 - RNA, 20 nt, Artificial Sequence
  Synthetic
agagucccugaauuacuggg

SEQ ID NO: 329228 - RNA, 21 nt, Artificial Sequence
  Synthetic
cagagucccugaauuacuggg

SEQ ID NO: 329229 - RNA, 22 nt, Artificial Sequence
  Synthetic
ucagagucccugaauuacuggg

SEQ ID NO: 329230 - RNA, 23 nt, Artificial Sequence
  Synthetic
cucagagucccugaauuacuggg

SEQ ID NO: 329231 - RNA, 24 nt, Artificial Sequence
  Synthetic
acucagagucccugaauuacuggg

SEQ ID NO: 329232 - RNA, 18 nt, Artificial Sequence
  Synthetic
uuauuccacagaccuggg

SEQ ID NO: 329233 - RNA, 19 nt, Artificial Sequence
  Synthetic
auuauuccacagaccuggg

SEQ ID NO: 329234 - RNA, 20 nt, Artificial Sequence
  Synthetic
cauuauuccacagaccuggg

SEQ ID NO: 329235 - RNA, 21 nt, Artificial Sequence
  Synthetic
acauuauuccacagaccuggg

SEQ ID NO: 329236 - RNA, 22 nt, Artificial Sequence
  Synthetic
uacauuauuccacagaccuggg

SEQ ID NO: 329237 - RNA, 23 nt, Artificial Sequence
  Synthetic
auacauuauuccacagaccuggg

SEQ ID NO: 329238 - RNA, 24 nt, Artificial Sequence
  Synthetic
uauacauuauuccacagaccuggg

SEQ ID NO: 329239 - RNA, 18 nt, Artificial Sequence
  Synthetic
cugugaccuauaccuggg

SEQ ID NO: 329240 - RNA, 19 nt, Artificial Sequence
  Synthetic
ccugugaccuauaccuggg

SEQ ID NO: 329241 - RNA, 20 nt, Artificial Sequence
  Synthetic
accugugaccuauaccuggg

SEQ ID NO: 329242 - RNA, 21 nt, Artificial Sequence
  Synthetic
gaccugugaccuauaccuggg

SEQ ID NO: 329243 - RNA, 22 nt, Artificial Sequence
  Synthetic
ggaccugugaccuauaccuggg

SEQ ID NO: 329244 - RNA, 23 nt, Artificial Sequence
  Synthetic
aggaccugugaccuauaccuggg

SEQ ID NO: 329245 - RNA, 24 nt, Artificial Sequence
  Synthetic
caggaccugugaccuauaccuggg

SEQ ID NO: 329246 - RNA, 18 nt, Artificial Sequence
  Synthetic
gaauuagcuagcccuggg

SEQ ID NO: 329247 - RNA, 19 nt, Artificial Sequence
  Synthetic
ggaauuagcuagcccuggg

SEQ ID NO: 329248 - RNA, 20 nt, Artificial Sequence
  Synthetic
aggaauuagcuagcccuggg

SEQ ID NO: 329249 - RNA, 21 nt, Artificial Sequence
  Synthetic
uaggaauuagcuagcccuggg

SEQ ID NO: 329250 - RNA, 22 nt, Artificial Sequence
  Synthetic
uuaggaauuagcuagcccuggg

SEQ ID NO: 329251 - RNA, 23 nt, Artificial Sequence
  Synthetic
uuuaggaauuagcuagcccuggg

SEQ ID NO: 329252 - RNA, 24 nt, Artificial Sequence
  Synthetic
cuuuaggaauuagcuagcccuggg

SEQ ID NO: 329253 - RNA, 18 nt, Artificial Sequence
  Synthetic
uuaagaaaaaugccuggg

SEQ ID NO: 329254 - RNA, 19 nt, Artificial Sequence
  Synthetic
uuuaagaaaaaugccuggg

SEQ ID NO: 329255 - RNA, 20 nt, Artificial Sequence
  Synthetic
uuuuaagaaaaaugccuggg

SEQ ID NO: 329256 - RNA, 21 nt, Artificial Sequence
  Synthetic
cuuuuaagaaaaaugccuggg

SEQ ID NO: 329257 - RNA, 22 nt, Artificial Sequence
  Synthetic
gcuuuuaagaaaaaugccuggg

SEQ ID NO: 329258 - RNA, 23 nt, Artificial Sequence
  Synthetic
ugcuuuuaagaaaaaugccuggg

SEQ ID NO: 329259 - RNA, 24 nt, Artificial Sequence
  Synthetic
gugcuuuuaagaaaaaugccuggg

SEQ ID NO: 329260 - RNA, 18 nt, Artificial Sequence
  Synthetic
auaggaacacauccuggg

SEQ ID NO: 329261 - RNA, 19 nt, Artificial Sequence
  Synthetic
aauaggaacacauccuggg

SEQ ID NO: 329262 - RNA, 20 nt, Artificial Sequence
  Synthetic
uaauaggaacacauccuggg

SEQ ID NO: 329263 - RNA, 21 nt, Artificial Sequence
  Synthetic
cuaauaggaacacauccuggg

SEQ ID NO: 329264 - RNA, 22 nt, Artificial Sequence
  Synthetic
gcuaauaggaacacauccuggg

SEQ ID NO: 329265 - RNA, 23 nt, Artificial Sequence
  Synthetic
agcuaauaggaacacauccuggg

SEQ ID NO: 329266 - RNA, 24 nt, Artificial Sequence
  Synthetic
cagcuaauaggaacacauccuggg

SEQ ID NO: 329267 - RNA, 18 nt, Artificial Sequence
  Synthetic
caaccucugccuccuggg

SEQ ID NO: 329268 - RNA, 19 nt, Artificial Sequence
  Synthetic
gcaaccucugccuccuggg

SEQ ID NO: 329269 - RNA, 20 nt, Artificial Sequence
  Synthetic
agcaaccucugccuccuggg

SEQ ID NO: 329270 - RNA, 21 nt, Artificial Sequence
  Synthetic
cagcaaccucugccuccuggg

SEQ ID NO: 329271 - RNA, 22 nt, Artificial Sequence
  Synthetic
acagcaaccucugccuccuggg

SEQ ID NO: 329272 - RNA, 23 nt, Artificial Sequence
  Synthetic
cacagcaaccucugccuccuggg

SEQ ID NO: 329273 - RNA, 24 nt, Artificial Sequence
  Synthetic
ucacagcaaccucugccuccuggg

SEQ ID NO: 329274 - RNA, 18 nt, Artificial Sequence
  Synthetic
uggucucagauuccuggg

SEQ ID NO: 329275 - RNA, 19 nt, Artificial Sequence
  Synthetic
cuggucucagauuccuggg

SEQ ID NO: 329276 - RNA, 20 nt, Artificial Sequence
  Synthetic
gcuggucucagauuccuggg

SEQ ID NO: 329277 - RNA, 21 nt, Artificial Sequence
  Synthetic
agcuggucucagauuccuggg

SEQ ID NO: 329278 - RNA, 22 nt, Artificial Sequence
  Synthetic
aagcuggucucagauuccuggg

SEQ ID NO: 329279 - RNA, 23 nt, Artificial Sequence
  Synthetic
uaagcuggucucagauuccuggg

SEQ ID NO: 329280 - RNA, 24 nt, Artificial Sequence
  Synthetic
cuaagcuggucucagauuccuggg

SEQ ID NO: 329281 - RNA, 18 nt, Artificial Sequence
  Synthetic
guaaaacauuuuccuggg

SEQ ID NO: 329282 - RNA, 19 nt, Artificial Sequence
  Synthetic
aguaaaacauuuuccuggg

SEQ ID NO: 329283 - RNA, 20 nt, Artificial Sequence
  Synthetic
aaguaaaacauuuuccuggg

SEQ ID NO: 329284 - RNA, 21 nt, Artificial Sequence
  Synthetic
aaaguaaaacauuuuccuggg

SEQ ID NO: 329285 - RNA, 22 nt, Artificial Sequence
  Synthetic
aaaaguaaaacauuuuccuggg

SEQ ID NO: 329286 - RNA, 23 nt, Artificial Sequence
  Synthetic
aaaaaguaaaacauuuuccuggg

SEQ ID NO: 329287 - RNA, 24 nt, Artificial Sequence
  Synthetic
gaaaaaguaaaacauuuuccuggg

SEQ ID NO: 329288 - RNA, 18 nt, Artificial Sequence
  Synthetic
gcacuuugggaagcuggg

SEQ ID NO: 329289 - RNA, 19 nt, Artificial Sequence
  Synthetic
agcacuuugggaagcuggg

SEQ ID NO: 329290 - RNA, 20 nt, Artificial Sequence
  Synthetic
cagcacuuugggaagcuggg

SEQ ID NO: 329291 - RNA, 21 nt, Artificial Sequence
  Synthetic
ccagcacuuugggaagcuggg

SEQ ID NO: 329292 - RNA, 22 nt, Artificial Sequence
  Synthetic
cccagcacuuugggaagcuggg

SEQ ID NO: 329293 - RNA, 23 nt, Artificial Sequence
  Synthetic
ucccagcacuuugggaagcuggg

SEQ ID NO: 329294 - RNA, 24 nt, Artificial Sequence
  Synthetic
aucccagcacuuugggaagcuggg

SEQ ID NO: 329295 - RNA, 18 nt, Artificial Sequence
  Synthetic
agcaggcuggaagcuggg

SEQ ID NO: 329296 - RNA, 19 nt, Artificial Sequence
  Synthetic
gagcaggcuggaagcuggg

SEQ ID NO: 329297 - RNA, 20 nt, Artificial Sequence
  Synthetic
agagcaggcuggaagcuggg

SEQ ID NO: 329298 - RNA, 21 nt, Artificial Sequence
  Synthetic
cagagcaggcuggaagcuggg

SEQ ID NO: 329299 - RNA, 22 nt, Artificial Sequence
  Synthetic
gcagagcaggcuggaagcuggg

SEQ ID NO: 329300 - RNA, 23 nt, Artificial Sequence
  Synthetic
ugcagagcaggcuggaagcuggg

SEQ ID NO: 329301 - RNA, 24 nt, Artificial Sequence
  Synthetic
uugcagagcaggcuggaagcuggg

SEQ ID NO: 329302 - RNA, 18 nt, Artificial Sequence
  Synthetic
gagaggaagacagcuggg

SEQ ID NO: 329303 - RNA, 19 nt, Artificial Sequence
  Synthetic
agagaggaagacagcuggg

SEQ ID NO: 329304 - RNA, 20 nt, Artificial Sequence
  Synthetic
gagagaggaagacagcuggg

SEQ ID NO: 329305 - RNA, 21 nt, Artificial Sequence
  Synthetic
agagagaggaagacagcuggg

SEQ ID NO: 329306 - RNA, 22 nt, Artificial Sequence
  Synthetic
aagagagaggaagacagcuggg

SEQ ID NO: 329307 - RNA, 23 nt, Artificial Sequence
  Synthetic
aaagagagaggaagacagcuggg

SEQ ID NO: 329308 - RNA, 24 nt, Artificial Sequence
  Synthetic
aaaagagagaggaagacagcuggg

SEQ ID NO: 329309 - RNA, 18 nt, Artificial Sequence
  Synthetic
gccaugauagcagcuggg

SEQ ID NO: 329310 - RNA, 19 nt, Artificial Sequence
  Synthetic
agccaugauagcagcuggg

SEQ ID NO: 329311 - RNA, 20 nt, Artificial Sequence
  Synthetic
uagccaugauagcagcuggg

SEQ ID NO: 329312 - RNA, 21 nt, Artificial Sequence
  Synthetic
cuagccaugauagcagcuggg

SEQ ID NO: 329313 - RNA, 22 nt, Artificial Sequence
  Synthetic
gcuagccaugauagcagcuggg

SEQ ID NO: 329314 - RNA, 23 nt, Artificial Sequence
  Synthetic
ugcuagccaugauagcagcuggg

SEQ ID NO: 329315 - RNA, 24 nt, Artificial Sequence
  Synthetic
gugcuagccaugauagcagcuggg

SEQ ID NO: 329316 - RNA, 18 nt, Artificial Sequence
  Synthetic
gcgcuuugggaggcuggg

SEQ ID NO: 329317 - RNA, 19 nt, Artificial Sequence
  Synthetic
agcgcuuugggaggcuggg

SEQ ID NO: 329318 - RNA, 20 nt, Artificial Sequence
  Synthetic
cagcgcuuugggaggcuggg

SEQ ID NO: 329319 - RNA, 21 nt, Artificial Sequence
  Synthetic
ccagcgcuuugggaggcuggg

SEQ ID NO: 329320 - RNA, 22 nt, Artificial Sequence
  Synthetic
uccagcgcuuugggaggcuggg

SEQ ID NO: 329321 - RNA, 23 nt, Artificial Sequence
  Synthetic
uuccagcgcuuugggaggcuggg

SEQ ID NO: 329322 - RNA, 24 nt, Artificial Sequence
  Synthetic
auuccagcgcuuugggaggcuggg

SEQ ID NO: 329323 - RNA, 18 nt, Artificial Sequence
  Synthetic
guuuagaguacggcuggg

SEQ ID NO: 329324 - RNA, 19 nt, Artificial Sequence
  Synthetic
uguuuagaguacggcuggg

SEQ ID NO: 329325 - RNA, 20 nt, Artificial Sequence
  Synthetic
uuguuuagaguacggcuggg

SEQ ID NO: 329326 - RNA, 21 nt, Artificial Sequence
  Synthetic
uuuguuuagaguacggcuggg

SEQ ID NO: 329327 - RNA, 22 nt, Artificial Sequence
  Synthetic
cuuuguuuagaguacggcuggg

SEQ ID NO: 329328 - RNA, 23 nt, Artificial Sequence
  Synthetic
ccuuuguuuagaguacggcuggg

SEQ ID NO: 329329 - RNA, 24 nt, Artificial Sequence
  Synthetic
gccuuuguuuagaguacggcuggg

SEQ ID NO: 329330 - RNA, 18 nt, Artificial Sequence
  Synthetic
uguauagaaccggcuggg

SEQ ID NO: 329331 - RNA, 19 nt, Artificial Sequence
  Synthetic
cuguauagaaccggcuggg

SEQ ID NO: 329332 - RNA, 20 nt, Artificial Sequence
  Synthetic
acuguauagaaccggcuggg

SEQ ID NO: 329333 - RNA, 21 nt, Artificial Sequence
  Synthetic
aacuguauagaaccggcuggg

SEQ ID NO: 329334 - RNA, 22 nt, Artificial Sequence
  Synthetic
aaacuguauagaaccggcuggg

SEQ ID NO: 329335 - RNA, 23 nt, Artificial Sequence
  Synthetic
uaaacuguauagaaccggcuggg

SEQ ID NO: 329336 - RNA, 24 nt, Artificial Sequence
  Synthetic
guaaacuguauagaaccggcuggg

SEQ ID NO: 329337 - RNA, 18 nt, Artificial Sequence
  Synthetic
gaucaacgccuggcuggg

SEQ ID NO: 329338 - RNA, 19 nt, Artificial Sequence
  Synthetic
ugaucaacgccuggcuggg

SEQ ID NO: 329339 - RNA, 20 nt, Artificial Sequence
  Synthetic
augaucaacgccuggcuggg

SEQ ID NO: 329340 - RNA, 21 nt, Artificial Sequence
  Synthetic
uaugaucaacgccuggcuggg

SEQ ID NO: 329341 - RNA, 22 nt, Artificial Sequence
  Synthetic
auaugaucaacgccuggcuggg

SEQ ID NO: 329342 - RNA, 23 nt, Artificial Sequence
  Synthetic
aauaugaucaacgccuggcuggg

SEQ ID NO: 329343 - RNA, 24 nt, Artificial Sequence
  Synthetic
aaauaugaucaacgccuggcuggg

SEQ ID NO: 329344 - RNA, 18 nt, Artificial Sequence
  Synthetic
ugaguucugacugcuggg

SEQ ID NO: 329345 - RNA, 19 nt, Artificial Sequence
  Synthetic
uugaguucugacugcuggg

SEQ ID NO: 329346 - RNA, 20 nt, Artificial Sequence
  Synthetic
cuugaguucugacugcuggg

SEQ ID NO: 329347 - RNA, 21 nt, Artificial Sequence
  Synthetic
acuugaguucugacugcuggg

SEQ ID NO: 329348 - RNA, 22 nt, Artificial Sequence
  Synthetic
aacuugaguucugacugcuggg

SEQ ID NO: 329349 - RNA, 23 nt, Artificial Sequence
  Synthetic
aaacuugaguucugacugcuggg

SEQ ID NO: 329350 - RNA, 24 nt, Artificial Sequence
  Synthetic
gaaacuugaguucugacugcuggg

SEQ ID NO: 329351 - RNA, 18 nt, Artificial Sequence
  Synthetic
aguaauggcauugcuggg

SEQ ID NO: 329352 - RNA, 19 nt, Artificial Sequence
  Synthetic
caguaauggcauugcuggg

SEQ ID NO: 329353 - RNA, 20 nt, Artificial Sequence
  Synthetic
ccaguaauggcauugcuggg

SEQ ID NO: 329354 - RNA, 21 nt, Artificial Sequence
  Synthetic
cccaguaauggcauugcuggg

SEQ ID NO: 329355 - RNA, 22 nt, Artificial Sequence
  Synthetic
acccaguaauggcauugcuggg

SEQ ID NO: 329356 - RNA, 23 nt, Artificial Sequence
  Synthetic
uacccaguaauggcauugcuggg

SEQ ID NO: 329357 - RNA, 24 nt, Artificial Sequence
  Synthetic
auacccaguaauggcauugcuggg

SEQ ID NO: 329358 - RNA, 18 nt, Artificial Sequence
  Synthetic
aagagaaaaaaaucuggg

SEQ ID NO: 329359 - RNA, 19 nt, Artificial Sequence
  Synthetic
aaagagaaaaaaaucuggg

SEQ ID NO: 329360 - RNA, 20 nt, Artificial Sequence
  Synthetic
caaagagaaaaaaaucuggg

SEQ ID NO: 329361 - RNA, 21 nt, Artificial Sequence
  Synthetic
acaaagagaaaaaaaucuggg

SEQ ID NO: 329362 - RNA, 22 nt, Artificial Sequence
  Synthetic
cacaaagagaaaaaaaucuggg

SEQ ID NO: 329363 - RNA, 23 nt, Artificial Sequence
  Synthetic
ccacaaagagaaaaaaaucuggg

SEQ ID NO: 329364 - RNA, 24 nt, Artificial Sequence
  Synthetic
accacaaagagaaaaaaaucuggg

SEQ ID NO: 329365 - RNA, 18 nt, Artificial Sequence
  Synthetic
cacacacaaaaaucuggg

SEQ ID NO: 329366 - RNA, 19 nt, Artificial Sequence
  Synthetic
gcacacacaaaaaucuggg

SEQ ID NO: 329367 - RNA, 20 nt, Artificial Sequence
  Synthetic
agcacacacaaaaaucuggg

SEQ ID NO: 329368 - RNA, 21 nt, Artificial Sequence
  Synthetic
cagcacacacaaaaaucuggg

SEQ ID NO: 329369 - RNA, 22 nt, Artificial Sequence
  Synthetic
acagcacacacaaaaaucuggg

SEQ ID NO: 329370 - RNA, 23 nt, Artificial Sequence
  Synthetic
gacagcacacacaaaaaucuggg

SEQ ID NO: 329371 - RNA, 24 nt, Artificial Sequence
  Synthetic
agacagcacacacaaaaaucuggg

SEQ ID NO: 329372 - RNA, 18 nt, Artificial Sequence
  Synthetic
ugauucaguagaucuggg

SEQ ID NO: 329373 - RNA, 19 nt, Artificial Sequence
  Synthetic
cugauucaguagaucuggg

SEQ ID NO: 329374 - RNA, 20 nt, Artificial Sequence
  Synthetic
ucugauucaguagaucuggg

SEQ ID NO: 329375 - RNA, 21 nt, Artificial Sequence
  Synthetic
uucugauucaguagaucuggg

SEQ ID NO: 329376 - RNA, 22 nt, Artificial Sequence
  Synthetic
cuucugauucaguagaucuggg

SEQ ID NO: 329377 - RNA, 23 nt, Artificial Sequence
  Synthetic
gcuucugauucaguagaucuggg

SEQ ID NO: 329378 - RNA, 24 nt, Artificial Sequence
  Synthetic
agcuucugauucaguagaucuggg

SEQ ID NO: 329379 - RNA, 18 nt, Artificial Sequence
  Synthetic
ggcaggugccccucuggg

SEQ ID NO: 329380 - RNA, 19 nt, Artificial Sequence
  Synthetic
uggcaggugccccucuggg

SEQ ID NO: 329381 - RNA, 20 nt, Artificial Sequence
  Synthetic
cuggcaggugccccucuggg

SEQ ID NO: 329382 - RNA, 21 nt, Artificial Sequence
  Synthetic
ucuggcaggugccccucuggg

SEQ ID NO: 329383 - RNA, 22 nt, Artificial Sequence
  Synthetic
aucuggcaggugccccucuggg

SEQ ID NO: 329384 - RNA, 23 nt, Artificial Sequence
  Synthetic
caucuggcaggugccccucuggg

SEQ ID NO: 329385 - RNA, 24 nt, Artificial Sequence
  Synthetic
gcaucuggcaggugccccucuggg

SEQ ID NO: 329386 - RNA, 18 nt, Artificial Sequence
  Synthetic
ugauuuacuagcucuggg

SEQ ID NO: 329387 - RNA, 19 nt, Artificial Sequence
  Synthetic
cugauuuacuagcucuggg

SEQ ID NO: 329388 - RNA, 20 nt, Artificial Sequence
  Synthetic
ucugauuuacuagcucuggg

SEQ ID NO: 329389 - RNA, 21 nt, Artificial Sequence
  Synthetic
uucugauuuacuagcucuggg

SEQ ID NO: 329390 - RNA, 22 nt, Artificial Sequence
  Synthetic
uuucugauuuacuagcucuggg

SEQ ID NO: 329391 - RNA, 23 nt, Artificial Sequence
  Synthetic
guuucugauuuacuagcucuggg

SEQ ID NO: 329392 - RNA, 24 nt, Artificial Sequence
  Synthetic
aguuucugauuuacuagcucuggg

SEQ ID NO: 329393 - RNA, 18 nt, Artificial Sequence
  Synthetic
agauuccuucucucuggg

SEQ ID NO: 329394 - RNA, 19 nt, Artificial Sequence
  Synthetic
uagauuccuucucucuggg

SEQ ID NO: 329395 - RNA, 20 nt, Artificial Sequence
  Synthetic
cuagauuccuucucucuggg

SEQ ID NO: 329396 - RNA, 21 nt, Artificial Sequence
  Synthetic
ucuagauuccuucucucuggg

SEQ ID NO: 329397 - RNA, 22 nt, Artificial Sequence
  Synthetic
cucuagauuccuucucucuggg

SEQ ID NO: 329398 - RNA, 23 nt, Artificial Sequence
  Synthetic
ucucuagauuccuucucucuggg

SEQ ID NO: 329399 - RNA, 24 nt, Artificial Sequence
  Synthetic
cucucuagauuccuucucucuggg

SEQ ID NO: 329400 - RNA, 18 nt, Artificial Sequence
  Synthetic
uaauuggggaggucuggg

SEQ ID NO: 329401 - RNA, 19 nt, Artificial Sequence
  Synthetic
cuaauuggggaggucuggg

SEQ ID NO: 329402 - RNA, 20 nt, Artificial Sequence
  Synthetic
ucuaauuggggaggucuggg

SEQ ID NO: 329403 - RNA, 21 nt, Artificial Sequence
  Synthetic
uucuaauuggggaggucuggg

SEQ ID NO: 329404 - RNA, 22 nt, Artificial Sequence
  Synthetic
cuucuaauuggggaggucuggg

SEQ ID NO: 329405 - RNA, 23 nt, Artificial Sequence
  Synthetic
gcuucuaauuggggaggucuggg

SEQ ID NO: 329406 - RNA, 24 nt, Artificial Sequence
  Synthetic
agcuucuaauuggggaggucuggg

SEQ ID NO: 329407 - RNA, 18 nt, Artificial Sequence
  Synthetic
ugugucaguuggucuggg

SEQ ID NO: 329408 - RNA, 19 nt, Artificial Sequence
  Synthetic
cugugucaguuggucuggg

SEQ ID NO: 329409 - RNA, 20 nt, Artificial Sequence
  Synthetic
ucugugucaguuggucuggg

SEQ ID NO: 329410 - RNA, 21 nt, Artificial Sequence
  Synthetic
uucugugucaguuggucuggg

SEQ ID NO: 329411 - RNA, 22 nt, Artificial Sequence
  Synthetic
uuucugugucaguuggucuggg

SEQ ID NO: 329412 - RNA, 23 nt, Artificial Sequence
  Synthetic
guuucugugucaguuggucuggg

SEQ ID NO: 329413 - RNA, 24 nt, Artificial Sequence
  Synthetic
aguuucugugucaguuggucuggg

SEQ ID NO: 329414 - RNA, 18 nt, Artificial Sequence
  Synthetic
uggauaugaaauucuggg

SEQ ID NO: 329415 - RNA, 19 nt, Artificial Sequence
  Synthetic
cuggauaugaaauucuggg

SEQ ID NO: 329416 - RNA, 20 nt, Artificial Sequence
  Synthetic
gcuggauaugaaauucuggg

SEQ ID NO: 329417 - RNA, 21 nt, Artificial Sequence
  Synthetic
ggcuggauaugaaauucuggg

SEQ ID NO: 329418 - RNA, 22 nt, Artificial Sequence
  Synthetic
uggcuggauaugaaauucuggg

SEQ ID NO: 329419 - RNA, 23 nt, Artificial Sequence
  Synthetic
uuggcuggauaugaaauucuggg

SEQ ID NO: 329420 - RNA, 24 nt, Artificial Sequence
  Synthetic
uuuggcuggauaugaaauucuggg

SEQ ID NO: 329421 - RNA, 18 nt, Artificial Sequence
  Synthetic
uaaauagagaauucuggg

SEQ ID NO: 329422 - RNA, 19 nt, Artificial Sequence
  Synthetic
uuaaauagagaauucuggg

SEQ ID NO: 329423 - RNA, 20 nt, Artificial Sequence
  Synthetic
uuuaaauagagaauucuggg

SEQ ID NO: 329424 - RNA, 21 nt, Artificial Sequence
  Synthetic
guuuaaauagagaauucuggg

SEQ ID NO: 329425 - RNA, 22 nt, Artificial Sequence
  Synthetic
uguuuaaauagagaauucuggg

SEQ ID NO: 329426 - RNA, 23 nt, Artificial Sequence
  Synthetic
guguuuaaauagagaauucuggg

SEQ ID NO: 329427 - RNA, 24 nt, Artificial Sequence
  Synthetic
uguguuuaaauagagaauucuggg

SEQ ID NO: 329428 - RNA, 18 nt, Artificial Sequence
  Synthetic
aucacacuggcuucuggg

SEQ ID NO: 329429 - RNA, 19 nt, Artificial Sequence
  Synthetic
gaucacacuggcuucuggg

SEQ ID NO: 329430 - RNA, 20 nt, Artificial Sequence
  Synthetic
ggaucacacuggcuucuggg

SEQ ID NO: 329431 - RNA, 21 nt, Artificial Sequence
  Synthetic
aggaucacacuggcuucuggg

SEQ ID NO: 329432 - RNA, 22 nt, Artificial Sequence
  Synthetic
aaggaucacacuggcuucuggg

SEQ ID NO: 329433 - RNA, 23 nt, Artificial Sequence
  Synthetic
aaaggaucacacuggcuucuggg

SEQ ID NO: 329434 - RNA, 24 nt, Artificial Sequence
  Synthetic
aaaaggaucacacuggcuucuggg

SEQ ID NO: 329435 - RNA, 18 nt, Artificial Sequence
  Synthetic
gaaaaccaggcaaguggg

SEQ ID NO: 329436 - RNA, 19 nt, Artificial Sequence
  Synthetic
agaaaaccaggcaaguggg

SEQ ID NO: 329437 - RNA, 20 nt, Artificial Sequence
  Synthetic
gagaaaaccaggcaaguggg

SEQ ID NO: 329438 - RNA, 21 nt, Artificial Sequence
  Synthetic
agagaaaaccaggcaaguggg

SEQ ID NO: 329439 - RNA, 22 nt, Artificial Sequence
  Synthetic
uagagaaaaccaggcaaguggg

SEQ ID NO: 329440 - RNA, 23 nt, Artificial Sequence
  Synthetic
auagagaaaaccaggcaaguggg

SEQ ID NO: 329441 - RNA, 24 nt, Artificial Sequence
  Synthetic
uauagagaaaaccaggcaaguggg

SEQ ID NO: 329442 - RNA, 18 nt, Artificial Sequence
  Synthetic
cugcugucaucaaguggg

SEQ ID NO: 329443 - RNA, 19 nt, Artificial Sequence
  Synthetic
acugcugucaucaaguggg

SEQ ID NO: 329444 - RNA, 20 nt, Artificial Sequence
  Synthetic
uacugcugucaucaaguggg

SEQ ID NO: 329445 - RNA, 21 nt, Artificial Sequence
  Synthetic
auacugcugucaucaaguggg

SEQ ID NO: 329446 - RNA, 22 nt, Artificial Sequence
  Synthetic
gauacugcugucaucaaguggg

SEQ ID NO: 329447 - RNA, 23 nt, Artificial Sequence
  Synthetic
ggauacugcugucaucaaguggg

SEQ ID NO: 329448 - RNA, 24 nt, Artificial Sequence
  Synthetic
gggauacugcugucaucaaguggg

SEQ ID NO: 329449 - RNA, 18 nt, Artificial Sequence
  Synthetic
acgauuuaaaacaguggg

SEQ ID NO: 329450 - RNA, 19 nt, Artificial Sequence
  Synthetic
aacgauuuaaaacaguggg

SEQ ID NO: 329451 - RNA, 20 nt, Artificial Sequence
  Synthetic
aaacgauuuaaaacaguggg

SEQ ID NO: 329452 - RNA, 21 nt, Artificial Sequence
  Synthetic
caaacgauuuaaaacaguggg

SEQ ID NO: 329453 - RNA, 22 nt, Artificial Sequence
  Synthetic
acaaacgauuuaaaacaguggg

SEQ ID NO: 329454 - RNA, 23 nt, Artificial Sequence
  Synthetic
aacaaacgauuuaaaacaguggg

SEQ ID NO: 329455 - RNA, 24 nt, Artificial Sequence
  Synthetic
aaacaaacgauuuaaaacaguggg

SEQ ID NO: 329456 - RNA, 18 nt, Artificial Sequence
  Synthetic
agaccuguuaacaguggg

SEQ ID NO: 329457 - RNA, 19 nt, Artificial Sequence
  Synthetic
uagaccuguuaacaguggg

SEQ ID NO: 329458 - RNA, 20 nt, Artificial Sequence
  Synthetic
uuagaccuguuaacaguggg

SEQ ID NO: 329459 - RNA, 21 nt, Artificial Sequence
  Synthetic
auuagaccuguuaacaguggg

SEQ ID NO: 329460 - RNA, 22 nt, Artificial Sequence
  Synthetic
aauuagaccuguuaacaguggg

SEQ ID NO: 329461 - RNA, 23 nt, Artificial Sequence
  Synthetic
uaauuagaccuguuaacaguggg

SEQ ID NO: 329462 - RNA, 24 nt, Artificial Sequence
  Synthetic
auaauuagaccuguuaacaguggg

SEQ ID NO: 329463 - RNA, 18 nt, Artificial Sequence
  Synthetic
gagcgugugagcaguggg

SEQ ID NO: 329464 - RNA, 19 nt, Artificial Sequence
  Synthetic
ggagcgugugagcaguggg

SEQ ID NO: 329465 - RNA, 20 nt, Artificial Sequence
  Synthetic
aggagcgugugagcaguggg

SEQ ID NO: 329466 - RNA, 21 nt, Artificial Sequence
  Synthetic
caggagcgugugagcaguggg

SEQ ID NO: 329467 - RNA, 22 nt, Artificial Sequence
  Synthetic
gcaggagcgugugagcaguggg

SEQ ID NO: 329468 - RNA, 23 nt, Artificial Sequence
  Synthetic
ugcaggagcgugugagcaguggg

SEQ ID NO: 329469 - RNA, 24 nt, Artificial Sequence
  Synthetic
augcaggagcgugugagcaguggg

SEQ ID NO: 329470 - RNA, 18 nt, Artificial Sequence
  Synthetic
agccgagaaggcaguggg

SEQ ID NO: 329471 - RNA, 19 nt, Artificial Sequence
  Synthetic
gagccgagaaggcaguggg

SEQ ID NO: 329472 - RNA, 20 nt, Artificial Sequence
  Synthetic
ggagccgagaaggcaguggg

SEQ ID NO: 329473 - RNA, 21 nt, Artificial Sequence
  Synthetic
cggagccgagaaggcaguggg

SEQ ID NO: 329474 - RNA, 22 nt, Artificial Sequence
  Synthetic
acggagccgagaaggcaguggg

SEQ ID NO: 329475 - RNA, 23 nt, Artificial Sequence
  Synthetic
gacggagccgagaaggcaguggg

SEQ ID NO: 329476 - RNA, 24 nt, Artificial Sequence
  Synthetic
agacggagccgagaaggcaguggg

SEQ ID NO: 329477 - RNA, 18 nt, Artificial Sequence
  Synthetic
gaauucagaaucaguggg

SEQ ID NO: 329478 - RNA, 19 nt, Artificial Sequence
  Synthetic
agaauucagaaucaguggg

SEQ ID NO: 329479 - RNA, 20 nt, Artificial Sequence
  Synthetic
aagaauucagaaucaguggg

SEQ ID NO: 329480 - RNA, 21 nt, Artificial Sequence
  Synthetic
aaagaauucagaaucaguggg

SEQ ID NO: 329481 - RNA, 22 nt, Artificial Sequence
  Synthetic
gaaagaauucagaaucaguggg

SEQ ID NO: 329482 - RNA, 23 nt, Artificial Sequence
  Synthetic
ugaaagaauucagaaucaguggg

SEQ ID NO: 329483 - RNA, 24 nt, Artificial Sequence
  Synthetic
uugaaagaauucagaaucaguggg

SEQ ID NO: 329484 - RNA, 18 nt, Artificial Sequence
  Synthetic
gauuagagaaucaguggg

SEQ ID NO: 329485 - RNA, 19 nt, Artificial Sequence
  Synthetic
ugauuagagaaucaguggg

SEQ ID NO: 329486 - RNA, 20 nt, Artificial Sequence
  Synthetic
gugauuagagaaucaguggg

SEQ ID NO: 329487 - RNA, 21 nt, Artificial Sequence
  Synthetic
agugauuagagaaucaguggg

SEQ ID NO: 329488 - RNA, 22 nt, Artificial Sequence
  Synthetic
aagugauuagagaaucaguggg

SEQ ID NO: 329489 - RNA, 23 nt, Artificial Sequence
  Synthetic
aaagugauuagagaaucaguggg

SEQ ID NO: 329490 - RNA, 24 nt, Artificial Sequence
  Synthetic
aaaagugauuagagaaucaguggg

SEQ ID NO: 329491 - RNA, 18 nt, Artificial Sequence
  Synthetic
ggaggaguaaagaguggg

SEQ ID NO: 329492 - RNA, 19 nt, Artificial Sequence
  Synthetic
aggaggaguaaagaguggg

SEQ ID NO: 329493 - RNA, 20 nt, Artificial Sequence
  Synthetic
gaggaggaguaaagaguggg

SEQ ID NO: 329494 - RNA, 21 nt, Artificial Sequence
  Synthetic
agaggaggaguaaagaguggg

SEQ ID NO: 329495 - RNA, 22 nt, Artificial Sequence
  Synthetic
uagaggaggaguaaagaguggg

SEQ ID NO: 329496 - RNA, 23 nt, Artificial Sequence
  Synthetic
auagaggaggaguaaagaguggg

SEQ ID NO: 329497 - RNA, 24 nt, Artificial Sequence
  Synthetic
uauagaggaggaguaaagaguggg

SEQ ID NO: 329498 - RNA, 18 nt, Artificial Sequence
  Synthetic
uacaggcuagggaguggg

SEQ ID NO: 329499 - RNA, 19 nt, Artificial Sequence
  Synthetic
auacaggcuagggaguggg

SEQ ID NO: 329500 - RNA, 20 nt, Artificial Sequence
  Synthetic
cauacaggcuagggaguggg

SEQ ID NO: 329501 - RNA, 21 nt, Artificial Sequence
  Synthetic
acauacaggcuagggaguggg

SEQ ID NO: 329502 - RNA, 22 nt, Artificial Sequence
  Synthetic
uacauacaggcuagggaguggg

SEQ ID NO: 329503 - RNA, 23 nt, Artificial Sequence
  Synthetic
uuacauacaggcuagggaguggg

SEQ ID NO: 329504 - RNA, 24 nt, Artificial Sequence
  Synthetic
guuacauacaggcuagggaguggg

SEQ ID NO: 329505 - RNA, 18 nt, Artificial Sequence
  Synthetic
ccuuuuauuuggaguggg

SEQ ID NO: 329506 - RNA, 19 nt, Artificial Sequence
  Synthetic
uccuuuuauuuggaguggg

SEQ ID NO: 329507 - RNA, 20 nt, Artificial Sequence
  Synthetic
cuccuuuuauuuggaguggg

SEQ ID NO: 329508 - RNA, 21 nt, Artificial Sequence
  Synthetic
gcuccuuuuauuuggaguggg

SEQ ID NO: 329509 - RNA, 22 nt, Artificial Sequence
  Synthetic
ggcuccuuuuauuuggaguggg

SEQ ID NO: 329510 - RNA, 23 nt, Artificial Sequence
  Synthetic
uggcuccuuuuauuuggaguggg

SEQ ID NO: 329511 - RNA, 24 nt, Artificial Sequence
  Synthetic
cuggcuccuuuuauuuggaguggg

SEQ ID NO: 329512 - RNA, 18 nt, Artificial Sequence
  Synthetic
uauuuuccguugaguggg

SEQ ID NO: 329513 - RNA, 19 nt, Artificial Sequence
  Synthetic
uuauuuuccguugaguggg

SEQ ID NO: 329514 - RNA, 20 nt, Artificial Sequence
  Synthetic
uuuauuuuccguugaguggg

SEQ ID NO: 329515 - RNA, 21 nt, Artificial Sequence
  Synthetic
uuuuauuuuccguugaguggg

SEQ ID NO: 329516 - RNA, 22 nt, Artificial Sequence
  Synthetic
cuuuuauuuuccguugaguggg

SEQ ID NO: 329517 - RNA, 23 nt, Artificial Sequence
  Synthetic
ucuuuuauuuuccguugaguggg

SEQ ID NO: 329518 - RNA, 24 nt, Artificial Sequence
  Synthetic
cucuuuuauuuuccguugaguggg

SEQ ID NO: 329519 - RNA, 18 nt, Artificial Sequence
  Synthetic
caacugaagucuaguggg

SEQ ID NO: 329520 - RNA, 19 nt, Artificial Sequence
  Synthetic
acaacugaagucuaguggg

SEQ ID NO: 329521 - RNA, 20 nt, Artificial Sequence
  Synthetic
uacaacugaagucuaguggg

SEQ ID NO: 329522 - RNA, 21 nt, Artificial Sequence
  Synthetic
auacaacugaagucuaguggg

SEQ ID NO: 329523 - RNA, 22 nt, Artificial Sequence
  Synthetic
gauacaacugaagucuaguggg

SEQ ID NO: 329524 - RNA, 23 nt, Artificial Sequence
  Synthetic
agauacaacugaagucuaguggg

SEQ ID NO: 329525 - RNA, 24 nt, Artificial Sequence
  Synthetic
gagauacaacugaagucuaguggg

SEQ ID NO: 329526 - RNA, 18 nt, Artificial Sequence
  Synthetic
cagagaacccaacguggg

SEQ ID NO: 329527 - RNA, 19 nt, Artificial Sequence
  Synthetic
acagagaacccaacguggg

SEQ ID NO: 329528 - RNA, 20 nt, Artificial Sequence
  Synthetic
aacagagaacccaacguggg

SEQ ID NO: 329529 - RNA, 21 nt, Artificial Sequence
  Synthetic
aaacagagaacccaacguggg

SEQ ID NO: 329530 - RNA, 22 nt, Artificial Sequence
  Synthetic
aaaacagagaacccaacguggg

SEQ ID NO: 329531 - RNA, 23 nt, Artificial Sequence
  Synthetic
gaaaacagagaacccaacguggg

SEQ ID NO: 329532 - RNA, 24 nt, Artificial Sequence
  Synthetic
ggaaaacagagaacccaacguggg

SEQ ID NO: 329533 - RNA, 18 nt, Artificial Sequence
  Synthetic
uggauagaccugcguggg

SEQ ID NO: 329534 - RNA, 19 nt, Artificial Sequence
  Synthetic
guggauagaccugcguggg

SEQ ID NO: 329535 - RNA, 20 nt, Artificial Sequence
  Synthetic
aguggauagaccugcguggg

SEQ ID NO: 329536 - RNA, 21 nt, Artificial Sequence
  Synthetic
gaguggauagaccugcguggg

SEQ ID NO: 329537 - RNA, 22 nt, Artificial Sequence
  Synthetic
ugaguggauagaccugcguggg

SEQ ID NO: 329538 - RNA, 23 nt, Artificial Sequence
  Synthetic
augaguggauagaccugcguggg

SEQ ID NO: 329539 - RNA, 24 nt, Artificial Sequence
  Synthetic
aaugaguggauagaccugcguggg

SEQ ID NO: 329540 - RNA, 18 nt, Artificial Sequence
  Synthetic
accagggccugucguggg

SEQ ID NO: 329541 - RNA, 19 nt, Artificial Sequence
  Synthetic
caccagggccugucguggg

SEQ ID NO: 329542 - RNA, 20 nt, Artificial Sequence
  Synthetic
acaccagggccugucguggg

SEQ ID NO: 329543 - RNA, 21 nt, Artificial Sequence
  Synthetic
cacaccagggccugucguggg

SEQ ID NO: 329544 - RNA, 22 nt, Artificial Sequence
  Synthetic
acacaccagggccugucguggg

SEQ ID NO: 329545 - RNA, 23 nt, Artificial Sequence
  Synthetic
cacacaccagggccugucguggg

SEQ ID NO: 329546 - RNA, 24 nt, Artificial Sequence
  Synthetic
ucacacaccagggccugucguggg

SEQ ID NO: 329547 - RNA, 18 nt, Artificial Sequence
  Synthetic
acuuuugaaaaagguggg

SEQ ID NO: 329548 - RNA, 19 nt, Artificial Sequence
  Synthetic
uacuuuugaaaaagguggg

SEQ ID NO: 329549 - RNA, 20 nt, Artificial Sequence
  Synthetic
auacuuuugaaaaagguggg

SEQ ID NO: 329550 - RNA, 21 nt, Artificial Sequence
  Synthetic
aauacuuuugaaaaagguggg

SEQ ID NO: 329551 - RNA, 22 nt, Artificial Sequence
  Synthetic
aaauacuuuugaaaaagguggg

SEQ ID NO: 329552 - RNA, 23 nt, Artificial Sequence
  Synthetic
uaaauacuuuugaaaaagguggg

SEQ ID NO: 329553 - RNA, 24 nt, Artificial Sequence
  Synthetic
uuaaauacuuuugaaaaagguggg

SEQ ID NO: 329554 - RNA, 18 nt, Artificial Sequence
  Synthetic
ggcuguguucaagguggg

SEQ ID NO: 329555 - RNA, 19 nt, Artificial Sequence
  Synthetic
uggcuguguucaagguggg

SEQ ID NO: 329556 - RNA, 20 nt, Artificial Sequence
  Synthetic
guggcuguguucaagguggg

SEQ ID NO: 329557 - RNA, 21 nt, Artificial Sequence
  Synthetic
uguggcuguguucaagguggg

SEQ ID NO: 329558 - RNA, 22 nt, Artificial Sequence
  Synthetic
uuguggcuguguucaagguggg

SEQ ID NO: 329559 - RNA, 23 nt, Artificial Sequence
  Synthetic
cuuguggcuguguucaagguggg

SEQ ID NO: 329560 - RNA, 24 nt, Artificial Sequence
  Synthetic
gcuuguggcuguguucaagguggg

SEQ ID NO: 329561 - RNA, 18 nt, Artificial Sequence
  Synthetic
uugggagucugagguggg

SEQ ID NO: 329562 - RNA, 19 nt, Artificial Sequence
  Synthetic
uuugggagucugagguggg

SEQ ID NO: 329563 - RNA, 20 nt, Artificial Sequence
  Synthetic
cuuugggagucugagguggg

SEQ ID NO: 329564 - RNA, 21 nt, Artificial Sequence
  Synthetic
acuuugggagucugagguggg

SEQ ID NO: 329565 - RNA, 22 nt, Artificial Sequence
  Synthetic
cacuuugggagucugagguggg

SEQ ID NO: 329566 - RNA, 23 nt, Artificial Sequence
  Synthetic
gcacuuugggagucugagguggg

SEQ ID NO: 329567 - RNA, 24 nt, Artificial Sequence
  Synthetic
agcacuuugggagucugagguggg

SEQ ID NO: 329568 - RNA, 18 nt, Artificial Sequence
  Synthetic
uuuuaacuaauagguggg

SEQ ID NO: 329569 - RNA, 19 nt, Artificial Sequence
  Synthetic
uuuuuaacuaauagguggg

SEQ ID NO: 329570 - RNA, 20 nt, Artificial Sequence
  Synthetic
uuuuuuaacuaauagguggg

SEQ ID NO: 329571 - RNA, 21 nt, Artificial Sequence
  Synthetic
uuuuuuuaacuaauagguggg

SEQ ID NO: 329572 - RNA, 22 nt, Artificial Sequence
  Synthetic
uuuuuuuuaacuaauagguggg

SEQ ID NO: 329573 - RNA, 23 nt, Artificial Sequence
  Synthetic
auuuuuuuuaacuaauagguggg

SEQ ID NO: 329574 - RNA, 24 nt, Artificial Sequence
  Synthetic
cauuuuuuuuaacuaauagguggg

SEQ ID NO: 329575 - RNA, 18 nt, Artificial Sequence
  Synthetic
uucucacucauagguggg

SEQ ID NO: 329576 - RNA, 19 nt, Artificial Sequence
  Synthetic
auucucacucauagguggg

SEQ ID NO: 329577 - RNA, 20 nt, Artificial Sequence
  Synthetic
uauucucacucauagguggg

SEQ ID NO: 329578 - RNA, 21 nt, Artificial Sequence
  Synthetic
auauucucacucauagguggg

SEQ ID NO: 329579 - RNA, 22 nt, Artificial Sequence
  Synthetic
cauauucucacucauagguggg

SEQ ID NO: 329580 - RNA, 23 nt, Artificial Sequence
  Synthetic
gcauauucucacucauagguggg

SEQ ID NO: 329581 - RNA, 24 nt, Artificial Sequence
  Synthetic
ugcauauucucacucauagguggg

SEQ ID NO: 329582 - RNA, 18 nt, Artificial Sequence
  Synthetic
augccguaguaggguggg

SEQ ID NO: 329583 - RNA, 19 nt, Artificial Sequence
  Synthetic
uaugccguaguaggguggg

SEQ ID NO: 329584 - RNA, 20 nt, Artificial Sequence
  Synthetic
uuaugccguaguaggguggg

SEQ ID NO: 329585 - RNA, 21 nt, Artificial Sequence
  Synthetic
cuuaugccguaguaggguggg

SEQ ID NO: 329586 - RNA, 22 nt, Artificial Sequence
  Synthetic
ccuuaugccguaguaggguggg

SEQ ID NO: 329587 - RNA, 23 nt, Artificial Sequence
  Synthetic
accuuaugccguaguaggguggg

SEQ ID NO: 329588 - RNA, 24 nt, Artificial Sequence
  Synthetic
uaccuuaugccguaguaggguggg

SEQ ID NO: 329589 - RNA, 18 nt, Artificial Sequence
  Synthetic
caguuugagcgggguggg

SEQ ID NO: 329590 - RNA, 19 nt, Artificial Sequence
  Synthetic
gcaguuugagcgggguggg

SEQ ID NO: 329591 - RNA, 20 nt, Artificial Sequence
  Synthetic
agcaguuugagcgggguggg

SEQ ID NO: 329592 - RNA, 21 nt, Artificial Sequence
  Synthetic
cagcaguuugagcgggguggg

SEQ ID NO: 329593 - RNA, 22 nt, Artificial Sequence
  Synthetic
ucagcaguuugagcgggguggg

SEQ ID NO: 329594 - RNA, 23 nt, Artificial Sequence
  Synthetic
cucagcaguuugagcgggguggg

SEQ ID NO: 329595 - RNA, 24 nt, Artificial Sequence
  Synthetic
ccucagcaguuugagcgggguggg

SEQ ID NO: 329596 - RNA, 18 nt, Artificial Sequence
  Synthetic
ggccugucgggggguggg

SEQ ID NO: 329597 - RNA, 19 nt, Artificial Sequence
  Synthetic
aggccugucgggggguggg

SEQ ID NO: 329598 - RNA, 20 nt, Artificial Sequence
  Synthetic
gaggccugucgggggguggg

SEQ ID NO: 329599 - RNA, 21 nt, Artificial Sequence
  Synthetic
ugaggccugucgggggguggg

SEQ ID NO: 329600 - RNA, 22 nt, Artificial Sequence
  Synthetic
cugaggccugucgggggguggg

SEQ ID NO: 329601 - RNA, 23 nt, Artificial Sequence
  Synthetic
acugaggccugucgggggguggg

SEQ ID NO: 329602 - RNA, 24 nt, Artificial Sequence
  Synthetic
cacugaggccugucgggggguggg

SEQ ID NO: 329603 - RNA, 18 nt, Artificial Sequence
  Synthetic
uuucacagaugggguggg

SEQ ID NO: 329604 - RNA, 19 nt, Artificial Sequence
  Synthetic
auuucacagaugggguggg

SEQ ID NO: 329605 - RNA, 20 nt, Artificial Sequence
  Synthetic
aauuucacagaugggguggg

SEQ ID NO: 329606 - RNA, 21 nt, Artificial Sequence
  Synthetic
aaauuucacagaugggguggg

SEQ ID NO: 329607 - RNA, 22 nt, Artificial Sequence
  Synthetic
aaaauuucacagaugggguggg

SEQ ID NO: 329608 - RNA, 23 nt, Artificial Sequence
  Synthetic
aaaaauuucacagaugggguggg

SEQ ID NO: 329609 - RNA, 24 nt, Artificial Sequence
  Synthetic
aaaaaauuucacagaugggguggg

SEQ ID NO: 329610 - RNA, 18 nt, Artificial Sequence
  Synthetic
ggccugucgugggguggg

SEQ ID NO: 329611 - RNA, 19 nt, Artificial Sequence
  Synthetic
gggccugucgugggguggg

SEQ ID NO: 329612 - RNA, 20 nt, Artificial Sequence
  Synthetic
agggccugucgugggguggg

SEQ ID NO: 329613 - RNA, 21 nt, Artificial Sequence
  Synthetic
cagggccugucgugggguggg

SEQ ID NO: 329614 - RNA, 22 nt, Artificial Sequence
  Synthetic
ccagggccugucgugggguggg

SEQ ID NO: 329615 - RNA, 23 nt, Artificial Sequence
  Synthetic
accagggccugucgugggguggg

SEQ ID NO: 329616 - RNA, 24 nt, Artificial Sequence
  Synthetic
caccagggccugucgugggguggg

SEQ ID NO: 329617 - RNA, 18 nt, Artificial Sequence
  Synthetic
ggacuguggugggguggg

SEQ ID NO: 329618 - RNA, 19 nt, Artificial Sequence
  Synthetic
gggacuguggugggguggg

SEQ ID NO: 329619 - RNA, 20 nt, Artificial Sequence
  Synthetic
ggggacuguggugggguggg

SEQ ID NO: 329620 - RNA, 21 nt, Artificial Sequence
  Synthetic
uggggacuguggugggguggg

SEQ ID NO: 329621 - RNA, 22 nt, Artificial Sequence
  Synthetic
cuggggacuguggugggguggg

SEQ ID NO: 329622 - RNA, 23 nt, Artificial Sequence
  Synthetic
ucuggggacuguggugggguggg

SEQ ID NO: 329623 - RNA, 24 nt, Artificial Sequence
  Synthetic
cucuggggacuguggugggguggg

SEQ ID NO: 329624 - RNA, 18 nt, Artificial Sequence
  Synthetic
ggacuguugugggguggg

SEQ ID NO: 329625 - RNA, 19 nt, Artificial Sequence
  Synthetic
gggacuguugugggguggg

SEQ ID NO: 329626 - RNA, 20 nt, Artificial Sequence
  Synthetic
ggggacuguugugggguggg

SEQ ID NO: 329627 - RNA, 21 nt, Artificial Sequence
  Synthetic
uggggacuguugugggguggg

SEQ ID NO: 329628 - RNA, 22 nt, Artificial Sequence
  Synthetic
cuggggacuguugugggguggg

SEQ ID NO: 329629 - RNA, 23 nt, Artificial Sequence
  Synthetic
ucuggggacuguugugggguggg

SEQ ID NO: 329630 - RNA, 24 nt, Artificial Sequence
  Synthetic
cucuggggacuguugugggguggg

SEQ ID NO: 329631 - RNA, 18 nt, Artificial Sequence
  Synthetic
ggccuguugugggguggg

SEQ ID NO: 329632 - RNA, 19 nt, Artificial Sequence
  Synthetic
gggccuguugugggguggg

SEQ ID NO: 329633 - RNA, 20 nt, Artificial Sequence
  Synthetic
ggggccuguugugggguggg

SEQ ID NO: 329634 - RNA, 18 nt, Artificial Sequence
  Synthetic
uuuaaaacaguggguggg

SEQ ID NO: 329635 - RNA, 19 nt, Artificial Sequence
  Synthetic
auuuaaaacaguggguggg

SEQ ID NO: 329636 - RNA, 20 nt, Artificial Sequence
  Synthetic
gauuuaaaacaguggguggg

SEQ ID NO: 329637 - RNA, 21 nt, Artificial Sequence
  Synthetic
cgauuuaaaacaguggguggg

SEQ ID NO: 329638 - RNA, 22 nt, Artificial Sequence
  Synthetic
acgauuuaaaacaguggguggg

SEQ ID NO: 329639 - RNA, 23 nt, Artificial Sequence
  Synthetic
aacgauuuaaaacaguggguggg

SEQ ID NO: 329640 - RNA, 24 nt, Artificial Sequence
  Synthetic
aaacgauuuaaaacaguggguggg

SEQ ID NO: 329641 - RNA, 18 nt, Artificial Sequence
  Synthetic
gugugagcaguggguggg

SEQ ID NO: 329642 - RNA, 19 nt, Artificial Sequence
  Synthetic
cgugugagcaguggguggg

SEQ ID NO: 329643 - RNA, 20 nt, Artificial Sequence
  Synthetic
gcgugugagcaguggguggg

SEQ ID NO: 329644 - RNA, 21 nt, Artificial Sequence
  Synthetic
agcgugugagcaguggguggg

SEQ ID NO: 329645 - RNA, 22 nt, Artificial Sequence
  Synthetic
gagcgugugagcaguggguggg

SEQ ID NO: 329646 - RNA, 23 nt, Artificial Sequence
  Synthetic
ggagcgugugagcaguggguggg

SEQ ID NO: 329647 - RNA, 24 nt, Artificial Sequence
  Synthetic
aggagcgugugagcaguggguggg

SEQ ID NO: 329648 - RNA, 18 nt, Artificial Sequence
  Synthetic
auuugagagguggguggg

SEQ ID NO: 329649 - RNA, 19 nt, Artificial Sequence
  Synthetic
uauuugagagguggguggg

SEQ ID NO: 329650 - RNA, 20 nt, Artificial Sequence
  Synthetic
cuauuugagagguggguggg

SEQ ID NO: 329651 - RNA, 21 nt, Artificial Sequence
  Synthetic
gcuauuugagagguggguggg

SEQ ID NO: 329652 - RNA, 22 nt, Artificial Sequence
  Synthetic
agcuauuugagagguggguggg

SEQ ID NO: 329653 - RNA, 23 nt, Artificial Sequence
  Synthetic
cagcuauuugagagguggguggg

SEQ ID NO: 329654 - RNA, 24 nt, Artificial Sequence
  Synthetic
gcagcuauuugagagguggguggg

SEQ ID NO: 329655 - RNA, 18 nt, Artificial Sequence
  Synthetic
acaaacacuccugguggg

SEQ ID NO: 329656 - RNA, 19 nt, Artificial Sequence
  Synthetic
uacaaacacuccugguggg

SEQ ID NO: 329657 - RNA, 20 nt, Artificial Sequence
  Synthetic
uuacaaacacuccugguggg

SEQ ID NO: 329658 - RNA, 21 nt, Artificial Sequence
  Synthetic
uuuacaaacacuccugguggg

SEQ ID NO: 329659 - RNA, 22 nt, Artificial Sequence
  Synthetic
auuuacaaacacuccugguggg

SEQ ID NO: 329660 - RNA, 23 nt, Artificial Sequence
  Synthetic
cauuuacaaacacuccugguggg

SEQ ID NO: 329661 - RNA, 24 nt, Artificial Sequence
  Synthetic
acauuuacaaacacuccugguggg

SEQ ID NO: 329662 - RNA, 18 nt, Artificial Sequence
  Synthetic
ucuggggacugugguggg

SEQ ID NO: 329663 - RNA, 19 nt, Artificial Sequence
  Synthetic
cucuggggacugugguggg

SEQ ID NO: 329664 - RNA, 20 nt, Artificial Sequence
  Synthetic
acucuggggacugugguggg

SEQ ID NO: 329665 - RNA, 21 nt, Artificial Sequence
  Synthetic
cacucuggggacugugguggg

SEQ ID NO: 329666 - RNA, 22 nt, Artificial Sequence
  Synthetic
acacucuggggacugugguggg

SEQ ID NO: 329667 - RNA, 23 nt, Artificial Sequence
  Synthetic
cacacucuggggacugugguggg

SEQ ID NO: 329668 - RNA, 24 nt, Artificial Sequence
  Synthetic
ucacacucuggggacugugguggg

SEQ ID NO: 329669 - RNA, 18 nt, Artificial Sequence
  Synthetic
gaaaagucaaaauguggg

SEQ ID NO: 329670 - RNA, 19 nt, Artificial Sequence
  Synthetic
ggaaaagucaaaauguggg

SEQ ID NO: 329671 - RNA, 20 nt, Artificial Sequence
  Synthetic
uggaaaagucaaaauguggg

SEQ ID NO: 329672 - RNA, 21 nt, Artificial Sequence
  Synthetic
auggaaaagucaaaauguggg

SEQ ID NO: 329673 - RNA, 22 nt, Artificial Sequence
  Synthetic
aauggaaaagucaaaauguggg

SEQ ID NO: 329674 - RNA, 23 nt, Artificial Sequence
  Synthetic
aaauggaaaagucaaaauguggg

SEQ ID NO: 329675 - RNA, 24 nt, Artificial Sequence
  Synthetic
gaaauggaaaagucaaaauguggg

SEQ ID NO: 329676 - RNA, 18 nt, Artificial Sequence
  Synthetic
aaagaugaaauauguggg

SEQ ID NO: 329677 - RNA, 19 nt, Artificial Sequence
  Synthetic
caaagaugaaauauguggg

SEQ ID NO: 329678 - RNA, 20 nt, Artificial Sequence
  Synthetic
ucaaagaugaaauauguggg

SEQ ID NO: 329679 - RNA, 21 nt, Artificial Sequence
  Synthetic
aucaaagaugaaauauguggg

SEQ ID NO: 329680 - RNA, 22 nt, Artificial Sequence
  Synthetic
aaucaaagaugaaauauguggg

SEQ ID NO: 329681 - RNA, 23 nt, Artificial Sequence
  Synthetic
uaaucaaagaugaaauauguggg

SEQ ID NO: 329682 - RNA, 24 nt, Artificial Sequence
  Synthetic
cuaaucaaagaugaaauauguggg

SEQ ID NO: 329683 - RNA, 18 nt, Artificial Sequence
  Synthetic
ugauaagguagcuguggg

SEQ ID NO: 329684 - RNA, 19 nt, Artificial Sequence
  Synthetic
cugauaagguagcuguggg

SEQ ID NO: 329685 - RNA, 20 nt, Artificial Sequence
  Synthetic
ucugauaagguagcuguggg

SEQ ID NO: 329686 - RNA, 21 nt, Artificial Sequence
  Synthetic
uucugauaagguagcuguggg

SEQ ID NO: 329687 - RNA, 22 nt, Artificial Sequence
  Synthetic
guucugauaagguagcuguggg

SEQ ID NO: 329688 - RNA, 23 nt, Artificial Sequence
  Synthetic
aguucugauaagguagcuguggg

SEQ ID NO: 329689 - RNA, 24 nt, Artificial Sequence
  Synthetic
gaguucugauaagguagcuguggg

SEQ ID NO: 329690 - RNA, 18 nt, Artificial Sequence
  Synthetic
uccugaaagcaguguggg

SEQ ID NO: 329691 - RNA, 19 nt, Artificial Sequence
  Synthetic
auccugaaagcaguguggg

SEQ ID NO: 329692 - RNA, 20 nt, Artificial Sequence
  Synthetic
uauccugaaagcaguguggg

SEQ ID NO: 329693 - RNA, 21 nt, Artificial Sequence
  Synthetic
cuauccugaaagcaguguggg

SEQ ID NO: 329694 - RNA, 22 nt, Artificial Sequence
  Synthetic
acuauccugaaagcaguguggg

SEQ ID NO: 329695 - RNA, 23 nt, Artificial Sequence
  Synthetic
uacuauccugaaagcaguguggg

SEQ ID NO: 329696 - RNA, 24 nt, Artificial Sequence
  Synthetic
auacuauccugaaagcaguguggg

SEQ ID NO: 329697 - RNA, 18 nt, Artificial Sequence
  Synthetic
uuaaagauucaguguggg

SEQ ID NO: 329698 - RNA, 19 nt, Artificial Sequence
  Synthetic
uuuaaagauucaguguggg

SEQ ID NO: 329699 - RNA, 20 nt, Artificial Sequence
  Synthetic
uuuuaaagauucaguguggg

SEQ ID NO: 329700 - RNA, 21 nt, Artificial Sequence
  Synthetic
uuuuuaaagauucaguguggg

SEQ ID NO: 329701 - RNA, 22 nt, Artificial Sequence
  Synthetic
guuuuuaaagauucaguguggg

SEQ ID NO: 329702 - RNA, 23 nt, Artificial Sequence
  Synthetic
uguuuuuaaagauucaguguggg

SEQ ID NO: 329703 - RNA, 24 nt, Artificial Sequence
  Synthetic
guguuuuuaaagauucaguguggg

SEQ ID NO: 329704 - RNA, 18 nt, Artificial Sequence
  Synthetic
acucaagcuuaguguggg

SEQ ID NO: 329705 - RNA, 19 nt, Artificial Sequence
  Synthetic
uacucaagcuuaguguggg

SEQ ID NO: 329706 - RNA, 20 nt, Artificial Sequence
  Synthetic
auacucaagcuuaguguggg

SEQ ID NO: 329707 - RNA, 21 nt, Artificial Sequence
  Synthetic
gauacucaagcuuaguguggg

SEQ ID NO: 329708 - RNA, 22 nt, Artificial Sequence
  Synthetic
ggauacucaagcuuaguguggg

SEQ ID NO: 329709 - RNA, 23 nt, Artificial Sequence
  Synthetic
gggauacucaagcuuaguguggg

SEQ ID NO: 329710 - RNA, 24 nt, Artificial Sequence
  Synthetic
ugggauacucaagcuuaguguggg

SEQ ID NO: 329711 - RNA, 18 nt, Artificial Sequence
  Synthetic
acaucuggaauguguggg

SEQ ID NO: 329712 - RNA, 19 nt, Artificial Sequence
  Synthetic
cacaucuggaauguguggg

SEQ ID NO: 329713 - RNA, 20 nt, Artificial Sequence
  Synthetic
ucacaucuggaauguguggg

SEQ ID NO: 329714 - RNA, 21 nt, Artificial Sequence
  Synthetic
aucacaucuggaauguguggg

SEQ ID NO: 329715 - RNA, 22 nt, Artificial Sequence
  Synthetic
uaucacaucuggaauguguggg

SEQ ID NO: 329716 - RNA, 23 nt, Artificial Sequence
  Synthetic
uuaucacaucuggaauguguggg

SEQ ID NO: 329717 - RNA, 24 nt, Artificial Sequence
  Synthetic
uuuaucacaucuggaauguguggg

SEQ ID NO: 329718 - RNA, 18 nt, Artificial Sequence
  Synthetic
guuggauguguguguggg

SEQ ID NO: 329719 - RNA, 19 nt, Artificial Sequence
  Synthetic
uguuggauguguguguggg

SEQ ID NO: 329720 - RNA, 20 nt, Artificial Sequence
  Synthetic
guguuggauguguguguggg

SEQ ID NO: 329721 - RNA, 21 nt, Artificial Sequence
  Synthetic
gguguuggauguguguguggg

SEQ ID NO: 329722 - RNA, 22 nt, Artificial Sequence
  Synthetic
ugguguuggauguguguguggg

SEQ ID NO: 329723 - RNA, 23 nt, Artificial Sequence
  Synthetic
uugguguuggauguguguguggg

SEQ ID NO: 329724 - RNA, 24 nt, Artificial Sequence
  Synthetic
guugguguuggauguguguguggg

SEQ ID NO: 329725 - RNA, 18 nt, Artificial Sequence
  Synthetic
uuacaaggagauuguggg

SEQ ID NO: 329726 - RNA, 19 nt, Artificial Sequence
  Synthetic
uuuacaaggagauuguggg

SEQ ID NO: 329727 - RNA, 20 nt, Artificial Sequence
  Synthetic
uuuuacaaggagauuguggg

SEQ ID NO: 329728 - RNA, 21 nt, Artificial Sequence
  Synthetic
cuuuuacaaggagauuguggg

SEQ ID NO: 329729 - RNA, 22 nt, Artificial Sequence
  Synthetic
gcuuuuacaaggagauuguggg

SEQ ID NO: 329730 - RNA, 23 nt, Artificial Sequence
  Synthetic
ugcuuuuacaaggagauuguggg

SEQ ID NO: 329731 - RNA, 24 nt, Artificial Sequence
  Synthetic
cugcuuuuacaaggagauuguggg

SEQ ID NO: 329732 - RNA, 18 nt, Artificial Sequence
  Synthetic
uuaagaugagauuguggg

SEQ ID NO: 329733 - RNA, 19 nt, Artificial Sequence
  Synthetic
uuuaagaugagauuguggg

SEQ ID NO: 329734 - RNA, 20 nt, Artificial Sequence
  Synthetic
auuuaagaugagauuguggg

SEQ ID NO: 329735 - RNA, 21 nt, Artificial Sequence
  Synthetic
aauuuaagaugagauuguggg

SEQ ID NO: 329736 - RNA, 22 nt, Artificial Sequence
  Synthetic
caauuuaagaugagauuguggg

SEQ ID NO: 329737 - RNA, 23 nt, Artificial Sequence
  Synthetic
acaauuuaagaugagauuguggg

SEQ ID NO: 329738 - RNA, 24 nt, Artificial Sequence
  Synthetic
uacaauuuaagaugagauuguggg

SEQ ID NO: 329739 - RNA, 18 nt, Artificial Sequence
  Synthetic
ucuggggacuguuguggg

SEQ ID NO: 329740 - RNA, 19 nt, Artificial Sequence
  Synthetic
cucuggggacuguuguggg

SEQ ID NO: 329741 - RNA, 20 nt, Artificial Sequence
  Synthetic
acucuggggacuguuguggg

SEQ ID NO: 329742 - RNA, 21 nt, Artificial Sequence
  Synthetic
cacucuggggacuguuguggg

SEQ ID NO: 329743 - RNA, 22 nt, Artificial Sequence
  Synthetic
acacucuggggacuguuguggg

SEQ ID NO: 329744 - RNA, 23 nt, Artificial Sequence
  Synthetic
cacacucuggggacuguuguggg

SEQ ID NO: 329745 - RNA, 24 nt, Artificial Sequence
  Synthetic
ucacacucuggggacuguuguggg

SEQ ID NO: 329746 - RNA, 18 nt, Artificial Sequence
  Synthetic
accggggccuguuguggg

SEQ ID NO: 329747 - RNA, 19 nt, Artificial Sequence
  Synthetic
caccggggccuguuguggg

SEQ ID NO: 329748 - RNA, 20 nt, Artificial Sequence
  Synthetic
acaccggggccuguuguggg

SEQ ID NO: 329749 - RNA, 18 nt, Artificial Sequence
  Synthetic
auucccauguguuguggg

SEQ ID NO: 329750 - RNA, 19 nt, Artificial Sequence
  Synthetic
aauucccauguguuguggg

SEQ ID NO: 329751 - RNA, 20 nt, Artificial Sequence
  Synthetic
uaauucccauguguuguggg

SEQ ID NO: 329752 - RNA, 21 nt, Artificial Sequence
  Synthetic
guaauucccauguguuguggg

SEQ ID NO: 329753 - RNA, 22 nt, Artificial Sequence
  Synthetic
uguaauucccauguguuguggg

SEQ ID NO: 329754 - RNA, 23 nt, Artificial Sequence
  Synthetic
cuguaauucccauguguuguggg

SEQ ID NO: 329755 - RNA, 24 nt, Artificial Sequence
  Synthetic
ccuguaauucccauguguuguggg

SEQ ID NO: 329756 - RNA, 18 nt, Artificial Sequence
  Synthetic
aggaagguuuguuguggg

SEQ ID NO: 329757 - RNA, 19 nt, Artificial Sequence
  Synthetic
gaggaagguuuguuguggg

SEQ ID NO: 329758 - RNA, 20 nt, Artificial Sequence
  Synthetic
ggaggaagguuuguuguggg

SEQ ID NO: 329759 - RNA, 21 nt, Artificial Sequence
  Synthetic
uggaggaagguuuguuguggg

SEQ ID NO: 329760 - RNA, 22 nt, Artificial Sequence
  Synthetic
guggaggaagguuuguuguggg

SEQ ID NO: 329761 - RNA, 23 nt, Artificial Sequence
  Synthetic
aguggaggaagguuuguuguggg

SEQ ID NO: 329762 - RNA, 24 nt, Artificial Sequence
  Synthetic
uaguggaggaagguuuguuguggg

SEQ ID NO: 329763 - RNA, 18 nt, Artificial Sequence
  Synthetic
acugaguauggaauuggg

SEQ ID NO: 329764 - RNA, 19 nt, Artificial Sequence
  Synthetic
cacugaguauggaauuggg

SEQ ID NO: 329765 - RNA, 20 nt, Artificial Sequence
  Synthetic
ccacugaguauggaauuggg

SEQ ID NO: 329766 - RNA, 21 nt, Artificial Sequence
  Synthetic
gccacugaguauggaauuggg

SEQ ID NO: 329767 - RNA, 22 nt, Artificial Sequence
  Synthetic
ugccacugaguauggaauuggg

SEQ ID NO: 329768 - RNA, 23 nt, Artificial Sequence
  Synthetic
augccacugaguauggaauuggg

SEQ ID NO: 329769 - RNA, 24 nt, Artificial Sequence
  Synthetic
aaugccacugaguauggaauuggg

SEQ ID NO: 329770 - RNA, 18 nt, Artificial Sequence
  Synthetic
gccauauguauaauuggg

SEQ ID NO: 329771 - RNA, 19 nt, Artificial Sequence
  Synthetic
ggccauauguauaauuggg

SEQ ID NO: 329772 - RNA, 20 nt, Artificial Sequence
  Synthetic
gggccauauguauaauuggg

SEQ ID NO: 329773 - RNA, 21 nt, Artificial Sequence
  Synthetic
ugggccauauguauaauuggg

SEQ ID NO: 329774 - RNA, 22 nt, Artificial Sequence
  Synthetic
gugggccauauguauaauuggg

SEQ ID NO: 329775 - RNA, 23 nt, Artificial Sequence
  Synthetic
ugugggccauauguauaauuggg

SEQ ID NO: 329776 - RNA, 24 nt, Artificial Sequence
  Synthetic
augugggccauauguauaauuggg

SEQ ID NO: 329777 - RNA, 18 nt, Artificial Sequence
  Synthetic
uaugucguuuuaauuggg

SEQ ID NO: 329778 - RNA, 19 nt, Artificial Sequence
  Synthetic
auaugucguuuuaauuggg

SEQ ID NO: 329779 - RNA, 20 nt, Artificial Sequence
  Synthetic
gauaugucguuuuaauuggg

SEQ ID NO: 329780 - RNA, 21 nt, Artificial Sequence
  Synthetic
ggauaugucguuuuaauuggg

SEQ ID NO: 329781 - RNA, 22 nt, Artificial Sequence
  Synthetic
uggauaugucguuuuaauuggg

SEQ ID NO: 329782 - RNA, 23 nt, Artificial Sequence
  Synthetic
uuggauaugucguuuuaauuggg

SEQ ID NO: 329783 - RNA, 24 nt, Artificial Sequence
  Synthetic
uuuggauaugucguuuuaauuggg

SEQ ID NO: 329784 - RNA, 18 nt, Artificial Sequence
  Synthetic
uguuagucuagcauuggg

SEQ ID NO: 329785 - RNA, 19 nt, Artificial Sequence
  Synthetic
auguuagucuagcauuggg

SEQ ID NO: 329786 - RNA, 20 nt, Artificial Sequence
  Synthetic
uauguuagucuagcauuggg

SEQ ID NO: 329787 - RNA, 21 nt, Artificial Sequence
  Synthetic
guauguuagucuagcauuggg

SEQ ID NO: 329788 - RNA, 22 nt, Artificial Sequence
  Synthetic
uguauguuagucuagcauuggg

SEQ ID NO: 329789 - RNA, 23 nt, Artificial Sequence
  Synthetic
uuguauguuagucuagcauuggg

SEQ ID NO: 329790 - RNA, 24 nt, Artificial Sequence
  Synthetic
auuguauguuagucuagcauuggg

SEQ ID NO: 329791 - RNA, 18 nt, Artificial Sequence
  Synthetic
aaagggagcaggauuggg

SEQ ID NO: 329792 - RNA, 19 nt, Artificial Sequence
  Synthetic
gaaagggagcaggauuggg

SEQ ID NO: 329793 - RNA, 20 nt, Artificial Sequence
  Synthetic
ggaaagggagcaggauuggg

SEQ ID NO: 329794 - RNA, 21 nt, Artificial Sequence
  Synthetic
aggaaagggagcaggauuggg

SEQ ID NO: 329795 - RNA, 22 nt, Artificial Sequence
  Synthetic
aaggaaagggagcaggauuggg

SEQ ID NO: 329796 - RNA, 23 nt, Artificial Sequence
  Synthetic
aaaggaaagggagcaggauuggg

SEQ ID NO: 329797 - RNA, 24 nt, Artificial Sequence
  Synthetic
gaaaggaaagggagcaggauuggg

SEQ ID NO: 329798 - RNA, 18 nt, Artificial Sequence
  Synthetic
guggguaucaggauuggg

SEQ ID NO: 329799 - RNA, 19 nt, Artificial Sequence
  Synthetic
aguggguaucaggauuggg

SEQ ID NO: 329800 - RNA, 20 nt, Artificial Sequence
  Synthetic
gaguggguaucaggauuggg

SEQ ID NO: 329801 - RNA, 21 nt, Artificial Sequence
  Synthetic
ugaguggguaucaggauuggg

SEQ ID NO: 329802 - RNA, 22 nt, Artificial Sequence
  Synthetic
gugaguggguaucaggauuggg

SEQ ID NO: 329803 - RNA, 23 nt, Artificial Sequence
  Synthetic
ggugaguggguaucaggauuggg

SEQ ID NO: 329804 - RNA, 24 nt, Artificial Sequence
  Synthetic
gggugaguggguaucaggauuggg

SEQ ID NO: 329805 - RNA, 18 nt, Artificial Sequence
  Synthetic
auaguucaagugauuggg

SEQ ID NO: 329806 - RNA, 19 nt, Artificial Sequence
  Synthetic
uauaguucaagugauuggg

SEQ ID NO: 329807 - RNA, 20 nt, Artificial Sequence
  Synthetic
guauaguucaagugauuggg

SEQ ID NO: 329808 - RNA, 21 nt, Artificial Sequence
  Synthetic
aguauaguucaagugauuggg

SEQ ID NO: 329809 - RNA, 22 nt, Artificial Sequence
  Synthetic
aaguauaguucaagugauuggg

SEQ ID NO: 329810 - RNA, 23 nt, Artificial Sequence
  Synthetic
aaaguauaguucaagugauuggg

SEQ ID NO: 329811 - RNA, 24 nt, Artificial Sequence
  Synthetic
aaaaguauaguucaagugauuggg

SEQ ID NO: 329812 - RNA, 18 nt, Artificial Sequence
  Synthetic
gaaggaggcaguauuggg

SEQ ID NO: 329813 - RNA, 19 nt, Artificial Sequence
  Synthetic
ugaaggaggcaguauuggg

SEQ ID NO: 329814 - RNA, 20 nt, Artificial Sequence
  Synthetic
gugaaggaggcaguauuggg

SEQ ID NO: 329815 - RNA, 21 nt, Artificial Sequence
  Synthetic
agugaaggaggcaguauuggg

SEQ ID NO: 329816 - RNA, 22 nt, Artificial Sequence
  Synthetic
aagugaaggaggcaguauuggg

SEQ ID NO: 329817 - RNA, 23 nt, Artificial Sequence
  Synthetic
gaagugaaggaggcaguauuggg

SEQ ID NO: 329818 - RNA, 24 nt, Artificial Sequence
  Synthetic
ggaagugaaggaggcaguauuggg

SEQ ID NO: 329819 - RNA, 18 nt, Artificial Sequence
  Synthetic
ggucugcugacacuuggg

SEQ ID NO: 329820 - RNA, 19 nt, Artificial Sequence
  Synthetic
uggucugcugacacuuggg

SEQ ID NO: 329821 - RNA, 20 nt, Artificial Sequence
  Synthetic
guggucugcugacacuuggg

SEQ ID NO: 329822 - RNA, 21 nt, Artificial Sequence
  Synthetic
aguggucugcugacacuuggg

SEQ ID NO: 329823 - RNA, 22 nt, Artificial Sequence
  Synthetic
caguggucugcugacacuuggg

SEQ ID NO: 329824 - RNA, 23 nt, Artificial Sequence
  Synthetic
acaguggucugcugacacuuggg

SEQ ID NO: 329825 - RNA, 24 nt, Artificial Sequence
  Synthetic
cacaguggucugcugacacuuggg

SEQ ID NO: 329826 - RNA, 18 nt, Artificial Sequence
  Synthetic
ccuucuucuccccuuggg

SEQ ID NO: 329827 - RNA, 19 nt, Artificial Sequence
  Synthetic
accuucuucuccccuuggg

SEQ ID NO: 329828 - RNA, 20 nt, Artificial Sequence
  Synthetic
caccuucuucuccccuuggg

SEQ ID NO: 329829 - RNA, 21 nt, Artificial Sequence
  Synthetic
ccaccuucuucuccccuuggg

SEQ ID NO: 329830 - RNA, 22 nt, Artificial Sequence
  Synthetic
cccaccuucuucuccccuuggg

SEQ ID NO: 329831 - RNA, 23 nt, Artificial Sequence
  Synthetic
ucccaccuucuucuccccuuggg

SEQ ID NO: 329832 - RNA, 24 nt, Artificial Sequence
  Synthetic
aucccaccuucuucuccccuuggg

SEQ ID NO: 329833 - RNA, 18 nt, Artificial Sequence
  Synthetic
agauuuuaaugccuuggg

SEQ ID NO: 329834 - RNA, 19 nt, Artificial Sequence
  Synthetic
cagauuuuaaugccuuggg

SEQ ID NO: 329835 - RNA, 20 nt, Artificial Sequence
  Synthetic
gcagauuuuaaugccuuggg

SEQ ID NO: 329836 - RNA, 21 nt, Artificial Sequence
  Synthetic
ugcagauuuuaaugccuuggg

SEQ ID NO: 329837 - RNA, 22 nt, Artificial Sequence
  Synthetic
augcagauuuuaaugccuuggg

SEQ ID NO: 329838 - RNA, 23 nt, Artificial Sequence
  Synthetic
caugcagauuuuaaugccuuggg

SEQ ID NO: 329839 - RNA, 24 nt, Artificial Sequence
  Synthetic
ucaugcagauuuuaaugccuuggg

SEQ ID NO: 329840 - RNA, 18 nt, Artificial Sequence
  Synthetic
gaagcagaguugcuuggg

SEQ ID NO: 329841 - RNA, 19 nt, Artificial Sequence
  Synthetic
ggaagcagaguugcuuggg

SEQ ID NO: 329842 - RNA, 20 nt, Artificial Sequence
  Synthetic
aggaagcagaguugcuuggg

SEQ ID NO: 329843 - RNA, 21 nt, Artificial Sequence
  Synthetic
uaggaagcagaguugcuuggg

SEQ ID NO: 329844 - RNA, 22 nt, Artificial Sequence
  Synthetic
auaggaagcagaguugcuuggg

SEQ ID NO: 329845 - RNA, 23 nt, Artificial Sequence
  Synthetic
aauaggaagcagaguugcuuggg

SEQ ID NO: 329846 - RNA, 24 nt, Artificial Sequence
  Synthetic
gaauaggaagcagaguugcuuggg

SEQ ID NO: 329847 - RNA, 18 nt, Artificial Sequence
  Synthetic
guaaauauggcucuuggg

SEQ ID NO: 329848 - RNA, 19 nt, Artificial Sequence
  Synthetic
uguaaauauggcucuuggg

SEQ ID NO: 329849 - RNA, 20 nt, Artificial Sequence
  Synthetic
uuguaaauauggcucuuggg

SEQ ID NO: 329850 - RNA, 21 nt, Artificial Sequence
  Synthetic
guuguaaauauggcucuuggg

SEQ ID NO: 329851 - RNA, 22 nt, Artificial Sequence
  Synthetic
aguuguaaauauggcucuuggg

SEQ ID NO: 329852 - RNA, 23 nt, Artificial Sequence
  Synthetic
aaguuguaaauauggcucuuggg

SEQ ID NO: 329853 - RNA, 24 nt, Artificial Sequence
  Synthetic
aaaguuguaaauauggcucuuggg

SEQ ID NO: 329854 - RNA, 18 nt, Artificial Sequence
  Synthetic
aaauuuucuggucuuggg

SEQ ID NO: 329855 - RNA, 19 nt, Artificial Sequence
  Synthetic
uaaauuuucuggucuuggg

SEQ ID NO: 329856 - RNA, 20 nt, Artificial Sequence
  Synthetic
auaaauuuucuggucuuggg

SEQ ID NO: 329857 - RNA, 21 nt, Artificial Sequence
  Synthetic
aauaaauuuucuggucuuggg

SEQ ID NO: 329858 - RNA, 22 nt, Artificial Sequence
  Synthetic
uaauaaauuuucuggucuuggg

SEQ ID NO: 329859 - RNA, 23 nt, Artificial Sequence
  Synthetic
uuaauaaauuuucuggucuuggg

SEQ ID NO: 329860 - RNA, 24 nt, Artificial Sequence
  Synthetic
cuuaauaaauuuucuggucuuggg

SEQ ID NO: 329861 - RNA, 18 nt, Artificial Sequence
  Synthetic
cagaggguggagguuggg

SEQ ID NO: 329862 - RNA, 19 nt, Artificial Sequence
  Synthetic
ucagaggguggagguuggg

SEQ ID NO: 329863 - RNA, 20 nt, Artificial Sequence
  Synthetic
aucagaggguggagguuggg

SEQ ID NO: 329864 - RNA, 21 nt, Artificial Sequence
  Synthetic
uaucagaggguggagguuggg

SEQ ID NO: 329865 - RNA, 22 nt, Artificial Sequence
  Synthetic
cuaucagaggguggagguuggg

SEQ ID NO: 329866 - RNA, 23 nt, Artificial Sequence
  Synthetic
ccuaucagaggguggagguuggg

SEQ ID NO: 329867 - RNA, 24 nt, Artificial Sequence
  Synthetic
gccuaucagaggguggagguuggg

SEQ ID NO: 329868 - RNA, 18 nt, Artificial Sequence
  Synthetic
gggaaguugaggguuggg

SEQ ID NO: 329869 - RNA, 19 nt, Artificial Sequence
  Synthetic
ugggaaguugaggguuggg

SEQ ID NO: 329870 - RNA, 20 nt, Artificial Sequence
  Synthetic
uugggaaguugaggguuggg

SEQ ID NO: 329871 - RNA, 21 nt, Artificial Sequence
  Synthetic
cuugggaaguugaggguuggg

SEQ ID NO: 329872 - RNA, 22 nt, Artificial Sequence
  Synthetic
acuugggaaguugaggguuggg

SEQ ID NO: 329873 - RNA, 23 nt, Artificial Sequence
  Synthetic
uacuugggaaguugaggguuggg

SEQ ID NO: 329874 - RNA, 24 nt, Artificial Sequence
  Synthetic
uuacuugggaaguugaggguuggg

SEQ ID NO: 329875 - RNA, 18 nt, Artificial Sequence
  Synthetic
cacaguggugggguuggg

SEQ ID NO: 329876 - RNA, 19 nt, Artificial Sequence
  Synthetic
acacaguggugggguuggg

SEQ ID NO: 329877 - RNA, 20 nt, Artificial Sequence
  Synthetic
cacacaguggugggguuggg

SEQ ID NO: 329878 - RNA, 21 nt, Artificial Sequence
  Synthetic
gcacacaguggugggguuggg

SEQ ID NO: 329879 - RNA, 22 nt, Artificial Sequence
  Synthetic
cgcacacaguggugggguuggg

SEQ ID NO: 329880 - RNA, 23 nt, Artificial Sequence
  Synthetic
ccgcacacaguggugggguuggg

SEQ ID NO: 329881 - RNA, 24 nt, Artificial Sequence
  Synthetic
gccgcacacaguggugggguuggg

SEQ ID NO: 329882 - RNA, 18 nt, Artificial Sequence
  Synthetic
gggugagguaugguuggg

SEQ ID NO: 329883 - RNA, 19 nt, Artificial Sequence
  Synthetic
agggugagguaugguuggg

SEQ ID NO: 329884 - RNA, 20 nt, Artificial Sequence
  Synthetic
uagggugagguaugguuggg

SEQ ID NO: 329885 - RNA, 21 nt, Artificial Sequence
  Synthetic
auagggugagguaugguuggg

SEQ ID NO: 329886 - RNA, 22 nt, Artificial Sequence
  Synthetic
cauagggugagguaugguuggg

SEQ ID NO: 329887 - RNA, 23 nt, Artificial Sequence
  Synthetic
gcauagggugagguaugguuggg

SEQ ID NO: 329888 - RNA, 24 nt, Artificial Sequence
  Synthetic
ugcauagggugagguaugguuggg

SEQ ID NO: 329889 - RNA, 18 nt, Artificial Sequence
  Synthetic
guauccucguauguuggg

SEQ ID NO: 329890 - RNA, 19 nt, Artificial Sequence
  Synthetic
uguauccucguauguuggg

SEQ ID NO: 329891 - RNA, 20 nt, Artificial Sequence
  Synthetic
cuguauccucguauguuggg

SEQ ID NO: 329892 - RNA, 21 nt, Artificial Sequence
  Synthetic
gcuguauccucguauguuggg

SEQ ID NO: 329893 - RNA, 22 nt, Artificial Sequence
  Synthetic
ugcuguauccucguauguuggg

SEQ ID NO: 329894 - RNA, 23 nt, Artificial Sequence
  Synthetic
uugcuguauccucguauguuggg

SEQ ID NO: 329895 - RNA, 24 nt, Artificial Sequence
  Synthetic
cuugcuguauccucguauguuggg

SEQ ID NO: 329896 - RNA, 18 nt, Artificial Sequence
  Synthetic
gacuuagauuauguuggg

SEQ ID NO: 329897 - RNA, 19 nt, Artificial Sequence
  Synthetic
agacuuagauuauguuggg

SEQ ID NO: 329898 - RNA, 20 nt, Artificial Sequence
  Synthetic
aagacuuagauuauguuggg

SEQ ID NO: 329899 - RNA, 21 nt, Artificial Sequence
  Synthetic
caagacuuagauuauguuggg

SEQ ID NO: 329900 - RNA, 22 nt, Artificial Sequence
  Synthetic
ccaagacuuagauuauguuggg

SEQ ID NO: 329901 - RNA, 23 nt, Artificial Sequence
  Synthetic
cccaagacuuagauuauguuggg

SEQ ID NO: 329902 - RNA, 24 nt, Artificial Sequence
  Synthetic
acccaagacuuagauuauguuggg

SEQ ID NO: 329903 - RNA, 18 nt, Artificial Sequence
  Synthetic
uauuguguguguguuggg

SEQ ID NO: 329904 - RNA, 19 nt, Artificial Sequence
  Synthetic
cuauuguguguguguuggg

SEQ ID NO: 329905 - RNA, 20 nt, Artificial Sequence
  Synthetic
acuauuguguguguguuggg

SEQ ID NO: 329906 - RNA, 21 nt, Artificial Sequence
  Synthetic
uacuauuguguguguguuggg

SEQ ID NO: 329907 - RNA, 22 nt, Artificial Sequence
  Synthetic
uuacuauuguguguguguuggg

SEQ ID NO: 329908 - RNA, 23 nt, Artificial Sequence
  Synthetic
guuacuauuguguguguguuggg

SEQ ID NO: 329909 - RNA, 24 nt, Artificial Sequence
  Synthetic
aguuacuauuguguguguguuggg

SEQ ID NO: 329910 - RNA, 18 nt, Artificial Sequence
  Synthetic
ccucauaggauuguuggg

SEQ ID NO: 329911 - RNA, 19 nt, Artificial Sequence
  Synthetic
gccucauaggauuguuggg

SEQ ID NO: 329912 - RNA, 20 nt, Artificial Sequence
  Synthetic
ggccucauaggauuguuggg

SEQ ID NO: 329913 - RNA, 21 nt, Artificial Sequence
  Synthetic
uggccucauaggauuguuggg

SEQ ID NO: 329914 - RNA, 22 nt, Artificial Sequence
  Synthetic
cuggccucauaggauuguuggg

SEQ ID NO: 329915 - RNA, 23 nt, Artificial Sequence
  Synthetic
acuggccucauaggauuguuggg

SEQ ID NO: 329916 - RNA, 24 nt, Artificial Sequence
  Synthetic
uacuggccucauaggauuguuggg

SEQ ID NO: 329917 - RNA, 18 nt, Artificial Sequence
  Synthetic
uauggccuccuuguuggg

SEQ ID NO: 329918 - RNA, 19 nt, Artificial Sequence
  Synthetic
auauggccuccuuguuggg

SEQ ID NO: 329919 - RNA, 20 nt, Artificial Sequence
  Synthetic
aauauggccuccuuguuggg

SEQ ID NO: 329920 - RNA, 21 nt, Artificial Sequence
  Synthetic
aaauauggccuccuuguuggg

SEQ ID NO: 329921 - RNA, 22 nt, Artificial Sequence
  Synthetic
uaaauauggccuccuuguuggg

SEQ ID NO: 329922 - RNA, 23 nt, Artificial Sequence
  Synthetic
cuaaauauggccuccuuguuggg

SEQ ID NO: 329923 - RNA, 24 nt, Artificial Sequence
  Synthetic
ucuaaauauggccuccuuguuggg

SEQ ID NO: 329924 - RNA, 18 nt, Artificial Sequence
  Synthetic
ccugaagccguuguuggg

SEQ ID NO: 329925 - RNA, 19 nt, Artificial Sequence
  Synthetic
accugaagccguuguuggg

SEQ ID NO: 329926 - RNA, 20 nt, Artificial Sequence
  Synthetic
gaccugaagccguuguuggg

SEQ ID NO: 329927 - RNA, 21 nt, Artificial Sequence
  Synthetic
agaccugaagccguuguuggg

SEQ ID NO: 329928 - RNA, 22 nt, Artificial Sequence
  Synthetic
uagaccugaagccguuguuggg

SEQ ID NO: 329929 - RNA, 23 nt, Artificial Sequence
  Synthetic
cuagaccugaagccguuguuggg

SEQ ID NO: 329930 - RNA, 24 nt, Artificial Sequence
  Synthetic
ccuagaccugaagccguuguuggg

SEQ ID NO: 329931 - RNA, 18 nt, Artificial Sequence
  Synthetic
ccugugggaaaauuuggg

SEQ ID NO: 329932 - RNA, 19 nt, Artificial Sequence
  Synthetic
gccugugggaaaauuuggg

SEQ ID NO: 329933 - RNA, 20 nt, Artificial Sequence
  Synthetic
ggccugugggaaaauuuggg

SEQ ID NO: 329934 - RNA, 21 nt, Artificial Sequence
  Synthetic
uggccugugggaaaauuuggg

SEQ ID NO: 329935 - RNA, 22 nt, Artificial Sequence
  Synthetic
guggccugugggaaaauuuggg

SEQ ID NO: 329936 - RNA, 23 nt, Artificial Sequence
  Synthetic
uguggccugugggaaaauuuggg

SEQ ID NO: 329937 - RNA, 24 nt, Artificial Sequence
  Synthetic
guguggccugugggaaaauuuggg

SEQ ID NO: 329938 - RNA, 18 nt, Artificial Sequence
  Synthetic
aaaggagacgcauuuggg

SEQ ID NO: 329939 - RNA, 19 nt, Artificial Sequence
  Synthetic
gaaaggagacgcauuuggg

SEQ ID NO: 329940 - RNA, 20 nt, Artificial Sequence
  Synthetic
ggaaaggagacgcauuuggg

SEQ ID NO: 329941 - RNA, 21 nt, Artificial Sequence
  Synthetic
gggaaaggagacgcauuuggg

SEQ ID NO: 329942 - RNA, 22 nt, Artificial Sequence
  Synthetic
ggggaaaggagacgcauuuggg

SEQ ID NO: 329943 - RNA, 23 nt, Artificial Sequence
  Synthetic
gggggaaaggagacgcauuuggg

SEQ ID NO: 329944 - RNA, 24 nt, Artificial Sequence
  Synthetic
agggggaaaggagacgcauuuggg

SEQ ID NO: 329945 - RNA, 18 nt, Artificial Sequence
  Synthetic
uucagaaugagauuuggg

SEQ ID NO: 329946 - RNA, 19 nt, Artificial Sequence
  Synthetic
auucagaaugagauuuggg

SEQ ID NO: 329947 - RNA, 20 nt, Artificial Sequence
  Synthetic
aauucagaaugagauuuggg

SEQ ID NO: 329948 - RNA, 21 nt, Artificial Sequence
  Synthetic
caauucagaaugagauuuggg

SEQ ID NO: 329949 - RNA, 22 nt, Artificial Sequence
  Synthetic
acaauucagaaugagauuuggg

SEQ ID NO: 329950 - RNA, 23 nt, Artificial Sequence
  Synthetic
uacaauucagaaugagauuuggg

SEQ ID NO: 329951 - RNA, 24 nt, Artificial Sequence
  Synthetic
cuacaauucagaaugagauuuggg

SEQ ID NO: 329952 - RNA, 18 nt, Artificial Sequence
  Synthetic
uucaacaugagauuuggg

SEQ ID NO: 329953 - RNA, 19 nt, Artificial Sequence
  Synthetic
auucaacaugagauuuggg

SEQ ID NO: 329954 - RNA, 20 nt, Artificial Sequence
  Synthetic
aauucaacaugagauuuggg

SEQ ID NO: 329955 - RNA, 21 nt, Artificial Sequence
  Synthetic
gaauucaacaugagauuuggg

SEQ ID NO: 329956 - RNA, 22 nt, Artificial Sequence
  Synthetic
ggaauucaacaugagauuuggg

SEQ ID NO: 329957 - RNA, 23 nt, Artificial Sequence
  Synthetic
gggaauucaacaugagauuuggg

SEQ ID NO: 329958 - RNA, 24 nt, Artificial Sequence
  Synthetic
ugggaauucaacaugagauuuggg

SEQ ID NO: 329959 - RNA, 18 nt, Artificial Sequence
  Synthetic
gaugacaugagauuuggg

SEQ ID NO: 329960 - RNA, 19 nt, Artificial Sequence
  Synthetic
ugaugacaugagauuuggg

SEQ ID NO: 329961 - RNA, 20 nt, Artificial Sequence
  Synthetic
gugaugacaugagauuuggg

SEQ ID NO: 329962 - RNA, 21 nt, Artificial Sequence
  Synthetic
ugugaugacaugagauuuggg

SEQ ID NO: 329963 - RNA, 22 nt, Artificial Sequence
  Synthetic
augugaugacaugagauuuggg

SEQ ID NO: 329964 - RNA, 23 nt, Artificial Sequence
  Synthetic
aaugugaugacaugagauuuggg

SEQ ID NO: 329965 - RNA, 24 nt, Artificial Sequence
  Synthetic
aaaugugaugacaugagauuuggg

SEQ ID NO: 329966 - RNA, 18 nt, Artificial Sequence
  Synthetic
uucaagaugagauuuggg

SEQ ID NO: 329967 - RNA, 19 nt, Artificial Sequence
  Synthetic
auucaagaugagauuuggg

SEQ ID NO: 329968 - RNA, 20 nt, Artificial Sequence
  Synthetic
aauucaagaugagauuuggg

SEQ ID NO: 329969 - RNA, 21 nt, Artificial Sequence
  Synthetic
caauucaagaugagauuuggg

SEQ ID NO: 329970 - RNA, 22 nt, Artificial Sequence
  Synthetic
acaauucaagaugagauuuggg

SEQ ID NO: 329971 - RNA, 23 nt, Artificial Sequence
  Synthetic
uacaauucaagaugagauuuggg

SEQ ID NO: 329972 - RNA, 24 nt, Artificial Sequence
  Synthetic
uuacaauucaagaugagauuuggg

SEQ ID NO: 329973 - RNA, 22 nt, Artificial Sequence
  Synthetic
ggaauucaagaugagauuuggg

SEQ ID NO: 329974 - RNA, 23 nt, Artificial Sequence
  Synthetic
aggaauucaagaugagauuuggg

SEQ ID NO: 329975 - RNA, 24 nt, Artificial Sequence
  Synthetic
uaggaauucaagaugagauuuggg

SEQ ID NO: 329976 - RNA, 19 nt, Artificial Sequence
  Synthetic
uuucaagaugagauuuggg

SEQ ID NO: 329977 - RNA, 20 nt, Artificial Sequence
  Synthetic
auuucaagaugagauuuggg

SEQ ID NO: 329978 - RNA, 21 nt, Artificial Sequence
  Synthetic
cauuucaagaugagauuuggg

SEQ ID NO: 329979 - RNA, 22 nt, Artificial Sequence
  Synthetic
acauuucaagaugagauuuggg

SEQ ID NO: 329980 - RNA, 23 nt, Artificial Sequence
  Synthetic
uacauuucaagaugagauuuggg

SEQ ID NO: 329981 - RNA, 24 nt, Artificial Sequence
  Synthetic
uuacauuucaagaugagauuuggg

SEQ ID NO: 329982 - RNA, 18 nt, Artificial Sequence
  Synthetic
uuuaauaugagauuuggg

SEQ ID NO: 329983 - RNA, 19 nt, Artificial Sequence
  Synthetic
auuuaauaugagauuuggg

SEQ ID NO: 329984 - RNA, 20 nt, Artificial Sequence
  Synthetic
aauuuaauaugagauuuggg

SEQ ID NO: 329985 - RNA, 21 nt, Artificial Sequence
  Synthetic
caauuuaauaugagauuuggg

SEQ ID NO: 329986 - RNA, 22 nt, Artificial Sequence
  Synthetic
acaauuuaauaugagauuuggg

SEQ ID NO: 329987 - RNA, 23 nt, Artificial Sequence
  Synthetic
uacaauuuaauaugagauuuggg

SEQ ID NO: 329988 - RNA, 24 nt, Artificial Sequence
  Synthetic
uuacaauuuaauaugagauuuggg

SEQ ID NO: 329989 - RNA, 18 nt, Artificial Sequence
  Synthetic
uucaagacgggauuuggg

SEQ ID NO: 329990 - RNA, 19 nt, Artificial Sequence
  Synthetic
auucaagacgggauuuggg

SEQ ID NO: 329991 - RNA, 20 nt, Artificial Sequence
  Synthetic
aauucaagacgggauuuggg

SEQ ID NO: 329992 - RNA, 21 nt, Artificial Sequence
  Synthetic
caauucaagacgggauuuggg

SEQ ID NO: 329993 - RNA, 22 nt, Artificial Sequence
  Synthetic
gcaauucaagacgggauuuggg

SEQ ID NO: 329994 - RNA, 23 nt, Artificial Sequence
  Synthetic
ugcaauucaagacgggauuuggg

SEQ ID NO: 329995 - RNA, 24 nt, Artificial Sequence
  Synthetic
cugcaauucaagacgggauuuggg

SEQ ID NO: 329996 - RNA, 18 nt, Artificial Sequence
  Synthetic
auauucuguugauuuggg

SEQ ID NO: 329997 - RNA, 19 nt, Artificial Sequence
  Synthetic
uauauucuguugauuuggg

SEQ ID NO: 329998 - RNA, 20 nt, Artificial Sequence
  Synthetic
guauauucuguugauuuggg

SEQ ID NO: 329999 - RNA, 21 nt, Artificial Sequence
  Synthetic
uguauauucuguugauuuggg

SEQ ID NO: 330000 - RNA, 22 nt, Artificial Sequence
  Synthetic
auguauauucuguugauuuggg

SEQ ID NO: 330001 - RNA, 23 nt, Artificial Sequence
  Synthetic
aauguauauucuguugauuuggg

SEQ ID NO: 330002 - RNA, 24 nt, Artificial Sequence
  Synthetic
aaauguauauucuguugauuuggg

SEQ ID NO: 330003 - RNA, 18 nt, Artificial Sequence
  Synthetic
gaugucccucacuuuggg

SEQ ID NO: 330004 - RNA, 19 nt, Artificial Sequence
  Synthetic
agaugucccucacuuuggg

SEQ ID NO: 330005 - RNA, 20 nt, Artificial Sequence
  Synthetic
aagaugucccucacuuuggg

SEQ ID NO: 330006 - RNA, 21 nt, Artificial Sequence
  Synthetic
aaagaugucccucacuuuggg

SEQ ID NO: 330007 - RNA, 22 nt, Artificial Sequence
  Synthetic
aaaagaugucccucacuuuggg

SEQ ID NO: 330008 - RNA, 23 nt, Artificial Sequence
  Synthetic
uaaaagaugucccucacuuuggg

SEQ ID NO: 330009 - RNA, 24 nt, Artificial Sequence
  Synthetic
auaaaagaugucccucacuuuggg

SEQ ID NO: 330010 - RNA, 18 nt, Artificial Sequence
  Synthetic
ugacuacugugcuuuggg

SEQ ID NO: 330011 - RNA, 19 nt, Artificial Sequence
  Synthetic
augacuacugugcuuuggg

SEQ ID NO: 330012 - RNA, 20 nt, Artificial Sequence
  Synthetic
aaugacuacugugcuuuggg

SEQ ID NO: 330013 - RNA, 21 nt, Artificial Sequence
  Synthetic
uaaugacuacugugcuuuggg

SEQ ID NO: 330014 - RNA, 22 nt, Artificial Sequence
  Synthetic
uuaaugacuacugugcuuuggg

SEQ ID NO: 330015 - RNA, 23 nt, Artificial Sequence
  Synthetic
auuaaugacuacugugcuuuggg

SEQ ID NO: 330016 - RNA, 24 nt, Artificial Sequence
  Synthetic
aauuaaugacuacugugcuuuggg

SEQ ID NO: 330017 - RNA, 18 nt, Artificial Sequence
  Synthetic
uuuaagauuuucuuuggg

SEQ ID NO: 330018 - RNA, 19 nt, Artificial Sequence
  Synthetic
auuuaagauuuucuuuggg

SEQ ID NO: 330019 - RNA, 20 nt, Artificial Sequence
  Synthetic
aauuuaagauuuucuuuggg

SEQ ID NO: 330020 - RNA, 21 nt, Artificial Sequence
  Synthetic
gaauuuaagauuuucuuuggg

SEQ ID NO: 330021 - RNA, 22 nt, Artificial Sequence
  Synthetic
ggaauuuaagauuuucuuuggg

SEQ ID NO: 330022 - RNA, 23 nt, Artificial Sequence
  Synthetic
aggaauuuaagauuuucuuuggg

SEQ ID NO: 330023 - RNA, 24 nt, Artificial Sequence
  Synthetic
gaggaauuuaagauuuucuuuggg

SEQ ID NO: 330024 - RNA, 18 nt, Artificial Sequence
  Synthetic
uuuuaccauaaguuuggg

SEQ ID NO: 330025 - RNA, 19 nt, Artificial Sequence
  Synthetic
auuuuaccauaaguuuggg

SEQ ID NO: 330026 - RNA, 20 nt, Artificial Sequence
  Synthetic
aauuuuaccauaaguuuggg

SEQ ID NO: 330027 - RNA, 21 nt, Artificial Sequence
  Synthetic
aaauuuuaccauaaguuuggg

SEQ ID NO: 330028 - RNA, 22 nt, Artificial Sequence
  Synthetic
uaaauuuuaccauaaguuuggg

SEQ ID NO: 330029 - RNA, 23 nt, Artificial Sequence
  Synthetic
uuaaauuuuaccauaaguuuggg

SEQ ID NO: 330030 - RNA, 24 nt, Artificial Sequence
  Synthetic
auuaaauuuuaccauaaguuuggg

SEQ ID NO: 330031 - RNA, 18 nt, Artificial Sequence
  Synthetic
uuucugcaauaguuuggg

SEQ ID NO: 330032 - RNA, 19 nt, Artificial Sequence
  Synthetic
uuuucugcaauaguuuggg

SEQ ID NO: 330033 - RNA, 20 nt, Artificial Sequence
  Synthetic
cuuuucugcaauaguuuggg

SEQ ID NO: 330034 - RNA, 21 nt, Artificial Sequence
  Synthetic
ucuuuucugcaauaguuuggg

SEQ ID NO: 330035 - RNA, 22 nt, Artificial Sequence
  Synthetic
aucuuuucugcaauaguuuggg

SEQ ID NO: 330036 - RNA, 23 nt, Artificial Sequence
  Synthetic
gaucuuuucugcaauaguuuggg

SEQ ID NO: 330037 - RNA, 24 nt, Artificial Sequence
  Synthetic
agaucuuuucugcaauaguuuggg

SEQ ID NO: 330038 - RNA, 18 nt, Artificial Sequence
  Synthetic
uuaauaaugauguuuggg

SEQ ID NO: 330039 - RNA, 19 nt, Artificial Sequence
  Synthetic
uuuaauaaugauguuuggg

SEQ ID NO: 330040 - RNA, 20 nt, Artificial Sequence
  Synthetic
guuuaauaaugauguuuggg

SEQ ID NO: 330041 - RNA, 21 nt, Artificial Sequence
  Synthetic
aguuuaauaaugauguuuggg

SEQ ID NO: 330042 - RNA, 22 nt, Artificial Sequence
  Synthetic
caguuuaauaaugauguuuggg

SEQ ID NO: 330043 - RNA, 23 nt, Artificial Sequence
  Synthetic
ucaguuuaauaaugauguuuggg

SEQ ID NO: 330044 - RNA, 24 nt, Artificial Sequence
  Synthetic
aucaguuuaauaaugauguuuggg

SEQ ID NO: 330045 - RNA, 18 nt, Artificial Sequence
  Synthetic
gcuuaaggagauuuuggg

SEQ ID NO: 330046 - RNA, 19 nt, Artificial Sequence
  Synthetic
agcuuaaggagauuuuggg

SEQ ID NO: 330047 - RNA, 20 nt, Artificial Sequence
  Synthetic
cagcuuaaggagauuuuggg

SEQ ID NO: 330048 - RNA, 21 nt, Artificial Sequence
  Synthetic
ucagcuuaaggagauuuuggg

SEQ ID NO: 330049 - RNA, 22 nt, Artificial Sequence
  Synthetic
aucagcuuaaggagauuuuggg

SEQ ID NO: 330050 - RNA, 23 nt, Artificial Sequence
  Synthetic
uaucagcuuaaggagauuuuggg

SEQ ID NO: 330051 - RNA, 24 nt, Artificial Sequence
  Synthetic
uuaucagcuuaaggagauuuuggg

SEQ ID NO: 330052 - RNA, 18 nt, Artificial Sequence
  Synthetic
ggaguaacauauuuuggg

SEQ ID NO: 330053 - RNA, 19 nt, Artificial Sequence
  Synthetic
aggaguaacauauuuuggg

SEQ ID NO: 330054 - RNA, 20 nt, Artificial Sequence
  Synthetic
caggaguaacauauuuuggg

SEQ ID NO: 330055 - RNA, 21 nt, Artificial Sequence
  Synthetic
ccaggaguaacauauuuuggg

SEQ ID NO: 330056 - RNA, 22 nt, Artificial Sequence
  Synthetic
uccaggaguaacauauuuuggg

SEQ ID NO: 330057 - RNA, 23 nt, Artificial Sequence
  Synthetic
cuccaggaguaacauauuuuggg

SEQ ID NO: 330058 - RNA, 24 nt, Artificial Sequence
  Synthetic
gcuccaggaguaacauauuuuggg

SEQ ID NO: 330059 - RNA, 18 nt, Artificial Sequence
  Synthetic
aguauucuagcuuuuggg

SEQ ID NO: 330060 - RNA, 19 nt, Artificial Sequence
  Synthetic
gaguauucuagcuuuuggg

SEQ ID NO: 330061 - RNA, 20 nt, Artificial Sequence
  Synthetic
ugaguauucuagcuuuuggg

SEQ ID NO: 330062 - RNA, 21 nt, Artificial Sequence
  Synthetic
gugaguauucuagcuuuuggg

SEQ ID NO: 330063 - RNA, 22 nt, Artificial Sequence
  Synthetic
ugugaguauucuagcuuuuggg

SEQ ID NO: 330064 - RNA, 23 nt, Artificial Sequence
  Synthetic
gugugaguauucuagcuuuuggg

SEQ ID NO: 330065 - RNA, 24 nt, Artificial Sequence
  Synthetic
ugugugaguauucuagcuuuuggg

SEQ ID NO: 330066 - RNA, 18 nt, Artificial Sequence
  Synthetic
uggaaaguauguuuuggg

SEQ ID NO: 330067 - RNA, 19 nt, Artificial Sequence
  Synthetic
cuggaaaguauguuuuggg

SEQ ID NO: 330068 - RNA, 20 nt, Artificial Sequence
  Synthetic
acuggaaaguauguuuuggg

SEQ ID NO: 330069 - RNA, 21 nt, Artificial Sequence
  Synthetic
uacuggaaaguauguuuuggg

SEQ ID NO: 330070 - RNA, 22 nt, Artificial Sequence
  Synthetic
auacuggaaaguauguuuuggg

SEQ ID NO: 330071 - RNA, 23 nt, Artificial Sequence
  Synthetic
gauacuggaaaguauguuuuggg

SEQ ID NO: 330072 - RNA, 24 nt, Artificial Sequence
  Synthetic
agauacuggaaaguauguuuuggg

SEQ ID NO: 330073 - RNA, 18 nt, Artificial Sequence
  Synthetic
uucaagaagauuuuuggg

SEQ ID NO: 330074 - RNA, 19 nt, Artificial Sequence
  Synthetic
cuucaagaagauuuuuggg

SEQ ID NO: 330075 - RNA, 20 nt, Artificial Sequence
  Synthetic
ccuucaagaagauuuuuggg

SEQ ID NO: 330076 - RNA, 21 nt, Artificial Sequence
  Synthetic
uccuucaagaagauuuuuggg

SEQ ID NO: 330077 - RNA, 22 nt, Artificial Sequence
  Synthetic
guccuucaagaagauuuuuggg

SEQ ID NO: 330078 - RNA, 23 nt, Artificial Sequence
  Synthetic
uguccuucaagaagauuuuuggg

SEQ ID NO: 330079 - RNA, 24 nt, Artificial Sequence
  Synthetic
auguccuucaagaagauuuuuggg

SEQ ID NO: 330080 - RNA, 18 nt, Artificial Sequence
  Synthetic
gcuuaaagaguuuuuggg

SEQ ID NO: 330081 - RNA, 19 nt, Artificial Sequence
  Synthetic
agcuuaaagaguuuuuggg

SEQ ID NO: 330082 - RNA, 20 nt, Artificial Sequence
  Synthetic
cagcuuaaagaguuuuuggg

SEQ ID NO: 330083 - RNA, 21 nt, Artificial Sequence
  Synthetic
ucagcuuaaagaguuuuuggg

SEQ ID NO: 330084 - RNA, 22 nt, Artificial Sequence
  Synthetic
aucagcuuaaagaguuuuuggg

SEQ ID NO: 330085 - RNA, 23 nt, Artificial Sequence
  Synthetic
uaucagcuuaaagaguuuuuggg

SEQ ID NO: 330086 - RNA, 24 nt, Artificial Sequence
  Synthetic
uuaucagcuuaaagaguuuuuggg

SEQ ID NO: 330087 - RNA, 18 nt, Artificial Sequence
  Synthetic
cuagucuuaaaaaaaugg

SEQ ID NO: 330088 - RNA, 19 nt, Artificial Sequence
  Synthetic
ucuagucuuaaaaaaaugg

SEQ ID NO: 330089 - RNA, 20 nt, Artificial Sequence
  Synthetic
uucuagucuuaaaaaaaugg

SEQ ID NO: 330090 - RNA, 21 nt, Artificial Sequence
  Synthetic
cuucuagucuuaaaaaaaugg

SEQ ID NO: 330091 - RNA, 22 nt, Artificial Sequence
  Synthetic
ccuucuagucuuaaaaaaaugg

SEQ ID NO: 330092 - RNA, 23 nt, Artificial Sequence
  Synthetic
cccuucuagucuuaaaaaaaugg

SEQ ID NO: 330093 - RNA, 24 nt, Artificial Sequence
  Synthetic
ucccuucuagucuuaaaaaaaugg

SEQ ID NO: 330094 - RNA, 18 nt, Artificial Sequence
  Synthetic
aggcaaccuacaaaaugg

SEQ ID NO: 330095 - RNA, 19 nt, Artificial Sequence
  Synthetic
caggcaaccuacaaaaugg

SEQ ID NO: 330096 - RNA, 20 nt, Artificial Sequence
  Synthetic
acaggcaaccuacaaaaugg

SEQ ID NO: 330097 - RNA, 21 nt, Artificial Sequence
  Synthetic
aacaggcaaccuacaaaaugg

SEQ ID NO: 330098 - RNA, 22 nt, Artificial Sequence
  Synthetic
gaacaggcaaccuacaaaaugg

SEQ ID NO: 330099 - RNA, 23 nt, Artificial Sequence
  Synthetic
ugaacaggcaaccuacaaaaugg

SEQ ID NO: 330100 - RNA, 24 nt, Artificial Sequence
  Synthetic
gugaacaggcaaccuacaaaaugg

SEQ ID NO: 330101 - RNA, 18 nt, Artificial Sequence
  Synthetic
auagaauugagaaaaugg

SEQ ID NO: 330102 - RNA, 19 nt, Artificial Sequence
  Synthetic
aauagaauugagaaaaugg

SEQ ID NO: 330103 - RNA, 20 nt, Artificial Sequence
  Synthetic
gaauagaauugagaaaaugg

SEQ ID NO: 330104 - RNA, 21 nt, Artificial Sequence
  Synthetic
ugaauagaauugagaaaaugg

SEQ ID NO: 330105 - RNA, 22 nt, Artificial Sequence
  Synthetic
gugaauagaauugagaaaaugg

SEQ ID NO: 330106 - RNA, 23 nt, Artificial Sequence
  Synthetic
ggugaauagaauugagaaaaugg

SEQ ID NO: 330107 - RNA, 24 nt, Artificial Sequence
  Synthetic
aggugaauagaauugagaaaaugg

SEQ ID NO: 330108 - RNA, 18 nt, Artificial Sequence
  Synthetic
aaaugacaaauaaaaugg

SEQ ID NO: 330109 - RNA, 19 nt, Artificial Sequence
  Synthetic
aaaaugacaaauaaaaugg

SEQ ID NO: 330110 - RNA, 20 nt, Artificial Sequence
  Synthetic
uaaaaugacaaauaaaaugg

SEQ ID NO: 330111 - RNA, 21 nt, Artificial Sequence
  Synthetic
auaaaaugacaaauaaaaugg

SEQ ID NO: 330112 - RNA, 22 nt, Artificial Sequence
  Synthetic
cauaaaaugacaaauaaaaugg

SEQ ID NO: 330113 - RNA, 23 nt, Artificial Sequence
  Synthetic
ucauaaaaugacaaauaaaaugg

SEQ ID NO: 330114 - RNA, 24 nt, Artificial Sequence
  Synthetic
gucauaaaaugacaaauaaaaugg

SEQ ID NO: 330115 - RNA, 18 nt, Artificial Sequence
  Synthetic
ugaaaaagccuaaaaugg

SEQ ID NO: 330116 - RNA, 19 nt, Artificial Sequence
  Synthetic
augaaaaagccuaaaaugg

SEQ ID NO: 330117 - RNA, 20 nt, Artificial Sequence
  Synthetic
gaugaaaaagccuaaaaugg

SEQ ID NO: 330118 - RNA, 21 nt, Artificial Sequence
  Synthetic
agaugaaaaagccuaaaaugg

SEQ ID NO: 330119 - RNA, 22 nt, Artificial Sequence
  Synthetic
gagaugaaaaagccuaaaaugg

SEQ ID NO: 330120 - RNA, 23 nt, Artificial Sequence
  Synthetic
ggagaugaaaaagccuaaaaugg

SEQ ID NO: 330121 - RNA, 24 nt, Artificial Sequence
  Synthetic
aggagaugaaaaagccuaaaaugg

SEQ ID NO: 330122 - RNA, 18 nt, Artificial Sequence
  Synthetic
ucgucaacuguaaaaugg

SEQ ID NO: 330123 - RNA, 19 nt, Artificial Sequence
  Synthetic
uucgucaacuguaaaaugg

SEQ ID NO: 330124 - RNA, 20 nt, Artificial Sequence
  Synthetic
uuucgucaacuguaaaaugg

SEQ ID NO: 330125 - RNA, 21 nt, Artificial Sequence
  Synthetic
auuucgucaacuguaaaaugg

SEQ ID NO: 330126 - RNA, 22 nt, Artificial Sequence
  Synthetic
uauuucgucaacuguaaaaugg

SEQ ID NO: 330127 - RNA, 23 nt, Artificial Sequence
  Synthetic
cuauuucgucaacuguaaaaugg

SEQ ID NO: 330128 - RNA, 24 nt, Artificial Sequence
  Synthetic
ucuauuucgucaacuguaaaaugg

SEQ ID NO: 330129 - RNA, 18 nt, Artificial Sequence
  Synthetic
cccucgccuguaaaaugg

SEQ ID NO: 330130 - RNA, 19 nt, Artificial Sequence
  Synthetic
gcccucgccuguaaaaugg

SEQ ID NO: 330131 - RNA, 20 nt, Artificial Sequence
  Synthetic
ugcccucgccuguaaaaugg

SEQ ID NO: 330132 - RNA, 21 nt, Artificial Sequence
  Synthetic
gugcccucgccuguaaaaugg

SEQ ID NO: 330133 - RNA, 22 nt, Artificial Sequence
  Synthetic
ugugcccucgccuguaaaaugg

SEQ ID NO: 330134 - RNA, 23 nt, Artificial Sequence
  Synthetic
uugugcccucgccuguaaaaugg

SEQ ID NO: 330135 - RNA, 24 nt, Artificial Sequence
  Synthetic
uuugugcccucgccuguaaaaugg

SEQ ID NO: 330136 - RNA, 18 nt, Artificial Sequence
  Synthetic
gacugcaauuuaaaaugg

SEQ ID NO: 330137 - RNA, 19 nt, Artificial Sequence
  Synthetic
agacugcaauuuaaaaugg

SEQ ID NO: 330138 - RNA, 20 nt, Artificial Sequence
  Synthetic
aagacugcaauuuaaaaugg

SEQ ID NO: 330139 - RNA, 21 nt, Artificial Sequence
  Synthetic
uaagacugcaauuuaaaaugg

SEQ ID NO: 330140 - RNA, 22 nt, Artificial Sequence
  Synthetic
guaagacugcaauuuaaaaugg

SEQ ID NO: 330141 - RNA, 23 nt, Artificial Sequence
  Synthetic
uguaagacugcaauuuaaaaugg

SEQ ID NO: 330142 - RNA, 24 nt, Artificial Sequence
  Synthetic
cuguaagacugcaauuuaaaaugg

SEQ ID NO: 330143 - RNA, 18 nt, Artificial Sequence
  Synthetic
gucuguacuuuaaaaugg

SEQ ID NO: 330144 - RNA, 19 nt, Artificial Sequence
  Synthetic
ugucuguacuuuaaaaugg

SEQ ID NO: 330145 - RNA, 20 nt, Artificial Sequence
  Synthetic
augucuguacuuuaaaaugg

SEQ ID NO: 330146 - RNA, 21 nt, Artificial Sequence
  Synthetic
uaugucuguacuuuaaaaugg

SEQ ID NO: 330147 - RNA, 22 nt, Artificial Sequence
  Synthetic
cuaugucuguacuuuaaaaugg

SEQ ID NO: 330148 - RNA, 23 nt, Artificial Sequence
  Synthetic
acuaugucuguacuuuaaaaugg

SEQ ID NO: 330149 - RNA, 24 nt, Artificial Sequence
  Synthetic
cacuaugucuguacuuuaaaaugg

SEQ ID NO: 330150 - RNA, 18 nt, Artificial Sequence
  Synthetic
gaggacacaaacaaaugg

SEQ ID NO: 330151 - RNA, 19 nt, Artificial Sequence
  Synthetic
agaggacacaaacaaaugg

SEQ ID NO: 330152 - RNA, 20 nt, Artificial Sequence
  Synthetic
aagaggacacaaacaaaugg

SEQ ID NO: 330153 - RNA, 18 nt, Artificial Sequence
  Synthetic
gacaccacaaacaaaugg

SEQ ID NO: 330154 - RNA, 19 nt, Artificial Sequence
  Synthetic
ggacaccacaaacaaaugg

SEQ ID NO: 330155 - RNA, 20 nt, Artificial Sequence
  Synthetic
aggacaccacaaacaaaugg

SEQ ID NO: 330156 - RNA, 21 nt, Artificial Sequence
  Synthetic
gaggacaccacaaacaaaugg

SEQ ID NO: 330157 - RNA, 22 nt, Artificial Sequence
  Synthetic
agaggacaccacaaacaaaugg

SEQ ID NO: 330158 - RNA, 23 nt, Artificial Sequence
  Synthetic
gagaggacaccacaaacaaaugg

SEQ ID NO: 330159 - RNA, 24 nt, Artificial Sequence
  Synthetic
agagaggacaccacaaacaaaugg

SEQ ID NO: 330160 - RNA, 18 nt, Artificial Sequence
  Synthetic
gaggauacaaacaaaugg

SEQ ID NO: 330161 - RNA, 19 nt, Artificial Sequence
  Synthetic
agaggauacaaacaaaugg

SEQ ID NO: 330162 - RNA, 20 nt, Artificial Sequence
  Synthetic
aagaggauacaaacaaaugg

SEQ ID NO: 330163 - RNA, 18 nt, Artificial Sequence
  Synthetic
uauacccauuacaaaugg

SEQ ID NO: 330164 - RNA, 19 nt, Artificial Sequence
  Synthetic
auauacccauuacaaaugg

SEQ ID NO: 330165 - RNA, 20 nt, Artificial Sequence
  Synthetic
aauauacccauuacaaaugg

SEQ ID NO: 330166 - RNA, 21 nt, Artificial Sequence
  Synthetic
aaauauacccauuacaaaugg

SEQ ID NO: 330167 - RNA, 22 nt, Artificial Sequence
  Synthetic
uaaauauacccauuacaaaugg

SEQ ID NO: 330168 - RNA, 23 nt, Artificial Sequence
  Synthetic
guaaauauacccauuacaaaugg

SEQ ID NO: 330169 - RNA, 24 nt, Artificial Sequence
  Synthetic
gguaaauauacccauuacaaaugg

SEQ ID NO: 330170 - RNA, 18 nt, Artificial Sequence
  Synthetic
cagacaaacaccaaaugg

SEQ ID NO: 330171 - RNA, 19 nt, Artificial Sequence
  Synthetic
acagacaaacaccaaaugg

SEQ ID NO: 330172 - RNA, 20 nt, Artificial Sequence
  Synthetic
aacagacaaacaccaaaugg

SEQ ID NO: 330173 - RNA, 21 nt, Artificial Sequence
  Synthetic
aaacagacaaacaccaaaugg

SEQ ID NO: 330174 - RNA, 22 nt, Artificial Sequence
  Synthetic
uaaacagacaaacaccaaaugg

SEQ ID NO: 330175 - RNA, 23 nt, Artificial Sequence
  Synthetic
guaaacagacaaacaccaaaugg

SEQ ID NO: 330176 - RNA, 24 nt, Artificial Sequence
  Synthetic
aguaaacagacaaacaccaaaugg

SEQ ID NO: 330177 - RNA, 18 nt, Artificial Sequence
  Synthetic
gacaaaauagccaaaugg

SEQ ID NO: 330178 - RNA, 19 nt, Artificial Sequence
  Synthetic
ugacaaaauagccaaaugg

SEQ ID NO: 330179 - RNA, 20 nt, Artificial Sequence
  Synthetic
uugacaaaauagccaaaugg

SEQ ID NO: 330180 - RNA, 21 nt, Artificial Sequence
  Synthetic
guugacaaaauagccaaaugg

SEQ ID NO: 330181 - RNA, 22 nt, Artificial Sequence
  Synthetic
gguugacaaaauagccaaaugg

SEQ ID NO: 330182 - RNA, 23 nt, Artificial Sequence
  Synthetic
ggguugacaaaauagccaaaugg

SEQ ID NO: 330183 - RNA, 24 nt, Artificial Sequence
  Synthetic
gggguugacaaaauagccaaaugg

SEQ ID NO: 330184 - RNA, 18 nt, Artificial Sequence
  Synthetic
aaauauuaaagcaaaugg

SEQ ID NO: 330185 - RNA, 19 nt, Artificial Sequence
  Synthetic
caaauauuaaagcaaaugg

SEQ ID NO: 330186 - RNA, 20 nt, Artificial Sequence
  Synthetic
ucaaauauuaaagcaaaugg

SEQ ID NO: 330187 - RNA, 21 nt, Artificial Sequence
  Synthetic
aucaaauauuaaagcaaaugg

SEQ ID NO: 330188 - RNA, 22 nt, Artificial Sequence
  Synthetic
uaucaaauauuaaagcaaaugg

SEQ ID NO: 330189 - RNA, 23 nt, Artificial Sequence
  Synthetic
guaucaaauauuaaagcaaaugg

SEQ ID NO: 330190 - RNA, 24 nt, Artificial Sequence
  Synthetic
aguaucaaauauuaaagcaaaugg

SEQ ID NO: 330191 - RNA, 18 nt, Artificial Sequence
  Synthetic
ccaaauugaggcaaaugg

SEQ ID NO: 330192 - RNA, 19 nt, Artificial Sequence
  Synthetic
accaaauugaggcaaaugg

SEQ ID NO: 330193 - RNA, 20 nt, Artificial Sequence
  Synthetic
uaccaaauugaggcaaaugg

SEQ ID NO: 330194 - RNA, 21 nt, Artificial Sequence
  Synthetic
cuaccaaauugaggcaaaugg

SEQ ID NO: 330195 - RNA, 22 nt, Artificial Sequence
  Synthetic
ucuaccaaauugaggcaaaugg

SEQ ID NO: 330196 - RNA, 23 nt, Artificial Sequence
  Synthetic
uucuaccaaauugaggcaaaugg

SEQ ID NO: 330197 - RNA, 24 nt, Artificial Sequence
  Synthetic
guucuaccaaauugaggcaaaugg

SEQ ID NO: 330198 - RNA, 18 nt, Artificial Sequence
  Synthetic
gagauuuuaaagaaaugg

SEQ ID NO: 330199 - RNA, 19 nt, Artificial Sequence
  Synthetic
ugagauuuuaaagaaaugg

SEQ ID NO: 330200 - RNA, 20 nt, Artificial Sequence
  Synthetic
cugagauuuuaaagaaaugg

SEQ ID NO: 330201 - RNA, 21 nt, Artificial Sequence
  Synthetic
acugagauuuuaaagaaaugg

SEQ ID NO: 330202 - RNA, 22 nt, Artificial Sequence
  Synthetic
uacugagauuuuaaagaaaugg

SEQ ID NO: 330203 - RNA, 23 nt, Artificial Sequence
  Synthetic
auacugagauuuuaaagaaaugg

SEQ ID NO: 330204 - RNA, 24 nt, Artificial Sequence
  Synthetic
cauacugagauuuuaaagaaaugg

SEQ ID NO: 330205 - RNA, 18 nt, Artificial Sequence
  Synthetic
gaggaaaggaggaaaugg

SEQ ID NO: 330206 - RNA, 19 nt, Artificial Sequence
  Synthetic
ugaggaaaggaggaaaugg

SEQ ID NO: 330207 - RNA, 20 nt, Artificial Sequence
  Synthetic
gugaggaaaggaggaaaugg

SEQ ID NO: 330208 - RNA, 21 nt, Artificial Sequence
  Synthetic
agugaggaaaggaggaaaugg

SEQ ID NO: 330209 - RNA, 22 nt, Artificial Sequence
  Synthetic
gagugaggaaaggaggaaaugg

SEQ ID NO: 330210 - RNA, 23 nt, Artificial Sequence
  Synthetic
ggagugaggaaaggaggaaaugg

SEQ ID NO: 330211 - RNA, 24 nt, Artificial Sequence
  Synthetic
aggagugaggaaaggaggaaaugg

SEQ ID NO: 330212 - RNA, 18 nt, Artificial Sequence
  Synthetic
caaggaggaaauaaaugg

SEQ ID NO: 330213 - RNA, 19 nt, Artificial Sequence
  Synthetic
acaaggaggaaauaaaugg

SEQ ID NO: 330214 - RNA, 20 nt, Artificial Sequence
  Synthetic
aacaaggaggaaauaaaugg

SEQ ID NO: 330215 - RNA, 21 nt, Artificial Sequence
  Synthetic
aaacaaggaggaaauaaaugg

SEQ ID NO: 330216 - RNA, 22 nt, Artificial Sequence
  Synthetic
gaaacaaggaggaaauaaaugg

SEQ ID NO: 330217 - RNA, 23 nt, Artificial Sequence
  Synthetic
agaaacaaggaggaaauaaaugg

SEQ ID NO: 330218 - RNA, 24 nt, Artificial Sequence
  Synthetic
gagaaacaaggaggaaauaaaugg

SEQ ID NO: 330219 - RNA, 18 nt, Artificial Sequence
  Synthetic
aauccuguaaauaaaugg

SEQ ID NO: 330220 - RNA, 19 nt, Artificial Sequence
  Synthetic
aaauccuguaaauaaaugg

SEQ ID NO: 330221 - RNA, 20 nt, Artificial Sequence
  Synthetic
uaaauccuguaaauaaaugg

SEQ ID NO: 330222 - RNA, 21 nt, Artificial Sequence
  Synthetic
uuaaauccuguaaauaaaugg

SEQ ID NO: 330223 - RNA, 22 nt, Artificial Sequence
  Synthetic
uuuaaauccuguaaauaaaugg

SEQ ID NO: 330224 - RNA, 23 nt, Artificial Sequence
  Synthetic
guuuaaauccuguaaauaaaugg

SEQ ID NO: 330225 - RNA, 24 nt, Artificial Sequence
  Synthetic
cguuuaaauccuguaaauaaaugg

SEQ ID NO: 330226 - RNA, 18 nt, Artificial Sequence
  Synthetic
uguauaauauauaaaugg

SEQ ID NO: 330227 - RNA, 19 nt, Artificial Sequence
  Synthetic
auguauaauauauaaaugg

SEQ ID NO: 330228 - RNA, 20 nt, Artificial Sequence
  Synthetic
cauguauaauauauaaaugg

SEQ ID NO: 330229 - RNA, 21 nt, Artificial Sequence
  Synthetic
ccauguauaauauauaaaugg

SEQ ID NO: 330230 - RNA, 22 nt, Artificial Sequence
  Synthetic
accauguauaauauauaaaugg

SEQ ID NO: 330231 - RNA, 23 nt, Artificial Sequence
  Synthetic
aaccauguauaauauauaaaugg

SEQ ID NO: 330232 - RNA, 24 nt, Artificial Sequence
  Synthetic
aaaccauguauaauauauaaaugg

SEQ ID NO: 330233 - RNA, 18 nt, Artificial Sequence
  Synthetic
ucacuuuacauuaaaugg

SEQ ID NO: 330234 - RNA, 19 nt, Artificial Sequence
  Synthetic
gucacuuuacauuaaaugg

SEQ ID NO: 330235 - RNA, 20 nt, Artificial Sequence
  Synthetic
ugucacuuuacauuaaaugg

SEQ ID NO: 330236 - RNA, 21 nt, Artificial Sequence
  Synthetic
uugucacuuuacauuaaaugg

SEQ ID NO: 330237 - RNA, 22 nt, Artificial Sequence
  Synthetic
guugucacuuuacauuaaaugg

SEQ ID NO: 330238 - RNA, 23 nt, Artificial Sequence
  Synthetic
aguugucacuuuacauuaaaugg

SEQ ID NO: 330239 - RNA, 24 nt, Artificial Sequence
  Synthetic
uaguugucacuuuacauuaaaugg

SEQ ID NO: 330240 - RNA, 18 nt, Artificial Sequence
  Synthetic
gcucuacuucuuaaaugg

SEQ ID NO: 330241 - RNA, 19 nt, Artificial Sequence
  Synthetic
ugcucuacuucuuaaaugg

SEQ ID NO: 330242 - RNA, 20 nt, Artificial Sequence
  Synthetic
uugcucuacuucuuaaaugg

SEQ ID NO: 330243 - RNA, 21 nt, Artificial Sequence
  Synthetic
cuugcucuacuucuuaaaugg

SEQ ID NO: 330244 - RNA, 22 nt, Artificial Sequence
  Synthetic
ccuugcucuacuucuuaaaugg

SEQ ID NO: 330245 - RNA, 23 nt, Artificial Sequence
  Synthetic
cccuugcucuacuucuuaaaugg

SEQ ID NO: 330246 - RNA, 24 nt, Artificial Sequence
  Synthetic
ccccuugcucuacuucuuaaaugg

SEQ ID NO: 330247 - RNA, 18 nt, Artificial Sequence
  Synthetic
gaugcugagaaacaaugg

SEQ ID NO: 330248 - RNA, 19 nt, Artificial Sequence
  Synthetic
agaugcugagaaacaaugg

SEQ ID NO: 330249 - RNA, 20 nt, Artificial Sequence
  Synthetic
aagaugcugagaaacaaugg

SEQ ID NO: 330250 - RNA, 21 nt, Artificial Sequence
  Synthetic
uaagaugcugagaaacaaugg

SEQ ID NO: 330251 - RNA, 22 nt, Artificial Sequence
  Synthetic
uuaagaugcugagaaacaaugg

SEQ ID NO: 330252 - RNA, 23 nt, Artificial Sequence
  Synthetic
uuuaagaugcugagaaacaaugg

SEQ ID NO: 330253 - RNA, 24 nt, Artificial Sequence
  Synthetic
cuuuaagaugcugagaaacaaugg

SEQ ID NO: 330254 - RNA, 18 nt, Artificial Sequence
  Synthetic
cacugacuuccacaaugg

SEQ ID NO: 330255 - RNA, 19 nt, Artificial Sequence
  Synthetic
acacugacuuccacaaugg

SEQ ID NO: 330256 - RNA, 20 nt, Artificial Sequence
  Synthetic
cacacugacuuccacaaugg

SEQ ID NO: 330257 - RNA, 23 nt, Artificial Sequence
  Synthetic
cgccacacugucuuccacaaugg

SEQ ID NO: 330258 - RNA, 24 nt, Artificial Sequence
  Synthetic
ucgccacacugucuuccacaaugg

SEQ ID NO: 330259 - RNA, 21 nt, Artificial Sequence
  Synthetic
gcacacugucuuccacaaugg

SEQ ID NO: 330260 - RNA, 22 nt, Artificial Sequence
  Synthetic
ugcacacugucuuccacaaugg

SEQ ID NO: 330261 - RNA, 23 nt, Artificial Sequence
  Synthetic
cugcacacugucuuccacaaugg

SEQ ID NO: 330262 - RNA, 24 nt, Artificial Sequence
  Synthetic
ucugcacacugucuuccacaaugg

SEQ ID NO: 330263 - RNA, 18 nt, Artificial Sequence
  Synthetic
uccuaauguugacaaugg

SEQ ID NO: 330264 - RNA, 19 nt, Artificial Sequence
  Synthetic
cuccuaauguugacaaugg

SEQ ID NO: 330265 - RNA, 20 nt, Artificial Sequence
  Synthetic
acuccuaauguugacaaugg

SEQ ID NO: 330266 - RNA, 21 nt, Artificial Sequence
  Synthetic
cacuccuaauguugacaaugg

SEQ ID NO: 330267 - RNA, 22 nt, Artificial Sequence
  Synthetic
gcacuccuaauguugacaaugg

SEQ ID NO: 330268 - RNA, 23 nt, Artificial Sequence
  Synthetic
ugcacuccuaauguugacaaugg

SEQ ID NO: 330269 - RNA, 24 nt, Artificial Sequence
  Synthetic
cugcacuccuaauguugacaaugg

SEQ ID NO: 330270 - RNA, 18 nt, Artificial Sequence
  Synthetic
aauaucuaucuacaaugg

SEQ ID NO: 330271 - RNA, 19 nt, Artificial Sequence
  Synthetic
gaauaucuaucuacaaugg

SEQ ID NO: 330272 - RNA, 20 nt, Artificial Sequence
  Synthetic
ugaauaucuaucuacaaugg

SEQ ID NO: 330273 - RNA, 21 nt, Artificial Sequence
  Synthetic
cugaauaucuaucuacaaugg

SEQ ID NO: 330274 - RNA, 22 nt, Artificial Sequence
  Synthetic
ccugaauaucuaucuacaaugg

SEQ ID NO: 330275 - RNA, 23 nt, Artificial Sequence
  Synthetic
accugaauaucuaucuacaaugg

SEQ ID NO: 330276 - RNA, 24 nt, Artificial Sequence
  Synthetic
uaccugaauaucuaucuacaaugg

SEQ ID NO: 330277 - RNA, 18 nt, Artificial Sequence
  Synthetic
uguauacacuuacaaugg

SEQ ID NO: 330278 - RNA, 19 nt, Artificial Sequence
  Synthetic
cuguauacacuuacaaugg

SEQ ID NO: 330279 - RNA, 20 nt, Artificial Sequence
  Synthetic
acuguauacacuuacaaugg

SEQ ID NO: 330280 - RNA, 21 nt, Artificial Sequence
  Synthetic
aacuguauacacuuacaaugg

SEQ ID NO: 330281 - RNA, 22 nt, Artificial Sequence
  Synthetic
gaacuguauacacuuacaaugg

SEQ ID NO: 330282 - RNA, 23 nt, Artificial Sequence
  Synthetic
ugaacuguauacacuuacaaugg

SEQ ID NO: 330283 - RNA, 24 nt, Artificial Sequence
  Synthetic
cugaacuguauacacuuacaaugg

SEQ ID NO: 330284 - RNA, 18 nt, Artificial Sequence
  Synthetic
uaauauaaagagcaaugg

SEQ ID NO: 330285 - RNA, 19 nt, Artificial Sequence
  Synthetic
uuaauauaaagagcaaugg

SEQ ID NO: 330286 - RNA, 20 nt, Artificial Sequence
  Synthetic
uuuaauauaaagagcaaugg

SEQ ID NO: 330287 - RNA, 21 nt, Artificial Sequence
  Synthetic
uuuuaauauaaagagcaaugg

SEQ ID NO: 330288 - RNA, 22 nt, Artificial Sequence
  Synthetic
uuuuuaauauaaagagcaaugg

SEQ ID NO: 330289 - RNA, 23 nt, Artificial Sequence
  Synthetic
auuuuuaauauaaagagcaaugg

SEQ ID NO: 330290 - RNA, 24 nt, Artificial Sequence
  Synthetic
uauuuuuaauauaaagagcaaugg

SEQ ID NO: 330291 - RNA, 18 nt, Artificial Sequence
  Synthetic
auuuuuuaaaaucaaugg

SEQ ID NO: 330292 - RNA, 19 nt, Artificial Sequence
  Synthetic
uauuuuuuaaaaucaaugg

SEQ ID NO: 330293 - RNA, 20 nt, Artificial Sequence
  Synthetic
auauuuuuuaaaaucaaugg

SEQ ID NO: 330294 - RNA, 21 nt, Artificial Sequence
  Synthetic
aauauuuuuuaaaaucaaugg

SEQ ID NO: 330295 - RNA, 22 nt, Artificial Sequence
  Synthetic
aaauauuuuuuaaaaucaaugg

SEQ ID NO: 330296 - RNA, 23 nt, Artificial Sequence
  Synthetic
aaaauauuuuuuaaaaucaaugg

SEQ ID NO: 330297 - RNA, 24 nt, Artificial Sequence
  Synthetic
uaaaauauuuuuuaaaaucaaugg

SEQ ID NO: 330298 - RNA, 18 nt, Artificial Sequence
  Synthetic
uuucguuugaaucaaugg

SEQ ID NO: 330299 - RNA, 19 nt, Artificial Sequence
  Synthetic
cuuucguuugaaucaaugg

SEQ ID NO: 330300 - RNA, 20 nt, Artificial Sequence
  Synthetic
ucuuucguuugaaucaaugg

SEQ ID NO: 330301 - RNA, 21 nt, Artificial Sequence
  Synthetic
gucuuucguuugaaucaaugg

SEQ ID NO: 330302 - RNA, 22 nt, Artificial Sequence
  Synthetic
ugucuuucguuugaaucaaugg

SEQ ID NO: 330303 - RNA, 23 nt, Artificial Sequence
  Synthetic
gugucuuucguuugaaucaaugg

SEQ ID NO: 330304 - RNA, 24 nt, Artificial Sequence
  Synthetic
ugugucuuucguuugaaucaaugg

SEQ ID NO: 330305 - RNA, 18 nt, Artificial Sequence
  Synthetic
gcaucagcagaucaaugg

SEQ ID NO: 330306 - RNA, 19 nt, Artificial Sequence
  Synthetic
ggcaucagcagaucaaugg

SEQ ID NO: 330307 - RNA, 20 nt, Artificial Sequence
  Synthetic
aggcaucagcagaucaaugg

SEQ ID NO: 330308 - RNA, 21 nt, Artificial Sequence
  Synthetic
gaggcaucagcagaucaaugg

SEQ ID NO: 330309 - RNA, 22 nt, Artificial Sequence
  Synthetic
ggaggcaucagcagaucaaugg

SEQ ID NO: 330310 - RNA, 23 nt, Artificial Sequence
  Synthetic
gggaggcaucagcagaucaaugg

SEQ ID NO: 330311 - RNA, 24 nt, Artificial Sequence
  Synthetic
ugggaggcaucagcagaucaaugg

SEQ ID NO: 330312 - RNA, 18 nt, Artificial Sequence
  Synthetic
uaaugguuuuuucaaugg

SEQ ID NO: 330313 - RNA, 19 nt, Artificial Sequence
  Synthetic
cuaaugguuuuuucaaugg

SEQ ID NO: 330314 - RNA, 20 nt, Artificial Sequence
  Synthetic
acuaaugguuuuuucaaugg

SEQ ID NO: 330315 - RNA, 21 nt, Artificial Sequence
  Synthetic
cacuaaugguuuuuucaaugg

SEQ ID NO: 330316 - RNA, 22 nt, Artificial Sequence
  Synthetic
ccacuaaugguuuuuucaaugg

SEQ ID NO: 330317 - RNA, 23 nt, Artificial Sequence
  Synthetic
accacuaaugguuuuuucaaugg

SEQ ID NO: 330318 - RNA, 24 nt, Artificial Sequence
  Synthetic
uaccacuaaugguuuuuucaaugg

SEQ ID NO: 330319 - RNA, 18 nt, Artificial Sequence
  Synthetic
guggucaccaaagaaugg

SEQ ID NO: 330320 - RNA, 19 nt, Artificial Sequence
  Synthetic
gguggucaccaaagaaugg

SEQ ID NO: 330321 - RNA, 20 nt, Artificial Sequence
  Synthetic
cgguggucaccaaagaaugg

SEQ ID NO: 330322 - RNA, 21 nt, Artificial Sequence
  Synthetic
acgguggucaccaaagaaugg

SEQ ID NO: 330323 - RNA, 22 nt, Artificial Sequence
  Synthetic
gacgguggucaccaaagaaugg

SEQ ID NO: 330324 - RNA, 23 nt, Artificial Sequence
  Synthetic
ggacgguggucaccaaagaaugg

SEQ ID NO: 330325 - RNA, 24 nt, Artificial Sequence
  Synthetic
uggacgguggucaccaaagaaugg

SEQ ID NO: 330326 - RNA, 18 nt, Artificial Sequence
  Synthetic
uuuggauuuaaagaaugg

SEQ ID NO: 330327 - RNA, 19 nt, Artificial Sequence
  Synthetic
uuuuggauuuaaagaaugg

SEQ ID NO: 330328 - RNA, 20 nt, Artificial Sequence
  Synthetic
cuuuuggauuuaaagaaugg

SEQ ID NO: 330329 - RNA, 21 nt, Artificial Sequence
  Synthetic
gcuuuuggauuuaaagaaugg

SEQ ID NO: 330330 - RNA, 22 nt, Artificial Sequence
  Synthetic
ggcuuuuggauuuaaagaaugg

SEQ ID NO: 330331 - RNA, 23 nt, Artificial Sequence
  Synthetic
uggcuuuuggauuuaaagaaugg

SEQ ID NO: 330332 - RNA, 24 nt, Artificial Sequence
  Synthetic
guggcuuuuggauuuaaagaaugg

SEQ ID NO: 330333 - RNA, 18 nt, Artificial Sequence
  Synthetic
aagcaaccuacagaaugg

SEQ ID NO: 330334 - RNA, 19 nt, Artificial Sequence
  Synthetic
caagcaaccuacagaaugg

SEQ ID NO: 330335 - RNA, 20 nt, Artificial Sequence
  Synthetic
acaagcaaccuacagaaugg

SEQ ID NO: 330336 - RNA, 21 nt, Artificial Sequence
  Synthetic
aacaagcaaccuacagaaugg

SEQ ID NO: 330337 - RNA, 22 nt, Artificial Sequence
  Synthetic
gaacaagcaaccuacagaaugg

SEQ ID NO: 330338 - RNA, 23 nt, Artificial Sequence
  Synthetic
ugaacaagcaaccuacagaaugg

SEQ ID NO: 330339 - RNA, 24 nt, Artificial Sequence
  Synthetic
gugaacaagcaaccuacagaaugg

SEQ ID NO: 330340 - RNA, 18 nt, Artificial Sequence
  Synthetic
gagauauaugcagaaugg

SEQ ID NO: 330341 - RNA, 19 nt, Artificial Sequence
  Synthetic
ugagauauaugcagaaugg

SEQ ID NO: 330342 - RNA, 20 nt, Artificial Sequence
  Synthetic
augagauauaugcagaaugg

SEQ ID NO: 330343 - RNA, 21 nt, Artificial Sequence
  Synthetic
caugagauauaugcagaaugg

SEQ ID NO: 330344 - RNA, 22 nt, Artificial Sequence
  Synthetic
acaugagauauaugcagaaugg

SEQ ID NO: 330345 - RNA, 23 nt, Artificial Sequence
  Synthetic
uacaugagauauaugcagaaugg

SEQ ID NO: 330346 - RNA, 24 nt, Artificial Sequence
  Synthetic
guacaugagauauaugcagaaugg

SEQ ID NO: 330347 - RNA, 18 nt, Artificial Sequence
  Synthetic
uggcugggaucagaaugg

SEQ ID NO: 330348 - RNA, 19 nt, Artificial Sequence
  Synthetic
guggcugggaucagaaugg

SEQ ID NO: 330349 - RNA, 20 nt, Artificial Sequence
  Synthetic
uguggcugggaucagaaugg

SEQ ID NO: 330350 - RNA, 21 nt, Artificial Sequence
  Synthetic
cuguggcugggaucagaaugg

SEQ ID NO: 330351 - RNA, 22 nt, Artificial Sequence
  Synthetic
acuguggcugggaucagaaugg

SEQ ID NO: 330352 - RNA, 23 nt, Artificial Sequence
  Synthetic
gacuguggcugggaucagaaugg

SEQ ID NO: 330353 - RNA, 24 nt, Artificial Sequence
  Synthetic
ugacuguggcugggaucagaaugg

SEQ ID NO: 330354 - RNA, 18 nt, Artificial Sequence
  Synthetic
augcuaaauuaggaaugg

SEQ ID NO: 330355 - RNA, 19 nt, Artificial Sequence
  Synthetic
uaugcuaaauuaggaaugg

SEQ ID NO: 330356 - RNA, 20 nt, Artificial Sequence
  Synthetic
auaugcuaaauuaggaaugg

SEQ ID NO: 330357 - RNA, 21 nt, Artificial Sequence
  Synthetic
uauaugcuaaauuaggaaugg

SEQ ID NO: 330358 - RNA, 22 nt, Artificial Sequence
  Synthetic
uuauaugcuaaauuaggaaugg

SEQ ID NO: 330359 - RNA, 23 nt, Artificial Sequence
  Synthetic
uuuauaugcuaaauuaggaaugg

SEQ ID NO: 330360 - RNA, 24 nt, Artificial Sequence
  Synthetic
cuuuauaugcuaaauuaggaaugg

SEQ ID NO: 330361 - RNA, 18 nt, Artificial Sequence
  Synthetic
cuggggcauuaggaaugg

SEQ ID NO: 330362 - RNA, 19 nt, Artificial Sequence
  Synthetic
ucuggggcauuaggaaugg

SEQ ID NO: 330363 - RNA, 20 nt, Artificial Sequence
  Synthetic
aucuggggcauuaggaaugg

SEQ ID NO: 330364 - RNA, 21 nt, Artificial Sequence
  Synthetic
aaucuggggcauuaggaaugg

SEQ ID NO: 330365 - RNA, 22 nt, Artificial Sequence
  Synthetic
aaaucuggggcauuaggaaugg

SEQ ID NO: 330366 - RNA, 23 nt, Artificial Sequence
  Synthetic
caaaucuggggcauuaggaaugg

SEQ ID NO: 330367 - RNA, 24 nt, Artificial Sequence
  Synthetic
gcaaaucuggggcauuaggaaugg

SEQ ID NO: 330368 - RNA, 18 nt, Artificial Sequence
  Synthetic
acaacccuuggggaaugg

SEQ ID NO: 330369 - RNA, 19 nt, Artificial Sequence
  Synthetic
gacaacccuuggggaaugg

SEQ ID NO: 330370 - RNA, 20 nt, Artificial Sequence
  Synthetic
agacaacccuuggggaaugg

SEQ ID NO: 330371 - RNA, 21 nt, Artificial Sequence
  Synthetic
cagacaacccuuggggaaugg

SEQ ID NO: 330372 - RNA, 22 nt, Artificial Sequence
  Synthetic
ucagacaacccuuggggaaugg

SEQ ID NO: 330373 - RNA, 23 nt, Artificial Sequence
  Synthetic
aucagacaacccuuggggaaugg

SEQ ID NO: 330374 - RNA, 24 nt, Artificial Sequence
  Synthetic
uaucagacaacccuuggggaaugg

SEQ ID NO: 330375 - RNA, 18 nt, Artificial Sequence
  Synthetic
aguugggguugggaaugg

SEQ ID NO: 330376 - RNA, 19 nt, Artificial Sequence
  Synthetic
gaguugggguugggaaugg

SEQ ID NO: 330377 - RNA, 20 nt, Artificial Sequence
  Synthetic
ugaguugggguugggaaugg

SEQ ID NO: 330378 - RNA, 21 nt, Artificial Sequence
  Synthetic
cugaguugggguugggaaugg

SEQ ID NO: 330379 - RNA, 22 nt, Artificial Sequence
  Synthetic
acugaguugggguugggaaugg

SEQ ID NO: 330380 - RNA, 23 nt, Artificial Sequence
  Synthetic
cacugaguugggguugggaaugg

SEQ ID NO: 330381 - RNA, 24 nt, Artificial Sequence
  Synthetic
gcacugaguugggguugggaaugg

SEQ ID NO: 330382 - RNA, 18 nt, Artificial Sequence
  Synthetic
gcuaaauauaaugaaugg

SEQ ID NO: 330383 - RNA, 19 nt, Artificial Sequence
  Synthetic
agcuaaauauaaugaaugg

SEQ ID NO: 330384 - RNA, 20 nt, Artificial Sequence
  Synthetic
gagcuaaauauaaugaaugg

SEQ ID NO: 330385 - RNA, 21 nt, Artificial Sequence
  Synthetic
agagcuaaauauaaugaaugg

SEQ ID NO: 330386 - RNA, 22 nt, Artificial Sequence
  Synthetic
cagagcuaaauauaaugaaugg

SEQ ID NO: 330387 - RNA, 23 nt, Artificial Sequence
  Synthetic
acagagcuaaauauaaugaaugg

SEQ ID NO: 330388 - RNA, 24 nt, Artificial Sequence
  Synthetic
aacagagcuaaauauaaugaaugg

SEQ ID NO: 330389 - RNA, 18 nt, Artificial Sequence
  Synthetic
cacaucuuacaugaaugg

SEQ ID NO: 330390 - RNA, 19 nt, Artificial Sequence
  Synthetic
ucacaucuuacaugaaugg

SEQ ID NO: 330391 - RNA, 20 nt, Artificial Sequence
  Synthetic
gucacaucuuacaugaaugg

SEQ ID NO: 330392 - RNA, 21 nt, Artificial Sequence
  Synthetic
agucacaucuuacaugaaugg

SEQ ID NO: 330393 - RNA, 22 nt, Artificial Sequence
  Synthetic
aagucacaucuuacaugaaugg

SEQ ID NO: 330394 - RNA, 23 nt, Artificial Sequence
  Synthetic
caagucacaucuuacaugaaugg

SEQ ID NO: 330395 - RNA, 24 nt, Artificial Sequence
  Synthetic
gcaagucacaucuuacaugaaugg

SEQ ID NO: 330396 - RNA, 18 nt, Artificial Sequence
  Synthetic
auagcagcuggugaaugg

SEQ ID NO: 330397 - RNA, 19 nt, Artificial Sequence
  Synthetic
aauagcagcuggugaaugg

SEQ ID NO: 330398 - RNA, 20 nt, Artificial Sequence
  Synthetic
aaauagcagcuggugaaugg

SEQ ID NO: 330399 - RNA, 21 nt, Artificial Sequence
  Synthetic
gaaauagcagcuggugaaugg

SEQ ID NO: 330400 - RNA, 22 nt, Artificial Sequence
  Synthetic
agaaauagcagcuggugaaugg

SEQ ID NO: 330401 - RNA, 23 nt, Artificial Sequence
  Synthetic
gagaaauagcagcuggugaaugg

SEQ ID NO: 330402 - RNA, 24 nt, Artificial Sequence
  Synthetic
ugagaaauagcagcuggugaaugg

SEQ ID NO: 330403 - RNA, 18 nt, Artificial Sequence
  Synthetic
agccauucuuuugaaugg

SEQ ID NO: 330404 - RNA, 19 nt, Artificial Sequence
  Synthetic
uagccauucuuuugaaugg

SEQ ID NO: 330405 - RNA, 20 nt, Artificial Sequence
  Synthetic
uuagccauucuuuugaaugg

SEQ ID NO: 330406 - RNA, 21 nt, Artificial Sequence
  Synthetic
cuuagccauucuuuugaaugg

SEQ ID NO: 330407 - RNA, 22 nt, Artificial Sequence
  Synthetic
ucuuagccauucuuuugaaugg

SEQ ID NO: 330408 - RNA, 23 nt, Artificial Sequence
  Synthetic
aucuuagccauucuuuugaaugg

SEQ ID NO: 330409 - RNA, 24 nt, Artificial Sequence
  Synthetic
caucuuagccauucuuuugaaugg

SEQ ID NO: 330410 - RNA, 18 nt, Artificial Sequence
  Synthetic
acugaggcacaauaaugg

SEQ ID NO: 330411 - RNA, 19 nt, Artificial Sequence
  Synthetic
gacugaggcacaauaaugg

SEQ ID NO: 330412 - RNA, 20 nt, Artificial Sequence
  Synthetic
ugacugaggcacaauaaugg

SEQ ID NO: 330413 - RNA, 21 nt, Artificial Sequence
  Synthetic
gugacugaggcacaauaaugg

SEQ ID NO: 330414 - RNA, 22 nt, Artificial Sequence
  Synthetic
ggugacugaggcacaauaaugg

SEQ ID NO: 330415 - RNA, 23 nt, Artificial Sequence
  Synthetic
gggugacugaggcacaauaaugg

SEQ ID NO: 330416 - RNA, 24 nt, Artificial Sequence
  Synthetic
ggggugacugaggcacaauaaugg

SEQ ID NO: 330417 - RNA, 18 nt, Artificial Sequence
  Synthetic
ggaauacacacauaaugg

SEQ ID NO: 330418 - RNA, 19 nt, Artificial Sequence
  Synthetic
uggaauacacacauaaugg

SEQ ID NO: 330419 - RNA, 20 nt, Artificial Sequence
  Synthetic
uuggaauacacacauaaugg

SEQ ID NO: 330420 - RNA, 21 nt, Artificial Sequence
  Synthetic
uuuggaauacacacauaaugg

SEQ ID NO: 330421 - RNA, 22 nt, Artificial Sequence
  Synthetic
auuuggaauacacacauaaugg

SEQ ID NO: 330422 - RNA, 23 nt, Artificial Sequence
  Synthetic
uauuuggaauacacacauaaugg

SEQ ID NO: 330423 - RNA, 24 nt, Artificial Sequence
  Synthetic
uuauuuggaauacacacauaaugg

SEQ ID NO: 330424 - RNA, 18 nt, Artificial Sequence
  Synthetic
cuaaagggagcauaaugg

SEQ ID NO: 330425 - RNA, 19 nt, Artificial Sequence
  Synthetic
gcuaaagggagcauaaugg

SEQ ID NO: 330426 - RNA, 20 nt, Artificial Sequence
  Synthetic
agcuaaagggagcauaaugg

SEQ ID NO: 330427 - RNA, 21 nt, Artificial Sequence
  Synthetic
cagcuaaagggagcauaaugg

SEQ ID NO: 330428 - RNA, 22 nt, Artificial Sequence
  Synthetic
acagcuaaagggagcauaaugg

SEQ ID NO: 330429 - RNA, 23 nt, Artificial Sequence
  Synthetic
gacagcuaaagggagcauaaugg

SEQ ID NO: 330430 - RNA, 24 nt, Artificial Sequence
  Synthetic
ugacagcuaaagggagcauaaugg

SEQ ID NO: 330431 - RNA, 18 nt, Artificial Sequence
  Synthetic
ccaggcccaagauaaugg

SEQ ID NO: 330432 - RNA, 19 nt, Artificial Sequence
  Synthetic
uccaggcccaagauaaugg

SEQ ID NO: 330433 - RNA, 20 nt, Artificial Sequence
  Synthetic
guccaggcccaagauaaugg

SEQ ID NO: 330434 - RNA, 21 nt, Artificial Sequence
  Synthetic
uguccaggcccaagauaaugg

SEQ ID NO: 330435 - RNA, 22 nt, Artificial Sequence
  Synthetic
guguccaggcccaagauaaugg

SEQ ID NO: 330436 - RNA, 23 nt, Artificial Sequence
  Synthetic
aguguccaggcccaagauaaugg

SEQ ID NO: 330437 - RNA, 24 nt, Artificial Sequence
  Synthetic
gaguguccaggcccaagauaaugg

SEQ ID NO: 330438 - RNA, 18 nt, Artificial Sequence
  Synthetic
gcccuuaauugauaaugg

SEQ ID NO: 330439 - RNA, 19 nt, Artificial Sequence
  Synthetic
agcccuuaauugauaaugg

SEQ ID NO: 330440 - RNA, 20 nt, Artificial Sequence
  Synthetic
aagcccuuaauugauaaugg

SEQ ID NO: 330441 - RNA, 21 nt, Artificial Sequence
  Synthetic
caagcccuuaauugauaaugg

SEQ ID NO: 330442 - RNA, 22 nt, Artificial Sequence
  Synthetic
ucaagcccuuaauugauaaugg

SEQ ID NO: 330443 - RNA, 23 nt, Artificial Sequence
  Synthetic
uucaagcccuuaauugauaaugg

SEQ ID NO: 330444 - RNA, 24 nt, Artificial Sequence
  Synthetic
cuucaagcccuuaauugauaaugg

SEQ ID NO: 330445 - RNA, 18 nt, Artificial Sequence
  Synthetic
uuuucagucagcuaaugg

SEQ ID NO: 330446 - RNA, 19 nt, Artificial Sequence
  Synthetic
auuuucagucagcuaaugg

SEQ ID NO: 330447 - RNA, 20 nt, Artificial Sequence
  Synthetic
cauuuucagucagcuaaugg

SEQ ID NO: 330448 - RNA, 21 nt, Artificial Sequence
  Synthetic
acauuuucagucagcuaaugg

SEQ ID NO: 330449 - RNA, 22 nt, Artificial Sequence
  Synthetic
uacauuuucagucagcuaaugg

SEQ ID NO: 330450 - RNA, 23 nt, Artificial Sequence
  Synthetic
auacauuuucagucagcuaaugg

SEQ ID NO: 330451 - RNA, 24 nt, Artificial Sequence
  Synthetic
cauacauuuucagucagcuaaugg

SEQ ID NO: 330452 - RNA, 18 nt, Artificial Sequence
  Synthetic
guagaccuuugcuaaugg

SEQ ID NO: 330453 - RNA, 19 nt, Artificial Sequence
  Synthetic
uguagaccuuugcuaaugg

SEQ ID NO: 330454 - RNA, 20 nt, Artificial Sequence
  Synthetic
uuguagaccuuugcuaaugg

SEQ ID NO: 330455 - RNA, 21 nt, Artificial Sequence
  Synthetic
uuuguagaccuuugcuaaugg

SEQ ID NO: 330456 - RNA, 22 nt, Artificial Sequence
  Synthetic
cuuuguagaccuuugcuaaugg

SEQ ID NO: 330457 - RNA, 23 nt, Artificial Sequence
  Synthetic
acuuuguagaccuuugcuaaugg

SEQ ID NO: 330458 - RNA, 24 nt, Artificial Sequence
  Synthetic
uacuuuguagaccuuugcuaaugg

SEQ ID NO: 330459 - RNA, 18 nt, Artificial Sequence
  Synthetic
caugcuaauuucuaaugg

SEQ ID NO: 330460 - RNA, 19 nt, Artificial Sequence
  Synthetic
ucaugcuaauuucuaaugg

SEQ ID NO: 330461 - RNA, 20 nt, Artificial Sequence
  Synthetic
gucaugcuaauuucuaaugg

SEQ ID NO: 330462 - RNA, 21 nt, Artificial Sequence
  Synthetic
cgucaugcuaauuucuaaugg

SEQ ID NO: 330463 - RNA, 22 nt, Artificial Sequence
  Synthetic
ccgucaugcuaauuucuaaugg

SEQ ID NO: 330464 - RNA, 23 nt, Artificial Sequence
  Synthetic
gccgucaugcuaauuucuaaugg

SEQ ID NO: 330465 - RNA, 24 nt, Artificial Sequence
  Synthetic
agccgucaugcuaauuucuaaugg

SEQ ID NO: 330466 - RNA, 18 nt, Artificial Sequence
  Synthetic
agaauuagaagguaaugg

SEQ ID NO: 330467 - RNA, 19 nt, Artificial Sequence
  Synthetic
gagaauuagaagguaaugg

SEQ ID NO: 330468 - RNA, 20 nt, Artificial Sequence
  Synthetic
agagaauuagaagguaaugg

SEQ ID NO: 330469 - RNA, 21 nt, Artificial Sequence
  Synthetic
uagagaauuagaagguaaugg

SEQ ID NO: 330470 - RNA, 22 nt, Artificial Sequence
  Synthetic
guagagaauuagaagguaaugg

SEQ ID NO: 330471 - RNA, 23 nt, Artificial Sequence
  Synthetic
aguagagaauuagaagguaaugg

SEQ ID NO: 330472 - RNA, 24 nt, Artificial Sequence
  Synthetic
gaguagagaauuagaagguaaugg

SEQ ID NO: 330473 - RNA, 18 nt, Artificial Sequence
  Synthetic
ccugagacuggguaaugg

SEQ ID NO: 330474 - RNA, 19 nt, Artificial Sequence
  Synthetic
accugagacuggguaaugg

SEQ ID NO: 330475 - RNA, 20 nt, Artificial Sequence
  Synthetic
uaccugagacuggguaaugg

SEQ ID NO: 330476 - RNA, 21 nt, Artificial Sequence
  Synthetic
auaccugagacuggguaaugg

SEQ ID NO: 330477 - RNA, 22 nt, Artificial Sequence
  Synthetic
aauaccugagacuggguaaugg

SEQ ID NO: 330478 - RNA, 23 nt, Artificial Sequence
  Synthetic
aaauaccugagacuggguaaugg

SEQ ID NO: 330479 - RNA, 24 nt, Artificial Sequence
  Synthetic
gaaauaccugagacuggguaaugg

SEQ ID NO: 330480 - RNA, 18 nt, Artificial Sequence
  Synthetic
ugugauuauuuguaaugg

SEQ ID NO: 330481 - RNA, 19 nt, Artificial Sequence
  Synthetic
augugauuauuuguaaugg

SEQ ID NO: 330482 - RNA, 20 nt, Artificial Sequence
  Synthetic
aaugugauuauuuguaaugg

SEQ ID NO: 330483 - RNA, 21 nt, Artificial Sequence
  Synthetic
caaugugauuauuuguaaugg

SEQ ID NO: 330484 - RNA, 22 nt, Artificial Sequence
  Synthetic
ucaaugugauuauuuguaaugg

SEQ ID NO: 330485 - RNA, 23 nt, Artificial Sequence
  Synthetic
gucaaugugauuauuuguaaugg

SEQ ID NO: 330486 - RNA, 24 nt, Artificial Sequence
  Synthetic
ugucaaugugauuauuuguaaugg

SEQ ID NO: 330487 - RNA, 18 nt, Artificial Sequence
  Synthetic
gaagacgaagauuaaugg

SEQ ID NO: 330488 - RNA, 19 nt, Artificial Sequence
  Synthetic
ggaagacgaagauuaaugg

SEQ ID NO: 330489 - RNA, 20 nt, Artificial Sequence
  Synthetic
aggaagacgaagauuaaugg

SEQ ID NO: 330490 - RNA, 21 nt, Artificial Sequence
  Synthetic
aaggaagacgaagauuaaugg

SEQ ID NO: 330491 - RNA, 22 nt, Artificial Sequence
  Synthetic
gaaggaagacgaagauuaaugg

SEQ ID NO: 330492 - RNA, 23 nt, Artificial Sequence
  Synthetic
agaaggaagacgaagauuaaugg

SEQ ID NO: 330493 - RNA, 24 nt, Artificial Sequence
  Synthetic
uagaaggaagacgaagauuaaugg

SEQ ID NO: 330494 - RNA, 18 nt, Artificial Sequence
  Synthetic
cgagugugagauuaaugg

SEQ ID NO: 330495 - RNA, 19 nt, Artificial Sequence
  Synthetic
acgagugugagauuaaugg

SEQ ID NO: 330496 - RNA, 20 nt, Artificial Sequence
  Synthetic
uacgagugugagauuaaugg

SEQ ID NO: 330497 - RNA, 21 nt, Artificial Sequence
  Synthetic
uuacgagugugagauuaaugg

SEQ ID NO: 330498 - RNA, 22 nt, Artificial Sequence
  Synthetic
cuuacgagugugagauuaaugg

SEQ ID NO: 330499 - RNA, 23 nt, Artificial Sequence
  Synthetic
ucuuacgagugugagauuaaugg

SEQ ID NO: 330500 - RNA, 24 nt, Artificial Sequence
  Synthetic
uucuuacgagugugagauuaaugg

SEQ ID NO: 330501 - RNA, 18 nt, Artificial Sequence
  Synthetic
ccuauauaaacuuaaugg

SEQ ID NO: 330502 - RNA, 19 nt, Artificial Sequence
  Synthetic
accuauauaaacuuaaugg

SEQ ID NO: 330503 - RNA, 20 nt, Artificial Sequence
  Synthetic
gaccuauauaaacuuaaugg

SEQ ID NO: 330504 - RNA, 21 nt, Artificial Sequence
  Synthetic
agaccuauauaaacuuaaugg

SEQ ID NO: 330505 - RNA, 22 nt, Artificial Sequence
  Synthetic
gagaccuauauaaacuuaaugg

SEQ ID NO: 330506 - RNA, 23 nt, Artificial Sequence
  Synthetic
ugagaccuauauaaacuuaaugg

SEQ ID NO: 330507 - RNA, 24 nt, Artificial Sequence
  Synthetic
augagaccuauauaaacuuaaugg

SEQ ID NO: 330508 - RNA, 18 nt, Artificial Sequence
  Synthetic
uugcuuuguauuuaaugg

SEQ ID NO: 330509 - RNA, 19 nt, Artificial Sequence
  Synthetic
cuugcuuuguauuuaaugg

SEQ ID NO: 330510 - RNA, 20 nt, Artificial Sequence
  Synthetic
acuugcuuuguauuuaaugg

SEQ ID NO: 330511 - RNA, 21 nt, Artificial Sequence
  Synthetic
cacuugcuuuguauuuaaugg

SEQ ID NO: 330512 - RNA, 22 nt, Artificial Sequence
  Synthetic
ucacuugcuuuguauuuaaugg

SEQ ID NO: 330513 - RNA, 23 nt, Artificial Sequence
  Synthetic
gucacuugcuuuguauuuaaugg

SEQ ID NO: 330514 - RNA, 24 nt, Artificial Sequence
  Synthetic
agucacuugcuuuguauuuaaugg

SEQ ID NO: 330515 - RNA, 18 nt, Artificial Sequence
  Synthetic
guaaaaauccuuuaaugg

SEQ ID NO: 330516 - RNA, 19 nt, Artificial Sequence
  Synthetic
aguaaaaauccuuuaaugg

SEQ ID NO: 330517 - RNA, 20 nt, Artificial Sequence
  Synthetic
uaguaaaaauccuuuaaugg

SEQ ID NO: 330518 - RNA, 21 nt, Artificial Sequence
  Synthetic
uuaguaaaaauccuuuaaugg

SEQ ID NO: 330519 - RNA, 22 nt, Artificial Sequence
  Synthetic
cuuaguaaaaauccuuuaaugg

SEQ ID NO: 330520 - RNA, 23 nt, Artificial Sequence
  Synthetic
ucuuaguaaaaauccuuuaaugg

SEQ ID NO: 330521 - RNA, 24 nt, Artificial Sequence
  Synthetic
cucuuaguaaaaauccuuuaaugg

SEQ ID NO: 330522 - RNA, 18 nt, Artificial Sequence
  Synthetic
aaugauaauuuuuaaugg

SEQ ID NO: 330523 - RNA, 19 nt, Artificial Sequence
  Synthetic
gaaugauaauuuuuaaugg

SEQ ID NO: 330524 - RNA, 20 nt, Artificial Sequence
  Synthetic
agaaugauaauuuuuaaugg

SEQ ID NO: 330525 - RNA, 21 nt, Artificial Sequence
  Synthetic
aagaaugauaauuuuuaaugg

SEQ ID NO: 330526 - RNA, 22 nt, Artificial Sequence
  Synthetic
uaagaaugauaauuuuuaaugg

SEQ ID NO: 330527 - RNA, 23 nt, Artificial Sequence
  Synthetic
uuaagaaugauaauuuuuaaugg

SEQ ID NO: 330528 - RNA, 24 nt, Artificial Sequence
  Synthetic
auuaagaaugauaauuuuuaaugg

SEQ ID NO: 330529 - RNA, 18 nt, Artificial Sequence
  Synthetic
uuucaauaaaaaacaugg

SEQ ID NO: 330530 - RNA, 19 nt, Artificial Sequence
  Synthetic
uuuucaauaaaaaacaugg

SEQ ID NO: 330531 - RNA, 20 nt, Artificial Sequence
  Synthetic
cuuuucaauaaaaaacaugg

SEQ ID NO: 330532 - RNA, 21 nt, Artificial Sequence
  Synthetic
ucuuuucaauaaaaaacaugg

SEQ ID NO: 330533 - RNA, 22 nt, Artificial Sequence
  Synthetic
aucuuuucaauaaaaaacaugg

SEQ ID NO: 330534 - RNA, 23 nt, Artificial Sequence
  Synthetic
uaucuuuucaauaaaaaacaugg

SEQ ID NO: 330535 - RNA, 24 nt, Artificial Sequence
  Synthetic
uuaucuuuucaauaaaaaacaugg

SEQ ID NO: 330536 - RNA, 18 nt, Artificial Sequence
  Synthetic
cugcuuuccaaaacaugg

SEQ ID NO: 330537 - RNA, 19 nt, Artificial Sequence
  Synthetic
acugcuuuccaaaacaugg

SEQ ID NO: 330538 - RNA, 20 nt, Artificial Sequence
  Synthetic
cacugcuuuccaaaacaugg

SEQ ID NO: 330539 - RNA, 21 nt, Artificial Sequence
  Synthetic
ucacugcuuuccaaaacaugg

SEQ ID NO: 330540 - RNA, 22 nt, Artificial Sequence
  Synthetic
cucacugcuuuccaaaacaugg

SEQ ID NO: 330541 - RNA, 23 nt, Artificial Sequence
  Synthetic
acucacugcuuuccaaaacaugg

SEQ ID NO: 330542 - RNA, 24 nt, Artificial Sequence
  Synthetic
aacucacugcuuuccaaaacaugg

SEQ ID NO: 330543 - RNA, 18 nt, Artificial Sequence
  Synthetic
aacauuuaucaaacaugg

SEQ ID NO: 330544 - RNA, 19 nt, Artificial Sequence
  Synthetic
caacauuuaucaaacaugg

SEQ ID NO: 330545 - RNA, 20 nt, Artificial Sequence
  Synthetic
acaacauuuaucaaacaugg

SEQ ID NO: 330546 - RNA, 21 nt, Artificial Sequence
  Synthetic
gacaacauuuaucaaacaugg

SEQ ID NO: 330547 - RNA, 22 nt, Artificial Sequence
  Synthetic
ggacaacauuuaucaaacaugg

SEQ ID NO: 330548 - RNA, 23 nt, Artificial Sequence
  Synthetic
uggacaacauuuaucaaacaugg

SEQ ID NO: 330549 - RNA, 24 nt, Artificial Sequence
  Synthetic
cuggacaacauuuaucaaacaugg

SEQ ID NO: 330550 - RNA, 18 nt, Artificial Sequence
  Synthetic
ucauuaauagaaacaugg

SEQ ID NO: 330551 - RNA, 19 nt, Artificial Sequence
  Synthetic
cucauuaauagaaacaugg

SEQ ID NO: 330552 - RNA, 20 nt, Artificial Sequence
  Synthetic
ucucauuaauagaaacaugg

SEQ ID NO: 330553 - RNA, 21 nt, Artificial Sequence
  Synthetic
uucucauuaauagaaacaugg

SEQ ID NO: 330554 - RNA, 22 nt, Artificial Sequence
  Synthetic
cuucucauuaauagaaacaugg

SEQ ID NO: 330555 - RNA, 23 nt, Artificial Sequence
  Synthetic
ccuucucauuaauagaaacaugg

SEQ ID NO: 330556 - RNA, 24 nt, Artificial Sequence
  Synthetic
uccuucucauuaauagaaacaugg

SEQ ID NO: 330557 - RNA, 18 nt, Artificial Sequence
  Synthetic
aggcaaccuacaacaugg

SEQ ID NO: 330558 - RNA, 19 nt, Artificial Sequence
  Synthetic
caggcaaccuacaacaugg

SEQ ID NO: 330559 - RNA, 20 nt, Artificial Sequence
  Synthetic
acaggcaaccuacaacaugg

SEQ ID NO: 330560 - RNA, 21 nt, Artificial Sequence
  Synthetic
aacaggcaaccuacaacaugg

SEQ ID NO: 330561 - RNA, 22 nt, Artificial Sequence
  Synthetic
gaacaggcaaccuacaacaugg

SEQ ID NO: 330562 - RNA, 23 nt, Artificial Sequence
  Synthetic
ugaacaggcaaccuacaacaugg

SEQ ID NO: 330563 - RNA, 24 nt, Artificial Sequence
  Synthetic
gugaacaggcaaccuacaacaugg

SEQ ID NO: 330564 - RNA, 18 nt, Artificial Sequence
  Synthetic
agggaaccuacaacaugg

SEQ ID NO: 330565 - RNA, 19 nt, Artificial Sequence
  Synthetic
cagggaaccuacaacaugg

SEQ ID NO: 330566 - RNA, 20 nt, Artificial Sequence
  Synthetic
acagggaaccuacaacaugg

SEQ ID NO: 330567 - RNA, 21 nt, Artificial Sequence
  Synthetic
aacagggaaccuacaacaugg

SEQ ID NO: 330568 - RNA, 22 nt, Artificial Sequence
  Synthetic
gaacagggaaccuacaacaugg

SEQ ID NO: 330569 - RNA, 23 nt, Artificial Sequence
  Synthetic
ugaacagggaaccuacaacaugg

SEQ ID NO: 330570 - RNA, 24 nt, Artificial Sequence
  Synthetic
gugaacagggaaccuacaacaugg

SEQ ID NO: 330571 - RNA, 18 nt, Artificial Sequence
  Synthetic
ucauuugucccaacaugg

SEQ ID NO: 330572 - RNA, 19 nt, Artificial Sequence
  Synthetic
gucauuugucccaacaugg

SEQ ID NO: 330573 - RNA, 20 nt, Artificial Sequence
  Synthetic
ugucauuugucccaacaugg

SEQ ID NO: 330574 - RNA, 21 nt, Artificial Sequence
  Synthetic
cugucauuugucccaacaugg

SEQ ID NO: 330575 - RNA, 22 nt, Artificial Sequence
  Synthetic
ucugucauuugucccaacaugg

SEQ ID NO: 330576 - RNA, 23 nt, Artificial Sequence
  Synthetic
aucugucauuugucccaacaugg

SEQ ID NO: 330577 - RNA, 24 nt, Artificial Sequence
  Synthetic
gaucugucauuugucccaacaugg

SEQ ID NO: 330578 - RNA, 18 nt, Artificial Sequence
  Synthetic
caucccaaaggaacaugg

SEQ ID NO: 330579 - RNA, 19 nt, Artificial Sequence
  Synthetic
ccaucccaaaggaacaugg

SEQ ID NO: 330580 - RNA, 20 nt, Artificial Sequence
  Synthetic
gccaucccaaaggaacaugg

SEQ ID NO: 330581 - RNA, 21 nt, Artificial Sequence
  Synthetic
ugccaucccaaaggaacaugg

SEQ ID NO: 330582 - RNA, 22 nt, Artificial Sequence
  Synthetic
cugccaucccaaaggaacaugg

SEQ ID NO: 330583 - RNA, 23 nt, Artificial Sequence
  Synthetic
ccugccaucccaaaggaacaugg

SEQ ID NO: 330584 - RNA, 24 nt, Artificial Sequence
  Synthetic
gccugccaucccaaaggaacaugg

SEQ ID NO: 330585 - RNA, 18 nt, Artificial Sequence
  Synthetic
agcagggaaguaacaugg

SEQ ID NO: 330586 - RNA, 19 nt, Artificial Sequence
  Synthetic
gagcagggaaguaacaugg

SEQ ID NO: 330587 - RNA, 20 nt, Artificial Sequence
  Synthetic
ugagcagggaaguaacaugg

SEQ ID NO: 330588 - RNA, 21 nt, Artificial Sequence
  Synthetic
uugagcagggaaguaacaugg

SEQ ID NO: 330589 - RNA, 22 nt, Artificial Sequence
  Synthetic
uuugagcagggaaguaacaugg

SEQ ID NO: 330590 - RNA, 23 nt, Artificial Sequence
  Synthetic
uuuugagcagggaaguaacaugg

SEQ ID NO: 330591 - RNA, 24 nt, Artificial Sequence
  Synthetic
auuuugagcagggaaguaacaugg

SEQ ID NO: 330592 - RNA, 18 nt, Artificial Sequence
  Synthetic
ugauagccaaacacaugg

SEQ ID NO: 330593 - RNA, 19 nt, Artificial Sequence
  Synthetic
gugauagccaaacacaugg

SEQ ID NO: 330594 - RNA, 20 nt, Artificial Sequence
  Synthetic
agugauagccaaacacaugg

SEQ ID NO: 330595 - RNA, 21 nt, Artificial Sequence
  Synthetic
gagugauagccaaacacaugg

SEQ ID NO: 330596 - RNA, 22 nt, Artificial Sequence
  Synthetic
ugagugauagccaaacacaugg

SEQ ID NO: 330597 - RNA, 23 nt, Artificial Sequence
  Synthetic
cugagugauagccaaacacaugg

SEQ ID NO: 330598 - RNA, 24 nt, Artificial Sequence
  Synthetic
acugagugauagccaaacacaugg

SEQ ID NO: 330599 - RNA, 18 nt, Artificial Sequence
  Synthetic
ugugguugucacacaugg

SEQ ID NO: 330600 - RNA, 19 nt, Artificial Sequence
  Synthetic
uugugguugucacacaugg

SEQ ID NO: 330601 - RNA, 20 nt, Artificial Sequence
  Synthetic
uuugugguugucacacaugg

SEQ ID NO: 330602 - RNA, 21 nt, Artificial Sequence
  Synthetic
auuugugguugucacacaugg

SEQ ID NO: 330603 - RNA, 22 nt, Artificial Sequence
  Synthetic
uauuugugguugucacacaugg

SEQ ID NO: 330604 - RNA, 23 nt, Artificial Sequence
  Synthetic
auauuugugguugucacacaugg

SEQ ID NO: 330605 - RNA, 24 nt, Artificial Sequence
  Synthetic
gauauuugugguugucacacaugg

SEQ ID NO: 330606 - RNA, 18 nt, Artificial Sequence
  Synthetic
ugagggccugacacaugg

SEQ ID NO: 330607 - RNA, 19 nt, Artificial Sequence
  Synthetic
gugagggccugacacaugg

SEQ ID NO: 330608 - RNA, 20 nt, Artificial Sequence
  Synthetic
ugugagggccugacacaugg

SEQ ID NO: 330609 - RNA, 21 nt, Artificial Sequence
  Synthetic
uugugagggccugacacaugg

SEQ ID NO: 330610 - RNA, 22 nt, Artificial Sequence
  Synthetic
cuugugagggccugacacaugg

SEQ ID NO: 330611 - RNA, 23 nt, Artificial Sequence
  Synthetic
gcuugugagggccugacacaugg

SEQ ID NO: 330612 - RNA, 24 nt, Artificial Sequence
  Synthetic
ggcuugugagggccugacacaugg

SEQ ID NO: 330613 - RNA, 18 nt, Artificial Sequence
  Synthetic
aagccacguuacacaugg

SEQ ID NO: 330614 - RNA, 19 nt, Artificial Sequence
  Synthetic
uaagccacguuacacaugg

SEQ ID NO: 330615 - RNA, 20 nt, Artificial Sequence
  Synthetic
auaagccacguuacacaugg

SEQ ID NO: 330616 - RNA, 21 nt, Artificial Sequence
  Synthetic
uauaagccacguuacacaugg

SEQ ID NO: 330617 - RNA, 22 nt, Artificial Sequence
  Synthetic
auauaagccacguuacacaugg

SEQ ID NO: 330618 - RNA, 23 nt, Artificial Sequence
  Synthetic
cauauaagccacguuacacaugg

SEQ ID NO: 330619 - RNA, 24 nt, Artificial Sequence
  Synthetic
ccauauaagccacguuacacaugg

SEQ ID NO: 330620 - RNA, 18 nt, Artificial Sequence
  Synthetic
acucacaguuccacaugg

SEQ ID NO: 330621 - RNA, 19 nt, Artificial Sequence
  Synthetic
gacucacaguuccacaugg

SEQ ID NO: 330622 - RNA, 20 nt, Artificial Sequence
  Synthetic
ggacucacaguuccacaugg

SEQ ID NO: 330623 - RNA, 21 nt, Artificial Sequence
  Synthetic
uggacucacaguuccacaugg

SEQ ID NO: 330624 - RNA, 22 nt, Artificial Sequence
  Synthetic
auggacucacaguuccacaugg

SEQ ID NO: 330625 - RNA, 23 nt, Artificial Sequence
  Synthetic
aauggacucacaguuccacaugg

SEQ ID NO: 330626 - RNA, 24 nt, Artificial Sequence
  Synthetic
uaauggacucacaguuccacaugg

SEQ ID NO: 330627 - RNA, 20 nt, Artificial Sequence
  Synthetic
ugacucacaguuccacaugg

SEQ ID NO: 330628 - RNA, 21 nt, Artificial Sequence
  Synthetic
uugacucacaguuccacaugg

SEQ ID NO: 330629 - RNA, 22 nt, Artificial Sequence
  Synthetic
auugacucacaguuccacaugg

SEQ ID NO: 330630 - RNA, 23 nt, Artificial Sequence
  Synthetic
aauugacucacaguuccacaugg

SEQ ID NO: 330631 - RNA, 24 nt, Artificial Sequence
  Synthetic
uaauugacucacaguuccacaugg

SEQ ID NO: 330632 - RNA, 18 nt, Artificial Sequence
  Synthetic
uccuuuguaggcacaugg

SEQ ID NO: 330633 - RNA, 19 nt, Artificial Sequence
  Synthetic
guccuuuguaggcacaugg

SEQ ID NO: 330634 - RNA, 20 nt, Artificial Sequence
  Synthetic
uguccuuuguaggcacaugg

SEQ ID NO: 330635 - RNA, 21 nt, Artificial Sequence
  Synthetic
auguccuuuguaggcacaugg

SEQ ID NO: 330636 - RNA, 22 nt, Artificial Sequence
  Synthetic
cauguccuuuguaggcacaugg

SEQ ID NO: 330637 - RNA, 23 nt, Artificial Sequence
  Synthetic
ucauguccuuuguaggcacaugg

SEQ ID NO: 330638 - RNA, 24 nt, Artificial Sequence
  Synthetic
uucauguccuuuguaggcacaugg

SEQ ID NO: 330639 - RNA, 18 nt, Artificial Sequence
  Synthetic
uccuuugcagcgacaugg

SEQ ID NO: 330640 - RNA, 19 nt, Artificial Sequence
  Synthetic
guccuuugcagcgacaugg

SEQ ID NO: 330641 - RNA, 20 nt, Artificial Sequence
  Synthetic
uguccuuugcagcgacaugg

SEQ ID NO: 330642 - RNA, 21 nt, Artificial Sequence
  Synthetic
auguccuuugcagcgacaugg

SEQ ID NO: 330643 - RNA, 22 nt, Artificial Sequence
  Synthetic
cauguccuuugcagcgacaugg

SEQ ID NO: 330644 - RNA, 23 nt, Artificial Sequence
  Synthetic
ucauguccuuugcagcgacaugg

SEQ ID NO: 330645 - RNA, 24 nt, Artificial Sequence
  Synthetic
aucauguccuuugcagcgacaugg

SEQ ID NO: 330646 - RNA, 18 nt, Artificial Sequence
  Synthetic
uccuuuguaaggacaugg

SEQ ID NO: 330647 - RNA, 19 nt, Artificial Sequence
  Synthetic
guccuuuguaaggacaugg

SEQ ID NO: 330648 - RNA, 20 nt, Artificial Sequence
  Synthetic
uguccuuuguaaggacaugg

SEQ ID NO: 330649 - RNA, 21 nt, Artificial Sequence
  Synthetic
guguccuuuguaaggacaugg

SEQ ID NO: 330650 - RNA, 22 nt, Artificial Sequence
  Synthetic
cguguccuuuguaaggacaugg

SEQ ID NO: 330651 - RNA, 23 nt, Artificial Sequence
  Synthetic
ucguguccuuuguaaggacaugg

SEQ ID NO: 330652 - RNA, 24 nt, Artificial Sequence
  Synthetic
uucguguccuuuguaaggacaugg

SEQ ID NO: 330653 - RNA, 18 nt, Artificial Sequence
  Synthetic
uccuuggcagggacaugg

SEQ ID NO: 330654 - RNA, 19 nt, Artificial Sequence
  Synthetic
guccuuggcagggacaugg

SEQ ID NO: 330655 - RNA, 20 nt, Artificial Sequence
  Synthetic
uguccuuggcagggacaugg

SEQ ID NO: 330656 - RNA, 21 nt, Artificial Sequence
  Synthetic
auguccuuggcagggacaugg

SEQ ID NO: 330657 - RNA, 22 nt, Artificial Sequence
  Synthetic
cauguccuuggcagggacaugg

SEQ ID NO: 330658 - RNA, 23 nt, Artificial Sequence
  Synthetic
ucauguccuuggcagggacaugg

SEQ ID NO: 330659 - RNA, 24 nt, Artificial Sequence
  Synthetic
uucauguccuuggcagggacaugg

SEQ ID NO: 330660 - RNA, 18 nt, Artificial Sequence
  Synthetic
uccguuguagggacaugg

SEQ ID NO: 330661 - RNA, 19 nt, Artificial Sequence
  Synthetic
guccguuguagggacaugg

SEQ ID NO: 330662 - RNA, 20 nt, Artificial Sequence
  Synthetic
uguccguuguagggacaugg

SEQ ID NO: 330663 - RNA, 21 nt, Artificial Sequence
  Synthetic
auguccguuguagggacaugg

SEQ ID NO: 330664 - RNA, 22 nt, Artificial Sequence
  Synthetic
cauguccguuguagggacaugg

SEQ ID NO: 330665 - RNA, 23 nt, Artificial Sequence
  Synthetic
ucauguccguuguagggacaugg

SEQ ID NO: 330666 - RNA, 24 nt, Artificial Sequence
  Synthetic
uucauguccguuguagggacaugg

SEQ ID NO: 330667 - RNA, 18 nt, Artificial Sequence
  Synthetic
uccuuuguagggacaugg

SEQ ID NO: 330668 - RNA, 19 nt, Artificial Sequence
  Synthetic
auccuuuguagggacaugg

SEQ ID NO: 330669 - RNA, 20 nt, Artificial Sequence
  Synthetic
cauccuuuguagggacaugg

SEQ ID NO: 330670 - RNA, 24 nt, Artificial Sequence
  Synthetic
uucacauccuuuguagggacaugg

SEQ ID NO: 330671 - RNA, 19 nt, Artificial Sequence
  Synthetic
guccuuuguagggacaugg

SEQ ID NO: 330672 - RNA, 20 nt, Artificial Sequence
  Synthetic
cguccuuuguagggacaugg

SEQ ID NO: 330673 - RNA, 21 nt, Artificial Sequence
  Synthetic
acguccuuuguagggacaugg

SEQ ID NO: 330674 - RNA, 22 nt, Artificial Sequence
  Synthetic
cacguccuuuguagggacaugg

SEQ ID NO: 330675 - RNA, 23 nt, Artificial Sequence
  Synthetic
ucacguccuuuguagggacaugg

SEQ ID NO: 330676 - RNA, 24 nt, Artificial Sequence
  Synthetic
uucacguccuuuguagggacaugg

SEQ ID NO: 330677 - RNA, 20 nt, Artificial Sequence
  Synthetic
uguccuuuguagggacaugg

SEQ ID NO: 330678 - RNA, 24 nt, Artificial Sequence
  Synthetic
uucauguccuuuguagggacaugg

SEQ ID NO: 330679 - RNA, 18 nt, Artificial Sequence
  Synthetic
ucuaguacuaugacaugg

SEQ ID NO: 330680 - RNA, 19 nt, Artificial Sequence
  Synthetic
uucuaguacuaugacaugg

SEQ ID NO: 330681 - RNA, 20 nt, Artificial Sequence
  Synthetic
uuucuaguacuaugacaugg

SEQ ID NO: 330682 - RNA, 21 nt, Artificial Sequence
  Synthetic
auuucuaguacuaugacaugg

SEQ ID NO: 330683 - RNA, 22 nt, Artificial Sequence
  Synthetic
uauuucuaguacuaugacaugg

SEQ ID NO: 330684 - RNA, 23 nt, Artificial Sequence
  Synthetic
auauuucuaguacuaugacaugg

SEQ ID NO: 330685 - RNA, 24 nt, Artificial Sequence
  Synthetic
uauauuucuaguacuaugacaugg

SEQ ID NO: 330686 - RNA, 18 nt, Artificial Sequence
  Synthetic
uauucuguauguacaugg

SEQ ID NO: 330687 - RNA, 19 nt, Artificial Sequence
  Synthetic
guauucuguauguacaugg

SEQ ID NO: 330688 - RNA, 20 nt, Artificial Sequence
  Synthetic
cguauucuguauguacaugg

SEQ ID NO: 330689 - RNA, 21 nt, Artificial Sequence
  Synthetic
acguauucuguauguacaugg

SEQ ID NO: 330690 - RNA, 22 nt, Artificial Sequence
  Synthetic
uacguauucuguauguacaugg

SEQ ID NO: 330691 - RNA, 23 nt, Artificial Sequence
  Synthetic
auacguauucuguauguacaugg

SEQ ID NO: 330692 - RNA, 24 nt, Artificial Sequence
  Synthetic
aauacguauucuguauguacaugg

SEQ ID NO: 330693 - RNA, 18 nt, Artificial Sequence
  Synthetic
ccaauguugcuuacaugg

SEQ ID NO: 330694 - RNA, 19 nt, Artificial Sequence
  Synthetic
uccaauguugcuuacaugg

SEQ ID NO: 330695 - RNA, 20 nt, Artificial Sequence
  Synthetic
cuccaauguugcuuacaugg

SEQ ID NO: 330696 - RNA, 21 nt, Artificial Sequence
  Synthetic
ucuccaauguugcuuacaugg

SEQ ID NO: 330697 - RNA, 22 nt, Artificial Sequence
  Synthetic
uucuccaauguugcuuacaugg

SEQ ID NO: 330698 - RNA, 23 nt, Artificial Sequence
  Synthetic
auucuccaauguugcuuacaugg

SEQ ID NO: 330699 - RNA, 24 nt, Artificial Sequence
  Synthetic
uauucuccaauguugcuuacaugg

SEQ ID NO: 330700 - RNA, 18 nt, Artificial Sequence
  Synthetic
guggauauaguuacaugg

SEQ ID NO: 330701 - RNA, 19 nt, Artificial Sequence
  Synthetic
aguggauauaguuacaugg

SEQ ID NO: 330702 - RNA, 20 nt, Artificial Sequence
  Synthetic
uaguggauauaguuacaugg

SEQ ID NO: 330703 - RNA, 21 nt, Artificial Sequence
  Synthetic
uuaguggauauaguuacaugg

SEQ ID NO: 330704 - RNA, 22 nt, Artificial Sequence
  Synthetic
uuuaguggauauaguuacaugg

SEQ ID NO: 330705 - RNA, 23 nt, Artificial Sequence
  Synthetic
cuuuaguggauauaguuacaugg

SEQ ID NO: 330706 - RNA, 24 nt, Artificial Sequence
  Synthetic
acuuuaguggauauaguuacaugg

SEQ ID NO: 330707 - RNA, 18 nt, Artificial Sequence
  Synthetic
uuaaagauccacccaugg

SEQ ID NO: 330708 - RNA, 19 nt, Artificial Sequence
  Synthetic
uuuaaagauccacccaugg

SEQ ID NO: 330709 - RNA, 20 nt, Artificial Sequence
  Synthetic
uuuuaaagauccacccaugg

SEQ ID NO: 330710 - RNA, 21 nt, Artificial Sequence
  Synthetic
guuuuaaagauccacccaugg

SEQ ID NO: 330711 - RNA, 22 nt, Artificial Sequence
  Synthetic
uguuuuaaagauccacccaugg

SEQ ID NO: 330712 - RNA, 23 nt, Artificial Sequence
  Synthetic
guguuuuaaagauccacccaugg

SEQ ID NO: 330713 - RNA, 24 nt, Artificial Sequence
  Synthetic
uguguuuuaaagauccacccaugg

SEQ ID NO: 330714 - RNA, 18 nt, Artificial Sequence
  Synthetic
ggcuccuuuuagccaugg

SEQ ID NO: 330715 - RNA, 19 nt, Artificial Sequence
  Synthetic
uggcuccuuuuagccaugg

SEQ ID NO: 330716 - RNA, 20 nt, Artificial Sequence
  Synthetic
uuggcuccuuuuagccaugg

SEQ ID NO: 330717 - RNA, 21 nt, Artificial Sequence
  Synthetic
cuuggcuccuuuuagccaugg

SEQ ID NO: 330718 - RNA, 22 nt, Artificial Sequence
  Synthetic
ucuuggcuccuuuuagccaugg

SEQ ID NO: 330719 - RNA, 23 nt, Artificial Sequence
  Synthetic
aucuuggcuccuuuuagccaugg

SEQ ID NO: 330720 - RNA, 24 nt, Artificial Sequence
  Synthetic
uaucuuggcuccuuuuagccaugg

SEQ ID NO: 330721 - RNA, 18 nt, Artificial Sequence
  Synthetic
accuaugugaggccaugg

SEQ ID NO: 330722 - RNA, 19 nt, Artificial Sequence
  Synthetic
caccuaugugaggccaugg

SEQ ID NO: 330723 - RNA, 20 nt, Artificial Sequence
  Synthetic
ccaccuaugugaggccaugg

SEQ ID NO: 330724 - RNA, 21 nt, Artificial Sequence
  Synthetic
uccaccuaugugaggccaugg

SEQ ID NO: 330725 - RNA, 22 nt, Artificial Sequence
  Synthetic
uuccaccuaugugaggccaugg

SEQ ID NO: 330726 - RNA, 23 nt, Artificial Sequence
  Synthetic
uuuccaccuaugugaggccaugg

SEQ ID NO: 330727 - RNA, 24 nt, Artificial Sequence
  Synthetic
cuuuccaccuaugugaggccaugg

SEQ ID NO: 330728 - RNA, 18 nt, Artificial Sequence
  Synthetic
aauguguucaugccaugg

SEQ ID NO: 330729 - RNA, 19 nt, Artificial Sequence
  Synthetic
aaauguguucaugccaugg

SEQ ID NO: 330730 - RNA, 20 nt, Artificial Sequence
  Synthetic
aaaauguguucaugccaugg

SEQ ID NO: 330731 - RNA, 21 nt, Artificial Sequence
  Synthetic
gaaaauguguucaugccaugg

SEQ ID NO: 330732 - RNA, 22 nt, Artificial Sequence
  Synthetic
agaaaauguguucaugccaugg

SEQ ID NO: 330733 - RNA, 23 nt, Artificial Sequence
  Synthetic
uagaaaauguguucaugccaugg

SEQ ID NO: 330734 - RNA, 24 nt, Artificial Sequence
  Synthetic
cuagaaaauguguucaugccaugg

SEQ ID NO: 330735 - RNA, 18 nt, Artificial Sequence
  Synthetic
guggugacuaauccaugg

SEQ ID NO: 330736 - RNA, 19 nt, Artificial Sequence
  Synthetic
aguggugacuaauccaugg

SEQ ID NO: 330737 - RNA, 20 nt, Artificial Sequence
  Synthetic
uaguggugacuaauccaugg

SEQ ID NO: 330738 - RNA, 21 nt, Artificial Sequence
  Synthetic
uuaguggugacuaauccaugg

SEQ ID NO: 330739 - RNA, 22 nt, Artificial Sequence
  Synthetic
uuuaguggugacuaauccaugg

SEQ ID NO: 330740 - RNA, 23 nt, Artificial Sequence
  Synthetic
auuuaguggugacuaauccaugg

SEQ ID NO: 330741 - RNA, 24 nt, Artificial Sequence
  Synthetic
uauuuaguggugacuaauccaugg

SEQ ID NO: 330742 - RNA, 18 nt, Artificial Sequence
  Synthetic
ggccccuuuuauccaugg

SEQ ID NO: 330743 - RNA, 19 nt, Artificial Sequence
  Synthetic
uggccccuuuuauccaugg

SEQ ID NO: 330744 - RNA, 20 nt, Artificial Sequence
  Synthetic
uuggccccuuuuauccaugg

SEQ ID NO: 330745 - RNA, 21 nt, Artificial Sequence
  Synthetic
cuuggccccuuuuauccaugg

SEQ ID NO: 330746 - RNA, 22 nt, Artificial Sequence
  Synthetic
ccuuggccccuuuuauccaugg

SEQ ID NO: 330747 - RNA, 23 nt, Artificial Sequence
  Synthetic
accuuggccccuuuuauccaugg

SEQ ID NO: 330748 - RNA, 24 nt, Artificial Sequence
  Synthetic
uaccuuggccccuuuuauccaugg

SEQ ID NO: 330749 - RNA, 18 nt, Artificial Sequence
  Synthetic
aauugcacugaagcaugg

SEQ ID NO: 330750 - RNA, 19 nt, Artificial Sequence
  Synthetic
uaauugcacugaagcaugg

SEQ ID NO: 330751 - RNA, 20 nt, Artificial Sequence
  Synthetic
cuaauugcacugaagcaugg

SEQ ID NO: 330752 - RNA, 21 nt, Artificial Sequence
  Synthetic
ucuaauugcacugaagcaugg

SEQ ID NO: 330753 - RNA, 22 nt, Artificial Sequence
  Synthetic
gucuaauugcacugaagcaugg

SEQ ID NO: 330754 - RNA, 23 nt, Artificial Sequence
  Synthetic
ugucuaauugcacugaagcaugg

SEQ ID NO: 330755 - RNA, 24 nt, Artificial Sequence
  Synthetic
uugucuaauugcacugaagcaugg

SEQ ID NO: 330756 - RNA, 18 nt, Artificial Sequence
  Synthetic
caugggaaaacagcaugg

SEQ ID NO: 330757 - RNA, 19 nt, Artificial Sequence
  Synthetic
acaugggaaaacagcaugg

SEQ ID NO: 330758 - RNA, 20 nt, Artificial Sequence
  Synthetic
cacaugggaaaacagcaugg

SEQ ID NO: 330759 - RNA, 21 nt, Artificial Sequence
  Synthetic
ucacaugggaaaacagcaugg

SEQ ID NO: 330760 - RNA, 22 nt, Artificial Sequence
  Synthetic
aucacaugggaaaacagcaugg

SEQ ID NO: 330761 - RNA, 23 nt, Artificial Sequence
  Synthetic
uaucacaugggaaaacagcaugg

SEQ ID NO: 330762 - RNA, 24 nt, Artificial Sequence
  Synthetic
cuaucacaugggaaaacagcaugg

SEQ ID NO: 330763 - RNA, 21 nt, Artificial Sequence
  Synthetic
acuaucaugagaacagcaugg

SEQ ID NO: 330764 - RNA, 22 nt, Artificial Sequence
  Synthetic
cacuaucaugagaacagcaugg

SEQ ID NO: 330765 - RNA, 23 nt, Artificial Sequence
  Synthetic
ucacuaucaugagaacagcaugg

SEQ ID NO: 330766 - RNA, 24 nt, Artificial Sequence
  Synthetic
cucacuaucaugagaacagcaugg

SEQ ID NO: 330767 - RNA, 21 nt, Artificial Sequence
  Synthetic
gcuaucaugagaacagcaugg

SEQ ID NO: 330768 - RNA, 22 nt, Artificial Sequence
  Synthetic
cgcuaucaugagaacagcaugg

SEQ ID NO: 330769 - RNA, 23 nt, Artificial Sequence
  Synthetic
ccgcuaucaugagaacagcaugg

SEQ ID NO: 330770 - RNA, 24 nt, Artificial Sequence
  Synthetic
cccgcuaucaugagaacagcaugg

SEQ ID NO: 330771 - RNA, 18 nt, Artificial Sequence
  Synthetic
acucacaguucagcaugg

SEQ ID NO: 330772 - RNA, 19 nt, Artificial Sequence
  Synthetic
gacucacaguucagcaugg

SEQ ID NO: 330773 - RNA, 20 nt, Artificial Sequence
  Synthetic
ugacucacaguucagcaugg

SEQ ID NO: 330774 - RNA, 21 nt, Artificial Sequence
  Synthetic
uugacucacaguucagcaugg

SEQ ID NO: 330775 - RNA, 22 nt, Artificial Sequence
  Synthetic
auugacucacaguucagcaugg

SEQ ID NO: 330776 - RNA, 23 nt, Artificial Sequence
  Synthetic
aauugacucacaguucagcaugg

SEQ ID NO: 330777 - RNA, 24 nt, Artificial Sequence
  Synthetic
uaauugacucacaguucagcaugg

SEQ ID NO: 330778 - RNA, 18 nt, Artificial Sequence
  Synthetic
auuaagaauaaggcaugg

SEQ ID NO: 330779 - RNA, 19 nt, Artificial Sequence
  Synthetic
cauuaagaauaaggcaugg

SEQ ID NO: 330780 - RNA, 20 nt, Artificial Sequence
  Synthetic
acauuaagaauaaggcaugg

SEQ ID NO: 330781 - RNA, 21 nt, Artificial Sequence
  Synthetic
gacauuaagaauaaggcaugg

SEQ ID NO: 330782 - RNA, 22 nt, Artificial Sequence
  Synthetic
ggacauuaagaauaaggcaugg

SEQ ID NO: 330783 - RNA, 23 nt, Artificial Sequence
  Synthetic
gggacauuaagaauaaggcaugg

SEQ ID NO: 330784 - RNA, 24 nt, Artificial Sequence
  Synthetic
ggggacauuaagaauaaggcaugg

SEQ ID NO: 330785 - RNA, 18 nt, Artificial Sequence
  Synthetic
auuggauaaggggcaugg

SEQ ID NO: 330786 - RNA, 19 nt, Artificial Sequence
  Synthetic
aauuggauaaggggcaugg

SEQ ID NO: 330787 - RNA, 20 nt, Artificial Sequence
  Synthetic
gaauuggauaaggggcaugg

SEQ ID NO: 330788 - RNA, 21 nt, Artificial Sequence
  Synthetic
ugaauuggauaaggggcaugg

SEQ ID NO: 330789 - RNA, 22 nt, Artificial Sequence
  Synthetic
augaauuggauaaggggcaugg

SEQ ID NO: 330790 - RNA, 23 nt, Artificial Sequence
  Synthetic
gaugaauuggauaaggggcaugg

SEQ ID NO: 330791 - RNA, 24 nt, Artificial Sequence
  Synthetic
ggaugaauuggauaaggggcaugg

SEQ ID NO: 330792 - RNA, 18 nt, Artificial Sequence
  Synthetic
uggcaguuaguugcaugg

SEQ ID NO: 330793 - RNA, 19 nt, Artificial Sequence
  Synthetic
auggcaguuaguugcaugg

SEQ ID NO: 330794 - RNA, 20 nt, Artificial Sequence
  Synthetic
uauggcaguuaguugcaugg

SEQ ID NO: 330795 - RNA, 21 nt, Artificial Sequence
  Synthetic
uuauggcaguuaguugcaugg

SEQ ID NO: 330796 - RNA, 22 nt, Artificial Sequence
  Synthetic
guuauggcaguuaguugcaugg

SEQ ID NO: 330797 - RNA, 23 nt, Artificial Sequence
  Synthetic
cguuauggcaguuaguugcaugg

SEQ ID NO: 330798 - RNA, 24 nt, Artificial Sequence
  Synthetic
ucguuauggcaguuaguugcaugg

SEQ ID NO: 330799 - RNA, 18 nt, Artificial Sequence
  Synthetic
guaucucaauuugcaugg

SEQ ID NO: 330800 - RNA, 19 nt, Artificial Sequence
  Synthetic
uguaucucaauuugcaugg

SEQ ID NO: 330801 - RNA, 20 nt, Artificial Sequence
  Synthetic
cuguaucucaauuugcaugg

SEQ ID NO: 330802 - RNA, 21 nt, Artificial Sequence
  Synthetic
ucuguaucucaauuugcaugg

SEQ ID NO: 330803 - RNA, 22 nt, Artificial Sequence
  Synthetic
aucuguaucucaauuugcaugg

SEQ ID NO: 330804 - RNA, 23 nt, Artificial Sequence
  Synthetic
uaucuguaucucaauuugcaugg

SEQ ID NO: 330805 - RNA, 24 nt, Artificial Sequence
  Synthetic
uuaucuguaucucaauuugcaugg

SEQ ID NO: 330806 - RNA, 18 nt, Artificial Sequence
  Synthetic
acucacugguuugcaugg

SEQ ID NO: 330807 - RNA, 19 nt, Artificial Sequence
  Synthetic
gacucacugguuugcaugg

SEQ ID NO: 330808 - RNA, 20 nt, Artificial Sequence
  Synthetic
ugacucacugguuugcaugg

SEQ ID NO: 330809 - RNA, 21 nt, Artificial Sequence
  Synthetic
uugacucacugguuugcaugg

SEQ ID NO: 330810 - RNA, 22 nt, Artificial Sequence
  Synthetic
auugacucacugguuugcaugg

SEQ ID NO: 330811 - RNA, 23 nt, Artificial Sequence
  Synthetic
aauugacucacugguuugcaugg

SEQ ID NO: 330812 - RNA, 24 nt, Artificial Sequence
  Synthetic
uaauugacucacugguuugcaugg

SEQ ID NO: 330813 - RNA, 18 nt, Artificial Sequence
  Synthetic
uuagucauuuuugcaugg

SEQ ID NO: 330814 - RNA, 19 nt, Artificial Sequence
  Synthetic
uuuagucauuuuugcaugg

SEQ ID NO: 330815 - RNA, 20 nt, Artificial Sequence
  Synthetic
guuuagucauuuuugcaugg

SEQ ID NO: 330816 - RNA, 21 nt, Artificial Sequence
  Synthetic
cguuuagucauuuuugcaugg

SEQ ID NO: 330817 - RNA, 22 nt, Artificial Sequence
  Synthetic
ucguuuagucauuuuugcaugg

SEQ ID NO: 330818 - RNA, 23 nt, Artificial Sequence
  Synthetic
aucguuuagucauuuuugcaugg

SEQ ID NO: 330819 - RNA, 24 nt, Artificial Sequence
  Synthetic
aaucguuuagucauuuuugcaugg

SEQ ID NO: 330820 - RNA, 18 nt, Artificial Sequence
  Synthetic
ggaaacuuaaaaucaugg

SEQ ID NO: 330821 - RNA, 19 nt, Artificial Sequence
  Synthetic
aggaaacuuaaaaucaugg

SEQ ID NO: 330822 - RNA, 20 nt, Artificial Sequence
  Synthetic
caggaaacuuaaaaucaugg

SEQ ID NO: 330823 - RNA, 21 nt, Artificial Sequence
  Synthetic
ucaggaaacuuaaaaucaugg

SEQ ID NO: 330824 - RNA, 22 nt, Artificial Sequence
  Synthetic
cucaggaaacuuaaaaucaugg

SEQ ID NO: 330825 - RNA, 23 nt, Artificial Sequence
  Synthetic
ccucaggaaacuuaaaaucaugg

SEQ ID NO: 330826 - RNA, 24 nt, Artificial Sequence
  Synthetic
gccucaggaaacuuaaaaucaugg

SEQ ID NO: 330827 - RNA, 18 nt, Artificial Sequence
  Synthetic
aagucuuuuaaaucaugg

SEQ ID NO: 330828 - RNA, 19 nt, Artificial Sequence
  Synthetic
gaagucuuuuaaaucaugg

SEQ ID NO: 330829 - RNA, 20 nt, Artificial Sequence
  Synthetic
agaagucuuuuaaaucaugg

SEQ ID NO: 330830 - RNA, 21 nt, Artificial Sequence
  Synthetic
aagaagucuuuuaaaucaugg

SEQ ID NO: 330831 - RNA, 22 nt, Artificial Sequence
  Synthetic
aaagaagucuuuuaaaucaugg

SEQ ID NO: 330832 - RNA, 23 nt, Artificial Sequence
  Synthetic
gaaagaagucuuuuaaaucaugg

SEQ ID NO: 330833 - RNA, 24 nt, Artificial Sequence
  Synthetic
agaaagaagucuuuuaaaucaugg

SEQ ID NO: 330834 - RNA, 18 nt, Artificial Sequence
  Synthetic
gaggccucacaaucaugg

SEQ ID NO: 330835 - RNA, 19 nt, Artificial Sequence
  Synthetic
agaggccucacaaucaugg

SEQ ID NO: 330836 - RNA, 20 nt, Artificial Sequence
  Synthetic
gagaggccucacaaucaugg

SEQ ID NO: 330837 - RNA, 21 nt, Artificial Sequence
  Synthetic
ggagaggccucacaaucaugg

SEQ ID NO: 330838 - RNA, 22 nt, Artificial Sequence
  Synthetic
uggagaggccucacaaucaugg

SEQ ID NO: 330839 - RNA, 23 nt, Artificial Sequence
  Synthetic
cuggagaggccucacaaucaugg

SEQ ID NO: 330840 - RNA, 24 nt, Artificial Sequence
  Synthetic
gcuggagaggccucacaaucaugg

SEQ ID NO: 330841 - RNA, 19 nt, Artificial Sequence
  Synthetic
ggaggccucacaaucaugg

SEQ ID NO: 330842 - RNA, 20 nt, Artificial Sequence
  Synthetic
gggaggccucacaaucaugg

SEQ ID NO: 330843 - RNA, 21 nt, Artificial Sequence
  Synthetic
agggaggccucacaaucaugg

SEQ ID NO: 330844 - RNA, 22 nt, Artificial Sequence
  Synthetic
uagggaggccucacaaucaugg

SEQ ID NO: 330845 - RNA, 23 nt, Artificial Sequence
  Synthetic
cuagggaggccucacaaucaugg

SEQ ID NO: 330846 - RNA, 24 nt, Artificial Sequence
  Synthetic
acuagggaggccucacaaucaugg

SEQ ID NO: 330847 - RNA, 19 nt, Artificial Sequence
  Synthetic
aggaaacuuacaaucaugg

SEQ ID NO: 330848 - RNA, 20 nt, Artificial Sequence
  Synthetic
caggaaacuuacaaucaugg

SEQ ID NO: 330849 - RNA, 21 nt, Artificial Sequence
  Synthetic
ucaggaaacuuacaaucaugg

SEQ ID NO: 330850 - RNA, 22 nt, Artificial Sequence
  Synthetic
cucaggaaacuuacaaucaugg

SEQ ID NO: 330851 - RNA, 23 nt, Artificial Sequence
  Synthetic
ccucaggaaacuuacaaucaugg

SEQ ID NO: 330852 - RNA, 24 nt, Artificial Sequence
  Synthetic
gccucaggaaacuuacaaucaugg

SEQ ID NO: 330853 - RNA, 18 nt, Artificial Sequence
  Synthetic
ggguuuggccaaucaugg

SEQ ID NO: 330854 - RNA, 19 nt, Artificial Sequence
  Synthetic
aggguuuggccaaucaugg

SEQ ID NO: 330855 - RNA, 20 nt, Artificial Sequence
  Synthetic
uaggguuuggccaaucaugg

SEQ ID NO: 330856 - RNA, 21 nt, Artificial Sequence
  Synthetic
guaggguuuggccaaucaugg

SEQ ID NO: 330857 - RNA, 22 nt, Artificial Sequence
  Synthetic
gguaggguuuggccaaucaugg

SEQ ID NO: 330858 - RNA, 23 nt, Artificial Sequence
  Synthetic
ugguaggguuuggccaaucaugg

SEQ ID NO: 330859 - RNA, 24 nt, Artificial Sequence
  Synthetic
uugguaggguuuggccaaucaugg

SEQ ID NO: 330860 - RNA, 18 nt, Artificial Sequence
  Synthetic
cagauaauugaaucaugg

SEQ ID NO: 330861 - RNA, 19 nt, Artificial Sequence
  Synthetic
gcagauaauugaaucaugg

SEQ ID NO: 330862 - RNA, 20 nt, Artificial Sequence
  Synthetic
ugcagauaauugaaucaugg

SEQ ID NO: 330863 - RNA, 21 nt, Artificial Sequence
  Synthetic
gugcagauaauugaaucaugg

SEQ ID NO: 330864 - RNA, 22 nt, Artificial Sequence
  Synthetic
ggugcagauaauugaaucaugg

SEQ ID NO: 330865 - RNA, 23 nt, Artificial Sequence
  Synthetic
aggugcagauaauugaaucaugg

SEQ ID NO: 330866 - RNA, 24 nt, Artificial Sequence
  Synthetic
caggugcagauaauugaaucaugg

SEQ ID NO: 330867 - RNA, 18 nt, Artificial Sequence
  Synthetic
ggaaacuuauaaucaugg

SEQ ID NO: 330868 - RNA, 19 nt, Artificial Sequence
  Synthetic
aggaaacuuauaaucaugg

SEQ ID NO: 330869 - RNA, 20 nt, Artificial Sequence
  Synthetic
caggaaacuuauaaucaugg

SEQ ID NO: 330870 - RNA, 21 nt, Artificial Sequence
  Synthetic
ucaggaaacuuauaaucaugg

SEQ ID NO: 330871 - RNA, 22 nt, Artificial Sequence
  Synthetic
cucaggaaacuuauaaucaugg

SEQ ID NO: 330872 - RNA, 23 nt, Artificial Sequence
  Synthetic
ccucaggaaacuuauaaucaugg

SEQ ID NO: 330873 - RNA, 24 nt, Artificial Sequence
  Synthetic
gccucaggaaacuuauaaucaugg

SEQ ID NO: 330874 - RNA, 18 nt, Artificial Sequence
  Synthetic
gaacacauggacucaugg

SEQ ID NO: 330875 - RNA, 19 nt, Artificial Sequence
  Synthetic
agaacacauggacucaugg

SEQ ID NO: 330876 - RNA, 20 nt, Artificial Sequence
  Synthetic
gagaacacauggacucaugg

SEQ ID NO: 330877 - RNA, 21 nt, Artificial Sequence
  Synthetic
ugagaacacauggacucaugg

SEQ ID NO: 330878 - RNA, 22 nt, Artificial Sequence
  Synthetic
augagaacacauggacucaugg

SEQ ID NO: 330879 - RNA, 23 nt, Artificial Sequence
  Synthetic
aaugagaacacauggacucaugg

SEQ ID NO: 330880 - RNA, 24 nt, Artificial Sequence
  Synthetic
caaugagaacacauggacucaugg

SEQ ID NO: 330881 - RNA, 18 nt, Artificial Sequence
  Synthetic
gggagcuuuuacucaugg

SEQ ID NO: 330882 - RNA, 19 nt, Artificial Sequence
  Synthetic
agggagcuuuuacucaugg

SEQ ID NO: 330883 - RNA, 20 nt, Artificial Sequence
  Synthetic
cagggagcuuuuacucaugg

SEQ ID NO: 330884 - RNA, 21 nt, Artificial Sequence
  Synthetic
ucagggagcuuuuacucaugg

SEQ ID NO: 330885 - RNA, 22 nt, Artificial Sequence
  Synthetic
cucagggagcuuuuacucaugg

SEQ ID NO: 330886 - RNA, 23 nt, Artificial Sequence
  Synthetic
ccucagggagcuuuuacucaugg

SEQ ID NO: 330887 - RNA, 24 nt, Artificial Sequence
  Synthetic
gccucagggagcuuuuacucaugg

SEQ ID NO: 330888 - RNA, 18 nt, Artificial Sequence
  Synthetic
gggaguuuuugcucaugg

SEQ ID NO: 330889 - RNA, 19 nt, Artificial Sequence
  Synthetic
agggaguuuuugcucaugg

SEQ ID NO: 330890 - RNA, 20 nt, Artificial Sequence
  Synthetic
cagggaguuuuugcucaugg

SEQ ID NO: 330891 - RNA, 21 nt, Artificial Sequence
  Synthetic
ucagggaguuuuugcucaugg

SEQ ID NO: 330892 - RNA, 22 nt, Artificial Sequence
  Synthetic
cucagggaguuuuugcucaugg

SEQ ID NO: 330893 - RNA, 23 nt, Artificial Sequence
  Synthetic
ccucagggaguuuuugcucaugg

SEQ ID NO: 330894 - RNA, 24 nt, Artificial Sequence
  Synthetic
gccucagggaguuuuugcucaugg

SEQ ID NO: 330895 - RNA, 18 nt, Artificial Sequence
  Synthetic
ugguuuuaaaucucaugg

SEQ ID NO: 330896 - RNA, 19 nt, Artificial Sequence
  Synthetic
uugguuuuaaaucucaugg

SEQ ID NO: 330897 - RNA, 20 nt, Artificial Sequence
  Synthetic
cuugguuuuaaaucucaugg

SEQ ID NO: 330898 - RNA, 21 nt, Artificial Sequence
  Synthetic
ucuugguuuuaaaucucaugg

SEQ ID NO: 330899 - RNA, 22 nt, Artificial Sequence
  Synthetic
cucuugguuuuaaaucucaugg

SEQ ID NO: 330900 - RNA, 23 nt, Artificial Sequence
  Synthetic
acucuugguuuuaaaucucaugg

SEQ ID NO: 330901 - RNA, 24 nt, Artificial Sequence
  Synthetic
aacucuugguuuuaaaucucaugg

SEQ ID NO: 330902 - RNA, 18 nt, Artificial Sequence
  Synthetic
ucugugacucucucaugg

SEQ ID NO: 330903 - RNA, 19 nt, Artificial Sequence
  Synthetic
gucugugacucucucaugg

SEQ ID NO: 330904 - RNA, 20 nt, Artificial Sequence
  Synthetic
agucugugacucucucaugg

SEQ ID NO: 330905 - RNA, 21 nt, Artificial Sequence
  Synthetic
uagucugugacucucucaugg

SEQ ID NO: 330906 - RNA, 22 nt, Artificial Sequence
  Synthetic
uuagucugugacucucucaugg

SEQ ID NO: 330907 - RNA, 23 nt, Artificial Sequence
  Synthetic
cuuagucugugacucucucaugg

SEQ ID NO: 330908 - RNA, 24 nt, Artificial Sequence
  Synthetic
ucuuagucugugacucucucaugg

SEQ ID NO: 330909 - RNA, 18 nt, Artificial Sequence
  Synthetic
ucagaaagguucucaugg

SEQ ID NO: 330910 - RNA, 19 nt, Artificial Sequence
  Synthetic
aucagaaagguucucaugg

SEQ ID NO: 330911 - RNA, 20 nt, Artificial Sequence
  Synthetic
uaucagaaagguucucaugg

SEQ ID NO: 330912 - RNA, 21 nt, Artificial Sequence
  Synthetic
guaucagaaagguucucaugg

SEQ ID NO: 330913 - RNA, 22 nt, Artificial Sequence
  Synthetic
aguaucagaaagguucucaugg

SEQ ID NO: 330914 - RNA, 23 nt, Artificial Sequence
  Synthetic
uaguaucagaaagguucucaugg

SEQ ID NO: 330915 - RNA, 24 nt, Artificial Sequence
  Synthetic
guaguaucagaaagguucucaugg

SEQ ID NO: 330916 - RNA, 18 nt, Artificial Sequence
  Synthetic
gcaggauuggagucaugg

SEQ ID NO: 330917 - RNA, 19 nt, Artificial Sequence
  Synthetic
agcaggauuggagucaugg

SEQ ID NO: 330918 - RNA, 20 nt, Artificial Sequence
  Synthetic
uagcaggauuggagucaugg

SEQ ID NO: 330919 - RNA, 21 nt, Artificial Sequence
  Synthetic
cuagcaggauuggagucaugg

SEQ ID NO: 330920 - RNA, 22 nt, Artificial Sequence
  Synthetic
gcuagcaggauuggagucaugg

SEQ ID NO: 330921 - RNA, 23 nt, Artificial Sequence
  Synthetic
ugcuagcaggauuggagucaugg

SEQ ID NO: 330922 - RNA, 24 nt, Artificial Sequence
  Synthetic
cugcuagcaggauuggagucaugg

SEQ ID NO: 330923 - RNA, 18 nt, Artificial Sequence
  Synthetic
gagaaaggucugucaugg

SEQ ID NO: 330924 - RNA, 19 nt, Artificial Sequence
  Synthetic
agagaaaggucugucaugg

SEQ ID NO: 330925 - RNA, 20 nt, Artificial Sequence
  Synthetic
aagagaaaggucugucaugg

SEQ ID NO: 330926 - RNA, 21 nt, Artificial Sequence
  Synthetic
gaagagaaaggucugucaugg

SEQ ID NO: 330927 - RNA, 22 nt, Artificial Sequence
  Synthetic
ggaagagaaaggucugucaugg

SEQ ID NO: 330928 - RNA, 23 nt, Artificial Sequence
  Synthetic
aggaagagaaaggucugucaugg

SEQ ID NO: 330929 - RNA, 24 nt, Artificial Sequence
  Synthetic
uaggaagagaaaggucugucaugg

SEQ ID NO: 330930 - RNA, 18 nt, Artificial Sequence
  Synthetic
aauccccaggugucaugg

SEQ ID NO: 330931 - RNA, 19 nt, Artificial Sequence
  Synthetic
aaauccccaggugucaugg

SEQ ID NO: 330932 - RNA, 20 nt, Artificial Sequence
  Synthetic
aaaauccccaggugucaugg

SEQ ID NO: 330933 - RNA, 21 nt, Artificial Sequence
  Synthetic
caaaauccccaggugucaugg

SEQ ID NO: 330934 - RNA, 22 nt, Artificial Sequence
  Synthetic
ccaaaauccccaggugucaugg

SEQ ID NO: 330935 - RNA, 23 nt, Artificial Sequence
  Synthetic
uccaaaauccccaggugucaugg

SEQ ID NO: 330936 - RNA, 24 nt, Artificial Sequence
  Synthetic
cuccaaaauccccaggugucaugg

SEQ ID NO: 330937 - RNA, 18 nt, Artificial Sequence
  Synthetic
caagggggcucuucaugg

SEQ ID NO: 330938 - RNA, 19 nt, Artificial Sequence
  Synthetic
gcaagggggcucuucaugg

SEQ ID NO: 330939 - RNA, 20 nt, Artificial Sequence
  Synthetic
ugcaagggggcucuucaugg

SEQ ID NO: 330940 - RNA, 21 nt, Artificial Sequence
  Synthetic
gugcaagggggcucuucaugg

SEQ ID NO: 330941 - RNA, 22 nt, Artificial Sequence
  Synthetic
ugugcaagggggcucuucaugg

SEQ ID NO: 330942 - RNA, 23 nt, Artificial Sequence
  Synthetic
uugugcaagggggcucuucaugg

SEQ ID NO: 330943 - RNA, 24 nt, Artificial Sequence
  Synthetic
cuugugcaagggggcucuucaugg

SEQ ID NO: 330944 - RNA, 18 nt, Artificial Sequence
  Synthetic
ccaucgcuagguucaugg

SEQ ID NO: 330945 - RNA, 19 nt, Artificial Sequence
  Synthetic
cccaucgcuagguucaugg

SEQ ID NO: 330946 - RNA, 20 nt, Artificial Sequence
  Synthetic
acccaucgcuagguucaugg

SEQ ID NO: 330947 - RNA, 21 nt, Artificial Sequence
  Synthetic
cacccaucgcuagguucaugg

SEQ ID NO: 330948 - RNA, 22 nt, Artificial Sequence
  Synthetic
ucacccaucgcuagguucaugg

SEQ ID NO: 330949 - RNA, 23 nt, Artificial Sequence
  Synthetic
cucacccaucgcuagguucaugg

SEQ ID NO: 330950 - RNA, 24 nt, Artificial Sequence
  Synthetic
ucucacccaucgcuagguucaugg

SEQ ID NO: 330951 - RNA, 18 nt, Artificial Sequence
  Synthetic
guggugccagaaagaugg

SEQ ID NO: 330952 - RNA, 19 nt, Artificial Sequence
  Synthetic
aguggugccagaaagaugg

SEQ ID NO: 330953 - RNA, 20 nt, Artificial Sequence
  Synthetic
aaguggugccagaaagaugg

SEQ ID NO: 330954 - RNA, 21 nt, Artificial Sequence
  Synthetic
aaaguggugccagaaagaugg

SEQ ID NO: 330955 - RNA, 22 nt, Artificial Sequence
  Synthetic
caaaguggugccagaaagaugg

SEQ ID NO: 330956 - RNA, 23 nt, Artificial Sequence
  Synthetic
gcaaaguggugccagaaagaugg

SEQ ID NO: 330957 - RNA, 24 nt, Artificial Sequence
  Synthetic
ugcaaaguggugccagaaagaugg

SEQ ID NO: 330958 - RNA, 18 nt, Artificial Sequence
  Synthetic
gcaaugagaagaagaugg

SEQ ID NO: 330959 - RNA, 19 nt, Artificial Sequence
  Synthetic
ggcaaugagaagaagaugg

SEQ ID NO: 330960 - RNA, 20 nt, Artificial Sequence
  Synthetic
uggcaaugagaagaagaugg

SEQ ID NO: 330961 - RNA, 21 nt, Artificial Sequence
  Synthetic
auggcaaugagaagaagaugg

SEQ ID NO: 330962 - RNA, 22 nt, Artificial Sequence
  Synthetic
aauggcaaugagaagaagaugg

SEQ ID NO: 330963 - RNA, 23 nt, Artificial Sequence
  Synthetic
aaauggcaaugagaagaagaugg

SEQ ID NO: 330964 - RNA, 24 nt, Artificial Sequence
  Synthetic
uaaauggcaaugagaagaagaugg

SEQ ID NO: 330965 - RNA, 18 nt, Artificial Sequence
  Synthetic
acuucucauagaagaugg

SEQ ID NO: 330966 - RNA, 19 nt, Artificial Sequence
  Synthetic
cacuucucauagaagaugg

SEQ ID NO: 330967 - RNA, 20 nt, Artificial Sequence
  Synthetic
ucacuucucauagaagaugg

SEQ ID NO: 330968 - RNA, 21 nt, Artificial Sequence
  Synthetic
aucacuucucauagaagaugg

SEQ ID NO: 330969 - RNA, 22 nt, Artificial Sequence
  Synthetic
aaucacuucucauagaagaugg

SEQ ID NO: 330970 - RNA, 23 nt, Artificial Sequence
  Synthetic
gaaucacuucucauagaagaugg

SEQ ID NO: 330971 - RNA, 24 nt, Artificial Sequence
  Synthetic
ggaaucacuucucauagaagaugg

SEQ ID NO: 330972 - RNA, 18 nt, Artificial Sequence
  Synthetic
ccaucuuuuuuaagaugg

SEQ ID NO: 330973 - RNA, 19 nt, Artificial Sequence
  Synthetic
gccaucuuuuuuaagaugg

SEQ ID NO: 330974 - RNA, 20 nt, Artificial Sequence
  Synthetic
agccaucuuuuuuaagaugg

SEQ ID NO: 330975 - RNA, 21 nt, Artificial Sequence
  Synthetic
cagccaucuuuuuuaagaugg

SEQ ID NO: 330976 - RNA, 22 nt, Artificial Sequence
  Synthetic
acagccaucuuuuuuaagaugg

SEQ ID NO: 330977 - RNA, 23 nt, Artificial Sequence
  Synthetic
aacagccaucuuuuuuaagaugg

SEQ ID NO: 330978 - RNA, 24 nt, Artificial Sequence
  Synthetic
uaacagccaucuuuuuuaagaugg

SEQ ID NO: 330979 - RNA, 18 nt, Artificial Sequence
  Synthetic
ggaacagacgccagaugg

SEQ ID NO: 330980 - RNA, 19 nt, Artificial Sequence
  Synthetic
aggaacagacgccagaugg

SEQ ID NO: 330981 - RNA, 20 nt, Artificial Sequence
  Synthetic
aaggaacagacgccagaugg

SEQ ID NO: 330982 - RNA, 21 nt, Artificial Sequence
  Synthetic
aaaggaacagacgccagaugg

SEQ ID NO: 330983 - RNA, 22 nt, Artificial Sequence
  Synthetic
gaaaggaacagacgccagaugg

SEQ ID NO: 330984 - RNA, 23 nt, Artificial Sequence
  Synthetic
agaaaggaacagacgccagaugg

SEQ ID NO: 330985 - RNA, 24 nt, Artificial Sequence
  Synthetic
cagaaaggaacagacgccagaugg

SEQ ID NO: 330986 - RNA, 18 nt, Artificial Sequence
  Synthetic
uacacccauuccagaugg

SEQ ID NO: 330987 - RNA, 19 nt, Artificial Sequence
  Synthetic
auacacccauuccagaugg

SEQ ID NO: 330988 - RNA, 20 nt, Artificial Sequence
  Synthetic
aauacacccauuccagaugg

SEQ ID NO: 330989 - RNA, 21 nt, Artificial Sequence
  Synthetic
aaauacacccauuccagaugg

SEQ ID NO: 330990 - RNA, 22 nt, Artificial Sequence
  Synthetic
uaaauacacccauuccagaugg

SEQ ID NO: 330991 - RNA, 23 nt, Artificial Sequence
  Synthetic
uuaaauacacccauuccagaugg

SEQ ID NO: 330992 - RNA, 24 nt, Artificial Sequence
  Synthetic
guuaaauacacccauuccagaugg

SEQ ID NO: 330993 - RNA, 18 nt, Artificial Sequence
  Synthetic
aucuaauaucagagaugg

SEQ ID NO: 330994 - RNA, 19 nt, Artificial Sequence
  Synthetic
uaucuaauaucagagaugg

SEQ ID NO: 330995 - RNA, 20 nt, Artificial Sequence
  Synthetic
cuaucuaauaucagagaugg

SEQ ID NO: 330996 - RNA, 21 nt, Artificial Sequence
  Synthetic
gcuaucuaauaucagagaugg

SEQ ID NO: 330997 - RNA, 22 nt, Artificial Sequence
  Synthetic
ugcuaucuaauaucagagaugg

SEQ ID NO: 330998 - RNA, 23 nt, Artificial Sequence
  Synthetic
gugcuaucuaauaucagagaugg

SEQ ID NO: 330999 - RNA, 24 nt, Artificial Sequence
  Synthetic
ugugcuaucuaauaucagagaugg

SEQ ID NO: 331000 - RNA, 18 nt, Artificial Sequence
  Synthetic
caguagcauuagagaugg

SEQ ID NO: 331001 - RNA, 19 nt, Artificial Sequence
  Synthetic
acaguagcauuagagaugg

SEQ ID NO: 331002 - RNA, 20 nt, Artificial Sequence
  Synthetic
aacaguagcauuagagaugg

SEQ ID NO: 331003 - RNA, 21 nt, Artificial Sequence
  Synthetic
aaacaguagcauuagagaugg

SEQ ID NO: 331004 - RNA, 22 nt, Artificial Sequence
  Synthetic
uaaacaguagcauuagagaugg

SEQ ID NO: 331005 - RNA, 23 nt, Artificial Sequence
  Synthetic
guaaacaguagcauuagagaugg

SEQ ID NO: 331006 - RNA, 24 nt, Artificial Sequence
  Synthetic
aguaaacaguagcauuagagaugg

SEQ ID NO: 331007 - RNA, 18 nt, Artificial Sequence
  Synthetic
cuagagauacggagaugg

SEQ ID NO: 331008 - RNA, 19 nt, Artificial Sequence
  Synthetic
gcuagagauacggagaugg

SEQ ID NO: 331009 - RNA, 20 nt, Artificial Sequence
  Synthetic
agcuagagauacggagaugg

SEQ ID NO: 331010 - RNA, 21 nt, Artificial Sequence
  Synthetic
cagcuagagauacggagaugg

SEQ ID NO: 331011 - RNA, 22 nt, Artificial Sequence
  Synthetic
ucagcuagagauacggagaugg

SEQ ID NO: 331012 - RNA, 23 nt, Artificial Sequence
  Synthetic
uucagcuagagauacggagaugg

SEQ ID NO: 331013 - RNA, 24 nt, Artificial Sequence
  Synthetic
guucagcuagagauacggagaugg

SEQ ID NO: 331014 - RNA, 18 nt, Artificial Sequence
  Synthetic
gagaacacauggagaugg

SEQ ID NO: 331015 - RNA, 19 nt, Artificial Sequence
  Synthetic
ugagaacacauggagaugg

SEQ ID NO: 331016 - RNA, 20 nt, Artificial Sequence
  Synthetic
augagaacacauggagaugg

SEQ ID NO: 331017 - RNA, 21 nt, Artificial Sequence
  Synthetic
gaugagaacacauggagaugg

SEQ ID NO: 331018 - RNA, 22 nt, Artificial Sequence
  Synthetic
cgaugagaacacauggagaugg

SEQ ID NO: 331019 - RNA, 23 nt, Artificial Sequence
  Synthetic
acgaugagaacacauggagaugg

SEQ ID NO: 331020 - RNA, 24 nt, Artificial Sequence
  Synthetic
aacgaugagaacacauggagaugg

SEQ ID NO: 331021 - RNA, 18 nt, Artificial Sequence
  Synthetic
agaugcucagugagaugg

SEQ ID NO: 331022 - RNA, 19 nt, Artificial Sequence
  Synthetic
aagaugcucagugagaugg

SEQ ID NO: 331023 - RNA, 20 nt, Artificial Sequence
  Synthetic
gaagaugcucagugagaugg

SEQ ID NO: 331024 - RNA, 21 nt, Artificial Sequence
  Synthetic
agaagaugcucagugagaugg

SEQ ID NO: 331025 - RNA, 22 nt, Artificial Sequence
  Synthetic
aagaagaugcucagugagaugg

SEQ ID NO: 331026 - RNA, 23 nt, Artificial Sequence
  Synthetic
gaagaagaugcucagugagaugg

SEQ ID NO: 331027 - RNA, 24 nt, Artificial Sequence
  Synthetic
agaagaagaugcucagugagaugg

SEQ ID NO: 331028 - RNA, 18 nt, Artificial Sequence
  Synthetic
aaggaucaaguuagaugg

SEQ ID NO: 331029 - RNA, 19 nt, Artificial Sequence
  Synthetic
gaaggaucaaguuagaugg

SEQ ID NO: 331030 - RNA, 20 nt, Artificial Sequence
  Synthetic
agaaggaucaaguuagaugg

SEQ ID NO: 331031 - RNA, 21 nt, Artificial Sequence
  Synthetic
uagaaggaucaaguuagaugg

SEQ ID NO: 331032 - RNA, 22 nt, Artificial Sequence
  Synthetic
guagaaggaucaaguuagaugg

SEQ ID NO: 331033 - RNA, 23 nt, Artificial Sequence
  Synthetic
gguagaaggaucaaguuagaugg

SEQ ID NO: 331034 - RNA, 24 nt, Artificial Sequence
  Synthetic
ugguagaaggaucaaguuagaugg

SEQ ID NO: 331035 - RNA, 18 nt, Artificial Sequence
  Synthetic
uuaauaacuuuuagaugg

SEQ ID NO: 331036 - RNA, 19 nt, Artificial Sequence
  Synthetic
cuuaauaacuuuuagaugg

SEQ ID NO: 331037 - RNA, 20 nt, Artificial Sequence
  Synthetic
ccuuaauaacuuuuagaugg

SEQ ID NO: 331038 - RNA, 21 nt, Artificial Sequence
  Synthetic
uccuuaauaacuuuuagaugg

SEQ ID NO: 331039 - RNA, 22 nt, Artificial Sequence
  Synthetic
uuccuuaauaacuuuuagaugg

SEQ ID NO: 331040 - RNA, 23 nt, Artificial Sequence
  Synthetic
cuuccuuaauaacuuuuagaugg

SEQ ID NO: 331041 - RNA, 24 nt, Artificial Sequence
  Synthetic
ucuuccuuaauaacuuuuagaugg

SEQ ID NO: 331042 - RNA, 18 nt, Artificial Sequence
  Synthetic
uuaaguggauaccgaugg

SEQ ID NO: 331043 - RNA, 19 nt, Artificial Sequence
  Synthetic
auuaaguggauaccgaugg

SEQ ID NO: 331044 - RNA, 20 nt, Artificial Sequence
  Synthetic
uauuaaguggauaccgaugg

SEQ ID NO: 331045 - RNA, 21 nt, Artificial Sequence
  Synthetic
cuauuaaguggauaccgaugg

SEQ ID NO: 331046 - RNA, 22 nt, Artificial Sequence
  Synthetic
ucuauuaaguggauaccgaugg

SEQ ID NO: 331047 - RNA, 23 nt, Artificial Sequence
  Synthetic
aucuauuaaguggauaccgaugg

SEQ ID NO: 331048 - RNA, 24 nt, Artificial Sequence
  Synthetic
caucuauuaaguggauaccgaugg

SEQ ID NO: 331049 - RNA, 18 nt, Artificial Sequence
  Synthetic
guuggaaaagaucgaugg

SEQ ID NO: 331050 - RNA, 19 nt, Artificial Sequence
  Synthetic
aguuggaaaagaucgaugg

SEQ ID NO: 331051 - RNA, 20 nt, Artificial Sequence
  Synthetic
gaguuggaaaagaucgaugg

SEQ ID NO: 331052 - RNA, 21 nt, Artificial Sequence
  Synthetic
ugaguuggaaaagaucgaugg

SEQ ID NO: 331053 - RNA, 22 nt, Artificial Sequence
  Synthetic
cugaguuggaaaagaucgaugg

SEQ ID NO: 331054 - RNA, 23 nt, Artificial Sequence
  Synthetic
gcugaguuggaaaagaucgaugg

SEQ ID NO: 331055 - RNA, 24 nt, Artificial Sequence
  Synthetic
ugcugaguuggaaaagaucgaugg

SEQ ID NO: 331056 - RNA, 18 nt, Artificial Sequence
  Synthetic
gucaccaagucaggaugg

SEQ ID NO: 331057 - RNA, 19 nt, Artificial Sequence
  Synthetic
ugucaccaagucaggaugg

SEQ ID NO: 331058 - RNA, 20 nt, Artificial Sequence
  Synthetic
gugucaccaagucaggaugg

SEQ ID NO: 331059 - RNA, 21 nt, Artificial Sequence
  Synthetic
agugucaccaagucaggaugg

SEQ ID NO: 331060 - RNA, 22 nt, Artificial Sequence
  Synthetic
cagugucaccaagucaggaugg

SEQ ID NO: 331061 - RNA, 23 nt, Artificial Sequence
  Synthetic
ucagugucaccaagucaggaugg

SEQ ID NO: 331062 - RNA, 24 nt, Artificial Sequence
  Synthetic
cucagugucaccaagucaggaugg

SEQ ID NO: 331063 - RNA, 18 nt, Artificial Sequence
  Synthetic
cuuuuucucagaggaugg

SEQ ID NO: 331064 - RNA, 19 nt, Artificial Sequence
  Synthetic
ucuuuuucucagaggaugg

SEQ ID NO: 331065 - RNA, 20 nt, Artificial Sequence
  Synthetic
cucuuuuucucagaggaugg

SEQ ID NO: 331066 - RNA, 21 nt, Artificial Sequence
  Synthetic
ucucuuuuucucagaggaugg

SEQ ID NO: 331067 - RNA, 22 nt, Artificial Sequence
  Synthetic
cucucuuuuucucagaggaugg

SEQ ID NO: 331068 - RNA, 23 nt, Artificial Sequence
  Synthetic
ccucucuuuuucucagaggaugg

SEQ ID NO: 331069 - RNA, 24 nt, Artificial Sequence
  Synthetic
accucucuuuuucucagaggaugg

SEQ ID NO: 331070 - RNA, 18 nt, Artificial Sequence
  Synthetic
uucccacaaggaggaugg

SEQ ID NO: 331071 - RNA, 19 nt, Artificial Sequence
  Synthetic
cuucccacaaggaggaugg

SEQ ID NO: 331072 - RNA, 20 nt, Artificial Sequence
  Synthetic
acuucccacaaggaggaugg

SEQ ID NO: 331073 - RNA, 21 nt, Artificial Sequence
  Synthetic
gacuucccacaaggaggaugg

SEQ ID NO: 331074 - RNA, 22 nt, Artificial Sequence
  Synthetic
agacuucccacaaggaggaugg

SEQ ID NO: 331075 - RNA, 23 nt, Artificial Sequence
  Synthetic
gagacuucccacaaggaggaugg

SEQ ID NO: 331076 - RNA, 24 nt, Artificial Sequence
  Synthetic
ugagacuucccacaaggaggaugg

SEQ ID NO: 331077 - RNA, 18 nt, Artificial Sequence
  Synthetic
aauccagagauaggaugg

SEQ ID NO: 331078 - RNA, 19 nt, Artificial Sequence
  Synthetic
aaauccagagauaggaugg

SEQ ID NO: 331079 - RNA, 20 nt, Artificial Sequence
  Synthetic
caaauccagagauaggaugg

SEQ ID NO: 331080 - RNA, 21 nt, Artificial Sequence
  Synthetic
gcaaauccagagauaggaugg

SEQ ID NO: 331081 - RNA, 22 nt, Artificial Sequence
  Synthetic
ugcaaauccagagauaggaugg

SEQ ID NO: 331082 - RNA, 23 nt, Artificial Sequence
  Synthetic
augcaaauccagagauaggaugg

SEQ ID NO: 331083 - RNA, 24 nt, Artificial Sequence
  Synthetic
uaugcaaauccagagauaggaugg

SEQ ID NO: 331084 - RNA, 18 nt, Artificial Sequence
  Synthetic
aggugguuauuaggaugg

SEQ ID NO: 331085 - RNA, 19 nt, Artificial Sequence
  Synthetic
aaggugguuauuaggaugg

SEQ ID NO: 331086 - RNA, 20 nt, Artificial Sequence
  Synthetic
gaaggugguuauuaggaugg

SEQ ID NO: 331087 - RNA, 21 nt, Artificial Sequence
  Synthetic
ggaaggugguuauuaggaugg

SEQ ID NO: 331088 - RNA, 22 nt, Artificial Sequence
  Synthetic
uggaaggugguuauuaggaugg

SEQ ID NO: 331089 - RNA, 23 nt, Artificial Sequence
  Synthetic
uuggaaggugguuauuaggaugg

SEQ ID NO: 331090 - RNA, 24 nt, Artificial Sequence
  Synthetic
cuuggaaggugguuauuaggaugg

SEQ ID NO: 331091 - RNA, 18 nt, Artificial Sequence
  Synthetic
cuucuguuuuuaggaugg

SEQ ID NO: 331092 - RNA, 19 nt, Artificial Sequence
  Synthetic
ccuucuguuuuuaggaugg

SEQ ID NO: 331093 - RNA, 20 nt, Artificial Sequence
  Synthetic
uccuucuguuuuuaggaugg

SEQ ID NO: 331094 - RNA, 21 nt, Artificial Sequence
  Synthetic
cuccuucuguuuuuaggaugg

SEQ ID NO: 331095 - RNA, 22 nt, Artificial Sequence
  Synthetic
ccuccuucuguuuuuaggaugg

SEQ ID NO: 331096 - RNA, 23 nt, Artificial Sequence
  Synthetic
cccuccuucuguuuuuaggaugg

SEQ ID NO: 331097 - RNA, 24 nt, Artificial Sequence
  Synthetic
ccccuccuucuguuuuuaggaugg

SEQ ID NO: 331098 - RNA, 18 nt, Artificial Sequence
  Synthetic
gaaauggaagagggaugg

SEQ ID NO: 331099 - RNA, 19 nt, Artificial Sequence
  Synthetic
ggaaauggaagagggaugg

SEQ ID NO: 331100 - RNA, 20 nt, Artificial Sequence
  Synthetic
aggaaauggaagagggaugg

SEQ ID NO: 331101 - RNA, 21 nt, Artificial Sequence
  Synthetic
gaggaaauggaagagggaugg

SEQ ID NO: 331102 - RNA, 22 nt, Artificial Sequence
  Synthetic
ggaggaaauggaagagggaugg

SEQ ID NO: 331103 - RNA, 23 nt, Artificial Sequence
  Synthetic
aggaggaaauggaagagggaugg

SEQ ID NO: 331104 - RNA, 24 nt, Artificial Sequence
  Synthetic
aaggaggaaauggaagagggaugg

SEQ ID NO: 331105 - RNA, 18 nt, Artificial Sequence
  Synthetic
ugagagagggagggaugg

SEQ ID NO: 331106 - RNA, 19 nt, Artificial Sequence
  Synthetic
augagagagggagggaugg

SEQ ID NO: 331107 - RNA, 20 nt, Artificial Sequence
  Synthetic
gaugagagagggagggaugg

SEQ ID NO: 331108 - RNA, 21 nt, Artificial Sequence
  Synthetic
agaugagagagggagggaugg

SEQ ID NO: 331109 - RNA, 22 nt, Artificial Sequence
  Synthetic
cagaugagagagggagggaugg

SEQ ID NO: 331110 - RNA, 23 nt, Artificial Sequence
  Synthetic
acagaugagagagggagggaugg

SEQ ID NO: 331111 - RNA, 24 nt, Artificial Sequence
  Synthetic
cacagaugagagagggagggaugg

SEQ ID NO: 331112 - RNA, 18 nt, Artificial Sequence
  Synthetic
gaaaagaucgauggaugg

SEQ ID NO: 331113 - RNA, 19 nt, Artificial Sequence
  Synthetic
ggaaaagaucgauggaugg

SEQ ID NO: 331114 - RNA, 20 nt, Artificial Sequence
  Synthetic
uggaaaagaucgauggaugg

SEQ ID NO: 331115 - RNA, 21 nt, Artificial Sequence
  Synthetic
uuggaaaagaucgauggaugg

SEQ ID NO: 331116 - RNA, 22 nt, Artificial Sequence
  Synthetic
guuggaaaagaucgauggaugg

SEQ ID NO: 331117 - RNA, 23 nt, Artificial Sequence
  Synthetic
aguuggaaaagaucgauggaugg

SEQ ID NO: 331118 - RNA, 24 nt, Artificial Sequence
  Synthetic
gaguuggaaaagaucgauggaugg

SEQ ID NO: 331119 - RNA, 18 nt, Artificial Sequence
  Synthetic
uaagcuguccguggaugg

SEQ ID NO: 331120 - RNA, 19 nt, Artificial Sequence
  Synthetic
cuaagcuguccguggaugg

SEQ ID NO: 331121 - RNA, 20 nt, Artificial Sequence
  Synthetic
ccuaagcuguccguggaugg

SEQ ID NO: 331122 - RNA, 21 nt, Artificial Sequence
  Synthetic
gccuaagcuguccguggaugg

SEQ ID NO: 331123 - RNA, 22 nt, Artificial Sequence
  Synthetic
cgccuaagcuguccguggaugg

SEQ ID NO: 331124 - RNA, 23 nt, Artificial Sequence
  Synthetic
acgccuaagcuguccguggaugg

SEQ ID NO: 331125 - RNA, 24 nt, Artificial Sequence
  Synthetic
aacgccuaagcuguccguggaugg

SEQ ID NO: 331126 - RNA, 18 nt, Artificial Sequence
  Synthetic
uuaguggaacgaugaugg

SEQ ID NO: 331127 - RNA, 19 nt, Artificial Sequence
  Synthetic
uuuaguggaacgaugaugg

SEQ ID NO: 331128 - RNA, 20 nt, Artificial Sequence
  Synthetic
uuuuaguggaacgaugaugg

SEQ ID NO: 331129 - RNA, 21 nt, Artificial Sequence
  Synthetic
guuuuaguggaacgaugaugg

SEQ ID NO: 331130 - RNA, 22 nt, Artificial Sequence
  Synthetic
aguuuuaguggaacgaugaugg

SEQ ID NO: 331131 - RNA, 23 nt, Artificial Sequence
  Synthetic
uaguuuuaguggaacgaugaugg

SEQ ID NO: 331132 - RNA, 24 nt, Artificial Sequence
  Synthetic
auaguuuuaguggaacgaugaugg

SEQ ID NO: 331133 - RNA, 18 nt, Artificial Sequence
  Synthetic
ccuuuugaacuaugaugg

SEQ ID NO: 331134 - RNA, 19 nt, Artificial Sequence
  Synthetic
accuuuugaacuaugaugg

SEQ ID NO: 331135 - RNA, 20 nt, Artificial Sequence
  Synthetic
caccuuuugaacuaugaugg

SEQ ID NO: 331136 - RNA, 21 nt, Artificial Sequence
  Synthetic
ucaccuuuugaacuaugaugg

SEQ ID NO: 331137 - RNA, 22 nt, Artificial Sequence
  Synthetic
gucaccuuuugaacuaugaugg

SEQ ID NO: 331138 - RNA, 23 nt, Artificial Sequence
  Synthetic
ugucaccuuuugaacuaugaugg

SEQ ID NO: 331139 - RNA, 24 nt, Artificial Sequence
  Synthetic
cugucaccuuuugaacuaugaugg

SEQ ID NO: 331140 - RNA, 18 nt, Artificial Sequence
  Synthetic
ccucugguccuaugaugg

SEQ ID NO: 331141 - RNA, 19 nt, Artificial Sequence
  Synthetic
gccucugguccuaugaugg

SEQ ID NO: 331142 - RNA, 20 nt, Artificial Sequence
  Synthetic
ggccucugguccuaugaugg

SEQ ID NO: 331143 - RNA, 21 nt, Artificial Sequence
  Synthetic
aggccucugguccuaugaugg

SEQ ID NO: 331144 - RNA, 22 nt, Artificial Sequence
  Synthetic
uaggccucugguccuaugaugg

SEQ ID NO: 331145 - RNA, 23 nt, Artificial Sequence
  Synthetic
cuaggccucugguccuaugaugg

SEQ ID NO: 331146 - RNA, 24 nt, Artificial Sequence
  Synthetic
ccuaggccucugguccuaugaugg

SEQ ID NO: 331147 - RNA, 18 nt, Artificial Sequence
  Synthetic
agguaaauguuaugaugg

SEQ ID NO: 331148 - RNA, 19 nt, Artificial Sequence
  Synthetic
gagguaaauguuaugaugg

SEQ ID NO: 331149 - RNA, 20 nt, Artificial Sequence
  Synthetic
ugagguaaauguuaugaugg

SEQ ID NO: 331150 - RNA, 21 nt, Artificial Sequence
  Synthetic
augagguaaauguuaugaugg

SEQ ID NO: 331151 - RNA, 22 nt, Artificial Sequence
  Synthetic
caugagguaaauguuaugaugg

SEQ ID NO: 331152 - RNA, 23 nt, Artificial Sequence
  Synthetic
gcaugagguaaauguuaugaugg

SEQ ID NO: 331153 - RNA, 24 nt, Artificial Sequence
  Synthetic
agcaugagguaaauguuaugaugg

SEQ ID NO: 331154 - RNA, 18 nt, Artificial Sequence
  Synthetic
ucgcugugcugcugaugg

SEQ ID NO: 331155 - RNA, 19 nt, Artificial Sequence
  Synthetic
aucgcugugcugcugaugg

SEQ ID NO: 331156 - RNA, 20 nt, Artificial Sequence
  Synthetic
caucgcugugcugcugaugg

SEQ ID NO: 331157 - RNA, 21 nt, Artificial Sequence
  Synthetic
acaucgcugugcugcugaugg

SEQ ID NO: 331158 - RNA, 22 nt, Artificial Sequence
  Synthetic
uacaucgcugugcugcugaugg

SEQ ID NO: 331159 - RNA, 23 nt, Artificial Sequence
  Synthetic
guacaucgcugugcugcugaugg

SEQ ID NO: 331160 - RNA, 24 nt, Artificial Sequence
  Synthetic
uguacaucgcugugcugcugaugg

SEQ ID NO: 331161 - RNA, 18 nt, Artificial Sequence
  Synthetic
caucagaauuagugaugg

SEQ ID NO: 331162 - RNA, 19 nt, Artificial Sequence
  Synthetic
ucaucagaauuagugaugg

SEQ ID NO: 331163 - RNA, 20 nt, Artificial Sequence
  Synthetic
uucaucagaauuagugaugg

SEQ ID NO: 331164 - RNA, 21 nt, Artificial Sequence
  Synthetic
guucaucagaauuagugaugg

SEQ ID NO: 331165 - RNA, 22 nt, Artificial Sequence
  Synthetic
uguucaucagaauuagugaugg

SEQ ID NO: 331166 - RNA, 23 nt, Artificial Sequence
  Synthetic
cuguucaucagaauuagugaugg

SEQ ID NO: 331167 - RNA, 24 nt, Artificial Sequence
  Synthetic
gcuguucaucagaauuagugaugg

SEQ ID NO: 331168 - RNA, 18 nt, Artificial Sequence
  Synthetic
ccucugggucugugaugg

SEQ ID NO: 331169 - RNA, 19 nt, Artificial Sequence
  Synthetic
accucugggucugugaugg

SEQ ID NO: 331170 - RNA, 20 nt, Artificial Sequence
  Synthetic
gaccucugggucugugaugg

SEQ ID NO: 331171 - RNA, 21 nt, Artificial Sequence
  Synthetic
agaccucugggucugugaugg

SEQ ID NO: 331172 - RNA, 22 nt, Artificial Sequence
  Synthetic
uagaccucugggucugugaugg

SEQ ID NO: 331173 - RNA, 23 nt, Artificial Sequence
  Synthetic
cuagaccucugggucugugaugg

SEQ ID NO: 331174 - RNA, 24 nt, Artificial Sequence
  Synthetic
ccuagaccucugggucugugaugg

SEQ ID NO: 331175 - RNA, 18 nt, Artificial Sequence
  Synthetic
gcaauggagaauugaugg

SEQ ID NO: 331176 - RNA, 19 nt, Artificial Sequence
  Synthetic
ggcaauggagaauugaugg

SEQ ID NO: 331177 - RNA, 20 nt, Artificial Sequence
  Synthetic
uggcaauggagaauugaugg

SEQ ID NO: 331178 - RNA, 21 nt, Artificial Sequence
  Synthetic
auggcaauggagaauugaugg

SEQ ID NO: 331179 - RNA, 22 nt, Artificial Sequence
  Synthetic
cauggcaauggagaauugaugg

SEQ ID NO: 331180 - RNA, 23 nt, Artificial Sequence
  Synthetic
ccauggcaauggagaauugaugg

SEQ ID NO: 331181 - RNA, 24 nt, Artificial Sequence
  Synthetic
uccauggcaauggagaauugaugg

SEQ ID NO: 331182 - RNA, 18 nt, Artificial Sequence
  Synthetic
aacaggauuaguugaugg

SEQ ID NO: 331183 - RNA, 19 nt, Artificial Sequence
  Synthetic
caacaggauuaguugaugg

SEQ ID NO: 331184 - RNA, 20 nt, Artificial Sequence
  Synthetic
acaacaggauuaguugaugg

SEQ ID NO: 331185 - RNA, 21 nt, Artificial Sequence
  Synthetic
gacaacaggauuaguugaugg

SEQ ID NO: 331186 - RNA, 22 nt, Artificial Sequence
  Synthetic
ggacaacaggauuaguugaugg

SEQ ID NO: 331187 - RNA, 23 nt, Artificial Sequence
  Synthetic
uggacaacaggauuaguugaugg

SEQ ID NO: 331188 - RNA, 24 nt, Artificial Sequence
  Synthetic
uuggacaacaggauuaguugaugg

SEQ ID NO: 331189 - RNA, 18 nt, Artificial Sequence
  Synthetic
guaaauaaacuuugaugg

SEQ ID NO: 331190 - RNA, 19 nt, Artificial Sequence
  Synthetic
aguaaauaaacuuugaugg

SEQ ID NO: 331191 - RNA, 20 nt, Artificial Sequence
  Synthetic
caguaaauaaacuuugaugg

SEQ ID NO: 331192 - RNA, 21 nt, Artificial Sequence
  Synthetic
ccaguaaauaaacuuugaugg

SEQ ID NO: 331193 - RNA, 22 nt, Artificial Sequence
  Synthetic
accaguaaauaaacuuugaugg

SEQ ID NO: 331194 - RNA, 23 nt, Artificial Sequence
  Synthetic
caccaguaaauaaacuuugaugg

SEQ ID NO: 331195 - RNA, 24 nt, Artificial Sequence
  Synthetic
ccaccaguaaauaaacuuugaugg

SEQ ID NO: 331196 - RNA, 18 nt, Artificial Sequence
  Synthetic
aaacauuuagaaauaugg

SEQ ID NO: 331197 - RNA, 19 nt, Artificial Sequence
  Synthetic
uaaacauuuagaaauaugg

SEQ ID NO: 331198 - RNA, 20 nt, Artificial Sequence
  Synthetic
auaaacauuuagaaauaugg

SEQ ID NO: 331199 - RNA, 21 nt, Artificial Sequence
  Synthetic
cauaaacauuuagaaauaugg

SEQ ID NO: 331200 - RNA, 22 nt, Artificial Sequence
  Synthetic
acauaaacauuuagaaauaugg

SEQ ID NO: 331201 - RNA, 23 nt, Artificial Sequence
  Synthetic
aacauaaacauuuagaaauaugg

SEQ ID NO: 331202 - RNA, 24 nt, Artificial Sequence
  Synthetic
aaacauaaacauuuagaaauaugg

SEQ ID NO: 331203 - RNA, 18 nt, Artificial Sequence
  Synthetic
acucacaguucaauaugg

SEQ ID NO: 331204 - RNA, 19 nt, Artificial Sequence
  Synthetic
gacucacaguucaauaugg

SEQ ID NO: 331205 - RNA, 20 nt, Artificial Sequence
  Synthetic
ugacucacaguucaauaugg

SEQ ID NO: 331206 - RNA, 21 nt, Artificial Sequence
  Synthetic
uugacucacaguucaauaugg

SEQ ID NO: 331207 - RNA, 22 nt, Artificial Sequence
  Synthetic
auugacucacaguucaauaugg

SEQ ID NO: 331208 - RNA, 23 nt, Artificial Sequence
  Synthetic
aauugacucacaguucaauaugg

SEQ ID NO: 331209 - RNA, 24 nt, Artificial Sequence
  Synthetic
uaauugacucacaguucaauaugg

SEQ ID NO: 331210 - RNA, 18 nt, Artificial Sequence
  Synthetic
aauugugauuccauaugg

SEQ ID NO: 331211 - RNA, 19 nt, Artificial Sequence
  Synthetic
gaauugugauuccauaugg

SEQ ID NO: 331212 - RNA, 20 nt, Artificial Sequence
  Synthetic
ggaauugugauuccauaugg

SEQ ID NO: 331213 - RNA, 21 nt, Artificial Sequence
  Synthetic
aggaauugugauuccauaugg

SEQ ID NO: 331214 - RNA, 22 nt, Artificial Sequence
  Synthetic
gaggaauugugauuccauaugg

SEQ ID NO: 331215 - RNA, 23 nt, Artificial Sequence
  Synthetic
agaggaauugugauuccauaugg

SEQ ID NO: 331216 - RNA, 24 nt, Artificial Sequence
  Synthetic
cagaggaauugugauuccauaugg

SEQ ID NO: 331217 - RNA, 18 nt, Artificial Sequence
  Synthetic
aauauaaauuagauaugg

SEQ ID NO: 331218 - RNA, 19 nt, Artificial Sequence
  Synthetic
uaauauaaauuagauaugg

SEQ ID NO: 331219 - RNA, 20 nt, Artificial Sequence
  Synthetic
cuaauauaaauuagauaugg

SEQ ID NO: 331220 - RNA, 21 nt, Artificial Sequence
  Synthetic
ucuaauauaaauuagauaugg

SEQ ID NO: 331221 - RNA, 22 nt, Artificial Sequence
  Synthetic
aucuaauauaaauuagauaugg

SEQ ID NO: 331222 - RNA, 23 nt, Artificial Sequence
  Synthetic
aaucuaauauaaauuagauaugg

SEQ ID NO: 331223 - RNA, 24 nt, Artificial Sequence
  Synthetic
caaucuaauauaaauuagauaugg

SEQ ID NO: 331224 - RNA, 18 nt, Artificial Sequence
  Synthetic
aggaagguaaauauaugg

SEQ ID NO: 331225 - RNA, 19 nt, Artificial Sequence
  Synthetic
uaggaagguaaauauaugg

SEQ ID NO: 331226 - RNA, 20 nt, Artificial Sequence
  Synthetic
guaggaagguaaauauaugg

SEQ ID NO: 331227 - RNA, 21 nt, Artificial Sequence
  Synthetic
uguaggaagguaaauauaugg

SEQ ID NO: 331228 - RNA, 22 nt, Artificial Sequence
  Synthetic
cuguaggaagguaaauauaugg

SEQ ID NO: 331229 - RNA, 23 nt, Artificial Sequence
  Synthetic
acuguaggaagguaaauauaugg

SEQ ID NO: 331230 - RNA, 24 nt, Artificial Sequence
  Synthetic
aacuguaggaagguaaauauaugg

SEQ ID NO: 331231 - RNA, 18 nt, Artificial Sequence
  Synthetic
uuccccaaggguauaugg

SEQ ID NO: 331232 - RNA, 19 nt, Artificial Sequence
  Synthetic
cuuccccaaggguauaugg

SEQ ID NO: 331233 - RNA, 20 nt, Artificial Sequence
  Synthetic
ccuuccccaaggguauaugg

SEQ ID NO: 331234 - RNA, 21 nt, Artificial Sequence
  Synthetic
uccuuccccaaggguauaugg

SEQ ID NO: 331235 - RNA, 22 nt, Artificial Sequence
  Synthetic
uuccuuccccaaggguauaugg

SEQ ID NO: 331236 - RNA, 23 nt, Artificial Sequence
  Synthetic
auuccuuccccaaggguauaugg

SEQ ID NO: 331237 - RNA, 24 nt, Artificial Sequence
  Synthetic
cauuccuuccccaaggguauaugg

SEQ ID NO: 331238 - RNA, 18 nt, Artificial Sequence
  Synthetic
cugucugcuuaacuaugg

SEQ ID NO: 331239 - RNA, 19 nt, Artificial Sequence
  Synthetic
ucugucugcuuaacuaugg

SEQ ID NO: 331240 - RNA, 20 nt, Artificial Sequence
  Synthetic
uucugucugcuuaacuaugg

SEQ ID NO: 331241 - RNA, 21 nt, Artificial Sequence
  Synthetic
uuucugucugcuuaacuaugg

SEQ ID NO: 331242 - RNA, 22 nt, Artificial Sequence
  Synthetic
uuuucugucugcuuaacuaugg

SEQ ID NO: 331243 - RNA, 23 nt, Artificial Sequence
  Synthetic
auuuucugucugcuuaacuaugg

SEQ ID NO: 331244 - RNA, 24 nt, Artificial Sequence
  Synthetic
gauuuucugucugcuuaacuaugg

SEQ ID NO: 331245 - RNA, 18 nt, Artificial Sequence
  Synthetic
uuuggcaucacccuaugg

SEQ ID NO: 331246 - RNA, 19 nt, Artificial Sequence
  Synthetic
cuuuggcaucacccuaugg

SEQ ID NO: 331247 - RNA, 20 nt, Artificial Sequence
  Synthetic
ucuuuggcaucacccuaugg

SEQ ID NO: 331248 - RNA, 21 nt, Artificial Sequence
  Synthetic
uucuuuggcaucacccuaugg

SEQ ID NO: 331249 - RNA, 22 nt, Artificial Sequence
  Synthetic
cuucuuuggcaucacccuaugg

SEQ ID NO: 331250 - RNA, 23 nt, Artificial Sequence
  Synthetic
ccuucuuuggcaucacccuaugg

SEQ ID NO: 331251 - RNA, 24 nt, Artificial Sequence
  Synthetic
uccuucuuuggcaucacccuaugg

SEQ ID NO: 331252 - RNA, 18 nt, Artificial Sequence
  Synthetic
ugccgcagcagccuaugg

SEQ ID NO: 331253 - RNA, 19 nt, Artificial Sequence
  Synthetic
uugccgcagcagccuaugg

SEQ ID NO: 331254 - RNA, 20 nt, Artificial Sequence
  Synthetic
uuugccgcagcagccuaugg

SEQ ID NO: 331255 - RNA, 21 nt, Artificial Sequence
  Synthetic
auuugccgcagcagccuaugg

SEQ ID NO: 331256 - RNA, 22 nt, Artificial Sequence
  Synthetic
gauuugccgcagcagccuaugg

SEQ ID NO: 331257 - RNA, 23 nt, Artificial Sequence
  Synthetic
ugauuugccgcagcagccuaugg

SEQ ID NO: 331258 - RNA, 24 nt, Artificial Sequence
  Synthetic
uugauuugccgcagcagccuaugg

SEQ ID NO: 331259 - RNA, 18 nt, Artificial Sequence
  Synthetic
aguucaggguuccuaugg

SEQ ID NO: 331260 - RNA, 19 nt, Artificial Sequence
  Synthetic
uaguucaggguuccuaugg

SEQ ID NO: 331261 - RNA, 20 nt, Artificial Sequence
  Synthetic
guaguucaggguuccuaugg

SEQ ID NO: 331262 - RNA, 21 nt, Artificial Sequence
  Synthetic
uguaguucaggguuccuaugg

SEQ ID NO: 331263 - RNA, 22 nt, Artificial Sequence
  Synthetic
cuguaguucaggguuccuaugg

SEQ ID NO: 331264 - RNA, 23 nt, Artificial Sequence
  Synthetic
acuguaguucaggguuccuaugg

SEQ ID NO: 331265 - RNA, 24 nt, Artificial Sequence
  Synthetic
gacuguaguucaggguuccuaugg

SEQ ID NO: 331266 - RNA, 18 nt, Artificial Sequence
  Synthetic
uacacagcugggcuaugg

SEQ ID NO: 331267 - RNA, 19 nt, Artificial Sequence
  Synthetic
auacacagcugggcuaugg

SEQ ID NO: 331268 - RNA, 20 nt, Artificial Sequence
  Synthetic
aauacacagcugggcuaugg

SEQ ID NO: 331269 - RNA, 21 nt, Artificial Sequence
  Synthetic
aaauacacagcugggcuaugg

SEQ ID NO: 331270 - RNA, 22 nt, Artificial Sequence
  Synthetic
uaaauacacagcugggcuaugg

SEQ ID NO: 331271 - RNA, 23 nt, Artificial Sequence
  Synthetic
uuaaauacacagcugggcuaugg

SEQ ID NO: 331272 - RNA, 24 nt, Artificial Sequence
  Synthetic
uuuaaauacacagcugggcuaugg

SEQ ID NO: 331273 - RNA, 18 nt, Artificial Sequence
  Synthetic
ugcuaugccaaucuaugg

SEQ ID NO: 331274 - RNA, 19 nt, Artificial Sequence
  Synthetic
uugcuaugccaaucuaugg

SEQ ID NO: 331275 - RNA, 20 nt, Artificial Sequence
  Synthetic
auugcuaugccaaucuaugg

SEQ ID NO: 331276 - RNA, 21 nt, Artificial Sequence
  Synthetic
aauugcuaugccaaucuaugg

SEQ ID NO: 331277 - RNA, 22 nt, Artificial Sequence
  Synthetic
uaauugcuaugccaaucuaugg

SEQ ID NO: 331278 - RNA, 23 nt, Artificial Sequence
  Synthetic
auaauugcuaugccaaucuaugg

SEQ ID NO: 331279 - RNA, 24 nt, Artificial Sequence
  Synthetic
gauaauugcuaugccaaucuaugg

SEQ ID NO: 331280 - RNA, 18 nt, Artificial Sequence
  Synthetic
caagaaaggguucuaugg

SEQ ID NO: 331281 - RNA, 19 nt, Artificial Sequence
  Synthetic
ucaagaaaggguucuaugg

SEQ ID NO: 331282 - RNA, 20 nt, Artificial Sequence
  Synthetic
cucaagaaaggguucuaugg

SEQ ID NO: 331283 - RNA, 21 nt, Artificial Sequence
  Synthetic
acucaagaaaggguucuaugg

SEQ ID NO: 331284 - RNA, 22 nt, Artificial Sequence
  Synthetic
aacucaagaaaggguucuaugg

SEQ ID NO: 331285 - RNA, 23 nt, Artificial Sequence
  Synthetic
uaacucaagaaaggguucuaugg

SEQ ID NO: 331286 - RNA, 24 nt, Artificial Sequence
  Synthetic
auaacucaagaaaggguucuaugg

SEQ ID NO: 331287 - RNA, 18 nt, Artificial Sequence
  Synthetic
aaucugggguuucuaugg

SEQ ID NO: 331288 - RNA, 19 nt, Artificial Sequence
  Synthetic
gaaucugggguuucuaugg

SEQ ID NO: 331289 - RNA, 20 nt, Artificial Sequence
  Synthetic
agaaucugggguuucuaugg

SEQ ID NO: 331290 - RNA, 21 nt, Artificial Sequence
  Synthetic
gagaaucugggguuucuaugg

SEQ ID NO: 331291 - RNA, 22 nt, Artificial Sequence
  Synthetic
agagaaucugggguuucuaugg

SEQ ID NO: 331292 - RNA, 23 nt, Artificial Sequence
  Synthetic
gagagaaucugggguuucuaugg

SEQ ID NO: 331293 - RNA, 24 nt, Artificial Sequence
  Synthetic
agagagaaucugggguuucuaugg

SEQ ID NO: 331294 - RNA, 18 nt, Artificial Sequence
  Synthetic
caagagagaaaaguaugg

SEQ ID NO: 331295 - RNA, 19 nt, Artificial Sequence
  Synthetic
gcaagagagaaaaguaugg

SEQ ID NO: 331296 - RNA, 20 nt, Artificial Sequence
  Synthetic
ugcaagagagaaaaguaugg

SEQ ID NO: 331297 - RNA, 21 nt, Artificial Sequence
  Synthetic
cugcaagagagaaaaguaugg

SEQ ID NO: 331298 - RNA, 22 nt, Artificial Sequence
  Synthetic
ccugcaagagagaaaaguaugg

SEQ ID NO: 331299 - RNA, 23 nt, Artificial Sequence
  Synthetic
uccugcaagagagaaaaguaugg

SEQ ID NO: 331300 - RNA, 24 nt, Artificial Sequence
  Synthetic
uuccugcaagagagaaaaguaugg

SEQ ID NO: 331301 - RNA, 18 nt, Artificial Sequence
  Synthetic
guauuuaugaaaguaugg

SEQ ID NO: 331302 - RNA, 19 nt, Artificial Sequence
  Synthetic
uguauuuaugaaaguaugg

SEQ ID NO: 331303 - RNA, 20 nt, Artificial Sequence
  Synthetic
guguauuuaugaaaguaugg

SEQ ID NO: 331304 - RNA, 21 nt, Artificial Sequence
  Synthetic
uguguauuuaugaaaguaugg

SEQ ID NO: 331305 - RNA, 22 nt, Artificial Sequence
  Synthetic
auguguauuuaugaaaguaugg

SEQ ID NO: 331306 - RNA, 23 nt, Artificial Sequence
  Synthetic
uauguguauuuaugaaaguaugg

SEQ ID NO: 331307 - RNA, 24 nt, Artificial Sequence
  Synthetic
guauguguauuuaugaaaguaugg

SEQ ID NO: 331308 - RNA, 18 nt, Artificial Sequence
  Synthetic
uuaaaaauaucaguaugg

SEQ ID NO: 331309 - RNA, 19 nt, Artificial Sequence
  Synthetic
uuuaaaaauaucaguaugg

SEQ ID NO: 331310 - RNA, 20 nt, Artificial Sequence
  Synthetic
uuuuaaaaauaucaguaugg

SEQ ID NO: 331311 - RNA, 21 nt, Artificial Sequence
  Synthetic
guuuuaaaaauaucaguaugg

SEQ ID NO: 331312 - RNA, 22 nt, Artificial Sequence
  Synthetic
cguuuuaaaaauaucaguaugg

SEQ ID NO: 331313 - RNA, 23 nt, Artificial Sequence
  Synthetic
acguuuuaaaaauaucaguaugg

SEQ ID NO: 331314 - RNA, 24 nt, Artificial Sequence
  Synthetic
cacguuuuaaaaauaucaguaugg

SEQ ID NO: 331315 - RNA, 18 nt, Artificial Sequence
  Synthetic
uugauaaaaggaguaugg

SEQ ID NO: 331316 - RNA, 19 nt, Artificial Sequence
  Synthetic
cuugauaaaaggaguaugg

SEQ ID NO: 331317 - RNA, 20 nt, Artificial Sequence
  Synthetic
gcuugauaaaaggaguaugg

SEQ ID NO: 331318 - RNA, 21 nt, Artificial Sequence
  Synthetic
ugcuugauaaaaggaguaugg

SEQ ID NO: 331319 - RNA, 22 nt, Artificial Sequence
  Synthetic
augcuugauaaaaggaguaugg

SEQ ID NO: 331320 - RNA, 23 nt, Artificial Sequence
  Synthetic
aaugcuugauaaaaggaguaugg

SEQ ID NO: 331321 - RNA, 24 nt, Artificial Sequence
  Synthetic
uaaugcuugauaaaaggaguaugg

SEQ ID NO: 331322 - RNA, 18 nt, Artificial Sequence
  Synthetic
guaagauacugaguaugg

SEQ ID NO: 331323 - RNA, 19 nt, Artificial Sequence
  Synthetic
uguaagauacugaguaugg

SEQ ID NO: 331324 - RNA, 20 nt, Artificial Sequence
  Synthetic
uuguaagauacugaguaugg

SEQ ID NO: 331325 - RNA, 21 nt, Artificial Sequence
  Synthetic
uuuguaagauacugaguaugg

SEQ ID NO: 331326 - RNA, 22 nt, Artificial Sequence
  Synthetic
auuuguaagauacugaguaugg

SEQ ID NO: 331327 - RNA, 23 nt, Artificial Sequence
  Synthetic
cauuuguaagauacugaguaugg

SEQ ID NO: 331328 - RNA, 24 nt, Artificial Sequence
  Synthetic
gcauuuguaagauacugaguaugg

SEQ ID NO: 331329 - RNA, 18 nt, Artificial Sequence
  Synthetic
gguagaauaguaguaugg

SEQ ID NO: 331330 - RNA, 19 nt, Artificial Sequence
  Synthetic
ugguagaauaguaguaugg

SEQ ID NO: 331331 - RNA, 20 nt, Artificial Sequence
  Synthetic
cugguagaauaguaguaugg

SEQ ID NO: 331332 - RNA, 21 nt, Artificial Sequence
  Synthetic
gcugguagaauaguaguaugg

SEQ ID NO: 331333 - RNA, 22 nt, Artificial Sequence
  Synthetic
ugcugguagaauaguaguaugg

SEQ ID NO: 331334 - RNA, 23 nt, Artificial Sequence
  Synthetic
gugcugguagaauaguaguaugg

SEQ ID NO: 331335 - RNA, 24 nt, Artificial Sequence
  Synthetic
ugugcugguagaauaguaguaugg

SEQ ID NO: 331336 - RNA, 18 nt, Artificial Sequence
  Synthetic
cauguaggggagguaugg

SEQ ID NO: 331337 - RNA, 19 nt, Artificial Sequence
  Synthetic
acauguaggggagguaugg

SEQ ID NO: 331338 - RNA, 20 nt, Artificial Sequence
  Synthetic
cacauguaggggagguaugg

SEQ ID NO: 331339 - RNA, 21 nt, Artificial Sequence
  Synthetic
acacauguaggggagguaugg

SEQ ID NO: 331340 - RNA, 22 nt, Artificial Sequence
  Synthetic
cacacauguaggggagguaugg

SEQ ID NO: 331341 - RNA, 23 nt, Artificial Sequence
  Synthetic
ucacacauguaggggagguaugg

SEQ ID NO: 331342 - RNA, 24 nt, Artificial Sequence
  Synthetic
aucacacauguaggggagguaugg

SEQ ID NO: 331343 - RNA, 18 nt, Artificial Sequence
  Synthetic
gcauagggugagguaugg

SEQ ID NO: 331344 - RNA, 19 nt, Artificial Sequence
  Synthetic
ugcauagggugagguaugg

SEQ ID NO: 331345 - RNA, 20 nt, Artificial Sequence
  Synthetic
augcauagggugagguaugg

SEQ ID NO: 331346 - RNA, 21 nt, Artificial Sequence
  Synthetic
gaugcauagggugagguaugg

SEQ ID NO: 331347 - RNA, 22 nt, Artificial Sequence
  Synthetic
agaugcauagggugagguaugg

SEQ ID NO: 331348 - RNA, 23 nt, Artificial Sequence
  Synthetic
gagaugcauagggugagguaugg

SEQ ID NO: 331349 - RNA, 24 nt, Artificial Sequence
  Synthetic
agagaugcauagggugagguaugg

SEQ ID NO: 331350 - RNA, 18 nt, Artificial Sequence
  Synthetic
cuagaugaagauguaugg

SEQ ID NO: 331351 - RNA, 19 nt, Artificial Sequence
  Synthetic
ccuagaugaagauguaugg

SEQ ID NO: 331352 - RNA, 20 nt, Artificial Sequence
  Synthetic
accuagaugaagauguaugg

SEQ ID NO: 331353 - RNA, 21 nt, Artificial Sequence
  Synthetic
uaccuagaugaagauguaugg

SEQ ID NO: 331354 - RNA, 22 nt, Artificial Sequence
  Synthetic
cuaccuagaugaagauguaugg

SEQ ID NO: 331355 - RNA, 23 nt, Artificial Sequence
  Synthetic
gcuaccuagaugaagauguaugg

SEQ ID NO: 331356 - RNA, 24 nt, Artificial Sequence
  Synthetic
agcuaccuagaugaagauguaugg

SEQ ID NO: 331357 - RNA, 18 nt, Artificial Sequence
  Synthetic
acagacuuuuauguaugg

SEQ ID NO: 331358 - RNA, 19 nt, Artificial Sequence
  Synthetic
uacagacuuuuauguaugg

SEQ ID NO: 331359 - RNA, 20 nt, Artificial Sequence
  Synthetic
auacagacuuuuauguaugg

SEQ ID NO: 331360 - RNA, 21 nt, Artificial Sequence
  Synthetic
gauacagacuuuuauguaugg

SEQ ID NO: 331361 - RNA, 22 nt, Artificial Sequence
  Synthetic
agauacagacuuuuauguaugg

SEQ ID NO: 331362 - RNA, 23 nt, Artificial Sequence
  Synthetic
aagauacagacuuuuauguaugg

SEQ ID NO: 331363 - RNA, 24 nt, Artificial Sequence
  Synthetic
aaagauacagacuuuuauguaugg

SEQ ID NO: 331364 - RNA, 18 nt, Artificial Sequence
  Synthetic
guuuugguuccuguaugg

SEQ ID NO: 331365 - RNA, 19 nt, Artificial Sequence
  Synthetic
uguuuugguuccuguaugg

SEQ ID NO: 331366 - RNA, 20 nt, Artificial Sequence
  Synthetic
cuguuuugguuccuguaugg

SEQ ID NO: 331367 - RNA, 21 nt, Artificial Sequence
  Synthetic
gcuguuuugguuccuguaugg

SEQ ID NO: 331368 - RNA, 22 nt, Artificial Sequence
  Synthetic
ugcuguuuugguuccuguaugg

SEQ ID NO: 331369 - RNA, 23 nt, Artificial Sequence
  Synthetic
cugcuguuuugguuccuguaugg

SEQ ID NO: 331370 - RNA, 24 nt, Artificial Sequence
  Synthetic
acugcuguuuugguuccuguaugg

SEQ ID NO: 331371 - RNA, 18 nt, Artificial Sequence
  Synthetic
aucuacuugccauuaugg

SEQ ID NO: 331372 - RNA, 19 nt, Artificial Sequence
  Synthetic
uaucuacuugccauuaugg

SEQ ID NO: 331373 - RNA, 20 nt, Artificial Sequence
  Synthetic
auaucuacuugccauuaugg

SEQ ID NO: 331374 - RNA, 21 nt, Artificial Sequence
  Synthetic
gauaucuacuugccauuaugg

SEQ ID NO: 331375 - RNA, 22 nt, Artificial Sequence
  Synthetic
agauaucuacuugccauuaugg

SEQ ID NO: 331376 - RNA, 23 nt, Artificial Sequence
  Synthetic
cagauaucuacuugccauuaugg

SEQ ID NO: 331377 - RNA, 24 nt, Artificial Sequence
  Synthetic
ccagauaucuacuugccauuaugg

SEQ ID NO: 331378 - RNA, 18 nt, Artificial Sequence
  Synthetic
auauaccaaaacuuaugg

SEQ ID NO: 331379 - RNA, 19 nt, Artificial Sequence
  Synthetic
aauauaccaaaacuuaugg

SEQ ID NO: 331380 - RNA, 20 nt, Artificial Sequence
  Synthetic
caauauaccaaaacuuaugg

SEQ ID NO: 331381 - RNA, 21 nt, Artificial Sequence
  Synthetic
acaauauaccaaaacuuaugg

SEQ ID NO: 331382 - RNA, 22 nt, Artificial Sequence
  Synthetic
uacaauauaccaaaacuuaugg

SEQ ID NO: 331383 - RNA, 23 nt, Artificial Sequence
  Synthetic
auacaauauaccaaaacuuaugg

SEQ ID NO: 331384 - RNA, 24 nt, Artificial Sequence
  Synthetic
aauacaauauaccaaaacuuaugg

SEQ ID NO: 331385 - RNA, 18 nt, Artificial Sequence
  Synthetic
uucaacucccacuuaugg

SEQ ID NO: 331386 - RNA, 19 nt, Artificial Sequence
  Synthetic
guucaacucccacuuaugg

SEQ ID NO: 331387 - RNA, 20 nt, Artificial Sequence
  Synthetic
cguucaacucccacuuaugg

SEQ ID NO: 331388 - RNA, 21 nt, Artificial Sequence
  Synthetic
ucguucaacucccacuuaugg

SEQ ID NO: 331389 - RNA, 22 nt, Artificial Sequence
  Synthetic
aucguucaacucccacuuaugg

SEQ ID NO: 331390 - RNA, 23 nt, Artificial Sequence
  Synthetic
caucguucaacucccacuuaugg

SEQ ID NO: 331391 - RNA, 24 nt, Artificial Sequence
  Synthetic
ucaucguucaacucccacuuaugg

SEQ ID NO: 331392 - RNA, 18 nt, Artificial Sequence
  Synthetic
agcuguucucacuuaugg

SEQ ID NO: 331393 - RNA, 19 nt, Artificial Sequence
  Synthetic
aagcuguucucacuuaugg

SEQ ID NO: 331394 - RNA, 20 nt, Artificial Sequence
  Synthetic
gaagcuguucucacuuaugg

SEQ ID NO: 331395 - RNA, 21 nt, Artificial Sequence
  Synthetic
ggaagcuguucucacuuaugg

SEQ ID NO: 331396 - RNA, 22 nt, Artificial Sequence
  Synthetic
aggaagcuguucucacuuaugg

SEQ ID NO: 331397 - RNA, 23 nt, Artificial Sequence
  Synthetic
caggaagcuguucucacuuaugg

SEQ ID NO: 331398 - RNA, 24 nt, Artificial Sequence
  Synthetic
gcaggaagcuguucucacuuaugg

SEQ ID NO: 331399 - RNA, 18 nt, Artificial Sequence
  Synthetic
cagaguugcugcuuaugg

SEQ ID NO: 331400 - RNA, 19 nt, Artificial Sequence
  Synthetic
ccagaguugcugcuuaugg

SEQ ID NO: 331401 - RNA, 20 nt, Artificial Sequence
  Synthetic
uccagaguugcugcuuaugg

SEQ ID NO: 331402 - RNA, 21 nt, Artificial Sequence
  Synthetic
auccagaguugcugcuuaugg

SEQ ID NO: 331403 - RNA, 22 nt, Artificial Sequence
  Synthetic
gauccagaguugcugcuuaugg

SEQ ID NO: 331404 - RNA, 23 nt, Artificial Sequence
  Synthetic
ggauccagaguugcugcuuaugg

SEQ ID NO: 331405 - RNA, 24 nt, Artificial Sequence
  Synthetic
cggauccagaguugcugcuuaugg

SEQ ID NO: 331406 - RNA, 18 nt, Artificial Sequence
  Synthetic
uauuuguaauucuuaugg

SEQ ID NO: 331407 - RNA, 19 nt, Artificial Sequence
  Synthetic
auauuuguaauucuuaugg

SEQ ID NO: 331408 - RNA, 20 nt, Artificial Sequence
  Synthetic
gauauuuguaauucuuaugg

SEQ ID NO: 331409 - RNA, 21 nt, Artificial Sequence
  Synthetic
agauauuuguaauucuuaugg

SEQ ID NO: 331410 - RNA, 22 nt, Artificial Sequence
  Synthetic
uagauauuuguaauucuuaugg

SEQ ID NO: 331411 - RNA, 23 nt, Artificial Sequence
  Synthetic
uuagauauuuguaauucuuaugg

SEQ ID NO: 331412 - RNA, 24 nt, Artificial Sequence
  Synthetic
cuuagauauuuguaauucuuaugg

SEQ ID NO: 331413 - RNA, 18 nt, Artificial Sequence
  Synthetic
cuuaacaaaguguuaugg

SEQ ID NO: 331414 - RNA, 19 nt, Artificial Sequence
  Synthetic
ucuuaacaaaguguuaugg

SEQ ID NO: 331415 - RNA, 20 nt, Artificial Sequence
  Synthetic
aucuuaacaaaguguuaugg

SEQ ID NO: 331416 - RNA, 21 nt, Artificial Sequence
  Synthetic
aaucuuaacaaaguguuaugg

SEQ ID NO: 331417 - RNA, 22 nt, Artificial Sequence
  Synthetic
aaaucuuaacaaaguguuaugg

SEQ ID NO: 331418 - RNA, 23 nt, Artificial Sequence
  Synthetic
aaaaucuuaacaaaguguuaugg

SEQ ID NO: 331419 - RNA, 24 nt, Artificial Sequence
  Synthetic
uaaaaucuuaacaaaguguuaugg

SEQ ID NO: 331420 - RNA, 18 nt, Artificial Sequence
  Synthetic
uaauauuauucuuuaugg

SEQ ID NO: 331421 - RNA, 19 nt, Artificial Sequence
  Synthetic
cuaauauuauucuuuaugg

SEQ ID NO: 331422 - RNA, 20 nt, Artificial Sequence
  Synthetic
gcuaauauuauucuuuaugg

SEQ ID NO: 331423 - RNA, 21 nt, Artificial Sequence
  Synthetic
agcuaauauuauucuuuaugg

SEQ ID NO: 331424 - RNA, 22 nt, Artificial Sequence
  Synthetic
cagcuaauauuauucuuuaugg

SEQ ID NO: 331425 - RNA, 23 nt, Artificial Sequence
  Synthetic
acagcuaauauuauucuuuaugg

SEQ ID NO: 331426 - RNA, 24 nt, Artificial Sequence
  Synthetic
uacagcuaauauuauucuuuaugg

SEQ ID NO: 331427 - RNA, 18 nt, Artificial Sequence
  Synthetic
cagaguguagguuuaugg

SEQ ID NO: 331428 - RNA, 19 nt, Artificial Sequence
  Synthetic
gcagaguguagguuuaugg

SEQ ID NO: 331429 - RNA, 20 nt, Artificial Sequence
  Synthetic
agcagaguguagguuuaugg

SEQ ID NO: 331430 - RNA, 21 nt, Artificial Sequence
  Synthetic
uagcagaguguagguuuaugg

SEQ ID NO: 331431 - RNA, 22 nt, Artificial Sequence
  Synthetic
uuagcagaguguagguuuaugg

SEQ ID NO: 331432 - RNA, 23 nt, Artificial Sequence
  Synthetic
uuuagcagaguguagguuuaugg

SEQ ID NO: 331433 - RNA, 24 nt, Artificial Sequence
  Synthetic
uuuuagcagaguguagguuuaugg

SEQ ID NO: 331434 - RNA, 18 nt, Artificial Sequence
  Synthetic
uaaaaauaaaaaaacugg

SEQ ID NO: 331435 - RNA, 19 nt, Artificial Sequence
  Synthetic
cuaaaaauaaaaaaacugg

SEQ ID NO: 331436 - RNA, 20 nt, Artificial Sequence
  Synthetic
acuaaaaauaaaaaaacugg

SEQ ID NO: 331437 - RNA, 21 nt, Artificial Sequence
  Synthetic
uacuaaaaauaaaaaaacugg

SEQ ID NO: 331438 - RNA, 22 nt, Artificial Sequence
  Synthetic
cuacuaaaaauaaaaaaacugg

SEQ ID NO: 331439 - RNA, 23 nt, Artificial Sequence
  Synthetic
ucuacuaaaaauaaaaaaacugg

SEQ ID NO: 331440 - RNA, 24 nt, Artificial Sequence
  Synthetic
cucuacuaaaaauaaaaaaacugg

SEQ ID NO: 331441 - RNA, 18 nt, Artificial Sequence
  Synthetic
gcaagggaacaaaacugg

SEQ ID NO: 331442 - RNA, 19 nt, Artificial Sequence
  Synthetic
agcaagggaacaaaacugg

SEQ ID NO: 331443 - RNA, 20 nt, Artificial Sequence
  Synthetic
cagcaagggaacaaaacugg

SEQ ID NO: 331444 - RNA, 21 nt, Artificial Sequence
  Synthetic
ccagcaagggaacaaaacugg

SEQ ID NO: 331445 - RNA, 22 nt, Artificial Sequence
  Synthetic
uccagcaagggaacaaaacugg

SEQ ID NO: 331446 - RNA, 23 nt, Artificial Sequence
  Synthetic
cuccagcaagggaacaaaacugg

SEQ ID NO: 331447 - RNA, 24 nt, Artificial Sequence
  Synthetic
ucuccagcaagggaacaaaacugg

SEQ ID NO: 331448 - RNA, 18 nt, Artificial Sequence
  Synthetic
aacccaguacaaaacugg

SEQ ID NO: 331449 - RNA, 19 nt, Artificial Sequence
  Synthetic
caacccaguacaaaacugg

SEQ ID NO: 331450 - RNA, 20 nt, Artificial Sequence
  Synthetic
acaacccaguacaaaacugg

SEQ ID NO: 331451 - RNA, 21 nt, Artificial Sequence
  Synthetic
aacaacccaguacaaaacugg

SEQ ID NO: 331452 - RNA, 22 nt, Artificial Sequence
  Synthetic
aaacaacccaguacaaaacugg

SEQ ID NO: 331453 - RNA, 23 nt, Artificial Sequence
  Synthetic
caaacaacccaguacaaaacugg

SEQ ID NO: 331454 - RNA, 24 nt, Artificial Sequence
  Synthetic
ucaaacaacccaguacaaaacugg

SEQ ID NO: 331455 - RNA, 18 nt, Artificial Sequence
  Synthetic
gcuggaucuuaaaacugg

SEQ ID NO: 331456 - RNA, 19 nt, Artificial Sequence
  Synthetic
ggcuggaucuuaaaacugg

SEQ ID NO: 331457 - RNA, 20 nt, Artificial Sequence
  Synthetic
aggcuggaucuuaaaacugg

SEQ ID NO: 331458 - RNA, 21 nt, Artificial Sequence
  Synthetic
gaggcuggaucuuaaaacugg

SEQ ID NO: 331459 - RNA, 22 nt, Artificial Sequence
  Synthetic
agaggcuggaucuuaaaacugg

SEQ ID NO: 331460 - RNA, 23 nt, Artificial Sequence
  Synthetic
cagaggcuggaucuuaaaacugg

SEQ ID NO: 331461 - RNA, 24 nt, Artificial Sequence
  Synthetic
ucagaggcuggaucuuaaaacugg

SEQ ID NO: 331462 - RNA, 18 nt, Artificial Sequence
  Synthetic
augggguggugaaacugg

SEQ ID NO: 331463 - RNA, 19 nt, Artificial Sequence
  Synthetic
aaugggguggugaaacugg

SEQ ID NO: 331464 - RNA, 20 nt, Artificial Sequence
  Synthetic
uaaugggguggugaaacugg

SEQ ID NO: 331465 - RNA, 21 nt, Artificial Sequence
  Synthetic
auaaugggguggugaaacugg

SEQ ID NO: 331466 - RNA, 22 nt, Artificial Sequence
  Synthetic
aauaaugggguggugaaacugg

SEQ ID NO: 331467 - RNA, 23 nt, Artificial Sequence
  Synthetic
uaauaaugggguggugaaacugg

SEQ ID NO: 331468 - RNA, 24 nt, Artificial Sequence
  Synthetic
guaauaaugggguggugaaacugg

SEQ ID NO: 331469 - RNA, 18 nt, Artificial Sequence
  Synthetic
gauugcucauuaaacugg

SEQ ID NO: 331470 - RNA, 19 nt, Artificial Sequence
  Synthetic
ggauugcucauuaaacugg

SEQ ID NO: 331471 - RNA, 20 nt, Artificial Sequence
  Synthetic
uggauugcucauuaaacugg

SEQ ID NO: 331472 - RNA, 21 nt, Artificial Sequence
  Synthetic
uuggauugcucauuaaacugg

SEQ ID NO: 331473 - RNA, 22 nt, Artificial Sequence
  Synthetic
guuggauugcucauuaaacugg

SEQ ID NO: 331474 - RNA, 23 nt, Artificial Sequence
  Synthetic
uguuggauugcucauuaaacugg

SEQ ID NO: 331475 - RNA, 24 nt, Artificial Sequence
  Synthetic
uuguuggauugcucauuaaacugg

SEQ ID NO: 331476 - RNA, 18 nt, Artificial Sequence
  Synthetic
aucauaucccacaacugg

SEQ ID NO: 331477 - RNA, 19 nt, Artificial Sequence
  Synthetic
caucauaucccacaacugg

SEQ ID NO: 331478 - RNA, 20 nt, Artificial Sequence
  Synthetic
ucaucauaucccacaacugg

SEQ ID NO: 331479 - RNA, 21 nt, Artificial Sequence
  Synthetic
cucaucauaucccacaacugg

SEQ ID NO: 331480 - RNA, 22 nt, Artificial Sequence
  Synthetic
ccucaucauaucccacaacugg

SEQ ID NO: 331481 - RNA, 23 nt, Artificial Sequence
  Synthetic
accucaucauaucccacaacugg

SEQ ID NO: 331482 - RNA, 24 nt, Artificial Sequence
  Synthetic
aaccucaucauaucccacaacugg

SEQ ID NO: 331483 - RNA, 18 nt, Artificial Sequence
  Synthetic
ugaugugggaucaacugg

SEQ ID NO: 331484 - RNA, 19 nt, Artificial Sequence
  Synthetic
augaugugggaucaacugg

SEQ ID NO: 331485 - RNA, 20 nt, Artificial Sequence
  Synthetic
gaugaugugggaucaacugg

SEQ ID NO: 331486 - RNA, 21 nt, Artificial Sequence
  Synthetic
agaugaugugggaucaacugg

SEQ ID NO: 331487 - RNA, 22 nt, Artificial Sequence
  Synthetic
gagaugaugugggaucaacugg

SEQ ID NO: 331488 - RNA, 23 nt, Artificial Sequence
  Synthetic
agagaugaugugggaucaacugg

SEQ ID NO: 331489 - RNA, 24 nt, Artificial Sequence
  Synthetic
uagagaugaugugggaucaacugg

SEQ ID NO: 331490 - RNA, 18 nt, Artificial Sequence
  Synthetic
ggaaccuaagucaacugg

SEQ ID NO: 331491 - RNA, 19 nt, Artificial Sequence
  Synthetic
uggaaccuaagucaacugg

SEQ ID NO: 331492 - RNA, 20 nt, Artificial Sequence
  Synthetic
guggaaccuaagucaacugg

SEQ ID NO: 331493 - RNA, 21 nt, Artificial Sequence
  Synthetic
aguggaaccuaagucaacugg

SEQ ID NO: 331494 - RNA, 22 nt, Artificial Sequence
  Synthetic
gaguggaaccuaagucaacugg

SEQ ID NO: 331495 - RNA, 23 nt, Artificial Sequence
  Synthetic
agaguggaaccuaagucaacugg

SEQ ID NO: 331496 - RNA, 24 nt, Artificial Sequence
  Synthetic
gagaguggaaccuaagucaacugg

SEQ ID NO: 331497 - RNA, 18 nt, Artificial Sequence
  Synthetic
agaaaaacguagaacugg

SEQ ID NO: 331498 - RNA, 19 nt, Artificial Sequence
  Synthetic
cagaaaaacguagaacugg

SEQ ID NO: 331499 - RNA, 20 nt, Artificial Sequence
  Synthetic
ucagaaaaacguagaacugg

SEQ ID NO: 331500 - RNA, 21 nt, Artificial Sequence
  Synthetic
cucagaaaaacguagaacugg

SEQ ID NO: 331501 - RNA, 22 nt, Artificial Sequence
  Synthetic
ucucagaaaaacguagaacugg

SEQ ID NO: 331502 - RNA, 23 nt, Artificial Sequence
  Synthetic
cucucagaaaaacguagaacugg

SEQ ID NO: 331503 - RNA, 24 nt, Artificial Sequence
  Synthetic
gcucucagaaaaacguagaacugg

SEQ ID NO: 331504 - RNA, 18 nt, Artificial Sequence
  Synthetic
cuugaacccaggaacugg

SEQ ID NO: 331505 - RNA, 19 nt, Artificial Sequence
  Synthetic
ccuugaacccaggaacugg

SEQ ID NO: 331506 - RNA, 20 nt, Artificial Sequence
  Synthetic
uccuugaacccaggaacugg

SEQ ID NO: 331507 - RNA, 21 nt, Artificial Sequence
  Synthetic
uuccuugaacccaggaacugg

SEQ ID NO: 331508 - RNA, 22 nt, Artificial Sequence
  Synthetic
auuccuugaacccaggaacugg

SEQ ID NO: 331509 - RNA, 23 nt, Artificial Sequence
  Synthetic
gauuccuugaacccaggaacugg

SEQ ID NO: 331510 - RNA, 24 nt, Artificial Sequence
  Synthetic
ggauuccuugaacccaggaacugg

SEQ ID NO: 331511 - RNA, 18 nt, Artificial Sequence
  Synthetic
ugaagcauuuugaacugg

SEQ ID NO: 331512 - RNA, 19 nt, Artificial Sequence
  Synthetic
gugaagcauuuugaacugg

SEQ ID NO: 331513 - RNA, 20 nt, Artificial Sequence
  Synthetic
ggugaagcauuuugaacugg

SEQ ID NO: 331514 - RNA, 21 nt, Artificial Sequence
  Synthetic
uggugaagcauuuugaacugg

SEQ ID NO: 331515 - RNA, 22 nt, Artificial Sequence
  Synthetic
auggugaagcauuuugaacugg

SEQ ID NO: 331516 - RNA, 23 nt, Artificial Sequence
  Synthetic
cauggugaagcauuuugaacugg

SEQ ID NO: 331517 - RNA, 24 nt, Artificial Sequence
  Synthetic
acauggugaagcauuuugaacugg

SEQ ID NO: 331518 - RNA, 18 nt, Artificial Sequence
  Synthetic
aaaagaaauuauaacugg

SEQ ID NO: 331519 - RNA, 19 nt, Artificial Sequence
  Synthetic
caaaagaaauuauaacugg

SEQ ID NO: 331520 - RNA, 20 nt, Artificial Sequence
  Synthetic
gcaaaagaaauuauaacugg

SEQ ID NO: 331521 - RNA, 21 nt, Artificial Sequence
  Synthetic
agcaaaagaaauuauaacugg

SEQ ID NO: 331522 - RNA, 22 nt, Artificial Sequence
  Synthetic
cagcaaaagaaauuauaacugg

SEQ ID NO: 331523 - RNA, 23 nt, Artificial Sequence
  Synthetic
ccagcaaaagaaauuauaacugg

SEQ ID NO: 331524 - RNA, 24 nt, Artificial Sequence
  Synthetic
accagcaaaagaaauuauaacugg

SEQ ID NO: 331525 - RNA, 18 nt, Artificial Sequence
  Synthetic
ucaagaaguucuaacugg

SEQ ID NO: 331526 - RNA, 19 nt, Artificial Sequence
  Synthetic
gucaagaaguucuaacugg

SEQ ID NO: 331527 - RNA, 20 nt, Artificial Sequence
  Synthetic
cgucaagaaguucuaacugg

SEQ ID NO: 331528 - RNA, 21 nt, Artificial Sequence
  Synthetic
ccgucaagaaguucuaacugg

SEQ ID NO: 331529 - RNA, 22 nt, Artificial Sequence
  Synthetic
gccgucaagaaguucuaacugg

SEQ ID NO: 331530 - RNA, 23 nt, Artificial Sequence
  Synthetic
agccgucaagaaguucuaacugg

SEQ ID NO: 331531 - RNA, 24 nt, Artificial Sequence
  Synthetic
aagccgucaagaaguucuaacugg

SEQ ID NO: 331532 - RNA, 18 nt, Artificial Sequence
  Synthetic
uuugcucugauuaacugg

SEQ ID NO: 331533 - RNA, 19 nt, Artificial Sequence
  Synthetic
uuuugcucugauuaacugg

SEQ ID NO: 331534 - RNA, 20 nt, Artificial Sequence
  Synthetic
uuuuugcucugauuaacugg

SEQ ID NO: 331535 - RNA, 21 nt, Artificial Sequence
  Synthetic
guuuuugcucugauuaacugg

SEQ ID NO: 331536 - RNA, 22 nt, Artificial Sequence
  Synthetic
cguuuuugcucugauuaacugg

SEQ ID NO: 331537 - RNA, 23 nt, Artificial Sequence
  Synthetic
acguuuuugcucugauuaacugg

SEQ ID NO: 331538 - RNA, 24 nt, Artificial Sequence
  Synthetic
aacguuuuugcucugauuaacugg

SEQ ID NO: 331539 - RNA, 18 nt, Artificial Sequence
  Synthetic
cagacacacacacacugg

SEQ ID NO: 331540 - RNA, 19 nt, Artificial Sequence
  Synthetic
acagacacacacacacugg

SEQ ID NO: 331541 - RNA, 20 nt, Artificial Sequence
  Synthetic
cacagacacacacacacugg

SEQ ID NO: 331542 - RNA, 21 nt, Artificial Sequence
  Synthetic
acacagacacacacacacugg

SEQ ID NO: 331543 - RNA, 22 nt, Artificial Sequence
  Synthetic
cacacagacacacacacacugg

SEQ ID NO: 331544 - RNA, 23 nt, Artificial Sequence
  Synthetic
acacacagacacacacacacugg

SEQ ID NO: 331545 - RNA, 24 nt, Artificial Sequence
  Synthetic
cacacacagacacacacacacugg

SEQ ID NO: 331546 - RNA, 18 nt, Artificial Sequence
  Synthetic
uaccacugcagacacugg

SEQ ID NO: 331547 - RNA, 19 nt, Artificial Sequence
  Synthetic
cuaccacugcagacacugg

SEQ ID NO: 331548 - RNA, 20 nt, Artificial Sequence
  Synthetic
ucuaccacugcagacacugg

SEQ ID NO: 331549 - RNA, 21 nt, Artificial Sequence
  Synthetic
cucuaccacugcagacacugg

SEQ ID NO: 331550 - RNA, 22 nt, Artificial Sequence
  Synthetic
acucuaccacugcagacacugg

SEQ ID NO: 331551 - RNA, 23 nt, Artificial Sequence
  Synthetic
cacucuaccacugcagacacugg

SEQ ID NO: 331552 - RNA, 24 nt, Artificial Sequence
  Synthetic
ccacucuaccacugcagacacugg

SEQ ID NO: 331553 - RNA, 18 nt, Artificial Sequence
  Synthetic
uaaaugaauagccacugg

SEQ ID NO: 331554 - RNA, 19 nt, Artificial Sequence
  Synthetic
cuaaaugaauagccacugg

SEQ ID NO: 331555 - RNA, 20 nt, Artificial Sequence
  Synthetic
ccuaaaugaauagccacugg

SEQ ID NO: 331556 - RNA, 21 nt, Artificial Sequence
  Synthetic
uccuaaaugaauagccacugg

SEQ ID NO: 331557 - RNA, 22 nt, Artificial Sequence
  Synthetic
auccuaaaugaauagccacugg

SEQ ID NO: 331558 - RNA, 23 nt, Artificial Sequence
  Synthetic
uauccuaaaugaauagccacugg

SEQ ID NO: 331559 - RNA, 24 nt, Artificial Sequence
  Synthetic
auauccuaaaugaauagccacugg

SEQ ID NO: 331560 - RNA, 18 nt, Artificial Sequence
  Synthetic
uuccuuccaugccacugg

SEQ ID NO: 331561 - RNA, 19 nt, Artificial Sequence
  Synthetic
auuccuuccaugccacugg

SEQ ID NO: 331562 - RNA, 20 nt, Artificial Sequence
  Synthetic
cauuccuuccaugccacugg

SEQ ID NO: 331563 - RNA, 21 nt, Artificial Sequence
  Synthetic
ccauuccuuccaugccacugg

SEQ ID NO: 331564 - RNA, 22 nt, Artificial Sequence
  Synthetic
gccauuccuuccaugccacugg

SEQ ID NO: 331565 - RNA, 23 nt, Artificial Sequence
  Synthetic
ggccauuccuuccaugccacugg

SEQ ID NO: 331566 - RNA, 24 nt, Artificial Sequence
  Synthetic
gggccauuccuuccaugccacugg

SEQ ID NO: 331567 - RNA, 18 nt, Artificial Sequence
  Synthetic
accuugcuuaugcacugg

SEQ ID NO: 331568 - RNA, 19 nt, Artificial Sequence
  Synthetic
aaccuugcuuaugcacugg

SEQ ID NO: 331569 - RNA, 20 nt, Artificial Sequence
  Synthetic
uaaccuugcuuaugcacugg

SEQ ID NO: 331570 - RNA, 21 nt, Artificial Sequence
  Synthetic
uuaaccuugcuuaugcacugg

SEQ ID NO: 331571 - RNA, 22 nt, Artificial Sequence
  Synthetic
uuuaaccuugcuuaugcacugg

SEQ ID NO: 331572 - RNA, 23 nt, Artificial Sequence
  Synthetic
uuuuaaccuugcuuaugcacugg

SEQ ID NO: 331573 - RNA, 24 nt, Artificial Sequence
  Synthetic
auuuuaaccuugcuuaugcacugg

SEQ ID NO: 331574 - RNA, 18 nt, Artificial Sequence
  Synthetic
agagagcaugugcacugg

SEQ ID NO: 331575 - RNA, 19 nt, Artificial Sequence
  Synthetic
aagagagcaugugcacugg

SEQ ID NO: 331576 - RNA, 20 nt, Artificial Sequence
  Synthetic
caagagagcaugugcacugg

SEQ ID NO: 331577 - RNA, 21 nt, Artificial Sequence
  Synthetic
acaagagagcaugugcacugg

SEQ ID NO: 331578 - RNA, 22 nt, Artificial Sequence
  Synthetic
cacaagagagcaugugcacugg

SEQ ID NO: 331579 - RNA, 23 nt, Artificial Sequence
  Synthetic
ucacaagagagcaugugcacugg

SEQ ID NO: 331580 - RNA, 24 nt, Artificial Sequence
  Synthetic
uucacaagagagcaugugcacugg

SEQ ID NO: 331581 - RNA, 18 nt, Artificial Sequence
  Synthetic
ugaauggaaauucacugg

SEQ ID NO: 331582 - RNA, 19 nt, Artificial Sequence
  Synthetic
cugaauggaaauucacugg

SEQ ID NO: 331583 - RNA, 20 nt, Artificial Sequence
  Synthetic
gcugaauggaaauucacugg

SEQ ID NO: 331584 - RNA, 21 nt, Artificial Sequence
  Synthetic
ggcugaauggaaauucacugg

SEQ ID NO: 331585 - RNA, 22 nt, Artificial Sequence
  Synthetic
aggcugaauggaaauucacugg

SEQ ID NO: 331586 - RNA, 23 nt, Artificial Sequence
  Synthetic
aaggcugaauggaaauucacugg

SEQ ID NO: 331587 - RNA, 24 nt, Artificial Sequence
  Synthetic
aaaggcugaauggaaauucacugg

SEQ ID NO: 331588 - RNA, 18 nt, Artificial Sequence
  Synthetic
auuuuacaacaagacugg

SEQ ID NO: 331589 - RNA, 19 nt, Artificial Sequence
  Synthetic
uauuuuacaacaagacugg

SEQ ID NO: 331590 - RNA, 20 nt, Artificial Sequence
  Synthetic
uuauuuuacaacaagacugg

SEQ ID NO: 331591 - RNA, 21 nt, Artificial Sequence
  Synthetic
auuauuuuacaacaagacugg

SEQ ID NO: 331592 - RNA, 22 nt, Artificial Sequence
  Synthetic
uauuauuuuacaacaagacugg

SEQ ID NO: 331593 - RNA, 23 nt, Artificial Sequence
  Synthetic
cuauuauuuuacaacaagacugg

SEQ ID NO: 331594 - RNA, 24 nt, Artificial Sequence
  Synthetic
acuauuauuuuacaacaagacugg

SEQ ID NO: 331595 - RNA, 18 nt, Artificial Sequence
  Synthetic
aaagaggcaugagacugg

SEQ ID NO: 331596 - RNA, 19 nt, Artificial Sequence
  Synthetic
gaaagaggcaugagacugg

SEQ ID NO: 331597 - RNA, 20 nt, Artificial Sequence
  Synthetic
agaaagaggcaugagacugg

SEQ ID NO: 331598 - RNA, 21 nt, Artificial Sequence
  Synthetic
aagaaagaggcaugagacugg

SEQ ID NO: 331599 - RNA, 22 nt, Artificial Sequence
  Synthetic
aaagaaagaggcaugagacugg

SEQ ID NO: 331600 - RNA, 23 nt, Artificial Sequence
  Synthetic
uaaagaaagaggcaugagacugg

SEQ ID NO: 331601 - RNA, 24 nt, Artificial Sequence
  Synthetic
auaaagaaagaggcaugagacugg

SEQ ID NO: 331602 - RNA, 18 nt, Artificial Sequence
  Synthetic
aagguguacauagacugg

SEQ ID NO: 331603 - RNA, 19 nt, Artificial Sequence
  Synthetic
caagguguacauagacugg

SEQ ID NO: 331604 - RNA, 20 nt, Artificial Sequence
  Synthetic
acaagguguacauagacugg

SEQ ID NO: 331605 - RNA, 21 nt, Artificial Sequence
  Synthetic
cacaagguguacauagacugg

SEQ ID NO: 331606 - RNA, 22 nt, Artificial Sequence
  Synthetic
ucacaagguguacauagacugg

SEQ ID NO: 331607 - RNA, 23 nt, Artificial Sequence
  Synthetic
aucacaagguguacauagacugg

SEQ ID NO: 331608 - RNA, 24 nt, Artificial Sequence
  Synthetic
caucacaagguguacauagacugg

SEQ ID NO: 331609 - RNA, 18 nt, Artificial Sequence
  Synthetic
gaaaguugaaaggacugg

SEQ ID NO: 331610 - RNA, 19 nt, Artificial Sequence
  Synthetic
ugaaaguugaaaggacugg

SEQ ID NO: 331611 - RNA, 20 nt, Artificial Sequence
  Synthetic
augaaaguugaaaggacugg

SEQ ID NO: 331612 - RNA, 21 nt, Artificial Sequence
  Synthetic
aaugaaaguugaaaggacugg

SEQ ID NO: 331613 - RNA, 22 nt, Artificial Sequence
  Synthetic
uaaugaaaguugaaaggacugg

SEQ ID NO: 331614 - RNA, 23 nt, Artificial Sequence
  Synthetic
auaaugaaaguugaaaggacugg

SEQ ID NO: 331615 - RNA, 24 nt, Artificial Sequence
  Synthetic
gauaaugaaaguugaaaggacugg

SEQ ID NO: 331616 - RNA, 18 nt, Artificial Sequence
  Synthetic
uuaaagacaugggacugg

SEQ ID NO: 331617 - RNA, 19 nt, Artificial Sequence
  Synthetic
uuuaaagacaugggacugg

SEQ ID NO: 331618 - RNA, 20 nt, Artificial Sequence
  Synthetic
uuuuaaagacaugggacugg

SEQ ID NO: 331619 - RNA, 21 nt, Artificial Sequence
  Synthetic
uuuuuaaagacaugggacugg

SEQ ID NO: 331620 - RNA, 22 nt, Artificial Sequence
  Synthetic
guuuuuaaagacaugggacugg

SEQ ID NO: 331621 - RNA, 23 nt, Artificial Sequence
  Synthetic
gguuuuuaaagacaugggacugg

SEQ ID NO: 331622 - RNA, 24 nt, Artificial Sequence
  Synthetic
ugguuuuuaaagacaugggacugg

SEQ ID NO: 331623 - RNA, 18 nt, Artificial Sequence
  Synthetic
ccaucaaugguggacugg

SEQ ID NO: 331624 - RNA, 19 nt, Artificial Sequence
  Synthetic
accaucaaugguggacugg

SEQ ID NO: 331625 - RNA, 20 nt, Artificial Sequence
  Synthetic
gaccaucaaugguggacugg

SEQ ID NO: 331626 - RNA, 21 nt, Artificial Sequence
  Synthetic
ugaccaucaaugguggacugg

SEQ ID NO: 331627 - RNA, 22 nt, Artificial Sequence
  Synthetic
augaccaucaaugguggacugg

SEQ ID NO: 331628 - RNA, 23 nt, Artificial Sequence
  Synthetic
gaugaccaucaaugguggacugg

SEQ ID NO: 331629 - RNA, 24 nt, Artificial Sequence
  Synthetic
agaugaccaucaaugguggacugg

SEQ ID NO: 331630 - RNA, 18 nt, Artificial Sequence
  Synthetic
cuaugaagugaugacugg

SEQ ID NO: 331631 - RNA, 19 nt, Artificial Sequence
  Synthetic
acuaugaagugaugacugg

SEQ ID NO: 331632 - RNA, 20 nt, Artificial Sequence
  Synthetic
aacuaugaagugaugacugg

SEQ ID NO: 331633 - RNA, 21 nt, Artificial Sequence
  Synthetic
caacuaugaagugaugacugg

SEQ ID NO: 331634 - RNA, 22 nt, Artificial Sequence
  Synthetic
gcaacuaugaagugaugacugg

SEQ ID NO: 331635 - RNA, 23 nt, Artificial Sequence
  Synthetic
ugcaacuaugaagugaugacugg

SEQ ID NO: 331636 - RNA, 24 nt, Artificial Sequence
  Synthetic
gugcaacuaugaagugaugacugg

SEQ ID NO: 331637 - RNA, 18 nt, Artificial Sequence
  Synthetic
cacuguuuuacugacugg

SEQ ID NO: 331638 - RNA, 19 nt, Artificial Sequence
  Synthetic
ccacuguuuuacugacugg

SEQ ID NO: 331639 - RNA, 20 nt, Artificial Sequence
  Synthetic
gccacuguuuuacugacugg

SEQ ID NO: 331640 - RNA, 21 nt, Artificial Sequence
  Synthetic
ggccacuguuuuacugacugg

SEQ ID NO: 331641 - RNA, 22 nt, Artificial Sequence
  Synthetic
uggccacuguuuuacugacugg

SEQ ID NO: 331642 - RNA, 23 nt, Artificial Sequence
  Synthetic
auggccacuguuuuacugacugg

SEQ ID NO: 331643 - RNA, 24 nt, Artificial Sequence
  Synthetic
cauggccacuguuuuacugacugg

SEQ ID NO: 331644 - RNA, 18 nt, Artificial Sequence
  Synthetic
uuuuugcauugugacugg

SEQ ID NO: 331645 - RNA, 19 nt, Artificial Sequence
  Synthetic
auuuuugcauugugacugg

SEQ ID NO: 331646 - RNA, 20 nt, Artificial Sequence
  Synthetic
aauuuuugcauugugacugg

SEQ ID NO: 331647 - RNA, 21 nt, Artificial Sequence
  Synthetic
gaauuuuugcauugugacugg

SEQ ID NO: 331648 - RNA, 22 nt, Artificial Sequence
  Synthetic
ggaauuuuugcauugugacugg

SEQ ID NO: 331649 - RNA, 23 nt, Artificial Sequence
  Synthetic
gggaauuuuugcauugugacugg

SEQ ID NO: 331650 - RNA, 24 nt, Artificial Sequence
  Synthetic
cgggaauuuuugcauugugacugg

SEQ ID NO: 331651 - RNA, 18 nt, Artificial Sequence
  Synthetic
gaauuuucacauuacugg

SEQ ID NO: 331652 - RNA, 19 nt, Artificial Sequence
  Synthetic
ggaauuuucacauuacugg

SEQ ID NO: 331653 - RNA, 20 nt, Artificial Sequence
  Synthetic
uggaauuuucacauuacugg

SEQ ID NO: 331654 - RNA, 21 nt, Artificial Sequence
  Synthetic
uuggaauuuucacauuacugg

SEQ ID NO: 331655 - RNA, 22 nt, Artificial Sequence
  Synthetic
cuuggaauuuucacauuacugg

SEQ ID NO: 331656 - RNA, 23 nt, Artificial Sequence
  Synthetic
gcuuggaauuuucacauuacugg

SEQ ID NO: 331657 - RNA, 24 nt, Artificial Sequence
  Synthetic
ugcuuggaauuuucacauuacugg

SEQ ID NO: 331658 - RNA, 18 nt, Artificial Sequence
  Synthetic
gucuguuucaguuacugg

SEQ ID NO: 331659 - RNA, 19 nt, Artificial Sequence
  Synthetic
ugucuguuucaguuacugg

SEQ ID NO: 331660 - RNA, 20 nt, Artificial Sequence
  Synthetic
uugucuguuucaguuacugg

SEQ ID NO: 331661 - RNA, 21 nt, Artificial Sequence
  Synthetic
uuugucuguuucaguuacugg

SEQ ID NO: 331662 - RNA, 22 nt, Artificial Sequence
  Synthetic
auuugucuguuucaguuacugg

SEQ ID NO: 331663 - RNA, 23 nt, Artificial Sequence
  Synthetic
cauuugucuguuucaguuacugg

SEQ ID NO: 331664 - RNA, 24 nt, Artificial Sequence
  Synthetic
gcauuugucuguuucaguuacugg

SEQ ID NO: 331665 - RNA, 18 nt, Artificial Sequence
  Synthetic
acccaaaucuguuacugg

SEQ ID NO: 331666 - RNA, 19 nt, Artificial Sequence
  Synthetic
cacccaaaucuguuacugg

SEQ ID NO: 331667 - RNA, 20 nt, Artificial Sequence
  Synthetic
ccacccaaaucuguuacugg

SEQ ID NO: 331668 - RNA, 21 nt, Artificial Sequence
  Synthetic
cccacccaaaucuguuacugg

SEQ ID NO: 331669 - RNA, 22 nt, Artificial Sequence
  Synthetic
acccacccaaaucuguuacugg

SEQ ID NO: 331670 - RNA, 23 nt, Artificial Sequence
  Synthetic
aacccacccaaaucuguuacugg

SEQ ID NO: 331671 - RNA, 24 nt, Artificial Sequence
  Synthetic
aaacccacccaaaucuguuacugg

SEQ ID NO: 331672 - RNA, 18 nt, Artificial Sequence
  Synthetic
uuagcugagauuuacugg

SEQ ID NO: 331673 - RNA, 19 nt, Artificial Sequence
  Synthetic
uuuagcugagauuuacugg

SEQ ID NO: 331674 - RNA, 20 nt, Artificial Sequence
  Synthetic
uuuuagcugagauuuacugg

SEQ ID NO: 331675 - RNA, 21 nt, Artificial Sequence
  Synthetic
uuuuuagcugagauuuacugg

SEQ ID NO: 331676 - RNA, 22 nt, Artificial Sequence
  Synthetic
guuuuuagcugagauuuacugg

SEQ ID NO: 331677 - RNA, 23 nt, Artificial Sequence
  Synthetic
aguuuuuagcugagauuuacugg

SEQ ID NO: 331678 - RNA, 24 nt, Artificial Sequence
  Synthetic
caguuuuuagcugagauuuacugg

SEQ ID NO: 331679 - RNA, 18 nt, Artificial Sequence
  Synthetic
ccugauaccaaaaccugg

SEQ ID NO: 331680 - RNA, 19 nt, Artificial Sequence
  Synthetic
uccugauaccaaaaccugg

SEQ ID NO: 331681 - RNA, 20 nt, Artificial Sequence
  Synthetic
auccugauaccaaaaccugg

SEQ ID NO: 331682 - RNA, 21 nt, Artificial Sequence
  Synthetic
cauccugauaccaaaaccugg

SEQ ID NO: 331683 - RNA, 22 nt, Artificial Sequence
  Synthetic
ucauccugauaccaaaaccugg

SEQ ID NO: 331684 - RNA, 23 nt, Artificial Sequence
  Synthetic
aucauccugauaccaaaaccugg

SEQ ID NO: 331685 - RNA, 24 nt, Artificial Sequence
  Synthetic
caucauccugauaccaaaaccugg

SEQ ID NO: 331686 - RNA, 18 nt, Artificial Sequence
  Synthetic
ugcuucucuuaaaccugg

SEQ ID NO: 331687 - RNA, 19 nt, Artificial Sequence
  Synthetic
cugcuucucuuaaaccugg

SEQ ID NO: 331688 - RNA, 20 nt, Artificial Sequence
  Synthetic
ucugcuucucuuaaaccugg

SEQ ID NO: 331689 - RNA, 21 nt, Artificial Sequence
  Synthetic
cucugcuucucuuaaaccugg

SEQ ID NO: 331690 - RNA, 22 nt, Artificial Sequence
  Synthetic
acucugcuucucuuaaaccugg

SEQ ID NO: 331691 - RNA, 23 nt, Artificial Sequence
  Synthetic
gacucugcuucucuuaaaccugg

SEQ ID NO: 331692 - RNA, 24 nt, Artificial Sequence
  Synthetic
agacucugcuucucuuaaaccugg

SEQ ID NO: 331693 - RNA, 18 nt, Artificial Sequence
  Synthetic
cagugcacauacaccugg

SEQ ID NO: 331694 - RNA, 19 nt, Artificial Sequence
  Synthetic
ucagugcacauacaccugg

SEQ ID NO: 331695 - RNA, 20 nt, Artificial Sequence
  Synthetic
uucagugcacauacaccugg

SEQ ID NO: 331696 - RNA, 21 nt, Artificial Sequence
  Synthetic
auucagugcacauacaccugg

SEQ ID NO: 331697 - RNA, 22 nt, Artificial Sequence
  Synthetic
uauucagugcacauacaccugg

SEQ ID NO: 331698 - RNA, 23 nt, Artificial Sequence
  Synthetic
auauucagugcacauacaccugg

SEQ ID NO: 331699 - RNA, 24 nt, Artificial Sequence
  Synthetic
aauauucagugcacauacaccugg

SEQ ID NO: 331700 - RNA, 18 nt, Artificial Sequence
  Synthetic
gugagccaccgcaccugg

SEQ ID NO: 331701 - RNA, 19 nt, Artificial Sequence
  Synthetic
cgugagccaccgcaccugg

SEQ ID NO: 331702 - RNA, 20 nt, Artificial Sequence
  Synthetic
gcgugagccaccgcaccugg

SEQ ID NO: 331703 - RNA, 24 nt, Artificial Sequence
  Synthetic
acaggcgugagccaccgcaccugg

SEQ ID NO: 331704 - RNA, 18 nt, Artificial Sequence
  Synthetic
auuauuccacagaccugg

SEQ ID NO: 331705 - RNA, 19 nt, Artificial Sequence
  Synthetic
cauuauuccacagaccugg

SEQ ID NO: 331706 - RNA, 20 nt, Artificial Sequence
  Synthetic
acauuauuccacagaccugg

SEQ ID NO: 331707 - RNA, 21 nt, Artificial Sequence
  Synthetic
uacauuauuccacagaccugg

SEQ ID NO: 331708 - RNA, 22 nt, Artificial Sequence
  Synthetic
auacauuauuccacagaccugg

SEQ ID NO: 331709 - RNA, 23 nt, Artificial Sequence
  Synthetic
uauacauuauuccacagaccugg

SEQ ID NO: 331710 - RNA, 24 nt, Artificial Sequence
  Synthetic
cuauacauuauuccacagaccugg

SEQ ID NO: 331711 - RNA, 18 nt, Artificial Sequence
  Synthetic
aacauauuugcuaccugg

SEQ ID NO: 331712 - RNA, 19 nt, Artificial Sequence
  Synthetic
gaacauauuugcuaccugg

SEQ ID NO: 331713 - RNA, 20 nt, Artificial Sequence
  Synthetic
ugaacauauuugcuaccugg

SEQ ID NO: 331714 - RNA, 21 nt, Artificial Sequence
  Synthetic
uugaacauauuugcuaccugg

SEQ ID NO: 331715 - RNA, 22 nt, Artificial Sequence
  Synthetic
auugaacauauuugcuaccugg

SEQ ID NO: 331716 - RNA, 23 nt, Artificial Sequence
  Synthetic
aauugaacauauuugcuaccugg

SEQ ID NO: 331717 - RNA, 24 nt, Artificial Sequence
  Synthetic
aaauugaacauauuugcuaccugg

SEQ ID NO: 331718 - RNA, 18 nt, Artificial Sequence
  Synthetic
ugaaaauggguuaccugg

SEQ ID NO: 331719 - RNA, 19 nt, Artificial Sequence
  Synthetic
uugaaaauggguuaccugg

SEQ ID NO: 331720 - RNA, 20 nt, Artificial Sequence
  Synthetic
uuugaaaauggguuaccugg

SEQ ID NO: 331721 - RNA, 21 nt, Artificial Sequence
  Synthetic
uuuugaaaauggguuaccugg

SEQ ID NO: 331722 - RNA, 22 nt, Artificial Sequence
  Synthetic
cuuuugaaaauggguuaccugg

SEQ ID NO: 331723 - RNA, 23 nt, Artificial Sequence
  Synthetic
gcuuuugaaaauggguuaccugg

SEQ ID NO: 331724 - RNA, 24 nt, Artificial Sequence
  Synthetic
ugcuuuugaaaauggguuaccugg

SEQ ID NO: 331725 - RNA, 18 nt, Artificial Sequence
  Synthetic
uguugagcauuuaccugg

SEQ ID NO: 331726 - RNA, 19 nt, Artificial Sequence
  Synthetic
auguugagcauuuaccugg

SEQ ID NO: 331727 - RNA, 20 nt, Artificial Sequence
  Synthetic
cauguugagcauuuaccugg

SEQ ID NO: 331728 - RNA, 21 nt, Artificial Sequence
  Synthetic
acauguugagcauuuaccugg

SEQ ID NO: 331729 - RNA, 22 nt, Artificial Sequence
  Synthetic
cacauguugagcauuuaccugg

SEQ ID NO: 331730 - RNA, 23 nt, Artificial Sequence
  Synthetic
acacauguugagcauuuaccugg

SEQ ID NO: 331731 - RNA, 24 nt, Artificial Sequence
  Synthetic
cacacauguugagcauuuaccugg

SEQ ID NO: 331732 - RNA, 18 nt, Artificial Sequence
  Synthetic
ucucacucugcacccugg

SEQ ID NO: 331733 - RNA, 19 nt, Artificial Sequence
  Synthetic
gucucacucugcacccugg

SEQ ID NO: 331734 - RNA, 20 nt, Artificial Sequence
  Synthetic
agucucacucugcacccugg

SEQ ID NO: 331735 - RNA, 21 nt, Artificial Sequence
  Synthetic
gagucucacucugcacccugg

SEQ ID NO: 331736 - RNA, 22 nt, Artificial Sequence
  Synthetic
ggagucucacucugcacccugg

SEQ ID NO: 331737 - RNA, 23 nt, Artificial Sequence
  Synthetic
uggagucucacucugcacccugg

SEQ ID NO: 331738 - RNA, 24 nt, Artificial Sequence
  Synthetic
auggagucucacucugcacccugg

SEQ ID NO: 331739 - RNA, 18 nt, Artificial Sequence
  Synthetic
cuaugaaaaagacccugg

SEQ ID NO: 331740 - RNA, 19 nt, Artificial Sequence
  Synthetic
ccuaugaaaaagacccugg

SEQ ID NO: 331741 - RNA, 20 nt, Artificial Sequence
  Synthetic
cccuaugaaaaagacccugg

SEQ ID NO: 331742 - RNA, 21 nt, Artificial Sequence
  Synthetic
gcccuaugaaaaagacccugg

SEQ ID NO: 331743 - RNA, 22 nt, Artificial Sequence
  Synthetic
agcccuaugaaaaagacccugg

SEQ ID NO: 331744 - RNA, 23 nt, Artificial Sequence
  Synthetic
gagcccuaugaaaaagacccugg

SEQ ID NO: 331745 - RNA, 24 nt, Artificial Sequence
  Synthetic
ggagcccuaugaaaaagacccugg

SEQ ID NO: 331746 - RNA, 18 nt, Artificial Sequence
  Synthetic
ggaauuagcuagcccugg

SEQ ID NO: 331747 - RNA, 19 nt, Artificial Sequence
  Synthetic
aggaauuagcuagcccugg

SEQ ID NO: 331748 - RNA, 20 nt, Artificial Sequence
  Synthetic
uaggaauuagcuagcccugg

SEQ ID NO: 331749 - RNA, 21 nt, Artificial Sequence
  Synthetic
uuaggaauuagcuagcccugg

SEQ ID NO: 331750 - RNA, 22 nt, Artificial Sequence
  Synthetic
uuuaggaauuagcuagcccugg

SEQ ID NO: 331751 - RNA, 23 nt, Artificial Sequence
  Synthetic
cuuuaggaauuagcuagcccugg

SEQ ID NO: 331752 - RNA, 24 nt, Artificial Sequence
  Synthetic
ucuuuaggaauuagcuagcccugg

SEQ ID NO: 331753 - RNA, 18 nt, Artificial Sequence
  Synthetic
uauuuuaaaaaucccugg

SEQ ID NO: 331754 - RNA, 19 nt, Artificial Sequence
  Synthetic
uuauuuuaaaaaucccugg

SEQ ID NO: 331755 - RNA, 20 nt, Artificial Sequence
  Synthetic
uuuauuuuaaaaaucccugg

SEQ ID NO: 331756 - RNA, 21 nt, Artificial Sequence
  Synthetic
uuuuauuuuaaaaaucccugg

SEQ ID NO: 331757 - RNA, 22 nt, Artificial Sequence
  Synthetic
uuuuuauuuuaaaaaucccugg

SEQ ID NO: 331758 - RNA, 23 nt, Artificial Sequence
  Synthetic
auuuuuauuuuaaaaaucccugg

SEQ ID NO: 331759 - RNA, 24 nt, Artificial Sequence
  Synthetic
cauuuuuauuuuaaaaaucccugg

SEQ ID NO: 331760 - RNA, 18 nt, Artificial Sequence
  Synthetic
uaauuugcauaucccugg

SEQ ID NO: 331761 - RNA, 19 nt, Artificial Sequence
  Synthetic
uuaauuugcauaucccugg

SEQ ID NO: 331762 - RNA, 20 nt, Artificial Sequence
  Synthetic
uuuaauuugcauaucccugg

SEQ ID NO: 331763 - RNA, 21 nt, Artificial Sequence
  Synthetic
uuuuaauuugcauaucccugg

SEQ ID NO: 331764 - RNA, 22 nt, Artificial Sequence
  Synthetic
auuuuaauuugcauaucccugg

SEQ ID NO: 331765 - RNA, 23 nt, Artificial Sequence
  Synthetic
uauuuuaauuugcauaucccugg

SEQ ID NO: 331766 - RNA, 24 nt, Artificial Sequence
  Synthetic
uuauuuuaauuugcauaucccugg

SEQ ID NO: 331767 - RNA, 18 nt, Artificial Sequence
  Synthetic
uggucucaaacucccugg

SEQ ID NO: 331768 - RNA, 19 nt, Artificial Sequence
  Synthetic
cuggucucaaacucccugg

SEQ ID NO: 331769 - RNA, 20 nt, Artificial Sequence
  Synthetic
gcuggucucaaacucccugg

SEQ ID NO: 331770 - RNA, 21 nt, Artificial Sequence
  Synthetic
ggcuggucucaaacucccugg

SEQ ID NO: 331771 - RNA, 22 nt, Artificial Sequence
  Synthetic
gggcuggucucaaacucccugg

SEQ ID NO: 331772 - RNA, 23 nt, Artificial Sequence
  Synthetic
ggggcuggucucaaacucccugg

SEQ ID NO: 331773 - RNA, 24 nt, Artificial Sequence
  Synthetic
uggggcuggucucaaacucccugg

SEQ ID NO: 331774 - RNA, 18 nt, Artificial Sequence
  Synthetic
aauaugaucaacgccugg

SEQ ID NO: 331775 - RNA, 19 nt, Artificial Sequence
  Synthetic
aaauaugaucaacgccugg

SEQ ID NO: 331776 - RNA, 20 nt, Artificial Sequence
  Synthetic
aaaauaugaucaacgccugg

SEQ ID NO: 331777 - RNA, 21 nt, Artificial Sequence
  Synthetic
uaaaauaugaucaacgccugg

SEQ ID NO: 331778 - RNA, 22 nt, Artificial Sequence
  Synthetic
guaaaauaugaucaacgccugg

SEQ ID NO: 331779 - RNA, 23 nt, Artificial Sequence
  Synthetic
uguaaaauaugaucaacgccugg

SEQ ID NO: 331780 - RNA, 24 nt, Artificial Sequence
  Synthetic
auguaaaauaugaucaacgccugg

SEQ ID NO: 331781 - RNA, 18 nt, Artificial Sequence
  Synthetic
cacugcaguccggccugg

SEQ ID NO: 331782 - RNA, 19 nt, Artificial Sequence
  Synthetic
gcacugcaguccggccugg

SEQ ID NO: 331783 - RNA, 20 nt, Artificial Sequence
  Synthetic
agcacugcaguccggccugg

SEQ ID NO: 331784 - RNA, 21 nt, Artificial Sequence
  Synthetic
cagcacugcaguccggccugg

SEQ ID NO: 331785 - RNA, 22 nt, Artificial Sequence
  Synthetic
gcagcacugcaguccggccugg

SEQ ID NO: 331786 - RNA, 23 nt, Artificial Sequence
  Synthetic
agcagcacugcaguccggccugg

SEQ ID NO: 331787 - RNA, 24 nt, Artificial Sequence
  Synthetic
cagcagcacugcaguccggccugg

SEQ ID NO: 331788 - RNA, 18 nt, Artificial Sequence
  Synthetic
uuuaagaaaaaugccugg

SEQ ID NO: 331789 - RNA, 19 nt, Artificial Sequence
  Synthetic
uuuuaagaaaaaugccugg

SEQ ID NO: 331790 - RNA, 20 nt, Artificial Sequence
  Synthetic
cuuuuaagaaaaaugccugg

SEQ ID NO: 331791 - RNA, 21 nt, Artificial Sequence
  Synthetic
gcuuuuaagaaaaaugccugg

SEQ ID NO: 331792 - RNA, 22 nt, Artificial Sequence
  Synthetic
ugcuuuuaagaaaaaugccugg

SEQ ID NO: 331793 - RNA, 23 nt, Artificial Sequence
  Synthetic
gugcuuuuaagaaaaaugccugg

SEQ ID NO: 331794 - RNA, 24 nt, Artificial Sequence
  Synthetic
agugcuuuuaagaaaaaugccugg

SEQ ID NO: 331795 - RNA, 19 nt, Artificial Sequence
  Synthetic
cgugagccaccaugccugg

SEQ ID NO: 331796 - RNA, 20 nt, Artificial Sequence
  Synthetic
gcgugagccaccaugccugg

SEQ ID NO: 331797 - RNA, 21 nt, Artificial Sequence
  Synthetic
ggcgugagccaccaugccugg

SEQ ID NO: 331798 - RNA, 22 nt, Artificial Sequence
  Synthetic
aggcgugagccaccaugccugg

SEQ ID NO: 331799 - RNA, 23 nt, Artificial Sequence
  Synthetic
caggcgugagccaccaugccugg

SEQ ID NO: 331800 - RNA, 24 nt, Artificial Sequence
  Synthetic
acaggcgugagccaccaugccugg

SEQ ID NO: 331801 - RNA, 18 nt, Artificial Sequence
  Synthetic
augagagaguuugccugg

SEQ ID NO: 331802 - RNA, 19 nt, Artificial Sequence
  Synthetic
gaugagagaguuugccugg

SEQ ID NO: 331803 - RNA, 20 nt, Artificial Sequence
  Synthetic
ggaugagagaguuugccugg

SEQ ID NO: 331804 - RNA, 21 nt, Artificial Sequence
  Synthetic
aggaugagagaguuugccugg

SEQ ID NO: 331805 - RNA, 22 nt, Artificial Sequence
  Synthetic
caggaugagagaguuugccugg

SEQ ID NO: 331806 - RNA, 23 nt, Artificial Sequence
  Synthetic
ucaggaugagagaguuugccugg

SEQ ID NO: 331807 - RNA, 24 nt, Artificial Sequence
  Synthetic
gucaggaugagagaguuugccugg

SEQ ID NO: 331808 - RNA, 18 nt, Artificial Sequence
  Synthetic
auuuacaaacacuccugg

SEQ ID NO: 331809 - RNA, 19 nt, Artificial Sequence
  Synthetic
cauuuacaaacacuccugg

SEQ ID NO: 331810 - RNA, 20 nt, Artificial Sequence
  Synthetic
acauuuacaaacacuccugg

SEQ ID NO: 331811 - RNA, 21 nt, Artificial Sequence
  Synthetic
aacauuuacaaacacuccugg

SEQ ID NO: 331812 - RNA, 22 nt, Artificial Sequence
  Synthetic
caacauuuacaaacacuccugg

SEQ ID NO: 331813 - RNA, 23 nt, Artificial Sequence
  Synthetic
ucaacauuuacaaacacuccugg

SEQ ID NO: 331814 - RNA, 24 nt, Artificial Sequence
  Synthetic
cucaacauuuacaaacacuccugg

SEQ ID NO: 331815 - RNA, 18 nt, Artificial Sequence
  Synthetic
gaucugucagucuccugg

SEQ ID NO: 331816 - RNA, 19 nt, Artificial Sequence
  Synthetic
ugaucugucagucuccugg

SEQ ID NO: 331817 - RNA, 20 nt, Artificial Sequence
  Synthetic
uugaucugucagucuccugg

SEQ ID NO: 331818 - RNA, 21 nt, Artificial Sequence
  Synthetic
uuugaucugucagucuccugg

SEQ ID NO: 331819 - RNA, 22 nt, Artificial Sequence
  Synthetic
uuuugaucugucagucuccugg

SEQ ID NO: 331820 - RNA, 23 nt, Artificial Sequence
  Synthetic
uuuuugaucugucagucuccugg

SEQ ID NO: 331821 - RNA, 24 nt, Artificial Sequence
  Synthetic
guuuuugaucugucagucuccugg

SEQ ID NO: 331822 - RNA, 18 nt, Artificial Sequence
  Synthetic
agugagaaugucuccugg

SEQ ID NO: 331823 - RNA, 19 nt, Artificial Sequence
  Synthetic
uagugagaaugucuccugg

SEQ ID NO: 331824 - RNA, 20 nt, Artificial Sequence
  Synthetic
auagugagaaugucuccugg

SEQ ID NO: 331825 - RNA, 21 nt, Artificial Sequence
  Synthetic
aauagugagaaugucuccugg

SEQ ID NO: 331826 - RNA, 22 nt, Artificial Sequence
  Synthetic
gaauagugagaaugucuccugg

SEQ ID NO: 331827 - RNA, 23 nt, Artificial Sequence
  Synthetic
agaauagugagaaugucuccugg

SEQ ID NO: 331828 - RNA, 24 nt, Artificial Sequence
  Synthetic
cagaauagugagaaugucuccugg

SEQ ID NO: 331829 - RNA, 18 nt, Artificial Sequence
  Synthetic
ucaagaagcugguccugg

SEQ ID NO: 331830 - RNA, 19 nt, Artificial Sequence
  Synthetic
uucaagaagcugguccugg

SEQ ID NO: 331831 - RNA, 20 nt, Artificial Sequence
  Synthetic
guucaagaagcugguccugg

SEQ ID NO: 331832 - RNA, 21 nt, Artificial Sequence
  Synthetic
cguucaagaagcugguccugg

SEQ ID NO: 331833 - RNA, 22 nt, Artificial Sequence
  Synthetic
acguucaagaagcugguccugg

SEQ ID NO: 331834 - RNA, 23 nt, Artificial Sequence
  Synthetic
uacguucaagaagcugguccugg

SEQ ID NO: 331835 - RNA, 24 nt, Artificial Sequence
  Synthetic
auacguucaagaagcugguccugg

SEQ ID NO: 331836 - RNA, 18 nt, Artificial Sequence
  Synthetic
guugccugacauuccugg

SEQ ID NO: 331837 - RNA, 19 nt, Artificial Sequence
  Synthetic
gguugccugacauuccugg

SEQ ID NO: 331838 - RNA, 20 nt, Artificial Sequence
  Synthetic
ugguugccugacauuccugg

SEQ ID NO: 331839 - RNA, 21 nt, Artificial Sequence
  Synthetic
augguugccugacauuccugg

SEQ ID NO: 331840 - RNA, 22 nt, Artificial Sequence
  Synthetic
gaugguugccugacauuccugg

SEQ ID NO: 331841 - RNA, 23 nt, Artificial Sequence
  Synthetic
ugaugguugccugacauuccugg

SEQ ID NO: 331842 - RNA, 24 nt, Artificial Sequence
  Synthetic
uugaugguugccugacauuccugg

SEQ ID NO: 331843 - RNA, 18 nt, Artificial Sequence
  Synthetic
aaauauuaaaguuccugg

SEQ ID NO: 331844 - RNA, 19 nt, Artificial Sequence
  Synthetic
aaaauauuaaaguuccugg

SEQ ID NO: 331845 - RNA, 20 nt, Artificial Sequence
  Synthetic
uaaaauauuaaaguuccugg

SEQ ID NO: 331846 - RNA, 21 nt, Artificial Sequence
  Synthetic
uuaaaauauuaaaguuccugg

SEQ ID NO: 331847 - RNA, 22 nt, Artificial Sequence
  Synthetic
uuuaaaauauuaaaguuccugg

SEQ ID NO: 331848 - RNA, 23 nt, Artificial Sequence
  Synthetic
auuuaaaauauuaaaguuccugg

SEQ ID NO: 331849 - RNA, 24 nt, Artificial Sequence
  Synthetic
uauuuaaaauauuaaaguuccugg

SEQ ID NO: 331850 - RNA, 18 nt, Artificial Sequence
  Synthetic
gguaaaaagaguuccugg

SEQ ID NO: 331851 - RNA, 19 nt, Artificial Sequence
  Synthetic
agguaaaaagaguuccugg

SEQ ID NO: 331852 - RNA, 20 nt, Artificial Sequence
  Synthetic
gagguaaaaagaguuccugg

SEQ ID NO: 331853 - RNA, 21 nt, Artificial Sequence
  Synthetic
ggagguaaaaagaguuccugg

SEQ ID NO: 331854 - RNA, 22 nt, Artificial Sequence
  Synthetic
uggagguaaaaagaguuccugg

SEQ ID NO: 331855 - RNA, 23 nt, Artificial Sequence
  Synthetic
cuggagguaaaaagaguuccugg

SEQ ID NO: 331856 - RNA, 24 nt, Artificial Sequence
  Synthetic
gcuggagguaaaaagaguuccugg

SEQ ID NO: 331857 - RNA, 18 nt, Artificial Sequence
  Synthetic
gcuguucaguguuccugg

SEQ ID NO: 331858 - RNA, 19 nt, Artificial Sequence
  Synthetic
agcuguucaguguuccugg

SEQ ID NO: 331859 - RNA, 20 nt, Artificial Sequence
  Synthetic
gagcuguucaguguuccugg

SEQ ID NO: 331860 - RNA, 21 nt, Artificial Sequence
  Synthetic
agagcuguucaguguuccugg

SEQ ID NO: 331861 - RNA, 22 nt, Artificial Sequence
  Synthetic
cagagcuguucaguguuccugg

SEQ ID NO: 331862 - RNA, 23 nt, Artificial Sequence
  Synthetic
gcagagcuguucaguguuccugg

SEQ ID NO: 331863 - RNA, 24 nt, Artificial Sequence
  Synthetic
ugcagagcuguucaguguuccugg

SEQ ID NO: 331864 - RNA, 18 nt, Artificial Sequence
  Synthetic
gaaacauuucuuuccugg

SEQ ID NO: 331865 - RNA, 19 nt, Artificial Sequence
  Synthetic
ugaaacauuucuuuccugg

SEQ ID NO: 331866 - RNA, 20 nt, Artificial Sequence
  Synthetic
gugaaacauuucuuuccugg

SEQ ID NO: 331867 - RNA, 21 nt, Artificial Sequence
  Synthetic
ugugaaacauuucuuuccugg

SEQ ID NO: 331868 - RNA, 22 nt, Artificial Sequence
  Synthetic
augugaaacauuucuuuccugg

SEQ ID NO: 331869 - RNA, 23 nt, Artificial Sequence
  Synthetic
aaugugaaacauuucuuuccugg

SEQ ID NO: 331870 - RNA, 24 nt, Artificial Sequence
  Synthetic
gaaugugaaacauuucuuuccugg

SEQ ID NO: 331871 - RNA, 18 nt, Artificial Sequence
  Synthetic
gagcugcuuuuuuccugg

SEQ ID NO: 331872 - RNA, 19 nt, Artificial Sequence
  Synthetic
ggagcugcuuuuuuccugg

SEQ ID NO: 331873 - RNA, 20 nt, Artificial Sequence
  Synthetic
gggagcugcuuuuuuccugg

SEQ ID NO: 331874 - RNA, 21 nt, Artificial Sequence
  Synthetic
agggagcugcuuuuuuccugg

SEQ ID NO: 331875 - RNA, 22 nt, Artificial Sequence
  Synthetic
gagggagcugcuuuuuuccugg

SEQ ID NO: 331876 - RNA, 23 nt, Artificial Sequence
  Synthetic
agagggagcugcuuuuuuccugg

SEQ ID NO: 331877 - RNA, 24 nt, Artificial Sequence
  Synthetic
gagagggagcugcuuuuuuccugg

SEQ ID NO: 331878 - RNA, 18 nt, Artificial Sequence
  Synthetic
ugauaucagguaagcugg

SEQ ID NO: 331879 - RNA, 19 nt, Artificial Sequence
  Synthetic
augauaucagguaagcugg

SEQ ID NO: 331880 - RNA, 20 nt, Artificial Sequence
  Synthetic
caugauaucagguaagcugg

SEQ ID NO: 331881 - RNA, 21 nt, Artificial Sequence
  Synthetic
ucaugauaucagguaagcugg

SEQ ID NO: 331882 - RNA, 22 nt, Artificial Sequence
  Synthetic
aucaugauaucagguaagcugg

SEQ ID NO: 331883 - RNA, 23 nt, Artificial Sequence
  Synthetic
caucaugauaucagguaagcugg

SEQ ID NO: 331884 - RNA, 24 nt, Artificial Sequence
  Synthetic
ucaucaugauaucagguaagcugg

SEQ ID NO: 331885 - RNA, 18 nt, Artificial Sequence
  Synthetic
auauggaacaccagcugg

SEQ ID NO: 331886 - RNA, 19 nt, Artificial Sequence
  Synthetic
aauauggaacaccagcugg

SEQ ID NO: 331887 - RNA, 20 nt, Artificial Sequence
  Synthetic
aaauauggaacaccagcugg

SEQ ID NO: 331888 - RNA, 21 nt, Artificial Sequence
  Synthetic
aaaauauggaacaccagcugg

SEQ ID NO: 331889 - RNA, 22 nt, Artificial Sequence
  Synthetic
gaaaauauggaacaccagcugg

SEQ ID NO: 331890 - RNA, 23 nt, Artificial Sequence
  Synthetic
ugaaaauauggaacaccagcugg

SEQ ID NO: 331891 - RNA, 24 nt, Artificial Sequence
  Synthetic
uugaaaauauggaacaccagcugg

SEQ ID NO: 331892 - RNA, 18 nt, Artificial Sequence
  Synthetic
aggauuuccgccagcugg

SEQ ID NO: 331893 - RNA, 19 nt, Artificial Sequence
  Synthetic
aaggauuuccgccagcugg

SEQ ID NO: 331894 - RNA, 20 nt, Artificial Sequence
  Synthetic
aaaggauuuccgccagcugg

SEQ ID NO: 331895 - RNA, 21 nt, Artificial Sequence
  Synthetic
gaaaggauuuccgccagcugg

SEQ ID NO: 331896 - RNA, 22 nt, Artificial Sequence
  Synthetic
ggaaaggauuuccgccagcugg

SEQ ID NO: 331897 - RNA, 23 nt, Artificial Sequence
  Synthetic
gggaaaggauuuccgccagcugg

SEQ ID NO: 331898 - RNA, 24 nt, Artificial Sequence
  Synthetic
cgggaaaggauuuccgccagcugg

SEQ ID NO: 331899 - RNA, 18 nt, Artificial Sequence
  Synthetic
uuauuccaaagcagcugg

SEQ ID NO: 331900 - RNA, 19 nt, Artificial Sequence
  Synthetic
cuuauuccaaagcagcugg

SEQ ID NO: 331901 - RNA, 20 nt, Artificial Sequence
  Synthetic
acuuauuccaaagcagcugg

SEQ ID NO: 331902 - RNA, 21 nt, Artificial Sequence
  Synthetic
aacuuauuccaaagcagcugg

SEQ ID NO: 331903 - RNA, 22 nt, Artificial Sequence
  Synthetic
aaacuuauuccaaagcagcugg

SEQ ID NO: 331904 - RNA, 23 nt, Artificial Sequence
  Synthetic
gaaacuuauuccaaagcagcugg

SEQ ID NO: 331905 - RNA, 24 nt, Artificial Sequence
  Synthetic
ugaaacuuauuccaaagcagcugg

SEQ ID NO: 331906 - RNA, 18 nt, Artificial Sequence
  Synthetic
agccaugauagcagcugg

SEQ ID NO: 331907 - RNA, 19 nt, Artificial Sequence
  Synthetic
uagccaugauagcagcugg

SEQ ID NO: 331908 - RNA, 20 nt, Artificial Sequence
  Synthetic
cuagccaugauagcagcugg

SEQ ID NO: 331909 - RNA, 21 nt, Artificial Sequence
  Synthetic
gcuagccaugauagcagcugg

SEQ ID NO: 331910 - RNA, 22 nt, Artificial Sequence
  Synthetic
ugcuagccaugauagcagcugg

SEQ ID NO: 331911 - RNA, 23 nt, Artificial Sequence
  Synthetic
gugcuagccaugauagcagcugg

SEQ ID NO: 331912 - RNA, 24 nt, Artificial Sequence
  Synthetic
agugcuagccaugauagcagcugg

SEQ ID NO: 331913 - RNA, 18 nt, Artificial Sequence
  Synthetic
caguaauuggagagcugg

SEQ ID NO: 331914 - RNA, 19 nt, Artificial Sequence
  Synthetic
acaguaauuggagagcugg

SEQ ID NO: 331915 - RNA, 20 nt, Artificial Sequence
  Synthetic
uacaguaauuggagagcugg

SEQ ID NO: 331916 - RNA, 21 nt, Artificial Sequence
  Synthetic
auacaguaauuggagagcugg

SEQ ID NO: 331917 - RNA, 22 nt, Artificial Sequence
  Synthetic
aauacaguaauuggagagcugg

SEQ ID NO: 331918 - RNA, 23 nt, Artificial Sequence
  Synthetic
uaauacaguaauuggagagcugg

SEQ ID NO: 331919 - RNA, 24 nt, Artificial Sequence
  Synthetic
uuaauacaguaauuggagagcugg

SEQ ID NO: 331920 - RNA, 18 nt, Artificial Sequence
  Synthetic
gauguuaccaggagcugg

SEQ ID NO: 331921 - RNA, 19 nt, Artificial Sequence
  Synthetic
ggauguuaccaggagcugg

SEQ ID NO: 331922 - RNA, 20 nt, Artificial Sequence
  Synthetic
aggauguuaccaggagcugg

SEQ ID NO: 331923 - RNA, 21 nt, Artificial Sequence
  Synthetic
aaggauguuaccaggagcugg

SEQ ID NO: 331924 - RNA, 22 nt, Artificial Sequence
  Synthetic
gaaggauguuaccaggagcugg

SEQ ID NO: 331925 - RNA, 23 nt, Artificial Sequence
  Synthetic
ugaaggauguuaccaggagcugg

SEQ ID NO: 331926 - RNA, 24 nt, Artificial Sequence
  Synthetic
uugaaggauguuaccaggagcugg

SEQ ID NO: 331927 - RNA, 18 nt, Artificial Sequence
  Synthetic
gcugccucugggagcugg

SEQ ID NO: 331928 - RNA, 19 nt, Artificial Sequence
  Synthetic
ggcugccucugggagcugg

SEQ ID NO: 331929 - RNA, 20 nt, Artificial Sequence
  Synthetic
aggcugccucugggagcugg

SEQ ID NO: 331930 - RNA, 21 nt, Artificial Sequence
  Synthetic
caggcugccucugggagcugg

SEQ ID NO: 331931 - RNA, 22 nt, Artificial Sequence
  Synthetic
acaggcugccucugggagcugg

SEQ ID NO: 331932 - RNA, 23 nt, Artificial Sequence
  Synthetic
uacaggcugccucugggagcugg

SEQ ID NO: 331933 - RNA, 24 nt, Artificial Sequence
  Synthetic
auacaggcugccucugggagcugg

SEQ ID NO: 331934 - RNA, 18 nt, Artificial Sequence
  Synthetic
caaagagaagcuagcugg

SEQ ID NO: 331935 - RNA, 19 nt, Artificial Sequence
  Synthetic
ucaaagagaagcuagcugg

SEQ ID NO: 331936 - RNA, 20 nt, Artificial Sequence
  Synthetic
gucaaagagaagcuagcugg

SEQ ID NO: 331937 - RNA, 21 nt, Artificial Sequence
  Synthetic
ggucaaagagaagcuagcugg

SEQ ID NO: 331938 - RNA, 22 nt, Artificial Sequence
  Synthetic
aggucaaagagaagcuagcugg

SEQ ID NO: 331939 - RNA, 23 nt, Artificial Sequence
  Synthetic
gaggucaaagagaagcuagcugg

SEQ ID NO: 331940 - RNA, 24 nt, Artificial Sequence
  Synthetic
ugaggucaaagagaagcuagcugg

SEQ ID NO: 331941 - RNA, 18 nt, Artificial Sequence
  Synthetic
uuuuuaaaacguagcugg

SEQ ID NO: 331942 - RNA, 19 nt, Artificial Sequence
  Synthetic
cuuuuuaaaacguagcugg

SEQ ID NO: 331943 - RNA, 20 nt, Artificial Sequence
  Synthetic
ccuuuuuaaaacguagcugg

SEQ ID NO: 331944 - RNA, 21 nt, Artificial Sequence
  Synthetic
gccuuuuuaaaacguagcugg

SEQ ID NO: 331945 - RNA, 22 nt, Artificial Sequence
  Synthetic
ugccuuuuuaaaacguagcugg

SEQ ID NO: 331946 - RNA, 23 nt, Artificial Sequence
  Synthetic
augccuuuuuaaaacguagcugg

SEQ ID NO: 331947 - RNA, 24 nt, Artificial Sequence
  Synthetic
aaugccuuuuuaaaacguagcugg

SEQ ID NO: 331948 - RNA, 18 nt, Artificial Sequence
  Synthetic
guagugccugguagcugg

SEQ ID NO: 331949 - RNA, 19 nt, Artificial Sequence
  Synthetic
uguagugccugguagcugg

SEQ ID NO: 331950 - RNA, 20 nt, Artificial Sequence
  Synthetic
auguagugccugguagcugg

SEQ ID NO: 331951 - RNA, 21 nt, Artificial Sequence
  Synthetic
aauguagugccugguagcugg

SEQ ID NO: 331952 - RNA, 22 nt, Artificial Sequence
  Synthetic
uaauguagugccugguagcugg

SEQ ID NO: 331953 - RNA, 23 nt, Artificial Sequence
  Synthetic
uuaauguagugccugguagcugg

SEQ ID NO: 331954 - RNA, 24 nt, Artificial Sequence
  Synthetic
auuaauguagugccugguagcugg

SEQ ID NO: 331955 - RNA, 18 nt, Artificial Sequence
  Synthetic
gaaauaauauagcgcugg

SEQ ID NO: 331956 - RNA, 19 nt, Artificial Sequence
  Synthetic
ugaaauaauauagcgcugg

SEQ ID NO: 331957 - RNA, 20 nt, Artificial Sequence
  Synthetic
uugaaauaauauagcgcugg

SEQ ID NO: 331958 - RNA, 21 nt, Artificial Sequence
  Synthetic
uuugaaauaauauagcgcugg

SEQ ID NO: 331959 - RNA, 22 nt, Artificial Sequence
  Synthetic
cuuugaaauaauauagcgcugg

SEQ ID NO: 331960 - RNA, 23 nt, Artificial Sequence
  Synthetic
ccuuugaaauaauauagcgcugg

SEQ ID NO: 331961 - RNA, 24 nt, Artificial Sequence
  Synthetic
cccuuugaaauaauauagcgcugg

SEQ ID NO: 331962 - RNA, 18 nt, Artificial Sequence
  Synthetic
aaugaauaaccaggcugg

SEQ ID NO: 331963 - RNA, 19 nt, Artificial Sequence
  Synthetic
uaaugaauaaccaggcugg

SEQ ID NO: 331964 - RNA, 20 nt, Artificial Sequence
  Synthetic
guaaugaauaaccaggcugg

SEQ ID NO: 331965 - RNA, 21 nt, Artificial Sequence
  Synthetic
uguaaugaauaaccaggcugg

SEQ ID NO: 331966 - RNA, 22 nt, Artificial Sequence
  Synthetic
guguaaugaauaaccaggcugg

SEQ ID NO: 331967 - RNA, 23 nt, Artificial Sequence
  Synthetic
aguguaaugaauaaccaggcugg

SEQ ID NO: 331968 - RNA, 24 nt, Artificial Sequence
  Synthetic
aaguguaaugaauaaccaggcugg

SEQ ID NO: 331969 - RNA, 18 nt, Artificial Sequence
  Synthetic
uacaaaucaugaggcugg

SEQ ID NO: 331970 - RNA, 19 nt, Artificial Sequence
  Synthetic
uuacaaaucaugaggcugg

SEQ ID NO: 331971 - RNA, 20 nt, Artificial Sequence
  Synthetic
cuuacaaaucaugaggcugg

SEQ ID NO: 331972 - RNA, 21 nt, Artificial Sequence
  Synthetic
acuuacaaaucaugaggcugg

SEQ ID NO: 331973 - RNA, 22 nt, Artificial Sequence
  Synthetic
aacuuacaaaucaugaggcugg

SEQ ID NO: 331974 - RNA, 23 nt, Artificial Sequence
  Synthetic
aaacuuacaaaucaugaggcugg

SEQ ID NO: 331975 - RNA, 24 nt, Artificial Sequence
  Synthetic
aaaacuuacaaaucaugaggcugg

SEQ ID NO: 331976 - RNA, 18 nt, Artificial Sequence
  Synthetic
uguuuagaguacggcugg

SEQ ID NO: 331977 - RNA, 19 nt, Artificial Sequence
  Synthetic
uuguuuagaguacggcugg

SEQ ID NO: 331978 - RNA, 20 nt, Artificial Sequence
  Synthetic
uuuguuuagaguacggcugg

SEQ ID NO: 331979 - RNA, 21 nt, Artificial Sequence
  Synthetic
cuuuguuuagaguacggcugg

SEQ ID NO: 331980 - RNA, 22 nt, Artificial Sequence
  Synthetic
ccuuuguuuagaguacggcugg

SEQ ID NO: 331981 - RNA, 23 nt, Artificial Sequence
  Synthetic
gccuuuguuuagaguacggcugg

SEQ ID NO: 331982 - RNA, 24 nt, Artificial Sequence
  Synthetic
agccuuuguuuagaguacggcugg

SEQ ID NO: 331983 - RNA, 18 nt, Artificial Sequence
  Synthetic
auaguaaccaggggcugg

SEQ ID NO: 331984 - RNA, 19 nt, Artificial Sequence
  Synthetic
gauaguaaccaggggcugg

SEQ ID NO: 331985 - RNA, 20 nt, Artificial Sequence
  Synthetic
ugauaguaaccaggggcugg

SEQ ID NO: 331986 - RNA, 21 nt, Artificial Sequence
  Synthetic
augauaguaaccaggggcugg

SEQ ID NO: 331987 - RNA, 22 nt, Artificial Sequence
  Synthetic
aaugauaguaaccaggggcugg

SEQ ID NO: 331988 - RNA, 23 nt, Artificial Sequence
  Synthetic
gaaugauaguaaccaggggcugg

SEQ ID NO: 331989 - RNA, 24 nt, Artificial Sequence
  Synthetic
agaaugauaguaaccaggggcugg

SEQ ID NO: 331990 - RNA, 18 nt, Artificial Sequence
  Synthetic
uagaaguggaauggcugg

SEQ ID NO: 331991 - RNA, 19 nt, Artificial Sequence
  Synthetic
guagaaguggaauggcugg

SEQ ID NO: 331992 - RNA, 20 nt, Artificial Sequence
  Synthetic
uguagaaguggaauggcugg

SEQ ID NO: 331993 - RNA, 21 nt, Artificial Sequence
  Synthetic
cuguagaaguggaauggcugg

SEQ ID NO: 331994 - RNA, 22 nt, Artificial Sequence
  Synthetic
ucuguagaaguggaauggcugg

SEQ ID NO: 331995 - RNA, 23 nt, Artificial Sequence
  Synthetic
cucuguagaaguggaauggcugg

SEQ ID NO: 331996 - RNA, 24 nt, Artificial Sequence
  Synthetic
acucuguagaaguggaauggcugg

SEQ ID NO: 331997 - RNA, 18 nt, Artificial Sequence
  Synthetic
aaauaguucaaaugcugg

SEQ ID NO: 331998 - RNA, 19 nt, Artificial Sequence
  Synthetic
aaaauaguucaaaugcugg

SEQ ID NO: 331999 - RNA, 20 nt, Artificial Sequence
  Synthetic
aaaaauaguucaaaugcugg

SEQ ID NO: 332000 - RNA, 21 nt, Artificial Sequence
  Synthetic
aaaaaauaguucaaaugcugg

SEQ ID NO: 332001 - RNA, 22 nt, Artificial Sequence
  Synthetic
uaaaaaauaguucaaaugcugg

SEQ ID NO: 332002 - RNA, 23 nt, Artificial Sequence
  Synthetic
auaaaaaauaguucaaaugcugg

SEQ ID NO: 332003 - RNA, 24 nt, Artificial Sequence
  Synthetic
gauaaaaaauaguucaaaugcugg

SEQ ID NO: 332004 - RNA, 18 nt, Artificial Sequence
  Synthetic
cacuuaacacacugcugg

SEQ ID NO: 332005 - RNA, 19 nt, Artificial Sequence
  Synthetic
acacuuaacacacugcugg

SEQ ID NO: 332006 - RNA, 20 nt, Artificial Sequence
  Synthetic
aacacuuaacacacugcugg

SEQ ID NO: 332007 - RNA, 21 nt, Artificial Sequence
  Synthetic
gaacacuuaacacacugcugg

SEQ ID NO: 332008 - RNA, 22 nt, Artificial Sequence
  Synthetic
ggaacacuuaacacacugcugg

SEQ ID NO: 332009 - RNA, 23 nt, Artificial Sequence
  Synthetic
aggaacacuuaacacacugcugg

SEQ ID NO: 332010 - RNA, 24 nt, Artificial Sequence
  Synthetic
uaggaacacuuaacacacugcugg

SEQ ID NO: 332011 - RNA, 18 nt, Artificial Sequence
  Synthetic
aaauuguacagcugcugg

SEQ ID NO: 332012 - RNA, 19 nt, Artificial Sequence
  Synthetic
uaaauuguacagcugcugg

SEQ ID NO: 332013 - RNA, 20 nt, Artificial Sequence
  Synthetic
auaaauuguacagcugcugg

SEQ ID NO: 332014 - RNA, 21 nt, Artificial Sequence
  Synthetic
cauaaauuguacagcugcugg

SEQ ID NO: 332015 - RNA, 22 nt, Artificial Sequence
  Synthetic
gcauaaauuguacagcugcugg

SEQ ID NO: 332016 - RNA, 23 nt, Artificial Sequence
  Synthetic
ugcauaaauuguacagcugcugg

SEQ ID NO: 332017 - RNA, 24 nt, Artificial Sequence
  Synthetic
gugcauaaauuguacagcugcugg

SEQ ID NO: 332018 - RNA, 18 nt, Artificial Sequence
  Synthetic
uuuaauaaauggugcugg

SEQ ID NO: 332019 - RNA, 19 nt, Artificial Sequence
  Synthetic
auuuaauaaauggugcugg

SEQ ID NO: 332020 - RNA, 20 nt, Artificial Sequence
  Synthetic
uauuuaauaaauggugcugg

SEQ ID NO: 332021 - RNA, 18 nt, Artificial Sequence
  Synthetic
cagaagagauggugcugg

SEQ ID NO: 332022 - RNA, 19 nt, Artificial Sequence
  Synthetic
ucagaagagauggugcugg

SEQ ID NO: 332023 - RNA, 20 nt, Artificial Sequence
  Synthetic
uucagaagagauggugcugg

SEQ ID NO: 332024 - RNA, 21 nt, Artificial Sequence
  Synthetic
auucagaagagauggugcugg

SEQ ID NO: 332025 - RNA, 22 nt, Artificial Sequence
  Synthetic
aauucagaagagauggugcugg

SEQ ID NO: 332026 - RNA, 23 nt, Artificial Sequence
  Synthetic
caauucagaagagauggugcugg

SEQ ID NO: 332027 - RNA, 24 nt, Artificial Sequence
  Synthetic
ucaauucagaagagauggugcugg

SEQ ID NO: 332028 - RNA, 18 nt, Artificial Sequence
  Synthetic
acuguuguucauugcugg

SEQ ID NO: 332029 - RNA, 19 nt, Artificial Sequence
  Synthetic
uacuguuguucauugcugg

SEQ ID NO: 332030 - RNA, 20 nt, Artificial Sequence
  Synthetic
uuacuguuguucauugcugg

SEQ ID NO: 332031 - RNA, 21 nt, Artificial Sequence
  Synthetic
cuuacuguuguucauugcugg

SEQ ID NO: 332032 - RNA, 22 nt, Artificial Sequence
  Synthetic
ucuuacuguuguucauugcugg

SEQ ID NO: 332033 - RNA, 23 nt, Artificial Sequence
  Synthetic
uucuuacuguuguucauugcugg

SEQ ID NO: 332034 - RNA, 24 nt, Artificial Sequence
  Synthetic
cuucuuacuguuguucauugcugg

SEQ ID NO: 332035 - RNA, 18 nt, Artificial Sequence
  Synthetic
ucauucacauauugcugg

SEQ ID NO: 332036 - RNA, 19 nt, Artificial Sequence
  Synthetic
aucauucacauauugcugg

SEQ ID NO: 332037 - RNA, 20 nt, Artificial Sequence
  Synthetic
gaucauucacauauugcugg

SEQ ID NO: 332038 - RNA, 21 nt, Artificial Sequence
  Synthetic
ggaucauucacauauugcugg

SEQ ID NO: 332039 - RNA, 22 nt, Artificial Sequence
  Synthetic
uggaucauucacauauugcugg

SEQ ID NO: 332040 - RNA, 23 nt, Artificial Sequence
  Synthetic
auggaucauucacauauugcugg

SEQ ID NO: 332041 - RNA, 24 nt, Artificial Sequence
  Synthetic
aauggaucauucacauauugcugg

SEQ ID NO: 332042 - RNA, 18 nt, Artificial Sequence
  Synthetic
gcccuuugcccuugcugg

SEQ ID NO: 332043 - RNA, 19 nt, Artificial Sequence
  Synthetic
ggcccuuugcccuugcugg

SEQ ID NO: 332044 - RNA, 20 nt, Artificial Sequence
  Synthetic
aggcccuuugcccuugcugg

SEQ ID NO: 332045 - RNA, 21 nt, Artificial Sequence
  Synthetic
aaggcccuuugcccuugcugg

SEQ ID NO: 332046 - RNA, 22 nt, Artificial Sequence
  Synthetic
aaaggcccuuugcccuugcugg

SEQ ID NO: 332047 - RNA, 23 nt, Artificial Sequence
  Synthetic
aaaaggcccuuugcccuugcugg

SEQ ID NO: 332048 - RNA, 24 nt, Artificial Sequence
  Synthetic
caaaaggcccuuugcccuugcugg

SEQ ID NO: 332049 - RNA, 18 nt, Artificial Sequence
  Synthetic
aaagagaaaaaaaucugg

SEQ ID NO: 332050 - RNA, 19 nt, Artificial Sequence
  Synthetic
caaagagaaaaaaaucugg

SEQ ID NO: 332051 - RNA, 20 nt, Artificial Sequence
  Synthetic
acaaagagaaaaaaaucugg

SEQ ID NO: 332052 - RNA, 21 nt, Artificial Sequence
  Synthetic
cacaaagagaaaaaaaucugg

SEQ ID NO: 332053 - RNA, 22 nt, Artificial Sequence
  Synthetic
ccacaaagagaaaaaaaucugg

SEQ ID NO: 332054 - RNA, 23 nt, Artificial Sequence
  Synthetic
accacaaagagaaaaaaaucugg

SEQ ID NO: 332055 - RNA, 24 nt, Artificial Sequence
  Synthetic
uaccacaaagagaaaaaaaucugg

SEQ ID NO: 332056 - RNA, 18 nt, Artificial Sequence
  Synthetic
gcacacacaaaaaucugg

SEQ ID NO: 332057 - RNA, 19 nt, Artificial Sequence
  Synthetic
agcacacacaaaaaucugg

SEQ ID NO: 332058 - RNA, 20 nt, Artificial Sequence
  Synthetic
cagcacacacaaaaaucugg

SEQ ID NO: 332059 - RNA, 21 nt, Artificial Sequence
  Synthetic
acagcacacacaaaaaucugg

SEQ ID NO: 332060 - RNA, 22 nt, Artificial Sequence
  Synthetic
gacagcacacacaaaaaucugg

SEQ ID NO: 332061 - RNA, 23 nt, Artificial Sequence
  Synthetic
agacagcacacacaaaaaucugg

SEQ ID NO: 332062 - RNA, 24 nt, Artificial Sequence
  Synthetic
uagacagcacacacaaaaaucugg

SEQ ID NO: 332063 - RNA, 18 nt, Artificial Sequence
  Synthetic
ccuuauccuagaaucugg

SEQ ID NO: 332064 - RNA, 19 nt, Artificial Sequence
  Synthetic
cccuuauccuagaaucugg

SEQ ID NO: 332065 - RNA, 20 nt, Artificial Sequence
  Synthetic
ucccuuauccuagaaucugg

SEQ ID NO: 332066 - RNA, 21 nt, Artificial Sequence
  Synthetic
uucccuuauccuagaaucugg

SEQ ID NO: 332067 - RNA, 22 nt, Artificial Sequence
  Synthetic
uuucccuuauccuagaaucugg

SEQ ID NO: 332068 - RNA, 23 nt, Artificial Sequence
  Synthetic
uuuucccuuauccuagaaucugg

SEQ ID NO: 332069 - RNA, 24 nt, Artificial Sequence
  Synthetic
cuuuucccuuauccuagaaucugg

SEQ ID NO: 332070 - RNA, 18 nt, Artificial Sequence
  Synthetic
cuaaagguuggaaucugg

SEQ ID NO: 332071 - RNA, 19 nt, Artificial Sequence
  Synthetic
acuaaagguuggaaucugg

SEQ ID NO: 332072 - RNA, 20 nt, Artificial Sequence
  Synthetic
aacuaaagguuggaaucugg

SEQ ID NO: 332073 - RNA, 21 nt, Artificial Sequence
  Synthetic
uaacuaaagguuggaaucugg

SEQ ID NO: 332074 - RNA, 22 nt, Artificial Sequence
  Synthetic
auaacuaaagguuggaaucugg

SEQ ID NO: 332075 - RNA, 23 nt, Artificial Sequence
  Synthetic
aauaacuaaagguuggaaucugg

SEQ ID NO: 332076 - RNA, 24 nt, Artificial Sequence
  Synthetic
gaauaacuaaagguuggaaucugg

SEQ ID NO: 332077 - RNA, 18 nt, Artificial Sequence
  Synthetic
ugggagaguaacaucugg

SEQ ID NO: 332078 - RNA, 19 nt, Artificial Sequence
  Synthetic
uugggagaguaacaucugg

SEQ ID NO: 332079 - RNA, 20 nt, Artificial Sequence
  Synthetic
uuugggagaguaacaucugg

SEQ ID NO: 332080 - RNA, 21 nt, Artificial Sequence
  Synthetic
guuugggagaguaacaucugg

SEQ ID NO: 332081 - RNA, 22 nt, Artificial Sequence
  Synthetic
uguuugggagaguaacaucugg

SEQ ID NO: 332082 - RNA, 23 nt, Artificial Sequence
  Synthetic
auguuugggagaguaacaucugg

SEQ ID NO: 332083 - RNA, 24 nt, Artificial Sequence
  Synthetic
cauguuugggagaguaacaucugg

SEQ ID NO: 332084 - RNA, 18 nt, Artificial Sequence
  Synthetic
gaaauaaaguacaucugg

SEQ ID NO: 332085 - RNA, 19 nt, Artificial Sequence
  Synthetic
ggaaauaaaguacaucugg

SEQ ID NO: 332086 - RNA, 20 nt, Artificial Sequence
  Synthetic
aggaaauaaaguacaucugg

SEQ ID NO: 332087 - RNA, 21 nt, Artificial Sequence
  Synthetic
aaggaaauaaaguacaucugg

SEQ ID NO: 332088 - RNA, 22 nt, Artificial Sequence
  Synthetic
aaaggaaauaaaguacaucugg

SEQ ID NO: 332089 - RNA, 23 nt, Artificial Sequence
  Synthetic
gaaaggaaauaaaguacaucugg

SEQ ID NO: 332090 - RNA, 24 nt, Artificial Sequence
  Synthetic
ugaaaggaaauaaaguacaucugg

SEQ ID NO: 332091 - RNA, 18 nt, Artificial Sequence
  Synthetic
uuaaauuuaacuaucugg

SEQ ID NO: 332092 - RNA, 19 nt, Artificial Sequence
  Synthetic
cuuaaauuuaacuaucugg

SEQ ID NO: 332093 - RNA, 20 nt, Artificial Sequence
  Synthetic
ucuuaaauuuaacuaucugg

SEQ ID NO: 332094 - RNA, 21 nt, Artificial Sequence
  Synthetic
uucuuaaauuuaacuaucugg

SEQ ID NO: 332095 - RNA, 22 nt, Artificial Sequence
  Synthetic
uuucuuaaauuuaacuaucugg

SEQ ID NO: 332096 - RNA, 23 nt, Artificial Sequence
  Synthetic
auuucuuaaauuuaacuaucugg

SEQ ID NO: 332097 - RNA, 24 nt, Artificial Sequence
  Synthetic
cauuucuuaaauuuaacuaucugg

SEQ ID NO: 332098 - RNA, 18 nt, Artificial Sequence
  Synthetic
auuacacagguuaucugg

SEQ ID NO: 332099 - RNA, 19 nt, Artificial Sequence
  Synthetic
cauuacacagguuaucugg

SEQ ID NO: 332100 - RNA, 20 nt, Artificial Sequence
  Synthetic
ccauuacacagguuaucugg

SEQ ID NO: 332101 - RNA, 21 nt, Artificial Sequence
  Synthetic
uccauuacacagguuaucugg

SEQ ID NO: 332102 - RNA, 22 nt, Artificial Sequence
  Synthetic
guccauuacacagguuaucugg

SEQ ID NO: 332103 - RNA, 23 nt, Artificial Sequence
  Synthetic
gguccauuacacagguuaucugg

SEQ ID NO: 332104 - RNA, 24 nt, Artificial Sequence
  Synthetic
agguccauuacacagguuaucugg

SEQ ID NO: 332105 - RNA, 18 nt, Artificial Sequence
  Synthetic
cacuucacucaacucugg

SEQ ID NO: 332106 - RNA, 19 nt, Artificial Sequence
  Synthetic
ccacuucacucaacucugg

SEQ ID NO: 332107 - RNA, 20 nt, Artificial Sequence
  Synthetic
accacuucacucaacucugg

SEQ ID NO: 332108 - RNA, 21 nt, Artificial Sequence
  Synthetic
aaccacuucacucaacucugg

SEQ ID NO: 332109 - RNA, 22 nt, Artificial Sequence
  Synthetic
uaaccacuucacucaacucugg

SEQ ID NO: 332110 - RNA, 23 nt, Artificial Sequence
  Synthetic
auaaccacuucacucaacucugg

SEQ ID NO: 332111 - RNA, 24 nt, Artificial Sequence
  Synthetic
uauaaccacuucacucaacucugg

SEQ ID NO: 332112 - RNA, 18 nt, Artificial Sequence
  Synthetic
uuaccagcucuacucugg

SEQ ID NO: 332113 - RNA, 19 nt, Artificial Sequence
  Synthetic
uuuaccagcucuacucugg

SEQ ID NO: 332114 - RNA, 20 nt, Artificial Sequence
  Synthetic
cuuuaccagcucuacucugg

SEQ ID NO: 332115 - RNA, 21 nt, Artificial Sequence
  Synthetic
gcuuuaccagcucuacucugg

SEQ ID NO: 332116 - RNA, 22 nt, Artificial Sequence
  Synthetic
ggcuuuaccagcucuacucugg

SEQ ID NO: 332117 - RNA, 23 nt, Artificial Sequence
  Synthetic
cggcuuuaccagcucuacucugg

SEQ ID NO: 332118 - RNA, 24 nt, Artificial Sequence
  Synthetic
ucggcuuuaccagcucuacucugg

SEQ ID NO: 332119 - RNA, 18 nt, Artificial Sequence
  Synthetic
uuagagggauuacucugg

SEQ ID NO: 332120 - RNA, 19 nt, Artificial Sequence
  Synthetic
uuuagagggauuacucugg

SEQ ID NO: 332121 - RNA, 20 nt, Artificial Sequence
  Synthetic
uuuuagagggauuacucugg

SEQ ID NO: 332122 - RNA, 21 nt, Artificial Sequence
  Synthetic
guuuuagagggauuacucugg

SEQ ID NO: 332123 - RNA, 22 nt, Artificial Sequence
  Synthetic
gguuuuagagggauuacucugg

SEQ ID NO: 332124 - RNA, 23 nt, Artificial Sequence
  Synthetic
ggguuuuagagggauuacucugg

SEQ ID NO: 332125 - RNA, 24 nt, Artificial Sequence
  Synthetic
uggguuuuagagggauuacucugg

SEQ ID NO: 332126 - RNA, 18 nt, Artificial Sequence
  Synthetic
cuguuucuucaccucugg

SEQ ID NO: 332127 - RNA, 19 nt, Artificial Sequence
  Synthetic
ccuguuucuucaccucugg

SEQ ID NO: 332128 - RNA, 20 nt, Artificial Sequence
  Synthetic
gccuguuucuucaccucugg

SEQ ID NO: 332129 - RNA, 21 nt, Artificial Sequence
  Synthetic
ggccuguuucuucaccucugg

SEQ ID NO: 332130 - RNA, 22 nt, Artificial Sequence
  Synthetic
gggccuguuucuucaccucugg

SEQ ID NO: 332131 - RNA, 23 nt, Artificial Sequence
  Synthetic
ugggccuguuucuucaccucugg

SEQ ID NO: 332132 - RNA, 24 nt, Artificial Sequence
  Synthetic
cugggccuguuucuucaccucugg

SEQ ID NO: 332133 - RNA, 18 nt, Artificial Sequence
  Synthetic
gaaagugguuaccucugg

SEQ ID NO: 332134 - RNA, 19 nt, Artificial Sequence
  Synthetic
agaaagugguuaccucugg

SEQ ID NO: 332135 - RNA, 20 nt, Artificial Sequence
  Synthetic
aagaaagugguuaccucugg

SEQ ID NO: 332136 - RNA, 21 nt, Artificial Sequence
  Synthetic
uaagaaagugguuaccucugg

SEQ ID NO: 332137 - RNA, 22 nt, Artificial Sequence
  Synthetic
uuaagaaagugguuaccucugg

SEQ ID NO: 332138 - RNA, 23 nt, Artificial Sequence
  Synthetic
auuaagaaagugguuaccucugg

SEQ ID NO: 332139 - RNA, 24 nt, Artificial Sequence
  Synthetic
aauuaagaaagugguuaccucugg

SEQ ID NO: 332140 - RNA, 18 nt, Artificial Sequence
  Synthetic
uuuguuuggcuccucugg

SEQ ID NO: 332141 - RNA, 19 nt, Artificial Sequence
  Synthetic
auuuguuuggcuccucugg

SEQ ID NO: 332142 - RNA, 20 nt, Artificial Sequence
  Synthetic
aauuuguuuggcuccucugg

SEQ ID NO: 332143 - RNA, 21 nt, Artificial Sequence
  Synthetic
caauuuguuuggcuccucugg

SEQ ID NO: 332144 - RNA, 22 nt, Artificial Sequence
  Synthetic
ccaauuuguuuggcuccucugg

SEQ ID NO: 332145 - RNA, 23 nt, Artificial Sequence
  Synthetic
gccaauuuguuuggcuccucugg

SEQ ID NO: 332146 - RNA, 24 nt, Artificial Sequence
  Synthetic
agccaauuuguuuggcuccucugg

SEQ ID NO: 332147 - RNA, 18 nt, Artificial Sequence
  Synthetic
gaaacauaagaucucugg

SEQ ID NO: 332148 - RNA, 19 nt, Artificial Sequence
  Synthetic
ggaaacauaagaucucugg

SEQ ID NO: 332149 - RNA, 20 nt, Artificial Sequence
  Synthetic
aggaaacauaagaucucugg

SEQ ID NO: 332150 - RNA, 21 nt, Artificial Sequence
  Synthetic
caggaaacauaagaucucugg

SEQ ID NO: 332151 - RNA, 22 nt, Artificial Sequence
  Synthetic
ucaggaaacauaagaucucugg

SEQ ID NO: 332152 - RNA, 23 nt, Artificial Sequence
  Synthetic
gucaggaaacauaagaucucugg

SEQ ID NO: 332153 - RNA, 24 nt, Artificial Sequence
  Synthetic
agucaggaaacauaagaucucugg

SEQ ID NO: 332154 - RNA, 18 nt, Artificial Sequence
  Synthetic
uacaacuagggucucugg

SEQ ID NO: 332155 - RNA, 19 nt, Artificial Sequence
  Synthetic
cuacaacuagggucucugg

SEQ ID NO: 332156 - RNA, 20 nt, Artificial Sequence
  Synthetic
ucuacaacuagggucucugg

SEQ ID NO: 332157 - RNA, 21 nt, Artificial Sequence
  Synthetic
uucuacaacuagggucucugg

SEQ ID NO: 332158 - RNA, 22 nt, Artificial Sequence
  Synthetic
auucuacaacuagggucucugg

SEQ ID NO: 332159 - RNA, 23 nt, Artificial Sequence
  Synthetic
cauucuacaacuagggucucugg

SEQ ID NO: 332160 - RNA, 24 nt, Artificial Sequence
  Synthetic
ucauucuacaacuagggucucugg

SEQ ID NO: 332161 - RNA, 18 nt, Artificial Sequence
  Synthetic
uagagauugauucucugg

SEQ ID NO: 332162 - RNA, 19 nt, Artificial Sequence
  Synthetic
auagagauugauucucugg

SEQ ID NO: 332163 - RNA, 20 nt, Artificial Sequence
  Synthetic
gauagagauugauucucugg

SEQ ID NO: 332164 - RNA, 21 nt, Artificial Sequence
  Synthetic
ggauagagauugauucucugg

SEQ ID NO: 332165 - RNA, 22 nt, Artificial Sequence
  Synthetic
aggauagagauugauucucugg

SEQ ID NO: 332166 - RNA, 23 nt, Artificial Sequence
  Synthetic
gaggauagagauugauucucugg

SEQ ID NO: 332167 - RNA, 24 nt, Artificial Sequence
  Synthetic
agaggauagagauugauucucugg

SEQ ID NO: 332168 - RNA, 18 nt, Artificial Sequence
  Synthetic
ugaaaacagggagucugg

SEQ ID NO: 332169 - RNA, 19 nt, Artificial Sequence
  Synthetic
augaaaacagggagucugg

SEQ ID NO: 332170 - RNA, 20 nt, Artificial Sequence
  Synthetic
gaugaaaacagggagucugg

SEQ ID NO: 332171 - RNA, 21 nt, Artificial Sequence
  Synthetic
agaugaaaacagggagucugg

SEQ ID NO: 332172 - RNA, 22 nt, Artificial Sequence
  Synthetic
aagaugaaaacagggagucugg

SEQ ID NO: 332173 - RNA, 23 nt, Artificial Sequence
  Synthetic
caagaugaaaacagggagucugg

SEQ ID NO: 332174 - RNA, 24 nt, Artificial Sequence
  Synthetic
acaagaugaaaacagggagucugg

SEQ ID NO: 332175 - RNA, 18 nt, Artificial Sequence
  Synthetic
ugggaaacacuggucugg

SEQ ID NO: 332176 - RNA, 19 nt, Artificial Sequence
  Synthetic
uugggaaacacuggucugg

SEQ ID NO: 332177 - RNA, 20 nt, Artificial Sequence
  Synthetic
guugggaaacacuggucugg

SEQ ID NO: 332178 - RNA, 21 nt, Artificial Sequence
  Synthetic
gguugggaaacacuggucugg

SEQ ID NO: 332179 - RNA, 22 nt, Artificial Sequence
  Synthetic
agguugggaaacacuggucugg

SEQ ID NO: 332180 - RNA, 23 nt, Artificial Sequence
  Synthetic
gagguugggaaacacuggucugg

SEQ ID NO: 332181 - RNA, 24 nt, Artificial Sequence
  Synthetic
ugagguugggaaacacuggucugg

SEQ ID NO: 332182 - RNA, 18 nt, Artificial Sequence
  Synthetic
uuuuuucuuaaugucugg

SEQ ID NO: 332183 - RNA, 19 nt, Artificial Sequence
  Synthetic
uuuuuuucuuaaugucugg

SEQ ID NO: 332184 - RNA, 20 nt, Artificial Sequence
  Synthetic
auuuuuuucuuaaugucugg

SEQ ID NO: 332185 - RNA, 21 nt, Artificial Sequence
  Synthetic
cauuuuuuucuuaaugucugg

SEQ ID NO: 332186 - RNA, 22 nt, Artificial Sequence
  Synthetic
ucauuuuuuucuuaaugucugg

SEQ ID NO: 332187 - RNA, 23 nt, Artificial Sequence
  Synthetic
uucauuuuuuucuuaaugucugg

SEQ ID NO: 332188 - RNA, 24 nt, Artificial Sequence
  Synthetic
auucauuuuuuucuuaaugucugg

SEQ ID NO: 332189 - RNA, 18 nt, Artificial Sequence
  Synthetic
guauaauugcaauucugg

SEQ ID NO: 332190 - RNA, 19 nt, Artificial Sequence
  Synthetic
uguauaauugcaauucugg

SEQ ID NO: 332191 - RNA, 20 nt, Artificial Sequence
  Synthetic
auguauaauugcaauucugg

SEQ ID NO: 332192 - RNA, 21 nt, Artificial Sequence
  Synthetic
aauguauaauugcaauucugg

SEQ ID NO: 332193 - RNA, 22 nt, Artificial Sequence
  Synthetic
aaauguauaauugcaauucugg

SEQ ID NO: 332194 - RNA, 23 nt, Artificial Sequence
  Synthetic
gaaauguauaauugcaauucugg

SEQ ID NO: 332195 - RNA, 24 nt, Artificial Sequence
  Synthetic
agaaauguauaauugcaauucugg

SEQ ID NO: 332196 - RNA, 18 nt, Artificial Sequence
  Synthetic
ucuuaccucauauucugg

SEQ ID NO: 332197 - RNA, 19 nt, Artificial Sequence
  Synthetic
uucuuaccucauauucugg

SEQ ID NO: 332198 - RNA, 20 nt, Artificial Sequence
  Synthetic
auucuuaccucauauucugg

SEQ ID NO: 332199 - RNA, 21 nt, Artificial Sequence
  Synthetic
uauucuuaccucauauucugg

SEQ ID NO: 332200 - RNA, 22 nt, Artificial Sequence
  Synthetic
uuauucuuaccucauauucugg

SEQ ID NO: 332201 - RNA, 23 nt, Artificial Sequence
  Synthetic
guuauucuuaccucauauucugg

SEQ ID NO: 332202 - RNA, 24 nt, Artificial Sequence
  Synthetic
uguuauucuuaccucauauucugg

SEQ ID NO: 332203 - RNA, 18 nt, Artificial Sequence
  Synthetic
ugggcgauucccuucugg

SEQ ID NO: 332204 - RNA, 19 nt, Artificial Sequence
  Synthetic
augggcgauucccuucugg

SEQ ID NO: 332205 - RNA, 20 nt, Artificial Sequence
  Synthetic
gaugggcgauucccuucugg

SEQ ID NO: 332206 - RNA, 21 nt, Artificial Sequence
  Synthetic
ggaugggcgauucccuucugg

SEQ ID NO: 332207 - RNA, 22 nt, Artificial Sequence
  Synthetic
gggaugggcgauucccuucugg

SEQ ID NO: 332208 - RNA, 23 nt, Artificial Sequence
  Synthetic
ugggaugggcgauucccuucugg

SEQ ID NO: 332209 - RNA, 24 nt, Artificial Sequence
  Synthetic
cugggaugggcgauucccuucugg

SEQ ID NO: 332210 - RNA, 18 nt, Artificial Sequence
  Synthetic
aauuauaccaaguucugg

SEQ ID NO: 332211 - RNA, 19 nt, Artificial Sequence
  Synthetic
gaauuauaccaaguucugg

SEQ ID NO: 332212 - RNA, 20 nt, Artificial Sequence
  Synthetic
agaauuauaccaaguucugg

SEQ ID NO: 332213 - RNA, 21 nt, Artificial Sequence
  Synthetic
aagaauuauaccaaguucugg

SEQ ID NO: 332214 - RNA, 22 nt, Artificial Sequence
  Synthetic
gaagaauuauaccaaguucugg

SEQ ID NO: 332215 - RNA, 23 nt, Artificial Sequence
  Synthetic
ggaagaauuauaccaaguucugg

SEQ ID NO: 332216 - RNA, 24 nt, Artificial Sequence
  Synthetic
uggaagaauuauaccaaguucugg

SEQ ID NO: 332217 - RNA, 18 nt, Artificial Sequence
  Synthetic
cauauucauuaguucugg

SEQ ID NO: 332218 - RNA, 19 nt, Artificial Sequence
  Synthetic
acauauucauuaguucugg

SEQ ID NO: 332219 - RNA, 20 nt, Artificial Sequence
  Synthetic
uacauauucauuaguucugg

SEQ ID NO: 332220 - RNA, 21 nt, Artificial Sequence
  Synthetic
cuacauauucauuaguucugg

SEQ ID NO: 332221 - RNA, 22 nt, Artificial Sequence
  Synthetic
acuacauauucauuaguucugg

SEQ ID NO: 332222 - RNA, 23 nt, Artificial Sequence
  Synthetic
cacuacauauucauuaguucugg

SEQ ID NO: 332223 - RNA, 24 nt, Artificial Sequence
  Synthetic
ccacuacauauucauuaguucugg

SEQ ID NO: 332224 - RNA, 18 nt, Artificial Sequence
  Synthetic
gugacuccaacuuucugg

SEQ ID NO: 332225 - RNA, 19 nt, Artificial Sequence
  Synthetic
ugugacuccaacuuucugg

SEQ ID NO: 332226 - RNA, 20 nt, Artificial Sequence
  Synthetic
cugugacuccaacuuucugg

SEQ ID NO: 332227 - RNA, 21 nt, Artificial Sequence
  Synthetic
ccugugacuccaacuuucugg

SEQ ID NO: 332228 - RNA, 22 nt, Artificial Sequence
  Synthetic
accugugacuccaacuuucugg

SEQ ID NO: 332229 - RNA, 23 nt, Artificial Sequence
  Synthetic
caccugugacuccaacuuucugg

SEQ ID NO: 332230 - RNA, 24 nt, Artificial Sequence
  Synthetic
ucaccugugacuccaacuuucugg

SEQ ID NO: 332231 - RNA, 18 nt, Artificial Sequence
  Synthetic
aaccccauccaaaagugg

SEQ ID NO: 332232 - RNA, 19 nt, Artificial Sequence
  Synthetic
caaccccauccaaaagugg

SEQ ID NO: 332233 - RNA, 20 nt, Artificial Sequence
  Synthetic
acaaccccauccaaaagugg

SEQ ID NO: 332234 - RNA, 21 nt, Artificial Sequence
  Synthetic
aacaaccccauccaaaagugg

SEQ ID NO: 332235 - RNA, 22 nt, Artificial Sequence
  Synthetic
aaacaaccccauccaaaagugg

SEQ ID NO: 332236 - RNA, 23 nt, Artificial Sequence
  Synthetic
caaacaaccccauccaaaagugg

SEQ ID NO: 332237 - RNA, 24 nt, Artificial Sequence
  Synthetic
acaaacaaccccauccaaaagugg

SEQ ID NO: 332238 - RNA, 18 nt, Artificial Sequence
  Synthetic
uucgaguaggaaaagugg

SEQ ID NO: 332239 - RNA, 19 nt, Artificial Sequence
  Synthetic
auucgaguaggaaaagugg

SEQ ID NO: 332240 - RNA, 20 nt, Artificial Sequence
  Synthetic
cauucgaguaggaaaagugg

SEQ ID NO: 332241 - RNA, 21 nt, Artificial Sequence
  Synthetic
ccauucgaguaggaaaagugg

SEQ ID NO: 332242 - RNA, 22 nt, Artificial Sequence
  Synthetic
accauucgaguaggaaaagugg

SEQ ID NO: 332243 - RNA, 23 nt, Artificial Sequence
  Synthetic
caccauucgaguaggaaaagugg

SEQ ID NO: 332244 - RNA, 24 nt, Artificial Sequence
  Synthetic
acaccauucgaguaggaaaagugg

SEQ ID NO: 332245 - RNA, 18 nt, Artificial Sequence
  Synthetic
uuugcuggggaaaagugg

SEQ ID NO: 332246 - RNA, 19 nt, Artificial Sequence
  Synthetic
cuuugcuggggaaaagugg

SEQ ID NO: 332247 - RNA, 20 nt, Artificial Sequence
  Synthetic
ucuuugcuggggaaaagugg

SEQ ID NO: 332248 - RNA, 21 nt, Artificial Sequence
  Synthetic
uucuuugcuggggaaaagugg

SEQ ID NO: 332249 - RNA, 22 nt, Artificial Sequence
  Synthetic
guucuuugcuggggaaaagugg

SEQ ID NO: 332250 - RNA, 23 nt, Artificial Sequence
  Synthetic
aguucuuugcuggggaaaagugg

SEQ ID NO: 332251 - RNA, 24 nt, Artificial Sequence
  Synthetic
aaguucuuugcuggggaaaagugg

SEQ ID NO: 332252 - RNA, 18 nt, Artificial Sequence
  Synthetic
acaagaaggccaaagugg

SEQ ID NO: 332253 - RNA, 19 nt, Artificial Sequence
  Synthetic
aacaagaaggccaaagugg

SEQ ID NO: 332254 - RNA, 20 nt, Artificial Sequence
  Synthetic
caacaagaaggccaaagugg

SEQ ID NO: 332255 - RNA, 21 nt, Artificial Sequence
  Synthetic
ccaacaagaaggccaaagugg

SEQ ID NO: 332256 - RNA, 22 nt, Artificial Sequence
  Synthetic
accaacaagaaggccaaagugg

SEQ ID NO: 332257 - RNA, 23 nt, Artificial Sequence
  Synthetic
caccaacaagaaggccaaagugg

SEQ ID NO: 332258 - RNA, 24 nt, Artificial Sequence
  Synthetic
gcaccaacaagaaggccaaagugg

SEQ ID NO: 332259 - RNA, 18 nt, Artificial Sequence
  Synthetic
aucagugagagaaagugg

SEQ ID NO: 332260 - RNA, 19 nt, Artificial Sequence
  Synthetic
aaucagugagagaaagugg

SEQ ID NO: 332261 - RNA, 20 nt, Artificial Sequence
  Synthetic
aaaucagugagagaaagugg

SEQ ID NO: 332262 - RNA, 21 nt, Artificial Sequence
  Synthetic
aaaaucagugagagaaagugg

SEQ ID NO: 332263 - RNA, 22 nt, Artificial Sequence
  Synthetic
caaaaucagugagagaaagugg

SEQ ID NO: 332264 - RNA, 23 nt, Artificial Sequence
  Synthetic
ucaaaaucagugagagaaagugg

SEQ ID NO: 332265 - RNA, 24 nt, Artificial Sequence
  Synthetic
aucaaaaucagugagagaaagugg

SEQ ID NO: 332266 - RNA, 18 nt, Artificial Sequence
  Synthetic
ugagaauugagaaagugg

SEQ ID NO: 332267 - RNA, 19 nt, Artificial Sequence
  Synthetic
uugagaauugagaaagugg

SEQ ID NO: 332268 - RNA, 20 nt, Artificial Sequence
  Synthetic
auugagaauugagaaagugg

SEQ ID NO: 332269 - RNA, 21 nt, Artificial Sequence
  Synthetic
gauugagaauugagaaagugg

SEQ ID NO: 332270 - RNA, 22 nt, Artificial Sequence
  Synthetic
ugauugagaauugagaaagugg

SEQ ID NO: 332271 - RNA, 23 nt, Artificial Sequence
  Synthetic
augauugagaauugagaaagugg

SEQ ID NO: 332272 - RNA, 24 nt, Artificial Sequence
  Synthetic
caugauugagaauugagaaagugg

SEQ ID NO: 332273 - RNA, 18 nt, Artificial Sequence
  Synthetic
uuagaauaacuaaagugg

SEQ ID NO: 332274 - RNA, 19 nt, Artificial Sequence
  Synthetic
guuagaauaacuaaagugg

SEQ ID NO: 332275 - RNA, 20 nt, Artificial Sequence
  Synthetic
aguuagaauaacuaaagugg

SEQ ID NO: 332276 - RNA, 21 nt, Artificial Sequence
  Synthetic
aaguuagaauaacuaaagugg

SEQ ID NO: 332277 - RNA, 22 nt, Artificial Sequence
  Synthetic
uaaguuagaauaacuaaagugg

SEQ ID NO: 332278 - RNA, 23 nt, Artificial Sequence
  Synthetic
auaaguuagaauaacuaaagugg

SEQ ID NO: 332279 - RNA, 24 nt, Artificial Sequence
  Synthetic
cauaaguuagaauaacuaaagugg

SEQ ID NO: 332280 - RNA, 18 nt, Artificial Sequence
  Synthetic
uuucuguaaguaaagugg

SEQ ID NO: 332281 - RNA, 19 nt, Artificial Sequence
  Synthetic
cuuucuguaaguaaagugg

SEQ ID NO: 332282 - RNA, 20 nt, Artificial Sequence
  Synthetic
acuuucuguaaguaaagugg

SEQ ID NO: 332283 - RNA, 21 nt, Artificial Sequence
  Synthetic
cacuuucuguaaguaaagugg

SEQ ID NO: 332284 - RNA, 22 nt, Artificial Sequence
  Synthetic
ucacuuucuguaaguaaagugg

SEQ ID NO: 332285 - RNA, 23 nt, Artificial Sequence
  Synthetic
aucacuuucuguaaguaaagugg

SEQ ID NO: 332286 - RNA, 24 nt, Artificial Sequence
  Synthetic
aaucacuuucuguaaguaaagugg

SEQ ID NO: 332287 - RNA, 18 nt, Artificial Sequence
  Synthetic
augaccucgaacaagugg

SEQ ID NO: 332288 - RNA, 19 nt, Artificial Sequence
  Synthetic
aaugaccucgaacaagugg

SEQ ID NO: 332289 - RNA, 20 nt, Artificial Sequence
  Synthetic
aaaugaccucgaacaagugg

SEQ ID NO: 332290 - RNA, 21 nt, Artificial Sequence
  Synthetic
caaaugaccucgaacaagugg

SEQ ID NO: 332291 - RNA, 22 nt, Artificial Sequence
  Synthetic
acaaaugaccucgaacaagugg

SEQ ID NO: 332292 - RNA, 23 nt, Artificial Sequence
  Synthetic
aacaaaugaccucgaacaagugg

SEQ ID NO: 332293 - RNA, 24 nt, Artificial Sequence
  Synthetic
gaacaaaugaccucgaacaagugg

SEQ ID NO: 332294 - RNA, 18 nt, Artificial Sequence
  Synthetic
aggguggaacacaagugg

SEQ ID NO: 332295 - RNA, 19 nt, Artificial Sequence
  Synthetic
gaggguggaacacaagugg

SEQ ID NO: 332296 - RNA, 20 nt, Artificial Sequence
  Synthetic
ggaggguggaacacaagugg

SEQ ID NO: 332297 - RNA, 21 nt, Artificial Sequence
  Synthetic
uggaggguggaacacaagugg

SEQ ID NO: 332298 - RNA, 22 nt, Artificial Sequence
  Synthetic
cuggaggguggaacacaagugg

SEQ ID NO: 332299 - RNA, 23 nt, Artificial Sequence
  Synthetic
acuggaggguggaacacaagugg

SEQ ID NO: 332300 - RNA, 24 nt, Artificial Sequence
  Synthetic
uacuggaggguggaacacaagugg

SEQ ID NO: 332301 - RNA, 18 nt, Artificial Sequence
  Synthetic
ccucagccucccaagugg

SEQ ID NO: 332302 - RNA, 19 nt, Artificial Sequence
  Synthetic
accucagccucccaagugg

SEQ ID NO: 332303 - RNA, 20 nt, Artificial Sequence
  Synthetic
caccucagccucccaagugg

SEQ ID NO: 332304 - RNA, 21 nt, Artificial Sequence
  Synthetic
ccaccucagccucccaagugg

SEQ ID NO: 332305 - RNA, 22 nt, Artificial Sequence
  Synthetic
cccaccucagccucccaagugg

SEQ ID NO: 332306 - RNA, 23 nt, Artificial Sequence
  Synthetic
ucccaccucagccucccaagugg

SEQ ID NO: 332307 - RNA, 24 nt, Artificial Sequence
  Synthetic
cucccaccucagccucccaagugg

SEQ ID NO: 332308 - RNA, 18 nt, Artificial Sequence
  Synthetic
accagcagcaagaagugg

SEQ ID NO: 332309 - RNA, 19 nt, Artificial Sequence
  Synthetic
caccagcagcaagaagugg

SEQ ID NO: 332310 - RNA, 20 nt, Artificial Sequence
  Synthetic
ccaccagcagcaagaagugg

SEQ ID NO: 332311 - RNA, 21 nt, Artificial Sequence
  Synthetic
uccaccagcagcaagaagugg

SEQ ID NO: 332312 - RNA, 22 nt, Artificial Sequence
  Synthetic
uuccaccagcagcaagaagugg

SEQ ID NO: 332313 - RNA, 23 nt, Artificial Sequence
  Synthetic
uuuccaccagcagcaagaagugg

SEQ ID NO: 332314 - RNA, 24 nt, Artificial Sequence
  Synthetic
uuuuccaccagcagcaagaagugg

SEQ ID NO: 332315 - RNA, 18 nt, Artificial Sequence
  Synthetic
ucaacaaugaagaagugg

SEQ ID NO: 332316 - RNA, 19 nt, Artificial Sequence
  Synthetic
uucaacaaugaagaagugg

SEQ ID NO: 332317 - RNA, 20 nt, Artificial Sequence
  Synthetic
uuucaacaaugaagaagugg

SEQ ID NO: 332318 - RNA, 21 nt, Artificial Sequence
  Synthetic
auuucaacaaugaagaagugg

SEQ ID NO: 332319 - RNA, 22 nt, Artificial Sequence
  Synthetic
aauuucaacaaugaagaagugg

SEQ ID NO: 332320 - RNA, 23 nt, Artificial Sequence
  Synthetic
caauuucaacaaugaagaagugg

SEQ ID NO: 332321 - RNA, 24 nt, Artificial Sequence
  Synthetic
gcaauuucaacaaugaagaagugg

SEQ ID NO: 332322 - RNA, 18 nt, Artificial Sequence
  Synthetic
gagucuuagcugaagugg

SEQ ID NO: 332323 - RNA, 19 nt, Artificial Sequence
  Synthetic
agagucuuagcugaagugg

SEQ ID NO: 332324 - RNA, 20 nt, Artificial Sequence
  Synthetic
aagagucuuagcugaagugg

SEQ ID NO: 332325 - RNA, 21 nt, Artificial Sequence
  Synthetic
aaagagucuuagcugaagugg

SEQ ID NO: 332326 - RNA, 22 nt, Artificial Sequence
  Synthetic
aaaagagucuuagcugaagugg

SEQ ID NO: 332327 - RNA, 23 nt, Artificial Sequence
  Synthetic
gaaaagagucuuagcugaagugg

SEQ ID NO: 332328 - RNA, 24 nt, Artificial Sequence
  Synthetic
agaaaagagucuuagcugaagugg

SEQ ID NO: 332329 - RNA, 18 nt, Artificial Sequence
  Synthetic
gaccaugaagugaagugg

SEQ ID NO: 332330 - RNA, 19 nt, Artificial Sequence
  Synthetic
agaccaugaagugaagugg

SEQ ID NO: 332331 - RNA, 20 nt, Artificial Sequence
  Synthetic
gagaccaugaagugaagugg

SEQ ID NO: 332332 - RNA, 21 nt, Artificial Sequence
  Synthetic
ggagaccaugaagugaagugg

SEQ ID NO: 332333 - RNA, 22 nt, Artificial Sequence
  Synthetic
uggagaccaugaagugaagugg

SEQ ID NO: 332334 - RNA, 23 nt, Artificial Sequence
  Synthetic
guggagaccaugaagugaagugg

SEQ ID NO: 332335 - RNA, 24 nt, Artificial Sequence
  Synthetic
aguggagaccaugaagugaagugg

SEQ ID NO: 332336 - RNA, 18 nt, Artificial Sequence
  Synthetic
gaguauugguauaagugg

SEQ ID NO: 332337 - RNA, 19 nt, Artificial Sequence
  Synthetic
ggaguauugguauaagugg

SEQ ID NO: 332338 - RNA, 20 nt, Artificial Sequence
  Synthetic
uggaguauugguauaagugg

SEQ ID NO: 332339 - RNA, 21 nt, Artificial Sequence
  Synthetic
cuggaguauugguauaagugg

SEQ ID NO: 332340 - RNA, 22 nt, Artificial Sequence
  Synthetic
acuggaguauugguauaagugg

SEQ ID NO: 332341 - RNA, 23 nt, Artificial Sequence
  Synthetic
aacuggaguauugguauaagugg

SEQ ID NO: 332342 - RNA, 24 nt, Artificial Sequence
  Synthetic
aaacuggaguauugguauaagugg

SEQ ID NO: 332343 - RNA, 18 nt, Artificial Sequence
  Synthetic
auuaacugcuuuaagugg

SEQ ID NO: 332344 - RNA, 19 nt, Artificial Sequence
  Synthetic
cauuaacugcuuuaagugg

SEQ ID NO: 332345 - RNA, 20 nt, Artificial Sequence
  Synthetic
acauuaacugcuuuaagugg

SEQ ID NO: 332346 - RNA, 21 nt, Artificial Sequence
  Synthetic
aacauuaacugcuuuaagugg

SEQ ID NO: 332347 - RNA, 22 nt, Artificial Sequence
  Synthetic
aaacauuaacugcuuuaagugg

SEQ ID NO: 332348 - RNA, 23 nt, Artificial Sequence
  Synthetic
aaaacauuaacugcuuuaagugg

SEQ ID NO: 332349 - RNA, 24 nt, Artificial Sequence
  Synthetic
gaaaacauuaacugcuuuaagugg

SEQ ID NO: 332350 - RNA, 18 nt, Artificial Sequence
  Synthetic
aacgauuuaaaacagugg

SEQ ID NO: 332351 - RNA, 19 nt, Artificial Sequence
  Synthetic
aaacgauuuaaaacagugg

SEQ ID NO: 332352 - RNA, 20 nt, Artificial Sequence
  Synthetic
caaacgauuuaaaacagugg

SEQ ID NO: 332353 - RNA, 21 nt, Artificial Sequence
  Synthetic
acaaacgauuuaaaacagugg

SEQ ID NO: 332354 - RNA, 22 nt, Artificial Sequence
  Synthetic
aacaaacgauuuaaaacagugg

SEQ ID NO: 332355 - RNA, 23 nt, Artificial Sequence
  Synthetic
aaacaaacgauuuaaaacagugg

SEQ ID NO: 332356 - RNA, 24 nt, Artificial Sequence
  Synthetic
caaacaaacgauuuaaaacagugg

SEQ ID NO: 332357 - RNA, 18 nt, Artificial Sequence
  Synthetic
uguacaucuccacagugg

SEQ ID NO: 332358 - RNA, 19 nt, Artificial Sequence
  Synthetic
auguacaucuccacagugg

SEQ ID NO: 332359 - RNA, 20 nt, Artificial Sequence
  Synthetic
aauguacaucuccacagugg

SEQ ID NO: 332360 - RNA, 21 nt, Artificial Sequence
  Synthetic
uaauguacaucuccacagugg

SEQ ID NO: 332361 - RNA, 22 nt, Artificial Sequence
  Synthetic
auaauguacaucuccacagugg

SEQ ID NO: 332362 - RNA, 23 nt, Artificial Sequence
  Synthetic
cauaauguacaucuccacagugg

SEQ ID NO: 332363 - RNA, 24 nt, Artificial Sequence
  Synthetic
ucauaauguacaucuccacagugg

SEQ ID NO: 332364 - RNA, 18 nt, Artificial Sequence
  Synthetic
aacugcuuuccacagugg

SEQ ID NO: 332365 - RNA, 19 nt, Artificial Sequence
  Synthetic
aaacugcuuuccacagugg

SEQ ID NO: 332366 - RNA, 20 nt, Artificial Sequence
  Synthetic
caaacugcuuuccacagugg

SEQ ID NO: 332367 - RNA, 21 nt, Artificial Sequence
  Synthetic
ccaaacugcuuuccacagugg

SEQ ID NO: 332368 - RNA, 22 nt, Artificial Sequence
  Synthetic
uccaaacugcuuuccacagugg

SEQ ID NO: 332369 - RNA, 23 nt, Artificial Sequence
  Synthetic
uuccaaacugcuuuccacagugg

SEQ ID NO: 332370 - RNA, 24 nt, Artificial Sequence
  Synthetic
uuuccaaacugcuuuccacagugg

SEQ ID NO: 332371 - RNA, 18 nt, Artificial Sequence
  Synthetic
ucagcucucugacagugg

SEQ ID NO: 332372 - RNA, 19 nt, Artificial Sequence
  Synthetic
uucagcucucugacagugg

SEQ ID NO: 332373 - RNA, 20 nt, Artificial Sequence
  Synthetic
uuucagcucucugacagugg

SEQ ID NO: 332374 - RNA, 21 nt, Artificial Sequence
  Synthetic
auuucagcucucugacagugg

SEQ ID NO: 332375 - RNA, 22 nt, Artificial Sequence
  Synthetic
cauuucagcucucugacagugg

SEQ ID NO: 332376 - RNA, 23 nt, Artificial Sequence
  Synthetic
gcauuucagcucucugacagugg

SEQ ID NO: 332377 - RNA, 24 nt, Artificial Sequence
  Synthetic
cgcauuucagcucucugacagugg

SEQ ID NO: 332378 - RNA, 18 nt, Artificial Sequence
  Synthetic
agacucuuccuacagugg

SEQ ID NO: 332379 - RNA, 19 nt, Artificial Sequence
  Synthetic
uagacucuuccuacagugg

SEQ ID NO: 332380 - RNA, 20 nt, Artificial Sequence
  Synthetic
guagacucuuccuacagugg

SEQ ID NO: 332381 - RNA, 21 nt, Artificial Sequence
  Synthetic
aguagacucuuccuacagugg

SEQ ID NO: 332382 - RNA, 22 nt, Artificial Sequence
  Synthetic
aaguagacucuuccuacagugg

SEQ ID NO: 332383 - RNA, 23 nt, Artificial Sequence
  Synthetic
aaaguagacucuuccuacagugg

SEQ ID NO: 332384 - RNA, 24 nt, Artificial Sequence
  Synthetic
gaaaguagacucuuccuacagugg

SEQ ID NO: 332385 - RNA, 18 nt, Artificial Sequence
  Synthetic
ggagcgugugagcagugg

SEQ ID NO: 332386 - RNA, 19 nt, Artificial Sequence
  Synthetic
aggagcgugugagcagugg

SEQ ID NO: 332387 - RNA, 20 nt, Artificial Sequence
  Synthetic
caggagcgugugagcagugg

SEQ ID NO: 332388 - RNA, 21 nt, Artificial Sequence
  Synthetic
gcaggagcgugugagcagugg

SEQ ID NO: 332389 - RNA, 22 nt, Artificial Sequence
  Synthetic
ugcaggagcgugugagcagugg

SEQ ID NO: 332390 - RNA, 23 nt, Artificial Sequence
  Synthetic
augcaggagcgugugagcagugg

SEQ ID NO: 332391 - RNA, 24 nt, Artificial Sequence
  Synthetic
gaugcaggagcgugugagcagugg

SEQ ID NO: 332392 - RNA, 18 nt, Artificial Sequence
  Synthetic
uuuucuaaguggcagugg

SEQ ID NO: 332393 - RNA, 19 nt, Artificial Sequence
  Synthetic
auuuucuaaguggcagugg

SEQ ID NO: 332394 - RNA, 20 nt, Artificial Sequence
  Synthetic
uauuuucuaaguggcagugg

SEQ ID NO: 332395 - RNA, 21 nt, Artificial Sequence
  Synthetic
uuauuuucuaaguggcagugg

SEQ ID NO: 332396 - RNA, 22 nt, Artificial Sequence
  Synthetic
auuauuuucuaaguggcagugg

SEQ ID NO: 332397 - RNA, 23 nt, Artificial Sequence
  Synthetic
uauuauuuucuaaguggcagugg

SEQ ID NO: 332398 - RNA, 24 nt, Artificial Sequence
  Synthetic
auauuauuuucuaaguggcagugg

SEQ ID NO: 332399 - RNA, 18 nt, Artificial Sequence
  Synthetic
guuagaggguuucagugg

SEQ ID NO: 332400 - RNA, 19 nt, Artificial Sequence
  Synthetic
uguuagaggguuucagugg

SEQ ID NO: 332401 - RNA, 20 nt, Artificial Sequence
  Synthetic
guguuagaggguuucagugg

SEQ ID NO: 332402 - RNA, 21 nt, Artificial Sequence
  Synthetic
gguguuagaggguuucagugg

SEQ ID NO: 332403 - RNA, 22 nt, Artificial Sequence
  Synthetic
ugguguuagaggguuucagugg

SEQ ID NO: 332404 - RNA, 23 nt, Artificial Sequence
  Synthetic
uugguguuagaggguuucagugg

SEQ ID NO: 332405 - RNA, 24 nt, Artificial Sequence
  Synthetic
auugguguuagaggguuucagugg

SEQ ID NO: 332406 - RNA, 18 nt, Artificial Sequence
  Synthetic
aauuucauugaagagugg

SEQ ID NO: 332407 - RNA, 19 nt, Artificial Sequence
  Synthetic
uaauuucauugaagagugg

SEQ ID NO: 332408 - RNA, 20 nt, Artificial Sequence
  Synthetic
auaauuucauugaagagugg

SEQ ID NO: 332409 - RNA, 21 nt, Artificial Sequence
  Synthetic
gauaauuucauugaagagugg

SEQ ID NO: 332410 - RNA, 22 nt, Artificial Sequence
  Synthetic
agauaauuucauugaagagugg

SEQ ID NO: 332411 - RNA, 23 nt, Artificial Sequence
  Synthetic
aagauaauuucauugaagagugg

SEQ ID NO: 332412 - RNA, 24 nt, Artificial Sequence
  Synthetic
caagauaauuucauugaagagugg

SEQ ID NO: 332413 - RNA, 18 nt, Artificial Sequence
  Synthetic
ccucagccuccagagugg

SEQ ID NO: 332414 - RNA, 19 nt, Artificial Sequence
  Synthetic
gccucagccuccagagugg

SEQ ID NO: 332415 - RNA, 20 nt, Artificial Sequence
  Synthetic
ugccucagccuccagagugg

SEQ ID NO: 332416 - RNA, 21 nt, Artificial Sequence
  Synthetic
cugccucagccuccagagugg

SEQ ID NO: 332417 - RNA, 22 nt, Artificial Sequence
  Synthetic
ccugccucagccuccagagugg

SEQ ID NO: 332418 - RNA, 23 nt, Artificial Sequence
  Synthetic
uccugccucagccuccagagugg

SEQ ID NO: 332419 - RNA, 24 nt, Artificial Sequence
  Synthetic
cuccugccucagccuccagagugg

SEQ ID NO: 332420 - RNA, 18 nt, Artificial Sequence
  Synthetic
gcugcugccugagagugg

SEQ ID NO: 332421 - RNA, 19 nt, Artificial Sequence
  Synthetic
ggcugcugccugagagugg

SEQ ID NO: 332422 - RNA, 20 nt, Artificial Sequence
  Synthetic
uggcugcugccugagagugg

SEQ ID NO: 332423 - RNA, 21 nt, Artificial Sequence
  Synthetic
cuggcugcugccugagagugg

SEQ ID NO: 332424 - RNA, 22 nt, Artificial Sequence
  Synthetic
gcuggcugcugccugagagugg

SEQ ID NO: 332425 - RNA, 23 nt, Artificial Sequence
  Synthetic
ggcuggcugcugccugagagugg

SEQ ID NO: 332426 - RNA, 24 nt, Artificial Sequence
  Synthetic
gggcuggcugcugccugagagugg

SEQ ID NO: 332427 - RNA, 18 nt, Artificial Sequence
  Synthetic
uguguggcuugagagugg

SEQ ID NO: 332428 - RNA, 19 nt, Artificial Sequence
  Synthetic
auguguggcuugagagugg

SEQ ID NO: 332429 - RNA, 20 nt, Artificial Sequence
  Synthetic
uauguguggcuugagagugg

SEQ ID NO: 332430 - RNA, 21 nt, Artificial Sequence
  Synthetic
guauguguggcuugagagugg

SEQ ID NO: 332431 - RNA, 22 nt, Artificial Sequence
  Synthetic
gguauguguggcuugagagugg

SEQ ID NO: 332432 - RNA, 23 nt, Artificial Sequence
  Synthetic
ugguauguguggcuugagagugg

SEQ ID NO: 332433 - RNA, 24 nt, Artificial Sequence
  Synthetic
gugguauguguggcuugagagugg

SEQ ID NO: 332434 - RNA, 18 nt, Artificial Sequence
  Synthetic
agggugguuugagagugg

SEQ ID NO: 332435 - RNA, 19 nt, Artificial Sequence
  Synthetic
aagggugguuugagagugg

SEQ ID NO: 332436 - RNA, 20 nt, Artificial Sequence
  Synthetic
gaagggugguuugagagugg

SEQ ID NO: 332437 - RNA, 21 nt, Artificial Sequence
  Synthetic
ggaagggugguuugagagugg

SEQ ID NO: 332438 - RNA, 22 nt, Artificial Sequence
  Synthetic
uggaagggugguuugagagugg

SEQ ID NO: 332439 - RNA, 23 nt, Artificial Sequence
  Synthetic
guggaagggugguuugagagugg

SEQ ID NO: 332440 - RNA, 24 nt, Artificial Sequence
  Synthetic
gguggaagggugguuugagagugg

SEQ ID NO: 332441 - RNA, 18 nt, Artificial Sequence
  Synthetic
ucucagccucccgagugg

SEQ ID NO: 332442 - RNA, 19 nt, Artificial Sequence
  Synthetic
gucucagccucccgagugg

SEQ ID NO: 332443 - RNA, 20 nt, Artificial Sequence
  Synthetic
ugucucagccucccgagugg

SEQ ID NO: 332444 - RNA, 21 nt, Artificial Sequence
  Synthetic
cugucucagccucccgagugg

SEQ ID NO: 332445 - RNA, 22 nt, Artificial Sequence
  Synthetic
ucugucucagccucccgagugg

SEQ ID NO: 332446 - RNA, 23 nt, Artificial Sequence
  Synthetic
cucugucucagccucccgagugg

SEQ ID NO: 332447 - RNA, 24 nt, Artificial Sequence
  Synthetic
ucucugucucagccucccgagugg

SEQ ID NO: 332448 - RNA, 18 nt, Artificial Sequence
  Synthetic
aaccgggaagaggagugg

SEQ ID NO: 332449 - RNA, 19 nt, Artificial Sequence
  Synthetic
uaaccgggaagaggagugg

SEQ ID NO: 332450 - RNA, 20 nt, Artificial Sequence
  Synthetic
guaaccgggaagaggagugg

SEQ ID NO: 332451 - RNA, 21 nt, Artificial Sequence
  Synthetic
aguaaccgggaagaggagugg

SEQ ID NO: 332452 - RNA, 22 nt, Artificial Sequence
  Synthetic
aaguaaccgggaagaggagugg

SEQ ID NO: 332453 - RNA, 23 nt, Artificial Sequence
  Synthetic
gaaguaaccgggaagaggagugg

SEQ ID NO: 332454 - RNA, 24 nt, Artificial Sequence
  Synthetic
ugaaguaaccgggaagaggagugg

SEQ ID NO: 332455 - RNA, 18 nt, Artificial Sequence
  Synthetic
aaaugaaguuaggagugg

SEQ ID NO: 332456 - RNA, 19 nt, Artificial Sequence
  Synthetic
uaaaugaaguuaggagugg

SEQ ID NO: 332457 - RNA, 20 nt, Artificial Sequence
  Synthetic
auaaaugaaguuaggagugg

SEQ ID NO: 332458 - RNA, 21 nt, Artificial Sequence
  Synthetic
uauaaaugaaguuaggagugg

SEQ ID NO: 332459 - RNA, 22 nt, Artificial Sequence
  Synthetic
uuauaaaugaaguuaggagugg

SEQ ID NO: 332460 - RNA, 23 nt, Artificial Sequence
  Synthetic
auuauaaaugaaguuaggagugg

SEQ ID NO: 332461 - RNA, 24 nt, Artificial Sequence
  Synthetic
gauuauaaaugaaguuaggagugg

SEQ ID NO: 332462 - RNA, 18 nt, Artificial Sequence
  Synthetic
uagccauggcuggagugg

SEQ ID NO: 332463 - RNA, 19 nt, Artificial Sequence
  Synthetic
uuagccauggcuggagugg

SEQ ID NO: 332464 - RNA, 20 nt, Artificial Sequence
  Synthetic
uuuagccauggcuggagugg

SEQ ID NO: 332465 - RNA, 21 nt, Artificial Sequence
  Synthetic
uuuuagccauggcuggagugg

SEQ ID NO: 332466 - RNA, 22 nt, Artificial Sequence
  Synthetic
cuuuuagccauggcuggagugg

SEQ ID NO: 332467 - RNA, 23 nt, Artificial Sequence
  Synthetic
ccuuuuagccauggcuggagugg

SEQ ID NO: 332468 - RNA, 24 nt, Artificial Sequence
  Synthetic
uccuuuuagccauggcuggagugg

SEQ ID NO: 332469 - RNA, 18 nt, Artificial Sequence
  Synthetic
uauccauggcuggagugg

SEQ ID NO: 332470 - RNA, 19 nt, Artificial Sequence
  Synthetic
uuauccauggcuggagugg

SEQ ID NO: 332471 - RNA, 20 nt, Artificial Sequence
  Synthetic
uuuauccauggcuggagugg

SEQ ID NO: 332472 - RNA, 21 nt, Artificial Sequence
  Synthetic
uuuuauccauggcuggagugg

SEQ ID NO: 332473 - RNA, 22 nt, Artificial Sequence
  Synthetic
cuuuuauccauggcuggagugg

SEQ ID NO: 332474 - RNA, 23 nt, Artificial Sequence
  Synthetic
ccuuuuauccauggcuggagugg

SEQ ID NO: 332475 - RNA, 24 nt, Artificial Sequence
  Synthetic
cccuuuuauccauggcuggagugg

SEQ ID NO: 332476 - RNA, 18 nt, Artificial Sequence
  Synthetic
uccuuuuauuuggagugg

SEQ ID NO: 332477 - RNA, 19 nt, Artificial Sequence
  Synthetic
cuccuuuuauuuggagugg

SEQ ID NO: 332478 - RNA, 20 nt, Artificial Sequence
  Synthetic
gcuccuuuuauuuggagugg

SEQ ID NO: 332479 - RNA, 21 nt, Artificial Sequence
  Synthetic
ggcuccuuuuauuuggagugg

SEQ ID NO: 332480 - RNA, 22 nt, Artificial Sequence
  Synthetic
uggcuccuuuuauuuggagugg

SEQ ID NO: 332481 - RNA, 23 nt, Artificial Sequence
  Synthetic
cuggcuccuuuuauuuggagugg

SEQ ID NO: 332482 - RNA, 24 nt, Artificial Sequence
  Synthetic
acuggcuccuuuuauuuggagugg

SEQ ID NO: 332483 - RNA, 18 nt, Artificial Sequence
  Synthetic
caaaaugaggaugagugg

SEQ ID NO: 332484 - RNA, 19 nt, Artificial Sequence
  Synthetic
acaaaaugaggaugagugg

SEQ ID NO: 332485 - RNA, 20 nt, Artificial Sequence
  Synthetic
aacaaaaugaggaugagugg

SEQ ID NO: 332486 - RNA, 21 nt, Artificial Sequence
  Synthetic
aaacaaaaugaggaugagugg

SEQ ID NO: 332487 - RNA, 22 nt, Artificial Sequence
  Synthetic
aaaacaaaaugaggaugagugg

SEQ ID NO: 332488 - RNA, 23 nt, Artificial Sequence
  Synthetic
caaaacaaaaugaggaugagugg

SEQ ID NO: 332489 - RNA, 24 nt, Artificial Sequence
  Synthetic
acaaaacaaaaugaggaugagugg

SEQ ID NO: 332490 - RNA, 18 nt, Artificial Sequence
  Synthetic
aagaggaauuaauagugg

SEQ ID NO: 332491 - RNA, 19 nt, Artificial Sequence
  Synthetic
aaagaggaauuaauagugg

SEQ ID NO: 332492 - RNA, 20 nt, Artificial Sequence
  Synthetic
aaaagaggaauuaauagugg

SEQ ID NO: 332493 - RNA, 21 nt, Artificial Sequence
  Synthetic
caaaagaggaauuaauagugg

SEQ ID NO: 332494 - RNA, 22 nt, Artificial Sequence
  Synthetic
ccaaaagaggaauuaauagugg

SEQ ID NO: 332495 - RNA, 23 nt, Artificial Sequence
  Synthetic
cccaaaagaggaauuaauagugg

SEQ ID NO: 332496 - RNA, 24 nt, Artificial Sequence
  Synthetic
ccccaaaagaggaauuaauagugg

SEQ ID NO: 332497 - RNA, 18 nt, Artificial Sequence
  Synthetic
agggugaauuuauagugg

SEQ ID NO: 332498 - RNA, 19 nt, Artificial Sequence
  Synthetic
aagggugaauuuauagugg

SEQ ID NO: 332499 - RNA, 20 nt, Artificial Sequence
  Synthetic
caagggugaauuuauagugg

SEQ ID NO: 332500 - RNA, 21 nt, Artificial Sequence
  Synthetic
ucaagggugaauuuauagugg

SEQ ID NO: 332501 - RNA, 22 nt, Artificial Sequence
  Synthetic
uucaagggugaauuuauagugg

SEQ ID NO: 332502 - RNA, 23 nt, Artificial Sequence
  Synthetic
auucaagggugaauuuauagugg

SEQ ID NO: 332503 - RNA, 24 nt, Artificial Sequence
  Synthetic
uauucaagggugaauuuauagugg

SEQ ID NO: 332504 - RNA, 18 nt, Artificial Sequence
  Synthetic
ccagggauaaacuagugg

SEQ ID NO: 332505 - RNA, 19 nt, Artificial Sequence
  Synthetic
accagggauaaacuagugg

SEQ ID NO: 332506 - RNA, 20 nt, Artificial Sequence
  Synthetic
caccagggauaaacuagugg

SEQ ID NO: 332507 - RNA, 21 nt, Artificial Sequence
  Synthetic
ucaccagggauaaacuagugg

SEQ ID NO: 332508 - RNA, 22 nt, Artificial Sequence
  Synthetic
cucaccagggauaaacuagugg

SEQ ID NO: 332509 - RNA, 23 nt, Artificial Sequence
  Synthetic
ccucaccagggauaaacuagugg

SEQ ID NO: 332510 - RNA, 24 nt, Artificial Sequence
  Synthetic
uccucaccagggauaaacuagugg

SEQ ID NO: 332511 - RNA, 18 nt, Artificial Sequence
  Synthetic
cagugugcggucuagugg

SEQ ID NO: 332512 - RNA, 19 nt, Artificial Sequence
  Synthetic
ccagugugcggucuagugg

SEQ ID NO: 332513 - RNA, 20 nt, Artificial Sequence
  Synthetic
cccagugugcggucuagugg

SEQ ID NO: 332514 - RNA, 21 nt, Artificial Sequence
  Synthetic
ucccagugugcggucuagugg

SEQ ID NO: 332515 - RNA, 22 nt, Artificial Sequence
  Synthetic
aucccagugugcggucuagugg

SEQ ID NO: 332516 - RNA, 23 nt, Artificial Sequence
  Synthetic
caucccagugugcggucuagugg

SEQ ID NO: 332517 - RNA, 24 nt, Artificial Sequence
  Synthetic
gcaucccagugugcggucuagugg

SEQ ID NO: 332518 - RNA, 18 nt, Artificial Sequence
  Synthetic
cagagcccccaguagugg

SEQ ID NO: 332519 - RNA, 19 nt, Artificial Sequence
  Synthetic
ccagagcccccaguagugg

SEQ ID NO: 332520 - RNA, 20 nt, Artificial Sequence
  Synthetic
uccagagcccccaguagugg

SEQ ID NO: 332521 - RNA, 21 nt, Artificial Sequence
  Synthetic
uuccagagcccccaguagugg

SEQ ID NO: 332522 - RNA, 22 nt, Artificial Sequence
  Synthetic
uuuccagagcccccaguagugg

SEQ ID NO: 332523 - RNA, 23 nt, Artificial Sequence
  Synthetic
uuuuccagagcccccaguagugg

SEQ ID NO: 332524 - RNA, 24 nt, Artificial Sequence
  Synthetic
guuuuccagagcccccaguagugg

SEQ ID NO: 332525 - RNA, 18 nt, Artificial Sequence
  Synthetic
cuccuuacuuuguagugg

SEQ ID NO: 332526 - RNA, 19 nt, Artificial Sequence
  Synthetic
acuccuuacuuuguagugg

SEQ ID NO: 332527 - RNA, 20 nt, Artificial Sequence
  Synthetic
uacuccuuacuuuguagugg

SEQ ID NO: 332528 - RNA, 21 nt, Artificial Sequence
  Synthetic
uuacuccuuacuuuguagugg

SEQ ID NO: 332529 - RNA, 22 nt, Artificial Sequence
  Synthetic
uuuacuccuuacuuuguagugg

SEQ ID NO: 332530 - RNA, 23 nt, Artificial Sequence
  Synthetic
guuuacuccuuacuuuguagugg

SEQ ID NO: 332531 - RNA, 24 nt, Artificial Sequence
  Synthetic
cguuuacuccuuacuuuguagugg

SEQ ID NO: 332532 - RNA, 18 nt, Artificial Sequence
  Synthetic
aaugauaaauauuagugg

SEQ ID NO: 332533 - RNA, 19 nt, Artificial Sequence
  Synthetic
uaaugauaaauauuagugg

SEQ ID NO: 332534 - RNA, 20 nt, Artificial Sequence
  Synthetic
auaaugauaaauauuagugg

SEQ ID NO: 332535 - RNA, 21 nt, Artificial Sequence
  Synthetic
gauaaugauaaauauuagugg

SEQ ID NO: 332536 - RNA, 22 nt, Artificial Sequence
  Synthetic
agauaaugauaaauauuagugg

SEQ ID NO: 332537 - RNA, 23 nt, Artificial Sequence
  Synthetic
aagauaaugauaaauauuagugg

SEQ ID NO: 332538 - RNA, 24 nt, Artificial Sequence
  Synthetic
uaagauaaugauaaauauuagugg

SEQ ID NO: 332539 - RNA, 18 nt, Artificial Sequence
  Synthetic
uacauugucauuuagugg

SEQ ID NO: 332540 - RNA, 19 nt, Artificial Sequence
  Synthetic
uuacauugucauuuagugg

SEQ ID NO: 332541 - RNA, 20 nt, Artificial Sequence
  Synthetic
guuacauugucauuuagugg

SEQ ID NO: 332542 - RNA, 21 nt, Artificial Sequence
  Synthetic
uguuacauugucauuuagugg

SEQ ID NO: 332543 - RNA, 22 nt, Artificial Sequence
  Synthetic
uuguuacauugucauuuagugg

SEQ ID NO: 332544 - RNA, 23 nt, Artificial Sequence
  Synthetic
cuuguuacauugucauuuagugg

SEQ ID NO: 332545 - RNA, 24 nt, Artificial Sequence
  Synthetic
acuuguuacauugucauuuagugg

SEQ ID NO: 332546 - RNA, 18 nt, Artificial Sequence
  Synthetic
ccucagccucuuuagugg

SEQ ID NO: 332547 - RNA, 19 nt, Artificial Sequence
  Synthetic
gccucagccucuuuagugg

SEQ ID NO: 332548 - RNA, 20 nt, Artificial Sequence
  Synthetic
ugccucagccucuuuagugg

SEQ ID NO: 332549 - RNA, 21 nt, Artificial Sequence
  Synthetic
uugccucagccucuuuagugg

SEQ ID NO: 332550 - RNA, 22 nt, Artificial Sequence
  Synthetic
auugccucagccucuuuagugg

SEQ ID NO: 332551 - RNA, 23 nt, Artificial Sequence
  Synthetic
uauugccucagccucuuuagugg

SEQ ID NO: 332552 - RNA, 24 nt, Artificial Sequence
  Synthetic
cuauugccucagccucuuuagugg

SEQ ID NO: 332553 - RNA, 18 nt, Artificial Sequence
  Synthetic
ugaucuguaguuuagugg

SEQ ID NO: 332554 - RNA, 19 nt, Artificial Sequence
  Synthetic
uugaucuguaguuuagugg

SEQ ID NO: 332555 - RNA, 20 nt, Artificial Sequence
  Synthetic
uuugaucuguaguuuagugg

SEQ ID NO: 332556 - RNA, 21 nt, Artificial Sequence
  Synthetic
cuuugaucuguaguuuagugg

SEQ ID NO: 332557 - RNA, 22 nt, Artificial Sequence
  Synthetic
ucuuugaucuguaguuuagugg

SEQ ID NO: 332558 - RNA, 23 nt, Artificial Sequence
  Synthetic
uucuuugaucuguaguuuagugg

SEQ ID NO: 332559 - RNA, 24 nt, Artificial Sequence
  Synthetic
cuucuuugaucuguaguuuagugg

SEQ ID NO: 332560 - RNA, 18 nt, Artificial Sequence
  Synthetic
gagcugaauguuuagugg

SEQ ID NO: 332561 - RNA, 19 nt, Artificial Sequence
  Synthetic
ggagcugaauguuuagugg

SEQ ID NO: 332562 - RNA, 20 nt, Artificial Sequence
  Synthetic
uggagcugaauguuuagugg

SEQ ID NO: 332563 - RNA, 21 nt, Artificial Sequence
  Synthetic
uuggagcugaauguuuagugg

SEQ ID NO: 332564 - RNA, 22 nt, Artificial Sequence
  Synthetic
uuuggagcugaauguuuagugg

SEQ ID NO: 332565 - RNA, 23 nt, Artificial Sequence
  Synthetic
uuuuggagcugaauguuuagugg

SEQ ID NO: 332566 - RNA, 24 nt, Artificial Sequence
  Synthetic
uuuuuggagcugaauguuuagugg

SEQ ID NO: 332567 - RNA, 18 nt, Artificial Sequence
  Synthetic
uaaugcuauguuuagugg

SEQ ID NO: 332568 - RNA, 19 nt, Artificial Sequence
  Synthetic
auaaugcuauguuuagugg

SEQ ID NO: 332569 - RNA, 20 nt, Artificial Sequence
  Synthetic
uauaaugcuauguuuagugg

SEQ ID NO: 332570 - RNA, 21 nt, Artificial Sequence
  Synthetic
auauaaugcuauguuuagugg

SEQ ID NO: 332571 - RNA, 22 nt, Artificial Sequence
  Synthetic
cauauaaugcuauguuuagugg

SEQ ID NO: 332572 - RNA, 23 nt, Artificial Sequence
  Synthetic
acauauaaugcuauguuuagugg

SEQ ID NO: 332573 - RNA, 24 nt, Artificial Sequence
  Synthetic
aacauauaaugcuauguuuagugg

SEQ ID NO: 332574 - RNA, 18 nt, Artificial Sequence
  Synthetic
auuagguuauuuuagugg

SEQ ID NO: 332575 - RNA, 19 nt, Artificial Sequence
  Synthetic
aauuagguuauuuuagugg

SEQ ID NO: 332576 - RNA, 20 nt, Artificial Sequence
  Synthetic
uaauuagguuauuuuagugg

SEQ ID NO: 332577 - RNA, 21 nt, Artificial Sequence
  Synthetic
auaauuagguuauuuuagugg

SEQ ID NO: 332578 - RNA, 22 nt, Artificial Sequence
  Synthetic
aauaauuagguuauuuuagugg

SEQ ID NO: 332579 - RNA, 23 nt, Artificial Sequence
  Synthetic
aaauaauuagguuauuuuagugg

SEQ ID NO: 332580 - RNA, 24 nt, Artificial Sequence
  Synthetic
uaaauaauuagguuauuuuagugg

SEQ ID NO: 332581 - RNA, 18 nt, Artificial Sequence
  Synthetic
caucuacaugaaacgugg

SEQ ID NO: 332582 - RNA, 19 nt, Artificial Sequence
  Synthetic
acaucuacaugaaacgugg

SEQ ID NO: 332583 - RNA, 20 nt, Artificial Sequence
  Synthetic
aacaucuacaugaaacgugg

SEQ ID NO: 332584 - RNA, 21 nt, Artificial Sequence
  Synthetic
aaacaucuacaugaaacgugg

SEQ ID NO: 332585 - RNA, 22 nt, Artificial Sequence
  Synthetic
gaaacaucuacaugaaacgugg

SEQ ID NO: 332586 - RNA, 23 nt, Artificial Sequence
  Synthetic
ugaaacaucuacaugaaacgugg

SEQ ID NO: 332587 - RNA, 24 nt, Artificial Sequence
  Synthetic
cugaaacaucuacaugaaacgugg

SEQ ID NO: 332588 - RNA, 18 nt, Artificial Sequence
  Synthetic
aaagcuuccacaacgugg

SEQ ID NO: 332589 - RNA, 19 nt, Artificial Sequence
  Synthetic
caaagcuuccacaacgugg

SEQ ID NO: 332590 - RNA, 20 nt, Artificial Sequence
  Synthetic
acaaagcuuccacaacgugg

SEQ ID NO: 332591 - RNA, 21 nt, Artificial Sequence
  Synthetic
aacaaagcuuccacaacgugg

SEQ ID NO: 332592 - RNA, 22 nt, Artificial Sequence
  Synthetic
gaacaaagcuuccacaacgugg

SEQ ID NO: 332593 - RNA, 23 nt, Artificial Sequence
  Synthetic
agaacaaagcuuccacaacgugg

SEQ ID NO: 332594 - RNA, 24 nt, Artificial Sequence
  Synthetic
aagaacaaagcuuccacaacgugg

SEQ ID NO: 332595 - RNA, 18 nt, Artificial Sequence
  Synthetic
acagagaacccaacgugg

SEQ ID NO: 332596 - RNA, 19 nt, Artificial Sequence
  Synthetic
aacagagaacccaacgugg

SEQ ID NO: 332597 - RNA, 20 nt, Artificial Sequence
  Synthetic
aaacagagaacccaacgugg

SEQ ID NO: 332598 - RNA, 21 nt, Artificial Sequence
  Synthetic
aaaacagagaacccaacgugg

SEQ ID NO: 332599 - RNA, 22 nt, Artificial Sequence
  Synthetic
gaaaacagagaacccaacgugg

SEQ ID NO: 332600 - RNA, 23 nt, Artificial Sequence
  Synthetic
ggaaaacagagaacccaacgugg

SEQ ID NO: 332601 - RNA, 24 nt, Artificial Sequence
  Synthetic
cggaaaacagagaacccaacgugg

SEQ ID NO: 332602 - RNA, 18 nt, Artificial Sequence
  Synthetic
uccuuuguagggacgugg

SEQ ID NO: 332603 - RNA, 19 nt, Artificial Sequence
  Synthetic
guccuuuguagggacgugg

SEQ ID NO: 332604 - RNA, 20 nt, Artificial Sequence
  Synthetic
aguccuuuguagggacgugg

SEQ ID NO: 332605 - RNA, 21 nt, Artificial Sequence
  Synthetic
aaguccuuuguagggacgugg

SEQ ID NO: 332606 - RNA, 22 nt, Artificial Sequence
  Synthetic
caaguccuuuguagggacgugg

SEQ ID NO: 332607 - RNA, 23 nt, Artificial Sequence
  Synthetic
ucaaguccuuuguagggacgugg

SEQ ID NO: 332608 - RNA, 24 nt, Artificial Sequence
  Synthetic
uucaaguccuuuguagggacgugg

SEQ ID NO: 332609 - RNA, 18 nt, Artificial Sequence
  Synthetic
gagucacaucuuacgugg

SEQ ID NO: 332610 - RNA, 19 nt, Artificial Sequence
  Synthetic
cgagucacaucuuacgugg

SEQ ID NO: 332611 - RNA, 20 nt, Artificial Sequence
  Synthetic
acgagucacaucuuacgugg

SEQ ID NO: 332612 - RNA, 21 nt, Artificial Sequence
  Synthetic
aacgagucacaucuuacgugg

SEQ ID NO: 332613 - RNA, 22 nt, Artificial Sequence
  Synthetic
gaacgagucacaucuuacgugg

SEQ ID NO: 332614 - RNA, 23 nt, Artificial Sequence
  Synthetic
ggaacgagucacaucuuacgugg

SEQ ID NO: 332615 - RNA, 24 nt, Artificial Sequence
  Synthetic
aggaacgagucacaucuuacgugg

SEQ ID NO: 332616 - RNA, 18 nt, Artificial Sequence
  Synthetic
auuuaaauuuaaccgugg

SEQ ID NO: 332617 - RNA, 19 nt, Artificial Sequence
  Synthetic
aauuuaaauuuaaccgugg

SEQ ID NO: 332618 - RNA, 20 nt, Artificial Sequence
  Synthetic
uaauuuaaauuuaaccgugg

SEQ ID NO: 332619 - RNA, 21 nt, Artificial Sequence
  Synthetic
guaauuuaaauuuaaccgugg

SEQ ID NO: 332620 - RNA, 22 nt, Artificial Sequence
  Synthetic
gguaauuuaaauuuaaccgugg

SEQ ID NO: 332621 - RNA, 23 nt, Artificial Sequence
  Synthetic
ugguaauuuaaauuuaaccgugg

SEQ ID NO: 332622 - RNA, 24 nt, Artificial Sequence
  Synthetic
uugguaauuuaaauuuaaccgugg

SEQ ID NO: 332623 - RNA, 18 nt, Artificial Sequence
  Synthetic
aaaccgaguagaccgugg

SEQ ID NO: 332624 - RNA, 19 nt, Artificial Sequence
  Synthetic
uaaaccgaguagaccgugg

SEQ ID NO: 332625 - RNA, 20 nt, Artificial Sequence
  Synthetic
auaaaccgaguagaccgugg

SEQ ID NO: 332626 - RNA, 21 nt, Artificial Sequence
  Synthetic
gauaaaccgaguagaccgugg

SEQ ID NO: 332627 - RNA, 22 nt, Artificial Sequence
  Synthetic
ugauaaaccgaguagaccgugg

SEQ ID NO: 332628 - RNA, 23 nt, Artificial Sequence
  Synthetic
uugauaaaccgaguagaccgugg

SEQ ID NO: 332629 - RNA, 24 nt, Artificial Sequence
  Synthetic
cuugauaaaccgaguagaccgugg

SEQ ID NO: 332630 - RNA, 18 nt, Artificial Sequence
  Synthetic
uuuauuaaaucuccgugg

SEQ ID NO: 332631 - RNA, 19 nt, Artificial Sequence
  Synthetic
uuuuauuaaaucuccgugg

SEQ ID NO: 332632 - RNA, 20 nt, Artificial Sequence
  Synthetic
cuuuuauuaaaucuccgugg

SEQ ID NO: 332633 - RNA, 21 nt, Artificial Sequence
  Synthetic
ucuuuuauuaaaucuccgugg

SEQ ID NO: 332634 - RNA, 22 nt, Artificial Sequence
  Synthetic
aucuuuuauuaaaucuccgugg

SEQ ID NO: 332635 - RNA, 23 nt, Artificial Sequence
  Synthetic
aaucuuuuauuaaaucuccgugg

SEQ ID NO: 332636 - RNA, 24 nt, Artificial Sequence
  Synthetic
aaaucuuuuauuaaaucuccgugg

SEQ ID NO: 332637 - RNA, 18 nt, Artificial Sequence
  Synthetic
uuugcaauaguuccgugg

SEQ ID NO: 332638 - RNA, 19 nt, Artificial Sequence
  Synthetic
uuuugcaauaguuccgugg

SEQ ID NO: 332639 - RNA, 20 nt, Artificial Sequence
  Synthetic
guuuugcaauaguuccgugg

SEQ ID NO: 332640 - RNA, 21 nt, Artificial Sequence
  Synthetic
aguuuugcaauaguuccgugg

SEQ ID NO: 332641 - RNA, 22 nt, Artificial Sequence
  Synthetic
caguuuugcaauaguuccgugg

SEQ ID NO: 332642 - RNA, 23 nt, Artificial Sequence
  Synthetic
ccaguuuugcaauaguuccgugg

SEQ ID NO: 332643 - RNA, 24 nt, Artificial Sequence
  Synthetic
accaguuuugcaauaguuccgugg

SEQ ID NO: 332644 - RNA, 18 nt, Artificial Sequence
  Synthetic
uuguuuaugacagcgugg

SEQ ID NO: 332645 - RNA, 19 nt, Artificial Sequence
  Synthetic
uuuguuuaugacagcgugg

SEQ ID NO: 332646 - RNA, 20 nt, Artificial Sequence
  Synthetic
uuuuguuuaugacagcgugg

SEQ ID NO: 332647 - RNA, 21 nt, Artificial Sequence
  Synthetic
cuuuuguuuaugacagcgugg

SEQ ID NO: 332648 - RNA, 22 nt, Artificial Sequence
  Synthetic
ccuuuuguuuaugacagcgugg

SEQ ID NO: 332649 - RNA, 23 nt, Artificial Sequence
  Synthetic
uccuuuuguuuaugacagcgugg

SEQ ID NO: 332650 - RNA, 24 nt, Artificial Sequence
  Synthetic
auccuuuuguuuaugacagcgugg

SEQ ID NO: 332651 - RNA, 18 nt, Artificial Sequence
  Synthetic
ggaagcuuccagucgugg

SEQ ID NO: 332652 - RNA, 19 nt, Artificial Sequence
  Synthetic
gggaagcuuccagucgugg

SEQ ID NO: 332653 - RNA, 20 nt, Artificial Sequence
  Synthetic
cgggaagcuuccagucgugg

SEQ ID NO: 332654 - RNA, 21 nt, Artificial Sequence
  Synthetic
ucgggaagcuuccagucgugg

SEQ ID NO: 332655 - RNA, 22 nt, Artificial Sequence
  Synthetic
uucgggaagcuuccagucgugg

SEQ ID NO: 332656 - RNA, 23 nt, Artificial Sequence
  Synthetic
cuucgggaagcuuccagucgugg

SEQ ID NO: 332657 - RNA, 24 nt, Artificial Sequence
  Synthetic
gcuucgggaagcuuccagucgugg

SEQ ID NO: 332658 - RNA, 18 nt, Artificial Sequence
  Synthetic
caggagggagaaaggugg

SEQ ID NO: 332659 - RNA, 19 nt, Artificial Sequence
  Synthetic
acaggagggagaaaggugg

SEQ ID NO: 332660 - RNA, 20 nt, Artificial Sequence
  Synthetic
gacaggagggagaaaggugg

SEQ ID NO: 332661 - RNA, 21 nt, Artificial Sequence
  Synthetic
agacaggagggagaaaggugg

SEQ ID NO: 332662 - RNA, 22 nt, Artificial Sequence
  Synthetic
gagacaggagggagaaaggugg

SEQ ID NO: 332663 - RNA, 23 nt, Artificial Sequence
  Synthetic
ggagacaggagggagaaaggugg

SEQ ID NO: 332664 - RNA, 24 nt, Artificial Sequence
  Synthetic
gggagacaggagggagaaaggugg

SEQ ID NO: 332665 - RNA, 18 nt, Artificial Sequence
  Synthetic
accuucuucacaaggugg

SEQ ID NO: 332666 - RNA, 19 nt, Artificial Sequence
  Synthetic
caccuucuucacaaggugg

SEQ ID NO: 332667 - RNA, 20 nt, Artificial Sequence
  Synthetic
gcaccuucuucacaaggugg

SEQ ID NO: 332668 - RNA, 21 nt, Artificial Sequence
  Synthetic
ggcaccuucuucacaaggugg

SEQ ID NO: 332669 - RNA, 22 nt, Artificial Sequence
  Synthetic
aggcaccuucuucacaaggugg

SEQ ID NO: 332670 - RNA, 23 nt, Artificial Sequence
  Synthetic
gaggcaccuucuucacaaggugg

SEQ ID NO: 332671 - RNA, 24 nt, Artificial Sequence
  Synthetic
cgaggcaccuucuucacaaggugg

SEQ ID NO: 332672 - RNA, 18 nt, Artificial Sequence
  Synthetic
ggguaaaacccaaggugg

SEQ ID NO: 332673 - RNA, 19 nt, Artificial Sequence
  Synthetic
uggguaaaacccaaggugg

SEQ ID NO: 332674 - RNA, 20 nt, Artificial Sequence
  Synthetic
uuggguaaaacccaaggugg

SEQ ID NO: 332675 - RNA, 21 nt, Artificial Sequence
  Synthetic
cuuggguaaaacccaaggugg

SEQ ID NO: 332676 - RNA, 22 nt, Artificial Sequence
  Synthetic
acuuggguaaaacccaaggugg

SEQ ID NO: 332677 - RNA, 23 nt, Artificial Sequence
  Synthetic
cacuuggguaaaacccaaggugg

SEQ ID NO: 332678 - RNA, 24 nt, Artificial Sequence
  Synthetic
acacuuggguaaaacccaaggugg

SEQ ID NO: 332679 - RNA, 18 nt, Artificial Sequence
  Synthetic
uggcuguguucaaggugg

SEQ ID NO: 332680 - RNA, 19 nt, Artificial Sequence
  Synthetic
guggcuguguucaaggugg

SEQ ID NO: 332681 - RNA, 20 nt, Artificial Sequence
  Synthetic
uguggcuguguucaaggugg

SEQ ID NO: 332682 - RNA, 21 nt, Artificial Sequence
  Synthetic
uuguggcuguguucaaggugg

SEQ ID NO: 332683 - RNA, 22 nt, Artificial Sequence
  Synthetic
cuuguggcuguguucaaggugg

SEQ ID NO: 332684 - RNA, 23 nt, Artificial Sequence
  Synthetic
gcuuguggcuguguucaaggugg

SEQ ID NO: 332685 - RNA, 24 nt, Artificial Sequence
  Synthetic
ugcuuguggcuguguucaaggugg

SEQ ID NO: 332686 - RNA, 18 nt, Artificial Sequence
  Synthetic
augggcaccagaaggugg

SEQ ID NO: 332687 - RNA, 19 nt, Artificial Sequence
  Synthetic
uaugggcaccagaaggugg

SEQ ID NO: 332688 - RNA, 20 nt, Artificial Sequence
  Synthetic
auaugggcaccagaaggugg

SEQ ID NO: 332689 - RNA, 21 nt, Artificial Sequence
  Synthetic
aauaugggcaccagaaggugg

SEQ ID NO: 332690 - RNA, 22 nt, Artificial Sequence
  Synthetic
aaauaugggcaccagaaggugg

SEQ ID NO: 332691 - RNA, 23 nt, Artificial Sequence
  Synthetic
aaaauaugggcaccagaaggugg

SEQ ID NO: 332692 - RNA, 24 nt, Artificial Sequence
  Synthetic
gaaaauaugggcaccagaaggugg

SEQ ID NO: 332693 - RNA, 18 nt, Artificial Sequence
  Synthetic
aaacuaccgugaaggugg

SEQ ID NO: 332694 - RNA, 19 nt, Artificial Sequence
  Synthetic
aaaacuaccgugaaggugg

SEQ ID NO: 332695 - RNA, 20 nt, Artificial Sequence
  Synthetic
caaaacuaccgugaaggugg

SEQ ID NO: 332696 - RNA, 21 nt, Artificial Sequence
  Synthetic
acaaaacuaccgugaaggugg

SEQ ID NO: 332697 - RNA, 22 nt, Artificial Sequence
  Synthetic
cacaaaacuaccgugaaggugg

SEQ ID NO: 332698 - RNA, 23 nt, Artificial Sequence
  Synthetic
acacaaaacuaccgugaaggugg

SEQ ID NO: 332699 - RNA, 24 nt, Artificial Sequence
  Synthetic
cacacaaaacuaccgugaaggugg

SEQ ID NO: 332700 - RNA, 18 nt, Artificial Sequence
  Synthetic
cuuaaaggaauaaggugg

SEQ ID NO: 332701 - RNA, 19 nt, Artificial Sequence
  Synthetic
gcuuaaaggaauaaggugg

SEQ ID NO: 332702 - RNA, 20 nt, Artificial Sequence
  Synthetic
agcuuaaaggaauaaggugg

SEQ ID NO: 332703 - RNA, 21 nt, Artificial Sequence
  Synthetic
gagcuuaaaggaauaaggugg

SEQ ID NO: 332704 - RNA, 22 nt, Artificial Sequence
  Synthetic
ggagcuuaaaggaauaaggugg

SEQ ID NO: 332705 - RNA, 23 nt, Artificial Sequence
  Synthetic
uggagcuuaaaggaauaaggugg

SEQ ID NO: 332706 - RNA, 24 nt, Artificial Sequence
  Synthetic
uuggagcuuaaaggaauaaggugg

SEQ ID NO: 332707 - RNA, 18 nt, Artificial Sequence
  Synthetic
cauacacaaaucaggugg

SEQ ID NO: 332708 - RNA, 19 nt, Artificial Sequence
  Synthetic
gcauacacaaaucaggugg

SEQ ID NO: 332709 - RNA, 20 nt, Artificial Sequence
  Synthetic
ggcauacacaaaucaggugg

SEQ ID NO: 332710 - RNA, 21 nt, Artificial Sequence
  Synthetic
uggcauacacaaaucaggugg

SEQ ID NO: 332711 - RNA, 22 nt, Artificial Sequence
  Synthetic
auggcauacacaaaucaggugg

SEQ ID NO: 332712 - RNA, 23 nt, Artificial Sequence
  Synthetic
gauggcauacacaaaucaggugg

SEQ ID NO: 332713 - RNA, 24 nt, Artificial Sequence
  Synthetic
cgauggcauacacaaaucaggugg

SEQ ID NO: 332714 - RNA, 18 nt, Artificial Sequence
  Synthetic
ucaucguccaucaggugg

SEQ ID NO: 332715 - RNA, 19 nt, Artificial Sequence
  Synthetic
aucaucguccaucaggugg

SEQ ID NO: 332716 - RNA, 20 nt, Artificial Sequence
  Synthetic
caucaucguccaucaggugg

SEQ ID NO: 332717 - RNA, 21 nt, Artificial Sequence
  Synthetic
ccaucaucguccaucaggugg

SEQ ID NO: 332718 - RNA, 22 nt, Artificial Sequence
  Synthetic
uccaucaucguccaucaggugg

SEQ ID NO: 332719 - RNA, 23 nt, Artificial Sequence
  Synthetic
guccaucaucguccaucaggugg

SEQ ID NO: 332720 - RNA, 24 nt, Artificial Sequence
  Synthetic
uguccaucaucguccaucaggugg

SEQ ID NO: 332721 - RNA, 18 nt, Artificial Sequence
  Synthetic
cuaaagauacagaggugg

SEQ ID NO: 332722 - RNA, 19 nt, Artificial Sequence
  Synthetic
ccuaaagauacagaggugg

SEQ ID NO: 332723 - RNA, 20 nt, Artificial Sequence
  Synthetic
cccuaaagauacagaggugg

SEQ ID NO: 332724 - RNA, 21 nt, Artificial Sequence
  Synthetic
ucccuaaagauacagaggugg

SEQ ID NO: 332725 - RNA, 22 nt, Artificial Sequence
  Synthetic
uucccuaaagauacagaggugg

SEQ ID NO: 332726 - RNA, 23 nt, Artificial Sequence
  Synthetic
cuucccuaaagauacagaggugg

SEQ ID NO: 332727 - RNA, 24 nt, Artificial Sequence
  Synthetic
acuucccuaaagauacagaggugg

SEQ ID NO: 332728 - RNA, 18 nt, Artificial Sequence
  Synthetic
aguaggcugaggaggugg

SEQ ID NO: 332729 - RNA, 19 nt, Artificial Sequence
  Synthetic
aaguaggcugaggaggugg

SEQ ID NO: 332730 - RNA, 20 nt, Artificial Sequence
  Synthetic
uaaguaggcugaggaggugg

SEQ ID NO: 332731 - RNA, 21 nt, Artificial Sequence
  Synthetic
uuaaguaggcugaggaggugg

SEQ ID NO: 332732 - RNA, 22 nt, Artificial Sequence
  Synthetic
guuaaguaggcugaggaggugg

SEQ ID NO: 332733 - RNA, 23 nt, Artificial Sequence
  Synthetic
cguuaaguaggcugaggaggugg

SEQ ID NO: 332734 - RNA, 24 nt, Artificial Sequence
  Synthetic
acguuaaguaggcugaggaggugg

SEQ ID NO: 332735 - RNA, 18 nt, Artificial Sequence
  Synthetic
agagagagagggaggugg

SEQ ID NO: 332736 - RNA, 19 nt, Artificial Sequence
  Synthetic
gagagagagagggaggugg

SEQ ID NO: 332737 - RNA, 20 nt, Artificial Sequence
  Synthetic
ggagagagagagggaggugg

SEQ ID NO: 332738 - RNA, 21 nt, Artificial Sequence
  Synthetic
uggagagagagagggaggugg

SEQ ID NO: 332739 - RNA, 22 nt, Artificial Sequence
  Synthetic
guggagagagagagggaggugg

SEQ ID NO: 332740 - RNA, 23 nt, Artificial Sequence
  Synthetic
aguggagagagagagggaggugg

SEQ ID NO: 332741 - RNA, 24 nt, Artificial Sequence
  Synthetic
aaguggagagagagagggaggugg

SEQ ID NO: 332742 - RNA, 18 nt, Artificial Sequence
  Synthetic
agacuucucuggaggugg

SEQ ID NO: 332743 - RNA, 19 nt, Artificial Sequence
  Synthetic
aagacuucucuggaggugg

SEQ ID NO: 332744 - RNA, 20 nt, Artificial Sequence
  Synthetic
gaagacuucucuggaggugg

SEQ ID NO: 332745 - RNA, 21 nt, Artificial Sequence
  Synthetic
agaagacuucucuggaggugg

SEQ ID NO: 332746 - RNA, 22 nt, Artificial Sequence
  Synthetic
cagaagacuucucuggaggugg

SEQ ID NO: 332747 - RNA, 23 nt, Artificial Sequence
  Synthetic
ucagaagacuucucuggaggugg

SEQ ID NO: 332748 - RNA, 24 nt, Artificial Sequence
  Synthetic
uucagaagacuucucuggaggugg

SEQ ID NO: 332749 - RNA, 18 nt, Artificial Sequence
  Synthetic
uuugggagucugaggugg

SEQ ID NO: 332750 - RNA, 19 nt, Artificial Sequence
  Synthetic
cuuugggagucugaggugg

SEQ ID NO: 332751 - RNA, 20 nt, Artificial Sequence
  Synthetic
acuuugggagucugaggugg

SEQ ID NO: 332752 - RNA, 21 nt, Artificial Sequence
  Synthetic
cacuuugggagucugaggugg

SEQ ID NO: 332753 - RNA, 22 nt, Artificial Sequence
  Synthetic
gcacuuugggagucugaggugg

SEQ ID NO: 332754 - RNA, 23 nt, Artificial Sequence
  Synthetic
agcacuuugggagucugaggugg

SEQ ID NO: 332755 - RNA, 24 nt, Artificial Sequence
  Synthetic
cagcacuuugggagucugaggugg

SEQ ID NO: 332756 - RNA, 18 nt, Artificial Sequence
  Synthetic
aguaugugugugaggugg

SEQ ID NO: 332757 - RNA, 19 nt, Artificial Sequence
  Synthetic
aaguaugugugugaggugg

SEQ ID NO: 332758 - RNA, 20 nt, Artificial Sequence
  Synthetic
uaaguaugugugugaggugg

SEQ ID NO: 332759 - RNA, 21 nt, Artificial Sequence
  Synthetic
auaaguaugugugugaggugg

SEQ ID NO: 332760 - RNA, 22 nt, Artificial Sequence
  Synthetic
uauaaguaugugugugaggugg

SEQ ID NO: 332761 - RNA, 23 nt, Artificial Sequence
  Synthetic
guauaaguaugugugugaggugg

SEQ ID NO: 332762 - RNA, 24 nt, Artificial Sequence
  Synthetic
aguauaaguaugugugugaggugg

SEQ ID NO: 332763 - RNA, 18 nt, Artificial Sequence
  Synthetic
cugcacugcuugaggugg

SEQ ID NO: 332764 - RNA, 19 nt, Artificial Sequence
  Synthetic
gcugcacugcuugaggugg

SEQ ID NO: 332765 - RNA, 20 nt, Artificial Sequence
  Synthetic
ggcugcacugcuugaggugg

SEQ ID NO: 332766 - RNA, 21 nt, Artificial Sequence
  Synthetic
gggcugcacugcuugaggugg

SEQ ID NO: 332767 - RNA, 22 nt, Artificial Sequence
  Synthetic
ugggcugcacugcuugaggugg

SEQ ID NO: 332768 - RNA, 23 nt, Artificial Sequence
  Synthetic
gugggcugcacugcuugaggugg

SEQ ID NO: 332769 - RNA, 24 nt, Artificial Sequence
  Synthetic
ugugggcugcacugcuugaggugg

SEQ ID NO: 332770 - RNA, 18 nt, Artificial Sequence
  Synthetic
uuuuuaacuaauaggugg

SEQ ID NO: 332771 - RNA, 19 nt, Artificial Sequence
  Synthetic
uuuuuuaacuaauaggugg

SEQ ID NO: 332772 - RNA, 20 nt, Artificial Sequence
  Synthetic
uuuuuuuaacuaauaggugg

SEQ ID NO: 332773 - RNA, 21 nt, Artificial Sequence
  Synthetic
uuuuuuuuaacuaauaggugg

SEQ ID NO: 332774 - RNA, 22 nt, Artificial Sequence
  Synthetic
auuuuuuuuaacuaauaggugg

SEQ ID NO: 332775 - RNA, 23 nt, Artificial Sequence
  Synthetic
cauuuuuuuuaacuaauaggugg

SEQ ID NO: 332776 - RNA, 24 nt, Artificial Sequence
  Synthetic
ccauuuuuuuuaacuaauaggugg

SEQ ID NO: 332777 - RNA, 18 nt, Artificial Sequence
  Synthetic
caggacgcacuuaggugg

SEQ ID NO: 332778 - RNA, 19 nt, Artificial Sequence
  Synthetic
gcaggacgcacuuaggugg

SEQ ID NO: 332779 - RNA, 20 nt, Artificial Sequence
  Synthetic
ggcaggacgcacuuaggugg

SEQ ID NO: 332780 - RNA, 21 nt, Artificial Sequence
  Synthetic
uggcaggacgcacuuaggugg

SEQ ID NO: 332781 - RNA, 22 nt, Artificial Sequence
  Synthetic
guggcaggacgcacuuaggugg

SEQ ID NO: 332782 - RNA, 23 nt, Artificial Sequence
  Synthetic
gguggcaggacgcacuuaggugg

SEQ ID NO: 332783 - RNA, 24 nt, Artificial Sequence
  Synthetic
agguggcaggacgcacuuaggugg

SEQ ID NO: 332784 - RNA, 18 nt, Artificial Sequence
  Synthetic
gggaaaaaguuagggugg

SEQ ID NO: 332785 - RNA, 19 nt, Artificial Sequence
  Synthetic
ggggaaaaaguuagggugg

SEQ ID NO: 332786 - RNA, 20 nt, Artificial Sequence
  Synthetic
aggggaaaaaguuagggugg

SEQ ID NO: 332787 - RNA, 21 nt, Artificial Sequence
  Synthetic
gaggggaaaaaguuagggugg

SEQ ID NO: 332788 - RNA, 22 nt, Artificial Sequence
  Synthetic
ugaggggaaaaaguuagggugg

SEQ ID NO: 332789 - RNA, 23 nt, Artificial Sequence
  Synthetic
gugaggggaaaaaguuagggugg

SEQ ID NO: 332790 - RNA, 24 nt, Artificial Sequence
  Synthetic
ggugaggggaaaaaguuagggugg

SEQ ID NO: 332791 - RNA, 18 nt, Artificial Sequence
  Synthetic
uaaaccuuaaaggggugg

SEQ ID NO: 332792 - RNA, 19 nt, Artificial Sequence
  Synthetic
uuaaaccuuaaaggggugg

SEQ ID NO: 332793 - RNA, 20 nt, Artificial Sequence
  Synthetic
uuuaaaccuuaaaggggugg

SEQ ID NO: 332794 - RNA, 21 nt, Artificial Sequence
  Synthetic
cuuuaaaccuuaaaggggugg

SEQ ID NO: 332795 - RNA, 22 nt, Artificial Sequence
  Synthetic
acuuuaaaccuuaaaggggugg

SEQ ID NO: 332796 - RNA, 23 nt, Artificial Sequence
  Synthetic
aacuuuaaaccuuaaaggggugg

SEQ ID NO: 332797 - RNA, 24 nt, Artificial Sequence
  Synthetic
gaacuuuaaaccuuaaaggggugg

SEQ ID NO: 332798 - RNA, 18 nt, Artificial Sequence
  Synthetic
gacuuaauuggggggugg

SEQ ID NO: 332799 - RNA, 19 nt, Artificial Sequence
  Synthetic
ugacuuaauuggggggugg

SEQ ID NO: 332800 - RNA, 20 nt, Artificial Sequence
  Synthetic
uugacuuaauuggggggugg

SEQ ID NO: 332801 - RNA, 21 nt, Artificial Sequence
  Synthetic
guugacuuaauuggggggugg

SEQ ID NO: 332802 - RNA, 22 nt, Artificial Sequence
  Synthetic
uguugacuuaauuggggggugg

SEQ ID NO: 332803 - RNA, 23 nt, Artificial Sequence
  Synthetic
cuguugacuuaauuggggggugg

SEQ ID NO: 332804 - RNA, 24 nt, Artificial Sequence
  Synthetic
gcuguugacuuaauuggggggugg

SEQ ID NO: 332805 - RNA, 18 nt, Artificial Sequence
  Synthetic
gggccugucguggggugg

SEQ ID NO: 332806 - RNA, 19 nt, Artificial Sequence
  Synthetic
agggccugucguggggugg

SEQ ID NO: 332807 - RNA, 20 nt, Artificial Sequence
  Synthetic
cagggccugucguggggugg

SEQ ID NO: 332808 - RNA, 21 nt, Artificial Sequence
  Synthetic
ccagggccugucguggggugg

SEQ ID NO: 332809 - RNA, 22 nt, Artificial Sequence
  Synthetic
accagggccugucguggggugg

SEQ ID NO: 332810 - RNA, 23 nt, Artificial Sequence
  Synthetic
caccagggccugucguggggugg

SEQ ID NO: 332811 - RNA, 24 nt, Artificial Sequence
  Synthetic
acaccagggccugucguggggugg

SEQ ID NO: 332812 - RNA, 18 nt, Artificial Sequence
  Synthetic
gggacugugguggggugg

SEQ ID NO: 332813 - RNA, 19 nt, Artificial Sequence
  Synthetic
ggggacugugguggggugg

SEQ ID NO: 332814 - RNA, 20 nt, Artificial Sequence
  Synthetic
uggggacugugguggggugg

SEQ ID NO: 332815 - RNA, 21 nt, Artificial Sequence
  Synthetic
cuggggacugugguggggugg

SEQ ID NO: 332816 - RNA, 22 nt, Artificial Sequence
  Synthetic
ucuggggacugugguggggugg

SEQ ID NO: 332817 - RNA, 23 nt, Artificial Sequence
  Synthetic
cucuggggacugugguggggugg

SEQ ID NO: 332818 - RNA, 24 nt, Artificial Sequence
  Synthetic
acucuggggacugugguggggugg

SEQ ID NO: 332819 - RNA, 18 nt, Artificial Sequence
  Synthetic
gggccuguuguggggugg

SEQ ID NO: 332820 - RNA, 19 nt, Artificial Sequence
  Synthetic
ggggccuguuguggggugg

SEQ ID NO: 332821 - RNA, 20 nt, Artificial Sequence
  Synthetic
cggggccuguuguggggugg

SEQ ID NO: 332822 - RNA, 18 nt, Artificial Sequence
  Synthetic
gagguaugguuggggugg

SEQ ID NO: 332823 - RNA, 19 nt, Artificial Sequence
  Synthetic
ugagguaugguuggggugg

SEQ ID NO: 332824 - RNA, 20 nt, Artificial Sequence
  Synthetic
gugagguaugguuggggugg

SEQ ID NO: 332825 - RNA, 21 nt, Artificial Sequence
  Synthetic
ggugagguaugguuggggugg

SEQ ID NO: 332826 - RNA, 22 nt, Artificial Sequence
  Synthetic
gggugagguaugguuggggugg

SEQ ID NO: 332827 - RNA, 23 nt, Artificial Sequence
  Synthetic
agggugagguaugguuggggugg

SEQ ID NO: 332828 - RNA, 24 nt, Artificial Sequence
  Synthetic
uagggugagguaugguuggggugg

SEQ ID NO: 332829 - RNA, 18 nt, Artificial Sequence
  Synthetic
cauuccugguuggggugg

SEQ ID NO: 332830 - RNA, 19 nt, Artificial Sequence
  Synthetic
acauuccugguuggggugg

SEQ ID NO: 332831 - RNA, 20 nt, Artificial Sequence
  Synthetic
gacauuccugguuggggugg

SEQ ID NO: 332832 - RNA, 21 nt, Artificial Sequence
  Synthetic
ugacauuccugguuggggugg

SEQ ID NO: 332833 - RNA, 22 nt, Artificial Sequence
  Synthetic
cugacauuccugguuggggugg

SEQ ID NO: 332834 - RNA, 23 nt, Artificial Sequence
  Synthetic
ccugacauuccugguuggggugg

SEQ ID NO: 332835 - RNA, 24 nt, Artificial Sequence
  Synthetic
gccugacauuccugguuggggugg

SEQ ID NO: 332836 - RNA, 18 nt, Artificial Sequence
  Synthetic
auuuaaaacagugggugg

SEQ ID NO: 332837 - RNA, 19 nt, Artificial Sequence
  Synthetic
gauuuaaaacagugggugg

SEQ ID NO: 332838 - RNA, 20 nt, Artificial Sequence
  Synthetic
cgauuuaaaacagugggugg

SEQ ID NO: 332839 - RNA, 21 nt, Artificial Sequence
  Synthetic
acgauuuaaaacagugggugg

SEQ ID NO: 332840 - RNA, 22 nt, Artificial Sequence
  Synthetic
aacgauuuaaaacagugggugg

SEQ ID NO: 332841 - RNA, 23 nt, Artificial Sequence
  Synthetic
aaacgauuuaaaacagugggugg

SEQ ID NO: 332842 - RNA, 24 nt, Artificial Sequence
  Synthetic
caaacgauuuaaaacagugggugg

SEQ ID NO: 332843 - RNA, 18 nt, Artificial Sequence
  Synthetic
cgugugagcagugggugg

SEQ ID NO: 332844 - RNA, 19 nt, Artificial Sequence
  Synthetic
gcgugugagcagugggugg

SEQ ID NO: 332845 - RNA, 20 nt, Artificial Sequence
  Synthetic
agcgugugagcagugggugg

SEQ ID NO: 332846 - RNA, 21 nt, Artificial Sequence
  Synthetic
gagcgugugagcagugggugg

SEQ ID NO: 332847 - RNA, 22 nt, Artificial Sequence
  Synthetic
ggagcgugugagcagugggugg

SEQ ID NO: 332848 - RNA, 23 nt, Artificial Sequence
  Synthetic
aggagcgugugagcagugggugg

SEQ ID NO: 332849 - RNA, 24 nt, Artificial Sequence
  Synthetic
caggagcgugugagcagugggugg

SEQ ID NO: 332850 - RNA, 18 nt, Artificial Sequence
  Synthetic
aagguuuguugugggugg

SEQ ID NO: 332851 - RNA, 19 nt, Artificial Sequence
  Synthetic
gaagguuuguugugggugg

SEQ ID NO: 332852 - RNA, 20 nt, Artificial Sequence
  Synthetic
ggaagguuuguugugggugg

SEQ ID NO: 332853 - RNA, 21 nt, Artificial Sequence
  Synthetic
aggaagguuuguugugggugg

SEQ ID NO: 332854 - RNA, 22 nt, Artificial Sequence
  Synthetic
gaggaagguuuguugugggugg

SEQ ID NO: 332855 - RNA, 23 nt, Artificial Sequence
  Synthetic
ggaggaagguuuguugugggugg

SEQ ID NO: 332856 - RNA, 24 nt, Artificial Sequence
  Synthetic
uggaggaagguuuguugugggugg

SEQ ID NO: 332857 - RNA, 18 nt, Artificial Sequence
  Synthetic
ucccagcacuuugggugg

SEQ ID NO: 332858 - RNA, 19 nt, Artificial Sequence
  Synthetic
aucccagcacuuugggugg

SEQ ID NO: 332859 - RNA, 20 nt, Artificial Sequence
  Synthetic
aaucccagcacuuugggugg

SEQ ID NO: 332860 - RNA, 21 nt, Artificial Sequence
  Synthetic
uaaucccagcacuuugggugg

SEQ ID NO: 332861 - RNA, 22 nt, Artificial Sequence
  Synthetic
guaaucccagcacuuugggugg

SEQ ID NO: 332862 - RNA, 23 nt, Artificial Sequence
  Synthetic
uguaaucccagcacuuugggugg

SEQ ID NO: 332863 - RNA, 24 nt, Artificial Sequence
  Synthetic
cuguaaucccagcacuuugggugg

SEQ ID NO: 332864 - RNA, 18 nt, Artificial Sequence
  Synthetic
gucauuuuugcauggugg

SEQ ID NO: 332865 - RNA, 19 nt, Artificial Sequence
  Synthetic
agucauuuuugcauggugg

SEQ ID NO: 332866 - RNA, 20 nt, Artificial Sequence
  Synthetic
uagucauuuuugcauggugg

SEQ ID NO: 332867 - RNA, 21 nt, Artificial Sequence
  Synthetic
uuagucauuuuugcauggugg

SEQ ID NO: 332868 - RNA, 22 nt, Artificial Sequence
  Synthetic
uuuagucauuuuugcauggugg

SEQ ID NO: 332869 - RNA, 23 nt, Artificial Sequence
  Synthetic
guuuagucauuuuugcauggugg

SEQ ID NO: 332870 - RNA, 24 nt, Artificial Sequence
  Synthetic
cguuuagucauuuuugcauggugg

SEQ ID NO: 332871 - RNA, 18 nt, Artificial Sequence
  Synthetic
gugccagaaagauggugg

SEQ ID NO: 332872 - RNA, 19 nt, Artificial Sequence
  Synthetic
ggugccagaaagauggugg

SEQ ID NO: 332873 - RNA, 20 nt, Artificial Sequence
  Synthetic
uggugccagaaagauggugg

SEQ ID NO: 332874 - RNA, 21 nt, Artificial Sequence
  Synthetic
guggugccagaaagauggugg

SEQ ID NO: 332875 - RNA, 22 nt, Artificial Sequence
  Synthetic
aguggugccagaaagauggugg

SEQ ID NO: 332876 - RNA, 23 nt, Artificial Sequence
  Synthetic
aaguggugccagaaagauggugg

SEQ ID NO: 332877 - RNA, 24 nt, Artificial Sequence
  Synthetic
aaaguggugccagaaagauggugg

SEQ ID NO: 332878 - RNA, 18 nt, Artificial Sequence
  Synthetic
accaagucaggauggugg

SEQ ID NO: 332879 - RNA, 19 nt, Artificial Sequence
  Synthetic
caccaagucaggauggugg

SEQ ID NO: 332880 - RNA, 20 nt, Artificial Sequence
  Synthetic
ucaccaagucaggauggugg

SEQ ID NO: 332881 - RNA, 21 nt, Artificial Sequence
  Synthetic
gucaccaagucaggauggugg

SEQ ID NO: 332882 - RNA, 22 nt, Artificial Sequence
  Synthetic
ugucaccaagucaggauggugg

SEQ ID NO: 332883 - RNA, 23 nt, Artificial Sequence
  Synthetic
gugucaccaagucaggauggugg

SEQ ID NO: 332884 - RNA, 24 nt, Artificial Sequence
  Synthetic
agugucaccaagucaggauggugg

SEQ ID NO: 332885 - RNA, 18 nt, Artificial Sequence
  Synthetic
uccuucuucauauggugg

SEQ ID NO: 332886 - RNA, 19 nt, Artificial Sequence
  Synthetic
auccuucuucauauggugg

SEQ ID NO: 332887 - RNA, 20 nt, Artificial Sequence
  Synthetic
cauccuucuucauauggugg

SEQ ID NO: 332888 - RNA, 21 nt, Artificial Sequence
  Synthetic
acauccuucuucauauggugg

SEQ ID NO: 332889 - RNA, 22 nt, Artificial Sequence
  Synthetic
cacauccuucuucauauggugg

SEQ ID NO: 332890 - RNA, 23 nt, Artificial Sequence
  Synthetic
ucacauccuucuucauauggugg

SEQ ID NO: 332891 - RNA, 24 nt, Artificial Sequence
  Synthetic
aucacauccuucuucauauggugg

SEQ ID NO: 332892 - RNA, 18 nt, Artificial Sequence
  Synthetic
agcaacuauuccuggugg

SEQ ID NO: 332893 - RNA, 19 nt, Artificial Sequence
  Synthetic
uagcaacuauuccuggugg

SEQ ID NO: 332894 - RNA, 20 nt, Artificial Sequence
  Synthetic
uuagcaacuauuccuggugg

SEQ ID NO: 332895 - RNA, 21 nt, Artificial Sequence
  Synthetic
cuuagcaacuauuccuggugg

SEQ ID NO: 332896 - RNA, 22 nt, Artificial Sequence
  Synthetic
ucuuagcaacuauuccuggugg

SEQ ID NO: 332897 - RNA, 23 nt, Artificial Sequence
  Synthetic
cucuuagcaacuauuccuggugg

SEQ ID NO: 332898 - RNA, 24 nt, Artificial Sequence
  Synthetic
acucuuagcaacuauuccuggugg

SEQ ID NO: 332899 - RNA, 18 nt, Artificial Sequence
  Synthetic
uaucaucuccucuggugg

SEQ ID NO: 332900 - RNA, 19 nt, Artificial Sequence
  Synthetic
uuaucaucuccucuggugg

SEQ ID NO: 332901 - RNA, 20 nt, Artificial Sequence
  Synthetic
cuuaucaucuccucuggugg

SEQ ID NO: 332902 - RNA, 21 nt, Artificial Sequence
  Synthetic
gcuuaucaucuccucuggugg

SEQ ID NO: 332903 - RNA, 22 nt, Artificial Sequence
  Synthetic
agcuuaucaucuccucuggugg

SEQ ID NO: 332904 - RNA, 23 nt, Artificial Sequence
  Synthetic
uagcuuaucaucuccucuggugg

SEQ ID NO: 332905 - RNA, 24 nt, Artificial Sequence
  Synthetic
auagcuuaucaucuccucuggugg

SEQ ID NO: 332906 - RNA, 18 nt, Artificial Sequence
  Synthetic
uaauugcaauucuggugg

SEQ ID NO: 332907 - RNA, 19 nt, Artificial Sequence
  Synthetic
auaauugcaauucuggugg

SEQ ID NO: 332908 - RNA, 20 nt, Artificial Sequence
  Synthetic
uauaauugcaauucuggugg

SEQ ID NO: 332909 - RNA, 21 nt, Artificial Sequence
  Synthetic
guauaauugcaauucuggugg

SEQ ID NO: 332910 - RNA, 22 nt, Artificial Sequence
  Synthetic
uguauaauugcaauucuggugg

SEQ ID NO: 332911 - RNA, 23 nt, Artificial Sequence
  Synthetic
auguauaauugcaauucuggugg

SEQ ID NO: 332912 - RNA, 24 nt, Artificial Sequence
  Synthetic
aauguauaauugcaauucuggugg

SEQ ID NO: 332913 - RNA, 18 nt, Artificial Sequence
  Synthetic
ggggacaaggaguggugg

SEQ ID NO: 332914 - RNA, 19 nt, Artificial Sequence
  Synthetic
uggggacaaggaguggugg

SEQ ID NO: 332915 - RNA, 20 nt, Artificial Sequence
  Synthetic
guggggacaaggaguggugg

SEQ ID NO: 332916 - RNA, 21 nt, Artificial Sequence
  Synthetic
uguggggacaaggaguggugg

SEQ ID NO: 332917 - RNA, 22 nt, Artificial Sequence
  Synthetic
cuguggggacaaggaguggugg

SEQ ID NO: 332918 - RNA, 23 nt, Artificial Sequence
  Synthetic
acuguggggacaaggaguggugg

SEQ ID NO: 332919 - RNA, 24 nt, Artificial Sequence
  Synthetic
cacuguggggacaaggaguggugg

SEQ ID NO: 332920 - RNA, 18 nt, Artificial Sequence
  Synthetic
gacaaggagugguggugg

SEQ ID NO: 332921 - RNA, 19 nt, Artificial Sequence
  Synthetic
ggacaaggagugguggugg

SEQ ID NO: 332922 - RNA, 20 nt, Artificial Sequence
  Synthetic
gggacaaggagugguggugg

SEQ ID NO: 332923 - RNA, 21 nt, Artificial Sequence
  Synthetic
ggggacaaggagugguggugg

SEQ ID NO: 332924 - RNA, 22 nt, Artificial Sequence
  Synthetic
uggggacaaggagugguggugg

SEQ ID NO: 332925 - RNA, 23 nt, Artificial Sequence
  Synthetic
guggggacaaggagugguggugg

SEQ ID NO: 332926 - RNA, 24 nt, Artificial Sequence
  Synthetic
uguggggacaaggagugguggugg

SEQ ID NO: 332927 - RNA, 18 nt, Artificial Sequence
  Synthetic
gagagagagaguuggugg

SEQ ID NO: 332928 - RNA, 19 nt, Artificial Sequence
  Synthetic
agagagagagaguuggugg

SEQ ID NO: 332929 - RNA, 20 nt, Artificial Sequence
  Synthetic
cagagagagagaguuggugg

SEQ ID NO: 332930 - RNA, 21 nt, Artificial Sequence
  Synthetic
gcagagagagagaguuggugg

SEQ ID NO: 332931 - RNA, 22 nt, Artificial Sequence
  Synthetic
agcagagagagagaguuggugg

SEQ ID NO: 332932 - RNA, 23 nt, Artificial Sequence
  Synthetic
aagcagagagagagaguuggugg

SEQ ID NO: 332933 - RNA, 24 nt, Artificial Sequence
  Synthetic
aaagcagagagagagaguuggugg

SEQ ID NO: 332934 - RNA, 18 nt, Artificial Sequence
  Synthetic
caaauaagcuguuggugg

SEQ ID NO: 332935 - RNA, 19 nt, Artificial Sequence
  Synthetic
ucaaauaagcuguuggugg

SEQ ID NO: 332936 - RNA, 20 nt, Artificial Sequence
  Synthetic
cucaaauaagcuguuggugg

SEQ ID NO: 332937 - RNA, 21 nt, Artificial Sequence
  Synthetic
ccucaaauaagcuguuggugg

SEQ ID NO: 332938 - RNA, 22 nt, Artificial Sequence
  Synthetic
uccucaaauaagcuguuggugg

SEQ ID NO: 332939 - RNA, 23 nt, Artificial Sequence
  Synthetic
cuccucaaauaagcuguuggugg

SEQ ID NO: 332940 - RNA, 24 nt, Artificial Sequence
  Synthetic
ucuccucaaauaagcuguuggugg

SEQ ID NO: 332941 - RNA, 18 nt, Artificial Sequence
  Synthetic
auaauuuaaaaaaugugg

SEQ ID NO: 332942 - RNA, 19 nt, Artificial Sequence
  Synthetic
uauaauuuaaaaaaugugg

SEQ ID NO: 332943 - RNA, 20 nt, Artificial Sequence
  Synthetic
guauaauuuaaaaaaugugg

SEQ ID NO: 332944 - RNA, 21 nt, Artificial Sequence
  Synthetic
aguauaauuuaaaaaaugugg

SEQ ID NO: 332945 - RNA, 22 nt, Artificial Sequence
  Synthetic
aaguauaauuuaaaaaaugugg

SEQ ID NO: 332946 - RNA, 23 nt, Artificial Sequence
  Synthetic
aaaguauaauuuaaaaaaugugg

SEQ ID NO: 332947 - RNA, 24 nt, Artificial Sequence
  Synthetic
uaaaguauaauuuaaaaaaugugg

SEQ ID NO: 332948 - RNA, 18 nt, Artificial Sequence
  Synthetic
gacagauuuucaaugugg

SEQ ID NO: 332949 - RNA, 19 nt, Artificial Sequence
  Synthetic
ugacagauuuucaaugugg

SEQ ID NO: 332950 - RNA, 20 nt, Artificial Sequence
  Synthetic
uugacagauuuucaaugugg

SEQ ID NO: 332951 - RNA, 21 nt, Artificial Sequence
  Synthetic
cuugacagauuuucaaugugg

SEQ ID NO: 332952 - RNA, 22 nt, Artificial Sequence
  Synthetic
ccuugacagauuuucaaugugg

SEQ ID NO: 332953 - RNA, 23 nt, Artificial Sequence
  Synthetic
gccuugacagauuuucaaugugg

SEQ ID NO: 332954 - RNA, 24 nt, Artificial Sequence
  Synthetic
ugccuugacagauuuucaaugugg

SEQ ID NO: 332955 - RNA, 18 nt, Artificial Sequence
  Synthetic
gcagcaggaauaaugugg

SEQ ID NO: 332956 - RNA, 19 nt, Artificial Sequence
  Synthetic
ggcagcaggaauaaugugg

SEQ ID NO: 332957 - RNA, 20 nt, Artificial Sequence
  Synthetic
aggcagcaggaauaaugugg

SEQ ID NO: 332958 - RNA, 21 nt, Artificial Sequence
  Synthetic
caggcagcaggaauaaugugg

SEQ ID NO: 332959 - RNA, 22 nt, Artificial Sequence
  Synthetic
acaggcagcaggaauaaugugg

SEQ ID NO: 332960 - RNA, 23 nt, Artificial Sequence
  Synthetic
cacaggcagcaggaauaaugugg

SEQ ID NO: 332961 - RNA, 24 nt, Artificial Sequence
  Synthetic
ccacaggcagcaggaauaaugugg

SEQ ID NO: 332962 - RNA, 18 nt, Artificial Sequence
  Synthetic
auacuaucaggcaugugg

SEQ ID NO: 332963 - RNA, 19 nt, Artificial Sequence
  Synthetic
uauacuaucaggcaugugg

SEQ ID NO: 332964 - RNA, 20 nt, Artificial Sequence
  Synthetic
guauacuaucaggcaugugg

SEQ ID NO: 332965 - RNA, 21 nt, Artificial Sequence
  Synthetic
aguauacuaucaggcaugugg

SEQ ID NO: 332966 - RNA, 22 nt, Artificial Sequence
  Synthetic
gaguauacuaucaggcaugugg

SEQ ID NO: 332967 - RNA, 23 nt, Artificial Sequence
  Synthetic
ugaguauacuaucaggcaugugg

SEQ ID NO: 332968 - RNA, 24 nt, Artificial Sequence
  Synthetic
uugaguauacuaucaggcaugugg

SEQ ID NO: 332969 - RNA, 18 nt, Artificial Sequence
  Synthetic
uucauuggccucaugugg

SEQ ID NO: 332970 - RNA, 19 nt, Artificial Sequence
  Synthetic
cuucauuggccucaugugg

SEQ ID NO: 332971 - RNA, 20 nt, Artificial Sequence
  Synthetic
ucuucauuggccucaugugg

SEQ ID NO: 332972 - RNA, 21 nt, Artificial Sequence
  Synthetic
aucuucauuggccucaugugg

SEQ ID NO: 332973 - RNA, 22 nt, Artificial Sequence
  Synthetic
caucuucauuggccucaugugg

SEQ ID NO: 332974 - RNA, 23 nt, Artificial Sequence
  Synthetic
ucaucuucauuggccucaugugg

SEQ ID NO: 332975 - RNA, 24 nt, Artificial Sequence
  Synthetic
uucaucuucauuggccucaugugg

SEQ ID NO: 332976 - RNA, 18 nt, Artificial Sequence
  Synthetic
aagucacugcagaugugg

SEQ ID NO: 332977 - RNA, 19 nt, Artificial Sequence
  Synthetic
gaagucacugcagaugugg

SEQ ID NO: 332978 - RNA, 20 nt, Artificial Sequence
  Synthetic
agaagucacugcagaugugg

SEQ ID NO: 332979 - RNA, 21 nt, Artificial Sequence
  Synthetic
aagaagucacugcagaugugg

SEQ ID NO: 332980 - RNA, 22 nt, Artificial Sequence
  Synthetic
gaagaagucacugcagaugugg

SEQ ID NO: 332981 - RNA, 23 nt, Artificial Sequence
  Synthetic
agaagaagucacugcagaugugg

SEQ ID NO: 332982 - RNA, 24 nt, Artificial Sequence
  Synthetic
uagaagaagucacugcagaugugg

SEQ ID NO: 332983 - RNA, 18 nt, Artificial Sequence
  Synthetic
cuaaacaaccggaugugg

SEQ ID NO: 332984 - RNA, 19 nt, Artificial Sequence
  Synthetic
gcuaaacaaccggaugugg

SEQ ID NO: 332985 - RNA, 20 nt, Artificial Sequence
  Synthetic
agcuaaacaaccggaugugg

SEQ ID NO: 332986 - RNA, 21 nt, Artificial Sequence
  Synthetic
aagcuaaacaaccggaugugg

SEQ ID NO: 332987 - RNA, 22 nt, Artificial Sequence
  Synthetic
caagcuaaacaaccggaugugg

SEQ ID NO: 332988 - RNA, 23 nt, Artificial Sequence
  Synthetic
ucaagcuaaacaaccggaugugg

SEQ ID NO: 332989 - RNA, 24 nt, Artificial Sequence
  Synthetic
uucaagcuaaacaaccggaugugg

SEQ ID NO: 332990 - RNA, 18 nt, Artificial Sequence
  Synthetic
aaaaauaguuggaugugg

SEQ ID NO: 332991 - RNA, 19 nt, Artificial Sequence
  Synthetic
aaaaaauaguuggaugugg

SEQ ID NO: 332992 - RNA, 20 nt, Artificial Sequence
  Synthetic
uaaaaaauaguuggaugugg

SEQ ID NO: 332993 - RNA, 21 nt, Artificial Sequence
  Synthetic
uuaaaaaauaguuggaugugg

SEQ ID NO: 332994 - RNA, 22 nt, Artificial Sequence
  Synthetic
uuuaaaaaauaguuggaugugg

SEQ ID NO: 332995 - RNA, 23 nt, Artificial Sequence
  Synthetic
uuuuaaaaaauaguuggaugugg

SEQ ID NO: 332996 - RNA, 24 nt, Artificial Sequence
  Synthetic
uuuuuaaaaaauaguuggaugugg

SEQ ID NO: 332997 - RNA, 18 nt, Artificial Sequence
  Synthetic
cuugagugauauaugugg

SEQ ID NO: 332998 - RNA, 19 nt, Artificial Sequence
  Synthetic
ccuugagugauauaugugg

SEQ ID NO: 332999 - RNA, 20 nt, Artificial Sequence
  Synthetic
uccuugagugauauaugugg

SEQ ID NO: 333000 - RNA, 21 nt, Artificial Sequence
  Synthetic
cuccuugagugauauaugugg

SEQ ID NO: 333001 - RNA, 22 nt, Artificial Sequence
  Synthetic
ucuccuugagugauauaugugg

SEQ ID NO: 333002 - RNA, 23 nt, Artificial Sequence
  Synthetic
cucuccuugagugauauaugugg

SEQ ID NO: 333003 - RNA, 24 nt, Artificial Sequence
  Synthetic
acucuccuugagugauauaugugg

SEQ ID NO: 333004 - RNA, 18 nt, Artificial Sequence
  Synthetic
gagagagggaguaugugg

SEQ ID NO: 333005 - RNA, 19 nt, Artificial Sequence
  Synthetic
agagagagggaguaugugg

SEQ ID NO: 333006 - RNA, 20 nt, Artificial Sequence
  Synthetic
aagagagagggaguaugugg

SEQ ID NO: 333007 - RNA, 21 nt, Artificial Sequence
  Synthetic
aaagagagagggaguaugugg

SEQ ID NO: 333008 - RNA, 22 nt, Artificial Sequence
  Synthetic
caaagagagagggaguaugugg

SEQ ID NO: 333009 - RNA, 23 nt, Artificial Sequence
  Synthetic
acaaagagagagggaguaugugg

SEQ ID NO: 333010 - RNA, 24 nt, Artificial Sequence
  Synthetic
cacaaagagagagggaguaugugg

SEQ ID NO: 333011 - RNA, 18 nt, Artificial Sequence
  Synthetic
gguuuuauauguaugugg

SEQ ID NO: 333012 - RNA, 19 nt, Artificial Sequence
  Synthetic
ugguuuuauauguaugugg

SEQ ID NO: 333013 - RNA, 20 nt, Artificial Sequence
  Synthetic
augguuuuauauguaugugg

SEQ ID NO: 333014 - RNA, 21 nt, Artificial Sequence
  Synthetic
caugguuuuauauguaugugg

SEQ ID NO: 333015 - RNA, 22 nt, Artificial Sequence
  Synthetic
acaugguuuuauauguaugugg

SEQ ID NO: 333016 - RNA, 23 nt, Artificial Sequence
  Synthetic
gacaugguuuuauauguaugugg

SEQ ID NO: 333017 - RNA, 24 nt, Artificial Sequence
  Synthetic
ugacaugguuuuauauguaugugg

SEQ ID NO: 333018 - RNA, 18 nt, Artificial Sequence
  Synthetic
aaaagaaggcaacugugg

SEQ ID NO: 333019 - RNA, 19 nt, Artificial Sequence
  Synthetic
gaaaagaaggcaacugugg

SEQ ID NO: 333020 - RNA, 20 nt, Artificial Sequence
  Synthetic
ggaaaagaaggcaacugugg

SEQ ID NO: 333021 - RNA, 21 nt, Artificial Sequence
  Synthetic
aggaaaagaaggcaacugugg

SEQ ID NO: 333022 - RNA, 22 nt, Artificial Sequence
  Synthetic
aaggaaaagaaggcaacugugg

SEQ ID NO: 333023 - RNA, 23 nt, Artificial Sequence
  Synthetic
gaaggaaaagaaggcaacugugg

SEQ ID NO: 333024 - RNA, 24 nt, Artificial Sequence
  Synthetic
ugaaggaaaagaaggcaacugugg

SEQ ID NO: 333025 - RNA, 18 nt, Artificial Sequence
  Synthetic
caaacuguuucacugugg

SEQ ID NO: 333026 - RNA, 19 nt, Artificial Sequence
  Synthetic
ucaaacuguuucacugugg

SEQ ID NO: 333027 - RNA, 20 nt, Artificial Sequence
  Synthetic
uucaaacuguuucacugugg

SEQ ID NO: 333028 - RNA, 21 nt, Artificial Sequence
  Synthetic
cuucaaacuguuucacugugg

SEQ ID NO: 333029 - RNA, 22 nt, Artificial Sequence
  Synthetic
ucuucaaacuguuucacugugg

SEQ ID NO: 333030 - RNA, 23 nt, Artificial Sequence
  Synthetic
aucuucaaacuguuucacugugg

SEQ ID NO: 333031 - RNA, 24 nt, Artificial Sequence
  Synthetic
aaucuucaaacuguuucacugugg

SEQ ID NO: 333032 - RNA, 18 nt, Artificial Sequence
  Synthetic
gucaagagaugacugugg

SEQ ID NO: 333033 - RNA, 19 nt, Artificial Sequence
  Synthetic
agucaagagaugacugugg

SEQ ID NO: 333034 - RNA, 20 nt, Artificial Sequence
  Synthetic
cagucaagagaugacugugg

SEQ ID NO: 333035 - RNA, 21 nt, Artificial Sequence
  Synthetic
ucagucaagagaugacugugg

SEQ ID NO: 333036 - RNA, 22 nt, Artificial Sequence
  Synthetic
uucagucaagagaugacugugg

SEQ ID NO: 333037 - RNA, 23 nt, Artificial Sequence
  Synthetic
auucagucaagagaugacugugg

SEQ ID NO: 333038 - RNA, 24 nt, Artificial Sequence
  Synthetic
aauucagucaagagaugacugugg

SEQ ID NO: 333039 - RNA, 18 nt, Artificial Sequence
  Synthetic
ugccccauccuacugugg

SEQ ID NO: 333040 - RNA, 19 nt, Artificial Sequence
  Synthetic
augccccauccuacugugg

SEQ ID NO: 333041 - RNA, 20 nt, Artificial Sequence
  Synthetic
caugccccauccuacugugg

SEQ ID NO: 333042 - RNA, 21 nt, Artificial Sequence
  Synthetic
ccaugccccauccuacugugg

SEQ ID NO: 333043 - RNA, 22 nt, Artificial Sequence
  Synthetic
cccaugccccauccuacugugg

SEQ ID NO: 333044 - RNA, 23 nt, Artificial Sequence
  Synthetic
gcccaugccccauccuacugugg

SEQ ID NO: 333045 - RNA, 24 nt, Artificial Sequence
  Synthetic
ugcccaugccccauccuacugugg

SEQ ID NO: 333046 - RNA, 18 nt, Artificial Sequence
  Synthetic
uugaauccuagccugugg

SEQ ID NO: 333047 - RNA, 19 nt, Artificial Sequence
  Synthetic
uuugaauccuagccugugg

SEQ ID NO: 333048 - RNA, 20 nt, Artificial Sequence
  Synthetic
cuuugaauccuagccugugg

SEQ ID NO: 333049 - RNA, 21 nt, Artificial Sequence
  Synthetic
acuuugaauccuagccugugg

SEQ ID NO: 333050 - RNA, 22 nt, Artificial Sequence
  Synthetic
gacuuugaauccuagccugugg

SEQ ID NO: 333051 - RNA, 23 nt, Artificial Sequence
  Synthetic
ugacuuugaauccuagccugugg

SEQ ID NO: 333052 - RNA, 24 nt, Artificial Sequence
  Synthetic
cugacuuugaauccuagccugugg

SEQ ID NO: 333053 - RNA, 18 nt, Artificial Sequence
  Synthetic
cguaaugcuuuccugugg

SEQ ID NO: 333054 - RNA, 19 nt, Artificial Sequence
  Synthetic
acguaaugcuuuccugugg

SEQ ID NO: 333055 - RNA, 20 nt, Artificial Sequence
  Synthetic
gacguaaugcuuuccugugg

SEQ ID NO: 333056 - RNA, 21 nt, Artificial Sequence
  Synthetic
agacguaaugcuuuccugugg

SEQ ID NO: 333057 - RNA, 22 nt, Artificial Sequence
  Synthetic
aagacguaaugcuuuccugugg

SEQ ID NO: 333058 - RNA, 23 nt, Artificial Sequence
  Synthetic
aaagacguaaugcuuuccugugg

SEQ ID NO: 333059 - RNA, 24 nt, Artificial Sequence
  Synthetic
aaaagacguaaugcuuuccugugg

SEQ ID NO: 333060 - RNA, 18 nt, Artificial Sequence
  Synthetic
caucuuaagaggcugugg

SEQ ID NO: 333061 - RNA, 19 nt, Artificial Sequence
  Synthetic
gcaucuuaagaggcugugg

SEQ ID NO: 333062 - RNA, 20 nt, Artificial Sequence
  Synthetic
ugcaucuuaagaggcugugg

SEQ ID NO: 333063 - RNA, 21 nt, Artificial Sequence
  Synthetic
cugcaucuuaagaggcugugg

SEQ ID NO: 333064 - RNA, 22 nt, Artificial Sequence
  Synthetic
ucugcaucuuaagaggcugugg

SEQ ID NO: 333065 - RNA, 23 nt, Artificial Sequence
  Synthetic
uucugcaucuuaagaggcugugg

SEQ ID NO: 333066 - RNA, 24 nt, Artificial Sequence
  Synthetic
auucugcaucuuaagaggcugugg

SEQ ID NO: 333067 - RNA, 18 nt, Artificial Sequence
  Synthetic
uguagcaaaaugcugugg

SEQ ID NO: 333068 - RNA, 19 nt, Artificial Sequence
  Synthetic
cuguagcaaaaugcugugg

SEQ ID NO: 333069 - RNA, 20 nt, Artificial Sequence
  Synthetic
ucuguagcaaaaugcugugg

SEQ ID NO: 333070 - RNA, 21 nt, Artificial Sequence
  Synthetic
uucuguagcaaaaugcugugg

SEQ ID NO: 333071 - RNA, 22 nt, Artificial Sequence
  Synthetic
auucuguagcaaaaugcugugg

SEQ ID NO: 333072 - RNA, 23 nt, Artificial Sequence
  Synthetic
cauucuguagcaaaaugcugugg

SEQ ID NO: 333073 - RNA, 24 nt, Artificial Sequence
  Synthetic
gcauucuguagcaaaaugcugugg

SEQ ID NO: 333074 - RNA, 18 nt, Artificial Sequence
  Synthetic
ccauucuucaugcugugg

SEQ ID NO: 333075 - RNA, 19 nt, Artificial Sequence
  Synthetic
gccauucuucaugcugugg

SEQ ID NO: 333076 - RNA, 20 nt, Artificial Sequence
  Synthetic
ugccauucuucaugcugugg

SEQ ID NO: 333077 - RNA, 21 nt, Artificial Sequence
  Synthetic
cugccauucuucaugcugugg

SEQ ID NO: 333078 - RNA, 22 nt, Artificial Sequence
  Synthetic
ucugccauucuucaugcugugg

SEQ ID NO: 333079 - RNA, 23 nt, Artificial Sequence
  Synthetic
aucugccauucuucaugcugugg

SEQ ID NO: 333080 - RNA, 24 nt, Artificial Sequence
  Synthetic
gaucugccauucuucaugcugugg

SEQ ID NO: 333081 - RNA, 18 nt, Artificial Sequence
  Synthetic
uucucugccuuucugugg

SEQ ID NO: 333082 - RNA, 19 nt, Artificial Sequence
  Synthetic
cuucucugccuuucugugg

SEQ ID NO: 333083 - RNA, 20 nt, Artificial Sequence
  Synthetic
gcuucucugccuuucugugg

SEQ ID NO: 333084 - RNA, 21 nt, Artificial Sequence
  Synthetic
ugcuucucugccuuucugugg

SEQ ID NO: 333085 - RNA, 22 nt, Artificial Sequence
  Synthetic
cugcuucucugccuuucugugg

SEQ ID NO: 333086 - RNA, 23 nt, Artificial Sequence
  Synthetic
ccugcuucucugccuuucugugg

SEQ ID NO: 333087 - RNA, 24 nt, Artificial Sequence
  Synthetic
gccugcuucucugccuuucugugg

SEQ ID NO: 333088 - RNA, 18 nt, Artificial Sequence
  Synthetic
augguuggccaagugugg

SEQ ID NO: 333089 - RNA, 19 nt, Artificial Sequence
  Synthetic
caugguuggccaagugugg

SEQ ID NO: 333090 - RNA, 20 nt, Artificial Sequence
  Synthetic
gcaugguuggccaagugugg

SEQ ID NO: 333091 - RNA, 21 nt, Artificial Sequence
  Synthetic
ggcaugguuggccaagugugg

SEQ ID NO: 333092 - RNA, 22 nt, Artificial Sequence
  Synthetic
uggcaugguuggccaagugugg

SEQ ID NO: 333093 - RNA, 23 nt, Artificial Sequence
  Synthetic
uuggcaugguuggccaagugugg

SEQ ID NO: 333094 - RNA, 24 nt, Artificial Sequence
  Synthetic
uuuggcaugguuggccaagugugg

SEQ ID NO: 333095 - RNA, 18 nt, Artificial Sequence
  Synthetic
gucauacacacagugugg

SEQ ID NO: 333096 - RNA, 19 nt, Artificial Sequence
  Synthetic
ggucauacacacagugugg

SEQ ID NO: 333097 - RNA, 20 nt, Artificial Sequence
  Synthetic
uggucauacacacagugugg

SEQ ID NO: 333098 - RNA, 21 nt, Artificial Sequence
  Synthetic
auggucauacacacagugugg

SEQ ID NO: 333099 - RNA, 22 nt, Artificial Sequence
  Synthetic
gauggucauacacacagugugg

SEQ ID NO: 333100 - RNA, 23 nt, Artificial Sequence
  Synthetic
agauggucauacacacagugugg

SEQ ID NO: 333101 - RNA, 24 nt, Artificial Sequence
  Synthetic
cagauggucauacacacagugugg

SEQ ID NO: 333102 - RNA, 18 nt, Artificial Sequence
  Synthetic
guggugaccacagugugg

SEQ ID NO: 333103 - RNA, 19 nt, Artificial Sequence
  Synthetic
uguggugaccacagugugg

SEQ ID NO: 333104 - RNA, 20 nt, Artificial Sequence
  Synthetic
guguggugaccacagugugg

SEQ ID NO: 333105 - RNA, 21 nt, Artificial Sequence
  Synthetic
gguguggugaccacagugugg

SEQ ID NO: 333106 - RNA, 22 nt, Artificial Sequence
  Synthetic
ggguguggugaccacagugugg

SEQ ID NO: 333107 - RNA, 23 nt, Artificial Sequence
  Synthetic
uggguguggugaccacagugugg

SEQ ID NO: 333108 - RNA, 24 nt, Artificial Sequence
  Synthetic
auggguguggugaccacagugugg

SEQ ID NO: 333109 - RNA, 18 nt, Artificial Sequence
  Synthetic
uuaaaauaugaggugugg

SEQ ID NO: 333110 - RNA, 19 nt, Artificial Sequence
  Synthetic
auuaaaauaugaggugugg

SEQ ID NO: 333111 - RNA, 20 nt, Artificial Sequence
  Synthetic
uauuaaaauaugaggugugg

SEQ ID NO: 333112 - RNA, 21 nt, Artificial Sequence
  Synthetic
uuauuaaaauaugaggugugg

SEQ ID NO: 333113 - RNA, 22 nt, Artificial Sequence
  Synthetic
uuuauuaaaauaugaggugugg

SEQ ID NO: 333114 - RNA, 23 nt, Artificial Sequence
  Synthetic
uuuuauuaaaauaugaggugugg

SEQ ID NO: 333115 - RNA, 24 nt, Artificial Sequence
  Synthetic
uuuuuauuaaaauaugaggugugg

SEQ ID NO: 333116 - RNA, 18 nt, Artificial Sequence
  Synthetic
caauagacaugggugugg

SEQ ID NO: 333117 - RNA, 19 nt, Artificial Sequence
  Synthetic
acaauagacaugggugugg

SEQ ID NO: 333118 - RNA, 20 nt, Artificial Sequence
  Synthetic
cacaauagacaugggugugg

SEQ ID NO: 333119 - RNA, 21 nt, Artificial Sequence
  Synthetic
gcacaauagacaugggugugg

SEQ ID NO: 333120 - RNA, 22 nt, Artificial Sequence
  Synthetic
ugcacaauagacaugggugugg

SEQ ID NO: 333121 - RNA, 23 nt, Artificial Sequence
  Synthetic
augcacaauagacaugggugugg

SEQ ID NO: 333122 - RNA, 24 nt, Artificial Sequence
  Synthetic
aaugcacaauagacaugggugugg

SEQ ID NO: 333123 - RNA, 18 nt, Artificial Sequence
  Synthetic
guuuaugagugggugugg

SEQ ID NO: 333124 - RNA, 19 nt, Artificial Sequence
  Synthetic
uguuuaugagugggugugg

SEQ ID NO: 333125 - RNA, 20 nt, Artificial Sequence
  Synthetic
auguuuaugagugggugugg

SEQ ID NO: 333126 - RNA, 21 nt, Artificial Sequence
  Synthetic
aauguuuaugagugggugugg

SEQ ID NO: 333127 - RNA, 22 nt, Artificial Sequence
  Synthetic
uaauguuuaugagugggugugg

SEQ ID NO: 333128 - RNA, 23 nt, Artificial Sequence
  Synthetic
uuaauguuuaugagugggugugg

SEQ ID NO: 333129 - RNA, 24 nt, Artificial Sequence
  Synthetic
cuuaauguuuaugagugggugugg

SEQ ID NO: 333130 - RNA, 18 nt, Artificial Sequence
  Synthetic
cuuucugauucugugugg

SEQ ID NO: 333131 - RNA, 19 nt, Artificial Sequence
  Synthetic
ucuuucugauucugugugg

SEQ ID NO: 333132 - RNA, 20 nt, Artificial Sequence
  Synthetic
cucuuucugauucugugugg

SEQ ID NO: 333133 - RNA, 21 nt, Artificial Sequence
  Synthetic
ucucuuucugauucugugugg

SEQ ID NO: 333134 - RNA, 22 nt, Artificial Sequence
  Synthetic
aucucuuucugauucugugugg

SEQ ID NO: 333135 - RNA, 23 nt, Artificial Sequence
  Synthetic
caucucuuucugauucugugugg

SEQ ID NO: 333136 - RNA, 24 nt, Artificial Sequence
  Synthetic
ucaucucuuucugauucugugugg

SEQ ID NO: 333137 - RNA, 18 nt, Artificial Sequence
  Synthetic
acucacaguucugugugg

SEQ ID NO: 333138 - RNA, 19 nt, Artificial Sequence
  Synthetic
gacucacaguucugugugg

SEQ ID NO: 333139 - RNA, 20 nt, Artificial Sequence
  Synthetic
ugacucacaguucugugugg

SEQ ID NO: 333140 - RNA, 21 nt, Artificial Sequence
  Synthetic
uugacucacaguucugugugg

SEQ ID NO: 333141 - RNA, 22 nt, Artificial Sequence
  Synthetic
guugacucacaguucugugugg

SEQ ID NO: 333142 - RNA, 23 nt, Artificial Sequence
  Synthetic
aguugacucacaguucugugugg

SEQ ID NO: 333143 - RNA, 24 nt, Artificial Sequence
  Synthetic
uaguugacucacaguucugugugg

SEQ ID NO: 333144 - RNA, 18 nt, Artificial Sequence
  Synthetic
acauuaagucgugugugg

SEQ ID NO: 333145 - RNA, 19 nt, Artificial Sequence
  Synthetic
uacauuaagucgugugugg

SEQ ID NO: 333146 - RNA, 20 nt, Artificial Sequence
  Synthetic
uuacauuaagucgugugugg

SEQ ID NO: 333147 - RNA, 21 nt, Artificial Sequence
  Synthetic
auuacauuaagucgugugugg

SEQ ID NO: 333148 - RNA, 22 nt, Artificial Sequence
  Synthetic
cauuacauuaagucgugugugg

SEQ ID NO: 333149 - RNA, 23 nt, Artificial Sequence
  Synthetic
gcauuacauuaagucgugugugg

SEQ ID NO: 333150 - RNA, 24 nt, Artificial Sequence
  Synthetic
agcauuacauuaagucgugugugg

SEQ ID NO: 333151 - RNA, 18 nt, Artificial Sequence
  Synthetic
cauggugugugugugugg

SEQ ID NO: 333152 - RNA, 19 nt, Artificial Sequence
  Synthetic
ccauggugugugugugugg

SEQ ID NO: 333153 - RNA, 20 nt, Artificial Sequence
  Synthetic
accauggugugugugugugg

SEQ ID NO: 333154 - RNA, 21 nt, Artificial Sequence
  Synthetic
uaccauggugugugugugugg

SEQ ID NO: 333155 - RNA, 22 nt, Artificial Sequence
  Synthetic
auaccauggugugugugugugg

SEQ ID NO: 333156 - RNA, 23 nt, Artificial Sequence
  Synthetic
aauaccauggugugugugugugg

SEQ ID NO: 333157 - RNA, 24 nt, Artificial Sequence
  Synthetic
aaauaccauggugugugugugugg

SEQ ID NO: 333158 - RNA, 18 nt, Artificial Sequence
  Synthetic
ucuaaaaaacaauugugg

SEQ ID NO: 333159 - RNA, 19 nt, Artificial Sequence
  Synthetic
aucuaaaaaacaauugugg

SEQ ID NO: 333160 - RNA, 20 nt, Artificial Sequence
  Synthetic
aaucuaaaaaacaauugugg

SEQ ID NO: 333161 - RNA, 21 nt, Artificial Sequence
  Synthetic
aaaucuaaaaaacaauugugg

SEQ ID NO: 333162 - RNA, 22 nt, Artificial Sequence
  Synthetic
uaaaucuaaaaaacaauugugg

SEQ ID NO: 333163 - RNA, 23 nt, Artificial Sequence
  Synthetic
guaaaucuaaaaaacaauugugg

SEQ ID NO: 333164 - RNA, 24 nt, Artificial Sequence
  Synthetic
cguaaaucuaaaaaacaauugugg

SEQ ID NO: 333165 - RNA, 18 nt, Artificial Sequence
  Synthetic
augcagccuguauugugg

SEQ ID NO: 333166 - RNA, 19 nt, Artificial Sequence
  Synthetic
caugcagccuguauugugg

SEQ ID NO: 333167 - RNA, 20 nt, Artificial Sequence
  Synthetic
acaugcagccuguauugugg

SEQ ID NO: 333168 - RNA, 21 nt, Artificial Sequence
  Synthetic
gacaugcagccuguauugugg

SEQ ID NO: 333169 - RNA, 22 nt, Artificial Sequence
  Synthetic
cgacaugcagccuguauugugg

SEQ ID NO: 333170 - RNA, 23 nt, Artificial Sequence
  Synthetic
acgacaugcagccuguauugugg

SEQ ID NO: 333171 - RNA, 24 nt, Artificial Sequence
  Synthetic
cacgacaugcagccuguauugugg

SEQ ID NO: 333172 - RNA, 18 nt, Artificial Sequence
  Synthetic
uucucuaaguuauugugg

SEQ ID NO: 333173 - RNA, 19 nt, Artificial Sequence
  Synthetic
uuucucuaaguuauugugg

SEQ ID NO: 333174 - RNA, 20 nt, Artificial Sequence
  Synthetic
uuuucucuaaguuauugugg

SEQ ID NO: 333175 - RNA, 21 nt, Artificial Sequence
  Synthetic
uuuuucucuaaguuauugugg

SEQ ID NO: 333176 - RNA, 22 nt, Artificial Sequence
  Synthetic
guuuuucucuaaguuauugugg

SEQ ID NO: 333177 - RNA, 23 nt, Artificial Sequence
  Synthetic
uguuuuucucuaaguuauugugg

SEQ ID NO: 333178 - RNA, 24 nt, Artificial Sequence
  Synthetic
cuguuuuucucuaaguuauugugg

SEQ ID NO: 333179 - RNA, 18 nt, Artificial Sequence
  Synthetic
uuuauuauuuccuugugg

SEQ ID NO: 333180 - RNA, 19 nt, Artificial Sequence
  Synthetic
auuuauuauuuccuugugg

SEQ ID NO: 333181 - RNA, 20 nt, Artificial Sequence
  Synthetic
aauuuauuauuuccuugugg

SEQ ID NO: 333182 - RNA, 21 nt, Artificial Sequence
  Synthetic
gaauuuauuauuuccuugugg

SEQ ID NO: 333183 - RNA, 22 nt, Artificial Sequence
  Synthetic
agaauuuauuauuuccuugugg

SEQ ID NO: 333184 - RNA, 23 nt, Artificial Sequence
  Synthetic
cagaauuuauuauuuccuugugg

SEQ ID NO: 333185 - RNA, 24 nt, Artificial Sequence
  Synthetic
ucagaauuuauuauuuccuugugg

SEQ ID NO: 333186 - RNA, 18 nt, Artificial Sequence
  Synthetic
cuuaggguuugcuugugg

SEQ ID NO: 333187 - RNA, 19 nt, Artificial Sequence
  Synthetic
acuuaggguuugcuugugg

SEQ ID NO: 333188 - RNA, 20 nt, Artificial Sequence
  Synthetic
cacuuaggguuugcuugugg

SEQ ID NO: 333189 - RNA, 21 nt, Artificial Sequence
  Synthetic
ccacuuaggguuugcuugugg

SEQ ID NO: 333190 - RNA, 22 nt, Artificial Sequence
  Synthetic
cccacuuaggguuugcuugugg

SEQ ID NO: 333191 - RNA, 23 nt, Artificial Sequence
  Synthetic
ucccacuuaggguuugcuugugg

SEQ ID NO: 333192 - RNA, 24 nt, Artificial Sequence
  Synthetic
cucccacuuaggguuugcuugugg

SEQ ID NO: 333193 - RNA, 18 nt, Artificial Sequence
  Synthetic
gcagauucaaucuugugg

SEQ ID NO: 333194 - RNA, 19 nt, Artificial Sequence
  Synthetic
agcagauucaaucuugugg

SEQ ID NO: 333195 - RNA, 20 nt, Artificial Sequence
  Synthetic
cagcagauucaaucuugugg

SEQ ID NO: 333196 - RNA, 21 nt, Artificial Sequence
  Synthetic
acagcagauucaaucuugugg

SEQ ID NO: 333197 - RNA, 22 nt, Artificial Sequence
  Synthetic
aacagcagauucaaucuugugg

SEQ ID NO: 333198 - RNA, 23 nt, Artificial Sequence
  Synthetic
aaacagcagauucaaucuugugg

SEQ ID NO: 333199 - RNA, 24 nt, Artificial Sequence
  Synthetic
aaaacagcagauucaaucuugugg

SEQ ID NO: 333200 - RNA, 18 nt, Artificial Sequence
  Synthetic
guuuauggagucuugugg

SEQ ID NO: 333201 - RNA, 19 nt, Artificial Sequence
  Synthetic
aguuuauggagucuugugg

SEQ ID NO: 333202 - RNA, 20 nt, Artificial Sequence
  Synthetic
uaguuuauggagucuugugg

SEQ ID NO: 333203 - RNA, 21 nt, Artificial Sequence
  Synthetic
uuaguuuauggagucuugugg

SEQ ID NO: 333204 - RNA, 22 nt, Artificial Sequence
  Synthetic
uuuaguuuauggagucuugugg

SEQ ID NO: 333205 - RNA, 23 nt, Artificial Sequence
  Synthetic
cuuuaguuuauggagucuugugg

SEQ ID NO: 333206 - RNA, 24 nt, Artificial Sequence
  Synthetic
ucuuuaguuuauggagucuugugg

SEQ ID NO: 333207 - RNA, 18 nt, Artificial Sequence
  Synthetic
ucugauuauuucuugugg

SEQ ID NO: 333208 - RNA, 19 nt, Artificial Sequence
  Synthetic
uucugauuauuucuugugg

SEQ ID NO: 333209 - RNA, 20 nt, Artificial Sequence
  Synthetic
uuucugauuauuucuugugg

SEQ ID NO: 333210 - RNA, 21 nt, Artificial Sequence
  Synthetic
cuuucugauuauuucuugugg

SEQ ID NO: 333211 - RNA, 22 nt, Artificial Sequence
  Synthetic
ucuuucugauuauuucuugugg

SEQ ID NO: 333212 - RNA, 23 nt, Artificial Sequence
  Synthetic
gucuuucugauuauuucuugugg

SEQ ID NO: 333213 - RNA, 24 nt, Artificial Sequence
  Synthetic
ugucuuucugauuauuucuugugg

SEQ ID NO: 333214 - RNA, 18 nt, Artificial Sequence
  Synthetic
uucaagcauauguugugg

SEQ ID NO: 333215 - RNA, 19 nt, Artificial Sequence
  Synthetic
uuucaagcauauguugugg

SEQ ID NO: 333216 - RNA, 20 nt, Artificial Sequence
  Synthetic
cuuucaagcauauguugugg

SEQ ID NO: 333217 - RNA, 21 nt, Artificial Sequence
  Synthetic
ucuuucaagcauauguugugg

SEQ ID NO: 333218 - RNA, 22 nt, Artificial Sequence
  Synthetic
uucuuucaagcauauguugugg

SEQ ID NO: 333219 - RNA, 23 nt, Artificial Sequence
  Synthetic
uuucuuucaagcauauguugugg

SEQ ID NO: 333220 - RNA, 24 nt, Artificial Sequence
  Synthetic
uuuucuuucaagcauauguugugg

SEQ ID NO: 333221 - RNA, 18 nt, Artificial Sequence
  Synthetic
aauucccauguguugugg

SEQ ID NO: 333222 - RNA, 19 nt, Artificial Sequence
  Synthetic
uaauucccauguguugugg

SEQ ID NO: 333223 - RNA, 20 nt, Artificial Sequence
  Synthetic
guaauucccauguguugugg

SEQ ID NO: 333224 - RNA, 21 nt, Artificial Sequence
  Synthetic
uguaauucccauguguugugg

SEQ ID NO: 333225 - RNA, 22 nt, Artificial Sequence
  Synthetic
cuguaauucccauguguugugg

SEQ ID NO: 333226 - RNA, 23 nt, Artificial Sequence
  Synthetic
ccuguaauucccauguguugugg

SEQ ID NO: 333227 - RNA, 24 nt, Artificial Sequence
  Synthetic
cccuguaauucccauguguugugg

SEQ ID NO: 333228 - RNA, 18 nt, Artificial Sequence
  Synthetic
aauuccuacuuguugugg

SEQ ID NO: 333229 - RNA, 19 nt, Artificial Sequence
  Synthetic
uaauuccuacuuguugugg

SEQ ID NO: 333230 - RNA, 20 nt, Artificial Sequence
  Synthetic
auaauuccuacuuguugugg

SEQ ID NO: 333231 - RNA, 21 nt, Artificial Sequence
  Synthetic
cauaauuccuacuuguugugg

SEQ ID NO: 333232 - RNA, 22 nt, Artificial Sequence
  Synthetic
ccauaauuccuacuuguugugg

SEQ ID NO: 333233 - RNA, 23 nt, Artificial Sequence
  Synthetic
cccauaauuccuacuuguugugg

SEQ ID NO: 333234 - RNA, 24 nt, Artificial Sequence
  Synthetic
ucccauaauuccuacuuguugugg

SEQ ID NO: 333235 - RNA, 18 nt, Artificial Sequence
  Synthetic
gaggaagguuuguugugg

SEQ ID NO: 333236 - RNA, 19 nt, Artificial Sequence
  Synthetic
ggaggaagguuuguugugg

SEQ ID NO: 333237 - RNA, 20 nt, Artificial Sequence
  Synthetic
uggaggaagguuuguugugg

SEQ ID NO: 333238 - RNA, 21 nt, Artificial Sequence
  Synthetic
guggaggaagguuuguugugg

SEQ ID NO: 333239 - RNA, 22 nt, Artificial Sequence
  Synthetic
aguggaggaagguuuguugugg

SEQ ID NO: 333240 - RNA, 23 nt, Artificial Sequence
  Synthetic
uaguggaggaagguuuguugugg

SEQ ID NO: 333241 - RNA, 24 nt, Artificial Sequence
  Synthetic
uuaguggaggaagguuuguugugg

SEQ ID NO: 333242 - RNA, 18 nt, Artificial Sequence
  Synthetic
guggcagaacauuugugg

SEQ ID NO: 333243 - RNA, 19 nt, Artificial Sequence
  Synthetic
uguggcagaacauuugugg

SEQ ID NO: 333244 - RNA, 20 nt, Artificial Sequence
  Synthetic
guguggcagaacauuugugg

SEQ ID NO: 333245 - RNA, 21 nt, Artificial Sequence
  Synthetic
aguguggcagaacauuugugg

SEQ ID NO: 333246 - RNA, 22 nt, Artificial Sequence
  Synthetic
caguguggcagaacauuugugg

SEQ ID NO: 333247 - RNA, 23 nt, Artificial Sequence
  Synthetic
acaguguggcagaacauuugugg

SEQ ID NO: 333248 - RNA, 24 nt, Artificial Sequence
  Synthetic
cacaguguggcagaacauuugugg

SEQ ID NO: 333249 - RNA, 18 nt, Artificial Sequence
  Synthetic
uuacaucaauauuugugg

SEQ ID NO: 333250 - RNA, 19 nt, Artificial Sequence
  Synthetic
uuuacaucaauauuugugg

SEQ ID NO: 333251 - RNA, 20 nt, Artificial Sequence
  Synthetic
guuuacaucaauauuugugg

SEQ ID NO: 333252 - RNA, 21 nt, Artificial Sequence
  Synthetic
aguuuacaucaauauuugugg

SEQ ID NO: 333253 - RNA, 22 nt, Artificial Sequence
  Synthetic
aaguuuacaucaauauuugugg

SEQ ID NO: 333254 - RNA, 23 nt, Artificial Sequence
  Synthetic
aaaguuuacaucaauauuugugg

SEQ ID NO: 333255 - RNA, 24 nt, Artificial Sequence
  Synthetic
aaaaguuuacaucaauauuugugg

SEQ ID NO: 333256 - RNA, 18 nt, Artificial Sequence
  Synthetic
auaaagauguauuugugg

SEQ ID NO: 333257 - RNA, 19 nt, Artificial Sequence
  Synthetic
uauaaagauguauuugugg

SEQ ID NO: 333258 - RNA, 20 nt, Artificial Sequence
  Synthetic
auauaaagauguauuugugg

SEQ ID NO: 333259 - RNA, 21 nt, Artificial Sequence
  Synthetic
cauauaaagauguauuugugg

SEQ ID NO: 333260 - RNA, 22 nt, Artificial Sequence
  Synthetic
acauauaaagauguauuugugg

SEQ ID NO: 333261 - RNA, 23 nt, Artificial Sequence
  Synthetic
aacauauaaagauguauuugugg

SEQ ID NO: 333262 - RNA, 24 nt, Artificial Sequence
  Synthetic
aaacauauaaagauguauuugugg

SEQ ID NO: 333263 - RNA, 18 nt, Artificial Sequence
  Synthetic
auaacuuguuauuugugg

SEQ ID NO: 333264 - RNA, 19 nt, Artificial Sequence
  Synthetic
aauaacuuguuauuugugg

SEQ ID NO: 333265 - RNA, 20 nt, Artificial Sequence
  Synthetic
uaauaacuuguuauuugugg

SEQ ID NO: 333266 - RNA, 21 nt, Artificial Sequence
  Synthetic
uuaauaacuuguuauuugugg

SEQ ID NO: 333267 - RNA, 22 nt, Artificial Sequence
  Synthetic
cuuaauaacuuguuauuugugg

SEQ ID NO: 333268 - RNA, 23 nt, Artificial Sequence
  Synthetic
ccuuaauaacuuguuauuugugg

SEQ ID NO: 333269 - RNA, 24 nt, Artificial Sequence
  Synthetic
uccuuaauaacuuguuauuugugg

SEQ ID NO: 333270 - RNA, 18 nt, Artificial Sequence
  Synthetic
uuaauggugcguuugugg

SEQ ID NO: 333271 - RNA, 19 nt, Artificial Sequence
  Synthetic
uuuaauggugcguuugugg

SEQ ID NO: 333272 - RNA, 20 nt, Artificial Sequence
  Synthetic
guuuaauggugcguuugugg

SEQ ID NO: 333273 - RNA, 21 nt, Artificial Sequence
  Synthetic
gguuuaauggugcguuugugg

SEQ ID NO: 333274 - RNA, 22 nt, Artificial Sequence
  Synthetic
agguuuaauggugcguuugugg

SEQ ID NO: 333275 - RNA, 23 nt, Artificial Sequence
  Synthetic
cagguuuaauggugcguuugugg

SEQ ID NO: 333276 - RNA, 24 nt, Artificial Sequence
  Synthetic
acagguuuaauggugcguuugugg

SEQ ID NO: 333277 - RNA, 18 nt, Artificial Sequence
  Synthetic
cucaacaacauuuugugg

SEQ ID NO: 333278 - RNA, 19 nt, Artificial Sequence
  Synthetic
ucucaacaacauuuugugg

SEQ ID NO: 333279 - RNA, 20 nt, Artificial Sequence
  Synthetic
uucucaacaacauuuugugg

SEQ ID NO: 333280 - RNA, 21 nt, Artificial Sequence
  Synthetic
uuucucaacaacauuuugugg

SEQ ID NO: 333281 - RNA, 22 nt, Artificial Sequence
  Synthetic
auuucucaacaacauuuugugg

SEQ ID NO: 333282 - RNA, 23 nt, Artificial Sequence
  Synthetic
aauuucucaacaacauuuugugg

SEQ ID NO: 333283 - RNA, 24 nt, Artificial Sequence
  Synthetic
uaauuucucaacaacauuuugugg

SEQ ID NO: 333284 - RNA, 18 nt, Artificial Sequence
  Synthetic
ggauaccauugcaauugg

SEQ ID NO: 333285 - RNA, 19 nt, Artificial Sequence
  Synthetic
uggauaccauugcaauugg

SEQ ID NO: 333286 - RNA, 20 nt, Artificial Sequence
  Synthetic
auggauaccauugcaauugg

SEQ ID NO: 333287 - RNA, 21 nt, Artificial Sequence
  Synthetic
cauggauaccauugcaauugg

SEQ ID NO: 333288 - RNA, 22 nt, Artificial Sequence
  Synthetic
ccauggauaccauugcaauugg

SEQ ID NO: 333289 - RNA, 23 nt, Artificial Sequence
  Synthetic
accauggauaccauugcaauugg

SEQ ID NO: 333290 - RNA, 24 nt, Artificial Sequence
  Synthetic
uaccauggauaccauugcaauugg

SEQ ID NO: 333291 - RNA, 18 nt, Artificial Sequence
  Synthetic
ucaaagugauagaauugg

SEQ ID NO: 333292 - RNA, 19 nt, Artificial Sequence
  Synthetic
uucaaagugauagaauugg

SEQ ID NO: 333293 - RNA, 20 nt, Artificial Sequence
  Synthetic
guucaaagugauagaauugg

SEQ ID NO: 333294 - RNA, 21 nt, Artificial Sequence
  Synthetic
uguucaaagugauagaauugg

SEQ ID NO: 333295 - RNA, 22 nt, Artificial Sequence
  Synthetic
uuguucaaagugauagaauugg

SEQ ID NO: 333296 - RNA, 23 nt, Artificial Sequence
  Synthetic
auuguucaaagugauagaauugg

SEQ ID NO: 333297 - RNA, 24 nt, Artificial Sequence
  Synthetic
uauuguucaaagugauagaauugg

SEQ ID NO: 333298 - RNA, 18 nt, Artificial Sequence
  Synthetic
gugcuuuauacgaauugg

SEQ ID NO: 333299 - RNA, 19 nt, Artificial Sequence
  Synthetic
ugugcuuuauacgaauugg

SEQ ID NO: 333300 - RNA, 20 nt, Artificial Sequence
  Synthetic
cugugcuuuauacgaauugg

SEQ ID NO: 333301 - RNA, 21 nt, Artificial Sequence
  Synthetic
gcugugcuuuauacgaauugg

SEQ ID NO: 333302 - RNA, 22 nt, Artificial Sequence
  Synthetic
ugcugugcuuuauacgaauugg

SEQ ID NO: 333303 - RNA, 23 nt, Artificial Sequence
  Synthetic
gugcugugcuuuauacgaauugg

SEQ ID NO: 333304 - RNA, 24 nt, Artificial Sequence
  Synthetic
ugugcugugcuuuauacgaauugg

SEQ ID NO: 333305 - RNA, 18 nt, Artificial Sequence
  Synthetic
cacugaguauggaauugg

SEQ ID NO: 333306 - RNA, 19 nt, Artificial Sequence
  Synthetic
ccacugaguauggaauugg

SEQ ID NO: 333307 - RNA, 20 nt, Artificial Sequence
  Synthetic
gccacugaguauggaauugg

SEQ ID NO: 333308 - RNA, 21 nt, Artificial Sequence
  Synthetic
ugccacugaguauggaauugg

SEQ ID NO: 333309 - RNA, 22 nt, Artificial Sequence
  Synthetic
augccacugaguauggaauugg

SEQ ID NO: 333310 - RNA, 23 nt, Artificial Sequence
  Synthetic
aaugccacugaguauggaauugg

SEQ ID NO: 333311 - RNA, 24 nt, Artificial Sequence
  Synthetic
uaaugccacugaguauggaauugg

SEQ ID NO: 333312 - RNA, 18 nt, Artificial Sequence
  Synthetic
aaaagaaagaugaauugg

SEQ ID NO: 333313 - RNA, 19 nt, Artificial Sequence
  Synthetic
aaaaagaaagaugaauugg

SEQ ID NO: 333314 - RNA, 20 nt, Artificial Sequence
  Synthetic
uaaaaagaaagaugaauugg

SEQ ID NO: 333315 - RNA, 21 nt, Artificial Sequence
  Synthetic
auaaaaagaaagaugaauugg

SEQ ID NO: 333316 - RNA, 22 nt, Artificial Sequence
  Synthetic
uauaaaaagaaagaugaauugg

SEQ ID NO: 333317 - RNA, 23 nt, Artificial Sequence
  Synthetic
uuauaaaaagaaagaugaauugg

SEQ ID NO: 333318 - RNA, 24 nt, Artificial Sequence
  Synthetic
auuauaaaaagaaagaugaauugg

SEQ ID NO: 333319 - RNA, 18 nt, Artificial Sequence
  Synthetic
accuagaguuugaauugg

SEQ ID NO: 333320 - RNA, 19 nt, Artificial Sequence
  Synthetic
aaccuagaguuugaauugg

SEQ ID NO: 333321 - RNA, 20 nt, Artificial Sequence
  Synthetic
aaaccuagaguuugaauugg

SEQ ID NO: 333322 - RNA, 21 nt, Artificial Sequence
  Synthetic
uaaaccuagaguuugaauugg

SEQ ID NO: 333323 - RNA, 22 nt, Artificial Sequence
  Synthetic
guaaaccuagaguuugaauugg

SEQ ID NO: 333324 - RNA, 23 nt, Artificial Sequence
  Synthetic
gguaaaccuagaguuugaauugg

SEQ ID NO: 333325 - RNA, 24 nt, Artificial Sequence
  Synthetic
ugguaaaccuagaguuugaauugg

SEQ ID NO: 333326 - RNA, 18 nt, Artificial Sequence
  Synthetic
ggccauauguauaauugg

SEQ ID NO: 333327 - RNA, 19 nt, Artificial Sequence
  Synthetic
gggccauauguauaauugg

SEQ ID NO: 333328 - RNA, 20 nt, Artificial Sequence
  Synthetic
ugggccauauguauaauugg

SEQ ID NO: 333329 - RNA, 21 nt, Artificial Sequence
  Synthetic
gugggccauauguauaauugg

SEQ ID NO: 333330 - RNA, 22 nt, Artificial Sequence
  Synthetic
ugugggccauauguauaauugg

SEQ ID NO: 333331 - RNA, 23 nt, Artificial Sequence
  Synthetic
augugggccauauguauaauugg

SEQ ID NO: 333332 - RNA, 24 nt, Artificial Sequence
  Synthetic
gaugugggccauauguauaauugg

SEQ ID NO: 333333 - RNA, 18 nt, Artificial Sequence
  Synthetic
caauuuucagcuaauugg

SEQ ID NO: 333334 - RNA, 19 nt, Artificial Sequence
  Synthetic
gcaauuuucagcuaauugg

SEQ ID NO: 333335 - RNA, 20 nt, Artificial Sequence
  Synthetic
ugcaauuuucagcuaauugg

SEQ ID NO: 333336 - RNA, 21 nt, Artificial Sequence
  Synthetic
cugcaauuuucagcuaauugg

SEQ ID NO: 333337 - RNA, 22 nt, Artificial Sequence
  Synthetic
gcugcaauuuucagcuaauugg

SEQ ID NO: 333338 - RNA, 23 nt, Artificial Sequence
  Synthetic
ggcugcaauuuucagcuaauugg

SEQ ID NO: 333339 - RNA, 24 nt, Artificial Sequence
  Synthetic
gggcugcaauuuucagcuaauugg

SEQ ID NO: 333340 - RNA, 18 nt, Artificial Sequence
  Synthetic
ucaacaaggcuuaauugg

SEQ ID NO: 333341 - RNA, 19 nt, Artificial Sequence
  Synthetic
gucaacaaggcuuaauugg

SEQ ID NO: 333342 - RNA, 20 nt, Artificial Sequence
  Synthetic
agucaacaaggcuuaauugg

SEQ ID NO: 333343 - RNA, 21 nt, Artificial Sequence
  Synthetic
uagucaacaaggcuuaauugg

SEQ ID NO: 333344 - RNA, 22 nt, Artificial Sequence
  Synthetic
guagucaacaaggcuuaauugg

SEQ ID NO: 333345 - RNA, 23 nt, Artificial Sequence
  Synthetic
uguagucaacaaggcuuaauugg

SEQ ID NO: 333346 - RNA, 24 nt, Artificial Sequence
  Synthetic
uuguagucaacaaggcuuaauugg

SEQ ID NO: 333347 - RNA, 18 nt, Artificial Sequence
  Synthetic
aauuauguucuuaauugg

SEQ ID NO: 333348 - RNA, 19 nt, Artificial Sequence
  Synthetic
caauuauguucuuaauugg

SEQ ID NO: 333349 - RNA, 20 nt, Artificial Sequence
  Synthetic
ccaauuauguucuuaauugg

SEQ ID NO: 333350 - RNA, 21 nt, Artificial Sequence
  Synthetic
accaauuauguucuuaauugg

SEQ ID NO: 333351 - RNA, 22 nt, Artificial Sequence
  Synthetic
uaccaauuauguucuuaauugg

SEQ ID NO: 333352 - RNA, 23 nt, Artificial Sequence
  Synthetic
cuaccaauuauguucuuaauugg

SEQ ID NO: 333353 - RNA, 24 nt, Artificial Sequence
  Synthetic
gcuaccaauuauguucuuaauugg

SEQ ID NO: 333354 - RNA, 18 nt, Artificial Sequence
  Synthetic
cucaauuugacacauugg

SEQ ID NO: 333355 - RNA, 19 nt, Artificial Sequence
  Synthetic
ucucaauuugacacauugg

SEQ ID NO: 333356 - RNA, 20 nt, Artificial Sequence
  Synthetic
cucucaauuugacacauugg

SEQ ID NO: 333357 - RNA, 21 nt, Artificial Sequence
  Synthetic
ucucucaauuugacacauugg

SEQ ID NO: 333358 - RNA, 22 nt, Artificial Sequence
  Synthetic
uucucucaauuugacacauugg

SEQ ID NO: 333359 - RNA, 23 nt, Artificial Sequence
  Synthetic
uuucucucaauuugacacauugg

SEQ ID NO: 333360 - RNA, 24 nt, Artificial Sequence
  Synthetic
uuuucucucaauuugacacauugg

SEQ ID NO: 333361 - RNA, 18 nt, Artificial Sequence
  Synthetic
uuuucccagcaccauugg

SEQ ID NO: 333362 - RNA, 19 nt, Artificial Sequence
  Synthetic
guuuucccagcaccauugg

SEQ ID NO: 333363 - RNA, 20 nt, Artificial Sequence
  Synthetic
aguuuucccagcaccauugg

SEQ ID NO: 333364 - RNA, 21 nt, Artificial Sequence
  Synthetic
caguuuucccagcaccauugg

SEQ ID NO: 333365 - RNA, 22 nt, Artificial Sequence
  Synthetic
ccaguuuucccagcaccauugg

SEQ ID NO: 333366 - RNA, 23 nt, Artificial Sequence
  Synthetic
uccaguuuucccagcaccauugg

SEQ ID NO: 333367 - RNA, 24 nt, Artificial Sequence
  Synthetic
auccaguuuucccagcaccauugg

SEQ ID NO: 333368 - RNA, 18 nt, Artificial Sequence
  Synthetic
acccuuuccccccauugg

SEQ ID NO: 333369 - RNA, 19 nt, Artificial Sequence
  Synthetic
uacccuuuccccccauugg

SEQ ID NO: 333370 - RNA, 20 nt, Artificial Sequence
  Synthetic
guacccuuuccccccauugg

SEQ ID NO: 333371 - RNA, 21 nt, Artificial Sequence
  Synthetic
uguacccuuuccccccauugg

SEQ ID NO: 333372 - RNA, 22 nt, Artificial Sequence
  Synthetic
cuguacccuuuccccccauugg

SEQ ID NO: 333373 - RNA, 23 nt, Artificial Sequence
  Synthetic
ccuguacccuuuccccccauugg

SEQ ID NO: 333374 - RNA, 24 nt, Artificial Sequence
  Synthetic
cccuguacccuuuccccccauugg

SEQ ID NO: 333375 - RNA, 18 nt, Artificial Sequence
  Synthetic
cgaguguaaagccauugg

SEQ ID NO: 333376 - RNA, 19 nt, Artificial Sequence
  Synthetic
ucgaguguaaagccauugg

SEQ ID NO: 333377 - RNA, 20 nt, Artificial Sequence
  Synthetic
aucgaguguaaagccauugg

SEQ ID NO: 333378 - RNA, 21 nt, Artificial Sequence
  Synthetic
uaucgaguguaaagccauugg

SEQ ID NO: 333379 - RNA, 22 nt, Artificial Sequence
  Synthetic
guaucgaguguaaagccauugg

SEQ ID NO: 333380 - RNA, 23 nt, Artificial Sequence
  Synthetic
uguaucgaguguaaagccauugg

SEQ ID NO: 333381 - RNA, 24 nt, Artificial Sequence
  Synthetic
cuguaucgaguguaaagccauugg

SEQ ID NO: 333382 - RNA, 18 nt, Artificial Sequence
  Synthetic
uacacaaucuugcauugg

SEQ ID NO: 333383 - RNA, 19 nt, Artificial Sequence
  Synthetic
guacacaaucuugcauugg

SEQ ID NO: 333384 - RNA, 20 nt, Artificial Sequence
  Synthetic
gguacacaaucuugcauugg

SEQ ID NO: 333385 - RNA, 21 nt, Artificial Sequence
  Synthetic
ugguacacaaucuugcauugg

SEQ ID NO: 333386 - RNA, 22 nt, Artificial Sequence
  Synthetic
cugguacacaaucuugcauugg

SEQ ID NO: 333387 - RNA, 23 nt, Artificial Sequence
  Synthetic
ccugguacacaaucuugcauugg

SEQ ID NO: 333388 - RNA, 24 nt, Artificial Sequence
  Synthetic
accugguacacaaucuugcauugg

SEQ ID NO: 333389 - RNA, 18 nt, Artificial Sequence
  Synthetic
accacacccaaucauugg

SEQ ID NO: 333390 - RNA, 19 nt, Artificial Sequence
  Synthetic
caccacacccaaucauugg

SEQ ID NO: 333391 - RNA, 20 nt, Artificial Sequence
  Synthetic
ccaccacacccaaucauugg

SEQ ID NO: 333392 - RNA, 21 nt, Artificial Sequence
  Synthetic
cccaccacacccaaucauugg

SEQ ID NO: 333393 - RNA, 22 nt, Artificial Sequence
  Synthetic
ucccaccacacccaaucauugg

SEQ ID NO: 333394 - RNA, 23 nt, Artificial Sequence
  Synthetic
uucccaccacacccaaucauugg

SEQ ID NO: 333395 - RNA, 24 nt, Artificial Sequence
  Synthetic
auucccaccacacccaaucauugg

SEQ ID NO: 333396 - RNA, 18 nt, Artificial Sequence
  Synthetic
acacuuguauaucauugg

SEQ ID NO: 333397 - RNA, 19 nt, Artificial Sequence
  Synthetic
aacacuuguauaucauugg

SEQ ID NO: 333398 - RNA, 20 nt, Artificial Sequence
  Synthetic
uaacacuuguauaucauugg

SEQ ID NO: 333399 - RNA, 21 nt, Artificial Sequence
  Synthetic
guaacacuuguauaucauugg

SEQ ID NO: 333400 - RNA, 22 nt, Artificial Sequence
  Synthetic
gguaacacuuguauaucauugg

SEQ ID NO: 333401 - RNA, 23 nt, Artificial Sequence
  Synthetic
agguaacacuuguauaucauugg

SEQ ID NO: 333402 - RNA, 24 nt, Artificial Sequence
  Synthetic
aagguaacacuuguauaucauugg

SEQ ID NO: 333403 - RNA, 18 nt, Artificial Sequence
  Synthetic
uuaaaaugcuaucauugg

SEQ ID NO: 333404 - RNA, 19 nt, Artificial Sequence
  Synthetic
uuuaaaaugcuaucauugg

SEQ ID NO: 333405 - RNA, 20 nt, Artificial Sequence
  Synthetic
auuuaaaaugcuaucauugg

SEQ ID NO: 333406 - RNA, 21 nt, Artificial Sequence
  Synthetic
uauuuaaaaugcuaucauugg

SEQ ID NO: 333407 - RNA, 22 nt, Artificial Sequence
  Synthetic
guauuuaaaaugcuaucauugg

SEQ ID NO: 333408 - RNA, 23 nt, Artificial Sequence
  Synthetic
gguauuuaaaaugcuaucauugg

SEQ ID NO: 333409 - RNA, 24 nt, Artificial Sequence
  Synthetic
ggguauuuaaaaugcuaucauugg

SEQ ID NO: 333410 - RNA, 18 nt, Artificial Sequence
  Synthetic
uccugggugcuucauugg

SEQ ID NO: 333411 - RNA, 19 nt, Artificial Sequence
  Synthetic
uuccugggugcuucauugg

SEQ ID NO: 333412 - RNA, 20 nt, Artificial Sequence
  Synthetic
uuuccugggugcuucauugg

SEQ ID NO: 333413 - RNA, 21 nt, Artificial Sequence
  Synthetic
guuuccugggugcuucauugg

SEQ ID NO: 333414 - RNA, 22 nt, Artificial Sequence
  Synthetic
uguuuccugggugcuucauugg

SEQ ID NO: 333415 - RNA, 23 nt, Artificial Sequence
  Synthetic
uuguuuccugggugcuucauugg

SEQ ID NO: 333416 - RNA, 24 nt, Artificial Sequence
  Synthetic
uuuguuuccugggugcuucauugg

SEQ ID NO: 333417 - RNA, 18 nt, Artificial Sequence
  Synthetic
caaaugguauuucauugg

SEQ ID NO: 333418 - RNA, 19 nt, Artificial Sequence
  Synthetic
ucaaaugguauuucauugg

SEQ ID NO: 333419 - RNA, 20 nt, Artificial Sequence
  Synthetic
gucaaaugguauuucauugg

SEQ ID NO: 333420 - RNA, 21 nt, Artificial Sequence
  Synthetic
ggucaaaugguauuucauugg

SEQ ID NO: 333421 - RNA, 22 nt, Artificial Sequence
  Synthetic
aggucaaaugguauuucauugg

SEQ ID NO: 333422 - RNA, 23 nt, Artificial Sequence
  Synthetic
caggucaaaugguauuucauugg

SEQ ID NO: 333423 - RNA, 24 nt, Artificial Sequence
  Synthetic
gcaggucaaaugguauuucauugg

SEQ ID NO: 333424 - RNA, 18 nt, Artificial Sequence
  Synthetic
ccuuugagcaaagauugg

SEQ ID NO: 333425 - RNA, 19 nt, Artificial Sequence
  Synthetic
accuuugagcaaagauugg

SEQ ID NO: 333426 - RNA, 20 nt, Artificial Sequence
  Synthetic
gaccuuugagcaaagauugg

SEQ ID NO: 333427 - RNA, 21 nt, Artificial Sequence
  Synthetic
ugaccuuugagcaaagauugg

SEQ ID NO: 333428 - RNA, 22 nt, Artificial Sequence
  Synthetic
augaccuuugagcaaagauugg

SEQ ID NO: 333429 - RNA, 23 nt, Artificial Sequence
  Synthetic
aaugaccuuugagcaaagauugg

SEQ ID NO: 333430 - RNA, 24 nt, Artificial Sequence
  Synthetic
aaaugaccuuugagcaaagauugg

SEQ ID NO: 333431 - RNA, 18 nt, Artificial Sequence
  Synthetic
uguaacuuggaagauugg

SEQ ID NO: 333432 - RNA, 19 nt, Artificial Sequence
  Synthetic
cuguaacuuggaagauugg

SEQ ID NO: 333433 - RNA, 20 nt, Artificial Sequence
  Synthetic
gcuguaacuuggaagauugg

SEQ ID NO: 333434 - RNA, 21 nt, Artificial Sequence
  Synthetic
ugcuguaacuuggaagauugg

SEQ ID NO: 333435 - RNA, 22 nt, Artificial Sequence
  Synthetic
cugcuguaacuuggaagauugg

SEQ ID NO: 333436 - RNA, 23 nt, Artificial Sequence
  Synthetic
acugcuguaacuuggaagauugg

SEQ ID NO: 333437 - RNA, 24 nt, Artificial Sequence
  Synthetic
aacugcuguaacuuggaagauugg

SEQ ID NO: 333438 - RNA, 18 nt, Artificial Sequence
  Synthetic
uuaaaaaccggagauugg

SEQ ID NO: 333439 - RNA, 19 nt, Artificial Sequence
  Synthetic
auuaaaaaccggagauugg

SEQ ID NO: 333440 - RNA, 20 nt, Artificial Sequence
  Synthetic
aauuaaaaaccggagauugg

SEQ ID NO: 333441 - RNA, 21 nt, Artificial Sequence
  Synthetic
caauuaaaaaccggagauugg

SEQ ID NO: 333442 - RNA, 22 nt, Artificial Sequence
  Synthetic
ccaauuaaaaaccggagauugg

SEQ ID NO: 333443 - RNA, 23 nt, Artificial Sequence
  Synthetic
gccaauuaaaaaccggagauugg

SEQ ID NO: 333444 - RNA, 24 nt, Artificial Sequence
  Synthetic
ugccaauuaaaaaccggagauugg

SEQ ID NO: 333445 - RNA, 18 nt, Artificial Sequence
  Synthetic
gggugggggugagauugg

SEQ ID NO: 333446 - RNA, 19 nt, Artificial Sequence
  Synthetic
ggggugggggugagauugg

SEQ ID NO: 333447 - RNA, 20 nt, Artificial Sequence
  Synthetic
uggggugggggugagauugg

SEQ ID NO: 333448 - RNA, 21 nt, Artificial Sequence
  Synthetic
guggggugggggugagauugg

SEQ ID NO: 333449 - RNA, 22 nt, Artificial Sequence
  Synthetic
aguggggugggggugagauugg

SEQ ID NO: 333450 - RNA, 23 nt, Artificial Sequence
  Synthetic
caguggggugggggugagauugg

SEQ ID NO: 333451 - RNA, 24 nt, Artificial Sequence
  Synthetic
ucaguggggugggggugagauugg

SEQ ID NO: 333452 - RNA, 18 nt, Artificial Sequence
  Synthetic
uaccagauaauagauugg

SEQ ID NO: 333453 - RNA, 19 nt, Artificial Sequence
  Synthetic
uuaccagauaauagauugg

SEQ ID NO: 333454 - RNA, 20 nt, Artificial Sequence
  Synthetic
guuaccagauaauagauugg

SEQ ID NO: 333455 - RNA, 21 nt, Artificial Sequence
  Synthetic
aguuaccagauaauagauugg

SEQ ID NO: 333456 - RNA, 22 nt, Artificial Sequence
  Synthetic
aaguuaccagauaauagauugg

SEQ ID NO: 333457 - RNA, 23 nt, Artificial Sequence
  Synthetic
gaaguuaccagauaauagauugg

SEQ ID NO: 333458 - RNA, 24 nt, Artificial Sequence
  Synthetic
agaaguuaccagauaauagauugg

SEQ ID NO: 333459 - RNA, 18 nt, Artificial Sequence
  Synthetic
agcagaagaugggauugg

SEQ ID NO: 333460 - RNA, 19 nt, Artificial Sequence
  Synthetic
gagcagaagaugggauugg

SEQ ID NO: 333461 - RNA, 20 nt, Artificial Sequence
  Synthetic
agagcagaagaugggauugg

SEQ ID NO: 333462 - RNA, 21 nt, Artificial Sequence
  Synthetic
cagagcagaagaugggauugg

SEQ ID NO: 333463 - RNA, 22 nt, Artificial Sequence
  Synthetic
acagagcagaagaugggauugg

SEQ ID NO: 333464 - RNA, 23 nt, Artificial Sequence
  Synthetic
uacagagcagaagaugggauugg

SEQ ID NO: 333465 - RNA, 24 nt, Artificial Sequence
  Synthetic
guacagagcagaagaugggauugg

SEQ ID NO: 333466 - RNA, 18 nt, Artificial Sequence
  Synthetic
cuugacugcugggauugg

SEQ ID NO: 333467 - RNA, 19 nt, Artificial Sequence
  Synthetic
acuugacugcugggauugg

SEQ ID NO: 333468 - RNA, 20 nt, Artificial Sequence
  Synthetic
aacuugacugcugggauugg

SEQ ID NO: 333469 - RNA, 21 nt, Artificial Sequence
  Synthetic
aaacuugacugcugggauugg

SEQ ID NO: 333470 - RNA, 22 nt, Artificial Sequence
  Synthetic
gaaacuugacugcugggauugg

SEQ ID NO: 333471 - RNA, 23 nt, Artificial Sequence
  Synthetic
ugaaacuugacugcugggauugg

SEQ ID NO: 333472 - RNA, 24 nt, Artificial Sequence
  Synthetic
cugaaacuugacugcugggauugg

SEQ ID NO: 333473 - RNA, 18 nt, Artificial Sequence
  Synthetic
aaaagaaaaauggauugg

SEQ ID NO: 333474 - RNA, 19 nt, Artificial Sequence
  Synthetic
aaaaagaaaaauggauugg

SEQ ID NO: 333475 - RNA, 20 nt, Artificial Sequence
  Synthetic
gaaaaagaaaaauggauugg

SEQ ID NO: 333476 - RNA, 21 nt, Artificial Sequence
  Synthetic
agaaaaagaaaaauggauugg

SEQ ID NO: 333477 - RNA, 22 nt, Artificial Sequence
  Synthetic
aagaaaaagaaaaauggauugg

SEQ ID NO: 333478 - RNA, 23 nt, Artificial Sequence
  Synthetic
caagaaaaagaaaaauggauugg

SEQ ID NO: 333479 - RNA, 24 nt, Artificial Sequence
  Synthetic
ucaagaaaaagaaaaauggauugg

SEQ ID NO: 333480 - RNA, 18 nt, Artificial Sequence
  Synthetic
guuauguuaaaauauugg

SEQ ID NO: 333481 - RNA, 19 nt, Artificial Sequence
  Synthetic
uguuauguuaaaauauugg

SEQ ID NO: 333482 - RNA, 20 nt, Artificial Sequence
  Synthetic
uuguuauguuaaaauauugg

SEQ ID NO: 333483 - RNA, 21 nt, Artificial Sequence
  Synthetic
uuuguuauguuaaaauauugg

SEQ ID NO: 333484 - RNA, 22 nt, Artificial Sequence
  Synthetic
auuuguuauguuaaaauauugg

SEQ ID NO: 333485 - RNA, 23 nt, Artificial Sequence
  Synthetic
aauuuguuauguuaaaauauugg

SEQ ID NO: 333486 - RNA, 24 nt, Artificial Sequence
  Synthetic
aaauuuguuauguuaaaauauugg

SEQ ID NO: 333487 - RNA, 18 nt, Artificial Sequence
  Synthetic
aaaaaaaaagaauauugg

SEQ ID NO: 333488 - RNA, 19 nt, Artificial Sequence
  Synthetic
aaaaaaaaaagaauauugg

SEQ ID NO: 333489 - RNA, 20 nt, Artificial Sequence
  Synthetic
aaaaaaaaaaagaauauugg

SEQ ID NO: 333490 - RNA, 21 nt, Artificial Sequence
  Synthetic
aaaaaaaaaaaagaauauugg

SEQ ID NO: 333491 - RNA, 22 nt, Artificial Sequence
  Synthetic
aaaaaaaaaaaaagaauauugg

SEQ ID NO: 333492 - RNA, 23 nt, Artificial Sequence
  Synthetic
gaaaaaaaaaaaaagaauauugg

SEQ ID NO: 333493 - RNA, 24 nt, Artificial Sequence
  Synthetic
ugaaaaaaaaaaaaagaauauugg

SEQ ID NO: 333494 - RNA, 18 nt, Artificial Sequence
  Synthetic
cugcuggaguuguauugg

SEQ ID NO: 333495 - RNA, 19 nt, Artificial Sequence
  Synthetic
ccugcuggaguuguauugg

SEQ ID NO: 333496 - RNA, 20 nt, Artificial Sequence
  Synthetic
gccugcuggaguuguauugg

SEQ ID NO: 333497 - RNA, 21 nt, Artificial Sequence
  Synthetic
ugccugcuggaguuguauugg

SEQ ID NO: 333498 - RNA, 22 nt, Artificial Sequence
  Synthetic
cugccugcuggaguuguauugg

SEQ ID NO: 333499 - RNA, 23 nt, Artificial Sequence
  Synthetic
gcugccugcuggaguuguauugg

SEQ ID NO: 333500 - RNA, 24 nt, Artificial Sequence
  Synthetic
ggcugccugcuggaguuguauugg

SEQ ID NO: 333501 - RNA, 18 nt, Artificial Sequence
  Synthetic
uaccuuuaugauuauugg

SEQ ID NO: 333502 - RNA, 19 nt, Artificial Sequence
  Synthetic
uuaccuuuaugauuauugg

SEQ ID NO: 333503 - RNA, 20 nt, Artificial Sequence
  Synthetic
auuaccuuuaugauuauugg

SEQ ID NO: 333504 - RNA, 21 nt, Artificial Sequence
  Synthetic
uauuaccuuuaugauuauugg

SEQ ID NO: 333505 - RNA, 22 nt, Artificial Sequence
  Synthetic
uuauuaccuuuaugauuauugg

SEQ ID NO: 333506 - RNA, 23 nt, Artificial Sequence
  Synthetic
auuauuaccuuuaugauuauugg

SEQ ID NO: 333507 - RNA, 24 nt, Artificial Sequence
  Synthetic
gauuauuaccuuuaugauuauugg

SEQ ID NO: 333508 - RNA, 18 nt, Artificial Sequence
  Synthetic
auuugaacaaaaacuugg

SEQ ID NO: 333509 - RNA, 19 nt, Artificial Sequence
  Synthetic
uauuugaacaaaaacuugg

SEQ ID NO: 333510 - RNA, 20 nt, Artificial Sequence
  Synthetic
uuauuugaacaaaaacuugg

SEQ ID NO: 333511 - RNA, 21 nt, Artificial Sequence
  Synthetic
uuuauuugaacaaaaacuugg

SEQ ID NO: 333512 - RNA, 22 nt, Artificial Sequence
  Synthetic
uuuuauuugaacaaaaacuugg

SEQ ID NO: 333513 - RNA, 23 nt, Artificial Sequence
  Synthetic
uuuuuauuugaacaaaaacuugg

SEQ ID NO: 333514 - RNA, 24 nt, Artificial Sequence
  Synthetic
uuuuuuauuugaacaaaaacuugg

SEQ ID NO: 333515 - RNA, 18 nt, Artificial Sequence
  Synthetic
aacauagauaaaacuugg

SEQ ID NO: 333516 - RNA, 19 nt, Artificial Sequence
  Synthetic
uaacauagauaaaacuugg

SEQ ID NO: 333517 - RNA, 20 nt, Artificial Sequence
  Synthetic
auaacauagauaaaacuugg

SEQ ID NO: 333518 - RNA, 21 nt, Artificial Sequence
  Synthetic
cauaacauagauaaaacuugg

SEQ ID NO: 333519 - RNA, 22 nt, Artificial Sequence
  Synthetic
acauaacauagauaaaacuugg

SEQ ID NO: 333520 - RNA, 23 nt, Artificial Sequence
  Synthetic
uacauaacauagauaaaacuugg

SEQ ID NO: 333521 - RNA, 24 nt, Artificial Sequence
  Synthetic
uuacauaacauagauaaaacuugg

SEQ ID NO: 333522 - RNA, 18 nt, Artificial Sequence
  Synthetic
uuucaugugucaacuugg

SEQ ID NO: 333523 - RNA, 19 nt, Artificial Sequence
  Synthetic
auuucaugugucaacuugg

SEQ ID NO: 333524 - RNA, 20 nt, Artificial Sequence
  Synthetic
aauuucaugugucaacuugg

SEQ ID NO: 333525 - RNA, 21 nt, Artificial Sequence
  Synthetic
uaauuucaugugucaacuugg

SEQ ID NO: 333526 - RNA, 22 nt, Artificial Sequence
  Synthetic
uuaauuucaugugucaacuugg

SEQ ID NO: 333527 - RNA, 23 nt, Artificial Sequence
  Synthetic
guuaauuucaugugucaacuugg

SEQ ID NO: 333528 - RNA, 24 nt, Artificial Sequence
  Synthetic
gguuaauuucaugugucaacuugg

SEQ ID NO: 333529 - RNA, 18 nt, Artificial Sequence
  Synthetic
gaaucugaaggaacuugg

SEQ ID NO: 333530 - RNA, 19 nt, Artificial Sequence
  Synthetic
agaaucugaaggaacuugg

SEQ ID NO: 333531 - RNA, 20 nt, Artificial Sequence
  Synthetic
gagaaucugaaggaacuugg

SEQ ID NO: 333532 - RNA, 21 nt, Artificial Sequence
  Synthetic
ugagaaucugaaggaacuugg

SEQ ID NO: 333533 - RNA, 22 nt, Artificial Sequence
  Synthetic
gugagaaucugaaggaacuugg

SEQ ID NO: 333534 - RNA, 23 nt, Artificial Sequence
  Synthetic
ugugagaaucugaaggaacuugg

SEQ ID NO: 333535 - RNA, 24 nt, Artificial Sequence
  Synthetic
gugugagaaucugaaggaacuugg

SEQ ID NO: 333536 - RNA, 18 nt, Artificial Sequence
  Synthetic
uggucugcugacacuugg

SEQ ID NO: 333537 - RNA, 19 nt, Artificial Sequence
  Synthetic
guggucugcugacacuugg

SEQ ID NO: 333538 - RNA, 20 nt, Artificial Sequence
  Synthetic
aguggucugcugacacuugg

SEQ ID NO: 333539 - RNA, 21 nt, Artificial Sequence
  Synthetic
caguggucugcugacacuugg

SEQ ID NO: 333540 - RNA, 22 nt, Artificial Sequence
  Synthetic
acaguggucugcugacacuugg

SEQ ID NO: 333541 - RNA, 23 nt, Artificial Sequence
  Synthetic
cacaguggucugcugacacuugg

SEQ ID NO: 333542 - RNA, 24 nt, Artificial Sequence
  Synthetic
gcacaguggucugcugacacuugg

SEQ ID NO: 333543 - RNA, 18 nt, Artificial Sequence
  Synthetic
acuuacgguuccacuugg

SEQ ID NO: 333544 - RNA, 19 nt, Artificial Sequence
  Synthetic
gacuuacgguuccacuugg

SEQ ID NO: 333545 - RNA, 20 nt, Artificial Sequence
  Synthetic
ggacuuacgguuccacuugg

SEQ ID NO: 333546 - RNA, 21 nt, Artificial Sequence
  Synthetic
uggacuuacgguuccacuugg

SEQ ID NO: 333547 - RNA, 22 nt, Artificial Sequence
  Synthetic
auggacuuacgguuccacuugg

SEQ ID NO: 333548 - RNA, 23 nt, Artificial Sequence
  Synthetic
aauggacuuacgguuccacuugg

SEQ ID NO: 333549 - RNA, 24 nt, Artificial Sequence
  Synthetic
uaauggacuuacgguuccacuugg

SEQ ID NO: 333550 - RNA, 18 nt, Artificial Sequence
  Synthetic
guaucuaugaagacuugg

SEQ ID NO: 333551 - RNA, 19 nt, Artificial Sequence
  Synthetic
aguaucuaugaagacuugg

SEQ ID NO: 333552 - RNA, 20 nt, Artificial Sequence
  Synthetic
caguaucuaugaagacuugg

SEQ ID NO: 333553 - RNA, 21 nt, Artificial Sequence
  Synthetic
ccaguaucuaugaagacuugg

SEQ ID NO: 333554 - RNA, 22 nt, Artificial Sequence
  Synthetic
cccaguaucuaugaagacuugg

SEQ ID NO: 333555 - RNA, 23 nt, Artificial Sequence
  Synthetic
ucccaguaucuaugaagacuugg

SEQ ID NO: 333556 - RNA, 24 nt, Artificial Sequence
  Synthetic
aucccaguaucuaugaagacuugg

SEQ ID NO: 333557 - RNA, 18 nt, Artificial Sequence
  Synthetic
uuguauucugagacuugg

SEQ ID NO: 333558 - RNA, 19 nt, Artificial Sequence
  Synthetic
uuuguauucugagacuugg

SEQ ID NO: 333559 - RNA, 20 nt, Artificial Sequence
  Synthetic
uuuuguauucugagacuugg

SEQ ID NO: 333560 - RNA, 21 nt, Artificial Sequence
  Synthetic
auuuuguauucugagacuugg

SEQ ID NO: 333561 - RNA, 22 nt, Artificial Sequence
  Synthetic
gauuuuguauucugagacuugg

SEQ ID NO: 333562 - RNA, 23 nt, Artificial Sequence
  Synthetic
ugauuuuguauucugagacuugg

SEQ ID NO: 333563 - RNA, 24 nt, Artificial Sequence
  Synthetic
uugauuuuguauucugagacuugg

SEQ ID NO: 333564 - RNA, 18 nt, Artificial Sequence
  Synthetic
gaccacaagcugacuugg

SEQ ID NO: 333565 - RNA, 19 nt, Artificial Sequence
  Synthetic
ggaccacaagcugacuugg

SEQ ID NO: 333566 - RNA, 20 nt, Artificial Sequence
  Synthetic
aggaccacaagcugacuugg

SEQ ID NO: 333567 - RNA, 21 nt, Artificial Sequence
  Synthetic
gaggaccacaagcugacuugg

SEQ ID NO: 333568 - RNA, 22 nt, Artificial Sequence
  Synthetic
ggaggaccacaagcugacuugg

SEQ ID NO: 333569 - RNA, 23 nt, Artificial Sequence
  Synthetic
gggaggaccacaagcugacuugg

SEQ ID NO: 333570 - RNA, 24 nt, Artificial Sequence
  Synthetic
ugggaggaccacaagcugacuugg

SEQ ID NO: 333571 - RNA, 18 nt, Artificial Sequence
  Synthetic
acucucgaaaguacuugg

SEQ ID NO: 333572 - RNA, 19 nt, Artificial Sequence
  Synthetic
aacucucgaaaguacuugg

SEQ ID NO: 333573 - RNA, 20 nt, Artificial Sequence
  Synthetic
caacucucgaaaguacuugg

SEQ ID NO: 333574 - RNA, 21 nt, Artificial Sequence
  Synthetic
ucaacucucgaaaguacuugg

SEQ ID NO: 333575 - RNA, 22 nt, Artificial Sequence
  Synthetic
gucaacucucgaaaguacuugg

SEQ ID NO: 333576 - RNA, 23 nt, Artificial Sequence
  Synthetic
agucaacucucgaaaguacuugg

SEQ ID NO: 333577 - RNA, 24 nt, Artificial Sequence
  Synthetic
cagucaacucucgaaaguacuugg

SEQ ID NO: 333578 - RNA, 18 nt, Artificial Sequence
  Synthetic
gggacuuagggcccuugg

SEQ ID NO: 333579 - RNA, 19 nt, Artificial Sequence
  Synthetic
agggacuuagggcccuugg

SEQ ID NO: 333580 - RNA, 20 nt, Artificial Sequence
  Synthetic
aagggacuuagggcccuugg

SEQ ID NO: 333581 - RNA, 21 nt, Artificial Sequence
  Synthetic
aaagggacuuagggcccuugg

SEQ ID NO: 333582 - RNA, 22 nt, Artificial Sequence
  Synthetic
caaagggacuuagggcccuugg

SEQ ID NO: 333583 - RNA, 23 nt, Artificial Sequence
  Synthetic
acaaagggacuuagggcccuugg

SEQ ID NO: 333584 - RNA, 24 nt, Artificial Sequence
  Synthetic
cacaaagggacuuagggcccuugg

SEQ ID NO: 333585 - RNA, 18 nt, Artificial Sequence
  Synthetic
cagauuuuaaugccuugg

SEQ ID NO: 333586 - RNA, 19 nt, Artificial Sequence
  Synthetic
gcagauuuuaaugccuugg

SEQ ID NO: 333587 - RNA, 20 nt, Artificial Sequence
  Synthetic
ugcagauuuuaaugccuugg

SEQ ID NO: 333588 - RNA, 21 nt, Artificial Sequence
  Synthetic
augcagauuuuaaugccuugg

SEQ ID NO: 333589 - RNA, 22 nt, Artificial Sequence
  Synthetic
caugcagauuuuaaugccuugg

SEQ ID NO: 333590 - RNA, 23 nt, Artificial Sequence
  Synthetic
ucaugcagauuuuaaugccuugg

SEQ ID NO: 333591 - RNA, 24 nt, Artificial Sequence
  Synthetic
aucaugcagauuuuaaugccuugg

SEQ ID NO: 333592 - RNA, 18 nt, Artificial Sequence
  Synthetic
uuugaaagcuugccuugg

SEQ ID NO: 333593 - RNA, 19 nt, Artificial Sequence
  Synthetic
auuugaaagcuugccuugg

SEQ ID NO: 333594 - RNA, 20 nt, Artificial Sequence
  Synthetic
cauuugaaagcuugccuugg

SEQ ID NO: 333595 - RNA, 21 nt, Artificial Sequence
  Synthetic
ucauuugaaagcuugccuugg

SEQ ID NO: 333596 - RNA, 22 nt, Artificial Sequence
  Synthetic
cucauuugaaagcuugccuugg

SEQ ID NO: 333597 - RNA, 23 nt, Artificial Sequence
  Synthetic
ucucauuugaaagcuugccuugg

SEQ ID NO: 333598 - RNA, 24 nt, Artificial Sequence
  Synthetic
gucucauuugaaagcuugccuugg

SEQ ID NO: 333599 - RNA, 18 nt, Artificial Sequence
  Synthetic
auuuaaaauaguccuugg

SEQ ID NO: 333600 - RNA, 19 nt, Artificial Sequence
  Synthetic
uauuuaaaauaguccuugg

SEQ ID NO: 333601 - RNA, 20 nt, Artificial Sequence
  Synthetic
uuauuuaaaauaguccuugg

SEQ ID NO: 333602 - RNA, 21 nt, Artificial Sequence
  Synthetic
guuauuuaaaauaguccuugg

SEQ ID NO: 333603 - RNA, 22 nt, Artificial Sequence
  Synthetic
uguuauuuaaaauaguccuugg

SEQ ID NO: 333604 - RNA, 23 nt, Artificial Sequence
  Synthetic
guguuauuuaaaauaguccuugg

SEQ ID NO: 333605 - RNA, 24 nt, Artificial Sequence
  Synthetic
uguguuauuuaaaauaguccuugg

SEQ ID NO: 333606 - RNA, 18 nt, Artificial Sequence
  Synthetic
augaguucauguccuugg

SEQ ID NO: 333607 - RNA, 19 nt, Artificial Sequence
  Synthetic
gaugaguucauguccuugg

SEQ ID NO: 333608 - RNA, 20 nt, Artificial Sequence
  Synthetic
ggaugaguucauguccuugg

SEQ ID NO: 333609 - RNA, 21 nt, Artificial Sequence
  Synthetic
aggaugaguucauguccuugg

SEQ ID NO: 333610 - RNA, 22 nt, Artificial Sequence
  Synthetic
aaggaugaguucauguccuugg

SEQ ID NO: 333611 - RNA, 23 nt, Artificial Sequence
  Synthetic
aaaggaugaguucauguccuugg

SEQ ID NO: 333612 - RNA, 24 nt, Artificial Sequence
  Synthetic
gaaaggaugaguucauguccuugg

SEQ ID NO: 333613 - RNA, 18 nt, Artificial Sequence
  Synthetic
auuuggaauuuuccuugg

SEQ ID NO: 333614 - RNA, 19 nt, Artificial Sequence
  Synthetic
cauuuggaauuuuccuugg

SEQ ID NO: 333615 - RNA, 20 nt, Artificial Sequence
  Synthetic
ucauuuggaauuuuccuugg

SEQ ID NO: 333616 - RNA, 21 nt, Artificial Sequence
  Synthetic
uucauuuggaauuuuccuugg

SEQ ID NO: 333617 - RNA, 22 nt, Artificial Sequence
  Synthetic
uuucauuuggaauuuuccuugg

SEQ ID NO: 333618 - RNA, 23 nt, Artificial Sequence
  Synthetic
uuuucauuuggaauuuuccuugg

SEQ ID NO: 333619 - RNA, 24 nt, Artificial Sequence
  Synthetic
uuuuucauuuggaauuuuccuugg

SEQ ID NO: 333620 - RNA, 18 nt, Artificial Sequence
  Synthetic
caugaauuuucagcuugg

SEQ ID NO: 333621 - RNA, 19 nt, Artificial Sequence
  Synthetic
ucaugaauuuucagcuugg

SEQ ID NO: 333622 - RNA, 20 nt, Artificial Sequence
  Synthetic
uucaugaauuuucagcuugg

SEQ ID NO: 333623 - RNA, 21 nt, Artificial Sequence
  Synthetic
uuucaugaauuuucagcuugg

SEQ ID NO: 333624 - RNA, 22 nt, Artificial Sequence
  Synthetic
cuuucaugaauuuucagcuugg

SEQ ID NO: 333625 - RNA, 23 nt, Artificial Sequence
  Synthetic
ccuuucaugaauuuucagcuugg

SEQ ID NO: 333626 - RNA, 24 nt, Artificial Sequence
  Synthetic
gccuuucaugaauuuucagcuugg

SEQ ID NO: 333627 - RNA, 18 nt, Artificial Sequence
  Synthetic
gaagacacuggagcuugg

SEQ ID NO: 333628 - RNA, 19 nt, Artificial Sequence
  Synthetic
ggaagacacuggagcuugg

SEQ ID NO: 333629 - RNA, 20 nt, Artificial Sequence
  Synthetic
gggaagacacuggagcuugg

SEQ ID NO: 333630 - RNA, 21 nt, Artificial Sequence
  Synthetic
ggggaagacacuggagcuugg

SEQ ID NO: 333631 - RNA, 22 nt, Artificial Sequence
  Synthetic
uggggaagacacuggagcuugg

SEQ ID NO: 333632 - RNA, 23 nt, Artificial Sequence
  Synthetic
auggggaagacacuggagcuugg

SEQ ID NO: 333633 - RNA, 24 nt, Artificial Sequence
  Synthetic
gauggggaagacacuggagcuugg

SEQ ID NO: 333634 - RNA, 18 nt, Artificial Sequence
  Synthetic
cuguaaauaggcgcuugg

SEQ ID NO: 333635 - RNA, 19 nt, Artificial Sequence
  Synthetic
ccuguaaauaggcgcuugg

SEQ ID NO: 333636 - RNA, 20 nt, Artificial Sequence
  Synthetic
gccuguaaauaggcgcuugg

SEQ ID NO: 333637 - RNA, 21 nt, Artificial Sequence
  Synthetic
ugccuguaaauaggcgcuugg

SEQ ID NO: 333638 - RNA, 22 nt, Artificial Sequence
  Synthetic
gugccuguaaauaggcgcuugg

SEQ ID NO: 333639 - RNA, 23 nt, Artificial Sequence
  Synthetic
ugugccuguaaauaggcgcuugg

SEQ ID NO: 333640 - RNA, 24 nt, Artificial Sequence
  Synthetic
cugugccuguaaauaggcgcuugg

SEQ ID NO: 333641 - RNA, 18 nt, Artificial Sequence
  Synthetic
ugacucagcugggcuugg

SEQ ID NO: 333642 - RNA, 19 nt, Artificial Sequence
  Synthetic
cugacucagcugggcuugg

SEQ ID NO: 333643 - RNA, 20 nt, Artificial Sequence
  Synthetic
acugacucagcugggcuugg

SEQ ID NO: 333644 - RNA, 21 nt, Artificial Sequence
  Synthetic
gacugacucagcugggcuugg

SEQ ID NO: 333645 - RNA, 22 nt, Artificial Sequence
  Synthetic
ugacugacucagcugggcuugg

SEQ ID NO: 333646 - RNA, 23 nt, Artificial Sequence
  Synthetic
uugacugacucagcugggcuugg

SEQ ID NO: 333647 - RNA, 24 nt, Artificial Sequence
  Synthetic
cuugacugacucagcugggcuugg

SEQ ID NO: 333648 - RNA, 18 nt, Artificial Sequence
  Synthetic
uuuucaucaguggcuugg

SEQ ID NO: 333649 - RNA, 19 nt, Artificial Sequence
  Synthetic
auuuucaucaguggcuugg

SEQ ID NO: 333650 - RNA, 20 nt, Artificial Sequence
  Synthetic
uauuuucaucaguggcuugg

SEQ ID NO: 333651 - RNA, 21 nt, Artificial Sequence
  Synthetic
auauuuucaucaguggcuugg

SEQ ID NO: 333652 - RNA, 22 nt, Artificial Sequence
  Synthetic
aauauuuucaucaguggcuugg

SEQ ID NO: 333653 - RNA, 23 nt, Artificial Sequence
  Synthetic
caauauuuucaucaguggcuugg

SEQ ID NO: 333654 - RNA, 24 nt, Artificial Sequence
  Synthetic
ucaauauuuucaucaguggcuugg

SEQ ID NO: 333655 - RNA, 18 nt, Artificial Sequence
  Synthetic
guaguauuaacugcuugg

SEQ ID NO: 333656 - RNA, 19 nt, Artificial Sequence
  Synthetic
aguaguauuaacugcuugg

SEQ ID NO: 333657 - RNA, 20 nt, Artificial Sequence
  Synthetic
aaguaguauuaacugcuugg

SEQ ID NO: 333658 - RNA, 21 nt, Artificial Sequence
  Synthetic
gaaguaguauuaacugcuugg

SEQ ID NO: 333659 - RNA, 22 nt, Artificial Sequence
  Synthetic
ugaaguaguauuaacugcuugg

SEQ ID NO: 333660 - RNA, 23 nt, Artificial Sequence
  Synthetic
augaaguaguauuaacugcuugg

SEQ ID NO: 333661 - RNA, 24 nt, Artificial Sequence
  Synthetic
uaugaaguaguauuaacugcuugg

SEQ ID NO: 333662 - RNA, 18 nt, Artificial Sequence
  Synthetic
uagcuguuuugugcuugg

SEQ ID NO: 333663 - RNA, 19 nt, Artificial Sequence
  Synthetic
uuagcuguuuugugcuugg

SEQ ID NO: 333664 - RNA, 20 nt, Artificial Sequence
  Synthetic
auuagcuguuuugugcuugg

SEQ ID NO: 333665 - RNA, 21 nt, Artificial Sequence
  Synthetic
cauuagcuguuuugugcuugg

SEQ ID NO: 333666 - RNA, 22 nt, Artificial Sequence
  Synthetic
gcauuagcuguuuugugcuugg

SEQ ID NO: 333667 - RNA, 23 nt, Artificial Sequence
  Synthetic
agcauuagcuguuuugugcuugg

SEQ ID NO: 333668 - RNA, 24 nt, Artificial Sequence
  Synthetic
cagcauuagcuguuuugugcuugg

SEQ ID NO: 333669 - RNA, 18 nt, Artificial Sequence
  Synthetic
gauucaugcauugcuugg

SEQ ID NO: 333670 - RNA, 19 nt, Artificial Sequence
  Synthetic
ggauucaugcauugcuugg

SEQ ID NO: 333671 - RNA, 20 nt, Artificial Sequence
  Synthetic
aggauucaugcauugcuugg

SEQ ID NO: 333672 - RNA, 21 nt, Artificial Sequence
  Synthetic
caggauucaugcauugcuugg

SEQ ID NO: 333673 - RNA, 22 nt, Artificial Sequence
  Synthetic
ucaggauucaugcauugcuugg

SEQ ID NO: 333674 - RNA, 23 nt, Artificial Sequence
  Synthetic
gucaggauucaugcauugcuugg

SEQ ID NO: 333675 - RNA, 24 nt, Artificial Sequence
  Synthetic
ggucaggauucaugcauugcuugg

SEQ ID NO: 333676 - RNA, 18 nt, Artificial Sequence
  Synthetic
uccagguuuuuugcuugg

SEQ ID NO: 333677 - RNA, 19 nt, Artificial Sequence
  Synthetic
uuccagguuuuuugcuugg

SEQ ID NO: 333678 - RNA, 20 nt, Artificial Sequence
  Synthetic
uuuccagguuuuuugcuugg

SEQ ID NO: 333679 - RNA, 21 nt, Artificial Sequence
  Synthetic
uuuuccagguuuuuugcuugg

SEQ ID NO: 333680 - RNA, 22 nt, Artificial Sequence
  Synthetic
cuuuuccagguuuuuugcuugg

SEQ ID NO: 333681 - RNA, 23 nt, Artificial Sequence
  Synthetic
ccuuuuccagguuuuuugcuugg

SEQ ID NO: 333682 - RNA, 24 nt, Artificial Sequence
  Synthetic
cccuuuuccagguuuuuugcuugg

SEQ ID NO: 333683 - RNA, 18 nt, Artificial Sequence
  Synthetic
gaggccucacaaucuugg

SEQ ID NO: 333684 - RNA, 19 nt, Artificial Sequence
  Synthetic
ggaggccucacaaucuugg

SEQ ID NO: 333685 - RNA, 20 nt, Artificial Sequence
  Synthetic
gggaggccucacaaucuugg

SEQ ID NO: 333686 - RNA, 21 nt, Artificial Sequence
  Synthetic
ggggaggccucacaaucuugg

SEQ ID NO: 333687 - RNA, 22 nt, Artificial Sequence
  Synthetic
uggggaggccucacaaucuugg

SEQ ID NO: 333688 - RNA, 23 nt, Artificial Sequence
  Synthetic
cuggggaggccucacaaucuugg

SEQ ID NO: 333689 - RNA, 24 nt, Artificial Sequence
  Synthetic
gcuggggaggccucacaaucuugg

SEQ ID NO: 333690 - RNA, 18 nt, Artificial Sequence
  Synthetic
uuaacaagaggcucuugg

SEQ ID NO: 333691 - RNA, 19 nt, Artificial Sequence
  Synthetic
uuuaacaagaggcucuugg

SEQ ID NO: 333692 - RNA, 20 nt, Artificial Sequence
  Synthetic
guuuaacaagaggcucuugg

SEQ ID NO: 333693 - RNA, 21 nt, Artificial Sequence
  Synthetic
uguuuaacaagaggcucuugg

SEQ ID NO: 333694 - RNA, 22 nt, Artificial Sequence
  Synthetic
auguuuaacaagaggcucuugg

SEQ ID NO: 333695 - RNA, 23 nt, Artificial Sequence
  Synthetic
aauguuuaacaagaggcucuugg

SEQ ID NO: 333696 - RNA, 24 nt, Artificial Sequence
  Synthetic
aaauguuuaacaagaggcucuugg

SEQ ID NO: 333697 - RNA, 18 nt, Artificial Sequence
  Synthetic
uagggcaugaggucuugg

SEQ ID NO: 333698 - RNA, 19 nt, Artificial Sequence
  Synthetic
cuagggcaugaggucuugg

SEQ ID NO: 333699 - RNA, 20 nt, Artificial Sequence
  Synthetic
gcuagggcaugaggucuugg

SEQ ID NO: 333700 - RNA, 21 nt, Artificial Sequence
  Synthetic
agcuagggcaugaggucuugg

SEQ ID NO: 333701 - RNA, 22 nt, Artificial Sequence
  Synthetic
cagcuagggcaugaggucuugg

SEQ ID NO: 333702 - RNA, 23 nt, Artificial Sequence
  Synthetic
ccagcuagggcaugaggucuugg

SEQ ID NO: 333703 - RNA, 24 nt, Artificial Sequence
  Synthetic
accagcuagggcaugaggucuugg

SEQ ID NO: 333704 - RNA, 18 nt, Artificial Sequence
  Synthetic
aucucugcucauucuugg

SEQ ID NO: 333705 - RNA, 19 nt, Artificial Sequence
  Synthetic
uaucucugcucauucuugg

SEQ ID NO: 333706 - RNA, 20 nt, Artificial Sequence
  Synthetic
cuaucucugcucauucuugg

SEQ ID NO: 333707 - RNA, 21 nt, Artificial Sequence
  Synthetic
gcuaucucugcucauucuugg

SEQ ID NO: 333708 - RNA, 22 nt, Artificial Sequence
  Synthetic
ggcuaucucugcucauucuugg

SEQ ID NO: 333709 - RNA, 23 nt, Artificial Sequence
  Synthetic
gggcuaucucugcucauucuugg

SEQ ID NO: 333710 - RNA, 24 nt, Artificial Sequence
  Synthetic
ggggcuaucucugcucauucuugg

SEQ ID NO: 333711 - RNA, 18 nt, Artificial Sequence
  Synthetic
cuuaagcaugcuucuugg

SEQ ID NO: 333712 - RNA, 19 nt, Artificial Sequence
  Synthetic
acuuaagcaugcuucuugg

SEQ ID NO: 333713 - RNA, 20 nt, Artificial Sequence
  Synthetic
cacuuaagcaugcuucuugg

SEQ ID NO: 333714 - RNA, 21 nt, Artificial Sequence
  Synthetic
ccacuuaagcaugcuucuugg

SEQ ID NO: 333715 - RNA, 22 nt, Artificial Sequence
  Synthetic
cccacuuaagcaugcuucuugg

SEQ ID NO: 333716 - RNA, 23 nt, Artificial Sequence
  Synthetic
ucccacuuaagcaugcuucuugg

SEQ ID NO: 333717 - RNA, 24 nt, Artificial Sequence
  Synthetic
gucccacuuaagcaugcuucuugg

SEQ ID NO: 333718 - RNA, 18 nt, Artificial Sequence
  Synthetic
aauuauguuuguucuugg

SEQ ID NO: 333719 - RNA, 19 nt, Artificial Sequence
  Synthetic
aaauuauguuuguucuugg

SEQ ID NO: 333720 - RNA, 20 nt, Artificial Sequence
  Synthetic
uaaauuauguuuguucuugg

SEQ ID NO: 333721 - RNA, 21 nt, Artificial Sequence
  Synthetic
uuaaauuauguuuguucuugg

SEQ ID NO: 333722 - RNA, 22 nt, Artificial Sequence
  Synthetic
guuaaauuauguuuguucuugg

SEQ ID NO: 333723 - RNA, 23 nt, Artificial Sequence
  Synthetic
aguuaaauuauguuuguucuugg

SEQ ID NO: 333724 - RNA, 24 nt, Artificial Sequence
  Synthetic
uaguuaaauuauguuuguucuugg

SEQ ID NO: 333725 - RNA, 18 nt, Artificial Sequence
  Synthetic
cugagagaaauuucuugg

SEQ ID NO: 333726 - RNA, 19 nt, Artificial Sequence
  Synthetic
gcugagagaaauuucuugg

SEQ ID NO: 333727 - RNA, 20 nt, Artificial Sequence
  Synthetic
ugcugagagaaauuucuugg

SEQ ID NO: 333728 - RNA, 21 nt, Artificial Sequence
  Synthetic
cugcugagagaaauuucuugg

SEQ ID NO: 333729 - RNA, 22 nt, Artificial Sequence
  Synthetic
ucugcugagagaaauuucuugg

SEQ ID NO: 333730 - RNA, 23 nt, Artificial Sequence
  Synthetic
gucugcugagagaaauuucuugg

SEQ ID NO: 333731 - RNA, 24 nt, Artificial Sequence
  Synthetic
ugucugcugagagaaauuucuugg

SEQ ID NO: 333732 - RNA, 18 nt, Artificial Sequence
  Synthetic
cagggcagcauuucuugg

SEQ ID NO: 333733 - RNA, 19 nt, Artificial Sequence
  Synthetic
ccagggcagcauuucuugg

SEQ ID NO: 333734 - RNA, 20 nt, Artificial Sequence
  Synthetic
cccagggcagcauuucuugg

SEQ ID NO: 333735 - RNA, 21 nt, Artificial Sequence
  Synthetic
gcccagggcagcauuucuugg

SEQ ID NO: 333736 - RNA, 22 nt, Artificial Sequence
  Synthetic
ggcccagggcagcauuucuugg

SEQ ID NO: 333737 - RNA, 23 nt, Artificial Sequence
  Synthetic
uggcccagggcagcauuucuugg

SEQ ID NO: 333738 - RNA, 24 nt, Artificial Sequence
  Synthetic
uuggcccagggcagcauuucuugg

SEQ ID NO: 333739 - RNA, 18 nt, Artificial Sequence
  Synthetic
uuuccauuucuuucuugg

SEQ ID NO: 333740 - RNA, 19 nt, Artificial Sequence
  Synthetic
uuuuccauuucuuucuugg

SEQ ID NO: 333741 - RNA, 20 nt, Artificial Sequence
  Synthetic
auuuuccauuucuuucuugg

SEQ ID NO: 333742 - RNA, 21 nt, Artificial Sequence
  Synthetic
aauuuuccauuucuuucuugg

SEQ ID NO: 333743 - RNA, 22 nt, Artificial Sequence
  Synthetic
uaauuuuccauuucuuucuugg

SEQ ID NO: 333744 - RNA, 23 nt, Artificial Sequence
  Synthetic
uuaauuuuccauuucuuucuugg

SEQ ID NO: 333745 - RNA, 24 nt, Artificial Sequence
  Synthetic
uuuaauuuuccauuucuuucuugg

SEQ ID NO: 333746 - RNA, 18 nt, Artificial Sequence
  Synthetic
accguaucauuuucuugg

SEQ ID NO: 333747 - RNA, 19 nt, Artificial Sequence
  Synthetic
aaccguaucauuuucuugg

SEQ ID NO: 333748 - RNA, 20 nt, Artificial Sequence
  Synthetic
aaaccguaucauuuucuugg

SEQ ID NO: 333749 - RNA, 21 nt, Artificial Sequence
  Synthetic
gaaaccguaucauuuucuugg

SEQ ID NO: 333750 - RNA, 22 nt, Artificial Sequence
  Synthetic
ggaaaccguaucauuuucuugg

SEQ ID NO: 333751 - RNA, 23 nt, Artificial Sequence
  Synthetic
aggaaaccguaucauuuucuugg

SEQ ID NO: 333752 - RNA, 24 nt, Artificial Sequence
  Synthetic
aaggaaaccguaucauuuucuugg

SEQ ID NO: 333753 - RNA, 18 nt, Artificial Sequence
  Synthetic
aaaaaugauaaaaguugg

SEQ ID NO: 333754 - RNA, 19 nt, Artificial Sequence
  Synthetic
aaaaaaugauaaaaguugg

SEQ ID NO: 333755 - RNA, 20 nt, Artificial Sequence
  Synthetic
gaaaaaaugauaaaaguugg

SEQ ID NO: 333756 - RNA, 21 nt, Artificial Sequence
  Synthetic
agaaaaaaugauaaaaguugg

SEQ ID NO: 333757 - RNA, 22 nt, Artificial Sequence
  Synthetic
gagaaaaaaugauaaaaguugg

SEQ ID NO: 333758 - RNA, 23 nt, Artificial Sequence
  Synthetic
ugagaaaaaaugauaaaaguugg

SEQ ID NO: 333759 - RNA, 24 nt, Artificial Sequence
  Synthetic
augagaaaaaaugauaaaaguugg

SEQ ID NO: 333760 - RNA, 18 nt, Artificial Sequence
  Synthetic
uucaagccacaaaguugg

SEQ ID NO: 333761 - RNA, 19 nt, Artificial Sequence
  Synthetic
uuucaagccacaaaguugg

SEQ ID NO: 333762 - RNA, 20 nt, Artificial Sequence
  Synthetic
auuucaagccacaaaguugg

SEQ ID NO: 333763 - RNA, 21 nt, Artificial Sequence
  Synthetic
aauuucaagccacaaaguugg

SEQ ID NO: 333764 - RNA, 22 nt, Artificial Sequence
  Synthetic
gaauuucaagccacaaaguugg

SEQ ID NO: 333765 - RNA, 23 nt, Artificial Sequence
  Synthetic
agaauuucaagccacaaaguugg

SEQ ID NO: 333766 - RNA, 24 nt, Artificial Sequence
  Synthetic
uagaauuucaagccacaaaguugg

SEQ ID NO: 333767 - RNA, 18 nt, Artificial Sequence
  Synthetic
aucaacauaucaaguugg

SEQ ID NO: 333768 - RNA, 19 nt, Artificial Sequence
  Synthetic
aaucaacauaucaaguugg

SEQ ID NO: 333769 - RNA, 20 nt, Artificial Sequence
  Synthetic
aaaucaacauaucaaguugg

SEQ ID NO: 333770 - RNA, 21 nt, Artificial Sequence
  Synthetic
aaaaucaacauaucaaguugg

SEQ ID NO: 333771 - RNA, 22 nt, Artificial Sequence
  Synthetic
aaaaaucaacauaucaaguugg

SEQ ID NO: 333772 - RNA, 23 nt, Artificial Sequence
  Synthetic
gaaaaaucaacauaucaaguugg

SEQ ID NO: 333773 - RNA, 24 nt, Artificial Sequence
  Synthetic
agaaaaaucaacauaucaaguugg

SEQ ID NO: 333774 - RNA, 18 nt, Artificial Sequence
  Synthetic
acauugaagucaaguugg

SEQ ID NO: 333775 - RNA, 19 nt, Artificial Sequence
  Synthetic
cacauugaagucaaguugg

SEQ ID NO: 333776 - RNA, 20 nt, Artificial Sequence
  Synthetic
ucacauugaagucaaguugg

SEQ ID NO: 333777 - RNA, 21 nt, Artificial Sequence
  Synthetic
uucacauugaagucaaguugg

SEQ ID NO: 333778 - RNA, 22 nt, Artificial Sequence
  Synthetic
guucacauugaagucaaguugg

SEQ ID NO: 333779 - RNA, 23 nt, Artificial Sequence
  Synthetic
aguucacauugaagucaaguugg

SEQ ID NO: 333780 - RNA, 24 nt, Artificial Sequence
  Synthetic
uaguucacauugaagucaaguugg

SEQ ID NO: 333781 - RNA, 18 nt, Artificial Sequence
  Synthetic
aacaccagaauaaguugg

SEQ ID NO: 333782 - RNA, 19 nt, Artificial Sequence
  Synthetic
uaacaccagaauaaguugg

SEQ ID NO: 333783 - RNA, 20 nt, Artificial Sequence
  Synthetic
auaacaccagaauaaguugg

SEQ ID NO: 333784 - RNA, 21 nt, Artificial Sequence
  Synthetic
aauaacaccagaauaaguugg

SEQ ID NO: 333785 - RNA, 22 nt, Artificial Sequence
  Synthetic
caauaacaccagaauaaguugg

SEQ ID NO: 333786 - RNA, 23 nt, Artificial Sequence
  Synthetic
ccaauaacaccagaauaaguugg

SEQ ID NO: 333787 - RNA, 24 nt, Artificial Sequence
  Synthetic
gccaauaacaccagaauaaguugg

SEQ ID NO: 333788 - RNA, 18 nt, Artificial Sequence
  Synthetic
aaagaagacauaaguugg

SEQ ID NO: 333789 - RNA, 19 nt, Artificial Sequence
  Synthetic
gaaagaagacauaaguugg

SEQ ID NO: 333790 - RNA, 20 nt, Artificial Sequence
  Synthetic
agaaagaagacauaaguugg

SEQ ID NO: 333791 - RNA, 21 nt, Artificial Sequence
  Synthetic
aagaaagaagacauaaguugg

SEQ ID NO: 333792 - RNA, 22 nt, Artificial Sequence
  Synthetic
gaagaaagaagacauaaguugg

SEQ ID NO: 333793 - RNA, 23 nt, Artificial Sequence
  Synthetic
agaagaaagaagacauaaguugg

SEQ ID NO: 333794 - RNA, 24 nt, Artificial Sequence
  Synthetic
gagaagaaagaagacauaaguugg

SEQ ID NO: 333795 - RNA, 18 nt, Artificial Sequence
  Synthetic
auauugugaguaaguugg

SEQ ID NO: 333796 - RNA, 19 nt, Artificial Sequence
  Synthetic
aauauugugaguaaguugg

SEQ ID NO: 333797 - RNA, 20 nt, Artificial Sequence
  Synthetic
uaauauugugaguaaguugg

SEQ ID NO: 333798 - RNA, 21 nt, Artificial Sequence
  Synthetic
auaauauugugaguaaguugg

SEQ ID NO: 333799 - RNA, 22 nt, Artificial Sequence
  Synthetic
gauaauauugugaguaaguugg

SEQ ID NO: 333800 - RNA, 23 nt, Artificial Sequence
  Synthetic
ugauaauauugugaguaaguugg

SEQ ID NO: 333801 - RNA, 24 nt, Artificial Sequence
  Synthetic
cugauaauauugugaguaaguugg

SEQ ID NO: 333802 - RNA, 18 nt, Artificial Sequence
  Synthetic
uagcuuaggcacaguugg

SEQ ID NO: 333803 - RNA, 19 nt, Artificial Sequence
  Synthetic
uuagcuuaggcacaguugg

SEQ ID NO: 333804 - RNA, 20 nt, Artificial Sequence
  Synthetic
cuuagcuuaggcacaguugg

SEQ ID NO: 333805 - RNA, 21 nt, Artificial Sequence
  Synthetic
acuuagcuuaggcacaguugg

SEQ ID NO: 333806 - RNA, 22 nt, Artificial Sequence
  Synthetic
cacuuagcuuaggcacaguugg

SEQ ID NO: 333807 - RNA, 23 nt, Artificial Sequence
  Synthetic
gcacuuagcuuaggcacaguugg

SEQ ID NO: 333808 - RNA, 24 nt, Artificial Sequence
  Synthetic
ggcacuuagcuuaggcacaguugg

SEQ ID NO: 333809 - RNA, 18 nt, Artificial Sequence
  Synthetic
agaggcguccccaguugg

SEQ ID NO: 333810 - RNA, 19 nt, Artificial Sequence
  Synthetic
cagaggcguccccaguugg

SEQ ID NO: 333811 - RNA, 20 nt, Artificial Sequence
  Synthetic
acagaggcguccccaguugg

SEQ ID NO: 333812 - RNA, 21 nt, Artificial Sequence
  Synthetic
aacagaggcguccccaguugg

SEQ ID NO: 333813 - RNA, 22 nt, Artificial Sequence
  Synthetic
gaacagaggcguccccaguugg

SEQ ID NO: 333814 - RNA, 23 nt, Artificial Sequence
  Synthetic
ggaacagaggcguccccaguugg

SEQ ID NO: 333815 - RNA, 24 nt, Artificial Sequence
  Synthetic
uggaacagaggcguccccaguugg

SEQ ID NO: 333816 - RNA, 18 nt, Artificial Sequence
  Synthetic
acuuucuuuagcaguugg

SEQ ID NO: 333817 - RNA, 19 nt, Artificial Sequence
  Synthetic
gacuuucuuuagcaguugg

SEQ ID NO: 333818 - RNA, 20 nt, Artificial Sequence
  Synthetic
ugacuuucuuuagcaguugg

SEQ ID NO: 333819 - RNA, 21 nt, Artificial Sequence
  Synthetic
augacuuucuuuagcaguugg

SEQ ID NO: 333820 - RNA, 22 nt, Artificial Sequence
  Synthetic
caugacuuucuuuagcaguugg

SEQ ID NO: 333821 - RNA, 23 nt, Artificial Sequence
  Synthetic
acaugacuuucuuuagcaguugg

SEQ ID NO: 333822 - RNA, 24 nt, Artificial Sequence
  Synthetic
gacaugacuuucuuuagcaguugg

SEQ ID NO: 333823 - RNA, 18 nt, Artificial Sequence
  Synthetic
cacaaagagugcaguugg

SEQ ID NO: 333824 - RNA, 19 nt, Artificial Sequence
  Synthetic
ucacaaagagugcaguugg

SEQ ID NO: 333825 - RNA, 20 nt, Artificial Sequence
  Synthetic
gucacaaagagugcaguugg

SEQ ID NO: 333826 - RNA, 21 nt, Artificial Sequence
  Synthetic
agucacaaagagugcaguugg

SEQ ID NO: 333827 - RNA, 22 nt, Artificial Sequence
  Synthetic
aagucacaaagagugcaguugg

SEQ ID NO: 333828 - RNA, 23 nt, Artificial Sequence
  Synthetic
aaagucacaaagagugcaguugg

SEQ ID NO: 333829 - RNA, 24 nt, Artificial Sequence
  Synthetic
uaaagucacaaagagugcaguugg

SEQ ID NO: 333830 - RNA, 18 nt, Artificial Sequence
  Synthetic
gaagugguagucaguugg

SEQ ID NO: 333831 - RNA, 19 nt, Artificial Sequence
  Synthetic
agaagugguagucaguugg

SEQ ID NO: 333832 - RNA, 20 nt, Artificial Sequence
  Synthetic
aagaagugguagucaguugg

SEQ ID NO: 333833 - RNA, 21 nt, Artificial Sequence
  Synthetic
gaagaagugguagucaguugg

SEQ ID NO: 333834 - RNA, 22 nt, Artificial Sequence
  Synthetic
ugaagaagugguagucaguugg

SEQ ID NO: 333835 - RNA, 23 nt, Artificial Sequence
  Synthetic
uugaagaagugguagucaguugg

SEQ ID NO: 333836 - RNA, 24 nt, Artificial Sequence
  Synthetic
cuugaagaagugguagucaguugg

SEQ ID NO: 333837 - RNA, 18 nt, Artificial Sequence
  Synthetic
uaauaacguaagaguugg

SEQ ID NO: 333838 - RNA, 19 nt, Artificial Sequence
  Synthetic
auaauaacguaagaguugg

SEQ ID NO: 333839 - RNA, 20 nt, Artificial Sequence
  Synthetic
aauaauaacguaagaguugg

SEQ ID NO: 333840 - RNA, 21 nt, Artificial Sequence
  Synthetic
gaauaauaacguaagaguugg

SEQ ID NO: 333841 - RNA, 22 nt, Artificial Sequence
  Synthetic
ggaauaauaacguaagaguugg

SEQ ID NO: 333842 - RNA, 23 nt, Artificial Sequence
  Synthetic
uggaauaauaacguaagaguugg

SEQ ID NO: 333843 - RNA, 24 nt, Artificial Sequence
  Synthetic
cuggaauaauaacguaagaguugg

SEQ ID NO: 333844 - RNA, 18 nt, Artificial Sequence
  Synthetic
ugcucaguauuuaguugg

SEQ ID NO: 333845 - RNA, 19 nt, Artificial Sequence
  Synthetic
gugcucaguauuuaguugg

SEQ ID NO: 333846 - RNA, 20 nt, Artificial Sequence
  Synthetic
ugugcucaguauuuaguugg

SEQ ID NO: 333847 - RNA, 21 nt, Artificial Sequence
  Synthetic
augugcucaguauuuaguugg

SEQ ID NO: 333848 - RNA, 22 nt, Artificial Sequence
  Synthetic
aaugugcucaguauuuaguugg

SEQ ID NO: 333849 - RNA, 23 nt, Artificial Sequence
  Synthetic
caaugugcucaguauuuaguugg

SEQ ID NO: 333850 - RNA, 24 nt, Artificial Sequence
  Synthetic
acaaugugcucaguauuuaguugg

SEQ ID NO: 333851 - RNA, 18 nt, Artificial Sequence
  Synthetic
ucuuuuuagccgcguugg

SEQ ID NO: 333852 - RNA, 19 nt, Artificial Sequence
  Synthetic
gucuuuuuagccgcguugg

SEQ ID NO: 333853 - RNA, 20 nt, Artificial Sequence
  Synthetic
ugucuuuuuagccgcguugg

SEQ ID NO: 333854 - RNA, 21 nt, Artificial Sequence
  Synthetic
gugucuuuuuagccgcguugg

SEQ ID NO: 333855 - RNA, 22 nt, Artificial Sequence
  Synthetic
ggugucuuuuuagccgcguugg

SEQ ID NO: 333856 - RNA, 23 nt, Artificial Sequence
  Synthetic
aggugucuuuuuagccgcguugg

SEQ ID NO: 333857 - RNA, 24 nt, Artificial Sequence
  Synthetic
aaggugucuuuuuagccgcguugg

SEQ ID NO: 333858 - RNA, 18 nt, Artificial Sequence
  Synthetic
accagugggaggcguugg

SEQ ID NO: 333859 - RNA, 19 nt, Artificial Sequence
  Synthetic
aaccagugggaggcguugg

SEQ ID NO: 333860 - RNA, 20 nt, Artificial Sequence
  Synthetic
uaaccagugggaggcguugg

SEQ ID NO: 333861 - RNA, 21 nt, Artificial Sequence
  Synthetic
uuaaccagugggaggcguugg

SEQ ID NO: 333862 - RNA, 22 nt, Artificial Sequence
  Synthetic
uuuaaccagugggaggcguugg

SEQ ID NO: 333863 - RNA, 23 nt, Artificial Sequence
  Synthetic
auuuaaccagugggaggcguugg

SEQ ID NO: 333864 - RNA, 24 nt, Artificial Sequence
  Synthetic
gauuuaaccagugggaggcguugg

SEQ ID NO: 333865 - RNA, 18 nt, Artificial Sequence
  Synthetic
ucagcucgaagagguugg

SEQ ID NO: 333866 - RNA, 19 nt, Artificial Sequence
  Synthetic
gucagcucgaagagguugg

SEQ ID NO: 333867 - RNA, 20 nt, Artificial Sequence
  Synthetic
ugucagcucgaagagguugg

SEQ ID NO: 333868 - RNA, 21 nt, Artificial Sequence
  Synthetic
augucagcucgaagagguugg

SEQ ID NO: 333869 - RNA, 22 nt, Artificial Sequence
  Synthetic
aaugucagcucgaagagguugg

SEQ ID NO: 333870 - RNA, 23 nt, Artificial Sequence
  Synthetic
uaaugucagcucgaagagguugg

SEQ ID NO: 333871 - RNA, 24 nt, Artificial Sequence
  Synthetic
uuaaugucagcucgaagagguugg

SEQ ID NO: 333872 - RNA, 18 nt, Artificial Sequence
  Synthetic
ucagaggguggagguugg

SEQ ID NO: 333873 - RNA, 19 nt, Artificial Sequence
  Synthetic
aucagaggguggagguugg

SEQ ID NO: 333874 - RNA, 20 nt, Artificial Sequence
  Synthetic
uaucagaggguggagguugg

SEQ ID NO: 333875 - RNA, 21 nt, Artificial Sequence
  Synthetic
cuaucagaggguggagguugg

SEQ ID NO: 333876 - RNA, 22 nt, Artificial Sequence
  Synthetic
ccuaucagaggguggagguugg

SEQ ID NO: 333877 - RNA, 23 nt, Artificial Sequence
  Synthetic
gccuaucagaggguggagguugg

SEQ ID NO: 333878 - RNA, 24 nt, Artificial Sequence
  Synthetic
ggccuaucagaggguggagguugg

SEQ ID NO: 333879 - RNA, 18 nt, Artificial Sequence
  Synthetic
gggcagcagugagguugg

SEQ ID NO: 333880 - RNA, 19 nt, Artificial Sequence
  Synthetic
agggcagcagugagguugg

SEQ ID NO: 333881 - RNA, 20 nt, Artificial Sequence
  Synthetic
gagggcagcagugagguugg

SEQ ID NO: 333882 - RNA, 21 nt, Artificial Sequence
  Synthetic
ugagggcagcagugagguugg

SEQ ID NO: 333883 - RNA, 22 nt, Artificial Sequence
  Synthetic
cugagggcagcagugagguugg

SEQ ID NO: 333884 - RNA, 23 nt, Artificial Sequence
  Synthetic
gcugagggcagcagugagguugg

SEQ ID NO: 333885 - RNA, 24 nt, Artificial Sequence
  Synthetic
ggcugagggcagcagugagguugg

SEQ ID NO: 333886 - RNA, 18 nt, Artificial Sequence
  Synthetic
aguagaaggugagguugg

SEQ ID NO: 333887 - RNA, 19 nt, Artificial Sequence
  Synthetic
aaguagaaggugagguugg

SEQ ID NO: 333888 - RNA, 20 nt, Artificial Sequence
  Synthetic
aaaguagaaggugagguugg

SEQ ID NO: 333889 - RNA, 21 nt, Artificial Sequence
  Synthetic
uaaaguagaaggugagguugg

SEQ ID NO: 333890 - RNA, 22 nt, Artificial Sequence
  Synthetic
auaaaguagaaggugagguugg

SEQ ID NO: 333891 - RNA, 23 nt, Artificial Sequence
  Synthetic
cauaaaguagaaggugagguugg

SEQ ID NO: 333892 - RNA, 24 nt, Artificial Sequence
  Synthetic
gcauaaaguagaaggugagguugg

SEQ ID NO: 333893 - RNA, 18 nt, Artificial Sequence
  Synthetic
gggauaaaugaggguugg

SEQ ID NO: 333894 - RNA, 19 nt, Artificial Sequence
  Synthetic
agggauaaaugaggguugg

SEQ ID NO: 333895 - RNA, 20 nt, Artificial Sequence
  Synthetic
gagggauaaaugaggguugg

SEQ ID NO: 333896 - RNA, 21 nt, Artificial Sequence
  Synthetic
ugagggauaaaugaggguugg

SEQ ID NO: 333897 - RNA, 22 nt, Artificial Sequence
  Synthetic
cugagggauaaaugaggguugg

SEQ ID NO: 333898 - RNA, 23 nt, Artificial Sequence
  Synthetic
gcugagggauaaaugaggguugg

SEQ ID NO: 333899 - RNA, 24 nt, Artificial Sequence
  Synthetic
ggcugagggauaaaugaggguugg

SEQ ID NO: 333900 - RNA, 18 nt, Artificial Sequence
  Synthetic
uuugaagcugaggguugg

SEQ ID NO: 333901 - RNA, 19 nt, Artificial Sequence
  Synthetic
guuugaagcugaggguugg

SEQ ID NO: 333902 - RNA, 20 nt, Artificial Sequence
  Synthetic
aguuugaagcugaggguugg

SEQ ID NO: 333903 - RNA, 21 nt, Artificial Sequence
  Synthetic
caguuugaagcugaggguugg

SEQ ID NO: 333904 - RNA, 22 nt, Artificial Sequence
  Synthetic
acaguuugaagcugaggguugg

SEQ ID NO: 333905 - RNA, 23 nt, Artificial Sequence
  Synthetic
aacaguuugaagcugaggguugg

SEQ ID NO: 333906 - RNA, 24 nt, Artificial Sequence
  Synthetic
aaacaguuugaagcugaggguugg

SEQ ID NO: 333907 - RNA, 18 nt, Artificial Sequence
  Synthetic
acacaguggugggguugg

SEQ ID NO: 333908 - RNA, 19 nt, Artificial Sequence
  Synthetic
cacacaguggugggguugg

SEQ ID NO: 333909 - RNA, 20 nt, Artificial Sequence
  Synthetic
gcacacaguggugggguugg

SEQ ID NO: 333910 - RNA, 21 nt, Artificial Sequence
  Synthetic
cgcacacaguggugggguugg

SEQ ID NO: 333911 - RNA, 22 nt, Artificial Sequence
  Synthetic
ccgcacacaguggugggguugg

SEQ ID NO: 333912 - RNA, 23 nt, Artificial Sequence
  Synthetic
gccgcacacaguggugggguugg

SEQ ID NO: 333913 - RNA, 24 nt, Artificial Sequence
  Synthetic
ugccgcacacaguggugggguugg

SEQ ID NO: 333914 - RNA, 18 nt, Artificial Sequence
  Synthetic
uucuggcaaguggguugg

SEQ ID NO: 333915 - RNA, 19 nt, Artificial Sequence
  Synthetic
cuucuggcaaguggguugg

SEQ ID NO: 333916 - RNA, 20 nt, Artificial Sequence
  Synthetic
gcuucuggcaaguggguugg

SEQ ID NO: 333917 - RNA, 21 nt, Artificial Sequence
  Synthetic
ugcuucuggcaaguggguugg

SEQ ID NO: 333918 - RNA, 22 nt, Artificial Sequence
  Synthetic
augcuucuggcaaguggguugg

SEQ ID NO: 333919 - RNA, 23 nt, Artificial Sequence
  Synthetic
aaugcuucuggcaaguggguugg

SEQ ID NO: 333920 - RNA, 24 nt, Artificial Sequence
  Synthetic
caaugcuucuggcaaguggguugg

SEQ ID NO: 333921 - RNA, 18 nt, Artificial Sequence
  Synthetic
uaggggagguaugguugg

SEQ ID NO: 333922 - RNA, 19 nt, Artificial Sequence
  Synthetic
guaggggagguaugguugg

SEQ ID NO: 333923 - RNA, 20 nt, Artificial Sequence
  Synthetic
uguaggggagguaugguugg

SEQ ID NO: 333924 - RNA, 21 nt, Artificial Sequence
  Synthetic
auguaggggagguaugguugg

SEQ ID NO: 333925 - RNA, 22 nt, Artificial Sequence
  Synthetic
cauguaggggagguaugguugg

SEQ ID NO: 333926 - RNA, 23 nt, Artificial Sequence
  Synthetic
acauguaggggagguaugguugg

SEQ ID NO: 333927 - RNA, 24 nt, Artificial Sequence
  Synthetic
cacauguaggggagguaugguugg

SEQ ID NO: 333928 - RNA, 18 nt, Artificial Sequence
  Synthetic
uuuaaaaccagauguugg

SEQ ID NO: 333929 - RNA, 19 nt, Artificial Sequence
  Synthetic
auuuaaaaccagauguugg

SEQ ID NO: 333930 - RNA, 20 nt, Artificial Sequence
  Synthetic
cauuuaaaaccagauguugg

SEQ ID NO: 333931 - RNA, 21 nt, Artificial Sequence
  Synthetic
gcauuuaaaaccagauguugg

SEQ ID NO: 333932 - RNA, 22 nt, Artificial Sequence
  Synthetic
agcauuuaaaaccagauguugg

SEQ ID NO: 333933 - RNA, 23 nt, Artificial Sequence
  Synthetic
uagcauuuaaaaccagauguugg

SEQ ID NO: 333934 - RNA, 24 nt, Artificial Sequence
  Synthetic
auagcauuuaaaaccagauguugg

SEQ ID NO: 333935 - RNA, 18 nt, Artificial Sequence
  Synthetic
agggauaugagauguugg

SEQ ID NO: 333936 - RNA, 19 nt, Artificial Sequence
  Synthetic
cagggauaugagauguugg

SEQ ID NO: 333937 - RNA, 20 nt, Artificial Sequence
  Synthetic
acagggauaugagauguugg

SEQ ID NO: 333938 - RNA, 21 nt, Artificial Sequence
  Synthetic
gacagggauaugagauguugg

SEQ ID NO: 333939 - RNA, 22 nt, Artificial Sequence
  Synthetic
ggacagggauaugagauguugg

SEQ ID NO: 333940 - RNA, 23 nt, Artificial Sequence
  Synthetic
gggacagggauaugagauguugg

SEQ ID NO: 333941 - RNA, 24 nt, Artificial Sequence
  Synthetic
ggggacagggauaugagauguugg

SEQ ID NO: 333942 - RNA, 18 nt, Artificial Sequence
  Synthetic
aaagucuugagauguugg

SEQ ID NO: 333943 - RNA, 19 nt, Artificial Sequence
  Synthetic
caaagucuugagauguugg

SEQ ID NO: 333944 - RNA, 20 nt, Artificial Sequence
  Synthetic
acaaagucuugagauguugg

SEQ ID NO: 333945 - RNA, 21 nt, Artificial Sequence
  Synthetic
aacaaagucuugagauguugg

SEQ ID NO: 333946 - RNA, 22 nt, Artificial Sequence
  Synthetic
gaacaaagucuugagauguugg

SEQ ID NO: 333947 - RNA, 23 nt, Artificial Sequence
  Synthetic
ugaacaaagucuugagauguugg

SEQ ID NO: 333948 - RNA, 24 nt, Artificial Sequence
  Synthetic
augaacaaagucuugagauguugg

SEQ ID NO: 333949 - RNA, 18 nt, Artificial Sequence
  Synthetic
gaagcagugggauguugg

SEQ ID NO: 333950 - RNA, 19 nt, Artificial Sequence
  Synthetic
ggaagcagugggauguugg

SEQ ID NO: 333951 - RNA, 20 nt, Artificial Sequence
  Synthetic
uggaagcagugggauguugg

SEQ ID NO: 333952 - RNA, 21 nt, Artificial Sequence
  Synthetic
cuggaagcagugggauguugg

SEQ ID NO: 333953 - RNA, 22 nt, Artificial Sequence
  Synthetic
acuggaagcagugggauguugg

SEQ ID NO: 333954 - RNA, 23 nt, Artificial Sequence
  Synthetic
aacuggaagcagugggauguugg

SEQ ID NO: 333955 - RNA, 24 nt, Artificial Sequence
  Synthetic
caacuggaagcagugggauguugg

SEQ ID NO: 333956 - RNA, 18 nt, Artificial Sequence
  Synthetic
agacuuagauuauguugg

SEQ ID NO: 333957 - RNA, 19 nt, Artificial Sequence
  Synthetic
aagacuuagauuauguugg

SEQ ID NO: 333958 - RNA, 20 nt, Artificial Sequence
  Synthetic
caagacuuagauuauguugg

SEQ ID NO: 333959 - RNA, 21 nt, Artificial Sequence
  Synthetic
ccaagacuuagauuauguugg

SEQ ID NO: 333960 - RNA, 22 nt, Artificial Sequence
  Synthetic
cccaagacuuagauuauguugg

SEQ ID NO: 333961 - RNA, 23 nt, Artificial Sequence
  Synthetic
acccaagacuuagauuauguugg

SEQ ID NO: 333962 - RNA, 24 nt, Artificial Sequence
  Synthetic
aacccaagacuuagauuauguugg

SEQ ID NO: 333963 - RNA, 18 nt, Artificial Sequence
  Synthetic
guauuuuguaacuguugg

SEQ ID NO: 333964 - RNA, 19 nt, Artificial Sequence
  Synthetic
aguauuuuguaacuguugg

SEQ ID NO: 333965 - RNA, 20 nt, Artificial Sequence
  Synthetic
aaguauuuuguaacuguugg

SEQ ID NO: 333966 - RNA, 21 nt, Artificial Sequence
  Synthetic
caaguauuuuguaacuguugg

SEQ ID NO: 333967 - RNA, 22 nt, Artificial Sequence
  Synthetic
acaaguauuuuguaacuguugg

SEQ ID NO: 333968 - RNA, 23 nt, Artificial Sequence
  Synthetic
gacaaguauuuuguaacuguugg

SEQ ID NO: 333969 - RNA, 24 nt, Artificial Sequence
  Synthetic
agacaaguauuuuguaacuguugg

SEQ ID NO: 333970 - RNA, 18 nt, Artificial Sequence
  Synthetic
acacuucuacacuguugg

SEQ ID NO: 333971 - RNA, 19 nt, Artificial Sequence
  Synthetic
aacacuucuacacuguugg

SEQ ID NO: 333972 - RNA, 20 nt, Artificial Sequence
  Synthetic
gaacacuucuacacuguugg

SEQ ID NO: 333973 - RNA, 21 nt, Artificial Sequence
  Synthetic
ggaacacuucuacacuguugg

SEQ ID NO: 333974 - RNA, 22 nt, Artificial Sequence
  Synthetic
aggaacacuucuacacuguugg

SEQ ID NO: 333975 - RNA, 23 nt, Artificial Sequence
  Synthetic
uaggaacacuucuacacuguugg

SEQ ID NO: 333976 - RNA, 24 nt, Artificial Sequence
  Synthetic
auaggaacacuucuacacuguugg

SEQ ID NO: 333977 - RNA, 18 nt, Artificial Sequence
  Synthetic
acacucuuacacuguugg

SEQ ID NO: 333978 - RNA, 19 nt, Artificial Sequence
  Synthetic
aacacucuuacacuguugg

SEQ ID NO: 333979 - RNA, 20 nt, Artificial Sequence
  Synthetic
gaacacucuuacacuguugg

SEQ ID NO: 333980 - RNA, 21 nt, Artificial Sequence
  Synthetic
ggaacacucuuacacuguugg

SEQ ID NO: 333981 - RNA, 22 nt, Artificial Sequence
  Synthetic
aggaacacucuuacacuguugg

SEQ ID NO: 333982 - RNA, 23 nt, Artificial Sequence
  Synthetic
uaggaacacucuuacacuguugg

SEQ ID NO: 333983 - RNA, 24 nt, Artificial Sequence
  Synthetic
auaggaacacucuuacacuguugg

SEQ ID NO: 333984 - RNA, 18 nt, Artificial Sequence
  Synthetic
acacuuuuacacuguugg

SEQ ID NO: 333985 - RNA, 19 nt, Artificial Sequence
  Synthetic
aacacuuuuacacuguugg

SEQ ID NO: 333986 - RNA, 20 nt, Artificial Sequence
  Synthetic
gaacacuuuuacacuguugg

SEQ ID NO: 333987 - RNA, 21 nt, Artificial Sequence
  Synthetic
ggaacacuuuuacacuguugg

SEQ ID NO: 333988 - RNA, 22 nt, Artificial Sequence
  Synthetic
aggaacacuuuuacacuguugg

SEQ ID NO: 333989 - RNA, 23 nt, Artificial Sequence
  Synthetic
caggaacacuuuuacacuguugg

SEQ ID NO: 333990 - RNA, 24 nt, Artificial Sequence
  Synthetic
acaggaacacuuuuacacuguugg

SEQ ID NO: 333991 - RNA, 23 nt, Artificial Sequence
  Synthetic
uaggaacacuuuuacacuguugg

SEQ ID NO: 333992 - RNA, 24 nt, Artificial Sequence
  Synthetic
auaggaacacuuuuacacuguugg

SEQ ID NO: 333993 - RNA, 18 nt, Artificial Sequence
  Synthetic
acgcuuuuacacuguugg

SEQ ID NO: 333994 - RNA, 19 nt, Artificial Sequence
  Synthetic
aacgcuuuuacacuguugg

SEQ ID NO: 333995 - RNA, 20 nt, Artificial Sequence
  Synthetic
gaacgcuuuuacacuguugg

SEQ ID NO: 333996 - RNA, 23 nt, Artificial Sequence
  Synthetic
uaggaacgcuuuuacacuguugg

SEQ ID NO: 333997 - RNA, 24 nt, Artificial Sequence
  Synthetic
auaggaacgcuuuuacacuguugg

SEQ ID NO: 333998 - RNA, 18 nt, Artificial Sequence
  Synthetic
gugcuuuuacacuguugg

SEQ ID NO: 333999 - RNA, 19 nt, Artificial Sequence
  Synthetic
ugugcuuuuacacuguugg

SEQ ID NO: 334000 - RNA, 20 nt, Artificial Sequence
  Synthetic
gugugcuuuuacacuguugg

SEQ ID NO: 334001 - RNA, 21 nt, Artificial Sequence
  Synthetic
ggugugcuuuuacacuguugg

SEQ ID NO: 334002 - RNA, 22 nt, Artificial Sequence
  Synthetic
aggugugcuuuuacacuguugg

SEQ ID NO: 334003 - RNA, 23 nt, Artificial Sequence
  Synthetic
uaggugugcuuuuacacuguugg

SEQ ID NO: 334004 - RNA, 24 nt, Artificial Sequence
  Synthetic
auaggugugcuuuuacacuguugg

SEQ ID NO: 334005 - RNA, 18 nt, Artificial Sequence
  Synthetic
gguggcauugacuguugg

SEQ ID NO: 334006 - RNA, 19 nt, Artificial Sequence
  Synthetic
ugguggcauugacuguugg

SEQ ID NO: 334007 - RNA, 20 nt, Artificial Sequence
  Synthetic
uugguggcauugacuguugg

SEQ ID NO: 334008 - RNA, 21 nt, Artificial Sequence
  Synthetic
cuugguggcauugacuguugg

SEQ ID NO: 334009 - RNA, 22 nt, Artificial Sequence
  Synthetic
ccuugguggcauugacuguugg

SEQ ID NO: 334010 - RNA, 23 nt, Artificial Sequence
  Synthetic
cccuugguggcauugacuguugg

SEQ ID NO: 334011 - RNA, 24 nt, Artificial Sequence
  Synthetic
ucccuugguggcauugacuguugg

SEQ ID NO: 334012 - RNA, 18 nt, Artificial Sequence
  Synthetic
aacauuauacgcuguugg

SEQ ID NO: 334013 - RNA, 19 nt, Artificial Sequence
  Synthetic
gaacauuauacgcuguugg

SEQ ID NO: 334014 - RNA, 20 nt, Artificial Sequence
  Synthetic
ggaacauuauacgcuguugg

SEQ ID NO: 334015 - RNA, 21 nt, Artificial Sequence
  Synthetic
gggaacauuauacgcuguugg

SEQ ID NO: 334016 - RNA, 22 nt, Artificial Sequence
  Synthetic
agggaacauuauacgcuguugg

SEQ ID NO: 334017 - RNA, 23 nt, Artificial Sequence
  Synthetic
aagggaacauuauacgcuguugg

SEQ ID NO: 334018 - RNA, 24 nt, Artificial Sequence
  Synthetic
aaagggaacauuauacgcuguugg

SEQ ID NO: 334019 - RNA, 18 nt, Artificial Sequence
  Synthetic
caggaauccaucuguugg

SEQ ID NO: 334020 - RNA, 19 nt, Artificial Sequence
  Synthetic
acaggaauccaucuguugg

SEQ ID NO: 334021 - RNA, 20 nt, Artificial Sequence
  Synthetic
uacaggaauccaucuguugg

SEQ ID NO: 334022 - RNA, 21 nt, Artificial Sequence
  Synthetic
auacaggaauccaucuguugg

SEQ ID NO: 334023 - RNA, 22 nt, Artificial Sequence
  Synthetic
aauacaggaauccaucuguugg

SEQ ID NO: 334024 - RNA, 23 nt, Artificial Sequence
  Synthetic
uaauacaggaauccaucuguugg

SEQ ID NO: 334025 - RNA, 24 nt, Artificial Sequence
  Synthetic
cuaauacaggaauccaucuguugg

SEQ ID NO: 334026 - RNA, 18 nt, Artificial Sequence
  Synthetic
cuauuguguguguguugg

SEQ ID NO: 334027 - RNA, 19 nt, Artificial Sequence
  Synthetic
acuauuguguguguguugg

SEQ ID NO: 334028 - RNA, 20 nt, Artificial Sequence
  Synthetic
uacuauuguguguguguugg

SEQ ID NO: 334029 - RNA, 21 nt, Artificial Sequence
  Synthetic
uuacuauuguguguguguugg

SEQ ID NO: 334030 - RNA, 22 nt, Artificial Sequence
  Synthetic
guuacuauuguguguguguugg

SEQ ID NO: 334031 - RNA, 23 nt, Artificial Sequence
  Synthetic
aguuacuauuguguguguguugg

SEQ ID NO: 334032 - RNA, 24 nt, Artificial Sequence
  Synthetic
uaguuacuauuguguguguguugg

SEQ ID NO: 334033 - RNA, 18 nt, Artificial Sequence
  Synthetic
guuaauaauaauuguugg

SEQ ID NO: 334034 - RNA, 19 nt, Artificial Sequence
  Synthetic
uguuaauaauaauuguugg

SEQ ID NO: 334035 - RNA, 20 nt, Artificial Sequence
  Synthetic
uuguuaauaauaauuguugg

SEQ ID NO: 334036 - RNA, 21 nt, Artificial Sequence
  Synthetic
guuguuaauaauaauuguugg

SEQ ID NO: 334037 - RNA, 22 nt, Artificial Sequence
  Synthetic
uguuguuaauaauaauuguugg

SEQ ID NO: 334038 - RNA, 23 nt, Artificial Sequence
  Synthetic
uuguuguuaauaauaauuguugg

SEQ ID NO: 334039 - RNA, 24 nt, Artificial Sequence
  Synthetic
guuguuguuaauaauaauuguugg

SEQ ID NO: 334040 - RNA, 18 nt, Artificial Sequence
  Synthetic
auauggccuccuuguugg

SEQ ID NO: 334041 - RNA, 19 nt, Artificial Sequence
  Synthetic
aauauggccuccuuguugg

SEQ ID NO: 334042 - RNA, 20 nt, Artificial Sequence
  Synthetic
aaauauggccuccuuguugg

SEQ ID NO: 334043 - RNA, 21 nt, Artificial Sequence
  Synthetic
uaaauauggccuccuuguugg

SEQ ID NO: 334044 - RNA, 22 nt, Artificial Sequence
  Synthetic
cuaaauauggccuccuuguugg

SEQ ID NO: 334045 - RNA, 23 nt, Artificial Sequence
  Synthetic
ucuaaauauggccuccuuguugg

SEQ ID NO: 334046 - RNA, 24 nt, Artificial Sequence
  Synthetic
aucuaaauauggccuccuuguugg

SEQ ID NO: 334047 - RNA, 18 nt, Artificial Sequence
  Synthetic
uagauaacagcuuguugg

SEQ ID NO: 334048 - RNA, 19 nt, Artificial Sequence
  Synthetic
uuagauaacagcuuguugg

SEQ ID NO: 334049 - RNA, 20 nt, Artificial Sequence
  Synthetic
auuagauaacagcuuguugg

SEQ ID NO: 334050 - RNA, 21 nt, Artificial Sequence
  Synthetic
aauuagauaacagcuuguugg

SEQ ID NO: 334051 - RNA, 22 nt, Artificial Sequence
  Synthetic
caauuagauaacagcuuguugg

SEQ ID NO: 334052 - RNA, 23 nt, Artificial Sequence
  Synthetic
acaauuagauaacagcuuguugg

SEQ ID NO: 334053 - RNA, 24 nt, Artificial Sequence
  Synthetic
aacaauuagauaacagcuuguugg

SEQ ID NO: 334054 - RNA, 18 nt, Artificial Sequence
  Synthetic
aagcugcaggguuguugg

SEQ ID NO: 334055 - RNA, 19 nt, Artificial Sequence
  Synthetic
aaagcugcaggguuguugg

SEQ ID NO: 334056 - RNA, 20 nt, Artificial Sequence
  Synthetic
aaaagcugcaggguuguugg

SEQ ID NO: 334057 - RNA, 21 nt, Artificial Sequence
  Synthetic
gaaaagcugcaggguuguugg

SEQ ID NO: 334058 - RNA, 22 nt, Artificial Sequence
  Synthetic
agaaaagcugcaggguuguugg

SEQ ID NO: 334059 - RNA, 23 nt, Artificial Sequence
  Synthetic
cagaaaagcugcaggguuguugg

SEQ ID NO: 334060 - RNA, 24 nt, Artificial Sequence
  Synthetic
ucagaaaagcugcaggguuguugg

SEQ ID NO: 334061 - RNA, 18 nt, Artificial Sequence
  Synthetic
aacaauuaagaaauuugg

SEQ ID NO: 334062 - RNA, 19 nt, Artificial Sequence
  Synthetic
aaacaauuaagaaauuugg

SEQ ID NO: 334063 - RNA, 20 nt, Artificial Sequence
  Synthetic
aaaacaauuaagaaauuugg

SEQ ID NO: 334064 - RNA, 21 nt, Artificial Sequence
  Synthetic
gaaaacaauuaagaaauuugg

SEQ ID NO: 334065 - RNA, 22 nt, Artificial Sequence
  Synthetic
ggaaaacaauuaagaaauuugg

SEQ ID NO: 334066 - RNA, 23 nt, Artificial Sequence
  Synthetic
uggaaaacaauuaagaaauuugg

SEQ ID NO: 334067 - RNA, 24 nt, Artificial Sequence
  Synthetic
uuggaaaacaauuaagaaauuugg

SEQ ID NO: 334068 - RNA, 18 nt, Artificial Sequence
  Synthetic
uggcuuuaggaaauuugg

SEQ ID NO: 334069 - RNA, 19 nt, Artificial Sequence
  Synthetic
auggcuuuaggaaauuugg

SEQ ID NO: 334070 - RNA, 20 nt, Artificial Sequence
  Synthetic
uauggcuuuaggaaauuugg

SEQ ID NO: 334071 - RNA, 21 nt, Artificial Sequence
  Synthetic
cuauggcuuuaggaaauuugg

SEQ ID NO: 334072 - RNA, 22 nt, Artificial Sequence
  Synthetic
acuauggcuuuaggaaauuugg

SEQ ID NO: 334073 - RNA, 23 nt, Artificial Sequence
  Synthetic
aacuauggcuuuaggaaauuugg

SEQ ID NO: 334074 - RNA, 24 nt, Artificial Sequence
  Synthetic
gaacuauggcuuuaggaaauuugg

SEQ ID NO: 334075 - RNA, 18 nt, Artificial Sequence
  Synthetic
ggauaccuaucaauuugg

SEQ ID NO: 334076 - RNA, 19 nt, Artificial Sequence
  Synthetic
uggauaccuaucaauuugg

SEQ ID NO: 334077 - RNA, 20 nt, Artificial Sequence
  Synthetic
auggauaccuaucaauuugg

SEQ ID NO: 334078 - RNA, 21 nt, Artificial Sequence
  Synthetic
aauggauaccuaucaauuugg

SEQ ID NO: 334079 - RNA, 22 nt, Artificial Sequence
  Synthetic
uaauggauaccuaucaauuugg

SEQ ID NO: 334080 - RNA, 23 nt, Artificial Sequence
  Synthetic
cuaauggauaccuaucaauuugg

SEQ ID NO: 334081 - RNA, 24 nt, Artificial Sequence
  Synthetic
ucuaauggauaccuaucaauuugg

SEQ ID NO: 334082 - RNA, 18 nt, Artificial Sequence
  Synthetic
cagucccucagaauuugg

SEQ ID NO: 334083 - RNA, 19 nt, Artificial Sequence
  Synthetic
acagucccucagaauuugg

SEQ ID NO: 334084 - RNA, 20 nt, Artificial Sequence
  Synthetic
cacagucccucagaauuugg

SEQ ID NO: 334085 - RNA, 21 nt, Artificial Sequence
  Synthetic
acacagucccucagaauuugg

SEQ ID NO: 334086 - RNA, 22 nt, Artificial Sequence
  Synthetic
cacacagucccucagaauuugg

SEQ ID NO: 334087 - RNA, 23 nt, Artificial Sequence
  Synthetic
ccacacagucccucagaauuugg

SEQ ID NO: 334088 - RNA, 24 nt, Artificial Sequence
  Synthetic
uccacacagucccucagaauuugg

SEQ ID NO: 334089 - RNA, 18 nt, Artificial Sequence
  Synthetic
cuaaugucuagaauuugg

SEQ ID NO: 334090 - RNA, 19 nt, Artificial Sequence
  Synthetic
gcuaaugucuagaauuugg

SEQ ID NO: 334091 - RNA, 20 nt, Artificial Sequence
  Synthetic
agcuaaugucuagaauuugg

SEQ ID NO: 334092 - RNA, 21 nt, Artificial Sequence
  Synthetic
gagcuaaugucuagaauuugg

SEQ ID NO: 334093 - RNA, 22 nt, Artificial Sequence
  Synthetic
ggagcuaaugucuagaauuugg

SEQ ID NO: 334094 - RNA, 23 nt, Artificial Sequence
  Synthetic
aggagcuaaugucuagaauuugg

SEQ ID NO: 334095 - RNA, 24 nt, Artificial Sequence
  Synthetic
caggagcuaaugucuagaauuugg

SEQ ID NO: 334096 - RNA, 18 nt, Artificial Sequence
  Synthetic
gugugcucaggaauuugg

SEQ ID NO: 334097 - RNA, 19 nt, Artificial Sequence
  Synthetic
ugugugcucaggaauuugg

SEQ ID NO: 334098 - RNA, 20 nt, Artificial Sequence
  Synthetic
augugugcucaggaauuugg

SEQ ID NO: 334099 - RNA, 21 nt, Artificial Sequence
  Synthetic
uaugugugcucaggaauuugg

SEQ ID NO: 334100 - RNA, 22 nt, Artificial Sequence
  Synthetic
auaugugugcucaggaauuugg

SEQ ID NO: 334101 - RNA, 23 nt, Artificial Sequence
  Synthetic
aauaugugugcucaggaauuugg

SEQ ID NO: 334102 - RNA, 24 nt, Artificial Sequence
  Synthetic
uaauaugugugcucaggaauuugg

SEQ ID NO: 334103 - RNA, 18 nt, Artificial Sequence
  Synthetic
uugguauuacuaauuugg

SEQ ID NO: 334104 - RNA, 19 nt, Artificial Sequence
  Synthetic
auugguauuacuaauuugg

SEQ ID NO: 334105 - RNA, 20 nt, Artificial Sequence
  Synthetic
aauugguauuacuaauuugg

SEQ ID NO: 334106 - RNA, 21 nt, Artificial Sequence
  Synthetic
uaauugguauuacuaauuugg

SEQ ID NO: 334107 - RNA, 22 nt, Artificial Sequence
  Synthetic
uuaauugguauuacuaauuugg

SEQ ID NO: 334108 - RNA, 23 nt, Artificial Sequence
  Synthetic
uuuaauugguauuacuaauuugg

SEQ ID NO: 334109 - RNA, 24 nt, Artificial Sequence
  Synthetic
auuuaauugguauuacuaauuugg

SEQ ID NO: 334110 - RNA, 18 nt, Artificial Sequence
  Synthetic
acuucaguuuuaauuugg

SEQ ID NO: 334111 - RNA, 19 nt, Artificial Sequence
  Synthetic
uacuucaguuuuaauuugg

SEQ ID NO: 334112 - RNA, 20 nt, Artificial Sequence
  Synthetic
guacuucaguuuuaauuugg

SEQ ID NO: 334113 - RNA, 21 nt, Artificial Sequence
  Synthetic
uguacuucaguuuuaauuugg

SEQ ID NO: 334114 - RNA, 22 nt, Artificial Sequence
  Synthetic
cuguacuucaguuuuaauuugg

SEQ ID NO: 334115 - RNA, 23 nt, Artificial Sequence
  Synthetic
acuguacuucaguuuuaauuugg

SEQ ID NO: 334116 - RNA, 24 nt, Artificial Sequence
  Synthetic
aacuguacuucaguuuuaauuugg

SEQ ID NO: 334117 - RNA, 18 nt, Artificial Sequence
  Synthetic
cauaaacacuacauuugg

SEQ ID NO: 334118 - RNA, 19 nt, Artificial Sequence
  Synthetic
gcauaaacacuacauuugg

SEQ ID NO: 334119 - RNA, 20 nt, Artificial Sequence
  Synthetic
ggcauaaacacuacauuugg

SEQ ID NO: 334120 - RNA, 21 nt, Artificial Sequence
  Synthetic
aggcauaaacacuacauuugg

SEQ ID NO: 334121 - RNA, 22 nt, Artificial Sequence
  Synthetic
aaggcauaaacacuacauuugg

SEQ ID NO: 334122 - RNA, 23 nt, Artificial Sequence
  Synthetic
aaaggcauaaacacuacauuugg

SEQ ID NO: 334123 - RNA, 24 nt, Artificial Sequence
  Synthetic
caaaggcauaaacacuacauuugg

SEQ ID NO: 334124 - RNA, 18 nt, Artificial Sequence
  Synthetic
uauggaucuuacauuugg

SEQ ID NO: 334125 - RNA, 19 nt, Artificial Sequence
  Synthetic
uuauggaucuuacauuugg

SEQ ID NO: 334126 - RNA, 20 nt, Artificial Sequence
  Synthetic
uuuauggaucuuacauuugg

SEQ ID NO: 334127 - RNA, 21 nt, Artificial Sequence
  Synthetic
cuuuauggaucuuacauuugg

SEQ ID NO: 334128 - RNA, 22 nt, Artificial Sequence
  Synthetic
ucuuuauggaucuuacauuugg

SEQ ID NO: 334129 - RNA, 23 nt, Artificial Sequence
  Synthetic
gucuuuauggaucuuacauuugg

SEQ ID NO: 334130 - RNA, 24 nt, Artificial Sequence
  Synthetic
ugucuuuauggaucuuacauuugg

SEQ ID NO: 334131 - RNA, 18 nt, Artificial Sequence
  Synthetic
uaacagcggaucauuugg

SEQ ID NO: 334132 - RNA, 19 nt, Artificial Sequence
  Synthetic
cuaacagcggaucauuugg

SEQ ID NO: 334133 - RNA, 20 nt, Artificial Sequence
  Synthetic
acuaacagcggaucauuugg

SEQ ID NO: 334134 - RNA, 21 nt, Artificial Sequence
  Synthetic
gacuaacagcggaucauuugg

SEQ ID NO: 334135 - RNA, 22 nt, Artificial Sequence
  Synthetic
agacuaacagcggaucauuugg

SEQ ID NO: 334136 - RNA, 23 nt, Artificial Sequence
  Synthetic
cagacuaacagcggaucauuugg

SEQ ID NO: 334137 - RNA, 24 nt, Artificial Sequence
  Synthetic
ucagacuaacagcggaucauuugg

SEQ ID NO: 334138 - RNA, 18 nt, Artificial Sequence
  Synthetic
uuacugguauucauuugg

SEQ ID NO: 334139 - RNA, 19 nt, Artificial Sequence
  Synthetic
guuacugguauucauuugg

SEQ ID NO: 334140 - RNA, 20 nt, Artificial Sequence
  Synthetic
uguuacugguauucauuugg

SEQ ID NO: 334141 - RNA, 21 nt, Artificial Sequence
  Synthetic
guguuacugguauucauuugg

SEQ ID NO: 334142 - RNA, 22 nt, Artificial Sequence
  Synthetic
aguguuacugguauucauuugg

SEQ ID NO: 334143 - RNA, 23 nt, Artificial Sequence
  Synthetic
gaguguuacugguauucauuugg

SEQ ID NO: 334144 - RNA, 24 nt, Artificial Sequence
  Synthetic
ggaguguuacugguauucauuugg

SEQ ID NO: 334145 - RNA, 18 nt, Artificial Sequence
  Synthetic
auucagaaugagauuugg

SEQ ID NO: 334146 - RNA, 19 nt, Artificial Sequence
  Synthetic
aauucagaaugagauuugg

SEQ ID NO: 334147 - RNA, 20 nt, Artificial Sequence
  Synthetic
caauucagaaugagauuugg

SEQ ID NO: 334148 - RNA, 21 nt, Artificial Sequence
  Synthetic
acaauucagaaugagauuugg

SEQ ID NO: 334149 - RNA, 22 nt, Artificial Sequence
  Synthetic
uacaauucagaaugagauuugg

SEQ ID NO: 334150 - RNA, 23 nt, Artificial Sequence
  Synthetic
cuacaauucagaaugagauuugg

SEQ ID NO: 334151 - RNA, 24 nt, Artificial Sequence
  Synthetic
acuacaauucagaaugagauuugg

SEQ ID NO: 334152 - RNA, 18 nt, Artificial Sequence
  Synthetic
auucaacaugagauuugg

SEQ ID NO: 334153 - RNA, 19 nt, Artificial Sequence
  Synthetic
aauucaacaugagauuugg

SEQ ID NO: 334154 - RNA, 20 nt, Artificial Sequence
  Synthetic
gaauucaacaugagauuugg

SEQ ID NO: 334155 - RNA, 21 nt, Artificial Sequence
  Synthetic
ggaauucaacaugagauuugg

SEQ ID NO: 334156 - RNA, 22 nt, Artificial Sequence
  Synthetic
gggaauucaacaugagauuugg

SEQ ID NO: 334157 - RNA, 23 nt, Artificial Sequence
  Synthetic
ugggaauucaacaugagauuugg

SEQ ID NO: 334158 - RNA, 24 nt, Artificial Sequence
  Synthetic
augggaauucaacaugagauuugg

SEQ ID NO: 334159 - RNA, 18 nt, Artificial Sequence
  Synthetic
uuucaacaugagauuugg

SEQ ID NO: 334160 - RNA, 19 nt, Artificial Sequence
  Synthetic
auuucaacaugagauuugg

SEQ ID NO: 334161 - RNA, 20 nt, Artificial Sequence
  Synthetic
aauuucaacaugagauuugg

SEQ ID NO: 334162 - RNA, 21 nt, Artificial Sequence
  Synthetic
aaauuucaacaugagauuugg

SEQ ID NO: 334163 - RNA, 22 nt, Artificial Sequence
  Synthetic
caaauuucaacaugagauuugg

SEQ ID NO: 334164 - RNA, 23 nt, Artificial Sequence
  Synthetic
ucaaauuucaacaugagauuugg

SEQ ID NO: 334165 - RNA, 24 nt, Artificial Sequence
  Synthetic
aucaaauuucaacaugagauuugg

SEQ ID NO: 334166 - RNA, 18 nt, Artificial Sequence
  Synthetic
ugaugacaugagauuugg

SEQ ID NO: 334167 - RNA, 19 nt, Artificial Sequence
  Synthetic
gugaugacaugagauuugg

SEQ ID NO: 334168 - RNA, 20 nt, Artificial Sequence
  Synthetic
ugugaugacaugagauuugg

SEQ ID NO: 334169 - RNA, 21 nt, Artificial Sequence
  Synthetic
augugaugacaugagauuugg

SEQ ID NO: 334170 - RNA, 22 nt, Artificial Sequence
  Synthetic
aaugugaugacaugagauuugg

SEQ ID NO: 334171 - RNA, 23 nt, Artificial Sequence
  Synthetic
aaaugugaugacaugagauuugg

SEQ ID NO: 334172 - RNA, 24 nt, Artificial Sequence
  Synthetic
gaaaugugaugacaugagauuugg

SEQ ID NO: 334173 - RNA, 18 nt, Artificial Sequence
  Synthetic
auucaagaugagauuugg

SEQ ID NO: 334174 - RNA, 19 nt, Artificial Sequence
  Synthetic
aauucaagaugagauuugg

SEQ ID NO: 334175 - RNA, 21 nt, Artificial Sequence
  Synthetic
acaauucaagaugagauuugg

SEQ ID NO: 334176 - RNA, 22 nt, Artificial Sequence
  Synthetic
uacaauucaagaugagauuugg

SEQ ID NO: 334177 - RNA, 23 nt, Artificial Sequence
  Synthetic
cuacaauucaagaugagauuugg

SEQ ID NO: 334178 - RNA, 24 nt, Artificial Sequence
  Synthetic
gcuacaauucaagaugagauuugg

SEQ ID NO: 334179 - RNA, 23 nt, Artificial Sequence
  Synthetic
uuacaauucaagaugagauuugg

SEQ ID NO: 334180 - RNA, 24 nt, Artificial Sequence
  Synthetic
auuacaauucaagaugagauuugg

SEQ ID NO: 334181 - RNA, 24 nt, Artificial Sequence
  Synthetic
guuacaauucaagaugagauuugg

SEQ ID NO: 334182 - RNA, 20 nt, Artificial Sequence
  Synthetic
gaauucaagaugagauuugg

SEQ ID NO: 334183 - RNA, 21 nt, Artificial Sequence
  Synthetic
ggaauucaagaugagauuugg

SEQ ID NO: 334184 - RNA, 22 nt, Artificial Sequence
  Synthetic
aggaauucaagaugagauuugg

SEQ ID NO: 334185 - RNA, 23 nt, Artificial Sequence
  Synthetic
uaggaauucaagaugagauuugg

SEQ ID NO: 334186 - RNA, 24 nt, Artificial Sequence
  Synthetic
guaggaauucaagaugagauuugg

SEQ ID NO: 334187 - RNA, 18 nt, Artificial Sequence
  Synthetic
uuucaagaugagauuugg

SEQ ID NO: 334188 - RNA, 19 nt, Artificial Sequence
  Synthetic
auuucaagaugagauuugg

SEQ ID NO: 334189 - RNA, 20 nt, Artificial Sequence
  Synthetic
cauuucaagaugagauuugg

SEQ ID NO: 334190 - RNA, 21 nt, Artificial Sequence
  Synthetic
acauuucaagaugagauuugg

SEQ ID NO: 334191 - RNA, 22 nt, Artificial Sequence
  Synthetic
uacauuucaagaugagauuugg

SEQ ID NO: 334192 - RNA, 23 nt, Artificial Sequence
  Synthetic
uuacauuucaagaugagauuugg

SEQ ID NO: 334193 - RNA, 24 nt, Artificial Sequence
  Synthetic
auuacauuucaagaugagauuugg

SEQ ID NO: 334194 - RNA, 18 nt, Artificial Sequence
  Synthetic
guucuagaugagauuugg

SEQ ID NO: 334195 - RNA, 19 nt, Artificial Sequence
  Synthetic
aguucuagaugagauuugg

SEQ ID NO: 334196 - RNA, 20 nt, Artificial Sequence
  Synthetic
caguucuagaugagauuugg

SEQ ID NO: 334197 - RNA, 21 nt, Artificial Sequence
  Synthetic
acaguucuagaugagauuugg

SEQ ID NO: 334198 - RNA, 22 nt, Artificial Sequence
  Synthetic
uacaguucuagaugagauuugg

SEQ ID NO: 334199 - RNA, 23 nt, Artificial Sequence
  Synthetic
uuacaguucuagaugagauuugg

SEQ ID NO: 334200 - RNA, 24 nt, Artificial Sequence
  Synthetic
auuacaguucuagaugagauuugg

SEQ ID NO: 334201 - RNA, 18 nt, Artificial Sequence
  Synthetic
auuuaauaugagauuugg

SEQ ID NO: 334202 - RNA, 19 nt, Artificial Sequence
  Synthetic
aauuuaauaugagauuugg

SEQ ID NO: 334203 - RNA, 20 nt, Artificial Sequence
  Synthetic
caauuuaauaugagauuugg

SEQ ID NO: 334204 - RNA, 21 nt, Artificial Sequence
  Synthetic
acaauuuaauaugagauuugg

SEQ ID NO: 334205 - RNA, 22 nt, Artificial Sequence
  Synthetic
uacaauuuaauaugagauuugg

SEQ ID NO: 334206 - RNA, 23 nt, Artificial Sequence
  Synthetic
uuacaauuuaauaugagauuugg

SEQ ID NO: 334207 - RNA, 24 nt, Artificial Sequence
  Synthetic
auuacaauuuaauaugagauuugg

SEQ ID NO: 334208 - RNA, 18 nt, Artificial Sequence
  Synthetic
cuugcugguaggauuugg

SEQ ID NO: 334209 - RNA, 19 nt, Artificial Sequence
  Synthetic
acuugcugguaggauuugg

SEQ ID NO: 334210 - RNA, 20 nt, Artificial Sequence
  Synthetic
aacuugcugguaggauuugg

SEQ ID NO: 334211 - RNA, 21 nt, Artificial Sequence
  Synthetic
aaacuugcugguaggauuugg

SEQ ID NO: 334212 - RNA, 22 nt, Artificial Sequence
  Synthetic
caaacuugcugguaggauuugg

SEQ ID NO: 334213 - RNA, 23 nt, Artificial Sequence
  Synthetic
gcaaacuugcugguaggauuugg

SEQ ID NO: 334214 - RNA, 24 nt, Artificial Sequence
  Synthetic
agcaaacuugcugguaggauuugg

SEQ ID NO: 334215 - RNA, 18 nt, Artificial Sequence
  Synthetic
auucaagacgggauuugg

SEQ ID NO: 334216 - RNA, 19 nt, Artificial Sequence
  Synthetic
aauucaagacgggauuugg

SEQ ID NO: 334217 - RNA, 20 nt, Artificial Sequence
  Synthetic
caauucaagacgggauuugg

SEQ ID NO: 334218 - RNA, 21 nt, Artificial Sequence
  Synthetic
gcaauucaagacgggauuugg

SEQ ID NO: 334219 - RNA, 22 nt, Artificial Sequence
  Synthetic
ugcaauucaagacgggauuugg

SEQ ID NO: 334220 - RNA, 23 nt, Artificial Sequence
  Synthetic
cugcaauucaagacgggauuugg

SEQ ID NO: 334221 - RNA, 24 nt, Artificial Sequence
  Synthetic
acugcaauucaagacgggauuugg

SEQ ID NO: 334222 - RNA, 18 nt, Artificial Sequence
  Synthetic
gucaaguuggggauuugg

SEQ ID NO: 334223 - RNA, 19 nt, Artificial Sequence
  Synthetic
ggucaaguuggggauuugg

SEQ ID NO: 334224 - RNA, 20 nt, Artificial Sequence
  Synthetic
aggucaaguuggggauuugg

SEQ ID NO: 334225 - RNA, 21 nt, Artificial Sequence
  Synthetic
caggucaaguuggggauuugg

SEQ ID NO: 334226 - RNA, 22 nt, Artificial Sequence
  Synthetic
acaggucaaguuggggauuugg

SEQ ID NO: 334227 - RNA, 23 nt, Artificial Sequence
  Synthetic
gacaggucaaguuggggauuugg

SEQ ID NO: 334228 - RNA, 24 nt, Artificial Sequence
  Synthetic
agacaggucaaguuggggauuugg

SEQ ID NO: 334229 - RNA, 18 nt, Artificial Sequence
  Synthetic
cucacguacuugauuugg

SEQ ID NO: 334230 - RNA, 19 nt, Artificial Sequence
  Synthetic
ucucacguacuugauuugg

SEQ ID NO: 334231 - RNA, 20 nt, Artificial Sequence
  Synthetic
gucucacguacuugauuugg

SEQ ID NO: 334232 - RNA, 21 nt, Artificial Sequence
  Synthetic
ugucucacguacuugauuugg

SEQ ID NO: 334233 - RNA, 22 nt, Artificial Sequence
  Synthetic
uugucucacguacuugauuugg

SEQ ID NO: 334234 - RNA, 23 nt, Artificial Sequence
  Synthetic
uuugucucacguacuugauuugg

SEQ ID NO: 334235 - RNA, 24 nt, Artificial Sequence
  Synthetic
auuugucucacguacuugauuugg

SEQ ID NO: 334236 - RNA, 18 nt, Artificial Sequence
  Synthetic
agaacaugugauauuugg

SEQ ID NO: 334237 - RNA, 19 nt, Artificial Sequence
  Synthetic
gagaacaugugauauuugg

SEQ ID NO: 334238 - RNA, 20 nt, Artificial Sequence
  Synthetic
ugagaacaugugauauuugg

SEQ ID NO: 334239 - RNA, 21 nt, Artificial Sequence
  Synthetic
gugagaacaugugauauuugg

SEQ ID NO: 334240 - RNA, 22 nt, Artificial Sequence
  Synthetic
agugagaacaugugauauuugg

SEQ ID NO: 334241 - RNA, 23 nt, Artificial Sequence
  Synthetic
aagugagaacaugugauauuugg

SEQ ID NO: 334242 - RNA, 24 nt, Artificial Sequence
  Synthetic
uaagugagaacaugugauauuugg

SEQ ID NO: 334243 - RNA, 18 nt, Artificial Sequence
  Synthetic
ugagauuuuuauauuugg

SEQ ID NO: 334244 - RNA, 19 nt, Artificial Sequence
  Synthetic
gugagauuuuuauauuugg

SEQ ID NO: 334245 - RNA, 20 nt, Artificial Sequence
  Synthetic
ugugagauuuuuauauuugg

SEQ ID NO: 334246 - RNA, 21 nt, Artificial Sequence
  Synthetic
augugagauuuuuauauuugg

SEQ ID NO: 334247 - RNA, 22 nt, Artificial Sequence
  Synthetic
uaugugagauuuuuauauuugg

SEQ ID NO: 334248 - RNA, 23 nt, Artificial Sequence
  Synthetic
uuaugugagauuuuuauauuugg

SEQ ID NO: 334249 - RNA, 24 nt, Artificial Sequence
  Synthetic
auuaugugagauuuuuauauuugg

SEQ ID NO: 334250 - RNA, 18 nt, Artificial Sequence
  Synthetic
aguguuuucucuauuugg

SEQ ID NO: 334251 - RNA, 19 nt, Artificial Sequence
  Synthetic
uaguguuuucucuauuugg

SEQ ID NO: 334252 - RNA, 20 nt, Artificial Sequence
  Synthetic
guaguguuuucucuauuugg

SEQ ID NO: 334253 - RNA, 21 nt, Artificial Sequence
  Synthetic
aguaguguuuucucuauuugg

SEQ ID NO: 334254 - RNA, 22 nt, Artificial Sequence
  Synthetic
gaguaguguuuucucuauuugg

SEQ ID NO: 334255 - RNA, 23 nt, Artificial Sequence
  Synthetic
ugaguaguguuuucucuauuugg

SEQ ID NO: 334256 - RNA, 24 nt, Artificial Sequence
  Synthetic
cugaguaguguuuucucuauuugg

SEQ ID NO: 334257 - RNA, 18 nt, Artificial Sequence
  Synthetic
uaauggaaauguauuugg

SEQ ID NO: 334258 - RNA, 19 nt, Artificial Sequence
  Synthetic
uuaauggaaauguauuugg

SEQ ID NO: 334259 - RNA, 20 nt, Artificial Sequence
  Synthetic
uuuaauggaaauguauuugg

SEQ ID NO: 334260 - RNA, 21 nt, Artificial Sequence
  Synthetic
auuuaauggaaauguauuugg

SEQ ID NO: 334261 - RNA, 22 nt, Artificial Sequence
  Synthetic
uauuuaauggaaauguauuugg

SEQ ID NO: 334262 - RNA, 23 nt, Artificial Sequence
  Synthetic
auauuuaauggaaauguauuugg

SEQ ID NO: 334263 - RNA, 24 nt, Artificial Sequence
  Synthetic
aauauuuaauggaaauguauuugg

SEQ ID NO: 334264 - RNA, 18 nt, Artificial Sequence
  Synthetic
ugaaacagacuuauuugg

SEQ ID NO: 334265 - RNA, 19 nt, Artificial Sequence
  Synthetic
augaaacagacuuauuugg

SEQ ID NO: 334266 - RNA, 20 nt, Artificial Sequence
  Synthetic
gaugaaacagacuuauuugg

SEQ ID NO: 334267 - RNA, 21 nt, Artificial Sequence
  Synthetic
agaugaaacagacuuauuugg

SEQ ID NO: 334268 - RNA, 22 nt, Artificial Sequence
  Synthetic
aagaugaaacagacuuauuugg

SEQ ID NO: 334269 - RNA, 23 nt, Artificial Sequence
  Synthetic
uaagaugaaacagacuuauuugg

SEQ ID NO: 334270 - RNA, 24 nt, Artificial Sequence
  Synthetic
auaagaugaaacagacuuauuugg

SEQ ID NO: 334271 - RNA, 18 nt, Artificial Sequence
  Synthetic
ccaauguuacuacuuugg

SEQ ID NO: 334272 - RNA, 19 nt, Artificial Sequence
  Synthetic
uccaauguuacuacuuugg

SEQ ID NO: 334273 - RNA, 20 nt, Artificial Sequence
  Synthetic
guccaauguuacuacuuugg

SEQ ID NO: 334274 - RNA, 21 nt, Artificial Sequence
  Synthetic
aguccaauguuacuacuuugg

SEQ ID NO: 334275 - RNA, 22 nt, Artificial Sequence
  Synthetic
aaguccaauguuacuacuuugg

SEQ ID NO: 334276 - RNA, 23 nt, Artificial Sequence
  Synthetic
uaaguccaauguuacuacuuugg

SEQ ID NO: 334277 - RNA, 24 nt, Artificial Sequence
  Synthetic
uuaaguccaauguuacuacuuugg

SEQ ID NO: 334278 - RNA, 18 nt, Artificial Sequence
  Synthetic
gaaaaggcaagccuuugg

SEQ ID NO: 334279 - RNA, 19 nt, Artificial Sequence
  Synthetic
agaaaaggcaagccuuugg

SEQ ID NO: 334280 - RNA, 20 nt, Artificial Sequence
  Synthetic
uagaaaaggcaagccuuugg

SEQ ID NO: 334281 - RNA, 21 nt, Artificial Sequence
  Synthetic
cuagaaaaggcaagccuuugg

SEQ ID NO: 334282 - RNA, 22 nt, Artificial Sequence
  Synthetic
ucuagaaaaggcaagccuuugg

SEQ ID NO: 334283 - RNA, 23 nt, Artificial Sequence
  Synthetic
uucuagaaaaggcaagccuuugg

SEQ ID NO: 334284 - RNA, 24 nt, Artificial Sequence
  Synthetic
uuucuagaaaaggcaagccuuugg

SEQ ID NO: 334285 - RNA, 18 nt, Artificial Sequence
  Synthetic
caggagucccggcuuugg

SEQ ID NO: 334286 - RNA, 19 nt, Artificial Sequence
  Synthetic
gcaggagucccggcuuugg

SEQ ID NO: 334287 - RNA, 20 nt, Artificial Sequence
  Synthetic
ggcaggagucccggcuuugg

SEQ ID NO: 334288 - RNA, 21 nt, Artificial Sequence
  Synthetic
uggcaggagucccggcuuugg

SEQ ID NO: 334289 - RNA, 22 nt, Artificial Sequence
  Synthetic
cuggcaggagucccggcuuugg

SEQ ID NO: 334290 - RNA, 23 nt, Artificial Sequence
  Synthetic
ucuggcaggagucccggcuuugg

SEQ ID NO: 334291 - RNA, 24 nt, Artificial Sequence
  Synthetic
aucuggcaggagucccggcuuugg

SEQ ID NO: 334292 - RNA, 18 nt, Artificial Sequence
  Synthetic
agcgagaggcugcuuugg

SEQ ID NO: 334293 - RNA, 19 nt, Artificial Sequence
  Synthetic
gagcgagaggcugcuuugg

SEQ ID NO: 334294 - RNA, 20 nt, Artificial Sequence
  Synthetic
ugagcgagaggcugcuuugg

SEQ ID NO: 334295 - RNA, 21 nt, Artificial Sequence
  Synthetic
gugagcgagaggcugcuuugg

SEQ ID NO: 334296 - RNA, 22 nt, Artificial Sequence
  Synthetic
agugagcgagaggcugcuuugg

SEQ ID NO: 334297 - RNA, 23 nt, Artificial Sequence
  Synthetic
gagugagcgagaggcugcuuugg

SEQ ID NO: 334298 - RNA, 24 nt, Artificial Sequence
  Synthetic
ugagugagcgagaggcugcuuugg

SEQ ID NO: 334299 - RNA, 18 nt, Artificial Sequence
  Synthetic
aggccuauuucucuuugg

SEQ ID NO: 334300 - RNA, 19 nt, Artificial Sequence
  Synthetic
caggccuauuucucuuugg

SEQ ID NO: 334301 - RNA, 20 nt, Artificial Sequence
  Synthetic
acaggccuauuucucuuugg

SEQ ID NO: 334302 - RNA, 21 nt, Artificial Sequence
  Synthetic
aacaggccuauuucucuuugg

SEQ ID NO: 334303 - RNA, 22 nt, Artificial Sequence
  Synthetic
aaacaggccuauuucucuuugg

SEQ ID NO: 334304 - RNA, 23 nt, Artificial Sequence
  Synthetic
gaaacaggccuauuucucuuugg

SEQ ID NO: 334305 - RNA, 24 nt, Artificial Sequence
  Synthetic
agaaacaggccuauuucucuuugg

SEQ ID NO: 334306 - RNA, 18 nt, Artificial Sequence
  Synthetic
ugagaagaaauucuuugg

SEQ ID NO: 334307 - RNA, 19 nt, Artificial Sequence
  Synthetic
cugagaagaaauucuuugg

SEQ ID NO: 334308 - RNA, 20 nt, Artificial Sequence
  Synthetic
ucugagaagaaauucuuugg

SEQ ID NO: 334309 - RNA, 21 nt, Artificial Sequence
  Synthetic
aucugagaagaaauucuuugg

SEQ ID NO: 334310 - RNA, 22 nt, Artificial Sequence
  Synthetic
uaucugagaagaaauucuuugg

SEQ ID NO: 334311 - RNA, 23 nt, Artificial Sequence
  Synthetic
auaucugagaagaaauucuuugg

SEQ ID NO: 334312 - RNA, 24 nt, Artificial Sequence
  Synthetic
cauaucugagaagaaauucuuugg

SEQ ID NO: 334313 - RNA, 18 nt, Artificial Sequence
  Synthetic
cauaucuuaaaaguuugg

SEQ ID NO: 334314 - RNA, 19 nt, Artificial Sequence
  Synthetic
ucauaucuuaaaaguuugg

SEQ ID NO: 334315 - RNA, 20 nt, Artificial Sequence
  Synthetic
gucauaucuuaaaaguuugg

SEQ ID NO: 334316 - RNA, 21 nt, Artificial Sequence
  Synthetic
ggucauaucuuaaaaguuugg

SEQ ID NO: 334317 - RNA, 22 nt, Artificial Sequence
  Synthetic
aggucauaucuuaaaaguuugg

SEQ ID NO: 334318 - RNA, 23 nt, Artificial Sequence
  Synthetic
aaggucauaucuuaaaaguuugg

SEQ ID NO: 334319 - RNA, 24 nt, Artificial Sequence
  Synthetic
caaggucauaucuuaaaaguuugg

SEQ ID NO: 334320 - RNA, 18 nt, Artificial Sequence
  Synthetic
uuuucugagcaaguuugg

SEQ ID NO: 334321 - RNA, 19 nt, Artificial Sequence
  Synthetic
auuuucugagcaaguuugg

SEQ ID NO: 334322 - RNA, 20 nt, Artificial Sequence
  Synthetic
uauuuucugagcaaguuugg

SEQ ID NO: 334323 - RNA, 21 nt, Artificial Sequence
  Synthetic
guauuuucugagcaaguuugg

SEQ ID NO: 334324 - RNA, 22 nt, Artificial Sequence
  Synthetic
aguauuuucugagcaaguuugg

SEQ ID NO: 334325 - RNA, 23 nt, Artificial Sequence
  Synthetic
caguauuuucugagcaaguuugg

SEQ ID NO: 334326 - RNA, 24 nt, Artificial Sequence
  Synthetic
ucaguauuuucugagcaaguuugg

SEQ ID NO: 334327 - RNA, 18 nt, Artificial Sequence
  Synthetic
uauuacaacuuaguuugg

SEQ ID NO: 334328 - RNA, 19 nt, Artificial Sequence
  Synthetic
guauuacaacuuaguuugg

SEQ ID NO: 334329 - RNA, 20 nt, Artificial Sequence
  Synthetic
gguauuacaacuuaguuugg

SEQ ID NO: 334330 - RNA, 21 nt, Artificial Sequence
  Synthetic
ugguauuacaacuuaguuugg

SEQ ID NO: 334331 - RNA, 22 nt, Artificial Sequence
  Synthetic
augguauuacaacuuaguuugg

SEQ ID NO: 334332 - RNA, 23 nt, Artificial Sequence
  Synthetic
caugguauuacaacuuaguuugg

SEQ ID NO: 334333 - RNA, 24 nt, Artificial Sequence
  Synthetic
ucaugguauuacaacuuaguuugg

SEQ ID NO: 334334 - RNA, 18 nt, Artificial Sequence
  Synthetic
cuacaggguuggguuugg

SEQ ID NO: 334335 - RNA, 19 nt, Artificial Sequence
  Synthetic
ucuacaggguuggguuugg

SEQ ID NO: 334336 - RNA, 20 nt, Artificial Sequence
  Synthetic
gucuacaggguuggguuugg

SEQ ID NO: 334337 - RNA, 21 nt, Artificial Sequence
  Synthetic
ugucuacaggguuggguuugg

SEQ ID NO: 334338 - RNA, 22 nt, Artificial Sequence
  Synthetic
uugucuacaggguuggguuugg

SEQ ID NO: 334339 - RNA, 23 nt, Artificial Sequence
  Synthetic
auugucuacaggguuggguuugg

SEQ ID NO: 334340 - RNA, 24 nt, Artificial Sequence
  Synthetic
gauugucuacaggguuggguuugg

SEQ ID NO: 334341 - RNA, 18 nt, Artificial Sequence
  Synthetic
gaauuugagaugguuugg

SEQ ID NO: 334342 - RNA, 19 nt, Artificial Sequence
  Synthetic
agaauuugagaugguuugg

SEQ ID NO: 334343 - RNA, 20 nt, Artificial Sequence
  Synthetic
aagaauuugagaugguuugg

SEQ ID NO: 334344 - RNA, 21 nt, Artificial Sequence
  Synthetic
aaagaauuugagaugguuugg

SEQ ID NO: 334345 - RNA, 22 nt, Artificial Sequence
  Synthetic
aaaagaauuugagaugguuugg

SEQ ID NO: 334346 - RNA, 23 nt, Artificial Sequence
  Synthetic
aaaaagaauuugagaugguuugg

SEQ ID NO: 334347 - RNA, 24 nt, Artificial Sequence
  Synthetic
caaaaagaauuugagaugguuugg

SEQ ID NO: 334348 - RNA, 18 nt, Artificial Sequence
  Synthetic
acagcagauuauguuugg

SEQ ID NO: 334349 - RNA, 19 nt, Artificial Sequence
  Synthetic
gacagcagauuauguuugg

SEQ ID NO: 334350 - RNA, 20 nt, Artificial Sequence
  Synthetic
ugacagcagauuauguuugg

SEQ ID NO: 334351 - RNA, 21 nt, Artificial Sequence
  Synthetic
gugacagcagauuauguuugg

SEQ ID NO: 334352 - RNA, 22 nt, Artificial Sequence
  Synthetic
ugugacagcagauuauguuugg

SEQ ID NO: 334353 - RNA, 23 nt, Artificial Sequence
  Synthetic
augugacagcagauuauguuugg

SEQ ID NO: 334354 - RNA, 24 nt, Artificial Sequence
  Synthetic
aaugugacagcagauuauguuugg

SEQ ID NO: 334355 - RNA, 18 nt, Artificial Sequence
  Synthetic
auguuguaaucuguuugg

SEQ ID NO: 334356 - RNA, 19 nt, Artificial Sequence
  Synthetic
aauguuguaaucuguuugg

SEQ ID NO: 334357 - RNA, 20 nt, Artificial Sequence
  Synthetic
uaauguuguaaucuguuugg

SEQ ID NO: 334358 - RNA, 21 nt, Artificial Sequence
  Synthetic
uuaauguuguaaucuguuugg

SEQ ID NO: 334359 - RNA, 22 nt, Artificial Sequence
  Synthetic
auuaauguuguaaucuguuugg

SEQ ID NO: 334360 - RNA, 23 nt, Artificial Sequence
  Synthetic
aauuaauguuguaaucuguuugg

SEQ ID NO: 334361 - RNA, 24 nt, Artificial Sequence
  Synthetic
aaauuaauguuguaaucuguuugg

SEQ ID NO: 334362 - RNA, 18 nt, Artificial Sequence
  Synthetic
cauacugcaucuguuugg

SEQ ID NO: 334363 - RNA, 19 nt, Artificial Sequence
  Synthetic
acauacugcaucuguuugg

SEQ ID NO: 334364 - RNA, 20 nt, Artificial Sequence
  Synthetic
aacauacugcaucuguuugg

SEQ ID NO: 334365 - RNA, 21 nt, Artificial Sequence
  Synthetic
aaacauacugcaucuguuugg

SEQ ID NO: 334366 - RNA, 22 nt, Artificial Sequence
  Synthetic
gaaacauacugcaucuguuugg

SEQ ID NO: 334367 - RNA, 23 nt, Artificial Sequence
  Synthetic
ugaaacauacugcaucuguuugg

SEQ ID NO: 334368 - RNA, 24 nt, Artificial Sequence
  Synthetic
uugaaacauacugcaucuguuugg

SEQ ID NO: 334369 - RNA, 18 nt, Artificial Sequence
  Synthetic
uacauauucauuguuugg

SEQ ID NO: 334370 - RNA, 19 nt, Artificial Sequence
  Synthetic
auacauauucauuguuugg

SEQ ID NO: 334371 - RNA, 20 nt, Artificial Sequence
  Synthetic
cauacauauucauuguuugg

SEQ ID NO: 334372 - RNA, 21 nt, Artificial Sequence
  Synthetic
ucauacauauucauuguuugg

SEQ ID NO: 334373 - RNA, 22 nt, Artificial Sequence
  Synthetic
uucauacauauucauuguuugg

SEQ ID NO: 334374 - RNA, 23 nt, Artificial Sequence
  Synthetic
uuucauacauauucauuguuugg

SEQ ID NO: 334375 - RNA, 24 nt, Artificial Sequence
  Synthetic
guuucauacauauucauuguuugg

SEQ ID NO: 334376 - RNA, 18 nt, Artificial Sequence
  Synthetic
guaccucugaaauuuugg

SEQ ID NO: 334377 - RNA, 19 nt, Artificial Sequence
  Synthetic
gguaccucugaaauuuugg

SEQ ID NO: 334378 - RNA, 20 nt, Artificial Sequence
  Synthetic
agguaccucugaaauuuugg

SEQ ID NO: 334379 - RNA, 21 nt, Artificial Sequence
  Synthetic
gagguaccucugaaauuuugg

SEQ ID NO: 334380 - RNA, 22 nt, Artificial Sequence
  Synthetic
ugagguaccucugaaauuuugg

SEQ ID NO: 334381 - RNA, 23 nt, Artificial Sequence
  Synthetic
uugagguaccucugaaauuuugg

SEQ ID NO: 334382 - RNA, 24 nt, Artificial Sequence
  Synthetic
auugagguaccucugaaauuuugg

SEQ ID NO: 334383 - RNA, 18 nt, Artificial Sequence
  Synthetic
aaaguuuauccauuuugg

SEQ ID NO: 334384 - RNA, 19 nt, Artificial Sequence
  Synthetic
caaaguuuauccauuuugg

SEQ ID NO: 334385 - RNA, 20 nt, Artificial Sequence
  Synthetic
ccaaaguuuauccauuuugg

SEQ ID NO: 334386 - RNA, 21 nt, Artificial Sequence
  Synthetic
cccaaaguuuauccauuuugg

SEQ ID NO: 334387 - RNA, 22 nt, Artificial Sequence
  Synthetic
ucccaaaguuuauccauuuugg

SEQ ID NO: 334388 - RNA, 23 nt, Artificial Sequence
  Synthetic
uucccaaaguuuauccauuuugg

SEQ ID NO: 334389 - RNA, 24 nt, Artificial Sequence
  Synthetic
auucccaaaguuuauccauuuugg

SEQ ID NO: 334390 - RNA, 18 nt, Artificial Sequence
  Synthetic
aggaguaacauauuuugg

SEQ ID NO: 334391 - RNA, 19 nt, Artificial Sequence
  Synthetic
caggaguaacauauuuugg

SEQ ID NO: 334392 - RNA, 20 nt, Artificial Sequence
  Synthetic
ccaggaguaacauauuuugg

SEQ ID NO: 334393 - RNA, 21 nt, Artificial Sequence
  Synthetic
uccaggaguaacauauuuugg

SEQ ID NO: 334394 - RNA, 22 nt, Artificial Sequence
  Synthetic
cuccaggaguaacauauuuugg

SEQ ID NO: 334395 - RNA, 23 nt, Artificial Sequence
  Synthetic
gcuccaggaguaacauauuuugg

SEQ ID NO: 334396 - RNA, 24 nt, Artificial Sequence
  Synthetic
ggcuccaggaguaacauauuuugg

SEQ ID NO: 334397 - RNA, 18 nt, Artificial Sequence
  Synthetic
acaccaucaguauuuugg

SEQ ID NO: 334398 - RNA, 19 nt, Artificial Sequence
  Synthetic
aacaccaucaguauuuugg

SEQ ID NO: 334399 - RNA, 20 nt, Artificial Sequence
  Synthetic
gaacaccaucaguauuuugg

SEQ ID NO: 334400 - RNA, 21 nt, Artificial Sequence
  Synthetic
agaacaccaucaguauuuugg

SEQ ID NO: 334401 - RNA, 22 nt, Artificial Sequence
  Synthetic
aagaacaccaucaguauuuugg

SEQ ID NO: 334402 - RNA, 23 nt, Artificial Sequence
  Synthetic
gaagaacaccaucaguauuuugg

SEQ ID NO: 334403 - RNA, 24 nt, Artificial Sequence
  Synthetic
agaagaacaccaucaguauuuugg

SEQ ID NO: 334404 - RNA, 18 nt, Artificial Sequence
  Synthetic
caaagagagagcuuuugg

SEQ ID NO: 334405 - RNA, 19 nt, Artificial Sequence
  Synthetic
ucaaagagagagcuuuugg

SEQ ID NO: 334406 - RNA, 20 nt, Artificial Sequence
  Synthetic
gucaaagagagagcuuuugg

SEQ ID NO: 334407 - RNA, 21 nt, Artificial Sequence
  Synthetic
agucaaagagagagcuuuugg

SEQ ID NO: 334408 - RNA, 22 nt, Artificial Sequence
  Synthetic
cagucaaagagagagcuuuugg

SEQ ID NO: 334409 - RNA, 23 nt, Artificial Sequence
  Synthetic
gcagucaaagagagagcuuuugg

SEQ ID NO: 334410 - RNA, 24 nt, Artificial Sequence
  Synthetic
agcagucaaagagagagcuuuugg

SEQ ID NO: 334411 - RNA, 18 nt, Artificial Sequence
  Synthetic
acugggaaugucuuuugg

SEQ ID NO: 334412 - RNA, 19 nt, Artificial Sequence
  Synthetic
uacugggaaugucuuuugg

SEQ ID NO: 334413 - RNA, 20 nt, Artificial Sequence
  Synthetic
uuacugggaaugucuuuugg

SEQ ID NO: 334414 - RNA, 21 nt, Artificial Sequence
  Synthetic
uuuacugggaaugucuuuugg

SEQ ID NO: 334415 - RNA, 22 nt, Artificial Sequence
  Synthetic
cuuuacugggaaugucuuuugg

SEQ ID NO: 334416 - RNA, 23 nt, Artificial Sequence
  Synthetic
acuuuacugggaaugucuuuugg

SEQ ID NO: 334417 - RNA, 24 nt, Artificial Sequence
  Synthetic
uacuuuacugggaaugucuuuugg

SEQ ID NO: 334418 - RNA, 18 nt, Artificial Sequence
  Synthetic
acuuuaucugucuuuugg

SEQ ID NO: 334419 - RNA, 19 nt, Artificial Sequence
  Synthetic
uacuuuaucugucuuuugg

SEQ ID NO: 334420 - RNA, 20 nt, Artificial Sequence
  Synthetic
uuacuuuaucugucuuuugg

SEQ ID NO: 334421 - RNA, 21 nt, Artificial Sequence
  Synthetic
uuuacuuuaucugucuuuugg

SEQ ID NO: 334422 - RNA, 22 nt, Artificial Sequence
  Synthetic
auuuacuuuaucugucuuuugg

SEQ ID NO: 334423 - RNA, 23 nt, Artificial Sequence
  Synthetic
gauuuacuuuaucugucuuuugg

SEQ ID NO: 334424 - RNA, 24 nt, Artificial Sequence
  Synthetic
ugauuuacuuuaucugucuuuugg

SEQ ID NO: 334425 - RNA, 18 nt, Artificial Sequence
  Synthetic
uuucaacaucaguuuugg

SEQ ID NO: 334426 - RNA, 19 nt, Artificial Sequence
  Synthetic
auuucaacaucaguuuugg

SEQ ID NO: 334427 - RNA, 20 nt, Artificial Sequence
  Synthetic
aauuucaacaucaguuuugg

SEQ ID NO: 334428 - RNA, 21 nt, Artificial Sequence
  Synthetic
aaauuucaacaucaguuuugg

SEQ ID NO: 334429 - RNA, 22 nt, Artificial Sequence
  Synthetic
uaaauuucaacaucaguuuugg

SEQ ID NO: 334430 - RNA, 23 nt, Artificial Sequence
  Synthetic
uuaaauuucaacaucaguuuugg

SEQ ID NO: 334431 - RNA, 24 nt, Artificial Sequence
  Synthetic
auuaaauuucaacaucaguuuugg

SEQ ID NO: 334432 - RNA, 18 nt, Artificial Sequence
  Synthetic
acuucaagaagguuuugg

SEQ ID NO: 334433 - RNA, 19 nt, Artificial Sequence
  Synthetic
cacuucaagaagguuuugg

SEQ ID NO: 334434 - RNA, 20 nt, Artificial Sequence
  Synthetic
ucacuucaagaagguuuugg

SEQ ID NO: 334435 - RNA, 21 nt, Artificial Sequence
  Synthetic
gucacuucaagaagguuuugg

SEQ ID NO: 334436 - RNA, 22 nt, Artificial Sequence
  Synthetic
agucacuucaagaagguuuugg

SEQ ID NO: 334437 - RNA, 23 nt, Artificial Sequence
  Synthetic
aagucacuucaagaagguuuugg

SEQ ID NO: 334438 - RNA, 24 nt, Artificial Sequence
  Synthetic
uaagucacuucaagaagguuuugg

SEQ ID NO: 334439 - RNA, 18 nt, Artificial Sequence
  Synthetic
uuccaaaugggguuuugg

SEQ ID NO: 334440 - RNA, 19 nt, Artificial Sequence
  Synthetic
uuuccaaaugggguuuugg

SEQ ID NO: 334441 - RNA, 20 nt, Artificial Sequence
  Synthetic
uuuuccaaaugggguuuugg

SEQ ID NO: 334442 - RNA, 21 nt, Artificial Sequence
  Synthetic
uuuuuccaaaugggguuuugg

SEQ ID NO: 334443 - RNA, 22 nt, Artificial Sequence
  Synthetic
cuuuuuccaaaugggguuuugg

SEQ ID NO: 334444 - RNA, 23 nt, Artificial Sequence
  Synthetic
ucuuuuuccaaaugggguuuugg

SEQ ID NO: 334445 - RNA, 24 nt, Artificial Sequence
  Synthetic
uucuuuuuccaaaugggguuuugg

SEQ ID NO: 334446 - RNA, 18 nt, Artificial Sequence
  Synthetic
cuggaaaguauguuuugg

SEQ ID NO: 334447 - RNA, 19 nt, Artificial Sequence
  Synthetic
acuggaaaguauguuuugg

SEQ ID NO: 334448 - RNA, 20 nt, Artificial Sequence
  Synthetic
uacuggaaaguauguuuugg

SEQ ID NO: 334449 - RNA, 21 nt, Artificial Sequence
  Synthetic
auacuggaaaguauguuuugg

SEQ ID NO: 334450 - RNA, 22 nt, Artificial Sequence
  Synthetic
gauacuggaaaguauguuuugg

SEQ ID NO: 334451 - RNA, 23 nt, Artificial Sequence
  Synthetic
agauacuggaaaguauguuuugg

SEQ ID NO: 334452 - RNA, 24 nt, Artificial Sequence
  Synthetic
aagauacuggaaaguauguuuugg

SEQ ID NO: 334453 - RNA, 18 nt, Artificial Sequence
  Synthetic
acuuuugugcauuuuugg

SEQ ID NO: 334454 - RNA, 19 nt, Artificial Sequence
  Synthetic
gacuuuugugcauuuuugg

SEQ ID NO: 334455 - RNA, 20 nt, Artificial Sequence
  Synthetic
ugacuuuugugcauuuuugg

SEQ ID NO: 334456 - RNA, 21 nt, Artificial Sequence
  Synthetic
uugacuuuugugcauuuuugg

SEQ ID NO: 334457 - RNA, 22 nt, Artificial Sequence
  Synthetic
uuugacuuuugugcauuuuugg

SEQ ID NO: 334458 - RNA, 23 nt, Artificial Sequence
  Synthetic
auuugacuuuugugcauuuuugg

SEQ ID NO: 334459 - RNA, 24 nt, Artificial Sequence
  Synthetic
gauuugacuuuugugcauuuuugg

SEQ ID NO: 334460 - RNA, 18 nt, Artificial Sequence
  Synthetic
cuucaagaagauuuuugg

SEQ ID NO: 334461 - RNA, 19 nt, Artificial Sequence
  Synthetic
ccuucaagaagauuuuugg

SEQ ID NO: 334462 - RNA, 20 nt, Artificial Sequence
  Synthetic
uccuucaagaagauuuuugg

SEQ ID NO: 334463 - RNA, 21 nt, Artificial Sequence
  Synthetic
guccuucaagaagauuuuugg

SEQ ID NO: 334464 - RNA, 22 nt, Artificial Sequence
  Synthetic
uguccuucaagaagauuuuugg

SEQ ID NO: 334465 - RNA, 23 nt, Artificial Sequence
  Synthetic
auguccuucaagaagauuuuugg

SEQ ID NO: 334466 - RNA, 24 nt, Artificial Sequence
  Synthetic
cauguccuucaagaagauuuuugg

SEQ ID NO: 334467 - RNA, 18 nt, Artificial Sequence
  Synthetic
gggggaggugauuuuugg

SEQ ID NO: 334468 - RNA, 19 nt, Artificial Sequence
  Synthetic
ugggggaggugauuuuugg

SEQ ID NO: 334469 - RNA, 20 nt, Artificial Sequence
  Synthetic
uugggggaggugauuuuugg

SEQ ID NO: 334470 - RNA, 21 nt, Artificial Sequence
  Synthetic
uuugggggaggugauuuuugg

SEQ ID NO: 334471 - RNA, 22 nt, Artificial Sequence
  Synthetic
auuugggggaggugauuuuugg

SEQ ID NO: 334472 - RNA, 23 nt, Artificial Sequence
  Synthetic
aauuugggggaggugauuuuugg

SEQ ID NO: 334473 - RNA, 24 nt, Artificial Sequence
  Synthetic
uaauuugggggaggugauuuuugg

SEQ ID NO: 334474 - RNA, 18 nt, Artificial Sequence
  Synthetic
aauuuuuuguauuuuugg

SEQ ID NO: 334475 - RNA, 19 nt, Artificial Sequence
  Synthetic
uaauuuuuuguauuuuugg

SEQ ID NO: 334476 - RNA, 20 nt, Artificial Sequence
  Synthetic
uuaauuuuuuguauuuuugg

SEQ ID NO: 334477 - RNA, 21 nt, Artificial Sequence
  Synthetic
guuaauuuuuuguauuuuugg

SEQ ID NO: 334478 - RNA, 22 nt, Artificial Sequence
  Synthetic
aguuaauuuuuuguauuuuugg

SEQ ID NO: 334479 - RNA, 23 nt, Artificial Sequence
  Synthetic
caguuaauuuuuuguauuuuugg

SEQ ID NO: 334480 - RNA, 24 nt, Artificial Sequence
  Synthetic
ccaguuaauuuuuuguauuuuugg

SEQ ID NO: 334481 - RNA, 18 nt, Artificial Sequence
  Synthetic
ccuuguguuuauuuuugg

SEQ ID NO: 334482 - RNA, 19 nt, Artificial Sequence
  Synthetic
gccuuguguuuauuuuugg

SEQ ID NO: 334483 - RNA, 20 nt, Artificial Sequence
  Synthetic
ggccuuguguuuauuuuugg

SEQ ID NO: 334484 - RNA, 21 nt, Artificial Sequence
  Synthetic
uggccuuguguuuauuuuugg

SEQ ID NO: 334485 - RNA, 22 nt, Artificial Sequence
  Synthetic
cuggccuuguguuuauuuuugg

SEQ ID NO: 334486 - RNA, 23 nt, Artificial Sequence
  Synthetic
acuggccuuguguuuauuuuugg

SEQ ID NO: 334487 - RNA, 24 nt, Artificial Sequence
  Synthetic
gacuggccuuguguuuauuuuugg

SEQ ID NO: 334488 - RNA, 18 nt, Artificial Sequence
  Synthetic
agaaaugagacuuuuugg

SEQ ID NO: 334489 - RNA, 19 nt, Artificial Sequence
  Synthetic
uagaaaugagacuuuuugg

SEQ ID NO: 334490 - RNA, 20 nt, Artificial Sequence
  Synthetic
uuagaaaugagacuuuuugg

SEQ ID NO: 334491 - RNA, 21 nt, Artificial Sequence
  Synthetic
auuagaaaugagacuuuuugg

SEQ ID NO: 334492 - RNA, 22 nt, Artificial Sequence
  Synthetic
uauuagaaaugagacuuuuugg

SEQ ID NO: 334493 - RNA, 23 nt, Artificial Sequence
  Synthetic
uuauuagaaaugagacuuuuugg

SEQ ID NO: 334494 - RNA, 24 nt, Artificial Sequence
  Synthetic
guuauuagaaaugagacuuuuugg

SEQ ID NO: 334495 - RNA, 18 nt, Artificial Sequence
  Synthetic
uuuauccuuacuuuuugg

SEQ ID NO: 334496 - RNA, 19 nt, Artificial Sequence
  Synthetic
auuuauccuuacuuuuugg

SEQ ID NO: 334497 - RNA, 20 nt, Artificial Sequence
  Synthetic
cauuuauccuuacuuuuugg

SEQ ID NO: 334498 - RNA, 21 nt, Artificial Sequence
  Synthetic
ccauuuauccuuacuuuuugg

SEQ ID NO: 334499 - RNA, 22 nt, Artificial Sequence
  Synthetic
accauuuauccuuacuuuuugg

SEQ ID NO: 334500 - RNA, 23 nt, Artificial Sequence
  Synthetic
gaccauuuauccuuacuuuuugg

SEQ ID NO: 334501 - RNA, 24 nt, Artificial Sequence
  Synthetic
ggaccauuuauccuuacuuuuugg

SEQ ID NO: 334502 - RNA, 18 nt, Artificial Sequence
  Synthetic
cgucucccuccuuuuugg

SEQ ID NO: 334503 - RNA, 19 nt, Artificial Sequence
  Synthetic
ccgucucccuccuuuuugg

SEQ ID NO: 334504 - RNA, 20 nt, Artificial Sequence
  Synthetic
accgucucccuccuuuuugg

SEQ ID NO: 334505 - RNA, 21 nt, Artificial Sequence
  Synthetic
uaccgucucccuccuuuuugg

SEQ ID NO: 334506 - RNA, 22 nt, Artificial Sequence
  Synthetic
cuaccgucucccuccuuuuugg

SEQ ID NO: 334507 - RNA, 23 nt, Artificial Sequence
  Synthetic
ccuaccgucucccuccuuuuugg

SEQ ID NO: 334508 - RNA, 24 nt, Artificial Sequence
  Synthetic
accuaccgucucccuccuuuuugg

SEQ ID NO: 334509 - RNA, 18 nt, Artificial Sequence
  Synthetic
uaaagaacauguuuuugg

SEQ ID NO: 334510 - RNA, 19 nt, Artificial Sequence
  Synthetic
cuaaagaacauguuuuugg

SEQ ID NO: 334511 - RNA, 20 nt, Artificial Sequence
  Synthetic
ucuaaagaacauguuuuugg

SEQ ID NO: 334512 - RNA, 21 nt, Artificial Sequence
  Synthetic
uucuaaagaacauguuuuugg

SEQ ID NO: 334513 - RNA, 22 nt, Artificial Sequence
  Synthetic
guucuaaagaacauguuuuugg

SEQ ID NO: 334514 - RNA, 23 nt, Artificial Sequence
  Synthetic
aguucuaaagaacauguuuuugg

SEQ ID NO: 334515 - RNA, 24 nt, Artificial Sequence
  Synthetic
gaguucuaaagaacauguuuuugg

SEQ ID NO: 334516 - RNA, 18 nt, Artificial Sequence
  Synthetic
ucuguuuuuguuuuuugg

SEQ ID NO: 334517 - RNA, 19 nt, Artificial Sequence
  Synthetic
uucuguuuuuguuuuuugg

SEQ ID NO: 334518 - RNA, 20 nt, Artificial Sequence
  Synthetic
uuucuguuuuuguuuuuugg

SEQ ID NO: 334519 - RNA, 21 nt, Artificial Sequence
  Synthetic
guuucuguuuuuguuuuuugg

SEQ ID NO: 334520 - RNA, 22 nt, Artificial Sequence
  Synthetic
uguuucuguuuuuguuuuuugg

SEQ ID NO: 334521 - RNA, 23 nt, Artificial Sequence
  Synthetic
guguuucuguuuuuguuuuuugg

SEQ ID NO: 334522 - RNA, 24 nt, Artificial Sequence
  Synthetic
uguguuucuguuuuuguuuuuugg

SEQ ID NO: 334523 - RNA, 18 nt, Artificial Sequence
  Synthetic
uuuuuuuuuuuuuuuugg

SEQ ID NO: 334524 - RNA, 19 nt, Artificial Sequence
  Synthetic
uuuuuuuuuuuuuuuuugg

SEQ ID NO: 334525 - RNA, 20 nt, Artificial Sequence
  Synthetic
uuuuuuuuuuuuuuuuuugg

SEQ ID NO: 334526 - RNA, 21 nt, Artificial Sequence
  Synthetic
uuuuuuuuuuuuuuuuuuugg

SEQ ID NO: 334527 - RNA, 22 nt, Artificial Sequence
  Synthetic
uuuuuuuuuuuuuuuuuuuugg

SEQ ID NO: 334528 - RNA, 23 nt, Artificial Sequence
  Synthetic
cuuuuuuuuuuuuuuuuuuuugg

SEQ ID NO: 334529 - RNA, 24 nt, Artificial Sequence
  Synthetic
ucuuuuuuuuuuuuuuuuuuuugg

SEQ ID NO: 334530 - RNA, 18 nt, Artificial Sequence
  Synthetic
acaaaaaaaaaaaaaaug

SEQ ID NO: 334531 - RNA, 19 nt, Artificial Sequence
  Synthetic
aacaaaaaaaaaaaaaaug

SEQ ID NO: 334532 - RNA, 20 nt, Artificial Sequence
  Synthetic
aaacaaaaaaaaaaaaaaug

SEQ ID NO: 334533 - RNA, 21 nt, Artificial Sequence
  Synthetic
uaaacaaaaaaaaaaaaaaug

SEQ ID NO: 334534 - RNA, 22 nt, Artificial Sequence
  Synthetic
guaaacaaaaaaaaaaaaaaug

SEQ ID NO: 334535 - RNA, 23 nt, Artificial Sequence
  Synthetic
aguaaacaaaaaaaaaaaaaaug

SEQ ID NO: 334536 - RNA, 24 nt, Artificial Sequence
  Synthetic
aaguaaacaaaaaaaaaaaaaaug

SEQ ID NO: 334537 - RNA, 18 nt, Artificial Sequence
  Synthetic
ccuuucagaaaaaaaaug

SEQ ID NO: 334538 - RNA, 19 nt, Artificial Sequence
  Synthetic
accuuucagaaaaaaaaug

SEQ ID NO: 334539 - RNA, 20 nt, Artificial Sequence
  Synthetic
aaccuuucagaaaaaaaaug

SEQ ID NO: 334540 - RNA, 21 nt, Artificial Sequence
  Synthetic
uaaccuuucagaaaaaaaaug

SEQ ID NO: 334541 - RNA, 22 nt, Artificial Sequence
  Synthetic
cuaaccuuucagaaaaaaaaug

SEQ ID NO: 334542 - RNA, 23 nt, Artificial Sequence
  Synthetic
ucuaaccuuucagaaaaaaaaug

SEQ ID NO: 334543 - RNA, 24 nt, Artificial Sequence
  Synthetic
cucuaaccuuucagaaaaaaaaug

SEQ ID NO: 334544 - RNA, 18 nt, Artificial Sequence
  Synthetic
uagaaaggaaaaaaaaug

SEQ ID NO: 334545 - RNA, 19 nt, Artificial Sequence
  Synthetic
auagaaaggaaaaaaaaug

SEQ ID NO: 334546 - RNA, 20 nt, Artificial Sequence
  Synthetic
aauagaaaggaaaaaaaaug

SEQ ID NO: 334547 - RNA, 21 nt, Artificial Sequence
  Synthetic
caauagaaaggaaaaaaaaug

SEQ ID NO: 334548 - RNA, 22 nt, Artificial Sequence
  Synthetic
gcaauagaaaggaaaaaaaaug

SEQ ID NO: 334549 - RNA, 23 nt, Artificial Sequence
  Synthetic
agcaauagaaaggaaaaaaaaug

SEQ ID NO: 334550 - RNA, 24 nt, Artificial Sequence
  Synthetic
cagcaauagaaaggaaaaaaaaug

SEQ ID NO: 334551 - RNA, 18 nt, Artificial Sequence
  Synthetic
aagaagaaagaaaaaaug

SEQ ID NO: 334552 - RNA, 19 nt, Artificial Sequence
  Synthetic
gaagaagaaagaaaaaaug

SEQ ID NO: 334553 - RNA, 20 nt, Artificial Sequence
  Synthetic
agaagaagaaagaaaaaaug

SEQ ID NO: 334554 - RNA, 21 nt, Artificial Sequence
  Synthetic
aagaagaagaaagaaaaaaug

SEQ ID NO: 334555 - RNA, 22 nt, Artificial Sequence
  Synthetic
gaagaagaagaaagaaaaaaug

SEQ ID NO: 334556 - RNA, 23 nt, Artificial Sequence
  Synthetic
ugaagaagaagaaagaaaaaaug

SEQ ID NO: 334557 - RNA, 24 nt, Artificial Sequence
  Synthetic
gugaagaagaagaaagaaaaaaug

SEQ ID NO: 334558 - RNA, 18 nt, Artificial Sequence
  Synthetic
ugguucugcuaaaaaaug

SEQ ID NO: 334559 - RNA, 19 nt, Artificial Sequence
  Synthetic
uugguucugcuaaaaaaug

SEQ ID NO: 334560 - RNA, 20 nt, Artificial Sequence
  Synthetic
auugguucugcuaaaaaaug

SEQ ID NO: 334561 - RNA, 21 nt, Artificial Sequence
  Synthetic
gauugguucugcuaaaaaaug

SEQ ID NO: 334562 - RNA, 22 nt, Artificial Sequence
  Synthetic
agauugguucugcuaaaaaaug

SEQ ID NO: 334563 - RNA, 23 nt, Artificial Sequence
  Synthetic
cagauugguucugcuaaaaaaug

SEQ ID NO: 334564 - RNA, 24 nt, Artificial Sequence
  Synthetic
gcagauugguucugcuaaaaaaug

SEQ ID NO: 334565 - RNA, 18 nt, Artificial Sequence
  Synthetic
auugaguucuaaaaaaug

SEQ ID NO: 334566 - RNA, 19 nt, Artificial Sequence
  Synthetic
aauugaguucuaaaaaaug

SEQ ID NO: 334567 - RNA, 20 nt, Artificial Sequence
  Synthetic
gaauugaguucuaaaaaaug

SEQ ID NO: 334568 - RNA, 21 nt, Artificial Sequence
  Synthetic
ugaauugaguucuaaaaaaug

SEQ ID NO: 334569 - RNA, 22 nt, Artificial Sequence
  Synthetic
uugaauugaguucuaaaaaaug

SEQ ID NO: 334570 - RNA, 23 nt, Artificial Sequence
  Synthetic
cuugaauugaguucuaaaaaaug

SEQ ID NO: 334571 - RNA, 24 nt, Artificial Sequence
  Synthetic
ccuugaauugaguucuaaaaaaug

SEQ ID NO: 334572 - RNA, 18 nt, Artificial Sequence
  Synthetic
ugccacaauacaaaaaug

SEQ ID NO: 334573 - RNA, 19 nt, Artificial Sequence
  Synthetic
uugccacaauacaaaaaug

SEQ ID NO: 334574 - RNA, 20 nt, Artificial Sequence
  Synthetic
uuugccacaauacaaaaaug

SEQ ID NO: 334575 - RNA, 21 nt, Artificial Sequence
  Synthetic
uuuugccacaauacaaaaaug

SEQ ID NO: 334576 - RNA, 22 nt, Artificial Sequence
  Synthetic
auuuugccacaauacaaaaaug

SEQ ID NO: 334577 - RNA, 23 nt, Artificial Sequence
  Synthetic
uauuuugccacaauacaaaaaug

SEQ ID NO: 334578 - RNA, 24 nt, Artificial Sequence
  Synthetic
auauuuugccacaauacaaaaaug

SEQ ID NO: 334579 - RNA, 18 nt, Artificial Sequence
  Synthetic
aaccuguuaccaaaaaug

SEQ ID NO: 334580 - RNA, 19 nt, Artificial Sequence
  Synthetic
uaaccuguuaccaaaaaug

SEQ ID NO: 334581 - RNA, 20 nt, Artificial Sequence
  Synthetic
auaaccuguuaccaaaaaug

SEQ ID NO: 334582 - RNA, 21 nt, Artificial Sequence
  Synthetic
aauaaccuguuaccaaaaaug

SEQ ID NO: 334583 - RNA, 22 nt, Artificial Sequence
  Synthetic
uaauaaccuguuaccaaaaaug

SEQ ID NO: 334584 - RNA, 23 nt, Artificial Sequence
  Synthetic
uuaauaaccuguuaccaaaaaug

SEQ ID NO: 334585 - RNA, 24 nt, Artificial Sequence
  Synthetic
uuuaauaaccuguuaccaaaaaug

SEQ ID NO: 334586 - RNA, 18 nt, Artificial Sequence
  Synthetic
gccugggggccaaaaaug

SEQ ID NO: 334587 - RNA, 19 nt, Artificial Sequence
  Synthetic
agccugggggccaaaaaug

SEQ ID NO: 334588 - RNA, 20 nt, Artificial Sequence
  Synthetic
cagccugggggccaaaaaug

SEQ ID NO: 334589 - RNA, 21 nt, Artificial Sequence
  Synthetic
gcagccugggggccaaaaaug

SEQ ID NO: 334590 - RNA, 22 nt, Artificial Sequence
  Synthetic
ugcagccugggggccaaaaaug

SEQ ID NO: 334591 - RNA, 23 nt, Artificial Sequence
  Synthetic
augcagccugggggccaaaaaug

SEQ ID NO: 334592 - RNA, 24 nt, Artificial Sequence
  Synthetic
uaugcagccugggggccaaaaaug

SEQ ID NO: 334593 - RNA, 18 nt, Artificial Sequence
  Synthetic
uaucuuaagucaaaaaug

SEQ ID NO: 334594 - RNA, 19 nt, Artificial Sequence
  Synthetic
auaucuuaagucaaaaaug

SEQ ID NO: 334595 - RNA, 20 nt, Artificial Sequence
  Synthetic
uauaucuuaagucaaaaaug

SEQ ID NO: 334596 - RNA, 21 nt, Artificial Sequence
  Synthetic
cuauaucuuaagucaaaaaug

SEQ ID NO: 334597 - RNA, 22 nt, Artificial Sequence
  Synthetic
acuauaucuuaagucaaaaaug

SEQ ID NO: 334598 - RNA, 23 nt, Artificial Sequence
  Synthetic
aacuauaucuuaagucaaaaaug

SEQ ID NO: 334599 - RNA, 24 nt, Artificial Sequence
  Synthetic
caacuauaucuuaagucaaaaaug

SEQ ID NO: 334600 - RNA, 18 nt, Artificial Sequence
  Synthetic
aauauuagaagaaaaaug

SEQ ID NO: 334601 - RNA, 19 nt, Artificial Sequence
  Synthetic
aaauauuagaagaaaaaug

SEQ ID NO: 334602 - RNA, 20 nt, Artificial Sequence
  Synthetic
gaaauauuagaagaaaaaug

SEQ ID NO: 334603 - RNA, 21 nt, Artificial Sequence
  Synthetic
ugaaauauuagaagaaaaaug

SEQ ID NO: 334604 - RNA, 22 nt, Artificial Sequence
  Synthetic
augaaauauuagaagaaaaaug

SEQ ID NO: 334605 - RNA, 23 nt, Artificial Sequence
  Synthetic
uaugaaauauuagaagaaaaaug

SEQ ID NO: 334606 - RNA, 24 nt, Artificial Sequence
  Synthetic
uuaugaaauauuagaagaaaaaug

SEQ ID NO: 334607 - RNA, 18 nt, Artificial Sequence
  Synthetic
uuaaaaaacagaaaaaug

SEQ ID NO: 334608 - RNA, 19 nt, Artificial Sequence
  Synthetic
auuaaaaaacagaaaaaug

SEQ ID NO: 334609 - RNA, 20 nt, Artificial Sequence
  Synthetic
uauuaaaaaacagaaaaaug

SEQ ID NO: 334610 - RNA, 21 nt, Artificial Sequence
  Synthetic
cuauuaaaaaacagaaaaaug

SEQ ID NO: 334611 - RNA, 22 nt, Artificial Sequence
  Synthetic
ucuauuaaaaaacagaaaaaug

SEQ ID NO: 334612 - RNA, 23 nt, Artificial Sequence
  Synthetic
gucuauuaaaaaacagaaaaaug

SEQ ID NO: 334613 - RNA, 24 nt, Artificial Sequence
  Synthetic
ugucuauuaaaaaacagaaaaaug

SEQ ID NO: 334614 - RNA, 18 nt, Artificial Sequence
  Synthetic
uucagcaagagaaaaaug

SEQ ID NO: 334615 - RNA, 19 nt, Artificial Sequence
  Synthetic
uuucagcaagagaaaaaug

SEQ ID NO: 334616 - RNA, 20 nt, Artificial Sequence
  Synthetic
auuucagcaagagaaaaaug

SEQ ID NO: 334617 - RNA, 21 nt, Artificial Sequence
  Synthetic
uauuucagcaagagaaaaaug

SEQ ID NO: 334618 - RNA, 22 nt, Artificial Sequence
  Synthetic
auauuucagcaagagaaaaaug

SEQ ID NO: 334619 - RNA, 23 nt, Artificial Sequence
  Synthetic
aauauuucagcaagagaaaaaug

SEQ ID NO: 334620 - RNA, 24 nt, Artificial Sequence
  Synthetic
gaauauuucagcaagagaaaaaug

SEQ ID NO: 334621 - RNA, 18 nt, Artificial Sequence
  Synthetic
ugaaaaaaaguaaaaaug

SEQ ID NO: 334622 - RNA, 19 nt, Artificial Sequence
  Synthetic
uugaaaaaaaguaaaaaug

SEQ ID NO: 334623 - RNA, 20 nt, Artificial Sequence
  Synthetic
guugaaaaaaaguaaaaaug

SEQ ID NO: 334624 - RNA, 21 nt, Artificial Sequence
  Synthetic
aguugaaaaaaaguaaaaaug

SEQ ID NO: 334625 - RNA, 22 nt, Artificial Sequence
  Synthetic
uaguugaaaaaaaguaaaaaug

SEQ ID NO: 334626 - RNA, 23 nt, Artificial Sequence
  Synthetic
uuaguugaaaaaaaguaaaaaug

SEQ ID NO: 334627 - RNA, 24 nt, Artificial Sequence
  Synthetic
uuuaguugaaaaaaaguaaaaaug

SEQ ID NO: 334628 - RNA, 18 nt, Artificial Sequence
  Synthetic
ucaagucuauuaaaaaug

SEQ ID NO: 334629 - RNA, 19 nt, Artificial Sequence
  Synthetic
aucaagucuauuaaaaaug

SEQ ID NO: 334630 - RNA, 20 nt, Artificial Sequence
  Synthetic
aaucaagucuauuaaaaaug

SEQ ID NO: 334631 - RNA, 21 nt, Artificial Sequence
  Synthetic
aaaucaagucuauuaaaaaug

SEQ ID NO: 334632 - RNA, 22 nt, Artificial Sequence
  Synthetic
aaaaucaagucuauuaaaaaug

SEQ ID NO: 334633 - RNA, 23 nt, Artificial Sequence
  Synthetic
aaaaaucaagucuauuaaaaaug

SEQ ID NO: 334634 - RNA, 24 nt, Artificial Sequence
  Synthetic
aaaaaaucaagucuauuaaaaaug

SEQ ID NO: 334635 - RNA, 18 nt, Artificial Sequence
  Synthetic
gagcaguauuacaaaaug

SEQ ID NO: 334636 - RNA, 19 nt, Artificial Sequence
  Synthetic
agagcaguauuacaaaaug

SEQ ID NO: 334637 - RNA, 20 nt, Artificial Sequence
  Synthetic
uagagcaguauuacaaaaug

SEQ ID NO: 334638 - RNA, 21 nt, Artificial Sequence
  Synthetic
guagagcaguauuacaaaaug

SEQ ID NO: 334639 - RNA, 22 nt, Artificial Sequence
  Synthetic
aguagagcaguauuacaaaaug

SEQ ID NO: 334640 - RNA, 23 nt, Artificial Sequence
  Synthetic
caguagagcaguauuacaaaaug

SEQ ID NO: 334641 - RNA, 24 nt, Artificial Sequence
  Synthetic
ucaguagagcaguauuacaaaaug

SEQ ID NO: 334642 - RNA, 18 nt, Artificial Sequence
  Synthetic
ccuuggccucccaaaaug

SEQ ID NO: 334643 - RNA, 19 nt, Artificial Sequence
  Synthetic
accuuggccucccaaaaug

SEQ ID NO: 334644 - RNA, 20 nt, Artificial Sequence
  Synthetic
caccuuggccucccaaaaug

SEQ ID NO: 334645 - RNA, 21 nt, Artificial Sequence
  Synthetic
ccaccuuggccucccaaaaug

SEQ ID NO: 334646 - RNA, 22 nt, Artificial Sequence
  Synthetic
cccaccuuggccucccaaaaug

SEQ ID NO: 334647 - RNA, 23 nt, Artificial Sequence
  Synthetic
gcccaccuuggccucccaaaaug

SEQ ID NO: 334648 - RNA, 24 nt, Artificial Sequence
  Synthetic
ugcccaccuuggccucccaaaaug

SEQ ID NO: 334649 - RNA, 18 nt, Artificial Sequence
  Synthetic
gagaaauuagccaaaaug

SEQ ID NO: 334650 - RNA, 19 nt, Artificial Sequence
  Synthetic
ggagaaauuagccaaaaug

SEQ ID NO: 334651 - RNA, 20 nt, Artificial Sequence
  Synthetic
gggagaaauuagccaaaaug

SEQ ID NO: 334652 - RNA, 21 nt, Artificial Sequence
  Synthetic
ugggagaaauuagccaaaaug

SEQ ID NO: 334653 - RNA, 22 nt, Artificial Sequence
  Synthetic
augggagaaauuagccaaaaug

SEQ ID NO: 334654 - RNA, 23 nt, Artificial Sequence
  Synthetic
aaugggagaaauuagccaaaaug

SEQ ID NO: 334655 - RNA, 24 nt, Artificial Sequence
  Synthetic
aaaugggagaaauuagccaaaaug

SEQ ID NO: 334656 - RNA, 18 nt, Artificial Sequence
  Synthetic
gcguaauuuuccaaaaug

SEQ ID NO: 334657 - RNA, 19 nt, Artificial Sequence
  Synthetic
agcguaauuuuccaaaaug

SEQ ID NO: 334658 - RNA, 20 nt, Artificial Sequence
  Synthetic
uagcguaauuuuccaaaaug

SEQ ID NO: 334659 - RNA, 21 nt, Artificial Sequence
  Synthetic
auagcguaauuuuccaaaaug

SEQ ID NO: 334660 - RNA, 22 nt, Artificial Sequence
  Synthetic
cauagcguaauuuuccaaaaug

SEQ ID NO: 334661 - RNA, 23 nt, Artificial Sequence
  Synthetic
ccauagcguaauuuuccaaaaug

SEQ ID NO: 334662 - RNA, 24 nt, Artificial Sequence
  Synthetic
uccauagcguaauuuuccaaaaug

SEQ ID NO: 334663 - RNA, 18 nt, Artificial Sequence
  Synthetic
uuccuccgaagcaaaaug

SEQ ID NO: 334664 - RNA, 19 nt, Artificial Sequence
  Synthetic
uuuccuccgaagcaaaaug

SEQ ID NO: 334665 - RNA, 20 nt, Artificial Sequence
  Synthetic
auuuccuccgaagcaaaaug

SEQ ID NO: 334666 - RNA, 21 nt, Artificial Sequence
  Synthetic
gauuuccuccgaagcaaaaug

SEQ ID NO: 334667 - RNA, 22 nt, Artificial Sequence
  Synthetic
ugauuuccuccgaagcaaaaug

SEQ ID NO: 334668 - RNA, 23 nt, Artificial Sequence
  Synthetic
augauuuccuccgaagcaaaaug

SEQ ID NO: 334669 - RNA, 24 nt, Artificial Sequence
  Synthetic
aaugauuuccuccgaagcaaaaug

SEQ ID NO: 334670 - RNA, 18 nt, Artificial Sequence
  Synthetic
cuucuggaucucaaaaug

SEQ ID NO: 334671 - RNA, 19 nt, Artificial Sequence
  Synthetic
ccuucuggaucucaaaaug

SEQ ID NO: 334672 - RNA, 20 nt, Artificial Sequence
  Synthetic
uccuucuggaucucaaaaug

SEQ ID NO: 334673 - RNA, 21 nt, Artificial Sequence
  Synthetic
guccuucuggaucucaaaaug

SEQ ID NO: 334674 - RNA, 22 nt, Artificial Sequence
  Synthetic
uguccuucuggaucucaaaaug

SEQ ID NO: 334675 - RNA, 23 nt, Artificial Sequence
  Synthetic
uuguccuucuggaucucaaaaug

SEQ ID NO: 334676 - RNA, 24 nt, Artificial Sequence
  Synthetic
uuuguccuucuggaucucaaaaug

SEQ ID NO: 334677 - RNA, 18 nt, Artificial Sequence
  Synthetic
gcaaugguucucaaaaug

SEQ ID NO: 334678 - RNA, 19 nt, Artificial Sequence
  Synthetic
ugcaaugguucucaaaaug

SEQ ID NO: 334679 - RNA, 20 nt, Artificial Sequence
  Synthetic
uugcaaugguucucaaaaug

SEQ ID NO: 334680 - RNA, 21 nt, Artificial Sequence
  Synthetic
auugcaaugguucucaaaaug

SEQ ID NO: 334681 - RNA, 22 nt, Artificial Sequence
  Synthetic
uauugcaaugguucucaaaaug

SEQ ID NO: 334682 - RNA, 23 nt, Artificial Sequence
  Synthetic
cuauugcaaugguucucaaaaug

SEQ ID NO: 334683 - RNA, 24 nt, Artificial Sequence
  Synthetic
ucuauugcaaugguucucaaaaug

SEQ ID NO: 334684 - RNA, 18 nt, Artificial Sequence
  Synthetic
aauggaaaagucaaaaug

SEQ ID NO: 334685 - RNA, 19 nt, Artificial Sequence
  Synthetic
aaauggaaaagucaaaaug

SEQ ID NO: 334686 - RNA, 20 nt, Artificial Sequence
  Synthetic
gaaauggaaaagucaaaaug

SEQ ID NO: 334687 - RNA, 21 nt, Artificial Sequence
  Synthetic
agaaauggaaaagucaaaaug

SEQ ID NO: 334688 - RNA, 22 nt, Artificial Sequence
  Synthetic
uagaaauggaaaagucaaaaug

SEQ ID NO: 334689 - RNA, 23 nt, Artificial Sequence
  Synthetic
guagaaauggaaaagucaaaaug

SEQ ID NO: 334690 - RNA, 24 nt, Artificial Sequence
  Synthetic
uguagaaauggaaaagucaaaaug

SEQ ID NO: 334691 - RNA, 18 nt, Artificial Sequence
  Synthetic
augacaagggucaaaaug

SEQ ID NO: 334692 - RNA, 19 nt, Artificial Sequence
  Synthetic
gaugacaagggucaaaaug

SEQ ID NO: 334693 - RNA, 20 nt, Artificial Sequence
  Synthetic
ugaugacaagggucaaaaug

SEQ ID NO: 334694 - RNA, 21 nt, Artificial Sequence
  Synthetic
gugaugacaagggucaaaaug

SEQ ID NO: 334695 - RNA, 22 nt, Artificial Sequence
  Synthetic
agugaugacaagggucaaaaug

SEQ ID NO: 334696 - RNA, 23 nt, Artificial Sequence
  Synthetic
cagugaugacaagggucaaaaug

SEQ ID NO: 334697 - RNA, 24 nt, Artificial Sequence
  Synthetic
ccagugaugacaagggucaaaaug

SEQ ID NO: 334698 - RNA, 18 nt, Artificial Sequence
  Synthetic
aacucuucuaagaaaaug

SEQ ID NO: 334699 - RNA, 19 nt, Artificial Sequence
  Synthetic
aaacucuucuaagaaaaug

SEQ ID NO: 334700 - RNA, 20 nt, Artificial Sequence
  Synthetic
aaaacucuucuaagaaaaug

SEQ ID NO: 334701 - RNA, 21 nt, Artificial Sequence
  Synthetic
uaaaacucuucuaagaaaaug

SEQ ID NO: 334702 - RNA, 22 nt, Artificial Sequence
  Synthetic
uuaaaacucuucuaagaaaaug

SEQ ID NO: 334703 - RNA, 23 nt, Artificial Sequence
  Synthetic
uuuaaaacucuucuaagaaaaug

SEQ ID NO: 334704 - RNA, 24 nt, Artificial Sequence
  Synthetic
cuuuaaaacucuucuaagaaaaug

SEQ ID NO: 334705 - RNA, 18 nt, Artificial Sequence
  Synthetic
gaaacaaagcagaaaaug

SEQ ID NO: 334706 - RNA, 19 nt, Artificial Sequence
  Synthetic
ggaaacaaagcagaaaaug

SEQ ID NO: 334707 - RNA, 20 nt, Artificial Sequence
  Synthetic
aggaaacaaagcagaaaaug

SEQ ID NO: 334708 - RNA, 21 nt, Artificial Sequence
  Synthetic
aaggaaacaaagcagaaaaug

SEQ ID NO: 334709 - RNA, 22 nt, Artificial Sequence
  Synthetic
aaaggaaacaaagcagaaaaug

SEQ ID NO: 334710 - RNA, 23 nt, Artificial Sequence
  Synthetic
caaaggaaacaaagcagaaaaug

SEQ ID NO: 334711 - RNA, 24 nt, Artificial Sequence
  Synthetic
acaaaggaaacaaagcagaaaaug

SEQ ID NO: 334712 - RNA, 18 nt, Artificial Sequence
  Synthetic
aaaucauggcagaaaaug

SEQ ID NO: 334713 - RNA, 19 nt, Artificial Sequence
  Synthetic
aaaaucauggcagaaaaug

SEQ ID NO: 334714 - RNA, 20 nt, Artificial Sequence
  Synthetic
uaaaaucauggcagaaaaug

SEQ ID NO: 334715 - RNA, 21 nt, Artificial Sequence
  Synthetic
uuaaaaucauggcagaaaaug

SEQ ID NO: 334716 - RNA, 22 nt, Artificial Sequence
  Synthetic
cuuaaaaucauggcagaaaaug

SEQ ID NO: 334717 - RNA, 23 nt, Artificial Sequence
  Synthetic
acuuaaaaucauggcagaaaaug

SEQ ID NO: 334718 - RNA, 24 nt, Artificial Sequence
  Synthetic
aacuuaaaaucauggcagaaaaug

SEQ ID NO: 334719 - RNA, 18 nt, Artificial Sequence
  Synthetic
aguuuuaaucagaaaaug

SEQ ID NO: 334720 - RNA, 19 nt, Artificial Sequence
  Synthetic
uaguuuuaaucagaaaaug

SEQ ID NO: 334721 - RNA, 20 nt, Artificial Sequence
  Synthetic
auaguuuuaaucagaaaaug

SEQ ID NO: 334722 - RNA, 21 nt, Artificial Sequence
  Synthetic
aauaguuuuaaucagaaaaug

SEQ ID NO: 334723 - RNA, 22 nt, Artificial Sequence
  Synthetic
aaauaguuuuaaucagaaaaug

SEQ ID NO: 334724 - RNA, 23 nt, Artificial Sequence
  Synthetic
aaaauaguuuuaaucagaaaaug

SEQ ID NO: 334725 - RNA, 24 nt, Artificial Sequence
  Synthetic
caaaauaguuuuaaucagaaaaug

SEQ ID NO: 334726 - RNA, 18 nt, Artificial Sequence
  Synthetic
guauuauuuuagaaaaug

SEQ ID NO: 334727 - RNA, 19 nt, Artificial Sequence
  Synthetic
aguauuauuuuagaaaaug

SEQ ID NO: 334728 - RNA, 20 nt, Artificial Sequence
  Synthetic
aaguauuauuuuagaaaaug

SEQ ID NO: 334729 - RNA, 21 nt, Artificial Sequence
  Synthetic
aaaguauuauuuuagaaaaug

SEQ ID NO: 334730 - RNA, 22 nt, Artificial Sequence
  Synthetic
uaaaguauuauuuuagaaaaug

SEQ ID NO: 334731 - RNA, 23 nt, Artificial Sequence
  Synthetic
uuaaaguauuauuuuagaaaaug

SEQ ID NO: 334732 - RNA, 24 nt, Artificial Sequence
  Synthetic
auuaaaguauuauuuuagaaaaug

SEQ ID NO: 334733 - RNA, 18 nt, Artificial Sequence
  Synthetic
gaagaugacaggaaaaug

SEQ ID NO: 334734 - RNA, 19 nt, Artificial Sequence
  Synthetic
agaagaugacaggaaaaug

SEQ ID NO: 334735 - RNA, 20 nt, Artificial Sequence
  Synthetic
uagaagaugacaggaaaaug

SEQ ID NO: 334736 - RNA, 21 nt, Artificial Sequence
  Synthetic
cuagaagaugacaggaaaaug

SEQ ID NO: 334737 - RNA, 22 nt, Artificial Sequence
  Synthetic
gcuagaagaugacaggaaaaug

SEQ ID NO: 334738 - RNA, 23 nt, Artificial Sequence
  Synthetic
ggcuagaagaugacaggaaaaug

SEQ ID NO: 334739 - RNA, 24 nt, Artificial Sequence
  Synthetic
gggcuagaagaugacaggaaaaug

SEQ ID NO: 334740 - RNA, 18 nt, Artificial Sequence
  Synthetic
auggaagaagggaaaaug

SEQ ID NO: 334741 - RNA, 19 nt, Artificial Sequence
  Synthetic
aauggaagaagggaaaaug

SEQ ID NO: 334742 - RNA, 20 nt, Artificial Sequence
  Synthetic
aaauggaagaagggaaaaug

SEQ ID NO: 334743 - RNA, 21 nt, Artificial Sequence
  Synthetic
aaaauggaagaagggaaaaug

SEQ ID NO: 334744 - RNA, 22 nt, Artificial Sequence
  Synthetic
uaaaauggaagaagggaaaaug

SEQ ID NO: 334745 - RNA, 23 nt, Artificial Sequence
  Synthetic
uuaaaauggaagaagggaaaaug

SEQ ID NO: 334746 - RNA, 24 nt, Artificial Sequence
  Synthetic
uuuaaaauggaagaagggaaaaug

SEQ ID NO: 334747 - RNA, 18 nt, Artificial Sequence
  Synthetic
auuuagggguggaaaaug

SEQ ID NO: 334748 - RNA, 19 nt, Artificial Sequence
  Synthetic
gauuuagggguggaaaaug

SEQ ID NO: 334749 - RNA, 20 nt, Artificial Sequence
  Synthetic
ggauuuagggguggaaaaug

SEQ ID NO: 334750 - RNA, 21 nt, Artificial Sequence
  Synthetic
uggauuuagggguggaaaaug

SEQ ID NO: 334751 - RNA, 22 nt, Artificial Sequence
  Synthetic
guggauuuagggguggaaaaug

SEQ ID NO: 334752 - RNA, 23 nt, Artificial Sequence
  Synthetic
uguggauuuagggguggaaaaug

SEQ ID NO: 334753 - RNA, 24 nt, Artificial Sequence
  Synthetic
cuguggauuuagggguggaaaaug

SEQ ID NO: 334754 - RNA, 18 nt, Artificial Sequence
  Synthetic
uaaauauaccugaaaaug

SEQ ID NO: 334755 - RNA, 19 nt, Artificial Sequence
  Synthetic
guaaauauaccugaaaaug

SEQ ID NO: 334756 - RNA, 20 nt, Artificial Sequence
  Synthetic
uguaaauauaccugaaaaug

SEQ ID NO: 334757 - RNA, 21 nt, Artificial Sequence
  Synthetic
cuguaaauauaccugaaaaug

SEQ ID NO: 334758 - RNA, 22 nt, Artificial Sequence
  Synthetic
gcuguaaauauaccugaaaaug

SEQ ID NO: 334759 - RNA, 23 nt, Artificial Sequence
  Synthetic
ugcuguaaauauaccugaaaaug

SEQ ID NO: 334760 - RNA, 24 nt, Artificial Sequence
  Synthetic
uugcuguaaauauaccugaaaaug

SEQ ID NO: 334761 - RNA, 18 nt, Artificial Sequence
  Synthetic
aaucaaggaaauaaaaug

SEQ ID NO: 334762 - RNA, 19 nt, Artificial Sequence
  Synthetic
aaaucaaggaaauaaaaug

SEQ ID NO: 334763 - RNA, 20 nt, Artificial Sequence
  Synthetic
gaaaucaaggaaauaaaaug

SEQ ID NO: 334764 - RNA, 21 nt, Artificial Sequence
  Synthetic
agaaaucaaggaaauaaaaug

SEQ ID NO: 334765 - RNA, 22 nt, Artificial Sequence
  Synthetic
cagaaaucaaggaaauaaaaug

SEQ ID NO: 334766 - RNA, 23 nt, Artificial Sequence
  Synthetic
ucagaaaucaaggaaauaaaaug

SEQ ID NO: 334767 - RNA, 24 nt, Artificial Sequence
  Synthetic
uucagaaaucaaggaaauaaaaug

SEQ ID NO: 334768 - RNA, 18 nt, Artificial Sequence
  Synthetic
cugauuggacauaaaaug

SEQ ID NO: 334769 - RNA, 19 nt, Artificial Sequence
  Synthetic
acugauuggacauaaaaug

SEQ ID NO: 334770 - RNA, 20 nt, Artificial Sequence
  Synthetic
aacugauuggacauaaaaug

SEQ ID NO: 334771 - RNA, 21 nt, Artificial Sequence
  Synthetic
uaacugauuggacauaaaaug

SEQ ID NO: 334772 - RNA, 22 nt, Artificial Sequence
  Synthetic
guaacugauuggacauaaaaug

SEQ ID NO: 334773 - RNA, 23 nt, Artificial Sequence
  Synthetic
gguaacugauuggacauaaaaug

SEQ ID NO: 334774 - RNA, 24 nt, Artificial Sequence
  Synthetic
ugguaacugauuggacauaaaaug

SEQ ID NO: 334775 - RNA, 18 nt, Artificial Sequence
  Synthetic
cauaaaaugcauaaaaug

SEQ ID NO: 334776 - RNA, 19 nt, Artificial Sequence
  Synthetic
gcauaaaaugcauaaaaug

SEQ ID NO: 334777 - RNA, 20 nt, Artificial Sequence
  Synthetic
ugcauaaaaugcauaaaaug

SEQ ID NO: 334778 - RNA, 21 nt, Artificial Sequence
  Synthetic
uugcauaaaaugcauaaaaug

SEQ ID NO: 334779 - RNA, 22 nt, Artificial Sequence
  Synthetic
cuugcauaaaaugcauaaaaug

SEQ ID NO: 334780 - RNA, 23 nt, Artificial Sequence
  Synthetic
ccuugcauaaaaugcauaaaaug

SEQ ID NO: 334781 - RNA, 24 nt, Artificial Sequence
  Synthetic
accuugcauaaaaugcauaaaaug

SEQ ID NO: 334782 - RNA, 18 nt, Artificial Sequence
  Synthetic
uacaaguuauauaaaaug

SEQ ID NO: 334783 - RNA, 19 nt, Artificial Sequence
  Synthetic
cuacaaguuauauaaaaug

SEQ ID NO: 334784 - RNA, 20 nt, Artificial Sequence
  Synthetic
acuacaaguuauauaaaaug

SEQ ID NO: 334785 - RNA, 21 nt, Artificial Sequence
  Synthetic
uacuacaaguuauauaaaaug

SEQ ID NO: 334786 - RNA, 22 nt, Artificial Sequence
  Synthetic
guacuacaaguuauauaaaaug

SEQ ID NO: 334787 - RNA, 23 nt, Artificial Sequence
  Synthetic
gguacuacaaguuauauaaaaug

SEQ ID NO: 334788 - RNA, 24 nt, Artificial Sequence
  Synthetic
ugguacuacaaguuauauaaaaug

SEQ ID NO: 334789 - RNA, 18 nt, Artificial Sequence
  Synthetic
agauugcauuauaaaaug

SEQ ID NO: 334790 - RNA, 19 nt, Artificial Sequence
  Synthetic
aagauugcauuauaaaaug

SEQ ID NO: 334791 - RNA, 20 nt, Artificial Sequence
  Synthetic
aaagauugcauuauaaaaug

SEQ ID NO: 334792 - RNA, 21 nt, Artificial Sequence
  Synthetic
uaaagauugcauuauaaaaug

SEQ ID NO: 334793 - RNA, 22 nt, Artificial Sequence
  Synthetic
auaaagauugcauuauaaaaug

SEQ ID NO: 334794 - RNA, 23 nt, Artificial Sequence
  Synthetic
aauaaagauugcauuauaaaaug

SEQ ID NO: 334795 - RNA, 24 nt, Artificial Sequence
  Synthetic
caauaaagauugcauuauaaaaug

SEQ ID NO: 334796 - RNA, 18 nt, Artificial Sequence
  Synthetic
gagagacauccuaaaaug

SEQ ID NO: 334797 - RNA, 19 nt, Artificial Sequence
  Synthetic
ugagagacauccuaaaaug

SEQ ID NO: 334798 - RNA, 20 nt, Artificial Sequence
  Synthetic
uugagagacauccuaaaaug

SEQ ID NO: 334799 - RNA, 21 nt, Artificial Sequence
  Synthetic
uuugagagacauccuaaaaug

SEQ ID NO: 334800 - RNA, 22 nt, Artificial Sequence
  Synthetic
cuuugagagacauccuaaaaug

SEQ ID NO: 334801 - RNA, 23 nt, Artificial Sequence
  Synthetic
gcuuugagagacauccuaaaaug

SEQ ID NO: 334802 - RNA, 24 nt, Artificial Sequence
  Synthetic
agcuuugagagacauccuaaaaug

SEQ ID NO: 334803 - RNA, 18 nt, Artificial Sequence
  Synthetic
ugguggaaauguaaaaug

SEQ ID NO: 334804 - RNA, 19 nt, Artificial Sequence
  Synthetic
cugguggaaauguaaaaug

SEQ ID NO: 334805 - RNA, 20 nt, Artificial Sequence
  Synthetic
acugguggaaauguaaaaug

SEQ ID NO: 334806 - RNA, 21 nt, Artificial Sequence
  Synthetic
uacugguggaaauguaaaaug

SEQ ID NO: 334807 - RNA, 22 nt, Artificial Sequence
  Synthetic
uuacugguggaaauguaaaaug

SEQ ID NO: 334808 - RNA, 23 nt, Artificial Sequence
  Synthetic
auuacugguggaaauguaaaaug

SEQ ID NO: 334809 - RNA, 24 nt, Artificial Sequence
  Synthetic
cauuacugguggaaauguaaaaug

SEQ ID NO: 334810 - RNA, 18 nt, Artificial Sequence
  Synthetic
uucgucaacuguaaaaug

SEQ ID NO: 334811 - RNA, 19 nt, Artificial Sequence
  Synthetic
uuucgucaacuguaaaaug

SEQ ID NO: 334812 - RNA, 20 nt, Artificial Sequence
  Synthetic
auuucgucaacuguaaaaug

SEQ ID NO: 334813 - RNA, 21 nt, Artificial Sequence
  Synthetic
uauuucgucaacuguaaaaug

SEQ ID NO: 334814 - RNA, 22 nt, Artificial Sequence
  Synthetic
cuauuucgucaacuguaaaaug

SEQ ID NO: 334815 - RNA, 23 nt, Artificial Sequence
  Synthetic
ucuauuucgucaacuguaaaaug

SEQ ID NO: 334816 - RNA, 24 nt, Artificial Sequence
  Synthetic
uucuauuucgucaacuguaaaaug

SEQ ID NO: 334817 - RNA, 18 nt, Artificial Sequence
  Synthetic
ugucucaucuguaaaaug

SEQ ID NO: 334818 - RNA, 19 nt, Artificial Sequence
  Synthetic
uugucucaucuguaaaaug

SEQ ID NO: 334819 - RNA, 20 nt, Artificial Sequence
  Synthetic
guugucucaucuguaaaaug

SEQ ID NO: 334820 - RNA, 21 nt, Artificial Sequence
  Synthetic
gguugucucaucuguaaaaug

SEQ ID NO: 334821 - RNA, 22 nt, Artificial Sequence
  Synthetic
ugguugucucaucuguaaaaug

SEQ ID NO: 334822 - RNA, 23 nt, Artificial Sequence
  Synthetic
uugguugucucaucuguaaaaug

SEQ ID NO: 334823 - RNA, 24 nt, Artificial Sequence
  Synthetic
cuugguugucucaucuguaaaaug

SEQ ID NO: 334824 - RNA, 18 nt, Artificial Sequence
  Synthetic
cucagcuauauuaaaaug

SEQ ID NO: 334825 - RNA, 19 nt, Artificial Sequence
  Synthetic
ucucagcuauauuaaaaug

SEQ ID NO: 334826 - RNA, 20 nt, Artificial Sequence
  Synthetic
uucucagcuauauuaaaaug

SEQ ID NO: 334827 - RNA, 21 nt, Artificial Sequence
  Synthetic
cuucucagcuauauuaaaaug

SEQ ID NO: 334828 - RNA, 22 nt, Artificial Sequence
  Synthetic
acuucucagcuauauuaaaaug

SEQ ID NO: 334829 - RNA, 23 nt, Artificial Sequence
  Synthetic
uacuucucagcuauauuaaaaug

SEQ ID NO: 334830 - RNA, 24 nt, Artificial Sequence
  Synthetic
uuacuucucagcuauauuaaaaug

SEQ ID NO: 334831 - RNA, 18 nt, Artificial Sequence
  Synthetic
agauaagcuauuaaaaug

SEQ ID NO: 334832 - RNA, 19 nt, Artificial Sequence
  Synthetic
gagauaagcuauuaaaaug

SEQ ID NO: 334833 - RNA, 20 nt, Artificial Sequence
  Synthetic
agagauaagcuauuaaaaug

SEQ ID NO: 334834 - RNA, 21 nt, Artificial Sequence
  Synthetic
cagagauaagcuauuaaaaug

SEQ ID NO: 334835 - RNA, 22 nt, Artificial Sequence
  Synthetic
ucagagauaagcuauuaaaaug

SEQ ID NO: 334836 - RNA, 23 nt, Artificial Sequence
  Synthetic
aucagagauaagcuauuaaaaug

SEQ ID NO: 334837 - RNA, 24 nt, Artificial Sequence
  Synthetic
uaucagagauaagcuauuaaaaug

SEQ ID NO: 334838 - RNA, 18 nt, Artificial Sequence
  Synthetic
ccucauccucuuaaaaug

SEQ ID NO: 334839 - RNA, 19 nt, Artificial Sequence
  Synthetic
gccucauccucuuaaaaug

SEQ ID NO: 334840 - RNA, 20 nt, Artificial Sequence
  Synthetic
cgccucauccucuuaaaaug

SEQ ID NO: 334841 - RNA, 21 nt, Artificial Sequence
  Synthetic
ccgccucauccucuuaaaaug

SEQ ID NO: 334842 - RNA, 22 nt, Artificial Sequence
  Synthetic
cccgccucauccucuuaaaaug

SEQ ID NO: 334843 - RNA, 23 nt, Artificial Sequence
  Synthetic
ucccgccucauccucuuaaaaug

SEQ ID NO: 334844 - RNA, 24 nt, Artificial Sequence
  Synthetic
cucccgccucauccucuuaaaaug

SEQ ID NO: 334845 - RNA, 18 nt, Artificial Sequence
  Synthetic
caugauggauuuaaaaug

SEQ ID NO: 334846 - RNA, 19 nt, Artificial Sequence
  Synthetic
ucaugauggauuuaaaaug

SEQ ID NO: 334847 - RNA, 20 nt, Artificial Sequence
  Synthetic
uucaugauggauuuaaaaug

SEQ ID NO: 334848 - RNA, 21 nt, Artificial Sequence
  Synthetic
guucaugauggauuuaaaaug

SEQ ID NO: 334849 - RNA, 22 nt, Artificial Sequence
  Synthetic
cguucaugauggauuuaaaaug

SEQ ID NO: 334850 - RNA, 23 nt, Artificial Sequence
  Synthetic
ccguucaugauggauuuaaaaug

SEQ ID NO: 334851 - RNA, 24 nt, Artificial Sequence
  Synthetic
cccguucaugauggauuuaaaaug

SEQ ID NO: 334852 - RNA, 18 nt, Artificial Sequence
  Synthetic
uaaaaggguuuuaaaaug

SEQ ID NO: 334853 - RNA, 19 nt, Artificial Sequence
  Synthetic
uuaaaaggguuuuaaaaug

SEQ ID NO: 334854 - RNA, 20 nt, Artificial Sequence
  Synthetic
uuuaaaaggguuuuaaaaug

SEQ ID NO: 334855 - RNA, 21 nt, Artificial Sequence
  Synthetic
uuuuaaaaggguuuuaaaaug

SEQ ID NO: 334856 - RNA, 22 nt, Artificial Sequence
  Synthetic
auuuuaaaaggguuuuaaaaug

SEQ ID NO: 334857 - RNA, 23 nt, Artificial Sequence
  Synthetic
uauuuuaaaaggguuuuaaaaug

SEQ ID NO: 334858 - RNA, 24 nt, Artificial Sequence
  Synthetic
cuauuuuaaaaggguuuuaaaaug

SEQ ID NO: 334859 - RNA, 18 nt, Artificial Sequence
  Synthetic
agauaacacaaacaaaug

SEQ ID NO: 334860 - RNA, 19 nt, Artificial Sequence
  Synthetic
uagauaacacaaacaaaug

SEQ ID NO: 334861 - RNA, 20 nt, Artificial Sequence
  Synthetic
auagauaacacaaacaaaug

SEQ ID NO: 334862 - RNA, 21 nt, Artificial Sequence
  Synthetic
cauagauaacacaaacaaaug

SEQ ID NO: 334863 - RNA, 22 nt, Artificial Sequence
  Synthetic
ccauagauaacacaaacaaaug

SEQ ID NO: 334864 - RNA, 23 nt, Artificial Sequence
  Synthetic
accauagauaacacaaacaaaug

SEQ ID NO: 334865 - RNA, 24 nt, Artificial Sequence
  Synthetic
aaccauagauaacacaaacaaaug

SEQ ID NO: 334866 - RNA, 18 nt, Artificial Sequence
  Synthetic
uaaaugcagaaacaaaug

SEQ ID NO: 334867 - RNA, 19 nt, Artificial Sequence
  Synthetic
guaaaugcagaaacaaaug

SEQ ID NO: 334868 - RNA, 20 nt, Artificial Sequence
  Synthetic
gguaaaugcagaaacaaaug

SEQ ID NO: 334869 - RNA, 21 nt, Artificial Sequence
  Synthetic
ggguaaaugcagaaacaaaug

SEQ ID NO: 334870 - RNA, 22 nt, Artificial Sequence
  Synthetic
cggguaaaugcagaaacaaaug

SEQ ID NO: 334871 - RNA, 23 nt, Artificial Sequence
  Synthetic
ccggguaaaugcagaaacaaaug

SEQ ID NO: 334872 - RNA, 24 nt, Artificial Sequence
  Synthetic
gccggguaaaugcagaaacaaaug

SEQ ID NO: 334873 - RNA, 18 nt, Artificial Sequence
  Synthetic
uuaguaauaacacaaaug

SEQ ID NO: 334874 - RNA, 19 nt, Artificial Sequence
  Synthetic
uuuaguaauaacacaaaug

SEQ ID NO: 334875 - RNA, 20 nt, Artificial Sequence
  Synthetic
uuuuaguaauaacacaaaug

SEQ ID NO: 334876 - RNA, 21 nt, Artificial Sequence
  Synthetic
uuuuuaguaauaacacaaaug

SEQ ID NO: 334877 - RNA, 22 nt, Artificial Sequence
  Synthetic
auuuuuaguaauaacacaaaug

SEQ ID NO: 334878 - RNA, 23 nt, Artificial Sequence
  Synthetic
uauuuuuaguaauaacacaaaug

SEQ ID NO: 334879 - RNA, 24 nt, Artificial Sequence
  Synthetic
cuauuuuuaguaauaacacaaaug

SEQ ID NO: 334880 - RNA, 18 nt, Artificial Sequence
  Synthetic
aaauugcuuacacaaaug

SEQ ID NO: 334881 - RNA, 19 nt, Artificial Sequence
  Synthetic
aaaauugcuuacacaaaug

SEQ ID NO: 334882 - RNA, 20 nt, Artificial Sequence
  Synthetic
aaaaauugcuuacacaaaug

SEQ ID NO: 334883 - RNA, 21 nt, Artificial Sequence
  Synthetic
aaaaaauugcuuacacaaaug

SEQ ID NO: 334884 - RNA, 22 nt, Artificial Sequence
  Synthetic
gaaaaaauugcuuacacaaaug

SEQ ID NO: 334885 - RNA, 23 nt, Artificial Sequence
  Synthetic
agaaaaaauugcuuacacaaaug

SEQ ID NO: 334886 - RNA, 24 nt, Artificial Sequence
  Synthetic
aagaaaaaauugcuuacacaaaug

SEQ ID NO: 334887 - RNA, 18 nt, Artificial Sequence
  Synthetic
ugguuaaauccacaaaug

SEQ ID NO: 334888 - RNA, 19 nt, Artificial Sequence
  Synthetic
cugguuaaauccacaaaug

SEQ ID NO: 334889 - RNA, 20 nt, Artificial Sequence
  Synthetic
acugguuaaauccacaaaug

SEQ ID NO: 334890 - RNA, 21 nt, Artificial Sequence
  Synthetic
gacugguuaaauccacaaaug

SEQ ID NO: 334891 - RNA, 22 nt, Artificial Sequence
  Synthetic
ugacugguuaaauccacaaaug

SEQ ID NO: 334892 - RNA, 23 nt, Artificial Sequence
  Synthetic
augacugguuaaauccacaaaug

SEQ ID NO: 334893 - RNA, 24 nt, Artificial Sequence
  Synthetic
gaugacugguuaaauccacaaaug

SEQ ID NO: 334894 - RNA, 18 nt, Artificial Sequence
  Synthetic
aaucacagcuuacaaaug

SEQ ID NO: 334895 - RNA, 19 nt, Artificial Sequence
  Synthetic
caaucacagcuuacaaaug

SEQ ID NO: 334896 - RNA, 20 nt, Artificial Sequence
  Synthetic
gcaaucacagcuuacaaaug

SEQ ID NO: 334897 - RNA, 21 nt, Artificial Sequence
  Synthetic
agcaaucacagcuuacaaaug

SEQ ID NO: 334898 - RNA, 22 nt, Artificial Sequence
  Synthetic
gagcaaucacagcuuacaaaug

SEQ ID NO: 334899 - RNA, 23 nt, Artificial Sequence
  Synthetic
ugagcaaucacagcuuacaaaug

SEQ ID NO: 334900 - RNA, 24 nt, Artificial Sequence
  Synthetic
cugagcaaucacagcuuacaaaug

SEQ ID NO: 334901 - RNA, 18 nt, Artificial Sequence
  Synthetic
guaacucgaacccaaaug

SEQ ID NO: 334902 - RNA, 19 nt, Artificial Sequence
  Synthetic
aguaacucgaacccaaaug

SEQ ID NO: 334903 - RNA, 20 nt, Artificial Sequence
  Synthetic
caguaacucgaacccaaaug

SEQ ID NO: 334904 - RNA, 21 nt, Artificial Sequence
  Synthetic
ucaguaacucgaacccaaaug

SEQ ID NO: 334905 - RNA, 22 nt, Artificial Sequence
  Synthetic
uucaguaacucgaacccaaaug

SEQ ID NO: 334906 - RNA, 23 nt, Artificial Sequence
  Synthetic
auucaguaacucgaacccaaaug

SEQ ID NO: 334907 - RNA, 24 nt, Artificial Sequence
  Synthetic
uauucaguaacucgaacccaaaug

SEQ ID NO: 334908 - RNA, 18 nt, Artificial Sequence
  Synthetic
aacaagcuaccccaaaug

SEQ ID NO: 334909 - RNA, 19 nt, Artificial Sequence
  Synthetic
uaacaagcuaccccaaaug

SEQ ID NO: 334910 - RNA, 20 nt, Artificial Sequence
  Synthetic
guaacaagcuaccccaaaug

SEQ ID NO: 334911 - RNA, 21 nt, Artificial Sequence
  Synthetic
uguaacaagcuaccccaaaug

SEQ ID NO: 334912 - RNA, 22 nt, Artificial Sequence
  Synthetic
guguaacaagcuaccccaaaug

SEQ ID NO: 334913 - RNA, 23 nt, Artificial Sequence
  Synthetic
uguguaacaagcuaccccaaaug

SEQ ID NO: 334914 - RNA, 24 nt, Artificial Sequence
  Synthetic
cuguguaacaagcuaccccaaaug

SEQ ID NO: 334915 - RNA, 18 nt, Artificial Sequence
  Synthetic
agaguagaggcccaaaug

SEQ ID NO: 334916 - RNA, 19 nt, Artificial Sequence
  Synthetic
uagaguagaggcccaaaug

SEQ ID NO: 334917 - RNA, 20 nt, Artificial Sequence
  Synthetic
auagaguagaggcccaaaug

SEQ ID NO: 334918 - RNA, 21 nt, Artificial Sequence
  Synthetic
aauagaguagaggcccaaaug

SEQ ID NO: 334919 - RNA, 22 nt, Artificial Sequence
  Synthetic
aaauagaguagaggcccaaaug

SEQ ID NO: 334920 - RNA, 23 nt, Artificial Sequence
  Synthetic
gaaauagaguagaggcccaaaug

SEQ ID NO: 334921 - RNA, 24 nt, Artificial Sequence
  Synthetic
ggaaauagaguagaggcccaaaug

SEQ ID NO: 334922 - RNA, 18 nt, Artificial Sequence
  Synthetic
uuuacagacaagcaaaug

SEQ ID NO: 334923 - RNA, 19 nt, Artificial Sequence
  Synthetic
cuuuacagacaagcaaaug

SEQ ID NO: 334924 - RNA, 20 nt, Artificial Sequence
  Synthetic
ccuuuacagacaagcaaaug

SEQ ID NO: 334925 - RNA, 21 nt, Artificial Sequence
  Synthetic
uccuuuacagacaagcaaaug

SEQ ID NO: 334926 - RNA, 22 nt, Artificial Sequence
  Synthetic
auccuuuacagacaagcaaaug

SEQ ID NO: 334927 - RNA, 23 nt, Artificial Sequence
  Synthetic
aauccuuuacagacaagcaaaug

SEQ ID NO: 334928 - RNA, 24 nt, Artificial Sequence
  Synthetic
aaauccuuuacagacaagcaaaug

SEQ ID NO: 334929 - RNA, 18 nt, Artificial Sequence
  Synthetic
ucagugcugaagcaaaug

SEQ ID NO: 334930 - RNA, 19 nt, Artificial Sequence
  Synthetic
gucagugcugaagcaaaug

SEQ ID NO: 334931 - RNA, 20 nt, Artificial Sequence
  Synthetic
ugucagugcugaagcaaaug

SEQ ID NO: 334932 - RNA, 21 nt, Artificial Sequence
  Synthetic
cugucagugcugaagcaaaug

SEQ ID NO: 334933 - RNA, 22 nt, Artificial Sequence
  Synthetic
acugucagugcugaagcaaaug

SEQ ID NO: 334934 - RNA, 23 nt, Artificial Sequence
  Synthetic
aacugucagugcugaagcaaaug

SEQ ID NO: 334935 - RNA, 24 nt, Artificial Sequence
  Synthetic
aaacugucagugcugaagcaaaug

SEQ ID NO: 334936 - RNA, 18 nt, Artificial Sequence
  Synthetic
aacuaaacucugcaaaug

SEQ ID NO: 334937 - RNA, 19 nt, Artificial Sequence
  Synthetic
aaacuaaacucugcaaaug

SEQ ID NO: 334938 - RNA, 20 nt, Artificial Sequence
  Synthetic
gaaacuaaacucugcaaaug

SEQ ID NO: 334939 - RNA, 21 nt, Artificial Sequence
  Synthetic
ugaaacuaaacucugcaaaug

SEQ ID NO: 334940 - RNA, 22 nt, Artificial Sequence
  Synthetic
uugaaacuaaacucugcaaaug

SEQ ID NO: 334941 - RNA, 23 nt, Artificial Sequence
  Synthetic
cuugaaacuaaacucugcaaaug

SEQ ID NO: 334942 - RNA, 24 nt, Artificial Sequence
  Synthetic
acuugaaacuaaacucugcaaaug

SEQ ID NO: 334943 - RNA, 18 nt, Artificial Sequence
  Synthetic
uggucccaccaucaaaug

SEQ ID NO: 334944 - RNA, 19 nt, Artificial Sequence
  Synthetic
auggucccaccaucaaaug

SEQ ID NO: 334945 - RNA, 20 nt, Artificial Sequence
  Synthetic
cauggucccaccaucaaaug

SEQ ID NO: 334946 - RNA, 21 nt, Artificial Sequence
  Synthetic
acauggucccaccaucaaaug

SEQ ID NO: 334947 - RNA, 22 nt, Artificial Sequence
  Synthetic
cacauggucccaccaucaaaug

SEQ ID NO: 334948 - RNA, 23 nt, Artificial Sequence
  Synthetic
ucacauggucccaccaucaaaug

SEQ ID NO: 334949 - RNA, 24 nt, Artificial Sequence
  Synthetic
uucacauggucccaccaucaaaug

SEQ ID NO: 334950 - RNA, 18 nt, Artificial Sequence
  Synthetic
gacauaaucuaucaaaug

SEQ ID NO: 334951 - RNA, 19 nt, Artificial Sequence
  Synthetic
ugacauaaucuaucaaaug

SEQ ID NO: 334952 - RNA, 20 nt, Artificial Sequence
  Synthetic
uugacauaaucuaucaaaug

SEQ ID NO: 334953 - RNA, 21 nt, Artificial Sequence
  Synthetic
uuugacauaaucuaucaaaug

SEQ ID NO: 334954 - RNA, 22 nt, Artificial Sequence
  Synthetic
uuuugacauaaucuaucaaaug

SEQ ID NO: 334955 - RNA, 23 nt, Artificial Sequence
  Synthetic
uuuuugacauaaucuaucaaaug

SEQ ID NO: 334956 - RNA, 24 nt, Artificial Sequence
  Synthetic
uuuuuugacauaaucuaucaaaug

SEQ ID NO: 334957 - RNA, 18 nt, Artificial Sequence
  Synthetic
gcaagcggcugucaaaug

SEQ ID NO: 334958 - RNA, 19 nt, Artificial Sequence
  Synthetic
agcaagcggcugucaaaug

SEQ ID NO: 334959 - RNA, 20 nt, Artificial Sequence
  Synthetic
uagcaagcggcugucaaaug

SEQ ID NO: 334960 - RNA, 21 nt, Artificial Sequence
  Synthetic
uuagcaagcggcugucaaaug

SEQ ID NO: 334961 - RNA, 22 nt, Artificial Sequence
  Synthetic
uuuagcaagcggcugucaaaug

SEQ ID NO: 334962 - RNA, 23 nt, Artificial Sequence
  Synthetic
auuuagcaagcggcugucaaaug

SEQ ID NO: 334963 - RNA, 24 nt, Artificial Sequence
  Synthetic
aauuuagcaagcggcugucaaaug

SEQ ID NO: 334964 - RNA, 18 nt, Artificial Sequence
  Synthetic
caaaaacagugucaaaug

SEQ ID NO: 334965 - RNA, 19 nt, Artificial Sequence
  Synthetic
ucaaaaacagugucaaaug

SEQ ID NO: 334966 - RNA, 20 nt, Artificial Sequence
  Synthetic
aucaaaaacagugucaaaug

SEQ ID NO: 334967 - RNA, 21 nt, Artificial Sequence
  Synthetic
aaucaaaaacagugucaaaug

SEQ ID NO: 334968 - RNA, 22 nt, Artificial Sequence
  Synthetic
gaaucaaaaacagugucaaaug

SEQ ID NO: 334969 - RNA, 23 nt, Artificial Sequence
  Synthetic
agaaucaaaaacagugucaaaug

SEQ ID NO: 334970 - RNA, 24 nt, Artificial Sequence
  Synthetic
uagaaucaaaaacagugucaaaug

SEQ ID NO: 334971 - RNA, 18 nt, Artificial Sequence
  Synthetic
uccaauuugcuucaaaug

SEQ ID NO: 334972 - RNA, 19 nt, Artificial Sequence
  Synthetic
uuccaauuugcuucaaaug

SEQ ID NO: 334973 - RNA, 20 nt, Artificial Sequence
  Synthetic
uuuccaauuugcuucaaaug

SEQ ID NO: 334974 - RNA, 21 nt, Artificial Sequence
  Synthetic
cuuuccaauuugcuucaaaug

SEQ ID NO: 334975 - RNA, 22 nt, Artificial Sequence
  Synthetic
ccuuuccaauuugcuucaaaug

SEQ ID NO: 334976 - RNA, 23 nt, Artificial Sequence
  Synthetic
gccuuuccaauuugcuucaaaug

SEQ ID NO: 334977 - RNA, 24 nt, Artificial Sequence
  Synthetic
cgccuuuccaauuugcuucaaaug

SEQ ID NO: 334978 - RNA, 18 nt, Artificial Sequence
  Synthetic
uuuauaugcaaagaaaug

SEQ ID NO: 334979 - RNA, 19 nt, Artificial Sequence
  Synthetic
guuuauaugcaaagaaaug

SEQ ID NO: 334980 - RNA, 20 nt, Artificial Sequence
  Synthetic
aguuuauaugcaaagaaaug

SEQ ID NO: 334981 - RNA, 21 nt, Artificial Sequence
  Synthetic
uaguuuauaugcaaagaaaug

SEQ ID NO: 334982 - RNA, 22 nt, Artificial Sequence
  Synthetic
cuaguuuauaugcaaagaaaug

SEQ ID NO: 334983 - RNA, 23 nt, Artificial Sequence
  Synthetic
ucuaguuuauaugcaaagaaaug

SEQ ID NO: 334984 - RNA, 24 nt, Artificial Sequence
  Synthetic
gucuaguuuauaugcaaagaaaug

SEQ ID NO: 334985 - RNA, 18 nt, Artificial Sequence
  Synthetic
uugcaggauaaagaaaug

SEQ ID NO: 334986 - RNA, 19 nt, Artificial Sequence
  Synthetic
uuugcaggauaaagaaaug

SEQ ID NO: 334987 - RNA, 20 nt, Artificial Sequence
  Synthetic
uuuugcaggauaaagaaaug

SEQ ID NO: 334988 - RNA, 21 nt, Artificial Sequence
  Synthetic
cuuuugcaggauaaagaaaug

SEQ ID NO: 334989 - RNA, 22 nt, Artificial Sequence
  Synthetic
gcuuuugcaggauaaagaaaug

SEQ ID NO: 334990 - RNA, 23 nt, Artificial Sequence
  Synthetic
ugcuuuugcaggauaaagaaaug

SEQ ID NO: 334991 - RNA, 24 nt, Artificial Sequence
  Synthetic
gugcuuuugcaggauaaagaaaug

SEQ ID NO: 334992 - RNA, 18 nt, Artificial Sequence
  Synthetic
aaucagacugaagaaaug

SEQ ID NO: 334993 - RNA, 19 nt, Artificial Sequence
  Synthetic
gaaucagacugaagaaaug

SEQ ID NO: 334994 - RNA, 20 nt, Artificial Sequence
  Synthetic
agaaucagacugaagaaaug

SEQ ID NO: 334995 - RNA, 21 nt, Artificial Sequence
  Synthetic
aagaaucagacugaagaaaug

SEQ ID NO: 334996 - RNA, 22 nt, Artificial Sequence
  Synthetic
gaagaaucagacugaagaaaug

SEQ ID NO: 334997 - RNA, 23 nt, Artificial Sequence
  Synthetic
ugaagaaucagacugaagaaaug

SEQ ID NO: 334998 - RNA, 24 nt, Artificial Sequence
  Synthetic
cugaagaaucagacugaagaaaug

SEQ ID NO: 334999 - RNA, 18 nt, Artificial Sequence
  Synthetic
uuaggaaaggcagaaaug

SEQ ID NO: 335000 - RNA, 19 nt, Artificial Sequence
  Synthetic
uuuaggaaaggcagaaaug

SEQ ID NO: 335001 - RNA, 20 nt, Artificial Sequence
  Synthetic
auuuaggaaaggcagaaaug

SEQ ID NO: 335002 - RNA, 21 nt, Artificial Sequence
  Synthetic
gauuuaggaaaggcagaaaug

SEQ ID NO: 335003 - RNA, 22 nt, Artificial Sequence
  Synthetic
ggauuuaggaaaggcagaaaug

SEQ ID NO: 335004 - RNA, 23 nt, Artificial Sequence
  Synthetic
uggauuuaggaaaggcagaaaug

SEQ ID NO: 335005 - RNA, 24 nt, Artificial Sequence
  Synthetic
uuggauuuaggaaaggcagaaaug

SEQ ID NO: 335006 - RNA, 18 nt, Artificial Sequence
  Synthetic
cagaauuuggcagaaaug

SEQ ID NO: 335007 - RNA, 19 nt, Artificial Sequence
  Synthetic
ucagaauuuggcagaaaug

SEQ ID NO: 335008 - RNA, 20 nt, Artificial Sequence
  Synthetic
cucagaauuuggcagaaaug

SEQ ID NO: 335009 - RNA, 21 nt, Artificial Sequence
  Synthetic
ccucagaauuuggcagaaaug

SEQ ID NO: 335010 - RNA, 22 nt, Artificial Sequence
  Synthetic
cccucagaauuuggcagaaaug

SEQ ID NO: 335011 - RNA, 23 nt, Artificial Sequence
  Synthetic
ucccucagaauuuggcagaaaug

SEQ ID NO: 335012 - RNA, 24 nt, Artificial Sequence
  Synthetic
gucccucagaauuuggcagaaaug

SEQ ID NO: 335013 - RNA, 18 nt, Artificial Sequence
  Synthetic
uggcccacugcagaaaug

SEQ ID NO: 335014 - RNA, 19 nt, Artificial Sequence
  Synthetic
uuggcccacugcagaaaug

SEQ ID NO: 335015 - RNA, 20 nt, Artificial Sequence
  Synthetic
auuggcccacugcagaaaug

SEQ ID NO: 335016 - RNA, 21 nt, Artificial Sequence
  Synthetic
cauuggcccacugcagaaaug

SEQ ID NO: 335017 - RNA, 22 nt, Artificial Sequence
  Synthetic
ucauuggcccacugcagaaaug

SEQ ID NO: 335018 - RNA, 23 nt, Artificial Sequence
  Synthetic
uucauuggcccacugcagaaaug

SEQ ID NO: 335019 - RNA, 24 nt, Artificial Sequence
  Synthetic
uuucauuggcccacugcagaaaug

SEQ ID NO: 335020 - RNA, 18 nt, Artificial Sequence
  Synthetic
uguugguuaagagaaaug

SEQ ID NO: 335021 - RNA, 19 nt, Artificial Sequence
  Synthetic
guguugguuaagagaaaug

SEQ ID NO: 335022 - RNA, 20 nt, Artificial Sequence
  Synthetic
uguguugguuaagagaaaug

SEQ ID NO: 335023 - RNA, 21 nt, Artificial Sequence
  Synthetic
guguguugguuaagagaaaug

SEQ ID NO: 335024 - RNA, 22 nt, Artificial Sequence
  Synthetic
gguguguugguuaagagaaaug

SEQ ID NO: 335025 - RNA, 23 nt, Artificial Sequence
  Synthetic
agguguguugguuaagagaaaug

SEQ ID NO: 335026 - RNA, 24 nt, Artificial Sequence
  Synthetic
aagguguguugguuaagagaaaug

SEQ ID NO: 335027 - RNA, 18 nt, Artificial Sequence
  Synthetic
uagauuccgagagaaaug

SEQ ID NO: 335028 - RNA, 19 nt, Artificial Sequence
  Synthetic
auagauuccgagagaaaug

SEQ ID NO: 335029 - RNA, 20 nt, Artificial Sequence
  Synthetic
cauagauuccgagagaaaug

SEQ ID NO: 335030 - RNA, 21 nt, Artificial Sequence
  Synthetic
acauagauuccgagagaaaug

SEQ ID NO: 335031 - RNA, 22 nt, Artificial Sequence
  Synthetic
cacauagauuccgagagaaaug

SEQ ID NO: 335032 - RNA, 23 nt, Artificial Sequence
  Synthetic
acacauagauuccgagagaaaug

SEQ ID NO: 335033 - RNA, 24 nt, Artificial Sequence
  Synthetic
cacacauagauuccgagagaaaug

SEQ ID NO: 335034 - RNA, 18 nt, Artificial Sequence
  Synthetic
cucaguguuagagaaaug

SEQ ID NO: 335035 - RNA, 19 nt, Artificial Sequence
  Synthetic
gcucaguguuagagaaaug

SEQ ID NO: 335036 - RNA, 20 nt, Artificial Sequence
  Synthetic
cgcucaguguuagagaaaug

SEQ ID NO: 335037 - RNA, 21 nt, Artificial Sequence
  Synthetic
acgcucaguguuagagaaaug

SEQ ID NO: 335038 - RNA, 22 nt, Artificial Sequence
  Synthetic
uacgcucaguguuagagaaaug

SEQ ID NO: 335039 - RNA, 23 nt, Artificial Sequence
  Synthetic
cuacgcucaguguuagagaaaug

SEQ ID NO: 335040 - RNA, 24 nt, Artificial Sequence
  Synthetic
gcuacgcucaguguuagagaaaug

SEQ ID NO: 335041 - RNA, 18 nt, Artificial Sequence
  Synthetic
acuucuauaugagaaaug

SEQ ID NO: 335042 - RNA, 19 nt, Artificial Sequence
  Synthetic
uacuucuauaugagaaaug

SEQ ID NO: 335043 - RNA, 20 nt, Artificial Sequence
  Synthetic
uuacuucuauaugagaaaug

SEQ ID NO: 335044 - RNA, 21 nt, Artificial Sequence
  Synthetic
auuacuucuauaugagaaaug

SEQ ID NO: 335045 - RNA, 22 nt, Artificial Sequence
  Synthetic
uauuacuucuauaugagaaaug

SEQ ID NO: 335046 - RNA, 23 nt, Artificial Sequence
  Synthetic
cuauuacuucuauaugagaaaug

SEQ ID NO: 335047 - RNA, 24 nt, Artificial Sequence
  Synthetic
acuauuacuucuauaugagaaaug

SEQ ID NO: 335048 - RNA, 18 nt, Artificial Sequence
  Synthetic
uauaucugcugagaaaug

SEQ ID NO: 335049 - RNA, 19 nt, Artificial Sequence
  Synthetic
auauaucugcugagaaaug

SEQ ID NO: 335050 - RNA, 20 nt, Artificial Sequence
  Synthetic
gauauaucugcugagaaaug

SEQ ID NO: 335051 - RNA, 21 nt, Artificial Sequence
  Synthetic
ugauauaucugcugagaaaug

SEQ ID NO: 335052 - RNA, 22 nt, Artificial Sequence
  Synthetic
augauauaucugcugagaaaug

SEQ ID NO: 335053 - RNA, 23 nt, Artificial Sequence
  Synthetic
gaugauauaucugcugagaaaug

SEQ ID NO: 335054 - RNA, 24 nt, Artificial Sequence
  Synthetic
ggaugauauaucugcugagaaaug

SEQ ID NO: 335055 - RNA, 18 nt, Artificial Sequence
  Synthetic
accauugugugagaaaug

SEQ ID NO: 335056 - RNA, 19 nt, Artificial Sequence
  Synthetic
aaccauugugugagaaaug

SEQ ID NO: 335057 - RNA, 20 nt, Artificial Sequence
  Synthetic
uaaccauugugugagaaaug

SEQ ID NO: 335058 - RNA, 21 nt, Artificial Sequence
  Synthetic
auaaccauugugugagaaaug

SEQ ID NO: 335059 - RNA, 22 nt, Artificial Sequence
  Synthetic
aauaaccauugugugagaaaug

SEQ ID NO: 335060 - RNA, 23 nt, Artificial Sequence
  Synthetic
caauaaccauugugugagaaaug

SEQ ID NO: 335061 - RNA, 24 nt, Artificial Sequence
  Synthetic
ccaauaaccauugugugagaaaug

SEQ ID NO: 335062 - RNA, 18 nt, Artificial Sequence
  Synthetic
cauaaaauaaaggaaaug

SEQ ID NO: 335063 - RNA, 19 nt, Artificial Sequence
  Synthetic
ucauaaaauaaaggaaaug

SEQ ID NO: 335064 - RNA, 20 nt, Artificial Sequence
  Synthetic
uucauaaaauaaaggaaaug

SEQ ID NO: 335065 - RNA, 21 nt, Artificial Sequence
  Synthetic
uuucauaaaauaaaggaaaug

SEQ ID NO: 335066 - RNA, 22 nt, Artificial Sequence
  Synthetic
auuucauaaaauaaaggaaaug

SEQ ID NO: 335067 - RNA, 23 nt, Artificial Sequence
  Synthetic
uauuucauaaaauaaaggaaaug

SEQ ID NO: 335068 - RNA, 24 nt, Artificial Sequence
  Synthetic
auauuucauaaaauaaaggaaaug

SEQ ID NO: 335069 - RNA, 18 nt, Artificial Sequence
  Synthetic
uuggugauauaggaaaug

SEQ ID NO: 335070 - RNA, 19 nt, Artificial Sequence
  Synthetic
cuuggugauauaggaaaug

SEQ ID NO: 335071 - RNA, 20 nt, Artificial Sequence
  Synthetic
acuuggugauauaggaaaug

SEQ ID NO: 335072 - RNA, 21 nt, Artificial Sequence
  Synthetic
uacuuggugauauaggaaaug

SEQ ID NO: 335073 - RNA, 22 nt, Artificial Sequence
  Synthetic
guacuuggugauauaggaaaug

SEQ ID NO: 335074 - RNA, 23 nt, Artificial Sequence
  Synthetic
uguacuuggugauauaggaaaug

SEQ ID NO: 335075 - RNA, 24 nt, Artificial Sequence
  Synthetic
cuguacuuggugauauaggaaaug

SEQ ID NO: 335076 - RNA, 18 nt, Artificial Sequence
  Synthetic
gagcaacaaauggaaaug

SEQ ID NO: 335077 - RNA, 19 nt, Artificial Sequence
  Synthetic
agagcaacaaauggaaaug

SEQ ID NO: 335078 - RNA, 20 nt, Artificial Sequence
  Synthetic
aagagcaacaaauggaaaug

SEQ ID NO: 335079 - RNA, 21 nt, Artificial Sequence
  Synthetic
gaagagcaacaaauggaaaug

SEQ ID NO: 335080 - RNA, 22 nt, Artificial Sequence
  Synthetic
ugaagagcaacaaauggaaaug

SEQ ID NO: 335081 - RNA, 23 nt, Artificial Sequence
  Synthetic
uugaagagcaacaaauggaaaug

SEQ ID NO: 335082 - RNA, 24 nt, Artificial Sequence
  Synthetic
guugaagagcaacaaauggaaaug

SEQ ID NO: 335083 - RNA, 18 nt, Artificial Sequence
  Synthetic
gauauccaaguggaaaug

SEQ ID NO: 335084 - RNA, 19 nt, Artificial Sequence
  Synthetic
agauauccaaguggaaaug

SEQ ID NO: 335085 - RNA, 20 nt, Artificial Sequence
  Synthetic
uagauauccaaguggaaaug

SEQ ID NO: 335086 - RNA, 21 nt, Artificial Sequence
  Synthetic
uuagauauccaaguggaaaug

SEQ ID NO: 335087 - RNA, 22 nt, Artificial Sequence
  Synthetic
auuagauauccaaguggaaaug

SEQ ID NO: 335088 - RNA, 23 nt, Artificial Sequence
  Synthetic
cauuagauauccaaguggaaaug

SEQ ID NO: 335089 - RNA, 24 nt, Artificial Sequence
  Synthetic
ucauuagauauccaaguggaaaug

SEQ ID NO: 335090 - RNA, 18 nt, Artificial Sequence
  Synthetic
guauaguucuuggaaaug

SEQ ID NO: 335091 - RNA, 19 nt, Artificial Sequence
  Synthetic
uguauaguucuuggaaaug

SEQ ID NO: 335092 - RNA, 20 nt, Artificial Sequence
  Synthetic
auguauaguucuuggaaaug

SEQ ID NO: 335093 - RNA, 21 nt, Artificial Sequence
  Synthetic
aauguauaguucuuggaaaug

SEQ ID NO: 335094 - RNA, 22 nt, Artificial Sequence
  Synthetic
uaauguauaguucuuggaaaug

SEQ ID NO: 335095 - RNA, 23 nt, Artificial Sequence
  Synthetic
auaauguauaguucuuggaaaug

SEQ ID NO: 335096 - RNA, 24 nt, Artificial Sequence
  Synthetic
gauaauguauaguucuuggaaaug

SEQ ID NO: 335097 - RNA, 18 nt, Artificial Sequence
  Synthetic
ggagggaaagaugaaaug

SEQ ID NO: 335098 - RNA, 19 nt, Artificial Sequence
  Synthetic
aggagggaaagaugaaaug

SEQ ID NO: 335099 - RNA, 20 nt, Artificial Sequence
  Synthetic
aaggagggaaagaugaaaug

SEQ ID NO: 335100 - RNA, 21 nt, Artificial Sequence
  Synthetic
caaggagggaaagaugaaaug

SEQ ID NO: 335101 - RNA, 22 nt, Artificial Sequence
  Synthetic
ccaaggagggaaagaugaaaug

SEQ ID NO: 335102 - RNA, 23 nt, Artificial Sequence
  Synthetic
gccaaggagggaaagaugaaaug

SEQ ID NO: 335103 - RNA, 24 nt, Artificial Sequence
  Synthetic
ugccaaggagggaaagaugaaaug

SEQ ID NO: 335104 - RNA, 18 nt, Artificial Sequence
  Synthetic
gucacagauuaugaaaug

SEQ ID NO: 335105 - RNA, 19 nt, Artificial Sequence
  Synthetic
agucacagauuaugaaaug

SEQ ID NO: 335106 - RNA, 20 nt, Artificial Sequence
  Synthetic
aagucacagauuaugaaaug

SEQ ID NO: 335107 - RNA, 21 nt, Artificial Sequence
  Synthetic
aaagucacagauuaugaaaug

SEQ ID NO: 335108 - RNA, 22 nt, Artificial Sequence
  Synthetic
aaaagucacagauuaugaaaug

SEQ ID NO: 335109 - RNA, 23 nt, Artificial Sequence
  Synthetic
uaaaagucacagauuaugaaaug

SEQ ID NO: 335110 - RNA, 24 nt, Artificial Sequence
  Synthetic
cuaaaagucacagauuaugaaaug

SEQ ID NO: 335111 - RNA, 18 nt, Artificial Sequence
  Synthetic
uugccauuuacugaaaug

SEQ ID NO: 335112 - RNA, 19 nt, Artificial Sequence
  Synthetic
auugccauuuacugaaaug

SEQ ID NO: 335113 - RNA, 20 nt, Artificial Sequence
  Synthetic
aauugccauuuacugaaaug

SEQ ID NO: 335114 - RNA, 21 nt, Artificial Sequence
  Synthetic
uaauugccauuuacugaaaug

SEQ ID NO: 335115 - RNA, 22 nt, Artificial Sequence
  Synthetic
guaauugccauuuacugaaaug

SEQ ID NO: 335116 - RNA, 23 nt, Artificial Sequence
  Synthetic
aguaauugccauuuacugaaaug

SEQ ID NO: 335117 - RNA, 24 nt, Artificial Sequence
  Synthetic
caguaauugccauuuacugaaaug

SEQ ID NO: 335118 - RNA, 18 nt, Artificial Sequence
  Synthetic
guaaauuggauugaaaug

SEQ ID NO: 335119 - RNA, 19 nt, Artificial Sequence
  Synthetic
gguaaauuggauugaaaug

SEQ ID NO: 335120 - RNA, 20 nt, Artificial Sequence
  Synthetic
agguaaauuggauugaaaug

SEQ ID NO: 335121 - RNA, 21 nt, Artificial Sequence
  Synthetic
aagguaaauuggauugaaaug

SEQ ID NO: 335122 - RNA, 22 nt, Artificial Sequence
  Synthetic
aaagguaaauuggauugaaaug

SEQ ID NO: 335123 - RNA, 23 nt, Artificial Sequence
  Synthetic
aaaagguaaauuggauugaaaug

SEQ ID NO: 335124 - RNA, 24 nt, Artificial Sequence
  Synthetic
aaaaagguaaauuggauugaaaug

SEQ ID NO: 335125 - RNA, 18 nt, Artificial Sequence
  Synthetic
uucaccaagguugaaaug

SEQ ID NO: 335126 - RNA, 19 nt, Artificial Sequence
  Synthetic
auucaccaagguugaaaug

SEQ ID NO: 335127 - RNA, 20 nt, Artificial Sequence
  Synthetic
gauucaccaagguugaaaug

SEQ ID NO: 335128 - RNA, 21 nt, Artificial Sequence
  Synthetic
ggauucaccaagguugaaaug

SEQ ID NO: 335129 - RNA, 22 nt, Artificial Sequence
  Synthetic
cggauucaccaagguugaaaug

SEQ ID NO: 335130 - RNA, 23 nt, Artificial Sequence
  Synthetic
ucggauucaccaagguugaaaug

SEQ ID NO: 335131 - RNA, 24 nt, Artificial Sequence
  Synthetic
aucggauucaccaagguugaaaug

SEQ ID NO: 335132 - RNA, 18 nt, Artificial Sequence
  Synthetic
agauuucaaaaauaaaug

SEQ ID NO: 335133 - RNA, 19 nt, Artificial Sequence
  Synthetic
aagauuucaaaaauaaaug

SEQ ID NO: 335134 - RNA, 20 nt, Artificial Sequence
  Synthetic
aaagauuucaaaaauaaaug

SEQ ID NO: 335135 - RNA, 21 nt, Artificial Sequence
  Synthetic
aaaagauuucaaaaauaaaug

SEQ ID NO: 335136 - RNA, 22 nt, Artificial Sequence
  Synthetic
uaaaagauuucaaaaauaaaug

SEQ ID NO: 335137 - RNA, 23 nt, Artificial Sequence
  Synthetic
auaaaagauuucaaaaauaaaug

SEQ ID NO: 335138 - RNA, 24 nt, Artificial Sequence
  Synthetic
aauaaaagauuucaaaaauaaaug

SEQ ID NO: 335139 - RNA, 18 nt, Artificial Sequence
  Synthetic
auaguagaauaauaaaug

SEQ ID NO: 335140 - RNA, 19 nt, Artificial Sequence
  Synthetic
cauaguagaauaauaaaug

SEQ ID NO: 335141 - RNA, 20 nt, Artificial Sequence
  Synthetic
acauaguagaauaauaaaug

SEQ ID NO: 335142 - RNA, 21 nt, Artificial Sequence
  Synthetic
cacauaguagaauaauaaaug

SEQ ID NO: 335143 - RNA, 22 nt, Artificial Sequence
  Synthetic
acacauaguagaauaauaaaug

SEQ ID NO: 335144 - RNA, 23 nt, Artificial Sequence
  Synthetic
gacacauaguagaauaauaaaug

SEQ ID NO: 335145 - RNA, 24 nt, Artificial Sequence
  Synthetic
agacacauaguagaauaauaaaug

SEQ ID NO: 335146 - RNA, 18 nt, Artificial Sequence
  Synthetic
uugagaaaauuauaaaug

SEQ ID NO: 335147 - RNA, 19 nt, Artificial Sequence
  Synthetic
uuugagaaaauuauaaaug

SEQ ID NO: 335148 - RNA, 20 nt, Artificial Sequence
  Synthetic
cuuugagaaaauuauaaaug

SEQ ID NO: 335149 - RNA, 21 nt, Artificial Sequence
  Synthetic
ccuuugagaaaauuauaaaug

SEQ ID NO: 335150 - RNA, 22 nt, Artificial Sequence
  Synthetic
cccuuugagaaaauuauaaaug

SEQ ID NO: 335151 - RNA, 23 nt, Artificial Sequence
  Synthetic
gcccuuugagaaaauuauaaaug

SEQ ID NO: 335152 - RNA, 24 nt, Artificial Sequence
  Synthetic
agcccuuugagaaaauuauaaaug

SEQ ID NO: 335153 - RNA, 18 nt, Artificial Sequence
  Synthetic
gggaguauacacuaaaug

SEQ ID NO: 335154 - RNA, 19 nt, Artificial Sequence
  Synthetic
ugggaguauacacuaaaug

SEQ ID NO: 335155 - RNA, 20 nt, Artificial Sequence
  Synthetic
augggaguauacacuaaaug

SEQ ID NO: 335156 - RNA, 21 nt, Artificial Sequence
  Synthetic
uaugggaguauacacuaaaug

SEQ ID NO: 335157 - RNA, 22 nt, Artificial Sequence
  Synthetic
uuaugggaguauacacuaaaug

SEQ ID NO: 335158 - RNA, 23 nt, Artificial Sequence
  Synthetic
guuaugggaguauacacuaaaug

SEQ ID NO: 335159 - RNA, 24 nt, Artificial Sequence
  Synthetic
aguuaugggaguauacacuaaaug

SEQ ID NO: 335160 - RNA, 18 nt, Artificial Sequence
  Synthetic
auaaauggaagcuaaaug

SEQ ID NO: 335161 - RNA, 19 nt, Artificial Sequence
  Synthetic
uauaaauggaagcuaaaug

SEQ ID NO: 335162 - RNA, 20 nt, Artificial Sequence
  Synthetic
uuauaaauggaagcuaaaug

SEQ ID NO: 335163 - RNA, 21 nt, Artificial Sequence
  Synthetic
cuuauaaauggaagcuaaaug

SEQ ID NO: 335164 - RNA, 22 nt, Artificial Sequence
  Synthetic
acuuauaaauggaagcuaaaug

SEQ ID NO: 335165 - RNA, 23 nt, Artificial Sequence
  Synthetic
cacuuauaaauggaagcuaaaug

SEQ ID NO: 335166 - RNA, 24 nt, Artificial Sequence
  Synthetic
ucacuuauaaauggaagcuaaaug

SEQ ID NO: 335167 - RNA, 18 nt, Artificial Sequence
  Synthetic
uugcugccaaucuaaaug

SEQ ID NO: 335168 - RNA, 19 nt, Artificial Sequence
  Synthetic
cuugcugccaaucuaaaug

SEQ ID NO: 335169 - RNA, 20 nt, Artificial Sequence
  Synthetic
ucuugcugccaaucuaaaug

SEQ ID NO: 335170 - RNA, 21 nt, Artificial Sequence
  Synthetic
gucuugcugccaaucuaaaug

SEQ ID NO: 335171 - RNA, 22 nt, Artificial Sequence
  Synthetic
ggucuugcugccaaucuaaaug

SEQ ID NO: 335172 - RNA, 23 nt, Artificial Sequence
  Synthetic
uggucuugcugccaaucuaaaug

SEQ ID NO: 335173 - RNA, 24 nt, Artificial Sequence
  Synthetic
uuggucuugcugccaaucuaaaug

SEQ ID NO: 335174 - RNA, 18 nt, Artificial Sequence
  Synthetic
uguuuaagauucuaaaug

SEQ ID NO: 335175 - RNA, 19 nt, Artificial Sequence
  Synthetic
uuguuuaagauucuaaaug

SEQ ID NO: 335176 - RNA, 20 nt, Artificial Sequence
  Synthetic
auuguuuaagauucuaaaug

SEQ ID NO: 335177 - RNA, 21 nt, Artificial Sequence
  Synthetic
uauuguuuaagauucuaaaug

SEQ ID NO: 335178 - RNA, 22 nt, Artificial Sequence
  Synthetic
auauuguuuaagauucuaaaug

SEQ ID NO: 335179 - RNA, 23 nt, Artificial Sequence
  Synthetic
gauauuguuuaagauucuaaaug

SEQ ID NO: 335180 - RNA, 24 nt, Artificial Sequence
  Synthetic
ugauauuguuuaagauucuaaaug

SEQ ID NO: 335181 - RNA, 18 nt, Artificial Sequence
  Synthetic
ucucaugcuaaguaaaug

SEQ ID NO: 335182 - RNA, 19 nt, Artificial Sequence
  Synthetic
uucucaugcuaaguaaaug

SEQ ID NO: 335183 - RNA, 20 nt, Artificial Sequence
  Synthetic
cuucucaugcuaaguaaaug

SEQ ID NO: 335184 - RNA, 21 nt, Artificial Sequence
  Synthetic
gcuucucaugcuaaguaaaug

SEQ ID NO: 335185 - RNA, 22 nt, Artificial Sequence
  Synthetic
agcuucucaugcuaaguaaaug

SEQ ID NO: 335186 - RNA, 23 nt, Artificial Sequence
  Synthetic
cagcuucucaugcuaaguaaaug

SEQ ID NO: 335187 - RNA, 24 nt, Artificial Sequence
  Synthetic
acagcuucucaugcuaaguaaaug

SEQ ID NO: 335188 - RNA, 18 nt, Artificial Sequence
  Synthetic
ugcaaaucuaaguaaaug

SEQ ID NO: 335189 - RNA, 19 nt, Artificial Sequence
  Synthetic
uugcaaaucuaaguaaaug

SEQ ID NO: 335190 - RNA, 20 nt, Artificial Sequence
  Synthetic
uuugcaaaucuaaguaaaug

SEQ ID NO: 335191 - RNA, 21 nt, Artificial Sequence
  Synthetic
cuuugcaaaucuaaguaaaug

SEQ ID NO: 335192 - RNA, 22 nt, Artificial Sequence
  Synthetic
ucuuugcaaaucuaaguaaaug

SEQ ID NO: 335193 - RNA, 23 nt, Artificial Sequence
  Synthetic
uucuuugcaaaucuaaguaaaug

SEQ ID NO: 335194 - RNA, 24 nt, Artificial Sequence
  Synthetic
uuucuuugcaaaucuaaguaaaug

SEQ ID NO: 335195 - RNA, 18 nt, Artificial Sequence
  Synthetic
agaaucacugaguaaaug

SEQ ID NO: 335196 - RNA, 19 nt, Artificial Sequence
  Synthetic
aagaaucacugaguaaaug

SEQ ID NO: 335197 - RNA, 20 nt, Artificial Sequence
  Synthetic
uaagaaucacugaguaaaug

SEQ ID NO: 335198 - RNA, 21 nt, Artificial Sequence
  Synthetic
auaagaaucacugaguaaaug

SEQ ID NO: 335199 - RNA, 22 nt, Artificial Sequence
  Synthetic
cauaagaaucacugaguaaaug

SEQ ID NO: 335200 - RNA, 23 nt, Artificial Sequence
  Synthetic
acauaagaaucacugaguaaaug

SEQ ID NO: 335201 - RNA, 24 nt, Artificial Sequence
  Synthetic
cacauaagaaucacugaguaaaug

SEQ ID NO: 335202 - RNA, 18 nt, Artificial Sequence
  Synthetic
guagcagccggguaaaug

SEQ ID NO: 335203 - RNA, 19 nt, Artificial Sequence
  Synthetic
aguagcagccggguaaaug

SEQ ID NO: 335204 - RNA, 20 nt, Artificial Sequence
  Synthetic
caguagcagccggguaaaug

SEQ ID NO: 335205 - RNA, 21 nt, Artificial Sequence
  Synthetic
acaguagcagccggguaaaug

SEQ ID NO: 335206 - RNA, 22 nt, Artificial Sequence
  Synthetic
aacaguagcagccggguaaaug

SEQ ID NO: 335207 - RNA, 23 nt, Artificial Sequence
  Synthetic
aaacaguagcagccggguaaaug

SEQ ID NO: 335208 - RNA, 24 nt, Artificial Sequence
  Synthetic
gaaacaguagcagccggguaaaug

SEQ ID NO: 335209 - RNA, 18 nt, Artificial Sequence
  Synthetic
caugaauauuuguaaaug

SEQ ID NO: 335210 - RNA, 19 nt, Artificial Sequence
  Synthetic
ccaugaauauuuguaaaug

SEQ ID NO: 335211 - RNA, 20 nt, Artificial Sequence
  Synthetic
gccaugaauauuuguaaaug

SEQ ID NO: 335212 - RNA, 21 nt, Artificial Sequence
  Synthetic
ugccaugaauauuuguaaaug

SEQ ID NO: 335213 - RNA, 22 nt, Artificial Sequence
  Synthetic
uugccaugaauauuuguaaaug

SEQ ID NO: 335214 - RNA, 23 nt, Artificial Sequence
  Synthetic
uuugccaugaauauuuguaaaug

SEQ ID NO: 335215 - RNA, 24 nt, Artificial Sequence
  Synthetic
auuugccaugaauauuuguaaaug

SEQ ID NO: 335216 - RNA, 18 nt, Artificial Sequence
  Synthetic
ccauguuauaauuaaaug

SEQ ID NO: 335217 - RNA, 19 nt, Artificial Sequence
  Synthetic
accauguuauaauuaaaug

SEQ ID NO: 335218 - RNA, 20 nt, Artificial Sequence
  Synthetic
gaccauguuauaauuaaaug

SEQ ID NO: 335219 - RNA, 21 nt, Artificial Sequence
  Synthetic
agaccauguuauaauuaaaug

SEQ ID NO: 335220 - RNA, 22 nt, Artificial Sequence
  Synthetic
cagaccauguuauaauuaaaug

SEQ ID NO: 335221 - RNA, 23 nt, Artificial Sequence
  Synthetic
acagaccauguuauaauuaaaug

SEQ ID NO: 335222 - RNA, 24 nt, Artificial Sequence
  Synthetic
aacagaccauguuauaauuaaaug

SEQ ID NO: 335223 - RNA, 18 nt, Artificial Sequence
  Synthetic
aacaauggaaguuaaaug

SEQ ID NO: 335224 - RNA, 19 nt, Artificial Sequence
  Synthetic
aaacaauggaaguuaaaug

SEQ ID NO: 335225 - RNA, 20 nt, Artificial Sequence
  Synthetic
gaaacaauggaaguuaaaug

SEQ ID NO: 335226 - RNA, 21 nt, Artificial Sequence
  Synthetic
agaaacaauggaaguuaaaug

SEQ ID NO: 335227 - RNA, 22 nt, Artificial Sequence
  Synthetic
cagaaacaauggaaguuaaaug

SEQ ID NO: 335228 - RNA, 23 nt, Artificial Sequence
  Synthetic
gcagaaacaauggaaguuaaaug

SEQ ID NO: 335229 - RNA, 24 nt, Artificial Sequence
  Synthetic
ugcagaaacaauggaaguuaaaug

SEQ ID NO: 335230 - RNA, 18 nt, Artificial Sequence
  Synthetic
aagcuuuucaguuaaaug

SEQ ID NO: 335231 - RNA, 19 nt, Artificial Sequence
  Synthetic
aaagcuuuucaguuaaaug

SEQ ID NO: 335232 - RNA, 20 nt, Artificial Sequence
  Synthetic
gaaagcuuuucaguuaaaug

SEQ ID NO: 335233 - RNA, 21 nt, Artificial Sequence
  Synthetic
ugaaagcuuuucaguuaaaug

SEQ ID NO: 335234 - RNA, 22 nt, Artificial Sequence
  Synthetic
cugaaagcuuuucaguuaaaug

SEQ ID NO: 335235 - RNA, 23 nt, Artificial Sequence
  Synthetic
ucugaaagcuuuucaguuaaaug

SEQ ID NO: 335236 - RNA, 24 nt, Artificial Sequence
  Synthetic
aucugaaagcuuuucaguuaaaug

SEQ ID NO: 335237 - RNA, 18 nt, Artificial Sequence
  Synthetic
gugguggaacguuaaaug

SEQ ID NO: 335238 - RNA, 19 nt, Artificial Sequence
  Synthetic
ggugguggaacguuaaaug

SEQ ID NO: 335239 - RNA, 20 nt, Artificial Sequence
  Synthetic
aggugguggaacguuaaaug

SEQ ID NO: 335240 - RNA, 21 nt, Artificial Sequence
  Synthetic
aaggugguggaacguuaaaug

SEQ ID NO: 335241 - RNA, 22 nt, Artificial Sequence
  Synthetic
uaaggugguggaacguuaaaug

SEQ ID NO: 335242 - RNA, 23 nt, Artificial Sequence
  Synthetic
auaaggugguggaacguuaaaug

SEQ ID NO: 335243 - RNA, 24 nt, Artificial Sequence
  Synthetic
aauaaggugguggaacguuaaaug

SEQ ID NO: 335244 - RNA, 18 nt, Artificial Sequence
  Synthetic
ggguuaagugguuaaaug

SEQ ID NO: 335245 - RNA, 19 nt, Artificial Sequence
  Synthetic
gggguuaagugguuaaaug

SEQ ID NO: 335246 - RNA, 20 nt, Artificial Sequence
  Synthetic
ggggguuaagugguuaaaug

SEQ ID NO: 335247 - RNA, 21 nt, Artificial Sequence
  Synthetic
aggggguuaagugguuaaaug

SEQ ID NO: 335248 - RNA, 22 nt, Artificial Sequence
  Synthetic
aaggggguuaagugguuaaaug

SEQ ID NO: 335249 - RNA, 23 nt, Artificial Sequence
  Synthetic
aaaggggguuaagugguuaaaug

SEQ ID NO: 335250 - RNA, 24 nt, Artificial Sequence
  Synthetic
gaaaggggguuaagugguuaaaug

SEQ ID NO: 335251 - RNA, 18 nt, Artificial Sequence
  Synthetic
auggcauauauuuaaaug

SEQ ID NO: 335252 - RNA, 19 nt, Artificial Sequence
  Synthetic
aauggcauauauuuaaaug

SEQ ID NO: 335253 - RNA, 20 nt, Artificial Sequence
  Synthetic
aaauggcauauauuuaaaug

SEQ ID NO: 335254 - RNA, 21 nt, Artificial Sequence
  Synthetic
uaaauggcauauauuuaaaug

SEQ ID NO: 335255 - RNA, 22 nt, Artificial Sequence
  Synthetic
uuaaauggcauauauuuaaaug

SEQ ID NO: 335256 - RNA, 23 nt, Artificial Sequence
  Synthetic
uuuaaauggcauauauuuaaaug

SEQ ID NO: 335257 - RNA, 24 nt, Artificial Sequence
  Synthetic
uuuuaaauggcauauauuuaaaug

SEQ ID NO: 335258 - RNA, 18 nt, Artificial Sequence
  Synthetic
cauuugagccuuuaaaug

SEQ ID NO: 335259 - RNA, 19 nt, Artificial Sequence
  Synthetic
ccauuugagccuuuaaaug

SEQ ID NO: 335260 - RNA, 20 nt, Artificial Sequence
  Synthetic
uccauuugagccuuuaaaug

SEQ ID NO: 335261 - RNA, 21 nt, Artificial Sequence
  Synthetic
cuccauuugagccuuuaaaug

SEQ ID NO: 335262 - RNA, 22 nt, Artificial Sequence
  Synthetic
ucuccauuugagccuuuaaaug

SEQ ID NO: 335263 - RNA, 23 nt, Artificial Sequence
  Synthetic
gucuccauuugagccuuuaaaug

SEQ ID NO: 335264 - RNA, 24 nt, Artificial Sequence
  Synthetic
ugucuccauuugagccuuuaaaug

SEQ ID NO: 335265 - RNA, 18 nt, Artificial Sequence
  Synthetic
cuaggcaaauuuuaaaug

SEQ ID NO: 335266 - RNA, 19 nt, Artificial Sequence
  Synthetic
ucuaggcaaauuuuaaaug

SEQ ID NO: 335267 - RNA, 20 nt, Artificial Sequence
  Synthetic
cucuaggcaaauuuuaaaug

SEQ ID NO: 335268 - RNA, 21 nt, Artificial Sequence
  Synthetic
ucucuaggcaaauuuuaaaug

SEQ ID NO: 335269 - RNA, 22 nt, Artificial Sequence
  Synthetic
cucucuaggcaaauuuuaaaug

SEQ ID NO: 335270 - RNA, 23 nt, Artificial Sequence
  Synthetic
gcucucuaggcaaauuuuaaaug

SEQ ID NO: 335271 - RNA, 24 nt, Artificial Sequence
  Synthetic
ugcucucuaggcaaauuuuaaaug

SEQ ID NO: 335272 - RNA, 18 nt, Artificial Sequence
  Synthetic
uagcuacgguuuuaaaug

SEQ ID NO: 335273 - RNA, 19 nt, Artificial Sequence
  Synthetic
uuagcuacgguuuuaaaug

SEQ ID NO: 335274 - RNA, 20 nt, Artificial Sequence
  Synthetic
uuuagcuacgguuuuaaaug

SEQ ID NO: 335275 - RNA, 21 nt, Artificial Sequence
  Synthetic
cuuuagcuacgguuuuaaaug

SEQ ID NO: 335276 - RNA, 22 nt, Artificial Sequence
  Synthetic
acuuuagcuacgguuuuaaaug

SEQ ID NO: 335277 - RNA, 23 nt, Artificial Sequence
  Synthetic
gacuuuagcuacgguuuuaaaug

SEQ ID NO: 335278 - RNA, 24 nt, Artificial Sequence
  Synthetic
ggacuuuagcuacgguuuuaaaug

SEQ ID NO: 335279 - RNA, 18 nt, Artificial Sequence
  Synthetic
uuaaaacuggaaacaaug

SEQ ID NO: 335280 - RNA, 19 nt, Artificial Sequence
  Synthetic
cuuaaaacuggaaacaaug

SEQ ID NO: 335281 - RNA, 20 nt, Artificial Sequence
  Synthetic
acuuaaaacuggaaacaaug

SEQ ID NO: 335282 - RNA, 21 nt, Artificial Sequence
  Synthetic
uacuuaaaacuggaaacaaug

SEQ ID NO: 335283 - RNA, 22 nt, Artificial Sequence
  Synthetic
auacuuaaaacuggaaacaaug

SEQ ID NO: 335284 - RNA, 23 nt, Artificial Sequence
  Synthetic
gauacuuaaaacuggaaacaaug

SEQ ID NO: 335285 - RNA, 24 nt, Artificial Sequence
  Synthetic
agauacuuaaaacuggaaacaaug

SEQ ID NO: 335286 - RNA, 18 nt, Artificial Sequence
  Synthetic
acauucccaccaacaaug

SEQ ID NO: 335287 - RNA, 19 nt, Artificial Sequence
  Synthetic
cacauucccaccaacaaug

SEQ ID NO: 335288 - RNA, 20 nt, Artificial Sequence
  Synthetic
ucacauucccaccaacaaug

SEQ ID NO: 335289 - RNA, 21 nt, Artificial Sequence
  Synthetic
uucacauucccaccaacaaug

SEQ ID NO: 335290 - RNA, 22 nt, Artificial Sequence
  Synthetic
uuucacauucccaccaacaaug

SEQ ID NO: 335291 - RNA, 23 nt, Artificial Sequence
  Synthetic
uuuucacauucccaccaacaaug

SEQ ID NO: 335292 - RNA, 24 nt, Artificial Sequence
  Synthetic
cuuuucacauucccaccaacaaug

SEQ ID NO: 335293 - RNA, 18 nt, Artificial Sequence
  Synthetic
aaggcaauuucaacaaug

SEQ ID NO: 335294 - RNA, 19 nt, Artificial Sequence
  Synthetic
gaaggcaauuucaacaaug

SEQ ID NO: 335295 - RNA, 20 nt, Artificial Sequence
  Synthetic
cgaaggcaauuucaacaaug

SEQ ID NO: 335296 - RNA, 21 nt, Artificial Sequence
  Synthetic
gcgaaggcaauuucaacaaug

SEQ ID NO: 335297 - RNA, 22 nt, Artificial Sequence
  Synthetic
ggcgaaggcaauuucaacaaug

SEQ ID NO: 335298 - RNA, 23 nt, Artificial Sequence
  Synthetic
uggcgaaggcaauuucaacaaug

SEQ ID NO: 335299 - RNA, 24 nt, Artificial Sequence
  Synthetic
uuggcgaaggcaauuucaacaaug

SEQ ID NO: 335300 - RNA, 18 nt, Artificial Sequence
  Synthetic
cuucacuaaugaacaaug

SEQ ID NO: 335301 - RNA, 19 nt, Artificial Sequence
  Synthetic
ucuucacuaaugaacaaug

SEQ ID NO: 335302 - RNA, 20 nt, Artificial Sequence
  Synthetic
cucuucacuaaugaacaaug

SEQ ID NO: 335303 - RNA, 21 nt, Artificial Sequence
  Synthetic
gcucuucacuaaugaacaaug

SEQ ID NO: 335304 - RNA, 22 nt, Artificial Sequence
  Synthetic
agcucuucacuaaugaacaaug

SEQ ID NO: 335305 - RNA, 23 nt, Artificial Sequence
  Synthetic
cagcucuucacuaaugaacaaug

SEQ ID NO: 335306 - RNA, 24 nt, Artificial Sequence
  Synthetic
ccagcucuucacuaaugaacaaug

SEQ ID NO: 335307 - RNA, 18 nt, Artificial Sequence
  Synthetic
agauuaaaaauaacaaug

SEQ ID NO: 335308 - RNA, 19 nt, Artificial Sequence
  Synthetic
aagauuaaaaauaacaaug

SEQ ID NO: 335309 - RNA, 20 nt, Artificial Sequence
  Synthetic
aaagauuaaaaauaacaaug

SEQ ID NO: 335310 - RNA, 21 nt, Artificial Sequence
  Synthetic
caaagauuaaaaauaacaaug

SEQ ID NO: 335311 - RNA, 22 nt, Artificial Sequence
  Synthetic
ucaaagauuaaaaauaacaaug

SEQ ID NO: 335312 - RNA, 23 nt, Artificial Sequence
  Synthetic
cucaaagauuaaaaauaacaaug

SEQ ID NO: 335313 - RNA, 24 nt, Artificial Sequence
  Synthetic
ucucaaagauuaaaaauaacaaug

SEQ ID NO: 335314 - RNA, 18 nt, Artificial Sequence
  Synthetic
caucccuaaauaacaaug

SEQ ID NO: 335315 - RNA, 19 nt, Artificial Sequence
  Synthetic
ucaucccuaaauaacaaug

SEQ ID NO: 335316 - RNA, 20 nt, Artificial Sequence
  Synthetic
uucaucccuaaauaacaaug

SEQ ID NO: 335317 - RNA, 21 nt, Artificial Sequence
  Synthetic
cuucaucccuaaauaacaaug

SEQ ID NO: 335318 - RNA, 22 nt, Artificial Sequence
  Synthetic
ccuucaucccuaaauaacaaug

SEQ ID NO: 335319 - RNA, 23 nt, Artificial Sequence
  Synthetic
gccuucaucccuaaauaacaaug

SEQ ID NO: 335320 - RNA, 24 nt, Artificial Sequence
  Synthetic
agccuucaucccuaaauaacaaug

SEQ ID NO: 335321 - RNA, 18 nt, Artificial Sequence
  Synthetic
aaaguaggaauaacaaug

SEQ ID NO: 335322 - RNA, 19 nt, Artificial Sequence
  Synthetic
aaaaguaggaauaacaaug

SEQ ID NO: 335323 - RNA, 20 nt, Artificial Sequence
  Synthetic
gaaaaguaggaauaacaaug

SEQ ID NO: 335324 - RNA, 21 nt, Artificial Sequence
  Synthetic
ggaaaaguaggaauaacaaug

SEQ ID NO: 335325 - RNA, 22 nt, Artificial Sequence
  Synthetic
uggaaaaguaggaauaacaaug

SEQ ID NO: 335326 - RNA, 23 nt, Artificial Sequence
  Synthetic
auggaaaaguaggaauaacaaug

SEQ ID NO: 335327 - RNA, 24 nt, Artificial Sequence
  Synthetic
uauggaaaaguaggaauaacaaug

SEQ ID NO: 335328 - RNA, 18 nt, Artificial Sequence
  Synthetic
uaaauccuacccacaaug

SEQ ID NO: 335329 - RNA, 19 nt, Artificial Sequence
  Synthetic
auaaauccuacccacaaug

SEQ ID NO: 335330 - RNA, 20 nt, Artificial Sequence
  Synthetic
aauaaauccuacccacaaug

SEQ ID NO: 335331 - RNA, 21 nt, Artificial Sequence
  Synthetic
aaauaaauccuacccacaaug

SEQ ID NO: 335332 - RNA, 22 nt, Artificial Sequence
  Synthetic
uaaauaaauccuacccacaaug

SEQ ID NO: 335333 - RNA, 23 nt, Artificial Sequence
  Synthetic
auaaauaaauccuacccacaaug

SEQ ID NO: 335334 - RNA, 24 nt, Artificial Sequence
  Synthetic
aauaaauaaauccuacccacaaug

SEQ ID NO: 335335 - RNA, 18 nt, Artificial Sequence
  Synthetic
gcacuuuggcccacaaug

SEQ ID NO: 335336 - RNA, 19 nt, Artificial Sequence
  Synthetic
agcacuuuggcccacaaug

SEQ ID NO: 335337 - RNA, 20 nt, Artificial Sequence
  Synthetic
gagcacuuuggcccacaaug

SEQ ID NO: 335338 - RNA, 21 nt, Artificial Sequence
  Synthetic
agagcacuuuggcccacaaug

SEQ ID NO: 335339 - RNA, 22 nt, Artificial Sequence
  Synthetic
cagagcacuuuggcccacaaug

SEQ ID NO: 335340 - RNA, 23 nt, Artificial Sequence
  Synthetic
ccagagcacuuuggcccacaaug

SEQ ID NO: 335341 - RNA, 24 nt, Artificial Sequence
  Synthetic
uccagagcacuuuggcccacaaug

SEQ ID NO: 335342 - RNA, 18 nt, Artificial Sequence
  Synthetic
acacugucuuccacaaug

SEQ ID NO: 335343 - RNA, 19 nt, Artificial Sequence
  Synthetic
cacacugucuuccacaaug

SEQ ID NO: 335344 - RNA, 20 nt, Artificial Sequence
  Synthetic
gcacacugucuuccacaaug

SEQ ID NO: 335345 - RNA, 21 nt, Artificial Sequence
  Synthetic
ugcacacugucuuccacaaug

SEQ ID NO: 335346 - RNA, 22 nt, Artificial Sequence
  Synthetic
cugcacacugucuuccacaaug

SEQ ID NO: 335347 - RNA, 23 nt, Artificial Sequence
  Synthetic
ucugcacacugucuuccacaaug

SEQ ID NO: 335348 - RNA, 24 nt, Artificial Sequence
  Synthetic
aucugcacacugucuuccacaaug

SEQ ID NO: 335349 - RNA, 18 nt, Artificial Sequence
  Synthetic
cgaggaagaaagacaaug

SEQ ID NO: 335350 - RNA, 19 nt, Artificial Sequence
  Synthetic
ucgaggaagaaagacaaug

SEQ ID NO: 335351 - RNA, 20 nt, Artificial Sequence
  Synthetic
aucgaggaagaaagacaaug

SEQ ID NO: 335352 - RNA, 21 nt, Artificial Sequence
  Synthetic
gaucgaggaagaaagacaaug

SEQ ID NO: 335353 - RNA, 22 nt, Artificial Sequence
  Synthetic
agaucgaggaagaaagacaaug

SEQ ID NO: 335354 - RNA, 23 nt, Artificial Sequence
  Synthetic
gagaucgaggaagaaagacaaug

SEQ ID NO: 335355 - RNA, 24 nt, Artificial Sequence
  Synthetic
ugagaucgaggaagaaagacaaug

SEQ ID NO: 335356 - RNA, 18 nt, Artificial Sequence
  Synthetic
uagcuuguaaagacaaug

SEQ ID NO: 335357 - RNA, 19 nt, Artificial Sequence
  Synthetic
uuagcuuguaaagacaaug

SEQ ID NO: 335358 - RNA, 20 nt, Artificial Sequence
  Synthetic
auuagcuuguaaagacaaug

SEQ ID NO: 335359 - RNA, 21 nt, Artificial Sequence
  Synthetic
uauuagcuuguaaagacaaug

SEQ ID NO: 335360 - RNA, 22 nt, Artificial Sequence
  Synthetic
auauuagcuuguaaagacaaug

SEQ ID NO: 335361 - RNA, 23 nt, Artificial Sequence
  Synthetic
aauauuagcuuguaaagacaaug

SEQ ID NO: 335362 - RNA, 24 nt, Artificial Sequence
  Synthetic
uaauauuagcuuguaaagacaaug

SEQ ID NO: 335363 - RNA, 18 nt, Artificial Sequence
  Synthetic
uuaagcgccaagacaaug

SEQ ID NO: 335364 - RNA, 19 nt, Artificial Sequence
  Synthetic
guuaagcgccaagacaaug

SEQ ID NO: 335365 - RNA, 20 nt, Artificial Sequence
  Synthetic
uguuaagcgccaagacaaug

SEQ ID NO: 335366 - RNA, 21 nt, Artificial Sequence
  Synthetic
auguuaagcgccaagacaaug

SEQ ID NO: 335367 - RNA, 22 nt, Artificial Sequence
  Synthetic
aauguuaagcgccaagacaaug

SEQ ID NO: 335368 - RNA, 23 nt, Artificial Sequence
  Synthetic
aaauguuaagcgccaagacaaug

SEQ ID NO: 335369 - RNA, 24 nt, Artificial Sequence
  Synthetic
caaauguuaagcgccaagacaaug

SEQ ID NO: 335370 - RNA, 18 nt, Artificial Sequence
  Synthetic
ucagucauggggacaaug

SEQ ID NO: 335371 - RNA, 19 nt, Artificial Sequence
  Synthetic
uucagucauggggacaaug

SEQ ID NO: 335372 - RNA, 20 nt, Artificial Sequence
  Synthetic
auucagucauggggacaaug

SEQ ID NO: 335373 - RNA, 21 nt, Artificial Sequence
  Synthetic
gauucagucauggggacaaug

SEQ ID NO: 335374 - RNA, 22 nt, Artificial Sequence
  Synthetic
ggauucagucauggggacaaug

SEQ ID NO: 335375 - RNA, 23 nt, Artificial Sequence
  Synthetic
uggauucagucauggggacaaug

SEQ ID NO: 335376 - RNA, 24 nt, Artificial Sequence
  Synthetic
guggauucagucauggggacaaug

SEQ ID NO: 335377 - RNA, 18 nt, Artificial Sequence
  Synthetic
uuggcuauuuugacaaug

SEQ ID NO: 335378 - RNA, 19 nt, Artificial Sequence
  Synthetic
auuggcuauuuugacaaug

SEQ ID NO: 335379 - RNA, 20 nt, Artificial Sequence
  Synthetic
cauuggcuauuuugacaaug

SEQ ID NO: 335380 - RNA, 21 nt, Artificial Sequence
  Synthetic
ucauuggcuauuuugacaaug

SEQ ID NO: 335381 - RNA, 22 nt, Artificial Sequence
  Synthetic
uucauuggcuauuuugacaaug

SEQ ID NO: 335382 - RNA, 23 nt, Artificial Sequence
  Synthetic
guucauuggcuauuuugacaaug

SEQ ID NO: 335383 - RNA, 24 nt, Artificial Sequence
  Synthetic
uguucauuggcuauuuugacaaug

SEQ ID NO: 335384 - RNA, 18 nt, Artificial Sequence
  Synthetic
aauauaacucauacaaug

SEQ ID NO: 335385 - RNA, 19 nt, Artificial Sequence
  Synthetic
aaauauaacucauacaaug

SEQ ID NO: 335386 - RNA, 20 nt, Artificial Sequence
  Synthetic
uaaauauaacucauacaaug

SEQ ID NO: 335387 - RNA, 21 nt, Artificial Sequence
  Synthetic
auaaauauaacucauacaaug

SEQ ID NO: 335388 - RNA, 22 nt, Artificial Sequence
  Synthetic
gauaaauauaacucauacaaug

SEQ ID NO: 335389 - RNA, 23 nt, Artificial Sequence
  Synthetic
ugauaaauauaacucauacaaug

SEQ ID NO: 335390 - RNA, 24 nt, Artificial Sequence
  Synthetic
uugauaaauauaacucauacaaug

SEQ ID NO: 335391 - RNA, 18 nt, Artificial Sequence
  Synthetic
gcuaaauacccuacaaug

SEQ ID NO: 335392 - RNA, 19 nt, Artificial Sequence
  Synthetic
ugcuaaauacccuacaaug

SEQ ID NO: 335393 - RNA, 20 nt, Artificial Sequence
  Synthetic
cugcuaaauacccuacaaug

SEQ ID NO: 335394 - RNA, 21 nt, Artificial Sequence
  Synthetic
acugcuaaauacccuacaaug

SEQ ID NO: 335395 - RNA, 22 nt, Artificial Sequence
  Synthetic
uacugcuaaauacccuacaaug

SEQ ID NO: 335396 - RNA, 23 nt, Artificial Sequence
  Synthetic
auacugcuaaauacccuacaaug

SEQ ID NO: 335397 - RNA, 24 nt, Artificial Sequence
  Synthetic
gauacugcuaaauacccuacaaug

SEQ ID NO: 335398 - RNA, 18 nt, Artificial Sequence
  Synthetic
ucacuuauugguacaaug

SEQ ID NO: 335399 - RNA, 19 nt, Artificial Sequence
  Synthetic
aucacuuauugguacaaug

SEQ ID NO: 335400 - RNA, 20 nt, Artificial Sequence
  Synthetic
aaucacuuauugguacaaug

SEQ ID NO: 335401 - RNA, 21 nt, Artificial Sequence
  Synthetic
aaaucacuuauugguacaaug

SEQ ID NO: 335402 - RNA, 22 nt, Artificial Sequence
  Synthetic
caaaucacuuauugguacaaug

SEQ ID NO: 335403 - RNA, 23 nt, Artificial Sequence
  Synthetic
ucaaaucacuuauugguacaaug

SEQ ID NO: 335404 - RNA, 24 nt, Artificial Sequence
  Synthetic
gucaaaucacuuauugguacaaug

SEQ ID NO: 335405 - RNA, 18 nt, Artificial Sequence
  Synthetic
uaugaugaggaaccaaug

SEQ ID NO: 335406 - RNA, 19 nt, Artificial Sequence
  Synthetic
guaugaugaggaaccaaug

SEQ ID NO: 335407 - RNA, 20 nt, Artificial Sequence
  Synthetic
gguaugaugaggaaccaaug

SEQ ID NO: 335408 - RNA, 21 nt, Artificial Sequence
  Synthetic
ugguaugaugaggaaccaaug

SEQ ID NO: 335409 - RNA, 22 nt, Artificial Sequence
  Synthetic
gugguaugaugaggaaccaaug

SEQ ID NO: 335410 - RNA, 23 nt, Artificial Sequence
  Synthetic
agugguaugaugaggaaccaaug

SEQ ID NO: 335411 - RNA, 24 nt, Artificial Sequence
  Synthetic
gagugguaugaugaggaaccaaug

SEQ ID NO: 335412 - RNA, 18 nt, Artificial Sequence
  Synthetic
ugggagaucugcccaaug

SEQ ID NO: 335413 - RNA, 19 nt, Artificial Sequence
  Synthetic
cugggagaucugcccaaug

SEQ ID NO: 335414 - RNA, 20 nt, Artificial Sequence
  Synthetic
ucugggagaucugcccaaug

SEQ ID NO: 335415 - RNA, 21 nt, Artificial Sequence
  Synthetic
gucugggagaucugcccaaug

SEQ ID NO: 335416 - RNA, 22 nt, Artificial Sequence
  Synthetic
ugucugggagaucugcccaaug

SEQ ID NO: 335417 - RNA, 23 nt, Artificial Sequence
  Synthetic
cugucugggagaucugcccaaug

SEQ ID NO: 335418 - RNA, 24 nt, Artificial Sequence
  Synthetic
ucugucugggagaucugcccaaug

SEQ ID NO: 335419 - RNA, 18 nt, Artificial Sequence
  Synthetic
aaaaguuucaucccaaug

SEQ ID NO: 335420 - RNA, 19 nt, Artificial Sequence
  Synthetic
aaaaaguuucaucccaaug

SEQ ID NO: 335421 - RNA, 20 nt, Artificial Sequence
  Synthetic
uaaaaaguuucaucccaaug

SEQ ID NO: 335422 - RNA, 21 nt, Artificial Sequence
  Synthetic
guaaaaaguuucaucccaaug

SEQ ID NO: 335423 - RNA, 22 nt, Artificial Sequence
  Synthetic
uguaaaaaguuucaucccaaug

SEQ ID NO: 335424 - RNA, 23 nt, Artificial Sequence
  Synthetic
guguaaaaaguuucaucccaaug

SEQ ID NO: 335425 - RNA, 24 nt, Artificial Sequence
  Synthetic
uguguaaaaaguuucaucccaaug

SEQ ID NO: 335426 - RNA, 18 nt, Artificial Sequence
  Synthetic
uuacuuuauuucccaaug

SEQ ID NO: 335427 - RNA, 19 nt, Artificial Sequence
  Synthetic
guuacuuuauuucccaaug

SEQ ID NO: 335428 - RNA, 20 nt, Artificial Sequence
  Synthetic
uguuacuuuauuucccaaug

SEQ ID NO: 335429 - RNA, 21 nt, Artificial Sequence
  Synthetic
uuguuacuuuauuucccaaug

SEQ ID NO: 335430 - RNA, 22 nt, Artificial Sequence
  Synthetic
uuuguuacuuuauuucccaaug

SEQ ID NO: 335431 - RNA, 23 nt, Artificial Sequence
  Synthetic
cuuuguuacuuuauuucccaaug

SEQ ID NO: 335432 - RNA, 24 nt, Artificial Sequence
  Synthetic
ucuuuguuacuuuauuucccaaug

SEQ ID NO: 335433 - RNA, 18 nt, Artificial Sequence
  Synthetic
gcauauuuggagccaaug

SEQ ID NO: 335434 - RNA, 19 nt, Artificial Sequence
  Synthetic
ugcauauuuggagccaaug

SEQ ID NO: 335435 - RNA, 20 nt, Artificial Sequence
  Synthetic
augcauauuuggagccaaug

SEQ ID NO: 335436 - RNA, 21 nt, Artificial Sequence
  Synthetic
aaugcauauuuggagccaaug

SEQ ID NO: 335437 - RNA, 22 nt, Artificial Sequence
  Synthetic
caaugcauauuuggagccaaug

SEQ ID NO: 335438 - RNA, 23 nt, Artificial Sequence
  Synthetic
gcaaugcauauuuggagccaaug

SEQ ID NO: 335439 - RNA, 24 nt, Artificial Sequence
  Synthetic
ugcaaugcauauuuggagccaaug

SEQ ID NO: 335440 - RNA, 18 nt, Artificial Sequence
  Synthetic
aacuuucaugugccaaug

SEQ ID NO: 335441 - RNA, 19 nt, Artificial Sequence
  Synthetic
caacuuucaugugccaaug

SEQ ID NO: 335442 - RNA, 20 nt, Artificial Sequence
  Synthetic
acaacuuucaugugccaaug

SEQ ID NO: 335443 - RNA, 21 nt, Artificial Sequence
  Synthetic
uacaacuuucaugugccaaug

SEQ ID NO: 335444 - RNA, 22 nt, Artificial Sequence
  Synthetic
auacaacuuucaugugccaaug

SEQ ID NO: 335445 - RNA, 23 nt, Artificial Sequence
  Synthetic
uauacaacuuucaugugccaaug

SEQ ID NO: 335446 - RNA, 24 nt, Artificial Sequence
  Synthetic
auauacaacuuucaugugccaaug

SEQ ID NO: 335447 - RNA, 18 nt, Artificial Sequence
  Synthetic
agucauugcuguccaaug

SEQ ID NO: 335448 - RNA, 19 nt, Artificial Sequence
  Synthetic
uagucauugcuguccaaug

SEQ ID NO: 335449 - RNA, 20 nt, Artificial Sequence
  Synthetic
guagucauugcuguccaaug

SEQ ID NO: 335450 - RNA, 21 nt, Artificial Sequence
  Synthetic
uguagucauugcuguccaaug

SEQ ID NO: 335451 - RNA, 22 nt, Artificial Sequence
  Synthetic
cuguagucauugcuguccaaug

SEQ ID NO: 335452 - RNA, 23 nt, Artificial Sequence
  Synthetic
ucuguagucauugcuguccaaug

SEQ ID NO: 335453 - RNA, 24 nt, Artificial Sequence
  Synthetic
uucuguagucauugcuguccaaug

SEQ ID NO: 335454 - RNA, 18 nt, Artificial Sequence
  Synthetic
gaaaugugauuuccaaug

SEQ ID NO: 335455 - RNA, 19 nt, Artificial Sequence
  Synthetic
ugaaaugugauuuccaaug

SEQ ID NO: 335456 - RNA, 20 nt, Artificial Sequence
  Synthetic
uugaaaugugauuuccaaug

SEQ ID NO: 335457 - RNA, 21 nt, Artificial Sequence
  Synthetic
auugaaaugugauuuccaaug

SEQ ID NO: 335458 - RNA, 22 nt, Artificial Sequence
  Synthetic
uauugaaaugugauuuccaaug

SEQ ID NO: 335459 - RNA, 23 nt, Artificial Sequence
  Synthetic
auauugaaaugugauuuccaaug

SEQ ID NO: 335460 - RNA, 24 nt, Artificial Sequence
  Synthetic
uauauugaaaugugauuuccaaug

SEQ ID NO: 335461 - RNA, 18 nt, Artificial Sequence
  Synthetic
caucaguguuuuccaaug

SEQ ID NO: 335462 - RNA, 19 nt, Artificial Sequence
  Synthetic
acaucaguguuuuccaaug

SEQ ID NO: 335463 - RNA, 20 nt, Artificial Sequence
  Synthetic
aacaucaguguuuuccaaug

SEQ ID NO: 335464 - RNA, 21 nt, Artificial Sequence
  Synthetic
aaacaucaguguuuuccaaug

SEQ ID NO: 335465 - RNA, 22 nt, Artificial Sequence
  Synthetic
gaaacaucaguguuuuccaaug

SEQ ID NO: 335466 - RNA, 23 nt, Artificial Sequence
  Synthetic
agaaacaucaguguuuuccaaug

SEQ ID NO: 335467 - RNA, 24 nt, Artificial Sequence
  Synthetic
uagaaacaucaguguuuuccaaug

SEQ ID NO: 335468 - RNA, 18 nt, Artificial Sequence
  Synthetic
ugacaaaaacaagcaaug

SEQ ID NO: 335469 - RNA, 19 nt, Artificial Sequence
  Synthetic
cugacaaaaacaagcaaug

SEQ ID NO: 335470 - RNA, 20 nt, Artificial Sequence
  Synthetic
ccugacaaaaacaagcaaug

SEQ ID NO: 335471 - RNA, 21 nt, Artificial Sequence
  Synthetic
accugacaaaaacaagcaaug

SEQ ID NO: 335472 - RNA, 22 nt, Artificial Sequence
  Synthetic
aaccugacaaaaacaagcaaug

SEQ ID NO: 335473 - RNA, 23 nt, Artificial Sequence
  Synthetic
aaaccugacaaaaacaagcaaug

SEQ ID NO: 335474 - RNA, 24 nt, Artificial Sequence
  Synthetic
caaaccugacaaaaacaagcaaug

SEQ ID NO: 335475 - RNA, 18 nt, Artificial Sequence
  Synthetic
ugagaaaaacaagcaaug

SEQ ID NO: 335476 - RNA, 19 nt, Artificial Sequence
  Synthetic
cugagaaaaacaagcaaug

SEQ ID NO: 335477 - RNA, 20 nt, Artificial Sequence
  Synthetic
ccugagaaaaacaagcaaug

SEQ ID NO: 335478 - RNA, 21 nt, Artificial Sequence
  Synthetic
accugagaaaaacaagcaaug

SEQ ID NO: 335479 - RNA, 22 nt, Artificial Sequence
  Synthetic
aaccugagaaaaacaagcaaug

SEQ ID NO: 335480 - RNA, 23 nt, Artificial Sequence
  Synthetic
aaaccugagaaaaacaagcaaug

SEQ ID NO: 335481 - RNA, 24 nt, Artificial Sequence
  Synthetic
caaaccugagaaaaacaagcaaug

SEQ ID NO: 335482 - RNA, 18 nt, Artificial Sequence
  Synthetic
ugaggaaaacaagcaaug

SEQ ID NO: 335483 - RNA, 19 nt, Artificial Sequence
  Synthetic
cugaggaaaacaagcaaug

SEQ ID NO: 335484 - RNA, 20 nt, Artificial Sequence
  Synthetic
ccugaggaaaacaagcaaug

SEQ ID NO: 335485 - RNA, 21 nt, Artificial Sequence
  Synthetic
accugaggaaaacaagcaaug

SEQ ID NO: 335486 - RNA, 22 nt, Artificial Sequence
  Synthetic
aaccugaggaaaacaagcaaug

SEQ ID NO: 335487 - RNA, 23 nt, Artificial Sequence
  Synthetic
aaaccugaggaaaacaagcaaug

SEQ ID NO: 335488 - RNA, 24 nt, Artificial Sequence
  Synthetic
caaaccugaggaaaacaagcaaug

SEQ ID NO: 335489 - RNA, 18 nt, Artificial Sequence
  Synthetic
auauuacuucaagcaaug

SEQ ID NO: 335490 - RNA, 19 nt, Artificial Sequence
  Synthetic
cauauuacuucaagcaaug

SEQ ID NO: 335491 - RNA, 20 nt, Artificial Sequence
  Synthetic
ccauauuacuucaagcaaug

SEQ ID NO: 335492 - RNA, 21 nt, Artificial Sequence
  Synthetic
cccauauuacuucaagcaaug

SEQ ID NO: 335493 - RNA, 22 nt, Artificial Sequence
  Synthetic
ucccauauuacuucaagcaaug

SEQ ID NO: 335494 - RNA, 23 nt, Artificial Sequence
  Synthetic
cucccauauuacuucaagcaaug

SEQ ID NO: 335495 - RNA, 24 nt, Artificial Sequence
  Synthetic
acucccauauuacuucaagcaaug

SEQ ID NO: 335496 - RNA, 18 nt, Artificial Sequence
  Synthetic
uuaauauaaagagcaaug

SEQ ID NO: 335497 - RNA, 19 nt, Artificial Sequence
  Synthetic
uuuaauauaaagagcaaug

SEQ ID NO: 335498 - RNA, 20 nt, Artificial Sequence
  Synthetic
uuuuaauauaaagagcaaug

SEQ ID NO: 335499 - RNA, 21 nt, Artificial Sequence
  Synthetic
uuuuuaauauaaagagcaaug

SEQ ID NO: 335500 - RNA, 22 nt, Artificial Sequence
  Synthetic
auuuuuaauauaaagagcaaug

SEQ ID NO: 335501 - RNA, 23 nt, Artificial Sequence
  Synthetic
uauuuuuaauauaaagagcaaug

SEQ ID NO: 335502 - RNA, 24 nt, Artificial Sequence
  Synthetic
uuauuuuuaauauaaagagcaaug

SEQ ID NO: 335503 - RNA, 18 nt, Artificial Sequence
  Synthetic
cuugauaaaggagcaaug

SEQ ID NO: 335504 - RNA, 19 nt, Artificial Sequence
  Synthetic
acuugauaaaggagcaaug

SEQ ID NO: 335505 - RNA, 20 nt, Artificial Sequence
  Synthetic
uacuugauaaaggagcaaug

SEQ ID NO: 335506 - RNA, 21 nt, Artificial Sequence
  Synthetic
guacuugauaaaggagcaaug

SEQ ID NO: 335507 - RNA, 22 nt, Artificial Sequence
  Synthetic
aguacuugauaaaggagcaaug

SEQ ID NO: 335508 - RNA, 23 nt, Artificial Sequence
  Synthetic
aaguacuugauaaaggagcaaug

SEQ ID NO: 335509 - RNA, 24 nt, Artificial Sequence
  Synthetic
caaguacuugauaaaggagcaaug

SEQ ID NO: 335510 - RNA, 18 nt, Artificial Sequence
  Synthetic
auaguuacaauagcaaug

SEQ ID NO: 335511 - RNA, 19 nt, Artificial Sequence
  Synthetic
aauaguuacaauagcaaug

SEQ ID NO: 335512 - RNA, 20 nt, Artificial Sequence
  Synthetic
aaauaguuacaauagcaaug

SEQ ID NO: 335513 - RNA, 21 nt, Artificial Sequence
  Synthetic
aaaauaguuacaauagcaaug

SEQ ID NO: 335514 - RNA, 22 nt, Artificial Sequence
  Synthetic
gaaaauaguuacaauagcaaug

SEQ ID NO: 335515 - RNA, 23 nt, Artificial Sequence
  Synthetic
agaaaauaguuacaauagcaaug

SEQ ID NO: 335516 - RNA, 24 nt, Artificial Sequence
  Synthetic
gagaaaauaguuacaauagcaaug

SEQ ID NO: 335517 - RNA, 18 nt, Artificial Sequence
  Synthetic
agauaaacaauggcaaug

SEQ ID NO: 335518 - RNA, 19 nt, Artificial Sequence
  Synthetic
uagauaaacaauggcaaug

SEQ ID NO: 335519 - RNA, 20 nt, Artificial Sequence
  Synthetic
cuagauaaacaauggcaaug

SEQ ID NO: 335520 - RNA, 21 nt, Artificial Sequence
  Synthetic
ucuagauaaacaauggcaaug

SEQ ID NO: 335521 - RNA, 22 nt, Artificial Sequence
  Synthetic
uucuagauaaacaauggcaaug

SEQ ID NO: 335522 - RNA, 23 nt, Artificial Sequence
  Synthetic
guucuagauaaacaauggcaaug

SEQ ID NO: 335523 - RNA, 24 nt, Artificial Sequence
  Synthetic
uguucuagauaaacaauggcaaug

SEQ ID NO: 335524 - RNA, 18 nt, Artificial Sequence
  Synthetic
cucagucugauggcaaug

SEQ ID NO: 335525 - RNA, 19 nt, Artificial Sequence
  Synthetic
acucagucugauggcaaug

SEQ ID NO: 335526 - RNA, 20 nt, Artificial Sequence
  Synthetic
gacucagucugauggcaaug

SEQ ID NO: 335527 - RNA, 21 nt, Artificial Sequence
  Synthetic
agacucagucugauggcaaug

SEQ ID NO: 335528 - RNA, 22 nt, Artificial Sequence
  Synthetic
aagacucagucugauggcaaug

SEQ ID NO: 335529 - RNA, 23 nt, Artificial Sequence
  Synthetic
gaagacucagucugauggcaaug

SEQ ID NO: 335530 - RNA, 24 nt, Artificial Sequence
  Synthetic
agaagacucagucugauggcaaug

SEQ ID NO: 335531 - RNA, 18 nt, Artificial Sequence
  Synthetic
ugauguaaaucugcaaug

SEQ ID NO: 335532 - RNA, 19 nt, Artificial Sequence
  Synthetic
uugauguaaaucugcaaug

SEQ ID NO: 335533 - RNA, 20 nt, Artificial Sequence
  Synthetic
cuugauguaaaucugcaaug

SEQ ID NO: 335534 - RNA, 21 nt, Artificial Sequence
  Synthetic
ucuugauguaaaucugcaaug

SEQ ID NO: 335535 - RNA, 22 nt, Artificial Sequence
  Synthetic
aucuugauguaaaucugcaaug

SEQ ID NO: 335536 - RNA, 23 nt, Artificial Sequence
  Synthetic
aaucuugauguaaaucugcaaug

SEQ ID NO: 335537 - RNA, 24 nt, Artificial Sequence
  Synthetic
aaaucuugauguaaaucugcaaug

SEQ ID NO: 335538 - RNA, 18 nt, Artificial Sequence
  Synthetic
gucaacuuuugugcaaug

SEQ ID NO: 335539 - RNA, 19 nt, Artificial Sequence
  Synthetic
ugucaacuuuugugcaaug

SEQ ID NO: 335540 - RNA, 20 nt, Artificial Sequence
  Synthetic
cugucaacuuuugugcaaug

SEQ ID NO: 335541 - RNA, 21 nt, Artificial Sequence
  Synthetic
acugucaacuuuugugcaaug

SEQ ID NO: 335542 - RNA, 22 nt, Artificial Sequence
  Synthetic
cacugucaacuuuugugcaaug

SEQ ID NO: 335543 - RNA, 23 nt, Artificial Sequence
  Synthetic
ucacugucaacuuuugugcaaug

SEQ ID NO: 335544 - RNA, 24 nt, Artificial Sequence
  Synthetic
aucacugucaacuuuugugcaaug

SEQ ID NO: 335545 - RNA, 18 nt, Artificial Sequence
  Synthetic
gggcacaagauugcaaug

SEQ ID NO: 335546 - RNA, 19 nt, Artificial Sequence
  Synthetic
ugggcacaagauugcaaug

SEQ ID NO: 335547 - RNA, 20 nt, Artificial Sequence
  Synthetic
gugggcacaagauugcaaug

SEQ ID NO: 335548 - RNA, 21 nt, Artificial Sequence
  Synthetic
ugugggcacaagauugcaaug

SEQ ID NO: 335549 - RNA, 22 nt, Artificial Sequence
  Synthetic
uugugggcacaagauugcaaug

SEQ ID NO: 335550 - RNA, 23 nt, Artificial Sequence
  Synthetic
uuugugggcacaagauugcaaug

SEQ ID NO: 335551 - RNA, 24 nt, Artificial Sequence
  Synthetic
uuuugugggcacaagauugcaaug

SEQ ID NO: 335552 - RNA, 18 nt, Artificial Sequence
  Synthetic
caggauacaaaaucaaug

SEQ ID NO: 335553 - RNA, 19 nt, Artificial Sequence
  Synthetic
ucaggauacaaaaucaaug

SEQ ID NO: 335554 - RNA, 20 nt, Artificial Sequence
  Synthetic
cucaggauacaaaaucaaug

SEQ ID NO: 335555 - RNA, 21 nt, Artificial Sequence
  Synthetic
ucucaggauacaaaaucaaug

SEQ ID NO: 335556 - RNA, 22 nt, Artificial Sequence
  Synthetic
gucucaggauacaaaaucaaug

SEQ ID NO: 335557 - RNA, 23 nt, Artificial Sequence
  Synthetic
agucucaggauacaaaaucaaug

SEQ ID NO: 335558 - RNA, 24 nt, Artificial Sequence
  Synthetic
aagucucaggauacaaaaucaaug

SEQ ID NO: 335559 - RNA, 18 nt, Artificial Sequence
  Synthetic
gggauacauacaucaaug

SEQ ID NO: 335560 - RNA, 19 nt, Artificial Sequence
  Synthetic
ugggauacauacaucaaug

SEQ ID NO: 335561 - RNA, 20 nt, Artificial Sequence
  Synthetic
uugggauacauacaucaaug

SEQ ID NO: 335562 - RNA, 21 nt, Artificial Sequence
  Synthetic
uuugggauacauacaucaaug

SEQ ID NO: 335563 - RNA, 22 nt, Artificial Sequence
  Synthetic
auuugggauacauacaucaaug

SEQ ID NO: 335564 - RNA, 23 nt, Artificial Sequence
  Synthetic
cauuugggauacauacaucaaug

SEQ ID NO: 335565 - RNA, 24 nt, Artificial Sequence
  Synthetic
acauuugggauacauacaucaaug

SEQ ID NO: 335566 - RNA, 18 nt, Artificial Sequence
  Synthetic
ccuagaugaccaucaaug

SEQ ID NO: 335567 - RNA, 19 nt, Artificial Sequence
  Synthetic
accuagaugaccaucaaug

SEQ ID NO: 335568 - RNA, 20 nt, Artificial Sequence
  Synthetic
aaccuagaugaccaucaaug

SEQ ID NO: 335569 - RNA, 21 nt, Artificial Sequence
  Synthetic
caaccuagaugaccaucaaug

SEQ ID NO: 335570 - RNA, 22 nt, Artificial Sequence
  Synthetic
ucaaccuagaugaccaucaaug

SEQ ID NO: 335571 - RNA, 23 nt, Artificial Sequence
  Synthetic
aucaaccuagaugaccaucaaug

SEQ ID NO: 335572 - RNA, 24 nt, Artificial Sequence
  Synthetic
aaucaaccuagaugaccaucaaug

SEQ ID NO: 335573 - RNA, 18 nt, Artificial Sequence
  Synthetic
auccugaaaaacucaaug

SEQ ID NO: 335574 - RNA, 19 nt, Artificial Sequence
  Synthetic
cauccugaaaaacucaaug

SEQ ID NO: 335575 - RNA, 20 nt, Artificial Sequence
  Synthetic
ucauccugaaaaacucaaug

SEQ ID NO: 335576 - RNA, 21 nt, Artificial Sequence
  Synthetic
cucauccugaaaaacucaaug

SEQ ID NO: 335577 - RNA, 22 nt, Artificial Sequence
  Synthetic
ucucauccugaaaaacucaaug

SEQ ID NO: 335578 - RNA, 23 nt, Artificial Sequence
  Synthetic
cucucauccugaaaaacucaaug

SEQ ID NO: 335579 - RNA, 24 nt, Artificial Sequence
  Synthetic
ucucucauccugaaaaacucaaug

SEQ ID NO: 335580 - RNA, 18 nt, Artificial Sequence
  Synthetic
gccauuuugcugucaaug

SEQ ID NO: 335581 - RNA, 19 nt, Artificial Sequence
  Synthetic
agccauuuugcugucaaug

SEQ ID NO: 335582 - RNA, 20 nt, Artificial Sequence
  Synthetic
gagccauuuugcugucaaug

SEQ ID NO: 335583 - RNA, 21 nt, Artificial Sequence
  Synthetic
ugagccauuuugcugucaaug

SEQ ID NO: 335584 - RNA, 22 nt, Artificial Sequence
  Synthetic
cugagccauuuugcugucaaug

SEQ ID NO: 335585 - RNA, 23 nt, Artificial Sequence
  Synthetic
acugagccauuuugcugucaaug

SEQ ID NO: 335586 - RNA, 24 nt, Artificial Sequence
  Synthetic
cacugagccauuuugcugucaaug

SEQ ID NO: 335587 - RNA, 18 nt, Artificial Sequence
  Synthetic
gaaucuucggauucaaug

SEQ ID NO: 335588 - RNA, 19 nt, Artificial Sequence
  Synthetic
agaaucuucggauucaaug

SEQ ID NO: 335589 - RNA, 20 nt, Artificial Sequence
  Synthetic
uagaaucuucggauucaaug

SEQ ID NO: 335590 - RNA, 21 nt, Artificial Sequence
  Synthetic
cuagaaucuucggauucaaug

SEQ ID NO: 335591 - RNA, 22 nt, Artificial Sequence
  Synthetic
acuagaaucuucggauucaaug

SEQ ID NO: 335592 - RNA, 23 nt, Artificial Sequence
  Synthetic
aacuagaaucuucggauucaaug

SEQ ID NO: 335593 - RNA, 24 nt, Artificial Sequence
  Synthetic
caacuagaaucuucggauucaaug

SEQ ID NO: 335594 - RNA, 18 nt, Artificial Sequence
  Synthetic
aggaugcaaauuucaaug

SEQ ID NO: 335595 - RNA, 19 nt, Artificial Sequence
  Synthetic
gaggaugcaaauuucaaug

SEQ ID NO: 335596 - RNA, 20 nt, Artificial Sequence
  Synthetic
ugaggaugcaaauuucaaug

SEQ ID NO: 335597 - RNA, 21 nt, Artificial Sequence
  Synthetic
augaggaugcaaauuucaaug

SEQ ID NO: 335598 - RNA, 22 nt, Artificial Sequence
  Synthetic
caugaggaugcaaauuucaaug

SEQ ID NO: 335599 - RNA, 23 nt, Artificial Sequence
  Synthetic
ccaugaggaugcaaauuucaaug

SEQ ID NO: 335600 - RNA, 24 nt, Artificial Sequence
  Synthetic
uccaugaggaugcaaauuucaaug

SEQ ID NO: 335601 - RNA, 18 nt, Artificial Sequence
  Synthetic
auuuagaaaaaaagaaug

SEQ ID NO: 335602 - RNA, 19 nt, Artificial Sequence
  Synthetic
uauuuagaaaaaaagaaug

SEQ ID NO: 335603 - RNA, 20 nt, Artificial Sequence
  Synthetic
uuauuuagaaaaaaagaaug

SEQ ID NO: 335604 - RNA, 21 nt, Artificial Sequence
  Synthetic
uuuauuuagaaaaaaagaaug

SEQ ID NO: 335605 - RNA, 22 nt, Artificial Sequence
  Synthetic
uuuuauuuagaaaaaaagaaug

SEQ ID NO: 335606 - RNA, 23 nt, Artificial Sequence
  Synthetic
cuuuuauuuagaaaaaaagaaug

SEQ ID NO: 335607 - RNA, 24 nt, Artificial Sequence
  Synthetic
ccuuuuauuuagaaaaaaagaaug

SEQ ID NO: 335608 - RNA, 18 nt, Artificial Sequence
  Synthetic
aaucaggguaaaagaaug

SEQ ID NO: 335609 - RNA, 19 nt, Artificial Sequence
  Synthetic
caaucaggguaaaagaaug

SEQ ID NO: 335610 - RNA, 20 nt, Artificial Sequence
  Synthetic
ccaaucaggguaaaagaaug

SEQ ID NO: 335611 - RNA, 21 nt, Artificial Sequence
  Synthetic
cccaaucaggguaaaagaaug

SEQ ID NO: 335612 - RNA, 22 nt, Artificial Sequence
  Synthetic
ccccaaucaggguaaaagaaug

SEQ ID NO: 335613 - RNA, 23 nt, Artificial Sequence
  Synthetic
gccccaaucaggguaaaagaaug

SEQ ID NO: 335614 - RNA, 24 nt, Artificial Sequence
  Synthetic
agccccaaucaggguaaaagaaug

SEQ ID NO: 335615 - RNA, 18 nt, Artificial Sequence
  Synthetic
gguggucaccaaagaaug

SEQ ID NO: 335616 - RNA, 19 nt, Artificial Sequence
  Synthetic
cgguggucaccaaagaaug

SEQ ID NO: 335617 - RNA, 20 nt, Artificial Sequence
  Synthetic
acgguggucaccaaagaaug

SEQ ID NO: 335618 - RNA, 21 nt, Artificial Sequence
  Synthetic
gacgguggucaccaaagaaug

SEQ ID NO: 335619 - RNA, 22 nt, Artificial Sequence
  Synthetic
ggacgguggucaccaaagaaug

SEQ ID NO: 335620 - RNA, 23 nt, Artificial Sequence
  Synthetic
uggacgguggucaccaaagaaug

SEQ ID NO: 335621 - RNA, 24 nt, Artificial Sequence
  Synthetic
auggacgguggucaccaaagaaug

SEQ ID NO: 335622 - RNA, 18 nt, Artificial Sequence
  Synthetic
aggagccuggaaagaaug

SEQ ID NO: 335623 - RNA, 19 nt, Artificial Sequence
  Synthetic
gaggagccuggaaagaaug

SEQ ID NO: 335624 - RNA, 20 nt, Artificial Sequence
  Synthetic
ggaggagccuggaaagaaug

SEQ ID NO: 335625 - RNA, 21 nt, Artificial Sequence
  Synthetic
uggaggagccuggaaagaaug

SEQ ID NO: 335626 - RNA, 22 nt, Artificial Sequence
  Synthetic
guggaggagccuggaaagaaug

SEQ ID NO: 335627 - RNA, 23 nt, Artificial Sequence
  Synthetic
uguggaggagccuggaaagaaug

SEQ ID NO: 335628 - RNA, 24 nt, Artificial Sequence
  Synthetic
guguggaggagccuggaaagaaug

SEQ ID NO: 335629 - RNA, 18 nt, Artificial Sequence
  Synthetic
auuguacuauaaagaaug

SEQ ID NO: 335630 - RNA, 19 nt, Artificial Sequence
  Synthetic
uauuguacuauaaagaaug

SEQ ID NO: 335631 - RNA, 20 nt, Artificial Sequence
  Synthetic
uuauuguacuauaaagaaug

SEQ ID NO: 335632 - RNA, 21 nt, Artificial Sequence
  Synthetic
guuauuguacuauaaagaaug

SEQ ID NO: 335633 - RNA, 22 nt, Artificial Sequence
  Synthetic
uguuauuguacuauaaagaaug

SEQ ID NO: 335634 - RNA, 23 nt, Artificial Sequence
  Synthetic
guguuauuguacuauaaagaaug

SEQ ID NO: 335635 - RNA, 24 nt, Artificial Sequence
  Synthetic
aguguuauuguacuauaaagaaug

SEQ ID NO: 335636 - RNA, 18 nt, Artificial Sequence
  Synthetic
ugacagaauuaaagaaug

SEQ ID NO: 335637 - RNA, 19 nt, Artificial Sequence
  Synthetic
gugacagaauuaaagaaug

SEQ ID NO: 335638 - RNA, 20 nt, Artificial Sequence
  Synthetic
agugacagaauuaaagaaug

SEQ ID NO: 335639 - RNA, 21 nt, Artificial Sequence
  Synthetic
aagugacagaauuaaagaaug

SEQ ID NO: 335640 - RNA, 22 nt, Artificial Sequence
  Synthetic
gaagugacagaauuaaagaaug

SEQ ID NO: 335641 - RNA, 23 nt, Artificial Sequence
  Synthetic
ugaagugacagaauuaaagaaug

SEQ ID NO: 335642 - RNA, 24 nt, Artificial Sequence
  Synthetic
uugaagugacagaauuaaagaaug

SEQ ID NO: 335643 - RNA, 18 nt, Artificial Sequence
  Synthetic
guacacugaccaagaaug

SEQ ID NO: 335644 - RNA, 19 nt, Artificial Sequence
  Synthetic
uguacacugaccaagaaug

SEQ ID NO: 335645 - RNA, 20 nt, Artificial Sequence
  Synthetic
guguacacugaccaagaaug

SEQ ID NO: 335646 - RNA, 21 nt, Artificial Sequence
  Synthetic
uguguacacugaccaagaaug

SEQ ID NO: 335647 - RNA, 22 nt, Artificial Sequence
  Synthetic
cuguguacacugaccaagaaug

SEQ ID NO: 335648 - RNA, 23 nt, Artificial Sequence
  Synthetic
acuguguacacugaccaagaaug

SEQ ID NO: 335649 - RNA, 24 nt, Artificial Sequence
  Synthetic
cacuguguacacugaccaagaaug

SEQ ID NO: 335650 - RNA, 18 nt, Artificial Sequence
  Synthetic
ggcagccaagcaagaaug

SEQ ID NO: 335651 - RNA, 19 nt, Artificial Sequence
  Synthetic
uggcagccaagcaagaaug

SEQ ID NO: 335652 - RNA, 20 nt, Artificial Sequence
  Synthetic
cuggcagccaagcaagaaug

SEQ ID NO: 335653 - RNA, 21 nt, Artificial Sequence
  Synthetic
acuggcagccaagcaagaaug

SEQ ID NO: 335654 - RNA, 22 nt, Artificial Sequence
  Synthetic
gacuggcagccaagcaagaaug

SEQ ID NO: 335655 - RNA, 23 nt, Artificial Sequence
  Synthetic
ggacuggcagccaagcaagaaug

SEQ ID NO: 335656 - RNA, 24 nt, Artificial Sequence
  Synthetic
uggacuggcagccaagcaagaaug

SEQ ID NO: 335657 - RNA, 18 nt, Artificial Sequence
  Synthetic
agcucagcaugaagaaug

SEQ ID NO: 335658 - RNA, 19 nt, Artificial Sequence
  Synthetic
uagcucagcaugaagaaug

SEQ ID NO: 335659 - RNA, 20 nt, Artificial Sequence
  Synthetic
cuagcucagcaugaagaaug

SEQ ID NO: 335660 - RNA, 21 nt, Artificial Sequence
  Synthetic
acuagcucagcaugaagaaug

SEQ ID NO: 335661 - RNA, 22 nt, Artificial Sequence
  Synthetic
gacuagcucagcaugaagaaug

SEQ ID NO: 335662 - RNA, 23 nt, Artificial Sequence
  Synthetic
ugacuagcucagcaugaagaaug

SEQ ID NO: 335663 - RNA, 24 nt, Artificial Sequence
  Synthetic
augacuagcucagcaugaagaaug

SEQ ID NO: 335664 - RNA, 18 nt, Artificial Sequence
  Synthetic
augcacagaauaagaaug

SEQ ID NO: 335665 - RNA, 19 nt, Artificial Sequence
  Synthetic
aaugcacagaauaagaaug

SEQ ID NO: 335666 - RNA, 20 nt, Artificial Sequence
  Synthetic
aaaugcacagaauaagaaug

SEQ ID NO: 335667 - RNA, 21 nt, Artificial Sequence
  Synthetic
caaaugcacagaauaagaaug

SEQ ID NO: 335668 - RNA, 22 nt, Artificial Sequence
  Synthetic
ucaaaugcacagaauaagaaug

SEQ ID NO: 335669 - RNA, 23 nt, Artificial Sequence
  Synthetic
cucaaaugcacagaauaagaaug

SEQ ID NO: 335670 - RNA, 24 nt, Artificial Sequence
  Synthetic
ucucaaaugcacagaauaagaaug

SEQ ID NO: 335671 - RNA, 18 nt, Artificial Sequence
  Synthetic
gaauggguucuaagaaug

SEQ ID NO: 335672 - RNA, 19 nt, Artificial Sequence
  Synthetic
ugaauggguucuaagaaug

SEQ ID NO: 335673 - RNA, 20 nt, Artificial Sequence
  Synthetic
augaauggguucuaagaaug

SEQ ID NO: 335674 - RNA, 21 nt, Artificial Sequence
  Synthetic
caugaauggguucuaagaaug

SEQ ID NO: 335675 - RNA, 22 nt, Artificial Sequence
  Synthetic
ucaugaauggguucuaagaaug

SEQ ID NO: 335676 - RNA, 23 nt, Artificial Sequence
  Synthetic
cucaugaauggguucuaagaaug

SEQ ID NO: 335677 - RNA, 24 nt, Artificial Sequence
  Synthetic
gcucaugaauggguucuaagaaug

SEQ ID NO: 335678 - RNA, 18 nt, Artificial Sequence
  Synthetic
aagaccuauuacagaaug

SEQ ID NO: 335679 - RNA, 19 nt, Artificial Sequence
  Synthetic
aaagaccuauuacagaaug

SEQ ID NO: 335680 - RNA, 20 nt, Artificial Sequence
  Synthetic
aaaagaccuauuacagaaug

SEQ ID NO: 335681 - RNA, 21 nt, Artificial Sequence
  Synthetic
caaaagaccuauuacagaaug

SEQ ID NO: 335682 - RNA, 22 nt, Artificial Sequence
  Synthetic
acaaaagaccuauuacagaaug

SEQ ID NO: 335683 - RNA, 23 nt, Artificial Sequence
  Synthetic
aacaaaagaccuauuacagaaug

SEQ ID NO: 335684 - RNA, 24 nt, Artificial Sequence
  Synthetic
aaacaaaagaccuauuacagaaug

SEQ ID NO: 335685 - RNA, 18 nt, Artificial Sequence
  Synthetic
cuaagaucaugcagaaug

SEQ ID NO: 335686 - RNA, 19 nt, Artificial Sequence
  Synthetic
ccuaagaucaugcagaaug

SEQ ID NO: 335687 - RNA, 20 nt, Artificial Sequence
  Synthetic
cccuaagaucaugcagaaug

SEQ ID NO: 335688 - RNA, 21 nt, Artificial Sequence
  Synthetic
ccccuaagaucaugcagaaug

SEQ ID NO: 335689 - RNA, 22 nt, Artificial Sequence
  Synthetic
cccccuaagaucaugcagaaug

SEQ ID NO: 335690 - RNA, 23 nt, Artificial Sequence
  Synthetic
ucccccuaagaucaugcagaaug

SEQ ID NO: 335691 - RNA, 24 nt, Artificial Sequence
  Synthetic
gucccccuaagaucaugcagaaug

SEQ ID NO: 335692 - RNA, 18 nt, Artificial Sequence
  Synthetic
gcuugaaguuucagaaug

SEQ ID NO: 335693 - RNA, 19 nt, Artificial Sequence
  Synthetic
ugcuugaaguuucagaaug

SEQ ID NO: 335694 - RNA, 20 nt, Artificial Sequence
  Synthetic
uugcuugaaguuucagaaug

SEQ ID NO: 335695 - RNA, 21 nt, Artificial Sequence
  Synthetic
guugcuugaaguuucagaaug

SEQ ID NO: 335696 - RNA, 22 nt, Artificial Sequence
  Synthetic
gguugcuugaaguuucagaaug

SEQ ID NO: 335697 - RNA, 23 nt, Artificial Sequence
  Synthetic
ugguugcuugaaguuucagaaug

SEQ ID NO: 335698 - RNA, 24 nt, Artificial Sequence
  Synthetic
uugguugcuugaaguuucagaaug

SEQ ID NO: 335699 - RNA, 18 nt, Artificial Sequence
  Synthetic
aggaauaugcagagaaug

SEQ ID NO: 335700 - RNA, 19 nt, Artificial Sequence
  Synthetic
uaggaauaugcagagaaug

SEQ ID NO: 335701 - RNA, 20 nt, Artificial Sequence
  Synthetic
uuaggaauaugcagagaaug

SEQ ID NO: 335702 - RNA, 21 nt, Artificial Sequence
  Synthetic
uuuaggaauaugcagagaaug

SEQ ID NO: 335703 - RNA, 22 nt, Artificial Sequence
  Synthetic
auuuaggaauaugcagagaaug

SEQ ID NO: 335704 - RNA, 23 nt, Artificial Sequence
  Synthetic
aauuuaggaauaugcagagaaug

SEQ ID NO: 335705 - RNA, 24 nt, Artificial Sequence
  Synthetic
aaauuuaggaauaugcagagaaug

SEQ ID NO: 335706 - RNA, 18 nt, Artificial Sequence
  Synthetic
cuaccuacuuagagaaug

SEQ ID NO: 335707 - RNA, 19 nt, Artificial Sequence
  Synthetic
ccuaccuacuuagagaaug

SEQ ID NO: 335708 - RNA, 20 nt, Artificial Sequence
  Synthetic
cccuaccuacuuagagaaug

SEQ ID NO: 335709 - RNA, 21 nt, Artificial Sequence
  Synthetic
gcccuaccuacuuagagaaug

SEQ ID NO: 335710 - RNA, 22 nt, Artificial Sequence
  Synthetic
agcccuaccuacuuagagaaug

SEQ ID NO: 335711 - RNA, 23 nt, Artificial Sequence
  Synthetic
cagcccuaccuacuuagagaaug

SEQ ID NO: 335712 - RNA, 24 nt, Artificial Sequence
  Synthetic
ccagcccuaccuacuuagagaaug

SEQ ID NO: 335713 - RNA, 18 nt, Artificial Sequence
  Synthetic
aggggaaaagcgagaaug

SEQ ID NO: 335714 - RNA, 19 nt, Artificial Sequence
  Synthetic
uaggggaaaagcgagaaug

SEQ ID NO: 335715 - RNA, 20 nt, Artificial Sequence
  Synthetic
guaggggaaaagcgagaaug

SEQ ID NO: 335716 - RNA, 21 nt, Artificial Sequence
  Synthetic
aguaggggaaaagcgagaaug

SEQ ID NO: 335717 - RNA, 22 nt, Artificial Sequence
  Synthetic
aaguaggggaaaagcgagaaug

SEQ ID NO: 335718 - RNA, 23 nt, Artificial Sequence
  Synthetic
gaaguaggggaaaagcgagaaug

SEQ ID NO: 335719 - RNA, 24 nt, Artificial Sequence
  Synthetic
ggaaguaggggaaaagcgagaaug

SEQ ID NO: 335720 - RNA, 18 nt, Artificial Sequence
  Synthetic
uuggacuaucugagaaug

SEQ ID NO: 335721 - RNA, 19 nt, Artificial Sequence
  Synthetic
cuuggacuaucugagaaug

SEQ ID NO: 335722 - RNA, 20 nt, Artificial Sequence
  Synthetic
ucuuggacuaucugagaaug

SEQ ID NO: 335723 - RNA, 21 nt, Artificial Sequence
  Synthetic
uucuuggacuaucugagaaug

SEQ ID NO: 335724 - RNA, 22 nt, Artificial Sequence
  Synthetic
uuucuuggacuaucugagaaug

SEQ ID NO: 335725 - RNA, 23 nt, Artificial Sequence
  Synthetic
auuucuuggacuaucugagaaug

SEQ ID NO: 335726 - RNA, 24 nt, Artificial Sequence
  Synthetic
uauuucuuggacuaucugagaaug

SEQ ID NO: 335727 - RNA, 18 nt, Artificial Sequence
  Synthetic
uugacucuagguagaaug

SEQ ID NO: 335728 - RNA, 19 nt, Artificial Sequence
  Synthetic
auugacucuagguagaaug

SEQ ID NO: 335729 - RNA, 20 nt, Artificial Sequence
  Synthetic
uauugacucuagguagaaug

SEQ ID NO: 335730 - RNA, 21 nt, Artificial Sequence
  Synthetic
uuauugacucuagguagaaug

SEQ ID NO: 335731 - RNA, 22 nt, Artificial Sequence
  Synthetic
auuauugacucuagguagaaug

SEQ ID NO: 335732 - RNA, 23 nt, Artificial Sequence
  Synthetic
uauuauugacucuagguagaaug

SEQ ID NO: 335733 - RNA, 24 nt, Artificial Sequence
  Synthetic
uuauuauugacucuagguagaaug

SEQ ID NO: 335734 - RNA, 18 nt, Artificial Sequence
  Synthetic
aacucugcuguuagaaug

SEQ ID NO: 335735 - RNA, 19 nt, Artificial Sequence
  Synthetic
caacucugcuguuagaaug

SEQ ID NO: 335736 - RNA, 20 nt, Artificial Sequence
  Synthetic
ucaacucugcuguuagaaug

SEQ ID NO: 335737 - RNA, 21 nt, Artificial Sequence
  Synthetic
uucaacucugcuguuagaaug

SEQ ID NO: 335738 - RNA, 22 nt, Artificial Sequence
  Synthetic
auucaacucugcuguuagaaug

SEQ ID NO: 335739 - RNA, 23 nt, Artificial Sequence
  Synthetic
uauucaacucugcuguuagaaug

SEQ ID NO: 335740 - RNA, 24 nt, Artificial Sequence
  Synthetic
cuauucaacucugcuguuagaaug

SEQ ID NO: 335741 - RNA, 18 nt, Artificial Sequence
  Synthetic
uaaaaucccauacgaaug

SEQ ID NO: 335742 - RNA, 19 nt, Artificial Sequence
  Synthetic
auaaaaucccauacgaaug

SEQ ID NO: 335743 - RNA, 20 nt, Artificial Sequence
  Synthetic
cauaaaaucccauacgaaug

SEQ ID NO: 335744 - RNA, 21 nt, Artificial Sequence
  Synthetic
gcauaaaaucccauacgaaug

SEQ ID NO: 335745 - RNA, 22 nt, Artificial Sequence
  Synthetic
agcauaaaaucccauacgaaug

SEQ ID NO: 335746 - RNA, 23 nt, Artificial Sequence
  Synthetic
gagcauaaaaucccauacgaaug

SEQ ID NO: 335747 - RNA, 24 nt, Artificial Sequence
  Synthetic
agagcauaaaaucccauacgaaug

SEQ ID NO: 335748 - RNA, 18 nt, Artificial Sequence
  Synthetic
uaaaauauuacaggaaug

SEQ ID NO: 335749 - RNA, 19 nt, Artificial Sequence
  Synthetic
uuaaaauauuacaggaaug

SEQ ID NO: 335750 - RNA, 20 nt, Artificial Sequence
  Synthetic
uuuaaaauauuacaggaaug

SEQ ID NO: 335751 - RNA, 21 nt, Artificial Sequence
  Synthetic
uuuuaaaauauuacaggaaug

SEQ ID NO: 335752 - RNA, 22 nt, Artificial Sequence
  Synthetic
uuuuuaaaauauuacaggaaug

SEQ ID NO: 335753 - RNA, 23 nt, Artificial Sequence
  Synthetic
cuuuuuaaaauauuacaggaaug

SEQ ID NO: 335754 - RNA, 24 nt, Artificial Sequence
  Synthetic
ucuuuuuaaaauauuacaggaaug

SEQ ID NO: 335755 - RNA, 18 nt, Artificial Sequence
  Synthetic
caauaucuuucaggaaug

SEQ ID NO: 335756 - RNA, 19 nt, Artificial Sequence
  Synthetic
gcaauaucuuucaggaaug

SEQ ID NO: 335757 - RNA, 20 nt, Artificial Sequence
  Synthetic
ggcaauaucuuucaggaaug

SEQ ID NO: 335758 - RNA, 21 nt, Artificial Sequence
  Synthetic
aggcaauaucuuucaggaaug

SEQ ID NO: 335759 - RNA, 22 nt, Artificial Sequence
  Synthetic
uaggcaauaucuuucaggaaug

SEQ ID NO: 335760 - RNA, 23 nt, Artificial Sequence
  Synthetic
cuaggcaauaucuuucaggaaug

SEQ ID NO: 335761 - RNA, 24 nt, Artificial Sequence
  Synthetic
ucuaggcaauaucuuucaggaaug

SEQ ID NO: 335762 - RNA, 18 nt, Artificial Sequence
  Synthetic
aaccaugaaggaggaaug

SEQ ID NO: 335763 - RNA, 19 nt, Artificial Sequence
  Synthetic
uaaccaugaaggaggaaug

SEQ ID NO: 335764 - RNA, 20 nt, Artificial Sequence
  Synthetic
auaaccaugaaggaggaaug

SEQ ID NO: 335765 - RNA, 21 nt, Artificial Sequence
  Synthetic
cauaaccaugaaggaggaaug

SEQ ID NO: 335766 - RNA, 22 nt, Artificial Sequence
  Synthetic
acauaaccaugaaggaggaaug

SEQ ID NO: 335767 - RNA, 23 nt, Artificial Sequence
  Synthetic
uacauaaccaugaaggaggaaug

SEQ ID NO: 335768 - RNA, 24 nt, Artificial Sequence
  Synthetic
uuacauaaccaugaaggaggaaug

SEQ ID NO: 335769 - RNA, 18 nt, Artificial Sequence
  Synthetic
ggcuccuccauaggaaug

SEQ ID NO: 335770 - RNA, 19 nt, Artificial Sequence
  Synthetic
uggcuccuccauaggaaug

SEQ ID NO: 335771 - RNA, 20 nt, Artificial Sequence
  Synthetic
cuggcuccuccauaggaaug

SEQ ID NO: 335772 - RNA, 21 nt, Artificial Sequence
  Synthetic
acuggcuccuccauaggaaug

SEQ ID NO: 335773 - RNA, 22 nt, Artificial Sequence
  Synthetic
gacuggcuccuccauaggaaug

SEQ ID NO: 335774 - RNA, 23 nt, Artificial Sequence
  Synthetic
ggacuggcuccuccauaggaaug

SEQ ID NO: 335775 - RNA, 24 nt, Artificial Sequence
  Synthetic
aggacuggcuccuccauaggaaug

SEQ ID NO: 335776 - RNA, 18 nt, Artificial Sequence
  Synthetic
ucuggggcauuaggaaug

SEQ ID NO: 335777 - RNA, 19 nt, Artificial Sequence
  Synthetic
aucuggggcauuaggaaug

SEQ ID NO: 335778 - RNA, 20 nt, Artificial Sequence
  Synthetic
aaucuggggcauuaggaaug

SEQ ID NO: 335779 - RNA, 21 nt, Artificial Sequence
  Synthetic
aaaucuggggcauuaggaaug

SEQ ID NO: 335780 - RNA, 22 nt, Artificial Sequence
  Synthetic
caaaucuggggcauuaggaaug

SEQ ID NO: 335781 - RNA, 23 nt, Artificial Sequence
  Synthetic
gcaaaucuggggcauuaggaaug

SEQ ID NO: 335782 - RNA, 24 nt, Artificial Sequence
  Synthetic
ggcaaaucuggggcauuaggaaug

SEQ ID NO: 335783 - RNA, 18 nt, Artificial Sequence
  Synthetic
cuuaucgaaaacggaaug

SEQ ID NO: 335784 - RNA, 19 nt, Artificial Sequence
  Synthetic
gcuuaucgaaaacggaaug

SEQ ID NO: 335785 - RNA, 20 nt, Artificial Sequence
  Synthetic
ggcuuaucgaaaacggaaug

SEQ ID NO: 335786 - RNA, 21 nt, Artificial Sequence
  Synthetic
uggcuuaucgaaaacggaaug

SEQ ID NO: 335787 - RNA, 22 nt, Artificial Sequence
  Synthetic
cuggcuuaucgaaaacggaaug

SEQ ID NO: 335788 - RNA, 23 nt, Artificial Sequence
  Synthetic
acuggcuuaucgaaaacggaaug

SEQ ID NO: 335789 - RNA, 24 nt, Artificial Sequence
  Synthetic
gacuggcuuaucgaaaacggaaug

SEQ ID NO: 335790 - RNA, 18 nt, Artificial Sequence
  Synthetic
gggaugaugaggggaaug

SEQ ID NO: 335791 - RNA, 19 nt, Artificial Sequence
  Synthetic
ugggaugaugaggggaaug

SEQ ID NO: 335792 - RNA, 20 nt, Artificial Sequence
  Synthetic
augggaugaugaggggaaug

SEQ ID NO: 335793 - RNA, 21 nt, Artificial Sequence
  Synthetic
gaugggaugaugaggggaaug

SEQ ID NO: 335794 - RNA, 22 nt, Artificial Sequence
  Synthetic
agaugggaugaugaggggaaug

SEQ ID NO: 335795 - RNA, 23 nt, Artificial Sequence
  Synthetic
uagaugggaugaugaggggaaug

SEQ ID NO: 335796 - RNA, 24 nt, Artificial Sequence
  Synthetic
guagaugggaugaugaggggaaug

SEQ ID NO: 335797 - RNA, 18 nt, Artificial Sequence
  Synthetic
gacaacccuuggggaaug

SEQ ID NO: 335798 - RNA, 19 nt, Artificial Sequence
  Synthetic
agacaacccuuggggaaug

SEQ ID NO: 335799 - RNA, 20 nt, Artificial Sequence
  Synthetic
cagacaacccuuggggaaug

SEQ ID NO: 335800 - RNA, 21 nt, Artificial Sequence
  Synthetic
ucagacaacccuuggggaaug

SEQ ID NO: 335801 - RNA, 22 nt, Artificial Sequence
  Synthetic
aucagacaacccuuggggaaug

SEQ ID NO: 335802 - RNA, 23 nt, Artificial Sequence
  Synthetic
uaucagacaacccuuggggaaug

SEQ ID NO: 335803 - RNA, 24 nt, Artificial Sequence
  Synthetic
uuaucagacaacccuuggggaaug

SEQ ID NO: 335804 - RNA, 18 nt, Artificial Sequence
  Synthetic
cucaaaguagugggaaug

SEQ ID NO: 335805 - RNA, 19 nt, Artificial Sequence
  Synthetic
ucucaaaguagugggaaug

SEQ ID NO: 335806 - RNA, 20 nt, Artificial Sequence
  Synthetic
aucucaaaguagugggaaug

SEQ ID NO: 335807 - RNA, 21 nt, Artificial Sequence
  Synthetic
gaucucaaaguagugggaaug

SEQ ID NO: 335808 - RNA, 22 nt, Artificial Sequence
  Synthetic
agaucucaaaguagugggaaug

SEQ ID NO: 335809 - RNA, 23 nt, Artificial Sequence
  Synthetic
aagaucucaaaguagugggaaug

SEQ ID NO: 335810 - RNA, 24 nt, Artificial Sequence
  Synthetic
uaagaucucaaaguagugggaaug

SEQ ID NO: 335811 - RNA, 18 nt, Artificial Sequence
  Synthetic
augugcuuagugggaaug

SEQ ID NO: 335812 - RNA, 19 nt, Artificial Sequence
  Synthetic
aaugugcuuagugggaaug

SEQ ID NO: 335813 - RNA, 20 nt, Artificial Sequence
  Synthetic
aaaugugcuuagugggaaug

SEQ ID NO: 335814 - RNA, 21 nt, Artificial Sequence
  Synthetic
gaaaugugcuuagugggaaug

SEQ ID NO: 335815 - RNA, 22 nt, Artificial Sequence
  Synthetic
ugaaaugugcuuagugggaaug

SEQ ID NO: 335816 - RNA, 23 nt, Artificial Sequence
  Synthetic
uugaaaugugcuuagugggaaug

SEQ ID NO: 335817 - RNA, 24 nt, Artificial Sequence
  Synthetic
cuugaaaugugcuuagugggaaug

SEQ ID NO: 335818 - RNA, 18 nt, Artificial Sequence
  Synthetic
auccauaugaguggaaug

SEQ ID NO: 335819 - RNA, 19 nt, Artificial Sequence
  Synthetic
aauccauaugaguggaaug

SEQ ID NO: 335820 - RNA, 20 nt, Artificial Sequence
  Synthetic
gaauccauaugaguggaaug

SEQ ID NO: 335821 - RNA, 21 nt, Artificial Sequence
  Synthetic
agaauccauaugaguggaaug

SEQ ID NO: 335822 - RNA, 22 nt, Artificial Sequence
  Synthetic
gagaauccauaugaguggaaug

SEQ ID NO: 335823 - RNA, 23 nt, Artificial Sequence
  Synthetic
ugagaauccauaugaguggaaug

SEQ ID NO: 335824 - RNA, 24 nt, Artificial Sequence
  Synthetic
gugagaauccauaugaguggaaug

SEQ ID NO: 335825 - RNA, 18 nt, Artificial Sequence
  Synthetic
ccuugagaggguggaaug

SEQ ID NO: 335826 - RNA, 19 nt, Artificial Sequence
  Synthetic
accuugagaggguggaaug

SEQ ID NO: 335827 - RNA, 20 nt, Artificial Sequence
  Synthetic
caccuugagaggguggaaug

SEQ ID NO: 335828 - RNA, 21 nt, Artificial Sequence
  Synthetic
gcaccuugagaggguggaaug

SEQ ID NO: 335829 - RNA, 22 nt, Artificial Sequence
  Synthetic
ugcaccuugagaggguggaaug

SEQ ID NO: 335830 - RNA, 23 nt, Artificial Sequence
  Synthetic
augcaccuugagaggguggaaug

SEQ ID NO: 335831 - RNA, 24 nt, Artificial Sequence
  Synthetic
uaugcaccuugagaggguggaaug

SEQ ID NO: 335832 - RNA, 18 nt, Artificial Sequence
  Synthetic
uacagcuuaauuggaaug

SEQ ID NO: 335833 - RNA, 19 nt, Artificial Sequence
  Synthetic
uuacagcuuaauuggaaug

SEQ ID NO: 335834 - RNA, 20 nt, Artificial Sequence
  Synthetic
uuuacagcuuaauuggaaug

SEQ ID NO: 335835 - RNA, 21 nt, Artificial Sequence
  Synthetic
uuuuacagcuuaauuggaaug

SEQ ID NO: 335836 - RNA, 22 nt, Artificial Sequence
  Synthetic
auuuuacagcuuaauuggaaug

SEQ ID NO: 335837 - RNA, 23 nt, Artificial Sequence
  Synthetic
aauuuuacagcuuaauuggaaug

SEQ ID NO: 335838 - RNA, 24 nt, Artificial Sequence
  Synthetic
gaauuuuacagcuuaauuggaaug

SEQ ID NO: 335839 - RNA, 18 nt, Artificial Sequence
  Synthetic
gcuuugguacuuggaaug

SEQ ID NO: 335840 - RNA, 19 nt, Artificial Sequence
  Synthetic
ugcuuugguacuuggaaug

SEQ ID NO: 335841 - RNA, 20 nt, Artificial Sequence
  Synthetic
augcuuugguacuuggaaug

SEQ ID NO: 335842 - RNA, 21 nt, Artificial Sequence
  Synthetic
gaugcuuugguacuuggaaug

SEQ ID NO: 335843 - RNA, 22 nt, Artificial Sequence
  Synthetic
agaugcuuugguacuuggaaug

SEQ ID NO: 335844 - RNA, 23 nt, Artificial Sequence
  Synthetic
gagaugcuuugguacuuggaaug

SEQ ID NO: 335845 - RNA, 24 nt, Artificial Sequence
  Synthetic
ggagaugcuuugguacuuggaaug

SEQ ID NO: 335846 - RNA, 18 nt, Artificial Sequence
  Synthetic
acaaaaauucuuggaaug

SEQ ID NO: 335847 - RNA, 19 nt, Artificial Sequence
  Synthetic
aacaaaaauucuuggaaug

SEQ ID NO: 335848 - RNA, 20 nt, Artificial Sequence
  Synthetic
aaacaaaaauucuuggaaug

SEQ ID NO: 335849 - RNA, 21 nt, Artificial Sequence
  Synthetic
aaaacaaaaauucuuggaaug

SEQ ID NO: 335850 - RNA, 22 nt, Artificial Sequence
  Synthetic
aaaaacaaaaauucuuggaaug

SEQ ID NO: 335851 - RNA, 23 nt, Artificial Sequence
  Synthetic
uaaaaacaaaaauucuuggaaug

SEQ ID NO: 335852 - RNA, 24 nt, Artificial Sequence
  Synthetic
guaaaaacaaaaauucuuggaaug

SEQ ID NO: 335853 - RNA, 18 nt, Artificial Sequence
  Synthetic
guauuuguagaaugaaug

SEQ ID NO: 335854 - RNA, 19 nt, Artificial Sequence
  Synthetic
aguauuuguagaaugaaug

SEQ ID NO: 335855 - RNA, 20 nt, Artificial Sequence
  Synthetic
caguauuuguagaaugaaug

SEQ ID NO: 335856 - RNA, 21 nt, Artificial Sequence
  Synthetic
ucaguauuuguagaaugaaug

SEQ ID NO: 335857 - RNA, 22 nt, Artificial Sequence
  Synthetic
cucaguauuuguagaaugaaug

SEQ ID NO: 335858 - RNA, 23 nt, Artificial Sequence
  Synthetic
ccucaguauuuguagaaugaaug

SEQ ID NO: 335859 - RNA, 24 nt, Artificial Sequence
  Synthetic
cccucaguauuuguagaaugaaug

SEQ ID NO: 335860 - RNA, 18 nt, Artificial Sequence
  Synthetic
auuaccugggaaugaaug

SEQ ID NO: 335861 - RNA, 19 nt, Artificial Sequence
  Synthetic
cauuaccugggaaugaaug

SEQ ID NO: 335862 - RNA, 20 nt, Artificial Sequence
  Synthetic
ccauuaccugggaaugaaug

SEQ ID NO: 335863 - RNA, 21 nt, Artificial Sequence
  Synthetic
cccauuaccugggaaugaaug

SEQ ID NO: 335864 - RNA, 22 nt, Artificial Sequence
  Synthetic
ccccauuaccugggaaugaaug

SEQ ID NO: 335865 - RNA, 23 nt, Artificial Sequence
  Synthetic
uccccauuaccugggaaugaaug

SEQ ID NO: 335866 - RNA, 24 nt, Artificial Sequence
  Synthetic
auccccauuaccugggaaugaaug

SEQ ID NO: 335867 - RNA, 18 nt, Artificial Sequence
  Synthetic
agcuaaauauaaugaaug

SEQ ID NO: 335868 - RNA, 19 nt, Artificial Sequence
  Synthetic
gagcuaaauauaaugaaug

SEQ ID NO: 335869 - RNA, 20 nt, Artificial Sequence
  Synthetic
agagcuaaauauaaugaaug

SEQ ID NO: 335870 - RNA, 21 nt, Artificial Sequence
  Synthetic
cagagcuaaauauaaugaaug

SEQ ID NO: 335871 - RNA, 22 nt, Artificial Sequence
  Synthetic
acagagcuaaauauaaugaaug

SEQ ID NO: 335872 - RNA, 23 nt, Artificial Sequence
  Synthetic
aacagagcuaaauauaaugaaug

SEQ ID NO: 335873 - RNA, 24 nt, Artificial Sequence
  Synthetic
uaacagagcuaaauauaaugaaug

SEQ ID NO: 335874 - RNA, 18 nt, Artificial Sequence
  Synthetic
ggagaaggguaaugaaug

SEQ ID NO: 335875 - RNA, 19 nt, Artificial Sequence
  Synthetic
aggagaaggguaaugaaug

SEQ ID NO: 335876 - RNA, 20 nt, Artificial Sequence
  Synthetic
gaggagaaggguaaugaaug

SEQ ID NO: 335877 - RNA, 21 nt, Artificial Sequence
  Synthetic
ugaggagaaggguaaugaaug

SEQ ID NO: 335878 - RNA, 22 nt, Artificial Sequence
  Synthetic
gugaggagaaggguaaugaaug

SEQ ID NO: 335879 - RNA, 23 nt, Artificial Sequence
  Synthetic
ugugaggagaaggguaaugaaug

SEQ ID NO: 335880 - RNA, 24 nt, Artificial Sequence
  Synthetic
gugugaggagaaggguaaugaaug

SEQ ID NO: 335881 - RNA, 18 nt, Artificial Sequence
  Synthetic
uugcaugaaauaugaaug

SEQ ID NO: 335882 - RNA, 19 nt, Artificial Sequence
  Synthetic
guugcaugaaauaugaaug

SEQ ID NO: 335883 - RNA, 20 nt, Artificial Sequence
  Synthetic
uguugcaugaaauaugaaug

SEQ ID NO: 335884 - RNA, 21 nt, Artificial Sequence
  Synthetic
uuguugcaugaaauaugaaug

SEQ ID NO: 335885 - RNA, 22 nt, Artificial Sequence
  Synthetic
auuguugcaugaaauaugaaug

SEQ ID NO: 335886 - RNA, 23 nt, Artificial Sequence
  Synthetic
aauuguugcaugaaauaugaaug

SEQ ID NO: 335887 - RNA, 24 nt, Artificial Sequence
  Synthetic
aaauuguugcaugaaauaugaaug

SEQ ID NO: 335888 - RNA, 18 nt, Artificial Sequence
  Synthetic
uuucucaucuuaugaaug

SEQ ID NO: 335889 - RNA, 19 nt, Artificial Sequence
  Synthetic
auuucucaucuuaugaaug

SEQ ID NO: 335890 - RNA, 20 nt, Artificial Sequence
  Synthetic
aauuucucaucuuaugaaug

SEQ ID NO: 335891 - RNA, 21 nt, Artificial Sequence
  Synthetic
aaauuucucaucuuaugaaug

SEQ ID NO: 335892 - RNA, 22 nt, Artificial Sequence
  Synthetic
caaauuucucaucuuaugaaug

SEQ ID NO: 335893 - RNA, 23 nt, Artificial Sequence
  Synthetic
gcaaauuucucaucuuaugaaug

SEQ ID NO: 335894 - RNA, 24 nt, Artificial Sequence
  Synthetic
ugcaaauuucucaucuuaugaaug

SEQ ID NO: 335895 - RNA, 18 nt, Artificial Sequence
  Synthetic
aagcaguaaaacugaaug

SEQ ID NO: 335896 - RNA, 19 nt, Artificial Sequence
  Synthetic
aaagcaguaaaacugaaug

SEQ ID NO: 335897 - RNA, 20 nt, Artificial Sequence
  Synthetic
gaaagcaguaaaacugaaug

SEQ ID NO: 335898 - RNA, 21 nt, Artificial Sequence
  Synthetic
ugaaagcaguaaaacugaaug

SEQ ID NO: 335899 - RNA, 22 nt, Artificial Sequence
  Synthetic
uugaaagcaguaaaacugaaug

SEQ ID NO: 335900 - RNA, 23 nt, Artificial Sequence
  Synthetic
auugaaagcaguaaaacugaaug

SEQ ID NO: 335901 - RNA, 24 nt, Artificial Sequence
  Synthetic
uauugaaagcaguaaaacugaaug

SEQ ID NO: 335902 - RNA, 18 nt, Artificial Sequence
  Synthetic
aggaagaaagacugaaug

SEQ ID NO: 335903 - RNA, 19 nt, Artificial Sequence
  Synthetic
caggaagaaagacugaaug

SEQ ID NO: 335904 - RNA, 20 nt, Artificial Sequence
  Synthetic
gcaggaagaaagacugaaug

SEQ ID NO: 335905 - RNA, 21 nt, Artificial Sequence
  Synthetic
ugcaggaagaaagacugaaug

SEQ ID NO: 335906 - RNA, 22 nt, Artificial Sequence
  Synthetic
cugcaggaagaaagacugaaug

SEQ ID NO: 335907 - RNA, 23 nt, Artificial Sequence
  Synthetic
ccugcaggaagaaagacugaaug

SEQ ID NO: 335908 - RNA, 24 nt, Artificial Sequence
  Synthetic
uccugcaggaagaaagacugaaug

SEQ ID NO: 335909 - RNA, 18 nt, Artificial Sequence
  Synthetic
uauuuuuauuccugaaug

SEQ ID NO: 335910 - RNA, 19 nt, Artificial Sequence
  Synthetic
uuauuuuuauuccugaaug

SEQ ID NO: 335911 - RNA, 20 nt, Artificial Sequence
  Synthetic
guuauuuuuauuccugaaug

SEQ ID NO: 335912 - RNA, 21 nt, Artificial Sequence
  Synthetic
cguuauuuuuauuccugaaug

SEQ ID NO: 335913 - RNA, 22 nt, Artificial Sequence
  Synthetic
acguuauuuuuauuccugaaug

SEQ ID NO: 335914 - RNA, 23 nt, Artificial Sequence
  Synthetic
cacguuauuuuuauuccugaaug

SEQ ID NO: 335915 - RNA, 24 nt, Artificial Sequence
  Synthetic
ccacguuauuuuuauuccugaaug

SEQ ID NO: 335916 - RNA, 18 nt, Artificial Sequence
  Synthetic
uacaaaugcuagugaaug

SEQ ID NO: 335917 - RNA, 19 nt, Artificial Sequence
  Synthetic
auacaaaugcuagugaaug

SEQ ID NO: 335918 - RNA, 20 nt, Artificial Sequence
  Synthetic
cauacaaaugcuagugaaug

SEQ ID NO: 335919 - RNA, 21 nt, Artificial Sequence
  Synthetic
ucauacaaaugcuagugaaug

SEQ ID NO: 335920 - RNA, 22 nt, Artificial Sequence
  Synthetic
uucauacaaaugcuagugaaug

SEQ ID NO: 335921 - RNA, 23 nt, Artificial Sequence
  Synthetic
cuucauacaaaugcuagugaaug

SEQ ID NO: 335922 - RNA, 24 nt, Artificial Sequence
  Synthetic
acuucauacaaaugcuagugaaug

SEQ ID NO: 335923 - RNA, 18 nt, Artificial Sequence
  Synthetic
aucagcuuguggugaaug

SEQ ID NO: 335924 - RNA, 19 nt, Artificial Sequence
  Synthetic
caucagcuuguggugaaug

SEQ ID NO: 335925 - RNA, 20 nt, Artificial Sequence
  Synthetic
ccaucagcuuguggugaaug

SEQ ID NO: 335926 - RNA, 21 nt, Artificial Sequence
  Synthetic
uccaucagcuuguggugaaug

SEQ ID NO: 335927 - RNA, 22 nt, Artificial Sequence
  Synthetic
uuccaucagcuuguggugaaug

SEQ ID NO: 335928 - RNA, 23 nt, Artificial Sequence
  Synthetic
cuuccaucagcuuguggugaaug

SEQ ID NO: 335929 - RNA, 24 nt, Artificial Sequence
  Synthetic
ucuuccaucagcuuguggugaaug

SEQ ID NO: 335930 - RNA, 18 nt, Artificial Sequence
  Synthetic
ucugcaauucugugaaug

SEQ ID NO: 335931 - RNA, 19 nt, Artificial Sequence
  Synthetic
cucugcaauucugugaaug

SEQ ID NO: 335932 - RNA, 20 nt, Artificial Sequence
  Synthetic
ucucugcaauucugugaaug

SEQ ID NO: 335933 - RNA, 21 nt, Artificial Sequence
  Synthetic
uucucugcaauucugugaaug

SEQ ID NO: 335934 - RNA, 22 nt, Artificial Sequence
  Synthetic
auucucugcaauucugugaaug

SEQ ID NO: 335935 - RNA, 23 nt, Artificial Sequence
  Synthetic
aauucucugcaauucugugaaug

SEQ ID NO: 335936 - RNA, 24 nt, Artificial Sequence
  Synthetic
uaauucucugcaauucugugaaug

SEQ ID NO: 335937 - RNA, 18 nt, Artificial Sequence
  Synthetic
cacauuucugugugaaug

SEQ ID NO: 335938 - RNA, 19 nt, Artificial Sequence
  Synthetic
acacauuucugugugaaug

SEQ ID NO: 335939 - RNA, 20 nt, Artificial Sequence
  Synthetic
uacacauuucugugugaaug

SEQ ID NO: 335940 - RNA, 21 nt, Artificial Sequence
  Synthetic
guacacauuucugugugaaug

SEQ ID NO: 335941 - RNA, 22 nt, Artificial Sequence
  Synthetic
uguacacauuucugugugaaug

SEQ ID NO: 335942 - RNA, 23 nt, Artificial Sequence
  Synthetic
guguacacauuucugugugaaug

SEQ ID NO: 335943 - RNA, 24 nt, Artificial Sequence
  Synthetic
uguguacacauuucugugugaaug

SEQ ID NO: 335944 - RNA, 18 nt, Artificial Sequence
  Synthetic
cccagagguaauugaaug

SEQ ID NO: 335945 - RNA, 19 nt, Artificial Sequence
  Synthetic
gcccagagguaauugaaug

SEQ ID NO: 335946 - RNA, 20 nt, Artificial Sequence
  Synthetic
agcccagagguaauugaaug

SEQ ID NO: 335947 - RNA, 21 nt, Artificial Sequence
  Synthetic
gagcccagagguaauugaaug

SEQ ID NO: 335948 - RNA, 22 nt, Artificial Sequence
  Synthetic
ggagcccagagguaauugaaug

SEQ ID NO: 335949 - RNA, 23 nt, Artificial Sequence
  Synthetic
aggagcccagagguaauugaaug

SEQ ID NO: 335950 - RNA, 24 nt, Artificial Sequence
  Synthetic
caggagcccagagguaauugaaug

SEQ ID NO: 335951 - RNA, 18 nt, Artificial Sequence
  Synthetic
augcaaaaaccuugaaug

SEQ ID NO: 335952 - RNA, 19 nt, Artificial Sequence
  Synthetic
caugcaaaaaccuugaaug

SEQ ID NO: 335953 - RNA, 20 nt, Artificial Sequence
  Synthetic
ccaugcaaaaaccuugaaug

SEQ ID NO: 335954 - RNA, 21 nt, Artificial Sequence
  Synthetic
accaugcaaaaaccuugaaug

SEQ ID NO: 335955 - RNA, 22 nt, Artificial Sequence
  Synthetic
aaccaugcaaaaaccuugaaug

SEQ ID NO: 335956 - RNA, 23 nt, Artificial Sequence
  Synthetic
aaaccaugcaaaaaccuugaaug

SEQ ID NO: 335957 - RNA, 24 nt, Artificial Sequence
  Synthetic
uaaaccaugcaaaaaccuugaaug

SEQ ID NO: 335958 - RNA, 18 nt, Artificial Sequence
  Synthetic
aauaauuuugcuugaaug

SEQ ID NO: 335959 - RNA, 19 nt, Artificial Sequence
  Synthetic
aaauaauuuugcuugaaug

SEQ ID NO: 335960 - RNA, 20 nt, Artificial Sequence
  Synthetic
aaaauaauuuugcuugaaug

SEQ ID NO: 335961 - RNA, 21 nt, Artificial Sequence
  Synthetic
gaaaauaauuuugcuugaaug

SEQ ID NO: 335962 - RNA, 22 nt, Artificial Sequence
  Synthetic
cgaaaauaauuuugcuugaaug

SEQ ID NO: 335963 - RNA, 23 nt, Artificial Sequence
  Synthetic
ucgaaaauaauuuugcuugaaug

SEQ ID NO: 335964 - RNA, 24 nt, Artificial Sequence
  Synthetic
uucgaaaauaauuuugcuugaaug

SEQ ID NO: 335965 - RNA, 18 nt, Artificial Sequence
  Synthetic
auuggaaaccuuugaaug

SEQ ID NO: 335966 - RNA, 19 nt, Artificial Sequence
  Synthetic
uauuggaaaccuuugaaug

SEQ ID NO: 335967 - RNA, 20 nt, Artificial Sequence
  Synthetic
uuauuggaaaccuuugaaug

SEQ ID NO: 335968 - RNA, 21 nt, Artificial Sequence
  Synthetic
guuauuggaaaccuuugaaug

SEQ ID NO: 335969 - RNA, 22 nt, Artificial Sequence
  Synthetic
uguuauuggaaaccuuugaaug

SEQ ID NO: 335970 - RNA, 23 nt, Artificial Sequence
  Synthetic
auguuauuggaaaccuuugaaug

SEQ ID NO: 335971 - RNA, 24 nt, Artificial Sequence
  Synthetic
aauguuauuggaaaccuuugaaug

SEQ ID NO: 335972 - RNA, 18 nt, Artificial Sequence
  Synthetic
auguuuuguguuugaaug

SEQ ID NO: 335973 - RNA, 19 nt, Artificial Sequence
  Synthetic
uauguuuuguguuugaaug

SEQ ID NO: 335974 - RNA, 20 nt, Artificial Sequence
  Synthetic
auauguuuuguguuugaaug

SEQ ID NO: 335975 - RNA, 21 nt, Artificial Sequence
  Synthetic
uauauguuuuguguuugaaug

SEQ ID NO: 335976 - RNA, 22 nt, Artificial Sequence
  Synthetic
auauauguuuuguguuugaaug

SEQ ID NO: 335977 - RNA, 23 nt, Artificial Sequence
  Synthetic
uauauauguuuuguguuugaaug

SEQ ID NO: 335978 - RNA, 24 nt, Artificial Sequence
  Synthetic
uuauauauguuuuguguuugaaug

SEQ ID NO: 335979 - RNA, 18 nt, Artificial Sequence
  Synthetic
ucaggauucuuuugaaug

SEQ ID NO: 335980 - RNA, 19 nt, Artificial Sequence
  Synthetic
cucaggauucuuuugaaug

SEQ ID NO: 335981 - RNA, 20 nt, Artificial Sequence
  Synthetic
acucaggauucuuuugaaug

SEQ ID NO: 335982 - RNA, 21 nt, Artificial Sequence
  Synthetic
gacucaggauucuuuugaaug

SEQ ID NO: 335983 - RNA, 22 nt, Artificial Sequence
  Synthetic
agacucaggauucuuuugaaug

SEQ ID NO: 335984 - RNA, 23 nt, Artificial Sequence
  Synthetic
cagacucaggauucuuuugaaug

SEQ ID NO: 335985 - RNA, 24 nt, Artificial Sequence
  Synthetic
ucagacucaggauucuuuugaaug

SEQ ID NO: 335986 - RNA, 18 nt, Artificial Sequence
  Synthetic
auuggaggguuuugaaug

SEQ ID NO: 335987 - RNA, 19 nt, Artificial Sequence
  Synthetic
uauuggaggguuuugaaug

SEQ ID NO: 335988 - RNA, 20 nt, Artificial Sequence
  Synthetic
uuauuggaggguuuugaaug

SEQ ID NO: 335989 - RNA, 21 nt, Artificial Sequence
  Synthetic
guuauuggaggguuuugaaug

SEQ ID NO: 335990 - RNA, 22 nt, Artificial Sequence
  Synthetic
aguuauuggaggguuuugaaug

SEQ ID NO: 335991 - RNA, 23 nt, Artificial Sequence
  Synthetic
gaguuauuggaggguuuugaaug

SEQ ID NO: 335992 - RNA, 24 nt, Artificial Sequence
  Synthetic
ggaguuauuggaggguuuugaaug

SEQ ID NO: 335993 - RNA, 18 nt, Artificial Sequence
  Synthetic
ugauuaagaaaaauaaug

SEQ ID NO: 335994 - RNA, 19 nt, Artificial Sequence
  Synthetic
augauuaagaaaaauaaug

SEQ ID NO: 335995 - RNA, 20 nt, Artificial Sequence
  Synthetic
aaugauuaagaaaaauaaug

SEQ ID NO: 335996 - RNA, 21 nt, Artificial Sequence
  Synthetic
gaaugauuaagaaaaauaaug

SEQ ID NO: 335997 - RNA, 22 nt, Artificial Sequence
  Synthetic
ugaaugauuaagaaaaauaaug

SEQ ID NO: 335998 - RNA, 23 nt, Artificial Sequence
  Synthetic
gugaaugauuaagaaaaauaaug

SEQ ID NO: 335999 - RNA, 24 nt, Artificial Sequence
  Synthetic
ugugaaugauuaagaaaaauaaug

SEQ ID NO: 336000 - RNA, 18 nt, Artificial Sequence
  Synthetic
aguguuuuaaaaauaaug

SEQ ID NO: 336001 - RNA, 19 nt, Artificial Sequence
  Synthetic
caguguuuuaaaaauaaug

SEQ ID NO: 336002 - RNA, 20 nt, Artificial Sequence
  Synthetic
gcaguguuuuaaaaauaaug

SEQ ID NO: 336003 - RNA, 21 nt, Artificial Sequence
  Synthetic
agcaguguuuuaaaaauaaug

SEQ ID NO: 336004 - RNA, 22 nt, Artificial Sequence
  Synthetic
gagcaguguuuuaaaaauaaug

SEQ ID NO: 336005 - RNA, 23 nt, Artificial Sequence
  Synthetic
agagcaguguuuuaaaaauaaug

SEQ ID NO: 336006 - RNA, 24 nt, Artificial Sequence
  Synthetic
aagagcaguguuuuaaaaauaaug

SEQ ID NO: 336007 - RNA, 18 nt, Artificial Sequence
  Synthetic
aaauggcacaaaauaaug

SEQ ID NO: 336008 - RNA, 19 nt, Artificial Sequence
  Synthetic
gaaauggcacaaaauaaug

SEQ ID NO: 336009 - RNA, 20 nt, Artificial Sequence
  Synthetic
agaaauggcacaaaauaaug

SEQ ID NO: 336010 - RNA, 21 nt, Artificial Sequence
  Synthetic
aagaaauggcacaaaauaaug

SEQ ID NO: 336011 - RNA, 22 nt, Artificial Sequence
  Synthetic
aaagaaauggcacaaaauaaug

SEQ ID NO: 336012 - RNA, 23 nt, Artificial Sequence
  Synthetic
gaaagaaauggcacaaaauaaug

SEQ ID NO: 336013 - RNA, 24 nt, Artificial Sequence
  Synthetic
ggaaagaaauggcacaaaauaaug

SEQ ID NO: 336014 - RNA, 18 nt, Artificial Sequence
  Synthetic
aaaugagaacaaauaaug

SEQ ID NO: 336015 - RNA, 19 nt, Artificial Sequence
  Synthetic
aaaaugagaacaaauaaug

SEQ ID NO: 336016 - RNA, 20 nt, Artificial Sequence
  Synthetic
uaaaaugagaacaaauaaug

SEQ ID NO: 336017 - RNA, 21 nt, Artificial Sequence
  Synthetic
guaaaaugagaacaaauaaug

SEQ ID NO: 336018 - RNA, 22 nt, Artificial Sequence
  Synthetic
aguaaaaugagaacaaauaaug

SEQ ID NO: 336019 - RNA, 23 nt, Artificial Sequence
  Synthetic
aaguaaaaugagaacaaauaaug

SEQ ID NO: 336020 - RNA, 24 nt, Artificial Sequence
  Synthetic
uaaguaaaaugagaacaaauaaug

SEQ ID NO: 336021 - RNA, 18 nt, Artificial Sequence
  Synthetic
ccuaauaacacaauaaug

SEQ ID NO: 336022 - RNA, 19 nt, Artificial Sequence
  Synthetic
uccuaauaacacaauaaug

SEQ ID NO: 336023 - RNA, 20 nt, Artificial Sequence
  Synthetic
uuccuaauaacacaauaaug

SEQ ID NO: 336024 - RNA, 21 nt, Artificial Sequence
  Synthetic
auuccuaauaacacaauaaug

SEQ ID NO: 336025 - RNA, 22 nt, Artificial Sequence
  Synthetic
aauuccuaauaacacaauaaug

SEQ ID NO: 336026 - RNA, 23 nt, Artificial Sequence
  Synthetic
aaauuccuaauaacacaauaaug

SEQ ID NO: 336027 - RNA, 24 nt, Artificial Sequence
  Synthetic
aaaauuccuaauaacacaauaaug

SEQ ID NO: 336028 - RNA, 18 nt, Artificial Sequence
  Synthetic
gggaaccucccaauaaug

SEQ ID NO: 336029 - RNA, 19 nt, Artificial Sequence
  Synthetic
ugggaaccucccaauaaug

SEQ ID NO: 336030 - RNA, 20 nt, Artificial Sequence
  Synthetic
augggaaccucccaauaaug

SEQ ID NO: 336031 - RNA, 21 nt, Artificial Sequence
  Synthetic
aaugggaaccucccaauaaug

SEQ ID NO: 336032 - RNA, 22 nt, Artificial Sequence
  Synthetic
uaaugggaaccucccaauaaug

SEQ ID NO: 336033 - RNA, 23 nt, Artificial Sequence
  Synthetic
uuaaugggaaccucccaauaaug

SEQ ID NO: 336034 - RNA, 24 nt, Artificial Sequence
  Synthetic
uuuaaugggaaccucccaauaaug

SEQ ID NO: 336035 - RNA, 18 nt, Artificial Sequence
  Synthetic
auaucuggagcaauaaug

SEQ ID NO: 336036 - RNA, 19 nt, Artificial Sequence
  Synthetic
uauaucuggagcaauaaug

SEQ ID NO: 336037 - RNA, 20 nt, Artificial Sequence
  Synthetic
uuauaucuggagcaauaaug

SEQ ID NO: 336038 - RNA, 21 nt, Artificial Sequence
  Synthetic
uuuauaucuggagcaauaaug

SEQ ID NO: 336039 - RNA, 22 nt, Artificial Sequence
  Synthetic
uuuuauaucuggagcaauaaug

SEQ ID NO: 336040 - RNA, 23 nt, Artificial Sequence
  Synthetic
uuuuuauaucuggagcaauaaug

SEQ ID NO: 336041 - RNA, 24 nt, Artificial Sequence
  Synthetic
uuuuuuauaucuggagcaauaaug

SEQ ID NO: 336042 - RNA, 18 nt, Artificial Sequence
  Synthetic
aaaguaaauagaauaaug

SEQ ID NO: 336043 - RNA, 19 nt, Artificial Sequence
  Synthetic
caaaguaaauagaauaaug

SEQ ID NO: 336044 - RNA, 20 nt, Artificial Sequence
  Synthetic
ucaaaguaaauagaauaaug

SEQ ID NO: 336045 - RNA, 21 nt, Artificial Sequence
  Synthetic
uucaaaguaaauagaauaaug

SEQ ID NO: 336046 - RNA, 22 nt, Artificial Sequence
  Synthetic
guucaaaguaaauagaauaaug

SEQ ID NO: 336047 - RNA, 23 nt, Artificial Sequence
  Synthetic
uguucaaaguaaauagaauaaug

SEQ ID NO: 336048 - RNA, 24 nt, Artificial Sequence
  Synthetic
auguucaaaguaaauagaauaaug

SEQ ID NO: 336049 - RNA, 18 nt, Artificial Sequence
  Synthetic
caggcagcaggaauaaug

SEQ ID NO: 336050 - RNA, 19 nt, Artificial Sequence
  Synthetic
acaggcagcaggaauaaug

SEQ ID NO: 336051 - RNA, 20 nt, Artificial Sequence
  Synthetic
cacaggcagcaggaauaaug

SEQ ID NO: 336052 - RNA, 21 nt, Artificial Sequence
  Synthetic
ccacaggcagcaggaauaaug

SEQ ID NO: 336053 - RNA, 22 nt, Artificial Sequence
  Synthetic
uccacaggcagcaggaauaaug

SEQ ID NO: 336054 - RNA, 23 nt, Artificial Sequence
  Synthetic
guccacaggcagcaggaauaaug

SEQ ID NO: 336055 - RNA, 24 nt, Artificial Sequence
  Synthetic
aguccacaggcagcaggaauaaug

SEQ ID NO: 336056 - RNA, 18 nt, Artificial Sequence
  Synthetic
gggacauuuugaauaaug

SEQ ID NO: 336057 - RNA, 19 nt, Artificial Sequence
  Synthetic
ggggacauuuugaauaaug

SEQ ID NO: 336058 - RNA, 20 nt, Artificial Sequence
  Synthetic
uggggacauuuugaauaaug

SEQ ID NO: 336059 - RNA, 21 nt, Artificial Sequence
  Synthetic
cuggggacauuuugaauaaug

SEQ ID NO: 336060 - RNA, 22 nt, Artificial Sequence
  Synthetic
acuggggacauuuugaauaaug

SEQ ID NO: 336061 - RNA, 23 nt, Artificial Sequence
  Synthetic
uacuggggacauuuugaauaaug

SEQ ID NO: 336062 - RNA, 24 nt, Artificial Sequence
  Synthetic
auacuggggacauuuugaauaaug

SEQ ID NO: 336063 - RNA, 18 nt, Artificial Sequence
  Synthetic
auugcugacaacauaaug

SEQ ID NO: 336064 - RNA, 19 nt, Artificial Sequence
  Synthetic
gauugcugacaacauaaug

SEQ ID NO: 336065 - RNA, 20 nt, Artificial Sequence
  Synthetic
ggauugcugacaacauaaug

SEQ ID NO: 336066 - RNA, 21 nt, Artificial Sequence
  Synthetic
uggauugcugacaacauaaug

SEQ ID NO: 336067 - RNA, 22 nt, Artificial Sequence
  Synthetic
auggauugcugacaacauaaug

SEQ ID NO: 336068 - RNA, 23 nt, Artificial Sequence
  Synthetic
aauggauugcugacaacauaaug

SEQ ID NO: 336069 - RNA, 24 nt, Artificial Sequence
  Synthetic
caauggauugcugacaacauaaug

SEQ ID NO: 336070 - RNA, 18 nt, Artificial Sequence
  Synthetic
caaaaauuacagauaaug

SEQ ID NO: 336071 - RNA, 19 nt, Artificial Sequence
  Synthetic
ucaaaaauuacagauaaug

SEQ ID NO: 336072 - RNA, 20 nt, Artificial Sequence
  Synthetic
gucaaaaauuacagauaaug

SEQ ID NO: 336073 - RNA, 21 nt, Artificial Sequence
  Synthetic
agucaaaaauuacagauaaug

SEQ ID NO: 336074 - RNA, 22 nt, Artificial Sequence
  Synthetic
aagucaaaaauuacagauaaug

SEQ ID NO: 336075 - RNA, 23 nt, Artificial Sequence
  Synthetic
aaagucaaaaauuacagauaaug

SEQ ID NO: 336076 - RNA, 24 nt, Artificial Sequence
  Synthetic
aaaagucaaaaauuacagauaaug

SEQ ID NO: 336077 - RNA, 18 nt, Artificial Sequence
  Synthetic
agagaaaaagugauaaug

SEQ ID NO: 336078 - RNA, 19 nt, Artificial Sequence
  Synthetic
uagagaaaaagugauaaug

SEQ ID NO: 336079 - RNA, 20 nt, Artificial Sequence
  Synthetic
cuagagaaaaagugauaaug

SEQ ID NO: 336080 - RNA, 21 nt, Artificial Sequence
  Synthetic
ucuagagaaaaagugauaaug

SEQ ID NO: 336081 - RNA, 22 nt, Artificial Sequence
  Synthetic
gucuagagaaaaagugauaaug

SEQ ID NO: 336082 - RNA, 23 nt, Artificial Sequence
  Synthetic
ugucuagagaaaaagugauaaug

SEQ ID NO: 336083 - RNA, 24 nt, Artificial Sequence
  Synthetic
gugucuagagaaaaagugauaaug

SEQ ID NO: 336084 - RNA, 18 nt, Artificial Sequence
  Synthetic
gcugaggcaccuauaaug

SEQ ID NO: 336085 - RNA, 19 nt, Artificial Sequence
  Synthetic
ggcugaggcaccuauaaug

SEQ ID NO: 336086 - RNA, 20 nt, Artificial Sequence
  Synthetic
uggcugaggcaccuauaaug

SEQ ID NO: 336087 - RNA, 21 nt, Artificial Sequence
  Synthetic
auggcugaggcaccuauaaug

SEQ ID NO: 336088 - RNA, 22 nt, Artificial Sequence
  Synthetic
cauggcugaggcaccuauaaug

SEQ ID NO: 336089 - RNA, 23 nt, Artificial Sequence
  Synthetic
ucauggcugaggcaccuauaaug

SEQ ID NO: 336090 - RNA, 24 nt, Artificial Sequence
  Synthetic
uucauggcugaggcaccuauaaug

SEQ ID NO: 336091 - RNA, 18 nt, Artificial Sequence
  Synthetic
uagugucuuuguauaaug

SEQ ID NO: 336092 - RNA, 19 nt, Artificial Sequence
  Synthetic
uuagugucuuuguauaaug

SEQ ID NO: 336093 - RNA, 20 nt, Artificial Sequence
  Synthetic
guuagugucuuuguauaaug

SEQ ID NO: 336094 - RNA, 21 nt, Artificial Sequence
  Synthetic
aguuagugucuuuguauaaug

SEQ ID NO: 336095 - RNA, 22 nt, Artificial Sequence
  Synthetic
uaguuagugucuuuguauaaug

SEQ ID NO: 336096 - RNA, 23 nt, Artificial Sequence
  Synthetic
auaguuagugucuuuguauaaug

SEQ ID NO: 336097 - RNA, 24 nt, Artificial Sequence
  Synthetic
aauaguuagugucuuuguauaaug

SEQ ID NO: 336098 - RNA, 18 nt, Artificial Sequence
  Synthetic
auaggucaaaaacuaaug

SEQ ID NO: 336099 - RNA, 19 nt, Artificial Sequence
  Synthetic
uauaggucaaaaacuaaug

SEQ ID NO: 336100 - RNA, 20 nt, Artificial Sequence
  Synthetic
auauaggucaaaaacuaaug

SEQ ID NO: 336101 - RNA, 21 nt, Artificial Sequence
  Synthetic
aauauaggucaaaaacuaaug

SEQ ID NO: 336102 - RNA, 22 nt, Artificial Sequence
  Synthetic
aaauauaggucaaaaacuaaug

SEQ ID NO: 336103 - RNA, 23 nt, Artificial Sequence
  Synthetic
uaaauauaggucaaaaacuaaug

SEQ ID NO: 336104 - RNA, 24 nt, Artificial Sequence
  Synthetic
uuaaauauaggucaaaaacuaaug

SEQ ID NO: 336105 - RNA, 18 nt, Artificial Sequence
  Synthetic
aaagacaauaaacuaaug

SEQ ID NO: 336106 - RNA, 19 nt, Artificial Sequence
  Synthetic
gaaagacaauaaacuaaug

SEQ ID NO: 336107 - RNA, 20 nt, Artificial Sequence
  Synthetic
agaaagacaauaaacuaaug

SEQ ID NO: 336108 - RNA, 21 nt, Artificial Sequence
  Synthetic
gagaaagacaauaaacuaaug

SEQ ID NO: 336109 - RNA, 22 nt, Artificial Sequence
  Synthetic
agagaaagacaauaaacuaaug

SEQ ID NO: 336110 - RNA, 23 nt, Artificial Sequence
  Synthetic
aagagaaagacaauaaacuaaug

SEQ ID NO: 336111 - RNA, 24 nt, Artificial Sequence
  Synthetic
aaagagaaagacaauaaacuaaug

SEQ ID NO: 336112 - RNA, 18 nt, Artificial Sequence
  Synthetic
uuagaguucuugcuaaug

SEQ ID NO: 336113 - RNA, 19 nt, Artificial Sequence
  Synthetic
uuuagaguucuugcuaaug

SEQ ID NO: 336114 - RNA, 20 nt, Artificial Sequence
  Synthetic
uuuuagaguucuugcuaaug

SEQ ID NO: 336115 - RNA, 21 nt, Artificial Sequence
  Synthetic
uuuuuagaguucuugcuaaug

SEQ ID NO: 336116 - RNA, 22 nt, Artificial Sequence
  Synthetic
cuuuuuagaguucuugcuaaug

SEQ ID NO: 336117 - RNA, 23 nt, Artificial Sequence
  Synthetic
ccuuuuuagaguucuugcuaaug

SEQ ID NO: 336118 - RNA, 24 nt, Artificial Sequence
  Synthetic
uccuuuuuagaguucuugcuaaug

SEQ ID NO: 336119 - RNA, 18 nt, Artificial Sequence
  Synthetic
uguugguagcaucuaaug

SEQ ID NO: 336120 - RNA, 19 nt, Artificial Sequence
  Synthetic
auguugguagcaucuaaug

SEQ ID NO: 336121 - RNA, 20 nt, Artificial Sequence
  Synthetic
aauguugguagcaucuaaug

SEQ ID NO: 336122 - RNA, 21 nt, Artificial Sequence
  Synthetic
caauguugguagcaucuaaug

SEQ ID NO: 336123 - RNA, 22 nt, Artificial Sequence
  Synthetic
acaauguugguagcaucuaaug

SEQ ID NO: 336124 - RNA, 23 nt, Artificial Sequence
  Synthetic
aacaauguugguagcaucuaaug

SEQ ID NO: 336125 - RNA, 24 nt, Artificial Sequence
  Synthetic
aaacaauguugguagcaucuaaug

SEQ ID NO: 336126 - RNA, 18 nt, Artificial Sequence
  Synthetic
guaccuacuucucuaaug

SEQ ID NO: 336127 - RNA, 19 nt, Artificial Sequence
  Synthetic
aguaccuacuucucuaaug

SEQ ID NO: 336128 - RNA, 20 nt, Artificial Sequence
  Synthetic
uaguaccuacuucucuaaug

SEQ ID NO: 336129 - RNA, 21 nt, Artificial Sequence
  Synthetic
guaguaccuacuucucuaaug

SEQ ID NO: 336130 - RNA, 22 nt, Artificial Sequence
  Synthetic
gguaguaccuacuucucuaaug

SEQ ID NO: 336131 - RNA, 23 nt, Artificial Sequence
  Synthetic
agguaguaccuacuucucuaaug

SEQ ID NO: 336132 - RNA, 24 nt, Artificial Sequence
  Synthetic
uagguaguaccuacuucucuaaug

SEQ ID NO: 336133 - RNA, 18 nt, Artificial Sequence
  Synthetic
ucaucuucuucucuaaug

SEQ ID NO: 336134 - RNA, 19 nt, Artificial Sequence
  Synthetic
cucaucuucuucucuaaug

SEQ ID NO: 336135 - RNA, 20 nt, Artificial Sequence
  Synthetic
acucaucuucuucucuaaug

SEQ ID NO: 336136 - RNA, 21 nt, Artificial Sequence
  Synthetic
uacucaucuucuucucuaaug

SEQ ID NO: 336137 - RNA, 22 nt, Artificial Sequence
  Synthetic
cuacucaucuucuucucuaaug

SEQ ID NO: 336138 - RNA, 23 nt, Artificial Sequence
  Synthetic
ucuacucaucuucuucucuaaug

SEQ ID NO: 336139 - RNA, 24 nt, Artificial Sequence
  Synthetic
uucuacucaucuucuucucuaaug

SEQ ID NO: 336140 - RNA, 18 nt, Artificial Sequence
  Synthetic
uuacaagagcuucuaaug

SEQ ID NO: 336141 - RNA, 19 nt, Artificial Sequence
  Synthetic
cuuacaagagcuucuaaug

SEQ ID NO: 336142 - RNA, 20 nt, Artificial Sequence
  Synthetic
ccuuacaagagcuucuaaug

SEQ ID NO: 336143 - RNA, 21 nt, Artificial Sequence
  Synthetic
gccuuacaagagcuucuaaug

SEQ ID NO: 336144 - RNA, 22 nt, Artificial Sequence
  Synthetic
ugccuuacaagagcuucuaaug

SEQ ID NO: 336145 - RNA, 23 nt, Artificial Sequence
  Synthetic
cugccuuacaagagcuucuaaug

SEQ ID NO: 336146 - RNA, 24 nt, Artificial Sequence
  Synthetic
ccugccuuacaagagcuucuaaug

SEQ ID NO: 336147 - RNA, 18 nt, Artificial Sequence
  Synthetic
ucacucgcauuucuaaug

SEQ ID NO: 336148 - RNA, 19 nt, Artificial Sequence
  Synthetic
aucacucgcauuucuaaug

SEQ ID NO: 336149 - RNA, 20 nt, Artificial Sequence
  Synthetic
uaucacucgcauuucuaaug

SEQ ID NO: 336150 - RNA, 21 nt, Artificial Sequence
  Synthetic
cuaucacucgcauuucuaaug

SEQ ID NO: 336151 - RNA, 22 nt, Artificial Sequence
  Synthetic
acuaucacucgcauuucuaaug

SEQ ID NO: 336152 - RNA, 23 nt, Artificial Sequence
  Synthetic
uacuaucacucgcauuucuaaug

SEQ ID NO: 336153 - RNA, 24 nt, Artificial Sequence
  Synthetic
uuacuaucacucgcauuucuaaug

SEQ ID NO: 336154 - RNA, 18 nt, Artificial Sequence
  Synthetic
cccuaucucucaguaaug

SEQ ID NO: 336155 - RNA, 19 nt, Artificial Sequence
  Synthetic
ccccuaucucucaguaaug

SEQ ID NO: 336156 - RNA, 20 nt, Artificial Sequence
  Synthetic
uccccuaucucucaguaaug

SEQ ID NO: 336157 - RNA, 21 nt, Artificial Sequence
  Synthetic
uuccccuaucucucaguaaug

SEQ ID NO: 336158 - RNA, 22 nt, Artificial Sequence
  Synthetic
uuuccccuaucucucaguaaug

SEQ ID NO: 336159 - RNA, 23 nt, Artificial Sequence
  Synthetic
cuuuccccuaucucucaguaaug

SEQ ID NO: 336160 - RNA, 24 nt, Artificial Sequence
  Synthetic
ucuuuccccuaucucucaguaaug

SEQ ID NO: 336161 - RNA, 18 nt, Artificial Sequence
  Synthetic
guuugucuuaagguaaug

SEQ ID NO: 336162 - RNA, 19 nt, Artificial Sequence
  Synthetic
uguuugucuuaagguaaug

SEQ ID NO: 336163 - RNA, 20 nt, Artificial Sequence
  Synthetic
auguuugucuuaagguaaug

SEQ ID NO: 336164 - RNA, 21 nt, Artificial Sequence
  Synthetic
cauguuugucuuaagguaaug

SEQ ID NO: 336165 - RNA, 22 nt, Artificial Sequence
  Synthetic
gcauguuugucuuaagguaaug

SEQ ID NO: 336166 - RNA, 23 nt, Artificial Sequence
  Synthetic
agcauguuugucuuaagguaaug

SEQ ID NO: 336167 - RNA, 24 nt, Artificial Sequence
  Synthetic
gagcauguuugucuuaagguaaug

SEQ ID NO: 336168 - RNA, 18 nt, Artificial Sequence
  Synthetic
uaaugcccagagguaaug

SEQ ID NO: 336169 - RNA, 19 nt, Artificial Sequence
  Synthetic
uuaaugcccagagguaaug

SEQ ID NO: 336170 - RNA, 20 nt, Artificial Sequence
  Synthetic
uuuaaugcccagagguaaug

SEQ ID NO: 336171 - RNA, 21 nt, Artificial Sequence
  Synthetic
uuuuaaugcccagagguaaug

SEQ ID NO: 336172 - RNA, 22 nt, Artificial Sequence
  Synthetic
auuuuaaugcccagagguaaug

SEQ ID NO: 336173 - RNA, 23 nt, Artificial Sequence
  Synthetic
aauuuuaaugcccagagguaaug

SEQ ID NO: 336174 - RNA, 24 nt, Artificial Sequence
  Synthetic
aaauuuuaaugcccagagguaaug

SEQ ID NO: 336175 - RNA, 18 nt, Artificial Sequence
  Synthetic
aaucagugguauguaaug

SEQ ID NO: 336176 - RNA, 19 nt, Artificial Sequence
  Synthetic
aaaucagugguauguaaug

SEQ ID NO: 336177 - RNA, 20 nt, Artificial Sequence
  Synthetic
aaaaucagugguauguaaug

SEQ ID NO: 336178 - RNA, 21 nt, Artificial Sequence
  Synthetic
uaaaaucagugguauguaaug

SEQ ID NO: 336179 - RNA, 22 nt, Artificial Sequence
  Synthetic
uuaaaaucagugguauguaaug

SEQ ID NO: 336180 - RNA, 23 nt, Artificial Sequence
  Synthetic
auuaaaaucagugguauguaaug

SEQ ID NO: 336181 - RNA, 24 nt, Artificial Sequence
  Synthetic
aauuaaaaucagugguauguaaug

SEQ ID NO: 336182 - RNA, 18 nt, Artificial Sequence
  Synthetic
gguaggcuguguguaaug

SEQ ID NO: 336183 - RNA, 19 nt, Artificial Sequence
  Synthetic
ggguaggcuguguguaaug

SEQ ID NO: 336184 - RNA, 20 nt, Artificial Sequence
  Synthetic
gggguaggcuguguguaaug

SEQ ID NO: 336185 - RNA, 21 nt, Artificial Sequence
  Synthetic
cgggguaggcuguguguaaug

SEQ ID NO: 336186 - RNA, 22 nt, Artificial Sequence
  Synthetic
gcgggguaggcuguguguaaug

SEQ ID NO: 336187 - RNA, 23 nt, Artificial Sequence
  Synthetic
agcgggguaggcuguguguaaug

SEQ ID NO: 336188 - RNA, 24 nt, Artificial Sequence
  Synthetic
uagcgggguaggcuguguguaaug

SEQ ID NO: 336189 - RNA, 18 nt, Artificial Sequence
  Synthetic
augugauuauuuguaaug

SEQ ID NO: 336190 - RNA, 19 nt, Artificial Sequence
  Synthetic
aaugugauuauuuguaaug

SEQ ID NO: 336191 - RNA, 20 nt, Artificial Sequence
  Synthetic
caaugugauuauuuguaaug

SEQ ID NO: 336192 - RNA, 21 nt, Artificial Sequence
  Synthetic
ucaaugugauuauuuguaaug

SEQ ID NO: 336193 - RNA, 22 nt, Artificial Sequence
  Synthetic
gucaaugugauuauuuguaaug

SEQ ID NO: 336194 - RNA, 23 nt, Artificial Sequence
  Synthetic
ugucaaugugauuauuuguaaug

SEQ ID NO: 336195 - RNA, 24 nt, Artificial Sequence
  Synthetic
augucaaugugauuauuuguaaug

SEQ ID NO: 336196 - RNA, 18 nt, Artificial Sequence
  Synthetic
auccuaagugaauuaaug

SEQ ID NO: 336197 - RNA, 19 nt, Artificial Sequence
  Synthetic
uauccuaagugaauuaaug

SEQ ID NO: 336198 - RNA, 20 nt, Artificial Sequence
  Synthetic
uuauccuaagugaauuaaug

SEQ ID NO: 336199 - RNA, 21 nt, Artificial Sequence
  Synthetic
auuauccuaagugaauuaaug

SEQ ID NO: 336200 - RNA, 22 nt, Artificial Sequence
  Synthetic
cauuauccuaagugaauuaaug

SEQ ID NO: 336201 - RNA, 23 nt, Artificial Sequence
  Synthetic
ucauuauccuaagugaauuaaug

SEQ ID NO: 336202 - RNA, 24 nt, Artificial Sequence
  Synthetic
gucauuauccuaagugaauuaaug

SEQ ID NO: 336203 - RNA, 18 nt, Artificial Sequence
  Synthetic
uagaugaaauaauuaaug

SEQ ID NO: 336204 - RNA, 19 nt, Artificial Sequence
  Synthetic
uuagaugaaauaauuaaug

SEQ ID NO: 336205 - RNA, 20 nt, Artificial Sequence
  Synthetic
auuagaugaaauaauuaaug

SEQ ID NO: 336206 - RNA, 21 nt, Artificial Sequence
  Synthetic
gauuagaugaaauaauuaaug

SEQ ID NO: 336207 - RNA, 22 nt, Artificial Sequence
  Synthetic
ggauuagaugaaauaauuaaug

SEQ ID NO: 336208 - RNA, 23 nt, Artificial Sequence
  Synthetic
aggauuagaugaaauaauuaaug

SEQ ID NO: 336209 - RNA, 24 nt, Artificial Sequence
  Synthetic
gaggauuagaugaaauaauuaaug

SEQ ID NO: 336210 - RNA, 18 nt, Artificial Sequence
  Synthetic
uuacugcaggcauuaaug

SEQ ID NO: 336211 - RNA, 19 nt, Artificial Sequence
  Synthetic
uuuacugcaggcauuaaug

SEQ ID NO: 336212 - RNA, 20 nt, Artificial Sequence
  Synthetic
auuuacugcaggcauuaaug

SEQ ID NO: 336213 - RNA, 21 nt, Artificial Sequence
  Synthetic
aauuuacugcaggcauuaaug

SEQ ID NO: 336214 - RNA, 22 nt, Artificial Sequence
  Synthetic
uaauuuacugcaggcauuaaug

SEQ ID NO: 336215 - RNA, 23 nt, Artificial Sequence
  Synthetic
guaauuuacugcaggcauuaaug

SEQ ID NO: 336216 - RNA, 24 nt, Artificial Sequence
  Synthetic
gguaauuuacugcaggcauuaaug

SEQ ID NO: 336217 - RNA, 18 nt, Artificial Sequence
  Synthetic
uuuaaacaaugauuaaug

SEQ ID NO: 336218 - RNA, 19 nt, Artificial Sequence
  Synthetic
cuuuaaacaaugauuaaug

SEQ ID NO: 336219 - RNA, 20 nt, Artificial Sequence
  Synthetic
ccuuuaaacaaugauuaaug

SEQ ID NO: 336220 - RNA, 21 nt, Artificial Sequence
  Synthetic
accuuuaaacaaugauuaaug

SEQ ID NO: 336221 - RNA, 22 nt, Artificial Sequence
  Synthetic
gaccuuuaaacaaugauuaaug

SEQ ID NO: 336222 - RNA, 23 nt, Artificial Sequence
  Synthetic
agaccuuuaaacaaugauuaaug

SEQ ID NO: 336223 - RNA, 24 nt, Artificial Sequence
  Synthetic
cagaccuuuaaacaaugauuaaug

SEQ ID NO: 336224 - RNA, 18 nt, Artificial Sequence
  Synthetic
accuauauaaacuuaaug

SEQ ID NO: 336225 - RNA, 19 nt, Artificial Sequence
  Synthetic
gaccuauauaaacuuaaug

SEQ ID NO: 336226 - RNA, 20 nt, Artificial Sequence
  Synthetic
agaccuauauaaacuuaaug

SEQ ID NO: 336227 - RNA, 21 nt, Artificial Sequence
  Synthetic
gagaccuauauaaacuuaaug

SEQ ID NO: 336228 - RNA, 22 nt, Artificial Sequence
  Synthetic
ugagaccuauauaaacuuaaug

SEQ ID NO: 336229 - RNA, 23 nt, Artificial Sequence
  Synthetic
augagaccuauauaaacuuaaug

SEQ ID NO: 336230 - RNA, 24 nt, Artificial Sequence
  Synthetic
aaugagaccuauauaaacuuaaug

SEQ ID NO: 336231 - RNA, 18 nt, Artificial Sequence
  Synthetic
caauucaacaaguuaaug

SEQ ID NO: 336232 - RNA, 19 nt, Artificial Sequence
  Synthetic
acaauucaacaaguuaaug

SEQ ID NO: 336233 - RNA, 20 nt, Artificial Sequence
  Synthetic
aacaauucaacaaguuaaug

SEQ ID NO: 336234 - RNA, 21 nt, Artificial Sequence
  Synthetic
aaacaauucaacaaguuaaug

SEQ ID NO: 336235 - RNA, 22 nt, Artificial Sequence
  Synthetic
uaaacaauucaacaaguuaaug

SEQ ID NO: 336236 - RNA, 23 nt, Artificial Sequence
  Synthetic
auaaacaauucaacaaguuaaug

SEQ ID NO: 336237 - RNA, 24 nt, Artificial Sequence
  Synthetic
cauaaacaauucaacaaguuaaug

SEQ ID NO: 336238 - RNA, 18 nt, Artificial Sequence
  Synthetic
ugagucuugaaguuaaug

SEQ ID NO: 336239 - RNA, 19 nt, Artificial Sequence
  Synthetic
augagucuugaaguuaaug

SEQ ID NO: 336240 - RNA, 20 nt, Artificial Sequence
  Synthetic
gaugagucuugaaguuaaug

SEQ ID NO: 336241 - RNA, 21 nt, Artificial Sequence
  Synthetic
agaugagucuugaaguuaaug

SEQ ID NO: 336242 - RNA, 22 nt, Artificial Sequence
  Synthetic
uagaugagucuugaaguuaaug

SEQ ID NO: 336243 - RNA, 23 nt, Artificial Sequence
  Synthetic
auagaugagucuugaaguuaaug

SEQ ID NO: 336244 - RNA, 24 nt, Artificial Sequence
  Synthetic
aauagaugagucuugaaguuaaug

SEQ ID NO: 336245 - RNA, 18 nt, Artificial Sequence
  Synthetic
uggacuuuuggguuaaug

SEQ ID NO: 336246 - RNA, 19 nt, Artificial Sequence
  Synthetic
uuggacuuuuggguuaaug

SEQ ID NO: 336247 - RNA, 20 nt, Artificial Sequence
  Synthetic
cuuggacuuuuggguuaaug

SEQ ID NO: 336248 - RNA, 21 nt, Artificial Sequence
  Synthetic
acuuggacuuuuggguuaaug

SEQ ID NO: 336249 - RNA, 22 nt, Artificial Sequence
  Synthetic
gacuuggacuuuuggguuaaug

SEQ ID NO: 336250 - RNA, 23 nt, Artificial Sequence
  Synthetic
ggacuuggacuuuuggguuaaug

SEQ ID NO: 336251 - RNA, 24 nt, Artificial Sequence
  Synthetic
uggacuuggacuuuuggguuaaug

SEQ ID NO: 336252 - RNA, 18 nt, Artificial Sequence
  Synthetic
uaauguccuguguuaaug

SEQ ID NO: 336253 - RNA, 19 nt, Artificial Sequence
  Synthetic
auaauguccuguguuaaug

SEQ ID NO: 336254 - RNA, 20 nt, Artificial Sequence
  Synthetic
uauaauguccuguguuaaug

SEQ ID NO: 336255 - RNA, 21 nt, Artificial Sequence
  Synthetic
uuauaauguccuguguuaaug

SEQ ID NO: 336256 - RNA, 22 nt, Artificial Sequence
  Synthetic
auuauaauguccuguguuaaug

SEQ ID NO: 336257 - RNA, 23 nt, Artificial Sequence
  Synthetic
aauuauaauguccuguguuaaug

SEQ ID NO: 336258 - RNA, 24 nt, Artificial Sequence
  Synthetic
aaauuauaauguccuguguuaaug

SEQ ID NO: 336259 - RNA, 18 nt, Artificial Sequence
  Synthetic
acuccuauccauuuaaug

SEQ ID NO: 336260 - RNA, 19 nt, Artificial Sequence
  Synthetic
cacuccuauccauuuaaug

SEQ ID NO: 336261 - RNA, 20 nt, Artificial Sequence
  Synthetic
acacuccuauccauuuaaug

SEQ ID NO: 336262 - RNA, 21 nt, Artificial Sequence
  Synthetic
uacacuccuauccauuuaaug

SEQ ID NO: 336263 - RNA, 22 nt, Artificial Sequence
  Synthetic
auacacuccuauccauuuaaug

SEQ ID NO: 336264 - RNA, 23 nt, Artificial Sequence
  Synthetic
cauacacuccuauccauuuaaug

SEQ ID NO: 336265 - RNA, 24 nt, Artificial Sequence
  Synthetic
acauacacuccuauccauuuaaug

SEQ ID NO: 336266 - RNA, 18 nt, Artificial Sequence
  Synthetic
aagucaacauauuuaaug

SEQ ID NO: 336267 - RNA, 19 nt, Artificial Sequence
  Synthetic
aaagucaacauauuuaaug

SEQ ID NO: 336268 - RNA, 20 nt, Artificial Sequence
  Synthetic
uaaagucaacauauuuaaug

SEQ ID NO: 336269 - RNA, 21 nt, Artificial Sequence
  Synthetic
uuaaagucaacauauuuaaug

SEQ ID NO: 336270 - RNA, 22 nt, Artificial Sequence
  Synthetic
guuaaagucaacauauuuaaug

SEQ ID NO: 336271 - RNA, 23 nt, Artificial Sequence
  Synthetic
aguuaaagucaacauauuuaaug

SEQ ID NO: 336272 - RNA, 24 nt, Artificial Sequence
  Synthetic
aaguuaaagucaacauauuuaaug

SEQ ID NO: 336273 - RNA, 18 nt, Artificial Sequence
  Synthetic
agagguacaaguuuaaug

SEQ ID NO: 336274 - RNA, 19 nt, Artificial Sequence
  Synthetic
aagagguacaaguuuaaug

SEQ ID NO: 336275 - RNA, 20 nt, Artificial Sequence
  Synthetic
aaagagguacaaguuuaaug

SEQ ID NO: 336276 - RNA, 21 nt, Artificial Sequence
  Synthetic
caaagagguacaaguuuaaug

SEQ ID NO: 336277 - RNA, 22 nt, Artificial Sequence
  Synthetic
ccaaagagguacaaguuuaaug

SEQ ID NO: 336278 - RNA, 23 nt, Artificial Sequence
  Synthetic
gccaaagagguacaaguuuaaug

SEQ ID NO: 336279 - RNA, 24 nt, Artificial Sequence
  Synthetic
agccaaagagguacaaguuuaaug

SEQ ID NO: 336280 - RNA, 18 nt, Artificial Sequence
  Synthetic
uaauuguacauuuuaaug

SEQ ID NO: 336281 - RNA, 19 nt, Artificial Sequence
  Synthetic
uuaauuguacauuuuaaug

SEQ ID NO: 336282 - RNA, 20 nt, Artificial Sequence
  Synthetic
uuuaauuguacauuuuaaug

SEQ ID NO: 336283 - RNA, 21 nt, Artificial Sequence
  Synthetic
guuuaauuguacauuuuaaug

SEQ ID NO: 336284 - RNA, 22 nt, Artificial Sequence
  Synthetic
gguuuaauuguacauuuuaaug

SEQ ID NO: 336285 - RNA, 23 nt, Artificial Sequence
  Synthetic
agguuuaauuguacauuuuaaug

SEQ ID NO: 336286 - RNA, 24 nt, Artificial Sequence
  Synthetic
cagguuuaauuguacauuuuaaug

SEQ ID NO: 336287 - RNA, 18 nt, Artificial Sequence
  Synthetic
guugcauagauuuuaaug

SEQ ID NO: 336288 - RNA, 19 nt, Artificial Sequence
  Synthetic
uguugcauagauuuuaaug

SEQ ID NO: 336289 - RNA, 20 nt, Artificial Sequence
  Synthetic
auguugcauagauuuuaaug

SEQ ID NO: 336290 - RNA, 21 nt, Artificial Sequence
  Synthetic
gauguugcauagauuuuaaug

SEQ ID NO: 336291 - RNA, 22 nt, Artificial Sequence
  Synthetic
ugauguugcauagauuuuaaug

SEQ ID NO: 336292 - RNA, 23 nt, Artificial Sequence
  Synthetic
augauguugcauagauuuuaaug

SEQ ID NO: 336293 - RNA, 24 nt, Artificial Sequence
  Synthetic
uaugauguugcauagauuuuaaug

SEQ ID NO: 336294 - RNA, 18 nt, Artificial Sequence
  Synthetic
uuuucaauaaaaaacaug

SEQ ID NO: 336295 - RNA, 19 nt, Artificial Sequence
  Synthetic
cuuuucaauaaaaaacaug

SEQ ID NO: 336296 - RNA, 20 nt, Artificial Sequence
  Synthetic
ucuuuucaauaaaaaacaug

SEQ ID NO: 336297 - RNA, 21 nt, Artificial Sequence
  Synthetic
aucuuuucaauaaaaaacaug

SEQ ID NO: 336298 - RNA, 22 nt, Artificial Sequence
  Synthetic
uaucuuuucaauaaaaaacaug

SEQ ID NO: 336299 - RNA, 23 nt, Artificial Sequence
  Synthetic
uuaucuuuucaauaaaaaacaug

SEQ ID NO: 336300 - RNA, 24 nt, Artificial Sequence
  Synthetic
uuuaucuuuucaauaaaaaacaug

SEQ ID NO: 336301 - RNA, 18 nt, Artificial Sequence
  Synthetic
acugcuuuccaaaacaug

SEQ ID NO: 336302 - RNA, 19 nt, Artificial Sequence
  Synthetic
cacugcuuuccaaaacaug

SEQ ID NO: 336303 - RNA, 20 nt, Artificial Sequence
  Synthetic
ucacugcuuuccaaaacaug

SEQ ID NO: 336304 - RNA, 21 nt, Artificial Sequence
  Synthetic
cucacugcuuuccaaaacaug

SEQ ID NO: 336305 - RNA, 22 nt, Artificial Sequence
  Synthetic
acucacugcuuuccaaaacaug

SEQ ID NO: 336306 - RNA, 23 nt, Artificial Sequence
  Synthetic
aacucacugcuuuccaaaacaug

SEQ ID NO: 336307 - RNA, 24 nt, Artificial Sequence
  Synthetic
gaacucacugcuuuccaaaacaug

SEQ ID NO: 336308 - RNA, 18 nt, Artificial Sequence
  Synthetic
ggguuaauggaaaacaug

SEQ ID NO: 336309 - RNA, 19 nt, Artificial Sequence
  Synthetic
aggguuaauggaaaacaug

SEQ ID NO: 336310 - RNA, 20 nt, Artificial Sequence
  Synthetic
uaggguuaauggaaaacaug

SEQ ID NO: 336311 - RNA, 21 nt, Artificial Sequence
  Synthetic
guaggguuaauggaaaacaug

SEQ ID NO: 336312 - RNA, 22 nt, Artificial Sequence
  Synthetic
uguaggguuaauggaaaacaug

SEQ ID NO: 336313 - RNA, 23 nt, Artificial Sequence
  Synthetic
uuguaggguuaauggaaaacaug

SEQ ID NO: 336314 - RNA, 24 nt, Artificial Sequence
  Synthetic
guuguaggguuaauggaaaacaug

SEQ ID NO: 336315 - RNA, 18 nt, Artificial Sequence
  Synthetic
cucacgcacacaaacaug

SEQ ID NO: 336316 - RNA, 19 nt, Artificial Sequence
  Synthetic
ucucacgcacacaaacaug

SEQ ID NO: 336317 - RNA, 20 nt, Artificial Sequence
  Synthetic
cucucacgcacacaaacaug

SEQ ID NO: 336318 - RNA, 21 nt, Artificial Sequence
  Synthetic
ucucucacgcacacaaacaug

SEQ ID NO: 336319 - RNA, 22 nt, Artificial Sequence
  Synthetic
cucucucacgcacacaaacaug

SEQ ID NO: 336320 - RNA, 23 nt, Artificial Sequence
  Synthetic
ucucucucacgcacacaaacaug

SEQ ID NO: 336321 - RNA, 24 nt, Artificial Sequence
  Synthetic
gucucucucacgcacacaaacaug

SEQ ID NO: 336322 - RNA, 18 nt, Artificial Sequence
  Synthetic
gugaggcuuagaaacaug

SEQ ID NO: 336323 - RNA, 19 nt, Artificial Sequence
  Synthetic
agugaggcuuagaaacaug

SEQ ID NO: 336324 - RNA, 20 nt, Artificial Sequence
  Synthetic
gagugaggcuuagaaacaug

SEQ ID NO: 336325 - RNA, 21 nt, Artificial Sequence
  Synthetic
ggagugaggcuuagaaacaug

SEQ ID NO: 336326 - RNA, 22 nt, Artificial Sequence
  Synthetic
uggagugaggcuuagaaacaug

SEQ ID NO: 336327 - RNA, 23 nt, Artificial Sequence
  Synthetic
auggagugaggcuuagaaacaug

SEQ ID NO: 336328 - RNA, 24 nt, Artificial Sequence
  Synthetic
aauggagugaggcuuagaaacaug

SEQ ID NO: 336329 - RNA, 18 nt, Artificial Sequence
  Synthetic
gguccuucccacaacaug

SEQ ID NO: 336330 - RNA, 19 nt, Artificial Sequence
  Synthetic
agguccuucccacaacaug

SEQ ID NO: 336331 - RNA, 20 nt, Artificial Sequence
  Synthetic
gagguccuucccacaacaug

SEQ ID NO: 336332 - RNA, 21 nt, Artificial Sequence
  Synthetic
cgagguccuucccacaacaug

SEQ ID NO: 336333 - RNA, 22 nt, Artificial Sequence
  Synthetic
acgagguccuucccacaacaug

SEQ ID NO: 336334 - RNA, 23 nt, Artificial Sequence
  Synthetic
cacgagguccuucccacaacaug

SEQ ID NO: 336335 - RNA, 24 nt, Artificial Sequence
  Synthetic
ccacgagguccuucccacaacaug

SEQ ID NO: 336336 - RNA, 21 nt, Artificial Sequence
  Synthetic
gagaccagccugaccaacaug

SEQ ID NO: 336337 - RNA, 24 nt, Artificial Sequence
  Synthetic
uucgagaccagccugaccaacaug

SEQ ID NO: 336338 - RNA, 22 nt, Artificial Sequence
  Synthetic
ugagaccagccugaccaacaug

SEQ ID NO: 336339 - RNA, 23 nt, Artificial Sequence
  Synthetic
uugagaccagccugaccaacaug

SEQ ID NO: 336340 - RNA, 24 nt, Artificial Sequence
  Synthetic
uuugagaccagccugaccaacaug

SEQ ID NO: 336341 - RNA, 18 nt, Artificial Sequence
  Synthetic
accggccugaccaacaug

SEQ ID NO: 336342 - RNA, 19 nt, Artificial Sequence
  Synthetic
gaccggccugaccaacaug

SEQ ID NO: 336343 - RNA, 20 nt, Artificial Sequence
  Synthetic
agaccggccugaccaacaug

SEQ ID NO: 336344 - RNA, 21 nt, Artificial Sequence
  Synthetic
gagaccggccugaccaacaug

SEQ ID NO: 336345 - RNA, 22 nt, Artificial Sequence
  Synthetic
ugagaccggccugaccaacaug

SEQ ID NO: 336346 - RNA, 23 nt, Artificial Sequence
  Synthetic
uugagaccggccugaccaacaug

SEQ ID NO: 336347 - RNA, 24 nt, Artificial Sequence
  Synthetic
uuugagaccggccugaccaacaug

SEQ ID NO: 336348 - RNA, 18 nt, Artificial Sequence
  Synthetic
uccagcccagccaacaug

SEQ ID NO: 336349 - RNA, 19 nt, Artificial Sequence
  Synthetic
guccagcccagccaacaug

SEQ ID NO: 336350 - RNA, 20 nt, Artificial Sequence
  Synthetic
aguccagcccagccaacaug

SEQ ID NO: 336351 - RNA, 21 nt, Artificial Sequence
  Synthetic
gaguccagcccagccaacaug

SEQ ID NO: 336352 - RNA, 22 nt, Artificial Sequence
  Synthetic
agaguccagcccagccaacaug

SEQ ID NO: 336353 - RNA, 23 nt, Artificial Sequence
  Synthetic
uagaguccagcccagccaacaug

SEQ ID NO: 336354 - RNA, 24 nt, Artificial Sequence
  Synthetic
uuagaguccagcccagccaacaug

SEQ ID NO: 336355 - RNA, 18 nt, Artificial Sequence
  Synthetic
accagcccggccaacaug

SEQ ID NO: 336356 - RNA, 19 nt, Artificial Sequence
  Synthetic
gaccagcccggccaacaug

SEQ ID NO: 336357 - RNA, 20 nt, Artificial Sequence
  Synthetic
agaccagcccggccaacaug

SEQ ID NO: 336358 - RNA, 21 nt, Artificial Sequence
  Synthetic
gagaccagcccggccaacaug

SEQ ID NO: 336359 - RNA, 22 nt, Artificial Sequence
  Synthetic
ugagaccagcccggccaacaug

SEQ ID NO: 336360 - RNA, 23 nt, Artificial Sequence
  Synthetic
uugagaccagcccggccaacaug

SEQ ID NO: 336361 - RNA, 24 nt, Artificial Sequence
  Synthetic
uuugagaccagcccggccaacaug

SEQ ID NO: 336362 - RNA, 18 nt, Artificial Sequence
  Synthetic
accagccuggccaacaug

SEQ ID NO: 336363 - RNA, 19 nt, Artificial Sequence
  Synthetic
caccagccuggccaacaug

SEQ ID NO: 336364 - RNA, 20 nt, Artificial Sequence
  Synthetic
acaccagccuggccaacaug

SEQ ID NO: 336365 - RNA, 21 nt, Artificial Sequence
  Synthetic
gacaccagccuggccaacaug

SEQ ID NO: 336366 - RNA, 22 nt, Artificial Sequence
  Synthetic
cgacaccagccuggccaacaug

SEQ ID NO: 336367 - RNA, 23 nt, Artificial Sequence
  Synthetic
ucgacaccagccuggccaacaug

SEQ ID NO: 336368 - RNA, 24 nt, Artificial Sequence
  Synthetic
uucgacaccagccuggccaacaug

SEQ ID NO: 336369 - RNA, 21 nt, Artificial Sequence
  Synthetic
aagaccagccuggccaacaug

SEQ ID NO: 336370 - RNA, 22 nt, Artificial Sequence
  Synthetic
caagaccagccuggccaacaug

SEQ ID NO: 336371 - RNA, 23 nt, Artificial Sequence
  Synthetic
ucaagaccagccuggccaacaug

SEQ ID NO: 336372 - RNA, 24 nt, Artificial Sequence
  Synthetic
uucaagaccagccuggccaacaug

SEQ ID NO: 336373 - RNA, 21 nt, Artificial Sequence
  Synthetic
gagaccagccuggccaacaug

SEQ ID NO: 336374 - RNA, 22 nt, Artificial Sequence
  Synthetic
cgagaccagccuggccaacaug

SEQ ID NO: 336375 - RNA, 23 nt, Artificial Sequence
  Synthetic
ccgagaccagccuggccaacaug

SEQ ID NO: 336376 - RNA, 24 nt, Artificial Sequence
  Synthetic
uccgagaccagccuggccaacaug

SEQ ID NO: 336377 - RNA, 23 nt, Artificial Sequence
  Synthetic
ucgagaccagccuggccaacaug

SEQ ID NO: 336378 - RNA, 24 nt, Artificial Sequence
  Synthetic
uucgagaccagccuggccaacaug

SEQ ID NO: 336379 - RNA, 22 nt, Artificial Sequence
  Synthetic
ggagaccagccuggccaacaug

SEQ ID NO: 336380 - RNA, 23 nt, Artificial Sequence
  Synthetic
uggagaccagccuggccaacaug

SEQ ID NO: 336381 - RNA, 24 nt, Artificial Sequence
  Synthetic
uuggagaccagccuggccaacaug

SEQ ID NO: 336382 - RNA, 18 nt, Artificial Sequence
  Synthetic
ggcagccuggccaacaug

SEQ ID NO: 336383 - RNA, 19 nt, Artificial Sequence
  Synthetic
aggcagccuggccaacaug

SEQ ID NO: 336384 - RNA, 20 nt, Artificial Sequence
  Synthetic
aaggcagccuggccaacaug

SEQ ID NO: 336385 - RNA, 21 nt, Artificial Sequence
  Synthetic
caaggcagccuggccaacaug

SEQ ID NO: 336386 - RNA, 22 nt, Artificial Sequence
  Synthetic
ucaaggcagccuggccaacaug

SEQ ID NO: 336387 - RNA, 23 nt, Artificial Sequence
  Synthetic
uucaaggcagccuggccaacaug

SEQ ID NO: 336388 - RNA, 24 nt, Artificial Sequence
  Synthetic
guucaaggcagccuggccaacaug

SEQ ID NO: 336389 - RNA, 18 nt, Artificial Sequence
  Synthetic
accugccuggccaacaug

SEQ ID NO: 336390 - RNA, 19 nt, Artificial Sequence
  Synthetic
gaccugccuggccaacaug

SEQ ID NO: 336391 - RNA, 20 nt, Artificial Sequence
  Synthetic
agaccugccuggccaacaug

SEQ ID NO: 336392 - RNA, 21 nt, Artificial Sequence
  Synthetic
gagaccugccuggccaacaug

SEQ ID NO: 336393 - RNA, 22 nt, Artificial Sequence
  Synthetic
cgagaccugccuggccaacaug

SEQ ID NO: 336394 - RNA, 23 nt, Artificial Sequence
  Synthetic
ucgagaccugccuggccaacaug

SEQ ID NO: 336395 - RNA, 24 nt, Artificial Sequence
  Synthetic
uucgagaccugccuggccaacaug

SEQ ID NO: 336396 - RNA, 18 nt, Artificial Sequence
  Synthetic
accauccuggccaacaug

SEQ ID NO: 336397 - RNA, 19 nt, Artificial Sequence
  Synthetic
caccauccuggccaacaug

SEQ ID NO: 336398 - RNA, 20 nt, Artificial Sequence
  Synthetic
acaccauccuggccaacaug

SEQ ID NO: 336399 - RNA, 21 nt, Artificial Sequence
  Synthetic
gacaccauccuggccaacaug

SEQ ID NO: 336400 - RNA, 22 nt, Artificial Sequence
  Synthetic
ugacaccauccuggccaacaug

SEQ ID NO: 336401 - RNA, 23 nt, Artificial Sequence
  Synthetic
uugacaccauccuggccaacaug

SEQ ID NO: 336402 - RNA, 24 nt, Artificial Sequence
  Synthetic
auugacaccauccuggccaacaug

SEQ ID NO: 336403 - RNA, 21 nt, Artificial Sequence
  Synthetic
gagaccauccuggccaacaug

SEQ ID NO: 336404 - RNA, 22 nt, Artificial Sequence
  Synthetic
cgagaccauccuggccaacaug

SEQ ID NO: 336405 - RNA, 23 nt, Artificial Sequence
  Synthetic
ucgagaccauccuggccaacaug

SEQ ID NO: 336406 - RNA, 24 nt, Artificial Sequence
  Synthetic
cucgagaccauccuggccaacaug

SEQ ID NO: 336407 - RNA, 24 nt, Artificial Sequence
  Synthetic
uucgagaccauccuggccaacaug

SEQ ID NO: 336408 - RNA, 22 nt, Artificial Sequence
  Synthetic
ugagaccauccuggccaacaug

SEQ ID NO: 336409 - RNA, 23 nt, Artificial Sequence
  Synthetic
uugagaccauccuggccaacaug

SEQ ID NO: 336410 - RNA, 24 nt, Artificial Sequence
  Synthetic
auugagaccauccuggccaacaug

SEQ ID NO: 336411 - RNA, 18 nt, Artificial Sequence
  Synthetic
aauaacaaauccaacaug

SEQ ID NO: 336412 - RNA, 19 nt, Artificial Sequence
  Synthetic
aaauaacaaauccaacaug

SEQ ID NO: 336413 - RNA, 20 nt, Artificial Sequence
  Synthetic
aaaauaacaaauccaacaug

SEQ ID NO: 336414 - RNA, 21 nt, Artificial Sequence
  Synthetic
aaaaauaacaaauccaacaug

SEQ ID NO: 336415 - RNA, 22 nt, Artificial Sequence
  Synthetic
gaaaaauaacaaauccaacaug

SEQ ID NO: 336416 - RNA, 23 nt, Artificial Sequence
  Synthetic
ggaaaaauaacaaauccaacaug

SEQ ID NO: 336417 - RNA, 24 nt, Artificial Sequence
  Synthetic
aggaaaaauaacaaauccaacaug

SEQ ID NO: 336418 - RNA, 18 nt, Artificial Sequence
  Synthetic
ugaguaguuuccaacaug

SEQ ID NO: 336419 - RNA, 19 nt, Artificial Sequence
  Synthetic
uugaguaguuuccaacaug

SEQ ID NO: 336420 - RNA, 20 nt, Artificial Sequence
  Synthetic
auugaguaguuuccaacaug

SEQ ID NO: 336421 - RNA, 21 nt, Artificial Sequence
  Synthetic
aauugaguaguuuccaacaug

SEQ ID NO: 336422 - RNA, 22 nt, Artificial Sequence
  Synthetic
aaauugaguaguuuccaacaug

SEQ ID NO: 336423 - RNA, 23 nt, Artificial Sequence
  Synthetic
gaaauugaguaguuuccaacaug

SEQ ID NO: 336424 - RNA, 24 nt, Artificial Sequence
  Synthetic
agaaauugaguaguuuccaacaug

SEQ ID NO: 336425 - RNA, 18 nt, Artificial Sequence
  Synthetic
ugucuuuacagcaacaug

SEQ ID NO: 336426 - RNA, 19 nt, Artificial Sequence
  Synthetic
augucuuuacagcaacaug

SEQ ID NO: 336427 - RNA, 20 nt, Artificial Sequence
  Synthetic
caugucuuuacagcaacaug

SEQ ID NO: 336428 - RNA, 21 nt, Artificial Sequence
  Synthetic
ucaugucuuuacagcaacaug

SEQ ID NO: 336429 - RNA, 22 nt, Artificial Sequence
  Synthetic
uucaugucuuuacagcaacaug

SEQ ID NO: 336430 - RNA, 23 nt, Artificial Sequence
  Synthetic
uuucaugucuuuacagcaacaug

SEQ ID NO: 336431 - RNA, 24 nt, Artificial Sequence
  Synthetic
cuuucaugucuuuacagcaacaug

SEQ ID NO: 336432 - RNA, 18 nt, Artificial Sequence
  Synthetic
accagacugagcaacaug

SEQ ID NO: 336433 - RNA, 19 nt, Artificial Sequence
  Synthetic
gaccagacugagcaacaug

SEQ ID NO: 336434 - RNA, 20 nt, Artificial Sequence
  Synthetic
agaccagacugagcaacaug

SEQ ID NO: 336435 - RNA, 21 nt, Artificial Sequence
  Synthetic
gagaccagacugagcaacaug

SEQ ID NO: 336436 - RNA, 22 nt, Artificial Sequence
  Synthetic
cgagaccagacugagcaacaug

SEQ ID NO: 336437 - RNA, 23 nt, Artificial Sequence
  Synthetic
ucgagaccagacugagcaacaug

SEQ ID NO: 336438 - RNA, 24 nt, Artificial Sequence
  Synthetic
uucgagaccagacugagcaacaug

SEQ ID NO: 336439 - RNA, 18 nt, Artificial Sequence
  Synthetic
uaccccuagggcaacaug

SEQ ID NO: 336440 - RNA, 19 nt, Artificial Sequence
  Synthetic
uuaccccuagggcaacaug

SEQ ID NO: 336441 - RNA, 20 nt, Artificial Sequence
  Synthetic
cuuaccccuagggcaacaug

SEQ ID NO: 336442 - RNA, 21 nt, Artificial Sequence
  Synthetic
acuuaccccuagggcaacaug

SEQ ID NO: 336443 - RNA, 22 nt, Artificial Sequence
  Synthetic
gacuuaccccuagggcaacaug

SEQ ID NO: 336444 - RNA, 23 nt, Artificial Sequence
  Synthetic
agacuuaccccuagggcaacaug

SEQ ID NO: 336445 - RNA, 24 nt, Artificial Sequence
  Synthetic
aagacuuaccccuagggcaacaug

SEQ ID NO: 336446 - RNA, 18 nt, Artificial Sequence
  Synthetic
aucagccugggcaacaug

SEQ ID NO: 336447 - RNA, 19 nt, Artificial Sequence
  Synthetic
gaucagccugggcaacaug

SEQ ID NO: 336448 - RNA, 20 nt, Artificial Sequence
  Synthetic
agaucagccugggcaacaug

SEQ ID NO: 336449 - RNA, 21 nt, Artificial Sequence
  Synthetic
gagaucagccugggcaacaug

SEQ ID NO: 336450 - RNA, 22 nt, Artificial Sequence
  Synthetic
ugagaucagccugggcaacaug

SEQ ID NO: 336451 - RNA, 23 nt, Artificial Sequence
  Synthetic
uugagaucagccugggcaacaug

SEQ ID NO: 336452 - RNA, 24 nt, Artificial Sequence
  Synthetic
uuugagaucagccugggcaacaug

SEQ ID NO: 336453 - RNA, 18 nt, Artificial Sequence
  Synthetic
auacgaauguagaacaug

SEQ ID NO: 336454 - RNA, 19 nt, Artificial Sequence
  Synthetic
cauacgaauguagaacaug

SEQ ID NO: 336455 - RNA, 20 nt, Artificial Sequence
  Synthetic
ccauacgaauguagaacaug

SEQ ID NO: 336456 - RNA, 21 nt, Artificial Sequence
  Synthetic
cccauacgaauguagaacaug

SEQ ID NO: 336457 - RNA, 22 nt, Artificial Sequence
  Synthetic
ucccauacgaauguagaacaug

SEQ ID NO: 336458 - RNA, 23 nt, Artificial Sequence
  Synthetic
aucccauacgaauguagaacaug

SEQ ID NO: 336459 - RNA, 24 nt, Artificial Sequence
  Synthetic
aaucccauacgaauguagaacaug

SEQ ID NO: 336460 - RNA, 18 nt, Artificial Sequence
  Synthetic
accauccuggugaacaug

SEQ ID NO: 336461 - RNA, 19 nt, Artificial Sequence
  Synthetic
gaccauccuggugaacaug

SEQ ID NO: 336462 - RNA, 20 nt, Artificial Sequence
  Synthetic
agaccauccuggugaacaug

SEQ ID NO: 336463 - RNA, 21 nt, Artificial Sequence
  Synthetic
gagaccauccuggugaacaug

SEQ ID NO: 336464 - RNA, 22 nt, Artificial Sequence
  Synthetic
cgagaccauccuggugaacaug

SEQ ID NO: 336465 - RNA, 23 nt, Artificial Sequence
  Synthetic
ucgagaccauccuggugaacaug

SEQ ID NO: 336466 - RNA, 24 nt, Artificial Sequence
  Synthetic
aucgagaccauccuggugaacaug

SEQ ID NO: 336467 - RNA, 18 nt, Artificial Sequence
  Synthetic
uaugaugaugugaacaug

SEQ ID NO: 336468 - RNA, 19 nt, Artificial Sequence
  Synthetic
uuaugaugaugugaacaug

SEQ ID NO: 336469 - RNA, 20 nt, Artificial Sequence
  Synthetic
auuaugaugaugugaacaug

SEQ ID NO: 336470 - RNA, 21 nt, Artificial Sequence
  Synthetic
uauuaugaugaugugaacaug

SEQ ID NO: 336471 - RNA, 22 nt, Artificial Sequence
  Synthetic
uuauuaugaugaugugaacaug

SEQ ID NO: 336472 - RNA, 23 nt, Artificial Sequence
  Synthetic
uuuauuaugaugaugugaacaug

SEQ ID NO: 336473 - RNA, 24 nt, Artificial Sequence
  Synthetic
uuuuauuaugaugaugugaacaug

SEQ ID NO: 336474 - RNA, 18 nt, Artificial Sequence
  Synthetic
auuauuccauugaacaug

SEQ ID NO: 336475 - RNA, 19 nt, Artificial Sequence
  Synthetic
cauuauuccauugaacaug

SEQ ID NO: 336476 - RNA, 20 nt, Artificial Sequence
  Synthetic
acauuauuccauugaacaug

SEQ ID NO: 336477 - RNA, 21 nt, Artificial Sequence
  Synthetic
uacauuauuccauugaacaug

SEQ ID NO: 336478 - RNA, 22 nt, Artificial Sequence
  Synthetic
auacauuauuccauugaacaug

SEQ ID NO: 336479 - RNA, 23 nt, Artificial Sequence
  Synthetic
uauacauuauuccauugaacaug

SEQ ID NO: 336480 - RNA, 24 nt, Artificial Sequence
  Synthetic
auauacauuauuccauugaacaug

SEQ ID NO: 336481 - RNA, 18 nt, Artificial Sequence
  Synthetic
accagccuggcuaacaug

SEQ ID NO: 336482 - RNA, 19 nt, Artificial Sequence
  Synthetic
aaccagccuggcuaacaug

SEQ ID NO: 336483 - RNA, 20 nt, Artificial Sequence
  Synthetic
aaaccagccuggcuaacaug

SEQ ID NO: 336484 - RNA, 21 nt, Artificial Sequence
  Synthetic
gaaaccagccuggcuaacaug

SEQ ID NO: 336485 - RNA, 22 nt, Artificial Sequence
  Synthetic
cgaaaccagccuggcuaacaug

SEQ ID NO: 336486 - RNA, 23 nt, Artificial Sequence
  Synthetic
ucgaaaccagccuggcuaacaug

SEQ ID NO: 336487 - RNA, 24 nt, Artificial Sequence
  Synthetic
uucgaaaccagccuggcuaacaug

SEQ ID NO: 336488 - RNA, 18 nt, Artificial Sequence
  Synthetic
accauccuggcuaacaug

SEQ ID NO: 336489 - RNA, 19 nt, Artificial Sequence
  Synthetic
gaccauccuggcuaacaug

SEQ ID NO: 336490 - RNA, 20 nt, Artificial Sequence
  Synthetic
agaccauccuggcuaacaug

SEQ ID NO: 336491 - RNA, 21 nt, Artificial Sequence
  Synthetic
gagaccauccuggcuaacaug

SEQ ID NO: 336492 - RNA, 22 nt, Artificial Sequence
  Synthetic
cgagaccauccuggcuaacaug

SEQ ID NO: 336493 - RNA, 23 nt, Artificial Sequence
  Synthetic
ucgagaccauccuggcuaacaug

SEQ ID NO: 336494 - RNA, 24 nt, Artificial Sequence
  Synthetic
aucgagaccauccuggcuaacaug

SEQ ID NO: 336495 - RNA, 18 nt, Artificial Sequence
  Synthetic
cggguaaagauuaacaug

SEQ ID NO: 336496 - RNA, 19 nt, Artificial Sequence
  Synthetic
acggguaaagauuaacaug

SEQ ID NO: 336497 - RNA, 20 nt, Artificial Sequence
  Synthetic
cacggguaaagauuaacaug

SEQ ID NO: 336498 - RNA, 21 nt, Artificial Sequence
  Synthetic
acacggguaaagauuaacaug

SEQ ID NO: 336499 - RNA, 22 nt, Artificial Sequence
  Synthetic
uacacggguaaagauuaacaug

SEQ ID NO: 336500 - RNA, 23 nt, Artificial Sequence
  Synthetic
uuacacggguaaagauuaacaug

SEQ ID NO: 336501 - RNA, 24 nt, Artificial Sequence
  Synthetic
uuuacacggguaaagauuaacaug

SEQ ID NO: 336502 - RNA, 18 nt, Artificial Sequence
  Synthetic
gcagccaaaaaacacaug

SEQ ID NO: 336503 - RNA, 19 nt, Artificial Sequence
  Synthetic
ugcagccaaaaaacacaug

SEQ ID NO: 336504 - RNA, 20 nt, Artificial Sequence
  Synthetic
augcagccaaaaaacacaug

SEQ ID NO: 336505 - RNA, 21 nt, Artificial Sequence
  Synthetic
uaugcagccaaaaaacacaug

SEQ ID NO: 336506 - RNA, 22 nt, Artificial Sequence
  Synthetic
uuaugcagccaaaaaacacaug

SEQ ID NO: 336507 - RNA, 23 nt, Artificial Sequence
  Synthetic
uuuaugcagccaaaaaacacaug

SEQ ID NO: 336508 - RNA, 24 nt, Artificial Sequence
  Synthetic
auuuaugcagccaaaaaacacaug

SEQ ID NO: 336509 - RNA, 18 nt, Artificial Sequence
  Synthetic
gagguaaagacacacaug

SEQ ID NO: 336510 - RNA, 19 nt, Artificial Sequence
  Synthetic
agagguaaagacacacaug

SEQ ID NO: 336511 - RNA, 20 nt, Artificial Sequence
  Synthetic
uagagguaaagacacacaug

SEQ ID NO: 336512 - RNA, 21 nt, Artificial Sequence
  Synthetic
guagagguaaagacacacaug

SEQ ID NO: 336513 - RNA, 22 nt, Artificial Sequence
  Synthetic
aguagagguaaagacacacaug

SEQ ID NO: 336514 - RNA, 23 nt, Artificial Sequence
  Synthetic
aaguagagguaaagacacacaug

SEQ ID NO: 336515 - RNA, 24 nt, Artificial Sequence
  Synthetic
uaaguagagguaaagacacacaug

SEQ ID NO: 336516 - RNA, 18 nt, Artificial Sequence
  Synthetic
guguuauauccacacaug

SEQ ID NO: 336517 - RNA, 19 nt, Artificial Sequence
  Synthetic
uguguuauauccacacaug

SEQ ID NO: 336518 - RNA, 20 nt, Artificial Sequence
  Synthetic
auguguuauauccacacaug

SEQ ID NO: 336519 - RNA, 21 nt, Artificial Sequence
  Synthetic
cauguguuauauccacacaug

SEQ ID NO: 336520 - RNA, 22 nt, Artificial Sequence
  Synthetic
acauguguuauauccacacaug

SEQ ID NO: 336521 - RNA, 23 nt, Artificial Sequence
  Synthetic
aacauguguuauauccacacaug

SEQ ID NO: 336522 - RNA, 24 nt, Artificial Sequence
  Synthetic
uaacauguguuauauccacacaug

SEQ ID NO: 336523 - RNA, 18 nt, Artificial Sequence
  Synthetic
aagcuuucaucacacaug

SEQ ID NO: 336524 - RNA, 19 nt, Artificial Sequence
  Synthetic
gaagcuuucaucacacaug

SEQ ID NO: 336525 - RNA, 20 nt, Artificial Sequence
  Synthetic
ugaagcuuucaucacacaug

SEQ ID NO: 336526 - RNA, 21 nt, Artificial Sequence
  Synthetic
cugaagcuuucaucacacaug

SEQ ID NO: 336527 - RNA, 22 nt, Artificial Sequence
  Synthetic
gcugaagcuuucaucacacaug

SEQ ID NO: 336528 - RNA, 23 nt, Artificial Sequence
  Synthetic
agcugaagcuuucaucacacaug

SEQ ID NO: 336529 - RNA, 24 nt, Artificial Sequence
  Synthetic
cagcugaagcuuucaucacacaug

SEQ ID NO: 336530 - RNA, 18 nt, Artificial Sequence
  Synthetic
uugugguugucacacaug

SEQ ID NO: 336531 - RNA, 19 nt, Artificial Sequence
  Synthetic
uuugugguugucacacaug

SEQ ID NO: 336532 - RNA, 20 nt, Artificial Sequence
  Synthetic
auuugugguugucacacaug

SEQ ID NO: 336533 - RNA, 21 nt, Artificial Sequence
  Synthetic
uauuugugguugucacacaug

SEQ ID NO: 336534 - RNA, 22 nt, Artificial Sequence
  Synthetic
auauuugugguugucacacaug

SEQ ID NO: 336535 - RNA, 23 nt, Artificial Sequence
  Synthetic
gauauuugugguugucacacaug

SEQ ID NO: 336536 - RNA, 24 nt, Artificial Sequence
  Synthetic
agauauuugugguugucacacaug

SEQ ID NO: 336537 - RNA, 18 nt, Artificial Sequence
  Synthetic
uggaguaaauuacacaug

SEQ ID NO: 336538 - RNA, 19 nt, Artificial Sequence
  Synthetic
guggaguaaauuacacaug

SEQ ID NO: 336539 - RNA, 20 nt, Artificial Sequence
  Synthetic
uguggaguaaauuacacaug

SEQ ID NO: 336540 - RNA, 21 nt, Artificial Sequence
  Synthetic
cuguggaguaaauuacacaug

SEQ ID NO: 336541 - RNA, 22 nt, Artificial Sequence
  Synthetic
acuguggaguaaauuacacaug

SEQ ID NO: 336542 - RNA, 23 nt, Artificial Sequence
  Synthetic
gacuguggaguaaauuacacaug

SEQ ID NO: 336543 - RNA, 24 nt, Artificial Sequence
  Synthetic
agacuguggaguaaauuacacaug

SEQ ID NO: 336544 - RNA, 18 nt, Artificial Sequence
  Synthetic
gaucaaaaagcccacaug

SEQ ID NO: 336545 - RNA, 19 nt, Artificial Sequence
  Synthetic
ggaucaaaaagcccacaug

SEQ ID NO: 336546 - RNA, 20 nt, Artificial Sequence
  Synthetic
aggaucaaaaagcccacaug

SEQ ID NO: 336547 - RNA, 21 nt, Artificial Sequence
  Synthetic
uaggaucaaaaagcccacaug

SEQ ID NO: 336548 - RNA, 22 nt, Artificial Sequence
  Synthetic
auaggaucaaaaagcccacaug

SEQ ID NO: 336549 - RNA, 23 nt, Artificial Sequence
  Synthetic
gauaggaucaaaaagcccacaug

SEQ ID NO: 336550 - RNA, 24 nt, Artificial Sequence
  Synthetic
agauaggaucaaaaagcccacaug

SEQ ID NO: 336551 - RNA, 18 nt, Artificial Sequence
  Synthetic
uugauaugucaucacaug

SEQ ID NO: 336552 - RNA, 19 nt, Artificial Sequence
  Synthetic
cuugauaugucaucacaug

SEQ ID NO: 336553 - RNA, 20 nt, Artificial Sequence
  Synthetic
acuugauaugucaucacaug

SEQ ID NO: 336554 - RNA, 21 nt, Artificial Sequence
  Synthetic
uacuugauaugucaucacaug

SEQ ID NO: 336555 - RNA, 22 nt, Artificial Sequence
  Synthetic
cuacuugauaugucaucacaug

SEQ ID NO: 336556 - RNA, 23 nt, Artificial Sequence
  Synthetic
ccuacuugauaugucaucacaug

SEQ ID NO: 336557 - RNA, 24 nt, Artificial Sequence
  Synthetic
gccuacuugauaugucaucacaug

SEQ ID NO: 336558 - RNA, 18 nt, Artificial Sequence
  Synthetic
ucacugcacccucacaug

SEQ ID NO: 336559 - RNA, 19 nt, Artificial Sequence
  Synthetic
cucacugcacccucacaug

SEQ ID NO: 336560 - RNA, 20 nt, Artificial Sequence
  Synthetic
ucucacugcacccucacaug

SEQ ID NO: 336561 - RNA, 21 nt, Artificial Sequence
  Synthetic
uucucacugcacccucacaug

SEQ ID NO: 336562 - RNA, 22 nt, Artificial Sequence
  Synthetic
cuucucacugcacccucacaug

SEQ ID NO: 336563 - RNA, 23 nt, Artificial Sequence
  Synthetic
ccuucucacugcacccucacaug

SEQ ID NO: 336564 - RNA, 24 nt, Artificial Sequence
  Synthetic
accuucucacugcacccucacaug

SEQ ID NO: 336565 - RNA, 18 nt, Artificial Sequence
  Synthetic
gagacuuucagucacaug

SEQ ID NO: 336566 - RNA, 19 nt, Artificial Sequence
  Synthetic
ugagacuuucagucacaug

SEQ ID NO: 336567 - RNA, 20 nt, Artificial Sequence
  Synthetic
cugagacuuucagucacaug

SEQ ID NO: 336568 - RNA, 21 nt, Artificial Sequence
  Synthetic
acugagacuuucagucacaug

SEQ ID NO: 336569 - RNA, 22 nt, Artificial Sequence
  Synthetic
cacugagacuuucagucacaug

SEQ ID NO: 336570 - RNA, 23 nt, Artificial Sequence
  Synthetic
gcacugagacuuucagucacaug

SEQ ID NO: 336571 - RNA, 24 nt, Artificial Sequence
  Synthetic
ugcacugagacuuucagucacaug

SEQ ID NO: 336572 - RNA, 18 nt, Artificial Sequence
  Synthetic
auaagcagaggucacaug

SEQ ID NO: 336573 - RNA, 19 nt, Artificial Sequence
  Synthetic
cauaagcagaggucacaug

SEQ ID NO: 336574 - RNA, 20 nt, Artificial Sequence
  Synthetic
ccauaagcagaggucacaug

SEQ ID NO: 336575 - RNA, 21 nt, Artificial Sequence
  Synthetic
cccauaagcagaggucacaug

SEQ ID NO: 336576 - RNA, 22 nt, Artificial Sequence
  Synthetic
ucccauaagcagaggucacaug

SEQ ID NO: 336577 - RNA, 23 nt, Artificial Sequence
  Synthetic
cucccauaagcagaggucacaug

SEQ ID NO: 336578 - RNA, 24 nt, Artificial Sequence
  Synthetic
gcucccauaagcagaggucacaug

SEQ ID NO: 336579 - RNA, 18 nt, Artificial Sequence
  Synthetic
cucacauuaauucacaug

SEQ ID NO: 336580 - RNA, 19 nt, Artificial Sequence
  Synthetic
ccucacauuaauucacaug

SEQ ID NO: 336581 - RNA, 20 nt, Artificial Sequence
  Synthetic
uccucacauuaauucacaug

SEQ ID NO: 336582 - RNA, 21 nt, Artificial Sequence
  Synthetic
uuccucacauuaauucacaug

SEQ ID NO: 336583 - RNA, 22 nt, Artificial Sequence
  Synthetic
cuuccucacauuaauucacaug

SEQ ID NO: 336584 - RNA, 23 nt, Artificial Sequence
  Synthetic
ccuuccucacauuaauucacaug

SEQ ID NO: 336585 - RNA, 24 nt, Artificial Sequence
  Synthetic
uccuuccucacauuaauucacaug

SEQ ID NO: 336586 - RNA, 18 nt, Artificial Sequence
  Synthetic
guguaggcauuucacaug

SEQ ID NO: 336587 - RNA, 19 nt, Artificial Sequence
  Synthetic
gguguaggcauuucacaug

SEQ ID NO: 336588 - RNA, 20 nt, Artificial Sequence
  Synthetic
agguguaggcauuucacaug

SEQ ID NO: 336589 - RNA, 21 nt, Artificial Sequence
  Synthetic
cagguguaggcauuucacaug

SEQ ID NO: 336590 - RNA, 22 nt, Artificial Sequence
  Synthetic
gcagguguaggcauuucacaug

SEQ ID NO: 336591 - RNA, 23 nt, Artificial Sequence
  Synthetic
agcagguguaggcauuucacaug

SEQ ID NO: 336592 - RNA, 24 nt, Artificial Sequence
  Synthetic
gagcagguguaggcauuucacaug

SEQ ID NO: 336593 - RNA, 18 nt, Artificial Sequence
  Synthetic
aaauguuaagcagacaug

SEQ ID NO: 336594 - RNA, 19 nt, Artificial Sequence
  Synthetic
caaauguuaagcagacaug

SEQ ID NO: 336595 - RNA, 20 nt, Artificial Sequence
  Synthetic
acaaauguuaagcagacaug

SEQ ID NO: 336596 - RNA, 21 nt, Artificial Sequence
  Synthetic
aacaaauguuaagcagacaug

SEQ ID NO: 336597 - RNA, 22 nt, Artificial Sequence
  Synthetic
caacaaauguuaagcagacaug

SEQ ID NO: 336598 - RNA, 23 nt, Artificial Sequence
  Synthetic
ucaacaaauguuaagcagacaug

SEQ ID NO: 336599 - RNA, 24 nt, Artificial Sequence
  Synthetic
aucaacaaauguuaagcagacaug

SEQ ID NO: 336600 - RNA, 18 nt, Artificial Sequence
  Synthetic
aaucauuauucagacaug

SEQ ID NO: 336601 - RNA, 19 nt, Artificial Sequence
  Synthetic
uaaucauuauucagacaug

SEQ ID NO: 336602 - RNA, 20 nt, Artificial Sequence
  Synthetic
uuaaucauuauucagacaug

SEQ ID NO: 336603 - RNA, 21 nt, Artificial Sequence
  Synthetic
auuaaucauuauucagacaug

SEQ ID NO: 336604 - RNA, 22 nt, Artificial Sequence
  Synthetic
uauuaaucauuauucagacaug

SEQ ID NO: 336605 - RNA, 23 nt, Artificial Sequence
  Synthetic
cuauuaaucauuauucagacaug

SEQ ID NO: 336606 - RNA, 24 nt, Artificial Sequence
  Synthetic
ucuauuaaucauuauucagacaug

SEQ ID NO: 336607 - RNA, 18 nt, Artificial Sequence
  Synthetic
uucuaguacuaugacaug

SEQ ID NO: 336608 - RNA, 19 nt, Artificial Sequence
  Synthetic
uuucuaguacuaugacaug

SEQ ID NO: 336609 - RNA, 20 nt, Artificial Sequence
  Synthetic
auuucuaguacuaugacaug

SEQ ID NO: 336610 - RNA, 21 nt, Artificial Sequence
  Synthetic
uauuucuaguacuaugacaug

SEQ ID NO: 336611 - RNA, 22 nt, Artificial Sequence
  Synthetic
auauuucuaguacuaugacaug

SEQ ID NO: 336612 - RNA, 23 nt, Artificial Sequence
  Synthetic
uauauuucuaguacuaugacaug

SEQ ID NO: 336613 - RNA, 24 nt, Artificial Sequence
  Synthetic
auauauuucuaguacuaugacaug

SEQ ID NO: 336614 - RNA, 18 nt, Artificial Sequence
  Synthetic
agaugaaaaaaauacaug

SEQ ID NO: 336615 - RNA, 19 nt, Artificial Sequence
  Synthetic
cagaugaaaaaaauacaug

SEQ ID NO: 336616 - RNA, 20 nt, Artificial Sequence
  Synthetic
ccagaugaaaaaaauacaug

SEQ ID NO: 336617 - RNA, 21 nt, Artificial Sequence
  Synthetic
uccagaugaaaaaaauacaug

SEQ ID NO: 336618 - RNA, 22 nt, Artificial Sequence
  Synthetic
auccagaugaaaaaaauacaug

SEQ ID NO: 336619 - RNA, 23 nt, Artificial Sequence
  Synthetic
cauccagaugaaaaaaauacaug

SEQ ID NO: 336620 - RNA, 24 nt, Artificial Sequence
  Synthetic
ucauccagaugaaaaaaauacaug

SEQ ID NO: 336621 - RNA, 18 nt, Artificial Sequence
  Synthetic
agugacuucaaauacaug

SEQ ID NO: 336622 - RNA, 19 nt, Artificial Sequence
  Synthetic
aagugacuucaaauacaug

SEQ ID NO: 336623 - RNA, 20 nt, Artificial Sequence
  Synthetic
aaagugacuucaaauacaug

SEQ ID NO: 336624 - RNA, 21 nt, Artificial Sequence
  Synthetic
caaagugacuucaaauacaug

SEQ ID NO: 336625 - RNA, 22 nt, Artificial Sequence
  Synthetic
gcaaagugacuucaaauacaug

SEQ ID NO: 336626 - RNA, 23 nt, Artificial Sequence
  Synthetic
agcaaagugacuucaaauacaug

SEQ ID NO: 336627 - RNA, 24 nt, Artificial Sequence
  Synthetic
uagcaaagugacuucaaauacaug

SEQ ID NO: 336628 - RNA, 18 nt, Artificial Sequence
  Synthetic
uucucuguaauauacaug

SEQ ID NO: 336629 - RNA, 19 nt, Artificial Sequence
  Synthetic
guucucuguaauauacaug

SEQ ID NO: 336630 - RNA, 20 nt, Artificial Sequence
  Synthetic
gguucucuguaauauacaug

SEQ ID NO: 336631 - RNA, 21 nt, Artificial Sequence
  Synthetic
agguucucuguaauauacaug

SEQ ID NO: 336632 - RNA, 22 nt, Artificial Sequence
  Synthetic
cagguucucuguaauauacaug

SEQ ID NO: 336633 - RNA, 23 nt, Artificial Sequence
  Synthetic
acagguucucuguaauauacaug

SEQ ID NO: 336634 - RNA, 24 nt, Artificial Sequence
  Synthetic
aacagguucucuguaauauacaug

SEQ ID NO: 336635 - RNA, 18 nt, Artificial Sequence
  Synthetic
uucaguacaguauacaug

SEQ ID NO: 336636 - RNA, 19 nt, Artificial Sequence
  Synthetic
uuucaguacaguauacaug

SEQ ID NO: 336637 - RNA, 20 nt, Artificial Sequence
  Synthetic
uuuucaguacaguauacaug

SEQ ID NO: 336638 - RNA, 21 nt, Artificial Sequence
  Synthetic
guuuucaguacaguauacaug

SEQ ID NO: 336639 - RNA, 22 nt, Artificial Sequence
  Synthetic
uguuuucaguacaguauacaug

SEQ ID NO: 336640 - RNA, 23 nt, Artificial Sequence
  Synthetic
auguuuucaguacaguauacaug

SEQ ID NO: 336641 - RNA, 24 nt, Artificial Sequence
  Synthetic
uauguuuucaguacaguauacaug

SEQ ID NO: 336642 - RNA, 18 nt, Artificial Sequence
  Synthetic
uuccaaauuuuauacaug

SEQ ID NO: 336643 - RNA, 19 nt, Artificial Sequence
  Synthetic
uuuccaaauuuuauacaug

SEQ ID NO: 336644 - RNA, 20 nt, Artificial Sequence
  Synthetic
auuuccaaauuuuauacaug

SEQ ID NO: 336645 - RNA, 21 nt, Artificial Sequence
  Synthetic
cauuuccaaauuuuauacaug

SEQ ID NO: 336646 - RNA, 22 nt, Artificial Sequence
  Synthetic
ucauuuccaaauuuuauacaug

SEQ ID NO: 336647 - RNA, 23 nt, Artificial Sequence
  Synthetic
cucauuuccaaauuuuauacaug

SEQ ID NO: 336648 - RNA, 24 nt, Artificial Sequence
  Synthetic
ccucauuuccaaauuuuauacaug

SEQ ID NO: 336649 - RNA, 18 nt, Artificial Sequence
  Synthetic
ugccauuugugcuacaug

SEQ ID NO: 336650 - RNA, 19 nt, Artificial Sequence
  Synthetic
cugccauuugugcuacaug

SEQ ID NO: 336651 - RNA, 20 nt, Artificial Sequence
  Synthetic
gcugccauuugugcuacaug

SEQ ID NO: 336652 - RNA, 21 nt, Artificial Sequence
  Synthetic
ggcugccauuugugcuacaug

SEQ ID NO: 336653 - RNA, 22 nt, Artificial Sequence
  Synthetic
uggcugccauuugugcuacaug

SEQ ID NO: 336654 - RNA, 23 nt, Artificial Sequence
  Synthetic
cuggcugccauuugugcuacaug

SEQ ID NO: 336655 - RNA, 24 nt, Artificial Sequence
  Synthetic
ucuggcugccauuugugcuacaug

SEQ ID NO: 336656 - RNA, 18 nt, Artificial Sequence
  Synthetic
augucaacgggguacaug

SEQ ID NO: 336657 - RNA, 19 nt, Artificial Sequence
  Synthetic
uaugucaacgggguacaug

SEQ ID NO: 336658 - RNA, 20 nt, Artificial Sequence
  Synthetic
auaugucaacgggguacaug

SEQ ID NO: 336659 - RNA, 21 nt, Artificial Sequence
  Synthetic
uauaugucaacgggguacaug

SEQ ID NO: 336660 - RNA, 22 nt, Artificial Sequence
  Synthetic
guauaugucaacgggguacaug

SEQ ID NO: 336661 - RNA, 23 nt, Artificial Sequence
  Synthetic
uguauaugucaacgggguacaug

SEQ ID NO: 336662 - RNA, 24 nt, Artificial Sequence
  Synthetic
guguauaugucaacgggguacaug

SEQ ID NO: 336663 - RNA, 18 nt, Artificial Sequence
  Synthetic
ucacacaauugguacaug

SEQ ID NO: 336664 - RNA, 19 nt, Artificial Sequence
  Synthetic
aucacacaauugguacaug

SEQ ID NO: 336665 - RNA, 20 nt, Artificial Sequence
  Synthetic
aaucacacaauugguacaug

SEQ ID NO: 336666 - RNA, 21 nt, Artificial Sequence
  Synthetic
aaaucacacaauugguacaug

SEQ ID NO: 336667 - RNA, 22 nt, Artificial Sequence
  Synthetic
aaaaucacacaauugguacaug

SEQ ID NO: 336668 - RNA, 23 nt, Artificial Sequence
  Synthetic
uaaaaucacacaauugguacaug

SEQ ID NO: 336669 - RNA, 24 nt, Artificial Sequence
  Synthetic
uuaaaaucacacaauugguacaug

SEQ ID NO: 336670 - RNA, 18 nt, Artificial Sequence
  Synthetic
caauuuuccuuguacaug

SEQ ID NO: 336671 - RNA, 19 nt, Artificial Sequence
  Synthetic
ccaauuuuccuuguacaug

SEQ ID NO: 336672 - RNA, 20 nt, Artificial Sequence
  Synthetic
accaauuuuccuuguacaug

SEQ ID NO: 336673 - RNA, 21 nt, Artificial Sequence
  Synthetic
uaccaauuuuccuuguacaug

SEQ ID NO: 336674 - RNA, 22 nt, Artificial Sequence
  Synthetic
uuaccaauuuuccuuguacaug

SEQ ID NO: 336675 - RNA, 23 nt, Artificial Sequence
  Synthetic
cuuaccaauuuuccuuguacaug

SEQ ID NO: 336676 - RNA, 24 nt, Artificial Sequence
  Synthetic
acuuaccaauuuuccuuguacaug

SEQ ID NO: 336677 - RNA, 18 nt, Artificial Sequence
  Synthetic
uccaauguugcuuacaug

SEQ ID NO: 336678 - RNA, 19 nt, Artificial Sequence
  Synthetic
cuccaauguugcuuacaug

SEQ ID NO: 336679 - RNA, 20 nt, Artificial Sequence
  Synthetic
ucuccaauguugcuuacaug

SEQ ID NO: 336680 - RNA, 21 nt, Artificial Sequence
  Synthetic
uucuccaauguugcuuacaug

SEQ ID NO: 336681 - RNA, 22 nt, Artificial Sequence
  Synthetic
auucuccaauguugcuuacaug

SEQ ID NO: 336682 - RNA, 23 nt, Artificial Sequence
  Synthetic
uauucuccaauguugcuuacaug

SEQ ID NO: 336683 - RNA, 24 nt, Artificial Sequence
  Synthetic
auauucuccaauguugcuuacaug

SEQ ID NO: 336684 - RNA, 18 nt, Artificial Sequence
  Synthetic
gauaaauuuauuuacaug

SEQ ID NO: 336685 - RNA, 19 nt, Artificial Sequence
  Synthetic
agauaaauuuauuuacaug

SEQ ID NO: 336686 - RNA, 20 nt, Artificial Sequence
  Synthetic
uagauaaauuuauuuacaug

SEQ ID NO: 336687 - RNA, 21 nt, Artificial Sequence
  Synthetic
uuagauaaauuuauuuacaug

SEQ ID NO: 336688 - RNA, 22 nt, Artificial Sequence
  Synthetic
cuuagauaaauuuauuuacaug

SEQ ID NO: 336689 - RNA, 23 nt, Artificial Sequence
  Synthetic
acuuagauaaauuuauuuacaug

SEQ ID NO: 336690 - RNA, 24 nt, Artificial Sequence
  Synthetic
aacuuagauaaauuuauuuacaug

SEQ ID NO: 336691 - RNA, 18 nt, Artificial Sequence
  Synthetic
gaaaauauuuuuuacaug

SEQ ID NO: 336692 - RNA, 19 nt, Artificial Sequence
  Synthetic
ugaaaauauuuuuuacaug

SEQ ID NO: 336693 - RNA, 20 nt, Artificial Sequence
  Synthetic
uugaaaauauuuuuuacaug

SEQ ID NO: 336694 - RNA, 21 nt, Artificial Sequence
  Synthetic
uuugaaaauauuuuuuacaug

SEQ ID NO: 336695 - RNA, 22 nt, Artificial Sequence
  Synthetic
cuuugaaaauauuuuuuacaug

SEQ ID NO: 336696 - RNA, 23 nt, Artificial Sequence
  Synthetic
ucuuugaaaauauuuuuuacaug

SEQ ID NO: 336697 - RNA, 24 nt, Artificial Sequence
  Synthetic
aucuuugaaaauauuuuuuacaug

SEQ ID NO: 336698 - RNA, 18 nt, Artificial Sequence
  Synthetic
auuuacagugaaaccaug

SEQ ID NO: 336699 - RNA, 19 nt, Artificial Sequence
  Synthetic
cauuuacagugaaaccaug

SEQ ID NO: 336700 - RNA, 20 nt, Artificial Sequence
  Synthetic
gcauuuacagugaaaccaug

SEQ ID NO: 336701 - RNA, 21 nt, Artificial Sequence
  Synthetic
agcauuuacagugaaaccaug

SEQ ID NO: 336702 - RNA, 22 nt, Artificial Sequence
  Synthetic
gagcauuuacagugaaaccaug

SEQ ID NO: 336703 - RNA, 23 nt, Artificial Sequence
  Synthetic
ugagcauuuacagugaaaccaug

SEQ ID NO: 336704 - RNA, 24 nt, Artificial Sequence
  Synthetic
cugagcauuuacagugaaaccaug

SEQ ID NO: 336705 - RNA, 18 nt, Artificial Sequence
  Synthetic
uggggacaauaaaccaug

SEQ ID NO: 336706 - RNA, 19 nt, Artificial Sequence
  Synthetic
auggggacaauaaaccaug

SEQ ID NO: 336707 - RNA, 20 nt, Artificial Sequence
  Synthetic
cauggggacaauaaaccaug

SEQ ID NO: 336708 - RNA, 21 nt, Artificial Sequence
  Synthetic
acauggggacaauaaaccaug

SEQ ID NO: 336709 - RNA, 22 nt, Artificial Sequence
  Synthetic
cacauggggacaauaaaccaug

SEQ ID NO: 336710 - RNA, 23 nt, Artificial Sequence
  Synthetic
ucacauggggacaauaaaccaug

SEQ ID NO: 336711 - RNA, 24 nt, Artificial Sequence
  Synthetic
cucacauggggacaauaaaccaug

SEQ ID NO: 336712 - RNA, 18 nt, Artificial Sequence
  Synthetic
ugggauuacauaaccaug

SEQ ID NO: 336713 - RNA, 19 nt, Artificial Sequence
  Synthetic
augggauuacauaaccaug

SEQ ID NO: 336714 - RNA, 20 nt, Artificial Sequence
  Synthetic
uaugggauuacauaaccaug

SEQ ID NO: 336715 - RNA, 21 nt, Artificial Sequence
  Synthetic
uuaugggauuacauaaccaug

SEQ ID NO: 336716 - RNA, 22 nt, Artificial Sequence
  Synthetic
cuuaugggauuacauaaccaug

SEQ ID NO: 336717 - RNA, 23 nt, Artificial Sequence
  Synthetic
ucuuaugggauuacauaaccaug

SEQ ID NO: 336718 - RNA, 24 nt, Artificial Sequence
  Synthetic
aucuuaugggauuacauaaccaug

SEQ ID NO: 336719 - RNA, 18 nt, Artificial Sequence
  Synthetic
auaacaaauauaaccaug

SEQ ID NO: 336720 - RNA, 19 nt, Artificial Sequence
  Synthetic
uauaacaaauauaaccaug

SEQ ID NO: 336721 - RNA, 20 nt, Artificial Sequence
  Synthetic
uuauaacaaauauaaccaug

SEQ ID NO: 336722 - RNA, 21 nt, Artificial Sequence
  Synthetic
uuuauaacaaauauaaccaug

SEQ ID NO: 336723 - RNA, 22 nt, Artificial Sequence
  Synthetic
cuuuauaacaaauauaaccaug

SEQ ID NO: 336724 - RNA, 23 nt, Artificial Sequence
  Synthetic
gcuuuauaacaaauauaaccaug

SEQ ID NO: 336725 - RNA, 24 nt, Artificial Sequence
  Synthetic
ugcuuuauaacaaauauaaccaug

SEQ ID NO: 336726 - RNA, 18 nt, Artificial Sequence
  Synthetic
gaaaagcugaacaccaug

SEQ ID NO: 336727 - RNA, 19 nt, Artificial Sequence
  Synthetic
ggaaaagcugaacaccaug

SEQ ID NO: 336728 - RNA, 20 nt, Artificial Sequence
  Synthetic
aggaaaagcugaacaccaug

SEQ ID NO: 336729 - RNA, 21 nt, Artificial Sequence
  Synthetic
aaggaaaagcugaacaccaug

SEQ ID NO: 336730 - RNA, 22 nt, Artificial Sequence
  Synthetic
aaaggaaaagcugaacaccaug

SEQ ID NO: 336731 - RNA, 23 nt, Artificial Sequence
  Synthetic
caaaggaaaagcugaacaccaug

SEQ ID NO: 336732 - RNA, 24 nt, Artificial Sequence
  Synthetic
ucaaaggaaaagcugaacaccaug

SEQ ID NO: 336733 - RNA, 18 nt, Artificial Sequence
  Synthetic
uauguaucauccaccaug

SEQ ID NO: 336734 - RNA, 19 nt, Artificial Sequence
  Synthetic
auauguaucauccaccaug

SEQ ID NO: 336735 - RNA, 20 nt, Artificial Sequence
  Synthetic
gauauguaucauccaccaug

SEQ ID NO: 336736 - RNA, 21 nt, Artificial Sequence
  Synthetic
agauauguaucauccaccaug

SEQ ID NO: 336737 - RNA, 22 nt, Artificial Sequence
  Synthetic
uagauauguaucauccaccaug

SEQ ID NO: 336738 - RNA, 23 nt, Artificial Sequence
  Synthetic
guagauauguaucauccaccaug

SEQ ID NO: 336739 - RNA, 24 nt, Artificial Sequence
  Synthetic
uguagauauguaucauccaccaug

SEQ ID NO: 336740 - RNA, 18 nt, Artificial Sequence
  Synthetic
uaugauguaagcaccaug

SEQ ID NO: 336741 - RNA, 19 nt, Artificial Sequence
  Synthetic
uuaugauguaagcaccaug

SEQ ID NO: 336742 - RNA, 20 nt, Artificial Sequence
  Synthetic
auuaugauguaagcaccaug

SEQ ID NO: 336743 - RNA, 21 nt, Artificial Sequence
  Synthetic
aauuaugauguaagcaccaug

SEQ ID NO: 336744 - RNA, 22 nt, Artificial Sequence
  Synthetic
caauuaugauguaagcaccaug

SEQ ID NO: 336745 - RNA, 23 nt, Artificial Sequence
  Synthetic
gcaauuaugauguaagcaccaug

SEQ ID NO: 336746 - RNA, 24 nt, Artificial Sequence
  Synthetic
ugcaauuaugauguaagcaccaug

SEQ ID NO: 336747 - RNA, 18 nt, Artificial Sequence
  Synthetic
uaucgcuuuugcaccaug

SEQ ID NO: 336748 - RNA, 19 nt, Artificial Sequence
  Synthetic
guaucgcuuuugcaccaug

SEQ ID NO: 336749 - RNA, 20 nt, Artificial Sequence
  Synthetic
uguaucgcuuuugcaccaug

SEQ ID NO: 336750 - RNA, 21 nt, Artificial Sequence
  Synthetic
guguaucgcuuuugcaccaug

SEQ ID NO: 336751 - RNA, 22 nt, Artificial Sequence
  Synthetic
uguguaucgcuuuugcaccaug

SEQ ID NO: 336752 - RNA, 23 nt, Artificial Sequence
  Synthetic
auguguaucgcuuuugcaccaug

SEQ ID NO: 336753 - RNA, 24 nt, Artificial Sequence
  Synthetic
aauguguaucgcuuuugcaccaug

SEQ ID NO: 336754 - RNA, 18 nt, Artificial Sequence
  Synthetic
uaaucaucccucaccaug

SEQ ID NO: 336755 - RNA, 19 nt, Artificial Sequence
  Synthetic
auaaucaucccucaccaug

SEQ ID NO: 336756 - RNA, 20 nt, Artificial Sequence
  Synthetic
aauaaucaucccucaccaug

SEQ ID NO: 336757 - RNA, 21 nt, Artificial Sequence
  Synthetic
gaauaaucaucccucaccaug

SEQ ID NO: 336758 - RNA, 22 nt, Artificial Sequence
  Synthetic
agaauaaucaucccucaccaug

SEQ ID NO: 336759 - RNA, 23 nt, Artificial Sequence
  Synthetic
gagaauaaucaucccucaccaug

SEQ ID NO: 336760 - RNA, 24 nt, Artificial Sequence
  Synthetic
cgagaauaaucaucccucaccaug

SEQ ID NO: 336761 - RNA, 18 nt, Artificial Sequence
  Synthetic
guaaguguucugaccaug

SEQ ID NO: 336762 - RNA, 19 nt, Artificial Sequence
  Synthetic
uguaaguguucugaccaug

SEQ ID NO: 336763 - RNA, 20 nt, Artificial Sequence
  Synthetic
auguaaguguucugaccaug

SEQ ID NO: 336764 - RNA, 21 nt, Artificial Sequence
  Synthetic
aauguaaguguucugaccaug

SEQ ID NO: 336765 - RNA, 22 nt, Artificial Sequence
  Synthetic
uaauguaaguguucugaccaug

SEQ ID NO: 336766 - RNA, 23 nt, Artificial Sequence
  Synthetic
cuaauguaaguguucugaccaug

SEQ ID NO: 336767 - RNA, 24 nt, Artificial Sequence
  Synthetic
gcuaauguaaguguucugaccaug

SEQ ID NO: 336768 - RNA, 18 nt, Artificial Sequence
  Synthetic
ugaaguaauuugaccaug

SEQ ID NO: 336769 - RNA, 19 nt, Artificial Sequence
  Synthetic
cugaaguaauuugaccaug

SEQ ID NO: 336770 - RNA, 20 nt, Artificial Sequence
  Synthetic
ucugaaguaauuugaccaug

SEQ ID NO: 336771 - RNA, 21 nt, Artificial Sequence
  Synthetic
aucugaaguaauuugaccaug

SEQ ID NO: 336772 - RNA, 22 nt, Artificial Sequence
  Synthetic
caucugaaguaauuugaccaug

SEQ ID NO: 336773 - RNA, 23 nt, Artificial Sequence
  Synthetic
gcaucugaaguaauuugaccaug

SEQ ID NO: 336774 - RNA, 24 nt, Artificial Sequence
  Synthetic
ggcaucugaaguaauuugaccaug

SEQ ID NO: 336775 - RNA, 18 nt, Artificial Sequence
  Synthetic
guaauaucaaauaccaug

SEQ ID NO: 336776 - RNA, 19 nt, Artificial Sequence
  Synthetic
gguaauaucaaauaccaug

SEQ ID NO: 336777 - RNA, 20 nt, Artificial Sequence
  Synthetic
ggguaauaucaaauaccaug

SEQ ID NO: 336778 - RNA, 21 nt, Artificial Sequence
  Synthetic
aggguaauaucaaauaccaug

SEQ ID NO: 336779 - RNA, 22 nt, Artificial Sequence
  Synthetic
gaggguaauaucaaauaccaug

SEQ ID NO: 336780 - RNA, 23 nt, Artificial Sequence
  Synthetic
ugaggguaauaucaaauaccaug

SEQ ID NO: 336781 - RNA, 24 nt, Artificial Sequence
  Synthetic
uugaggguaauaucaaauaccaug

SEQ ID NO: 336782 - RNA, 18 nt, Artificial Sequence
  Synthetic
ggagacucaaauaccaug

SEQ ID NO: 336783 - RNA, 19 nt, Artificial Sequence
  Synthetic
uggagacucaaauaccaug

SEQ ID NO: 336784 - RNA, 20 nt, Artificial Sequence
  Synthetic
auggagacucaaauaccaug

SEQ ID NO: 336785 - RNA, 21 nt, Artificial Sequence
  Synthetic
uauggagacucaaauaccaug

SEQ ID NO: 336786 - RNA, 22 nt, Artificial Sequence
  Synthetic
guauggagacucaaauaccaug

SEQ ID NO: 336787 - RNA, 23 nt, Artificial Sequence
  Synthetic
uguauggagacucaaauaccaug

SEQ ID NO: 336788 - RNA, 24 nt, Artificial Sequence
  Synthetic
uuguauggagacucaaauaccaug

SEQ ID NO: 336789 - RNA, 18 nt, Artificial Sequence
  Synthetic
aguguaaugaguaccaug

SEQ ID NO: 336790 - RNA, 19 nt, Artificial Sequence
  Synthetic
caguguaaugaguaccaug

SEQ ID NO: 336791 - RNA, 20 nt, Artificial Sequence
  Synthetic
gcaguguaaugaguaccaug

SEQ ID NO: 336792 - RNA, 21 nt, Artificial Sequence
  Synthetic
ugcaguguaaugaguaccaug

SEQ ID NO: 336793 - RNA, 22 nt, Artificial Sequence
  Synthetic
augcaguguaaugaguaccaug

SEQ ID NO: 336794 - RNA, 23 nt, Artificial Sequence
  Synthetic
caugcaguguaaugaguaccaug

SEQ ID NO: 336795 - RNA, 24 nt, Artificial Sequence
  Synthetic
ucaugcaguguaaugaguaccaug

SEQ ID NO: 336796 - RNA, 18 nt, Artificial Sequence
  Synthetic
aaacuccuauguaccaug

SEQ ID NO: 336797 - RNA, 19 nt, Artificial Sequence
  Synthetic
aaaacuccuauguaccaug

SEQ ID NO: 336798 - RNA, 20 nt, Artificial Sequence
  Synthetic
caaaacuccuauguaccaug

SEQ ID NO: 336799 - RNA, 21 nt, Artificial Sequence
  Synthetic
ccaaaacuccuauguaccaug

SEQ ID NO: 336800 - RNA, 22 nt, Artificial Sequence
  Synthetic
accaaaacuccuauguaccaug

SEQ ID NO: 336801 - RNA, 23 nt, Artificial Sequence
  Synthetic
gaccaaaacuccuauguaccaug

SEQ ID NO: 336802 - RNA, 24 nt, Artificial Sequence
  Synthetic
ugaccaaaacuccuauguaccaug

SEQ ID NO: 336803 - RNA, 18 nt, Artificial Sequence
  Synthetic
aaagauaugagacccaug

SEQ ID NO: 336804 - RNA, 19 nt, Artificial Sequence
  Synthetic
gaaagauaugagacccaug

SEQ ID NO: 336805 - RNA, 20 nt, Artificial Sequence
  Synthetic
ggaaagauaugagacccaug

SEQ ID NO: 336806 - RNA, 21 nt, Artificial Sequence
  Synthetic
uggaaagauaugagacccaug

SEQ ID NO: 336807 - RNA, 22 nt, Artificial Sequence
  Synthetic
uuggaaagauaugagacccaug

SEQ ID NO: 336808 - RNA, 23 nt, Artificial Sequence
  Synthetic
auuggaaagauaugagacccaug

SEQ ID NO: 336809 - RNA, 24 nt, Artificial Sequence
  Synthetic
aauuggaaagauaugagacccaug

SEQ ID NO: 336810 - RNA, 18 nt, Artificial Sequence
  Synthetic
gacauuaugauacccaug

SEQ ID NO: 336811 - RNA, 19 nt, Artificial Sequence
  Synthetic
agacauuaugauacccaug

SEQ ID NO: 336812 - RNA, 20 nt, Artificial Sequence
  Synthetic
uagacauuaugauacccaug

SEQ ID NO: 336813 - RNA, 21 nt, Artificial Sequence
  Synthetic
auagacauuaugauacccaug

SEQ ID NO: 336814 - RNA, 22 nt, Artificial Sequence
  Synthetic
aauagacauuaugauacccaug

SEQ ID NO: 336815 - RNA, 23 nt, Artificial Sequence
  Synthetic
uaauagacauuaugauacccaug

SEQ ID NO: 336816 - RNA, 24 nt, Artificial Sequence
  Synthetic
cuaauagacauuaugauacccaug

SEQ ID NO: 336817 - RNA, 18 nt, Artificial Sequence
  Synthetic
auguacugacuacccaug

SEQ ID NO: 336818 - RNA, 19 nt, Artificial Sequence
  Synthetic
cauguacugacuacccaug

SEQ ID NO: 336819 - RNA, 20 nt, Artificial Sequence
  Synthetic
acauguacugacuacccaug

SEQ ID NO: 336820 - RNA, 21 nt, Artificial Sequence
  Synthetic
aacauguacugacuacccaug

SEQ ID NO: 336821 - RNA, 22 nt, Artificial Sequence
  Synthetic
uaacauguacugacuacccaug

SEQ ID NO: 336822 - RNA, 23 nt, Artificial Sequence
  Synthetic
uuaacauguacugacuacccaug

SEQ ID NO: 336823 - RNA, 24 nt, Artificial Sequence
  Synthetic
auuaacauguacugacuacccaug

SEQ ID NO: 336824 - RNA, 18 nt, Artificial Sequence
  Synthetic
cagaguggcaggcccaug

SEQ ID NO: 336825 - RNA, 19 nt, Artificial Sequence
  Synthetic
ccagaguggcaggcccaug

SEQ ID NO: 336826 - RNA, 20 nt, Artificial Sequence
  Synthetic
accagaguggcaggcccaug

SEQ ID NO: 336827 - RNA, 21 nt, Artificial Sequence
  Synthetic
gaccagaguggcaggcccaug

SEQ ID NO: 336828 - RNA, 22 nt, Artificial Sequence
  Synthetic
ugaccagaguggcaggcccaug

SEQ ID NO: 336829 - RNA, 23 nt, Artificial Sequence
  Synthetic
gugaccagaguggcaggcccaug

SEQ ID NO: 336830 - RNA, 24 nt, Artificial Sequence
  Synthetic
agugaccagaguggcaggcccaug

SEQ ID NO: 336831 - RNA, 18 nt, Artificial Sequence
  Synthetic
augagauuucaucccaug

SEQ ID NO: 336832 - RNA, 19 nt, Artificial Sequence
  Synthetic
gaugagauuucaucccaug

SEQ ID NO: 336833 - RNA, 20 nt, Artificial Sequence
  Synthetic
ggaugagauuucaucccaug

SEQ ID NO: 336834 - RNA, 21 nt, Artificial Sequence
  Synthetic
aggaugagauuucaucccaug

SEQ ID NO: 336835 - RNA, 22 nt, Artificial Sequence
  Synthetic
uaggaugagauuucaucccaug

SEQ ID NO: 336836 - RNA, 23 nt, Artificial Sequence
  Synthetic
guaggaugagauuucaucccaug

SEQ ID NO: 336837 - RNA, 24 nt, Artificial Sequence
  Synthetic
uguaggaugagauuucaucccaug

SEQ ID NO: 336838 - RNA, 18 nt, Artificial Sequence
  Synthetic
uagugcagugaucccaug

SEQ ID NO: 336839 - RNA, 19 nt, Artificial Sequence
  Synthetic
uuagugcagugaucccaug

SEQ ID NO: 336840 - RNA, 20 nt, Artificial Sequence
  Synthetic
uuuagugcagugaucccaug

SEQ ID NO: 336841 - RNA, 21 nt, Artificial Sequence
  Synthetic
uuuuagugcagugaucccaug

SEQ ID NO: 336842 - RNA, 22 nt, Artificial Sequence
  Synthetic
guuuuagugcagugaucccaug

SEQ ID NO: 336843 - RNA, 23 nt, Artificial Sequence
  Synthetic
gguuuuagugcagugaucccaug

SEQ ID NO: 336844 - RNA, 24 nt, Artificial Sequence
  Synthetic
ggguuuuagugcagugaucccaug

SEQ ID NO: 336845 - RNA, 18 nt, Artificial Sequence
  Synthetic
acugccuaucuucccaug

SEQ ID NO: 336846 - RNA, 19 nt, Artificial Sequence
  Synthetic
gacugccuaucuucccaug

SEQ ID NO: 336847 - RNA, 20 nt, Artificial Sequence
  Synthetic
agacugccuaucuucccaug

SEQ ID NO: 336848 - RNA, 21 nt, Artificial Sequence
  Synthetic
aagacugccuaucuucccaug

SEQ ID NO: 336849 - RNA, 22 nt, Artificial Sequence
  Synthetic
caagacugccuaucuucccaug

SEQ ID NO: 336850 - RNA, 23 nt, Artificial Sequence
  Synthetic
ucaagacugccuaucuucccaug

SEQ ID NO: 336851 - RNA, 24 nt, Artificial Sequence
  Synthetic
cucaagacugccuaucuucccaug

SEQ ID NO: 336852 - RNA, 18 nt, Artificial Sequence
  Synthetic
acgccaugcaaagccaug

SEQ ID NO: 336853 - RNA, 19 nt, Artificial Sequence
  Synthetic
uacgccaugcaaagccaug

SEQ ID NO: 336854 - RNA, 20 nt, Artificial Sequence
  Synthetic
cuacgccaugcaaagccaug

SEQ ID NO: 336855 - RNA, 21 nt, Artificial Sequence
  Synthetic
acuacgccaugcaaagccaug

SEQ ID NO: 336856 - RNA, 22 nt, Artificial Sequence
  Synthetic
uacuacgccaugcaaagccaug

SEQ ID NO: 336857 - RNA, 23 nt, Artificial Sequence
  Synthetic
auacuacgccaugcaaagccaug

SEQ ID NO: 336858 - RNA, 24 nt, Artificial Sequence
  Synthetic
cauacuacgccaugcaaagccaug

SEQ ID NO: 336859 - RNA, 18 nt, Artificial Sequence
  Synthetic
gaggccucugaagccaug

SEQ ID NO: 336860 - RNA, 19 nt, Artificial Sequence
  Synthetic
ggaggccucugaagccaug

SEQ ID NO: 336861 - RNA, 20 nt, Artificial Sequence
  Synthetic
cggaggccucugaagccaug

SEQ ID NO: 336862 - RNA, 21 nt, Artificial Sequence
  Synthetic
ccggaggccucugaagccaug

SEQ ID NO: 336863 - RNA, 22 nt, Artificial Sequence
  Synthetic
uccggaggccucugaagccaug

SEQ ID NO: 336864 - RNA, 23 nt, Artificial Sequence
  Synthetic
uuccggaggccucugaagccaug

SEQ ID NO: 336865 - RNA, 24 nt, Artificial Sequence
  Synthetic
uuuccggaggccucugaagccaug

SEQ ID NO: 336866 - RNA, 18 nt, Artificial Sequence
  Synthetic
gaggucuccccagccaug

SEQ ID NO: 336867 - RNA, 19 nt, Artificial Sequence
  Synthetic
ugaggucuccccagccaug

SEQ ID NO: 336868 - RNA, 20 nt, Artificial Sequence
  Synthetic
cugaggucuccccagccaug

SEQ ID NO: 336869 - RNA, 21 nt, Artificial Sequence
  Synthetic
ccugaggucuccccagccaug

SEQ ID NO: 336870 - RNA, 22 nt, Artificial Sequence
  Synthetic
uccugaggucuccccagccaug

SEQ ID NO: 336871 - RNA, 23 nt, Artificial Sequence
  Synthetic
uuccugaggucuccccagccaug

SEQ ID NO: 336872 - RNA, 24 nt, Artificial Sequence
  Synthetic
uuuccugaggucuccccagccaug

SEQ ID NO: 336873 - RNA, 18 nt, Artificial Sequence
  Synthetic
cugacacugggagccaug

SEQ ID NO: 336874 - RNA, 19 nt, Artificial Sequence
  Synthetic
gcugacacugggagccaug

SEQ ID NO: 336875 - RNA, 20 nt, Artificial Sequence
  Synthetic
cgcugacacugggagccaug

SEQ ID NO: 336876 - RNA, 21 nt, Artificial Sequence
  Synthetic
gcgcugacacugggagccaug

SEQ ID NO: 336877 - RNA, 22 nt, Artificial Sequence
  Synthetic
agcgcugacacugggagccaug

SEQ ID NO: 336878 - RNA, 23 nt, Artificial Sequence
  Synthetic
uagcgcugacacugggagccaug

SEQ ID NO: 336879 - RNA, 24 nt, Artificial Sequence
  Synthetic
auagcgcugacacugggagccaug

SEQ ID NO: 336880 - RNA, 18 nt, Artificial Sequence
  Synthetic
cuaguguagcuagccaug

SEQ ID NO: 336881 - RNA, 19 nt, Artificial Sequence
  Synthetic
ccuaguguagcuagccaug

SEQ ID NO: 336882 - RNA, 20 nt, Artificial Sequence
  Synthetic
cccuaguguagcuagccaug

SEQ ID NO: 336883 - RNA, 21 nt, Artificial Sequence
  Synthetic
ccccuaguguagcuagccaug

SEQ ID NO: 336884 - RNA, 22 nt, Artificial Sequence
  Synthetic
cccccuaguguagcuagccaug

SEQ ID NO: 336885 - RNA, 23 nt, Artificial Sequence
  Synthetic
ucccccuaguguagcuagccaug

SEQ ID NO: 336886 - RNA, 24 nt, Artificial Sequence
  Synthetic
uucccccuaguguagcuagccaug

SEQ ID NO: 336887 - RNA, 18 nt, Artificial Sequence
  Synthetic
cagcguuuaggggccaug

SEQ ID NO: 336888 - RNA, 19 nt, Artificial Sequence
  Synthetic
ucagcguuuaggggccaug

SEQ ID NO: 336889 - RNA, 20 nt, Artificial Sequence
  Synthetic
aucagcguuuaggggccaug

SEQ ID NO: 336890 - RNA, 21 nt, Artificial Sequence
  Synthetic
uaucagcguuuaggggccaug

SEQ ID NO: 336891 - RNA, 22 nt, Artificial Sequence
  Synthetic
auaucagcguuuaggggccaug

SEQ ID NO: 336892 - RNA, 23 nt, Artificial Sequence
  Synthetic
gauaucagcguuuaggggccaug

SEQ ID NO: 336893 - RNA, 24 nt, Artificial Sequence
  Synthetic
agauaucagcguuuaggggccaug

SEQ ID NO: 336894 - RNA, 18 nt, Artificial Sequence
  Synthetic
accauuccagaugccaug

SEQ ID NO: 336895 - RNA, 19 nt, Artificial Sequence
  Synthetic
caccauuccagaugccaug

SEQ ID NO: 336896 - RNA, 20 nt, Artificial Sequence
  Synthetic
ucaccauuccagaugccaug

SEQ ID NO: 336897 - RNA, 21 nt, Artificial Sequence
  Synthetic
cucaccauuccagaugccaug

SEQ ID NO: 336898 - RNA, 22 nt, Artificial Sequence
  Synthetic
ccucaccauuccagaugccaug

SEQ ID NO: 336899 - RNA, 23 nt, Artificial Sequence
  Synthetic
uccucaccauuccagaugccaug

SEQ ID NO: 336900 - RNA, 24 nt, Artificial Sequence
  Synthetic
guccucaccauuccagaugccaug

SEQ ID NO: 336901 - RNA, 18 nt, Artificial Sequence
  Synthetic
caauucaggacugccaug

SEQ ID NO: 336902 - RNA, 19 nt, Artificial Sequence
  Synthetic
acaauucaggacugccaug

SEQ ID NO: 336903 - RNA, 20 nt, Artificial Sequence
  Synthetic
uacaauucaggacugccaug

SEQ ID NO: 336904 - RNA, 21 nt, Artificial Sequence
  Synthetic
cuacaauucaggacugccaug

SEQ ID NO: 336905 - RNA, 22 nt, Artificial Sequence
  Synthetic
acuacaauucaggacugccaug

SEQ ID NO: 336906 - RNA, 23 nt, Artificial Sequence
  Synthetic
uacuacaauucaggacugccaug

SEQ ID NO: 336907 - RNA, 24 nt, Artificial Sequence
  Synthetic
uuacuacaauucaggacugccaug

SEQ ID NO: 336908 - RNA, 18 nt, Artificial Sequence
  Synthetic
auguauaccugugccaug

SEQ ID NO: 336909 - RNA, 19 nt, Artificial Sequence
  Synthetic
uauguauaccugugccaug

SEQ ID NO: 336910 - RNA, 20 nt, Artificial Sequence
  Synthetic
auauguauaccugugccaug

SEQ ID NO: 336911 - RNA, 21 nt, Artificial Sequence
  Synthetic
cauauguauaccugugccaug

SEQ ID NO: 336912 - RNA, 22 nt, Artificial Sequence
  Synthetic
acauauguauaccugugccaug

SEQ ID NO: 336913 - RNA, 23 nt, Artificial Sequence
  Synthetic
uacauauguauaccugugccaug

SEQ ID NO: 336914 - RNA, 24 nt, Artificial Sequence
  Synthetic
uuacauauguauaccugugccaug

SEQ ID NO: 336915 - RNA, 18 nt, Artificial Sequence
  Synthetic
uacuaugacacauccaug

SEQ ID NO: 336916 - RNA, 19 nt, Artificial Sequence
  Synthetic
guacuaugacacauccaug

SEQ ID NO: 336917 - RNA, 20 nt, Artificial Sequence
  Synthetic
uguacuaugacacauccaug

SEQ ID NO: 336918 - RNA, 21 nt, Artificial Sequence
  Synthetic
auguacuaugacacauccaug

SEQ ID NO: 336919 - RNA, 22 nt, Artificial Sequence
  Synthetic
aauguacuaugacacauccaug

SEQ ID NO: 336920 - RNA, 23 nt, Artificial Sequence
  Synthetic
gaauguacuaugacacauccaug

SEQ ID NO: 336921 - RNA, 24 nt, Artificial Sequence
  Synthetic
agaauguacuaugacacauccaug

SEQ ID NO: 336922 - RNA, 18 nt, Artificial Sequence
  Synthetic
uucuucuccauauccaug

SEQ ID NO: 336923 - RNA, 19 nt, Artificial Sequence
  Synthetic
uuucuucuccauauccaug

SEQ ID NO: 336924 - RNA, 20 nt, Artificial Sequence
  Synthetic
uuuucuucuccauauccaug

SEQ ID NO: 336925 - RNA, 21 nt, Artificial Sequence
  Synthetic
uuuuucuucuccauauccaug

SEQ ID NO: 336926 - RNA, 22 nt, Artificial Sequence
  Synthetic
uuuuuucuucuccauauccaug

SEQ ID NO: 336927 - RNA, 23 nt, Artificial Sequence
  Synthetic
uuuuuuucuucuccauauccaug

SEQ ID NO: 336928 - RNA, 24 nt, Artificial Sequence
  Synthetic
uuuuuuuucuucuccauauccaug

SEQ ID NO: 336929 - RNA, 18 nt, Artificial Sequence
  Synthetic
uugagugacaacuccaug

SEQ ID NO: 336930 - RNA, 19 nt, Artificial Sequence
  Synthetic
cuugagugacaacuccaug

SEQ ID NO: 336931 - RNA, 20 nt, Artificial Sequence
  Synthetic
gcuugagugacaacuccaug

SEQ ID NO: 336932 - RNA, 21 nt, Artificial Sequence
  Synthetic
ugcuugagugacaacuccaug

SEQ ID NO: 336933 - RNA, 22 nt, Artificial Sequence
  Synthetic
gugcuugagugacaacuccaug

SEQ ID NO: 336934 - RNA, 23 nt, Artificial Sequence
  Synthetic
agugcuugagugacaacuccaug

SEQ ID NO: 336935 - RNA, 24 nt, Artificial Sequence
  Synthetic
cagugcuugagugacaacuccaug

SEQ ID NO: 336936 - RNA, 18 nt, Artificial Sequence
  Synthetic
agacucuguaacuccaug

SEQ ID NO: 336937 - RNA, 19 nt, Artificial Sequence
  Synthetic
cagacucuguaacuccaug

SEQ ID NO: 336938 - RNA, 20 nt, Artificial Sequence
  Synthetic
ucagacucuguaacuccaug

SEQ ID NO: 336939 - RNA, 21 nt, Artificial Sequence
  Synthetic
cucagacucuguaacuccaug

SEQ ID NO: 336940 - RNA, 22 nt, Artificial Sequence
  Synthetic
ccucagacucuguaacuccaug

SEQ ID NO: 336941 - RNA, 23 nt, Artificial Sequence
  Synthetic
gccucagacucuguaacuccaug

SEQ ID NO: 336942 - RNA, 24 nt, Artificial Sequence
  Synthetic
agccucagacucuguaacuccaug

SEQ ID NO: 336943 - RNA, 18 nt, Artificial Sequence
  Synthetic
auaagaaauaucuccaug

SEQ ID NO: 336944 - RNA, 19 nt, Artificial Sequence
  Synthetic
uauaagaaauaucuccaug

SEQ ID NO: 336945 - RNA, 20 nt, Artificial Sequence
  Synthetic
auauaagaaauaucuccaug

SEQ ID NO: 336946 - RNA, 21 nt, Artificial Sequence
  Synthetic
uauauaagaaauaucuccaug

SEQ ID NO: 336947 - RNA, 22 nt, Artificial Sequence
  Synthetic
auauauaagaaauaucuccaug

SEQ ID NO: 336948 - RNA, 23 nt, Artificial Sequence
  Synthetic
gauauauaagaaauaucuccaug

SEQ ID NO: 336949 - RNA, 24 nt, Artificial Sequence
  Synthetic
cgauauauaagaaauaucuccaug

SEQ ID NO: 336950 - RNA, 18 nt, Artificial Sequence
  Synthetic
uugcucucguuguccaug

SEQ ID NO: 336951 - RNA, 19 nt, Artificial Sequence
  Synthetic
uuugcucucguuguccaug

SEQ ID NO: 336952 - RNA, 20 nt, Artificial Sequence
  Synthetic
uuuugcucucguuguccaug

SEQ ID NO: 336953 - RNA, 21 nt, Artificial Sequence
  Synthetic
auuuugcucucguuguccaug

SEQ ID NO: 336954 - RNA, 22 nt, Artificial Sequence
  Synthetic
aauuuugcucucguuguccaug

SEQ ID NO: 336955 - RNA, 23 nt, Artificial Sequence
  Synthetic
gaauuuugcucucguuguccaug

SEQ ID NO: 336956 - RNA, 24 nt, Artificial Sequence
  Synthetic
agaauuuugcucucguuguccaug

SEQ ID NO: 336957 - RNA, 18 nt, Artificial Sequence
  Synthetic
uucucaucuaauuccaug

SEQ ID NO: 336958 - RNA, 19 nt, Artificial Sequence
  Synthetic
cuucucaucuaauuccaug

SEQ ID NO: 336959 - RNA, 20 nt, Artificial Sequence
  Synthetic
ucuucucaucuaauuccaug

SEQ ID NO: 336960 - RNA, 21 nt, Artificial Sequence
  Synthetic
cucuucucaucuaauuccaug

SEQ ID NO: 336961 - RNA, 22 nt, Artificial Sequence
  Synthetic
ccucuucucaucuaauuccaug

SEQ ID NO: 336962 - RNA, 23 nt, Artificial Sequence
  Synthetic
accucuucucaucuaauuccaug

SEQ ID NO: 336963 - RNA, 24 nt, Artificial Sequence
  Synthetic
caccucuucucaucuaauuccaug

SEQ ID NO: 336964 - RNA, 18 nt, Artificial Sequence
  Synthetic
uugugucaugauuccaug

SEQ ID NO: 336965 - RNA, 19 nt, Artificial Sequence
  Synthetic
guugugucaugauuccaug

SEQ ID NO: 336966 - RNA, 20 nt, Artificial Sequence
  Synthetic
uguugugucaugauuccaug

SEQ ID NO: 336967 - RNA, 21 nt, Artificial Sequence
  Synthetic
uuguugugucaugauuccaug

SEQ ID NO: 336968 - RNA, 22 nt, Artificial Sequence
  Synthetic
cuuguugugucaugauuccaug

SEQ ID NO: 336969 - RNA, 23 nt, Artificial Sequence
  Synthetic
ucuuguugugucaugauuccaug

SEQ ID NO: 336970 - RNA, 24 nt, Artificial Sequence
  Synthetic
uucuuguugugucaugauuccaug

SEQ ID NO: 336971 - RNA, 18 nt, Artificial Sequence
  Synthetic
aaacuccaccuuuccaug

SEQ ID NO: 336972 - RNA, 19 nt, Artificial Sequence
  Synthetic
uaaacuccaccuuuccaug

SEQ ID NO: 336973 - RNA, 20 nt, Artificial Sequence
  Synthetic
auaaacuccaccuuuccaug

SEQ ID NO: 336974 - RNA, 21 nt, Artificial Sequence
  Synthetic
cauaaacuccaccuuuccaug

SEQ ID NO: 336975 - RNA, 22 nt, Artificial Sequence
  Synthetic
acauaaacuccaccuuuccaug

SEQ ID NO: 336976 - RNA, 23 nt, Artificial Sequence
  Synthetic
aacauaaacuccaccuuuccaug

SEQ ID NO: 336977 - RNA, 24 nt, Artificial Sequence
  Synthetic
gaacauaaacuccaccuuuccaug

SEQ ID NO: 336978 - RNA, 18 nt, Artificial Sequence
  Synthetic
gucgagaagcuuuccaug

SEQ ID NO: 336979 - RNA, 19 nt, Artificial Sequence
  Synthetic
agucgagaagcuuuccaug

SEQ ID NO: 336980 - RNA, 20 nt, Artificial Sequence
  Synthetic
uagucgagaagcuuuccaug

SEQ ID NO: 336981 - RNA, 21 nt, Artificial Sequence
  Synthetic
uuagucgagaagcuuuccaug

SEQ ID NO: 336982 - RNA, 22 nt, Artificial Sequence
  Synthetic
auuagucgagaagcuuuccaug

SEQ ID NO: 336983 - RNA, 23 nt, Artificial Sequence
  Synthetic
aauuagucgagaagcuuuccaug

SEQ ID NO: 336984 - RNA, 24 nt, Artificial Sequence
  Synthetic
aaauuagucgagaagcuuuccaug

SEQ ID NO: 336985 - RNA, 18 nt, Artificial Sequence
  Synthetic
uuaaugaaauaaagcaug

SEQ ID NO: 336986 - RNA, 19 nt, Artificial Sequence
  Synthetic
cuuaaugaaauaaagcaug

SEQ ID NO: 336987 - RNA, 20 nt, Artificial Sequence
  Synthetic
acuuaaugaaauaaagcaug

SEQ ID NO: 336988 - RNA, 21 nt, Artificial Sequence
  Synthetic
aacuuaaugaaauaaagcaug

SEQ ID NO: 336989 - RNA, 22 nt, Artificial Sequence
  Synthetic
caacuuaaugaaauaaagcaug

SEQ ID NO: 336990 - RNA, 23 nt, Artificial Sequence
  Synthetic
ucaacuuaaugaaauaaagcaug

SEQ ID NO: 336991 - RNA, 24 nt, Artificial Sequence
  Synthetic
aucaacuuaaugaaauaaagcaug

SEQ ID NO: 336992 - RNA, 18 nt, Artificial Sequence
  Synthetic
cuaagcaaaagaagcaug

SEQ ID NO: 336993 - RNA, 19 nt, Artificial Sequence
  Synthetic
ucuaagcaaaagaagcaug

SEQ ID NO: 336994 - RNA, 20 nt, Artificial Sequence
  Synthetic
uucuaagcaaaagaagcaug

SEQ ID NO: 336995 - RNA, 21 nt, Artificial Sequence
  Synthetic
guucuaagcaaaagaagcaug

SEQ ID NO: 336996 - RNA, 22 nt, Artificial Sequence
  Synthetic
uguucuaagcaaaagaagcaug

SEQ ID NO: 336997 - RNA, 23 nt, Artificial Sequence
  Synthetic
uuguucuaagcaaaagaagcaug

SEQ ID NO: 336998 - RNA, 24 nt, Artificial Sequence
  Synthetic
auuguucuaagcaaaagaagcaug

SEQ ID NO: 336999 - RNA, 18 nt, Artificial Sequence
  Synthetic
gagagggagggaagcaug

SEQ ID NO: 337000 - RNA, 19 nt, Artificial Sequence
  Synthetic
agagagggagggaagcaug

SEQ ID NO: 337001 - RNA, 20 nt, Artificial Sequence
  Synthetic
gagagagggagggaagcaug

SEQ ID NO: 337002 - RNA, 21 nt, Artificial Sequence
  Synthetic
ggagagagggagggaagcaug

SEQ ID NO: 337003 - RNA, 22 nt, Artificial Sequence
  Synthetic
gggagagagggagggaagcaug

SEQ ID NO: 337004 - RNA, 23 nt, Artificial Sequence
  Synthetic
agggagagagggagggaagcaug

SEQ ID NO: 337005 - RNA, 24 nt, Artificial Sequence
  Synthetic
aagggagagagggagggaagcaug

SEQ ID NO: 337006 - RNA, 18 nt, Artificial Sequence
  Synthetic
uauaugcauauaagcaug

SEQ ID NO: 337007 - RNA, 19 nt, Artificial Sequence
  Synthetic
cuauaugcauauaagcaug

SEQ ID NO: 337008 - RNA, 20 nt, Artificial Sequence
  Synthetic
ucuauaugcauauaagcaug

SEQ ID NO: 337009 - RNA, 21 nt, Artificial Sequence
  Synthetic
aucuauaugcauauaagcaug

SEQ ID NO: 337010 - RNA, 22 nt, Artificial Sequence
  Synthetic
aaucuauaugcauauaagcaug

SEQ ID NO: 337011 - RNA, 23 nt, Artificial Sequence
  Synthetic
aaaucuauaugcauauaagcaug

SEQ ID NO: 337012 - RNA, 24 nt, Artificial Sequence
  Synthetic
caaaucuauaugcauauaagcaug

SEQ ID NO: 337013 - RNA, 18 nt, Artificial Sequence
  Synthetic
auuggaauacuaagcaug

SEQ ID NO: 337014 - RNA, 19 nt, Artificial Sequence
  Synthetic
uauuggaauacuaagcaug

SEQ ID NO: 337015 - RNA, 20 nt, Artificial Sequence
  Synthetic
uuauuggaauacuaagcaug

SEQ ID NO: 337016 - RNA, 21 nt, Artificial Sequence
  Synthetic
auuauuggaauacuaagcaug

SEQ ID NO: 337017 - RNA, 22 nt, Artificial Sequence
  Synthetic
cauuauuggaauacuaagcaug

SEQ ID NO: 337018 - RNA, 23 nt, Artificial Sequence
  Synthetic
ccauuauuggaauacuaagcaug

SEQ ID NO: 337019 - RNA, 24 nt, Artificial Sequence
  Synthetic
uccauuauuggaauacuaagcaug

SEQ ID NO: 337020 - RNA, 18 nt, Artificial Sequence
  Synthetic
acaugggaaaacagcaug

SEQ ID NO: 337021 - RNA, 19 nt, Artificial Sequence
  Synthetic
cacaugggaaaacagcaug

SEQ ID NO: 337022 - RNA, 20 nt, Artificial Sequence
  Synthetic
ucacaugggaaaacagcaug

SEQ ID NO: 337023 - RNA, 21 nt, Artificial Sequence
  Synthetic
aucacaugggaaaacagcaug

SEQ ID NO: 337024 - RNA, 22 nt, Artificial Sequence
  Synthetic
uaucacaugggaaaacagcaug

SEQ ID NO: 337025 - RNA, 23 nt, Artificial Sequence
  Synthetic
cuaucacaugggaaaacagcaug

SEQ ID NO: 337026 - RNA, 24 nt, Artificial Sequence
  Synthetic
acuaucacaugggaaaacagcaug

SEQ ID NO: 337027 - RNA, 18 nt, Artificial Sequence
  Synthetic
uaucaugagaacagcaug

SEQ ID NO: 337028 - RNA, 19 nt, Artificial Sequence
  Synthetic
cuaucaugagaacagcaug

SEQ ID NO: 337029 - RNA, 20 nt, Artificial Sequence
  Synthetic
acuaucaugagaacagcaug

SEQ ID NO: 337030 - RNA, 21 nt, Artificial Sequence
  Synthetic
cacuaucaugagaacagcaug

SEQ ID NO: 337031 - RNA, 22 nt, Artificial Sequence
  Synthetic
ucacuaucaugagaacagcaug

SEQ ID NO: 337032 - RNA, 23 nt, Artificial Sequence
  Synthetic
cucacuaucaugagaacagcaug

SEQ ID NO: 337033 - RNA, 24 nt, Artificial Sequence
  Synthetic
acucacuaucaugagaacagcaug

SEQ ID NO: 337034 - RNA, 18 nt, Artificial Sequence
  Synthetic
accagccuggccagcaug

SEQ ID NO: 337035 - RNA, 19 nt, Artificial Sequence
  Synthetic
gaccagccuggccagcaug

SEQ ID NO: 337036 - RNA, 20 nt, Artificial Sequence
  Synthetic
agaccagccuggccagcaug

SEQ ID NO: 337037 - RNA, 21 nt, Artificial Sequence
  Synthetic
aagaccagccuggccagcaug

SEQ ID NO: 337038 - RNA, 22 nt, Artificial Sequence
  Synthetic
caagaccagccuggccagcaug

SEQ ID NO: 337039 - RNA, 23 nt, Artificial Sequence
  Synthetic
ucaagaccagccuggccagcaug

SEQ ID NO: 337040 - RNA, 24 nt, Artificial Sequence
  Synthetic
uucaagaccagccuggccagcaug

SEQ ID NO: 337041 - RNA, 18 nt, Artificial Sequence
  Synthetic
aauugauggcagagcaug

SEQ ID NO: 337042 - RNA, 19 nt, Artificial Sequence
  Synthetic
gaauugauggcagagcaug

SEQ ID NO: 337043 - RNA, 20 nt, Artificial Sequence
  Synthetic
agaauugauggcagagcaug

SEQ ID NO: 337044 - RNA, 21 nt, Artificial Sequence
  Synthetic
gagaauugauggcagagcaug

SEQ ID NO: 337045 - RNA, 22 nt, Artificial Sequence
  Synthetic
ggagaauugauggcagagcaug

SEQ ID NO: 337046 - RNA, 23 nt, Artificial Sequence
  Synthetic
uggagaauugauggcagagcaug

SEQ ID NO: 337047 - RNA, 24 nt, Artificial Sequence
  Synthetic
auggagaauugauggcagagcaug

SEQ ID NO: 337048 - RNA, 18 nt, Artificial Sequence
  Synthetic
augccauggcugagcaug

SEQ ID NO: 337049 - RNA, 19 nt, Artificial Sequence
  Synthetic
caugccauggcugagcaug

SEQ ID NO: 337050 - RNA, 20 nt, Artificial Sequence
  Synthetic
ucaugccauggcugagcaug

SEQ ID NO: 337051 - RNA, 21 nt, Artificial Sequence
  Synthetic
uucaugccauggcugagcaug

SEQ ID NO: 337052 - RNA, 22 nt, Artificial Sequence
  Synthetic
guucaugccauggcugagcaug

SEQ ID NO: 337053 - RNA, 23 nt, Artificial Sequence
  Synthetic
uguucaugccauggcugagcaug

SEQ ID NO: 337054 - RNA, 24 nt, Artificial Sequence
  Synthetic
guguucaugccauggcugagcaug

SEQ ID NO: 337055 - RNA, 18 nt, Artificial Sequence
  Synthetic
gagaaagugauuagcaug

SEQ ID NO: 337056 - RNA, 19 nt, Artificial Sequence
  Synthetic
ugagaaagugauuagcaug

SEQ ID NO: 337057 - RNA, 20 nt, Artificial Sequence
  Synthetic
cugagaaagugauuagcaug

SEQ ID NO: 337058 - RNA, 21 nt, Artificial Sequence
  Synthetic
ucugagaaagugauuagcaug

SEQ ID NO: 337059 - RNA, 22 nt, Artificial Sequence
  Synthetic
uucugagaaagugauuagcaug

SEQ ID NO: 337060 - RNA, 23 nt, Artificial Sequence
  Synthetic
auucugagaaagugauuagcaug

SEQ ID NO: 337061 - RNA, 24 nt, Artificial Sequence
  Synthetic
gauucugagaaagugauuagcaug

SEQ ID NO: 337062 - RNA, 18 nt, Artificial Sequence
  Synthetic
ucgagaguuuuuagcaug

SEQ ID NO: 337063 - RNA, 19 nt, Artificial Sequence
  Synthetic
aucgagaguuuuuagcaug

SEQ ID NO: 337064 - RNA, 20 nt, Artificial Sequence
  Synthetic
uaucgagaguuuuuagcaug

SEQ ID NO: 337065 - RNA, 21 nt, Artificial Sequence
  Synthetic
uuaucgagaguuuuuagcaug

SEQ ID NO: 337066 - RNA, 22 nt, Artificial Sequence
  Synthetic
uuuaucgagaguuuuuagcaug

SEQ ID NO: 337067 - RNA, 23 nt, Artificial Sequence
  Synthetic
auuuaucgagaguuuuuagcaug

SEQ ID NO: 337068 - RNA, 24 nt, Artificial Sequence
  Synthetic
aauuuaucgagaguuuuuagcaug

SEQ ID NO: 337069 - RNA, 18 nt, Artificial Sequence
  Synthetic
gcugagccugaaggcaug

SEQ ID NO: 337070 - RNA, 19 nt, Artificial Sequence
  Synthetic
agcugagccugaaggcaug

SEQ ID NO: 337071 - RNA, 20 nt, Artificial Sequence
  Synthetic
uagcugagccugaaggcaug

SEQ ID NO: 337072 - RNA, 21 nt, Artificial Sequence
  Synthetic
auagcugagccugaaggcaug

SEQ ID NO: 337073 - RNA, 22 nt, Artificial Sequence
  Synthetic
aauagcugagccugaaggcaug

SEQ ID NO: 337074 - RNA, 23 nt, Artificial Sequence
  Synthetic
gaauagcugagccugaaggcaug

SEQ ID NO: 337075 - RNA, 24 nt, Artificial Sequence
  Synthetic
agaauagcugagccugaaggcaug

SEQ ID NO: 337076 - RNA, 18 nt, Artificial Sequence
  Synthetic
cauuaagaauaaggcaug

SEQ ID NO: 337077 - RNA, 19 nt, Artificial Sequence
  Synthetic
acauuaagaauaaggcaug

SEQ ID NO: 337078 - RNA, 20 nt, Artificial Sequence
  Synthetic
gacauuaagaauaaggcaug

SEQ ID NO: 337079 - RNA, 21 nt, Artificial Sequence
  Synthetic
ggacauuaagaauaaggcaug

SEQ ID NO: 337080 - RNA, 22 nt, Artificial Sequence
  Synthetic
gggacauuaagaauaaggcaug

SEQ ID NO: 337081 - RNA, 23 nt, Artificial Sequence
  Synthetic
ggggacauuaagaauaaggcaug

SEQ ID NO: 337082 - RNA, 24 nt, Artificial Sequence
  Synthetic
aggggacauuaagaauaaggcaug

SEQ ID NO: 337083 - RNA, 18 nt, Artificial Sequence
  Synthetic
cagcccaugggaggcaug

SEQ ID NO: 337084 - RNA, 19 nt, Artificial Sequence
  Synthetic
ccagcccaugggaggcaug

SEQ ID NO: 337085 - RNA, 20 nt, Artificial Sequence
  Synthetic
gccagcccaugggaggcaug

SEQ ID NO: 337086 - RNA, 21 nt, Artificial Sequence
  Synthetic
ggccagcccaugggaggcaug

SEQ ID NO: 337087 - RNA, 22 nt, Artificial Sequence
  Synthetic
aggccagcccaugggaggcaug

SEQ ID NO: 337088 - RNA, 23 nt, Artificial Sequence
  Synthetic
gaggccagcccaugggaggcaug

SEQ ID NO: 337089 - RNA, 24 nt, Artificial Sequence
  Synthetic
agaggccagcccaugggaggcaug

SEQ ID NO: 337090 - RNA, 18 nt, Artificial Sequence
  Synthetic
uagauguugguaggcaug

SEQ ID NO: 337091 - RNA, 19 nt, Artificial Sequence
  Synthetic
uuagauguugguaggcaug

SEQ ID NO: 337092 - RNA, 20 nt, Artificial Sequence
  Synthetic
auuagauguugguaggcaug

SEQ ID NO: 337093 - RNA, 21 nt, Artificial Sequence
  Synthetic
aauuagauguugguaggcaug

SEQ ID NO: 337094 - RNA, 22 nt, Artificial Sequence
  Synthetic
gaauuagauguugguaggcaug

SEQ ID NO: 337095 - RNA, 23 nt, Artificial Sequence
  Synthetic
ugaauuagauguugguaggcaug

SEQ ID NO: 337096 - RNA, 24 nt, Artificial Sequence
  Synthetic
uugaauuagauguugguaggcaug

SEQ ID NO: 337097 - RNA, 18 nt, Artificial Sequence
  Synthetic
aaaauauuuuggggcaug

SEQ ID NO: 337098 - RNA, 19 nt, Artificial Sequence
  Synthetic
aaaaauauuuuggggcaug

SEQ ID NO: 337099 - RNA, 20 nt, Artificial Sequence
  Synthetic
uaaaaauauuuuggggcaug

SEQ ID NO: 337100 - RNA, 21 nt, Artificial Sequence
  Synthetic
auaaaaauauuuuggggcaug

SEQ ID NO: 337101 - RNA, 22 nt, Artificial Sequence
  Synthetic
uauaaaaauauuuuggggcaug

SEQ ID NO: 337102 - RNA, 23 nt, Artificial Sequence
  Synthetic
auauaaaaauauuuuggggcaug

SEQ ID NO: 337103 - RNA, 24 nt, Artificial Sequence
  Synthetic
uauauaaaaauauuuuggggcaug

SEQ ID NO: 337104 - RNA, 18 nt, Artificial Sequence
  Synthetic
agaaggcaguguggcaug

SEQ ID NO: 337105 - RNA, 19 nt, Artificial Sequence
  Synthetic
aagaaggcaguguggcaug

SEQ ID NO: 337106 - RNA, 20 nt, Artificial Sequence
  Synthetic
uaagaaggcaguguggcaug

SEQ ID NO: 337107 - RNA, 21 nt, Artificial Sequence
  Synthetic
guaagaaggcaguguggcaug

SEQ ID NO: 337108 - RNA, 22 nt, Artificial Sequence
  Synthetic
uguaagaaggcaguguggcaug

SEQ ID NO: 337109 - RNA, 23 nt, Artificial Sequence
  Synthetic
cuguaagaaggcaguguggcaug

SEQ ID NO: 337110 - RNA, 24 nt, Artificial Sequence
  Synthetic
ucuguaagaaggcaguguggcaug

SEQ ID NO: 337111 - RNA, 18 nt, Artificial Sequence
  Synthetic
aggaauauucuuggcaug

SEQ ID NO: 337112 - RNA, 19 nt, Artificial Sequence
  Synthetic
caggaauauucuuggcaug

SEQ ID NO: 337113 - RNA, 20 nt, Artificial Sequence
  Synthetic
gcaggaauauucuuggcaug

SEQ ID NO: 337114 - RNA, 21 nt, Artificial Sequence
  Synthetic
agcaggaauauucuuggcaug

SEQ ID NO: 337115 - RNA, 22 nt, Artificial Sequence
  Synthetic
aagcaggaauauucuuggcaug

SEQ ID NO: 337116 - RNA, 23 nt, Artificial Sequence
  Synthetic
aaagcaggaauauucuuggcaug

SEQ ID NO: 337117 - RNA, 24 nt, Artificial Sequence
  Synthetic
caaagcaggaauauucuuggcaug

SEQ ID NO: 337118 - RNA, 18 nt, Artificial Sequence
  Synthetic
acaaauaccuaaugcaug

SEQ ID NO: 337119 - RNA, 19 nt, Artificial Sequence
  Synthetic
gacaaauaccuaaugcaug

SEQ ID NO: 337120 - RNA, 20 nt, Artificial Sequence
  Synthetic
ggacaaauaccuaaugcaug

SEQ ID NO: 337121 - RNA, 18 nt, Artificial Sequence
  Synthetic
aaaaauagcuaaugcaug

SEQ ID NO: 337122 - RNA, 19 nt, Artificial Sequence
  Synthetic
gaaaaauagcuaaugcaug

SEQ ID NO: 337123 - RNA, 20 nt, Artificial Sequence
  Synthetic
ggaaaaauagcuaaugcaug

SEQ ID NO: 337124 - RNA, 21 nt, Artificial Sequence
  Synthetic
gggaaaaauagcuaaugcaug

SEQ ID NO: 337125 - RNA, 22 nt, Artificial Sequence
  Synthetic
ugggaaaaauagcuaaugcaug

SEQ ID NO: 337126 - RNA, 23 nt, Artificial Sequence
  Synthetic
uugggaaaaauagcuaaugcaug

SEQ ID NO: 337127 - RNA, 24 nt, Artificial Sequence
  Synthetic
auugggaaaaauagcuaaugcaug

SEQ ID NO: 337128 - RNA, 18 nt, Artificial Sequence
  Synthetic
ugacuucaugcaugcaug

SEQ ID NO: 337129 - RNA, 19 nt, Artificial Sequence
  Synthetic
cugacuucaugcaugcaug

SEQ ID NO: 337130 - RNA, 20 nt, Artificial Sequence
  Synthetic
ccugacuucaugcaugcaug

SEQ ID NO: 337131 - RNA, 21 nt, Artificial Sequence
  Synthetic
uccugacuucaugcaugcaug

SEQ ID NO: 337132 - RNA, 22 nt, Artificial Sequence
  Synthetic
uuccugacuucaugcaugcaug

SEQ ID NO: 337133 - RNA, 23 nt, Artificial Sequence
  Synthetic
guuccugacuucaugcaugcaug

SEQ ID NO: 337134 - RNA, 24 nt, Artificial Sequence
  Synthetic
uguuccugacuucaugcaugcaug

SEQ ID NO: 337135 - RNA, 18 nt, Artificial Sequence
  Synthetic
aagggcuacugaugcaug

SEQ ID NO: 337136 - RNA, 19 nt, Artificial Sequence
  Synthetic
caagggcuacugaugcaug

SEQ ID NO: 337137 - RNA, 20 nt, Artificial Sequence
  Synthetic
ucaagggcuacugaugcaug

SEQ ID NO: 337138 - RNA, 21 nt, Artificial Sequence
  Synthetic
uucaagggcuacugaugcaug

SEQ ID NO: 337139 - RNA, 22 nt, Artificial Sequence
  Synthetic
cuucaagggcuacugaugcaug

SEQ ID NO: 337140 - RNA, 23 nt, Artificial Sequence
  Synthetic
ccuucaagggcuacugaugcaug

SEQ ID NO: 337141 - RNA, 24 nt, Artificial Sequence
  Synthetic
gccuucaagggcuacugaugcaug

SEQ ID NO: 337142 - RNA, 18 nt, Artificial Sequence
  Synthetic
gucucagcauucugcaug

SEQ ID NO: 337143 - RNA, 19 nt, Artificial Sequence
  Synthetic
agucucagcauucugcaug

SEQ ID NO: 337144 - RNA, 20 nt, Artificial Sequence
  Synthetic
aagucucagcauucugcaug

SEQ ID NO: 337145 - RNA, 21 nt, Artificial Sequence
  Synthetic
aaagucucagcauucugcaug

SEQ ID NO: 337146 - RNA, 22 nt, Artificial Sequence
  Synthetic
aaaagucucagcauucugcaug

SEQ ID NO: 337147 - RNA, 23 nt, Artificial Sequence
  Synthetic
caaaagucucagcauucugcaug

SEQ ID NO: 337148 - RNA, 24 nt, Artificial Sequence
  Synthetic
ccaaaagucucagcauucugcaug

SEQ ID NO: 337149 - RNA, 18 nt, Artificial Sequence
  Synthetic
uucuucagguggugcaug

SEQ ID NO: 337150 - RNA, 19 nt, Artificial Sequence
  Synthetic
guucuucagguggugcaug

SEQ ID NO: 337151 - RNA, 20 nt, Artificial Sequence
  Synthetic
uguucuucagguggugcaug

SEQ ID NO: 337152 - RNA, 21 nt, Artificial Sequence
  Synthetic
auguucuucagguggugcaug

SEQ ID NO: 337153 - RNA, 22 nt, Artificial Sequence
  Synthetic
gauguucuucagguggugcaug

SEQ ID NO: 337154 - RNA, 23 nt, Artificial Sequence
  Synthetic
agauguucuucagguggugcaug

SEQ ID NO: 337155 - RNA, 24 nt, Artificial Sequence
  Synthetic
uagauguucuucagguggugcaug

SEQ ID NO: 337156 - RNA, 18 nt, Artificial Sequence
  Synthetic
guuuuaucccugugcaug

SEQ ID NO: 337157 - RNA, 19 nt, Artificial Sequence
  Synthetic
uguuuuaucccugugcaug

SEQ ID NO: 337158 - RNA, 20 nt, Artificial Sequence
  Synthetic
cuguuuuaucccugugcaug

SEQ ID NO: 337159 - RNA, 21 nt, Artificial Sequence
  Synthetic
ccuguuuuaucccugugcaug

SEQ ID NO: 337160 - RNA, 22 nt, Artificial Sequence
  Synthetic
uccuguuuuaucccugugcaug

SEQ ID NO: 337161 - RNA, 23 nt, Artificial Sequence
  Synthetic
uuccuguuuuaucccugugcaug

SEQ ID NO: 337162 - RNA, 24 nt, Artificial Sequence
  Synthetic
cuuccuguuuuaucccugugcaug

SEQ ID NO: 337163 - RNA, 18 nt, Artificial Sequence
  Synthetic
ucauuuuaaaauugcaug

SEQ ID NO: 337164 - RNA, 19 nt, Artificial Sequence
  Synthetic
uucauuuuaaaauugcaug

SEQ ID NO: 337165 - RNA, 20 nt, Artificial Sequence
  Synthetic
auucauuuuaaaauugcaug

SEQ ID NO: 337166 - RNA, 21 nt, Artificial Sequence
  Synthetic
aauucauuuuaaaauugcaug

SEQ ID NO: 337167 - RNA, 22 nt, Artificial Sequence
  Synthetic
uaauucauuuuaaaauugcaug

SEQ ID NO: 337168 - RNA, 23 nt, Artificial Sequence
  Synthetic
uuaauucauuuuaaaauugcaug

SEQ ID NO: 337169 - RNA, 24 nt, Artificial Sequence
  Synthetic
auuaauucauuuuaaaauugcaug

SEQ ID NO: 337170 - RNA, 18 nt, Artificial Sequence
  Synthetic
aggagcucugcuugcaug

SEQ ID NO: 337171 - RNA, 19 nt, Artificial Sequence
  Synthetic
caggagcucugcuugcaug

SEQ ID NO: 337172 - RNA, 20 nt, Artificial Sequence
  Synthetic
ccaggagcucugcuugcaug

SEQ ID NO: 337173 - RNA, 21 nt, Artificial Sequence
  Synthetic
accaggagcucugcuugcaug

SEQ ID NO: 337174 - RNA, 22 nt, Artificial Sequence
  Synthetic
aaccaggagcucugcuugcaug

SEQ ID NO: 337175 - RNA, 23 nt, Artificial Sequence
  Synthetic
uaaccaggagcucugcuugcaug

SEQ ID NO: 337176 - RNA, 24 nt, Artificial Sequence
  Synthetic
uuaaccaggagcucugcuugcaug

SEQ ID NO: 337177 - RNA, 18 nt, Artificial Sequence
  Synthetic
ucacauuuuauuugcaug

SEQ ID NO: 337178 - RNA, 19 nt, Artificial Sequence
  Synthetic
gucacauuuuauuugcaug

SEQ ID NO: 337179 - RNA, 20 nt, Artificial Sequence
  Synthetic
ugucacauuuuauuugcaug

SEQ ID NO: 337180 - RNA, 21 nt, Artificial Sequence
  Synthetic
augucacauuuuauuugcaug

SEQ ID NO: 337181 - RNA, 22 nt, Artificial Sequence
  Synthetic
uaugucacauuuuauuugcaug

SEQ ID NO: 337182 - RNA, 23 nt, Artificial Sequence
  Synthetic
cuaugucacauuuuauuugcaug

SEQ ID NO: 337183 - RNA, 24 nt, Artificial Sequence
  Synthetic
ucuaugucacauuuuauuugcaug

SEQ ID NO: 337184 - RNA, 18 nt, Artificial Sequence
  Synthetic
cuauagaauuuuugcaug

SEQ ID NO: 337185 - RNA, 19 nt, Artificial Sequence
  Synthetic
ucuauagaauuuuugcaug

SEQ ID NO: 337186 - RNA, 20 nt, Artificial Sequence
  Synthetic
uucuauagaauuuuugcaug

SEQ ID NO: 337187 - RNA, 21 nt, Artificial Sequence
  Synthetic
auucuauagaauuuuugcaug

SEQ ID NO: 337188 - RNA, 22 nt, Artificial Sequence
  Synthetic
aauucuauagaauuuuugcaug

SEQ ID NO: 337189 - RNA, 23 nt, Artificial Sequence
  Synthetic
gaauucuauagaauuuuugcaug

SEQ ID NO: 337190 - RNA, 24 nt, Artificial Sequence
  Synthetic
agaauucuauagaauuuuugcaug

SEQ ID NO: 337191 - RNA, 18 nt, Artificial Sequence
  Synthetic
uuuagucauuuuugcaug

SEQ ID NO: 337192 - RNA, 19 nt, Artificial Sequence
  Synthetic
guuuagucauuuuugcaug

SEQ ID NO: 337193 - RNA, 20 nt, Artificial Sequence
  Synthetic
cguuuagucauuuuugcaug

SEQ ID NO: 337194 - RNA, 21 nt, Artificial Sequence
  Synthetic
ucguuuagucauuuuugcaug

SEQ ID NO: 337195 - RNA, 22 nt, Artificial Sequence
  Synthetic
aucguuuagucauuuuugcaug

SEQ ID NO: 337196 - RNA, 23 nt, Artificial Sequence
  Synthetic
aaucguuuagucauuuuugcaug

SEQ ID NO: 337197 - RNA, 24 nt, Artificial Sequence
  Synthetic
aaaucguuuagucauuuuugcaug

SEQ ID NO: 337198 - RNA, 18 nt, Artificial Sequence
  Synthetic
caaugucuuaaaaucaug

SEQ ID NO: 337199 - RNA, 19 nt, Artificial Sequence
  Synthetic
ucaaugucuuaaaaucaug

SEQ ID NO: 337200 - RNA, 20 nt, Artificial Sequence
  Synthetic
uucaaugucuuaaaaucaug

SEQ ID NO: 337201 - RNA, 21 nt, Artificial Sequence
  Synthetic
auucaaugucuuaaaaucaug

SEQ ID NO: 337202 - RNA, 22 nt, Artificial Sequence
  Synthetic
aauucaaugucuuaaaaucaug

SEQ ID NO: 337203 - RNA, 23 nt, Artificial Sequence
  Synthetic
aaauucaaugucuuaaaaucaug

SEQ ID NO: 337204 - RNA, 24 nt, Artificial Sequence
  Synthetic
aaaauucaaugucuuaaaaucaug

SEQ ID NO: 337205 - RNA, 18 nt, Artificial Sequence
  Synthetic
aagaaugaagaaaucaug

SEQ ID NO: 337206 - RNA, 19 nt, Artificial Sequence
  Synthetic
aaagaaugaagaaaucaug

SEQ ID NO: 337207 - RNA, 20 nt, Artificial Sequence
  Synthetic
uaaagaaugaagaaaucaug

SEQ ID NO: 337208 - RNA, 21 nt, Artificial Sequence
  Synthetic
auaaagaaugaagaaaucaug

SEQ ID NO: 337209 - RNA, 22 nt, Artificial Sequence
  Synthetic
uauaaagaaugaagaaaucaug

SEQ ID NO: 337210 - RNA, 23 nt, Artificial Sequence
  Synthetic
cuauaaagaaugaagaaaucaug

SEQ ID NO: 337211 - RNA, 24 nt, Artificial Sequence
  Synthetic
acuauaaagaaugaagaaaucaug

SEQ ID NO: 337212 - RNA, 18 nt, Artificial Sequence
  Synthetic
gaagucuuuuaaaucaug

SEQ ID NO: 337213 - RNA, 19 nt, Artificial Sequence
  Synthetic
agaagucuuuuaaaucaug

SEQ ID NO: 337214 - RNA, 20 nt, Artificial Sequence
  Synthetic
aagaagucuuuuaaaucaug

SEQ ID NO: 337215 - RNA, 21 nt, Artificial Sequence
  Synthetic
aaagaagucuuuuaaaucaug

SEQ ID NO: 337216 - RNA, 22 nt, Artificial Sequence
  Synthetic
gaaagaagucuuuuaaaucaug

SEQ ID NO: 337217 - RNA, 23 nt, Artificial Sequence
  Synthetic
agaaagaagucuuuuaaaucaug

SEQ ID NO: 337218 - RNA, 24 nt, Artificial Sequence
  Synthetic
gagaaagaagucuuuuaaaucaug

SEQ ID NO: 337219 - RNA, 18 nt, Artificial Sequence
  Synthetic
ggaggccucacaaucaug

SEQ ID NO: 337220 - RNA, 19 nt, Artificial Sequence
  Synthetic
gggaggccucacaaucaug

SEQ ID NO: 337221 - RNA, 20 nt, Artificial Sequence
  Synthetic
agggaggccucacaaucaug

SEQ ID NO: 337222 - RNA, 21 nt, Artificial Sequence
  Synthetic
uagggaggccucacaaucaug

SEQ ID NO: 337223 - RNA, 22 nt, Artificial Sequence
  Synthetic
cuagggaggccucacaaucaug

SEQ ID NO: 337224 - RNA, 23 nt, Artificial Sequence
  Synthetic
acuagggaggccucacaaucaug

SEQ ID NO: 337225 - RNA, 24 nt, Artificial Sequence
  Synthetic
gacuagggaggccucacaaucaug

SEQ ID NO: 337226 - RNA, 18 nt, Artificial Sequence
  Synthetic
aggaaacuuauaaucaug

SEQ ID NO: 337227 - RNA, 19 nt, Artificial Sequence
  Synthetic
caggaaacuuauaaucaug

SEQ ID NO: 337228 - RNA, 20 nt, Artificial Sequence
  Synthetic
ucaggaaacuuauaaucaug

SEQ ID NO: 337229 - RNA, 21 nt, Artificial Sequence
  Synthetic
cucaggaaacuuauaaucaug

SEQ ID NO: 337230 - RNA, 22 nt, Artificial Sequence
  Synthetic
ccucaggaaacuuauaaucaug

SEQ ID NO: 337231 - RNA, 23 nt, Artificial Sequence
  Synthetic
gccucaggaaacuuauaaucaug

SEQ ID NO: 337232 - RNA, 24 nt, Artificial Sequence
  Synthetic
ggccucaggaaacuuauaaucaug

SEQ ID NO: 337233 - RNA, 18 nt, Artificial Sequence
  Synthetic
ggaaauauaguaaucaug

SEQ ID NO: 337234 - RNA, 19 nt, Artificial Sequence
  Synthetic
aggaaauauaguaaucaug

SEQ ID NO: 337235 - RNA, 20 nt, Artificial Sequence
  Synthetic
aaggaaauauaguaaucaug

SEQ ID NO: 337236 - RNA, 21 nt, Artificial Sequence
  Synthetic
gaaggaaauauaguaaucaug

SEQ ID NO: 337237 - RNA, 22 nt, Artificial Sequence
  Synthetic
agaaggaaauauaguaaucaug

SEQ ID NO: 337238 - RNA, 23 nt, Artificial Sequence
  Synthetic
cagaaggaaauauaguaaucaug

SEQ ID NO: 337239 - RNA, 24 nt, Artificial Sequence
  Synthetic
gcagaaggaaauauaguaaucaug

SEQ ID NO: 337240 - RNA, 18 nt, Artificial Sequence
  Synthetic
ggcaugcuaguaaucaug

SEQ ID NO: 337241 - RNA, 19 nt, Artificial Sequence
  Synthetic
aggcaugcuaguaaucaug

SEQ ID NO: 337242 - RNA, 20 nt, Artificial Sequence
  Synthetic
gaggcaugcuaguaaucaug

SEQ ID NO: 337243 - RNA, 21 nt, Artificial Sequence
  Synthetic
agaggcaugcuaguaaucaug

SEQ ID NO: 337244 - RNA, 22 nt, Artificial Sequence
  Synthetic
cagaggcaugcuaguaaucaug

SEQ ID NO: 337245 - RNA, 23 nt, Artificial Sequence
  Synthetic
ucagaggcaugcuaguaaucaug

SEQ ID NO: 337246 - RNA, 24 nt, Artificial Sequence
  Synthetic
uucagaggcaugcuaguaaucaug

SEQ ID NO: 337247 - RNA, 18 nt, Artificial Sequence
  Synthetic
cauaauaaucacaucaug

SEQ ID NO: 337248 - RNA, 19 nt, Artificial Sequence
  Synthetic
gcauaauaaucacaucaug

SEQ ID NO: 337249 - RNA, 20 nt, Artificial Sequence
  Synthetic
ugcauaauaaucacaucaug

SEQ ID NO: 337250 - RNA, 21 nt, Artificial Sequence
  Synthetic
augcauaauaaucacaucaug

SEQ ID NO: 337251 - RNA, 22 nt, Artificial Sequence
  Synthetic
aaugcauaauaaucacaucaug

SEQ ID NO: 337252 - RNA, 23 nt, Artificial Sequence
  Synthetic
caaugcauaauaaucacaucaug

SEQ ID NO: 337253 - RNA, 24 nt, Artificial Sequence
  Synthetic
gcaaugcauaauaaucacaucaug

SEQ ID NO: 337254 - RNA, 18 nt, Artificial Sequence
  Synthetic
caggcuuugaccaucaug

SEQ ID NO: 337255 - RNA, 19 nt, Artificial Sequence
  Synthetic
ucaggcuuugaccaucaug

SEQ ID NO: 337256 - RNA, 20 nt, Artificial Sequence
  Synthetic
gucaggcuuugaccaucaug

SEQ ID NO: 337257 - RNA, 21 nt, Artificial Sequence
  Synthetic
ggucaggcuuugaccaucaug

SEQ ID NO: 337258 - RNA, 22 nt, Artificial Sequence
  Synthetic
gggucaggcuuugaccaucaug

SEQ ID NO: 337259 - RNA, 23 nt, Artificial Sequence
  Synthetic
ugggucaggcuuugaccaucaug

SEQ ID NO: 337260 - RNA, 24 nt, Artificial Sequence
  Synthetic
cugggucaggcuuugaccaucaug

SEQ ID NO: 337261 - RNA, 18 nt, Artificial Sequence
  Synthetic
gguauagguaccaucaug

SEQ ID NO: 337262 - RNA, 19 nt, Artificial Sequence
  Synthetic
agguauagguaccaucaug

SEQ ID NO: 337263 - RNA, 20 nt, Artificial Sequence
  Synthetic
gagguauagguaccaucaug

SEQ ID NO: 337264 - RNA, 21 nt, Artificial Sequence
  Synthetic
agagguauagguaccaucaug

SEQ ID NO: 337265 - RNA, 22 nt, Artificial Sequence
  Synthetic
uagagguauagguaccaucaug

SEQ ID NO: 337266 - RNA, 23 nt, Artificial Sequence
  Synthetic
cuagagguauagguaccaucaug

SEQ ID NO: 337267 - RNA, 24 nt, Artificial Sequence
  Synthetic
ucuagagguauagguaccaucaug

SEQ ID NO: 337268 - RNA, 18 nt, Artificial Sequence
  Synthetic
gaauauuuuuccaucaug

SEQ ID NO: 337269 - RNA, 19 nt, Artificial Sequence
  Synthetic
ugaauauuuuuccaucaug

SEQ ID NO: 337270 - RNA, 20 nt, Artificial Sequence
  Synthetic
cugaauauuuuuccaucaug

SEQ ID NO: 337271 - RNA, 21 nt, Artificial Sequence
  Synthetic
ccugaauauuuuuccaucaug

SEQ ID NO: 337272 - RNA, 22 nt, Artificial Sequence
  Synthetic
cccugaauauuuuuccaucaug

SEQ ID NO: 337273 - RNA, 23 nt, Artificial Sequence
  Synthetic
acccugaauauuuuuccaucaug

SEQ ID NO: 337274 - RNA, 24 nt, Artificial Sequence
  Synthetic
cacccugaauauuuuuccaucaug

SEQ ID NO: 337275 - RNA, 18 nt, Artificial Sequence
  Synthetic
gaaacuuaaaauaucaug

SEQ ID NO: 337276 - RNA, 19 nt, Artificial Sequence
  Synthetic
agaaacuuaaaauaucaug

SEQ ID NO: 337277 - RNA, 20 nt, Artificial Sequence
  Synthetic
cagaaacuuaaaauaucaug

SEQ ID NO: 337278 - RNA, 21 nt, Artificial Sequence
  Synthetic
gcagaaacuuaaaauaucaug

SEQ ID NO: 337279 - RNA, 22 nt, Artificial Sequence
  Synthetic
agcagaaacuuaaaauaucaug

SEQ ID NO: 337280 - RNA, 23 nt, Artificial Sequence
  Synthetic
aagcagaaacuuaaaauaucaug

SEQ ID NO: 337281 - RNA, 24 nt, Artificial Sequence
  Synthetic
caagcagaaacuuaaaauaucaug

SEQ ID NO: 337282 - RNA, 18 nt, Artificial Sequence
  Synthetic
ugccugcccaauaucaug

SEQ ID NO: 337283 - RNA, 19 nt, Artificial Sequence
  Synthetic
gugccugcccaauaucaug

SEQ ID NO: 337284 - RNA, 20 nt, Artificial Sequence
  Synthetic
agugccugcccaauaucaug

SEQ ID NO: 337285 - RNA, 21 nt, Artificial Sequence
  Synthetic
cagugccugcccaauaucaug

SEQ ID NO: 337286 - RNA, 22 nt, Artificial Sequence
  Synthetic
ucagugccugcccaauaucaug

SEQ ID NO: 337287 - RNA, 23 nt, Artificial Sequence
  Synthetic
uucagugccugcccaauaucaug

SEQ ID NO: 337288 - RNA, 24 nt, Artificial Sequence
  Synthetic
cuucagugccugcccaauaucaug

SEQ ID NO: 337289 - RNA, 18 nt, Artificial Sequence
  Synthetic
agucuuuuugauaucaug

SEQ ID NO: 337290 - RNA, 19 nt, Artificial Sequence
  Synthetic
cagucuuuuugauaucaug

SEQ ID NO: 337291 - RNA, 20 nt, Artificial Sequence
  Synthetic
ucagucuuuuugauaucaug

SEQ ID NO: 337292 - RNA, 21 nt, Artificial Sequence
  Synthetic
cucagucuuuuugauaucaug

SEQ ID NO: 337293 - RNA, 22 nt, Artificial Sequence
  Synthetic
ccucagucuuuuugauaucaug

SEQ ID NO: 337294 - RNA, 23 nt, Artificial Sequence
  Synthetic
uccucagucuuuuugauaucaug

SEQ ID NO: 337295 - RNA, 24 nt, Artificial Sequence
  Synthetic
uuccucagucuuuuugauaucaug

SEQ ID NO: 337296 - RNA, 18 nt, Artificial Sequence
  Synthetic
agaacacauggacucaug

SEQ ID NO: 337297 - RNA, 19 nt, Artificial Sequence
  Synthetic
gagaacacauggacucaug

SEQ ID NO: 337298 - RNA, 20 nt, Artificial Sequence
  Synthetic
ugagaacacauggacucaug

SEQ ID NO: 337299 - RNA, 21 nt, Artificial Sequence
  Synthetic
augagaacacauggacucaug

SEQ ID NO: 337300 - RNA, 22 nt, Artificial Sequence
  Synthetic
aaugagaacacauggacucaug

SEQ ID NO: 337301 - RNA, 23 nt, Artificial Sequence
  Synthetic
caaugagaacacauggacucaug

SEQ ID NO: 337302 - RNA, 24 nt, Artificial Sequence
  Synthetic
acaaugagaacacauggacucaug

SEQ ID NO: 337303 - RNA, 18 nt, Artificial Sequence
  Synthetic
agggagcuuuuacucaug

SEQ ID NO: 337304 - RNA, 19 nt, Artificial Sequence
  Synthetic
cagggagcuuuuacucaug

SEQ ID NO: 337305 - RNA, 20 nt, Artificial Sequence
  Synthetic
ucagggagcuuuuacucaug

SEQ ID NO: 337306 - RNA, 21 nt, Artificial Sequence
  Synthetic
cucagggagcuuuuacucaug

SEQ ID NO: 337307 - RNA, 22 nt, Artificial Sequence
  Synthetic
ccucagggagcuuuuacucaug

SEQ ID NO: 337308 - RNA, 23 nt, Artificial Sequence
  Synthetic
gccucagggagcuuuuacucaug

SEQ ID NO: 337309 - RNA, 24 nt, Artificial Sequence
  Synthetic
ggccucagggagcuuuuacucaug

SEQ ID NO: 337310 - RNA, 18 nt, Artificial Sequence
  Synthetic
uguacucaguagcucaug

SEQ ID NO: 337311 - RNA, 19 nt, Artificial Sequence
  Synthetic
auguacucaguagcucaug

SEQ ID NO: 337312 - RNA, 20 nt, Artificial Sequence
  Synthetic
cauguacucaguagcucaug

SEQ ID NO: 337313 - RNA, 21 nt, Artificial Sequence
  Synthetic
ucauguacucaguagcucaug

SEQ ID NO: 337314 - RNA, 22 nt, Artificial Sequence
  Synthetic
cucauguacucaguagcucaug

SEQ ID NO: 337315 - RNA, 23 nt, Artificial Sequence
  Synthetic
ucucauguacucaguagcucaug

SEQ ID NO: 337316 - RNA, 24 nt, Artificial Sequence
  Synthetic
gucucauguacucaguagcucaug

SEQ ID NO: 337317 - RNA, 18 nt, Artificial Sequence
  Synthetic
aauaagagauggcucaug

SEQ ID NO: 337318 - RNA, 19 nt, Artificial Sequence
  Synthetic
aaauaagagauggcucaug

SEQ ID NO: 337319 - RNA, 20 nt, Artificial Sequence
  Synthetic
aaaauaagagauggcucaug

SEQ ID NO: 337320 - RNA, 21 nt, Artificial Sequence
  Synthetic
uaaaauaagagauggcucaug

SEQ ID NO: 337321 - RNA, 22 nt, Artificial Sequence
  Synthetic
guaaaauaagagauggcucaug

SEQ ID NO: 337322 - RNA, 23 nt, Artificial Sequence
  Synthetic
gguaaaauaagagauggcucaug

SEQ ID NO: 337323 - RNA, 24 nt, Artificial Sequence
  Synthetic
ggguaaaauaagagauggcucaug

SEQ ID NO: 337324 - RNA, 18 nt, Artificial Sequence
  Synthetic
gcauauuauucucucaug

SEQ ID NO: 337325 - RNA, 19 nt, Artificial Sequence
  Synthetic
ggcauauuauucucucaug

SEQ ID NO: 337326 - RNA, 20 nt, Artificial Sequence
  Synthetic
uggcauauuauucucucaug

SEQ ID NO: 337327 - RNA, 21 nt, Artificial Sequence
  Synthetic
auggcauauuauucucucaug

SEQ ID NO: 337328 - RNA, 22 nt, Artificial Sequence
  Synthetic
uauggcauauuauucucucaug

SEQ ID NO: 337329 - RNA, 23 nt, Artificial Sequence
  Synthetic
auauggcauauuauucucucaug

SEQ ID NO: 337330 - RNA, 24 nt, Artificial Sequence
  Synthetic
uauauggcauauuauucucucaug

SEQ ID NO: 337331 - RNA, 18 nt, Artificial Sequence
  Synthetic
ucugaaagaugucucaug

SEQ ID NO: 337332 - RNA, 19 nt, Artificial Sequence
  Synthetic
aucugaaagaugucucaug

SEQ ID NO: 337333 - RNA, 20 nt, Artificial Sequence
  Synthetic
gaucugaaagaugucucaug

SEQ ID NO: 337334 - RNA, 21 nt, Artificial Sequence
  Synthetic
ugaucugaaagaugucucaug

SEQ ID NO: 337335 - RNA, 22 nt, Artificial Sequence
  Synthetic
cugaucugaaagaugucucaug

SEQ ID NO: 337336 - RNA, 23 nt, Artificial Sequence
  Synthetic
acugaucugaaagaugucucaug

SEQ ID NO: 337337 - RNA, 24 nt, Artificial Sequence
  Synthetic
cacugaucugaaagaugucucaug

SEQ ID NO: 337338 - RNA, 18 nt, Artificial Sequence
  Synthetic
cugugacccauucucaug

SEQ ID NO: 337339 - RNA, 19 nt, Artificial Sequence
  Synthetic
acugugacccauucucaug

SEQ ID NO: 337340 - RNA, 20 nt, Artificial Sequence
  Synthetic
aacugugacccauucucaug

SEQ ID NO: 337341 - RNA, 21 nt, Artificial Sequence
  Synthetic
caacugugacccauucucaug

SEQ ID NO: 337342 - RNA, 22 nt, Artificial Sequence
  Synthetic
ucaacugugacccauucucaug

SEQ ID NO: 337343 - RNA, 23 nt, Artificial Sequence
  Synthetic
uucaacugugacccauucucaug

SEQ ID NO: 337344 - RNA, 24 nt, Artificial Sequence
  Synthetic
guucaacugugacccauucucaug

SEQ ID NO: 337345 - RNA, 18 nt, Artificial Sequence
  Synthetic
aucagaaagguucucaug

SEQ ID NO: 337346 - RNA, 19 nt, Artificial Sequence
  Synthetic
uaucagaaagguucucaug

SEQ ID NO: 337347 - RNA, 20 nt, Artificial Sequence
  Synthetic
guaucagaaagguucucaug

SEQ ID NO: 337348 - RNA, 21 nt, Artificial Sequence
  Synthetic
aguaucagaaagguucucaug

SEQ ID NO: 337349 - RNA, 22 nt, Artificial Sequence
  Synthetic
uaguaucagaaagguucucaug

SEQ ID NO: 337350 - RNA, 23 nt, Artificial Sequence
  Synthetic
guaguaucagaaagguucucaug

SEQ ID NO: 337351 - RNA, 24 nt, Artificial Sequence
  Synthetic
gguaguaucagaaagguucucaug

SEQ ID NO: 337352 - RNA, 18 nt, Artificial Sequence
  Synthetic
guauacaaccaagucaug

SEQ ID NO: 337353 - RNA, 19 nt, Artificial Sequence
  Synthetic
aguauacaaccaagucaug

SEQ ID NO: 337354 - RNA, 20 nt, Artificial Sequence
  Synthetic
uaguauacaaccaagucaug

SEQ ID NO: 337355 - RNA, 21 nt, Artificial Sequence
  Synthetic
guaguauacaaccaagucaug

SEQ ID NO: 337356 - RNA, 22 nt, Artificial Sequence
  Synthetic
gguaguauacaaccaagucaug

SEQ ID NO: 337357 - RNA, 23 nt, Artificial Sequence
  Synthetic
agguaguauacaaccaagucaug

SEQ ID NO: 337358 - RNA, 24 nt, Artificial Sequence
  Synthetic
uagguaguauacaaccaagucaug

SEQ ID NO: 337359 - RNA, 18 nt, Artificial Sequence
  Synthetic
ucuuuguaucaagucaug

SEQ ID NO: 337360 - RNA, 19 nt, Artificial Sequence
  Synthetic
uucuuuguaucaagucaug

SEQ ID NO: 337361 - RNA, 20 nt, Artificial Sequence
  Synthetic
auucuuuguaucaagucaug

SEQ ID NO: 337362 - RNA, 21 nt, Artificial Sequence
  Synthetic
uauucuuuguaucaagucaug

SEQ ID NO: 337363 - RNA, 22 nt, Artificial Sequence
  Synthetic
guauucuuuguaucaagucaug

SEQ ID NO: 337364 - RNA, 23 nt, Artificial Sequence
  Synthetic
uguauucuuuguaucaagucaug

SEQ ID NO: 337365 - RNA, 24 nt, Artificial Sequence
  Synthetic
guguauucuuuguaucaagucaug

SEQ ID NO: 337366 - RNA, 18 nt, Artificial Sequence
  Synthetic
acauccaaggaagucaug

SEQ ID NO: 337367 - RNA, 19 nt, Artificial Sequence
  Synthetic
gacauccaaggaagucaug

SEQ ID NO: 337368 - RNA, 20 nt, Artificial Sequence
  Synthetic
ugacauccaaggaagucaug

SEQ ID NO: 337369 - RNA, 21 nt, Artificial Sequence
  Synthetic
cugacauccaaggaagucaug

SEQ ID NO: 337370 - RNA, 22 nt, Artificial Sequence
  Synthetic
acugacauccaaggaagucaug

SEQ ID NO: 337371 - RNA, 23 nt, Artificial Sequence
  Synthetic
aacugacauccaaggaagucaug

SEQ ID NO: 337372 - RNA, 24 nt, Artificial Sequence
  Synthetic
caacugacauccaaggaagucaug

SEQ ID NO: 337373 - RNA, 18 nt, Artificial Sequence
  Synthetic
gaggccuccccagucaug

SEQ ID NO: 337374 - RNA, 19 nt, Artificial Sequence
  Synthetic
ugaggccuccccagucaug

SEQ ID NO: 337375 - RNA, 20 nt, Artificial Sequence
  Synthetic
cugaggccuccccagucaug

SEQ ID NO: 337376 - RNA, 21 nt, Artificial Sequence
  Synthetic
ucugaggccuccccagucaug

SEQ ID NO: 337377 - RNA, 22 nt, Artificial Sequence
  Synthetic
uucugaggccuccccagucaug

SEQ ID NO: 337378 - RNA, 23 nt, Artificial Sequence
  Synthetic
auucugaggccuccccagucaug

SEQ ID NO: 337379 - RNA, 24 nt, Artificial Sequence
  Synthetic
gauucugaggccuccccagucaug

SEQ ID NO: 337380 - RNA, 18 nt, Artificial Sequence
  Synthetic
aaaaguuucaaggucaug

SEQ ID NO: 337381 - RNA, 19 nt, Artificial Sequence
  Synthetic
caaaaguuucaaggucaug

SEQ ID NO: 337382 - RNA, 20 nt, Artificial Sequence
  Synthetic
ucaaaaguuucaaggucaug

SEQ ID NO: 337383 - RNA, 21 nt, Artificial Sequence
  Synthetic
uucaaaaguuucaaggucaug

SEQ ID NO: 337384 - RNA, 22 nt, Artificial Sequence
  Synthetic
auucaaaaguuucaaggucaug

SEQ ID NO: 337385 - RNA, 23 nt, Artificial Sequence
  Synthetic
uauucaaaaguuucaaggucaug

SEQ ID NO: 337386 - RNA, 24 nt, Artificial Sequence
  Synthetic
cuauucaaaaguuucaaggucaug

SEQ ID NO: 337387 - RNA, 18 nt, Artificial Sequence
  Synthetic
gugucucccuaggucaug

SEQ ID NO: 337388 - RNA, 19 nt, Artificial Sequence
  Synthetic
ggugucucccuaggucaug

SEQ ID NO: 337389 - RNA, 20 nt, Artificial Sequence
  Synthetic
uggugucucccuaggucaug

SEQ ID NO: 337390 - RNA, 21 nt, Artificial Sequence
  Synthetic
cuggugucucccuaggucaug

SEQ ID NO: 337391 - RNA, 22 nt, Artificial Sequence
  Synthetic
gcuggugucucccuaggucaug

SEQ ID NO: 337392 - RNA, 23 nt, Artificial Sequence
  Synthetic
agcuggugucucccuaggucaug

SEQ ID NO: 337393 - RNA, 24 nt, Artificial Sequence
  Synthetic
cagcuggugucucccuaggucaug

SEQ ID NO: 337394 - RNA, 18 nt, Artificial Sequence
  Synthetic
aaaaccggagaugucaug

SEQ ID NO: 337395 - RNA, 19 nt, Artificial Sequence
  Synthetic
uaaaaccggagaugucaug

SEQ ID NO: 337396 - RNA, 20 nt, Artificial Sequence
  Synthetic
auaaaaccggagaugucaug

SEQ ID NO: 337397 - RNA, 21 nt, Artificial Sequence
  Synthetic
aauaaaaccggagaugucaug

SEQ ID NO: 337398 - RNA, 22 nt, Artificial Sequence
  Synthetic
aaauaaaaccggagaugucaug

SEQ ID NO: 337399 - RNA, 23 nt, Artificial Sequence
  Synthetic
gaaauaaaaccggagaugucaug

SEQ ID NO: 337400 - RNA, 24 nt, Artificial Sequence
  Synthetic
agaaauaaaaccggagaugucaug

SEQ ID NO: 337401 - RNA, 18 nt, Artificial Sequence
  Synthetic
auaucaauugcugucaug

SEQ ID NO: 337402 - RNA, 19 nt, Artificial Sequence
  Synthetic
aauaucaauugcugucaug

SEQ ID NO: 337403 - RNA, 20 nt, Artificial Sequence
  Synthetic
caauaucaauugcugucaug

SEQ ID NO: 337404 - RNA, 21 nt, Artificial Sequence
  Synthetic
ucaauaucaauugcugucaug

SEQ ID NO: 337405 - RNA, 22 nt, Artificial Sequence
  Synthetic
gucaauaucaauugcugucaug

SEQ ID NO: 337406 - RNA, 23 nt, Artificial Sequence
  Synthetic
agucaauaucaauugcugucaug

SEQ ID NO: 337407 - RNA, 24 nt, Artificial Sequence
  Synthetic
cagucaauaucaauugcugucaug

SEQ ID NO: 337408 - RNA, 18 nt, Artificial Sequence
  Synthetic
guucucucaucugucaug

SEQ ID NO: 337409 - RNA, 19 nt, Artificial Sequence
  Synthetic
gguucucucaucugucaug

SEQ ID NO: 337410 - RNA, 20 nt, Artificial Sequence
  Synthetic
ugguucucucaucugucaug

SEQ ID NO: 337411 - RNA, 21 nt, Artificial Sequence
  Synthetic
gugguucucucaucugucaug

SEQ ID NO: 337412 - RNA, 22 nt, Artificial Sequence
  Synthetic
ugugguucucucaucugucaug

SEQ ID NO: 337413 - RNA, 23 nt, Artificial Sequence
  Synthetic
cugugguucucucaucugucaug

SEQ ID NO: 337414 - RNA, 24 nt, Artificial Sequence
  Synthetic
acugugguucucucaucugucaug

SEQ ID NO: 337415 - RNA, 18 nt, Artificial Sequence
  Synthetic
gauugccacaaauucaug

SEQ ID NO: 337416 - RNA, 19 nt, Artificial Sequence
  Synthetic
agauugccacaaauucaug

SEQ ID NO: 337417 - RNA, 20 nt, Artificial Sequence
  Synthetic
aagauugccacaaauucaug

SEQ ID NO: 337418 - RNA, 21 nt, Artificial Sequence
  Synthetic
caagauugccacaaauucaug

SEQ ID NO: 337419 - RNA, 22 nt, Artificial Sequence
  Synthetic
acaagauugccacaaauucaug

SEQ ID NO: 337420 - RNA, 23 nt, Artificial Sequence
  Synthetic
uacaagauugccacaaauucaug

SEQ ID NO: 337421 - RNA, 24 nt, Artificial Sequence
  Synthetic
uuacaagauugccacaaauucaug

SEQ ID NO: 337422 - RNA, 18 nt, Artificial Sequence
  Synthetic
cauuuuacauaauucaug

SEQ ID NO: 337423 - RNA, 19 nt, Artificial Sequence
  Synthetic
acauuuuacauaauucaug

SEQ ID NO: 337424 - RNA, 20 nt, Artificial Sequence
  Synthetic
aacauuuuacauaauucaug

SEQ ID NO: 337425 - RNA, 21 nt, Artificial Sequence
  Synthetic
gaacauuuuacauaauucaug

SEQ ID NO: 337426 - RNA, 22 nt, Artificial Sequence
  Synthetic
cgaacauuuuacauaauucaug

SEQ ID NO: 337427 - RNA, 23 nt, Artificial Sequence
  Synthetic
acgaacauuuuacauaauucaug

SEQ ID NO: 337428 - RNA, 24 nt, Artificial Sequence
  Synthetic
uacgaacauuuuacauaauucaug

SEQ ID NO: 337429 - RNA, 18 nt, Artificial Sequence
  Synthetic
uggacuuucuaauucaug

SEQ ID NO: 337430 - RNA, 19 nt, Artificial Sequence
  Synthetic
uuggacuuucuaauucaug

SEQ ID NO: 337431 - RNA, 20 nt, Artificial Sequence
  Synthetic
auuggacuuucuaauucaug

SEQ ID NO: 337432 - RNA, 21 nt, Artificial Sequence
  Synthetic
uauuggacuuucuaauucaug

SEQ ID NO: 337433 - RNA, 22 nt, Artificial Sequence
  Synthetic
guauuggacuuucuaauucaug

SEQ ID NO: 337434 - RNA, 23 nt, Artificial Sequence
  Synthetic
aguauuggacuuucuaauucaug

SEQ ID NO: 337435 - RNA, 24 nt, Artificial Sequence
  Synthetic
caguauuggacuuucuaauucaug

SEQ ID NO: 337436 - RNA, 18 nt, Artificial Sequence
  Synthetic
aggcuucuuccauucaug

SEQ ID NO: 337437 - RNA, 19 nt, Artificial Sequence
  Synthetic
caggcuucuuccauucaug

SEQ ID NO: 337438 - RNA, 20 nt, Artificial Sequence
  Synthetic
ucaggcuucuuccauucaug

SEQ ID NO: 337439 - RNA, 21 nt, Artificial Sequence
  Synthetic
cucaggcuucuuccauucaug

SEQ ID NO: 337440 - RNA, 22 nt, Artificial Sequence
  Synthetic
ccucaggcuucuuccauucaug

SEQ ID NO: 337441 - RNA, 23 nt, Artificial Sequence
  Synthetic
gccucaggcuucuuccauucaug

SEQ ID NO: 337442 - RNA, 24 nt, Artificial Sequence
  Synthetic
ggccucaggcuucuuccauucaug

SEQ ID NO: 337443 - RNA, 18 nt, Artificial Sequence
  Synthetic
uaauuguacauauucaug

SEQ ID NO: 337444 - RNA, 19 nt, Artificial Sequence
  Synthetic
auaauuguacauauucaug

SEQ ID NO: 337445 - RNA, 20 nt, Artificial Sequence
  Synthetic
aauaauuguacauauucaug

SEQ ID NO: 337446 - RNA, 21 nt, Artificial Sequence
  Synthetic
uaauaauuguacauauucaug

SEQ ID NO: 337447 - RNA, 22 nt, Artificial Sequence
  Synthetic
auaauaauuguacauauucaug

SEQ ID NO: 337448 - RNA, 23 nt, Artificial Sequence
  Synthetic
aauaauaauuguacauauucaug

SEQ ID NO: 337449 - RNA, 24 nt, Artificial Sequence
  Synthetic
aaauaauaauuguacauauucaug

SEQ ID NO: 337450 - RNA, 18 nt, Artificial Sequence
  Synthetic
auccuuacuauauucaug

SEQ ID NO: 337451 - RNA, 19 nt, Artificial Sequence
  Synthetic
aauccuuacuauauucaug

SEQ ID NO: 337452 - RNA, 20 nt, Artificial Sequence
  Synthetic
aaauccuuacuauauucaug

SEQ ID NO: 337453 - RNA, 21 nt, Artificial Sequence
  Synthetic
aaaauccuuacuauauucaug

SEQ ID NO: 337454 - RNA, 22 nt, Artificial Sequence
  Synthetic
uaaaauccuuacuauauucaug

SEQ ID NO: 337455 - RNA, 23 nt, Artificial Sequence
  Synthetic
cuaaaauccuuacuauauucaug

SEQ ID NO: 337456 - RNA, 24 nt, Artificial Sequence
  Synthetic
acuaaaauccuuacuauauucaug

SEQ ID NO: 337457 - RNA, 18 nt, Artificial Sequence
  Synthetic
ucuaugaaauccuucaug

SEQ ID NO: 337458 - RNA, 19 nt, Artificial Sequence
  Synthetic
aucuaugaaauccuucaug

SEQ ID NO: 337459 - RNA, 20 nt, Artificial Sequence
  Synthetic
aaucuaugaaauccuucaug

SEQ ID NO: 337460 - RNA, 21 nt, Artificial Sequence
  Synthetic
aaaucuaugaaauccuucaug

SEQ ID NO: 337461 - RNA, 22 nt, Artificial Sequence
  Synthetic
caaaucuaugaaauccuucaug

SEQ ID NO: 337462 - RNA, 23 nt, Artificial Sequence
  Synthetic
ccaaaucuaugaaauccuucaug

SEQ ID NO: 337463 - RNA, 24 nt, Artificial Sequence
  Synthetic
accaaaucuaugaaauccuucaug

SEQ ID NO: 337464 - RNA, 18 nt, Artificial Sequence
  Synthetic
aucaaggaaggcuucaug

SEQ ID NO: 337465 - RNA, 19 nt, Artificial Sequence
  Synthetic
aaucaaggaaggcuucaug

SEQ ID NO: 337466 - RNA, 20 nt, Artificial Sequence
  Synthetic
aaaucaaggaaggcuucaug

SEQ ID NO: 337467 - RNA, 21 nt, Artificial Sequence
  Synthetic
uaaaucaaggaaggcuucaug

SEQ ID NO: 337468 - RNA, 22 nt, Artificial Sequence
  Synthetic
cuaaaucaaggaaggcuucaug

SEQ ID NO: 337469 - RNA, 23 nt, Artificial Sequence
  Synthetic
gcuaaaucaaggaaggcuucaug

SEQ ID NO: 337470 - RNA, 24 nt, Artificial Sequence
  Synthetic
agcuaaaucaaggaaggcuucaug

SEQ ID NO: 337471 - RNA, 18 nt, Artificial Sequence
  Synthetic
uauaguaaaauguucaug

SEQ ID NO: 337472 - RNA, 19 nt, Artificial Sequence
  Synthetic
guauaguaaaauguucaug

SEQ ID NO: 337473 - RNA, 20 nt, Artificial Sequence
  Synthetic
aguauaguaaaauguucaug

SEQ ID NO: 337474 - RNA, 21 nt, Artificial Sequence
  Synthetic
gaguauaguaaaauguucaug

SEQ ID NO: 337475 - RNA, 22 nt, Artificial Sequence
  Synthetic
cgaguauaguaaaauguucaug

SEQ ID NO: 337476 - RNA, 23 nt, Artificial Sequence
  Synthetic
acgaguauaguaaaauguucaug

SEQ ID NO: 337477 - RNA, 24 nt, Artificial Sequence
  Synthetic
aacgaguauaguaaaauguucaug

SEQ ID NO: 337478 - RNA, 18 nt, Artificial Sequence
  Synthetic
guaaucagacauuucaug

SEQ ID NO: 337479 - RNA, 19 nt, Artificial Sequence
  Synthetic
aguaaucagacauuucaug

SEQ ID NO: 337480 - RNA, 20 nt, Artificial Sequence
  Synthetic
uaguaaucagacauuucaug

SEQ ID NO: 337481 - RNA, 21 nt, Artificial Sequence
  Synthetic
guaguaaucagacauuucaug

SEQ ID NO: 337482 - RNA, 22 nt, Artificial Sequence
  Synthetic
gguaguaaucagacauuucaug

SEQ ID NO: 337483 - RNA, 23 nt, Artificial Sequence
  Synthetic
ugguaguaaucagacauuucaug

SEQ ID NO: 337484 - RNA, 24 nt, Artificial Sequence
  Synthetic
uugguaguaaucagacauuucaug

SEQ ID NO: 337485 - RNA, 18 nt, Artificial Sequence
  Synthetic
agccugauacauuucaug

SEQ ID NO: 337486 - RNA, 19 nt, Artificial Sequence
  Synthetic
gagccugauacauuucaug

SEQ ID NO: 337487 - RNA, 20 nt, Artificial Sequence
  Synthetic
ugagccugauacauuucaug

SEQ ID NO: 337488 - RNA, 21 nt, Artificial Sequence
  Synthetic
cugagccugauacauuucaug

SEQ ID NO: 337489 - RNA, 22 nt, Artificial Sequence
  Synthetic
ucugagccugauacauuucaug

SEQ ID NO: 337490 - RNA, 23 nt, Artificial Sequence
  Synthetic
cucugagccugauacauuucaug

SEQ ID NO: 337491 - RNA, 24 nt, Artificial Sequence
  Synthetic
ucucugagccugauacauuucaug

SEQ ID NO: 337492 - RNA, 18 nt, Artificial Sequence
  Synthetic
uugguuugcucuuucaug

SEQ ID NO: 337493 - RNA, 19 nt, Artificial Sequence
  Synthetic
cuugguuugcucuuucaug

SEQ ID NO: 337494 - RNA, 20 nt, Artificial Sequence
  Synthetic
acuugguuugcucuuucaug

SEQ ID NO: 337495 - RNA, 21 nt, Artificial Sequence
  Synthetic
gacuugguuugcucuuucaug

SEQ ID NO: 337496 - RNA, 22 nt, Artificial Sequence
  Synthetic
agacuugguuugcucuuucaug

SEQ ID NO: 337497 - RNA, 23 nt, Artificial Sequence
  Synthetic
uagacuugguuugcucuuucaug

SEQ ID NO: 337498 - RNA, 24 nt, Artificial Sequence
  Synthetic
uuagacuugguuugcucuuucaug

SEQ ID NO: 337499 - RNA, 18 nt, Artificial Sequence
  Synthetic
aaaaaaaagcuuuucaug

SEQ ID NO: 337500 - RNA, 19 nt, Artificial Sequence
  Synthetic
uaaaaaaaagcuuuucaug

SEQ ID NO: 337501 - RNA, 20 nt, Artificial Sequence
  Synthetic
auaaaaaaaagcuuuucaug

SEQ ID NO: 337502 - RNA, 21 nt, Artificial Sequence
  Synthetic
uauaaaaaaaagcuuuucaug

SEQ ID NO: 337503 - RNA, 22 nt, Artificial Sequence
  Synthetic
auauaaaaaaaagcuuuucaug

SEQ ID NO: 337504 - RNA, 23 nt, Artificial Sequence
  Synthetic
uauauaaaaaaaagcuuuucaug

SEQ ID NO: 337505 - RNA, 24 nt, Artificial Sequence
  Synthetic
cuauauaaaaaaaagcuuuucaug

SEQ ID NO: 337506 - RNA, 18 nt, Artificial Sequence
  Synthetic
ccaaauacaguuuucaug

SEQ ID NO: 337507 - RNA, 19 nt, Artificial Sequence
  Synthetic
accaaauacaguuuucaug

SEQ ID NO: 337508 - RNA, 20 nt, Artificial Sequence
  Synthetic
gaccaaauacaguuuucaug

SEQ ID NO: 337509 - RNA, 21 nt, Artificial Sequence
  Synthetic
ugaccaaauacaguuuucaug

SEQ ID NO: 337510 - RNA, 22 nt, Artificial Sequence
  Synthetic
augaccaaauacaguuuucaug

SEQ ID NO: 337511 - RNA, 23 nt, Artificial Sequence
  Synthetic
aaugaccaaauacaguuuucaug

SEQ ID NO: 337512 - RNA, 24 nt, Artificial Sequence
  Synthetic
aaaugaccaaauacaguuuucaug

SEQ ID NO: 337513 - RNA, 18 nt, Artificial Sequence
  Synthetic
aaaauaaaccaaaagaug

SEQ ID NO: 337514 - RNA, 19 nt, Artificial Sequence
  Synthetic
aaaaauaaaccaaaagaug

SEQ ID NO: 337515 - RNA, 20 nt, Artificial Sequence
  Synthetic
caaaaauaaaccaaaagaug

SEQ ID NO: 337516 - RNA, 21 nt, Artificial Sequence
  Synthetic
acaaaaauaaaccaaaagaug

SEQ ID NO: 337517 - RNA, 22 nt, Artificial Sequence
  Synthetic
aacaaaaauaaaccaaaagaug

SEQ ID NO: 337518 - RNA, 23 nt, Artificial Sequence
  Synthetic
aaacaaaaauaaaccaaaagaug

SEQ ID NO: 337519 - RNA, 24 nt, Artificial Sequence
  Synthetic
uaaacaaaaauaaaccaaaagaug

SEQ ID NO: 337520 - RNA, 18 nt, Artificial Sequence
  Synthetic
auuagguaggaaaagaug

SEQ ID NO: 337521 - RNA, 19 nt, Artificial Sequence
  Synthetic
cauuagguaggaaaagaug

SEQ ID NO: 337522 - RNA, 20 nt, Artificial Sequence
  Synthetic
acauuagguaggaaaagaug

SEQ ID NO: 337523 - RNA, 21 nt, Artificial Sequence
  Synthetic
aacauuagguaggaaaagaug

SEQ ID NO: 337524 - RNA, 22 nt, Artificial Sequence
  Synthetic
caacauuagguaggaaaagaug

SEQ ID NO: 337525 - RNA, 23 nt, Artificial Sequence
  Synthetic
ucaacauuagguaggaaaagaug

SEQ ID NO: 337526 - RNA, 24 nt, Artificial Sequence
  Synthetic
cucaacauuagguaggaaaagaug

SEQ ID NO: 337527 - RNA, 18 nt, Artificial Sequence
  Synthetic
uuuaguauggaaaagaug

SEQ ID NO: 337528 - RNA, 19 nt, Artificial Sequence
  Synthetic
uuuuaguauggaaaagaug

SEQ ID NO: 337529 - RNA, 20 nt, Artificial Sequence
  Synthetic
uuuuuaguauggaaaagaug

SEQ ID NO: 337530 - RNA, 21 nt, Artificial Sequence
  Synthetic
auuuuuaguauggaaaagaug

SEQ ID NO: 337531 - RNA, 22 nt, Artificial Sequence
  Synthetic
cauuuuuaguauggaaaagaug

SEQ ID NO: 337532 - RNA, 23 nt, Artificial Sequence
  Synthetic
acauuuuuaguauggaaaagaug

SEQ ID NO: 337533 - RNA, 24 nt, Artificial Sequence
  Synthetic
uacauuuuuaguauggaaaagaug

SEQ ID NO: 337534 - RNA, 18 nt, Artificial Sequence
  Synthetic
aagauccuuccaaagaug

SEQ ID NO: 337535 - RNA, 19 nt, Artificial Sequence
  Synthetic
caagauccuuccaaagaug

SEQ ID NO: 337536 - RNA, 20 nt, Artificial Sequence
  Synthetic
ccaagauccuuccaaagaug

SEQ ID NO: 337537 - RNA, 21 nt, Artificial Sequence
  Synthetic
gccaagauccuuccaaagaug

SEQ ID NO: 337538 - RNA, 22 nt, Artificial Sequence
  Synthetic
agccaagauccuuccaaagaug

SEQ ID NO: 337539 - RNA, 23 nt, Artificial Sequence
  Synthetic
cagccaagauccuuccaaagaug

SEQ ID NO: 337540 - RNA, 24 nt, Artificial Sequence
  Synthetic
acagccaagauccuuccaaagaug

SEQ ID NO: 337541 - RNA, 18 nt, Artificial Sequence
  Synthetic
acagugcaaagaaagaug

SEQ ID NO: 337542 - RNA, 19 nt, Artificial Sequence
  Synthetic
uacagugcaaagaaagaug

SEQ ID NO: 337543 - RNA, 20 nt, Artificial Sequence
  Synthetic
auacagugcaaagaaagaug

SEQ ID NO: 337544 - RNA, 21 nt, Artificial Sequence
  Synthetic
uauacagugcaaagaaagaug

SEQ ID NO: 337545 - RNA, 22 nt, Artificial Sequence
  Synthetic
cuauacagugcaaagaaagaug

SEQ ID NO: 337546 - RNA, 23 nt, Artificial Sequence
  Synthetic
acuauacagugcaaagaaagaug

SEQ ID NO: 337547 - RNA, 24 nt, Artificial Sequence
  Synthetic
aacuauacagugcaaagaaagaug

SEQ ID NO: 337548 - RNA, 18 nt, Artificial Sequence
  Synthetic
aaauaauuaagaaagaug

SEQ ID NO: 337549 - RNA, 19 nt, Artificial Sequence
  Synthetic
aaaauaauuaagaaagaug

SEQ ID NO: 337550 - RNA, 20 nt, Artificial Sequence
  Synthetic
uaaaauaauuaagaaagaug

SEQ ID NO: 337551 - RNA, 21 nt, Artificial Sequence
  Synthetic
cuaaaauaauuaagaaagaug

SEQ ID NO: 337552 - RNA, 22 nt, Artificial Sequence
  Synthetic
acuaaaauaauuaagaaagaug

SEQ ID NO: 337553 - RNA, 23 nt, Artificial Sequence
  Synthetic
uacuaaaauaauuaagaaagaug

SEQ ID NO: 337554 - RNA, 24 nt, Artificial Sequence
  Synthetic
uuacuaaaauaauuaagaaagaug

SEQ ID NO: 337555 - RNA, 18 nt, Artificial Sequence
  Synthetic
aguggugccagaaagaug

SEQ ID NO: 337556 - RNA, 19 nt, Artificial Sequence
  Synthetic
aaguggugccagaaagaug

SEQ ID NO: 337557 - RNA, 20 nt, Artificial Sequence
  Synthetic
aaaguggugccagaaagaug

SEQ ID NO: 337558 - RNA, 21 nt, Artificial Sequence
  Synthetic
caaaguggugccagaaagaug

SEQ ID NO: 337559 - RNA, 22 nt, Artificial Sequence
  Synthetic
gcaaaguggugccagaaagaug

SEQ ID NO: 337560 - RNA, 23 nt, Artificial Sequence
  Synthetic
ugcaaaguggugccagaaagaug

SEQ ID NO: 337561 - RNA, 24 nt, Artificial Sequence
  Synthetic
augcaaaguggugccagaaagaug

SEQ ID NO: 337562 - RNA, 18 nt, Artificial Sequence
  Synthetic
ugaaguuagagaaagaug

SEQ ID NO: 337563 - RNA, 19 nt, Artificial Sequence
  Synthetic
augaaguuagagaaagaug

SEQ ID NO: 337564 - RNA, 20 nt, Artificial Sequence
  Synthetic
aaugaaguuagagaaagaug

SEQ ID NO: 337565 - RNA, 21 nt, Artificial Sequence
  Synthetic
aaaugaaguuagagaaagaug

SEQ ID NO: 337566 - RNA, 22 nt, Artificial Sequence
  Synthetic
gaaaugaaguuagagaaagaug

SEQ ID NO: 337567 - RNA, 23 nt, Artificial Sequence
  Synthetic
ggaaaugaaguuagagaaagaug

SEQ ID NO: 337568 - RNA, 24 nt, Artificial Sequence
  Synthetic
uggaaaugaaguuagagaaagaug

SEQ ID NO: 337569 - RNA, 18 nt, Artificial Sequence
  Synthetic
augguagcaauaaagaug

SEQ ID NO: 337570 - RNA, 19 nt, Artificial Sequence
  Synthetic
caugguagcaauaaagaug

SEQ ID NO: 337571 - RNA, 20 nt, Artificial Sequence
  Synthetic
ccaugguagcaauaaagaug

SEQ ID NO: 337572 - RNA, 21 nt, Artificial Sequence
  Synthetic
accaugguagcaauaaagaug

SEQ ID NO: 337573 - RNA, 22 nt, Artificial Sequence
  Synthetic
uaccaugguagcaauaaagaug

SEQ ID NO: 337574 - RNA, 23 nt, Artificial Sequence
  Synthetic
auaccaugguagcaauaaagaug

SEQ ID NO: 337575 - RNA, 24 nt, Artificial Sequence
  Synthetic
aauaccaugguagcaauaaagaug

SEQ ID NO: 337576 - RNA, 18 nt, Artificial Sequence
  Synthetic
ugaaguaggaacaagaug

SEQ ID NO: 337577 - RNA, 19 nt, Artificial Sequence
  Synthetic
cugaaguaggaacaagaug

SEQ ID NO: 337578 - RNA, 20 nt, Artificial Sequence
  Synthetic
acugaaguaggaacaagaug

SEQ ID NO: 337579 - RNA, 21 nt, Artificial Sequence
  Synthetic
uacugaaguaggaacaagaug

SEQ ID NO: 337580 - RNA, 22 nt, Artificial Sequence
  Synthetic
auacugaaguaggaacaagaug

SEQ ID NO: 337581 - RNA, 23 nt, Artificial Sequence
  Synthetic
gauacugaaguaggaacaagaug

SEQ ID NO: 337582 - RNA, 24 nt, Artificial Sequence
  Synthetic
cgauacugaaguaggaacaagaug

SEQ ID NO: 337583 - RNA, 18 nt, Artificial Sequence
  Synthetic
cagagccuaaccaagaug

SEQ ID NO: 337584 - RNA, 19 nt, Artificial Sequence
  Synthetic
acagagccuaaccaagaug

SEQ ID NO: 337585 - RNA, 20 nt, Artificial Sequence
  Synthetic
cacagagccuaaccaagaug

SEQ ID NO: 337586 - RNA, 21 nt, Artificial Sequence
  Synthetic
ccacagagccuaaccaagaug

SEQ ID NO: 337587 - RNA, 22 nt, Artificial Sequence
  Synthetic
cccacagagccuaaccaagaug

SEQ ID NO: 337588 - RNA, 23 nt, Artificial Sequence
  Synthetic
ccccacagagccuaaccaagaug

SEQ ID NO: 337589 - RNA, 24 nt, Artificial Sequence
  Synthetic
uccccacagagccuaaccaagaug

SEQ ID NO: 337590 - RNA, 18 nt, Artificial Sequence
  Synthetic
uuucuuauuuccaagaug

SEQ ID NO: 337591 - RNA, 19 nt, Artificial Sequence
  Synthetic
cuuucuuauuuccaagaug

SEQ ID NO: 337592 - RNA, 20 nt, Artificial Sequence
  Synthetic
acuuucuuauuuccaagaug

SEQ ID NO: 337593 - RNA, 21 nt, Artificial Sequence
  Synthetic
aacuuucuuauuuccaagaug

SEQ ID NO: 337594 - RNA, 22 nt, Artificial Sequence
  Synthetic
uaacuuucuuauuuccaagaug

SEQ ID NO: 337595 - RNA, 23 nt, Artificial Sequence
  Synthetic
cuaacuuucuuauuuccaagaug

SEQ ID NO: 337596 - RNA, 24 nt, Artificial Sequence
  Synthetic
ucuaacuuucuuauuuccaagaug

SEQ ID NO: 337597 - RNA, 18 nt, Artificial Sequence
  Synthetic
gaugaggaaaagaagaug

SEQ ID NO: 337598 - RNA, 19 nt, Artificial Sequence
  Synthetic
agaugaggaaaagaagaug

SEQ ID NO: 337599 - RNA, 20 nt, Artificial Sequence
  Synthetic
cagaugaggaaaagaagaug

SEQ ID NO: 337600 - RNA, 21 nt, Artificial Sequence
  Synthetic
acagaugaggaaaagaagaug

SEQ ID NO: 337601 - RNA, 22 nt, Artificial Sequence
  Synthetic
uacagaugaggaaaagaagaug

SEQ ID NO: 337602 - RNA, 23 nt, Artificial Sequence
  Synthetic
uuacagaugaggaaaagaagaug

SEQ ID NO: 337603 - RNA, 24 nt, Artificial Sequence
  Synthetic
cuuacagaugaggaaaagaagaug

SEQ ID NO: 337604 - RNA, 18 nt, Artificial Sequence
  Synthetic
gauaaauccacgaagaug

SEQ ID NO: 337605 - RNA, 19 nt, Artificial Sequence
  Synthetic
agauaaauccacgaagaug

SEQ ID NO: 337606 - RNA, 20 nt, Artificial Sequence
  Synthetic
uagauaaauccacgaagaug

SEQ ID NO: 337607 - RNA, 21 nt, Artificial Sequence
  Synthetic
guagauaaauccacgaagaug

SEQ ID NO: 337608 - RNA, 22 nt, Artificial Sequence
  Synthetic
gguagauaaauccacgaagaug

SEQ ID NO: 337609 - RNA, 23 nt, Artificial Sequence
  Synthetic
agguagauaaauccacgaagaug

SEQ ID NO: 337610 - RNA, 24 nt, Artificial Sequence
  Synthetic
aagguagauaaauccacgaagaug

SEQ ID NO: 337611 - RNA, 18 nt, Artificial Sequence
  Synthetic
caggugcuggggaagaug

SEQ ID NO: 337612 - RNA, 19 nt, Artificial Sequence
  Synthetic
ucaggugcuggggaagaug

SEQ ID NO: 337613 - RNA, 20 nt, Artificial Sequence
  Synthetic
aucaggugcuggggaagaug

SEQ ID NO: 337614 - RNA, 21 nt, Artificial Sequence
  Synthetic
caucaggugcuggggaagaug

SEQ ID NO: 337615 - RNA, 22 nt, Artificial Sequence
  Synthetic
acaucaggugcuggggaagaug

SEQ ID NO: 337616 - RNA, 23 nt, Artificial Sequence
  Synthetic
aacaucaggugcuggggaagaug

SEQ ID NO: 337617 - RNA, 24 nt, Artificial Sequence
  Synthetic
aaacaucaggugcuggggaagaug

SEQ ID NO: 337618 - RNA, 18 nt, Artificial Sequence
  Synthetic
gaagaaagacugaagaug

SEQ ID NO: 337619 - RNA, 19 nt, Artificial Sequence
  Synthetic
agaagaaagacugaagaug

SEQ ID NO: 337620 - RNA, 20 nt, Artificial Sequence
  Synthetic
aagaagaaagacugaagaug

SEQ ID NO: 337621 - RNA, 21 nt, Artificial Sequence
  Synthetic
uaagaagaaagacugaagaug

SEQ ID NO: 337622 - RNA, 22 nt, Artificial Sequence
  Synthetic
uuaagaagaaagacugaagaug

SEQ ID NO: 337623 - RNA, 23 nt, Artificial Sequence
  Synthetic
cuuaagaagaaagacugaagaug

SEQ ID NO: 337624 - RNA, 24 nt, Artificial Sequence
  Synthetic
acuuaagaagaaagacugaagaug

SEQ ID NO: 337625 - RNA, 18 nt, Artificial Sequence
  Synthetic
cuacuggcauugaagaug

SEQ ID NO: 337626 - RNA, 19 nt, Artificial Sequence
  Synthetic
acuacuggcauugaagaug

SEQ ID NO: 337627 - RNA, 20 nt, Artificial Sequence
  Synthetic
cacuacuggcauugaagaug

SEQ ID NO: 337628 - RNA, 21 nt, Artificial Sequence
  Synthetic
acacuacuggcauugaagaug

SEQ ID NO: 337629 - RNA, 22 nt, Artificial Sequence
  Synthetic
uacacuacuggcauugaagaug

SEQ ID NO: 337630 - RNA, 23 nt, Artificial Sequence
  Synthetic
cuacacuacuggcauugaagaug

SEQ ID NO: 337631 - RNA, 24 nt, Artificial Sequence
  Synthetic
gcuacacuacuggcauugaagaug

SEQ ID NO: 337632 - RNA, 18 nt, Artificial Sequence
  Synthetic
aauuggauguugaagaug

SEQ ID NO: 337633 - RNA, 19 nt, Artificial Sequence
  Synthetic
uaauuggauguugaagaug

SEQ ID NO: 337634 - RNA, 20 nt, Artificial Sequence
  Synthetic
guaauuggauguugaagaug

SEQ ID NO: 337635 - RNA, 21 nt, Artificial Sequence
  Synthetic
aguaauuggauguugaagaug

SEQ ID NO: 337636 - RNA, 22 nt, Artificial Sequence
  Synthetic
uaguaauuggauguugaagaug

SEQ ID NO: 337637 - RNA, 23 nt, Artificial Sequence
  Synthetic
uuaguaauuggauguugaagaug

SEQ ID NO: 337638 - RNA, 24 nt, Artificial Sequence
  Synthetic
uuuaguaauuggauguugaagaug

SEQ ID NO: 337639 - RNA, 18 nt, Artificial Sequence
  Synthetic
auuaacacuuguaagaug

SEQ ID NO: 337640 - RNA, 19 nt, Artificial Sequence
  Synthetic
uauuaacacuuguaagaug

SEQ ID NO: 337641 - RNA, 20 nt, Artificial Sequence
  Synthetic
uuauuaacacuuguaagaug

SEQ ID NO: 337642 - RNA, 21 nt, Artificial Sequence
  Synthetic
auuauuaacacuuguaagaug

SEQ ID NO: 337643 - RNA, 22 nt, Artificial Sequence
  Synthetic
uauuauuaacacuuguaagaug

SEQ ID NO: 337644 - RNA, 23 nt, Artificial Sequence
  Synthetic
cuauuauuaacacuuguaagaug

SEQ ID NO: 337645 - RNA, 24 nt, Artificial Sequence
  Synthetic
ccuauuauuaacacuuguaagaug

SEQ ID NO: 337646 - RNA, 18 nt, Artificial Sequence
  Synthetic
ucuuuuauccuuaagaug

SEQ ID NO: 337647 - RNA, 19 nt, Artificial Sequence
  Synthetic
gucuuuuauccuuaagaug

SEQ ID NO: 337648 - RNA, 20 nt, Artificial Sequence
  Synthetic
ugucuuuuauccuuaagaug

SEQ ID NO: 337649 - RNA, 21 nt, Artificial Sequence
  Synthetic
uugucuuuuauccuuaagaug

SEQ ID NO: 337650 - RNA, 22 nt, Artificial Sequence
  Synthetic
auugucuuuuauccuuaagaug

SEQ ID NO: 337651 - RNA, 23 nt, Artificial Sequence
  Synthetic
aauugucuuuuauccuuaagaug

SEQ ID NO: 337652 - RNA, 24 nt, Artificial Sequence
  Synthetic
uaauugucuuuuauccuuaagaug

SEQ ID NO: 337653 - RNA, 18 nt, Artificial Sequence
  Synthetic
auaaaauccuuuaagaug

SEQ ID NO: 337654 - RNA, 19 nt, Artificial Sequence
  Synthetic
aauaaaauccuuuaagaug

SEQ ID NO: 337655 - RNA, 20 nt, Artificial Sequence
  Synthetic
aaauaaaauccuuuaagaug

SEQ ID NO: 337656 - RNA, 21 nt, Artificial Sequence
  Synthetic
uaaauaaaauccuuuaagaug

SEQ ID NO: 337657 - RNA, 22 nt, Artificial Sequence
  Synthetic
guaaauaaaauccuuuaagaug

SEQ ID NO: 337658 - RNA, 23 nt, Artificial Sequence
  Synthetic
uguaaauaaaauccuuuaagaug

SEQ ID NO: 337659 - RNA, 24 nt, Artificial Sequence
  Synthetic
uuguaaauaaaauccuuuaagaug

SEQ ID NO: 337660 - RNA, 18 nt, Artificial Sequence
  Synthetic
gaaggcaguuuuaagaug

SEQ ID NO: 337661 - RNA, 19 nt, Artificial Sequence
  Synthetic
ugaaggcaguuuuaagaug

SEQ ID NO: 337662 - RNA, 20 nt, Artificial Sequence
  Synthetic
augaaggcaguuuuaagaug

SEQ ID NO: 337663 - RNA, 21 nt, Artificial Sequence
  Synthetic
aaugaaggcaguuuuaagaug

SEQ ID NO: 337664 - RNA, 22 nt, Artificial Sequence
  Synthetic
aaaugaaggcaguuuuaagaug

SEQ ID NO: 337665 - RNA, 23 nt, Artificial Sequence
  Synthetic
caaaugaaggcaguuuuaagaug

SEQ ID NO: 337666 - RNA, 24 nt, Artificial Sequence
  Synthetic
ccaaaugaaggcaguuuuaagaug

SEQ ID NO: 337667 - RNA, 18 nt, Artificial Sequence
  Synthetic
gucaggaaacaacagaug

SEQ ID NO: 337668 - RNA, 19 nt, Artificial Sequence
  Synthetic
agucaggaaacaacagaug

SEQ ID NO: 337669 - RNA, 20 nt, Artificial Sequence
  Synthetic
aagucaggaaacaacagaug

SEQ ID NO: 337670 - RNA, 18 nt, Artificial Sequence
  Synthetic
uugcaaaggacacagaug

SEQ ID NO: 337671 - RNA, 19 nt, Artificial Sequence
  Synthetic
auugcaaaggacacagaug

SEQ ID NO: 337672 - RNA, 20 nt, Artificial Sequence
  Synthetic
uauugcaaaggacacagaug

SEQ ID NO: 337673 - RNA, 21 nt, Artificial Sequence
  Synthetic
auauugcaaaggacacagaug

SEQ ID NO: 337674 - RNA, 22 nt, Artificial Sequence
  Synthetic
gauauugcaaaggacacagaug

SEQ ID NO: 337675 - RNA, 23 nt, Artificial Sequence
  Synthetic
ggauauugcaaaggacacagaug

SEQ ID NO: 337676 - RNA, 24 nt, Artificial Sequence
  Synthetic
aggauauugcaaaggacacagaug

SEQ ID NO: 337677 - RNA, 18 nt, Artificial Sequence
  Synthetic
uugcauuaccgacagaug

SEQ ID NO: 337678 - RNA, 19 nt, Artificial Sequence
  Synthetic
uuugcauuaccgacagaug

SEQ ID NO: 337679 - RNA, 20 nt, Artificial Sequence
  Synthetic
guuugcauuaccgacagaug

SEQ ID NO: 337680 - RNA, 21 nt, Artificial Sequence
  Synthetic
cguuugcauuaccgacagaug

SEQ ID NO: 337681 - RNA, 22 nt, Artificial Sequence
  Synthetic
ccguuugcauuaccgacagaug

SEQ ID NO: 337682 - RNA, 23 nt, Artificial Sequence
  Synthetic
cccguuugcauuaccgacagaug

SEQ ID NO: 337683 - RNA, 24 nt, Artificial Sequence
  Synthetic
ucccguuugcauuaccgacagaug

SEQ ID NO: 337684 - RNA, 18 nt, Artificial Sequence
  Synthetic
cagcuggguugacagaug

SEQ ID NO: 337685 - RNA, 19 nt, Artificial Sequence
  Synthetic
gcagcuggguugacagaug

SEQ ID NO: 337686 - RNA, 20 nt, Artificial Sequence
  Synthetic
ggcagcuggguugacagaug

SEQ ID NO: 337687 - RNA, 21 nt, Artificial Sequence
  Synthetic
uggcagcuggguugacagaug

SEQ ID NO: 337688 - RNA, 22 nt, Artificial Sequence
  Synthetic
auggcagcuggguugacagaug

SEQ ID NO: 337689 - RNA, 23 nt, Artificial Sequence
  Synthetic
aauggcagcuggguugacagaug

SEQ ID NO: 337690 - RNA, 24 nt, Artificial Sequence
  Synthetic
aaauggcagcuggguugacagaug

SEQ ID NO: 337691 - RNA, 18 nt, Artificial Sequence
  Synthetic
auagaucucuuacagaug

SEQ ID NO: 337692 - RNA, 19 nt, Artificial Sequence
  Synthetic
aauagaucucuuacagaug

SEQ ID NO: 337693 - RNA, 20 nt, Artificial Sequence
  Synthetic
uaauagaucucuuacagaug

SEQ ID NO: 337694 - RNA, 21 nt, Artificial Sequence
  Synthetic
auaauagaucucuuacagaug

SEQ ID NO: 337695 - RNA, 22 nt, Artificial Sequence
  Synthetic
cauaauagaucucuuacagaug

SEQ ID NO: 337696 - RNA, 23 nt, Artificial Sequence
  Synthetic
ucauaauagaucucuuacagaug

SEQ ID NO: 337697 - RNA, 24 nt, Artificial Sequence
  Synthetic
cucauaauagaucucuuacagaug

SEQ ID NO: 337698 - RNA, 18 nt, Artificial Sequence
  Synthetic
agcauuuaaaaccagaug

SEQ ID NO: 337699 - RNA, 19 nt, Artificial Sequence
  Synthetic
uagcauuuaaaaccagaug

SEQ ID NO: 337700 - RNA, 20 nt, Artificial Sequence
  Synthetic
auagcauuuaaaaccagaug

SEQ ID NO: 337701 - RNA, 21 nt, Artificial Sequence
  Synthetic
aauagcauuuaaaaccagaug

SEQ ID NO: 337702 - RNA, 22 nt, Artificial Sequence
  Synthetic
uaauagcauuuaaaaccagaug

SEQ ID NO: 337703 - RNA, 23 nt, Artificial Sequence
  Synthetic
guaauagcauuuaaaaccagaug

SEQ ID NO: 337704 - RNA, 24 nt, Artificial Sequence
  Synthetic
aguaauagcauuuaaaaccagaug

SEQ ID NO: 337705 - RNA, 18 nt, Artificial Sequence
  Synthetic
uagaugggugcccagaug

SEQ ID NO: 337706 - RNA, 19 nt, Artificial Sequence
  Synthetic
auagaugggugcccagaug

SEQ ID NO: 337707 - RNA, 20 nt, Artificial Sequence
  Synthetic
aauagaugggugcccagaug

SEQ ID NO: 337708 - RNA, 21 nt, Artificial Sequence
  Synthetic
gaauagaugggugcccagaug

SEQ ID NO: 337709 - RNA, 22 nt, Artificial Sequence
  Synthetic
agaauagaugggugcccagaug

SEQ ID NO: 337710 - RNA, 23 nt, Artificial Sequence
  Synthetic
cagaauagaugggugcccagaug

SEQ ID NO: 337711 - RNA, 24 nt, Artificial Sequence
  Synthetic
ccagaauagaugggugcccagaug

SEQ ID NO: 337712 - RNA, 18 nt, Artificial Sequence
  Synthetic
uucaaaaucuuccagaug

SEQ ID NO: 337713 - RNA, 19 nt, Artificial Sequence
  Synthetic
uuucaaaaucuuccagaug

SEQ ID NO: 337714 - RNA, 20 nt, Artificial Sequence
  Synthetic
cuuucaaaaucuuccagaug

SEQ ID NO: 337715 - RNA, 21 nt, Artificial Sequence
  Synthetic
acuuucaaaaucuuccagaug

SEQ ID NO: 337716 - RNA, 22 nt, Artificial Sequence
  Synthetic
cacuuucaaaaucuuccagaug

SEQ ID NO: 337717 - RNA, 23 nt, Artificial Sequence
  Synthetic
ucacuuucaaaaucuuccagaug

SEQ ID NO: 337718 - RNA, 24 nt, Artificial Sequence
  Synthetic
uucacuuucaaaaucuuccagaug

SEQ ID NO: 337719 - RNA, 18 nt, Artificial Sequence
  Synthetic
uagcaaguauagcagaug

SEQ ID NO: 337720 - RNA, 19 nt, Artificial Sequence
  Synthetic
cuagcaaguauagcagaug

SEQ ID NO: 337721 - RNA, 20 nt, Artificial Sequence
  Synthetic
acuagcaaguauagcagaug

SEQ ID NO: 337722 - RNA, 21 nt, Artificial Sequence
  Synthetic
cacuagcaaguauagcagaug

SEQ ID NO: 337723 - RNA, 22 nt, Artificial Sequence
  Synthetic
acacuagcaaguauagcagaug

SEQ ID NO: 337724 - RNA, 23 nt, Artificial Sequence
  Synthetic
aacacuagcaaguauagcagaug

SEQ ID NO: 337725 - RNA, 24 nt, Artificial Sequence
  Synthetic
aaacacuagcaaguauagcagaug

SEQ ID NO: 337726 - RNA, 18 nt, Artificial Sequence
  Synthetic
uuacaaucauggcagaug

SEQ ID NO: 337727 - RNA, 19 nt, Artificial Sequence
  Synthetic
cuuacaaucauggcagaug

SEQ ID NO: 337728 - RNA, 20 nt, Artificial Sequence
  Synthetic
acuuacaaucauggcagaug

SEQ ID NO: 337729 - RNA, 21 nt, Artificial Sequence
  Synthetic
aacuuacaaucauggcagaug

SEQ ID NO: 337730 - RNA, 22 nt, Artificial Sequence
  Synthetic
aaacuuacaaucauggcagaug

SEQ ID NO: 337731 - RNA, 23 nt, Artificial Sequence
  Synthetic
gaaacuuacaaucauggcagaug

SEQ ID NO: 337732 - RNA, 24 nt, Artificial Sequence
  Synthetic
ggaaacuuacaaucauggcagaug

SEQ ID NO: 337733 - RNA, 18 nt, Artificial Sequence
  Synthetic
cauuuuuagcaucagaug

SEQ ID NO: 337734 - RNA, 19 nt, Artificial Sequence
  Synthetic
ucauuuuuagcaucagaug

SEQ ID NO: 337735 - RNA, 20 nt, Artificial Sequence
  Synthetic
cucauuuuuagcaucagaug

SEQ ID NO: 337736 - RNA, 21 nt, Artificial Sequence
  Synthetic
acucauuuuuagcaucagaug

SEQ ID NO: 337737 - RNA, 22 nt, Artificial Sequence
  Synthetic
aacucauuuuuagcaucagaug

SEQ ID NO: 337738 - RNA, 23 nt, Artificial Sequence
  Synthetic
uaacucauuuuuagcaucagaug

SEQ ID NO: 337739 - RNA, 24 nt, Artificial Sequence
  Synthetic
auaacucauuuuuagcaucagaug

SEQ ID NO: 337740 - RNA, 18 nt, Artificial Sequence
  Synthetic
gaaacaauucaucagaug

SEQ ID NO: 337741 - RNA, 19 nt, Artificial Sequence
  Synthetic
ugaaacaauucaucagaug

SEQ ID NO: 337742 - RNA, 20 nt, Artificial Sequence
  Synthetic
augaaacaauucaucagaug

SEQ ID NO: 337743 - RNA, 21 nt, Artificial Sequence
  Synthetic
aaugaaacaauucaucagaug

SEQ ID NO: 337744 - RNA, 22 nt, Artificial Sequence
  Synthetic
gaaugaaacaauucaucagaug

SEQ ID NO: 337745 - RNA, 23 nt, Artificial Sequence
  Synthetic
ugaaugaaacaauucaucagaug

SEQ ID NO: 337746 - RNA, 24 nt, Artificial Sequence
  Synthetic
uugaaugaaacaauucaucagaug

SEQ ID NO: 337747 - RNA, 18 nt, Artificial Sequence
  Synthetic
uauacccauacucagaug

SEQ ID NO: 337748 - RNA, 19 nt, Artificial Sequence
  Synthetic
uuauacccauacucagaug

SEQ ID NO: 337749 - RNA, 20 nt, Artificial Sequence
  Synthetic
auuauacccauacucagaug

SEQ ID NO: 337750 - RNA, 21 nt, Artificial Sequence
  Synthetic
uauuauacccauacucagaug

SEQ ID NO: 337751 - RNA, 22 nt, Artificial Sequence
  Synthetic
uuauuauacccauacucagaug

SEQ ID NO: 337752 - RNA, 23 nt, Artificial Sequence
  Synthetic
auuauuauacccauacucagaug

SEQ ID NO: 337753 - RNA, 24 nt, Artificial Sequence
  Synthetic
uauuauuauacccauacucagaug

SEQ ID NO: 337754 - RNA, 18 nt, Artificial Sequence
  Synthetic
gcugugaucucucagaug

SEQ ID NO: 337755 - RNA, 19 nt, Artificial Sequence
  Synthetic
ugcugugaucucucagaug

SEQ ID NO: 337756 - RNA, 20 nt, Artificial Sequence
  Synthetic
cugcugugaucucucagaug

SEQ ID NO: 337757 - RNA, 21 nt, Artificial Sequence
  Synthetic
ccugcugugaucucucagaug

SEQ ID NO: 337758 - RNA, 22 nt, Artificial Sequence
  Synthetic
cccugcugugaucucucagaug

SEQ ID NO: 337759 - RNA, 23 nt, Artificial Sequence
  Synthetic
acccugcugugaucucucagaug

SEQ ID NO: 337760 - RNA, 24 nt, Artificial Sequence
  Synthetic
gacccugcugugaucucucagaug

SEQ ID NO: 337761 - RNA, 18 nt, Artificial Sequence
  Synthetic
aucaaacagauucagaug

SEQ ID NO: 337762 - RNA, 19 nt, Artificial Sequence
  Synthetic
uaucaaacagauucagaug

SEQ ID NO: 337763 - RNA, 20 nt, Artificial Sequence
  Synthetic
auaucaaacagauucagaug

SEQ ID NO: 337764 - RNA, 21 nt, Artificial Sequence
  Synthetic
aauaucaaacagauucagaug

SEQ ID NO: 337765 - RNA, 22 nt, Artificial Sequence
  Synthetic
uaauaucaaacagauucagaug

SEQ ID NO: 337766 - RNA, 23 nt, Artificial Sequence
  Synthetic
auaauaucaaacagauucagaug

SEQ ID NO: 337767 - RNA, 24 nt, Artificial Sequence
  Synthetic
gauaauaucaaacagauucagaug

SEQ ID NO: 337768 - RNA, 18 nt, Artificial Sequence
  Synthetic
cagccucuccuucagaug

SEQ ID NO: 337769 - RNA, 19 nt, Artificial Sequence
  Synthetic
acagccucuccuucagaug

SEQ ID NO: 337770 - RNA, 20 nt, Artificial Sequence
  Synthetic
gacagccucuccuucagaug

SEQ ID NO: 337771 - RNA, 21 nt, Artificial Sequence
  Synthetic
agacagccucuccuucagaug

SEQ ID NO: 337772 - RNA, 22 nt, Artificial Sequence
  Synthetic
cagacagccucuccuucagaug

SEQ ID NO: 337773 - RNA, 23 nt, Artificial Sequence
  Synthetic
ucagacagccucuccuucagaug

SEQ ID NO: 337774 - RNA, 24 nt, Artificial Sequence
  Synthetic
cucagacagccucuccuucagaug

SEQ ID NO: 337775 - RNA, 18 nt, Artificial Sequence
  Synthetic
cucagggaaaaagagaug

SEQ ID NO: 337776 - RNA, 19 nt, Artificial Sequence
  Synthetic
acucagggaaaaagagaug

SEQ ID NO: 337777 - RNA, 20 nt, Artificial Sequence
  Synthetic
uacucagggaaaaagagaug

SEQ ID NO: 337778 - RNA, 21 nt, Artificial Sequence
  Synthetic
auacucagggaaaaagagaug

SEQ ID NO: 337779 - RNA, 22 nt, Artificial Sequence
  Synthetic
gauacucagggaaaaagagaug

SEQ ID NO: 337780 - RNA, 23 nt, Artificial Sequence
  Synthetic
ugauacucagggaaaaagagaug

SEQ ID NO: 337781 - RNA, 24 nt, Artificial Sequence
  Synthetic
augauacucagggaaaaagagaug

SEQ ID NO: 337782 - RNA, 18 nt, Artificial Sequence
  Synthetic
gcccagauucaagagaug

SEQ ID NO: 337783 - RNA, 19 nt, Artificial Sequence
  Synthetic
agcccagauucaagagaug

SEQ ID NO: 337784 - RNA, 20 nt, Artificial Sequence
  Synthetic
cagcccagauucaagagaug

SEQ ID NO: 337785 - RNA, 21 nt, Artificial Sequence
  Synthetic
ucagcccagauucaagagaug

SEQ ID NO: 337786 - RNA, 22 nt, Artificial Sequence
  Synthetic
aucagcccagauucaagagaug

SEQ ID NO: 337787 - RNA, 23 nt, Artificial Sequence
  Synthetic
gaucagcccagauucaagagaug

SEQ ID NO: 337788 - RNA, 24 nt, Artificial Sequence
  Synthetic
agaucagcccagauucaagagaug

SEQ ID NO: 337789 - RNA, 18 nt, Artificial Sequence
  Synthetic
cuagaaaagauagagaug

SEQ ID NO: 337790 - RNA, 19 nt, Artificial Sequence
  Synthetic
ucuagaaaagauagagaug

SEQ ID NO: 337791 - RNA, 20 nt, Artificial Sequence
  Synthetic
aucuagaaaagauagagaug

SEQ ID NO: 337792 - RNA, 21 nt, Artificial Sequence
  Synthetic
uaucuagaaaagauagagaug

SEQ ID NO: 337793 - RNA, 22 nt, Artificial Sequence
  Synthetic
auaucuagaaaagauagagaug

SEQ ID NO: 337794 - RNA, 23 nt, Artificial Sequence
  Synthetic
gauaucuagaaaagauagagaug

SEQ ID NO: 337795 - RNA, 24 nt, Artificial Sequence
  Synthetic
ugauaucuagaaaagauagagaug

SEQ ID NO: 337796 - RNA, 18 nt, Artificial Sequence
  Synthetic
gguaagugccaggagaug

SEQ ID NO: 337797 - RNA, 19 nt, Artificial Sequence
  Synthetic
agguaagugccaggagaug

SEQ ID NO: 337798 - RNA, 20 nt, Artificial Sequence
  Synthetic
gagguaagugccaggagaug

SEQ ID NO: 337799 - RNA, 21 nt, Artificial Sequence
  Synthetic
agagguaagugccaggagaug

SEQ ID NO: 337800 - RNA, 22 nt, Artificial Sequence
  Synthetic
gagagguaagugccaggagaug

SEQ ID NO: 337801 - RNA, 23 nt, Artificial Sequence
  Synthetic
ggagagguaagugccaggagaug

SEQ ID NO: 337802 - RNA, 24 nt, Artificial Sequence
  Synthetic
uggagagguaagugccaggagaug

SEQ ID NO: 337803 - RNA, 18 nt, Artificial Sequence
  Synthetic
ugagaacacauggagaug

SEQ ID NO: 337804 - RNA, 19 nt, Artificial Sequence
  Synthetic
augagaacacauggagaug

SEQ ID NO: 337805 - RNA, 20 nt, Artificial Sequence
  Synthetic
gaugagaacacauggagaug

SEQ ID NO: 337806 - RNA, 21 nt, Artificial Sequence
  Synthetic
cgaugagaacacauggagaug

SEQ ID NO: 337807 - RNA, 22 nt, Artificial Sequence
  Synthetic
acgaugagaacacauggagaug

SEQ ID NO: 337808 - RNA, 23 nt, Artificial Sequence
  Synthetic
aacgaugagaacacauggagaug

SEQ ID NO: 337809 - RNA, 24 nt, Artificial Sequence
  Synthetic
gaacgaugagaacacauggagaug

SEQ ID NO: 337810 - RNA, 18 nt, Artificial Sequence
  Synthetic
ggacagggauaugagaug

SEQ ID NO: 337811 - RNA, 19 nt, Artificial Sequence
  Synthetic
gggacagggauaugagaug

SEQ ID NO: 337812 - RNA, 20 nt, Artificial Sequence
  Synthetic
ggggacagggauaugagaug

SEQ ID NO: 337813 - RNA, 21 nt, Artificial Sequence
  Synthetic
gggggacagggauaugagaug

SEQ ID NO: 337814 - RNA, 22 nt, Artificial Sequence
  Synthetic
ggggggacagggauaugagaug

SEQ ID NO: 337815 - RNA, 23 nt, Artificial Sequence
  Synthetic
uggggggacagggauaugagaug

SEQ ID NO: 337816 - RNA, 24 nt, Artificial Sequence
  Synthetic
cuggggggacagggauaugagaug

SEQ ID NO: 337817 - RNA, 18 nt, Artificial Sequence
  Synthetic
uaguuaaugacugagaug

SEQ ID NO: 337818 - RNA, 19 nt, Artificial Sequence
  Synthetic
uuaguuaaugacugagaug

SEQ ID NO: 337819 - RNA, 20 nt, Artificial Sequence
  Synthetic
auuaguuaaugacugagaug

SEQ ID NO: 337820 - RNA, 21 nt, Artificial Sequence
  Synthetic
aauuaguuaaugacugagaug

SEQ ID NO: 337821 - RNA, 22 nt, Artificial Sequence
  Synthetic
uaauuaguuaaugacugagaug

SEQ ID NO: 337822 - RNA, 23 nt, Artificial Sequence
  Synthetic
uuaauuaguuaaugacugagaug

SEQ ID NO: 337823 - RNA, 24 nt, Artificial Sequence
  Synthetic
cuuaauuaguuaaugacugagaug

SEQ ID NO: 337824 - RNA, 18 nt, Artificial Sequence
  Synthetic
ucaucauuuacugagaug

SEQ ID NO: 337825 - RNA, 19 nt, Artificial Sequence
  Synthetic
gucaucauuuacugagaug

SEQ ID NO: 337826 - RNA, 20 nt, Artificial Sequence
  Synthetic
ggucaucauuuacugagaug

SEQ ID NO: 337827 - RNA, 21 nt, Artificial Sequence
  Synthetic
gggucaucauuuacugagaug

SEQ ID NO: 337828 - RNA, 22 nt, Artificial Sequence
  Synthetic
ggggucaucauuuacugagaug

SEQ ID NO: 337829 - RNA, 23 nt, Artificial Sequence
  Synthetic
uggggucaucauuuacugagaug

SEQ ID NO: 337830 - RNA, 24 nt, Artificial Sequence
  Synthetic
auggggucaucauuuacugagaug

SEQ ID NO: 337831 - RNA, 18 nt, Artificial Sequence
  Synthetic
gcaggugacuuugagaug

SEQ ID NO: 337832 - RNA, 19 nt, Artificial Sequence
  Synthetic
agcaggugacuuugagaug

SEQ ID NO: 337833 - RNA, 20 nt, Artificial Sequence
  Synthetic
aagcaggugacuuugagaug

SEQ ID NO: 337834 - RNA, 21 nt, Artificial Sequence
  Synthetic
uaagcaggugacuuugagaug

SEQ ID NO: 337835 - RNA, 22 nt, Artificial Sequence
  Synthetic
cuaagcaggugacuuugagaug

SEQ ID NO: 337836 - RNA, 23 nt, Artificial Sequence
  Synthetic
gcuaagcaggugacuuugagaug

SEQ ID NO: 337837 - RNA, 24 nt, Artificial Sequence
  Synthetic
ugcuaagcaggugacuuugagaug

SEQ ID NO: 337838 - RNA, 18 nt, Artificial Sequence
  Synthetic
ugauuaucucaauagaug

SEQ ID NO: 337839 - RNA, 19 nt, Artificial Sequence
  Synthetic
augauuaucucaauagaug

SEQ ID NO: 337840 - RNA, 20 nt, Artificial Sequence
  Synthetic
caugauuaucucaauagaug

SEQ ID NO: 337841 - RNA, 18 nt, Artificial Sequence
  Synthetic
ucaaauuaaacauagaug

SEQ ID NO: 337842 - RNA, 19 nt, Artificial Sequence
  Synthetic
uucaaauuaaacauagaug

SEQ ID NO: 337843 - RNA, 20 nt, Artificial Sequence
  Synthetic
auucaaauuaaacauagaug

SEQ ID NO: 337844 - RNA, 21 nt, Artificial Sequence
  Synthetic
aauucaaauuaaacauagaug

SEQ ID NO: 337845 - RNA, 22 nt, Artificial Sequence
  Synthetic
caauucaaauuaaacauagaug

SEQ ID NO: 337846 - RNA, 23 nt, Artificial Sequence
  Synthetic
ucaauucaaauuaaacauagaug

SEQ ID NO: 337847 - RNA, 24 nt, Artificial Sequence
  Synthetic
aucaauucaaauuaaacauagaug

SEQ ID NO: 337848 - RNA, 18 nt, Artificial Sequence
  Synthetic
auucuucuuuuauagaug

SEQ ID NO: 337849 - RNA, 19 nt, Artificial Sequence
  Synthetic
uauucuucuuuuauagaug

SEQ ID NO: 337850 - RNA, 20 nt, Artificial Sequence
  Synthetic
guauucuucuuuuauagaug

SEQ ID NO: 337851 - RNA, 21 nt, Artificial Sequence
  Synthetic
aguauucuucuuuuauagaug

SEQ ID NO: 337852 - RNA, 22 nt, Artificial Sequence
  Synthetic
gaguauucuucuuuuauagaug

SEQ ID NO: 337853 - RNA, 23 nt, Artificial Sequence
  Synthetic
ugaguauucuucuuuuauagaug

SEQ ID NO: 337854 - RNA, 24 nt, Artificial Sequence
  Synthetic
uugaguauucuucuuuuauagaug

SEQ ID NO: 337855 - RNA, 18 nt, Artificial Sequence
  Synthetic
auuaauuauaacuagaug

SEQ ID NO: 337856 - RNA, 19 nt, Artificial Sequence
  Synthetic
uauuaauuauaacuagaug

SEQ ID NO: 337857 - RNA, 20 nt, Artificial Sequence
  Synthetic
uuauuaauuauaacuagaug

SEQ ID NO: 337858 - RNA, 21 nt, Artificial Sequence
  Synthetic
auuauuaauuauaacuagaug

SEQ ID NO: 337859 - RNA, 22 nt, Artificial Sequence
  Synthetic
uauuauuaauuauaacuagaug

SEQ ID NO: 337860 - RNA, 23 nt, Artificial Sequence
  Synthetic
uuauuauuaauuauaacuagaug

SEQ ID NO: 337861 - RNA, 24 nt, Artificial Sequence
  Synthetic
auuauuauuaauuauaacuagaug

SEQ ID NO: 337862 - RNA, 18 nt, Artificial Sequence
  Synthetic
ccucauuuucccuagaug

SEQ ID NO: 337863 - RNA, 19 nt, Artificial Sequence
  Synthetic
accucauuuucccuagaug

SEQ ID NO: 337864 - RNA, 20 nt, Artificial Sequence
  Synthetic
gaccucauuuucccuagaug

SEQ ID NO: 337865 - RNA, 21 nt, Artificial Sequence
  Synthetic
ugaccucauuuucccuagaug

SEQ ID NO: 337866 - RNA, 22 nt, Artificial Sequence
  Synthetic
gugaccucauuuucccuagaug

SEQ ID NO: 337867 - RNA, 23 nt, Artificial Sequence
  Synthetic
ugugaccucauuuucccuagaug

SEQ ID NO: 337868 - RNA, 24 nt, Artificial Sequence
  Synthetic
augugaccucauuuucccuagaug

SEQ ID NO: 337869 - RNA, 18 nt, Artificial Sequence
  Synthetic
cugacuguguucuagaug

SEQ ID NO: 337870 - RNA, 19 nt, Artificial Sequence
  Synthetic
gcugacuguguucuagaug

SEQ ID NO: 337871 - RNA, 20 nt, Artificial Sequence
  Synthetic
ugcugacuguguucuagaug

SEQ ID NO: 337872 - RNA, 21 nt, Artificial Sequence
  Synthetic
gugcugacuguguucuagaug

SEQ ID NO: 337873 - RNA, 22 nt, Artificial Sequence
  Synthetic
agugcugacuguguucuagaug

SEQ ID NO: 337874 - RNA, 23 nt, Artificial Sequence
  Synthetic
aagugcugacuguguucuagaug

SEQ ID NO: 337875 - RNA, 24 nt, Artificial Sequence
  Synthetic
caagugcugacuguguucuagaug

SEQ ID NO: 337876 - RNA, 18 nt, Artificial Sequence
  Synthetic
aaggugaaacauuagaug

SEQ ID NO: 337877 - RNA, 19 nt, Artificial Sequence
  Synthetic
caaggugaaacauuagaug

SEQ ID NO: 337878 - RNA, 20 nt, Artificial Sequence
  Synthetic
ucaaggugaaacauuagaug

SEQ ID NO: 337879 - RNA, 21 nt, Artificial Sequence
  Synthetic
uucaaggugaaacauuagaug

SEQ ID NO: 337880 - RNA, 22 nt, Artificial Sequence
  Synthetic
uuucaaggugaaacauuagaug

SEQ ID NO: 337881 - RNA, 23 nt, Artificial Sequence
  Synthetic
uuuucaaggugaaacauuagaug

SEQ ID NO: 337882 - RNA, 24 nt, Artificial Sequence
  Synthetic
uuuuucaaggugaaacauuagaug

SEQ ID NO: 337883 - RNA, 18 nt, Artificial Sequence
  Synthetic
gaaagacaugauuagaug

SEQ ID NO: 337884 - RNA, 19 nt, Artificial Sequence
  Synthetic
ggaaagacaugauuagaug

SEQ ID NO: 337885 - RNA, 20 nt, Artificial Sequence
  Synthetic
aggaaagacaugauuagaug

SEQ ID NO: 337886 - RNA, 21 nt, Artificial Sequence
  Synthetic
caggaaagacaugauuagaug

SEQ ID NO: 337887 - RNA, 22 nt, Artificial Sequence
  Synthetic
ucaggaaagacaugauuagaug

SEQ ID NO: 337888 - RNA, 23 nt, Artificial Sequence
  Synthetic
uucaggaaagacaugauuagaug

SEQ ID NO: 337889 - RNA, 24 nt, Artificial Sequence
  Synthetic
cuucaggaaagacaugauuagaug

SEQ ID NO: 337890 - RNA, 18 nt, Artificial Sequence
  Synthetic
uguaacaacaguuagaug

SEQ ID NO: 337891 - RNA, 19 nt, Artificial Sequence
  Synthetic
guguaacaacaguuagaug

SEQ ID NO: 337892 - RNA, 20 nt, Artificial Sequence
  Synthetic
gguguaacaacaguuagaug

SEQ ID NO: 337893 - RNA, 21 nt, Artificial Sequence
  Synthetic
ugguguaacaacaguuagaug

SEQ ID NO: 337894 - RNA, 22 nt, Artificial Sequence
  Synthetic
uugguguaacaacaguuagaug

SEQ ID NO: 337895 - RNA, 23 nt, Artificial Sequence
  Synthetic
uuugguguaacaacaguuagaug

SEQ ID NO: 337896 - RNA, 24 nt, Artificial Sequence
  Synthetic
guuugguguaacaacaguuagaug

SEQ ID NO: 337897 - RNA, 18 nt, Artificial Sequence
  Synthetic
acugaagacauuuagaug

SEQ ID NO: 337898 - RNA, 19 nt, Artificial Sequence
  Synthetic
cacugaagacauuuagaug

SEQ ID NO: 337899 - RNA, 20 nt, Artificial Sequence
  Synthetic
ccacugaagacauuuagaug

SEQ ID NO: 337900 - RNA, 21 nt, Artificial Sequence
  Synthetic
gccacugaagacauuuagaug

SEQ ID NO: 337901 - RNA, 22 nt, Artificial Sequence
  Synthetic
ugccacugaagacauuuagaug

SEQ ID NO: 337902 - RNA, 23 nt, Artificial Sequence
  Synthetic
uugccacugaagacauuuagaug

SEQ ID NO: 337903 - RNA, 24 nt, Artificial Sequence
  Synthetic
uuugccacugaagacauuuagaug

SEQ ID NO: 337904 - RNA, 18 nt, Artificial Sequence
  Synthetic
aggaucucucugacgaug

SEQ ID NO: 337905 - RNA, 19 nt, Artificial Sequence
  Synthetic
caggaucucucugacgaug

SEQ ID NO: 337906 - RNA, 20 nt, Artificial Sequence
  Synthetic
gcaggaucucucugacgaug

SEQ ID NO: 337907 - RNA, 21 nt, Artificial Sequence
  Synthetic
agcaggaucucucugacgaug

SEQ ID NO: 337908 - RNA, 22 nt, Artificial Sequence
  Synthetic
aagcaggaucucucugacgaug

SEQ ID NO: 337909 - RNA, 23 nt, Artificial Sequence
  Synthetic
aaagcaggaucucucugacgaug

SEQ ID NO: 337910 - RNA, 24 nt, Artificial Sequence
  Synthetic
gaaagcaggaucucucugacgaug

SEQ ID NO: 337911 - RNA, 18 nt, Artificial Sequence
  Synthetic
ugugaauucucugcgaug

SEQ ID NO: 337912 - RNA, 19 nt, Artificial Sequence
  Synthetic
augugaauucucugcgaug

SEQ ID NO: 337913 - RNA, 20 nt, Artificial Sequence
  Synthetic
gaugugaauucucugcgaug

SEQ ID NO: 337914 - RNA, 21 nt, Artificial Sequence
  Synthetic
ugaugugaauucucugcgaug

SEQ ID NO: 337915 - RNA, 22 nt, Artificial Sequence
  Synthetic
gugaugugaauucucugcgaug

SEQ ID NO: 337916 - RNA, 23 nt, Artificial Sequence
  Synthetic
ugugaugugaauucucugcgaug

SEQ ID NO: 337917 - RNA, 24 nt, Artificial Sequence
  Synthetic
cugugaugugaauucucugcgaug

SEQ ID NO: 337918 - RNA, 18 nt, Artificial Sequence
  Synthetic
guauuaaggccaaggaug

SEQ ID NO: 337919 - RNA, 19 nt, Artificial Sequence
  Synthetic
uguauuaaggccaaggaug

SEQ ID NO: 337920 - RNA, 20 nt, Artificial Sequence
  Synthetic
uuguauuaaggccaaggaug

SEQ ID NO: 337921 - RNA, 21 nt, Artificial Sequence
  Synthetic
uuuguauuaaggccaaggaug

SEQ ID NO: 337922 - RNA, 22 nt, Artificial Sequence
  Synthetic
uuuuguauuaaggccaaggaug

SEQ ID NO: 337923 - RNA, 23 nt, Artificial Sequence
  Synthetic
guuuuguauuaaggccaaggaug

SEQ ID NO: 337924 - RNA, 24 nt, Artificial Sequence
  Synthetic
aguuuuguauuaaggccaaggaug

SEQ ID NO: 337925 - RNA, 18 nt, Artificial Sequence
  Synthetic
cagaugcuagcaaggaug

SEQ ID NO: 337926 - RNA, 19 nt, Artificial Sequence
  Synthetic
ccagaugcuagcaaggaug

SEQ ID NO: 337927 - RNA, 20 nt, Artificial Sequence
  Synthetic
accagaugcuagcaaggaug

SEQ ID NO: 337928 - RNA, 21 nt, Artificial Sequence
  Synthetic
caccagaugcuagcaaggaug

SEQ ID NO: 337929 - RNA, 22 nt, Artificial Sequence
  Synthetic
acaccagaugcuagcaaggaug

SEQ ID NO: 337930 - RNA, 23 nt, Artificial Sequence
  Synthetic
aacaccagaugcuagcaaggaug

SEQ ID NO: 337931 - RNA, 24 nt, Artificial Sequence
  Synthetic
caacaccagaugcuagcaaggaug

SEQ ID NO: 337932 - RNA, 18 nt, Artificial Sequence
  Synthetic
gcugaaguggcaaggaug

SEQ ID NO: 337933 - RNA, 19 nt, Artificial Sequence
  Synthetic
ugcugaaguggcaaggaug

SEQ ID NO: 337934 - RNA, 20 nt, Artificial Sequence
  Synthetic
gugcugaaguggcaaggaug

SEQ ID NO: 337935 - RNA, 21 nt, Artificial Sequence
  Synthetic
ggugcugaaguggcaaggaug

SEQ ID NO: 337936 - RNA, 22 nt, Artificial Sequence
  Synthetic
gggugcugaaguggcaaggaug

SEQ ID NO: 337937 - RNA, 23 nt, Artificial Sequence
  Synthetic
ugggugcugaaguggcaaggaug

SEQ ID NO: 337938 - RNA, 24 nt, Artificial Sequence
  Synthetic
augggugcugaaguggcaaggaug

SEQ ID NO: 337939 - RNA, 18 nt, Artificial Sequence
  Synthetic
ggguagaauauaaggaug

SEQ ID NO: 337940 - RNA, 19 nt, Artificial Sequence
  Synthetic
aggguagaauauaaggaug

SEQ ID NO: 337941 - RNA, 20 nt, Artificial Sequence
  Synthetic
caggguagaauauaaggaug

SEQ ID NO: 337942 - RNA, 21 nt, Artificial Sequence
  Synthetic
ccaggguagaauauaaggaug

SEQ ID NO: 337943 - RNA, 22 nt, Artificial Sequence
  Synthetic
uccaggguagaauauaaggaug

SEQ ID NO: 337944 - RNA, 23 nt, Artificial Sequence
  Synthetic
uuccaggguagaauauaaggaug

SEQ ID NO: 337945 - RNA, 24 nt, Artificial Sequence
  Synthetic
uuuccaggguagaauauaaggaug

SEQ ID NO: 337946 - RNA, 18 nt, Artificial Sequence
  Synthetic
cccuggcuuggcaggaug

SEQ ID NO: 337947 - RNA, 19 nt, Artificial Sequence
  Synthetic
acccuggcuuggcaggaug

SEQ ID NO: 337948 - RNA, 20 nt, Artificial Sequence
  Synthetic
gacccuggcuuggcaggaug

SEQ ID NO: 337949 - RNA, 21 nt, Artificial Sequence
  Synthetic
ugacccuggcuuggcaggaug

SEQ ID NO: 337950 - RNA, 22 nt, Artificial Sequence
  Synthetic
uugacccuggcuuggcaggaug

SEQ ID NO: 337951 - RNA, 23 nt, Artificial Sequence
  Synthetic
auugacccuggcuuggcaggaug

SEQ ID NO: 337952 - RNA, 24 nt, Artificial Sequence
  Synthetic
aauugacccuggcuuggcaggaug

SEQ ID NO: 337953 - RNA, 18 nt, Artificial Sequence
  Synthetic
ugucaccaagucaggaug

SEQ ID NO: 337954 - RNA, 19 nt, Artificial Sequence
  Synthetic
gugucaccaagucaggaug

SEQ ID NO: 337955 - RNA, 20 nt, Artificial Sequence
  Synthetic
agugucaccaagucaggaug

SEQ ID NO: 337956 - RNA, 21 nt, Artificial Sequence
  Synthetic
cagugucaccaagucaggaug

SEQ ID NO: 337957 - RNA, 22 nt, Artificial Sequence
  Synthetic
ucagugucaccaagucaggaug

SEQ ID NO: 337958 - RNA, 23 nt, Artificial Sequence
  Synthetic
cucagugucaccaagucaggaug

SEQ ID NO: 337959 - RNA, 24 nt, Artificial Sequence
  Synthetic
ucucagugucaccaagucaggaug

SEQ ID NO: 337960 - RNA, 18 nt, Artificial Sequence
  Synthetic
cagaugcuggagaggaug

SEQ ID NO: 337961 - RNA, 19 nt, Artificial Sequence
  Synthetic
acagaugcuggagaggaug

SEQ ID NO: 337962 - RNA, 20 nt, Artificial Sequence
  Synthetic
aacagaugcuggagaggaug

SEQ ID NO: 337963 - RNA, 21 nt, Artificial Sequence
  Synthetic
caacagaugcuggagaggaug

SEQ ID NO: 337964 - RNA, 22 nt, Artificial Sequence
  Synthetic
acaacagaugcuggagaggaug

SEQ ID NO: 337965 - RNA, 23 nt, Artificial Sequence
  Synthetic
aacaacagaugcuggagaggaug

SEQ ID NO: 337966 - RNA, 24 nt, Artificial Sequence
  Synthetic
aaacaacagaugcuggagaggaug

SEQ ID NO: 337967 - RNA, 18 nt, Artificial Sequence
  Synthetic
auuuuauaauagaggaug

SEQ ID NO: 337968 - RNA, 19 nt, Artificial Sequence
  Synthetic
uauuuuauaauagaggaug

SEQ ID NO: 337969 - RNA, 20 nt, Artificial Sequence
  Synthetic
guauuuuauaauagaggaug

SEQ ID NO: 337970 - RNA, 21 nt, Artificial Sequence
  Synthetic
aguauuuuauaauagaggaug

SEQ ID NO: 337971 - RNA, 22 nt, Artificial Sequence
  Synthetic
uaguauuuuauaauagaggaug

SEQ ID NO: 337972 - RNA, 23 nt, Artificial Sequence
  Synthetic
guaguauuuuauaauagaggaug

SEQ ID NO: 337973 - RNA, 24 nt, Artificial Sequence
  Synthetic
gguaguauuuuauaauagaggaug

SEQ ID NO: 337974 - RNA, 18 nt, Artificial Sequence
  Synthetic
cuucccacaaggaggaug

SEQ ID NO: 337975 - RNA, 19 nt, Artificial Sequence
  Synthetic
acuucccacaaggaggaug

SEQ ID NO: 337976 - RNA, 20 nt, Artificial Sequence
  Synthetic
gacuucccacaaggaggaug

SEQ ID NO: 337977 - RNA, 21 nt, Artificial Sequence
  Synthetic
agacuucccacaaggaggaug

SEQ ID NO: 337978 - RNA, 22 nt, Artificial Sequence
  Synthetic
gagacuucccacaaggaggaug

SEQ ID NO: 337979 - RNA, 23 nt, Artificial Sequence
  Synthetic
ugagacuucccacaaggaggaug

SEQ ID NO: 337980 - RNA, 24 nt, Artificial Sequence
  Synthetic
cugagacuucccacaaggaggaug

SEQ ID NO: 337981 - RNA, 18 nt, Artificial Sequence
  Synthetic
gacagcgacaggaggaug

SEQ ID NO: 337982 - RNA, 19 nt, Artificial Sequence
  Synthetic
agacagcgacaggaggaug

SEQ ID NO: 337983 - RNA, 20 nt, Artificial Sequence
  Synthetic
gagacagcgacaggaggaug

SEQ ID NO: 337984 - RNA, 21 nt, Artificial Sequence
  Synthetic
ggagacagcgacaggaggaug

SEQ ID NO: 337985 - RNA, 22 nt, Artificial Sequence
  Synthetic
aggagacagcgacaggaggaug

SEQ ID NO: 337986 - RNA, 23 nt, Artificial Sequence
  Synthetic
aaggagacagcgacaggaggaug

SEQ ID NO: 337987 - RNA, 24 nt, Artificial Sequence
  Synthetic
gaaggagacagcgacaggaggaug

SEQ ID NO: 337988 - RNA, 18 nt, Artificial Sequence
  Synthetic
caggugcuggugaggaug

SEQ ID NO: 337989 - RNA, 19 nt, Artificial Sequence
  Synthetic
acaggugcuggugaggaug

SEQ ID NO: 337990 - RNA, 20 nt, Artificial Sequence
  Synthetic
aacaggugcuggugaggaug

SEQ ID NO: 337991 - RNA, 21 nt, Artificial Sequence
  Synthetic
caacaggugcuggugaggaug

SEQ ID NO: 337992 - RNA, 22 nt, Artificial Sequence
  Synthetic
acaacaggugcuggugaggaug

SEQ ID NO: 337993 - RNA, 23 nt, Artificial Sequence
  Synthetic
aacaacaggugcuggugaggaug

SEQ ID NO: 337994 - RNA, 24 nt, Artificial Sequence
  Synthetic
aaacaacaggugcuggugaggaug

SEQ ID NO: 337995 - RNA, 18 nt, Artificial Sequence
  Synthetic
aauguguaugugaggaug

SEQ ID NO: 337996 - RNA, 19 nt, Artificial Sequence
  Synthetic
aaauguguaugugaggaug

SEQ ID NO: 337997 - RNA, 20 nt, Artificial Sequence
  Synthetic
aaaauguguaugugaggaug

SEQ ID NO: 337998 - RNA, 21 nt, Artificial Sequence
  Synthetic
gaaaauguguaugugaggaug

SEQ ID NO: 337999 - RNA, 22 nt, Artificial Sequence
  Synthetic
ugaaaauguguaugugaggaug

SEQ ID NO: 338000 - RNA, 23 nt, Artificial Sequence
  Synthetic
augaaaauguguaugugaggaug

SEQ ID NO: 338001 - RNA, 24 nt, Artificial Sequence
  Synthetic
aaugaaaauguguaugugaggaug

SEQ ID NO: 338002 - RNA, 18 nt, Artificial Sequence
  Synthetic
agggagagguugaggaug

SEQ ID NO: 338003 - RNA, 19 nt, Artificial Sequence
  Synthetic
gagggagagguugaggaug

SEQ ID NO: 338004 - RNA, 20 nt, Artificial Sequence
  Synthetic
agagggagagguugaggaug

SEQ ID NO: 338005 - RNA, 21 nt, Artificial Sequence
  Synthetic
gagagggagagguugaggaug

SEQ ID NO: 338006 - RNA, 22 nt, Artificial Sequence
  Synthetic
agagagggagagguugaggaug

SEQ ID NO: 338007 - RNA, 23 nt, Artificial Sequence
  Synthetic
uagagagggagagguugaggaug

SEQ ID NO: 338008 - RNA, 24 nt, Artificial Sequence
  Synthetic
guagagagggagagguugaggaug

SEQ ID NO: 338009 - RNA, 18 nt, Artificial Sequence
  Synthetic
aaauccagagauaggaug

SEQ ID NO: 338010 - RNA, 19 nt, Artificial Sequence
  Synthetic
caaauccagagauaggaug

SEQ ID NO: 338011 - RNA, 20 nt, Artificial Sequence
  Synthetic
gcaaauccagagauaggaug

SEQ ID NO: 338012 - RNA, 21 nt, Artificial Sequence
  Synthetic
ugcaaauccagagauaggaug

SEQ ID NO: 338013 - RNA, 22 nt, Artificial Sequence
  Synthetic
augcaaauccagagauaggaug

SEQ ID NO: 338014 - RNA, 23 nt, Artificial Sequence
  Synthetic
uaugcaaauccagagauaggaug

SEQ ID NO: 338015 - RNA, 24 nt, Artificial Sequence
  Synthetic
guaugcaaauccagagauaggaug

SEQ ID NO: 338016 - RNA, 18 nt, Artificial Sequence
  Synthetic
ggaagcugugguaggaug

SEQ ID NO: 338017 - RNA, 19 nt, Artificial Sequence
  Synthetic
aggaagcugugguaggaug

SEQ ID NO: 338018 - RNA, 20 nt, Artificial Sequence
  Synthetic
uaggaagcugugguaggaug

SEQ ID NO: 338019 - RNA, 21 nt, Artificial Sequence
  Synthetic
cuaggaagcugugguaggaug

SEQ ID NO: 338020 - RNA, 22 nt, Artificial Sequence
  Synthetic
ucuaggaagcugugguaggaug

SEQ ID NO: 338021 - RNA, 23 nt, Artificial Sequence
  Synthetic
uucuaggaagcugugguaggaug

SEQ ID NO: 338022 - RNA, 24 nt, Artificial Sequence
  Synthetic
auucuaggaagcugugguaggaug

SEQ ID NO: 338023 - RNA, 18 nt, Artificial Sequence
  Synthetic
ccacaggucauuaggaug

SEQ ID NO: 338024 - RNA, 19 nt, Artificial Sequence
  Synthetic
uccacaggucauuaggaug

SEQ ID NO: 338025 - RNA, 20 nt, Artificial Sequence
  Synthetic
uuccacaggucauuaggaug

SEQ ID NO: 338026 - RNA, 21 nt, Artificial Sequence
  Synthetic
guuccacaggucauuaggaug

SEQ ID NO: 338027 - RNA, 22 nt, Artificial Sequence
  Synthetic
aguuccacaggucauuaggaug

SEQ ID NO: 338028 - RNA, 23 nt, Artificial Sequence
  Synthetic
caguuccacaggucauuaggaug

SEQ ID NO: 338029 - RNA, 24 nt, Artificial Sequence
  Synthetic
acaguuccacaggucauuaggaug

SEQ ID NO: 338030 - RNA, 18 nt, Artificial Sequence
  Synthetic
aagcuaaacaaccggaug

SEQ ID NO: 338031 - RNA, 19 nt, Artificial Sequence
  Synthetic
caagcuaaacaaccggaug

SEQ ID NO: 338032 - RNA, 20 nt, Artificial Sequence
  Synthetic
ucaagcuaaacaaccggaug

SEQ ID NO: 338033 - RNA, 21 nt, Artificial Sequence
  Synthetic
uucaagcuaaacaaccggaug

SEQ ID NO: 338034 - RNA, 22 nt, Artificial Sequence
  Synthetic
guucaagcuaaacaaccggaug

SEQ ID NO: 338035 - RNA, 23 nt, Artificial Sequence
  Synthetic
aguucaagcuaaacaaccggaug

SEQ ID NO: 338036 - RNA, 24 nt, Artificial Sequence
  Synthetic
caguucaagcuaaacaaccggaug

SEQ ID NO: 338037 - RNA, 18 nt, Artificial Sequence
  Synthetic
gcucaaagcaaagggaug

SEQ ID NO: 338038 - RNA, 19 nt, Artificial Sequence
  Synthetic
ggcucaaagcaaagggaug

SEQ ID NO: 338039 - RNA, 20 nt, Artificial Sequence
  Synthetic
aggcucaaagcaaagggaug

SEQ ID NO: 338040 - RNA, 21 nt, Artificial Sequence
  Synthetic
uaggcucaaagcaaagggaug

SEQ ID NO: 338041 - RNA, 22 nt, Artificial Sequence
  Synthetic
auaggcucaaagcaaagggaug

SEQ ID NO: 338042 - RNA, 23 nt, Artificial Sequence
  Synthetic
cauaggcucaaagcaaagggaug

SEQ ID NO: 338043 - RNA, 24 nt, Artificial Sequence
  Synthetic
acauaggcucaaagcaaagggaug

SEQ ID NO: 338044 - RNA, 18 nt, Artificial Sequence
  Synthetic
ggaaauggaagagggaug

SEQ ID NO: 338045 - RNA, 19 nt, Artificial Sequence
  Synthetic
aggaaauggaagagggaug

SEQ ID NO: 338046 - RNA, 20 nt, Artificial Sequence
  Synthetic
gaggaaauggaagagggaug

SEQ ID NO: 338047 - RNA, 21 nt, Artificial Sequence
  Synthetic
ggaggaaauggaagagggaug

SEQ ID NO: 338048 - RNA, 22 nt, Artificial Sequence
  Synthetic
aggaggaaauggaagagggaug

SEQ ID NO: 338049 - RNA, 23 nt, Artificial Sequence
  Synthetic
aaggaggaaauggaagagggaug

SEQ ID NO: 338050 - RNA, 24 nt, Artificial Sequence
  Synthetic
aaaggaggaaauggaagagggaug

SEQ ID NO: 338051 - RNA, 18 nt, Artificial Sequence
  Synthetic
uugaacuuacgagggaug

SEQ ID NO: 338052 - RNA, 19 nt, Artificial Sequence
  Synthetic
auugaacuuacgagggaug

SEQ ID NO: 338053 - RNA, 20 nt, Artificial Sequence
  Synthetic
gauugaacuuacgagggaug

SEQ ID NO: 338054 - RNA, 21 nt, Artificial Sequence
  Synthetic
agauugaacuuacgagggaug

SEQ ID NO: 338055 - RNA, 22 nt, Artificial Sequence
  Synthetic
cagauugaacuuacgagggaug

SEQ ID NO: 338056 - RNA, 23 nt, Artificial Sequence
  Synthetic
ccagauugaacuuacgagggaug

SEQ ID NO: 338057 - RNA, 24 nt, Artificial Sequence
  Synthetic
uccagauugaacuuacgagggaug

SEQ ID NO: 338058 - RNA, 18 nt, Artificial Sequence
  Synthetic
augagagagggagggaug

SEQ ID NO: 338059 - RNA, 19 nt, Artificial Sequence
  Synthetic
gaugagagagggagggaug

SEQ ID NO: 338060 - RNA, 20 nt, Artificial Sequence
  Synthetic
agaugagagagggagggaug

SEQ ID NO: 338061 - RNA, 21 nt, Artificial Sequence
  Synthetic
cagaugagagagggagggaug

SEQ ID NO: 338062 - RNA, 22 nt, Artificial Sequence
  Synthetic
acagaugagagagggagggaug

SEQ ID NO: 338063 - RNA, 23 nt, Artificial Sequence
  Synthetic
cacagaugagagagggagggaug

SEQ ID NO: 338064 - RNA, 24 nt, Artificial Sequence
  Synthetic
acacagaugagagagggagggaug

SEQ ID NO: 338065 - RNA, 18 nt, Artificial Sequence
  Synthetic
gcacacauuguggggaug

SEQ ID NO: 338066 - RNA, 19 nt, Artificial Sequence
  Synthetic
ugcacacauuguggggaug

SEQ ID NO: 338067 - RNA, 20 nt, Artificial Sequence
  Synthetic
uugcacacauuguggggaug

SEQ ID NO: 338068 - RNA, 21 nt, Artificial Sequence
  Synthetic
auugcacacauuguggggaug

SEQ ID NO: 338069 - RNA, 22 nt, Artificial Sequence
  Synthetic
uauugcacacauuguggggaug

SEQ ID NO: 338070 - RNA, 23 nt, Artificial Sequence
  Synthetic
auauugcacacauuguggggaug

SEQ ID NO: 338071 - RNA, 24 nt, Artificial Sequence
  Synthetic
aauauugcacacauuguggggaug

SEQ ID NO: 338072 - RNA, 18 nt, Artificial Sequence
  Synthetic
cguuaaguagaugggaug

SEQ ID NO: 338073 - RNA, 19 nt, Artificial Sequence
  Synthetic
ucguuaaguagaugggaug

SEQ ID NO: 338074 - RNA, 20 nt, Artificial Sequence
  Synthetic
gucguuaaguagaugggaug

SEQ ID NO: 338075 - RNA, 21 nt, Artificial Sequence
  Synthetic
agucguuaaguagaugggaug

SEQ ID NO: 338076 - RNA, 22 nt, Artificial Sequence
  Synthetic
uagucguuaaguagaugggaug

SEQ ID NO: 338077 - RNA, 23 nt, Artificial Sequence
  Synthetic
uuagucguuaaguagaugggaug

SEQ ID NO: 338078 - RNA, 24 nt, Artificial Sequence
  Synthetic
uuuagucguuaaguagaugggaug

SEQ ID NO: 338079 - RNA, 18 nt, Artificial Sequence
  Synthetic
uggcgugaaccugggaug

SEQ ID NO: 338080 - RNA, 19 nt, Artificial Sequence
  Synthetic
auggcgugaaccugggaug

SEQ ID NO: 338081 - RNA, 20 nt, Artificial Sequence
  Synthetic
aauggcgugaaccugggaug

SEQ ID NO: 338082 - RNA, 21 nt, Artificial Sequence
  Synthetic
gaauggcgugaaccugggaug

SEQ ID NO: 338083 - RNA, 22 nt, Artificial Sequence
  Synthetic
agaauggcgugaaccugggaug

SEQ ID NO: 338084 - RNA, 23 nt, Artificial Sequence
  Synthetic
gagaauggcgugaaccugggaug

SEQ ID NO: 338085 - RNA, 24 nt, Artificial Sequence
  Synthetic
ggagaauggcgugaaccugggaug

SEQ ID NO: 338086 - RNA, 18 nt, Artificial Sequence
  Synthetic
gcuggaguggcugggaug

SEQ ID NO: 338087 - RNA, 19 nt, Artificial Sequence
  Synthetic
ggcuggaguggcugggaug

SEQ ID NO: 338088 - RNA, 20 nt, Artificial Sequence
  Synthetic
uggcuggaguggcugggaug

SEQ ID NO: 338089 - RNA, 21 nt, Artificial Sequence
  Synthetic
auggcuggaguggcugggaug

SEQ ID NO: 338090 - RNA, 22 nt, Artificial Sequence
  Synthetic
cauggcuggaguggcugggaug

SEQ ID NO: 338091 - RNA, 23 nt, Artificial Sequence
  Synthetic
ccauggcuggaguggcugggaug

SEQ ID NO: 338092 - RNA, 24 nt, Artificial Sequence
  Synthetic
gccauggcuggaguggcugggaug

SEQ ID NO: 338093 - RNA, 18 nt, Artificial Sequence
  Synthetic
aaccaggcaagugggaug

SEQ ID NO: 338094 - RNA, 19 nt, Artificial Sequence
  Synthetic
aaaccaggcaagugggaug

SEQ ID NO: 338095 - RNA, 20 nt, Artificial Sequence
  Synthetic
aaaaccaggcaagugggaug

SEQ ID NO: 338096 - RNA, 21 nt, Artificial Sequence
  Synthetic
gaaaaccaggcaagugggaug

SEQ ID NO: 338097 - RNA, 22 nt, Artificial Sequence
  Synthetic
agaaaaccaggcaagugggaug

SEQ ID NO: 338098 - RNA, 23 nt, Artificial Sequence
  Synthetic
gagaaaaccaggcaagugggaug

SEQ ID NO: 338099 - RNA, 24 nt, Artificial Sequence
  Synthetic
agagaaaaccaggcaagugggaug

SEQ ID NO: 338100 - RNA, 18 nt, Artificial Sequence
  Synthetic
acuggaagcagugggaug

SEQ ID NO: 338101 - RNA, 19 nt, Artificial Sequence
  Synthetic
aacuggaagcagugggaug

SEQ ID NO: 338102 - RNA, 20 nt, Artificial Sequence
  Synthetic
caacuggaagcagugggaug

SEQ ID NO: 338103 - RNA, 21 nt, Artificial Sequence
  Synthetic
gcaacuggaagcagugggaug

SEQ ID NO: 338104 - RNA, 22 nt, Artificial Sequence
  Synthetic
agcaacuggaagcagugggaug

SEQ ID NO: 338105 - RNA, 23 nt, Artificial Sequence
  Synthetic
uagcaacuggaagcagugggaug

SEQ ID NO: 338106 - RNA, 24 nt, Artificial Sequence
  Synthetic
guagcaacuggaagcagugggaug

SEQ ID NO: 338107 - RNA, 18 nt, Artificial Sequence
  Synthetic
ccaaaauuuagugggaug

SEQ ID NO: 338108 - RNA, 19 nt, Artificial Sequence
  Synthetic
cccaaaauuuagugggaug

SEQ ID NO: 338109 - RNA, 20 nt, Artificial Sequence
  Synthetic
gcccaaaauuuagugggaug

SEQ ID NO: 338110 - RNA, 21 nt, Artificial Sequence
  Synthetic
ugcccaaaauuuagugggaug

SEQ ID NO: 338111 - RNA, 22 nt, Artificial Sequence
  Synthetic
uugcccaaaauuuagugggaug

SEQ ID NO: 338112 - RNA, 23 nt, Artificial Sequence
  Synthetic
auugcccaaaauuuagugggaug

SEQ ID NO: 338113 - RNA, 24 nt, Artificial Sequence
  Synthetic
aauugcccaaaauuuagugggaug

SEQ ID NO: 338114 - RNA, 18 nt, Artificial Sequence
  Synthetic
uugggcgaccuugggaug

SEQ ID NO: 338115 - RNA, 19 nt, Artificial Sequence
  Synthetic
guugggcgaccuugggaug

SEQ ID NO: 338116 - RNA, 20 nt, Artificial Sequence
  Synthetic
uguugggcgaccuugggaug

SEQ ID NO: 338117 - RNA, 21 nt, Artificial Sequence
  Synthetic
cuguugggcgaccuugggaug

SEQ ID NO: 338118 - RNA, 22 nt, Artificial Sequence
  Synthetic
ucuguugggcgaccuugggaug

SEQ ID NO: 338119 - RNA, 23 nt, Artificial Sequence
  Synthetic
aucuguugggcgaccuugggaug

SEQ ID NO: 338120 - RNA, 24 nt, Artificial Sequence
  Synthetic
gaucuguugggcgaccuugggaug

SEQ ID NO: 338121 - RNA, 18 nt, Artificial Sequence
  Synthetic
ucucagcacuuugggaug

SEQ ID NO: 338122 - RNA, 19 nt, Artificial Sequence
  Synthetic
aucucagcacuuugggaug

SEQ ID NO: 338123 - RNA, 20 nt, Artificial Sequence
  Synthetic
aaucucagcacuuugggaug

SEQ ID NO: 338124 - RNA, 21 nt, Artificial Sequence
  Synthetic
uaaucucagcacuuugggaug

SEQ ID NO: 338125 - RNA, 22 nt, Artificial Sequence
  Synthetic
guaaucucagcacuuugggaug

SEQ ID NO: 338126 - RNA, 23 nt, Artificial Sequence
  Synthetic
uguaaucucagcacuuugggaug

SEQ ID NO: 338127 - RNA, 24 nt, Artificial Sequence
  Synthetic
cuguaaucucagcacuuugggaug

SEQ ID NO: 338128 - RNA, 18 nt, Artificial Sequence
  Synthetic
gaguuucaguuugggaug

SEQ ID NO: 338129 - RNA, 19 nt, Artificial Sequence
  Synthetic
ugaguuucaguuugggaug

SEQ ID NO: 338130 - RNA, 20 nt, Artificial Sequence
  Synthetic
cugaguuucaguuugggaug

SEQ ID NO: 338131 - RNA, 21 nt, Artificial Sequence
  Synthetic
ccugaguuucaguuugggaug

SEQ ID NO: 338132 - RNA, 22 nt, Artificial Sequence
  Synthetic
accugaguuucaguuugggaug

SEQ ID NO: 338133 - RNA, 23 nt, Artificial Sequence
  Synthetic
uaccugaguuucaguuugggaug

SEQ ID NO: 338134 - RNA, 24 nt, Artificial Sequence
  Synthetic
guaccugaguuucaguuugggaug

SEQ ID NO: 338135 - RNA, 18 nt, Artificial Sequence
  Synthetic
cuuuguauuuaauggaug

SEQ ID NO: 338136 - RNA, 19 nt, Artificial Sequence
  Synthetic
gcuuuguauuuaauggaug

SEQ ID NO: 338137 - RNA, 20 nt, Artificial Sequence
  Synthetic
ugcuuuguauuuaauggaug

SEQ ID NO: 338138 - RNA, 21 nt, Artificial Sequence
  Synthetic
uugcuuuguauuuaauggaug

SEQ ID NO: 338139 - RNA, 22 nt, Artificial Sequence
  Synthetic
cuugcuuuguauuuaauggaug

SEQ ID NO: 338140 - RNA, 23 nt, Artificial Sequence
  Synthetic
acuugcuuuguauuuaauggaug

SEQ ID NO: 338141 - RNA, 24 nt, Artificial Sequence
  Synthetic
cacuugcuuuguauuuaauggaug

SEQ ID NO: 338142 - RNA, 18 nt, Artificial Sequence
  Synthetic
aguagcagaagauggaug

SEQ ID NO: 338143 - RNA, 19 nt, Artificial Sequence
  Synthetic
uaguagcagaagauggaug

SEQ ID NO: 338144 - RNA, 20 nt, Artificial Sequence
  Synthetic
auaguagcagaagauggaug

SEQ ID NO: 338145 - RNA, 21 nt, Artificial Sequence
  Synthetic
cauaguagcagaagauggaug

SEQ ID NO: 338146 - RNA, 22 nt, Artificial Sequence
  Synthetic
ccauaguagcagaagauggaug

SEQ ID NO: 338147 - RNA, 23 nt, Artificial Sequence
  Synthetic
gccauaguagcagaagauggaug

SEQ ID NO: 338148 - RNA, 24 nt, Artificial Sequence
  Synthetic
ggccauaguagcagaagauggaug

SEQ ID NO: 338149 - RNA, 18 nt, Artificial Sequence
  Synthetic
ggaaaagaucgauggaug

SEQ ID NO: 338150 - RNA, 19 nt, Artificial Sequence
  Synthetic
uggaaaagaucgauggaug

SEQ ID NO: 338151 - RNA, 20 nt, Artificial Sequence
  Synthetic
uuggaaaagaucgauggaug

SEQ ID NO: 338152 - RNA, 21 nt, Artificial Sequence
  Synthetic
guuggaaaagaucgauggaug

SEQ ID NO: 338153 - RNA, 22 nt, Artificial Sequence
  Synthetic
aguuggaaaagaucgauggaug

SEQ ID NO: 338154 - RNA, 23 nt, Artificial Sequence
  Synthetic
gaguuggaaaagaucgauggaug

SEQ ID NO: 338155 - RNA, 24 nt, Artificial Sequence
  Synthetic
ugaguuggaaaagaucgauggaug

SEQ ID NO: 338156 - RNA, 18 nt, Artificial Sequence
  Synthetic
agauacugaguauggaug

SEQ ID NO: 338157 - RNA, 19 nt, Artificial Sequence
  Synthetic
aagauacugaguauggaug

SEQ ID NO: 338158 - RNA, 20 nt, Artificial Sequence
  Synthetic
uaagauacugaguauggaug

SEQ ID NO: 338159 - RNA, 21 nt, Artificial Sequence
  Synthetic
guaagauacugaguauggaug

SEQ ID NO: 338160 - RNA, 22 nt, Artificial Sequence
  Synthetic
uguaagauacugaguauggaug

SEQ ID NO: 338161 - RNA, 23 nt, Artificial Sequence
  Synthetic
uuguaagauacugaguauggaug

SEQ ID NO: 338162 - RNA, 24 nt, Artificial Sequence
  Synthetic
uuuguaagauacugaguauggaug

SEQ ID NO: 338163 - RNA, 18 nt, Artificial Sequence
  Synthetic
uaauuccacuuauggaug

SEQ ID NO: 338164 - RNA, 19 nt, Artificial Sequence
  Synthetic
uuaauuccacuuauggaug

SEQ ID NO: 338165 - RNA, 20 nt, Artificial Sequence
  Synthetic
auuaauuccacuuauggaug

SEQ ID NO: 338166 - RNA, 21 nt, Artificial Sequence
  Synthetic
uauuaauuccacuuauggaug

SEQ ID NO: 338167 - RNA, 22 nt, Artificial Sequence
  Synthetic
uuauuaauuccacuuauggaug

SEQ ID NO: 338168 - RNA, 23 nt, Artificial Sequence
  Synthetic
auuauuaauuccacuuauggaug

SEQ ID NO: 338169 - RNA, 24 nt, Artificial Sequence
  Synthetic
uauuauuaauuccacuuauggaug

SEQ ID NO: 338170 - RNA, 18 nt, Artificial Sequence
  Synthetic
ucaaugguggacuggaug

SEQ ID NO: 338171 - RNA, 19 nt, Artificial Sequence
  Synthetic
aucaaugguggacuggaug

SEQ ID NO: 338172 - RNA, 20 nt, Artificial Sequence
  Synthetic
caucaaugguggacuggaug

SEQ ID NO: 338173 - RNA, 21 nt, Artificial Sequence
  Synthetic
ccaucaaugguggacuggaug

SEQ ID NO: 338174 - RNA, 22 nt, Artificial Sequence
  Synthetic
accaucaaugguggacuggaug

SEQ ID NO: 338175 - RNA, 23 nt, Artificial Sequence
  Synthetic
gaccaucaaugguggacuggaug

SEQ ID NO: 338176 - RNA, 24 nt, Artificial Sequence
  Synthetic
ugaccaucaaugguggacuggaug

SEQ ID NO: 338177 - RNA, 18 nt, Artificial Sequence
  Synthetic
guaugugagguguggaug

SEQ ID NO: 338178 - RNA, 19 nt, Artificial Sequence
  Synthetic
gguaugugagguguggaug

SEQ ID NO: 338179 - RNA, 20 nt, Artificial Sequence
  Synthetic
ggguaugugagguguggaug

SEQ ID NO: 338180 - RNA, 21 nt, Artificial Sequence
  Synthetic
aggguaugugagguguggaug

SEQ ID NO: 338181 - RNA, 22 nt, Artificial Sequence
  Synthetic
aaggguaugugagguguggaug

SEQ ID NO: 338182 - RNA, 23 nt, Artificial Sequence
  Synthetic
gaaggguaugugagguguggaug

SEQ ID NO: 338183 - RNA, 24 nt, Artificial Sequence
  Synthetic
agaaggguaugugagguguggaug

SEQ ID NO: 338184 - RNA, 18 nt, Artificial Sequence
  Synthetic
cuuuauacgaauuggaug

SEQ ID NO: 338185 - RNA, 19 nt, Artificial Sequence
  Synthetic
gcuuuauacgaauuggaug

SEQ ID NO: 338186 - RNA, 20 nt, Artificial Sequence
  Synthetic
ugcuuuauacgaauuggaug

SEQ ID NO: 338187 - RNA, 21 nt, Artificial Sequence
  Synthetic
gugcuuuauacgaauuggaug

SEQ ID NO: 338188 - RNA, 22 nt, Artificial Sequence
  Synthetic
ugugcuuuauacgaauuggaug

SEQ ID NO: 338189 - RNA, 23 nt, Artificial Sequence
  Synthetic
cugugcuuuauacgaauuggaug

SEQ ID NO: 338190 - RNA, 24 nt, Artificial Sequence
  Synthetic
gcugugcuuuauacgaauuggaug

SEQ ID NO: 338191 - RNA, 18 nt, Artificial Sequence
  Synthetic
uuauuuaguaauuggaug

SEQ ID NO: 338192 - RNA, 19 nt, Artificial Sequence
  Synthetic
cuuauuuaguaauuggaug

SEQ ID NO: 338193 - RNA, 20 nt, Artificial Sequence
  Synthetic
ccuuauuuaguaauuggaug

SEQ ID NO: 338194 - RNA, 21 nt, Artificial Sequence
  Synthetic
uccuuauuuaguaauuggaug

SEQ ID NO: 338195 - RNA, 22 nt, Artificial Sequence
  Synthetic
auccuuauuuaguaauuggaug

SEQ ID NO: 338196 - RNA, 23 nt, Artificial Sequence
  Synthetic
cauccuuauuuaguaauuggaug

SEQ ID NO: 338197 - RNA, 24 nt, Artificial Sequence
  Synthetic
acauccuuauuuaguaauuggaug

SEQ ID NO: 338198 - RNA, 18 nt, Artificial Sequence
  Synthetic
aacuugaauaguuggaug

SEQ ID NO: 338199 - RNA, 19 nt, Artificial Sequence
  Synthetic
uaacuugaauaguuggaug

SEQ ID NO: 338200 - RNA, 20 nt, Artificial Sequence
  Synthetic
uuaacuugaauaguuggaug

SEQ ID NO: 338201 - RNA, 21 nt, Artificial Sequence
  Synthetic
cuuaacuugaauaguuggaug

SEQ ID NO: 338202 - RNA, 22 nt, Artificial Sequence
  Synthetic
ucuuaacuugaauaguuggaug

SEQ ID NO: 338203 - RNA, 23 nt, Artificial Sequence
  Synthetic
uucuuaacuugaauaguuggaug

SEQ ID NO: 338204 - RNA, 24 nt, Artificial Sequence
  Synthetic
uuucuuaacuugaauaguuggaug

SEQ ID NO: 338205 - RNA, 18 nt, Artificial Sequence
  Synthetic
guuaauuauguuuggaug

SEQ ID NO: 338206 - RNA, 19 nt, Artificial Sequence
  Synthetic
uguuaauuauguuuggaug

SEQ ID NO: 338207 - RNA, 20 nt, Artificial Sequence
  Synthetic
auguuaauuauguuuggaug

SEQ ID NO: 338208 - RNA, 21 nt, Artificial Sequence
  Synthetic
aauguuaauuauguuuggaug

SEQ ID NO: 338209 - RNA, 22 nt, Artificial Sequence
  Synthetic
gaauguuaauuauguuuggaug

SEQ ID NO: 338210 - RNA, 23 nt, Artificial Sequence
  Synthetic
agaauguuaauuauguuuggaug

SEQ ID NO: 338211 - RNA, 24 nt, Artificial Sequence
  Synthetic
uagaauguuaauuauguuuggaug

SEQ ID NO: 338212 - RNA, 18 nt, Artificial Sequence
  Synthetic
gggaaugucuuuuggaug

SEQ ID NO: 338213 - RNA, 19 nt, Artificial Sequence
  Synthetic
ugggaaugucuuuuggaug

SEQ ID NO: 338214 - RNA, 20 nt, Artificial Sequence
  Synthetic
cugggaaugucuuuuggaug

SEQ ID NO: 338215 - RNA, 21 nt, Artificial Sequence
  Synthetic
acugggaaugucuuuuggaug

SEQ ID NO: 338216 - RNA, 22 nt, Artificial Sequence
  Synthetic
uacugggaaugucuuuuggaug

SEQ ID NO: 338217 - RNA, 23 nt, Artificial Sequence
  Synthetic
uuacugggaaugucuuuuggaug

SEQ ID NO: 338218 - RNA, 24 nt, Artificial Sequence
  Synthetic
uuuacugggaaugucuuuuggaug

SEQ ID NO: 338219 - RNA, 18 nt, Artificial Sequence
  Synthetic
ugaagaguauaaaugaug

SEQ ID NO: 338220 - RNA, 19 nt, Artificial Sequence
  Synthetic
augaagaguauaaaugaug

SEQ ID NO: 338221 - RNA, 20 nt, Artificial Sequence
  Synthetic
gaugaagaguauaaaugaug

SEQ ID NO: 338222 - RNA, 21 nt, Artificial Sequence
  Synthetic
ugaugaagaguauaaaugaug

SEQ ID NO: 338223 - RNA, 22 nt, Artificial Sequence
  Synthetic
augaugaagaguauaaaugaug

SEQ ID NO: 338224 - RNA, 23 nt, Artificial Sequence
  Synthetic
aaugaugaagaguauaaaugaug

SEQ ID NO: 338225 - RNA, 24 nt, Artificial Sequence
  Synthetic
aaaugaugaagaguauaaaugaug

SEQ ID NO: 338226 - RNA, 18 nt, Artificial Sequence
  Synthetic
guaaggcaaauaaugaug

SEQ ID NO: 338227 - RNA, 19 nt, Artificial Sequence
  Synthetic
aguaaggcaaauaaugaug

SEQ ID NO: 338228 - RNA, 20 nt, Artificial Sequence
  Synthetic
aaguaaggcaaauaaugaug

SEQ ID NO: 338229 - RNA, 21 nt, Artificial Sequence
  Synthetic
caaguaaggcaaauaaugaug

SEQ ID NO: 338230 - RNA, 22 nt, Artificial Sequence
  Synthetic
ucaaguaaggcaaauaaugaug

SEQ ID NO: 338231 - RNA, 23 nt, Artificial Sequence
  Synthetic
cucaaguaaggcaaauaaugaug

SEQ ID NO: 338232 - RNA, 24 nt, Artificial Sequence
  Synthetic
ucucaaguaaggcaaauaaugaug

SEQ ID NO: 338233 - RNA, 18 nt, Artificial Sequence
  Synthetic
gucagccauguaaugaug

SEQ ID NO: 338234 - RNA, 19 nt, Artificial Sequence
  Synthetic
agucagccauguaaugaug

SEQ ID NO: 338235 - RNA, 20 nt, Artificial Sequence
  Synthetic
gagucagccauguaaugaug

SEQ ID NO: 338236 - RNA, 21 nt, Artificial Sequence
  Synthetic
agagucagccauguaaugaug

SEQ ID NO: 338237 - RNA, 22 nt, Artificial Sequence
  Synthetic
uagagucagccauguaaugaug

SEQ ID NO: 338238 - RNA, 23 nt, Artificial Sequence
  Synthetic
cuagagucagccauguaaugaug

SEQ ID NO: 338239 - RNA, 24 nt, Artificial Sequence
  Synthetic
acuagagucagccauguaaugaug

SEQ ID NO: 338240 - RNA, 18 nt, Artificial Sequence
  Synthetic
uugauauauuacaugaug

SEQ ID NO: 338241 - RNA, 19 nt, Artificial Sequence
  Synthetic
cuugauauauuacaugaug

SEQ ID NO: 338242 - RNA, 20 nt, Artificial Sequence
  Synthetic
ccuugauauauuacaugaug

SEQ ID NO: 338243 - RNA, 21 nt, Artificial Sequence
  Synthetic
accuugauauauuacaugaug

SEQ ID NO: 338244 - RNA, 22 nt, Artificial Sequence
  Synthetic
uaccuugauauauuacaugaug

SEQ ID NO: 338245 - RNA, 23 nt, Artificial Sequence
  Synthetic
uuaccuugauauauuacaugaug

SEQ ID NO: 338246 - RNA, 24 nt, Artificial Sequence
  Synthetic
auuaccuugauauauuacaugaug

SEQ ID NO: 338247 - RNA, 18 nt, Artificial Sequence
  Synthetic
ggggaauagcgcaugaug

SEQ ID NO: 338248 - RNA, 19 nt, Artificial Sequence
  Synthetic
aggggaauagcgcaugaug

SEQ ID NO: 338249 - RNA, 20 nt, Artificial Sequence
  Synthetic
caggggaauagcgcaugaug

SEQ ID NO: 338250 - RNA, 21 nt, Artificial Sequence
  Synthetic
acaggggaauagcgcaugaug

SEQ ID NO: 338251 - RNA, 22 nt, Artificial Sequence
  Synthetic
cacaggggaauagcgcaugaug

SEQ ID NO: 338252 - RNA, 23 nt, Artificial Sequence
  Synthetic
ucacaggggaauagcgcaugaug

SEQ ID NO: 338253 - RNA, 24 nt, Artificial Sequence
  Synthetic
gucacaggggaauagcgcaugaug

SEQ ID NO: 338254 - RNA, 18 nt, Artificial Sequence
  Synthetic
uggauauagugcaugaug

SEQ ID NO: 338255 - RNA, 19 nt, Artificial Sequence
  Synthetic
cuggauauagugcaugaug

SEQ ID NO: 338256 - RNA, 20 nt, Artificial Sequence
  Synthetic
ccuggauauagugcaugaug

SEQ ID NO: 338257 - RNA, 21 nt, Artificial Sequence
  Synthetic
cccuggauauagugcaugaug

SEQ ID NO: 338258 - RNA, 22 nt, Artificial Sequence
  Synthetic
ucccuggauauagugcaugaug

SEQ ID NO: 338259 - RNA, 23 nt, Artificial Sequence
  Synthetic
uucccuggauauagugcaugaug

SEQ ID NO: 338260 - RNA, 24 nt, Artificial Sequence
  Synthetic
guucccuggauauagugcaugaug

SEQ ID NO: 338261 - RNA, 18 nt, Artificial Sequence
  Synthetic
ugggaguauugcaugaug

SEQ ID NO: 338262 - RNA, 19 nt, Artificial Sequence
  Synthetic
gugggaguauugcaugaug

SEQ ID NO: 338263 - RNA, 20 nt, Artificial Sequence
  Synthetic
cgugggaguauugcaugaug

SEQ ID NO: 338264 - RNA, 21 nt, Artificial Sequence
  Synthetic
acgugggaguauugcaugaug

SEQ ID NO: 338265 - RNA, 22 nt, Artificial Sequence
  Synthetic
cacgugggaguauugcaugaug

SEQ ID NO: 338266 - RNA, 23 nt, Artificial Sequence
  Synthetic
ucacgugggaguauugcaugaug

SEQ ID NO: 338267 - RNA, 24 nt, Artificial Sequence
  Synthetic
gucacgugggaguauugcaugaug

SEQ ID NO: 338268 - RNA, 18 nt, Artificial Sequence
  Synthetic
aaaaaacaacagaugaug

SEQ ID NO: 338269 - RNA, 19 nt, Artificial Sequence
  Synthetic
caaaaaacaacagaugaug

SEQ ID NO: 338270 - RNA, 20 nt, Artificial Sequence
  Synthetic
ucaaaaaacaacagaugaug

SEQ ID NO: 338271 - RNA, 21 nt, Artificial Sequence
  Synthetic
gucaaaaaacaacagaugaug

SEQ ID NO: 338272 - RNA, 22 nt, Artificial Sequence
  Synthetic
agucaaaaaacaacagaugaug

SEQ ID NO: 338273 - RNA, 23 nt, Artificial Sequence
  Synthetic
aagucaaaaaacaacagaugaug

SEQ ID NO: 338274 - RNA, 24 nt, Artificial Sequence
  Synthetic
aaagucaaaaaacaacagaugaug

SEQ ID NO: 338275 - RNA, 18 nt, Artificial Sequence
  Synthetic
aggacauuccagaugaug

SEQ ID NO: 338276 - RNA, 19 nt, Artificial Sequence
  Synthetic
gaggacauuccagaugaug

SEQ ID NO: 338277 - RNA, 20 nt, Artificial Sequence
  Synthetic
ggaggacauuccagaugaug

SEQ ID NO: 338278 - RNA, 21 nt, Artificial Sequence
  Synthetic
gggaggacauuccagaugaug

SEQ ID NO: 338279 - RNA, 22 nt, Artificial Sequence
  Synthetic
agggaggacauuccagaugaug

SEQ ID NO: 338280 - RNA, 23 nt, Artificial Sequence
  Synthetic
cagggaggacauuccagaugaug

SEQ ID NO: 338281 - RNA, 24 nt, Artificial Sequence
  Synthetic
ucagggaggacauuccagaugaug

SEQ ID NO: 338282 - RNA, 18 nt, Artificial Sequence
  Synthetic
uaaguagaugggaugaug

SEQ ID NO: 338283 - RNA, 19 nt, Artificial Sequence
  Synthetic
uuaaguagaugggaugaug

SEQ ID NO: 338284 - RNA, 20 nt, Artificial Sequence
  Synthetic
guuaaguagaugggaugaug

SEQ ID NO: 338285 - RNA, 21 nt, Artificial Sequence
  Synthetic
cguuaaguagaugggaugaug

SEQ ID NO: 338286 - RNA, 22 nt, Artificial Sequence
  Synthetic
ucguuaaguagaugggaugaug

SEQ ID NO: 338287 - RNA, 23 nt, Artificial Sequence
  Synthetic
gucguuaaguagaugggaugaug

SEQ ID NO: 338288 - RNA, 24 nt, Artificial Sequence
  Synthetic
agucguuaaguagaugggaugaug

SEQ ID NO: 338289 - RNA, 18 nt, Artificial Sequence
  Synthetic
aguuaaggguauaugaug

SEQ ID NO: 338290 - RNA, 19 nt, Artificial Sequence
  Synthetic
aaguuaaggguauaugaug

SEQ ID NO: 338291 - RNA, 20 nt, Artificial Sequence
  Synthetic
gaaguuaaggguauaugaug

SEQ ID NO: 338292 - RNA, 21 nt, Artificial Sequence
  Synthetic
ugaaguuaaggguauaugaug

SEQ ID NO: 338293 - RNA, 22 nt, Artificial Sequence
  Synthetic
cugaaguuaaggguauaugaug

SEQ ID NO: 338294 - RNA, 23 nt, Artificial Sequence
  Synthetic
gcugaaguuaaggguauaugaug

SEQ ID NO: 338295 - RNA, 24 nt, Artificial Sequence
  Synthetic
ggcugaaguuaaggguauaugaug

SEQ ID NO: 338296 - RNA, 18 nt, Artificial Sequence
  Synthetic
accuuuugaacuaugaug

SEQ ID NO: 338297 - RNA, 19 nt, Artificial Sequence
  Synthetic
caccuuuugaacuaugaug

SEQ ID NO: 338298 - RNA, 20 nt, Artificial Sequence
  Synthetic
ucaccuuuugaacuaugaug

SEQ ID NO: 338299 - RNA, 21 nt, Artificial Sequence
  Synthetic
gucaccuuuugaacuaugaug

SEQ ID NO: 338300 - RNA, 22 nt, Artificial Sequence
  Synthetic
ugucaccuuuugaacuaugaug

SEQ ID NO: 338301 - RNA, 23 nt, Artificial Sequence
  Synthetic
cugucaccuuuugaacuaugaug

SEQ ID NO: 338302 - RNA, 24 nt, Artificial Sequence
  Synthetic
ccugucaccuuuugaacuaugaug

SEQ ID NO: 338303 - RNA, 18 nt, Artificial Sequence
  Synthetic
uaucauugcucuaugaug

SEQ ID NO: 338304 - RNA, 19 nt, Artificial Sequence
  Synthetic
guaucauugcucuaugaug

SEQ ID NO: 338305 - RNA, 20 nt, Artificial Sequence
  Synthetic
gguaucauugcucuaugaug

SEQ ID NO: 338306 - RNA, 21 nt, Artificial Sequence
  Synthetic
ugguaucauugcucuaugaug

SEQ ID NO: 338307 - RNA, 22 nt, Artificial Sequence
  Synthetic
uugguaucauugcucuaugaug

SEQ ID NO: 338308 - RNA, 23 nt, Artificial Sequence
  Synthetic
guugguaucauugcucuaugaug

SEQ ID NO: 338309 - RNA, 24 nt, Artificial Sequence
  Synthetic
gguugguaucauugcucuaugaug

SEQ ID NO: 338310 - RNA, 18 nt, Artificial Sequence
  Synthetic
gucccaaauucuaugaug

SEQ ID NO: 338311 - RNA, 19 nt, Artificial Sequence
  Synthetic
agucccaaauucuaugaug

SEQ ID NO: 338312 - RNA, 20 nt, Artificial Sequence
  Synthetic
aagucccaaauucuaugaug

SEQ ID NO: 338313 - RNA, 21 nt, Artificial Sequence
  Synthetic
aaagucccaaauucuaugaug

SEQ ID NO: 338314 - RNA, 22 nt, Artificial Sequence
  Synthetic
gaaagucccaaauucuaugaug

SEQ ID NO: 338315 - RNA, 23 nt, Artificial Sequence
  Synthetic
ggaaagucccaaauucuaugaug

SEQ ID NO: 338316 - RNA, 24 nt, Artificial Sequence
  Synthetic
aggaaagucccaaauucuaugaug

SEQ ID NO: 338317 - RNA, 18 nt, Artificial Sequence
  Synthetic
caccagagugguaugaug

SEQ ID NO: 338318 - RNA, 19 nt, Artificial Sequence
  Synthetic
acaccagagugguaugaug

SEQ ID NO: 338319 - RNA, 20 nt, Artificial Sequence
  Synthetic
cacaccagagugguaugaug

SEQ ID NO: 338320 - RNA, 21 nt, Artificial Sequence
  Synthetic
ccacaccagagugguaugaug

SEQ ID NO: 338321 - RNA, 22 nt, Artificial Sequence
  Synthetic
uccacaccagagugguaugaug

SEQ ID NO: 338322 - RNA, 23 nt, Artificial Sequence
  Synthetic
auccacaccagagugguaugaug

SEQ ID NO: 338323 - RNA, 24 nt, Artificial Sequence
  Synthetic
uauccacaccagagugguaugaug

SEQ ID NO: 338324 - RNA, 18 nt, Artificial Sequence
  Synthetic
uauguuuuguguaugaug

SEQ ID NO: 338325 - RNA, 19 nt, Artificial Sequence
  Synthetic
uuauguuuuguguaugaug

SEQ ID NO: 338326 - RNA, 20 nt, Artificial Sequence
  Synthetic
uuuauguuuuguguaugaug

SEQ ID NO: 338327 - RNA, 21 nt, Artificial Sequence
  Synthetic
auuuauguuuuguguaugaug

SEQ ID NO: 338328 - RNA, 22 nt, Artificial Sequence
  Synthetic
aauuuauguuuuguguaugaug

SEQ ID NO: 338329 - RNA, 23 nt, Artificial Sequence
  Synthetic
gaauuuauguuuuguguaugaug

SEQ ID NO: 338330 - RNA, 24 nt, Artificial Sequence
  Synthetic
agaauuuauguuuuguguaugaug

SEQ ID NO: 338331 - RNA, 18 nt, Artificial Sequence
  Synthetic
gagguaaauguuaugaug

SEQ ID NO: 338332 - RNA, 19 nt, Artificial Sequence
  Synthetic
ugagguaaauguuaugaug

SEQ ID NO: 338333 - RNA, 20 nt, Artificial Sequence
  Synthetic
augagguaaauguuaugaug

SEQ ID NO: 338334 - RNA, 21 nt, Artificial Sequence
  Synthetic
caugagguaaauguuaugaug

SEQ ID NO: 338335 - RNA, 22 nt, Artificial Sequence
  Synthetic
gcaugagguaaauguuaugaug

SEQ ID NO: 338336 - RNA, 23 nt, Artificial Sequence
  Synthetic
agcaugagguaaauguuaugaug

SEQ ID NO: 338337 - RNA, 24 nt, Artificial Sequence
  Synthetic
uagcaugagguaaauguuaugaug

SEQ ID NO: 338338 - RNA, 18 nt, Artificial Sequence
  Synthetic
uuggggucugaacugaug

SEQ ID NO: 338339 - RNA, 19 nt, Artificial Sequence
  Synthetic
uuuggggucugaacugaug

SEQ ID NO: 338340 - RNA, 20 nt, Artificial Sequence
  Synthetic
cuuuggggucugaacugaug

SEQ ID NO: 338341 - RNA, 21 nt, Artificial Sequence
  Synthetic
gcuuuggggucugaacugaug

SEQ ID NO: 338342 - RNA, 22 nt, Artificial Sequence
  Synthetic
ugcuuuggggucugaacugaug

SEQ ID NO: 338343 - RNA, 23 nt, Artificial Sequence
  Synthetic
gugcuuuggggucugaacugaug

SEQ ID NO: 338344 - RNA, 24 nt, Artificial Sequence
  Synthetic
ugugcuuuggggucugaacugaug

SEQ ID NO: 338345 - RNA, 18 nt, Artificial Sequence
  Synthetic
uuagaucauuaacugaug

SEQ ID NO: 338346 - RNA, 19 nt, Artificial Sequence
  Synthetic
auuagaucauuaacugaug

SEQ ID NO: 338347 - RNA, 20 nt, Artificial Sequence
  Synthetic
uauuagaucauuaacugaug

SEQ ID NO: 338348 - RNA, 21 nt, Artificial Sequence
  Synthetic
uuauuagaucauuaacugaug

SEQ ID NO: 338349 - RNA, 22 nt, Artificial Sequence
  Synthetic
uuuauuagaucauuaacugaug

SEQ ID NO: 338350 - RNA, 23 nt, Artificial Sequence
  Synthetic
uuuuauuagaucauuaacugaug

SEQ ID NO: 338351 - RNA, 24 nt, Artificial Sequence
  Synthetic
auuuuauuagaucauuaacugaug

SEQ ID NO: 338352 - RNA, 18 nt, Artificial Sequence
  Synthetic
gucuuuuucuuacugaug

SEQ ID NO: 338353 - RNA, 19 nt, Artificial Sequence
  Synthetic
ugucuuuuucuuacugaug

SEQ ID NO: 338354 - RNA, 20 nt, Artificial Sequence
  Synthetic
uugucuuuuucuuacugaug

SEQ ID NO: 338355 - RNA, 21 nt, Artificial Sequence
  Synthetic
guugucuuuuucuuacugaug

SEQ ID NO: 338356 - RNA, 22 nt, Artificial Sequence
  Synthetic
aguugucuuuuucuuacugaug

SEQ ID NO: 338357 - RNA, 23 nt, Artificial Sequence
  Synthetic
uaguugucuuuuucuuacugaug

SEQ ID NO: 338358 - RNA, 24 nt, Artificial Sequence
  Synthetic
auaguugucuuuuucuuacugaug

SEQ ID NO: 338359 - RNA, 18 nt, Artificial Sequence
  Synthetic
gcugauaagggccugaug

SEQ ID NO: 338360 - RNA, 19 nt, Artificial Sequence
  Synthetic
ggcugauaagggccugaug

SEQ ID NO: 338361 - RNA, 20 nt, Artificial Sequence
  Synthetic
gggcugauaagggccugaug

SEQ ID NO: 338362 - RNA, 21 nt, Artificial Sequence
  Synthetic
agggcugauaagggccugaug

SEQ ID NO: 338363 - RNA, 22 nt, Artificial Sequence
  Synthetic
aagggcugauaagggccugaug

SEQ ID NO: 338364 - RNA, 23 nt, Artificial Sequence
  Synthetic
aaagggcugauaagggccugaug

SEQ ID NO: 338365 - RNA, 24 nt, Artificial Sequence
  Synthetic
aaaagggcugauaagggccugaug

SEQ ID NO: 338366 - RNA, 18 nt, Artificial Sequence
  Synthetic
gggguagauugccugaug

SEQ ID NO: 338367 - RNA, 19 nt, Artificial Sequence
  Synthetic
ugggguagauugccugaug

SEQ ID NO: 338368 - RNA, 20 nt, Artificial Sequence
  Synthetic
uugggguagauugccugaug

SEQ ID NO: 338369 - RNA, 21 nt, Artificial Sequence
  Synthetic
guugggguagauugccugaug

SEQ ID NO: 338370 - RNA, 22 nt, Artificial Sequence
  Synthetic
aguugggguagauugccugaug

SEQ ID NO: 338371 - RNA, 23 nt, Artificial Sequence
  Synthetic
caguugggguagauugccugaug

SEQ ID NO: 338372 - RNA, 24 nt, Artificial Sequence
  Synthetic
ucaguugggguagauugccugaug

SEQ ID NO: 338373 - RNA, 18 nt, Artificial Sequence
  Synthetic
ugggguuugauccugaug

SEQ ID NO: 338374 - RNA, 19 nt, Artificial Sequence
  Synthetic
cugggguuugauccugaug

SEQ ID NO: 338375 - RNA, 20 nt, Artificial Sequence
  Synthetic
acugggguuugauccugaug

SEQ ID NO: 338376 - RNA, 21 nt, Artificial Sequence
  Synthetic
cacugggguuugauccugaug

SEQ ID NO: 338377 - RNA, 22 nt, Artificial Sequence
  Synthetic
ccacugggguuugauccugaug

SEQ ID NO: 338378 - RNA, 23 nt, Artificial Sequence
  Synthetic
gccacugggguuugauccugaug

SEQ ID NO: 338379 - RNA, 24 nt, Artificial Sequence
  Synthetic
ggccacugggguuugauccugaug

SEQ ID NO: 338380 - RNA, 18 nt, Artificial Sequence
  Synthetic
ccacuugggaggcugaug

SEQ ID NO: 338381 - RNA, 19 nt, Artificial Sequence
  Synthetic
gccacuugggaggcugaug

SEQ ID NO: 338382 - RNA, 20 nt, Artificial Sequence
  Synthetic
agccacuugggaggcugaug

SEQ ID NO: 338383 - RNA, 21 nt, Artificial Sequence
  Synthetic
cagccacuugggaggcugaug

SEQ ID NO: 338384 - RNA, 22 nt, Artificial Sequence
  Synthetic
ccagccacuugggaggcugaug

SEQ ID NO: 338385 - RNA, 23 nt, Artificial Sequence
  Synthetic
cccagccacuugggaggcugaug

SEQ ID NO: 338386 - RNA, 24 nt, Artificial Sequence
  Synthetic
ucccagccacuugggaggcugaug

SEQ ID NO: 338387 - RNA, 18 nt, Artificial Sequence
  Synthetic
aacuuuuauaugcugaug

SEQ ID NO: 338388 - RNA, 19 nt, Artificial Sequence
  Synthetic
uaacuuuuauaugcugaug

SEQ ID NO: 338389 - RNA, 20 nt, Artificial Sequence
  Synthetic
auaacuuuuauaugcugaug

SEQ ID NO: 338390 - RNA, 21 nt, Artificial Sequence
  Synthetic
gauaacuuuuauaugcugaug

SEQ ID NO: 338391 - RNA, 22 nt, Artificial Sequence
  Synthetic
ggauaacuuuuauaugcugaug

SEQ ID NO: 338392 - RNA, 23 nt, Artificial Sequence
  Synthetic
uggauaacuuuuauaugcugaug

SEQ ID NO: 338393 - RNA, 24 nt, Artificial Sequence
  Synthetic
cuggauaacuuuuauaugcugaug

SEQ ID NO: 338394 - RNA, 18 nt, Artificial Sequence
  Synthetic
gagcaacaagugcugaug

SEQ ID NO: 338395 - RNA, 19 nt, Artificial Sequence
  Synthetic
agagcaacaagugcugaug

SEQ ID NO: 338396 - RNA, 20 nt, Artificial Sequence
  Synthetic
cagagcaacaagugcugaug

SEQ ID NO: 338397 - RNA, 21 nt, Artificial Sequence
  Synthetic
gcagagcaacaagugcugaug

SEQ ID NO: 338398 - RNA, 22 nt, Artificial Sequence
  Synthetic
ggcagagcaacaagugcugaug

SEQ ID NO: 338399 - RNA, 23 nt, Artificial Sequence
  Synthetic
aggcagagcaacaagugcugaug

SEQ ID NO: 338400 - RNA, 24 nt, Artificial Sequence
  Synthetic
aaggcagagcaacaagugcugaug

SEQ ID NO: 338401 - RNA, 18 nt, Artificial Sequence
  Synthetic
aacuuuggaacucugaug

SEQ ID NO: 338402 - RNA, 19 nt, Artificial Sequence
  Synthetic
gaacuuuggaacucugaug

SEQ ID NO: 338403 - RNA, 20 nt, Artificial Sequence
  Synthetic
agaacuuuggaacucugaug

SEQ ID NO: 338404 - RNA, 21 nt, Artificial Sequence
  Synthetic
aagaacuuuggaacucugaug

SEQ ID NO: 338405 - RNA, 22 nt, Artificial Sequence
  Synthetic
aaagaacuuuggaacucugaug

SEQ ID NO: 338406 - RNA, 23 nt, Artificial Sequence
  Synthetic
gaaagaacuuuggaacucugaug

SEQ ID NO: 338407 - RNA, 24 nt, Artificial Sequence
  Synthetic
agaaagaacuuuggaacucugaug

SEQ ID NO: 338408 - RNA, 18 nt, Artificial Sequence
  Synthetic
aagucuucuauucugaug

SEQ ID NO: 338409 - RNA, 19 nt, Artificial Sequence
  Synthetic
uaagucuucuauucugaug

SEQ ID NO: 338410 - RNA, 20 nt, Artificial Sequence
  Synthetic
guaagucuucuauucugaug

SEQ ID NO: 338411 - RNA, 21 nt, Artificial Sequence
  Synthetic
uguaagucuucuauucugaug

SEQ ID NO: 338412 - RNA, 22 nt, Artificial Sequence
  Synthetic
cuguaagucuucuauucugaug

SEQ ID NO: 338413 - RNA, 23 nt, Artificial Sequence
  Synthetic
ucuguaagucuucuauucugaug

SEQ ID NO: 338414 - RNA, 24 nt, Artificial Sequence
  Synthetic
uucuguaagucuucuauucugaug

SEQ ID NO: 338415 - RNA, 18 nt, Artificial Sequence
  Synthetic
guuggaaccaaagugaug

SEQ ID NO: 338416 - RNA, 19 nt, Artificial Sequence
  Synthetic
uguuggaaccaaagugaug

SEQ ID NO: 338417 - RNA, 20 nt, Artificial Sequence
  Synthetic
cuguuggaaccaaagugaug

SEQ ID NO: 338418 - RNA, 21 nt, Artificial Sequence
  Synthetic
gcuguuggaaccaaagugaug

SEQ ID NO: 338419 - RNA, 22 nt, Artificial Sequence
  Synthetic
agcuguuggaaccaaagugaug

SEQ ID NO: 338420 - RNA, 23 nt, Artificial Sequence
  Synthetic
cagcuguuggaaccaaagugaug

SEQ ID NO: 338421 - RNA, 24 nt, Artificial Sequence
  Synthetic
gcagcuguuggaaccaaagugaug

SEQ ID NO: 338422 - RNA, 18 nt, Artificial Sequence
  Synthetic
guguaccugaaagugaug

SEQ ID NO: 338423 - RNA, 19 nt, Artificial Sequence
  Synthetic
gguguaccugaaagugaug

SEQ ID NO: 338424 - RNA, 20 nt, Artificial Sequence
  Synthetic
ugguguaccugaaagugaug

SEQ ID NO: 338425 - RNA, 24 nt, Artificial Sequence
  Synthetic
ugauugguguaccugaaagugaug

SEQ ID NO: 338426 - RNA, 18 nt, Artificial Sequence
  Synthetic
auaauuuugacagugaug

SEQ ID NO: 338427 - RNA, 19 nt, Artificial Sequence
  Synthetic
aauaauuuugacagugaug

SEQ ID NO: 338428 - RNA, 20 nt, Artificial Sequence
  Synthetic
aaauaauuuugacagugaug

SEQ ID NO: 338429 - RNA, 21 nt, Artificial Sequence
  Synthetic
aaaauaauuuugacagugaug

SEQ ID NO: 338430 - RNA, 22 nt, Artificial Sequence
  Synthetic
gaaaauaauuuugacagugaug

SEQ ID NO: 338431 - RNA, 23 nt, Artificial Sequence
  Synthetic
agaaaauaauuuugacagugaug

SEQ ID NO: 338432 - RNA, 24 nt, Artificial Sequence
  Synthetic
aagaaaauaauuuugacagugaug

SEQ ID NO: 338433 - RNA, 18 nt, Artificial Sequence
  Synthetic
gcaaugccaccagugaug

SEQ ID NO: 338434 - RNA, 19 nt, Artificial Sequence
  Synthetic
ugcaaugccaccagugaug

SEQ ID NO: 338435 - RNA, 20 nt, Artificial Sequence
  Synthetic
uugcaaugccaccagugaug

SEQ ID NO: 338436 - RNA, 21 nt, Artificial Sequence
  Synthetic
uuugcaaugccaccagugaug

SEQ ID NO: 338437 - RNA, 22 nt, Artificial Sequence
  Synthetic
uuuugcaaugccaccagugaug

SEQ ID NO: 338438 - RNA, 23 nt, Artificial Sequence
  Synthetic
auuuugcaaugccaccagugaug

SEQ ID NO: 338439 - RNA, 24 nt, Artificial Sequence
  Synthetic
cauuuugcaaugccaccagugaug

SEQ ID NO: 338440 - RNA, 18 nt, Artificial Sequence
  Synthetic
cucuaaugaccagugaug

SEQ ID NO: 338441 - RNA, 19 nt, Artificial Sequence
  Synthetic
ucucuaaugaccagugaug

SEQ ID NO: 338442 - RNA, 20 nt, Artificial Sequence
  Synthetic
uucucuaaugaccagugaug

SEQ ID NO: 338443 - RNA, 21 nt, Artificial Sequence
  Synthetic
uuucucuaaugaccagugaug

SEQ ID NO: 338444 - RNA, 22 nt, Artificial Sequence
  Synthetic
auuucucuaaugaccagugaug

SEQ ID NO: 338445 - RNA, 23 nt, Artificial Sequence
  Synthetic
cauuucucuaaugaccagugaug

SEQ ID NO: 338446 - RNA, 24 nt, Artificial Sequence
  Synthetic
gcauuucucuaaugaccagugaug

SEQ ID NO: 338447 - RNA, 18 nt, Artificial Sequence
  Synthetic
cucugaugaccagugaug

SEQ ID NO: 338448 - RNA, 19 nt, Artificial Sequence
  Synthetic
ucucugaugaccagugaug

SEQ ID NO: 338449 - RNA, 20 nt, Artificial Sequence
  Synthetic
uucucugaugaccagugaug

SEQ ID NO: 338450 - RNA, 21 nt, Artificial Sequence
  Synthetic
uuucucugaugaccagugaug

SEQ ID NO: 338451 - RNA, 22 nt, Artificial Sequence
  Synthetic
auuucucugaugaccagugaug

SEQ ID NO: 338452 - RNA, 23 nt, Artificial Sequence
  Synthetic
cauuucucugaugaccagugaug

SEQ ID NO: 338453 - RNA, 24 nt, Artificial Sequence
  Synthetic
gcauuucucugaugaccagugaug

SEQ ID NO: 338454 - RNA, 18 nt, Artificial Sequence
  Synthetic
gcuaaaugcccagugaug

SEQ ID NO: 338455 - RNA, 19 nt, Artificial Sequence
  Synthetic
agcuaaaugcccagugaug

SEQ ID NO: 338456 - RNA, 20 nt, Artificial Sequence
  Synthetic
cagcuaaaugcccagugaug

SEQ ID NO: 338457 - RNA, 21 nt, Artificial Sequence
  Synthetic
gcagcuaaaugcccagugaug

SEQ ID NO: 338458 - RNA, 22 nt, Artificial Sequence
  Synthetic
ugcagcuaaaugcccagugaug

SEQ ID NO: 338459 - RNA, 23 nt, Artificial Sequence
  Synthetic
cugcagcuaaaugcccagugaug

SEQ ID NO: 338460 - RNA, 24 nt, Artificial Sequence
  Synthetic
gcugcagcuaaaugcccagugaug

SEQ ID NO: 338461 - RNA, 21 nt, Artificial Sequence
  Synthetic
guucucugauggccagugaug

SEQ ID NO: 338462 - RNA, 22 nt, Artificial Sequence
  Synthetic
aguucucugauggccagugaug

SEQ ID NO: 338463 - RNA, 23 nt, Artificial Sequence
  Synthetic
caguucucugauggccagugaug

SEQ ID NO: 338464 - RNA, 24 nt, Artificial Sequence
  Synthetic
gcaguucucugauggccagugaug

SEQ ID NO: 338465 - RNA, 21 nt, Artificial Sequence
  Synthetic
uuucucugauggccagugaug

SEQ ID NO: 338466 - RNA, 22 nt, Artificial Sequence
  Synthetic
guuucucugauggccagugaug

SEQ ID NO: 338467 - RNA, 23 nt, Artificial Sequence
  Synthetic
cguuucucugauggccagugaug

SEQ ID NO: 338468 - RNA, 24 nt, Artificial Sequence
  Synthetic
gcguuucucugauggccagugaug

SEQ ID NO: 338469 - RNA, 18 nt, Artificial Sequence
  Synthetic
cuccaaugaucagugaug

SEQ ID NO: 338470 - RNA, 19 nt, Artificial Sequence
  Synthetic
ucuccaaugaucagugaug

SEQ ID NO: 338471 - RNA, 20 nt, Artificial Sequence
  Synthetic
uucuccaaugaucagugaug

SEQ ID NO: 338472 - RNA, 21 nt, Artificial Sequence
  Synthetic
uuucuccaaugaucagugaug

SEQ ID NO: 338473 - RNA, 22 nt, Artificial Sequence
  Synthetic
auuucuccaaugaucagugaug

SEQ ID NO: 338474 - RNA, 23 nt, Artificial Sequence
  Synthetic
cauuucuccaaugaucagugaug

SEQ ID NO: 338475 - RNA, 24 nt, Artificial Sequence
  Synthetic
gcauuucuccaaugaucagugaug

SEQ ID NO: 338476 - RNA, 18 nt, Artificial Sequence
  Synthetic
cuacagaauucagugaug

SEQ ID NO: 338477 - RNA, 19 nt, Artificial Sequence
  Synthetic
ucuacagaauucagugaug

SEQ ID NO: 338478 - RNA, 20 nt, Artificial Sequence
  Synthetic
aucuacagaauucagugaug

SEQ ID NO: 338479 - RNA, 21 nt, Artificial Sequence
  Synthetic
aaucuacagaauucagugaug

SEQ ID NO: 338480 - RNA, 22 nt, Artificial Sequence
  Synthetic
aaaucuacagaauucagugaug

SEQ ID NO: 338481 - RNA, 23 nt, Artificial Sequence
  Synthetic
aaaaucuacagaauucagugaug

SEQ ID NO: 338482 - RNA, 24 nt, Artificial Sequence
  Synthetic
aaaaaucuacagaauucagugaug

SEQ ID NO: 338483 - RNA, 18 nt, Artificial Sequence
  Synthetic
aucaaugauucagugaug

SEQ ID NO: 338484 - RNA, 19 nt, Artificial Sequence
  Synthetic
uaucaaugauucagugaug

SEQ ID NO: 338485 - RNA, 20 nt, Artificial Sequence
  Synthetic
uuaucaaugauucagugaug

SEQ ID NO: 338486 - RNA, 21 nt, Artificial Sequence
  Synthetic
guuaucaaugauucagugaug

SEQ ID NO: 338487 - RNA, 22 nt, Artificial Sequence
  Synthetic
gguuaucaaugauucagugaug

SEQ ID NO: 338488 - RNA, 23 nt, Artificial Sequence
  Synthetic
ugguuaucaaugauucagugaug

SEQ ID NO: 338489 - RNA, 24 nt, Artificial Sequence
  Synthetic
cugguuaucaaugauucagugaug

SEQ ID NO: 338490 - RNA, 18 nt, Artificial Sequence
  Synthetic
aaguaaacaggagugaug

SEQ ID NO: 338491 - RNA, 19 nt, Artificial Sequence
  Synthetic
aaaguaaacaggagugaug

SEQ ID NO: 338492 - RNA, 20 nt, Artificial Sequence
  Synthetic
aaaaguaaacaggagugaug

SEQ ID NO: 338493 - RNA, 21 nt, Artificial Sequence
  Synthetic
aaaaaguaaacaggagugaug

SEQ ID NO: 338494 - RNA, 22 nt, Artificial Sequence
  Synthetic
gaaaaaguaaacaggagugaug

SEQ ID NO: 338495 - RNA, 23 nt, Artificial Sequence
  Synthetic
ggaaaaaguaaacaggagugaug

SEQ ID NO: 338496 - RNA, 24 nt, Artificial Sequence
  Synthetic
aggaaaaaguaaacaggagugaug

SEQ ID NO: 338497 - RNA, 18 nt, Artificial Sequence
  Synthetic
cucugauguugagugaug

SEQ ID NO: 338498 - RNA, 19 nt, Artificial Sequence
  Synthetic
ucucugauguugagugaug

SEQ ID NO: 338499 - RNA, 20 nt, Artificial Sequence
  Synthetic
uucucugauguugagugaug

SEQ ID NO: 338500 - RNA, 21 nt, Artificial Sequence
  Synthetic
uuucucugauguugagugaug

SEQ ID NO: 338501 - RNA, 22 nt, Artificial Sequence
  Synthetic
auuucucugauguugagugaug

SEQ ID NO: 338502 - RNA, 23 nt, Artificial Sequence
  Synthetic
cauuucucugauguugagugaug

SEQ ID NO: 338503 - RNA, 24 nt, Artificial Sequence
  Synthetic
gcauuucucugauguugagugaug

SEQ ID NO: 338504 - RNA, 18 nt, Artificial Sequence
  Synthetic
uuucuuauuugagugaug

SEQ ID NO: 338505 - RNA, 19 nt, Artificial Sequence
  Synthetic
guuucuuauuugagugaug

SEQ ID NO: 338506 - RNA, 20 nt, Artificial Sequence
  Synthetic
gguuucuuauuugagugaug

SEQ ID NO: 338507 - RNA, 21 nt, Artificial Sequence
  Synthetic
agguuucuuauuugagugaug

SEQ ID NO: 338508 - RNA, 22 nt, Artificial Sequence
  Synthetic
aagguuucuuauuugagugaug

SEQ ID NO: 338509 - RNA, 23 nt, Artificial Sequence
  Synthetic
aaagguuucuuauuugagugaug

SEQ ID NO: 338510 - RNA, 24 nt, Artificial Sequence
  Synthetic
gaaagguuucuuauuugagugaug

SEQ ID NO: 338511 - RNA, 18 nt, Artificial Sequence
  Synthetic
auuuuccugauagugaug

SEQ ID NO: 338512 - RNA, 19 nt, Artificial Sequence
  Synthetic
cauuuuccugauagugaug

SEQ ID NO: 338513 - RNA, 20 nt, Artificial Sequence
  Synthetic
gcauuuuccugauagugaug

SEQ ID NO: 338514 - RNA, 21 nt, Artificial Sequence
  Synthetic
ugcauuuuccugauagugaug

SEQ ID NO: 338515 - RNA, 22 nt, Artificial Sequence
  Synthetic
uugcauuuuccugauagugaug

SEQ ID NO: 338516 - RNA, 23 nt, Artificial Sequence
  Synthetic
uuugcauuuuccugauagugaug

SEQ ID NO: 338517 - RNA, 24 nt, Artificial Sequence
  Synthetic
auuugcauuuuccugauagugaug

SEQ ID NO: 338518 - RNA, 18 nt, Artificial Sequence
  Synthetic
cugugaugauuagugaug

SEQ ID NO: 338519 - RNA, 19 nt, Artificial Sequence
  Synthetic
ucugugaugauuagugaug

SEQ ID NO: 338520 - RNA, 20 nt, Artificial Sequence
  Synthetic
uucugugaugauuagugaug

SEQ ID NO: 338521 - RNA, 21 nt, Artificial Sequence
  Synthetic
uuucugugaugauuagugaug

SEQ ID NO: 338522 - RNA, 22 nt, Artificial Sequence
  Synthetic
auuucugugaugauuagugaug

SEQ ID NO: 338523 - RNA, 23 nt, Artificial Sequence
  Synthetic
uauuucugugaugauuagugaug

SEQ ID NO: 338524 - RNA, 24 nt, Artificial Sequence
  Synthetic
guauuucugugaugauuagugaug

SEQ ID NO: 338525 - RNA, 18 nt, Artificial Sequence
  Synthetic
cccugguaguuagugaug

SEQ ID NO: 338526 - RNA, 19 nt, Artificial Sequence
  Synthetic
ucccugguaguuagugaug

SEQ ID NO: 338527 - RNA, 20 nt, Artificial Sequence
  Synthetic
uucccugguaguuagugaug

SEQ ID NO: 338528 - RNA, 21 nt, Artificial Sequence
  Synthetic
uuucccugguaguuagugaug

SEQ ID NO: 338529 - RNA, 22 nt, Artificial Sequence
  Synthetic
auuucccugguaguuagugaug

SEQ ID NO: 338530 - RNA, 23 nt, Artificial Sequence
  Synthetic
cauuucccugguaguuagugaug

SEQ ID NO: 338531 - RNA, 24 nt, Artificial Sequence
  Synthetic
gcauuucccugguaguuagugaug

SEQ ID NO: 338532 - RNA, 18 nt, Artificial Sequence
  Synthetic
aauagaacucccgugaug

SEQ ID NO: 338533 - RNA, 19 nt, Artificial Sequence
  Synthetic
aaauagaacucccgugaug

SEQ ID NO: 338534 - RNA, 20 nt, Artificial Sequence
  Synthetic
caaauagaacucccgugaug

SEQ ID NO: 338535 - RNA, 21 nt, Artificial Sequence
  Synthetic
ucaaauagaacucccgugaug

SEQ ID NO: 338536 - RNA, 22 nt, Artificial Sequence
  Synthetic
uucaaauagaacucccgugaug

SEQ ID NO: 338537 - RNA, 23 nt, Artificial Sequence
  Synthetic
uuucaaauagaacucccgugaug

SEQ ID NO: 338538 - RNA, 24 nt, Artificial Sequence
  Synthetic
cuuucaaauagaacucccgugaug

SEQ ID NO: 338539 - RNA, 18 nt, Artificial Sequence
  Synthetic
aucaaugagaucgugaug

SEQ ID NO: 338540 - RNA, 19 nt, Artificial Sequence
  Synthetic
aaucaaugagaucgugaug

SEQ ID NO: 338541 - RNA, 20 nt, Artificial Sequence
  Synthetic
uaaucaaugagaucgugaug

SEQ ID NO: 338542 - RNA, 21 nt, Artificial Sequence
  Synthetic
auaaucaaugagaucgugaug

SEQ ID NO: 338543 - RNA, 22 nt, Artificial Sequence
  Synthetic
cauaaucaaugagaucgugaug

SEQ ID NO: 338544 - RNA, 23 nt, Artificial Sequence
  Synthetic
acauaaucaaugagaucgugaug

SEQ ID NO: 338545 - RNA, 24 nt, Artificial Sequence
  Synthetic
aacauaaucaaugagaucgugaug

SEQ ID NO: 338546 - RNA, 18 nt, Artificial Sequence
  Synthetic
aaugacuccauggugaug

SEQ ID NO: 338547 - RNA, 19 nt, Artificial Sequence
  Synthetic
uaaugacuccauggugaug

SEQ ID NO: 338548 - RNA, 20 nt, Artificial Sequence
  Synthetic
cuaaugacuccauggugaug

SEQ ID NO: 338549 - RNA, 21 nt, Artificial Sequence
  Synthetic
acuaaugacuccauggugaug

SEQ ID NO: 338550 - RNA, 22 nt, Artificial Sequence
  Synthetic
uacuaaugacuccauggugaug

SEQ ID NO: 338551 - RNA, 23 nt, Artificial Sequence
  Synthetic
auacuaaugacuccauggugaug

SEQ ID NO: 338552 - RNA, 24 nt, Artificial Sequence
  Synthetic
aauacuaaugacuccauggugaug

SEQ ID NO: 338553 - RNA, 18 nt, Artificial Sequence
  Synthetic
gaguggauuuuggugaug

SEQ ID NO: 338554 - RNA, 19 nt, Artificial Sequence
  Synthetic
ugaguggauuuuggugaug

SEQ ID NO: 338555 - RNA, 20 nt, Artificial Sequence
  Synthetic
gugaguggauuuuggugaug

SEQ ID NO: 338556 - RNA, 21 nt, Artificial Sequence
  Synthetic
ugugaguggauuuuggugaug

SEQ ID NO: 338557 - RNA, 22 nt, Artificial Sequence
  Synthetic
gugugaguggauuuuggugaug

SEQ ID NO: 338558 - RNA, 23 nt, Artificial Sequence
  Synthetic
agugugaguggauuuuggugaug

SEQ ID NO: 338559 - RNA, 24 nt, Artificial Sequence
  Synthetic
aagugugaguggauuuuggugaug

SEQ ID NO: 338560 - RNA, 18 nt, Artificial Sequence
  Synthetic
ugauugaacucugugaug

SEQ ID NO: 338561 - RNA, 19 nt, Artificial Sequence
  Synthetic
gugauugaacucugugaug

SEQ ID NO: 338562 - RNA, 20 nt, Artificial Sequence
  Synthetic
ugugauugaacucugugaug

SEQ ID NO: 338563 - RNA, 21 nt, Artificial Sequence
  Synthetic
cugugauugaacucugugaug

SEQ ID NO: 338564 - RNA, 22 nt, Artificial Sequence
  Synthetic
gcugugauugaacucugugaug

SEQ ID NO: 338565 - RNA, 23 nt, Artificial Sequence
  Synthetic
ggcugugauugaacucugugaug

SEQ ID NO: 338566 - RNA, 24 nt, Artificial Sequence
  Synthetic
uggcugugauugaacucugugaug

SEQ ID NO: 338567 - RNA, 18 nt, Artificial Sequence
  Synthetic
ggggccagcucugugaug

SEQ ID NO: 338568 - RNA, 19 nt, Artificial Sequence
  Synthetic
aggggccagcucugugaug

SEQ ID NO: 338569 - RNA, 20 nt, Artificial Sequence
  Synthetic
aaggggccagcucugugaug

SEQ ID NO: 338570 - RNA, 21 nt, Artificial Sequence
  Synthetic
gaaggggccagcucugugaug

SEQ ID NO: 338571 - RNA, 22 nt, Artificial Sequence
  Synthetic
agaaggggccagcucugugaug

SEQ ID NO: 338572 - RNA, 23 nt, Artificial Sequence
  Synthetic
aagaaggggccagcucugugaug

SEQ ID NO: 338573 - RNA, 24 nt, Artificial Sequence
  Synthetic
caagaaggggccagcucugugaug

SEQ ID NO: 338574 - RNA, 18 nt, Artificial Sequence
  Synthetic
aauacucauauugugaug

SEQ ID NO: 338575 - RNA, 19 nt, Artificial Sequence
  Synthetic
uaauacucauauugugaug

SEQ ID NO: 338576 - RNA, 20 nt, Artificial Sequence
  Synthetic
cuaauacucauauugugaug

SEQ ID NO: 338577 - RNA, 21 nt, Artificial Sequence
  Synthetic
ccuaauacucauauugugaug

SEQ ID NO: 338578 - RNA, 22 nt, Artificial Sequence
  Synthetic
cccuaauacucauauugugaug

SEQ ID NO: 338579 - RNA, 23 nt, Artificial Sequence
  Synthetic
acccuaauacucauauugugaug

SEQ ID NO: 338580 - RNA, 24 nt, Artificial Sequence
  Synthetic
aacccuaauacucauauugugaug

SEQ ID NO: 338581 - RNA, 18 nt, Artificial Sequence
  Synthetic
cugucuuucaaauugaug

SEQ ID NO: 338582 - RNA, 19 nt, Artificial Sequence
  Synthetic
gcugucuuucaaauugaug

SEQ ID NO: 338583 - RNA, 20 nt, Artificial Sequence
  Synthetic
ugcugucuuucaaauugaug

SEQ ID NO: 338584 - RNA, 21 nt, Artificial Sequence
  Synthetic
augcugucuuucaaauugaug

SEQ ID NO: 338585 - RNA, 22 nt, Artificial Sequence
  Synthetic
gaugcugucuuucaaauugaug

SEQ ID NO: 338586 - RNA, 23 nt, Artificial Sequence
  Synthetic
agaugcugucuuucaaauugaug

SEQ ID NO: 338587 - RNA, 24 nt, Artificial Sequence
  Synthetic
aagaugcugucuuucaaauugaug

SEQ ID NO: 338588 - RNA, 18 nt, Artificial Sequence
  Synthetic
uuagggauagaauugaug

SEQ ID NO: 338589 - RNA, 19 nt, Artificial Sequence
  Synthetic
auuagggauagaauugaug

SEQ ID NO: 338590 - RNA, 20 nt, Artificial Sequence
  Synthetic
aauuagggauagaauugaug

SEQ ID NO: 338591 - RNA, 21 nt, Artificial Sequence
  Synthetic
aaauuagggauagaauugaug

SEQ ID NO: 338592 - RNA, 22 nt, Artificial Sequence
  Synthetic
aaaauuagggauagaauugaug

SEQ ID NO: 338593 - RNA, 23 nt, Artificial Sequence
  Synthetic
aaaaauuagggauagaauugaug

SEQ ID NO: 338594 - RNA, 24 nt, Artificial Sequence
  Synthetic
caaaaauuagggauagaauugaug

SEQ ID NO: 338595 - RNA, 18 nt, Artificial Sequence
  Synthetic
ugauuauauugauugaug

SEQ ID NO: 338596 - RNA, 19 nt, Artificial Sequence
  Synthetic
augauuauauugauugaug

SEQ ID NO: 338597 - RNA, 20 nt, Artificial Sequence
  Synthetic
uaugauuauauugauugaug

SEQ ID NO: 338598 - RNA, 21 nt, Artificial Sequence
  Synthetic
auaugauuauauugauugaug

SEQ ID NO: 338599 - RNA, 22 nt, Artificial Sequence
  Synthetic
cauaugauuauauugauugaug

SEQ ID NO: 338600 - RNA, 23 nt, Artificial Sequence
  Synthetic
ucauaugauuauauugauugaug

SEQ ID NO: 338601 - RNA, 24 nt, Artificial Sequence
  Synthetic
aucauaugauuauauugauugaug

SEQ ID NO: 338602 - RNA, 18 nt, Artificial Sequence
  Synthetic
uuccauuauuuauugaug

SEQ ID NO: 338603 - RNA, 19 nt, Artificial Sequence
  Synthetic
cuuccauuauuuauugaug

SEQ ID NO: 338604 - RNA, 20 nt, Artificial Sequence
  Synthetic
gcuuccauuauuuauugaug

SEQ ID NO: 338605 - RNA, 21 nt, Artificial Sequence
  Synthetic
agcuuccauuauuuauugaug

SEQ ID NO: 338606 - RNA, 22 nt, Artificial Sequence
  Synthetic
aagcuuccauuauuuauugaug

SEQ ID NO: 338607 - RNA, 23 nt, Artificial Sequence
  Synthetic
aaagcuuccauuauuuauugaug

SEQ ID NO: 338608 - RNA, 24 nt, Artificial Sequence
  Synthetic
uaaagcuuccauuauuuauugaug

SEQ ID NO: 338609 - RNA, 18 nt, Artificial Sequence
  Synthetic
accguucauaacuugaug

SEQ ID NO: 338610 - RNA, 19 nt, Artificial Sequence
  Synthetic
aaccguucauaacuugaug

SEQ ID NO: 338611 - RNA, 20 nt, Artificial Sequence
  Synthetic
aaaccguucauaacuugaug

SEQ ID NO: 338612 - RNA, 21 nt, Artificial Sequence
  Synthetic
aaaaccguucauaacuugaug

SEQ ID NO: 338613 - RNA, 22 nt, Artificial Sequence
  Synthetic
uaaaaccguucauaacuugaug

SEQ ID NO: 338614 - RNA, 23 nt, Artificial Sequence
  Synthetic
cuaaaaccguucauaacuugaug

SEQ ID NO: 338615 - RNA, 24 nt, Artificial Sequence
  Synthetic
gcuaaaaccguucauaacuugaug

SEQ ID NO: 338616 - RNA, 18 nt, Artificial Sequence
  Synthetic
agcaaaucccccuugaug

SEQ ID NO: 338617 - RNA, 19 nt, Artificial Sequence
  Synthetic
cagcaaaucccccuugaug

SEQ ID NO: 338618 - RNA, 20 nt, Artificial Sequence
  Synthetic
ucagcaaaucccccuugaug

SEQ ID NO: 338619 - RNA, 21 nt, Artificial Sequence
  Synthetic
gucagcaaaucccccuugaug

SEQ ID NO: 338620 - RNA, 22 nt, Artificial Sequence
  Synthetic
agucagcaaaucccccuugaug

SEQ ID NO: 338621 - RNA, 23 nt, Artificial Sequence
  Synthetic
gagucagcaaaucccccuugaug

SEQ ID NO: 338622 - RNA, 24 nt, Artificial Sequence
  Synthetic
agagucagcaaaucccccuugaug

SEQ ID NO: 338623 - RNA, 18 nt, Artificial Sequence
  Synthetic
cuauacaguuucuugaug

SEQ ID NO: 338624 - RNA, 19 nt, Artificial Sequence
  Synthetic
gcuauacaguuucuugaug

SEQ ID NO: 338625 - RNA, 20 nt, Artificial Sequence
  Synthetic
cgcuauacaguuucuugaug

SEQ ID NO: 338626 - RNA, 21 nt, Artificial Sequence
  Synthetic
acgcuauacaguuucuugaug

SEQ ID NO: 338627 - RNA, 22 nt, Artificial Sequence
  Synthetic
uacgcuauacaguuucuugaug

SEQ ID NO: 338628 - RNA, 23 nt, Artificial Sequence
  Synthetic
cuacgcuauacaguuucuugaug

SEQ ID NO: 338629 - RNA, 24 nt, Artificial Sequence
  Synthetic
acuacgcuauacaguuucuugaug

SEQ ID NO: 338630 - RNA, 18 nt, Artificial Sequence
  Synthetic
uuaaguaagccuuugaug

SEQ ID NO: 338631 - RNA, 19 nt, Artificial Sequence
  Synthetic
auuaaguaagccuuugaug

SEQ ID NO: 338632 - RNA, 20 nt, Artificial Sequence
  Synthetic
uauuaaguaagccuuugaug

SEQ ID NO: 338633 - RNA, 21 nt, Artificial Sequence
  Synthetic
guauuaaguaagccuuugaug

SEQ ID NO: 338634 - RNA, 22 nt, Artificial Sequence
  Synthetic
uguauuaaguaagccuuugaug

SEQ ID NO: 338635 - RNA, 23 nt, Artificial Sequence
  Synthetic
guguauuaaguaagccuuugaug

SEQ ID NO: 338636 - RNA, 24 nt, Artificial Sequence
  Synthetic
uguguauuaaguaagccuuugaug

SEQ ID NO: 338637 - RNA, 18 nt, Artificial Sequence
  Synthetic
ugaugauuuucuuugaug

SEQ ID NO: 338638 - RNA, 19 nt, Artificial Sequence
  Synthetic
uugaugauuuucuuugaug

SEQ ID NO: 338639 - RNA, 20 nt, Artificial Sequence
  Synthetic
guugaugauuuucuuugaug

SEQ ID NO: 338640 - RNA, 21 nt, Artificial Sequence
  Synthetic
uguugaugauuuucuuugaug

SEQ ID NO: 338641 - RNA, 22 nt, Artificial Sequence
  Synthetic
uuguugaugauuuucuuugaug

SEQ ID NO: 338642 - RNA, 23 nt, Artificial Sequence
  Synthetic
uuuguugaugauuuucuuugaug

SEQ ID NO: 338643 - RNA, 24 nt, Artificial Sequence
  Synthetic
uuuuguugaugauuuucuuugaug

SEQ ID NO: 338644 - RNA, 18 nt, Artificial Sequence
  Synthetic
aagaauccagguuugaug

SEQ ID NO: 338645 - RNA, 19 nt, Artificial Sequence
  Synthetic
aaagaauccagguuugaug

SEQ ID NO: 338646 - RNA, 20 nt, Artificial Sequence
  Synthetic
gaaagaauccagguuugaug

SEQ ID NO: 338647 - RNA, 21 nt, Artificial Sequence
  Synthetic
ggaaagaauccagguuugaug

SEQ ID NO: 338648 - RNA, 22 nt, Artificial Sequence
  Synthetic
aggaaagaauccagguuugaug

SEQ ID NO: 338649 - RNA, 23 nt, Artificial Sequence
  Synthetic
uaggaaagaauccagguuugaug

SEQ ID NO: 338650 - RNA, 24 nt, Artificial Sequence
  Synthetic
uuaggaaagaauccagguuugaug

SEQ ID NO: 338651 - RNA, 18 nt, Artificial Sequence
  Synthetic
uggauauauuguuugaug

SEQ ID NO: 338652 - RNA, 19 nt, Artificial Sequence
  Synthetic
auggauauauuguuugaug

SEQ ID NO: 338653 - RNA, 20 nt, Artificial Sequence
  Synthetic
cauggauauauuguuugaug

SEQ ID NO: 338654 - RNA, 21 nt, Artificial Sequence
  Synthetic
acauggauauauuguuugaug

SEQ ID NO: 338655 - RNA, 22 nt, Artificial Sequence
  Synthetic
uacauggauauauuguuugaug

SEQ ID NO: 338656 - RNA, 23 nt, Artificial Sequence
  Synthetic
uuacauggauauauuguuugaug

SEQ ID NO: 338657 - RNA, 24 nt, Artificial Sequence
  Synthetic
guuacauggauauauuguuugaug

SEQ ID NO: 338658 - RNA, 18 nt, Artificial Sequence
  Synthetic
agguuggcaauuuugaug

SEQ ID NO: 338659 - RNA, 19 nt, Artificial Sequence
  Synthetic
aagguuggcaauuuugaug

SEQ ID NO: 338660 - RNA, 20 nt, Artificial Sequence
  Synthetic
uaagguuggcaauuuugaug

SEQ ID NO: 338661 - RNA, 21 nt, Artificial Sequence
  Synthetic
uuaagguuggcaauuuugaug

SEQ ID NO: 338662 - RNA, 22 nt, Artificial Sequence
  Synthetic
guuaagguuggcaauuuugaug

SEQ ID NO: 338663 - RNA, 23 nt, Artificial Sequence
  Synthetic
aguuaagguuggcaauuuugaug

SEQ ID NO: 338664 - RNA, 24 nt, Artificial Sequence
  Synthetic
caguuaagguuggcaauuuugaug

SEQ ID NO: 338665 - RNA, 18 nt, Artificial Sequence
  Synthetic
auuucuucuuuuuugaug

SEQ ID NO: 338666 - RNA, 19 nt, Artificial Sequence
  Synthetic
uauuucuucuuuuuugaug

SEQ ID NO: 338667 - RNA, 20 nt, Artificial Sequence
  Synthetic
auauuucuucuuuuuugaug

SEQ ID NO: 338668 - RNA, 21 nt, Artificial Sequence
  Synthetic
gauauuucuucuuuuuugaug

SEQ ID NO: 338669 - RNA, 22 nt, Artificial Sequence
  Synthetic
agauauuucuucuuuuuugaug

SEQ ID NO: 338670 - RNA, 23 nt, Artificial Sequence
  Synthetic
gagauauuucuucuuuuuugaug

SEQ ID NO: 338671 - RNA, 24 nt, Artificial Sequence
  Synthetic
ugagauauuucuucuuuuuugaug

SEQ ID NO: 338672 - RNA, 18 nt, Artificial Sequence
  Synthetic
acuuaaaggaaaaauaug

SEQ ID NO: 338673 - RNA, 19 nt, Artificial Sequence
  Synthetic
uacuuaaaggaaaaauaug

SEQ ID NO: 338674 - RNA, 20 nt, Artificial Sequence
  Synthetic
guacuuaaaggaaaaauaug

SEQ ID NO: 338675 - RNA, 21 nt, Artificial Sequence
  Synthetic
gguacuuaaaggaaaaauaug

SEQ ID NO: 338676 - RNA, 22 nt, Artificial Sequence
  Synthetic
ugguacuuaaaggaaaaauaug

SEQ ID NO: 338677 - RNA, 23 nt, Artificial Sequence
  Synthetic
uugguacuuaaaggaaaaauaug

SEQ ID NO: 338678 - RNA, 24 nt, Artificial Sequence
  Synthetic
uuugguacuuaaaggaaaaauaug

SEQ ID NO: 338679 - RNA, 18 nt, Artificial Sequence
  Synthetic
ucaaauucaggaaauaug

SEQ ID NO: 338680 - RNA, 19 nt, Artificial Sequence
  Synthetic
uucaaauucaggaaauaug

SEQ ID NO: 338681 - RNA, 20 nt, Artificial Sequence
  Synthetic
auucaaauucaggaaauaug

SEQ ID NO: 338682 - RNA, 21 nt, Artificial Sequence
  Synthetic
cauucaaauucaggaaauaug

SEQ ID NO: 338683 - RNA, 22 nt, Artificial Sequence
  Synthetic
acauucaaauucaggaaauaug

SEQ ID NO: 338684 - RNA, 23 nt, Artificial Sequence
  Synthetic
aacauucaaauucaggaaauaug

SEQ ID NO: 338685 - RNA, 24 nt, Artificial Sequence
  Synthetic
caacauucaaauucaggaaauaug

SEQ ID NO: 338686 - RNA, 18 nt, Artificial Sequence
  Synthetic
gguggagggggaaauaug

SEQ ID NO: 338687 - RNA, 19 nt, Artificial Sequence
  Synthetic
agguggagggggaaauaug

SEQ ID NO: 338688 - RNA, 20 nt, Artificial Sequence
  Synthetic
aagguggagggggaaauaug

SEQ ID NO: 338689 - RNA, 21 nt, Artificial Sequence
  Synthetic
aaagguggagggggaaauaug

SEQ ID NO: 338690 - RNA, 22 nt, Artificial Sequence
  Synthetic
gaaagguggagggggaaauaug

SEQ ID NO: 338691 - RNA, 23 nt, Artificial Sequence
  Synthetic
agaaagguggagggggaaauaug

SEQ ID NO: 338692 - RNA, 24 nt, Artificial Sequence
  Synthetic
gagaaagguggagggggaaauaug

SEQ ID NO: 338693 - RNA, 18 nt, Artificial Sequence
  Synthetic
augcauacaauaaauaug

SEQ ID NO: 338694 - RNA, 19 nt, Artificial Sequence
  Synthetic
caugcauacaauaaauaug

SEQ ID NO: 338695 - RNA, 20 nt, Artificial Sequence
  Synthetic
ucaugcauacaauaaauaug

SEQ ID NO: 338696 - RNA, 21 nt, Artificial Sequence
  Synthetic
uucaugcauacaauaaauaug

SEQ ID NO: 338697 - RNA, 22 nt, Artificial Sequence
  Synthetic
uuucaugcauacaauaaauaug

SEQ ID NO: 338698 - RNA, 23 nt, Artificial Sequence
  Synthetic
uuuucaugcauacaauaaauaug

SEQ ID NO: 338699 - RNA, 24 nt, Artificial Sequence
  Synthetic
auuuucaugcauacaauaaauaug

SEQ ID NO: 338700 - RNA, 18 nt, Artificial Sequence
  Synthetic
uuccuacuauuaaauaug

SEQ ID NO: 338701 - RNA, 19 nt, Artificial Sequence
  Synthetic
auuccuacuauuaaauaug

SEQ ID NO: 338702 - RNA, 20 nt, Artificial Sequence
  Synthetic
cauuccuacuauuaaauaug

SEQ ID NO: 338703 - RNA, 21 nt, Artificial Sequence
  Synthetic
gcauuccuacuauuaaauaug

SEQ ID NO: 338704 - RNA, 22 nt, Artificial Sequence
  Synthetic
ugcauuccuacuauuaaauaug

SEQ ID NO: 338705 - RNA, 23 nt, Artificial Sequence
  Synthetic
uugcauuccuacuauuaaauaug

SEQ ID NO: 338706 - RNA, 24 nt, Artificial Sequence
  Synthetic
auugcauuccuacuauuaaauaug

SEQ ID NO: 338707 - RNA, 18 nt, Artificial Sequence
  Synthetic
ccuguguaaaacaauaug

SEQ ID NO: 338708 - RNA, 19 nt, Artificial Sequence
  Synthetic
cccuguguaaaacaauaug

SEQ ID NO: 338709 - RNA, 20 nt, Artificial Sequence
  Synthetic
ccccuguguaaaacaauaug

SEQ ID NO: 338710 - RNA, 21 nt, Artificial Sequence
  Synthetic
uccccuguguaaaacaauaug

SEQ ID NO: 338711 - RNA, 22 nt, Artificial Sequence
  Synthetic
guccccuguguaaaacaauaug

SEQ ID NO: 338712 - RNA, 23 nt, Artificial Sequence
  Synthetic
uguccccuguguaaaacaauaug

SEQ ID NO: 338713 - RNA, 24 nt, Artificial Sequence
  Synthetic
cuguccccuguguaaaacaauaug

SEQ ID NO: 338714 - RNA, 18 nt, Artificial Sequence
  Synthetic
uagcaccuguacaauaug

SEQ ID NO: 338715 - RNA, 19 nt, Artificial Sequence
  Synthetic
auagcaccuguacaauaug

SEQ ID NO: 338716 - RNA, 20 nt, Artificial Sequence
  Synthetic
aauagcaccuguacaauaug

SEQ ID NO: 338717 - RNA, 21 nt, Artificial Sequence
  Synthetic
aaauagcaccuguacaauaug

SEQ ID NO: 338718 - RNA, 22 nt, Artificial Sequence
  Synthetic
aaaauagcaccuguacaauaug

SEQ ID NO: 338719 - RNA, 23 nt, Artificial Sequence
  Synthetic
aaaaauagcaccuguacaauaug

SEQ ID NO: 338720 - RNA, 24 nt, Artificial Sequence
  Synthetic
aaaaaauagcaccuguacaauaug

SEQ ID NO: 338721 - RNA, 18 nt, Artificial Sequence
  Synthetic
aacagccuagccaauaug

SEQ ID NO: 338722 - RNA, 19 nt, Artificial Sequence
  Synthetic
aaacagccuagccaauaug

SEQ ID NO: 338723 - RNA, 20 nt, Artificial Sequence
  Synthetic
aaaacagccuagccaauaug

SEQ ID NO: 338724 - RNA, 21 nt, Artificial Sequence
  Synthetic
gaaaacagccuagccaauaug

SEQ ID NO: 338725 - RNA, 22 nt, Artificial Sequence
  Synthetic
cgaaaacagccuagccaauaug

SEQ ID NO: 338726 - RNA, 23 nt, Artificial Sequence
  Synthetic
ucgaaaacagccuagccaauaug

SEQ ID NO: 338727 - RNA, 24 nt, Artificial Sequence
  Synthetic
uucgaaaacagccuagccaauaug

SEQ ID NO: 338728 - RNA, 18 nt, Artificial Sequence
  Synthetic
accagcuuugccaauaug

SEQ ID NO: 338729 - RNA, 19 nt, Artificial Sequence
  Synthetic
gaccagcuuugccaauaug

SEQ ID NO: 338730 - RNA, 20 nt, Artificial Sequence
  Synthetic
agaccagcuuugccaauaug

SEQ ID NO: 338731 - RNA, 21 nt, Artificial Sequence
  Synthetic
gagaccagcuuugccaauaug

SEQ ID NO: 338732 - RNA, 22 nt, Artificial Sequence
  Synthetic
cgagaccagcuuugccaauaug

SEQ ID NO: 338733 - RNA, 23 nt, Artificial Sequence
  Synthetic
ucgagaccagcuuugccaauaug

SEQ ID NO: 338734 - RNA, 24 nt, Artificial Sequence
  Synthetic
uucgagaccagcuuugccaauaug

SEQ ID NO: 338735 - RNA, 18 nt, Artificial Sequence
  Synthetic
ugacuaguugucaauaug

SEQ ID NO: 338736 - RNA, 19 nt, Artificial Sequence
  Synthetic
augacuaguugucaauaug

SEQ ID NO: 338737 - RNA, 20 nt, Artificial Sequence
  Synthetic
aaugacuaguugucaauaug

SEQ ID NO: 338738 - RNA, 21 nt, Artificial Sequence
  Synthetic
aaaugacuaguugucaauaug

SEQ ID NO: 338739 - RNA, 22 nt, Artificial Sequence
  Synthetic
gaaaugacuaguugucaauaug

SEQ ID NO: 338740 - RNA, 23 nt, Artificial Sequence
  Synthetic
ggaaaugacuaguugucaauaug

SEQ ID NO: 338741 - RNA, 24 nt, Artificial Sequence
  Synthetic
aggaaaugacuaguugucaauaug

SEQ ID NO: 338742 - RNA, 18 nt, Artificial Sequence
  Synthetic
ggaagugguuucaauaug

SEQ ID NO: 338743 - RNA, 19 nt, Artificial Sequence
  Synthetic
cggaagugguuucaauaug

SEQ ID NO: 338744 - RNA, 20 nt, Artificial Sequence
  Synthetic
acggaagugguuucaauaug

SEQ ID NO: 338745 - RNA, 21 nt, Artificial Sequence
  Synthetic
uacggaagugguuucaauaug

SEQ ID NO: 338746 - RNA, 22 nt, Artificial Sequence
  Synthetic
uuacggaagugguuucaauaug

SEQ ID NO: 338747 - RNA, 23 nt, Artificial Sequence
  Synthetic
guuacggaagugguuucaauaug

SEQ ID NO: 338748 - RNA, 24 nt, Artificial Sequence
  Synthetic
aguuacggaagugguuucaauaug

SEQ ID NO: 338749 - RNA, 18 nt, Artificial Sequence
  Synthetic
uauaaauaaaagaauaug

SEQ ID NO: 338750 - RNA, 19 nt, Artificial Sequence
  Synthetic
auauaaauaaaagaauaug

SEQ ID NO: 338751 - RNA, 20 nt, Artificial Sequence
  Synthetic
cauauaaauaaaagaauaug

SEQ ID NO: 338752 - RNA, 21 nt, Artificial Sequence
  Synthetic
acauauaaauaaaagaauaug

SEQ ID NO: 338753 - RNA, 22 nt, Artificial Sequence
  Synthetic
cacauauaaauaaaagaauaug

SEQ ID NO: 338754 - RNA, 23 nt, Artificial Sequence
  Synthetic
acacauauaaauaaaagaauaug

SEQ ID NO: 338755 - RNA, 24 nt, Artificial Sequence
  Synthetic
cacacauauaaauaaaagaauaug

SEQ ID NO: 338756 - RNA, 18 nt, Artificial Sequence
  Synthetic
ggaagggcuaagaauaug

SEQ ID NO: 338757 - RNA, 19 nt, Artificial Sequence
  Synthetic
uggaagggcuaagaauaug

SEQ ID NO: 338758 - RNA, 20 nt, Artificial Sequence
  Synthetic
auggaagggcuaagaauaug

SEQ ID NO: 338759 - RNA, 21 nt, Artificial Sequence
  Synthetic
uauggaagggcuaagaauaug

SEQ ID NO: 338760 - RNA, 22 nt, Artificial Sequence
  Synthetic
cuauggaagggcuaagaauaug

SEQ ID NO: 338761 - RNA, 23 nt, Artificial Sequence
  Synthetic
ucuauggaagggcuaagaauaug

SEQ ID NO: 338762 - RNA, 24 nt, Artificial Sequence
  Synthetic
uucuauggaagggcuaagaauaug

SEQ ID NO: 338763 - RNA, 18 nt, Artificial Sequence
  Synthetic
uuucagccucagaauaug

SEQ ID NO: 338764 - RNA, 19 nt, Artificial Sequence
  Synthetic
uuuucagccucagaauaug

SEQ ID NO: 338765 - RNA, 20 nt, Artificial Sequence
  Synthetic
cuuuucagccucagaauaug

SEQ ID NO: 338766 - RNA, 21 nt, Artificial Sequence
  Synthetic
ucuuuucagccucagaauaug

SEQ ID NO: 338767 - RNA, 22 nt, Artificial Sequence
  Synthetic
uucuuuucagccucagaauaug

SEQ ID NO: 338768 - RNA, 23 nt, Artificial Sequence
  Synthetic
uuucuuuucagccucagaauaug

SEQ ID NO: 338769 - RNA, 24 nt, Artificial Sequence
  Synthetic
cuuucuuuucagccucagaauaug

SEQ ID NO: 338770 - RNA, 18 nt, Artificial Sequence
  Synthetic
gguuugaagaggaauaug

SEQ ID NO: 338771 - RNA, 19 nt, Artificial Sequence
  Synthetic
ggguuugaagaggaauaug

SEQ ID NO: 338772 - RNA, 20 nt, Artificial Sequence
  Synthetic
cggguuugaagaggaauaug

SEQ ID NO: 338773 - RNA, 21 nt, Artificial Sequence
  Synthetic
acggguuugaagaggaauaug

SEQ ID NO: 338774 - RNA, 22 nt, Artificial Sequence
  Synthetic
uacggguuugaagaggaauaug

SEQ ID NO: 338775 - RNA, 23 nt, Artificial Sequence
  Synthetic
guacggguuugaagaggaauaug

SEQ ID NO: 338776 - RNA, 24 nt, Artificial Sequence
  Synthetic
gguacggguuugaagaggaauaug

SEQ ID NO: 338777 - RNA, 18 nt, Artificial Sequence
  Synthetic
aaaaaauuuaggaauaug

SEQ ID NO: 338778 - RNA, 19 nt, Artificial Sequence
  Synthetic
uaaaaaauuuaggaauaug

SEQ ID NO: 338779 - RNA, 20 nt, Artificial Sequence
  Synthetic
auaaaaaauuuaggaauaug

SEQ ID NO: 338780 - RNA, 21 nt, Artificial Sequence
  Synthetic
gauaaaaaauuuaggaauaug

SEQ ID NO: 338781 - RNA, 22 nt, Artificial Sequence
  Synthetic
agauaaaaaauuuaggaauaug

SEQ ID NO: 338782 - RNA, 23 nt, Artificial Sequence
  Synthetic
aagauaaaaaauuuaggaauaug

SEQ ID NO: 338783 - RNA, 24 nt, Artificial Sequence
  Synthetic
aaagauaaaaaauuuaggaauaug

SEQ ID NO: 338784 - RNA, 18 nt, Artificial Sequence
  Synthetic
uaaauuuaagggaauaug

SEQ ID NO: 338785 - RNA, 19 nt, Artificial Sequence
  Synthetic
uuaaauuuaagggaauaug

SEQ ID NO: 338786 - RNA, 20 nt, Artificial Sequence
  Synthetic
auuaaauuuaagggaauaug

SEQ ID NO: 338787 - RNA, 21 nt, Artificial Sequence
  Synthetic
cauuaaauuuaagggaauaug

SEQ ID NO: 338788 - RNA, 22 nt, Artificial Sequence
  Synthetic
acauuaaauuuaagggaauaug

SEQ ID NO: 338789 - RNA, 23 nt, Artificial Sequence
  Synthetic
cacauuaaauuuaagggaauaug

SEQ ID NO: 338790 - RNA, 24 nt, Artificial Sequence
  Synthetic
acacauuaaauuuaagggaauaug

SEQ ID NO: 338791 - RNA, 18 nt, Artificial Sequence
  Synthetic
gagaugaguuggaauaug

SEQ ID NO: 338792 - RNA, 19 nt, Artificial Sequence
  Synthetic
agagaugaguuggaauaug

SEQ ID NO: 338793 - RNA, 20 nt, Artificial Sequence
  Synthetic
gagagaugaguuggaauaug

SEQ ID NO: 338794 - RNA, 21 nt, Artificial Sequence
  Synthetic
ggagagaugaguuggaauaug

SEQ ID NO: 338795 - RNA, 22 nt, Artificial Sequence
  Synthetic
gggagagaugaguuggaauaug

SEQ ID NO: 338796 - RNA, 23 nt, Artificial Sequence
  Synthetic
agggagagaugaguuggaauaug

SEQ ID NO: 338797 - RNA, 24 nt, Artificial Sequence
  Synthetic
uagggagagaugaguuggaauaug

SEQ ID NO: 338798 - RNA, 18 nt, Artificial Sequence
  Synthetic
ugguaaaagaugaauaug

SEQ ID NO: 338799 - RNA, 19 nt, Artificial Sequence
  Synthetic
gugguaaaagaugaauaug

SEQ ID NO: 338800 - RNA, 20 nt, Artificial Sequence
  Synthetic
ggugguaaaagaugaauaug

SEQ ID NO: 338801 - RNA, 21 nt, Artificial Sequence
  Synthetic
aggugguaaaagaugaauaug

SEQ ID NO: 338802 - RNA, 22 nt, Artificial Sequence
  Synthetic
gaggugguaaaagaugaauaug

SEQ ID NO: 338803 - RNA, 23 nt, Artificial Sequence
  Synthetic
ugaggugguaaaagaugaauaug

SEQ ID NO: 338804 - RNA, 24 nt, Artificial Sequence
  Synthetic
gugaggugguaaaagaugaauaug

SEQ ID NO: 338805 - RNA, 18 nt, Artificial Sequence
  Synthetic
uucuucaacuguaauaug

SEQ ID NO: 338806 - RNA, 19 nt, Artificial Sequence
  Synthetic
guucuucaacuguaauaug

SEQ ID NO: 338807 - RNA, 20 nt, Artificial Sequence
  Synthetic
uguucuucaacuguaauaug

SEQ ID NO: 338808 - RNA, 21 nt, Artificial Sequence
  Synthetic
uuguucuucaacuguaauaug

SEQ ID NO: 338809 - RNA, 22 nt, Artificial Sequence
  Synthetic
uuuguucuucaacuguaauaug

SEQ ID NO: 338810 - RNA, 23 nt, Artificial Sequence
  Synthetic
uuuuguucuucaacuguaauaug

SEQ ID NO: 338811 - RNA, 24 nt, Artificial Sequence
  Synthetic
auuuuguucuucaacuguaauaug

SEQ ID NO: 338812 - RNA, 18 nt, Artificial Sequence
  Synthetic
uauauauauauacauaug

SEQ ID NO: 338813 - RNA, 19 nt, Artificial Sequence
  Synthetic
guauauauauauacauaug

SEQ ID NO: 338814 - RNA, 20 nt, Artificial Sequence
  Synthetic
cguauauauauauacauaug

SEQ ID NO: 338815 - RNA, 21 nt, Artificial Sequence
  Synthetic
acguauauauauauacauaug

SEQ ID NO: 338816 - RNA, 22 nt, Artificial Sequence
  Synthetic
uacguauauauauauacauaug

SEQ ID NO: 338817 - RNA, 23 nt, Artificial Sequence
  Synthetic
auacguauauauauauacauaug

SEQ ID NO: 338818 - RNA, 24 nt, Artificial Sequence
  Synthetic
uauacguauauauauauacauaug

SEQ ID NO: 338819 - RNA, 18 nt, Artificial Sequence
  Synthetic
agcaagaggcaccauaug

SEQ ID NO: 338820 - RNA, 19 nt, Artificial Sequence
  Synthetic
uagcaagaggcaccauaug

SEQ ID NO: 338821 - RNA, 20 nt, Artificial Sequence
  Synthetic
auagcaagaggcaccauaug

SEQ ID NO: 338822 - RNA, 21 nt, Artificial Sequence
  Synthetic
aauagcaagaggcaccauaug

SEQ ID NO: 338823 - RNA, 22 nt, Artificial Sequence
  Synthetic
uaauagcaagaggcaccauaug

SEQ ID NO: 338824 - RNA, 23 nt, Artificial Sequence
  Synthetic
auaauagcaagaggcaccauaug

SEQ ID NO: 338825 - RNA, 24 nt, Artificial Sequence
  Synthetic
gauaauagcaagaggcaccauaug

SEQ ID NO: 338826 - RNA, 18 nt, Artificial Sequence
  Synthetic
aauuccagucaccauaug

SEQ ID NO: 338827 - RNA, 19 nt, Artificial Sequence
  Synthetic
uaauuccagucaccauaug

SEQ ID NO: 338828 - RNA, 20 nt, Artificial Sequence
  Synthetic
guaauuccagucaccauaug

SEQ ID NO: 338829 - RNA, 21 nt, Artificial Sequence
  Synthetic
aguaauuccagucaccauaug

SEQ ID NO: 338830 - RNA, 22 nt, Artificial Sequence
  Synthetic
aaguaauuccagucaccauaug

SEQ ID NO: 338831 - RNA, 23 nt, Artificial Sequence
  Synthetic
gaaguaauuccagucaccauaug

SEQ ID NO: 338832 - RNA, 24 nt, Artificial Sequence
  Synthetic
agaaguaauuccagucaccauaug

SEQ ID NO: 338833 - RNA, 18 nt, Artificial Sequence
  Synthetic
aaacuggcuagccauaug

SEQ ID NO: 338834 - RNA, 19 nt, Artificial Sequence
  Synthetic
aaaacuggcuagccauaug

SEQ ID NO: 338835 - RNA, 20 nt, Artificial Sequence
  Synthetic
gaaaacuggcuagccauaug

SEQ ID NO: 338836 - RNA, 21 nt, Artificial Sequence
  Synthetic
ggaaaacuggcuagccauaug

SEQ ID NO: 338837 - RNA, 22 nt, Artificial Sequence
  Synthetic
gggaaaacuggcuagccauaug

SEQ ID NO: 338838 - RNA, 23 nt, Artificial Sequence
  Synthetic
ugggaaaacuggcuagccauaug

SEQ ID NO: 338839 - RNA, 24 nt, Artificial Sequence
  Synthetic
cugggaaaacuggcuagccauaug

SEQ ID NO: 338840 - RNA, 18 nt, Artificial Sequence
  Synthetic
gaacuggcuagccauaug

SEQ ID NO: 338841 - RNA, 19 nt, Artificial Sequence
  Synthetic
agaacuggcuagccauaug

SEQ ID NO: 338842 - RNA, 20 nt, Artificial Sequence
  Synthetic
gagaacuggcuagccauaug

SEQ ID NO: 338843 - RNA, 21 nt, Artificial Sequence
  Synthetic
ggagaacuggcuagccauaug

SEQ ID NO: 338844 - RNA, 22 nt, Artificial Sequence
  Synthetic
gggagaacuggcuagccauaug

SEQ ID NO: 338845 - RNA, 23 nt, Artificial Sequence
  Synthetic
ugggagaacuggcuagccauaug

SEQ ID NO: 338846 - RNA, 24 nt, Artificial Sequence
  Synthetic
cugggagaacuggcuagccauaug

SEQ ID NO: 338847 - RNA, 18 nt, Artificial Sequence
  Synthetic
agacuggcuagccauaug

SEQ ID NO: 338848 - RNA, 19 nt, Artificial Sequence
  Synthetic
aagacuggcuagccauaug

SEQ ID NO: 338849 - RNA, 20 nt, Artificial Sequence
  Synthetic
gaagacuggcuagccauaug

SEQ ID NO: 338850 - RNA, 21 nt, Artificial Sequence
  Synthetic
ggaagacuggcuagccauaug

SEQ ID NO: 338851 - RNA, 22 nt, Artificial Sequence
  Synthetic
gggaagacuggcuagccauaug

SEQ ID NO: 338852 - RNA, 23 nt, Artificial Sequence
  Synthetic
ugggaagacuggcuagccauaug

SEQ ID NO: 338853 - RNA, 24 nt, Artificial Sequence
  Synthetic
cugggaagacuggcuagccauaug

SEQ ID NO: 338854 - RNA, 18 nt, Artificial Sequence
  Synthetic
gaaaaacguggccauaug

SEQ ID NO: 338855 - RNA, 19 nt, Artificial Sequence
  Synthetic
ugaaaaacguggccauaug

SEQ ID NO: 338856 - RNA, 20 nt, Artificial Sequence
  Synthetic
augaaaaacguggccauaug

SEQ ID NO: 338857 - RNA, 21 nt, Artificial Sequence
  Synthetic
gaugaaaaacguggccauaug

SEQ ID NO: 338858 - RNA, 22 nt, Artificial Sequence
  Synthetic
ugaugaaaaacguggccauaug

SEQ ID NO: 338859 - RNA, 23 nt, Artificial Sequence
  Synthetic
gugaugaaaaacguggccauaug

SEQ ID NO: 338860 - RNA, 24 nt, Artificial Sequence
  Synthetic
ggugaugaaaaacguggccauaug

SEQ ID NO: 338861 - RNA, 18 nt, Artificial Sequence
  Synthetic
guauuuauaguucauaug

SEQ ID NO: 338862 - RNA, 19 nt, Artificial Sequence
  Synthetic
gguauuuauaguucauaug

SEQ ID NO: 338863 - RNA, 20 nt, Artificial Sequence
  Synthetic
agguauuuauaguucauaug

SEQ ID NO: 338864 - RNA, 21 nt, Artificial Sequence
  Synthetic
uagguauuuauaguucauaug

SEQ ID NO: 338865 - RNA, 22 nt, Artificial Sequence
  Synthetic
uuagguauuuauaguucauaug

SEQ ID NO: 338866 - RNA, 23 nt, Artificial Sequence
  Synthetic
auuagguauuuauaguucauaug

SEQ ID NO: 338867 - RNA, 24 nt, Artificial Sequence
  Synthetic
cauuagguauuuauaguucauaug

SEQ ID NO: 338868 - RNA, 18 nt, Artificial Sequence
  Synthetic
acucgaguauuucauaug

SEQ ID NO: 338869 - RNA, 19 nt, Artificial Sequence
  Synthetic
cacucgaguauuucauaug

SEQ ID NO: 338870 - RNA, 20 nt, Artificial Sequence
  Synthetic
acacucgaguauuucauaug

SEQ ID NO: 338871 - RNA, 21 nt, Artificial Sequence
  Synthetic
uacacucgaguauuucauaug

SEQ ID NO: 338872 - RNA, 22 nt, Artificial Sequence
  Synthetic
auacacucgaguauuucauaug

SEQ ID NO: 338873 - RNA, 23 nt, Artificial Sequence
  Synthetic
gauacacucgaguauuucauaug

SEQ ID NO: 338874 - RNA, 24 nt, Artificial Sequence
  Synthetic
agauacacucgaguauuucauaug

SEQ ID NO: 338875 - RNA, 18 nt, Artificial Sequence
  Synthetic
gugaaaaauacagauaug

SEQ ID NO: 338876 - RNA, 19 nt, Artificial Sequence
  Synthetic
ggugaaaaauacagauaug

SEQ ID NO: 338877 - RNA, 20 nt, Artificial Sequence
  Synthetic
uggugaaaaauacagauaug

SEQ ID NO: 338878 - RNA, 21 nt, Artificial Sequence
  Synthetic
auggugaaaaauacagauaug

SEQ ID NO: 338879 - RNA, 22 nt, Artificial Sequence
  Synthetic
uauggugaaaaauacagauaug

SEQ ID NO: 338880 - RNA, 23 nt, Artificial Sequence
  Synthetic
guauggugaaaaauacagauaug

SEQ ID NO: 338881 - RNA, 24 nt, Artificial Sequence
  Synthetic
aguauggugaaaaauacagauaug

SEQ ID NO: 338882 - RNA, 18 nt, Artificial Sequence
  Synthetic
uuuaaaggagcagauaug

SEQ ID NO: 338883 - RNA, 19 nt, Artificial Sequence
  Synthetic
uuuuaaaggagcagauaug

SEQ ID NO: 338884 - RNA, 20 nt, Artificial Sequence
  Synthetic
uuuuuaaaggagcagauaug

SEQ ID NO: 338885 - RNA, 21 nt, Artificial Sequence
  Synthetic
uuuuuuaaaggagcagauaug

SEQ ID NO: 338886 - RNA, 22 nt, Artificial Sequence
  Synthetic
auuuuuuaaaggagcagauaug

SEQ ID NO: 338887 - RNA, 23 nt, Artificial Sequence
  Synthetic
cauuuuuuaaaggagcagauaug

SEQ ID NO: 338888 - RNA, 24 nt, Artificial Sequence
  Synthetic
acauuuuuuaaaggagcagauaug

SEQ ID NO: 338889 - RNA, 18 nt, Artificial Sequence
  Synthetic
ugaccccugagagauaug

SEQ ID NO: 338890 - RNA, 19 nt, Artificial Sequence
  Synthetic
uugaccccugagagauaug

SEQ ID NO: 338891 - RNA, 20 nt, Artificial Sequence
  Synthetic
uuugaccccugagagauaug

SEQ ID NO: 338892 - RNA, 21 nt, Artificial Sequence
  Synthetic
guuugaccccugagagauaug

SEQ ID NO: 338893 - RNA, 22 nt, Artificial Sequence
  Synthetic
uguuugaccccugagagauaug

SEQ ID NO: 338894 - RNA, 23 nt, Artificial Sequence
  Synthetic
guguuugaccccugagagauaug

SEQ ID NO: 338895 - RNA, 24 nt, Artificial Sequence
  Synthetic
uguguuugaccccugagagauaug

SEQ ID NO: 338896 - RNA, 18 nt, Artificial Sequence
  Synthetic
auguuguugauagauaug

SEQ ID NO: 338897 - RNA, 19 nt, Artificial Sequence
  Synthetic
gauguuguugauagauaug

SEQ ID NO: 338898 - RNA, 20 nt, Artificial Sequence
  Synthetic
agauguuguugauagauaug

SEQ ID NO: 338899 - RNA, 21 nt, Artificial Sequence
  Synthetic
uagauguuguugauagauaug

SEQ ID NO: 338900 - RNA, 22 nt, Artificial Sequence
  Synthetic
uuagauguuguugauagauaug

SEQ ID NO: 338901 - RNA, 23 nt, Artificial Sequence
  Synthetic
auuagauguuguugauagauaug

SEQ ID NO: 338902 - RNA, 24 nt, Artificial Sequence
  Synthetic
uauuagauguuguugauagauaug

SEQ ID NO: 338903 - RNA, 18 nt, Artificial Sequence
  Synthetic
auuugacaucuagauaug

SEQ ID NO: 338904 - RNA, 19 nt, Artificial Sequence
  Synthetic
aauuugacaucuagauaug

SEQ ID NO: 338905 - RNA, 20 nt, Artificial Sequence
  Synthetic
aaauuugacaucuagauaug

SEQ ID NO: 338906 - RNA, 21 nt, Artificial Sequence
  Synthetic
gaaauuugacaucuagauaug

SEQ ID NO: 338907 - RNA, 22 nt, Artificial Sequence
  Synthetic
ggaaauuugacaucuagauaug

SEQ ID NO: 338908 - RNA, 23 nt, Artificial Sequence
  Synthetic
uggaaauuugacaucuagauaug

SEQ ID NO: 338909 - RNA, 24 nt, Artificial Sequence
  Synthetic
guggaaauuugacaucuagauaug

SEQ ID NO: 338910 - RNA, 18 nt, Artificial Sequence
  Synthetic
uaucugacacaauauaug

SEQ ID NO: 338911 - RNA, 19 nt, Artificial Sequence
  Synthetic
uuaucugacacaauauaug

SEQ ID NO: 338912 - RNA, 20 nt, Artificial Sequence
  Synthetic
auuaucugacacaauauaug

SEQ ID NO: 338913 - RNA, 21 nt, Artificial Sequence
  Synthetic
gauuaucugacacaauauaug

SEQ ID NO: 338914 - RNA, 22 nt, Artificial Sequence
  Synthetic
ggauuaucugacacaauauaug

SEQ ID NO: 338915 - RNA, 23 nt, Artificial Sequence
  Synthetic
aggauuaucugacacaauauaug

SEQ ID NO: 338916 - RNA, 24 nt, Artificial Sequence
  Synthetic
gaggauuaucugacacaauauaug

SEQ ID NO: 338917 - RNA, 18 nt, Artificial Sequence
  Synthetic
auuuauuggcaauauaug

SEQ ID NO: 338918 - RNA, 19 nt, Artificial Sequence
  Synthetic
aauuuauuggcaauauaug

SEQ ID NO: 338919 - RNA, 20 nt, Artificial Sequence
  Synthetic
caauuuauuggcaauauaug

SEQ ID NO: 338920 - RNA, 21 nt, Artificial Sequence
  Synthetic
ucaauuuauuggcaauauaug

SEQ ID NO: 338921 - RNA, 22 nt, Artificial Sequence
  Synthetic
gucaauuuauuggcaauauaug

SEQ ID NO: 338922 - RNA, 23 nt, Artificial Sequence
  Synthetic
agucaauuuauuggcaauauaug

SEQ ID NO: 338923 - RNA, 24 nt, Artificial Sequence
  Synthetic
aagucaauuuauuggcaauauaug

SEQ ID NO: 338924 - RNA, 18 nt, Artificial Sequence
  Synthetic
gccaugucugaauauaug

SEQ ID NO: 338925 - RNA, 19 nt, Artificial Sequence
  Synthetic
ugccaugucugaauauaug

SEQ ID NO: 338926 - RNA, 20 nt, Artificial Sequence
  Synthetic
augccaugucugaauauaug

SEQ ID NO: 338927 - RNA, 21 nt, Artificial Sequence
  Synthetic
uaugccaugucugaauauaug

SEQ ID NO: 338928 - RNA, 22 nt, Artificial Sequence
  Synthetic
uuaugccaugucugaauauaug

SEQ ID NO: 338929 - RNA, 23 nt, Artificial Sequence
  Synthetic
cuuaugccaugucugaauauaug

SEQ ID NO: 338930 - RNA, 24 nt, Artificial Sequence
  Synthetic
gcuuaugccaugucugaauauaug

SEQ ID NO: 338931 - RNA, 18 nt, Artificial Sequence
  Synthetic
gucuuuaaaauauauaug

SEQ ID NO: 338932 - RNA, 19 nt, Artificial Sequence
  Synthetic
ugucuuuaaaauauauaug

SEQ ID NO: 338933 - RNA, 20 nt, Artificial Sequence
  Synthetic
cugucuuuaaaauauauaug

SEQ ID NO: 338934 - RNA, 21 nt, Artificial Sequence
  Synthetic
ccugucuuuaaaauauauaug

SEQ ID NO: 338935 - RNA, 22 nt, Artificial Sequence
  Synthetic
cccugucuuuaaaauauauaug

SEQ ID NO: 338936 - RNA, 23 nt, Artificial Sequence
  Synthetic
acccugucuuuaaaauauauaug

SEQ ID NO: 338937 - RNA, 24 nt, Artificial Sequence
  Synthetic
gacccugucuuuaaaauauauaug

SEQ ID NO: 338938 - RNA, 18 nt, Artificial Sequence
  Synthetic
gggcuuaccauauauaug

SEQ ID NO: 338939 - RNA, 19 nt, Artificial Sequence
  Synthetic
ggggcuuaccauauauaug

SEQ ID NO: 338940 - RNA, 20 nt, Artificial Sequence
  Synthetic
uggggcuuaccauauauaug

SEQ ID NO: 338941 - RNA, 21 nt, Artificial Sequence
  Synthetic
uuggggcuuaccauauauaug

SEQ ID NO: 338942 - RNA, 22 nt, Artificial Sequence
  Synthetic
uuuggggcuuaccauauauaug

SEQ ID NO: 338943 - RNA, 23 nt, Artificial Sequence
  Synthetic
cuuuggggcuuaccauauauaug

SEQ ID NO: 338944 - RNA, 24 nt, Artificial Sequence
  Synthetic
gcuuuggggcuuaccauauauaug

SEQ ID NO: 338945 - RNA, 18 nt, Artificial Sequence
  Synthetic
uauauauauauauauaug

SEQ ID NO: 338946 - RNA, 19 nt, Artificial Sequence
  Synthetic
auauauauauauauauaug

SEQ ID NO: 338947 - RNA, 20 nt, Artificial Sequence
  Synthetic
uauauauauauauauauaug

SEQ ID NO: 338948 - RNA, 18 nt, Artificial Sequence
  Synthetic
auauucaguauauauaug

SEQ ID NO: 338949 - RNA, 19 nt, Artificial Sequence
  Synthetic
gauauucaguauauauaug

SEQ ID NO: 338950 - RNA, 20 nt, Artificial Sequence
  Synthetic
agauauucaguauauauaug

SEQ ID NO: 338951 - RNA, 21 nt, Artificial Sequence
  Synthetic
gagauauucaguauauauaug

SEQ ID NO: 338952 - RNA, 22 nt, Artificial Sequence
  Synthetic
agagauauucaguauauauaug

SEQ ID NO: 338953 - RNA, 23 nt, Artificial Sequence
  Synthetic
aagagauauucaguauauauaug

SEQ ID NO: 338954 - RNA, 24 nt, Artificial Sequence
  Synthetic
aaagagauauucaguauauauaug

SEQ ID NO: 338955 - RNA, 18 nt, Artificial Sequence
  Synthetic
gcucuggaacuauauaug

SEQ ID NO: 338956 - RNA, 19 nt, Artificial Sequence
  Synthetic
agcucuggaacuauauaug

SEQ ID NO: 338957 - RNA, 20 nt, Artificial Sequence
  Synthetic
uagcucuggaacuauauaug

SEQ ID NO: 338958 - RNA, 21 nt, Artificial Sequence
  Synthetic
auagcucuggaacuauauaug

SEQ ID NO: 338959 - RNA, 22 nt, Artificial Sequence
  Synthetic
cauagcucuggaacuauauaug

SEQ ID NO: 338960 - RNA, 23 nt, Artificial Sequence
  Synthetic
acauagcucuggaacuauauaug

SEQ ID NO: 338961 - RNA, 24 nt, Artificial Sequence
  Synthetic
uacauagcucuggaacuauauaug

SEQ ID NO: 338962 - RNA, 18 nt, Artificial Sequence
  Synthetic
cucucuugcuuauauaug

SEQ ID NO: 338963 - RNA, 19 nt, Artificial Sequence
  Synthetic
ucucucuugcuuauauaug

SEQ ID NO: 338964 - RNA, 20 nt, Artificial Sequence
  Synthetic
gucucucuugcuuauauaug

SEQ ID NO: 338965 - RNA, 21 nt, Artificial Sequence
  Synthetic
agucucucuugcuuauauaug

SEQ ID NO: 338966 - RNA, 22 nt, Artificial Sequence
  Synthetic
cagucucucuugcuuauauaug

SEQ ID NO: 338967 - RNA, 23 nt, Artificial Sequence
  Synthetic
gcagucucucuugcuuauauaug

SEQ ID NO: 338968 - RNA, 24 nt, Artificial Sequence
  Synthetic
ggcagucucucuugcuuauauaug

SEQ ID NO: 338969 - RNA, 18 nt, Artificial Sequence
  Synthetic
ucuagcaguuucuauaug

SEQ ID NO: 338970 - RNA, 19 nt, Artificial Sequence
  Synthetic
aucuagcaguuucuauaug

SEQ ID NO: 338971 - RNA, 20 nt, Artificial Sequence
  Synthetic
gaucuagcaguuucuauaug

SEQ ID NO: 338972 - RNA, 21 nt, Artificial Sequence
  Synthetic
ggaucuagcaguuucuauaug

SEQ ID NO: 338973 - RNA, 22 nt, Artificial Sequence
  Synthetic
aggaucuagcaguuucuauaug

SEQ ID NO: 338974 - RNA, 23 nt, Artificial Sequence
  Synthetic
gaggaucuagcaguuucuauaug

SEQ ID NO: 338975 - RNA, 24 nt, Artificial Sequence
  Synthetic
agaggaucuagcaguuucuauaug

SEQ ID NO: 338976 - RNA, 18 nt, Artificial Sequence
  Synthetic
cuuguucuucaguauaug

SEQ ID NO: 338977 - RNA, 19 nt, Artificial Sequence
  Synthetic
ucuuguucuucaguauaug

SEQ ID NO: 338978 - RNA, 20 nt, Artificial Sequence
  Synthetic
uucuuguucuucaguauaug

SEQ ID NO: 338979 - RNA, 21 nt, Artificial Sequence
  Synthetic
auucuuguucuucaguauaug

SEQ ID NO: 338980 - RNA, 22 nt, Artificial Sequence
  Synthetic
gauucuuguucuucaguauaug

SEQ ID NO: 338981 - RNA, 23 nt, Artificial Sequence
  Synthetic
ugauucuuguucuucaguauaug

SEQ ID NO: 338982 - RNA, 24 nt, Artificial Sequence
  Synthetic
augauucuuguucuucaguauaug

SEQ ID NO: 338983 - RNA, 18 nt, Artificial Sequence
  Synthetic
cuuccccaaggguauaug

SEQ ID NO: 338984 - RNA, 19 nt, Artificial Sequence
  Synthetic
ccuuccccaaggguauaug

SEQ ID NO: 338985 - RNA, 20 nt, Artificial Sequence
  Synthetic
uccuuccccaaggguauaug

SEQ ID NO: 338986 - RNA, 21 nt, Artificial Sequence
  Synthetic
uuccuuccccaaggguauaug

SEQ ID NO: 338987 - RNA, 22 nt, Artificial Sequence
  Synthetic
auuccuuccccaaggguauaug

SEQ ID NO: 338988 - RNA, 23 nt, Artificial Sequence
  Synthetic
cauuccuuccccaaggguauaug

SEQ ID NO: 338989 - RNA, 24 nt, Artificial Sequence
  Synthetic
gcauuccuuccccaaggguauaug

SEQ ID NO: 338990 - RNA, 18 nt, Artificial Sequence
  Synthetic
ugaaguuaaggguauaug

SEQ ID NO: 338991 - RNA, 19 nt, Artificial Sequence
  Synthetic
cugaaguuaaggguauaug

SEQ ID NO: 338992 - RNA, 20 nt, Artificial Sequence
  Synthetic
gcugaaguuaaggguauaug

SEQ ID NO: 338993 - RNA, 21 nt, Artificial Sequence
  Synthetic
ggcugaaguuaaggguauaug

SEQ ID NO: 338994 - RNA, 22 nt, Artificial Sequence
  Synthetic
uggcugaaguuaaggguauaug

SEQ ID NO: 338995 - RNA, 23 nt, Artificial Sequence
  Synthetic
auggcugaaguuaaggguauaug

SEQ ID NO: 338996 - RNA, 24 nt, Artificial Sequence
  Synthetic
uauggcugaaguuaaggguauaug

SEQ ID NO: 338997 - RNA, 18 nt, Artificial Sequence
  Synthetic
aaaaaaaaaugguauaug

SEQ ID NO: 338998 - RNA, 19 nt, Artificial Sequence
  Synthetic
aaaaaaaaaaugguauaug

SEQ ID NO: 338999 - RNA, 20 nt, Artificial Sequence
  Synthetic
caaaaaaaaaaugguauaug

SEQ ID NO: 339000 - RNA, 21 nt, Artificial Sequence
  Synthetic
acaaaaaaaaaaugguauaug

SEQ ID NO: 339001 - RNA, 22 nt, Artificial Sequence
  Synthetic
cacaaaaaaaaaaugguauaug

SEQ ID NO: 339002 - RNA, 23 nt, Artificial Sequence
  Synthetic
gcacaaaaaaaaaaugguauaug

SEQ ID NO: 339003 - RNA, 24 nt, Artificial Sequence
  Synthetic
ugcacaaaaaaaaaaugguauaug

SEQ ID NO: 339004 - RNA, 18 nt, Artificial Sequence
  Synthetic
auuugauuuuuguauaug

SEQ ID NO: 339005 - RNA, 19 nt, Artificial Sequence
  Synthetic
gauuugauuuuuguauaug

SEQ ID NO: 339006 - RNA, 20 nt, Artificial Sequence
  Synthetic
ugauuugauuuuuguauaug

SEQ ID NO: 339007 - RNA, 21 nt, Artificial Sequence
  Synthetic
uugauuugauuuuuguauaug

SEQ ID NO: 339008 - RNA, 22 nt, Artificial Sequence
  Synthetic
uuugauuugauuuuuguauaug

SEQ ID NO: 339009 - RNA, 23 nt, Artificial Sequence
  Synthetic
cuuugauuugauuuuuguauaug

SEQ ID NO: 339010 - RNA, 24 nt, Artificial Sequence
  Synthetic
acuuugauuugauuuuuguauaug

SEQ ID NO: 339011 - RNA, 18 nt, Artificial Sequence
  Synthetic
uuggaugucuauuauaug

SEQ ID NO: 339012 - RNA, 19 nt, Artificial Sequence
  Synthetic
uuuggaugucuauuauaug

SEQ ID NO: 339013 - RNA, 20 nt, Artificial Sequence
  Synthetic
uuuuggaugucuauuauaug

SEQ ID NO: 339014 - RNA, 21 nt, Artificial Sequence
  Synthetic
auuuuggaugucuauuauaug

SEQ ID NO: 339015 - RNA, 22 nt, Artificial Sequence
  Synthetic
cauuuuggaugucuauuauaug

SEQ ID NO: 339016 - RNA, 23 nt, Artificial Sequence
  Synthetic
acauuuuggaugucuauuauaug

SEQ ID NO: 339017 - RNA, 24 nt, Artificial Sequence
  Synthetic
cacauuuuggaugucuauuauaug

SEQ ID NO: 339018 - RNA, 18 nt, Artificial Sequence
  Synthetic
guuuuuguguauuauaug

SEQ ID NO: 339019 - RNA, 19 nt, Artificial Sequence
  Synthetic
uguuuuuguguauuauaug

SEQ ID NO: 339020 - RNA, 20 nt, Artificial Sequence
  Synthetic
cuguuuuuguguauuauaug

SEQ ID NO: 339021 - RNA, 21 nt, Artificial Sequence
  Synthetic
ccuguuuuuguguauuauaug

SEQ ID NO: 339022 - RNA, 22 nt, Artificial Sequence
  Synthetic
uccuguuuuuguguauuauaug

SEQ ID NO: 339023 - RNA, 23 nt, Artificial Sequence
  Synthetic
uuccuguuuuuguguauuauaug

SEQ ID NO: 339024 - RNA, 24 nt, Artificial Sequence
  Synthetic
uuuccuguuuuuguguauuauaug

SEQ ID NO: 339025 - RNA, 18 nt, Artificial Sequence
  Synthetic
cuuaaauuuuauuauaug

SEQ ID NO: 339026 - RNA, 19 nt, Artificial Sequence
  Synthetic
gcuuaaauuuuauuauaug

SEQ ID NO: 339027 - RNA, 20 nt, Artificial Sequence
  Synthetic
ugcuuaaauuuuauuauaug

SEQ ID NO: 339028 - RNA, 21 nt, Artificial Sequence
  Synthetic
cugcuuaaauuuuauuauaug

SEQ ID NO: 339029 - RNA, 22 nt, Artificial Sequence
  Synthetic
acugcuuaaauuuuauuauaug

SEQ ID NO: 339030 - RNA, 23 nt, Artificial Sequence
  Synthetic
cacugcuuaaauuuuauuauaug

SEQ ID NO: 339031 - RNA, 24 nt, Artificial Sequence
  Synthetic
gcacugcuuaaauuuuauuauaug

SEQ ID NO: 339032 - RNA, 18 nt, Artificial Sequence
  Synthetic
cagggaacauguuauaug

SEQ ID NO: 339033 - RNA, 19 nt, Artificial Sequence
  Synthetic
acagggaacauguuauaug

SEQ ID NO: 339034 - RNA, 20 nt, Artificial Sequence
  Synthetic
cacagggaacauguuauaug

SEQ ID NO: 339035 - RNA, 21 nt, Artificial Sequence
  Synthetic
ccacagggaacauguuauaug

SEQ ID NO: 339036 - RNA, 22 nt, Artificial Sequence
  Synthetic
accacagggaacauguuauaug

SEQ ID NO: 339037 - RNA, 23 nt, Artificial Sequence
  Synthetic
caccacagggaacauguuauaug

SEQ ID NO: 339038 - RNA, 24 nt, Artificial Sequence
  Synthetic
ucaccacagggaacauguuauaug

SEQ ID NO: 339039 - RNA, 18 nt, Artificial Sequence
  Synthetic
gugauacaguguuauaug

SEQ ID NO: 339040 - RNA, 19 nt, Artificial Sequence
  Synthetic
agugauacaguguuauaug

SEQ ID NO: 339041 - RNA, 20 nt, Artificial Sequence
  Synthetic
uagugauacaguguuauaug

SEQ ID NO: 339042 - RNA, 21 nt, Artificial Sequence
  Synthetic
uuagugauacaguguuauaug

SEQ ID NO: 339043 - RNA, 22 nt, Artificial Sequence
  Synthetic
uuuagugauacaguguuauaug

SEQ ID NO: 339044 - RNA, 23 nt, Artificial Sequence
  Synthetic
guuuagugauacaguguuauaug

SEQ ID NO: 339045 - RNA, 24 nt, Artificial Sequence
  Synthetic
uguuuagugauacaguguuauaug

SEQ ID NO: 339046 - RNA, 18 nt, Artificial Sequence
  Synthetic
aagguuuuaguuuauaug

SEQ ID NO: 339047 - RNA, 19 nt, Artificial Sequence
  Synthetic
caagguuuuaguuuauaug

SEQ ID NO: 339048 - RNA, 20 nt, Artificial Sequence
  Synthetic
acaagguuuuaguuuauaug

SEQ ID NO: 339049 - RNA, 21 nt, Artificial Sequence
  Synthetic
gacaagguuuuaguuuauaug

SEQ ID NO: 339050 - RNA, 22 nt, Artificial Sequence
  Synthetic
ggacaagguuuuaguuuauaug

SEQ ID NO: 339051 - RNA, 23 nt, Artificial Sequence
  Synthetic
aggacaagguuuuaguuuauaug

SEQ ID NO: 339052 - RNA, 24 nt, Artificial Sequence
  Synthetic
gaggacaagguuuuaguuuauaug

SEQ ID NO: 339053 - RNA, 18 nt, Artificial Sequence
  Synthetic
gcaauuuaauuuuauaug

SEQ ID NO: 339054 - RNA, 19 nt, Artificial Sequence
  Synthetic
ggcaauuuaauuuuauaug

SEQ ID NO: 339055 - RNA, 20 nt, Artificial Sequence
  Synthetic
aggcaauuuaauuuuauaug

SEQ ID NO: 339056 - RNA, 21 nt, Artificial Sequence
  Synthetic
caggcaauuuaauuuuauaug

SEQ ID NO: 339057 - RNA, 22 nt, Artificial Sequence
  Synthetic
acaggcaauuuaauuuuauaug

SEQ ID NO: 339058 - RNA, 23 nt, Artificial Sequence
  Synthetic
gacaggcaauuuaauuuuauaug

SEQ ID NO: 339059 - RNA, 24 nt, Artificial Sequence
  Synthetic
ugacaggcaauuuaauuuuauaug

SEQ ID NO: 339060 - RNA, 18 nt, Artificial Sequence
  Synthetic
gggacuuccuuuuauaug

SEQ ID NO: 339061 - RNA, 19 nt, Artificial Sequence
  Synthetic
ggggacuuccuuuuauaug

SEQ ID NO: 339062 - RNA, 20 nt, Artificial Sequence
  Synthetic
aggggacuuccuuuuauaug

SEQ ID NO: 339063 - RNA, 21 nt, Artificial Sequence
  Synthetic
aaggggacuuccuuuuauaug

SEQ ID NO: 339064 - RNA, 22 nt, Artificial Sequence
  Synthetic
uaaggggacuuccuuuuauaug

SEQ ID NO: 339065 - RNA, 23 nt, Artificial Sequence
  Synthetic
auaaggggacuuccuuuuauaug

SEQ ID NO: 339066 - RNA, 24 nt, Artificial Sequence
  Synthetic
gauaaggggacuuccuuuuauaug

SEQ ID NO: 339067 - RNA, 18 nt, Artificial Sequence
  Synthetic
aauaguuugagaacuaug

SEQ ID NO: 339068 - RNA, 19 nt, Artificial Sequence
  Synthetic
aaauaguuugagaacuaug

SEQ ID NO: 339069 - RNA, 20 nt, Artificial Sequence
  Synthetic
caaauaguuugagaacuaug

SEQ ID NO: 339070 - RNA, 21 nt, Artificial Sequence
  Synthetic
acaaauaguuugagaacuaug

SEQ ID NO: 339071 - RNA, 22 nt, Artificial Sequence
  Synthetic
aacaaauaguuugagaacuaug

SEQ ID NO: 339072 - RNA, 23 nt, Artificial Sequence
  Synthetic
uaacaaauaguuugagaacuaug

SEQ ID NO: 339073 - RNA, 24 nt, Artificial Sequence
  Synthetic
uuaacaaauaguuugagaacuaug

SEQ ID NO: 339074 - RNA, 18 nt, Artificial Sequence
  Synthetic
gucaccuuuugaacuaug

SEQ ID NO: 339075 - RNA, 19 nt, Artificial Sequence
  Synthetic
ugucaccuuuugaacuaug

SEQ ID NO: 339076 - RNA, 20 nt, Artificial Sequence
  Synthetic
cugucaccuuuugaacuaug

SEQ ID NO: 339077 - RNA, 21 nt, Artificial Sequence
  Synthetic
ccugucaccuuuugaacuaug

SEQ ID NO: 339078 - RNA, 22 nt, Artificial Sequence
  Synthetic
cccugucaccuuuugaacuaug

SEQ ID NO: 339079 - RNA, 23 nt, Artificial Sequence
  Synthetic
ucccugucaccuuuugaacuaug

SEQ ID NO: 339080 - RNA, 24 nt, Artificial Sequence
  Synthetic
uucccugucaccuuuugaacuaug

SEQ ID NO: 339081 - RNA, 18 nt, Artificial Sequence
  Synthetic
ucugucugcuuaacuaug

SEQ ID NO: 339082 - RNA, 19 nt, Artificial Sequence
  Synthetic
uucugucugcuuaacuaug

SEQ ID NO: 339083 - RNA, 20 nt, Artificial Sequence
  Synthetic
uuucugucugcuuaacuaug

SEQ ID NO: 339084 - RNA, 21 nt, Artificial Sequence
  Synthetic
uuuucugucugcuuaacuaug

SEQ ID NO: 339085 - RNA, 22 nt, Artificial Sequence
  Synthetic
auuuucugucugcuuaacuaug

SEQ ID NO: 339086 - RNA, 23 nt, Artificial Sequence
  Synthetic
gauuuucugucugcuuaacuaug

SEQ ID NO: 339087 - RNA, 24 nt, Artificial Sequence
  Synthetic
ugauuuucugucugcuuaacuaug

SEQ ID NO: 339088 - RNA, 18 nt, Artificial Sequence
  Synthetic
aaauauuuaaacacuaug

SEQ ID NO: 339089 - RNA, 19 nt, Artificial Sequence
  Synthetic
gaaauauuuaaacacuaug

SEQ ID NO: 339090 - RNA, 20 nt, Artificial Sequence
  Synthetic
ugaaauauuuaaacacuaug

SEQ ID NO: 339091 - RNA, 21 nt, Artificial Sequence
  Synthetic
cugaaauauuuaaacacuaug

SEQ ID NO: 339092 - RNA, 22 nt, Artificial Sequence
  Synthetic
acugaaauauuuaaacacuaug

SEQ ID NO: 339093 - RNA, 23 nt, Artificial Sequence
  Synthetic
uacugaaauauuuaaacacuaug

SEQ ID NO: 339094 - RNA, 24 nt, Artificial Sequence
  Synthetic
auacugaaauauuuaaacacuaug

SEQ ID NO: 339095 - RNA, 18 nt, Artificial Sequence
  Synthetic
aaagaccaucacacuaug

SEQ ID NO: 339096 - RNA, 19 nt, Artificial Sequence
  Synthetic
uaaagaccaucacacuaug

SEQ ID NO: 339097 - RNA, 20 nt, Artificial Sequence
  Synthetic
guaaagaccaucacacuaug

SEQ ID NO: 339098 - RNA, 21 nt, Artificial Sequence
  Synthetic
uguaaagaccaucacacuaug

SEQ ID NO: 339099 - RNA, 22 nt, Artificial Sequence
  Synthetic
uuguaaagaccaucacacuaug

SEQ ID NO: 339100 - RNA, 23 nt, Artificial Sequence
  Synthetic
auuguaaagaccaucacacuaug

SEQ ID NO: 339101 - RNA, 24 nt, Artificial Sequence
  Synthetic
aauuguaaagaccaucacacuaug

SEQ ID NO: 339102 - RNA, 18 nt, Artificial Sequence
  Synthetic
ucuaugucagacacuaug

SEQ ID NO: 339103 - RNA, 19 nt, Artificial Sequence
  Synthetic
gucuaugucagacacuaug

SEQ ID NO: 339104 - RNA, 20 nt, Artificial Sequence
  Synthetic
agucuaugucagacacuaug

SEQ ID NO: 339105 - RNA, 21 nt, Artificial Sequence
  Synthetic
uagucuaugucagacacuaug

SEQ ID NO: 339106 - RNA, 22 nt, Artificial Sequence
  Synthetic
guagucuaugucagacacuaug

SEQ ID NO: 339107 - RNA, 23 nt, Artificial Sequence
  Synthetic
uguagucuaugucagacacuaug

SEQ ID NO: 339108 - RNA, 24 nt, Artificial Sequence
  Synthetic
auguagucuaugucagacacuaug

SEQ ID NO: 339109 - RNA, 18 nt, Artificial Sequence
  Synthetic
caaugaaucuacacuaug

SEQ ID NO: 339110 - RNA, 19 nt, Artificial Sequence
  Synthetic
ucaaugaaucuacacuaug

SEQ ID NO: 339111 - RNA, 20 nt, Artificial Sequence
  Synthetic
uucaaugaaucuacacuaug

SEQ ID NO: 339112 - RNA, 21 nt, Artificial Sequence
  Synthetic
auucaaugaaucuacacuaug

SEQ ID NO: 339113 - RNA, 22 nt, Artificial Sequence
  Synthetic
cauucaaugaaucuacacuaug

SEQ ID NO: 339114 - RNA, 23 nt, Artificial Sequence
  Synthetic
ucauucaaugaaucuacacuaug

SEQ ID NO: 339115 - RNA, 24 nt, Artificial Sequence
  Synthetic
cucauucaaugaaucuacacuaug

SEQ ID NO: 339116 - RNA, 18 nt, Artificial Sequence
  Synthetic
auauaccaugccacuaug

SEQ ID NO: 339117 - RNA, 19 nt, Artificial Sequence
  Synthetic
aauauaccaugccacuaug

SEQ ID NO: 339118 - RNA, 20 nt, Artificial Sequence
  Synthetic
caauauaccaugccacuaug

SEQ ID NO: 339119 - RNA, 21 nt, Artificial Sequence
  Synthetic
gcaauauaccaugccacuaug

SEQ ID NO: 339120 - RNA, 22 nt, Artificial Sequence
  Synthetic
agcaauauaccaugccacuaug

SEQ ID NO: 339121 - RNA, 23 nt, Artificial Sequence
  Synthetic
gagcaauauaccaugccacuaug

SEQ ID NO: 339122 - RNA, 24 nt, Artificial Sequence
  Synthetic
agagcaauauaccaugccacuaug

SEQ ID NO: 339123 - RNA, 18 nt, Artificial Sequence
  Synthetic
gaaguguuguggacuaug

SEQ ID NO: 339124 - RNA, 19 nt, Artificial Sequence
  Synthetic
ugaaguguuguggacuaug

SEQ ID NO: 339125 - RNA, 20 nt, Artificial Sequence
  Synthetic
gugaaguguuguggacuaug

SEQ ID NO: 339126 - RNA, 21 nt, Artificial Sequence
  Synthetic
ggugaaguguuguggacuaug

SEQ ID NO: 339127 - RNA, 22 nt, Artificial Sequence
  Synthetic
gggugaaguguuguggacuaug

SEQ ID NO: 339128 - RNA, 23 nt, Artificial Sequence
  Synthetic
agggugaaguguuguggacuaug

SEQ ID NO: 339129 - RNA, 24 nt, Artificial Sequence
  Synthetic
gagggugaaguguuguggacuaug

SEQ ID NO: 339130 - RNA, 18 nt, Artificial Sequence
  Synthetic
cagcauggugugacuaug

SEQ ID NO: 339131 - RNA, 19 nt, Artificial Sequence
  Synthetic
ucagcauggugugacuaug

SEQ ID NO: 339132 - RNA, 20 nt, Artificial Sequence
  Synthetic
gucagcauggugugacuaug

SEQ ID NO: 339133 - RNA, 21 nt, Artificial Sequence
  Synthetic
ugucagcauggugugacuaug

SEQ ID NO: 339134 - RNA, 22 nt, Artificial Sequence
  Synthetic
cugucagcauggugugacuaug

SEQ ID NO: 339135 - RNA, 23 nt, Artificial Sequence
  Synthetic
ucugucagcauggugugacuaug

SEQ ID NO: 339136 - RNA, 24 nt, Artificial Sequence
  Synthetic
uucugucagcauggugugacuaug

SEQ ID NO: 339137 - RNA, 18 nt, Artificial Sequence
  Synthetic
ugaacuaucaauacuaug

SEQ ID NO: 339138 - RNA, 19 nt, Artificial Sequence
  Synthetic
gugaacuaucaauacuaug

SEQ ID NO: 339139 - RNA, 20 nt, Artificial Sequence
  Synthetic
agugaacuaucaauacuaug

SEQ ID NO: 339140 - RNA, 21 nt, Artificial Sequence
  Synthetic
uagugaacuaucaauacuaug

SEQ ID NO: 339141 - RNA, 22 nt, Artificial Sequence
  Synthetic
guagugaacuaucaauacuaug

SEQ ID NO: 339142 - RNA, 23 nt, Artificial Sequence
  Synthetic
uguagugaacuaucaauacuaug

SEQ ID NO: 339143 - RNA, 24 nt, Artificial Sequence
  Synthetic
uuguagugaacuaucaauacuaug

SEQ ID NO: 339144 - RNA, 18 nt, Artificial Sequence
  Synthetic
uaagauaguaguacuaug

SEQ ID NO: 339145 - RNA, 19 nt, Artificial Sequence
  Synthetic
auaagauaguaguacuaug

SEQ ID NO: 339146 - RNA, 20 nt, Artificial Sequence
  Synthetic
aauaagauaguaguacuaug

SEQ ID NO: 339147 - RNA, 21 nt, Artificial Sequence
  Synthetic
aaauaagauaguaguacuaug

SEQ ID NO: 339148 - RNA, 22 nt, Artificial Sequence
  Synthetic
caaauaagauaguaguacuaug

SEQ ID NO: 339149 - RNA, 23 nt, Artificial Sequence
  Synthetic
ccaaauaagauaguaguacuaug

SEQ ID NO: 339150 - RNA, 24 nt, Artificial Sequence
  Synthetic
accaaauaagauaguaguacuaug

SEQ ID NO: 339151 - RNA, 18 nt, Artificial Sequence
  Synthetic
aagaaggaauuuacuaug

SEQ ID NO: 339152 - RNA, 19 nt, Artificial Sequence
  Synthetic
gaagaaggaauuuacuaug

SEQ ID NO: 339153 - RNA, 20 nt, Artificial Sequence
  Synthetic
ggaagaaggaauuuacuaug

SEQ ID NO: 339154 - RNA, 21 nt, Artificial Sequence
  Synthetic
uggaagaaggaauuuacuaug

SEQ ID NO: 339155 - RNA, 22 nt, Artificial Sequence
  Synthetic
cuggaagaaggaauuuacuaug

SEQ ID NO: 339156 - RNA, 23 nt, Artificial Sequence
  Synthetic
ucuggaagaaggaauuuacuaug

SEQ ID NO: 339157 - RNA, 24 nt, Artificial Sequence
  Synthetic
gucuggaagaaggaauuuacuaug

SEQ ID NO: 339158 - RNA, 18 nt, Artificial Sequence
  Synthetic
ucuuuccccaaaccuaug

SEQ ID NO: 339159 - RNA, 19 nt, Artificial Sequence
  Synthetic
uucuuuccccaaaccuaug

SEQ ID NO: 339160 - RNA, 20 nt, Artificial Sequence
  Synthetic
auucuuuccccaaaccuaug

SEQ ID NO: 339161 - RNA, 21 nt, Artificial Sequence
  Synthetic
uauucuuuccccaaaccuaug

SEQ ID NO: 339162 - RNA, 22 nt, Artificial Sequence
  Synthetic
guauucuuuccccaaaccuaug

SEQ ID NO: 339163 - RNA, 23 nt, Artificial Sequence
  Synthetic
gguauucuuuccccaaaccuaug

SEQ ID NO: 339164 - RNA, 24 nt, Artificial Sequence
  Synthetic
ggguauucuuuccccaaaccuaug

SEQ ID NO: 339165 - RNA, 18 nt, Artificial Sequence
  Synthetic
augugagcugaaccuaug

SEQ ID NO: 339166 - RNA, 19 nt, Artificial Sequence
  Synthetic
uaugugagcugaaccuaug

SEQ ID NO: 339167 - RNA, 20 nt, Artificial Sequence
  Synthetic
guaugugagcugaaccuaug

SEQ ID NO: 339168 - RNA, 21 nt, Artificial Sequence
  Synthetic
gguaugugagcugaaccuaug

SEQ ID NO: 339169 - RNA, 22 nt, Artificial Sequence
  Synthetic
agguaugugagcugaaccuaug

SEQ ID NO: 339170 - RNA, 23 nt, Artificial Sequence
  Synthetic
uagguaugugagcugaaccuaug

SEQ ID NO: 339171 - RNA, 24 nt, Artificial Sequence
  Synthetic
cuagguaugugagcugaaccuaug

SEQ ID NO: 339172 - RNA, 18 nt, Artificial Sequence
  Synthetic
uuauuguugugaccuaug

SEQ ID NO: 339173 - RNA, 19 nt, Artificial Sequence
  Synthetic
auuauuguugugaccuaug

SEQ ID NO: 339174 - RNA, 20 nt, Artificial Sequence
  Synthetic
gauuauuguugugaccuaug

SEQ ID NO: 339175 - RNA, 21 nt, Artificial Sequence
  Synthetic
agauuauuguugugaccuaug

SEQ ID NO: 339176 - RNA, 22 nt, Artificial Sequence
  Synthetic
uagauuauuguugugaccuaug

SEQ ID NO: 339177 - RNA, 23 nt, Artificial Sequence
  Synthetic
auagauuauuguugugaccuaug

SEQ ID NO: 339178 - RNA, 24 nt, Artificial Sequence
  Synthetic
cauagauuauuguugugaccuaug

SEQ ID NO: 339179 - RNA, 18 nt, Artificial Sequence
  Synthetic
aagaccaucgacccuaug

SEQ ID NO: 339180 - RNA, 19 nt, Artificial Sequence
  Synthetic
aaagaccaucgacccuaug

SEQ ID NO: 339181 - RNA, 20 nt, Artificial Sequence
  Synthetic
uaaagaccaucgacccuaug

SEQ ID NO: 339182 - RNA, 21 nt, Artificial Sequence
  Synthetic
guaaagaccaucgacccuaug

SEQ ID NO: 339183 - RNA, 22 nt, Artificial Sequence
  Synthetic
uguaaagaccaucgacccuaug

SEQ ID NO: 339184 - RNA, 23 nt, Artificial Sequence
  Synthetic
uuguaaagaccaucgacccuaug

SEQ ID NO: 339185 - RNA, 24 nt, Artificial Sequence
  Synthetic
auuguaaagaccaucgacccuaug

SEQ ID NO: 339186 - RNA, 18 nt, Artificial Sequence
  Synthetic
uaggccucugguccuaug

SEQ ID NO: 339187 - RNA, 19 nt, Artificial Sequence
  Synthetic
cuaggccucugguccuaug

SEQ ID NO: 339188 - RNA, 20 nt, Artificial Sequence
  Synthetic
ccuaggccucugguccuaug

SEQ ID NO: 339189 - RNA, 21 nt, Artificial Sequence
  Synthetic
uccuaggccucugguccuaug

SEQ ID NO: 339190 - RNA, 22 nt, Artificial Sequence
  Synthetic
uuccuaggccucugguccuaug

SEQ ID NO: 339191 - RNA, 23 nt, Artificial Sequence
  Synthetic
cuuccuaggccucugguccuaug

SEQ ID NO: 339192 - RNA, 24 nt, Artificial Sequence
  Synthetic
ccuuccuaggccucugguccuaug

SEQ ID NO: 339193 - RNA, 18 nt, Artificial Sequence
  Synthetic
uaguucaggguuccuaug

SEQ ID NO: 339194 - RNA, 19 nt, Artificial Sequence
  Synthetic
guaguucaggguuccuaug

SEQ ID NO: 339195 - RNA, 20 nt, Artificial Sequence
  Synthetic
uguaguucaggguuccuaug

SEQ ID NO: 339196 - RNA, 21 nt, Artificial Sequence
  Synthetic
cuguaguucaggguuccuaug

SEQ ID NO: 339197 - RNA, 22 nt, Artificial Sequence
  Synthetic
acuguaguucaggguuccuaug

SEQ ID NO: 339198 - RNA, 23 nt, Artificial Sequence
  Synthetic
gacuguaguucaggguuccuaug

SEQ ID NO: 339199 - RNA, 24 nt, Artificial Sequence
  Synthetic
agacuguaguucaggguuccuaug

SEQ ID NO: 339200 - RNA, 18 nt, Artificial Sequence
  Synthetic
auauagucuacagcuaug

SEQ ID NO: 339201 - RNA, 19 nt, Artificial Sequence
  Synthetic
aauauagucuacagcuaug

SEQ ID NO: 339202 - RNA, 20 nt, Artificial Sequence
  Synthetic
uaauauagucuacagcuaug

SEQ ID NO: 339203 - RNA, 21 nt, Artificial Sequence
  Synthetic
auaauauagucuacagcuaug

SEQ ID NO: 339204 - RNA, 22 nt, Artificial Sequence
  Synthetic
aauaauauagucuacagcuaug

SEQ ID NO: 339205 - RNA, 23 nt, Artificial Sequence
  Synthetic
caauaauauagucuacagcuaug

SEQ ID NO: 339206 - RNA, 24 nt, Artificial Sequence
  Synthetic
ucaauaauauagucuacagcuaug

SEQ ID NO: 339207 - RNA, 18 nt, Artificial Sequence
  Synthetic
auacacagcugggcuaug

SEQ ID NO: 339208 - RNA, 19 nt, Artificial Sequence
  Synthetic
aauacacagcugggcuaug

SEQ ID NO: 339209 - RNA, 20 nt, Artificial Sequence
  Synthetic
aaauacacagcugggcuaug

SEQ ID NO: 339210 - RNA, 21 nt, Artificial Sequence
  Synthetic
uaaauacacagcugggcuaug

SEQ ID NO: 339211 - RNA, 22 nt, Artificial Sequence
  Synthetic
uuaaauacacagcugggcuaug

SEQ ID NO: 339212 - RNA, 23 nt, Artificial Sequence
  Synthetic
uuuaaauacacagcugggcuaug

SEQ ID NO: 339213 - RNA, 24 nt, Artificial Sequence
  Synthetic
uuuuaaauacacagcugggcuaug

SEQ ID NO: 339214 - RNA, 18 nt, Artificial Sequence
  Synthetic
aguuuucauacugcuaug

SEQ ID NO: 339215 - RNA, 19 nt, Artificial Sequence
  Synthetic
uaguuuucauacugcuaug

SEQ ID NO: 339216 - RNA, 20 nt, Artificial Sequence
  Synthetic
auaguuuucauacugcuaug

SEQ ID NO: 339217 - RNA, 21 nt, Artificial Sequence
  Synthetic
cauaguuuucauacugcuaug

SEQ ID NO: 339218 - RNA, 22 nt, Artificial Sequence
  Synthetic
ucauaguuuucauacugcuaug

SEQ ID NO: 339219 - RNA, 23 nt, Artificial Sequence
  Synthetic
uucauaguuuucauacugcuaug

SEQ ID NO: 339220 - RNA, 24 nt, Artificial Sequence
  Synthetic
cuucauaguuuucauacugcuaug

SEQ ID NO: 339221 - RNA, 18 nt, Artificial Sequence
  Synthetic
cauuuuccuacugcuaug

SEQ ID NO: 339222 - RNA, 19 nt, Artificial Sequence
  Synthetic
ucauuuuccuacugcuaug

SEQ ID NO: 339223 - RNA, 20 nt, Artificial Sequence
  Synthetic
uucauuuuccuacugcuaug

SEQ ID NO: 339224 - RNA, 21 nt, Artificial Sequence
  Synthetic
guucauuuuccuacugcuaug

SEQ ID NO: 339225 - RNA, 22 nt, Artificial Sequence
  Synthetic
aguucauuuuccuacugcuaug

SEQ ID NO: 339226 - RNA, 23 nt, Artificial Sequence
  Synthetic
uaguucauuuuccuacugcuaug

SEQ ID NO: 339227 - RNA, 24 nt, Artificial Sequence
  Synthetic
uuaguucauuuuccuacugcuaug

SEQ ID NO: 339228 - RNA, 18 nt, Artificial Sequence
  Synthetic
uggguaguaagugcuaug

SEQ ID NO: 339229 - RNA, 19 nt, Artificial Sequence
  Synthetic
uuggguaguaagugcuaug

SEQ ID NO: 339230 - RNA, 20 nt, Artificial Sequence
  Synthetic
guuggguaguaagugcuaug

SEQ ID NO: 339231 - RNA, 21 nt, Artificial Sequence
  Synthetic
uguuggguaguaagugcuaug

SEQ ID NO: 339232 - RNA, 22 nt, Artificial Sequence
  Synthetic
auguuggguaguaagugcuaug

SEQ ID NO: 339233 - RNA, 23 nt, Artificial Sequence
  Synthetic
uauguuggguaguaagugcuaug

SEQ ID NO: 339234 - RNA, 24 nt, Artificial Sequence
  Synthetic
uuauguuggguaguaagugcuaug

SEQ ID NO: 339235 - RNA, 18 nt, Artificial Sequence
  Synthetic
uuagcauguauugcuaug

SEQ ID NO: 339236 - RNA, 19 nt, Artificial Sequence
  Synthetic
guuagcauguauugcuaug

SEQ ID NO: 339237 - RNA, 20 nt, Artificial Sequence
  Synthetic
uguuagcauguauugcuaug

SEQ ID NO: 339238 - RNA, 21 nt, Artificial Sequence
  Synthetic
guguuagcauguauugcuaug

SEQ ID NO: 339239 - RNA, 22 nt, Artificial Sequence
  Synthetic
uguguuagcauguauugcuaug

SEQ ID NO: 339240 - RNA, 23 nt, Artificial Sequence
  Synthetic
cuguguuagcauguauugcuaug

SEQ ID NO: 339241 - RNA, 24 nt, Artificial Sequence
  Synthetic
ucuguguuagcauguauugcuaug

SEQ ID NO: 339242 - RNA, 18 nt, Artificial Sequence
  Synthetic
uaauauccagaaucuaug

SEQ ID NO: 339243 - RNA, 19 nt, Artificial Sequence
  Synthetic
guaauauccagaaucuaug

SEQ ID NO: 339244 - RNA, 20 nt, Artificial Sequence
  Synthetic
uguaauauccagaaucuaug

SEQ ID NO: 339245 - RNA, 21 nt, Artificial Sequence
  Synthetic
guguaauauccagaaucuaug

SEQ ID NO: 339246 - RNA, 22 nt, Artificial Sequence
  Synthetic
gguguaauauccagaaucuaug

SEQ ID NO: 339247 - RNA, 23 nt, Artificial Sequence
  Synthetic
ugguguaauauccagaaucuaug

SEQ ID NO: 339248 - RNA, 24 nt, Artificial Sequence
  Synthetic
gugguguaauauccagaaucuaug

SEQ ID NO: 339249 - RNA, 18 nt, Artificial Sequence
  Synthetic
auaaugaaaguaucuaug

SEQ ID NO: 339250 - RNA, 19 nt, Artificial Sequence
  Synthetic
uauaaugaaaguaucuaug

SEQ ID NO: 339251 - RNA, 20 nt, Artificial Sequence
  Synthetic
auauaaugaaaguaucuaug

SEQ ID NO: 339252 - RNA, 21 nt, Artificial Sequence
  Synthetic
uauauaaugaaaguaucuaug

SEQ ID NO: 339253 - RNA, 22 nt, Artificial Sequence
  Synthetic
cuauauaaugaaaguaucuaug

SEQ ID NO: 339254 - RNA, 23 nt, Artificial Sequence
  Synthetic
acuauauaaugaaaguaucuaug

SEQ ID NO: 339255 - RNA, 24 nt, Artificial Sequence
  Synthetic
uacuauauaaugaaaguaucuaug

SEQ ID NO: 339256 - RNA, 18 nt, Artificial Sequence
  Synthetic
acuuacggauuaucuaug

SEQ ID NO: 339257 - RNA, 19 nt, Artificial Sequence
  Synthetic
aacuuacggauuaucuaug

SEQ ID NO: 339258 - RNA, 20 nt, Artificial Sequence
  Synthetic
caacuuacggauuaucuaug

SEQ ID NO: 339259 - RNA, 21 nt, Artificial Sequence
  Synthetic
acaacuuacggauuaucuaug

SEQ ID NO: 339260 - RNA, 22 nt, Artificial Sequence
  Synthetic
cacaacuuacggauuaucuaug

SEQ ID NO: 339261 - RNA, 23 nt, Artificial Sequence
  Synthetic
ucacaacuuacggauuaucuaug

SEQ ID NO: 339262 - RNA, 24 nt, Artificial Sequence
  Synthetic
aucacaacuuacggauuaucuaug

SEQ ID NO: 339263 - RNA, 18 nt, Artificial Sequence
  Synthetic
cccaguggggacucuaug

SEQ ID NO: 339264 - RNA, 19 nt, Artificial Sequence
  Synthetic
ccccaguggggacucuaug

SEQ ID NO: 339265 - RNA, 20 nt, Artificial Sequence
  Synthetic
gccccaguggggacucuaug

SEQ ID NO: 339266 - RNA, 21 nt, Artificial Sequence
  Synthetic
ugccccaguggggacucuaug

SEQ ID NO: 339267 - RNA, 22 nt, Artificial Sequence
  Synthetic
gugccccaguggggacucuaug

SEQ ID NO: 339268 - RNA, 23 nt, Artificial Sequence
  Synthetic
agugccccaguggggacucuaug

SEQ ID NO: 339269 - RNA, 24 nt, Artificial Sequence
  Synthetic
cagugccccaguggggacucuaug

SEQ ID NO: 339270 - RNA, 18 nt, Artificial Sequence
  Synthetic
uguuucuucuacucuaug

SEQ ID NO: 339271 - RNA, 19 nt, Artificial Sequence
  Synthetic
guguuucuucuacucuaug

SEQ ID NO: 339272 - RNA, 20 nt, Artificial Sequence
  Synthetic
gguguuucuucuacucuaug

SEQ ID NO: 339273 - RNA, 21 nt, Artificial Sequence
  Synthetic
cgguguuucuucuacucuaug

SEQ ID NO: 339274 - RNA, 22 nt, Artificial Sequence
  Synthetic
ccgguguuucuucuacucuaug

SEQ ID NO: 339275 - RNA, 23 nt, Artificial Sequence
  Synthetic
gccgguguuucuucuacucuaug

SEQ ID NO: 339276 - RNA, 24 nt, Artificial Sequence
  Synthetic
ggccgguguuucuucuacucuaug

SEQ ID NO: 339277 - RNA, 18 nt, Artificial Sequence
  Synthetic
cucuuacaugccucuaug

SEQ ID NO: 339278 - RNA, 19 nt, Artificial Sequence
  Synthetic
acucuuacaugccucuaug

SEQ ID NO: 339279 - RNA, 20 nt, Artificial Sequence
  Synthetic
gacucuuacaugccucuaug

SEQ ID NO: 339280 - RNA, 21 nt, Artificial Sequence
  Synthetic
ugacucuuacaugccucuaug

SEQ ID NO: 339281 - RNA, 22 nt, Artificial Sequence
  Synthetic
cugacucuuacaugccucuaug

SEQ ID NO: 339282 - RNA, 23 nt, Artificial Sequence
  Synthetic
acugacucuuacaugccucuaug

SEQ ID NO: 339283 - RNA, 24 nt, Artificial Sequence
  Synthetic
aacugacucuuacaugccucuaug

SEQ ID NO: 339284 - RNA, 18 nt, Artificial Sequence
  Synthetic
caugaggucaagucuaug

SEQ ID NO: 339285 - RNA, 19 nt, Artificial Sequence
  Synthetic
ccaugaggucaagucuaug

SEQ ID NO: 339286 - RNA, 20 nt, Artificial Sequence
  Synthetic
cccaugaggucaagucuaug

SEQ ID NO: 339287 - RNA, 21 nt, Artificial Sequence
  Synthetic
gcccaugaggucaagucuaug

SEQ ID NO: 339288 - RNA, 22 nt, Artificial Sequence
  Synthetic
agcccaugaggucaagucuaug

SEQ ID NO: 339289 - RNA, 23 nt, Artificial Sequence
  Synthetic
gagcccaugaggucaagucuaug

SEQ ID NO: 339290 - RNA, 24 nt, Artificial Sequence
  Synthetic
ugagcccaugaggucaagucuaug

SEQ ID NO: 339291 - RNA, 18 nt, Artificial Sequence
  Synthetic
caagaagguuagucuaug

SEQ ID NO: 339292 - RNA, 19 nt, Artificial Sequence
  Synthetic
ccaagaagguuagucuaug

SEQ ID NO: 339293 - RNA, 20 nt, Artificial Sequence
  Synthetic
uccaagaagguuagucuaug

SEQ ID NO: 339294 - RNA, 21 nt, Artificial Sequence
  Synthetic
auccaagaagguuagucuaug

SEQ ID NO: 339295 - RNA, 22 nt, Artificial Sequence
  Synthetic
cauccaagaagguuagucuaug

SEQ ID NO: 339296 - RNA, 23 nt, Artificial Sequence
  Synthetic
acauccaagaagguuagucuaug

SEQ ID NO: 339297 - RNA, 24 nt, Artificial Sequence
  Synthetic
gacauccaagaagguuagucuaug

SEQ ID NO: 339298 - RNA, 18 nt, Artificial Sequence
  Synthetic
uaaggccaguugucuaug

SEQ ID NO: 339299 - RNA, 19 nt, Artificial Sequence
  Synthetic
guaaggccaguugucuaug

SEQ ID NO: 339300 - RNA, 20 nt, Artificial Sequence
  Synthetic
aguaaggccaguugucuaug

SEQ ID NO: 339301 - RNA, 21 nt, Artificial Sequence
  Synthetic
aaguaaggccaguugucuaug

SEQ ID NO: 339302 - RNA, 22 nt, Artificial Sequence
  Synthetic
aaaguaaggccaguugucuaug

SEQ ID NO: 339303 - RNA, 23 nt, Artificial Sequence
  Synthetic
aaaaguaaggccaguugucuaug

SEQ ID NO: 339304 - RNA, 24 nt, Artificial Sequence
  Synthetic
aaaaaguaaggccaguugucuaug

SEQ ID NO: 339305 - RNA, 18 nt, Artificial Sequence
  Synthetic
ccaaccauggauucuaug

SEQ ID NO: 339306 - RNA, 19 nt, Artificial Sequence
  Synthetic
gccaaccauggauucuaug

SEQ ID NO: 339307 - RNA, 20 nt, Artificial Sequence
  Synthetic
ggccaaccauggauucuaug

SEQ ID NO: 339308 - RNA, 21 nt, Artificial Sequence
  Synthetic
uggccaaccauggauucuaug

SEQ ID NO: 339309 - RNA, 22 nt, Artificial Sequence
  Synthetic
auggccaaccauggauucuaug

SEQ ID NO: 339310 - RNA, 23 nt, Artificial Sequence
  Synthetic
cauggccaaccauggauucuaug

SEQ ID NO: 339311 - RNA, 24 nt, Artificial Sequence
  Synthetic
gcauggccaaccauggauucuaug

SEQ ID NO: 339312 - RNA, 18 nt, Artificial Sequence
  Synthetic
uuauaugguucuucuaug

SEQ ID NO: 339313 - RNA, 19 nt, Artificial Sequence
  Synthetic
uuuauaugguucuucuaug

SEQ ID NO: 339314 - RNA, 20 nt, Artificial Sequence
  Synthetic
uuuuauaugguucuucuaug

SEQ ID NO: 339315 - RNA, 21 nt, Artificial Sequence
  Synthetic
cuuuuauaugguucuucuaug

SEQ ID NO: 339316 - RNA, 22 nt, Artificial Sequence
  Synthetic
ccuuuuauaugguucuucuaug

SEQ ID NO: 339317 - RNA, 23 nt, Artificial Sequence
  Synthetic
uccuuuuauaugguucuucuaug

SEQ ID NO: 339318 - RNA, 24 nt, Artificial Sequence
  Synthetic
uuccuuuuauaugguucuucuaug

SEQ ID NO: 339319 - RNA, 18 nt, Artificial Sequence
  Synthetic
ggauuaugacuuucuaug

SEQ ID NO: 339320 - RNA, 19 nt, Artificial Sequence
  Synthetic
gggauuaugacuuucuaug

SEQ ID NO: 339321 - RNA, 20 nt, Artificial Sequence
  Synthetic
ugggauuaugacuuucuaug

SEQ ID NO: 339322 - RNA, 21 nt, Artificial Sequence
  Synthetic
augggauuaugacuuucuaug

SEQ ID NO: 339323 - RNA, 22 nt, Artificial Sequence
  Synthetic
aaugggauuaugacuuucuaug

SEQ ID NO: 339324 - RNA, 23 nt, Artificial Sequence
  Synthetic
uaaugggauuaugacuuucuaug

SEQ ID NO: 339325 - RNA, 24 nt, Artificial Sequence
  Synthetic
cuaaugggauuaugacuuucuaug

SEQ ID NO: 339326 - RNA, 18 nt, Artificial Sequence
  Synthetic
uguauuuaugaaaguaug

SEQ ID NO: 339327 - RNA, 19 nt, Artificial Sequence
  Synthetic
guguauuuaugaaaguaug

SEQ ID NO: 339328 - RNA, 20 nt, Artificial Sequence
  Synthetic
uguguauuuaugaaaguaug

SEQ ID NO: 339329 - RNA, 21 nt, Artificial Sequence
  Synthetic
auguguauuuaugaaaguaug

SEQ ID NO: 339330 - RNA, 22 nt, Artificial Sequence
  Synthetic
uauguguauuuaugaaaguaug

SEQ ID NO: 339331 - RNA, 23 nt, Artificial Sequence
  Synthetic
guauguguauuuaugaaaguaug

SEQ ID NO: 339332 - RNA, 24 nt, Artificial Sequence
  Synthetic
aguauguguauuuaugaaaguaug

SEQ ID NO: 339333 - RNA, 18 nt, Artificial Sequence
  Synthetic
uuuauucagagaaguaug

SEQ ID NO: 339334 - RNA, 19 nt, Artificial Sequence
  Synthetic
guuuauucagagaaguaug

SEQ ID NO: 339335 - RNA, 20 nt, Artificial Sequence
  Synthetic
aguuuauucagagaaguaug

SEQ ID NO: 339336 - RNA, 21 nt, Artificial Sequence
  Synthetic
aaguuuauucagagaaguaug

SEQ ID NO: 339337 - RNA, 22 nt, Artificial Sequence
  Synthetic
aaaguuuauucagagaaguaug

SEQ ID NO: 339338 - RNA, 23 nt, Artificial Sequence
  Synthetic
caaaguuuauucagagaaguaug

SEQ ID NO: 339339 - RNA, 24 nt, Artificial Sequence
  Synthetic
acaaaguuuauucagagaaguaug

SEQ ID NO: 339340 - RNA, 18 nt, Artificial Sequence
  Synthetic
gaaggauaaguaaguaug

SEQ ID NO: 339341 - RNA, 19 nt, Artificial Sequence
  Synthetic
agaaggauaaguaaguaug

SEQ ID NO: 339342 - RNA, 20 nt, Artificial Sequence
  Synthetic
aagaaggauaaguaaguaug

SEQ ID NO: 339343 - RNA, 21 nt, Artificial Sequence
  Synthetic
uaagaaggauaaguaaguaug

SEQ ID NO: 339344 - RNA, 22 nt, Artificial Sequence
  Synthetic
auaagaaggauaaguaaguaug

SEQ ID NO: 339345 - RNA, 23 nt, Artificial Sequence
  Synthetic
aauaagaaggauaaguaaguaug

SEQ ID NO: 339346 - RNA, 24 nt, Artificial Sequence
  Synthetic
aaauaagaaggauaaguaaguaug

SEQ ID NO: 339347 - RNA, 18 nt, Artificial Sequence
  Synthetic
auaauuuuauuaaguaug

SEQ ID NO: 339348 - RNA, 19 nt, Artificial Sequence
  Synthetic
uauaauuuuauuaaguaug

SEQ ID NO: 339349 - RNA, 20 nt, Artificial Sequence
  Synthetic
cuauaauuuuauuaaguaug

SEQ ID NO: 339350 - RNA, 21 nt, Artificial Sequence
  Synthetic
ccuauaauuuuauuaaguaug

SEQ ID NO: 339351 - RNA, 22 nt, Artificial Sequence
  Synthetic
cccuauaauuuuauuaaguaug

SEQ ID NO: 339352 - RNA, 23 nt, Artificial Sequence
  Synthetic
ucccuauaauuuuauuaaguaug

SEQ ID NO: 339353 - RNA, 24 nt, Artificial Sequence
  Synthetic
aucccuauaauuuuauuaaguaug

SEQ ID NO: 339354 - RNA, 18 nt, Artificial Sequence
  Synthetic
ucagucugaaagaguaug

SEQ ID NO: 339355 - RNA, 19 nt, Artificial Sequence
  Synthetic
cucagucugaaagaguaug

SEQ ID NO: 339356 - RNA, 20 nt, Artificial Sequence
  Synthetic
gcucagucugaaagaguaug

SEQ ID NO: 339357 - RNA, 21 nt, Artificial Sequence
  Synthetic
agcucagucugaaagaguaug

SEQ ID NO: 339358 - RNA, 22 nt, Artificial Sequence
  Synthetic
uagcucagucugaaagaguaug

SEQ ID NO: 339359 - RNA, 23 nt, Artificial Sequence
  Synthetic
uuagcucagucugaaagaguaug

SEQ ID NO: 339360 - RNA, 24 nt, Artificial Sequence
  Synthetic
auuagcucagucugaaagaguaug

SEQ ID NO: 339361 - RNA, 18 nt, Artificial Sequence
  Synthetic
aaagagagagggaguaug

SEQ ID NO: 339362 - RNA, 19 nt, Artificial Sequence
  Synthetic
caaagagagagggaguaug

SEQ ID NO: 339363 - RNA, 20 nt, Artificial Sequence
  Synthetic
acaaagagagagggaguaug

SEQ ID NO: 339364 - RNA, 21 nt, Artificial Sequence
  Synthetic
cacaaagagagagggaguaug

SEQ ID NO: 339365 - RNA, 22 nt, Artificial Sequence
  Synthetic
acacaaagagagagggaguaug

SEQ ID NO: 339366 - RNA, 23 nt, Artificial Sequence
  Synthetic
cacacaaagagagagggaguaug

SEQ ID NO: 339367 - RNA, 24 nt, Artificial Sequence
  Synthetic
acacacaaagagagagggaguaug

SEQ ID NO: 339368 - RNA, 18 nt, Artificial Sequence
  Synthetic
uuauucaaaacuaguaug

SEQ ID NO: 339369 - RNA, 19 nt, Artificial Sequence
  Synthetic
uuuauucaaaacuaguaug

SEQ ID NO: 339370 - RNA, 20 nt, Artificial Sequence
  Synthetic
auuuauucaaaacuaguaug

SEQ ID NO: 339371 - RNA, 21 nt, Artificial Sequence
  Synthetic
aauuuauucaaaacuaguaug

SEQ ID NO: 339372 - RNA, 22 nt, Artificial Sequence
  Synthetic
gaauuuauucaaaacuaguaug

SEQ ID NO: 339373 - RNA, 23 nt, Artificial Sequence
  Synthetic
ugaauuuauucaaaacuaguaug

SEQ ID NO: 339374 - RNA, 24 nt, Artificial Sequence
  Synthetic
augaauuuauucaaaacuaguaug

SEQ ID NO: 339375 - RNA, 18 nt, Artificial Sequence
  Synthetic
ugguagaauaguaguaug

SEQ ID NO: 339376 - RNA, 19 nt, Artificial Sequence
  Synthetic
cugguagaauaguaguaug

SEQ ID NO: 339377 - RNA, 20 nt, Artificial Sequence
  Synthetic
gcugguagaauaguaguaug

SEQ ID NO: 339378 - RNA, 21 nt, Artificial Sequence
  Synthetic
ugcugguagaauaguaguaug

SEQ ID NO: 339379 - RNA, 22 nt, Artificial Sequence
  Synthetic
gugcugguagaauaguaguaug

SEQ ID NO: 339380 - RNA, 23 nt, Artificial Sequence
  Synthetic
ugugcugguagaauaguaguaug

SEQ ID NO: 339381 - RNA, 24 nt, Artificial Sequence
  Synthetic
cugugcugguagaauaguaguaug

SEQ ID NO: 339382 - RNA, 18 nt, Artificial Sequence
  Synthetic
uauggagaugcacguaug

SEQ ID NO: 339383 - RNA, 19 nt, Artificial Sequence
  Synthetic
cuauggagaugcacguaug

SEQ ID NO: 339384 - RNA, 20 nt, Artificial Sequence
  Synthetic
ccuauggagaugcacguaug

SEQ ID NO: 339385 - RNA, 21 nt, Artificial Sequence
  Synthetic
cccuauggagaugcacguaug

SEQ ID NO: 339386 - RNA, 22 nt, Artificial Sequence
  Synthetic
gcccuauggagaugcacguaug

SEQ ID NO: 339387 - RNA, 23 nt, Artificial Sequence
  Synthetic
agcccuauggagaugcacguaug

SEQ ID NO: 339388 - RNA, 24 nt, Artificial Sequence
  Synthetic
cagcccuauggagaugcacguaug

SEQ ID NO: 339389 - RNA, 18 nt, Artificial Sequence
  Synthetic
uuuauugauuugcguaug

SEQ ID NO: 339390 - RNA, 19 nt, Artificial Sequence
  Synthetic
auuuauugauuugcguaug

SEQ ID NO: 339391 - RNA, 20 nt, Artificial Sequence
  Synthetic
cauuuauugauuugcguaug

SEQ ID NO: 339392 - RNA, 21 nt, Artificial Sequence
  Synthetic
acauuuauugauuugcguaug

SEQ ID NO: 339393 - RNA, 22 nt, Artificial Sequence
  Synthetic
uacauuuauugauuugcguaug

SEQ ID NO: 339394 - RNA, 23 nt, Artificial Sequence
  Synthetic
uuacauuuauugauuugcguaug

SEQ ID NO: 339395 - RNA, 24 nt, Artificial Sequence
  Synthetic
auuacauuuauugauuugcguaug

SEQ ID NO: 339396 - RNA, 24 nt, Artificial Sequence
  Synthetic
guuacauuuauugauuugcguaug

SEQ ID NO: 339397 - RNA, 18 nt, Artificial Sequence
  Synthetic
uugcuguauccucguaug

SEQ ID NO: 339398 - RNA, 19 nt, Artificial Sequence
  Synthetic
cuugcuguauccucguaug

SEQ ID NO: 339399 - RNA, 20 nt, Artificial Sequence
  Synthetic
ucuugcuguauccucguaug

SEQ ID NO: 339400 - RNA, 21 nt, Artificial Sequence
  Synthetic
uucuugcuguauccucguaug

SEQ ID NO: 339401 - RNA, 22 nt, Artificial Sequence
  Synthetic
cuucuugcuguauccucguaug

SEQ ID NO: 339402 - RNA, 23 nt, Artificial Sequence
  Synthetic
ucuucuugcuguauccucguaug

SEQ ID NO: 339403 - RNA, 24 nt, Artificial Sequence
  Synthetic
uucuucuugcuguauccucguaug

SEQ ID NO: 339404 - RNA, 18 nt, Artificial Sequence
  Synthetic
ggugaaaagaaagguaug

SEQ ID NO: 339405 - RNA, 19 nt, Artificial Sequence
  Synthetic
aggugaaaagaaagguaug

SEQ ID NO: 339406 - RNA, 20 nt, Artificial Sequence
  Synthetic
aaggugaaaagaaagguaug

SEQ ID NO: 339407 - RNA, 21 nt, Artificial Sequence
  Synthetic
aaaggugaaaagaaagguaug

SEQ ID NO: 339408 - RNA, 22 nt, Artificial Sequence
  Synthetic
gaaaggugaaaagaaagguaug

SEQ ID NO: 339409 - RNA, 23 nt, Artificial Sequence
  Synthetic
ggaaaggugaaaagaaagguaug

SEQ ID NO: 339410 - RNA, 24 nt, Artificial Sequence
  Synthetic
uggaaaggugaaaagaaagguaug

SEQ ID NO: 339411 - RNA, 18 nt, Artificial Sequence
  Synthetic
aaaaaccaucgagguaug

SEQ ID NO: 339412 - RNA, 19 nt, Artificial Sequence
  Synthetic
caaaaaccaucgagguaug

SEQ ID NO: 339413 - RNA, 20 nt, Artificial Sequence
  Synthetic
acaaaaaccaucgagguaug

SEQ ID NO: 339414 - RNA, 21 nt, Artificial Sequence
  Synthetic
cacaaaaaccaucgagguaug

SEQ ID NO: 339415 - RNA, 22 nt, Artificial Sequence
  Synthetic
gcacaaaaaccaucgagguaug

SEQ ID NO: 339416 - RNA, 23 nt, Artificial Sequence
  Synthetic
agcacaaaaaccaucgagguaug

SEQ ID NO: 339417 - RNA, 24 nt, Artificial Sequence
  Synthetic
gagcacaaaaaccaucgagguaug

SEQ ID NO: 339418 - RNA, 18 nt, Artificial Sequence
  Synthetic
auguacaggaucgguaug

SEQ ID NO: 339419 - RNA, 19 nt, Artificial Sequence
  Synthetic
cauguacaggaucgguaug

SEQ ID NO: 339420 - RNA, 20 nt, Artificial Sequence
  Synthetic
acauguacaggaucgguaug

SEQ ID NO: 339421 - RNA, 21 nt, Artificial Sequence
  Synthetic
uacauguacaggaucgguaug

SEQ ID NO: 339422 - RNA, 22 nt, Artificial Sequence
  Synthetic
auacauguacaggaucgguaug

SEQ ID NO: 339423 - RNA, 23 nt, Artificial Sequence
  Synthetic
cauacauguacaggaucgguaug

SEQ ID NO: 339424 - RNA, 24 nt, Artificial Sequence
  Synthetic
ucauacauguacaggaucgguaug

SEQ ID NO: 339425 - RNA, 18 nt, Artificial Sequence
  Synthetic
ccuuguguaugggguaug

SEQ ID NO: 339426 - RNA, 19 nt, Artificial Sequence
  Synthetic
cccuuguguaugggguaug

SEQ ID NO: 339427 - RNA, 20 nt, Artificial Sequence
  Synthetic
gcccuuguguaugggguaug

SEQ ID NO: 339428 - RNA, 21 nt, Artificial Sequence
  Synthetic
agcccuuguguaugggguaug

SEQ ID NO: 339429 - RNA, 22 nt, Artificial Sequence
  Synthetic
aagcccuuguguaugggguaug

SEQ ID NO: 339430 - RNA, 23 nt, Artificial Sequence
  Synthetic
aaagcccuuguguaugggguaug

SEQ ID NO: 339431 - RNA, 24 nt, Artificial Sequence
  Synthetic
gaaagcccuuguguaugggguaug

SEQ ID NO: 339432 - RNA, 18 nt, Artificial Sequence
  Synthetic
aaaaagaaaauggguaug

SEQ ID NO: 339433 - RNA, 19 nt, Artificial Sequence
  Synthetic
uaaaaagaaaauggguaug

SEQ ID NO: 339434 - RNA, 20 nt, Artificial Sequence
  Synthetic
uuaaaaagaaaauggguaug

SEQ ID NO: 339435 - RNA, 21 nt, Artificial Sequence
  Synthetic
cuuaaaaagaaaauggguaug

SEQ ID NO: 339436 - RNA, 22 nt, Artificial Sequence
  Synthetic
ucuuaaaaagaaaauggguaug

SEQ ID NO: 339437 - RNA, 23 nt, Artificial Sequence
  Synthetic
gucuuaaaaagaaaauggguaug

SEQ ID NO: 339438 - RNA, 24 nt, Artificial Sequence
  Synthetic
ggucuuaaaaagaaaauggguaug

SEQ ID NO: 339439 - RNA, 18 nt, Artificial Sequence
  Synthetic
gguggccacuuggguaug

SEQ ID NO: 339440 - RNA, 19 nt, Artificial Sequence
  Synthetic
ugguggccacuuggguaug

SEQ ID NO: 339441 - RNA, 20 nt, Artificial Sequence
  Synthetic
augguggccacuuggguaug

SEQ ID NO: 339442 - RNA, 21 nt, Artificial Sequence
  Synthetic
caugguggccacuuggguaug

SEQ ID NO: 339443 - RNA, 22 nt, Artificial Sequence
  Synthetic
ucaugguggccacuuggguaug

SEQ ID NO: 339444 - RNA, 23 nt, Artificial Sequence
  Synthetic
cucaugguggccacuuggguaug

SEQ ID NO: 339445 - RNA, 24 nt, Artificial Sequence
  Synthetic
ucucaugguggccacuuggguaug

SEQ ID NO: 339446 - RNA, 18 nt, Artificial Sequence
  Synthetic
ccacaccagagugguaug

SEQ ID NO: 339447 - RNA, 19 nt, Artificial Sequence
  Synthetic
uccacaccagagugguaug

SEQ ID NO: 339448 - RNA, 20 nt, Artificial Sequence
  Synthetic
auccacaccagagugguaug

SEQ ID NO: 339449 - RNA, 21 nt, Artificial Sequence
  Synthetic
uauccacaccagagugguaug

SEQ ID NO: 339450 - RNA, 22 nt, Artificial Sequence
  Synthetic
cuauccacaccagagugguaug

SEQ ID NO: 339451 - RNA, 23 nt, Artificial Sequence
  Synthetic
ccuauccacaccagagugguaug

SEQ ID NO: 339452 - RNA, 24 nt, Artificial Sequence
  Synthetic
cccuauccacaccagagugguaug

SEQ ID NO: 339453 - RNA, 18 nt, Artificial Sequence
  Synthetic
ugugguucucaauguaug

SEQ ID NO: 339454 - RNA, 19 nt, Artificial Sequence
  Synthetic
augugguucucaauguaug

SEQ ID NO: 339455 - RNA, 20 nt, Artificial Sequence
  Synthetic
gaugugguucucaauguaug

SEQ ID NO: 339456 - RNA, 21 nt, Artificial Sequence
  Synthetic
ugaugugguucucaauguaug

SEQ ID NO: 339457 - RNA, 22 nt, Artificial Sequence
  Synthetic
cugaugugguucucaauguaug

SEQ ID NO: 339458 - RNA, 23 nt, Artificial Sequence
  Synthetic
ccugaugugguucucaauguaug

SEQ ID NO: 339459 - RNA, 24 nt, Artificial Sequence
  Synthetic
accugaugugguucucaauguaug

SEQ ID NO: 339460 - RNA, 18 nt, Artificial Sequence
  Synthetic
uacagacuuuuauguaug

SEQ ID NO: 339461 - RNA, 19 nt, Artificial Sequence
  Synthetic
auacagacuuuuauguaug

SEQ ID NO: 339462 - RNA, 20 nt, Artificial Sequence
  Synthetic
gauacagacuuuuauguaug

SEQ ID NO: 339463 - RNA, 21 nt, Artificial Sequence
  Synthetic
agauacagacuuuuauguaug

SEQ ID NO: 339464 - RNA, 22 nt, Artificial Sequence
  Synthetic
aagauacagacuuuuauguaug

SEQ ID NO: 339465 - RNA, 23 nt, Artificial Sequence
  Synthetic
aaagauacagacuuuuauguaug

SEQ ID NO: 339466 - RNA, 24 nt, Artificial Sequence
  Synthetic
uaaagauacagacuuuuauguaug

SEQ ID NO: 339467 - RNA, 18 nt, Artificial Sequence
  Synthetic
cacauuucuuacuguaug

SEQ ID NO: 339468 - RNA, 19 nt, Artificial Sequence
  Synthetic
ccacauuucuuacuguaug

SEQ ID NO: 339469 - RNA, 20 nt, Artificial Sequence
  Synthetic
cccacauuucuuacuguaug

SEQ ID NO: 339470 - RNA, 21 nt, Artificial Sequence
  Synthetic
ucccacauuucuuacuguaug

SEQ ID NO: 339471 - RNA, 22 nt, Artificial Sequence
  Synthetic
gucccacauuucuuacuguaug

SEQ ID NO: 339472 - RNA, 23 nt, Artificial Sequence
  Synthetic
ugucccacauuucuuacuguaug

SEQ ID NO: 339473 - RNA, 24 nt, Artificial Sequence
  Synthetic
cugucccacauuucuuacuguaug

SEQ ID NO: 339474 - RNA, 18 nt, Artificial Sequence
  Synthetic
acaauacaauccuguaug

SEQ ID NO: 339475 - RNA, 19 nt, Artificial Sequence
  Synthetic
gacaauacaauccuguaug

SEQ ID NO: 339476 - RNA, 20 nt, Artificial Sequence
  Synthetic
agacaauacaauccuguaug

SEQ ID NO: 339477 - RNA, 21 nt, Artificial Sequence
  Synthetic
cagacaauacaauccuguaug

SEQ ID NO: 339478 - RNA, 22 nt, Artificial Sequence
  Synthetic
acagacaauacaauccuguaug

SEQ ID NO: 339479 - RNA, 23 nt, Artificial Sequence
  Synthetic
cacagacaauacaauccuguaug

SEQ ID NO: 339480 - RNA, 24 nt, Artificial Sequence
  Synthetic
ucacagacaauacaauccuguaug

SEQ ID NO: 339481 - RNA, 18 nt, Artificial Sequence
  Synthetic
aguaugaaaggcuguaug

SEQ ID NO: 339482 - RNA, 19 nt, Artificial Sequence
  Synthetic
caguaugaaaggcuguaug

SEQ ID NO: 339483 - RNA, 20 nt, Artificial Sequence
  Synthetic
ccaguaugaaaggcuguaug

SEQ ID NO: 339484 - RNA, 21 nt, Artificial Sequence
  Synthetic
accaguaugaaaggcuguaug

SEQ ID NO: 339485 - RNA, 22 nt, Artificial Sequence
  Synthetic
uaccaguaugaaaggcuguaug

SEQ ID NO: 339486 - RNA, 23 nt, Artificial Sequence
  Synthetic
guaccaguaugaaaggcuguaug

SEQ ID NO: 339487 - RNA, 24 nt, Artificial Sequence
  Synthetic
aguaccaguaugaaaggcuguaug

SEQ ID NO: 339488 - RNA, 18 nt, Artificial Sequence
  Synthetic
uguacaugaaucuguaug

SEQ ID NO: 339489 - RNA, 19 nt, Artificial Sequence
  Synthetic
uuguacaugaaucuguaug

SEQ ID NO: 339490 - RNA, 20 nt, Artificial Sequence
  Synthetic
cuuguacaugaaucuguaug

SEQ ID NO: 339491 - RNA, 21 nt, Artificial Sequence
  Synthetic
ccuuguacaugaaucuguaug

SEQ ID NO: 339492 - RNA, 22 nt, Artificial Sequence
  Synthetic
uccuuguacaugaaucuguaug

SEQ ID NO: 339493 - RNA, 23 nt, Artificial Sequence
  Synthetic
auccuuguacaugaaucuguaug

SEQ ID NO: 339494 - RNA, 24 nt, Artificial Sequence
  Synthetic
cauccuuguacaugaaucuguaug

SEQ ID NO: 339495 - RNA, 18 nt, Artificial Sequence
  Synthetic
uguggcuaggucuguaug

SEQ ID NO: 339496 - RNA, 19 nt, Artificial Sequence
  Synthetic
guguggcuaggucuguaug

SEQ ID NO: 339497 - RNA, 20 nt, Artificial Sequence
  Synthetic
aguguggcuaggucuguaug

SEQ ID NO: 339498 - RNA, 21 nt, Artificial Sequence
  Synthetic
uaguguggcuaggucuguaug

SEQ ID NO: 339499 - RNA, 22 nt, Artificial Sequence
  Synthetic
cuaguguggcuaggucuguaug

SEQ ID NO: 339500 - RNA, 23 nt, Artificial Sequence
  Synthetic
acuaguguggcuaggucuguaug

SEQ ID NO: 339501 - RNA, 24 nt, Artificial Sequence
  Synthetic
aacuaguguggcuaggucuguaug

SEQ ID NO: 339502 - RNA, 18 nt, Artificial Sequence
  Synthetic
ucuacucccagguguaug

SEQ ID NO: 339503 - RNA, 19 nt, Artificial Sequence
  Synthetic
uucuacucccagguguaug

SEQ ID NO: 339504 - RNA, 20 nt, Artificial Sequence
  Synthetic
auucuacucccagguguaug

SEQ ID NO: 339505 - RNA, 21 nt, Artificial Sequence
  Synthetic
cauucuacucccagguguaug

SEQ ID NO: 339506 - RNA, 22 nt, Artificial Sequence
  Synthetic
ccauucuacucccagguguaug

SEQ ID NO: 339507 - RNA, 23 nt, Artificial Sequence
  Synthetic
accauucuacucccagguguaug

SEQ ID NO: 339508 - RNA, 24 nt, Artificial Sequence
  Synthetic
aaccauucuacucccagguguaug

SEQ ID NO: 339509 - RNA, 18 nt, Artificial Sequence
  Synthetic
cccuccaaaauguguaug

SEQ ID NO: 339510 - RNA, 19 nt, Artificial Sequence
  Synthetic
ucccuccaaaauguguaug

SEQ ID NO: 339511 - RNA, 20 nt, Artificial Sequence
  Synthetic
gucccuccaaaauguguaug

SEQ ID NO: 339512 - RNA, 21 nt, Artificial Sequence
  Synthetic
ugucccuccaaaauguguaug

SEQ ID NO: 339513 - RNA, 22 nt, Artificial Sequence
  Synthetic
uugucccuccaaaauguguaug

SEQ ID NO: 339514 - RNA, 23 nt, Artificial Sequence
  Synthetic
uuugucccuccaaaauguguaug

SEQ ID NO: 339515 - RNA, 24 nt, Artificial Sequence
  Synthetic
uuuugucccuccaaaauguguaug

SEQ ID NO: 339516 - RNA, 18 nt, Artificial Sequence
  Synthetic
gaauguuugcauuguaug

SEQ ID NO: 339517 - RNA, 19 nt, Artificial Sequence
  Synthetic
ggaauguuugcauuguaug

SEQ ID NO: 339518 - RNA, 20 nt, Artificial Sequence
  Synthetic
uggaauguuugcauuguaug

SEQ ID NO: 339519 - RNA, 21 nt, Artificial Sequence
  Synthetic
cuggaauguuugcauuguaug

SEQ ID NO: 339520 - RNA, 22 nt, Artificial Sequence
  Synthetic
acuggaauguuugcauuguaug

SEQ ID NO: 339521 - RNA, 23 nt, Artificial Sequence
  Synthetic
uacuggaauguuugcauuguaug

SEQ ID NO: 339522 - RNA, 24 nt, Artificial Sequence
  Synthetic
guacuggaauguuugcauuguaug

SEQ ID NO: 339523 - RNA, 18 nt, Artificial Sequence
  Synthetic
uuuaguacucauuguaug

SEQ ID NO: 339524 - RNA, 19 nt, Artificial Sequence
  Synthetic
uuuuaguacucauuguaug

SEQ ID NO: 339525 - RNA, 20 nt, Artificial Sequence
  Synthetic
auuuuaguacucauuguaug

SEQ ID NO: 339526 - RNA, 21 nt, Artificial Sequence
  Synthetic
aauuuuaguacucauuguaug

SEQ ID NO: 339527 - RNA, 22 nt, Artificial Sequence
  Synthetic
aaauuuuaguacucauuguaug

SEQ ID NO: 339528 - RNA, 23 nt, Artificial Sequence
  Synthetic
uaaauuuuaguacucauuguaug

SEQ ID NO: 339529 - RNA, 24 nt, Artificial Sequence
  Synthetic
uuaaauuuuaguacucauuguaug

SEQ ID NO: 339530 - RNA, 18 nt, Artificial Sequence
  Synthetic
aaaauggagauuuguaug

SEQ ID NO: 339531 - RNA, 19 nt, Artificial Sequence
  Synthetic
uaaaauggagauuuguaug

SEQ ID NO: 339532 - RNA, 20 nt, Artificial Sequence
  Synthetic
guaaaauggagauuuguaug

SEQ ID NO: 339533 - RNA, 21 nt, Artificial Sequence
  Synthetic
uguaaaauggagauuuguaug

SEQ ID NO: 339534 - RNA, 22 nt, Artificial Sequence
  Synthetic
uuguaaaauggagauuuguaug

SEQ ID NO: 339535 - RNA, 23 nt, Artificial Sequence
  Synthetic
auuguaaaauggagauuuguaug

SEQ ID NO: 339536 - RNA, 24 nt, Artificial Sequence
  Synthetic
cauuguaaaauggagauuuguaug

SEQ ID NO: 339537 - RNA, 18 nt, Artificial Sequence
  Synthetic
augaacuagcuuuguaug

SEQ ID NO: 339538 - RNA, 19 nt, Artificial Sequence
  Synthetic
aaugaacuagcuuuguaug

SEQ ID NO: 339539 - RNA, 20 nt, Artificial Sequence
  Synthetic
aaaugaacuagcuuuguaug

SEQ ID NO: 339540 - RNA, 21 nt, Artificial Sequence
  Synthetic
aaaaugaacuagcuuuguaug

SEQ ID NO: 339541 - RNA, 22 nt, Artificial Sequence
  Synthetic
aaaaaugaacuagcuuuguaug

SEQ ID NO: 339542 - RNA, 23 nt, Artificial Sequence
  Synthetic
uaaaaaugaacuagcuuuguaug

SEQ ID NO: 339543 - RNA, 24 nt, Artificial Sequence
  Synthetic
uuaaaaaugaacuagcuuuguaug

SEQ ID NO: 339544 - RNA, 18 nt, Artificial Sequence
  Synthetic
aguugagaauuuuguaug

SEQ ID NO: 339545 - RNA, 19 nt, Artificial Sequence
  Synthetic
aaguugagaauuuuguaug

SEQ ID NO: 339546 - RNA, 20 nt, Artificial Sequence
  Synthetic
uaaguugagaauuuuguaug

SEQ ID NO: 339547 - RNA, 21 nt, Artificial Sequence
  Synthetic
guaaguugagaauuuuguaug

SEQ ID NO: 339548 - RNA, 22 nt, Artificial Sequence
  Synthetic
uguaaguugagaauuuuguaug

SEQ ID NO: 339549 - RNA, 23 nt, Artificial Sequence
  Synthetic
uuguaaguugagaauuuuguaug

SEQ ID NO: 339550 - RNA, 24 nt, Artificial Sequence
  Synthetic
auuguaaguugagaauuuuguaug

SEQ ID NO: 339551 - RNA, 18 nt, Artificial Sequence
  Synthetic
ugguaccacuuuuguaug

SEQ ID NO: 339552 - RNA, 19 nt, Artificial Sequence
  Synthetic
augguaccacuuuuguaug

SEQ ID NO: 339553 - RNA, 20 nt, Artificial Sequence
  Synthetic
aaugguaccacuuuuguaug

SEQ ID NO: 339554 - RNA, 21 nt, Artificial Sequence
  Synthetic
aaaugguaccacuuuuguaug

SEQ ID NO: 339555 - RNA, 22 nt, Artificial Sequence
  Synthetic
aaaaugguaccacuuuuguaug

SEQ ID NO: 339556 - RNA, 23 nt, Artificial Sequence
  Synthetic
uaaaaugguaccacuuuuguaug

SEQ ID NO: 339557 - RNA, 24 nt, Artificial Sequence
  Synthetic
auaaaaugguaccacuuuuguaug

SEQ ID NO: 339558 - RNA, 18 nt, Artificial Sequence
  Synthetic
auauuuucaaaaauuaug

SEQ ID NO: 339559 - RNA, 19 nt, Artificial Sequence
  Synthetic
cauauuuucaaaaauuaug

SEQ ID NO: 339560 - RNA, 20 nt, Artificial Sequence
  Synthetic
acauauuuucaaaaauuaug

SEQ ID NO: 339561 - RNA, 21 nt, Artificial Sequence
  Synthetic
aacauauuuucaaaaauuaug

SEQ ID NO: 339562 - RNA, 22 nt, Artificial Sequence
  Synthetic
caacauauuuucaaaaauuaug

SEQ ID NO: 339563 - RNA, 23 nt, Artificial Sequence
  Synthetic
gcaacauauuuucaaaaauuaug

SEQ ID NO: 339564 - RNA, 24 nt, Artificial Sequence
  Synthetic
ugcaacauauuuucaaaaauuaug

SEQ ID NO: 339565 - RNA, 18 nt, Artificial Sequence
  Synthetic
aguaggcuagaaauuaug

SEQ ID NO: 339566 - RNA, 19 nt, Artificial Sequence
  Synthetic
uaguaggcuagaaauuaug

SEQ ID NO: 339567 - RNA, 20 nt, Artificial Sequence
  Synthetic
guaguaggcuagaaauuaug

SEQ ID NO: 339568 - RNA, 21 nt, Artificial Sequence
  Synthetic
uguaguaggcuagaaauuaug

SEQ ID NO: 339569 - RNA, 22 nt, Artificial Sequence
  Synthetic
guguaguaggcuagaaauuaug

SEQ ID NO: 339570 - RNA, 23 nt, Artificial Sequence
  Synthetic
uguguaguaggcuagaaauuaug

SEQ ID NO: 339571 - RNA, 24 nt, Artificial Sequence
  Synthetic
guguguaguaggcuagaaauuaug

SEQ ID NO: 339572 - RNA, 18 nt, Artificial Sequence
  Synthetic
aagcaguuggaaauuaug

SEQ ID NO: 339573 - RNA, 19 nt, Artificial Sequence
  Synthetic
aaagcaguuggaaauuaug

SEQ ID NO: 339574 - RNA, 20 nt, Artificial Sequence
  Synthetic
aaaagcaguuggaaauuaug

SEQ ID NO: 339575 - RNA, 21 nt, Artificial Sequence
  Synthetic
caaaagcaguuggaaauuaug

SEQ ID NO: 339576 - RNA, 22 nt, Artificial Sequence
  Synthetic
ucaaaagcaguuggaaauuaug

SEQ ID NO: 339577 - RNA, 23 nt, Artificial Sequence
  Synthetic
uucaaaagcaguuggaaauuaug

SEQ ID NO: 339578 - RNA, 24 nt, Artificial Sequence
  Synthetic
uuucaaaagcaguuggaaauuaug

SEQ ID NO: 339579 - RNA, 18 nt, Artificial Sequence
  Synthetic
aacuggggcuaaauuaug

SEQ ID NO: 339580 - RNA, 19 nt, Artificial Sequence
  Synthetic
caacuggggcuaaauuaug

SEQ ID NO: 339581 - RNA, 20 nt, Artificial Sequence
  Synthetic
ucaacuggggcuaaauuaug

SEQ ID NO: 339582 - RNA, 21 nt, Artificial Sequence
  Synthetic
aucaacuggggcuaaauuaug

SEQ ID NO: 339583 - RNA, 22 nt, Artificial Sequence
  Synthetic
gaucaacuggggcuaaauuaug

SEQ ID NO: 339584 - RNA, 23 nt, Artificial Sequence
  Synthetic
agaucaacuggggcuaaauuaug

SEQ ID NO: 339585 - RNA, 24 nt, Artificial Sequence
  Synthetic
uagaucaacuggggcuaaauuaug

SEQ ID NO: 339586 - RNA, 18 nt, Artificial Sequence
  Synthetic
guacaauucagaauuaug

SEQ ID NO: 339587 - RNA, 19 nt, Artificial Sequence
  Synthetic
uguacaauucagaauuaug

SEQ ID NO: 339588 - RNA, 20 nt, Artificial Sequence
  Synthetic
auguacaauucagaauuaug

SEQ ID NO: 339589 - RNA, 21 nt, Artificial Sequence
  Synthetic
uauguacaauucagaauuaug

SEQ ID NO: 339590 - RNA, 22 nt, Artificial Sequence
  Synthetic
cuauguacaauucagaauuaug

SEQ ID NO: 339591 - RNA, 23 nt, Artificial Sequence
  Synthetic
gcuauguacaauucagaauuaug

SEQ ID NO: 339592 - RNA, 24 nt, Artificial Sequence
  Synthetic
agcuauguacaauucagaauuaug

SEQ ID NO: 339593 - RNA, 18 nt, Artificial Sequence
  Synthetic
agaaacaaaauaauuaug

SEQ ID NO: 339594 - RNA, 19 nt, Artificial Sequence
  Synthetic
uagaaacaaaauaauuaug

SEQ ID NO: 339595 - RNA, 20 nt, Artificial Sequence
  Synthetic
uuagaaacaaaauaauuaug

SEQ ID NO: 339596 - RNA, 21 nt, Artificial Sequence
  Synthetic
auuagaaacaaaauaauuaug

SEQ ID NO: 339597 - RNA, 22 nt, Artificial Sequence
  Synthetic
cauuagaaacaaaauaauuaug

SEQ ID NO: 339598 - RNA, 23 nt, Artificial Sequence
  Synthetic
acauuagaaacaaaauaauuaug

SEQ ID NO: 339599 - RNA, 24 nt, Artificial Sequence
  Synthetic
gacauuagaaacaaaauaauuaug

SEQ ID NO: 339600 - RNA, 18 nt, Artificial Sequence
  Synthetic
uuaacuugaauaauuaug

SEQ ID NO: 339601 - RNA, 19 nt, Artificial Sequence
  Synthetic
uuuaacuugaauaauuaug

SEQ ID NO: 339602 - RNA, 20 nt, Artificial Sequence
  Synthetic
guuuaacuugaauaauuaug

SEQ ID NO: 339603 - RNA, 21 nt, Artificial Sequence
  Synthetic
uguuuaacuugaauaauuaug

SEQ ID NO: 339604 - RNA, 22 nt, Artificial Sequence
  Synthetic
auguuuaacuugaauaauuaug

SEQ ID NO: 339605 - RNA, 23 nt, Artificial Sequence
  Synthetic
aauguuuaacuugaauaauuaug

SEQ ID NO: 339606 - RNA, 24 nt, Artificial Sequence
  Synthetic
uaauguuuaacuugaauaauuaug

SEQ ID NO: 339607 - RNA, 18 nt, Artificial Sequence
  Synthetic
gaaacuguaauaauuaug

SEQ ID NO: 339608 - RNA, 19 nt, Artificial Sequence
  Synthetic
ggaaacuguaauaauuaug

SEQ ID NO: 339609 - RNA, 20 nt, Artificial Sequence
  Synthetic
uggaaacuguaauaauuaug

SEQ ID NO: 339610 - RNA, 21 nt, Artificial Sequence
  Synthetic
uuggaaacuguaauaauuaug

SEQ ID NO: 339611 - RNA, 22 nt, Artificial Sequence
  Synthetic
uuuggaaacuguaauaauuaug

SEQ ID NO: 339612 - RNA, 23 nt, Artificial Sequence
  Synthetic
auuuggaaacuguaauaauuaug

SEQ ID NO: 339613 - RNA, 24 nt, Artificial Sequence
  Synthetic
cauuuggaaacuguaauaauuaug

SEQ ID NO: 339614 - RNA, 18 nt, Artificial Sequence
  Synthetic
gcuuggaaaguaauuaug

SEQ ID NO: 339615 - RNA, 19 nt, Artificial Sequence
  Synthetic
agcuuggaaaguaauuaug

SEQ ID NO: 339616 - RNA, 20 nt, Artificial Sequence
  Synthetic
uagcuuggaaaguaauuaug

SEQ ID NO: 339617 - RNA, 21 nt, Artificial Sequence
  Synthetic
auagcuuggaaaguaauuaug

SEQ ID NO: 339618 - RNA, 22 nt, Artificial Sequence
  Synthetic
uauagcuuggaaaguaauuaug

SEQ ID NO: 339619 - RNA, 23 nt, Artificial Sequence
  Synthetic
guauagcuuggaaaguaauuaug

SEQ ID NO: 339620 - RNA, 24 nt, Artificial Sequence
  Synthetic
aguauagcuuggaaaguaauuaug

SEQ ID NO: 339621 - RNA, 18 nt, Artificial Sequence
  Synthetic
ugugauggaaacauuaug

SEQ ID NO: 339622 - RNA, 19 nt, Artificial Sequence
  Synthetic
cugugauggaaacauuaug

SEQ ID NO: 339623 - RNA, 20 nt, Artificial Sequence
  Synthetic
ccugugauggaaacauuaug

SEQ ID NO: 339624 - RNA, 21 nt, Artificial Sequence
  Synthetic
uccugugauggaaacauuaug

SEQ ID NO: 339625 - RNA, 22 nt, Artificial Sequence
  Synthetic
uuccugugauggaaacauuaug

SEQ ID NO: 339626 - RNA, 23 nt, Artificial Sequence
  Synthetic
uuuccugugauggaaacauuaug

SEQ ID NO: 339627 - RNA, 24 nt, Artificial Sequence
  Synthetic
auuuccugugauggaaacauuaug

SEQ ID NO: 339628 - RNA, 18 nt, Artificial Sequence
  Synthetic
auuaguacaaccauuaug

SEQ ID NO: 339629 - RNA, 19 nt, Artificial Sequence
  Synthetic
uauuaguacaaccauuaug

SEQ ID NO: 339630 - RNA, 20 nt, Artificial Sequence
  Synthetic
auauuaguacaaccauuaug

SEQ ID NO: 339631 - RNA, 21 nt, Artificial Sequence
  Synthetic
uauauuaguacaaccauuaug

SEQ ID NO: 339632 - RNA, 22 nt, Artificial Sequence
  Synthetic
guauauuaguacaaccauuaug

SEQ ID NO: 339633 - RNA, 23 nt, Artificial Sequence
  Synthetic
uguauauuaguacaaccauuaug

SEQ ID NO: 339634 - RNA, 24 nt, Artificial Sequence
  Synthetic
auguauauuaguacaaccauuaug

SEQ ID NO: 339635 - RNA, 18 nt, Artificial Sequence
  Synthetic
auaauggcucccauuaug

SEQ ID NO: 339636 - RNA, 19 nt, Artificial Sequence
  Synthetic
uauaauggcucccauuaug

SEQ ID NO: 339637 - RNA, 20 nt, Artificial Sequence
  Synthetic
uuauaauggcucccauuaug

SEQ ID NO: 339638 - RNA, 21 nt, Artificial Sequence
  Synthetic
auuauaauggcucccauuaug

SEQ ID NO: 339639 - RNA, 22 nt, Artificial Sequence
  Synthetic
aauuauaauggcucccauuaug

SEQ ID NO: 339640 - RNA, 23 nt, Artificial Sequence
  Synthetic
gaauuauaauggcucccauuaug

SEQ ID NO: 339641 - RNA, 24 nt, Artificial Sequence
  Synthetic
agaauuauaauggcucccauuaug

SEQ ID NO: 339642 - RNA, 18 nt, Artificial Sequence
  Synthetic
uacaaauuauucauuaug

SEQ ID NO: 339643 - RNA, 19 nt, Artificial Sequence
  Synthetic
auacaaauuauucauuaug

SEQ ID NO: 339644 - RNA, 20 nt, Artificial Sequence
  Synthetic
gauacaaauuauucauuaug

SEQ ID NO: 339645 - RNA, 21 nt, Artificial Sequence
  Synthetic
ugauacaaauuauucauuaug

SEQ ID NO: 339646 - RNA, 22 nt, Artificial Sequence
  Synthetic
cugauacaaauuauucauuaug

SEQ ID NO: 339647 - RNA, 23 nt, Artificial Sequence
  Synthetic
ucugauacaaauuauucauuaug

SEQ ID NO: 339648 - RNA, 24 nt, Artificial Sequence
  Synthetic
gucugauacaaauuauucauuaug

SEQ ID NO: 339649 - RNA, 18 nt, Artificial Sequence
  Synthetic
gcuaaagcacagauuaug

SEQ ID NO: 339650 - RNA, 19 nt, Artificial Sequence
  Synthetic
ugcuaaagcacagauuaug

SEQ ID NO: 339651 - RNA, 20 nt, Artificial Sequence
  Synthetic
uugcuaaagcacagauuaug

SEQ ID NO: 339652 - RNA, 21 nt, Artificial Sequence
  Synthetic
uuugcuaaagcacagauuaug

SEQ ID NO: 339653 - RNA, 22 nt, Artificial Sequence
  Synthetic
cuuugcuaaagcacagauuaug

SEQ ID NO: 339654 - RNA, 23 nt, Artificial Sequence
  Synthetic
ucuuugcuaaagcacagauuaug

SEQ ID NO: 339655 - RNA, 24 nt, Artificial Sequence
  Synthetic
aucuuugcuaaagcacagauuaug

SEQ ID NO: 339656 - RNA, 18 nt, Artificial Sequence
  Synthetic
aauguuuaagagauuaug

SEQ ID NO: 339657 - RNA, 19 nt, Artificial Sequence
  Synthetic
aaauguuuaagagauuaug

SEQ ID NO: 339658 - RNA, 20 nt, Artificial Sequence
  Synthetic
gaaauguuuaagagauuaug

SEQ ID NO: 339659 - RNA, 21 nt, Artificial Sequence
  Synthetic
agaaauguuuaagagauuaug

SEQ ID NO: 339660 - RNA, 22 nt, Artificial Sequence
  Synthetic
aagaaauguuuaagagauuaug

SEQ ID NO: 339661 - RNA, 23 nt, Artificial Sequence
  Synthetic
uaagaaauguuuaagagauuaug

SEQ ID NO: 339662 - RNA, 24 nt, Artificial Sequence
  Synthetic
uuaagaaauguuuaagagauuaug

SEQ ID NO: 339663 - RNA, 18 nt, Artificial Sequence
  Synthetic
cccaagacuuagauuaug

SEQ ID NO: 339664 - RNA, 19 nt, Artificial Sequence
  Synthetic
acccaagacuuagauuaug

SEQ ID NO: 339665 - RNA, 20 nt, Artificial Sequence
  Synthetic
aacccaagacuuagauuaug

SEQ ID NO: 339666 - RNA, 21 nt, Artificial Sequence
  Synthetic
gaacccaagacuuagauuaug

SEQ ID NO: 339667 - RNA, 22 nt, Artificial Sequence
  Synthetic
ggaacccaagacuuagauuaug

SEQ ID NO: 339668 - RNA, 23 nt, Artificial Sequence
  Synthetic
gggaacccaagacuuagauuaug

SEQ ID NO: 339669 - RNA, 24 nt, Artificial Sequence
  Synthetic
agggaacccaagacuuagauuaug

SEQ ID NO: 339670 - RNA, 18 nt, Artificial Sequence
  Synthetic
aaaaaaauagggauuaug

SEQ ID NO: 339671 - RNA, 19 nt, Artificial Sequence
  Synthetic
gaaaaaaauagggauuaug

SEQ ID NO: 339672 - RNA, 20 nt, Artificial Sequence
  Synthetic
ugaaaaaaauagggauuaug

SEQ ID NO: 339673 - RNA, 21 nt, Artificial Sequence
  Synthetic
uugaaaaaaauagggauuaug

SEQ ID NO: 339674 - RNA, 22 nt, Artificial Sequence
  Synthetic
guugaaaaaaauagggauuaug

SEQ ID NO: 339675 - RNA, 23 nt, Artificial Sequence
  Synthetic
aguugaaaaaaauagggauuaug

SEQ ID NO: 339676 - RNA, 24 nt, Artificial Sequence
  Synthetic
aaguugaaaaaaauagggauuaug

SEQ ID NO: 339677 - RNA, 18 nt, Artificial Sequence
  Synthetic
auuucaguguugauuaug

SEQ ID NO: 339678 - RNA, 19 nt, Artificial Sequence
  Synthetic
gauuucaguguugauuaug

SEQ ID NO: 339679 - RNA, 20 nt, Artificial Sequence
  Synthetic
ugauuucaguguugauuaug

SEQ ID NO: 339680 - RNA, 21 nt, Artificial Sequence
  Synthetic
gugauuucaguguugauuaug

SEQ ID NO: 339681 - RNA, 22 nt, Artificial Sequence
  Synthetic
agugauuucaguguugauuaug

SEQ ID NO: 339682 - RNA, 23 nt, Artificial Sequence
  Synthetic
aagugauuucaguguugauuaug

SEQ ID NO: 339683 - RNA, 24 nt, Artificial Sequence
  Synthetic
caagugauuucaguguugauuaug

SEQ ID NO: 339684 - RNA, 18 nt, Artificial Sequence
  Synthetic
aaugucaaaaauauuaug

SEQ ID NO: 339685 - RNA, 19 nt, Artificial Sequence
  Synthetic
gaaugucaaaaauauuaug

SEQ ID NO: 339686 - RNA, 20 nt, Artificial Sequence
  Synthetic
ugaaugucaaaaauauuaug

SEQ ID NO: 339687 - RNA, 21 nt, Artificial Sequence
  Synthetic
augaaugucaaaaauauuaug

SEQ ID NO: 339688 - RNA, 22 nt, Artificial Sequence
  Synthetic
aaugaaugucaaaaauauuaug

SEQ ID NO: 339689 - RNA, 23 nt, Artificial Sequence
  Synthetic
gaaugaaugucaaaaauauuaug

SEQ ID NO: 339690 - RNA, 24 nt, Artificial Sequence
  Synthetic
ugaaugaaugucaaaaauauuaug

SEQ ID NO: 339691 - RNA, 18 nt, Artificial Sequence
  Synthetic
gguaaaccucauauuaug

SEQ ID NO: 339692 - RNA, 19 nt, Artificial Sequence
  Synthetic
agguaaaccucauauuaug

SEQ ID NO: 339693 - RNA, 20 nt, Artificial Sequence
  Synthetic
aagguaaaccucauauuaug

SEQ ID NO: 339694 - RNA, 21 nt, Artificial Sequence
  Synthetic
uaagguaaaccucauauuaug

SEQ ID NO: 339695 - RNA, 22 nt, Artificial Sequence
  Synthetic
uuaagguaaaccucauauuaug

SEQ ID NO: 339696 - RNA, 23 nt, Artificial Sequence
  Synthetic
cuuaagguaaaccucauauuaug

SEQ ID NO: 339697 - RNA, 24 nt, Artificial Sequence
  Synthetic
ccuuaagguaaaccucauauuaug

SEQ ID NO: 339698 - RNA, 18 nt, Artificial Sequence
  Synthetic
uacccaaaggcuauuaug

SEQ ID NO: 339699 - RNA, 19 nt, Artificial Sequence
  Synthetic
uuacccaaaggcuauuaug

SEQ ID NO: 339700 - RNA, 20 nt, Artificial Sequence
  Synthetic
cuuacccaaaggcuauuaug

SEQ ID NO: 339701 - RNA, 21 nt, Artificial Sequence
  Synthetic
acuuacccaaaggcuauuaug

SEQ ID NO: 339702 - RNA, 22 nt, Artificial Sequence
  Synthetic
uacuuacccaaaggcuauuaug

SEQ ID NO: 339703 - RNA, 23 nt, Artificial Sequence
  Synthetic
guacuuacccaaaggcuauuaug

SEQ ID NO: 339704 - RNA, 24 nt, Artificial Sequence
  Synthetic
uguacuuacccaaaggcuauuaug

SEQ ID NO: 339705 - RNA, 18 nt, Artificial Sequence
  Synthetic
ugcaaaugugaccuuaug

SEQ ID NO: 339706 - RNA, 19 nt, Artificial Sequence
  Synthetic
cugcaaaugugaccuuaug

SEQ ID NO: 339707 - RNA, 20 nt, Artificial Sequence
  Synthetic
ucugcaaaugugaccuuaug

SEQ ID NO: 339708 - RNA, 21 nt, Artificial Sequence
  Synthetic
aucugcaaaugugaccuuaug

SEQ ID NO: 339709 - RNA, 22 nt, Artificial Sequence
  Synthetic
uaucugcaaaugugaccuuaug

SEQ ID NO: 339710 - RNA, 23 nt, Artificial Sequence
  Synthetic
guaucugcaaaugugaccuuaug

SEQ ID NO: 339711 - RNA, 24 nt, Artificial Sequence
  Synthetic
gguaucugcaaaugugaccuuaug

SEQ ID NO: 339712 - RNA, 18 nt, Artificial Sequence
  Synthetic
auguguaaaaugcuuaug

SEQ ID NO: 339713 - RNA, 19 nt, Artificial Sequence
  Synthetic
aauguguaaaaugcuuaug

SEQ ID NO: 339714 - RNA, 20 nt, Artificial Sequence
  Synthetic
aaauguguaaaaugcuuaug

SEQ ID NO: 339715 - RNA, 21 nt, Artificial Sequence
  Synthetic
uaaauguguaaaaugcuuaug

SEQ ID NO: 339716 - RNA, 22 nt, Artificial Sequence
  Synthetic
uuaaauguguaaaaugcuuaug

SEQ ID NO: 339717 - RNA, 23 nt, Artificial Sequence
  Synthetic
uuuaaauguguaaaaugcuuaug

SEQ ID NO: 339718 - RNA, 24 nt, Artificial Sequence
  Synthetic
uuuuaaauguguaaaaugcuuaug

SEQ ID NO: 339719 - RNA, 18 nt, Artificial Sequence
  Synthetic
aaguauccaaugcuuaug

SEQ ID NO: 339720 - RNA, 19 nt, Artificial Sequence
  Synthetic
uaaguauccaaugcuuaug

SEQ ID NO: 339721 - RNA, 20 nt, Artificial Sequence
  Synthetic
cuaaguauccaaugcuuaug

SEQ ID NO: 339722 - RNA, 21 nt, Artificial Sequence
  Synthetic
acuaaguauccaaugcuuaug

SEQ ID NO: 339723 - RNA, 22 nt, Artificial Sequence
  Synthetic
uacuaaguauccaaugcuuaug

SEQ ID NO: 339724 - RNA, 23 nt, Artificial Sequence
  Synthetic
cuacuaaguauccaaugcuuaug

SEQ ID NO: 339725 - RNA, 24 nt, Artificial Sequence
  Synthetic
gcuacuaaguauccaaugcuuaug

SEQ ID NO: 339726 - RNA, 18 nt, Artificial Sequence
  Synthetic
gaugcuccucaucuuaug

SEQ ID NO: 339727 - RNA, 19 nt, Artificial Sequence
  Synthetic
agaugcuccucaucuuaug

SEQ ID NO: 339728 - RNA, 20 nt, Artificial Sequence
  Synthetic
cagaugcuccucaucuuaug

SEQ ID NO: 339729 - RNA, 21 nt, Artificial Sequence
  Synthetic
acagaugcuccucaucuuaug

SEQ ID NO: 339730 - RNA, 22 nt, Artificial Sequence
  Synthetic
uacagaugcuccucaucuuaug

SEQ ID NO: 339731 - RNA, 23 nt, Artificial Sequence
  Synthetic
auacagaugcuccucaucuuaug

SEQ ID NO: 339732 - RNA, 24 nt, Artificial Sequence
  Synthetic
uauacagaugcuccucaucuuaug

SEQ ID NO: 339733 - RNA, 18 nt, Artificial Sequence
  Synthetic
auccucuuucaucuuaug

SEQ ID NO: 339734 - RNA, 19 nt, Artificial Sequence
  Synthetic
aauccucuuucaucuuaug

SEQ ID NO: 339735 - RNA, 20 nt, Artificial Sequence
  Synthetic
aaauccucuuucaucuuaug

SEQ ID NO: 339736 - RNA, 21 nt, Artificial Sequence
  Synthetic
uaaauccucuuucaucuuaug

SEQ ID NO: 339737 - RNA, 22 nt, Artificial Sequence
  Synthetic
cuaaauccucuuucaucuuaug

SEQ ID NO: 339738 - RNA, 23 nt, Artificial Sequence
  Synthetic
ccuaaauccucuuucaucuuaug

SEQ ID NO: 339739 - RNA, 24 nt, Artificial Sequence
  Synthetic
uccuaaauccucuuucaucuuaug

SEQ ID NO: 339740 - RNA, 18 nt, Artificial Sequence
  Synthetic
cugcgugucccucuuaug

SEQ ID NO: 339741 - RNA, 19 nt, Artificial Sequence
  Synthetic
ucugcgugucccucuuaug

SEQ ID NO: 339742 - RNA, 20 nt, Artificial Sequence
  Synthetic
uucugcgugucccucuuaug

SEQ ID NO: 339743 - RNA, 21 nt, Artificial Sequence
  Synthetic
auucugcgugucccucuuaug

SEQ ID NO: 339744 - RNA, 22 nt, Artificial Sequence
  Synthetic
aauucugcgugucccucuuaug

SEQ ID NO: 339745 - RNA, 23 nt, Artificial Sequence
  Synthetic
caauucugcgugucccucuuaug

SEQ ID NO: 339746 - RNA, 24 nt, Artificial Sequence
  Synthetic
ccaauucugcgugucccucuuaug

SEQ ID NO: 339747 - RNA, 18 nt, Artificial Sequence
  Synthetic
acuguucccuuucuuaug

SEQ ID NO: 339748 - RNA, 19 nt, Artificial Sequence
  Synthetic
uacuguucccuuucuuaug

SEQ ID NO: 339749 - RNA, 20 nt, Artificial Sequence
  Synthetic
uuacuguucccuuucuuaug

SEQ ID NO: 339750 - RNA, 21 nt, Artificial Sequence
  Synthetic
uuuacuguucccuuucuuaug

SEQ ID NO: 339751 - RNA, 22 nt, Artificial Sequence
  Synthetic
uuuuacuguucccuuucuuaug

SEQ ID NO: 339752 - RNA, 23 nt, Artificial Sequence
  Synthetic
cuuuuacuguucccuuucuuaug

SEQ ID NO: 339753 - RNA, 24 nt, Artificial Sequence
  Synthetic
acuuuuacuguucccuuucuuaug

SEQ ID NO: 339754 - RNA, 18 nt, Artificial Sequence
  Synthetic
cuuacuuucaaaguuaug

SEQ ID NO: 339755 - RNA, 19 nt, Artificial Sequence
  Synthetic
acuuacuuucaaaguuaug

SEQ ID NO: 339756 - RNA, 20 nt, Artificial Sequence
  Synthetic
cacuuacuuucaaaguuaug

SEQ ID NO: 339757 - RNA, 21 nt, Artificial Sequence
  Synthetic
ccacuuacuuucaaaguuaug

SEQ ID NO: 339758 - RNA, 22 nt, Artificial Sequence
  Synthetic
cccacuuacuuucaaaguuaug

SEQ ID NO: 339759 - RNA, 23 nt, Artificial Sequence
  Synthetic
ucccacuuacuuucaaaguuaug

SEQ ID NO: 339760 - RNA, 24 nt, Artificial Sequence
  Synthetic
aucccacuuacuuucaaaguuaug

SEQ ID NO: 339761 - RNA, 18 nt, Artificial Sequence
  Synthetic
uaauagaaaggaguuaug

SEQ ID NO: 339762 - RNA, 19 nt, Artificial Sequence
  Synthetic
auaauagaaaggaguuaug

SEQ ID NO: 339763 - RNA, 20 nt, Artificial Sequence
  Synthetic
aauaauagaaaggaguuaug

SEQ ID NO: 339764 - RNA, 21 nt, Artificial Sequence
  Synthetic
aaauaauagaaaggaguuaug

SEQ ID NO: 339765 - RNA, 22 nt, Artificial Sequence
  Synthetic
aaaauaauagaaaggaguuaug

SEQ ID NO: 339766 - RNA, 23 nt, Artificial Sequence
  Synthetic
uaaaauaauagaaaggaguuaug

SEQ ID NO: 339767 - RNA, 24 nt, Artificial Sequence
  Synthetic
auaaaauaauagaaaggaguuaug

SEQ ID NO: 339768 - RNA, 18 nt, Artificial Sequence
  Synthetic
auuaaauuuagcguuaug

SEQ ID NO: 339769 - RNA, 19 nt, Artificial Sequence
  Synthetic
uauuaaauuuagcguuaug

SEQ ID NO: 339770 - RNA, 20 nt, Artificial Sequence
  Synthetic
guauuaaauuuagcguuaug

SEQ ID NO: 339771 - RNA, 21 nt, Artificial Sequence
  Synthetic
aguauuaaauuuagcguuaug

SEQ ID NO: 339772 - RNA, 22 nt, Artificial Sequence
  Synthetic
caguauuaaauuuagcguuaug

SEQ ID NO: 339773 - RNA, 23 nt, Artificial Sequence
  Synthetic
ucaguauuaaauuuagcguuaug

SEQ ID NO: 339774 - RNA, 24 nt, Artificial Sequence
  Synthetic
uucaguauuaaauuuagcguuaug

SEQ ID NO: 339775 - RNA, 18 nt, Artificial Sequence
  Synthetic
gucaauauuuggguuaug

SEQ ID NO: 339776 - RNA, 19 nt, Artificial Sequence
  Synthetic
ugucaauauuuggguuaug

SEQ ID NO: 339777 - RNA, 20 nt, Artificial Sequence
  Synthetic
augucaauauuuggguuaug

SEQ ID NO: 339778 - RNA, 21 nt, Artificial Sequence
  Synthetic
aaugucaauauuuggguuaug

SEQ ID NO: 339779 - RNA, 22 nt, Artificial Sequence
  Synthetic
uaaugucaauauuuggguuaug

SEQ ID NO: 339780 - RNA, 23 nt, Artificial Sequence
  Synthetic
auaaugucaauauuuggguuaug

SEQ ID NO: 339781 - RNA, 24 nt, Artificial Sequence
  Synthetic
aauaaugucaauauuuggguuaug

SEQ ID NO: 339782 - RNA, 18 nt, Artificial Sequence
  Synthetic
gacaaccagaugguuaug

SEQ ID NO: 339783 - RNA, 19 nt, Artificial Sequence
  Synthetic
agacaaccagaugguuaug

SEQ ID NO: 339784 - RNA, 20 nt, Artificial Sequence
  Synthetic
aagacaaccagaugguuaug

SEQ ID NO: 339785 - RNA, 21 nt, Artificial Sequence
  Synthetic
gaagacaaccagaugguuaug

SEQ ID NO: 339786 - RNA, 22 nt, Artificial Sequence
  Synthetic
ggaagacaaccagaugguuaug

SEQ ID NO: 339787 - RNA, 23 nt, Artificial Sequence
  Synthetic
aggaagacaaccagaugguuaug

SEQ ID NO: 339788 - RNA, 24 nt, Artificial Sequence
  Synthetic
aaggaagacaaccagaugguuaug

SEQ ID NO: 339789 - RNA, 18 nt, Artificial Sequence
  Synthetic
guucaucaguugguuaug

SEQ ID NO: 339790 - RNA, 19 nt, Artificial Sequence
  Synthetic
uguucaucaguugguuaug

SEQ ID NO: 339791 - RNA, 20 nt, Artificial Sequence
  Synthetic
uuguucaucaguugguuaug

SEQ ID NO: 339792 - RNA, 21 nt, Artificial Sequence
  Synthetic
uuuguucaucaguugguuaug

SEQ ID NO: 339793 - RNA, 22 nt, Artificial Sequence
  Synthetic
auuuguucaucaguugguuaug

SEQ ID NO: 339794 - RNA, 23 nt, Artificial Sequence
  Synthetic
uauuuguucaucaguugguuaug

SEQ ID NO: 339795 - RNA, 24 nt, Artificial Sequence
  Synthetic
guauuuguucaucaguugguuaug

SEQ ID NO: 339796 - RNA, 18 nt, Artificial Sequence
  Synthetic
aauaaccagcauguuaug

SEQ ID NO: 339797 - RNA, 19 nt, Artificial Sequence
  Synthetic
uaauaaccagcauguuaug

SEQ ID NO: 339798 - RNA, 20 nt, Artificial Sequence
  Synthetic
uuaauaaccagcauguuaug

SEQ ID NO: 339799 - RNA, 21 nt, Artificial Sequence
  Synthetic
auuaauaaccagcauguuaug

SEQ ID NO: 339800 - RNA, 22 nt, Artificial Sequence
  Synthetic
aauuaauaaccagcauguuaug

SEQ ID NO: 339801 - RNA, 23 nt, Artificial Sequence
  Synthetic
uaauuaauaaccagcauguuaug

SEQ ID NO: 339802 - RNA, 24 nt, Artificial Sequence
  Synthetic
guaauuaauaaccagcauguuaug

SEQ ID NO: 339803 - RNA, 18 nt, Artificial Sequence
  Synthetic
augguacauauuguuaug

SEQ ID NO: 339804 - RNA, 19 nt, Artificial Sequence
  Synthetic
aaugguacauauuguuaug

SEQ ID NO: 339805 - RNA, 20 nt, Artificial Sequence
  Synthetic
aaaugguacauauuguuaug

SEQ ID NO: 339806 - RNA, 21 nt, Artificial Sequence
  Synthetic
uaaaugguacauauuguuaug

SEQ ID NO: 339807 - RNA, 22 nt, Artificial Sequence
  Synthetic
uuaaaugguacauauuguuaug

SEQ ID NO: 339808 - RNA, 23 nt, Artificial Sequence
  Synthetic
auuaaaugguacauauuguuaug

SEQ ID NO: 339809 - RNA, 24 nt, Artificial Sequence
  Synthetic
cauuaaaugguacauauuguuaug

SEQ ID NO: 339810 - RNA, 18 nt, Artificial Sequence
  Synthetic
gcauuuuugguuguuaug

SEQ ID NO: 339811 - RNA, 19 nt, Artificial Sequence
  Synthetic
ggcauuuuugguuguuaug

SEQ ID NO: 339812 - RNA, 20 nt, Artificial Sequence
  Synthetic
aggcauuuuugguuguuaug

SEQ ID NO: 339813 - RNA, 21 nt, Artificial Sequence
  Synthetic
gaggcauuuuugguuguuaug

SEQ ID NO: 339814 - RNA, 22 nt, Artificial Sequence
  Synthetic
ggaggcauuuuugguuguuaug

SEQ ID NO: 339815 - RNA, 23 nt, Artificial Sequence
  Synthetic
gggaggcauuuuugguuguuaug

SEQ ID NO: 339816 - RNA, 24 nt, Artificial Sequence
  Synthetic
agggaggcauuuuugguuguuaug

SEQ ID NO: 339817 - RNA, 18 nt, Artificial Sequence
  Synthetic
uaacuuuugaaauuuaug

SEQ ID NO: 339818 - RNA, 19 nt, Artificial Sequence
  Synthetic
cuaacuuuugaaauuuaug

SEQ ID NO: 339819 - RNA, 20 nt, Artificial Sequence
  Synthetic
ccuaacuuuugaaauuuaug

SEQ ID NO: 339820 - RNA, 21 nt, Artificial Sequence
  Synthetic
gccuaacuuuugaaauuuaug

SEQ ID NO: 339821 - RNA, 22 nt, Artificial Sequence
  Synthetic
agccuaacuuuugaaauuuaug

SEQ ID NO: 339822 - RNA, 23 nt, Artificial Sequence
  Synthetic
uagccuaacuuuugaaauuuaug

SEQ ID NO: 339823 - RNA, 24 nt, Artificial Sequence
  Synthetic
uuagccuaacuuuugaaauuuaug

SEQ ID NO: 339824 - RNA, 18 nt, Artificial Sequence
  Synthetic
auagugugguaauuuaug

SEQ ID NO: 339825 - RNA, 19 nt, Artificial Sequence
  Synthetic
uauagugugguaauuuaug

SEQ ID NO: 339826 - RNA, 20 nt, Artificial Sequence
  Synthetic
auauagugugguaauuuaug

SEQ ID NO: 339827 - RNA, 21 nt, Artificial Sequence
  Synthetic
aauauagugugguaauuuaug

SEQ ID NO: 339828 - RNA, 22 nt, Artificial Sequence
  Synthetic
aaauauagugugguaauuuaug

SEQ ID NO: 339829 - RNA, 23 nt, Artificial Sequence
  Synthetic
aaaauauagugugguaauuuaug

SEQ ID NO: 339830 - RNA, 24 nt, Artificial Sequence
  Synthetic
aaaaauauagugugguaauuuaug

SEQ ID NO: 339831 - RNA, 18 nt, Artificial Sequence
  Synthetic
aaugcugaaguauuuaug

SEQ ID NO: 339832 - RNA, 19 nt, Artificial Sequence
  Synthetic
aaaugcugaaguauuuaug

SEQ ID NO: 339833 - RNA, 20 nt, Artificial Sequence
  Synthetic
aaaaugcugaaguauuuaug

SEQ ID NO: 339834 - RNA, 21 nt, Artificial Sequence
  Synthetic
aaaaaugcugaaguauuuaug

SEQ ID NO: 339835 - RNA, 22 nt, Artificial Sequence
  Synthetic
gaaaaaugcugaaguauuuaug

SEQ ID NO: 339836 - RNA, 23 nt, Artificial Sequence
  Synthetic
agaaaaaugcugaaguauuuaug

SEQ ID NO: 339837 - RNA, 24 nt, Artificial Sequence
  Synthetic
gagaaaaaugcugaaguauuuaug

SEQ ID NO: 339838 - RNA, 18 nt, Artificial Sequence
  Synthetic
guguauuucggcuuuaug

SEQ ID NO: 339839 - RNA, 19 nt, Artificial Sequence
  Synthetic
uguguauuucggcuuuaug

SEQ ID NO: 339840 - RNA, 20 nt, Artificial Sequence
  Synthetic
guguguauuucggcuuuaug

SEQ ID NO: 339841 - RNA, 21 nt, Artificial Sequence
  Synthetic
aguguguauuucggcuuuaug

SEQ ID NO: 339842 - RNA, 22 nt, Artificial Sequence
  Synthetic
caguguguauuucggcuuuaug

SEQ ID NO: 339843 - RNA, 23 nt, Artificial Sequence
  Synthetic
gcaguguguauuucggcuuuaug

SEQ ID NO: 339844 - RNA, 24 nt, Artificial Sequence
  Synthetic
ggcaguguguauuucggcuuuaug

SEQ ID NO: 339845 - RNA, 18 nt, Artificial Sequence
  Synthetic
cauguucaagucuuuaug

SEQ ID NO: 339846 - RNA, 19 nt, Artificial Sequence
  Synthetic
acauguucaagucuuuaug

SEQ ID NO: 339847 - RNA, 20 nt, Artificial Sequence
  Synthetic
aacauguucaagucuuuaug

SEQ ID NO: 339848 - RNA, 21 nt, Artificial Sequence
  Synthetic
uaacauguucaagucuuuaug

SEQ ID NO: 339849 - RNA, 22 nt, Artificial Sequence
  Synthetic
uuaacauguucaagucuuuaug

SEQ ID NO: 339850 - RNA, 23 nt, Artificial Sequence
  Synthetic
auuaacauguucaagucuuuaug

SEQ ID NO: 339851 - RNA, 24 nt, Artificial Sequence
  Synthetic
cauuaacauguucaagucuuuaug

SEQ ID NO: 339852 - RNA, 18 nt, Artificial Sequence
  Synthetic
uagggggaggucuuuaug

SEQ ID NO: 339853 - RNA, 19 nt, Artificial Sequence
  Synthetic
cuagggggaggucuuuaug

SEQ ID NO: 339854 - RNA, 20 nt, Artificial Sequence
  Synthetic
ucuagggggaggucuuuaug

SEQ ID NO: 339855 - RNA, 21 nt, Artificial Sequence
  Synthetic
gucuagggggaggucuuuaug

SEQ ID NO: 339856 - RNA, 22 nt, Artificial Sequence
  Synthetic
ggucuagggggaggucuuuaug

SEQ ID NO: 339857 - RNA, 23 nt, Artificial Sequence
  Synthetic
uggucuagggggaggucuuuaug

SEQ ID NO: 339858 - RNA, 24 nt, Artificial Sequence
  Synthetic
cuggucuagggggaggucuuuaug

SEQ ID NO: 339859 - RNA, 18 nt, Artificial Sequence
  Synthetic
aauaaaagaggguuuaug

SEQ ID NO: 339860 - RNA, 19 nt, Artificial Sequence
  Synthetic
aaauaaaagaggguuuaug

SEQ ID NO: 339861 - RNA, 20 nt, Artificial Sequence
  Synthetic
gaaauaaaagaggguuuaug

SEQ ID NO: 339862 - RNA, 21 nt, Artificial Sequence
  Synthetic
ugaaauaaaagaggguuuaug

SEQ ID NO: 339863 - RNA, 22 nt, Artificial Sequence
  Synthetic
gugaaauaaaagaggguuuaug

SEQ ID NO: 339864 - RNA, 23 nt, Artificial Sequence
  Synthetic
ggugaaauaaaagaggguuuaug

SEQ ID NO: 339865 - RNA, 24 nt, Artificial Sequence
  Synthetic
aggugaaauaaaagaggguuuaug

SEQ ID NO: 339866 - RNA, 18 nt, Artificial Sequence
  Synthetic
uugaaaccaugguuuaug

SEQ ID NO: 339867 - RNA, 19 nt, Artificial Sequence
  Synthetic
guugaaaccaugguuuaug

SEQ ID NO: 339868 - RNA, 20 nt, Artificial Sequence
  Synthetic
uguugaaaccaugguuuaug

SEQ ID NO: 339869 - RNA, 21 nt, Artificial Sequence
  Synthetic
uuguugaaaccaugguuuaug

SEQ ID NO: 339870 - RNA, 22 nt, Artificial Sequence
  Synthetic
auuguugaaaccaugguuuaug

SEQ ID NO: 339871 - RNA, 23 nt, Artificial Sequence
  Synthetic
aauuguugaaaccaugguuuaug

SEQ ID NO: 339872 - RNA, 24 nt, Artificial Sequence
  Synthetic
gaauuguugaaaccaugguuuaug

SEQ ID NO: 339873 - RNA, 18 nt, Artificial Sequence
  Synthetic
cauuuaaaacuguuuaug

SEQ ID NO: 339874 - RNA, 19 nt, Artificial Sequence
  Synthetic
ccauuuaaaacuguuuaug

SEQ ID NO: 339875 - RNA, 20 nt, Artificial Sequence
  Synthetic
uccauuuaaaacuguuuaug

SEQ ID NO: 339876 - RNA, 21 nt, Artificial Sequence
  Synthetic
guccauuuaaaacuguuuaug

SEQ ID NO: 339877 - RNA, 22 nt, Artificial Sequence
  Synthetic
gguccauuuaaaacuguuuaug

SEQ ID NO: 339878 - RNA, 23 nt, Artificial Sequence
  Synthetic
ggguccauuuaaaacuguuuaug

SEQ ID NO: 339879 - RNA, 24 nt, Artificial Sequence
  Synthetic
uggguccauuuaaaacuguuuaug

SEQ ID NO: 339880 - RNA, 18 nt, Artificial Sequence
  Synthetic
ucuaauacauuguuuaug

SEQ ID NO: 339881 - RNA, 19 nt, Artificial Sequence
  Synthetic
uucuaauacauuguuuaug

SEQ ID NO: 339882 - RNA, 20 nt, Artificial Sequence
  Synthetic
guucuaauacauuguuuaug

SEQ ID NO: 339883 - RNA, 21 nt, Artificial Sequence
  Synthetic
uguucuaauacauuguuuaug

SEQ ID NO: 339884 - RNA, 22 nt, Artificial Sequence
  Synthetic
guguucuaauacauuguuuaug

SEQ ID NO: 339885 - RNA, 23 nt, Artificial Sequence
  Synthetic
uguguucuaauacauuguuuaug

SEQ ID NO: 339886 - RNA, 24 nt, Artificial Sequence
  Synthetic
cuguguucuaauacauuguuuaug

SEQ ID NO: 339887 - RNA, 18 nt, Artificial Sequence
  Synthetic
gcacagugaaauuuuaug

SEQ ID NO: 339888 - RNA, 19 nt, Artificial Sequence
  Synthetic
agcacagugaaauuuuaug

SEQ ID NO: 339889 - RNA, 20 nt, Artificial Sequence
  Synthetic
cagcacagugaaauuuuaug

SEQ ID NO: 339890 - RNA, 21 nt, Artificial Sequence
  Synthetic
ucagcacagugaaauuuuaug

SEQ ID NO: 339891 - RNA, 22 nt, Artificial Sequence
  Synthetic
aucagcacagugaaauuuuaug

SEQ ID NO: 339892 - RNA, 23 nt, Artificial Sequence
  Synthetic
uaucagcacagugaaauuuuaug

SEQ ID NO: 339893 - RNA, 24 nt, Artificial Sequence
  Synthetic
cuaucagcacagugaaauuuuaug

SEQ ID NO: 339894 - RNA, 18 nt, Artificial Sequence
  Synthetic
gaaaauaucaauuuuaug

SEQ ID NO: 339895 - RNA, 19 nt, Artificial Sequence
  Synthetic
ugaaaauaucaauuuuaug

SEQ ID NO: 339896 - RNA, 20 nt, Artificial Sequence
  Synthetic
uugaaaauaucaauuuuaug

SEQ ID NO: 339897 - RNA, 21 nt, Artificial Sequence
  Synthetic
cuugaaaauaucaauuuuaug

SEQ ID NO: 339898 - RNA, 22 nt, Artificial Sequence
  Synthetic
ucuugaaaauaucaauuuuaug

SEQ ID NO: 339899 - RNA, 23 nt, Artificial Sequence
  Synthetic
aucuugaaaauaucaauuuuaug

SEQ ID NO: 339900 - RNA, 24 nt, Artificial Sequence
  Synthetic
uaucuugaaaauaucaauuuuaug

SEQ ID NO: 339901 - RNA, 18 nt, Artificial Sequence
  Synthetic
gaaaaagcuacuuuuaug

SEQ ID NO: 339902 - RNA, 19 nt, Artificial Sequence
  Synthetic
ggaaaaagcuacuuuuaug

SEQ ID NO: 339903 - RNA, 20 nt, Artificial Sequence
  Synthetic
aggaaaaagcuacuuuuaug

SEQ ID NO: 339904 - RNA, 21 nt, Artificial Sequence
  Synthetic
gaggaaaaagcuacuuuuaug

SEQ ID NO: 339905 - RNA, 22 nt, Artificial Sequence
  Synthetic
cgaggaaaaagcuacuuuuaug

SEQ ID NO: 339906 - RNA, 23 nt, Artificial Sequence
  Synthetic
ucgaggaaaaagcuacuuuuaug

SEQ ID NO: 339907 - RNA, 24 nt, Artificial Sequence
  Synthetic
gucgaggaaaaagcuacuuuuaug

SEQ ID NO: 339908 - RNA, 18 nt, Artificial Sequence
  Synthetic
gucuaaaauauuuuuaug

SEQ ID NO: 339909 - RNA, 19 nt, Artificial Sequence
  Synthetic
agucuaaaauauuuuuaug

SEQ ID NO: 339910 - RNA, 20 nt, Artificial Sequence
  Synthetic
cagucuaaaauauuuuuaug

SEQ ID NO: 339911 - RNA, 21 nt, Artificial Sequence
  Synthetic
ucagucuaaaauauuuuuaug

SEQ ID NO: 339912 - RNA, 22 nt, Artificial Sequence
  Synthetic
gucagucuaaaauauuuuuaug

SEQ ID NO: 339913 - RNA, 23 nt, Artificial Sequence
  Synthetic
ugucagucuaaaauauuuuuaug

SEQ ID NO: 339914 - RNA, 24 nt, Artificial Sequence
  Synthetic
uugucagucuaaaauauuuuuaug

SEQ ID NO: 339915 - RNA, 18 nt, Artificial Sequence
  Synthetic
ccucugaauauuuuuaug

SEQ ID NO: 339916 - RNA, 19 nt, Artificial Sequence
  Synthetic
gccucugaauauuuuuaug

SEQ ID NO: 339917 - RNA, 20 nt, Artificial Sequence
  Synthetic
ugccucugaauauuuuuaug

SEQ ID NO: 339918 - RNA, 21 nt, Artificial Sequence
  Synthetic
cugccucugaauauuuuuaug

SEQ ID NO: 339919 - RNA, 22 nt, Artificial Sequence
  Synthetic
ucugccucugaauauuuuuaug

SEQ ID NO: 339920 - RNA, 23 nt, Artificial Sequence
  Synthetic
uucugccucugaauauuuuuaug

SEQ ID NO: 339921 - RNA, 24 nt, Artificial Sequence
  Synthetic
uuucugccucugaauauuuuuaug

SEQ ID NO: 339922 - RNA, 18 nt, Artificial Sequence
  Synthetic
cuuuggaaauuuuuuaug

SEQ ID NO: 339923 - RNA, 19 nt, Artificial Sequence
  Synthetic
gcuuuggaaauuuuuuaug

SEQ ID NO: 339924 - RNA, 20 nt, Artificial Sequence
  Synthetic
ggcuuuggaaauuuuuuaug

SEQ ID NO: 339925 - RNA, 21 nt, Artificial Sequence
  Synthetic
gggcuuuggaaauuuuuuaug

SEQ ID NO: 339926 - RNA, 22 nt, Artificial Sequence
  Synthetic
ugggcuuuggaaauuuuuuaug

SEQ ID NO: 339927 - RNA, 23 nt, Artificial Sequence
  Synthetic
augggcuuuggaaauuuuuuaug

SEQ ID NO: 339928 - RNA, 24 nt, Artificial Sequence
  Synthetic
uaugggcuuuggaaauuuuuuaug

SEQ ID NO: 339929 - RNA, 18 nt, Artificial Sequence
  Synthetic
ucaagaacuuuuuuuaug

SEQ ID NO: 339930 - RNA, 19 nt, Artificial Sequence
  Synthetic
uucaagaacuuuuuuuaug

SEQ ID NO: 339931 - RNA, 20 nt, Artificial Sequence
  Synthetic
uuucaagaacuuuuuuuaug

SEQ ID NO: 339932 - RNA, 21 nt, Artificial Sequence
  Synthetic
cuuucaagaacuuuuuuuaug

SEQ ID NO: 339933 - RNA, 22 nt, Artificial Sequence
  Synthetic
ucuuucaagaacuuuuuuuaug

SEQ ID NO: 339934 - RNA, 23 nt, Artificial Sequence
  Synthetic
uucuuucaagaacuuuuuuuaug

SEQ ID NO: 339935 - RNA, 24 nt, Artificial Sequence
  Synthetic
guucuuucaagaacuuuuuuuaug

SEQ ID NO: 339936 - RNA, 18 nt, Artificial Sequence
  Synthetic
aaaaaaaaaaaaaaacug

SEQ ID NO: 339937 - RNA, 19 nt, Artificial Sequence
  Synthetic
aaaaaaaaaaaaaaaacug

SEQ ID NO: 339938 - RNA, 20 nt, Artificial Sequence
  Synthetic
aaaaaaaaaaaaaaaaacug

SEQ ID NO: 339939 - RNA, 21 nt, Artificial Sequence
  Synthetic
uaaaaaaaaaaaaaaaaacug

SEQ ID NO: 339940 - RNA, 22 nt, Artificial Sequence
  Synthetic
uuaaaaaaaaaaaaaaaaacug

SEQ ID NO: 339941 - RNA, 23 nt, Artificial Sequence
  Synthetic
uuuaaaaaaaaaaaaaaaaacug

SEQ ID NO: 339942 - RNA, 24 nt, Artificial Sequence
  Synthetic
guuuaaaaaaaaaaaaaaaaacug

SEQ ID NO: 339943 - RNA, 18 nt, Artificial Sequence
  Synthetic
acucaaaacaaaaaacug

SEQ ID NO: 339944 - RNA, 19 nt, Artificial Sequence
  Synthetic
gacucaaaacaaaaaacug

SEQ ID NO: 339945 - RNA, 20 nt, Artificial Sequence
  Synthetic
ugacucaaaacaaaaaacug

SEQ ID NO: 339946 - RNA, 21 nt, Artificial Sequence
  Synthetic
augacucaaaacaaaaaacug

SEQ ID NO: 339947 - RNA, 22 nt, Artificial Sequence
  Synthetic
gaugacucaaaacaaaaaacug

SEQ ID NO: 339948 - RNA, 23 nt, Artificial Sequence
  Synthetic
agaugacucaaaacaaaaaacug

SEQ ID NO: 339949 - RNA, 24 nt, Artificial Sequence
  Synthetic
uagaugacucaaaacaaaaaacug

SEQ ID NO: 339950 - RNA, 18 nt, Artificial Sequence
  Synthetic
ggaaagaaacaaaaacug

SEQ ID NO: 339951 - RNA, 19 nt, Artificial Sequence
  Synthetic
aggaaagaaacaaaaacug

SEQ ID NO: 339952 - RNA, 20 nt, Artificial Sequence
  Synthetic
caggaaagaaacaaaaacug

SEQ ID NO: 339953 - RNA, 21 nt, Artificial Sequence
  Synthetic
acaggaaagaaacaaaaacug

SEQ ID NO: 339954 - RNA, 22 nt, Artificial Sequence
  Synthetic
uacaggaaagaaacaaaaacug

SEQ ID NO: 339955 - RNA, 23 nt, Artificial Sequence
  Synthetic
guacaggaaagaaacaaaaacug

SEQ ID NO: 339956 - RNA, 24 nt, Artificial Sequence
  Synthetic
uguacaggaaagaaacaaaaacug

SEQ ID NO: 339957 - RNA, 18 nt, Artificial Sequence
  Synthetic
acaugaguggaaaaacug

SEQ ID NO: 339958 - RNA, 19 nt, Artificial Sequence
  Synthetic
gacaugaguggaaaaacug

SEQ ID NO: 339959 - RNA, 20 nt, Artificial Sequence
  Synthetic
ugacaugaguggaaaaacug

SEQ ID NO: 339960 - RNA, 21 nt, Artificial Sequence
  Synthetic
augacaugaguggaaaaacug

SEQ ID NO: 339961 - RNA, 22 nt, Artificial Sequence
  Synthetic
aaugacaugaguggaaaaacug

SEQ ID NO: 339962 - RNA, 23 nt, Artificial Sequence
  Synthetic
aaaugacaugaguggaaaaacug

SEQ ID NO: 339963 - RNA, 24 nt, Artificial Sequence
  Synthetic
aaaaugacaugaguggaaaaacug

SEQ ID NO: 339964 - RNA, 18 nt, Artificial Sequence
  Synthetic
gcuuuaucaucaaaacug

SEQ ID NO: 339965 - RNA, 19 nt, Artificial Sequence
  Synthetic
agcuuuaucaucaaaacug

SEQ ID NO: 339966 - RNA, 20 nt, Artificial Sequence
  Synthetic
uagcuuuaucaucaaaacug

SEQ ID NO: 339967 - RNA, 21 nt, Artificial Sequence
  Synthetic
cuagcuuuaucaucaaaacug

SEQ ID NO: 339968 - RNA, 22 nt, Artificial Sequence
  Synthetic
acuagcuuuaucaucaaaacug

SEQ ID NO: 339969 - RNA, 23 nt, Artificial Sequence
  Synthetic
aacuagcuuuaucaucaaaacug

SEQ ID NO: 339970 - RNA, 24 nt, Artificial Sequence
  Synthetic
aaacuagcuuuaucaucaaaacug

SEQ ID NO: 339971 - RNA, 18 nt, Artificial Sequence
  Synthetic
aaaggagcuugaaaacug

SEQ ID NO: 339972 - RNA, 19 nt, Artificial Sequence
  Synthetic
caaaggagcuugaaaacug

SEQ ID NO: 339973 - RNA, 20 nt, Artificial Sequence
  Synthetic
ucaaaggagcuugaaaacug

SEQ ID NO: 339974 - RNA, 21 nt, Artificial Sequence
  Synthetic
gucaaaggagcuugaaaacug

SEQ ID NO: 339975 - RNA, 22 nt, Artificial Sequence
  Synthetic
ugucaaaggagcuugaaaacug

SEQ ID NO: 339976 - RNA, 23 nt, Artificial Sequence
  Synthetic
cugucaaaggagcuugaaaacug

SEQ ID NO: 339977 - RNA, 24 nt, Artificial Sequence
  Synthetic
ccugucaaaggagcuugaaaacug

SEQ ID NO: 339978 - RNA, 18 nt, Artificial Sequence
  Synthetic
uuuaggguugccaaacug

SEQ ID NO: 339979 - RNA, 19 nt, Artificial Sequence
  Synthetic
auuuaggguugccaaacug

SEQ ID NO: 339980 - RNA, 20 nt, Artificial Sequence
  Synthetic
uauuuaggguugccaaacug

SEQ ID NO: 339981 - RNA, 21 nt, Artificial Sequence
  Synthetic
guauuuaggguugccaaacug

SEQ ID NO: 339982 - RNA, 22 nt, Artificial Sequence
  Synthetic
gguauuuaggguugccaaacug

SEQ ID NO: 339983 - RNA, 23 nt, Artificial Sequence
  Synthetic
agguauuuaggguugccaaacug

SEQ ID NO: 339984 - RNA, 24 nt, Artificial Sequence
  Synthetic
uagguauuuaggguugccaaacug

SEQ ID NO: 339985 - RNA, 18 nt, Artificial Sequence
  Synthetic
uuccuuaagaucaaacug

SEQ ID NO: 339986 - RNA, 19 nt, Artificial Sequence
  Synthetic
cuuccuuaagaucaaacug

SEQ ID NO: 339987 - RNA, 20 nt, Artificial Sequence
  Synthetic
acuuccuuaagaucaaacug

SEQ ID NO: 339988 - RNA, 21 nt, Artificial Sequence
  Synthetic
gacuuccuuaagaucaaacug

SEQ ID NO: 339989 - RNA, 22 nt, Artificial Sequence
  Synthetic
ugacuuccuuaagaucaaacug

SEQ ID NO: 339990 - RNA, 23 nt, Artificial Sequence
  Synthetic
augacuuccuuaagaucaaacug

SEQ ID NO: 339991 - RNA, 24 nt, Artificial Sequence
  Synthetic
aaugacuuccuuaagaucaaacug

SEQ ID NO: 339992 - RNA, 18 nt, Artificial Sequence
  Synthetic
caauaucagaggaaacug

SEQ ID NO: 339993 - RNA, 19 nt, Artificial Sequence
  Synthetic
acaauaucagaggaaacug

SEQ ID NO: 339994 - RNA, 20 nt, Artificial Sequence
  Synthetic
cacaauaucagaggaaacug

SEQ ID NO: 339995 - RNA, 21 nt, Artificial Sequence
  Synthetic
ucacaauaucagaggaaacug

SEQ ID NO: 339996 - RNA, 22 nt, Artificial Sequence
  Synthetic
uucacaauaucagaggaaacug

SEQ ID NO: 339997 - RNA, 23 nt, Artificial Sequence
  Synthetic
auucacaauaucagaggaaacug

SEQ ID NO: 339998 - RNA, 24 nt, Artificial Sequence
  Synthetic
aauucacaauaucagaggaaacug

SEQ ID NO: 339999 - RNA, 18 nt, Artificial Sequence
  Synthetic
gugguuuaguugaaacug

SEQ ID NO: 340000 - RNA, 19 nt, Artificial Sequence
  Synthetic
ugugguuuaguugaaacug

SEQ ID NO: 340001 - RNA, 20 nt, Artificial Sequence
  Synthetic
gugugguuuaguugaaacug

SEQ ID NO: 340002 - RNA, 21 nt, Artificial Sequence
  Synthetic
agugugguuuaguugaaacug

SEQ ID NO: 340003 - RNA, 22 nt, Artificial Sequence
  Synthetic
cagugugguuuaguugaaacug

SEQ ID NO: 340004 - RNA, 23 nt, Artificial Sequence
  Synthetic
acagugugguuuaguugaaacug

SEQ ID NO: 340005 - RNA, 24 nt, Artificial Sequence
  Synthetic
gacagugugguuuaguugaaacug

SEQ ID NO: 340006 - RNA, 18 nt, Artificial Sequence
  Synthetic
cacuaguuuuauaaacug

SEQ ID NO: 340007 - RNA, 19 nt, Artificial Sequence
  Synthetic
ucacuaguuuuauaaacug

SEQ ID NO: 340008 - RNA, 20 nt, Artificial Sequence
  Synthetic
uucacuaguuuuauaaacug

SEQ ID NO: 340009 - RNA, 21 nt, Artificial Sequence
  Synthetic
uuucacuaguuuuauaaacug

SEQ ID NO: 340010 - RNA, 22 nt, Artificial Sequence
  Synthetic
auuucacuaguuuuauaaacug

SEQ ID NO: 340011 - RNA, 23 nt, Artificial Sequence
  Synthetic
cauuucacuaguuuuauaaacug

SEQ ID NO: 340012 - RNA, 24 nt, Artificial Sequence
  Synthetic
ccauuucacuaguuuuauaaacug

SEQ ID NO: 340013 - RNA, 18 nt, Artificial Sequence
  Synthetic
uaauagaccucuaaacug

SEQ ID NO: 340014 - RNA, 19 nt, Artificial Sequence
  Synthetic
uuaauagaccucuaaacug

SEQ ID NO: 340015 - RNA, 20 nt, Artificial Sequence
  Synthetic
uuuaauagaccucuaaacug

SEQ ID NO: 340016 - RNA, 21 nt, Artificial Sequence
  Synthetic
auuuaauagaccucuaaacug

SEQ ID NO: 340017 - RNA, 22 nt, Artificial Sequence
  Synthetic
cauuuaauagaccucuaaacug

SEQ ID NO: 340018 - RNA, 23 nt, Artificial Sequence
  Synthetic
ucauuuaauagaccucuaaacug

SEQ ID NO: 340019 - RNA, 24 nt, Artificial Sequence
  Synthetic
gucauuuaauagaccucuaaacug

SEQ ID NO: 340020 - RNA, 18 nt, Artificial Sequence
  Synthetic
agcacggacuguaaacug

SEQ ID NO: 340021 - RNA, 19 nt, Artificial Sequence
  Synthetic
aagcacggacuguaaacug

SEQ ID NO: 340022 - RNA, 20 nt, Artificial Sequence
  Synthetic
caagcacggacuguaaacug

SEQ ID NO: 340023 - RNA, 21 nt, Artificial Sequence
  Synthetic
ccaagcacggacuguaaacug

SEQ ID NO: 340024 - RNA, 22 nt, Artificial Sequence
  Synthetic
accaagcacggacuguaaacug

SEQ ID NO: 340025 - RNA, 23 nt, Artificial Sequence
  Synthetic
gaccaagcacggacuguaaacug

SEQ ID NO: 340026 - RNA, 24 nt, Artificial Sequence
  Synthetic
agaccaagcacggacuguaaacug

SEQ ID NO: 340027 - RNA, 18 nt, Artificial Sequence
  Synthetic
aauaccuucaaacaacug

SEQ ID NO: 340028 - RNA, 19 nt, Artificial Sequence
  Synthetic
aaauaccuucaaacaacug

SEQ ID NO: 340029 - RNA, 20 nt, Artificial Sequence
  Synthetic
uaaauaccuucaaacaacug

SEQ ID NO: 340030 - RNA, 21 nt, Artificial Sequence
  Synthetic
auaaauaccuucaaacaacug

SEQ ID NO: 340031 - RNA, 22 nt, Artificial Sequence
  Synthetic
uauaaauaccuucaaacaacug

SEQ ID NO: 340032 - RNA, 23 nt, Artificial Sequence
  Synthetic
cuauaaauaccuucaaacaacug

SEQ ID NO: 340033 - RNA, 24 nt, Artificial Sequence
  Synthetic
acuauaaauaccuucaaacaacug

SEQ ID NO: 340034 - RNA, 18 nt, Artificial Sequence
  Synthetic
guagucagagcacaacug

SEQ ID NO: 340035 - RNA, 19 nt, Artificial Sequence
  Synthetic
uguagucagagcacaacug

SEQ ID NO: 340036 - RNA, 20 nt, Artificial Sequence
  Synthetic
uuguagucagagcacaacug

SEQ ID NO: 340037 - RNA, 21 nt, Artificial Sequence
  Synthetic
cuuguagucagagcacaacug

SEQ ID NO: 340038 - RNA, 22 nt, Artificial Sequence
  Synthetic
gcuuguagucagagcacaacug

SEQ ID NO: 340039 - RNA, 23 nt, Artificial Sequence
  Synthetic
ugcuuguagucagagcacaacug

SEQ ID NO: 340040 - RNA, 24 nt, Artificial Sequence
  Synthetic
augcuuguagucagagcacaacug

SEQ ID NO: 340041 - RNA, 18 nt, Artificial Sequence
  Synthetic
ugaucucccagacaacug

SEQ ID NO: 340042 - RNA, 19 nt, Artificial Sequence
  Synthetic
uugaucucccagacaacug

SEQ ID NO: 340043 - RNA, 20 nt, Artificial Sequence
  Synthetic
guugaucucccagacaacug

SEQ ID NO: 340044 - RNA, 21 nt, Artificial Sequence
  Synthetic
uguugaucucccagacaacug

SEQ ID NO: 340045 - RNA, 22 nt, Artificial Sequence
  Synthetic
auguugaucucccagacaacug

SEQ ID NO: 340046 - RNA, 23 nt, Artificial Sequence
  Synthetic
aauguugaucucccagacaacug

SEQ ID NO: 340047 - RNA, 24 nt, Artificial Sequence
  Synthetic
uaauguugaucucccagacaacug

SEQ ID NO: 340048 - RNA, 18 nt, Artificial Sequence
  Synthetic
agcugugagguacaacug

SEQ ID NO: 340049 - RNA, 19 nt, Artificial Sequence
  Synthetic
uagcugugagguacaacug

SEQ ID NO: 340050 - RNA, 20 nt, Artificial Sequence
  Synthetic
uuagcugugagguacaacug

SEQ ID NO: 340051 - RNA, 21 nt, Artificial Sequence
  Synthetic
uuuagcugugagguacaacug

SEQ ID NO: 340052 - RNA, 22 nt, Artificial Sequence
  Synthetic
auuuagcugugagguacaacug

SEQ ID NO: 340053 - RNA, 23 nt, Artificial Sequence
  Synthetic
uauuuagcugugagguacaacug

SEQ ID NO: 340054 - RNA, 24 nt, Artificial Sequence
  Synthetic
cuauuuagcugugagguacaacug

SEQ ID NO: 340055 - RNA, 18 nt, Artificial Sequence
  Synthetic
acagaagagaggcaacug

SEQ ID NO: 340056 - RNA, 19 nt, Artificial Sequence
  Synthetic
aacagaagagaggcaacug

SEQ ID NO: 340057 - RNA, 20 nt, Artificial Sequence
  Synthetic
aaacagaagagaggcaacug

SEQ ID NO: 340058 - RNA, 21 nt, Artificial Sequence
  Synthetic
aaaacagaagagaggcaacug

SEQ ID NO: 340059 - RNA, 22 nt, Artificial Sequence
  Synthetic
uaaaacagaagagaggcaacug

SEQ ID NO: 340060 - RNA, 23 nt, Artificial Sequence
  Synthetic
auaaaacagaagagaggcaacug

SEQ ID NO: 340061 - RNA, 24 nt, Artificial Sequence
  Synthetic
aauaaaacagaagagaggcaacug

SEQ ID NO: 340062 - RNA, 18 nt, Artificial Sequence
  Synthetic
guuguaacaagucaacug

SEQ ID NO: 340063 - RNA, 19 nt, Artificial Sequence
  Synthetic
gguuguaacaagucaacug

SEQ ID NO: 340064 - RNA, 20 nt, Artificial Sequence
  Synthetic
cgguuguaacaagucaacug

SEQ ID NO: 340065 - RNA, 21 nt, Artificial Sequence
  Synthetic
acgguuguaacaagucaacug

SEQ ID NO: 340066 - RNA, 22 nt, Artificial Sequence
  Synthetic
gacgguuguaacaagucaacug

SEQ ID NO: 340067 - RNA, 23 nt, Artificial Sequence
  Synthetic
ugacgguuguaacaagucaacug

SEQ ID NO: 340068 - RNA, 24 nt, Artificial Sequence
  Synthetic
cugacgguuguaacaagucaacug

SEQ ID NO: 340069 - RNA, 18 nt, Artificial Sequence
  Synthetic
gauuuugaagaagaacug

SEQ ID NO: 340070 - RNA, 19 nt, Artificial Sequence
  Synthetic
ugauuuugaagaagaacug

SEQ ID NO: 340071 - RNA, 20 nt, Artificial Sequence
  Synthetic
gugauuuugaagaagaacug

SEQ ID NO: 340072 - RNA, 21 nt, Artificial Sequence
  Synthetic
ggugauuuugaagaagaacug

SEQ ID NO: 340073 - RNA, 22 nt, Artificial Sequence
  Synthetic
aggugauuuugaagaagaacug

SEQ ID NO: 340074 - RNA, 23 nt, Artificial Sequence
  Synthetic
aaggugauuuugaagaagaacug

SEQ ID NO: 340075 - RNA, 24 nt, Artificial Sequence
  Synthetic
gaaggugauuuugaagaagaacug

SEQ ID NO: 340076 - RNA, 18 nt, Artificial Sequence
  Synthetic
ggauguauguaagaacug

SEQ ID NO: 340077 - RNA, 19 nt, Artificial Sequence
  Synthetic
aggauguauguaagaacug

SEQ ID NO: 340078 - RNA, 20 nt, Artificial Sequence
  Synthetic
aaggauguauguaagaacug

SEQ ID NO: 340079 - RNA, 21 nt, Artificial Sequence
  Synthetic
gaaggauguauguaagaacug

SEQ ID NO: 340080 - RNA, 22 nt, Artificial Sequence
  Synthetic
agaaggauguauguaagaacug

SEQ ID NO: 340081 - RNA, 23 nt, Artificial Sequence
  Synthetic
uagaaggauguauguaagaacug

SEQ ID NO: 340082 - RNA, 24 nt, Artificial Sequence
  Synthetic
uuagaaggauguauguaagaacug

SEQ ID NO: 340083 - RNA, 18 nt, Artificial Sequence
  Synthetic
ucuguaaucccagaacug

SEQ ID NO: 340084 - RNA, 19 nt, Artificial Sequence
  Synthetic
uucuguaaucccagaacug

SEQ ID NO: 340085 - RNA, 20 nt, Artificial Sequence
  Synthetic
cuucuguaaucccagaacug

SEQ ID NO: 340086 - RNA, 21 nt, Artificial Sequence
  Synthetic
acuucuguaaucccagaacug

SEQ ID NO: 340087 - RNA, 22 nt, Artificial Sequence
  Synthetic
cacuucuguaaucccagaacug

SEQ ID NO: 340088 - RNA, 23 nt, Artificial Sequence
  Synthetic
ucacuucuguaaucccagaacug

SEQ ID NO: 340089 - RNA, 24 nt, Artificial Sequence
  Synthetic
gucacuucuguaaucccagaacug

SEQ ID NO: 340090 - RNA, 18 nt, Artificial Sequence
  Synthetic
acgaucagagcagaacug

SEQ ID NO: 340091 - RNA, 19 nt, Artificial Sequence
  Synthetic
uacgaucagagcagaacug

SEQ ID NO: 340092 - RNA, 20 nt, Artificial Sequence
  Synthetic
cuacgaucagagcagaacug

SEQ ID NO: 340093 - RNA, 21 nt, Artificial Sequence
  Synthetic
acuacgaucagagcagaacug

SEQ ID NO: 340094 - RNA, 22 nt, Artificial Sequence
  Synthetic
aacuacgaucagagcagaacug

SEQ ID NO: 340095 - RNA, 23 nt, Artificial Sequence
  Synthetic
uaacuacgaucagagcagaacug

SEQ ID NO: 340096 - RNA, 24 nt, Artificial Sequence
  Synthetic
auaacuacgaucagagcagaacug

SEQ ID NO: 340097 - RNA, 18 nt, Artificial Sequence
  Synthetic
ggguugagaguagaacug

SEQ ID NO: 340098 - RNA, 19 nt, Artificial Sequence
  Synthetic
uggguugagaguagaacug

SEQ ID NO: 340099 - RNA, 20 nt, Artificial Sequence
  Synthetic
cuggguugagaguagaacug

SEQ ID NO: 340100 - RNA, 21 nt, Artificial Sequence
  Synthetic
ucuggguugagaguagaacug

SEQ ID NO: 340101 - RNA, 22 nt, Artificial Sequence
  Synthetic
uucuggguugagaguagaacug

SEQ ID NO: 340102 - RNA, 23 nt, Artificial Sequence
  Synthetic
cuucuggguugagaguagaacug

SEQ ID NO: 340103 - RNA, 24 nt, Artificial Sequence
  Synthetic
gcuucuggguugagaguagaacug

SEQ ID NO: 340104 - RNA, 18 nt, Artificial Sequence
  Synthetic
ucaguuuucuuagaacug

SEQ ID NO: 340105 - RNA, 19 nt, Artificial Sequence
  Synthetic
aucaguuuucuuagaacug

SEQ ID NO: 340106 - RNA, 20 nt, Artificial Sequence
  Synthetic
caucaguuuucuuagaacug

SEQ ID NO: 340107 - RNA, 21 nt, Artificial Sequence
  Synthetic
acaucaguuuucuuagaacug

SEQ ID NO: 340108 - RNA, 22 nt, Artificial Sequence
  Synthetic
aacaucaguuuucuuagaacug

SEQ ID NO: 340109 - RNA, 23 nt, Artificial Sequence
  Synthetic
caacaucaguuuucuuagaacug

SEQ ID NO: 340110 - RNA, 24 nt, Artificial Sequence
  Synthetic
acaacaucaguuuucuuagaacug

SEQ ID NO: 340111 - RNA, 18 nt, Artificial Sequence
  Synthetic
ccuugaacccaggaacug

SEQ ID NO: 340112 - RNA, 19 nt, Artificial Sequence
  Synthetic
uccuugaacccaggaacug

SEQ ID NO: 340113 - RNA, 20 nt, Artificial Sequence
  Synthetic
uuccuugaacccaggaacug

SEQ ID NO: 340114 - RNA, 21 nt, Artificial Sequence
  Synthetic
auuccuugaacccaggaacug

SEQ ID NO: 340115 - RNA, 22 nt, Artificial Sequence
  Synthetic
gauuccuugaacccaggaacug

SEQ ID NO: 340116 - RNA, 23 nt, Artificial Sequence
  Synthetic
ggauuccuugaacccaggaacug

SEQ ID NO: 340117 - RNA, 24 nt, Artificial Sequence
  Synthetic
aggauuccuugaacccaggaacug

SEQ ID NO: 340118 - RNA, 18 nt, Artificial Sequence
  Synthetic
ucacguuacauggaacug

SEQ ID NO: 340119 - RNA, 19 nt, Artificial Sequence
  Synthetic
aucacguuacauggaacug

SEQ ID NO: 340120 - RNA, 20 nt, Artificial Sequence
  Synthetic
caucacguuacauggaacug

SEQ ID NO: 340121 - RNA, 21 nt, Artificial Sequence
  Synthetic
ccaucacguuacauggaacug

SEQ ID NO: 340122 - RNA, 22 nt, Artificial Sequence
  Synthetic
accaucacguuacauggaacug

SEQ ID NO: 340123 - RNA, 23 nt, Artificial Sequence
  Synthetic
aaccaucacguuacauggaacug

SEQ ID NO: 340124 - RNA, 24 nt, Artificial Sequence
  Synthetic
gaaccaucacguuacauggaacug

SEQ ID NO: 340125 - RNA, 18 nt, Artificial Sequence
  Synthetic
gacaaaugagcugaacug

SEQ ID NO: 340126 - RNA, 19 nt, Artificial Sequence
  Synthetic
agacaaaugagcugaacug

SEQ ID NO: 340127 - RNA, 20 nt, Artificial Sequence
  Synthetic
cagacaaaugagcugaacug

SEQ ID NO: 340128 - RNA, 21 nt, Artificial Sequence
  Synthetic
ucagacaaaugagcugaacug

SEQ ID NO: 340129 - RNA, 22 nt, Artificial Sequence
  Synthetic
uucagacaaaugagcugaacug

SEQ ID NO: 340130 - RNA, 23 nt, Artificial Sequence
  Synthetic
auucagacaaaugagcugaacug

SEQ ID NO: 340131 - RNA, 24 nt, Artificial Sequence
  Synthetic
aauucagacaaaugagcugaacug

SEQ ID NO: 340132 - RNA, 18 nt, Artificial Sequence
  Synthetic
ugaagaguggcugaacug

SEQ ID NO: 340133 - RNA, 19 nt, Artificial Sequence
  Synthetic
uugaagaguggcugaacug

SEQ ID NO: 340134 - RNA, 20 nt, Artificial Sequence
  Synthetic
auugaagaguggcugaacug

SEQ ID NO: 340135 - RNA, 21 nt, Artificial Sequence
  Synthetic
cauugaagaguggcugaacug

SEQ ID NO: 340136 - RNA, 22 nt, Artificial Sequence
  Synthetic
ucauugaagaguggcugaacug

SEQ ID NO: 340137 - RNA, 23 nt, Artificial Sequence
  Synthetic
uucauugaagaguggcugaacug

SEQ ID NO: 340138 - RNA, 24 nt, Artificial Sequence
  Synthetic
uuucauugaagaguggcugaacug

SEQ ID NO: 340139 - RNA, 18 nt, Artificial Sequence
  Synthetic
gcuuuggggucugaacug

SEQ ID NO: 340140 - RNA, 19 nt, Artificial Sequence
  Synthetic
ugcuuuggggucugaacug

SEQ ID NO: 340141 - RNA, 20 nt, Artificial Sequence
  Synthetic
gugcuuuggggucugaacug

SEQ ID NO: 340142 - RNA, 21 nt, Artificial Sequence
  Synthetic
ugugcuuuggggucugaacug

SEQ ID NO: 340143 - RNA, 22 nt, Artificial Sequence
  Synthetic
uugugcuuuggggucugaacug

SEQ ID NO: 340144 - RNA, 23 nt, Artificial Sequence
  Synthetic
guugugcuuuggggucugaacug

SEQ ID NO: 340145 - RNA, 24 nt, Artificial Sequence
  Synthetic
gguugugcuuuggggucugaacug

SEQ ID NO: 340146 - RNA, 18 nt, Artificial Sequence
  Synthetic
cacacuacuuaauaacug

SEQ ID NO: 340147 - RNA, 19 nt, Artificial Sequence
  Synthetic
ucacacuacuuaauaacug

SEQ ID NO: 340148 - RNA, 20 nt, Artificial Sequence
  Synthetic
uucacacuacuuaauaacug

SEQ ID NO: 340149 - RNA, 21 nt, Artificial Sequence
  Synthetic
cuucacacuacuuaauaacug

SEQ ID NO: 340150 - RNA, 22 nt, Artificial Sequence
  Synthetic
ucuucacacuacuuaauaacug

SEQ ID NO: 340151 - RNA, 23 nt, Artificial Sequence
  Synthetic
gucuucacacuacuuaauaacug

SEQ ID NO: 340152 - RNA, 24 nt, Artificial Sequence
  Synthetic
ugucuucacacuacuuaauaacug

SEQ ID NO: 340153 - RNA, 18 nt, Artificial Sequence
  Synthetic
aauacugaucacuaacug

SEQ ID NO: 340154 - RNA, 19 nt, Artificial Sequence
  Synthetic
caauacugaucacuaacug

SEQ ID NO: 340155 - RNA, 20 nt, Artificial Sequence
  Synthetic
acaauacugaucacuaacug

SEQ ID NO: 340156 - RNA, 21 nt, Artificial Sequence
  Synthetic
uacaauacugaucacuaacug

SEQ ID NO: 340157 - RNA, 22 nt, Artificial Sequence
  Synthetic
auacaauacugaucacuaacug

SEQ ID NO: 340158 - RNA, 23 nt, Artificial Sequence
  Synthetic
gauacaauacugaucacuaacug

SEQ ID NO: 340159 - RNA, 24 nt, Artificial Sequence
  Synthetic
agauacaauacugaucacuaacug

SEQ ID NO: 340160 - RNA, 18 nt, Artificial Sequence
  Synthetic
gucuguagcagcuaacug

SEQ ID NO: 340161 - RNA, 19 nt, Artificial Sequence
  Synthetic
ugucuguagcagcuaacug

SEQ ID NO: 340162 - RNA, 20 nt, Artificial Sequence
  Synthetic
augucuguagcagcuaacug

SEQ ID NO: 340163 - RNA, 21 nt, Artificial Sequence
  Synthetic
aaugucuguagcagcuaacug

SEQ ID NO: 340164 - RNA, 22 nt, Artificial Sequence
  Synthetic
uaaugucuguagcagcuaacug

SEQ ID NO: 340165 - RNA, 23 nt, Artificial Sequence
  Synthetic
auaaugucuguagcagcuaacug

SEQ ID NO: 340166 - RNA, 24 nt, Artificial Sequence
  Synthetic
cauaaugucuguagcagcuaacug

SEQ ID NO: 340167 - RNA, 18 nt, Artificial Sequence
  Synthetic
cgaucagaguaguaacug

SEQ ID NO: 340168 - RNA, 19 nt, Artificial Sequence
  Synthetic
ccgaucagaguaguaacug

SEQ ID NO: 340169 - RNA, 20 nt, Artificial Sequence
  Synthetic
accgaucagaguaguaacug

SEQ ID NO: 340170 - RNA, 21 nt, Artificial Sequence
  Synthetic
gaccgaucagaguaguaacug

SEQ ID NO: 340171 - RNA, 22 nt, Artificial Sequence
  Synthetic
ugaccgaucagaguaguaacug

SEQ ID NO: 340172 - RNA, 23 nt, Artificial Sequence
  Synthetic
cugaccgaucagaguaguaacug

SEQ ID NO: 340173 - RNA, 24 nt, Artificial Sequence
  Synthetic
gcugaccgaucagaguaguaacug

SEQ ID NO: 340174 - RNA, 18 nt, Artificial Sequence
  Synthetic
aaaagaacaaauuaacug

SEQ ID NO: 340175 - RNA, 19 nt, Artificial Sequence
  Synthetic
aaaaagaacaaauuaacug

SEQ ID NO: 340176 - RNA, 20 nt, Artificial Sequence
  Synthetic
uaaaaagaacaaauuaacug

SEQ ID NO: 340177 - RNA, 21 nt, Artificial Sequence
  Synthetic
guaaaaagaacaaauuaacug

SEQ ID NO: 340178 - RNA, 22 nt, Artificial Sequence
  Synthetic
aguaaaaagaacaaauuaacug

SEQ ID NO: 340179 - RNA, 23 nt, Artificial Sequence
  Synthetic
uaguaaaaagaacaaauuaacug

SEQ ID NO: 340180 - RNA, 24 nt, Artificial Sequence
  Synthetic
uuaguaaaaagaacaaauuaacug

SEQ ID NO: 340181 - RNA, 18 nt, Artificial Sequence
  Synthetic
gccagaauaaauuaacug

SEQ ID NO: 340182 - RNA, 19 nt, Artificial Sequence
  Synthetic
cgccagaauaaauuaacug

SEQ ID NO: 340183 - RNA, 20 nt, Artificial Sequence
  Synthetic
ucgccagaauaaauuaacug

SEQ ID NO: 340184 - RNA, 21 nt, Artificial Sequence
  Synthetic
cucgccagaauaaauuaacug

SEQ ID NO: 340185 - RNA, 22 nt, Artificial Sequence
  Synthetic
ucucgccagaauaaauuaacug

SEQ ID NO: 340186 - RNA, 23 nt, Artificial Sequence
  Synthetic
uucucgccagaauaaauuaacug

SEQ ID NO: 340187 - RNA, 24 nt, Artificial Sequence
  Synthetic
cuucucgccagaauaaauuaacug

SEQ ID NO: 340188 - RNA, 18 nt, Artificial Sequence
  Synthetic
uuauuagaucauuaacug

SEQ ID NO: 340189 - RNA, 19 nt, Artificial Sequence
  Synthetic
uuuauuagaucauuaacug

SEQ ID NO: 340190 - RNA, 20 nt, Artificial Sequence
  Synthetic
uuuuauuagaucauuaacug

SEQ ID NO: 340191 - RNA, 21 nt, Artificial Sequence
  Synthetic
auuuuauuagaucauuaacug

SEQ ID NO: 340192 - RNA, 22 nt, Artificial Sequence
  Synthetic
cauuuuauuagaucauuaacug

SEQ ID NO: 340193 - RNA, 23 nt, Artificial Sequence
  Synthetic
acauuuuauuagaucauuaacug

SEQ ID NO: 340194 - RNA, 24 nt, Artificial Sequence
  Synthetic
aacauuuuauuagaucauuaacug

SEQ ID NO: 340195 - RNA, 18 nt, Artificial Sequence
  Synthetic
gcuaacuacaaaacacug

SEQ ID NO: 340196 - RNA, 19 nt, Artificial Sequence
  Synthetic
ggcuaacuacaaaacacug

SEQ ID NO: 340197 - RNA, 20 nt, Artificial Sequence
  Synthetic
gggcuaacuacaaaacacug

SEQ ID NO: 340198 - RNA, 21 nt, Artificial Sequence
  Synthetic
agggcuaacuacaaaacacug

SEQ ID NO: 340199 - RNA, 22 nt, Artificial Sequence
  Synthetic
cagggcuaacuacaaaacacug

SEQ ID NO: 340200 - RNA, 23 nt, Artificial Sequence
  Synthetic
acagggcuaacuacaaaacacug

SEQ ID NO: 340201 - RNA, 24 nt, Artificial Sequence
  Synthetic
uacagggcuaacuacaaaacacug

SEQ ID NO: 340202 - RNA, 18 nt, Artificial Sequence
  Synthetic
uccagagugaaaacacug

SEQ ID NO: 340203 - RNA, 19 nt, Artificial Sequence
  Synthetic
guccagagugaaaacacug

SEQ ID NO: 340204 - RNA, 20 nt, Artificial Sequence
  Synthetic
uguccagagugaaaacacug

SEQ ID NO: 340205 - RNA, 21 nt, Artificial Sequence
  Synthetic
auguccagagugaaaacacug

SEQ ID NO: 340206 - RNA, 22 nt, Artificial Sequence
  Synthetic
cauguccagagugaaaacacug

SEQ ID NO: 340207 - RNA, 23 nt, Artificial Sequence
  Synthetic
ucauguccagagugaaaacacug

SEQ ID NO: 340208 - RNA, 24 nt, Artificial Sequence
  Synthetic
gucauguccagagugaaaacacug

SEQ ID NO: 340209 - RNA, 18 nt, Artificial Sequence
  Synthetic
cuaguaaucccaacacug

SEQ ID NO: 340210 - RNA, 19 nt, Artificial Sequence
  Synthetic
acuaguaaucccaacacug

SEQ ID NO: 340211 - RNA, 20 nt, Artificial Sequence
  Synthetic
cacuaguaaucccaacacug

SEQ ID NO: 340212 - RNA, 21 nt, Artificial Sequence
  Synthetic
acacuaguaaucccaacacug

SEQ ID NO: 340213 - RNA, 22 nt, Artificial Sequence
  Synthetic
cacacuaguaaucccaacacug

SEQ ID NO: 340214 - RNA, 23 nt, Artificial Sequence
  Synthetic
ucacacuaguaaucccaacacug

SEQ ID NO: 340215 - RNA, 24 nt, Artificial Sequence
  Synthetic
cucacacuaguaaucccaacacug

SEQ ID NO: 340216 - RNA, 18 nt, Artificial Sequence
  Synthetic
ugcuuacaugcaacacug

SEQ ID NO: 340217 - RNA, 19 nt, Artificial Sequence
  Synthetic
augcuuacaugcaacacug

SEQ ID NO: 340218 - RNA, 20 nt, Artificial Sequence
  Synthetic
caugcuuacaugcaacacug

SEQ ID NO: 340219 - RNA, 21 nt, Artificial Sequence
  Synthetic
ccaugcuuacaugcaacacug

SEQ ID NO: 340220 - RNA, 22 nt, Artificial Sequence
  Synthetic
cccaugcuuacaugcaacacug

SEQ ID NO: 340221 - RNA, 23 nt, Artificial Sequence
  Synthetic
ccccaugcuuacaugcaacacug

SEQ ID NO: 340222 - RNA, 24 nt, Artificial Sequence
  Synthetic
uccccaugcuuacaugcaacacug

SEQ ID NO: 340223 - RNA, 18 nt, Artificial Sequence
  Synthetic
aucaacagccacacacug

SEQ ID NO: 340224 - RNA, 19 nt, Artificial Sequence
  Synthetic
uaucaacagccacacacug

SEQ ID NO: 340225 - RNA, 20 nt, Artificial Sequence
  Synthetic
auaucaacagccacacacug

SEQ ID NO: 340226 - RNA, 21 nt, Artificial Sequence
  Synthetic
aauaucaacagccacacacug

SEQ ID NO: 340227 - RNA, 22 nt, Artificial Sequence
  Synthetic
gaauaucaacagccacacacug

SEQ ID NO: 340228 - RNA, 23 nt, Artificial Sequence
  Synthetic
agaauaucaacagccacacacug

SEQ ID NO: 340229 - RNA, 24 nt, Artificial Sequence
  Synthetic
aagaauaucaacagccacacacug

SEQ ID NO: 340230 - RNA, 18 nt, Artificial Sequence
  Synthetic
guaaaaugggacacacug

SEQ ID NO: 340231 - RNA, 19 nt, Artificial Sequence
  Synthetic
aguaaaaugggacacacug

SEQ ID NO: 340232 - RNA, 20 nt, Artificial Sequence
  Synthetic
caguaaaaugggacacacug

SEQ ID NO: 340233 - RNA, 21 nt, Artificial Sequence
  Synthetic
ucaguaaaaugggacacacug

SEQ ID NO: 340234 - RNA, 22 nt, Artificial Sequence
  Synthetic
aucaguaaaaugggacacacug

SEQ ID NO: 340235 - RNA, 23 nt, Artificial Sequence
  Synthetic
aaucaguaaaaugggacacacug

SEQ ID NO: 340236 - RNA, 24 nt, Artificial Sequence
  Synthetic
gaaucaguaaaaugggacacacug

SEQ ID NO: 340237 - RNA, 18 nt, Artificial Sequence
  Synthetic
uucuuaacagccacacug

SEQ ID NO: 340238 - RNA, 19 nt, Artificial Sequence
  Synthetic
cuucuuaacagccacacug

SEQ ID NO: 340239 - RNA, 20 nt, Artificial Sequence
  Synthetic
gcuucuuaacagccacacug

SEQ ID NO: 340240 - RNA, 21 nt, Artificial Sequence
  Synthetic
ggcuucuuaacagccacacug

SEQ ID NO: 340241 - RNA, 22 nt, Artificial Sequence
  Synthetic
cggcuucuuaacagccacacug

SEQ ID NO: 340242 - RNA, 23 nt, Artificial Sequence
  Synthetic
acggcuucuuaacagccacacug

SEQ ID NO: 340243 - RNA, 24 nt, Artificial Sequence
  Synthetic
gacggcuucuuaacagccacacug

SEQ ID NO: 340244 - RNA, 18 nt, Artificial Sequence
  Synthetic
cucuaaacauccacacug

SEQ ID NO: 340245 - RNA, 19 nt, Artificial Sequence
  Synthetic
ucucuaaacauccacacug

SEQ ID NO: 340246 - RNA, 20 nt, Artificial Sequence
  Synthetic
gucucuaaacauccacacug

SEQ ID NO: 340247 - RNA, 21 nt, Artificial Sequence
  Synthetic
cgucucuaaacauccacacug

SEQ ID NO: 340248 - RNA, 22 nt, Artificial Sequence
  Synthetic
ucgucucuaaacauccacacug

SEQ ID NO: 340249 - RNA, 23 nt, Artificial Sequence
  Synthetic
aucgucucuaaacauccacacug

SEQ ID NO: 340250 - RNA, 24 nt, Artificial Sequence
  Synthetic
uaucgucucuaaacauccacacug

SEQ ID NO: 340251 - RNA, 18 nt, Artificial Sequence
  Synthetic
cagaaggggcucacacug

SEQ ID NO: 340252 - RNA, 19 nt, Artificial Sequence
  Synthetic
ucagaaggggcucacacug

SEQ ID NO: 340253 - RNA, 20 nt, Artificial Sequence
  Synthetic
uucagaaggggcucacacug

SEQ ID NO: 340254 - RNA, 21 nt, Artificial Sequence
  Synthetic
auucagaaggggcucacacug

SEQ ID NO: 340255 - RNA, 22 nt, Artificial Sequence
  Synthetic
cauucagaaggggcucacacug

SEQ ID NO: 340256 - RNA, 23 nt, Artificial Sequence
  Synthetic
gcauucagaaggggcucacacug

SEQ ID NO: 340257 - RNA, 24 nt, Artificial Sequence
  Synthetic
ugcauucagaaggggcucacacug

SEQ ID NO: 340258 - RNA, 18 nt, Artificial Sequence
  Synthetic
augagaugugucacacug

SEQ ID NO: 340259 - RNA, 19 nt, Artificial Sequence
  Synthetic
aaugagaugugucacacug

SEQ ID NO: 340260 - RNA, 20 nt, Artificial Sequence
  Synthetic
uaaugagaugugucacacug

SEQ ID NO: 340261 - RNA, 21 nt, Artificial Sequence
  Synthetic
auaaugagaugugucacacug

SEQ ID NO: 340262 - RNA, 22 nt, Artificial Sequence
  Synthetic
uauaaugagaugugucacacug

SEQ ID NO: 340263 - RNA, 23 nt, Artificial Sequence
  Synthetic
auauaaugagaugugucacacug

SEQ ID NO: 340264 - RNA, 24 nt, Artificial Sequence
  Synthetic
aauauaaugagaugugucacacug

SEQ ID NO: 340265 - RNA, 18 nt, Artificial Sequence
  Synthetic
cagagaaaauagacacug

SEQ ID NO: 340266 - RNA, 19 nt, Artificial Sequence
  Synthetic
acagagaaaauagacacug

SEQ ID NO: 340267 - RNA, 20 nt, Artificial Sequence
  Synthetic
gacagagaaaauagacacug

SEQ ID NO: 340268 - RNA, 21 nt, Artificial Sequence
  Synthetic
ugacagagaaaauagacacug

SEQ ID NO: 340269 - RNA, 22 nt, Artificial Sequence
  Synthetic
augacagagaaaauagacacug

SEQ ID NO: 340270 - RNA, 23 nt, Artificial Sequence
  Synthetic
gaugacagagaaaauagacacug

SEQ ID NO: 340271 - RNA, 24 nt, Artificial Sequence
  Synthetic
agaugacagagaaaauagacacug

SEQ ID NO: 340272 - RNA, 18 nt, Artificial Sequence
  Synthetic
cuucuccgguauacacug

SEQ ID NO: 340273 - RNA, 19 nt, Artificial Sequence
  Synthetic
acuucuccgguauacacug

SEQ ID NO: 340274 - RNA, 20 nt, Artificial Sequence
  Synthetic
aacuucuccgguauacacug

SEQ ID NO: 340275 - RNA, 21 nt, Artificial Sequence
  Synthetic
aaacuucuccgguauacacug

SEQ ID NO: 340276 - RNA, 22 nt, Artificial Sequence
  Synthetic
gaaacuucuccgguauacacug

SEQ ID NO: 340277 - RNA, 23 nt, Artificial Sequence
  Synthetic
agaaacuucuccgguauacacug

SEQ ID NO: 340278 - RNA, 24 nt, Artificial Sequence
  Synthetic
gagaaacuucuccgguauacacug

SEQ ID NO: 340279 - RNA, 18 nt, Artificial Sequence
  Synthetic
gggaaauaguguacacug

SEQ ID NO: 340280 - RNA, 19 nt, Artificial Sequence
  Synthetic
agggaaauaguguacacug

SEQ ID NO: 340281 - RNA, 20 nt, Artificial Sequence
  Synthetic
uagggaaauaguguacacug

SEQ ID NO: 340282 - RNA, 21 nt, Artificial Sequence
  Synthetic
uuagggaaauaguguacacug

SEQ ID NO: 340283 - RNA, 22 nt, Artificial Sequence
  Synthetic
auuagggaaauaguguacacug

SEQ ID NO: 340284 - RNA, 23 nt, Artificial Sequence
  Synthetic
aauuagggaaauaguguacacug

SEQ ID NO: 340285 - RNA, 24 nt, Artificial Sequence
  Synthetic
gaauuagggaaauaguguacacug

SEQ ID NO: 340286 - RNA, 18 nt, Artificial Sequence
  Synthetic
gagguaacuuuuacacug

SEQ ID NO: 340287 - RNA, 19 nt, Artificial Sequence
  Synthetic
ugagguaacuuuuacacug

SEQ ID NO: 340288 - RNA, 20 nt, Artificial Sequence
  Synthetic
gugagguaacuuuuacacug

SEQ ID NO: 340289 - RNA, 21 nt, Artificial Sequence
  Synthetic
agugagguaacuuuuacacug

SEQ ID NO: 340290 - RNA, 22 nt, Artificial Sequence
  Synthetic
cagugagguaacuuuuacacug

SEQ ID NO: 340291 - RNA, 23 nt, Artificial Sequence
  Synthetic
ucagugagguaacuuuuacacug

SEQ ID NO: 340292 - RNA, 24 nt, Artificial Sequence
  Synthetic
aucagugagguaacuuuuacacug

SEQ ID NO: 340293 - RNA, 18 nt, Artificial Sequence
  Synthetic
gaaacuccaaacccacug

SEQ ID NO: 340294 - RNA, 19 nt, Artificial Sequence
  Synthetic
cgaaacuccaaacccacug

SEQ ID NO: 340295 - RNA, 20 nt, Artificial Sequence
  Synthetic
ccgaaacuccaaacccacug

SEQ ID NO: 340296 - RNA, 21 nt, Artificial Sequence
  Synthetic
uccgaaacuccaaacccacug

SEQ ID NO: 340297 - RNA, 22 nt, Artificial Sequence
  Synthetic
auccgaaacuccaaacccacug

SEQ ID NO: 340298 - RNA, 23 nt, Artificial Sequence
  Synthetic
aauccgaaacuccaaacccacug

SEQ ID NO: 340299 - RNA, 24 nt, Artificial Sequence
  Synthetic
aaauccgaaacuccaaacccacug

SEQ ID NO: 340300 - RNA, 18 nt, Artificial Sequence
  Synthetic
acauuaguucacccacug

SEQ ID NO: 340301 - RNA, 19 nt, Artificial Sequence
  Synthetic
uacauuaguucacccacug

SEQ ID NO: 340302 - RNA, 20 nt, Artificial Sequence
  Synthetic
guacauuaguucacccacug

SEQ ID NO: 340303 - RNA, 21 nt, Artificial Sequence
  Synthetic
uguacauuaguucacccacug

SEQ ID NO: 340304 - RNA, 22 nt, Artificial Sequence
  Synthetic
guguacauuaguucacccacug

SEQ ID NO: 340305 - RNA, 23 nt, Artificial Sequence
  Synthetic
aguguacauuaguucacccacug

SEQ ID NO: 340306 - RNA, 24 nt, Artificial Sequence
  Synthetic
gaguguacauuaguucacccacug

SEQ ID NO: 340307 - RNA, 18 nt, Artificial Sequence
  Synthetic
aguuucauuggcccacug

SEQ ID NO: 340308 - RNA, 19 nt, Artificial Sequence
  Synthetic
aaguuucauuggcccacug

SEQ ID NO: 340309 - RNA, 20 nt, Artificial Sequence
  Synthetic
caaguuucauuggcccacug

SEQ ID NO: 340310 - RNA, 21 nt, Artificial Sequence
  Synthetic
ucaaguuucauuggcccacug

SEQ ID NO: 340311 - RNA, 22 nt, Artificial Sequence
  Synthetic
uucaaguuucauuggcccacug

SEQ ID NO: 340312 - RNA, 23 nt, Artificial Sequence
  Synthetic
uuucaaguuucauuggcccacug

SEQ ID NO: 340313 - RNA, 24 nt, Artificial Sequence
  Synthetic
guuucaaguuucauuggcccacug

SEQ ID NO: 340314 - RNA, 18 nt, Artificial Sequence
  Synthetic
uggaguuuaaucccacug

SEQ ID NO: 340315 - RNA, 19 nt, Artificial Sequence
  Synthetic
guggaguuuaaucccacug

SEQ ID NO: 340316 - RNA, 20 nt, Artificial Sequence
  Synthetic
aguggaguuuaaucccacug

SEQ ID NO: 340317 - RNA, 21 nt, Artificial Sequence
  Synthetic
uaguggaguuuaaucccacug

SEQ ID NO: 340318 - RNA, 22 nt, Artificial Sequence
  Synthetic
cuaguggaguuuaaucccacug

SEQ ID NO: 340319 - RNA, 23 nt, Artificial Sequence
  Synthetic
ucuaguggaguuuaaucccacug

SEQ ID NO: 340320 - RNA, 24 nt, Artificial Sequence
  Synthetic
gucuaguggaguuuaaucccacug

SEQ ID NO: 340321 - RNA, 18 nt, Artificial Sequence
  Synthetic
cucaugcuccucccacug

SEQ ID NO: 340322 - RNA, 19 nt, Artificial Sequence
  Synthetic
ccucaugcuccucccacug

SEQ ID NO: 340323 - RNA, 20 nt, Artificial Sequence
  Synthetic
cccucaugcuccucccacug

SEQ ID NO: 340324 - RNA, 21 nt, Artificial Sequence
  Synthetic
ucccucaugcuccucccacug

SEQ ID NO: 340325 - RNA, 22 nt, Artificial Sequence
  Synthetic
uucccucaugcuccucccacug

SEQ ID NO: 340326 - RNA, 23 nt, Artificial Sequence
  Synthetic
uuucccucaugcuccucccacug

SEQ ID NO: 340327 - RNA, 24 nt, Artificial Sequence
  Synthetic
auuucccucaugcuccucccacug

SEQ ID NO: 340328 - RNA, 18 nt, Artificial Sequence
  Synthetic
cacugccaaaagccacug

SEQ ID NO: 340329 - RNA, 19 nt, Artificial Sequence
  Synthetic
acacugccaaaagccacug

SEQ ID NO: 340330 - RNA, 20 nt, Artificial Sequence
  Synthetic
cacacugccaaaagccacug

SEQ ID NO: 340331 - RNA, 21 nt, Artificial Sequence
  Synthetic
acacacugccaaaagccacug

SEQ ID NO: 340332 - RNA, 22 nt, Artificial Sequence
  Synthetic
aacacacugccaaaagccacug

SEQ ID NO: 340333 - RNA, 23 nt, Artificial Sequence
  Synthetic
caacacacugccaaaagccacug

SEQ ID NO: 340334 - RNA, 24 nt, Artificial Sequence
  Synthetic
ucaacacacugccaaaagccacug

SEQ ID NO: 340335 - RNA, 18 nt, Artificial Sequence
  Synthetic
uaauuaguucagccacug

SEQ ID NO: 340336 - RNA, 19 nt, Artificial Sequence
  Synthetic
uuaauuaguucagccacug

SEQ ID NO: 340337 - RNA, 20 nt, Artificial Sequence
  Synthetic
guuaauuaguucagccacug

SEQ ID NO: 340338 - RNA, 21 nt, Artificial Sequence
  Synthetic
uguuaauuaguucagccacug

SEQ ID NO: 340339 - RNA, 22 nt, Artificial Sequence
  Synthetic
auguuaauuaguucagccacug

SEQ ID NO: 340340 - RNA, 23 nt, Artificial Sequence
  Synthetic
aauguuaauuaguucagccacug

SEQ ID NO: 340341 - RNA, 24 nt, Artificial Sequence
  Synthetic
gaauguuaauuaguucagccacug

SEQ ID NO: 340342 - RNA, 18 nt, Artificial Sequence
  Synthetic
cuaaaugaauagccacug

SEQ ID NO: 340343 - RNA, 19 nt, Artificial Sequence
  Synthetic
ccuaaaugaauagccacug

SEQ ID NO: 340344 - RNA, 20 nt, Artificial Sequence
  Synthetic
uccuaaaugaauagccacug

SEQ ID NO: 340345 - RNA, 21 nt, Artificial Sequence
  Synthetic
auccuaaaugaauagccacug

SEQ ID NO: 340346 - RNA, 22 nt, Artificial Sequence
  Synthetic
uauccuaaaugaauagccacug

SEQ ID NO: 340347 - RNA, 23 nt, Artificial Sequence
  Synthetic
auauccuaaaugaauagccacug

SEQ ID NO: 340348 - RNA, 24 nt, Artificial Sequence
  Synthetic
gauauccuaaaugaauagccacug

SEQ ID NO: 340349 - RNA, 18 nt, Artificial Sequence
  Synthetic
auauaggccaggccacug

SEQ ID NO: 340350 - RNA, 19 nt, Artificial Sequence
  Synthetic
cauauaggccaggccacug

SEQ ID NO: 340351 - RNA, 20 nt, Artificial Sequence
  Synthetic
gcauauaggccaggccacug

SEQ ID NO: 340352 - RNA, 21 nt, Artificial Sequence
  Synthetic
agcauauaggccaggccacug

SEQ ID NO: 340353 - RNA, 22 nt, Artificial Sequence
  Synthetic
uagcauauaggccaggccacug

SEQ ID NO: 340354 - RNA, 23 nt, Artificial Sequence
  Synthetic
auagcauauaggccaggccacug

SEQ ID NO: 340355 - RNA, 24 nt, Artificial Sequence
  Synthetic
cauagcauauaggccaggccacug

SEQ ID NO: 340356 - RNA, 18 nt, Artificial Sequence
  Synthetic
uucuccagucugccacug

SEQ ID NO: 340357 - RNA, 19 nt, Artificial Sequence
  Synthetic
uuucuccagucugccacug

SEQ ID NO: 340358 - RNA, 20 nt, Artificial Sequence
  Synthetic
cuuucuccagucugccacug

SEQ ID NO: 340359 - RNA, 21 nt, Artificial Sequence
  Synthetic
ucuuucuccagucugccacug

SEQ ID NO: 340360 - RNA, 22 nt, Artificial Sequence
  Synthetic
uucuuucuccagucugccacug

SEQ ID NO: 340361 - RNA, 23 nt, Artificial Sequence
  Synthetic
uuucuuucuccagucugccacug

SEQ ID NO: 340362 - RNA, 24 nt, Artificial Sequence
  Synthetic
uuuucuuucuccagucugccacug

SEQ ID NO: 340363 - RNA, 18 nt, Artificial Sequence
  Synthetic
agcacugaaacuccacug

SEQ ID NO: 340364 - RNA, 19 nt, Artificial Sequence
  Synthetic
gagcacugaaacuccacug

SEQ ID NO: 340365 - RNA, 20 nt, Artificial Sequence
  Synthetic
ugagcacugaaacuccacug

SEQ ID NO: 340366 - RNA, 21 nt, Artificial Sequence
  Synthetic
augagcacugaaacuccacug

SEQ ID NO: 340367 - RNA, 22 nt, Artificial Sequence
  Synthetic
uaugagcacugaaacuccacug

SEQ ID NO: 340368 - RNA, 23 nt, Artificial Sequence
  Synthetic
guaugagcacugaaacuccacug

SEQ ID NO: 340369 - RNA, 24 nt, Artificial Sequence
  Synthetic
aguaugagcacugaaacuccacug

SEQ ID NO: 340370 - RNA, 18 nt, Artificial Sequence
  Synthetic
agucuguaacuagcacug

SEQ ID NO: 340371 - RNA, 19 nt, Artificial Sequence
  Synthetic
gagucuguaacuagcacug

SEQ ID NO: 340372 - RNA, 20 nt, Artificial Sequence
  Synthetic
ugagucuguaacuagcacug

SEQ ID NO: 340373 - RNA, 21 nt, Artificial Sequence
  Synthetic
uugagucuguaacuagcacug

SEQ ID NO: 340374 - RNA, 22 nt, Artificial Sequence
  Synthetic
cuugagucuguaacuagcacug

SEQ ID NO: 340375 - RNA, 23 nt, Artificial Sequence
  Synthetic
acuugagucuguaacuagcacug

SEQ ID NO: 340376 - RNA, 24 nt, Artificial Sequence
  Synthetic
aacuugagucuguaacuagcacug

SEQ ID NO: 340377 - RNA, 18 nt, Artificial Sequence
  Synthetic
aaaugaguuuaggcacug

SEQ ID NO: 340378 - RNA, 19 nt, Artificial Sequence
  Synthetic
uaaaugaguuuaggcacug

SEQ ID NO: 340379 - RNA, 20 nt, Artificial Sequence
  Synthetic
guaaaugaguuuaggcacug

SEQ ID NO: 340380 - RNA, 21 nt, Artificial Sequence
  Synthetic
uguaaaugaguuuaggcacug

SEQ ID NO: 340381 - RNA, 22 nt, Artificial Sequence
  Synthetic
auguaaaugaguuuaggcacug

SEQ ID NO: 340382 - RNA, 23 nt, Artificial Sequence
  Synthetic
aauguaaaugaguuuaggcacug

SEQ ID NO: 340383 - RNA, 24 nt, Artificial Sequence
  Synthetic
gaauguaaaugaguuuaggcacug

SEQ ID NO: 340384 - RNA, 18 nt, Artificial Sequence
  Synthetic
uucuaagagggggcacug

SEQ ID NO: 340385 - RNA, 19 nt, Artificial Sequence
  Synthetic
cuucuaagagggggcacug

SEQ ID NO: 340386 - RNA, 20 nt, Artificial Sequence
  Synthetic
ccuucuaagagggggcacug

SEQ ID NO: 340387 - RNA, 21 nt, Artificial Sequence
  Synthetic
uccuucuaagagggggcacug

SEQ ID NO: 340388 - RNA, 22 nt, Artificial Sequence
  Synthetic
guccuucuaagagggggcacug

SEQ ID NO: 340389 - RNA, 23 nt, Artificial Sequence
  Synthetic
uguccuucuaagagggggcacug

SEQ ID NO: 340390 - RNA, 24 nt, Artificial Sequence
  Synthetic
uuguccuucuaagagggggcacug

SEQ ID NO: 340391 - RNA, 18 nt, Artificial Sequence
  Synthetic
caagagcagauggcacug

SEQ ID NO: 340392 - RNA, 19 nt, Artificial Sequence
  Synthetic
ucaagagcagauggcacug

SEQ ID NO: 340393 - RNA, 20 nt, Artificial Sequence
  Synthetic
cucaagagcagauggcacug

SEQ ID NO: 340394 - RNA, 21 nt, Artificial Sequence
  Synthetic
ccucaagagcagauggcacug

SEQ ID NO: 340395 - RNA, 22 nt, Artificial Sequence
  Synthetic
uccucaagagcagauggcacug

SEQ ID NO: 340396 - RNA, 23 nt, Artificial Sequence
  Synthetic
cuccucaagagcagauggcacug

SEQ ID NO: 340397 - RNA, 24 nt, Artificial Sequence
  Synthetic
acuccucaagagcagauggcacug

SEQ ID NO: 340398 - RNA, 18 nt, Artificial Sequence
  Synthetic
ccugaauucuuggcacug

SEQ ID NO: 340399 - RNA, 19 nt, Artificial Sequence
  Synthetic
uccugaauucuuggcacug

SEQ ID NO: 340400 - RNA, 20 nt, Artificial Sequence
  Synthetic
cuccugaauucuuggcacug

SEQ ID NO: 340401 - RNA, 21 nt, Artificial Sequence
  Synthetic
acuccugaauucuuggcacug

SEQ ID NO: 340402 - RNA, 22 nt, Artificial Sequence
  Synthetic
aacuccugaauucuuggcacug

SEQ ID NO: 340403 - RNA, 23 nt, Artificial Sequence
  Synthetic
aaacuccugaauucuuggcacug

SEQ ID NO: 340404 - RNA, 24 nt, Artificial Sequence
  Synthetic
caaacuccugaauucuuggcacug

SEQ ID NO: 340405 - RNA, 18 nt, Artificial Sequence
  Synthetic
auaacauuuaaugcacug

SEQ ID NO: 340406 - RNA, 19 nt, Artificial Sequence
  Synthetic
cauaacauuuaaugcacug

SEQ ID NO: 340407 - RNA, 20 nt, Artificial Sequence
  Synthetic
acauaacauuuaaugcacug

SEQ ID NO: 340408 - RNA, 21 nt, Artificial Sequence
  Synthetic
aacauaacauuuaaugcacug

SEQ ID NO: 340409 - RNA, 22 nt, Artificial Sequence
  Synthetic
aaacauaacauuuaaugcacug

SEQ ID NO: 340410 - RNA, 23 nt, Artificial Sequence
  Synthetic
uaaacauaacauuuaaugcacug

SEQ ID NO: 340411 - RNA, 24 nt, Artificial Sequence
  Synthetic
guaaacauaacauuuaaugcacug

SEQ ID NO: 340412 - RNA, 18 nt, Artificial Sequence
  Synthetic
aaccuugcuuaugcacug

SEQ ID NO: 340413 - RNA, 19 nt, Artificial Sequence
  Synthetic
uaaccuugcuuaugcacug

SEQ ID NO: 340414 - RNA, 20 nt, Artificial Sequence
  Synthetic
uuaaccuugcuuaugcacug

SEQ ID NO: 340415 - RNA, 21 nt, Artificial Sequence
  Synthetic
uuuaaccuugcuuaugcacug

SEQ ID NO: 340416 - RNA, 22 nt, Artificial Sequence
  Synthetic
uuuuaaccuugcuuaugcacug

SEQ ID NO: 340417 - RNA, 23 nt, Artificial Sequence
  Synthetic
auuuuaaccuugcuuaugcacug

SEQ ID NO: 340418 - RNA, 24 nt, Artificial Sequence
  Synthetic
gauuuuaaccuugcuuaugcacug

SEQ ID NO: 340419 - RNA, 18 nt, Artificial Sequence
  Synthetic
gguccuaaaauugcacug

SEQ ID NO: 340420 - RNA, 19 nt, Artificial Sequence
  Synthetic
ugguccuaaaauugcacug

SEQ ID NO: 340421 - RNA, 20 nt, Artificial Sequence
  Synthetic
uugguccuaaaauugcacug

SEQ ID NO: 340422 - RNA, 21 nt, Artificial Sequence
  Synthetic
auugguccuaaaauugcacug

SEQ ID NO: 340423 - RNA, 22 nt, Artificial Sequence
  Synthetic
cauugguccuaaaauugcacug

SEQ ID NO: 340424 - RNA, 23 nt, Artificial Sequence
  Synthetic
ucauugguccuaaaauugcacug

SEQ ID NO: 340425 - RNA, 24 nt, Artificial Sequence
  Synthetic
uucauugguccuaaaauugcacug

SEQ ID NO: 340426 - RNA, 18 nt, Artificial Sequence
  Synthetic
gcuuguuuuaaaucacug

SEQ ID NO: 340427 - RNA, 19 nt, Artificial Sequence
  Synthetic
agcuuguuuuaaaucacug

SEQ ID NO: 340428 - RNA, 20 nt, Artificial Sequence
  Synthetic
cagcuuguuuuaaaucacug

SEQ ID NO: 340429 - RNA, 21 nt, Artificial Sequence
  Synthetic
gcagcuuguuuuaaaucacug

SEQ ID NO: 340430 - RNA, 22 nt, Artificial Sequence
  Synthetic
ugcagcuuguuuuaaaucacug

SEQ ID NO: 340431 - RNA, 23 nt, Artificial Sequence
  Synthetic
cugcagcuuguuuuaaaucacug

SEQ ID NO: 340432 - RNA, 24 nt, Artificial Sequence
  Synthetic
ccugcagcuuguuuuaaaucacug

SEQ ID NO: 340433 - RNA, 18 nt, Artificial Sequence
  Synthetic
ggaaacuuacaaucacug

SEQ ID NO: 340434 - RNA, 19 nt, Artificial Sequence
  Synthetic
aggaaacuuacaaucacug

SEQ ID NO: 340435 - RNA, 20 nt, Artificial Sequence
  Synthetic
caggaaacuuacaaucacug

SEQ ID NO: 340436 - RNA, 21 nt, Artificial Sequence
  Synthetic
ucaggaaacuuacaaucacug

SEQ ID NO: 340437 - RNA, 22 nt, Artificial Sequence
  Synthetic
cucaggaaacuuacaaucacug

SEQ ID NO: 340438 - RNA, 23 nt, Artificial Sequence
  Synthetic
ccucaggaaacuuacaaucacug

SEQ ID NO: 340439 - RNA, 24 nt, Artificial Sequence
  Synthetic
gccucaggaaacuuacaaucacug

SEQ ID NO: 340440 - RNA, 18 nt, Artificial Sequence
  Synthetic
uaauccagucuaucacug

SEQ ID NO: 340441 - RNA, 19 nt, Artificial Sequence
  Synthetic
uuaauccagucuaucacug

SEQ ID NO: 340442 - RNA, 20 nt, Artificial Sequence
  Synthetic
cuuaauccagucuaucacug

SEQ ID NO: 340443 - RNA, 24 nt, Artificial Sequence
  Synthetic
uuuucuuaauccagucuaucacug

SEQ ID NO: 340444 - RNA, 18 nt, Artificial Sequence
  Synthetic
acaaaauaagacucacug

SEQ ID NO: 340445 - RNA, 19 nt, Artificial Sequence
  Synthetic
cacaaaauaagacucacug

SEQ ID NO: 340446 - RNA, 20 nt, Artificial Sequence
  Synthetic
acacaaaauaagacucacug

SEQ ID NO: 340447 - RNA, 21 nt, Artificial Sequence
  Synthetic
aacacaaaauaagacucacug

SEQ ID NO: 340448 - RNA, 22 nt, Artificial Sequence
  Synthetic
gaacacaaaauaagacucacug

SEQ ID NO: 340449 - RNA, 23 nt, Artificial Sequence
  Synthetic
ugaacacaaaauaagacucacug

SEQ ID NO: 340450 - RNA, 24 nt, Artificial Sequence
  Synthetic
uugaacacaaaauaagacucacug

SEQ ID NO: 340451 - RNA, 18 nt, Artificial Sequence
  Synthetic
uuuuccuuauacucacug

SEQ ID NO: 340452 - RNA, 19 nt, Artificial Sequence
  Synthetic
auuuuccuuauacucacug

SEQ ID NO: 340453 - RNA, 20 nt, Artificial Sequence
  Synthetic
uauuuuccuuauacucacug

SEQ ID NO: 340454 - RNA, 21 nt, Artificial Sequence
  Synthetic
uuauuuuccuuauacucacug

SEQ ID NO: 340455 - RNA, 22 nt, Artificial Sequence
  Synthetic
uuuauuuuccuuauacucacug

SEQ ID NO: 340456 - RNA, 23 nt, Artificial Sequence
  Synthetic
guuuauuuuccuuauacucacug

SEQ ID NO: 340457 - RNA, 24 nt, Artificial Sequence
  Synthetic
aguuuauuuuccuuauacucacug

SEQ ID NO: 340458 - RNA, 18 nt, Artificial Sequence
  Synthetic
uccucuuuuuucucacug

SEQ ID NO: 340459 - RNA, 19 nt, Artificial Sequence
  Synthetic
uuccucuuuuuucucacug

SEQ ID NO: 340460 - RNA, 20 nt, Artificial Sequence
  Synthetic
guuccucuuuuuucucacug

SEQ ID NO: 340461 - RNA, 21 nt, Artificial Sequence
  Synthetic
gguuccucuuuuuucucacug

SEQ ID NO: 340462 - RNA, 22 nt, Artificial Sequence
  Synthetic
ugguuccucuuuuuucucacug

SEQ ID NO: 340463 - RNA, 23 nt, Artificial Sequence
  Synthetic
augguuccucuuuuuucucacug

SEQ ID NO: 340464 - RNA, 24 nt, Artificial Sequence
  Synthetic
aaugguuccucuuuuuucucacug

SEQ ID NO: 340465 - RNA, 18 nt, Artificial Sequence
  Synthetic
gacaaagaagauucacug

SEQ ID NO: 340466 - RNA, 19 nt, Artificial Sequence
  Synthetic
ugacaaagaagauucacug

SEQ ID NO: 340467 - RNA, 20 nt, Artificial Sequence
  Synthetic
cugacaaagaagauucacug

SEQ ID NO: 340468 - RNA, 21 nt, Artificial Sequence
  Synthetic
ccugacaaagaagauucacug

SEQ ID NO: 340469 - RNA, 22 nt, Artificial Sequence
  Synthetic
uccugacaaagaagauucacug

SEQ ID NO: 340470 - RNA, 23 nt, Artificial Sequence
  Synthetic
uuccugacaaagaagauucacug

SEQ ID NO: 340471 - RNA, 24 nt, Artificial Sequence
  Synthetic
uuuccugacaaagaagauucacug

SEQ ID NO: 340472 - RNA, 18 nt, Artificial Sequence
  Synthetic
agggaaguauauucacug

SEQ ID NO: 340473 - RNA, 19 nt, Artificial Sequence
  Synthetic
aagggaaguauauucacug

SEQ ID NO: 340474 - RNA, 20 nt, Artificial Sequence
  Synthetic
gaagggaaguauauucacug

SEQ ID NO: 340475 - RNA, 21 nt, Artificial Sequence
  Synthetic
ggaagggaaguauauucacug

SEQ ID NO: 340476 - RNA, 22 nt, Artificial Sequence
  Synthetic
gggaagggaaguauauucacug

SEQ ID NO: 340477 - RNA, 23 nt, Artificial Sequence
  Synthetic
ugggaagggaaguauauucacug

SEQ ID NO: 340478 - RNA, 24 nt, Artificial Sequence
  Synthetic
augggaagggaaguauauucacug

SEQ ID NO: 340479 - RNA, 18 nt, Artificial Sequence
  Synthetic
uugcugcaagcuucacug

SEQ ID NO: 340480 - RNA, 19 nt, Artificial Sequence
  Synthetic
guugcugcaagcuucacug

SEQ ID NO: 340481 - RNA, 20 nt, Artificial Sequence
  Synthetic
uguugcugcaagcuucacug

SEQ ID NO: 340482 - RNA, 21 nt, Artificial Sequence
  Synthetic
cuguugcugcaagcuucacug

SEQ ID NO: 340483 - RNA, 22 nt, Artificial Sequence
  Synthetic
ucuguugcugcaagcuucacug

SEQ ID NO: 340484 - RNA, 23 nt, Artificial Sequence
  Synthetic
uucuguugcugcaagcuucacug

SEQ ID NO: 340485 - RNA, 24 nt, Artificial Sequence
  Synthetic
cuucuguugcugcaagcuucacug

SEQ ID NO: 340486 - RNA, 18 nt, Artificial Sequence
  Synthetic
gcgccaugcucuucacug

SEQ ID NO: 340487 - RNA, 19 nt, Artificial Sequence
  Synthetic
ggcgccaugcucuucacug

SEQ ID NO: 340488 - RNA, 20 nt, Artificial Sequence
  Synthetic
gggcgccaugcucuucacug

SEQ ID NO: 340489 - RNA, 21 nt, Artificial Sequence
  Synthetic
ggggcgccaugcucuucacug

SEQ ID NO: 340490 - RNA, 22 nt, Artificial Sequence
  Synthetic
aggggcgccaugcucuucacug

SEQ ID NO: 340491 - RNA, 23 nt, Artificial Sequence
  Synthetic
aaggggcgccaugcucuucacug

SEQ ID NO: 340492 - RNA, 24 nt, Artificial Sequence
  Synthetic
caaggggcgccaugcucuucacug

SEQ ID NO: 340493 - RNA, 18 nt, Artificial Sequence
  Synthetic
acccccugaaguucacug

SEQ ID NO: 340494 - RNA, 19 nt, Artificial Sequence
  Synthetic
gacccccugaaguucacug

SEQ ID NO: 340495 - RNA, 20 nt, Artificial Sequence
  Synthetic
ugacccccugaaguucacug

SEQ ID NO: 340496 - RNA, 21 nt, Artificial Sequence
  Synthetic
uugacccccugaaguucacug

SEQ ID NO: 340497 - RNA, 22 nt, Artificial Sequence
  Synthetic
auugacccccugaaguucacug

SEQ ID NO: 340498 - RNA, 23 nt, Artificial Sequence
  Synthetic
uauugacccccugaaguucacug

SEQ ID NO: 340499 - RNA, 24 nt, Artificial Sequence
  Synthetic
cuauugacccccugaaguucacug

SEQ ID NO: 340500 - RNA, 18 nt, Artificial Sequence
  Synthetic
auauaacggaguucacug

SEQ ID NO: 340501 - RNA, 19 nt, Artificial Sequence
  Synthetic
aauauaacggaguucacug

SEQ ID NO: 340502 - RNA, 20 nt, Artificial Sequence
  Synthetic
caauauaacggaguucacug

SEQ ID NO: 340503 - RNA, 21 nt, Artificial Sequence
  Synthetic
ucaauauaacggaguucacug

SEQ ID NO: 340504 - RNA, 22 nt, Artificial Sequence
  Synthetic
gucaauauaacggaguucacug

SEQ ID NO: 340505 - RNA, 23 nt, Artificial Sequence
  Synthetic
ggucaauauaacggaguucacug

SEQ ID NO: 340506 - RNA, 24 nt, Artificial Sequence
  Synthetic
aggucaauauaacggaguucacug

SEQ ID NO: 340507 - RNA, 18 nt, Artificial Sequence
  Synthetic
aagauuggucuuucacug

SEQ ID NO: 340508 - RNA, 19 nt, Artificial Sequence
  Synthetic
uaagauuggucuuucacug

SEQ ID NO: 340509 - RNA, 20 nt, Artificial Sequence
  Synthetic
uuaagauuggucuuucacug

SEQ ID NO: 340510 - RNA, 21 nt, Artificial Sequence
  Synthetic
uuuaagauuggucuuucacug

SEQ ID NO: 340511 - RNA, 22 nt, Artificial Sequence
  Synthetic
guuuaagauuggucuuucacug

SEQ ID NO: 340512 - RNA, 23 nt, Artificial Sequence
  Synthetic
gguuuaagauuggucuuucacug

SEQ ID NO: 340513 - RNA, 24 nt, Artificial Sequence
  Synthetic
ugguuuaagauuggucuuucacug

SEQ ID NO: 340514 - RNA, 18 nt, Artificial Sequence
  Synthetic
uuauugauuguuucacug

SEQ ID NO: 340515 - RNA, 19 nt, Artificial Sequence
  Synthetic
uuuauugauuguuucacug

SEQ ID NO: 340516 - RNA, 20 nt, Artificial Sequence
  Synthetic
cuuuauugauuguuucacug

SEQ ID NO: 340517 - RNA, 21 nt, Artificial Sequence
  Synthetic
acuuuauugauuguuucacug

SEQ ID NO: 340518 - RNA, 22 nt, Artificial Sequence
  Synthetic
cacuuuauugauuguuucacug

SEQ ID NO: 340519 - RNA, 23 nt, Artificial Sequence
  Synthetic
ucacuuuauugauuguuucacug

SEQ ID NO: 340520 - RNA, 24 nt, Artificial Sequence
  Synthetic
uucacuuuauugauuguuucacug

SEQ ID NO: 340521 - RNA, 18 nt, Artificial Sequence
  Synthetic
aacauccaguaaagacug

SEQ ID NO: 340522 - RNA, 19 nt, Artificial Sequence
  Synthetic
aaacauccaguaaagacug

SEQ ID NO: 340523 - RNA, 20 nt, Artificial Sequence
  Synthetic
aaaacauccaguaaagacug

SEQ ID NO: 340524 - RNA, 21 nt, Artificial Sequence
  Synthetic
uaaaacauccaguaaagacug

SEQ ID NO: 340525 - RNA, 22 nt, Artificial Sequence
  Synthetic
auaaaacauccaguaaagacug

SEQ ID NO: 340526 - RNA, 23 nt, Artificial Sequence
  Synthetic
uauaaaacauccaguaaagacug

SEQ ID NO: 340527 - RNA, 24 nt, Artificial Sequence
  Synthetic
auauaaaacauccaguaaagacug

SEQ ID NO: 340528 - RNA, 18 nt, Artificial Sequence
  Synthetic
ucagccuucuccagacug

SEQ ID NO: 340529 - RNA, 19 nt, Artificial Sequence
  Synthetic
uucagccuucuccagacug

SEQ ID NO: 340530 - RNA, 20 nt, Artificial Sequence
  Synthetic
cuucagccuucuccagacug

SEQ ID NO: 340531 - RNA, 21 nt, Artificial Sequence
  Synthetic
gcuucagccuucuccagacug

SEQ ID NO: 340532 - RNA, 22 nt, Artificial Sequence
  Synthetic
ugcuucagccuucuccagacug

SEQ ID NO: 340533 - RNA, 23 nt, Artificial Sequence
  Synthetic
augcuucagccuucuccagacug

SEQ ID NO: 340534 - RNA, 24 nt, Artificial Sequence
  Synthetic
caugcuucagccuucuccagacug

SEQ ID NO: 340535 - RNA, 18 nt, Artificial Sequence
  Synthetic
aguaugaguuccagacug

SEQ ID NO: 340536 - RNA, 19 nt, Artificial Sequence
  Synthetic
gaguaugaguuccagacug

SEQ ID NO: 340537 - RNA, 20 nt, Artificial Sequence
  Synthetic
agaguaugaguuccagacug

SEQ ID NO: 340538 - RNA, 21 nt, Artificial Sequence
  Synthetic
aagaguaugaguuccagacug

SEQ ID NO: 340539 - RNA, 22 nt, Artificial Sequence
  Synthetic
aaagaguaugaguuccagacug

SEQ ID NO: 340540 - RNA, 23 nt, Artificial Sequence
  Synthetic
caaagaguaugaguuccagacug

SEQ ID NO: 340541 - RNA, 24 nt, Artificial Sequence
  Synthetic
gcaaagaguaugaguuccagacug

SEQ ID NO: 340542 - RNA, 18 nt, Artificial Sequence
  Synthetic
uucugaagaaucagacug

SEQ ID NO: 340543 - RNA, 19 nt, Artificial Sequence
  Synthetic
auucugaagaaucagacug

SEQ ID NO: 340544 - RNA, 20 nt, Artificial Sequence
  Synthetic
uauucugaagaaucagacug

SEQ ID NO: 340545 - RNA, 21 nt, Artificial Sequence
  Synthetic
uuauucugaagaaucagacug

SEQ ID NO: 340546 - RNA, 22 nt, Artificial Sequence
  Synthetic
auuauucugaagaaucagacug

SEQ ID NO: 340547 - RNA, 23 nt, Artificial Sequence
  Synthetic
aauuauucugaagaaucagacug

SEQ ID NO: 340548 - RNA, 24 nt, Artificial Sequence
  Synthetic
aaauuauucugaagaaucagacug

SEQ ID NO: 340549 - RNA, 18 nt, Artificial Sequence
  Synthetic
cauguucguuguagacug

SEQ ID NO: 340550 - RNA, 19 nt, Artificial Sequence
  Synthetic
acauguucguuguagacug

SEQ ID NO: 340551 - RNA, 20 nt, Artificial Sequence
  Synthetic
uacauguucguuguagacug

SEQ ID NO: 340552 - RNA, 21 nt, Artificial Sequence
  Synthetic
uuacauguucguuguagacug

SEQ ID NO: 340553 - RNA, 22 nt, Artificial Sequence
  Synthetic
guuacauguucguuguagacug

SEQ ID NO: 340554 - RNA, 23 nt, Artificial Sequence
  Synthetic
uguuacauguucguuguagacug

SEQ ID NO: 340555 - RNA, 24 nt, Artificial Sequence
  Synthetic
auguuacauguucguuguagacug

SEQ ID NO: 340556 - RNA, 18 nt, Artificial Sequence
  Synthetic
aaauucuucuuuagacug

SEQ ID NO: 340557 - RNA, 19 nt, Artificial Sequence
  Synthetic
aaaauucuucuuuagacug

SEQ ID NO: 340558 - RNA, 20 nt, Artificial Sequence
  Synthetic
gaaaauucuucuuuagacug

SEQ ID NO: 340559 - RNA, 21 nt, Artificial Sequence
  Synthetic
agaaaauucuucuuuagacug

SEQ ID NO: 340560 - RNA, 22 nt, Artificial Sequence
  Synthetic
aagaaaauucuucuuuagacug

SEQ ID NO: 340561 - RNA, 23 nt, Artificial Sequence
  Synthetic
uaagaaaauucuucuuuagacug

SEQ ID NO: 340562 - RNA, 24 nt, Artificial Sequence
  Synthetic
uuaagaaaauucuucuuuagacug

SEQ ID NO: 340563 - RNA, 18 nt, Artificial Sequence
  Synthetic
uuaggaagguuuagacug

SEQ ID NO: 340564 - RNA, 19 nt, Artificial Sequence
  Synthetic
uuuaggaagguuuagacug

SEQ ID NO: 340565 - RNA, 20 nt, Artificial Sequence
  Synthetic
auuuaggaagguuuagacug

SEQ ID NO: 340566 - RNA, 21 nt, Artificial Sequence
  Synthetic
uauuuaggaagguuuagacug

SEQ ID NO: 340567 - RNA, 22 nt, Artificial Sequence
  Synthetic
cuauuuaggaagguuuagacug

SEQ ID NO: 340568 - RNA, 23 nt, Artificial Sequence
  Synthetic
gcuauuuaggaagguuuagacug

SEQ ID NO: 340569 - RNA, 24 nt, Artificial Sequence
  Synthetic
ggcuauuuaggaagguuuagacug

SEQ ID NO: 340570 - RNA, 18 nt, Artificial Sequence
  Synthetic
ugaaaguugaaaggacug

SEQ ID NO: 340571 - RNA, 19 nt, Artificial Sequence
  Synthetic
augaaaguugaaaggacug

SEQ ID NO: 340572 - RNA, 20 nt, Artificial Sequence
  Synthetic
aaugaaaguugaaaggacug

SEQ ID NO: 340573 - RNA, 21 nt, Artificial Sequence
  Synthetic
uaaugaaaguugaaaggacug

SEQ ID NO: 340574 - RNA, 22 nt, Artificial Sequence
  Synthetic
auaaugaaaguugaaaggacug

SEQ ID NO: 340575 - RNA, 23 nt, Artificial Sequence
  Synthetic
gauaaugaaaguugaaaggacug

SEQ ID NO: 340576 - RNA, 24 nt, Artificial Sequence
  Synthetic
agauaaugaaaguugaaaggacug

SEQ ID NO: 340577 - RNA, 18 nt, Artificial Sequence
  Synthetic
gacugacaaucuggacug

SEQ ID NO: 340578 - RNA, 19 nt, Artificial Sequence
  Synthetic
ugacugacaaucuggacug

SEQ ID NO: 340579 - RNA, 20 nt, Artificial Sequence
  Synthetic
cugacugacaaucuggacug

SEQ ID NO: 340580 - RNA, 21 nt, Artificial Sequence
  Synthetic
ucugacugacaaucuggacug

SEQ ID NO: 340581 - RNA, 22 nt, Artificial Sequence
  Synthetic
gucugacugacaaucuggacug

SEQ ID NO: 340582 - RNA, 23 nt, Artificial Sequence
  Synthetic
agucugacugacaaucuggacug

SEQ ID NO: 340583 - RNA, 24 nt, Artificial Sequence
  Synthetic
gagucugacugacaaucuggacug

SEQ ID NO: 340584 - RNA, 18 nt, Artificial Sequence
  Synthetic
aauuugaguaaaugacug

SEQ ID NO: 340585 - RNA, 19 nt, Artificial Sequence
  Synthetic
aaauuugaguaaaugacug

SEQ ID NO: 340586 - RNA, 20 nt, Artificial Sequence
  Synthetic
aaaauuugaguaaaugacug

SEQ ID NO: 340587 - RNA, 21 nt, Artificial Sequence
  Synthetic
uaaaauuugaguaaaugacug

SEQ ID NO: 340588 - RNA, 22 nt, Artificial Sequence
  Synthetic
cuaaaauuugaguaaaugacug

SEQ ID NO: 340589 - RNA, 23 nt, Artificial Sequence
  Synthetic
ucuaaaauuugaguaaaugacug

SEQ ID NO: 340590 - RNA, 24 nt, Artificial Sequence
  Synthetic
uucuaaaauuugaguaaaugacug

SEQ ID NO: 340591 - RNA, 18 nt, Artificial Sequence
  Synthetic
acaacguaauaaugacug

SEQ ID NO: 340592 - RNA, 19 nt, Artificial Sequence
  Synthetic
uacaacguaauaaugacug

SEQ ID NO: 340593 - RNA, 20 nt, Artificial Sequence
  Synthetic
guacaacguaauaaugacug

SEQ ID NO: 340594 - RNA, 21 nt, Artificial Sequence
  Synthetic
uguacaacguaauaaugacug

SEQ ID NO: 340595 - RNA, 22 nt, Artificial Sequence
  Synthetic
uuguacaacguaauaaugacug

SEQ ID NO: 340596 - RNA, 23 nt, Artificial Sequence
  Synthetic
uuuguacaacguaauaaugacug

SEQ ID NO: 340597 - RNA, 24 nt, Artificial Sequence
  Synthetic
auuuguacaacguaauaaugacug

SEQ ID NO: 340598 - RNA, 18 nt, Artificial Sequence
  Synthetic
aucccugaagucugacug

SEQ ID NO: 340599 - RNA, 19 nt, Artificial Sequence
  Synthetic
aaucccugaagucugacug

SEQ ID NO: 340600 - RNA, 20 nt, Artificial Sequence
  Synthetic
caaucccugaagucugacug

SEQ ID NO: 340601 - RNA, 21 nt, Artificial Sequence
  Synthetic
acaaucccugaagucugacug

SEQ ID NO: 340602 - RNA, 22 nt, Artificial Sequence
  Synthetic
cacaaucccugaagucugacug

SEQ ID NO: 340603 - RNA, 23 nt, Artificial Sequence
  Synthetic
gcacaaucccugaagucugacug

SEQ ID NO: 340604 - RNA, 24 nt, Artificial Sequence
  Synthetic
agcacaaucccugaagucugacug

SEQ ID NO: 340605 - RNA, 18 nt, Artificial Sequence
  Synthetic
aaacuugaguucugacug

SEQ ID NO: 340606 - RNA, 19 nt, Artificial Sequence
  Synthetic
gaaacuugaguucugacug

SEQ ID NO: 340607 - RNA, 20 nt, Artificial Sequence
  Synthetic
agaaacuugaguucugacug

SEQ ID NO: 340608 - RNA, 21 nt, Artificial Sequence
  Synthetic
aagaaacuugaguucugacug

SEQ ID NO: 340609 - RNA, 22 nt, Artificial Sequence
  Synthetic
caagaaacuugaguucugacug

SEQ ID NO: 340610 - RNA, 23 nt, Artificial Sequence
  Synthetic
ccaagaaacuugaguucugacug

SEQ ID NO: 340611 - RNA, 24 nt, Artificial Sequence
  Synthetic
gccaagaaacuugaguucugacug

SEQ ID NO: 340612 - RNA, 18 nt, Artificial Sequence
  Synthetic
gauuuggucaggugacug

SEQ ID NO: 340613 - RNA, 19 nt, Artificial Sequence
  Synthetic
ugauuuggucaggugacug

SEQ ID NO: 340614 - RNA, 20 nt, Artificial Sequence
  Synthetic
gugauuuggucaggugacug

SEQ ID NO: 340615 - RNA, 21 nt, Artificial Sequence
  Synthetic
ggugauuuggucaggugacug

SEQ ID NO: 340616 - RNA, 22 nt, Artificial Sequence
  Synthetic
aggugauuuggucaggugacug

SEQ ID NO: 340617 - RNA, 23 nt, Artificial Sequence
  Synthetic
aaggugauuuggucaggugacug

SEQ ID NO: 340618 - RNA, 24 nt, Artificial Sequence
  Synthetic
uaaggugauuuggucaggugacug

SEQ ID NO: 340619 - RNA, 18 nt, Artificial Sequence
  Synthetic
uaagacuuugggugacug

SEQ ID NO: 340620 - RNA, 19 nt, Artificial Sequence
  Synthetic
uuaagacuuugggugacug

SEQ ID NO: 340621 - RNA, 20 nt, Artificial Sequence
  Synthetic
guuaagacuuugggugacug

SEQ ID NO: 340622 - RNA, 21 nt, Artificial Sequence
  Synthetic
aguuaagacuuugggugacug

SEQ ID NO: 340623 - RNA, 22 nt, Artificial Sequence
  Synthetic
gaguuaagacuuugggugacug

SEQ ID NO: 340624 - RNA, 23 nt, Artificial Sequence
  Synthetic
ugaguuaagacuuugggugacug

SEQ ID NO: 340625 - RNA, 24 nt, Artificial Sequence
  Synthetic
augaguuaagacuuugggugacug

SEQ ID NO: 340626 - RNA, 18 nt, Artificial Sequence
  Synthetic
gaguuggucgugugacug

SEQ ID NO: 340627 - RNA, 19 nt, Artificial Sequence
  Synthetic
agaguuggucgugugacug

SEQ ID NO: 340628 - RNA, 20 nt, Artificial Sequence
  Synthetic
gagaguuggucgugugacug

SEQ ID NO: 340629 - RNA, 21 nt, Artificial Sequence
  Synthetic
ggagaguuggucgugugacug

SEQ ID NO: 340630 - RNA, 22 nt, Artificial Sequence
  Synthetic
uggagaguuggucgugugacug

SEQ ID NO: 340631 - RNA, 23 nt, Artificial Sequence
  Synthetic
cuggagaguuggucgugugacug

SEQ ID NO: 340632 - RNA, 24 nt, Artificial Sequence
  Synthetic
ccuggagaguuggucgugugacug

SEQ ID NO: 340633 - RNA, 18 nt, Artificial Sequence
  Synthetic
guuuauuauuauugacug

SEQ ID NO: 340634 - RNA, 19 nt, Artificial Sequence
  Synthetic
cguuuauuauuauugacug

SEQ ID NO: 340635 - RNA, 20 nt, Artificial Sequence
  Synthetic
ccguuuauuauuauugacug

SEQ ID NO: 340636 - RNA, 21 nt, Artificial Sequence
  Synthetic
gccguuuauuauuauugacug

SEQ ID NO: 340637 - RNA, 22 nt, Artificial Sequence
  Synthetic
ggccguuuauuauuauugacug

SEQ ID NO: 340638 - RNA, 23 nt, Artificial Sequence
  Synthetic
uggccguuuauuauuauugacug

SEQ ID NO: 340639 - RNA, 24 nt, Artificial Sequence
  Synthetic
guggccguuuauuauuauugacug

SEQ ID NO: 340640 - RNA, 18 nt, Artificial Sequence
  Synthetic
uuagcugaaacuugacug

SEQ ID NO: 340641 - RNA, 19 nt, Artificial Sequence
  Synthetic
auuagcugaaacuugacug

SEQ ID NO: 340642 - RNA, 20 nt, Artificial Sequence
  Synthetic
gauuagcugaaacuugacug

SEQ ID NO: 340643 - RNA, 21 nt, Artificial Sequence
  Synthetic
ugauuagcugaaacuugacug

SEQ ID NO: 340644 - RNA, 22 nt, Artificial Sequence
  Synthetic
gugauuagcugaaacuugacug

SEQ ID NO: 340645 - RNA, 23 nt, Artificial Sequence
  Synthetic
ugugauuagcugaaacuugacug

SEQ ID NO: 340646 - RNA, 24 nt, Artificial Sequence
  Synthetic
cugugauuagcugaaacuugacug

SEQ ID NO: 340647 - RNA, 18 nt, Artificial Sequence
  Synthetic
uagacaauucaaauacug

SEQ ID NO: 340648 - RNA, 19 nt, Artificial Sequence
  Synthetic
auagacaauucaaauacug

SEQ ID NO: 340649 - RNA, 20 nt, Artificial Sequence
  Synthetic
aauagacaauucaaauacug

SEQ ID NO: 340650 - RNA, 21 nt, Artificial Sequence
  Synthetic
aaauagacaauucaaauacug

SEQ ID NO: 340651 - RNA, 22 nt, Artificial Sequence
  Synthetic
uaaauagacaauucaaauacug

SEQ ID NO: 340652 - RNA, 23 nt, Artificial Sequence
  Synthetic
auaaauagacaauucaaauacug

SEQ ID NO: 340653 - RNA, 24 nt, Artificial Sequence
  Synthetic
uauaaauagacaauucaaauacug

SEQ ID NO: 340654 - RNA, 18 nt, Artificial Sequence
  Synthetic
uuacacucccacauacug

SEQ ID NO: 340655 - RNA, 19 nt, Artificial Sequence
  Synthetic
uuuacacucccacauacug

SEQ ID NO: 340656 - RNA, 20 nt, Artificial Sequence
  Synthetic
cuuuacacucccacauacug

SEQ ID NO: 340657 - RNA, 21 nt, Artificial Sequence
  Synthetic
gcuuuacacucccacauacug

SEQ ID NO: 340658 - RNA, 22 nt, Artificial Sequence
  Synthetic
agcuuuacacucccacauacug

SEQ ID NO: 340659 - RNA, 23 nt, Artificial Sequence
  Synthetic
aagcuuuacacucccacauacug

SEQ ID NO: 340660 - RNA, 24 nt, Artificial Sequence
  Synthetic
gaagcuuuacacucccacauacug

SEQ ID NO: 340661 - RNA, 18 nt, Artificial Sequence
  Synthetic
uagguacuacucauacug

SEQ ID NO: 340662 - RNA, 19 nt, Artificial Sequence
  Synthetic
auagguacuacucauacug

SEQ ID NO: 340663 - RNA, 20 nt, Artificial Sequence
  Synthetic
aauagguacuacucauacug

SEQ ID NO: 340664 - RNA, 21 nt, Artificial Sequence
  Synthetic
aaauagguacuacucauacug

SEQ ID NO: 340665 - RNA, 22 nt, Artificial Sequence
  Synthetic
aaaauagguacuacucauacug

SEQ ID NO: 340666 - RNA, 23 nt, Artificial Sequence
  Synthetic
uaaaauagguacuacucauacug

SEQ ID NO: 340667 - RNA, 24 nt, Artificial Sequence
  Synthetic
guaaaauagguacuacucauacug

SEQ ID NO: 340668 - RNA, 18 nt, Artificial Sequence
  Synthetic
acgguuggguagauacug

SEQ ID NO: 340669 - RNA, 19 nt, Artificial Sequence
  Synthetic
gacgguuggguagauacug

SEQ ID NO: 340670 - RNA, 20 nt, Artificial Sequence
  Synthetic
ugacgguuggguagauacug

SEQ ID NO: 340671 - RNA, 21 nt, Artificial Sequence
  Synthetic
uugacgguuggguagauacug

SEQ ID NO: 340672 - RNA, 22 nt, Artificial Sequence
  Synthetic
auugacgguuggguagauacug

SEQ ID NO: 340673 - RNA, 23 nt, Artificial Sequence
  Synthetic
aauugacgguuggguagauacug

SEQ ID NO: 340674 - RNA, 24 nt, Artificial Sequence
  Synthetic
uaauugacgguuggguagauacug

SEQ ID NO: 340675 - RNA, 18 nt, Artificial Sequence
  Synthetic
auggauaucaggauacug

SEQ ID NO: 340676 - RNA, 19 nt, Artificial Sequence
  Synthetic
gauggauaucaggauacug

SEQ ID NO: 340677 - RNA, 20 nt, Artificial Sequence
  Synthetic
agauggauaucaggauacug

SEQ ID NO: 340678 - RNA, 21 nt, Artificial Sequence
  Synthetic
aagauggauaucaggauacug

SEQ ID NO: 340679 - RNA, 22 nt, Artificial Sequence
  Synthetic
uaagauggauaucaggauacug

SEQ ID NO: 340680 - RNA, 23 nt, Artificial Sequence
  Synthetic
cuaagauggauaucaggauacug

SEQ ID NO: 340681 - RNA, 24 nt, Artificial Sequence
  Synthetic
ucuaagauggauaucaggauacug

SEQ ID NO: 340682 - RNA, 18 nt, Artificial Sequence
  Synthetic
aaucccccauggauacug

SEQ ID NO: 340683 - RNA, 19 nt, Artificial Sequence
  Synthetic
caaucccccauggauacug

SEQ ID NO: 340684 - RNA, 20 nt, Artificial Sequence
  Synthetic
ccaaucccccauggauacug

SEQ ID NO: 340685 - RNA, 21 nt, Artificial Sequence
  Synthetic
accaaucccccauggauacug

SEQ ID NO: 340686 - RNA, 22 nt, Artificial Sequence
  Synthetic
aaccaaucccccauggauacug

SEQ ID NO: 340687 - RNA, 23 nt, Artificial Sequence
  Synthetic
gaaccaaucccccauggauacug

SEQ ID NO: 340688 - RNA, 24 nt, Artificial Sequence
  Synthetic
ggaaccaaucccccauggauacug

SEQ ID NO: 340689 - RNA, 18 nt, Artificial Sequence
  Synthetic
auggcuuggcauauacug

SEQ ID NO: 340690 - RNA, 19 nt, Artificial Sequence
  Synthetic
uauggcuuggcauauacug

SEQ ID NO: 340691 - RNA, 20 nt, Artificial Sequence
  Synthetic
cuauggcuuggcauauacug

SEQ ID NO: 340692 - RNA, 21 nt, Artificial Sequence
  Synthetic
acuauggcuuggcauauacug

SEQ ID NO: 340693 - RNA, 22 nt, Artificial Sequence
  Synthetic
uacuauggcuuggcauauacug

SEQ ID NO: 340694 - RNA, 23 nt, Artificial Sequence
  Synthetic
guacuauggcuuggcauauacug

SEQ ID NO: 340695 - RNA, 24 nt, Artificial Sequence
  Synthetic
uguacuauggcuuggcauauacug

SEQ ID NO: 340696 - RNA, 18 nt, Artificial Sequence
  Synthetic
ggaaauucagauauacug

SEQ ID NO: 340697 - RNA, 19 nt, Artificial Sequence
  Synthetic
aggaaauucagauauacug

SEQ ID NO: 340698 - RNA, 20 nt, Artificial Sequence
  Synthetic
caggaaauucagauauacug

SEQ ID NO: 340699 - RNA, 21 nt, Artificial Sequence
  Synthetic
acaggaaauucagauauacug

SEQ ID NO: 340700 - RNA, 22 nt, Artificial Sequence
  Synthetic
aacaggaaauucagauauacug

SEQ ID NO: 340701 - RNA, 23 nt, Artificial Sequence
  Synthetic
aaacaggaaauucagauauacug

SEQ ID NO: 340702 - RNA, 24 nt, Artificial Sequence
  Synthetic
caaacaggaaauucagauauacug

SEQ ID NO: 340703 - RNA, 18 nt, Artificial Sequence
  Synthetic
gugaagcaccagcuacug

SEQ ID NO: 340704 - RNA, 19 nt, Artificial Sequence
  Synthetic
ugugaagcaccagcuacug

SEQ ID NO: 340705 - RNA, 20 nt, Artificial Sequence
  Synthetic
augugaagcaccagcuacug

SEQ ID NO: 340706 - RNA, 21 nt, Artificial Sequence
  Synthetic
aaugugaagcaccagcuacug

SEQ ID NO: 340707 - RNA, 22 nt, Artificial Sequence
  Synthetic
aaaugugaagcaccagcuacug

SEQ ID NO: 340708 - RNA, 23 nt, Artificial Sequence
  Synthetic
gaaaugugaagcaccagcuacug

SEQ ID NO: 340709 - RNA, 24 nt, Artificial Sequence
  Synthetic
agaaaugugaagcaccagcuacug

SEQ ID NO: 340710 - RNA, 18 nt, Artificial Sequence
  Synthetic
uguuauuacuugcuacug

SEQ ID NO: 340711 - RNA, 19 nt, Artificial Sequence
  Synthetic
guguuauuacuugcuacug

SEQ ID NO: 340712 - RNA, 20 nt, Artificial Sequence
  Synthetic
uguguuauuacuugcuacug

SEQ ID NO: 340713 - RNA, 21 nt, Artificial Sequence
  Synthetic
uuguguuauuacuugcuacug

SEQ ID NO: 340714 - RNA, 22 nt, Artificial Sequence
  Synthetic
cuuguguuauuacuugcuacug

SEQ ID NO: 340715 - RNA, 23 nt, Artificial Sequence
  Synthetic
gcuuguguuauuacuugcuacug

SEQ ID NO: 340716 - RNA, 24 nt, Artificial Sequence
  Synthetic
agcuuguguuauuacuugcuacug

SEQ ID NO: 340717 - RNA, 18 nt, Artificial Sequence
  Synthetic
uuguccauucaucuacug

SEQ ID NO: 340718 - RNA, 19 nt, Artificial Sequence
  Synthetic
uuuguccauucaucuacug

SEQ ID NO: 340719 - RNA, 20 nt, Artificial Sequence
  Synthetic
cuuuguccauucaucuacug

SEQ ID NO: 340720 - RNA, 21 nt, Artificial Sequence
  Synthetic
ucuuuguccauucaucuacug

SEQ ID NO: 340721 - RNA, 22 nt, Artificial Sequence
  Synthetic
uucuuuguccauucaucuacug

SEQ ID NO: 340722 - RNA, 23 nt, Artificial Sequence
  Synthetic
guucuuuguccauucaucuacug

SEQ ID NO: 340723 - RNA, 24 nt, Artificial Sequence
  Synthetic
uguucuuuguccauucaucuacug

SEQ ID NO: 340724 - RNA, 18 nt, Artificial Sequence
  Synthetic
acagagauuuaucuacug

SEQ ID NO: 340725 - RNA, 19 nt, Artificial Sequence
  Synthetic
uacagagauuuaucuacug

SEQ ID NO: 340726 - RNA, 20 nt, Artificial Sequence
  Synthetic
cuacagagauuuaucuacug

SEQ ID NO: 340727 - RNA, 21 nt, Artificial Sequence
  Synthetic
ucuacagagauuuaucuacug

SEQ ID NO: 340728 - RNA, 22 nt, Artificial Sequence
  Synthetic
uucuacagagauuuaucuacug

SEQ ID NO: 340729 - RNA, 23 nt, Artificial Sequence
  Synthetic
uuucuacagagauuuaucuacug

SEQ ID NO: 340730 - RNA, 24 nt, Artificial Sequence
  Synthetic
uuuucuacagagauuuaucuacug

SEQ ID NO: 340731 - RNA, 18 nt, Artificial Sequence
  Synthetic
caggaaggagaaguacug

SEQ ID NO: 340732 - RNA, 19 nt, Artificial Sequence
  Synthetic
gcaggaaggagaaguacug

SEQ ID NO: 340733 - RNA, 20 nt, Artificial Sequence
  Synthetic
ggcaggaaggagaaguacug

SEQ ID NO: 340734 - RNA, 21 nt, Artificial Sequence
  Synthetic
uggcaggaaggagaaguacug

SEQ ID NO: 340735 - RNA, 22 nt, Artificial Sequence
  Synthetic
guggcaggaaggagaaguacug

SEQ ID NO: 340736 - RNA, 23 nt, Artificial Sequence
  Synthetic
gguggcaggaaggagaaguacug

SEQ ID NO: 340737 - RNA, 24 nt, Artificial Sequence
  Synthetic
agguggcaggaaggagaaguacug

SEQ ID NO: 340738 - RNA, 18 nt, Artificial Sequence
  Synthetic
gucaauuggcagguacug

SEQ ID NO: 340739 - RNA, 19 nt, Artificial Sequence
  Synthetic
cgucaauuggcagguacug

SEQ ID NO: 340740 - RNA, 20 nt, Artificial Sequence
  Synthetic
ucgucaauuggcagguacug

SEQ ID NO: 340741 - RNA, 21 nt, Artificial Sequence
  Synthetic
uucgucaauuggcagguacug

SEQ ID NO: 340742 - RNA, 22 nt, Artificial Sequence
  Synthetic
guucgucaauuggcagguacug

SEQ ID NO: 340743 - RNA, 23 nt, Artificial Sequence
  Synthetic
gguucgucaauuggcagguacug

SEQ ID NO: 340744 - RNA, 24 nt, Artificial Sequence
  Synthetic
ggguucgucaauuggcagguacug

SEQ ID NO: 340745 - RNA, 18 nt, Artificial Sequence
  Synthetic
ucaauaaauuagguacug

SEQ ID NO: 340746 - RNA, 19 nt, Artificial Sequence
  Synthetic
cucaauaaauuagguacug

SEQ ID NO: 340747 - RNA, 20 nt, Artificial Sequence
  Synthetic
ucucaauaaauuagguacug

SEQ ID NO: 340748 - RNA, 21 nt, Artificial Sequence
  Synthetic
cucucaauaaauuagguacug

SEQ ID NO: 340749 - RNA, 22 nt, Artificial Sequence
  Synthetic
acucucaauaaauuagguacug

SEQ ID NO: 340750 - RNA, 23 nt, Artificial Sequence
  Synthetic
aacucucaauaaauuagguacug

SEQ ID NO: 340751 - RNA, 24 nt, Artificial Sequence
  Synthetic
aaacucucaauaaauuagguacug

SEQ ID NO: 340752 - RNA, 18 nt, Artificial Sequence
  Synthetic
uacaguaaauugguacug

SEQ ID NO: 340753 - RNA, 19 nt, Artificial Sequence
  Synthetic
auacaguaaauugguacug

SEQ ID NO: 340754 - RNA, 20 nt, Artificial Sequence
  Synthetic
aauacaguaaauugguacug

SEQ ID NO: 340755 - RNA, 21 nt, Artificial Sequence
  Synthetic
uaauacaguaaauugguacug

SEQ ID NO: 340756 - RNA, 22 nt, Artificial Sequence
  Synthetic
cuaauacaguaaauugguacug

SEQ ID NO: 340757 - RNA, 23 nt, Artificial Sequence
  Synthetic
acuaauacaguaaauugguacug

SEQ ID NO: 340758 - RNA, 24 nt, Artificial Sequence
  Synthetic
gacuaauacaguaaauugguacug

SEQ ID NO: 340759 - RNA, 18 nt, Artificial Sequence
  Synthetic
acaaggacgauuguacug

SEQ ID NO: 340760 - RNA, 19 nt, Artificial Sequence
  Synthetic
gacaaggacgauuguacug

SEQ ID NO: 340761 - RNA, 20 nt, Artificial Sequence
  Synthetic
ggacaaggacgauuguacug

SEQ ID NO: 340762 - RNA, 21 nt, Artificial Sequence
  Synthetic
uggacaaggacgauuguacug

SEQ ID NO: 340763 - RNA, 22 nt, Artificial Sequence
  Synthetic
uuggacaaggacgauuguacug

SEQ ID NO: 340764 - RNA, 23 nt, Artificial Sequence
  Synthetic
cuuggacaaggacgauuguacug

SEQ ID NO: 340765 - RNA, 24 nt, Artificial Sequence
  Synthetic
gcuuggacaaggacgauuguacug

SEQ ID NO: 340766 - RNA, 18 nt, Artificial Sequence
  Synthetic
ggaauuuucacauuacug

SEQ ID NO: 340767 - RNA, 19 nt, Artificial Sequence
  Synthetic
uggaauuuucacauuacug

SEQ ID NO: 340768 - RNA, 20 nt, Artificial Sequence
  Synthetic
uuggaauuuucacauuacug

SEQ ID NO: 340769 - RNA, 21 nt, Artificial Sequence
  Synthetic
cuuggaauuuucacauuacug

SEQ ID NO: 340770 - RNA, 22 nt, Artificial Sequence
  Synthetic
gcuuggaauuuucacauuacug

SEQ ID NO: 340771 - RNA, 23 nt, Artificial Sequence
  Synthetic
ugcuuggaauuuucacauuacug

SEQ ID NO: 340772 - RNA, 24 nt, Artificial Sequence
  Synthetic
augcuuggaauuuucacauuacug

SEQ ID NO: 340773 - RNA, 18 nt, Artificial Sequence
  Synthetic
auuuauauuucauuacug

SEQ ID NO: 340774 - RNA, 19 nt, Artificial Sequence
  Synthetic
cauuuauauuucauuacug

SEQ ID NO: 340775 - RNA, 20 nt, Artificial Sequence
  Synthetic
acauuuauauuucauuacug

SEQ ID NO: 340776 - RNA, 21 nt, Artificial Sequence
  Synthetic
uacauuuauauuucauuacug

SEQ ID NO: 340777 - RNA, 22 nt, Artificial Sequence
  Synthetic
guacauuuauauuucauuacug

SEQ ID NO: 340778 - RNA, 23 nt, Artificial Sequence
  Synthetic
uguacauuuauauuucauuacug

SEQ ID NO: 340779 - RNA, 24 nt, Artificial Sequence
  Synthetic
cuguacauuuauauuucauuacug

SEQ ID NO: 340780 - RNA, 18 nt, Artificial Sequence
  Synthetic
uguaaaauuuuauuacug

SEQ ID NO: 340781 - RNA, 19 nt, Artificial Sequence
  Synthetic
auguaaaauuuuauuacug

SEQ ID NO: 340782 - RNA, 20 nt, Artificial Sequence
  Synthetic
gauguaaaauuuuauuacug

SEQ ID NO: 340783 - RNA, 21 nt, Artificial Sequence
  Synthetic
ugauguaaaauuuuauuacug

SEQ ID NO: 340784 - RNA, 22 nt, Artificial Sequence
  Synthetic
cugauguaaaauuuuauuacug

SEQ ID NO: 340785 - RNA, 23 nt, Artificial Sequence
  Synthetic
ucugauguaaaauuuuauuacug

SEQ ID NO: 340786 - RNA, 24 nt, Artificial Sequence
  Synthetic
uucugauguaaaauuuuauuacug

SEQ ID NO: 340787 - RNA, 18 nt, Artificial Sequence
  Synthetic
gugaaaugaaacuuacug

SEQ ID NO: 340788 - RNA, 19 nt, Artificial Sequence
  Synthetic
agugaaaugaaacuuacug

SEQ ID NO: 340789 - RNA, 20 nt, Artificial Sequence
  Synthetic
aagugaaaugaaacuuacug

SEQ ID NO: 340790 - RNA, 21 nt, Artificial Sequence
  Synthetic
gaagugaaaugaaacuuacug

SEQ ID NO: 340791 - RNA, 22 nt, Artificial Sequence
  Synthetic
ugaagugaaaugaaacuuacug

SEQ ID NO: 340792 - RNA, 23 nt, Artificial Sequence
  Synthetic
cugaagugaaaugaaacuuacug

SEQ ID NO: 340793 - RNA, 24 nt, Artificial Sequence
  Synthetic
acugaagugaaaugaaacuuacug

SEQ ID NO: 340794 - RNA, 18 nt, Artificial Sequence
  Synthetic
uugcuugaacucuuacug

SEQ ID NO: 340795 - RNA, 19 nt, Artificial Sequence
  Synthetic
auugcuugaacucuuacug

SEQ ID NO: 340796 - RNA, 20 nt, Artificial Sequence
  Synthetic
aauugcuugaacucuuacug

SEQ ID NO: 340797 - RNA, 21 nt, Artificial Sequence
  Synthetic
aaauugcuugaacucuuacug

SEQ ID NO: 340798 - RNA, 22 nt, Artificial Sequence
  Synthetic
gaaauugcuugaacucuuacug

SEQ ID NO: 340799 - RNA, 23 nt, Artificial Sequence
  Synthetic
ugaaauugcuugaacucuuacug

SEQ ID NO: 340800 - RNA, 24 nt, Artificial Sequence
  Synthetic
gugaaauugcuugaacucuuacug

SEQ ID NO: 340801 - RNA, 18 nt, Artificial Sequence
  Synthetic
ugucuguuucaguuacug

SEQ ID NO: 340802 - RNA, 19 nt, Artificial Sequence
  Synthetic
uugucuguuucaguuacug

SEQ ID NO: 340803 - RNA, 20 nt, Artificial Sequence
  Synthetic
uuugucuguuucaguuacug

SEQ ID NO: 340804 - RNA, 21 nt, Artificial Sequence
  Synthetic
auuugucuguuucaguuacug

SEQ ID NO: 340805 - RNA, 22 nt, Artificial Sequence
  Synthetic
cauuugucuguuucaguuacug

SEQ ID NO: 340806 - RNA, 23 nt, Artificial Sequence
  Synthetic
gcauuugucuguuucaguuacug

SEQ ID NO: 340807 - RNA, 24 nt, Artificial Sequence
  Synthetic
ugcauuugucuguuucaguuacug

SEQ ID NO: 340808 - RNA, 18 nt, Artificial Sequence
  Synthetic
uaaaucucugaguuacug

SEQ ID NO: 340809 - RNA, 19 nt, Artificial Sequence
  Synthetic
uuaaaucucugaguuacug

SEQ ID NO: 340810 - RNA, 20 nt, Artificial Sequence
  Synthetic
cuuaaaucucugaguuacug

SEQ ID NO: 340811 - RNA, 21 nt, Artificial Sequence
  Synthetic
ucuuaaaucucugaguuacug

SEQ ID NO: 340812 - RNA, 22 nt, Artificial Sequence
  Synthetic
uucuuaaaucucugaguuacug

SEQ ID NO: 340813 - RNA, 23 nt, Artificial Sequence
  Synthetic
auucuuaaaucucugaguuacug

SEQ ID NO: 340814 - RNA, 24 nt, Artificial Sequence
  Synthetic
gauucuuaaaucucugaguuacug

SEQ ID NO: 340815 - RNA, 18 nt, Artificial Sequence
  Synthetic
cacccaaaucuguuacug

SEQ ID NO: 340816 - RNA, 19 nt, Artificial Sequence
  Synthetic
ccacccaaaucuguuacug

SEQ ID NO: 340817 - RNA, 20 nt, Artificial Sequence
  Synthetic
cccacccaaaucuguuacug

SEQ ID NO: 340818 - RNA, 21 nt, Artificial Sequence
  Synthetic
acccacccaaaucuguuacug

SEQ ID NO: 340819 - RNA, 22 nt, Artificial Sequence
  Synthetic
aacccacccaaaucuguuacug

SEQ ID NO: 340820 - RNA, 23 nt, Artificial Sequence
  Synthetic
aaacccacccaaaucuguuacug

SEQ ID NO: 340821 - RNA, 24 nt, Artificial Sequence
  Synthetic
aaaacccacccaaaucuguuacug

SEQ ID NO: 340822 - RNA, 18 nt, Artificial Sequence
  Synthetic
ggcaacugucauuuacug

SEQ ID NO: 340823 - RNA, 19 nt, Artificial Sequence
  Synthetic
uggcaacugucauuuacug

SEQ ID NO: 340824 - RNA, 20 nt, Artificial Sequence
  Synthetic
auggcaacugucauuuacug

SEQ ID NO: 340825 - RNA, 21 nt, Artificial Sequence
  Synthetic
uauggcaacugucauuuacug

SEQ ID NO: 340826 - RNA, 22 nt, Artificial Sequence
  Synthetic
uuauggcaacugucauuuacug

SEQ ID NO: 340827 - RNA, 23 nt, Artificial Sequence
  Synthetic
uuuauggcaacugucauuuacug

SEQ ID NO: 340828 - RNA, 24 nt, Artificial Sequence
  Synthetic
uuuuauggcaacugucauuuacug

SEQ ID NO: 340829 - RNA, 18 nt, Artificial Sequence
  Synthetic
gugaagcuaucuuuacug

SEQ ID NO: 340830 - RNA, 19 nt, Artificial Sequence
  Synthetic
ugugaagcuaucuuuacug

SEQ ID NO: 340831 - RNA, 20 nt, Artificial Sequence
  Synthetic
augugaagcuaucuuuacug

SEQ ID NO: 340832 - RNA, 21 nt, Artificial Sequence
  Synthetic
gaugugaagcuaucuuuacug

SEQ ID NO: 340833 - RNA, 22 nt, Artificial Sequence
  Synthetic
ugaugugaagcuaucuuuacug

SEQ ID NO: 340834 - RNA, 23 nt, Artificial Sequence
  Synthetic
augaugugaagcuaucuuuacug

SEQ ID NO: 340835 - RNA, 24 nt, Artificial Sequence
  Synthetic
gaugaugugaagcuaucuuuacug

SEQ ID NO: 340836 - RNA, 18 nt, Artificial Sequence
  Synthetic
cagcaccacgguuuacug

SEQ ID NO: 340837 - RNA, 19 nt, Artificial Sequence
  Synthetic
acagcaccacgguuuacug

SEQ ID NO: 340838 - RNA, 20 nt, Artificial Sequence
  Synthetic
uacagcaccacgguuuacug

SEQ ID NO: 340839 - RNA, 21 nt, Artificial Sequence
  Synthetic
auacagcaccacgguuuacug

SEQ ID NO: 340840 - RNA, 22 nt, Artificial Sequence
  Synthetic
uauacagcaccacgguuuacug

SEQ ID NO: 340841 - RNA, 23 nt, Artificial Sequence
  Synthetic
cuauacagcaccacgguuuacug

SEQ ID NO: 340842 - RNA, 24 nt, Artificial Sequence
  Synthetic
ucuauacagcaccacgguuuacug

SEQ ID NO: 340843 - RNA, 18 nt, Artificial Sequence
  Synthetic
ucuguucuuuguuuacug

SEQ ID NO: 340844 - RNA, 19 nt, Artificial Sequence
  Synthetic
gucuguucuuuguuuacug

SEQ ID NO: 340845 - RNA, 20 nt, Artificial Sequence
  Synthetic
agucuguucuuuguuuacug

SEQ ID NO: 340846 - RNA, 21 nt, Artificial Sequence
  Synthetic
cagucuguucuuuguuuacug

SEQ ID NO: 340847 - RNA, 22 nt, Artificial Sequence
  Synthetic
acagucuguucuuuguuuacug

SEQ ID NO: 340848 - RNA, 23 nt, Artificial Sequence
  Synthetic
aacagucuguucuuuguuuacug

SEQ ID NO: 340849 - RNA, 24 nt, Artificial Sequence
  Synthetic
uaacagucuguucuuuguuuacug

SEQ ID NO: 340850 - RNA, 18 nt, Artificial Sequence
  Synthetic
uagcagcauauuuuacug

SEQ ID NO: 340851 - RNA, 19 nt, Artificial Sequence
  Synthetic
auagcagcauauuuuacug

SEQ ID NO: 340852 - RNA, 20 nt, Artificial Sequence
  Synthetic
cauagcagcauauuuuacug

SEQ ID NO: 340853 - RNA, 21 nt, Artificial Sequence
  Synthetic
ucauagcagcauauuuuacug

SEQ ID NO: 340854 - RNA, 22 nt, Artificial Sequence
  Synthetic
uucauagcagcauauuuuacug

SEQ ID NO: 340855 - RNA, 23 nt, Artificial Sequence
  Synthetic
guucauagcagcauauuuuacug

SEQ ID NO: 340856 - RNA, 24 nt, Artificial Sequence
  Synthetic
aguucauagcagcauauuuuacug

SEQ ID NO: 340857 - RNA, 18 nt, Artificial Sequence
  Synthetic
ucauuuguuauuuuacug

SEQ ID NO: 340858 - RNA, 19 nt, Artificial Sequence
  Synthetic
cucauuuguuauuuuacug

SEQ ID NO: 340859 - RNA, 20 nt, Artificial Sequence
  Synthetic
ucucauuuguuauuuuacug

SEQ ID NO: 340860 - RNA, 21 nt, Artificial Sequence
  Synthetic
aucucauuuguuauuuuacug

SEQ ID NO: 340861 - RNA, 22 nt, Artificial Sequence
  Synthetic
uaucucauuuguuauuuuacug

SEQ ID NO: 340862 - RNA, 23 nt, Artificial Sequence
  Synthetic
uuaucucauuuguuauuuuacug

SEQ ID NO: 340863 - RNA, 24 nt, Artificial Sequence
  Synthetic
uuuaucucauuuguuauuuuacug

SEQ ID NO: 340864 - RNA, 18 nt, Artificial Sequence
  Synthetic
uaaucgagucuuuuacug

SEQ ID NO: 340865 - RNA, 19 nt, Artificial Sequence
  Synthetic
uuaaucgagucuuuuacug

SEQ ID NO: 340866 - RNA, 20 nt, Artificial Sequence
  Synthetic
cuuaaucgagucuuuuacug

SEQ ID NO: 340867 - RNA, 21 nt, Artificial Sequence
  Synthetic
acuuaaucgagucuuuuacug

SEQ ID NO: 340868 - RNA, 22 nt, Artificial Sequence
  Synthetic
cacuuaaucgagucuuuuacug

SEQ ID NO: 340869 - RNA, 23 nt, Artificial Sequence
  Synthetic
ccacuuaaucgagucuuuuacug

SEQ ID NO: 340870 - RNA, 24 nt, Artificial Sequence
  Synthetic
gccacuuaaucgagucuuuuacug

SEQ ID NO: 340871 - RNA, 18 nt, Artificial Sequence
  Synthetic
cucauucuuuuuuuacug

SEQ ID NO: 340872 - RNA, 19 nt, Artificial Sequence
  Synthetic
ucucauucuuuuuuuacug

SEQ ID NO: 340873 - RNA, 20 nt, Artificial Sequence
  Synthetic
uucucauucuuuuuuuacug

SEQ ID NO: 340874 - RNA, 21 nt, Artificial Sequence
  Synthetic
auucucauucuuuuuuuacug

SEQ ID NO: 340875 - RNA, 22 nt, Artificial Sequence
  Synthetic
cauucucauucuuuuuuuacug

SEQ ID NO: 340876 - RNA, 23 nt, Artificial Sequence
  Synthetic
ucauucucauucuuuuuuuacug

SEQ ID NO: 340877 - RNA, 24 nt, Artificial Sequence
  Synthetic
cucauucucauucuuuuuuuacug

SEQ ID NO: 340878 - RNA, 18 nt, Artificial Sequence
  Synthetic
uucgugaaagaaaaccug

SEQ ID NO: 340879 - RNA, 19 nt, Artificial Sequence
  Synthetic
auucgugaaagaaaaccug

SEQ ID NO: 340880 - RNA, 20 nt, Artificial Sequence
  Synthetic
cauucgugaaagaaaaccug

SEQ ID NO: 340881 - RNA, 21 nt, Artificial Sequence
  Synthetic
gcauucgugaaagaaaaccug

SEQ ID NO: 340882 - RNA, 22 nt, Artificial Sequence
  Synthetic
ugcauucgugaaagaaaaccug

SEQ ID NO: 340883 - RNA, 23 nt, Artificial Sequence
  Synthetic
uugcauucgugaaagaaaaccug

SEQ ID NO: 340884 - RNA, 24 nt, Artificial Sequence
  Synthetic
cuugcauucgugaaagaaaaccug

SEQ ID NO: 340885 - RNA, 18 nt, Artificial Sequence
  Synthetic
ugaucuuugacaaaccug

SEQ ID NO: 340886 - RNA, 19 nt, Artificial Sequence
  Synthetic
cugaucuuugacaaaccug

SEQ ID NO: 340887 - RNA, 20 nt, Artificial Sequence
  Synthetic
ucugaucuuugacaaaccug

SEQ ID NO: 340888 - RNA, 21 nt, Artificial Sequence
  Synthetic
aucugaucuuugacaaaccug

SEQ ID NO: 340889 - RNA, 22 nt, Artificial Sequence
  Synthetic
uaucugaucuuugacaaaccug

SEQ ID NO: 340890 - RNA, 23 nt, Artificial Sequence
  Synthetic
cuaucugaucuuugacaaaccug

SEQ ID NO: 340891 - RNA, 24 nt, Artificial Sequence
  Synthetic
acuaucugaucuuugacaaaccug

SEQ ID NO: 340892 - RNA, 18 nt, Artificial Sequence
  Synthetic
gucaauggaucaaaccug

SEQ ID NO: 340893 - RNA, 19 nt, Artificial Sequence
  Synthetic
ugucaauggaucaaaccug

SEQ ID NO: 340894 - RNA, 20 nt, Artificial Sequence
  Synthetic
augucaauggaucaaaccug

SEQ ID NO: 340895 - RNA, 21 nt, Artificial Sequence
  Synthetic
aaugucaauggaucaaaccug

SEQ ID NO: 340896 - RNA, 22 nt, Artificial Sequence
  Synthetic
gaaugucaauggaucaaaccug

SEQ ID NO: 340897 - RNA, 23 nt, Artificial Sequence
  Synthetic
agaaugucaauggaucaaaccug

SEQ ID NO: 340898 - RNA, 24 nt, Artificial Sequence
  Synthetic
uagaaugucaauggaucaaaccug

SEQ ID NO: 340899 - RNA, 18 nt, Artificial Sequence
  Synthetic
ucccuuuacuccaaccug

SEQ ID NO: 340900 - RNA, 19 nt, Artificial Sequence
  Synthetic
uucccuuuacuccaaccug

SEQ ID NO: 340901 - RNA, 20 nt, Artificial Sequence
  Synthetic
auucccuuuacuccaaccug

SEQ ID NO: 340902 - RNA, 21 nt, Artificial Sequence
  Synthetic
uauucccuuuacuccaaccug

SEQ ID NO: 340903 - RNA, 22 nt, Artificial Sequence
  Synthetic
guauucccuuuacuccaaccug

SEQ ID NO: 340904 - RNA, 23 nt, Artificial Sequence
  Synthetic
aguauucccuuuacuccaaccug

SEQ ID NO: 340905 - RNA, 24 nt, Artificial Sequence
  Synthetic
caguauucccuuuacuccaaccug

SEQ ID NO: 340906 - RNA, 18 nt, Artificial Sequence
  Synthetic
acagcguggaugaaccug

SEQ ID NO: 340907 - RNA, 19 nt, Artificial Sequence
  Synthetic
gacagcguggaugaaccug

SEQ ID NO: 340908 - RNA, 20 nt, Artificial Sequence
  Synthetic
ugacagcguggaugaaccug

SEQ ID NO: 340909 - RNA, 21 nt, Artificial Sequence
  Synthetic
augacagcguggaugaaccug

SEQ ID NO: 340910 - RNA, 22 nt, Artificial Sequence
  Synthetic
uaugacagcguggaugaaccug

SEQ ID NO: 340911 - RNA, 23 nt, Artificial Sequence
  Synthetic
uuaugacagcguggaugaaccug

SEQ ID NO: 340912 - RNA, 24 nt, Artificial Sequence
  Synthetic
uuuaugacagcguggaugaaccug

SEQ ID NO: 340913 - RNA, 18 nt, Artificial Sequence
  Synthetic
uucagagcagcuaaccug

SEQ ID NO: 340914 - RNA, 19 nt, Artificial Sequence
  Synthetic
uuucagagcagcuaaccug

SEQ ID NO: 340915 - RNA, 20 nt, Artificial Sequence
  Synthetic
auuucagagcagcuaaccug

SEQ ID NO: 340916 - RNA, 21 nt, Artificial Sequence
  Synthetic
aauuucagagcagcuaaccug

SEQ ID NO: 340917 - RNA, 22 nt, Artificial Sequence
  Synthetic
caauuucagagcagcuaaccug

SEQ ID NO: 340918 - RNA, 23 nt, Artificial Sequence
  Synthetic
ccaauuucagagcagcuaaccug

SEQ ID NO: 340919 - RNA, 24 nt, Artificial Sequence
  Synthetic
cccaauuucagagcagcuaaccug

SEQ ID NO: 340920 - RNA, 18 nt, Artificial Sequence
  Synthetic
augccuaguucccaccug

SEQ ID NO: 340921 - RNA, 19 nt, Artificial Sequence
  Synthetic
gaugccuaguucccaccug

SEQ ID NO: 340922 - RNA, 20 nt, Artificial Sequence
  Synthetic
agaugccuaguucccaccug

SEQ ID NO: 340923 - RNA, 21 nt, Artificial Sequence
  Synthetic
gagaugccuaguucccaccug

SEQ ID NO: 340924 - RNA, 22 nt, Artificial Sequence
  Synthetic
agagaugccuaguucccaccug

SEQ ID NO: 340925 - RNA, 23 nt, Artificial Sequence
  Synthetic
uagagaugccuaguucccaccug

SEQ ID NO: 340926 - RNA, 24 nt, Artificial Sequence
  Synthetic
auagagaugccuaguucccaccug

SEQ ID NO: 340927 - RNA, 18 nt, Artificial Sequence
  Synthetic
caccagcccuuccaccug

SEQ ID NO: 340928 - RNA, 19 nt, Artificial Sequence
  Synthetic
ccaccagcccuuccaccug

SEQ ID NO: 340929 - RNA, 20 nt, Artificial Sequence
  Synthetic
gccaccagcccuuccaccug

SEQ ID NO: 340930 - RNA, 21 nt, Artificial Sequence
  Synthetic
ugccaccagcccuuccaccug

SEQ ID NO: 340931 - RNA, 22 nt, Artificial Sequence
  Synthetic
cugccaccagcccuuccaccug

SEQ ID NO: 340932 - RNA, 23 nt, Artificial Sequence
  Synthetic
ucugccaccagcccuuccaccug

SEQ ID NO: 340933 - RNA, 24 nt, Artificial Sequence
  Synthetic
gucugccaccagcccuuccaccug

SEQ ID NO: 340934 - RNA, 18 nt, Artificial Sequence
  Synthetic
ugguaauuaaaucaccug

SEQ ID NO: 340935 - RNA, 19 nt, Artificial Sequence
  Synthetic
uugguaauuaaaucaccug

SEQ ID NO: 340936 - RNA, 20 nt, Artificial Sequence
  Synthetic
auugguaauuaaaucaccug

SEQ ID NO: 340937 - RNA, 21 nt, Artificial Sequence
  Synthetic
uauugguaauuaaaucaccug

SEQ ID NO: 340938 - RNA, 22 nt, Artificial Sequence
  Synthetic
uuauugguaauuaaaucaccug

SEQ ID NO: 340939 - RNA, 23 nt, Artificial Sequence
  Synthetic
auuauugguaauuaaaucaccug

SEQ ID NO: 340940 - RNA, 24 nt, Artificial Sequence
  Synthetic
gauuauugguaauuaaaucaccug

SEQ ID NO: 340941 - RNA, 18 nt, Artificial Sequence
  Synthetic
auacaucagaaucaccug

SEQ ID NO: 340942 - RNA, 19 nt, Artificial Sequence
  Synthetic
cauacaucagaaucaccug

SEQ ID NO: 340943 - RNA, 20 nt, Artificial Sequence
  Synthetic
gcauacaucagaaucaccug

SEQ ID NO: 340944 - RNA, 21 nt, Artificial Sequence
  Synthetic
agcauacaucagaaucaccug

SEQ ID NO: 340945 - RNA, 22 nt, Artificial Sequence
  Synthetic
cagcauacaucagaaucaccug

SEQ ID NO: 340946 - RNA, 23 nt, Artificial Sequence
  Synthetic
ucagcauacaucagaaucaccug

SEQ ID NO: 340947 - RNA, 24 nt, Artificial Sequence
  Synthetic
cucagcauacaucagaaucaccug

SEQ ID NO: 340948 - RNA, 18 nt, Artificial Sequence
  Synthetic
gcguaucugaaucaccug

SEQ ID NO: 340949 - RNA, 19 nt, Artificial Sequence
  Synthetic
ugcguaucugaaucaccug

SEQ ID NO: 340950 - RNA, 20 nt, Artificial Sequence
  Synthetic
uugcguaucugaaucaccug

SEQ ID NO: 340951 - RNA, 21 nt, Artificial Sequence
  Synthetic
auugcguaucugaaucaccug

SEQ ID NO: 340952 - RNA, 22 nt, Artificial Sequence
  Synthetic
gauugcguaucugaaucaccug

SEQ ID NO: 340953 - RNA, 23 nt, Artificial Sequence
  Synthetic
ugauugcguaucugaaucaccug

SEQ ID NO: 340954 - RNA, 24 nt, Artificial Sequence
  Synthetic
uugauugcguaucugaaucaccug

SEQ ID NO: 340955 - RNA, 18 nt, Artificial Sequence
  Synthetic
caagcuauagaucaccug

SEQ ID NO: 340956 - RNA, 19 nt, Artificial Sequence
  Synthetic
ucaagcuauagaucaccug

SEQ ID NO: 340957 - RNA, 20 nt, Artificial Sequence
  Synthetic
uucaagcuauagaucaccug

SEQ ID NO: 340958 - RNA, 21 nt, Artificial Sequence
  Synthetic
guucaagcuauagaucaccug

SEQ ID NO: 340959 - RNA, 22 nt, Artificial Sequence
  Synthetic
aguucaagcuauagaucaccug

SEQ ID NO: 340960 - RNA, 23 nt, Artificial Sequence
  Synthetic
uaguucaagcuauagaucaccug

SEQ ID NO: 340961 - RNA, 24 nt, Artificial Sequence
  Synthetic
uuaguucaagcuauagaucaccug

SEQ ID NO: 340962 - RNA, 18 nt, Artificial Sequence
  Synthetic
gcagaaugucuucaccug

SEQ ID NO: 340963 - RNA, 19 nt, Artificial Sequence
  Synthetic
agcagaaugucuucaccug

SEQ ID NO: 340964 - RNA, 20 nt, Artificial Sequence
  Synthetic
gagcagaaugucuucaccug

SEQ ID NO: 340965 - RNA, 21 nt, Artificial Sequence
  Synthetic
agagcagaaugucuucaccug

SEQ ID NO: 340966 - RNA, 22 nt, Artificial Sequence
  Synthetic
uagagcagaaugucuucaccug

SEQ ID NO: 340967 - RNA, 23 nt, Artificial Sequence
  Synthetic
guagagcagaaugucuucaccug

SEQ ID NO: 340968 - RNA, 24 nt, Artificial Sequence
  Synthetic
gguagagcagaaugucuucaccug

SEQ ID NO: 340969 - RNA, 18 nt, Artificial Sequence
  Synthetic
ucagauuucuaagaccug

SEQ ID NO: 340970 - RNA, 19 nt, Artificial Sequence
  Synthetic
cucagauuucuaagaccug

SEQ ID NO: 340971 - RNA, 20 nt, Artificial Sequence
  Synthetic
ccucagauuucuaagaccug

SEQ ID NO: 340972 - RNA, 21 nt, Artificial Sequence
  Synthetic
accucagauuucuaagaccug

SEQ ID NO: 340973 - RNA, 22 nt, Artificial Sequence
  Synthetic
caccucagauuucuaagaccug

SEQ ID NO: 340974 - RNA, 23 nt, Artificial Sequence
  Synthetic
acaccucagauuucuaagaccug

SEQ ID NO: 340975 - RNA, 24 nt, Artificial Sequence
  Synthetic
gacaccucagauuucuaagaccug

SEQ ID NO: 340976 - RNA, 18 nt, Artificial Sequence
  Synthetic
cauuauuccacagaccug

SEQ ID NO: 340977 - RNA, 19 nt, Artificial Sequence
  Synthetic
acauuauuccacagaccug

SEQ ID NO: 340978 - RNA, 20 nt, Artificial Sequence
  Synthetic
uacauuauuccacagaccug

SEQ ID NO: 340979 - RNA, 21 nt, Artificial Sequence
  Synthetic
auacauuauuccacagaccug

SEQ ID NO: 340980 - RNA, 22 nt, Artificial Sequence
  Synthetic
uauacauuauuccacagaccug

SEQ ID NO: 340981 - RNA, 23 nt, Artificial Sequence
  Synthetic
cuauacauuauuccacagaccug

SEQ ID NO: 340982 - RNA, 24 nt, Artificial Sequence
  Synthetic
ccuauacauuauuccacagaccug

SEQ ID NO: 340983 - RNA, 18 nt, Artificial Sequence
  Synthetic
uaccucagcugagaccug

SEQ ID NO: 340984 - RNA, 19 nt, Artificial Sequence
  Synthetic
uuaccucagcugagaccug

SEQ ID NO: 340985 - RNA, 20 nt, Artificial Sequence
  Synthetic
cuuaccucagcugagaccug

SEQ ID NO: 340986 - RNA, 21 nt, Artificial Sequence
  Synthetic
ccuuaccucagcugagaccug

SEQ ID NO: 340987 - RNA, 22 nt, Artificial Sequence
  Synthetic
gccuuaccucagcugagaccug

SEQ ID NO: 340988 - RNA, 23 nt, Artificial Sequence
  Synthetic
agccuuaccucagcugagaccug

SEQ ID NO: 340989 - RNA, 24 nt, Artificial Sequence
  Synthetic
aagccuuaccucagcugagaccug

SEQ ID NO: 340990 - RNA, 18 nt, Artificial Sequence
  Synthetic
ccaacauggauggaccug

SEQ ID NO: 340991 - RNA, 19 nt, Artificial Sequence
  Synthetic
cccaacauggauggaccug

SEQ ID NO: 340992 - RNA, 20 nt, Artificial Sequence
  Synthetic
ucccaacauggauggaccug

SEQ ID NO: 340993 - RNA, 21 nt, Artificial Sequence
  Synthetic
gucccaacauggauggaccug

SEQ ID NO: 340994 - RNA, 22 nt, Artificial Sequence
  Synthetic
ugucccaacauggauggaccug

SEQ ID NO: 340995 - RNA, 23 nt, Artificial Sequence
  Synthetic
uugucccaacauggauggaccug

SEQ ID NO: 340996 - RNA, 24 nt, Artificial Sequence
  Synthetic
uuugucccaacauggauggaccug

SEQ ID NO: 340997 - RNA, 18 nt, Artificial Sequence
  Synthetic
aggaacauaaaugaccug

SEQ ID NO: 340998 - RNA, 19 nt, Artificial Sequence
  Synthetic
gaggaacauaaaugaccug

SEQ ID NO: 340999 - RNA, 20 nt, Artificial Sequence
  Synthetic
agaggaacauaaaugaccug

SEQ ID NO: 341000 - RNA, 21 nt, Artificial Sequence
  Synthetic
gagaggaacauaaaugaccug

SEQ ID NO: 341001 - RNA, 22 nt, Artificial Sequence
  Synthetic
agagaggaacauaaaugaccug

SEQ ID NO: 341002 - RNA, 23 nt, Artificial Sequence
  Synthetic
uagagaggaacauaaaugaccug

SEQ ID NO: 341003 - RNA, 24 nt, Artificial Sequence
  Synthetic
uuagagaggaacauaaaugaccug

SEQ ID NO: 341004 - RNA, 18 nt, Artificial Sequence
  Synthetic
ggcagaauuucugaccug

SEQ ID NO: 341005 - RNA, 19 nt, Artificial Sequence
  Synthetic
cggcagaauuucugaccug

SEQ ID NO: 341006 - RNA, 20 nt, Artificial Sequence
  Synthetic
acggcagaauuucugaccug

SEQ ID NO: 341007 - RNA, 21 nt, Artificial Sequence
  Synthetic
uacggcagaauuucugaccug

SEQ ID NO: 341008 - RNA, 22 nt, Artificial Sequence
  Synthetic
auacggcagaauuucugaccug

SEQ ID NO: 341009 - RNA, 23 nt, Artificial Sequence
  Synthetic
aauacggcagaauuucugaccug

SEQ ID NO: 341010 - RNA, 24 nt, Artificial Sequence
  Synthetic
gaauacggcagaauuucugaccug

SEQ ID NO: 341011 - RNA, 18 nt, Artificial Sequence
  Synthetic
gcuagaugaggauaccug

SEQ ID NO: 341012 - RNA, 19 nt, Artificial Sequence
  Synthetic
ugcuagaugaggauaccug

SEQ ID NO: 341013 - RNA, 20 nt, Artificial Sequence
  Synthetic
augcuagaugaggauaccug

SEQ ID NO: 341014 - RNA, 21 nt, Artificial Sequence
  Synthetic
aaugcuagaugaggauaccug

SEQ ID NO: 341015 - RNA, 22 nt, Artificial Sequence
  Synthetic
aaaugcuagaugaggauaccug

SEQ ID NO: 341016 - RNA, 23 nt, Artificial Sequence
  Synthetic
uaaaugcuagaugaggauaccug

SEQ ID NO: 341017 - RNA, 24 nt, Artificial Sequence
  Synthetic
cuaaaugcuagaugaggauaccug

SEQ ID NO: 341018 - RNA, 18 nt, Artificial Sequence
  Synthetic
aaggagaauguauaccug

SEQ ID NO: 341019 - RNA, 19 nt, Artificial Sequence
  Synthetic
aaaggagaauguauaccug

SEQ ID NO: 341020 - RNA, 20 nt, Artificial Sequence
  Synthetic
aaaaggagaauguauaccug

SEQ ID NO: 341021 - RNA, 21 nt, Artificial Sequence
  Synthetic
uaaaaggagaauguauaccug

SEQ ID NO: 341022 - RNA, 22 nt, Artificial Sequence
  Synthetic
uuaaaaggagaauguauaccug

SEQ ID NO: 341023 - RNA, 23 nt, Artificial Sequence
  Synthetic
guuaaaaggagaauguauaccug

SEQ ID NO: 341024 - RNA, 24 nt, Artificial Sequence
  Synthetic
cguuaaaaggagaauguauaccug

SEQ ID NO: 341025 - RNA, 18 nt, Artificial Sequence
  Synthetic
gaacauauuugcuaccug

SEQ ID NO: 341026 - RNA, 19 nt, Artificial Sequence
  Synthetic
ugaacauauuugcuaccug

SEQ ID NO: 341027 - RNA, 20 nt, Artificial Sequence
  Synthetic
uugaacauauuugcuaccug

SEQ ID NO: 341028 - RNA, 21 nt, Artificial Sequence
  Synthetic
auugaacauauuugcuaccug

SEQ ID NO: 341029 - RNA, 22 nt, Artificial Sequence
  Synthetic
aauugaacauauuugcuaccug

SEQ ID NO: 341030 - RNA, 23 nt, Artificial Sequence
  Synthetic
aaauugaacauauuugcuaccug

SEQ ID NO: 341031 - RNA, 24 nt, Artificial Sequence
  Synthetic
aaaauugaacauauuugcuaccug

SEQ ID NO: 341032 - RNA, 18 nt, Artificial Sequence
  Synthetic
ccuaugaaaaagacccug

SEQ ID NO: 341033 - RNA, 19 nt, Artificial Sequence
  Synthetic
cccuaugaaaaagacccug

SEQ ID NO: 341034 - RNA, 20 nt, Artificial Sequence
  Synthetic
gcccuaugaaaaagacccug

SEQ ID NO: 341035 - RNA, 21 nt, Artificial Sequence
  Synthetic
agcccuaugaaaaagacccug

SEQ ID NO: 341036 - RNA, 22 nt, Artificial Sequence
  Synthetic
gagcccuaugaaaaagacccug

SEQ ID NO: 341037 - RNA, 23 nt, Artificial Sequence
  Synthetic
ggagcccuaugaaaaagacccug

SEQ ID NO: 341038 - RNA, 24 nt, Artificial Sequence
  Synthetic
uggagcccuaugaaaaagacccug

SEQ ID NO: 341039 - RNA, 18 nt, Artificial Sequence
  Synthetic
cuucccaccucaccccug

SEQ ID NO: 341040 - RNA, 19 nt, Artificial Sequence
  Synthetic
ccuucccaccucaccccug

SEQ ID NO: 341041 - RNA, 20 nt, Artificial Sequence
  Synthetic
accuucccaccucaccccug

SEQ ID NO: 341042 - RNA, 21 nt, Artificial Sequence
  Synthetic
aaccuucccaccucaccccug

SEQ ID NO: 341043 - RNA, 22 nt, Artificial Sequence
  Synthetic
aaaccuucccaccucaccccug

SEQ ID NO: 341044 - RNA, 23 nt, Artificial Sequence
  Synthetic
aaaaccuucccaccucaccccug

SEQ ID NO: 341045 - RNA, 24 nt, Artificial Sequence
  Synthetic
uaaaaccuucccaccucaccccug

SEQ ID NO: 341046 - RNA, 18 nt, Artificial Sequence
  Synthetic
guagcaguuaugccccug

SEQ ID NO: 341047 - RNA, 19 nt, Artificial Sequence
  Synthetic
uguagcaguuaugccccug

SEQ ID NO: 341048 - RNA, 20 nt, Artificial Sequence
  Synthetic
auguagcaguuaugccccug

SEQ ID NO: 341049 - RNA, 21 nt, Artificial Sequence
  Synthetic
aauguagcaguuaugccccug

SEQ ID NO: 341050 - RNA, 22 nt, Artificial Sequence
  Synthetic
aaauguagcaguuaugccccug

SEQ ID NO: 341051 - RNA, 23 nt, Artificial Sequence
  Synthetic
gaaauguagcaguuaugccccug

SEQ ID NO: 341052 - RNA, 24 nt, Artificial Sequence
  Synthetic
agaaauguagcaguuaugccccug

SEQ ID NO: 341053 - RNA, 18 nt, Artificial Sequence
  Synthetic
uucccaauuuauccccug

SEQ ID NO: 341054 - RNA, 19 nt, Artificial Sequence
  Synthetic
uuucccaauuuauccccug

SEQ ID NO: 341055 - RNA, 20 nt, Artificial Sequence
  Synthetic
auuucccaauuuauccccug

SEQ ID NO: 341056 - RNA, 21 nt, Artificial Sequence
  Synthetic
uauuucccaauuuauccccug

SEQ ID NO: 341057 - RNA, 22 nt, Artificial Sequence
  Synthetic
uuauuucccaauuuauccccug

SEQ ID NO: 341058 - RNA, 23 nt, Artificial Sequence
  Synthetic
cuuauuucccaauuuauccccug

SEQ ID NO: 341059 - RNA, 24 nt, Artificial Sequence
  Synthetic
ccuuauuucccaauuuauccccug

SEQ ID NO: 341060 - RNA, 18 nt, Artificial Sequence
  Synthetic
ucaagguaugcuccccug

SEQ ID NO: 341061 - RNA, 19 nt, Artificial Sequence
  Synthetic
aucaagguaugcuccccug

SEQ ID NO: 341062 - RNA, 20 nt, Artificial Sequence
  Synthetic
uaucaagguaugcuccccug

SEQ ID NO: 341063 - RNA, 21 nt, Artificial Sequence
  Synthetic
uuaucaagguaugcuccccug

SEQ ID NO: 341064 - RNA, 22 nt, Artificial Sequence
  Synthetic
auuaucaagguaugcuccccug

SEQ ID NO: 341065 - RNA, 23 nt, Artificial Sequence
  Synthetic
uauuaucaagguaugcuccccug

SEQ ID NO: 341066 - RNA, 24 nt, Artificial Sequence
  Synthetic
auauuaucaagguaugcuccccug

SEQ ID NO: 341067 - RNA, 18 nt, Artificial Sequence
  Synthetic
uuuauuuuuuuuccccug

SEQ ID NO: 341068 - RNA, 19 nt, Artificial Sequence
  Synthetic
uuuuauuuuuuuuccccug

SEQ ID NO: 341069 - RNA, 20 nt, Artificial Sequence
  Synthetic
guuuuauuuuuuuuccccug

SEQ ID NO: 341070 - RNA, 21 nt, Artificial Sequence
  Synthetic
uguuuuauuuuuuuuccccug

SEQ ID NO: 341071 - RNA, 22 nt, Artificial Sequence
  Synthetic
uuguuuuauuuuuuuuccccug

SEQ ID NO: 341072 - RNA, 23 nt, Artificial Sequence
  Synthetic
uuuguuuuauuuuuuuuccccug

SEQ ID NO: 341073 - RNA, 24 nt, Artificial Sequence
  Synthetic
auuuguuuuauuuuuuuuccccug

SEQ ID NO: 341074 - RNA, 18 nt, Artificial Sequence
  Synthetic
gugagggacugugcccug

SEQ ID NO: 341075 - RNA, 19 nt, Artificial Sequence
  Synthetic
cgugagggacugugcccug

SEQ ID NO: 341076 - RNA, 20 nt, Artificial Sequence
  Synthetic
ccgugagggacugugcccug

SEQ ID NO: 341077 - RNA, 21 nt, Artificial Sequence
  Synthetic
gccgugagggacugugcccug

SEQ ID NO: 341078 - RNA, 22 nt, Artificial Sequence
  Synthetic
agccgugagggacugugcccug

SEQ ID NO: 341079 - RNA, 23 nt, Artificial Sequence
  Synthetic
aagccgugagggacugugcccug

SEQ ID NO: 341080 - RNA, 24 nt, Artificial Sequence
  Synthetic
gaagccgugagggacugugcccug

SEQ ID NO: 341081 - RNA, 18 nt, Artificial Sequence
  Synthetic
caggcaguauuugcccug

SEQ ID NO: 341082 - RNA, 19 nt, Artificial Sequence
  Synthetic
ccaggcaguauuugcccug

SEQ ID NO: 341083 - RNA, 20 nt, Artificial Sequence
  Synthetic
accaggcaguauuugcccug

SEQ ID NO: 341084 - RNA, 21 nt, Artificial Sequence
  Synthetic
aaccaggcaguauuugcccug

SEQ ID NO: 341085 - RNA, 22 nt, Artificial Sequence
  Synthetic
aaaccaggcaguauuugcccug

SEQ ID NO: 341086 - RNA, 23 nt, Artificial Sequence
  Synthetic
uaaaccaggcaguauuugcccug

SEQ ID NO: 341087 - RNA, 24 nt, Artificial Sequence
  Synthetic
cuaaaccaggcaguauuugcccug

SEQ ID NO: 341088 - RNA, 18 nt, Artificial Sequence
  Synthetic
aaugccaccuuugcccug

SEQ ID NO: 341089 - RNA, 19 nt, Artificial Sequence
  Synthetic
aaaugccaccuuugcccug

SEQ ID NO: 341090 - RNA, 20 nt, Artificial Sequence
  Synthetic
caaaugccaccuuugcccug

SEQ ID NO: 341091 - RNA, 21 nt, Artificial Sequence
  Synthetic
acaaaugccaccuuugcccug

SEQ ID NO: 341092 - RNA, 22 nt, Artificial Sequence
  Synthetic
gacaaaugccaccuuugcccug

SEQ ID NO: 341093 - RNA, 23 nt, Artificial Sequence
  Synthetic
ugacaaaugccaccuuugcccug

SEQ ID NO: 341094 - RNA, 24 nt, Artificial Sequence
  Synthetic
cugacaaaugccaccuuugcccug

SEQ ID NO: 341095 - RNA, 18 nt, Artificial Sequence
  Synthetic
uucaggccaauaucccug

SEQ ID NO: 341096 - RNA, 19 nt, Artificial Sequence
  Synthetic
uuucaggccaauaucccug

SEQ ID NO: 341097 - RNA, 20 nt, Artificial Sequence
  Synthetic
auuucaggccaauaucccug

SEQ ID NO: 341098 - RNA, 21 nt, Artificial Sequence
  Synthetic
aauuucaggccaauaucccug

SEQ ID NO: 341099 - RNA, 22 nt, Artificial Sequence
  Synthetic
aaauuucaggccaauaucccug

SEQ ID NO: 341100 - RNA, 23 nt, Artificial Sequence
  Synthetic
aaaauuucaggccaauaucccug

SEQ ID NO: 341101 - RNA, 24 nt, Artificial Sequence
  Synthetic
gaaaauuucaggccaauaucccug

SEQ ID NO: 341102 - RNA, 18 nt, Artificial Sequence
  Synthetic
agacugucugacucccug

SEQ ID NO: 341103 - RNA, 19 nt, Artificial Sequence
  Synthetic
uagacugucugacucccug

SEQ ID NO: 341104 - RNA, 20 nt, Artificial Sequence
  Synthetic
auagacugucugacucccug

SEQ ID NO: 341105 - RNA, 21 nt, Artificial Sequence
  Synthetic
cauagacugucugacucccug

SEQ ID NO: 341106 - RNA, 22 nt, Artificial Sequence
  Synthetic
acauagacugucugacucccug

SEQ ID NO: 341107 - RNA, 23 nt, Artificial Sequence
  Synthetic
aacauagacugucugacucccug

SEQ ID NO: 341108 - RNA, 24 nt, Artificial Sequence
  Synthetic
caacauagacugucugacucccug

SEQ ID NO: 341109 - RNA, 18 nt, Artificial Sequence
  Synthetic
auauguuucgccucccug

SEQ ID NO: 341110 - RNA, 19 nt, Artificial Sequence
  Synthetic
uauauguuucgccucccug

SEQ ID NO: 341111 - RNA, 20 nt, Artificial Sequence
  Synthetic
guauauguuucgccucccug

SEQ ID NO: 341112 - RNA, 21 nt, Artificial Sequence
  Synthetic
aguauauguuucgccucccug

SEQ ID NO: 341113 - RNA, 22 nt, Artificial Sequence
  Synthetic
uaguauauguuucgccucccug

SEQ ID NO: 341114 - RNA, 23 nt, Artificial Sequence
  Synthetic
guaguauauguuucgccucccug

SEQ ID NO: 341115 - RNA, 24 nt, Artificial Sequence
  Synthetic
uguaguauauguuucgccucccug

SEQ ID NO: 341116 - RNA, 18 nt, Artificial Sequence
  Synthetic
gcauaucccuucucccug

SEQ ID NO: 341117 - RNA, 19 nt, Artificial Sequence
  Synthetic
agcauaucccuucucccug

SEQ ID NO: 341118 - RNA, 20 nt, Artificial Sequence
  Synthetic
aagcauaucccuucucccug

SEQ ID NO: 341119 - RNA, 21 nt, Artificial Sequence
  Synthetic
aaagcauaucccuucucccug

SEQ ID NO: 341120 - RNA, 22 nt, Artificial Sequence
  Synthetic
gaaagcauaucccuucucccug

SEQ ID NO: 341121 - RNA, 23 nt, Artificial Sequence
  Synthetic
agaaagcauaucccuucucccug

SEQ ID NO: 341122 - RNA, 24 nt, Artificial Sequence
  Synthetic
aagaaagcauaucccuucucccug

SEQ ID NO: 341123 - RNA, 18 nt, Artificial Sequence
  Synthetic
cagcucaggcagucccug

SEQ ID NO: 341124 - RNA, 19 nt, Artificial Sequence
  Synthetic
gcagcucaggcagucccug

SEQ ID NO: 341125 - RNA, 20 nt, Artificial Sequence
  Synthetic
ugcagcucaggcagucccug

SEQ ID NO: 341126 - RNA, 21 nt, Artificial Sequence
  Synthetic
cugcagcucaggcagucccug

SEQ ID NO: 341127 - RNA, 22 nt, Artificial Sequence
  Synthetic
ucugcagcucaggcagucccug

SEQ ID NO: 341128 - RNA, 23 nt, Artificial Sequence
  Synthetic
cucugcagcucaggcagucccug

SEQ ID NO: 341129 - RNA, 24 nt, Artificial Sequence
  Synthetic
ucucugcagcucaggcagucccug

SEQ ID NO: 341130 - RNA, 18 nt, Artificial Sequence
  Synthetic
cuagggcuuaauucccug

SEQ ID NO: 341131 - RNA, 19 nt, Artificial Sequence
  Synthetic
acuagggcuuaauucccug

SEQ ID NO: 341132 - RNA, 20 nt, Artificial Sequence
  Synthetic
aacuagggcuuaauucccug

SEQ ID NO: 341133 - RNA, 21 nt, Artificial Sequence
  Synthetic
gaacuagggcuuaauucccug

SEQ ID NO: 341134 - RNA, 22 nt, Artificial Sequence
  Synthetic
agaacuagggcuuaauucccug

SEQ ID NO: 341135 - RNA, 23 nt, Artificial Sequence
  Synthetic
gagaacuagggcuuaauucccug

SEQ ID NO: 341136 - RNA, 24 nt, Artificial Sequence
  Synthetic
ugagaacuagggcuuaauucccug

SEQ ID NO: 341137 - RNA, 18 nt, Artificial Sequence
  Synthetic
accagacacuguucccug

SEQ ID NO: 341138 - RNA, 19 nt, Artificial Sequence
  Synthetic
caccagacacuguucccug

SEQ ID NO: 341139 - RNA, 20 nt, Artificial Sequence
  Synthetic
acaccagacacuguucccug

SEQ ID NO: 341140 - RNA, 21 nt, Artificial Sequence
  Synthetic
cacaccagacacuguucccug

SEQ ID NO: 341141 - RNA, 22 nt, Artificial Sequence
  Synthetic
acacaccagacacuguucccug

SEQ ID NO: 341142 - RNA, 23 nt, Artificial Sequence
  Synthetic
cacacaccagacacuguucccug

SEQ ID NO: 341143 - RNA, 24 nt, Artificial Sequence
  Synthetic
ccacacaccagacacuguucccug

SEQ ID NO: 341144 - RNA, 18 nt, Artificial Sequence
  Synthetic
ucucaacuuuguucccug

SEQ ID NO: 341145 - RNA, 19 nt, Artificial Sequence
  Synthetic
aucucaacuuuguucccug

SEQ ID NO: 341146 - RNA, 20 nt, Artificial Sequence
  Synthetic
uaucucaacuuuguucccug

SEQ ID NO: 341147 - RNA, 21 nt, Artificial Sequence
  Synthetic
auaucucaacuuuguucccug

SEQ ID NO: 341148 - RNA, 22 nt, Artificial Sequence
  Synthetic
uauaucucaacuuuguucccug

SEQ ID NO: 341149 - RNA, 23 nt, Artificial Sequence
  Synthetic
auauaucucaacuuuguucccug

SEQ ID NO: 341150 - RNA, 24 nt, Artificial Sequence
  Synthetic
cauauaucucaacuuuguucccug

SEQ ID NO: 341151 - RNA, 24 nt, Artificial Sequence
  Synthetic
uauauaucucaacuuuguucccug

SEQ ID NO: 341152 - RNA, 18 nt, Artificial Sequence
  Synthetic
ugcuuccuguacagccug

SEQ ID NO: 341153 - RNA, 19 nt, Artificial Sequence
  Synthetic
augcuuccuguacagccug

SEQ ID NO: 341154 - RNA, 20 nt, Artificial Sequence
  Synthetic
caugcuuccuguacagccug

SEQ ID NO: 341155 - RNA, 21 nt, Artificial Sequence
  Synthetic
acaugcuuccuguacagccug

SEQ ID NO: 341156 - RNA, 22 nt, Artificial Sequence
  Synthetic
gacaugcuuccuguacagccug

SEQ ID NO: 341157 - RNA, 23 nt, Artificial Sequence
  Synthetic
ugacaugcuuccuguacagccug

SEQ ID NO: 341158 - RNA, 24 nt, Artificial Sequence
  Synthetic
gugacaugcuuccuguacagccug

SEQ ID NO: 341159 - RNA, 18 nt, Artificial Sequence
  Synthetic
ccacugcacuccagccug

SEQ ID NO: 341160 - RNA, 19 nt, Artificial Sequence
  Synthetic
gccacugcacuccagccug

SEQ ID NO: 341161 - RNA, 20 nt, Artificial Sequence
  Synthetic
cgccacugcacuccagccug

SEQ ID NO: 341162 - RNA, 21 nt, Artificial Sequence
  Synthetic
gcgccacugcacuccagccug

SEQ ID NO: 341163 - RNA, 22 nt, Artificial Sequence
  Synthetic
ggcgccacugcacuccagccug

SEQ ID NO: 341164 - RNA, 23 nt, Artificial Sequence
  Synthetic
uggcgccacugcacuccagccug

SEQ ID NO: 341165 - RNA, 24 nt, Artificial Sequence
  Synthetic
auggcgccacugcacuccagccug

SEQ ID NO: 341166 - RNA, 18 nt, Artificial Sequence
  Synthetic
guccccuuggagagccug

SEQ ID NO: 341167 - RNA, 19 nt, Artificial Sequence
  Synthetic
aguccccuuggagagccug

SEQ ID NO: 341168 - RNA, 20 nt, Artificial Sequence
  Synthetic
gaguccccuuggagagccug

SEQ ID NO: 341169 - RNA, 21 nt, Artificial Sequence
  Synthetic
ugaguccccuuggagagccug

SEQ ID NO: 341170 - RNA, 22 nt, Artificial Sequence
  Synthetic
uugaguccccuuggagagccug

SEQ ID NO: 341171 - RNA, 23 nt, Artificial Sequence
  Synthetic
guugaguccccuuggagagccug

SEQ ID NO: 341172 - RNA, 24 nt, Artificial Sequence
  Synthetic
gguugaguccccuuggagagccug

SEQ ID NO: 341173 - RNA, 18 nt, Artificial Sequence
  Synthetic
aaagucagugguagccug

SEQ ID NO: 341174 - RNA, 19 nt, Artificial Sequence
  Synthetic
gaaagucagugguagccug

SEQ ID NO: 341175 - RNA, 20 nt, Artificial Sequence
  Synthetic
agaaagucagugguagccug

SEQ ID NO: 341176 - RNA, 21 nt, Artificial Sequence
  Synthetic
aagaaagucagugguagccug

SEQ ID NO: 341177 - RNA, 22 nt, Artificial Sequence
  Synthetic
aaagaaagucagugguagccug

SEQ ID NO: 341178 - RNA, 23 nt, Artificial Sequence
  Synthetic
uaaagaaagucagugguagccug

SEQ ID NO: 341179 - RNA, 24 nt, Artificial Sequence
  Synthetic
guaaagaaagucagugguagccug

SEQ ID NO: 341180 - RNA, 18 nt, Artificial Sequence
  Synthetic
ggaugaguuguuagccug

SEQ ID NO: 341181 - RNA, 19 nt, Artificial Sequence
  Synthetic
gggaugaguuguuagccug

SEQ ID NO: 341182 - RNA, 20 nt, Artificial Sequence
  Synthetic
ugggaugaguuguuagccug

SEQ ID NO: 341183 - RNA, 21 nt, Artificial Sequence
  Synthetic
gugggaugaguuguuagccug

SEQ ID NO: 341184 - RNA, 22 nt, Artificial Sequence
  Synthetic
agugggaugaguuguuagccug

SEQ ID NO: 341185 - RNA, 23 nt, Artificial Sequence
  Synthetic
cagugggaugaguuguuagccug

SEQ ID NO: 341186 - RNA, 24 nt, Artificial Sequence
  Synthetic
acagugggaugaguuguuagccug

SEQ ID NO: 341187 - RNA, 18 nt, Artificial Sequence
  Synthetic
aacacacacugaggccug

SEQ ID NO: 341188 - RNA, 19 nt, Artificial Sequence
  Synthetic
caacacacacugaggccug

SEQ ID NO: 341189 - RNA, 20 nt, Artificial Sequence
  Synthetic
acaacacacacugaggccug

SEQ ID NO: 341190 - RNA, 21 nt, Artificial Sequence
  Synthetic
aacaacacacacugaggccug

SEQ ID NO: 341191 - RNA, 22 nt, Artificial Sequence
  Synthetic
gaacaacacacacugaggccug

SEQ ID NO: 341192 - RNA, 23 nt, Artificial Sequence
  Synthetic
ggaacaacacacacugaggccug

SEQ ID NO: 341193 - RNA, 24 nt, Artificial Sequence
  Synthetic
gggaacaacacacacugaggccug

SEQ ID NO: 341194 - RNA, 18 nt, Artificial Sequence
  Synthetic
agggcugauaagggccug

SEQ ID NO: 341195 - RNA, 19 nt, Artificial Sequence
  Synthetic
aagggcugauaagggccug

SEQ ID NO: 341196 - RNA, 20 nt, Artificial Sequence
  Synthetic
aaagggcugauaagggccug

SEQ ID NO: 341197 - RNA, 21 nt, Artificial Sequence
  Synthetic
aaaagggcugauaagggccug

SEQ ID NO: 341198 - RNA, 22 nt, Artificial Sequence
  Synthetic
caaaagggcugauaagggccug

SEQ ID NO: 341199 - RNA, 23 nt, Artificial Sequence
  Synthetic
acaaaagggcugauaagggccug

SEQ ID NO: 341200 - RNA, 24 nt, Artificial Sequence
  Synthetic
aacaaaagggcugauaagggccug

SEQ ID NO: 341201 - RNA, 18 nt, Artificial Sequence
  Synthetic
uuccaagaucagggccug

SEQ ID NO: 341202 - RNA, 19 nt, Artificial Sequence
  Synthetic
auuccaagaucagggccug

SEQ ID NO: 341203 - RNA, 20 nt, Artificial Sequence
  Synthetic
gauuccaagaucagggccug

SEQ ID NO: 341204 - RNA, 21 nt, Artificial Sequence
  Synthetic
ggauuccaagaucagggccug

SEQ ID NO: 341205 - RNA, 22 nt, Artificial Sequence
  Synthetic
gggauuccaagaucagggccug

SEQ ID NO: 341206 - RNA, 23 nt, Artificial Sequence
  Synthetic
ugggauuccaagaucagggccug

SEQ ID NO: 341207 - RNA, 24 nt, Artificial Sequence
  Synthetic
cugggauuccaagaucagggccug

SEQ ID NO: 341208 - RNA, 18 nt, Artificial Sequence
  Synthetic
aucacacaccggggccug

SEQ ID NO: 341209 - RNA, 19 nt, Artificial Sequence
  Synthetic
caucacacaccggggccug

SEQ ID NO: 341210 - RNA, 20 nt, Artificial Sequence
  Synthetic
acaucacacaccggggccug

SEQ ID NO: 341211 - RNA, 21 nt, Artificial Sequence
  Synthetic
aacaucacacaccggggccug

SEQ ID NO: 341212 - RNA, 22 nt, Artificial Sequence
  Synthetic
gaacaucacacaccggggccug

SEQ ID NO: 341213 - RNA, 23 nt, Artificial Sequence
  Synthetic
ggaacaucacacaccggggccug

SEQ ID NO: 341214 - RNA, 24 nt, Artificial Sequence
  Synthetic
gggaacaucacacaccggggccug

SEQ ID NO: 341215 - RNA, 18 nt, Artificial Sequence
  Synthetic
agcaggaguaugggccug

SEQ ID NO: 341216 - RNA, 19 nt, Artificial Sequence
  Synthetic
cagcaggaguaugggccug

SEQ ID NO: 341217 - RNA, 20 nt, Artificial Sequence
  Synthetic
ucagcaggaguaugggccug

SEQ ID NO: 341218 - RNA, 21 nt, Artificial Sequence
  Synthetic
uucagcaggaguaugggccug

SEQ ID NO: 341219 - RNA, 22 nt, Artificial Sequence
  Synthetic
uuucagcaggaguaugggccug

SEQ ID NO: 341220 - RNA, 23 nt, Artificial Sequence
  Synthetic
guuucagcaggaguaugggccug

SEQ ID NO: 341221 - RNA, 24 nt, Artificial Sequence
  Synthetic
gguuucagcaggaguaugggccug

SEQ ID NO: 341222 - RNA, 18 nt, Artificial Sequence
  Synthetic
uacggaggguauggccug

SEQ ID NO: 341223 - RNA, 19 nt, Artificial Sequence
  Synthetic
cuacggaggguauggccug

SEQ ID NO: 341224 - RNA, 20 nt, Artificial Sequence
  Synthetic
ccuacggaggguauggccug

SEQ ID NO: 341225 - RNA, 21 nt, Artificial Sequence
  Synthetic
accuacggaggguauggccug

SEQ ID NO: 341226 - RNA, 22 nt, Artificial Sequence
  Synthetic
gaccuacggaggguauggccug

SEQ ID NO: 341227 - RNA, 23 nt, Artificial Sequence
  Synthetic
ugaccuacggaggguauggccug

SEQ ID NO: 341228 - RNA, 24 nt, Artificial Sequence
  Synthetic
augaccuacggaggguauggccug

SEQ ID NO: 341229 - RNA, 18 nt, Artificial Sequence
  Synthetic
uggguugaguguggccug

SEQ ID NO: 341230 - RNA, 19 nt, Artificial Sequence
  Synthetic
auggguugaguguggccug

SEQ ID NO: 341231 - RNA, 20 nt, Artificial Sequence
  Synthetic
aauggguugaguguggccug

SEQ ID NO: 341232 - RNA, 21 nt, Artificial Sequence
  Synthetic
gaauggguugaguguggccug

SEQ ID NO: 341233 - RNA, 22 nt, Artificial Sequence
  Synthetic
agaauggguugaguguggccug

SEQ ID NO: 341234 - RNA, 23 nt, Artificial Sequence
  Synthetic
aagaauggguugaguguggccug

SEQ ID NO: 341235 - RNA, 24 nt, Artificial Sequence
  Synthetic
uaagaauggguugaguguggccug

SEQ ID NO: 341236 - RNA, 18 nt, Artificial Sequence
  Synthetic
cuuugaaaaaaaugccug

SEQ ID NO: 341237 - RNA, 19 nt, Artificial Sequence
  Synthetic
gcuuugaaaaaaaugccug

SEQ ID NO: 341238 - RNA, 20 nt, Artificial Sequence
  Synthetic
ggcuuugaaaaaaaugccug

SEQ ID NO: 341239 - RNA, 21 nt, Artificial Sequence
  Synthetic
uggcuuugaaaaaaaugccug

SEQ ID NO: 341240 - RNA, 22 nt, Artificial Sequence
  Synthetic
uuggcuuugaaaaaaaugccug

SEQ ID NO: 341241 - RNA, 23 nt, Artificial Sequence
  Synthetic
uuuggcuuugaaaaaaaugccug

SEQ ID NO: 341242 - RNA, 24 nt, Artificial Sequence
  Synthetic
cuuuggcuuugaaaaaaaugccug

SEQ ID NO: 341243 - RNA, 18 nt, Artificial Sequence
  Synthetic
cuuaaagaaagaugccug

SEQ ID NO: 341244 - RNA, 19 nt, Artificial Sequence
  Synthetic
ucuuaaagaaagaugccug

SEQ ID NO: 341245 - RNA, 20 nt, Artificial Sequence
  Synthetic
cucuuaaagaaagaugccug

SEQ ID NO: 341246 - RNA, 21 nt, Artificial Sequence
  Synthetic
ucucuuaaagaaagaugccug

SEQ ID NO: 341247 - RNA, 22 nt, Artificial Sequence
  Synthetic
gucucuuaaagaaagaugccug

SEQ ID NO: 341248 - RNA, 23 nt, Artificial Sequence
  Synthetic
ugucucuuaaagaaagaugccug

SEQ ID NO: 341249 - RNA, 24 nt, Artificial Sequence
  Synthetic
uugucucuuaaagaaagaugccug

SEQ ID NO: 341250 - RNA, 18 nt, Artificial Sequence
  Synthetic
uaaauaaaauuaugccug

SEQ ID NO: 341251 - RNA, 19 nt, Artificial Sequence
  Synthetic
uuaaauaaaauuaugccug

SEQ ID NO: 341252 - RNA, 20 nt, Artificial Sequence
  Synthetic
uuuaaauaaaauuaugccug

SEQ ID NO: 341253 - RNA, 21 nt, Artificial Sequence
  Synthetic
cuuuaaauaaaauuaugccug

SEQ ID NO: 341254 - RNA, 22 nt, Artificial Sequence
  Synthetic
ccuuuaaauaaaauuaugccug

SEQ ID NO: 341255 - RNA, 23 nt, Artificial Sequence
  Synthetic
uccuuuaaauaaaauuaugccug

SEQ ID NO: 341256 - RNA, 24 nt, Artificial Sequence
  Synthetic
uuccuuuaaauaaaauuaugccug

SEQ ID NO: 341257 - RNA, 18 nt, Artificial Sequence
  Synthetic
cugaaugagggcugccug

SEQ ID NO: 341258 - RNA, 19 nt, Artificial Sequence
  Synthetic
acugaaugagggcugccug

SEQ ID NO: 341259 - RNA, 20 nt, Artificial Sequence
  Synthetic
cacugaaugagggcugccug

SEQ ID NO: 341260 - RNA, 21 nt, Artificial Sequence
  Synthetic
ucacugaaugagggcugccug

SEQ ID NO: 341261 - RNA, 22 nt, Artificial Sequence
  Synthetic
gucacugaaugagggcugccug

SEQ ID NO: 341262 - RNA, 23 nt, Artificial Sequence
  Synthetic
agucacugaaugagggcugccug

SEQ ID NO: 341263 - RNA, 24 nt, Artificial Sequence
  Synthetic
cagucacugaaugagggcugccug

SEQ ID NO: 341264 - RNA, 18 nt, Artificial Sequence
  Synthetic
uccaaaccuggcugccug

SEQ ID NO: 341265 - RNA, 19 nt, Artificial Sequence
  Synthetic
uuccaaaccuggcugccug

SEQ ID NO: 341266 - RNA, 20 nt, Artificial Sequence
  Synthetic
cuuccaaaccuggcugccug

SEQ ID NO: 341267 - RNA, 21 nt, Artificial Sequence
  Synthetic
acuuccaaaccuggcugccug

SEQ ID NO: 341268 - RNA, 22 nt, Artificial Sequence
  Synthetic
uacuuccaaaccuggcugccug

SEQ ID NO: 341269 - RNA, 23 nt, Artificial Sequence
  Synthetic
guacuuccaaaccuggcugccug

SEQ ID NO: 341270 - RNA, 24 nt, Artificial Sequence
  Synthetic
aguacuuccaaaccuggcugccug

SEQ ID NO: 341271 - RNA, 18 nt, Artificial Sequence
  Synthetic
gaguccuuucucugccug

SEQ ID NO: 341272 - RNA, 19 nt, Artificial Sequence
  Synthetic
ugaguccuuucucugccug

SEQ ID NO: 341273 - RNA, 20 nt, Artificial Sequence
  Synthetic
cugaguccuuucucugccug

SEQ ID NO: 341274 - RNA, 21 nt, Artificial Sequence
  Synthetic
ccugaguccuuucucugccug

SEQ ID NO: 341275 - RNA, 22 nt, Artificial Sequence
  Synthetic
uccugaguccuuucucugccug

SEQ ID NO: 341276 - RNA, 23 nt, Artificial Sequence
  Synthetic
uuccugaguccuuucucugccug

SEQ ID NO: 341277 - RNA, 24 nt, Artificial Sequence
  Synthetic
cuuccugaguccuuucucugccug

SEQ ID NO: 341278 - RNA, 18 nt, Artificial Sequence
  Synthetic
augcauagcaauugccug

SEQ ID NO: 341279 - RNA, 19 nt, Artificial Sequence
  Synthetic
uaugcauagcaauugccug

SEQ ID NO: 341280 - RNA, 20 nt, Artificial Sequence
  Synthetic
auaugcauagcaauugccug

SEQ ID NO: 341281 - RNA, 21 nt, Artificial Sequence
  Synthetic
aauaugcauagcaauugccug

SEQ ID NO: 341282 - RNA, 22 nt, Artificial Sequence
  Synthetic
uaauaugcauagcaauugccug

SEQ ID NO: 341283 - RNA, 23 nt, Artificial Sequence
  Synthetic
uuaauaugcauagcaauugccug

SEQ ID NO: 341284 - RNA, 24 nt, Artificial Sequence
  Synthetic
cuuaauaugcauagcaauugccug

SEQ ID NO: 341285 - RNA, 18 nt, Artificial Sequence
  Synthetic
cuagccucuguaauccug

SEQ ID NO: 341286 - RNA, 19 nt, Artificial Sequence
  Synthetic
acuagccucuguaauccug

SEQ ID NO: 341287 - RNA, 20 nt, Artificial Sequence
  Synthetic
cacuagccucuguaauccug

SEQ ID NO: 341288 - RNA, 21 nt, Artificial Sequence
  Synthetic
acacuagccucuguaauccug

SEQ ID NO: 341289 - RNA, 22 nt, Artificial Sequence
  Synthetic
aacacuagccucuguaauccug

SEQ ID NO: 341290 - RNA, 23 nt, Artificial Sequence
  Synthetic
aaacacuagccucuguaauccug

SEQ ID NO: 341291 - RNA, 24 nt, Artificial Sequence
  Synthetic
uaaacacuagccucuguaauccug

SEQ ID NO: 341292 - RNA, 18 nt, Artificial Sequence
  Synthetic
auaucauuaaacauccug

SEQ ID NO: 341293 - RNA, 19 nt, Artificial Sequence
  Synthetic
uauaucauuaaacauccug

SEQ ID NO: 341294 - RNA, 20 nt, Artificial Sequence
  Synthetic
auauaucauuaaacauccug

SEQ ID NO: 341295 - RNA, 21 nt, Artificial Sequence
  Synthetic
uauauaucauuaaacauccug

SEQ ID NO: 341296 - RNA, 22 nt, Artificial Sequence
  Synthetic
auauauaucauuaaacauccug

SEQ ID NO: 341297 - RNA, 23 nt, Artificial Sequence
  Synthetic
aauauauaucauuaaacauccug

SEQ ID NO: 341298 - RNA, 24 nt, Artificial Sequence
  Synthetic
uaauauauaucauuaaacauccug

SEQ ID NO: 341299 - RNA, 18 nt, Artificial Sequence
  Synthetic
uaauaggaacacauccug

SEQ ID NO: 341300 - RNA, 19 nt, Artificial Sequence
  Synthetic
cuaauaggaacacauccug

SEQ ID NO: 341301 - RNA, 20 nt, Artificial Sequence
  Synthetic
gcuaauaggaacacauccug

SEQ ID NO: 341302 - RNA, 21 nt, Artificial Sequence
  Synthetic
agcuaauaggaacacauccug

SEQ ID NO: 341303 - RNA, 22 nt, Artificial Sequence
  Synthetic
cagcuaauaggaacacauccug

SEQ ID NO: 341304 - RNA, 23 nt, Artificial Sequence
  Synthetic
gcagcuaauaggaacacauccug

SEQ ID NO: 341305 - RNA, 24 nt, Artificial Sequence
  Synthetic
ugcagcuaauaggaacacauccug

SEQ ID NO: 341306 - RNA, 18 nt, Artificial Sequence
  Synthetic
gagaucgagaccauccug

SEQ ID NO: 341307 - RNA, 19 nt, Artificial Sequence
  Synthetic
agagaucgagaccauccug

SEQ ID NO: 341308 - RNA, 20 nt, Artificial Sequence
  Synthetic
aagagaucgagaccauccug

SEQ ID NO: 341309 - RNA, 21 nt, Artificial Sequence
  Synthetic
caagagaucgagaccauccug

SEQ ID NO: 341310 - RNA, 22 nt, Artificial Sequence
  Synthetic
ucaagagaucgagaccauccug

SEQ ID NO: 341311 - RNA, 23 nt, Artificial Sequence
  Synthetic
gucaagagaucgagaccauccug

SEQ ID NO: 341312 - RNA, 24 nt, Artificial Sequence
  Synthetic
ggucaagagaucgagaccauccug

SEQ ID NO: 341313 - RNA, 19 nt, Artificial Sequence
  Synthetic
ggagaucgagaccauccug

SEQ ID NO: 341314 - RNA, 20 nt, Artificial Sequence
  Synthetic
aggagaucgagaccauccug

SEQ ID NO: 341315 - RNA, 18 nt, Artificial Sequence
  Synthetic
uaugugguaugcauccug

SEQ ID NO: 341316 - RNA, 19 nt, Artificial Sequence
  Synthetic
auaugugguaugcauccug

SEQ ID NO: 341317 - RNA, 20 nt, Artificial Sequence
  Synthetic
cauaugugguaugcauccug

SEQ ID NO: 341318 - RNA, 21 nt, Artificial Sequence
  Synthetic
ccauaugugguaugcauccug

SEQ ID NO: 341319 - RNA, 22 nt, Artificial Sequence
  Synthetic
cccauaugugguaugcauccug

SEQ ID NO: 341320 - RNA, 23 nt, Artificial Sequence
  Synthetic
gcccauaugugguaugcauccug

SEQ ID NO: 341321 - RNA, 24 nt, Artificial Sequence
  Synthetic
agcccauaugugguaugcauccug

SEQ ID NO: 341322 - RNA, 18 nt, Artificial Sequence
  Synthetic
ggucucuagugcauccug

SEQ ID NO: 341323 - RNA, 19 nt, Artificial Sequence
  Synthetic
gggucucuagugcauccug

SEQ ID NO: 341324 - RNA, 20 nt, Artificial Sequence
  Synthetic
ugggucucuagugcauccug

SEQ ID NO: 341325 - RNA, 21 nt, Artificial Sequence
  Synthetic
uugggucucuagugcauccug

SEQ ID NO: 341326 - RNA, 22 nt, Artificial Sequence
  Synthetic
guugggucucuagugcauccug

SEQ ID NO: 341327 - RNA, 23 nt, Artificial Sequence
  Synthetic
aguugggucucuagugcauccug

SEQ ID NO: 341328 - RNA, 24 nt, Artificial Sequence
  Synthetic
gaguugggucucuagugcauccug

SEQ ID NO: 341329 - RNA, 18 nt, Artificial Sequence
  Synthetic
cacugggguuugauccug

SEQ ID NO: 341330 - RNA, 19 nt, Artificial Sequence
  Synthetic
ccacugggguuugauccug

SEQ ID NO: 341331 - RNA, 20 nt, Artificial Sequence
  Synthetic
gccacugggguuugauccug

SEQ ID NO: 341332 - RNA, 21 nt, Artificial Sequence
  Synthetic
ggccacugggguuugauccug

SEQ ID NO: 341333 - RNA, 22 nt, Artificial Sequence
  Synthetic
gggccacugggguuugauccug

SEQ ID NO: 341334 - RNA, 23 nt, Artificial Sequence
  Synthetic
ugggccacugggguuugauccug

SEQ ID NO: 341335 - RNA, 24 nt, Artificial Sequence
  Synthetic
uugggccacugggguuugauccug

SEQ ID NO: 341336 - RNA, 18 nt, Artificial Sequence
  Synthetic
cuuggcauauauauccug

SEQ ID NO: 341337 - RNA, 19 nt, Artificial Sequence
  Synthetic
gcuuggcauauauauccug

SEQ ID NO: 341338 - RNA, 20 nt, Artificial Sequence
  Synthetic
ugcuuggcauauauauccug

SEQ ID NO: 341339 - RNA, 21 nt, Artificial Sequence
  Synthetic
augcuuggcauauauauccug

SEQ ID NO: 341340 - RNA, 22 nt, Artificial Sequence
  Synthetic
aaugcuuggcauauauauccug

SEQ ID NO: 341341 - RNA, 23 nt, Artificial Sequence
  Synthetic
caaugcuuggcauauauauccug

SEQ ID NO: 341342 - RNA, 24 nt, Artificial Sequence
  Synthetic
ucaaugcuuggcauauauauccug

SEQ ID NO: 341343 - RNA, 18 nt, Artificial Sequence
  Synthetic
uuuucccccauuauccug

SEQ ID NO: 341344 - RNA, 19 nt, Artificial Sequence
  Synthetic
auuuucccccauuauccug

SEQ ID NO: 341345 - RNA, 20 nt, Artificial Sequence
  Synthetic
cauuuucccccauuauccug

SEQ ID NO: 341346 - RNA, 21 nt, Artificial Sequence
  Synthetic
gcauuuucccccauuauccug

SEQ ID NO: 341347 - RNA, 22 nt, Artificial Sequence
  Synthetic
agcauuuucccccauuauccug

SEQ ID NO: 341348 - RNA, 23 nt, Artificial Sequence
  Synthetic
aagcauuuucccccauuauccug

SEQ ID NO: 341349 - RNA, 24 nt, Artificial Sequence
  Synthetic
uaagcauuuucccccauuauccug

SEQ ID NO: 341350 - RNA, 18 nt, Artificial Sequence
  Synthetic
cuuucuucucuuauccug

SEQ ID NO: 341351 - RNA, 19 nt, Artificial Sequence
  Synthetic
acuuucuucucuuauccug

SEQ ID NO: 341352 - RNA, 20 nt, Artificial Sequence
  Synthetic
aacuuucuucucuuauccug

SEQ ID NO: 341353 - RNA, 21 nt, Artificial Sequence
  Synthetic
caacuuucuucucuuauccug

SEQ ID NO: 341354 - RNA, 22 nt, Artificial Sequence
  Synthetic
ucaacuuucuucucuuauccug

SEQ ID NO: 341355 - RNA, 23 nt, Artificial Sequence
  Synthetic
uucaacuuucuucucuuauccug

SEQ ID NO: 341356 - RNA, 24 nt, Artificial Sequence
  Synthetic
guucaacuuucuucucuuauccug

SEQ ID NO: 341357 - RNA, 18 nt, Artificial Sequence
  Synthetic
cauuuacaaacacuccug

SEQ ID NO: 341358 - RNA, 19 nt, Artificial Sequence
  Synthetic
acauuuacaaacacuccug

SEQ ID NO: 341359 - RNA, 20 nt, Artificial Sequence
  Synthetic
aacauuuacaaacacuccug

SEQ ID NO: 341360 - RNA, 21 nt, Artificial Sequence
  Synthetic
caacauuuacaaacacuccug

SEQ ID NO: 341361 - RNA, 22 nt, Artificial Sequence
  Synthetic
ucaacauuuacaaacacuccug

SEQ ID NO: 341362 - RNA, 23 nt, Artificial Sequence
  Synthetic
cucaacauuuacaaacacuccug

SEQ ID NO: 341363 - RNA, 24 nt, Artificial Sequence
  Synthetic
ccucaacauuuacaaacacuccug

SEQ ID NO: 341364 - RNA, 18 nt, Artificial Sequence
  Synthetic
auuuagagcugccuccug

SEQ ID NO: 341365 - RNA, 19 nt, Artificial Sequence
  Synthetic
aauuuagagcugccuccug

SEQ ID NO: 341366 - RNA, 20 nt, Artificial Sequence
  Synthetic
caauuuagagcugccuccug

SEQ ID NO: 341367 - RNA, 21 nt, Artificial Sequence
  Synthetic
ccaauuuagagcugccuccug

SEQ ID NO: 341368 - RNA, 22 nt, Artificial Sequence
  Synthetic
gccaauuuagagcugccuccug

SEQ ID NO: 341369 - RNA, 23 nt, Artificial Sequence
  Synthetic
ugccaauuuagagcugccuccug

SEQ ID NO: 341370 - RNA, 24 nt, Artificial Sequence
  Synthetic
uugccaauuuagagcugccuccug

SEQ ID NO: 341371 - RNA, 18 nt, Artificial Sequence
  Synthetic
ugguuuugauuccuccug

SEQ ID NO: 341372 - RNA, 19 nt, Artificial Sequence
  Synthetic
uugguuuugauuccuccug

SEQ ID NO: 341373 - RNA, 20 nt, Artificial Sequence
  Synthetic
uuugguuuugauuccuccug

SEQ ID NO: 341374 - RNA, 21 nt, Artificial Sequence
  Synthetic
auuugguuuugauuccuccug

SEQ ID NO: 341375 - RNA, 22 nt, Artificial Sequence
  Synthetic
gauuugguuuugauuccuccug

SEQ ID NO: 341376 - RNA, 23 nt, Artificial Sequence
  Synthetic
agauuugguuuugauuccuccug

SEQ ID NO: 341377 - RNA, 24 nt, Artificial Sequence
  Synthetic
uagauuugguuuugauuccuccug

SEQ ID NO: 341378 - RNA, 18 nt, Artificial Sequence
  Synthetic
ggcuuacaagagcuccug

SEQ ID NO: 341379 - RNA, 19 nt, Artificial Sequence
  Synthetic
uggcuuacaagagcuccug

SEQ ID NO: 341380 - RNA, 20 nt, Artificial Sequence
  Synthetic
cuggcuuacaagagcuccug

SEQ ID NO: 341381 - RNA, 21 nt, Artificial Sequence
  Synthetic
ccuggcuuacaagagcuccug

SEQ ID NO: 341382 - RNA, 22 nt, Artificial Sequence
  Synthetic
gccuggcuuacaagagcuccug

SEQ ID NO: 341383 - RNA, 23 nt, Artificial Sequence
  Synthetic
ggccuggcuuacaagagcuccug

SEQ ID NO: 341384 - RNA, 24 nt, Artificial Sequence
  Synthetic
aggccuggcuuacaagagcuccug

SEQ ID NO: 341385 - RNA, 18 nt, Artificial Sequence
  Synthetic
uuuauuggguagcuccug

SEQ ID NO: 341386 - RNA, 19 nt, Artificial Sequence
  Synthetic
auuuauuggguagcuccug

SEQ ID NO: 341387 - RNA, 20 nt, Artificial Sequence
  Synthetic
cauuuauuggguagcuccug

SEQ ID NO: 341388 - RNA, 21 nt, Artificial Sequence
  Synthetic
ucauuuauuggguagcuccug

SEQ ID NO: 341389 - RNA, 22 nt, Artificial Sequence
  Synthetic
aucauuuauuggguagcuccug

SEQ ID NO: 341390 - RNA, 23 nt, Artificial Sequence
  Synthetic
uaucauuuauuggguagcuccug

SEQ ID NO: 341391 - RNA, 24 nt, Artificial Sequence
  Synthetic
cuaucauuuauuggguagcuccug

SEQ ID NO: 341392 - RNA, 18 nt, Artificial Sequence
  Synthetic
gcauuugcuuggcuccug

SEQ ID NO: 341393 - RNA, 19 nt, Artificial Sequence
  Synthetic
ggcauuugcuuggcuccug

SEQ ID NO: 341394 - RNA, 20 nt, Artificial Sequence
  Synthetic
aggcauuugcuuggcuccug

SEQ ID NO: 341395 - RNA, 21 nt, Artificial Sequence
  Synthetic
caggcauuugcuuggcuccug

SEQ ID NO: 341396 - RNA, 22 nt, Artificial Sequence
  Synthetic
acaggcauuugcuuggcuccug

SEQ ID NO: 341397 - RNA, 23 nt, Artificial Sequence
  Synthetic
cacaggcauuugcuuggcuccug

SEQ ID NO: 341398 - RNA, 24 nt, Artificial Sequence
  Synthetic
gcacaggcauuugcuuggcuccug

SEQ ID NO: 341399 - RNA, 18 nt, Artificial Sequence
  Synthetic
cuggucuuuuaucuccug

SEQ ID NO: 341400 - RNA, 19 nt, Artificial Sequence
  Synthetic
acuggucuuuuaucuccug

SEQ ID NO: 341401 - RNA, 20 nt, Artificial Sequence
  Synthetic
gacuggucuuuuaucuccug

SEQ ID NO: 341402 - RNA, 21 nt, Artificial Sequence
  Synthetic
ggacuggucuuuuaucuccug

SEQ ID NO: 341403 - RNA, 22 nt, Artificial Sequence
  Synthetic
aggacuggucuuuuaucuccug

SEQ ID NO: 341404 - RNA, 23 nt, Artificial Sequence
  Synthetic
caggacuggucuuuuaucuccug

SEQ ID NO: 341405 - RNA, 24 nt, Artificial Sequence
  Synthetic
ucaggacuggucuuuuaucuccug

SEQ ID NO: 341406 - RNA, 18 nt, Artificial Sequence
  Synthetic
cucugcccaagucuccug

SEQ ID NO: 341407 - RNA, 19 nt, Artificial Sequence
  Synthetic
ccucugcccaagucuccug

SEQ ID NO: 341408 - RNA, 20 nt, Artificial Sequence
  Synthetic
cccucugcccaagucuccug

SEQ ID NO: 341409 - RNA, 21 nt, Artificial Sequence
  Synthetic
gcccucugcccaagucuccug

SEQ ID NO: 341410 - RNA, 22 nt, Artificial Sequence
  Synthetic
ugcccucugcccaagucuccug

SEQ ID NO: 341411 - RNA, 23 nt, Artificial Sequence
  Synthetic
cugcccucugcccaagucuccug

SEQ ID NO: 341412 - RNA, 24 nt, Artificial Sequence
  Synthetic
gcugcccucugcccaagucuccug

SEQ ID NO: 341413 - RNA, 18 nt, Artificial Sequence
  Synthetic
uccagugugagucuccug

SEQ ID NO: 341414 - RNA, 19 nt, Artificial Sequence
  Synthetic
guccagugugagucuccug

SEQ ID NO: 341415 - RNA, 20 nt, Artificial Sequence
  Synthetic
uguccagugugagucuccug

SEQ ID NO: 341416 - RNA, 21 nt, Artificial Sequence
  Synthetic
uuguccagugugagucuccug

SEQ ID NO: 341417 - RNA, 22 nt, Artificial Sequence
  Synthetic
guuguccagugugagucuccug

SEQ ID NO: 341418 - RNA, 23 nt, Artificial Sequence
  Synthetic
gguuguccagugugagucuccug

SEQ ID NO: 341419 - RNA, 24 nt, Artificial Sequence
  Synthetic
ugguuguccagugugagucuccug

SEQ ID NO: 341420 - RNA, 18 nt, Artificial Sequence
  Synthetic
uagugagaaugucuccug

SEQ ID NO: 341421 - RNA, 19 nt, Artificial Sequence
  Synthetic
auagugagaaugucuccug

SEQ ID NO: 341422 - RNA, 20 nt, Artificial Sequence
  Synthetic
aauagugagaaugucuccug

SEQ ID NO: 341423 - RNA, 21 nt, Artificial Sequence
  Synthetic
gaauagugagaaugucuccug

SEQ ID NO: 341424 - RNA, 22 nt, Artificial Sequence
  Synthetic
agaauagugagaaugucuccug

SEQ ID NO: 341425 - RNA, 23 nt, Artificial Sequence
  Synthetic
cagaauagugagaaugucuccug

SEQ ID NO: 341426 - RNA, 24 nt, Artificial Sequence
  Synthetic
acagaauagugagaaugucuccug

SEQ ID NO: 341427 - RNA, 18 nt, Artificial Sequence
  Synthetic
uauuacuaaauucuccug

SEQ ID NO: 341428 - RNA, 19 nt, Artificial Sequence
  Synthetic
auauuacuaaauucuccug

SEQ ID NO: 341429 - RNA, 20 nt, Artificial Sequence
  Synthetic
aauauuacuaaauucuccug

SEQ ID NO: 341430 - RNA, 21 nt, Artificial Sequence
  Synthetic
aaauauuacuaaauucuccug

SEQ ID NO: 341431 - RNA, 22 nt, Artificial Sequence
  Synthetic
uaaauauuacuaaauucuccug

SEQ ID NO: 341432 - RNA, 23 nt, Artificial Sequence
  Synthetic
cuaaauauuacuaaauucuccug

SEQ ID NO: 341433 - RNA, 24 nt, Artificial Sequence
  Synthetic
ucuaaauauuacuaaauucuccug

SEQ ID NO: 341434 - RNA, 18 nt, Artificial Sequence
  Synthetic
guuuacuuuauucuccug

SEQ ID NO: 341435 - RNA, 19 nt, Artificial Sequence
  Synthetic
uguuuacuuuauucuccug

SEQ ID NO: 341436 - RNA, 20 nt, Artificial Sequence
  Synthetic
uuguuuacuuuauucuccug

SEQ ID NO: 341437 - RNA, 21 nt, Artificial Sequence
  Synthetic
uuuguuuacuuuauucuccug

SEQ ID NO: 341438 - RNA, 22 nt, Artificial Sequence
  Synthetic
auuuguuuacuuuauucuccug

SEQ ID NO: 341439 - RNA, 23 nt, Artificial Sequence
  Synthetic
uauuuguuuacuuuauucuccug

SEQ ID NO: 341440 - RNA, 24 nt, Artificial Sequence
  Synthetic
cuauuuguuuacuuuauucuccug

SEQ ID NO: 341441 - RNA, 18 nt, Artificial Sequence
  Synthetic
uacaccauauuucuccug

SEQ ID NO: 341442 - RNA, 19 nt, Artificial Sequence
  Synthetic
uuacaccauauuucuccug

SEQ ID NO: 341443 - RNA, 20 nt, Artificial Sequence
  Synthetic
cuuacaccauauuucuccug

SEQ ID NO: 341444 - RNA, 21 nt, Artificial Sequence
  Synthetic
acuuacaccauauuucuccug

SEQ ID NO: 341445 - RNA, 22 nt, Artificial Sequence
  Synthetic
cacuuacaccauauuucuccug

SEQ ID NO: 341446 - RNA, 23 nt, Artificial Sequence
  Synthetic
ccacuuacaccauauuucuccug

SEQ ID NO: 341447 - RNA, 24 nt, Artificial Sequence
  Synthetic
cccacuuacaccauauuucuccug

SEQ ID NO: 341448 - RNA, 18 nt, Artificial Sequence
  Synthetic
ucuccaaggagaguccug

SEQ ID NO: 341449 - RNA, 19 nt, Artificial Sequence
  Synthetic
cucuccaaggagaguccug

SEQ ID NO: 341450 - RNA, 20 nt, Artificial Sequence
  Synthetic
ccucuccaaggagaguccug

SEQ ID NO: 341451 - RNA, 21 nt, Artificial Sequence
  Synthetic
uccucuccaaggagaguccug

SEQ ID NO: 341452 - RNA, 22 nt, Artificial Sequence
  Synthetic
auccucuccaaggagaguccug

SEQ ID NO: 341453 - RNA, 23 nt, Artificial Sequence
  Synthetic
aauccucuccaaggagaguccug

SEQ ID NO: 341454 - RNA, 24 nt, Artificial Sequence
  Synthetic
uaauccucuccaaggagaguccug

SEQ ID NO: 341455 - RNA, 18 nt, Artificial Sequence
  Synthetic
aggguccuucggguccug

SEQ ID NO: 341456 - RNA, 19 nt, Artificial Sequence
  Synthetic
gaggguccuucggguccug

SEQ ID NO: 341457 - RNA, 20 nt, Artificial Sequence
  Synthetic
ggaggguccuucggguccug

SEQ ID NO: 341458 - RNA, 21 nt, Artificial Sequence
  Synthetic
uggaggguccuucggguccug

SEQ ID NO: 341459 - RNA, 22 nt, Artificial Sequence
  Synthetic
cuggaggguccuucggguccug

SEQ ID NO: 341460 - RNA, 23 nt, Artificial Sequence
  Synthetic
ccuggaggguccuucggguccug

SEQ ID NO: 341461 - RNA, 24 nt, Artificial Sequence
  Synthetic
accuggaggguccuucggguccug

SEQ ID NO: 341462 - RNA, 18 nt, Artificial Sequence
  Synthetic
uuucaacaaaugguccug

SEQ ID NO: 341463 - RNA, 19 nt, Artificial Sequence
  Synthetic
uuuucaacaaaugguccug

SEQ ID NO: 341464 - RNA, 20 nt, Artificial Sequence
  Synthetic
cuuuucaacaaaugguccug

SEQ ID NO: 341465 - RNA, 21 nt, Artificial Sequence
  Synthetic
ccuuuucaacaaaugguccug

SEQ ID NO: 341466 - RNA, 22 nt, Artificial Sequence
  Synthetic
accuuuucaacaaaugguccug

SEQ ID NO: 341467 - RNA, 23 nt, Artificial Sequence
  Synthetic
caccuuuucaacaaaugguccug

SEQ ID NO: 341468 - RNA, 24 nt, Artificial Sequence
  Synthetic
ucaccuuuucaacaaaugguccug

SEQ ID NO: 341469 - RNA, 18 nt, Artificial Sequence
  Synthetic
cuucuuccugcuguccug

SEQ ID NO: 341470 - RNA, 19 nt, Artificial Sequence
  Synthetic
ucuucuuccugcuguccug

SEQ ID NO: 341471 - RNA, 20 nt, Artificial Sequence
  Synthetic
uucuucuuccugcuguccug

SEQ ID NO: 341472 - RNA, 21 nt, Artificial Sequence
  Synthetic
auucuucuuccugcuguccug

SEQ ID NO: 341473 - RNA, 22 nt, Artificial Sequence
  Synthetic
uauucuucuuccugcuguccug

SEQ ID NO: 341474 - RNA, 23 nt, Artificial Sequence
  Synthetic
auauucuucuuccugcuguccug

SEQ ID NO: 341475 - RNA, 24 nt, Artificial Sequence
  Synthetic
cauauucuucuuccugcuguccug

SEQ ID NO: 341476 - RNA, 18 nt, Artificial Sequence
  Synthetic
agaggugauuuuguccug

SEQ ID NO: 341477 - RNA, 19 nt, Artificial Sequence
  Synthetic
uagaggugauuuuguccug

SEQ ID NO: 341478 - RNA, 20 nt, Artificial Sequence
  Synthetic
auagaggugauuuuguccug

SEQ ID NO: 341479 - RNA, 21 nt, Artificial Sequence
  Synthetic
aauagaggugauuuuguccug

SEQ ID NO: 341480 - RNA, 22 nt, Artificial Sequence
  Synthetic
aaauagaggugauuuuguccug

SEQ ID NO: 341481 - RNA, 23 nt, Artificial Sequence
  Synthetic
caaauagaggugauuuuguccug

SEQ ID NO: 341482 - RNA, 24 nt, Artificial Sequence
  Synthetic
acaaauagaggugauuuuguccug

SEQ ID NO: 341483 - RNA, 18 nt, Artificial Sequence
  Synthetic
uuauaggauucauuccug

SEQ ID NO: 341484 - RNA, 19 nt, Artificial Sequence
  Synthetic
cuuauaggauucauuccug

SEQ ID NO: 341485 - RNA, 20 nt, Artificial Sequence
  Synthetic
ucuuauaggauucauuccug

SEQ ID NO: 341486 - RNA, 21 nt, Artificial Sequence
  Synthetic
uucuuauaggauucauuccug

SEQ ID NO: 341487 - RNA, 22 nt, Artificial Sequence
  Synthetic
auucuuauaggauucauuccug

SEQ ID NO: 341488 - RNA, 23 nt, Artificial Sequence
  Synthetic
aauucuuauaggauucauuccug

SEQ ID NO: 341489 - RNA, 24 nt, Artificial Sequence
  Synthetic
aaauucuuauaggauucauuccug

SEQ ID NO: 341490 - RNA, 18 nt, Artificial Sequence
  Synthetic
ucuuuuccaggauuccug

SEQ ID NO: 341491 - RNA, 19 nt, Artificial Sequence
  Synthetic
cucuuuuccaggauuccug

SEQ ID NO: 341492 - RNA, 20 nt, Artificial Sequence
  Synthetic
ccucuuuuccaggauuccug

SEQ ID NO: 341493 - RNA, 21 nt, Artificial Sequence
  Synthetic
uccucuuuuccaggauuccug

SEQ ID NO: 341494 - RNA, 22 nt, Artificial Sequence
  Synthetic
auccucuuuuccaggauuccug

SEQ ID NO: 341495 - RNA, 23 nt, Artificial Sequence
  Synthetic
gauccucuuuuccaggauuccug

SEQ ID NO: 341496 - RNA, 24 nt, Artificial Sequence
  Synthetic
ugauccucuuuuccaggauuccug

SEQ ID NO: 341497 - RNA, 18 nt, Artificial Sequence
  Synthetic
gcuagugagauauuccug

SEQ ID NO: 341498 - RNA, 19 nt, Artificial Sequence
  Synthetic
ugcuagugagauauuccug

SEQ ID NO: 341499 - RNA, 20 nt, Artificial Sequence
  Synthetic
augcuagugagauauuccug

SEQ ID NO: 341500 - RNA, 21 nt, Artificial Sequence
  Synthetic
gaugcuagugagauauuccug

SEQ ID NO: 341501 - RNA, 22 nt, Artificial Sequence
  Synthetic
ggaugcuagugagauauuccug

SEQ ID NO: 341502 - RNA, 23 nt, Artificial Sequence
  Synthetic
uggaugcuagugagauauuccug

SEQ ID NO: 341503 - RNA, 24 nt, Artificial Sequence
  Synthetic
auggaugcuagugagauauuccug

SEQ ID NO: 341504 - RNA, 18 nt, Artificial Sequence
  Synthetic
ucuuagcaacuauuccug

SEQ ID NO: 341505 - RNA, 19 nt, Artificial Sequence
  Synthetic
cucuuagcaacuauuccug

SEQ ID NO: 341506 - RNA, 20 nt, Artificial Sequence
  Synthetic
acucuuagcaacuauuccug

SEQ ID NO: 341507 - RNA, 21 nt, Artificial Sequence
  Synthetic
aacucuuagcaacuauuccug

SEQ ID NO: 341508 - RNA, 22 nt, Artificial Sequence
  Synthetic
uaacucuuagcaacuauuccug

SEQ ID NO: 341509 - RNA, 23 nt, Artificial Sequence
  Synthetic
auaacucuuagcaacuauuccug

SEQ ID NO: 341510 - RNA, 24 nt, Artificial Sequence
  Synthetic
cauaacucuuagcaacuauuccug

SEQ ID NO: 341511 - RNA, 18 nt, Artificial Sequence
  Synthetic
cauugacauagcuuccug

SEQ ID NO: 341512 - RNA, 19 nt, Artificial Sequence
  Synthetic
ccauugacauagcuuccug

SEQ ID NO: 341513 - RNA, 20 nt, Artificial Sequence
  Synthetic
accauugacauagcuuccug

SEQ ID NO: 341514 - RNA, 21 nt, Artificial Sequence
  Synthetic
uaccauugacauagcuuccug

SEQ ID NO: 341515 - RNA, 22 nt, Artificial Sequence
  Synthetic
cuaccauugacauagcuuccug

SEQ ID NO: 341516 - RNA, 23 nt, Artificial Sequence
  Synthetic
ucuaccauugacauagcuuccug

SEQ ID NO: 341517 - RNA, 24 nt, Artificial Sequence
  Synthetic
gucuaccauugacauagcuuccug

SEQ ID NO: 341518 - RNA, 18 nt, Artificial Sequence
  Synthetic
auguauaacaucuuccug

SEQ ID NO: 341519 - RNA, 19 nt, Artificial Sequence
  Synthetic
aauguauaacaucuuccug

SEQ ID NO: 341520 - RNA, 20 nt, Artificial Sequence
  Synthetic
gaauguauaacaucuuccug

SEQ ID NO: 341521 - RNA, 21 nt, Artificial Sequence
  Synthetic
ugaauguauaacaucuuccug

SEQ ID NO: 341522 - RNA, 22 nt, Artificial Sequence
  Synthetic
augaauguauaacaucuuccug

SEQ ID NO: 341523 - RNA, 23 nt, Artificial Sequence
  Synthetic
aaugaauguauaacaucuuccug

SEQ ID NO: 341524 - RNA, 24 nt, Artificial Sequence
  Synthetic
gaaugaauguauaacaucuuccug

SEQ ID NO: 341525 - RNA, 18 nt, Artificial Sequence
  Synthetic
aaaauauuaaaguuccug

SEQ ID NO: 341526 - RNA, 19 nt, Artificial Sequence
  Synthetic
uaaaauauuaaaguuccug

SEQ ID NO: 341527 - RNA, 20 nt, Artificial Sequence
  Synthetic
uuaaaauauuaaaguuccug

SEQ ID NO: 341528 - RNA, 21 nt, Artificial Sequence
  Synthetic
uuuaaaauauuaaaguuccug

SEQ ID NO: 341529 - RNA, 22 nt, Artificial Sequence
  Synthetic
auuuaaaauauuaaaguuccug

SEQ ID NO: 341530 - RNA, 23 nt, Artificial Sequence
  Synthetic
uauuuaaaauauuaaaguuccug

SEQ ID NO: 341531 - RNA, 24 nt, Artificial Sequence
  Synthetic
uuauuuaaaauauuaaaguuccug

SEQ ID NO: 341532 - RNA, 18 nt, Artificial Sequence
  Synthetic
ugacagaugugguuccug

SEQ ID NO: 341533 - RNA, 19 nt, Artificial Sequence
  Synthetic
cugacagaugugguuccug

SEQ ID NO: 341534 - RNA, 20 nt, Artificial Sequence
  Synthetic
gcugacagaugugguuccug

SEQ ID NO: 341535 - RNA, 21 nt, Artificial Sequence
  Synthetic
ugcugacagaugugguuccug

SEQ ID NO: 341536 - RNA, 22 nt, Artificial Sequence
  Synthetic
gugcugacagaugugguuccug

SEQ ID NO: 341537 - RNA, 23 nt, Artificial Sequence
  Synthetic
ggugcugacagaugugguuccug

SEQ ID NO: 341538 - RNA, 24 nt, Artificial Sequence
  Synthetic
uggugcugacagaugugguuccug

SEQ ID NO: 341539 - RNA, 18 nt, Artificial Sequence
  Synthetic
augugugcauuguuccug

SEQ ID NO: 341540 - RNA, 19 nt, Artificial Sequence
  Synthetic
gaugugugcauuguuccug

SEQ ID NO: 341541 - RNA, 20 nt, Artificial Sequence
  Synthetic
ggaugugugcauuguuccug

SEQ ID NO: 341542 - RNA, 21 nt, Artificial Sequence
  Synthetic
gggaugugugcauuguuccug

SEQ ID NO: 341543 - RNA, 22 nt, Artificial Sequence
  Synthetic
agggaugugugcauuguuccug

SEQ ID NO: 341544 - RNA, 23 nt, Artificial Sequence
  Synthetic
cagggaugugugcauuguuccug

SEQ ID NO: 341545 - RNA, 24 nt, Artificial Sequence
  Synthetic
ccagggaugugugcauuguuccug

SEQ ID NO: 341546 - RNA, 18 nt, Artificial Sequence
  Synthetic
acuucauuccauuuccug

SEQ ID NO: 341547 - RNA, 19 nt, Artificial Sequence
  Synthetic
cacuucauuccauuuccug

SEQ ID NO: 341548 - RNA, 20 nt, Artificial Sequence
  Synthetic
ucacuucauuccauuuccug

SEQ ID NO: 341549 - RNA, 21 nt, Artificial Sequence
  Synthetic
uucacuucauuccauuuccug

SEQ ID NO: 341550 - RNA, 22 nt, Artificial Sequence
  Synthetic
cuucacuucauuccauuuccug

SEQ ID NO: 341551 - RNA, 23 nt, Artificial Sequence
  Synthetic
ucuucacuucauuccauuuccug

SEQ ID NO: 341552 - RNA, 24 nt, Artificial Sequence
  Synthetic
uucuucacuucauuccauuuccug

SEQ ID NO: 341553 - RNA, 18 nt, Artificial Sequence
  Synthetic
aaugaccaguauuuccug

SEQ ID NO: 341554 - RNA, 19 nt, Artificial Sequence
  Synthetic
aaaugaccaguauuuccug

SEQ ID NO: 341555 - RNA, 20 nt, Artificial Sequence
  Synthetic
aaaaugaccaguauuuccug

SEQ ID NO: 341556 - RNA, 21 nt, Artificial Sequence
  Synthetic
aaaaaugaccaguauuuccug

SEQ ID NO: 341557 - RNA, 22 nt, Artificial Sequence
  Synthetic
uaaaaaugaccaguauuuccug

SEQ ID NO: 341558 - RNA, 23 nt, Artificial Sequence
  Synthetic
uuaaaaaugaccaguauuuccug

SEQ ID NO: 341559 - RNA, 24 nt, Artificial Sequence
  Synthetic
auuaaaaaugaccaguauuuccug

SEQ ID NO: 341560 - RNA, 18 nt, Artificial Sequence
  Synthetic
cuuaugaaguguuuccug

SEQ ID NO: 341561 - RNA, 19 nt, Artificial Sequence
  Synthetic
acuuaugaaguguuuccug

SEQ ID NO: 341562 - RNA, 20 nt, Artificial Sequence
  Synthetic
cacuuaugaaguguuuccug

SEQ ID NO: 341563 - RNA, 21 nt, Artificial Sequence
  Synthetic
acacuuaugaaguguuuccug

SEQ ID NO: 341564 - RNA, 22 nt, Artificial Sequence
  Synthetic
aacacuuaugaaguguuuccug

SEQ ID NO: 341565 - RNA, 23 nt, Artificial Sequence
  Synthetic
caacacuuaugaaguguuuccug

SEQ ID NO: 341566 - RNA, 24 nt, Artificial Sequence
  Synthetic
acaacacuuaugaaguguuuccug

SEQ ID NO: 341567 - RNA, 18 nt, Artificial Sequence
  Synthetic
ccaacuccuguuuuccug

SEQ ID NO: 341568 - RNA, 19 nt, Artificial Sequence
  Synthetic
gccaacuccuguuuuccug

SEQ ID NO: 341569 - RNA, 20 nt, Artificial Sequence
  Synthetic
cgccaacuccuguuuuccug

SEQ ID NO: 341570 - RNA, 21 nt, Artificial Sequence
  Synthetic
ccgccaacuccuguuuuccug

SEQ ID NO: 341571 - RNA, 22 nt, Artificial Sequence
  Synthetic
cccgccaacuccuguuuuccug

SEQ ID NO: 341572 - RNA, 23 nt, Artificial Sequence
  Synthetic
acccgccaacuccuguuuuccug

SEQ ID NO: 341573 - RNA, 24 nt, Artificial Sequence
  Synthetic
cacccgccaacuccuguuuuccug

SEQ ID NO: 341574 - RNA, 18 nt, Artificial Sequence
  Synthetic
ucaugauguguuuuccug

SEQ ID NO: 341575 - RNA, 19 nt, Artificial Sequence
  Synthetic
cucaugauguguuuuccug

SEQ ID NO: 341576 - RNA, 20 nt, Artificial Sequence
  Synthetic
ccucaugauguguuuuccug

SEQ ID NO: 341577 - RNA, 21 nt, Artificial Sequence
  Synthetic
cccucaugauguguuuuccug

SEQ ID NO: 341578 - RNA, 22 nt, Artificial Sequence
  Synthetic
ccccucaugauguguuuuccug

SEQ ID NO: 341579 - RNA, 23 nt, Artificial Sequence
  Synthetic
uccccucaugauguguuuuccug

SEQ ID NO: 341580 - RNA, 24 nt, Artificial Sequence
  Synthetic
uuccccucaugauguguuuuccug

SEQ ID NO: 341581 - RNA, 18 nt, Artificial Sequence
  Synthetic
gagguuuucacaaagcug

SEQ ID NO: 341582 - RNA, 19 nt, Artificial Sequence
  Synthetic
agagguuuucacaaagcug

SEQ ID NO: 341583 - RNA, 20 nt, Artificial Sequence
  Synthetic
uagagguuuucacaaagcug

SEQ ID NO: 341584 - RNA, 21 nt, Artificial Sequence
  Synthetic
auagagguuuucacaaagcug

SEQ ID NO: 341585 - RNA, 22 nt, Artificial Sequence
  Synthetic
aauagagguuuucacaaagcug

SEQ ID NO: 341586 - RNA, 23 nt, Artificial Sequence
  Synthetic
uaauagagguuuucacaaagcug

SEQ ID NO: 341587 - RNA, 24 nt, Artificial Sequence
  Synthetic
uuaauagagguuuucacaaagcug

SEQ ID NO: 341588 - RNA, 18 nt, Artificial Sequence
  Synthetic
gaaauuuuggcaaagcug

SEQ ID NO: 341589 - RNA, 19 nt, Artificial Sequence
  Synthetic
ggaaauuuuggcaaagcug

SEQ ID NO: 341590 - RNA, 20 nt, Artificial Sequence
  Synthetic
aggaaauuuuggcaaagcug

SEQ ID NO: 341591 - RNA, 21 nt, Artificial Sequence
  Synthetic
aaggaaauuuuggcaaagcug

SEQ ID NO: 341592 - RNA, 22 nt, Artificial Sequence
  Synthetic
gaaggaaauuuuggcaaagcug

SEQ ID NO: 341593 - RNA, 23 nt, Artificial Sequence
  Synthetic
ggaaggaaauuuuggcaaagcug

SEQ ID NO: 341594 - RNA, 24 nt, Artificial Sequence
  Synthetic
uggaaggaaauuuuggcaaagcug

SEQ ID NO: 341595 - RNA, 18 nt, Artificial Sequence
  Synthetic
uccaaaaagucaaagcug

SEQ ID NO: 341596 - RNA, 19 nt, Artificial Sequence
  Synthetic
cuccaaaaagucaaagcug

SEQ ID NO: 341597 - RNA, 20 nt, Artificial Sequence
  Synthetic
ucuccaaaaagucaaagcug

SEQ ID NO: 341598 - RNA, 21 nt, Artificial Sequence
  Synthetic
cucuccaaaaagucaaagcug

SEQ ID NO: 341599 - RNA, 22 nt, Artificial Sequence
  Synthetic
ccucuccaaaaagucaaagcug

SEQ ID NO: 341600 - RNA, 23 nt, Artificial Sequence
  Synthetic
gccucuccaaaaagucaaagcug

SEQ ID NO: 341601 - RNA, 24 nt, Artificial Sequence
  Synthetic
ugccucuccaaaaagucaaagcug

SEQ ID NO: 341602 - RNA, 18 nt, Artificial Sequence
  Synthetic
uuucuuauccacaagcug

SEQ ID NO: 341603 - RNA, 19 nt, Artificial Sequence
  Synthetic
cuuucuuauccacaagcug

SEQ ID NO: 341604 - RNA, 20 nt, Artificial Sequence
  Synthetic
ccuuucuuauccacaagcug

SEQ ID NO: 341605 - RNA, 21 nt, Artificial Sequence
  Synthetic
uccuuucuuauccacaagcug

SEQ ID NO: 341606 - RNA, 22 nt, Artificial Sequence
  Synthetic
auccuuucuuauccacaagcug

SEQ ID NO: 341607 - RNA, 23 nt, Artificial Sequence
  Synthetic
aauccuuucuuauccacaagcug

SEQ ID NO: 341608 - RNA, 24 nt, Artificial Sequence
  Synthetic
gaauccuuucuuauccacaagcug

SEQ ID NO: 341609 - RNA, 18 nt, Artificial Sequence
  Synthetic
cuuuuaagcuacaagcug

SEQ ID NO: 341610 - RNA, 19 nt, Artificial Sequence
  Synthetic
gcuuuuaagcuacaagcug

SEQ ID NO: 341611 - RNA, 20 nt, Artificial Sequence
  Synthetic
ggcuuuuaagcuacaagcug

SEQ ID NO: 341612 - RNA, 21 nt, Artificial Sequence
  Synthetic
uggcuuuuaagcuacaagcug

SEQ ID NO: 341613 - RNA, 22 nt, Artificial Sequence
  Synthetic
uuggcuuuuaagcuacaagcug

SEQ ID NO: 341614 - RNA, 23 nt, Artificial Sequence
  Synthetic
auuggcuuuuaagcuacaagcug

SEQ ID NO: 341615 - RNA, 24 nt, Artificial Sequence
  Synthetic
gauuggcuuuuaagcuacaagcug

SEQ ID NO: 341616 - RNA, 18 nt, Artificial Sequence
  Synthetic
uuauuuagcaccaagcug

SEQ ID NO: 341617 - RNA, 19 nt, Artificial Sequence
  Synthetic
auuauuuagcaccaagcug

SEQ ID NO: 341618 - RNA, 20 nt, Artificial Sequence
  Synthetic
uauuauuuagcaccaagcug

SEQ ID NO: 341619 - RNA, 21 nt, Artificial Sequence
  Synthetic
uuauuauuuagcaccaagcug

SEQ ID NO: 341620 - RNA, 22 nt, Artificial Sequence
  Synthetic
auuauuauuuagcaccaagcug

SEQ ID NO: 341621 - RNA, 23 nt, Artificial Sequence
  Synthetic
uauuauuauuuagcaccaagcug

SEQ ID NO: 341622 - RNA, 24 nt, Artificial Sequence
  Synthetic
auauuauuauuuagcaccaagcug

SEQ ID NO: 341623 - RNA, 18 nt, Artificial Sequence
  Synthetic
agcgcaccuagcaagcug

SEQ ID NO: 341624 - RNA, 19 nt, Artificial Sequence
  Synthetic
cagcgcaccuagcaagcug

SEQ ID NO: 341625 - RNA, 20 nt, Artificial Sequence
  Synthetic
ccagcgcaccuagcaagcug

SEQ ID NO: 341626 - RNA, 21 nt, Artificial Sequence
  Synthetic
gccagcgcaccuagcaagcug

SEQ ID NO: 341627 - RNA, 22 nt, Artificial Sequence
  Synthetic
ggccagcgcaccuagcaagcug

SEQ ID NO: 341628 - RNA, 23 nt, Artificial Sequence
  Synthetic
uggccagcgcaccuagcaagcug

SEQ ID NO: 341629 - RNA, 24 nt, Artificial Sequence
  Synthetic
cuggccagcgcaccuagcaagcug

SEQ ID NO: 341630 - RNA, 18 nt, Artificial Sequence
  Synthetic
cuucugagacucaagcug

SEQ ID NO: 341631 - RNA, 19 nt, Artificial Sequence
  Synthetic
ucuucugagacucaagcug

SEQ ID NO: 341632 - RNA, 20 nt, Artificial Sequence
  Synthetic
uucuucugagacucaagcug

SEQ ID NO: 341633 - RNA, 21 nt, Artificial Sequence
  Synthetic
uuucuucugagacucaagcug

SEQ ID NO: 341634 - RNA, 22 nt, Artificial Sequence
  Synthetic
uuuucuucugagacucaagcug

SEQ ID NO: 341635 - RNA, 23 nt, Artificial Sequence
  Synthetic
auuuucuucugagacucaagcug

SEQ ID NO: 341636 - RNA, 24 nt, Artificial Sequence
  Synthetic
uauuuucuucugagacucaagcug

SEQ ID NO: 341637 - RNA, 18 nt, Artificial Sequence
  Synthetic
aaaagcagaaggaagcug

SEQ ID NO: 341638 - RNA, 19 nt, Artificial Sequence
  Synthetic
gaaaagcagaaggaagcug

SEQ ID NO: 341639 - RNA, 20 nt, Artificial Sequence
  Synthetic
ugaaaagcagaaggaagcug

SEQ ID NO: 341640 - RNA, 21 nt, Artificial Sequence
  Synthetic
uugaaaagcagaaggaagcug

SEQ ID NO: 341641 - RNA, 22 nt, Artificial Sequence
  Synthetic
uuugaaaagcagaaggaagcug

SEQ ID NO: 341642 - RNA, 23 nt, Artificial Sequence
  Synthetic
cuuugaaaagcagaaggaagcug

SEQ ID NO: 341643 - RNA, 24 nt, Artificial Sequence
  Synthetic
acuuugaaaagcagaaggaagcug

SEQ ID NO: 341644 - RNA, 18 nt, Artificial Sequence
  Synthetic
ucuccagccaggaagcug

SEQ ID NO: 341645 - RNA, 19 nt, Artificial Sequence
  Synthetic
uucuccagccaggaagcug

SEQ ID NO: 341646 - RNA, 20 nt, Artificial Sequence
  Synthetic
cuucuccagccaggaagcug

SEQ ID NO: 341647 - RNA, 21 nt, Artificial Sequence
  Synthetic
ccuucuccagccaggaagcug

SEQ ID NO: 341648 - RNA, 22 nt, Artificial Sequence
  Synthetic
cccuucuccagccaggaagcug

SEQ ID NO: 341649 - RNA, 23 nt, Artificial Sequence
  Synthetic
gcccuucuccagccaggaagcug

SEQ ID NO: 341650 - RNA, 24 nt, Artificial Sequence
  Synthetic
ugcccuucuccagccaggaagcug

SEQ ID NO: 341651 - RNA, 18 nt, Artificial Sequence
  Synthetic
agagcaggcuggaagcug

SEQ ID NO: 341652 - RNA, 19 nt, Artificial Sequence
  Synthetic
cagagcaggcuggaagcug

SEQ ID NO: 341653 - RNA, 20 nt, Artificial Sequence
  Synthetic
gcagagcaggcuggaagcug

SEQ ID NO: 341654 - RNA, 21 nt, Artificial Sequence
  Synthetic
ugcagagcaggcuggaagcug

SEQ ID NO: 341655 - RNA, 22 nt, Artificial Sequence
  Synthetic
uugcagagcaggcuggaagcug

SEQ ID NO: 341656 - RNA, 23 nt, Artificial Sequence
  Synthetic
cuugcagagcaggcuggaagcug

SEQ ID NO: 341657 - RNA, 24 nt, Artificial Sequence
  Synthetic
acuugcagagcaggcuggaagcug

SEQ ID NO: 341658 - RNA, 18 nt, Artificial Sequence
  Synthetic
uugagaagcaugaagcug

SEQ ID NO: 341659 - RNA, 19 nt, Artificial Sequence
  Synthetic
cuugagaagcaugaagcug

SEQ ID NO: 341660 - RNA, 20 nt, Artificial Sequence
  Synthetic
ucuugagaagcaugaagcug

SEQ ID NO: 341661 - RNA, 21 nt, Artificial Sequence
  Synthetic
cucuugagaagcaugaagcug

SEQ ID NO: 341662 - RNA, 22 nt, Artificial Sequence
  Synthetic
gcucuugagaagcaugaagcug

SEQ ID NO: 341663 - RNA, 23 nt, Artificial Sequence
  Synthetic
ggcucuugagaagcaugaagcug

SEQ ID NO: 341664 - RNA, 24 nt, Artificial Sequence
  Synthetic
uggcucuugagaagcaugaagcug

SEQ ID NO: 341665 - RNA, 18 nt, Artificial Sequence
  Synthetic
aacuaacuuaauaagcug

SEQ ID NO: 341666 - RNA, 19 nt, Artificial Sequence
  Synthetic
uaacuaacuuaauaagcug

SEQ ID NO: 341667 - RNA, 20 nt, Artificial Sequence
  Synthetic
auaacuaacuuaauaagcug

SEQ ID NO: 341668 - RNA, 21 nt, Artificial Sequence
  Synthetic
aauaacuaacuuaauaagcug

SEQ ID NO: 341669 - RNA, 22 nt, Artificial Sequence
  Synthetic
uaauaacuaacuuaauaagcug

SEQ ID NO: 341670 - RNA, 23 nt, Artificial Sequence
  Synthetic
cuaauaacuaacuuaauaagcug

SEQ ID NO: 341671 - RNA, 24 nt, Artificial Sequence
  Synthetic
gcuaauaacuaacuuaauaagcug

SEQ ID NO: 341672 - RNA, 18 nt, Artificial Sequence
  Synthetic
cacuucuuugauaagcug

SEQ ID NO: 341673 - RNA, 19 nt, Artificial Sequence
  Synthetic
ucacuucuuugauaagcug

SEQ ID NO: 341674 - RNA, 20 nt, Artificial Sequence
  Synthetic
aucacuucuuugauaagcug

SEQ ID NO: 341675 - RNA, 21 nt, Artificial Sequence
  Synthetic
uaucacuucuuugauaagcug

SEQ ID NO: 341676 - RNA, 22 nt, Artificial Sequence
  Synthetic
cuaucacuucuuugauaagcug

SEQ ID NO: 341677 - RNA, 23 nt, Artificial Sequence
  Synthetic
acuaucacuucuuugauaagcug

SEQ ID NO: 341678 - RNA, 24 nt, Artificial Sequence
  Synthetic
cacuaucacuucuuugauaagcug

SEQ ID NO: 341679 - RNA, 18 nt, Artificial Sequence
  Synthetic
aaaacucaaaaacagcug

SEQ ID NO: 341680 - RNA, 19 nt, Artificial Sequence
  Synthetic
aaaaacucaaaaacagcug

SEQ ID NO: 341681 - RNA, 20 nt, Artificial Sequence
  Synthetic
aaaaaacucaaaaacagcug

SEQ ID NO: 341682 - RNA, 21 nt, Artificial Sequence
  Synthetic
gaaaaaacucaaaaacagcug

SEQ ID NO: 341683 - RNA, 22 nt, Artificial Sequence
  Synthetic
ggaaaaaacucaaaaacagcug

SEQ ID NO: 341684 - RNA, 23 nt, Artificial Sequence
  Synthetic
aggaaaaaacucaaaaacagcug

SEQ ID NO: 341685 - RNA, 24 nt, Artificial Sequence
  Synthetic
caggaaaaaacucaaaaacagcug

SEQ ID NO: 341686 - RNA, 18 nt, Artificial Sequence
  Synthetic
uacaguuccacacagcug

SEQ ID NO: 341687 - RNA, 19 nt, Artificial Sequence
  Synthetic
uuacaguuccacacagcug

SEQ ID NO: 341688 - RNA, 20 nt, Artificial Sequence
  Synthetic
cuuacaguuccacacagcug

SEQ ID NO: 341689 - RNA, 21 nt, Artificial Sequence
  Synthetic
acuuacaguuccacacagcug

SEQ ID NO: 341690 - RNA, 22 nt, Artificial Sequence
  Synthetic
gacuuacaguuccacacagcug

SEQ ID NO: 341691 - RNA, 23 nt, Artificial Sequence
  Synthetic
ggacuuacaguuccacacagcug

SEQ ID NO: 341692 - RNA, 24 nt, Artificial Sequence
  Synthetic
uggacuuacaguuccacacagcug

SEQ ID NO: 341693 - RNA, 18 nt, Artificial Sequence
  Synthetic
uauuuaaagcuacagcug

SEQ ID NO: 341694 - RNA, 19 nt, Artificial Sequence
  Synthetic
cuauuuaaagcuacagcug

SEQ ID NO: 341695 - RNA, 20 nt, Artificial Sequence
  Synthetic
acuauuuaaagcuacagcug

SEQ ID NO: 341696 - RNA, 21 nt, Artificial Sequence
  Synthetic
cacuauuuaaagcuacagcug

SEQ ID NO: 341697 - RNA, 22 nt, Artificial Sequence
  Synthetic
ccacuauuuaaagcuacagcug

SEQ ID NO: 341698 - RNA, 23 nt, Artificial Sequence
  Synthetic
cccacuauuuaaagcuacagcug

SEQ ID NO: 341699 - RNA, 24 nt, Artificial Sequence
  Synthetic
ucccacuauuuaaagcuacagcug

SEQ ID NO: 341700 - RNA, 18 nt, Artificial Sequence
  Synthetic
gaagcagcccaccagcug

SEQ ID NO: 341701 - RNA, 19 nt, Artificial Sequence
  Synthetic
ggaagcagcccaccagcug

SEQ ID NO: 341702 - RNA, 20 nt, Artificial Sequence
  Synthetic
aggaagcagcccaccagcug

SEQ ID NO: 341703 - RNA, 21 nt, Artificial Sequence
  Synthetic
caggaagcagcccaccagcug

SEQ ID NO: 341704 - RNA, 22 nt, Artificial Sequence
  Synthetic
gcaggaagcagcccaccagcug

SEQ ID NO: 341705 - RNA, 23 nt, Artificial Sequence
  Synthetic
agcaggaagcagcccaccagcug

SEQ ID NO: 341706 - RNA, 24 nt, Artificial Sequence
  Synthetic
aagcaggaagcagcccaccagcug

SEQ ID NO: 341707 - RNA, 18 nt, Artificial Sequence
  Synthetic
aaggauuuccgccagcug

SEQ ID NO: 341708 - RNA, 19 nt, Artificial Sequence
  Synthetic
aaaggauuuccgccagcug

SEQ ID NO: 341709 - RNA, 20 nt, Artificial Sequence
  Synthetic
gaaaggauuuccgccagcug

SEQ ID NO: 341710 - RNA, 21 nt, Artificial Sequence
  Synthetic
ggaaaggauuuccgccagcug

SEQ ID NO: 341711 - RNA, 22 nt, Artificial Sequence
  Synthetic
gggaaaggauuuccgccagcug

SEQ ID NO: 341712 - RNA, 23 nt, Artificial Sequence
  Synthetic
cgggaaaggauuuccgccagcug

SEQ ID NO: 341713 - RNA, 24 nt, Artificial Sequence
  Synthetic
acgggaaaggauuuccgccagcug

SEQ ID NO: 341714 - RNA, 18 nt, Artificial Sequence
  Synthetic
aaggccuuggagcagcug

SEQ ID NO: 341715 - RNA, 19 nt, Artificial Sequence
  Synthetic
caaggccuuggagcagcug

SEQ ID NO: 341716 - RNA, 20 nt, Artificial Sequence
  Synthetic
gcaaggccuuggagcagcug

SEQ ID NO: 341717 - RNA, 21 nt, Artificial Sequence
  Synthetic
ugcaaggccuuggagcagcug

SEQ ID NO: 341718 - RNA, 22 nt, Artificial Sequence
  Synthetic
cugcaaggccuuggagcagcug

SEQ ID NO: 341719 - RNA, 23 nt, Artificial Sequence
  Synthetic
acugcaaggccuuggagcagcug

SEQ ID NO: 341720 - RNA, 24 nt, Artificial Sequence
  Synthetic
uacugcaaggccuuggagcagcug

SEQ ID NO: 341721 - RNA, 18 nt, Artificial Sequence
  Synthetic
cagcacuccuagcagcug

SEQ ID NO: 341722 - RNA, 19 nt, Artificial Sequence
  Synthetic
gcagcacuccuagcagcug

SEQ ID NO: 341723 - RNA, 20 nt, Artificial Sequence
  Synthetic
agcagcacuccuagcagcug

SEQ ID NO: 341724 - RNA, 21 nt, Artificial Sequence
  Synthetic
cagcagcacuccuagcagcug

SEQ ID NO: 341725 - RNA, 22 nt, Artificial Sequence
  Synthetic
ccagcagcacuccuagcagcug

SEQ ID NO: 341726 - RNA, 23 nt, Artificial Sequence
  Synthetic
accagcagcacuccuagcagcug

SEQ ID NO: 341727 - RNA, 24 nt, Artificial Sequence
  Synthetic
uaccagcagcacuccuagcagcug

SEQ ID NO: 341728 - RNA, 18 nt, Artificial Sequence
  Synthetic
ccgugaacugggcagcug

SEQ ID NO: 341729 - RNA, 19 nt, Artificial Sequence
  Synthetic
uccgugaacugggcagcug

SEQ ID NO: 341730 - RNA, 20 nt, Artificial Sequence
  Synthetic
uuccgugaacugggcagcug

SEQ ID NO: 341731 - RNA, 21 nt, Artificial Sequence
  Synthetic
uuuccgugaacugggcagcug

SEQ ID NO: 341732 - RNA, 22 nt, Artificial Sequence
  Synthetic
cuuuccgugaacugggcagcug

SEQ ID NO: 341733 - RNA, 23 nt, Artificial Sequence
  Synthetic
gcuuuccgugaacugggcagcug

SEQ ID NO: 341734 - RNA, 24 nt, Artificial Sequence
  Synthetic
ggcuuuccgugaacugggcagcug

SEQ ID NO: 341735 - RNA, 18 nt, Artificial Sequence
  Synthetic
aaaaauagaugucagcug

SEQ ID NO: 341736 - RNA, 19 nt, Artificial Sequence
  Synthetic
uaaaaauagaugucagcug

SEQ ID NO: 341737 - RNA, 20 nt, Artificial Sequence
  Synthetic
auaaaaauagaugucagcug

SEQ ID NO: 341738 - RNA, 21 nt, Artificial Sequence
  Synthetic
cauaaaaauagaugucagcug

SEQ ID NO: 341739 - RNA, 22 nt, Artificial Sequence
  Synthetic
acauaaaaauagaugucagcug

SEQ ID NO: 341740 - RNA, 23 nt, Artificial Sequence
  Synthetic
uacauaaaaauagaugucagcug

SEQ ID NO: 341741 - RNA, 24 nt, Artificial Sequence
  Synthetic
cuacauaaaaauagaugucagcug

SEQ ID NO: 341742 - RNA, 18 nt, Artificial Sequence
  Synthetic
uaguaaacacuucagcug

SEQ ID NO: 341743 - RNA, 19 nt, Artificial Sequence
  Synthetic
auaguaaacacuucagcug

SEQ ID NO: 341744 - RNA, 20 nt, Artificial Sequence
  Synthetic
aauaguaaacacuucagcug

SEQ ID NO: 341745 - RNA, 21 nt, Artificial Sequence
  Synthetic
aaauaguaaacacuucagcug

SEQ ID NO: 341746 - RNA, 22 nt, Artificial Sequence
  Synthetic
aaaauaguaaacacuucagcug

SEQ ID NO: 341747 - RNA, 23 nt, Artificial Sequence
  Synthetic
caaaauaguaaacacuucagcug

SEQ ID NO: 341748 - RNA, 24 nt, Artificial Sequence
  Synthetic
ucaaaauaguaaacacuucagcug

SEQ ID NO: 341749 - RNA, 18 nt, Artificial Sequence
  Synthetic
cauggaacugaagagcug

SEQ ID NO: 341750 - RNA, 19 nt, Artificial Sequence
  Synthetic
acauggaacugaagagcug

SEQ ID NO: 341751 - RNA, 20 nt, Artificial Sequence
  Synthetic
uacauggaacugaagagcug

SEQ ID NO: 341752 - RNA, 21 nt, Artificial Sequence
  Synthetic
uuacauggaacugaagagcug

SEQ ID NO: 341753 - RNA, 22 nt, Artificial Sequence
  Synthetic
guuacauggaacugaagagcug

SEQ ID NO: 341754 - RNA, 23 nt, Artificial Sequence
  Synthetic
cguuacauggaacugaagagcug

SEQ ID NO: 341755 - RNA, 24 nt, Artificial Sequence
  Synthetic
acguuacauggaacugaagagcug

SEQ ID NO: 341756 - RNA, 18 nt, Artificial Sequence
  Synthetic
gucaauacagcagagcug

SEQ ID NO: 341757 - RNA, 19 nt, Artificial Sequence
  Synthetic
agucaauacagcagagcug

SEQ ID NO: 341758 - RNA, 20 nt, Artificial Sequence
  Synthetic
gagucaauacagcagagcug

SEQ ID NO: 341759 - RNA, 21 nt, Artificial Sequence
  Synthetic
ugagucaauacagcagagcug

SEQ ID NO: 341760 - RNA, 22 nt, Artificial Sequence
  Synthetic
augagucaauacagcagagcug

SEQ ID NO: 341761 - RNA, 23 nt, Artificial Sequence
  Synthetic
aaugagucaauacagcagagcug

SEQ ID NO: 341762 - RNA, 24 nt, Artificial Sequence
  Synthetic
gaaugagucaauacagcagagcug

SEQ ID NO: 341763 - RNA, 18 nt, Artificial Sequence
  Synthetic
augauucggucagagcug

SEQ ID NO: 341764 - RNA, 19 nt, Artificial Sequence
  Synthetic
uaugauucggucagagcug

SEQ ID NO: 341765 - RNA, 20 nt, Artificial Sequence
  Synthetic
uuaugauucggucagagcug

SEQ ID NO: 341766 - RNA, 21 nt, Artificial Sequence
  Synthetic
auuaugauucggucagagcug

SEQ ID NO: 341767 - RNA, 22 nt, Artificial Sequence
  Synthetic
uauuaugauucggucagagcug

SEQ ID NO: 341768 - RNA, 23 nt, Artificial Sequence
  Synthetic
uuauuaugauucggucagagcug

SEQ ID NO: 341769 - RNA, 24 nt, Artificial Sequence
  Synthetic
uuuauuaugauucggucagagcug

SEQ ID NO: 341770 - RNA, 18 nt, Artificial Sequence
  Synthetic
ggauguuaccaggagcug

SEQ ID NO: 341771 - RNA, 19 nt, Artificial Sequence
  Synthetic
aggauguuaccaggagcug

SEQ ID NO: 341772 - RNA, 20 nt, Artificial Sequence
  Synthetic
aaggauguuaccaggagcug

SEQ ID NO: 341773 - RNA, 21 nt, Artificial Sequence
  Synthetic
gaaggauguuaccaggagcug

SEQ ID NO: 341774 - RNA, 22 nt, Artificial Sequence
  Synthetic
ugaaggauguuaccaggagcug

SEQ ID NO: 341775 - RNA, 23 nt, Artificial Sequence
  Synthetic
uugaaggauguuaccaggagcug

SEQ ID NO: 341776 - RNA, 24 nt, Artificial Sequence
  Synthetic
guugaaggauguuaccaggagcug

SEQ ID NO: 341777 - RNA, 18 nt, Artificial Sequence
  Synthetic
uuaaaaaaccgggagcug

SEQ ID NO: 341778 - RNA, 19 nt, Artificial Sequence
  Synthetic
cuuaaaaaaccgggagcug

SEQ ID NO: 341779 - RNA, 20 nt, Artificial Sequence
  Synthetic
gcuuaaaaaaccgggagcug

SEQ ID NO: 341780 - RNA, 21 nt, Artificial Sequence
  Synthetic
agcuuaaaaaaccgggagcug

SEQ ID NO: 341781 - RNA, 22 nt, Artificial Sequence
  Synthetic
cagcuuaaaaaaccgggagcug

SEQ ID NO: 341782 - RNA, 23 nt, Artificial Sequence
  Synthetic
ucagcuuaaaaaaccgggagcug

SEQ ID NO: 341783 - RNA, 24 nt, Artificial Sequence
  Synthetic
uucagcuuaaaaaaccgggagcug

SEQ ID NO: 341784 - RNA, 18 nt, Artificial Sequence
  Synthetic
ggcugccucugggagcug

SEQ ID NO: 341785 - RNA, 19 nt, Artificial Sequence
  Synthetic
aggcugccucugggagcug

SEQ ID NO: 341786 - RNA, 20 nt, Artificial Sequence
  Synthetic
caggcugccucugggagcug

SEQ ID NO: 341787 - RNA, 21 nt, Artificial Sequence
  Synthetic
acaggcugccucugggagcug

SEQ ID NO: 341788 - RNA, 22 nt, Artificial Sequence
  Synthetic
uacaggcugccucugggagcug

SEQ ID NO: 341789 - RNA, 23 nt, Artificial Sequence
  Synthetic
auacaggcugccucugggagcug

SEQ ID NO: 341790 - RNA, 24 nt, Artificial Sequence
  Synthetic
uauacaggcugccucugggagcug

SEQ ID NO: 341791 - RNA, 18 nt, Artificial Sequence
  Synthetic
acaucaggaggugagcug

SEQ ID NO: 341792 - RNA, 19 nt, Artificial Sequence
  Synthetic
cacaucaggaggugagcug

SEQ ID NO: 341793 - RNA, 20 nt, Artificial Sequence
  Synthetic
ccacaucaggaggugagcug

SEQ ID NO: 341794 - RNA, 21 nt, Artificial Sequence
  Synthetic
cccacaucaggaggugagcug

SEQ ID NO: 341795 - RNA, 22 nt, Artificial Sequence
  Synthetic
ccccacaucaggaggugagcug

SEQ ID NO: 341796 - RNA, 23 nt, Artificial Sequence
  Synthetic
gccccacaucaggaggugagcug

SEQ ID NO: 341797 - RNA, 24 nt, Artificial Sequence
  Synthetic
ggccccacaucaggaggugagcug

SEQ ID NO: 341798 - RNA, 18 nt, Artificial Sequence
  Synthetic
uaauccuaaauugagcug

SEQ ID NO: 341799 - RNA, 19 nt, Artificial Sequence
  Synthetic
guaauccuaaauugagcug

SEQ ID NO: 341800 - RNA, 20 nt, Artificial Sequence
  Synthetic
aguaauccuaaauugagcug

SEQ ID NO: 341801 - RNA, 21 nt, Artificial Sequence
  Synthetic
uaguaauccuaaauugagcug

SEQ ID NO: 341802 - RNA, 22 nt, Artificial Sequence
  Synthetic
guaguaauccuaaauugagcug

SEQ ID NO: 341803 - RNA, 23 nt, Artificial Sequence
  Synthetic
cguaguaauccuaaauugagcug

SEQ ID NO: 341804 - RNA, 24 nt, Artificial Sequence
  Synthetic
ucguaguaauccuaaauugagcug

SEQ ID NO: 341805 - RNA, 18 nt, Artificial Sequence
  Synthetic
uuagauaauauugagcug

SEQ ID NO: 341806 - RNA, 19 nt, Artificial Sequence
  Synthetic
auuagauaauauugagcug

SEQ ID NO: 341807 - RNA, 20 nt, Artificial Sequence
  Synthetic
uauuagauaauauugagcug

SEQ ID NO: 341808 - RNA, 21 nt, Artificial Sequence
  Synthetic
auauuagauaauauugagcug

SEQ ID NO: 341809 - RNA, 22 nt, Artificial Sequence
  Synthetic
cauauuagauaauauugagcug

SEQ ID NO: 341810 - RNA, 23 nt, Artificial Sequence
  Synthetic
gcauauuagauaauauugagcug

SEQ ID NO: 341811 - RNA, 24 nt, Artificial Sequence
  Synthetic
agcauauuagauaauauugagcug

SEQ ID NO: 341812 - RNA, 18 nt, Artificial Sequence
  Synthetic
caagaaccgcuugagcug

SEQ ID NO: 341813 - RNA, 19 nt, Artificial Sequence
  Synthetic
acaagaaccgcuugagcug

SEQ ID NO: 341814 - RNA, 20 nt, Artificial Sequence
  Synthetic
cacaagaaccgcuugagcug

SEQ ID NO: 341815 - RNA, 21 nt, Artificial Sequence
  Synthetic
gcacaagaaccgcuugagcug

SEQ ID NO: 341816 - RNA, 22 nt, Artificial Sequence
  Synthetic
ggcacaagaaccgcuugagcug

SEQ ID NO: 341817 - RNA, 23 nt, Artificial Sequence
  Synthetic
aggcacaagaaccgcuugagcug

SEQ ID NO: 341818 - RNA, 24 nt, Artificial Sequence
  Synthetic
gaggcacaagaaccgcuugagcug

SEQ ID NO: 341819 - RNA, 18 nt, Artificial Sequence
  Synthetic
cugaauuuucaauagcug

SEQ ID NO: 341820 - RNA, 19 nt, Artificial Sequence
  Synthetic
ucugaauuuucaauagcug

SEQ ID NO: 341821 - RNA, 20 nt, Artificial Sequence
  Synthetic
cucugaauuuucaauagcug

SEQ ID NO: 341822 - RNA, 21 nt, Artificial Sequence
  Synthetic
ccucugaauuuucaauagcug

SEQ ID NO: 341823 - RNA, 22 nt, Artificial Sequence
  Synthetic
cccucugaauuuucaauagcug

SEQ ID NO: 341824 - RNA, 23 nt, Artificial Sequence
  Synthetic
gcccucugaauuuucaauagcug

SEQ ID NO: 341825 - RNA, 24 nt, Artificial Sequence
  Synthetic
ugcccucugaauuuucaauagcug

SEQ ID NO: 341826 - RNA, 18 nt, Artificial Sequence
  Synthetic
cuggaugcagaauagcug

SEQ ID NO: 341827 - RNA, 19 nt, Artificial Sequence
  Synthetic
ccuggaugcagaauagcug

SEQ ID NO: 341828 - RNA, 20 nt, Artificial Sequence
  Synthetic
gccuggaugcagaauagcug

SEQ ID NO: 341829 - RNA, 21 nt, Artificial Sequence
  Synthetic
agccuggaugcagaauagcug

SEQ ID NO: 341830 - RNA, 22 nt, Artificial Sequence
  Synthetic
cagccuggaugcagaauagcug

SEQ ID NO: 341831 - RNA, 23 nt, Artificial Sequence
  Synthetic
ccagccuggaugcagaauagcug

SEQ ID NO: 341832 - RNA, 24 nt, Artificial Sequence
  Synthetic
uccagccuggaugcagaauagcug

SEQ ID NO: 341833 - RNA, 18 nt, Artificial Sequence
  Synthetic
auucuagauauauagcug

SEQ ID NO: 341834 - RNA, 19 nt, Artificial Sequence
  Synthetic
gauucuagauauauagcug

SEQ ID NO: 341835 - RNA, 20 nt, Artificial Sequence
  Synthetic
ugauucuagauauauagcug

SEQ ID NO: 341836 - RNA, 21 nt, Artificial Sequence
  Synthetic
uugauucuagauauauagcug

SEQ ID NO: 341837 - RNA, 22 nt, Artificial Sequence
  Synthetic
guugauucuagauauauagcug

SEQ ID NO: 341838 - RNA, 23 nt, Artificial Sequence
  Synthetic
aguugauucuagauauauagcug

SEQ ID NO: 341839 - RNA, 24 nt, Artificial Sequence
  Synthetic
gaguugauucuagauauauagcug

SEQ ID NO: 341840 - RNA, 18 nt, Artificial Sequence
  Synthetic
ucaaagagaagcuagcug

SEQ ID NO: 341841 - RNA, 19 nt, Artificial Sequence
  Synthetic
gucaaagagaagcuagcug

SEQ ID NO: 341842 - RNA, 20 nt, Artificial Sequence
  Synthetic
ggucaaagagaagcuagcug

SEQ ID NO: 341843 - RNA, 21 nt, Artificial Sequence
  Synthetic
aggucaaagagaagcuagcug

SEQ ID NO: 341844 - RNA, 22 nt, Artificial Sequence
  Synthetic
gaggucaaagagaagcuagcug

SEQ ID NO: 341845 - RNA, 23 nt, Artificial Sequence
  Synthetic
ugaggucaaagagaagcuagcug

SEQ ID NO: 341846 - RNA, 24 nt, Artificial Sequence
  Synthetic
augaggucaaagagaagcuagcug

SEQ ID NO: 341847 - RNA, 18 nt, Artificial Sequence
  Synthetic
gaugggaccaucuagcug

SEQ ID NO: 341848 - RNA, 19 nt, Artificial Sequence
  Synthetic
agaugggaccaucuagcug

SEQ ID NO: 341849 - RNA, 20 nt, Artificial Sequence
  Synthetic
cagaugggaccaucuagcug

SEQ ID NO: 341850 - RNA, 21 nt, Artificial Sequence
  Synthetic
ccagaugggaccaucuagcug

SEQ ID NO: 341851 - RNA, 22 nt, Artificial Sequence
  Synthetic
cccagaugggaccaucuagcug

SEQ ID NO: 341852 - RNA, 23 nt, Artificial Sequence
  Synthetic
ccccagaugggaccaucuagcug

SEQ ID NO: 341853 - RNA, 24 nt, Artificial Sequence
  Synthetic
cccccagaugggaccaucuagcug

SEQ ID NO: 341854 - RNA, 18 nt, Artificial Sequence
  Synthetic
caaacgcaguucuagcug

SEQ ID NO: 341855 - RNA, 19 nt, Artificial Sequence
  Synthetic
ccaaacgcaguucuagcug

SEQ ID NO: 341856 - RNA, 20 nt, Artificial Sequence
  Synthetic
gccaaacgcaguucuagcug

SEQ ID NO: 341857 - RNA, 21 nt, Artificial Sequence
  Synthetic
ugccaaacgcaguucuagcug

SEQ ID NO: 341858 - RNA, 22 nt, Artificial Sequence
  Synthetic
gugccaaacgcaguucuagcug

SEQ ID NO: 341859 - RNA, 23 nt, Artificial Sequence
  Synthetic
ugugccaaacgcaguucuagcug

SEQ ID NO: 341860 - RNA, 24 nt, Artificial Sequence
  Synthetic
cugugccaaacgcaguucuagcug

SEQ ID NO: 341861 - RNA, 18 nt, Artificial Sequence
  Synthetic
gugaaguugggguagcug

SEQ ID NO: 341862 - RNA, 19 nt, Artificial Sequence
  Synthetic
agugaaguugggguagcug

SEQ ID NO: 341863 - RNA, 20 nt, Artificial Sequence
  Synthetic
uagugaaguugggguagcug

SEQ ID NO: 341864 - RNA, 21 nt, Artificial Sequence
  Synthetic
cuagugaaguugggguagcug

SEQ ID NO: 341865 - RNA, 22 nt, Artificial Sequence
  Synthetic
ccuagugaaguugggguagcug

SEQ ID NO: 341866 - RNA, 23 nt, Artificial Sequence
  Synthetic
uccuagugaaguugggguagcug

SEQ ID NO: 341867 - RNA, 24 nt, Artificial Sequence
  Synthetic
guccuagugaaguugggguagcug

SEQ ID NO: 341868 - RNA, 18 nt, Artificial Sequence
  Synthetic
aaggaauacacaacgcug

SEQ ID NO: 341869 - RNA, 19 nt, Artificial Sequence
  Synthetic
aaaggaauacacaacgcug

SEQ ID NO: 341870 - RNA, 20 nt, Artificial Sequence
  Synthetic
aaaaggaauacacaacgcug

SEQ ID NO: 341871 - RNA, 21 nt, Artificial Sequence
  Synthetic
uaaaaggaauacacaacgcug

SEQ ID NO: 341872 - RNA, 22 nt, Artificial Sequence
  Synthetic
guaaaaggaauacacaacgcug

SEQ ID NO: 341873 - RNA, 23 nt, Artificial Sequence
  Synthetic
uguaaaaggaauacacaacgcug

SEQ ID NO: 341874 - RNA, 24 nt, Artificial Sequence
  Synthetic
auguaaaaggaauacacaacgcug

SEQ ID NO: 341875 - RNA, 18 nt, Artificial Sequence
  Synthetic
gcaacaugaugaacgcug

SEQ ID NO: 341876 - RNA, 19 nt, Artificial Sequence
  Synthetic
ggcaacaugaugaacgcug

SEQ ID NO: 341877 - RNA, 20 nt, Artificial Sequence
  Synthetic
gggcaacaugaugaacgcug

SEQ ID NO: 341878 - RNA, 21 nt, Artificial Sequence
  Synthetic
agggcaacaugaugaacgcug

SEQ ID NO: 341879 - RNA, 22 nt, Artificial Sequence
  Synthetic
uagggcaacaugaugaacgcug

SEQ ID NO: 341880 - RNA, 23 nt, Artificial Sequence
  Synthetic
cuagggcaacaugaugaacgcug

SEQ ID NO: 341881 - RNA, 24 nt, Artificial Sequence
  Synthetic
ccuagggcaacaugaugaacgcug

SEQ ID NO: 341882 - RNA, 18 nt, Artificial Sequence
  Synthetic
guaguaauugcuacgcug

SEQ ID NO: 341883 - RNA, 19 nt, Artificial Sequence
  Synthetic
uguaguaauugcuacgcug

SEQ ID NO: 341884 - RNA, 20 nt, Artificial Sequence
  Synthetic
uuguaguaauugcuacgcug

SEQ ID NO: 341885 - RNA, 21 nt, Artificial Sequence
  Synthetic
guuguaguaauugcuacgcug

SEQ ID NO: 341886 - RNA, 22 nt, Artificial Sequence
  Synthetic
uguuguaguaauugcuacgcug

SEQ ID NO: 341887 - RNA, 23 nt, Artificial Sequence
  Synthetic
uuguuguaguaauugcuacgcug

SEQ ID NO: 341888 - RNA, 24 nt, Artificial Sequence
  Synthetic
cuuguuguaguaauugcuacgcug

SEQ ID NO: 341889 - RNA, 18 nt, Artificial Sequence
  Synthetic
augauuuugaugccgcug

SEQ ID NO: 341890 - RNA, 19 nt, Artificial Sequence
  Synthetic
caugauuuugaugccgcug

SEQ ID NO: 341891 - RNA, 20 nt, Artificial Sequence
  Synthetic
ccaugauuuugaugccgcug

SEQ ID NO: 341892 - RNA, 21 nt, Artificial Sequence
  Synthetic
uccaugauuuugaugccgcug

SEQ ID NO: 341893 - RNA, 22 nt, Artificial Sequence
  Synthetic
uuccaugauuuugaugccgcug

SEQ ID NO: 341894 - RNA, 23 nt, Artificial Sequence
  Synthetic
cuuccaugauuuugaugccgcug

SEQ ID NO: 341895 - RNA, 24 nt, Artificial Sequence
  Synthetic
ucuuccaugauuuugaugccgcug

SEQ ID NO: 341896 - RNA, 18 nt, Artificial Sequence
  Synthetic
gucaaggcugcaaggcug

SEQ ID NO: 341897 - RNA, 19 nt, Artificial Sequence
  Synthetic
ggucaaggcugcaaggcug

SEQ ID NO: 341898 - RNA, 20 nt, Artificial Sequence
  Synthetic
aggucaaggcugcaaggcug

SEQ ID NO: 341899 - RNA, 21 nt, Artificial Sequence
  Synthetic
gaggucaaggcugcaaggcug

SEQ ID NO: 341900 - RNA, 22 nt, Artificial Sequence
  Synthetic
ggaggucaaggcugcaaggcug

SEQ ID NO: 341901 - RNA, 23 nt, Artificial Sequence
  Synthetic
gggaggucaaggcugcaaggcug

SEQ ID NO: 341902 - RNA, 24 nt, Artificial Sequence
  Synthetic
ugggaggucaaggcugcaaggcug

SEQ ID NO: 341903 - RNA, 18 nt, Artificial Sequence
  Synthetic
uaaugaauaaccaggcug

SEQ ID NO: 341904 - RNA, 19 nt, Artificial Sequence
  Synthetic
guaaugaauaaccaggcug

SEQ ID NO: 341905 - RNA, 20 nt, Artificial Sequence
  Synthetic
uguaaugaauaaccaggcug

SEQ ID NO: 341906 - RNA, 21 nt, Artificial Sequence
  Synthetic
guguaaugaauaaccaggcug

SEQ ID NO: 341907 - RNA, 22 nt, Artificial Sequence
  Synthetic
aguguaaugaauaaccaggcug

SEQ ID NO: 341908 - RNA, 23 nt, Artificial Sequence
  Synthetic
aaguguaaugaauaaccaggcug

SEQ ID NO: 341909 - RNA, 24 nt, Artificial Sequence
  Synthetic
gaaguguaaugaauaaccaggcug

SEQ ID NO: 341910 - RNA, 18 nt, Artificial Sequence
  Synthetic
caguacuuugggaggcug

SEQ ID NO: 341911 - RNA, 19 nt, Artificial Sequence
  Synthetic
ccaguacuuugggaggcug

SEQ ID NO: 341912 - RNA, 20 nt, Artificial Sequence
  Synthetic
cccaguacuuugggaggcug

SEQ ID NO: 341913 - RNA, 21 nt, Artificial Sequence
  Synthetic
ucccaguacuuugggaggcug

SEQ ID NO: 341914 - RNA, 22 nt, Artificial Sequence
  Synthetic
aucccaguacuuugggaggcug

SEQ ID NO: 341915 - RNA, 23 nt, Artificial Sequence
  Synthetic
aaucccaguacuuugggaggcug

SEQ ID NO: 341916 - RNA, 24 nt, Artificial Sequence
  Synthetic
uaaucccaguacuuugggaggcug

SEQ ID NO: 341917 - RNA, 18 nt, Artificial Sequence
  Synthetic
uagauguuggugaggcug

SEQ ID NO: 341918 - RNA, 19 nt, Artificial Sequence
  Synthetic
auagauguuggugaggcug

SEQ ID NO: 341919 - RNA, 20 nt, Artificial Sequence
  Synthetic
aauagauguuggugaggcug

SEQ ID NO: 341920 - RNA, 21 nt, Artificial Sequence
  Synthetic
caauagauguuggugaggcug

SEQ ID NO: 341921 - RNA, 22 nt, Artificial Sequence
  Synthetic
acaauagauguuggugaggcug

SEQ ID NO: 341922 - RNA, 23 nt, Artificial Sequence
  Synthetic
cacaauagauguuggugaggcug

SEQ ID NO: 341923 - RNA, 24 nt, Artificial Sequence
  Synthetic
acacaauagauguuggugaggcug

SEQ ID NO: 341924 - RNA, 18 nt, Artificial Sequence
  Synthetic
ugcucaauagauaggcug

SEQ ID NO: 341925 - RNA, 19 nt, Artificial Sequence
  Synthetic
uugcucaauagauaggcug

SEQ ID NO: 341926 - RNA, 20 nt, Artificial Sequence
  Synthetic
auugcucaauagauaggcug

SEQ ID NO: 341927 - RNA, 21 nt, Artificial Sequence
  Synthetic
aauugcucaauagauaggcug

SEQ ID NO: 341928 - RNA, 22 nt, Artificial Sequence
  Synthetic
aaauugcucaauagauaggcug

SEQ ID NO: 341929 - RNA, 23 nt, Artificial Sequence
  Synthetic
uaaauugcucaauagauaggcug

SEQ ID NO: 341930 - RNA, 24 nt, Artificial Sequence
  Synthetic
uuaaauugcucaauagauaggcug

SEQ ID NO: 341931 - RNA, 18 nt, Artificial Sequence
  Synthetic
accuaaacaucuaggcug

SEQ ID NO: 341932 - RNA, 19 nt, Artificial Sequence
  Synthetic
caccuaaacaucuaggcug

SEQ ID NO: 341933 - RNA, 20 nt, Artificial Sequence
  Synthetic
acaccuaaacaucuaggcug

SEQ ID NO: 341934 - RNA, 21 nt, Artificial Sequence
  Synthetic
aacaccuaaacaucuaggcug

SEQ ID NO: 341935 - RNA, 22 nt, Artificial Sequence
  Synthetic
gaacaccuaaacaucuaggcug

SEQ ID NO: 341936 - RNA, 23 nt, Artificial Sequence
  Synthetic
agaacaccuaaacaucuaggcug

SEQ ID NO: 341937 - RNA, 24 nt, Artificial Sequence
  Synthetic
aagaacaccuaaacaucuaggcug

SEQ ID NO: 341938 - RNA, 18 nt, Artificial Sequence
  Synthetic
uucacguuaaguaggcug

SEQ ID NO: 341939 - RNA, 19 nt, Artificial Sequence
  Synthetic
cuucacguuaaguaggcug

SEQ ID NO: 341940 - RNA, 20 nt, Artificial Sequence
  Synthetic
ucuucacguuaaguaggcug

SEQ ID NO: 341941 - RNA, 21 nt, Artificial Sequence
  Synthetic
aucuucacguuaaguaggcug

SEQ ID NO: 341942 - RNA, 22 nt, Artificial Sequence
  Synthetic
uaucuucacguuaaguaggcug

SEQ ID NO: 341943 - RNA, 23 nt, Artificial Sequence
  Synthetic
uuaucuucacguuaaguaggcug

SEQ ID NO: 341944 - RNA, 24 nt, Artificial Sequence
  Synthetic
auuaucuucacguuaaguaggcug

SEQ ID NO: 341945 - RNA, 18 nt, Artificial Sequence
  Synthetic
acaugcaguuuccggcug

SEQ ID NO: 341946 - RNA, 19 nt, Artificial Sequence
  Synthetic
gacaugcaguuuccggcug

SEQ ID NO: 341947 - RNA, 20 nt, Artificial Sequence
  Synthetic
agacaugcaguuuccggcug

SEQ ID NO: 341948 - RNA, 21 nt, Artificial Sequence
  Synthetic
aagacaugcaguuuccggcug

SEQ ID NO: 341949 - RNA, 22 nt, Artificial Sequence
  Synthetic
uaagacaugcaguuuccggcug

SEQ ID NO: 341950 - RNA, 23 nt, Artificial Sequence
  Synthetic
cuaagacaugcaguuuccggcug

SEQ ID NO: 341951 - RNA, 24 nt, Artificial Sequence
  Synthetic
gcuaagacaugcaguuuccggcug

SEQ ID NO: 341952 - RNA, 18 nt, Artificial Sequence
  Synthetic
uuaccaccucaagggcug

SEQ ID NO: 341953 - RNA, 19 nt, Artificial Sequence
  Synthetic
auuaccaccucaagggcug

SEQ ID NO: 341954 - RNA, 20 nt, Artificial Sequence
  Synthetic
uauuaccaccucaagggcug

SEQ ID NO: 341955 - RNA, 21 nt, Artificial Sequence
  Synthetic
cuauuaccaccucaagggcug

SEQ ID NO: 341956 - RNA, 22 nt, Artificial Sequence
  Synthetic
acuauuaccaccucaagggcug

SEQ ID NO: 341957 - RNA, 23 nt, Artificial Sequence
  Synthetic
aacuauuaccaccucaagggcug

SEQ ID NO: 341958 - RNA, 24 nt, Artificial Sequence
  Synthetic
aaacuauuaccaccucaagggcug

SEQ ID NO: 341959 - RNA, 18 nt, Artificial Sequence
  Synthetic
aaacauuaugaggggcug

SEQ ID NO: 341960 - RNA, 19 nt, Artificial Sequence
  Synthetic
gaaacauuaugaggggcug

SEQ ID NO: 341961 - RNA, 20 nt, Artificial Sequence
  Synthetic
ggaaacauuaugaggggcug

SEQ ID NO: 341962 - RNA, 21 nt, Artificial Sequence
  Synthetic
uggaaacauuaugaggggcug

SEQ ID NO: 341963 - RNA, 22 nt, Artificial Sequence
  Synthetic
auggaaacauuaugaggggcug

SEQ ID NO: 341964 - RNA, 23 nt, Artificial Sequence
  Synthetic
gauggaaacauuaugaggggcug

SEQ ID NO: 341965 - RNA, 24 nt, Artificial Sequence
  Synthetic
ugauggaaacauuaugaggggcug

SEQ ID NO: 341966 - RNA, 18 nt, Artificial Sequence
  Synthetic
cccgaggauugggggcug

SEQ ID NO: 341967 - RNA, 19 nt, Artificial Sequence
  Synthetic
ccccgaggauugggggcug

SEQ ID NO: 341968 - RNA, 20 nt, Artificial Sequence
  Synthetic
cccccgaggauugggggcug

SEQ ID NO: 341969 - RNA, 21 nt, Artificial Sequence
  Synthetic
ucccccgaggauugggggcug

SEQ ID NO: 341970 - RNA, 22 nt, Artificial Sequence
  Synthetic
cucccccgaggauugggggcug

SEQ ID NO: 341971 - RNA, 23 nt, Artificial Sequence
  Synthetic
ucucccccgaggauugggggcug

SEQ ID NO: 341972 - RNA, 24 nt, Artificial Sequence
  Synthetic
aucucccccgaggauugggggcug

SEQ ID NO: 341973 - RNA, 18 nt, Artificial Sequence
  Synthetic
cuagucagccuugggcug

SEQ ID NO: 341974 - RNA, 19 nt, Artificial Sequence
  Synthetic
acuagucagccuugggcug

SEQ ID NO: 341975 - RNA, 20 nt, Artificial Sequence
  Synthetic
cacuagucagccuugggcug

SEQ ID NO: 341976 - RNA, 21 nt, Artificial Sequence
  Synthetic
ucacuagucagccuugggcug

SEQ ID NO: 341977 - RNA, 22 nt, Artificial Sequence
  Synthetic
aucacuagucagccuugggcug

SEQ ID NO: 341978 - RNA, 23 nt, Artificial Sequence
  Synthetic
gaucacuagucagccuugggcug

SEQ ID NO: 341979 - RNA, 24 nt, Artificial Sequence
  Synthetic
ugaucacuagucagccuugggcug

SEQ ID NO: 341980 - RNA, 21 nt, Artificial Sequence
  Synthetic
acucacaguuccacauggcug

SEQ ID NO: 341981 - RNA, 22 nt, Artificial Sequence
  Synthetic
gacucacaguuccacauggcug

SEQ ID NO: 341982 - RNA, 23 nt, Artificial Sequence
  Synthetic
ggacucacaguuccacauggcug

SEQ ID NO: 341983 - RNA, 24 nt, Artificial Sequence
  Synthetic
uggacucacaguuccacauggcug

SEQ ID NO: 341984 - RNA, 23 nt, Artificial Sequence
  Synthetic
ugacucacaguuccacauggcug

SEQ ID NO: 341985 - RNA, 24 nt, Artificial Sequence
  Synthetic
uugacucacaguuccacauggcug

SEQ ID NO: 341986 - RNA, 18 nt, Artificial Sequence
  Synthetic
cacaguucagcauggcug

SEQ ID NO: 341987 - RNA, 19 nt, Artificial Sequence
  Synthetic
ucacaguucagcauggcug

SEQ ID NO: 341988 - RNA, 20 nt, Artificial Sequence
  Synthetic
cucacaguucagcauggcug

SEQ ID NO: 341989 - RNA, 21 nt, Artificial Sequence
  Synthetic
acucacaguucagcauggcug

SEQ ID NO: 341990 - RNA, 22 nt, Artificial Sequence
  Synthetic
gacucacaguucagcauggcug

SEQ ID NO: 341991 - RNA, 23 nt, Artificial Sequence
  Synthetic
ugacucacaguucagcauggcug

SEQ ID NO: 341992 - RNA, 24 nt, Artificial Sequence
  Synthetic
uugacucacaguucagcauggcug

SEQ ID NO: 341993 - RNA, 18 nt, Artificial Sequence
  Synthetic
cacugguuugcauggcug

SEQ ID NO: 341994 - RNA, 19 nt, Artificial Sequence
  Synthetic
ucacugguuugcauggcug

SEQ ID NO: 341995 - RNA, 20 nt, Artificial Sequence
  Synthetic
cucacugguuugcauggcug

SEQ ID NO: 341996 - RNA, 21 nt, Artificial Sequence
  Synthetic
acucacugguuugcauggcug

SEQ ID NO: 341997 - RNA, 22 nt, Artificial Sequence
  Synthetic
gacucacugguuugcauggcug

SEQ ID NO: 341998 - RNA, 23 nt, Artificial Sequence
  Synthetic
ugacucacugguuugcauggcug

SEQ ID NO: 341999 - RNA, 24 nt, Artificial Sequence
  Synthetic
uugacucacugguuugcauggcug

SEQ ID NO: 342000 - RNA, 18 nt, Artificial Sequence
  Synthetic
cacaguucaauauggcug

SEQ ID NO: 342001 - RNA, 19 nt, Artificial Sequence
  Synthetic
ucacaguucaauauggcug

SEQ ID NO: 342002 - RNA, 20 nt, Artificial Sequence
  Synthetic
cucacaguucaauauggcug

SEQ ID NO: 342003 - RNA, 21 nt, Artificial Sequence
  Synthetic
acucacaguucaauauggcug

SEQ ID NO: 342004 - RNA, 22 nt, Artificial Sequence
  Synthetic
gacucacaguucaauauggcug

SEQ ID NO: 342005 - RNA, 23 nt, Artificial Sequence
  Synthetic
ugacucacaguucaauauggcug

SEQ ID NO: 342006 - RNA, 24 nt, Artificial Sequence
  Synthetic
uugacucacaguucaauauggcug

SEQ ID NO: 342007 - RNA, 18 nt, Artificial Sequence
  Synthetic
cuuccuuauuuauggcug

SEQ ID NO: 342008 - RNA, 19 nt, Artificial Sequence
  Synthetic
acuuccuuauuuauggcug

SEQ ID NO: 342009 - RNA, 20 nt, Artificial Sequence
  Synthetic
cacuuccuuauuuauggcug

SEQ ID NO: 342010 - RNA, 21 nt, Artificial Sequence
  Synthetic
ccacuuccuuauuuauggcug

SEQ ID NO: 342011 - RNA, 22 nt, Artificial Sequence
  Synthetic
accacuuccuuauuuauggcug

SEQ ID NO: 342012 - RNA, 23 nt, Artificial Sequence
  Synthetic
aaccacuuccuuauuuauggcug

SEQ ID NO: 342013 - RNA, 24 nt, Artificial Sequence
  Synthetic
uaaccacuuccuuauuuauggcug

SEQ ID NO: 342014 - RNA, 18 nt, Artificial Sequence
  Synthetic
aauacugaacccuggcug

SEQ ID NO: 342015 - RNA, 19 nt, Artificial Sequence
  Synthetic
uaauacugaacccuggcug

SEQ ID NO: 342016 - RNA, 20 nt, Artificial Sequence
  Synthetic
auaauacugaacccuggcug

SEQ ID NO: 342017 - RNA, 21 nt, Artificial Sequence
  Synthetic
aauaauacugaacccuggcug

SEQ ID NO: 342018 - RNA, 22 nt, Artificial Sequence
  Synthetic
uaauaauacugaacccuggcug

SEQ ID NO: 342019 - RNA, 23 nt, Artificial Sequence
  Synthetic
uuaauaauacugaacccuggcug

SEQ ID NO: 342020 - RNA, 24 nt, Artificial Sequence
  Synthetic
auuaauaauacugaacccuggcug

SEQ ID NO: 342021 - RNA, 18 nt, Artificial Sequence
  Synthetic
aacagaaagcccuggcug

SEQ ID NO: 342022 - RNA, 19 nt, Artificial Sequence
  Synthetic
caacagaaagcccuggcug

SEQ ID NO: 342023 - RNA, 20 nt, Artificial Sequence
  Synthetic
acaacagaaagcccuggcug

SEQ ID NO: 342024 - RNA, 21 nt, Artificial Sequence
  Synthetic
gacaacagaaagcccuggcug

SEQ ID NO: 342025 - RNA, 22 nt, Artificial Sequence
  Synthetic
ugacaacagaaagcccuggcug

SEQ ID NO: 342026 - RNA, 23 nt, Artificial Sequence
  Synthetic
gugacaacagaaagcccuggcug

SEQ ID NO: 342027 - RNA, 24 nt, Artificial Sequence
  Synthetic
agugacaacagaaagcccuggcug

SEQ ID NO: 342028 - RNA, 18 nt, Artificial Sequence
  Synthetic
ugcugaauugccuggcug

SEQ ID NO: 342029 - RNA, 19 nt, Artificial Sequence
  Synthetic
cugcugaauugccuggcug

SEQ ID NO: 342030 - RNA, 20 nt, Artificial Sequence
  Synthetic
ucugcugaauugccuggcug

SEQ ID NO: 342031 - RNA, 21 nt, Artificial Sequence
  Synthetic
uucugcugaauugccuggcug

SEQ ID NO: 342032 - RNA, 22 nt, Artificial Sequence
  Synthetic
cuucugcugaauugccuggcug

SEQ ID NO: 342033 - RNA, 23 nt, Artificial Sequence
  Synthetic
gcuucugcugaauugccuggcug

SEQ ID NO: 342034 - RNA, 24 nt, Artificial Sequence
  Synthetic
agcuucugcugaauugccuggcug

SEQ ID NO: 342035 - RNA, 18 nt, Artificial Sequence
  Synthetic
agaaauacaagcuggcug

SEQ ID NO: 342036 - RNA, 19 nt, Artificial Sequence
  Synthetic
gagaaauacaagcuggcug

SEQ ID NO: 342037 - RNA, 20 nt, Artificial Sequence
  Synthetic
ugagaaauacaagcuggcug

SEQ ID NO: 342038 - RNA, 21 nt, Artificial Sequence
  Synthetic
cugagaaauacaagcuggcug

SEQ ID NO: 342039 - RNA, 22 nt, Artificial Sequence
  Synthetic
ucugagaaauacaagcuggcug

SEQ ID NO: 342040 - RNA, 23 nt, Artificial Sequence
  Synthetic
uucugagaaauacaagcuggcug

SEQ ID NO: 342041 - RNA, 24 nt, Artificial Sequence
  Synthetic
uuucugagaaauacaagcuggcug

SEQ ID NO: 342042 - RNA, 18 nt, Artificial Sequence
  Synthetic
cacaguucuguguggcug

SEQ ID NO: 342043 - RNA, 19 nt, Artificial Sequence
  Synthetic
ucacaguucuguguggcug

SEQ ID NO: 342044 - RNA, 20 nt, Artificial Sequence
  Synthetic
cucacaguucuguguggcug

SEQ ID NO: 342045 - RNA, 21 nt, Artificial Sequence
  Synthetic
acucacaguucuguguggcug

SEQ ID NO: 342046 - RNA, 22 nt, Artificial Sequence
  Synthetic
gacucacaguucuguguggcug

SEQ ID NO: 342047 - RNA, 23 nt, Artificial Sequence
  Synthetic
ugacucacaguucuguguggcug

SEQ ID NO: 342048 - RNA, 24 nt, Artificial Sequence
  Synthetic
uugacucacaguucuguguggcug

SEQ ID NO: 342049 - RNA, 18 nt, Artificial Sequence
  Synthetic
uacgguuccacuuggcug

SEQ ID NO: 342050 - RNA, 19 nt, Artificial Sequence
  Synthetic
uuacgguuccacuuggcug

SEQ ID NO: 342051 - RNA, 20 nt, Artificial Sequence
  Synthetic
cuuacgguuccacuuggcug

SEQ ID NO: 342052 - RNA, 21 nt, Artificial Sequence
  Synthetic
acuuacgguuccacuuggcug

SEQ ID NO: 342053 - RNA, 22 nt, Artificial Sequence
  Synthetic
gacuuacgguuccacuuggcug

SEQ ID NO: 342054 - RNA, 23 nt, Artificial Sequence
  Synthetic
ggacuuacgguuccacuuggcug

SEQ ID NO: 342055 - RNA, 24 nt, Artificial Sequence
  Synthetic
uggacuuacgguuccacuuggcug

SEQ ID NO: 342056 - RNA, 18 nt, Artificial Sequence
  Synthetic
gaguguuccauuuggcug

SEQ ID NO: 342057 - RNA, 19 nt, Artificial Sequence
  Synthetic
agaguguuccauuuggcug

SEQ ID NO: 342058 - RNA, 20 nt, Artificial Sequence
  Synthetic
uagaguguuccauuuggcug

SEQ ID NO: 342059 - RNA, 21 nt, Artificial Sequence
  Synthetic
auagaguguuccauuuggcug

SEQ ID NO: 342060 - RNA, 22 nt, Artificial Sequence
  Synthetic
uauagaguguuccauuuggcug

SEQ ID NO: 342061 - RNA, 23 nt, Artificial Sequence
  Synthetic
auauagaguguuccauuuggcug

SEQ ID NO: 342062 - RNA, 24 nt, Artificial Sequence
  Synthetic
gauauagaguguuccauuuggcug

SEQ ID NO: 342063 - RNA, 18 nt, Artificial Sequence
  Synthetic
auuagaagaaaaaugcug

SEQ ID NO: 342064 - RNA, 19 nt, Artificial Sequence
  Synthetic
uauuagaagaaaaaugcug

SEQ ID NO: 342065 - RNA, 20 nt, Artificial Sequence
  Synthetic
auauuagaagaaaaaugcug

SEQ ID NO: 342066 - RNA, 21 nt, Artificial Sequence
  Synthetic
aauauuagaagaaaaaugcug

SEQ ID NO: 342067 - RNA, 22 nt, Artificial Sequence
  Synthetic
aaauauuagaagaaaaaugcug

SEQ ID NO: 342068 - RNA, 23 nt, Artificial Sequence
  Synthetic
gaaauauuagaagaaaaaugcug

SEQ ID NO: 342069 - RNA, 24 nt, Artificial Sequence
  Synthetic
ugaaauauuagaagaaaaaugcug

SEQ ID NO: 342070 - RNA, 18 nt, Artificial Sequence
  Synthetic
gaaaauuauaaaaugcug

SEQ ID NO: 342071 - RNA, 19 nt, Artificial Sequence
  Synthetic
agaaaauuauaaaaugcug

SEQ ID NO: 342072 - RNA, 20 nt, Artificial Sequence
  Synthetic
uagaaaauuauaaaaugcug

SEQ ID NO: 342073 - RNA, 21 nt, Artificial Sequence
  Synthetic
guagaaaauuauaaaaugcug

SEQ ID NO: 342074 - RNA, 22 nt, Artificial Sequence
  Synthetic
uguagaaaauuauaaaaugcug

SEQ ID NO: 342075 - RNA, 23 nt, Artificial Sequence
  Synthetic
auguagaaaauuauaaaaugcug

SEQ ID NO: 342076 - RNA, 24 nt, Artificial Sequence
  Synthetic
uauguagaaaauuauaaaaugcug

SEQ ID NO: 342077 - RNA, 18 nt, Artificial Sequence
  Synthetic
guguauuucuuaaugcug

SEQ ID NO: 342078 - RNA, 19 nt, Artificial Sequence
  Synthetic
uguguauuucuuaaugcug

SEQ ID NO: 342079 - RNA, 20 nt, Artificial Sequence
  Synthetic
uuguguauuucuuaaugcug

SEQ ID NO: 342080 - RNA, 21 nt, Artificial Sequence
  Synthetic
auuguguauuucuuaaugcug

SEQ ID NO: 342081 - RNA, 22 nt, Artificial Sequence
  Synthetic
gauuguguauuucuuaaugcug

SEQ ID NO: 342082 - RNA, 23 nt, Artificial Sequence
  Synthetic
agauuguguauuucuuaaugcug

SEQ ID NO: 342083 - RNA, 24 nt, Artificial Sequence
  Synthetic
gagauuguguauuucuuaaugcug

SEQ ID NO: 342084 - RNA, 18 nt, Artificial Sequence
  Synthetic
gccaccugccacaugcug

SEQ ID NO: 342085 - RNA, 19 nt, Artificial Sequence
  Synthetic
agccaccugccacaugcug

SEQ ID NO: 342086 - RNA, 20 nt, Artificial Sequence
  Synthetic
aagccaccugccacaugcug

SEQ ID NO: 342087 - RNA, 21 nt, Artificial Sequence
  Synthetic
aaagccaccugccacaugcug

SEQ ID NO: 342088 - RNA, 22 nt, Artificial Sequence
  Synthetic
aaaagccaccugccacaugcug

SEQ ID NO: 342089 - RNA, 23 nt, Artificial Sequence
  Synthetic
aaaaagccaccugccacaugcug

SEQ ID NO: 342090 - RNA, 24 nt, Artificial Sequence
  Synthetic
uaaaaagccaccugccacaugcug

SEQ ID NO: 342091 - RNA, 18 nt, Artificial Sequence
  Synthetic
uucagguggugcaugcug

SEQ ID NO: 342092 - RNA, 19 nt, Artificial Sequence
  Synthetic
cuucagguggugcaugcug

SEQ ID NO: 342093 - RNA, 20 nt, Artificial Sequence
  Synthetic
ucuucagguggugcaugcug

SEQ ID NO: 342094 - RNA, 21 nt, Artificial Sequence
  Synthetic
uucuucagguggugcaugcug

SEQ ID NO: 342095 - RNA, 22 nt, Artificial Sequence
  Synthetic
guucuucagguggugcaugcug

SEQ ID NO: 342096 - RNA, 23 nt, Artificial Sequence
  Synthetic
uguucuucagguggugcaugcug

SEQ ID NO: 342097 - RNA, 24 nt, Artificial Sequence
  Synthetic
auguucuucagguggugcaugcug

SEQ ID NO: 342098 - RNA, 18 nt, Artificial Sequence
  Synthetic
cucagaggauucaugcug

SEQ ID NO: 342099 - RNA, 19 nt, Artificial Sequence
  Synthetic
ccucagaggauucaugcug

SEQ ID NO: 342100 - RNA, 20 nt, Artificial Sequence
  Synthetic
cccucagaggauucaugcug

SEQ ID NO: 342101 - RNA, 21 nt, Artificial Sequence
  Synthetic
gcccucagaggauucaugcug

SEQ ID NO: 342102 - RNA, 22 nt, Artificial Sequence
  Synthetic
agcccucagaggauucaugcug

SEQ ID NO: 342103 - RNA, 23 nt, Artificial Sequence
  Synthetic
aagcccucagaggauucaugcug

SEQ ID NO: 342104 - RNA, 24 nt, Artificial Sequence
  Synthetic
uaagcccucagaggauucaugcug

SEQ ID NO: 342105 - RNA, 18 nt, Artificial Sequence
  Synthetic
aggaaacaacagaugcug

SEQ ID NO: 342106 - RNA, 19 nt, Artificial Sequence
  Synthetic
caggaaacaacagaugcug

SEQ ID NO: 342107 - RNA, 20 nt, Artificial Sequence
  Synthetic
ucaggaaacaacagaugcug

SEQ ID NO: 342108 - RNA, 18 nt, Artificial Sequence
  Synthetic
auugugugggugaugcug

SEQ ID NO: 342109 - RNA, 19 nt, Artificial Sequence
  Synthetic
uauugugugggugaugcug

SEQ ID NO: 342110 - RNA, 20 nt, Artificial Sequence
  Synthetic
auauugugugggugaugcug

SEQ ID NO: 342111 - RNA, 21 nt, Artificial Sequence
  Synthetic
gauauugugugggugaugcug

SEQ ID NO: 342112 - RNA, 22 nt, Artificial Sequence
  Synthetic
ugauauugugugggugaugcug

SEQ ID NO: 342113 - RNA, 23 nt, Artificial Sequence
  Synthetic
cugauauugugugggugaugcug

SEQ ID NO: 342114 - RNA, 24 nt, Artificial Sequence
  Synthetic
ucugauauugugugggugaugcug

SEQ ID NO: 342115 - RNA, 18 nt, Artificial Sequence
  Synthetic
uaaaggaaaaauaugcug

SEQ ID NO: 342116 - RNA, 19 nt, Artificial Sequence
  Synthetic
uuaaaggaaaaauaugcug

SEQ ID NO: 342117 - RNA, 20 nt, Artificial Sequence
  Synthetic
cuuaaaggaaaaauaugcug

SEQ ID NO: 342118 - RNA, 21 nt, Artificial Sequence
  Synthetic
acuuaaaggaaaaauaugcug

SEQ ID NO: 342119 - RNA, 22 nt, Artificial Sequence
  Synthetic
uacuuaaaggaaaaauaugcug

SEQ ID NO: 342120 - RNA, 23 nt, Artificial Sequence
  Synthetic
guacuuaaaggaaaaauaugcug

SEQ ID NO: 342121 - RNA, 24 nt, Artificial Sequence
  Synthetic
gguacuuaaaggaaaaauaugcug

SEQ ID NO: 342122 - RNA, 18 nt, Artificial Sequence
  Synthetic
augaguuggaauaugcug

SEQ ID NO: 342123 - RNA, 19 nt, Artificial Sequence
  Synthetic
gaugaguuggaauaugcug

SEQ ID NO: 342124 - RNA, 20 nt, Artificial Sequence
  Synthetic
agaugaguuggaauaugcug

SEQ ID NO: 342125 - RNA, 21 nt, Artificial Sequence
  Synthetic
gagaugaguuggaauaugcug

SEQ ID NO: 342126 - RNA, 22 nt, Artificial Sequence
  Synthetic
agagaugaguuggaauaugcug

SEQ ID NO: 342127 - RNA, 23 nt, Artificial Sequence
  Synthetic
gagagaugaguuggaauaugcug

SEQ ID NO: 342128 - RNA, 24 nt, Artificial Sequence
  Synthetic
ggagagaugaguuggaauaugcug

SEQ ID NO: 342129 - RNA, 18 nt, Artificial Sequence
  Synthetic
gauaacuuuuauaugcug

SEQ ID NO: 342130 - RNA, 19 nt, Artificial Sequence
  Synthetic
ggauaacuuuuauaugcug

SEQ ID NO: 342131 - RNA, 20 nt, Artificial Sequence
  Synthetic
uggauaacuuuuauaugcug

SEQ ID NO: 342132 - RNA, 21 nt, Artificial Sequence
  Synthetic
cuggauaacuuuuauaugcug

SEQ ID NO: 342133 - RNA, 22 nt, Artificial Sequence
  Synthetic
acuggauaacuuuuauaugcug

SEQ ID NO: 342134 - RNA, 23 nt, Artificial Sequence
  Synthetic
aacuggauaacuuuuauaugcug

SEQ ID NO: 342135 - RNA, 24 nt, Artificial Sequence
  Synthetic
uaacuggauaacuuuuauaugcug

SEQ ID NO: 342136 - RNA, 18 nt, Artificial Sequence
  Synthetic
uucuuguuauguaugcug

SEQ ID NO: 342137 - RNA, 19 nt, Artificial Sequence
  Synthetic
cuucuuguuauguaugcug

SEQ ID NO: 342138 - RNA, 20 nt, Artificial Sequence
  Synthetic
acuucuuguuauguaugcug

SEQ ID NO: 342139 - RNA, 21 nt, Artificial Sequence
  Synthetic
uacuucuuguuauguaugcug

SEQ ID NO: 342140 - RNA, 22 nt, Artificial Sequence
  Synthetic
auacuucuuguuauguaugcug

SEQ ID NO: 342141 - RNA, 23 nt, Artificial Sequence
  Synthetic
cauacuucuuguuauguaugcug

SEQ ID NO: 342142 - RNA, 24 nt, Artificial Sequence
  Synthetic
ccauacuucuuguuauguaugcug

SEQ ID NO: 342143 - RNA, 18 nt, Artificial Sequence
  Synthetic
acacuuaacacacugcug

SEQ ID NO: 342144 - RNA, 19 nt, Artificial Sequence
  Synthetic
aacacuuaacacacugcug

SEQ ID NO: 342145 - RNA, 20 nt, Artificial Sequence
  Synthetic
gaacacuuaacacacugcug

SEQ ID NO: 342146 - RNA, 21 nt, Artificial Sequence
  Synthetic
ggaacacuuaacacacugcug

SEQ ID NO: 342147 - RNA, 22 nt, Artificial Sequence
  Synthetic
aggaacacuuaacacacugcug

SEQ ID NO: 342148 - RNA, 23 nt, Artificial Sequence
  Synthetic
uaggaacacuuaacacacugcug

SEQ ID NO: 342149 - RNA, 24 nt, Artificial Sequence
  Synthetic
auaggaacacuuaacacacugcug

SEQ ID NO: 342150 - RNA, 18 nt, Artificial Sequence
  Synthetic
aaccauuaagcacugcug

SEQ ID NO: 342151 - RNA, 19 nt, Artificial Sequence
  Synthetic
uaaccauuaagcacugcug

SEQ ID NO: 342152 - RNA, 20 nt, Artificial Sequence
  Synthetic
uuaaccauuaagcacugcug

SEQ ID NO: 342153 - RNA, 21 nt, Artificial Sequence
  Synthetic
auuaaccauuaagcacugcug

SEQ ID NO: 342154 - RNA, 22 nt, Artificial Sequence
  Synthetic
cauuaaccauuaagcacugcug

SEQ ID NO: 342155 - RNA, 23 nt, Artificial Sequence
  Synthetic
acauuaaccauuaagcacugcug

SEQ ID NO: 342156 - RNA, 24 nt, Artificial Sequence
  Synthetic
cacauuaaccauuaagcacugcug

SEQ ID NO: 342157 - RNA, 18 nt, Artificial Sequence
  Synthetic
aucucugaguuacugcug

SEQ ID NO: 342158 - RNA, 19 nt, Artificial Sequence
  Synthetic
aaucucugaguuacugcug

SEQ ID NO: 342159 - RNA, 20 nt, Artificial Sequence
  Synthetic
aaaucucugaguuacugcug

SEQ ID NO: 342160 - RNA, 21 nt, Artificial Sequence
  Synthetic
uaaaucucugaguuacugcug

SEQ ID NO: 342161 - RNA, 22 nt, Artificial Sequence
  Synthetic
uuaaaucucugaguuacugcug

SEQ ID NO: 342162 - RNA, 23 nt, Artificial Sequence
  Synthetic
cuuaaaucucugaguuacugcug

SEQ ID NO: 342163 - RNA, 24 nt, Artificial Sequence
  Synthetic
ucuuaaaucucugaguuacugcug

SEQ ID NO: 342164 - RNA, 18 nt, Artificial Sequence
  Synthetic
uacaucgcugugcugcug

SEQ ID NO: 342165 - RNA, 19 nt, Artificial Sequence
  Synthetic
guacaucgcugugcugcug

SEQ ID NO: 342166 - RNA, 20 nt, Artificial Sequence
  Synthetic
uguacaucgcugugcugcug

SEQ ID NO: 342167 - RNA, 21 nt, Artificial Sequence
  Synthetic
uuguacaucgcugugcugcug

SEQ ID NO: 342168 - RNA, 22 nt, Artificial Sequence
  Synthetic
auuguacaucgcugugcugcug

SEQ ID NO: 342169 - RNA, 23 nt, Artificial Sequence
  Synthetic
uauuguacaucgcugugcugcug

SEQ ID NO: 342170 - RNA, 24 nt, Artificial Sequence
  Synthetic
uuauuguacaucgcugugcugcug

SEQ ID NO: 342171 - RNA, 18 nt, Artificial Sequence
  Synthetic
cuagaaccuucucugcug

SEQ ID NO: 342172 - RNA, 19 nt, Artificial Sequence
  Synthetic
ucuagaaccuucucugcug

SEQ ID NO: 342173 - RNA, 20 nt, Artificial Sequence
  Synthetic
uucuagaaccuucucugcug

SEQ ID NO: 342174 - RNA, 21 nt, Artificial Sequence
  Synthetic
uuucuagaaccuucucugcug

SEQ ID NO: 342175 - RNA, 22 nt, Artificial Sequence
  Synthetic
cuuucuagaaccuucucugcug

SEQ ID NO: 342176 - RNA, 23 nt, Artificial Sequence
  Synthetic
acuuucuagaaccuucucugcug

SEQ ID NO: 342177 - RNA, 24 nt, Artificial Sequence
  Synthetic
uacuuucuagaaccuucucugcug

SEQ ID NO: 342178 - RNA, 18 nt, Artificial Sequence
  Synthetic
gcagagcaacaagugcug

SEQ ID NO: 342179 - RNA, 19 nt, Artificial Sequence
  Synthetic
ggcagagcaacaagugcug

SEQ ID NO: 342180 - RNA, 20 nt, Artificial Sequence
  Synthetic
aggcagagcaacaagugcug

SEQ ID NO: 342181 - RNA, 21 nt, Artificial Sequence
  Synthetic
aaggcagagcaacaagugcug

SEQ ID NO: 342182 - RNA, 22 nt, Artificial Sequence
  Synthetic
caaggcagagcaacaagugcug

SEQ ID NO: 342183 - RNA, 23 nt, Artificial Sequence
  Synthetic
gcaaggcagagcaacaagugcug

SEQ ID NO: 342184 - RNA, 24 nt, Artificial Sequence
  Synthetic
ugcaaggcagagcaacaagugcug

SEQ ID NO: 342185 - RNA, 18 nt, Artificial Sequence
  Synthetic
cacugcuaggaagugcug

SEQ ID NO: 342186 - RNA, 19 nt, Artificial Sequence
  Synthetic
gcacugcuaggaagugcug

SEQ ID NO: 342187 - RNA, 20 nt, Artificial Sequence
  Synthetic
ggcacugcuaggaagugcug

SEQ ID NO: 342188 - RNA, 21 nt, Artificial Sequence
  Synthetic
aggcacugcuaggaagugcug

SEQ ID NO: 342189 - RNA, 22 nt, Artificial Sequence
  Synthetic
caggcacugcuaggaagugcug

SEQ ID NO: 342190 - RNA, 23 nt, Artificial Sequence
  Synthetic
ccaggcacugcuaggaagugcug

SEQ ID NO: 342191 - RNA, 24 nt, Artificial Sequence
  Synthetic
gccaggcacugcuaggaagugcug

SEQ ID NO: 342192 - RNA, 18 nt, Artificial Sequence
  Synthetic
uccaaggaaacagugcug

SEQ ID NO: 342193 - RNA, 19 nt, Artificial Sequence
  Synthetic
uuccaaggaaacagugcug

SEQ ID NO: 342194 - RNA, 20 nt, Artificial Sequence
  Synthetic
uuuccaaggaaacagugcug

SEQ ID NO: 342195 - RNA, 21 nt, Artificial Sequence
  Synthetic
guuuccaaggaaacagugcug

SEQ ID NO: 342196 - RNA, 22 nt, Artificial Sequence
  Synthetic
uguuuccaaggaaacagugcug

SEQ ID NO: 342197 - RNA, 23 nt, Artificial Sequence
  Synthetic
guguuuccaaggaaacagugcug

SEQ ID NO: 342198 - RNA, 24 nt, Artificial Sequence
  Synthetic
aguguuuccaaggaaacagugcug

SEQ ID NO: 342199 - RNA, 18 nt, Artificial Sequence
  Synthetic
cuggggaagucagugcug

SEQ ID NO: 342200 - RNA, 19 nt, Artificial Sequence
  Synthetic
ccuggggaagucagugcug

SEQ ID NO: 342201 - RNA, 20 nt, Artificial Sequence
  Synthetic
uccuggggaagucagugcug

SEQ ID NO: 342202 - RNA, 21 nt, Artificial Sequence
  Synthetic
auccuggggaagucagugcug

SEQ ID NO: 342203 - RNA, 22 nt, Artificial Sequence
  Synthetic
aauccuggggaagucagugcug

SEQ ID NO: 342204 - RNA, 23 nt, Artificial Sequence
  Synthetic
uaauccuggggaagucagugcug

SEQ ID NO: 342205 - RNA, 24 nt, Artificial Sequence
  Synthetic
guaauccuggggaagucagugcug

SEQ ID NO: 342206 - RNA, 18 nt, Artificial Sequence
  Synthetic
caucgcuccugagugcug

SEQ ID NO: 342207 - RNA, 19 nt, Artificial Sequence
  Synthetic
ucaucgcuccugagugcug

SEQ ID NO: 342208 - RNA, 20 nt, Artificial Sequence
  Synthetic
aucaucgcuccugagugcug

SEQ ID NO: 342209 - RNA, 21 nt, Artificial Sequence
  Synthetic
caucaucgcuccugagugcug

SEQ ID NO: 342210 - RNA, 22 nt, Artificial Sequence
  Synthetic
acaucaucgcuccugagugcug

SEQ ID NO: 342211 - RNA, 23 nt, Artificial Sequence
  Synthetic
aacaucaucgcuccugagugcug

SEQ ID NO: 342212 - RNA, 24 nt, Artificial Sequence
  Synthetic
caacaucaucgcuccugagugcug

SEQ ID NO: 342213 - RNA, 18 nt, Artificial Sequence
  Synthetic
ucaauuuacuuagugcug

SEQ ID NO: 342214 - RNA, 19 nt, Artificial Sequence
  Synthetic
uucaauuuacuuagugcug

SEQ ID NO: 342215 - RNA, 20 nt, Artificial Sequence
  Synthetic
uuucaauuuacuuagugcug

SEQ ID NO: 342216 - RNA, 21 nt, Artificial Sequence
  Synthetic
uuuucaauuuacuuagugcug

SEQ ID NO: 342217 - RNA, 22 nt, Artificial Sequence
  Synthetic
guuuucaauuuacuuagugcug

SEQ ID NO: 342218 - RNA, 23 nt, Artificial Sequence
  Synthetic
uguuuucaauuuacuuagugcug

SEQ ID NO: 342219 - RNA, 24 nt, Artificial Sequence
  Synthetic
uuguuuucaauuuacuuagugcug

SEQ ID NO: 342220 - RNA, 21 nt, Artificial Sequence
  Synthetic
aucaggaaacaacaggugcug

SEQ ID NO: 342221 - RNA, 22 nt, Artificial Sequence
  Synthetic
aaucaggaaacaacaggugcug

SEQ ID NO: 342222 - RNA, 23 nt, Artificial Sequence
  Synthetic
aaaucaggaaacaacaggugcug

SEQ ID NO: 342223 - RNA, 24 nt, Artificial Sequence
  Synthetic
aaaaucaggaaacaacaggugcug

SEQ ID NO: 342224 - RNA, 21 nt, Artificial Sequence
  Synthetic
gucaggaaacaacaggugcug

SEQ ID NO: 342225 - RNA, 22 nt, Artificial Sequence
  Synthetic
agucaggaaacaacaggugcug

SEQ ID NO: 342226 - RNA, 23 nt, Artificial Sequence
  Synthetic
aagucaggaaacaacaggugcug

SEQ ID NO: 342227 - RNA, 24 nt, Artificial Sequence
  Synthetic
aaagucaggaaacaacaggugcug

SEQ ID NO: 342228 - RNA, 18 nt, Artificial Sequence
  Synthetic
aggaaacaucaggugcug

SEQ ID NO: 342229 - RNA, 19 nt, Artificial Sequence
  Synthetic
caggaaacaucaggugcug

SEQ ID NO: 342230 - RNA, 20 nt, Artificial Sequence
  Synthetic
ucaggaaacaucaggugcug

SEQ ID NO: 342231 - RNA, 21 nt, Artificial Sequence
  Synthetic
gucaggaaacaucaggugcug

SEQ ID NO: 342232 - RNA, 22 nt, Artificial Sequence
  Synthetic
agucaggaaacaucaggugcug

SEQ ID NO: 342233 - RNA, 23 nt, Artificial Sequence
  Synthetic
aagucaggaaacaucaggugcug

SEQ ID NO: 342234 - RNA, 24 nt, Artificial Sequence
  Synthetic
aaagucaggaaacaucaggugcug

SEQ ID NO: 342235 - RNA, 18 nt, Artificial Sequence
  Synthetic
ucagaagagauggugcug

SEQ ID NO: 342236 - RNA, 19 nt, Artificial Sequence
  Synthetic
uucagaagagauggugcug

SEQ ID NO: 342237 - RNA, 20 nt, Artificial Sequence
  Synthetic
auucagaagagauggugcug

SEQ ID NO: 342238 - RNA, 21 nt, Artificial Sequence
  Synthetic
aauucagaagagauggugcug

SEQ ID NO: 342239 - RNA, 22 nt, Artificial Sequence
  Synthetic
caauucagaagagauggugcug

SEQ ID NO: 342240 - RNA, 23 nt, Artificial Sequence
  Synthetic
ucaauucagaagagauggugcug

SEQ ID NO: 342241 - RNA, 24 nt, Artificial Sequence
  Synthetic
aucaauucagaagagauggugcug

SEQ ID NO: 342242 - RNA, 18 nt, Artificial Sequence
  Synthetic
ugagggugaacugugcug

SEQ ID NO: 342243 - RNA, 19 nt, Artificial Sequence
  Synthetic
augagggugaacugugcug

SEQ ID NO: 342244 - RNA, 20 nt, Artificial Sequence
  Synthetic
caugagggugaacugugcug

SEQ ID NO: 342245 - RNA, 21 nt, Artificial Sequence
  Synthetic
ucaugagggugaacugugcug

SEQ ID NO: 342246 - RNA, 22 nt, Artificial Sequence
  Synthetic
uucaugagggugaacugugcug

SEQ ID NO: 342247 - RNA, 23 nt, Artificial Sequence
  Synthetic
cuucaugagggugaacugugcug

SEQ ID NO: 342248 - RNA, 24 nt, Artificial Sequence
  Synthetic
gcuucaugagggugaacugugcug

SEQ ID NO: 342249 - RNA, 18 nt, Artificial Sequence
  Synthetic
auguucaucauugugcug

SEQ ID NO: 342250 - RNA, 19 nt, Artificial Sequence
  Synthetic
aauguucaucauugugcug

SEQ ID NO: 342251 - RNA, 20 nt, Artificial Sequence
  Synthetic
aaauguucaucauugugcug

SEQ ID NO: 342252 - RNA, 21 nt, Artificial Sequence
  Synthetic
gaaauguucaucauugugcug

SEQ ID NO: 342253 - RNA, 22 nt, Artificial Sequence
  Synthetic
ugaaauguucaucauugugcug

SEQ ID NO: 342254 - RNA, 23 nt, Artificial Sequence
  Synthetic
cugaaauguucaucauugugcug

SEQ ID NO: 342255 - RNA, 24 nt, Artificial Sequence
  Synthetic
ccugaaauguucaucauugugcug

SEQ ID NO: 342256 - RNA, 18 nt, Artificial Sequence
  Synthetic
auggaggcgauugugcug

SEQ ID NO: 342257 - RNA, 19 nt, Artificial Sequence
  Synthetic
gauggaggcgauugugcug

SEQ ID NO: 342258 - RNA, 20 nt, Artificial Sequence
  Synthetic
agauggaggcgauugugcug

SEQ ID NO: 342259 - RNA, 21 nt, Artificial Sequence
  Synthetic
gagauggaggcgauugugcug

SEQ ID NO: 342260 - RNA, 22 nt, Artificial Sequence
  Synthetic
ggagauggaggcgauugugcug

SEQ ID NO: 342261 - RNA, 23 nt, Artificial Sequence
  Synthetic
gggagauggaggcgauugugcug

SEQ ID NO: 342262 - RNA, 24 nt, Artificial Sequence
  Synthetic
agggagauggaggcgauugugcug

SEQ ID NO: 342263 - RNA, 18 nt, Artificial Sequence
  Synthetic
ggcaggcuggaauugcug

SEQ ID NO: 342264 - RNA, 19 nt, Artificial Sequence
  Synthetic
uggcaggcuggaauugcug

SEQ ID NO: 342265 - RNA, 20 nt, Artificial Sequence
  Synthetic
auggcaggcuggaauugcug

SEQ ID NO: 342266 - RNA, 21 nt, Artificial Sequence
  Synthetic
gauggcaggcuggaauugcug

SEQ ID NO: 342267 - RNA, 22 nt, Artificial Sequence
  Synthetic
agauggcaggcuggaauugcug

SEQ ID NO: 342268 - RNA, 23 nt, Artificial Sequence
  Synthetic
cagauggcaggcuggaauugcug

SEQ ID NO: 342269 - RNA, 24 nt, Artificial Sequence
  Synthetic
gcagauggcaggcuggaauugcug

SEQ ID NO: 342270 - RNA, 18 nt, Artificial Sequence
  Synthetic
guaagauuuucauugcug

SEQ ID NO: 342271 - RNA, 19 nt, Artificial Sequence
  Synthetic
uguaagauuuucauugcug

SEQ ID NO: 342272 - RNA, 20 nt, Artificial Sequence
  Synthetic
auguaagauuuucauugcug

SEQ ID NO: 342273 - RNA, 21 nt, Artificial Sequence
  Synthetic
uauguaagauuuucauugcug

SEQ ID NO: 342274 - RNA, 22 nt, Artificial Sequence
  Synthetic
uuauguaagauuuucauugcug

SEQ ID NO: 342275 - RNA, 23 nt, Artificial Sequence
  Synthetic
auuauguaagauuuucauugcug

SEQ ID NO: 342276 - RNA, 24 nt, Artificial Sequence
  Synthetic
gauuauguaagauuuucauugcug

SEQ ID NO: 342277 - RNA, 18 nt, Artificial Sequence
  Synthetic
aucauucacauauugcug

SEQ ID NO: 342278 - RNA, 19 nt, Artificial Sequence
  Synthetic
gaucauucacauauugcug

SEQ ID NO: 342279 - RNA, 20 nt, Artificial Sequence
  Synthetic
ggaucauucacauauugcug

SEQ ID NO: 342280 - RNA, 21 nt, Artificial Sequence
  Synthetic
uggaucauucacauauugcug

SEQ ID NO: 342281 - RNA, 22 nt, Artificial Sequence
  Synthetic
auggaucauucacauauugcug

SEQ ID NO: 342282 - RNA, 23 nt, Artificial Sequence
  Synthetic
aauggaucauucacauauugcug

SEQ ID NO: 342283 - RNA, 24 nt, Artificial Sequence
  Synthetic
aaauggaucauucacauauugcug

SEQ ID NO: 342284 - RNA, 18 nt, Artificial Sequence
  Synthetic
uuuauugaacacuugcug

SEQ ID NO: 342285 - RNA, 19 nt, Artificial Sequence
  Synthetic
auuuauugaacacuugcug

SEQ ID NO: 342286 - RNA, 20 nt, Artificial Sequence
  Synthetic
uauuuauugaacacuugcug

SEQ ID NO: 342287 - RNA, 21 nt, Artificial Sequence
  Synthetic
uuauuuauugaacacuugcug

SEQ ID NO: 342288 - RNA, 22 nt, Artificial Sequence
  Synthetic
guuauuuauugaacacuugcug

SEQ ID NO: 342289 - RNA, 23 nt, Artificial Sequence
  Synthetic
uguuauuuauugaacacuugcug

SEQ ID NO: 342290 - RNA, 24 nt, Artificial Sequence
  Synthetic
cuguuauuuauugaacacuugcug

SEQ ID NO: 342291 - RNA, 18 nt, Artificial Sequence
  Synthetic
cuggagaagcacuugcug

SEQ ID NO: 342292 - RNA, 19 nt, Artificial Sequence
  Synthetic
ccuggagaagcacuugcug

SEQ ID NO: 342293 - RNA, 20 nt, Artificial Sequence
  Synthetic
accuggagaagcacuugcug

SEQ ID NO: 342294 - RNA, 21 nt, Artificial Sequence
  Synthetic
caccuggagaagcacuugcug

SEQ ID NO: 342295 - RNA, 22 nt, Artificial Sequence
  Synthetic
ucaccuggagaagcacuugcug

SEQ ID NO: 342296 - RNA, 23 nt, Artificial Sequence
  Synthetic
aucaccuggagaagcacuugcug

SEQ ID NO: 342297 - RNA, 24 nt, Artificial Sequence
  Synthetic
aaucaccuggagaagcacuugcug

SEQ ID NO: 342298 - RNA, 18 nt, Artificial Sequence
  Synthetic
ggcccuuugcccuugcug

SEQ ID NO: 342299 - RNA, 19 nt, Artificial Sequence
  Synthetic
aggcccuuugcccuugcug

SEQ ID NO: 342300 - RNA, 20 nt, Artificial Sequence
  Synthetic
aaggcccuuugcccuugcug

SEQ ID NO: 342301 - RNA, 21 nt, Artificial Sequence
  Synthetic
aaaggcccuuugcccuugcug

SEQ ID NO: 342302 - RNA, 22 nt, Artificial Sequence
  Synthetic
aaaaggcccuuugcccuugcug

SEQ ID NO: 342303 - RNA, 23 nt, Artificial Sequence
  Synthetic
caaaaggcccuuugcccuugcug

SEQ ID NO: 342304 - RNA, 24 nt, Artificial Sequence
  Synthetic
acaaaaggcccuuugcccuugcug

SEQ ID NO: 342305 - RNA, 18 nt, Artificial Sequence
  Synthetic
aaagacauagccuugcug

SEQ ID NO: 342306 - RNA, 19 nt, Artificial Sequence
  Synthetic
uaaagacauagccuugcug

SEQ ID NO: 342307 - RNA, 20 nt, Artificial Sequence
  Synthetic
auaaagacauagccuugcug

SEQ ID NO: 342308 - RNA, 21 nt, Artificial Sequence
  Synthetic
aauaaagacauagccuugcug

SEQ ID NO: 342309 - RNA, 22 nt, Artificial Sequence
  Synthetic
gaauaaagacauagccuugcug

SEQ ID NO: 342310 - RNA, 23 nt, Artificial Sequence
  Synthetic
agaauaaagacauagccuugcug

SEQ ID NO: 342311 - RNA, 24 nt, Artificial Sequence
  Synthetic
aagaauaaagacauagccuugcug

SEQ ID NO: 342312 - RNA, 18 nt, Artificial Sequence
  Synthetic
ccuuugcccuucuugcug

SEQ ID NO: 342313 - RNA, 19 nt, Artificial Sequence
  Synthetic
gccuuugcccuucuugcug

SEQ ID NO: 342314 - RNA, 20 nt, Artificial Sequence
  Synthetic
ugccuuugcccuucuugcug

SEQ ID NO: 342315 - RNA, 21 nt, Artificial Sequence
  Synthetic
cugccuuugcccuucuugcug

SEQ ID NO: 342316 - RNA, 22 nt, Artificial Sequence
  Synthetic
ucugccuuugcccuucuugcug

SEQ ID NO: 342317 - RNA, 23 nt, Artificial Sequence
  Synthetic
aucugccuuugcccuucuugcug

SEQ ID NO: 342318 - RNA, 24 nt, Artificial Sequence
  Synthetic
aaucugccuuugcccuucuugcug

SEQ ID NO: 342319 - RNA, 18 nt, Artificial Sequence
  Synthetic
cccaugauaaaguugcug

SEQ ID NO: 342320 - RNA, 19 nt, Artificial Sequence
  Synthetic
ucccaugauaaaguugcug

SEQ ID NO: 342321 - RNA, 20 nt, Artificial Sequence
  Synthetic
aucccaugauaaaguugcug

SEQ ID NO: 342322 - RNA, 21 nt, Artificial Sequence
  Synthetic
caucccaugauaaaguugcug

SEQ ID NO: 342323 - RNA, 22 nt, Artificial Sequence
  Synthetic
acaucccaugauaaaguugcug

SEQ ID NO: 342324 - RNA, 23 nt, Artificial Sequence
  Synthetic
cacaucccaugauaaaguugcug

SEQ ID NO: 342325 - RNA, 24 nt, Artificial Sequence
  Synthetic
gcacaucccaugauaaaguugcug

SEQ ID NO: 342326 - RNA, 18 nt, Artificial Sequence
  Synthetic
uacaguaugauguugcug

SEQ ID NO: 342327 - RNA, 19 nt, Artificial Sequence
  Synthetic
auacaguaugauguugcug

SEQ ID NO: 342328 - RNA, 20 nt, Artificial Sequence
  Synthetic
aauacaguaugauguugcug

SEQ ID NO: 342329 - RNA, 21 nt, Artificial Sequence
  Synthetic
caauacaguaugauguugcug

SEQ ID NO: 342330 - RNA, 22 nt, Artificial Sequence
  Synthetic
ucaauacaguaugauguugcug

SEQ ID NO: 342331 - RNA, 23 nt, Artificial Sequence
  Synthetic
aucaauacaguaugauguugcug

SEQ ID NO: 342332 - RNA, 24 nt, Artificial Sequence
  Synthetic
uaucaauacaguaugauguugcug

SEQ ID NO: 342333 - RNA, 18 nt, Artificial Sequence
  Synthetic
uuauuuuccuuguugcug

SEQ ID NO: 342334 - RNA, 19 nt, Artificial Sequence
  Synthetic
uuuauuuuccuuguugcug

SEQ ID NO: 342335 - RNA, 20 nt, Artificial Sequence
  Synthetic
auuuauuuuccuuguugcug

SEQ ID NO: 342336 - RNA, 21 nt, Artificial Sequence
  Synthetic
cauuuauuuuccuuguugcug

SEQ ID NO: 342337 - RNA, 22 nt, Artificial Sequence
  Synthetic
gcauuuauuuuccuuguugcug

SEQ ID NO: 342338 - RNA, 23 nt, Artificial Sequence
  Synthetic
ugcauuuauuuuccuuguugcug

SEQ ID NO: 342339 - RNA, 24 nt, Artificial Sequence
  Synthetic
cugcauuuauuuuccuuguugcug

SEQ ID NO: 342340 - RNA, 18 nt, Artificial Sequence
  Synthetic
guucuuuuacauuugcug

SEQ ID NO: 342341 - RNA, 19 nt, Artificial Sequence
  Synthetic
uguucuuuuacauuugcug

SEQ ID NO: 342342 - RNA, 20 nt, Artificial Sequence
  Synthetic
cuguucuuuuacauuugcug

SEQ ID NO: 342343 - RNA, 21 nt, Artificial Sequence
  Synthetic
ucuguucuuuuacauuugcug

SEQ ID NO: 342344 - RNA, 22 nt, Artificial Sequence
  Synthetic
uucuguucuuuuacauuugcug

SEQ ID NO: 342345 - RNA, 23 nt, Artificial Sequence
  Synthetic
uuucuguucuuuuacauuugcug

SEQ ID NO: 342346 - RNA, 24 nt, Artificial Sequence
  Synthetic
auuucuguucuuuuacauuugcug

SEQ ID NO: 342347 - RNA, 18 nt, Artificial Sequence
  Synthetic
uuucuaaguucuuugcug

SEQ ID NO: 342348 - RNA, 19 nt, Artificial Sequence
  Synthetic
auuucuaaguucuuugcug

SEQ ID NO: 342349 - RNA, 20 nt, Artificial Sequence
  Synthetic
uauuucuaaguucuuugcug

SEQ ID NO: 342350 - RNA, 21 nt, Artificial Sequence
  Synthetic
uuauuucuaaguucuuugcug

SEQ ID NO: 342351 - RNA, 22 nt, Artificial Sequence
  Synthetic
auuauuucuaaguucuuugcug

SEQ ID NO: 342352 - RNA, 23 nt, Artificial Sequence
  Synthetic
aauuauuucuaaguucuuugcug

SEQ ID NO: 342353 - RNA, 24 nt, Artificial Sequence
  Synthetic
gaauuauuucuaaguucuuugcug

SEQ ID NO: 342354 - RNA, 18 nt, Artificial Sequence
  Synthetic
ccaggcagaaguuugcug

SEQ ID NO: 342355 - RNA, 19 nt, Artificial Sequence
  Synthetic
uccaggcagaaguuugcug

SEQ ID NO: 342356 - RNA, 20 nt, Artificial Sequence
  Synthetic
guccaggcagaaguuugcug

SEQ ID NO: 342357 - RNA, 21 nt, Artificial Sequence
  Synthetic
uguccaggcagaaguuugcug

SEQ ID NO: 342358 - RNA, 22 nt, Artificial Sequence
  Synthetic
guguccaggcagaaguuugcug

SEQ ID NO: 342359 - RNA, 23 nt, Artificial Sequence
  Synthetic
gguguccaggcagaaguuugcug

SEQ ID NO: 342360 - RNA, 24 nt, Artificial Sequence
  Synthetic
agguguccaggcagaaguuugcug

SEQ ID NO: 342361 - RNA, 18 nt, Artificial Sequence
  Synthetic
uccugacaucuuuugcug

SEQ ID NO: 342362 - RNA, 19 nt, Artificial Sequence
  Synthetic
cuccugacaucuuuugcug

SEQ ID NO: 342363 - RNA, 20 nt, Artificial Sequence
  Synthetic
gcuccugacaucuuuugcug

SEQ ID NO: 342364 - RNA, 21 nt, Artificial Sequence
  Synthetic
ugcuccugacaucuuuugcug

SEQ ID NO: 342365 - RNA, 22 nt, Artificial Sequence
  Synthetic
uugcuccugacaucuuuugcug

SEQ ID NO: 342366 - RNA, 23 nt, Artificial Sequence
  Synthetic
cuugcuccugacaucuuuugcug

SEQ ID NO: 342367 - RNA, 24 nt, Artificial Sequence
  Synthetic
ucuugcuccugacaucuuuugcug

SEQ ID NO: 342368 - RNA, 18 nt, Artificial Sequence
  Synthetic
cacuuuucucuuuugcug

SEQ ID NO: 342369 - RNA, 19 nt, Artificial Sequence
  Synthetic
ucacuuuucucuuuugcug

SEQ ID NO: 342370 - RNA, 20 nt, Artificial Sequence
  Synthetic
cucacuuuucucuuuugcug

SEQ ID NO: 342371 - RNA, 21 nt, Artificial Sequence
  Synthetic
acucacuuuucucuuuugcug

SEQ ID NO: 342372 - RNA, 22 nt, Artificial Sequence
  Synthetic
aacucacuuuucucuuuugcug

SEQ ID NO: 342373 - RNA, 23 nt, Artificial Sequence
  Synthetic
uaacucacuuuucucuuuugcug

SEQ ID NO: 342374 - RNA, 24 nt, Artificial Sequence
  Synthetic
uuaacucacuuuucucuuuugcug

SEQ ID NO: 342375 - RNA, 18 nt, Artificial Sequence
  Synthetic
gucuuaaucuuuuugcug

SEQ ID NO: 342376 - RNA, 19 nt, Artificial Sequence
  Synthetic
agucuuaaucuuuuugcug

SEQ ID NO: 342377 - RNA, 20 nt, Artificial Sequence
  Synthetic
gagucuuaaucuuuuugcug

SEQ ID NO: 342378 - RNA, 21 nt, Artificial Sequence
  Synthetic
ugagucuuaaucuuuuugcug

SEQ ID NO: 342379 - RNA, 22 nt, Artificial Sequence
  Synthetic
augagucuuaaucuuuuugcug

SEQ ID NO: 342380 - RNA, 23 nt, Artificial Sequence
  Synthetic
aaugagucuuaaucuuuuugcug

SEQ ID NO: 342381 - RNA, 24 nt, Artificial Sequence
  Synthetic
caaugagucuuaaucuuuuugcug

SEQ ID NO: 342382 - RNA, 18 nt, Artificial Sequence
  Synthetic
agcacacacaaaaaucug

SEQ ID NO: 342383 - RNA, 19 nt, Artificial Sequence
  Synthetic
cagcacacacaaaaaucug

SEQ ID NO: 342384 - RNA, 20 nt, Artificial Sequence
  Synthetic
acagcacacacaaaaaucug

SEQ ID NO: 342385 - RNA, 21 nt, Artificial Sequence
  Synthetic
gacagcacacacaaaaaucug

SEQ ID NO: 342386 - RNA, 22 nt, Artificial Sequence
  Synthetic
agacagcacacacaaaaaucug

SEQ ID NO: 342387 - RNA, 23 nt, Artificial Sequence
  Synthetic
uagacagcacacacaaaaaucug

SEQ ID NO: 342388 - RNA, 24 nt, Artificial Sequence
  Synthetic
guagacagcacacacaaaaaucug

SEQ ID NO: 342389 - RNA, 18 nt, Artificial Sequence
  Synthetic
caucuggaguaaaaucug

SEQ ID NO: 342390 - RNA, 19 nt, Artificial Sequence
  Synthetic
ucaucuggaguaaaaucug

SEQ ID NO: 342391 - RNA, 20 nt, Artificial Sequence
  Synthetic
aucaucuggaguaaaaucug

SEQ ID NO: 342392 - RNA, 21 nt, Artificial Sequence
  Synthetic
gaucaucuggaguaaaaucug

SEQ ID NO: 342393 - RNA, 22 nt, Artificial Sequence
  Synthetic
agaucaucuggaguaaaaucug

SEQ ID NO: 342394 - RNA, 23 nt, Artificial Sequence
  Synthetic
aagaucaucuggaguaaaaucug

SEQ ID NO: 342395 - RNA, 24 nt, Artificial Sequence
  Synthetic
gaagaucaucuggaguaaaaucug

SEQ ID NO: 342396 - RNA, 18 nt, Artificial Sequence
  Synthetic
gagggacaccuaaaucug

SEQ ID NO: 342397 - RNA, 19 nt, Artificial Sequence
  Synthetic
ggagggacaccuaaaucug

SEQ ID NO: 342398 - RNA, 20 nt, Artificial Sequence
  Synthetic
aggagggacaccuaaaucug

SEQ ID NO: 342399 - RNA, 21 nt, Artificial Sequence
  Synthetic
uaggagggacaccuaaaucug

SEQ ID NO: 342400 - RNA, 22 nt, Artificial Sequence
  Synthetic
guaggagggacaccuaaaucug

SEQ ID NO: 342401 - RNA, 23 nt, Artificial Sequence
  Synthetic
gguaggagggacaccuaaaucug

SEQ ID NO: 342402 - RNA, 24 nt, Artificial Sequence
  Synthetic
ggguaggagggacaccuaaaucug

SEQ ID NO: 342403 - RNA, 18 nt, Artificial Sequence
  Synthetic
cacagacuccacaaucug

SEQ ID NO: 342404 - RNA, 19 nt, Artificial Sequence
  Synthetic
ucacagacuccacaaucug

SEQ ID NO: 342405 - RNA, 20 nt, Artificial Sequence
  Synthetic
uucacagacuccacaaucug

SEQ ID NO: 342406 - RNA, 21 nt, Artificial Sequence
  Synthetic
cuucacagacuccacaaucug

SEQ ID NO: 342407 - RNA, 22 nt, Artificial Sequence
  Synthetic
ccuucacagacuccacaaucug

SEQ ID NO: 342408 - RNA, 23 nt, Artificial Sequence
  Synthetic
uccuucacagacuccacaaucug

SEQ ID NO: 342409 - RNA, 24 nt, Artificial Sequence
  Synthetic
uuccuucacagacuccacaaucug

SEQ ID NO: 342410 - RNA, 18 nt, Artificial Sequence
  Synthetic
cuguaaaguggcaaucug

SEQ ID NO: 342411 - RNA, 19 nt, Artificial Sequence
  Synthetic
ucuguaaaguggcaaucug

SEQ ID NO: 342412 - RNA, 20 nt, Artificial Sequence
  Synthetic
aucuguaaaguggcaaucug

SEQ ID NO: 342413 - RNA, 21 nt, Artificial Sequence
  Synthetic
uaucuguaaaguggcaaucug

SEQ ID NO: 342414 - RNA, 22 nt, Artificial Sequence
  Synthetic
uuaucuguaaaguggcaaucug

SEQ ID NO: 342415 - RNA, 23 nt, Artificial Sequence
  Synthetic
cuuaucuguaaaguggcaaucug

SEQ ID NO: 342416 - RNA, 24 nt, Artificial Sequence
  Synthetic
ucuuaucuguaaaguggcaaucug

SEQ ID NO: 342417 - RNA, 18 nt, Artificial Sequence
  Synthetic
auuuuugcccucaaucug

SEQ ID NO: 342418 - RNA, 19 nt, Artificial Sequence
  Synthetic
gauuuuugcccucaaucug

SEQ ID NO: 342419 - RNA, 20 nt, Artificial Sequence
  Synthetic
ggauuuuugcccucaaucug

SEQ ID NO: 342420 - RNA, 21 nt, Artificial Sequence
  Synthetic
aggauuuuugcccucaaucug

SEQ ID NO: 342421 - RNA, 22 nt, Artificial Sequence
  Synthetic
uaggauuuuugcccucaaucug

SEQ ID NO: 342422 - RNA, 23 nt, Artificial Sequence
  Synthetic
auaggauuuuugcccucaaucug

SEQ ID NO: 342423 - RNA, 24 nt, Artificial Sequence
  Synthetic
gauaggauuuuugcccucaaucug

SEQ ID NO: 342424 - RNA, 18 nt, Artificial Sequence
  Synthetic
auaagaaauuucaaucug

SEQ ID NO: 342425 - RNA, 19 nt, Artificial Sequence
  Synthetic
aauaagaaauuucaaucug

SEQ ID NO: 342426 - RNA, 20 nt, Artificial Sequence
  Synthetic
gaauaagaaauuucaaucug

SEQ ID NO: 342427 - RNA, 21 nt, Artificial Sequence
  Synthetic
agaauaagaaauuucaaucug

SEQ ID NO: 342428 - RNA, 22 nt, Artificial Sequence
  Synthetic
uagaauaagaaauuucaaucug

SEQ ID NO: 342429 - RNA, 23 nt, Artificial Sequence
  Synthetic
uuagaauaagaaauuucaaucug

SEQ ID NO: 342430 - RNA, 24 nt, Artificial Sequence
  Synthetic
uuuagaauaagaaauuucaaucug

SEQ ID NO: 342431 - RNA, 18 nt, Artificial Sequence
  Synthetic
uucuaaggucagaaucug

SEQ ID NO: 342432 - RNA, 19 nt, Artificial Sequence
  Synthetic
auucuaaggucagaaucug

SEQ ID NO: 342433 - RNA, 20 nt, Artificial Sequence
  Synthetic
gauucuaaggucagaaucug

SEQ ID NO: 342434 - RNA, 21 nt, Artificial Sequence
  Synthetic
ugauucuaaggucagaaucug

SEQ ID NO: 342435 - RNA, 22 nt, Artificial Sequence
  Synthetic
uugauucuaaggucagaaucug

SEQ ID NO: 342436 - RNA, 23 nt, Artificial Sequence
  Synthetic
auugauucuaaggucagaaucug

SEQ ID NO: 342437 - RNA, 24 nt, Artificial Sequence
  Synthetic
aauugauucuaaggucagaaucug

SEQ ID NO: 342438 - RNA, 18 nt, Artificial Sequence
  Synthetic
ugguagugugagaaucug

SEQ ID NO: 342439 - RNA, 19 nt, Artificial Sequence
  Synthetic
gugguagugugagaaucug

SEQ ID NO: 342440 - RNA, 20 nt, Artificial Sequence
  Synthetic
ugugguagugugagaaucug

SEQ ID NO: 342441 - RNA, 21 nt, Artificial Sequence
  Synthetic
gugugguagugugagaaucug

SEQ ID NO: 342442 - RNA, 22 nt, Artificial Sequence
  Synthetic
agugugguagugugagaaucug

SEQ ID NO: 342443 - RNA, 23 nt, Artificial Sequence
  Synthetic
cagugugguagugugagaaucug

SEQ ID NO: 342444 - RNA, 24 nt, Artificial Sequence
  Synthetic
ucagugugguagugugagaaucug

SEQ ID NO: 342445 - RNA, 18 nt, Artificial Sequence
  Synthetic
uacagaauugagaaucug

SEQ ID NO: 342446 - RNA, 19 nt, Artificial Sequence
  Synthetic
guacagaauugagaaucug

SEQ ID NO: 342447 - RNA, 20 nt, Artificial Sequence
  Synthetic
gguacagaauugagaaucug

SEQ ID NO: 342448 - RNA, 21 nt, Artificial Sequence
  Synthetic
ggguacagaauugagaaucug

SEQ ID NO: 342449 - RNA, 22 nt, Artificial Sequence
  Synthetic
uggguacagaauugagaaucug

SEQ ID NO: 342450 - RNA, 23 nt, Artificial Sequence
  Synthetic
auggguacagaauugagaaucug

SEQ ID NO: 342451 - RNA, 24 nt, Artificial Sequence
  Synthetic
uauggguacagaauugagaaucug

SEQ ID NO: 342452 - RNA, 18 nt, Artificial Sequence
  Synthetic
auaaaauacuggaaucug

SEQ ID NO: 342453 - RNA, 19 nt, Artificial Sequence
  Synthetic
uauaaaauacuggaaucug

SEQ ID NO: 342454 - RNA, 20 nt, Artificial Sequence
  Synthetic
auauaaaauacuggaaucug

SEQ ID NO: 342455 - RNA, 21 nt, Artificial Sequence
  Synthetic
cauauaaaauacuggaaucug

SEQ ID NO: 342456 - RNA, 22 nt, Artificial Sequence
  Synthetic
acauauaaaauacuggaaucug

SEQ ID NO: 342457 - RNA, 23 nt, Artificial Sequence
  Synthetic
uacauauaaaauacuggaaucug

SEQ ID NO: 342458 - RNA, 24 nt, Artificial Sequence
  Synthetic
auacauauaaaauacuggaaucug

SEQ ID NO: 342459 - RNA, 18 nt, Artificial Sequence
  Synthetic
ccagcacauaauaaucug

SEQ ID NO: 342460 - RNA, 19 nt, Artificial Sequence
  Synthetic
uccagcacauaauaaucug

SEQ ID NO: 342461 - RNA, 20 nt, Artificial Sequence
  Synthetic
uuccagcacauaauaaucug

SEQ ID NO: 342462 - RNA, 21 nt, Artificial Sequence
  Synthetic
uuuccagcacauaauaaucug

SEQ ID NO: 342463 - RNA, 22 nt, Artificial Sequence
  Synthetic
uuuuccagcacauaauaaucug

SEQ ID NO: 342464 - RNA, 23 nt, Artificial Sequence
  Synthetic
auuuuccagcacauaauaaucug

SEQ ID NO: 342465 - RNA, 24 nt, Artificial Sequence
  Synthetic
gauuuuccagcacauaauaaucug

SEQ ID NO: 342466 - RNA, 18 nt, Artificial Sequence
  Synthetic
aaguaacaauauaaucug

SEQ ID NO: 342467 - RNA, 19 nt, Artificial Sequence
  Synthetic
aaaguaacaauauaaucug

SEQ ID NO: 342468 - RNA, 20 nt, Artificial Sequence
  Synthetic
aaaaguaacaauauaaucug

SEQ ID NO: 342469 - RNA, 21 nt, Artificial Sequence
  Synthetic
caaaaguaacaauauaaucug

SEQ ID NO: 342470 - RNA, 22 nt, Artificial Sequence
  Synthetic
ucaaaaguaacaauauaaucug

SEQ ID NO: 342471 - RNA, 23 nt, Artificial Sequence
  Synthetic
aucaaaaguaacaauauaaucug

SEQ ID NO: 342472 - RNA, 24 nt, Artificial Sequence
  Synthetic
uaucaaaaguaacaauauaaucug

SEQ ID NO: 342473 - RNA, 18 nt, Artificial Sequence
  Synthetic
ccucauucuaguaaucug

SEQ ID NO: 342474 - RNA, 19 nt, Artificial Sequence
  Synthetic
gccucauucuaguaaucug

SEQ ID NO: 342475 - RNA, 20 nt, Artificial Sequence
  Synthetic
ugccucauucuaguaaucug

SEQ ID NO: 342476 - RNA, 21 nt, Artificial Sequence
  Synthetic
cugccucauucuaguaaucug

SEQ ID NO: 342477 - RNA, 22 nt, Artificial Sequence
  Synthetic
acugccucauucuaguaaucug

SEQ ID NO: 342478 - RNA, 23 nt, Artificial Sequence
  Synthetic
cacugccucauucuaguaaucug

SEQ ID NO: 342479 - RNA, 24 nt, Artificial Sequence
  Synthetic
acacugccucauucuaguaaucug

SEQ ID NO: 342480 - RNA, 18 nt, Artificial Sequence
  Synthetic
aaucagguacguaaucug

SEQ ID NO: 342481 - RNA, 19 nt, Artificial Sequence
  Synthetic
caaucagguacguaaucug

SEQ ID NO: 342482 - RNA, 20 nt, Artificial Sequence
  Synthetic
acaaucagguacguaaucug

SEQ ID NO: 342483 - RNA, 21 nt, Artificial Sequence
  Synthetic
cacaaucagguacguaaucug

SEQ ID NO: 342484 - RNA, 22 nt, Artificial Sequence
  Synthetic
ucacaaucagguacguaaucug

SEQ ID NO: 342485 - RNA, 23 nt, Artificial Sequence
  Synthetic
gucacaaucagguacguaaucug

SEQ ID NO: 342486 - RNA, 24 nt, Artificial Sequence
  Synthetic
ggucacaaucagguacguaaucug

SEQ ID NO: 342487 - RNA, 18 nt, Artificial Sequence
  Synthetic
aaagcuggaagacaucug

SEQ ID NO: 342488 - RNA, 19 nt, Artificial Sequence
  Synthetic
aaaagcuggaagacaucug

SEQ ID NO: 342489 - RNA, 20 nt, Artificial Sequence
  Synthetic
uaaaagcuggaagacaucug

SEQ ID NO: 342490 - RNA, 21 nt, Artificial Sequence
  Synthetic
cuaaaagcuggaagacaucug

SEQ ID NO: 342491 - RNA, 22 nt, Artificial Sequence
  Synthetic
ccuaaaagcuggaagacaucug

SEQ ID NO: 342492 - RNA, 23 nt, Artificial Sequence
  Synthetic
gccuaaaagcuggaagacaucug

SEQ ID NO: 342493 - RNA, 24 nt, Artificial Sequence
  Synthetic
ugccuaaaagcuggaagacaucug

SEQ ID NO: 342494 - RNA, 18 nt, Artificial Sequence
  Synthetic
cauuacauauggcaucug

SEQ ID NO: 342495 - RNA, 19 nt, Artificial Sequence
  Synthetic
gcauuacauauggcaucug

SEQ ID NO: 342496 - RNA, 20 nt, Artificial Sequence
  Synthetic
ugcauuacauauggcaucug

SEQ ID NO: 342497 - RNA, 21 nt, Artificial Sequence
  Synthetic
cugcauuacauauggcaucug

SEQ ID NO: 342498 - RNA, 22 nt, Artificial Sequence
  Synthetic
ucugcauuacauauggcaucug

SEQ ID NO: 342499 - RNA, 23 nt, Artificial Sequence
  Synthetic
aucugcauuacauauggcaucug

SEQ ID NO: 342500 - RNA, 24 nt, Artificial Sequence
  Synthetic
aaucugcauuacauauggcaucug

SEQ ID NO: 342501 - RNA, 18 nt, Artificial Sequence
  Synthetic
gaugcucuguggcaucug

SEQ ID NO: 342502 - RNA, 19 nt, Artificial Sequence
  Synthetic
ugaugcucuguggcaucug

SEQ ID NO: 342503 - RNA, 20 nt, Artificial Sequence
  Synthetic
uugaugcucuguggcaucug

SEQ ID NO: 342504 - RNA, 21 nt, Artificial Sequence
  Synthetic
guugaugcucuguggcaucug

SEQ ID NO: 342505 - RNA, 22 nt, Artificial Sequence
  Synthetic
uguugaugcucuguggcaucug

SEQ ID NO: 342506 - RNA, 23 nt, Artificial Sequence
  Synthetic
uuguugaugcucuguggcaucug

SEQ ID NO: 342507 - RNA, 24 nt, Artificial Sequence
  Synthetic
cuuguugaugcucuguggcaucug

SEQ ID NO: 342508 - RNA, 18 nt, Artificial Sequence
  Synthetic
gugagccacagucaucug

SEQ ID NO: 342509 - RNA, 19 nt, Artificial Sequence
  Synthetic
ugugagccacagucaucug

SEQ ID NO: 342510 - RNA, 20 nt, Artificial Sequence
  Synthetic
gugugagccacagucaucug

SEQ ID NO: 342511 - RNA, 21 nt, Artificial Sequence
  Synthetic
ugugugagccacagucaucug

SEQ ID NO: 342512 - RNA, 22 nt, Artificial Sequence
  Synthetic
augugugagccacagucaucug

SEQ ID NO: 342513 - RNA, 23 nt, Artificial Sequence
  Synthetic
aaugugugagccacagucaucug

SEQ ID NO: 342514 - RNA, 24 nt, Artificial Sequence
  Synthetic
aaaugugugagccacagucaucug

SEQ ID NO: 342515 - RNA, 18 nt, Artificial Sequence
  Synthetic
ggcgauuugacagaucug

SEQ ID NO: 342516 - RNA, 19 nt, Artificial Sequence
  Synthetic
aggcgauuugacagaucug

SEQ ID NO: 342517 - RNA, 20 nt, Artificial Sequence
  Synthetic
caggcgauuugacagaucug

SEQ ID NO: 342518 - RNA, 21 nt, Artificial Sequence
  Synthetic
gcaggcgauuugacagaucug

SEQ ID NO: 342519 - RNA, 22 nt, Artificial Sequence
  Synthetic
ugcaggcgauuugacagaucug

SEQ ID NO: 342520 - RNA, 23 nt, Artificial Sequence
  Synthetic
cugcaggcgauuugacagaucug

SEQ ID NO: 342521 - RNA, 24 nt, Artificial Sequence
  Synthetic
ccugcaggcgauuugacagaucug

SEQ ID NO: 342522 - RNA, 18 nt, Artificial Sequence
  Synthetic
cccuggccuagagaucug

SEQ ID NO: 342523 - RNA, 19 nt, Artificial Sequence
  Synthetic
ccccuggccuagagaucug

SEQ ID NO: 342524 - RNA, 20 nt, Artificial Sequence
  Synthetic
uccccuggccuagagaucug

SEQ ID NO: 342525 - RNA, 21 nt, Artificial Sequence
  Synthetic
uuccccuggccuagagaucug

SEQ ID NO: 342526 - RNA, 22 nt, Artificial Sequence
  Synthetic
uuuccccuggccuagagaucug

SEQ ID NO: 342527 - RNA, 23 nt, Artificial Sequence
  Synthetic
uuuuccccuggccuagagaucug

SEQ ID NO: 342528 - RNA, 24 nt, Artificial Sequence
  Synthetic
auuuuccccuggccuagagaucug

SEQ ID NO: 342529 - RNA, 18 nt, Artificial Sequence
  Synthetic
aaaauggaucuggaucug

SEQ ID NO: 342530 - RNA, 19 nt, Artificial Sequence
  Synthetic
gaaaauggaucuggaucug

SEQ ID NO: 342531 - RNA, 20 nt, Artificial Sequence
  Synthetic
ggaaaauggaucuggaucug

SEQ ID NO: 342532 - RNA, 21 nt, Artificial Sequence
  Synthetic
gggaaaauggaucuggaucug

SEQ ID NO: 342533 - RNA, 22 nt, Artificial Sequence
  Synthetic
agggaaaauggaucuggaucug

SEQ ID NO: 342534 - RNA, 23 nt, Artificial Sequence
  Synthetic
aagggaaaauggaucuggaucug

SEQ ID NO: 342535 - RNA, 24 nt, Artificial Sequence
  Synthetic
gaagggaaaauggaucuggaucug

SEQ ID NO: 342536 - RNA, 18 nt, Artificial Sequence
  Synthetic
cuuccagguguggaucug

SEQ ID NO: 342537 - RNA, 19 nt, Artificial Sequence
  Synthetic
gcuuccagguguggaucug

SEQ ID NO: 342538 - RNA, 20 nt, Artificial Sequence
  Synthetic
ugcuuccagguguggaucug

SEQ ID NO: 342539 - RNA, 21 nt, Artificial Sequence
  Synthetic
uugcuuccagguguggaucug

SEQ ID NO: 342540 - RNA, 22 nt, Artificial Sequence
  Synthetic
auugcuuccagguguggaucug

SEQ ID NO: 342541 - RNA, 23 nt, Artificial Sequence
  Synthetic
gauugcuuccagguguggaucug

SEQ ID NO: 342542 - RNA, 24 nt, Artificial Sequence
  Synthetic
agauugcuuccagguguggaucug

SEQ ID NO: 342543 - RNA, 18 nt, Artificial Sequence
  Synthetic
uaucuuagcccugaucug

SEQ ID NO: 342544 - RNA, 19 nt, Artificial Sequence
  Synthetic
uuaucuuagcccugaucug

SEQ ID NO: 342545 - RNA, 20 nt, Artificial Sequence
  Synthetic
auuaucuuagcccugaucug

SEQ ID NO: 342546 - RNA, 21 nt, Artificial Sequence
  Synthetic
aauuaucuuagcccugaucug

SEQ ID NO: 342547 - RNA, 22 nt, Artificial Sequence
  Synthetic
gaauuaucuuagcccugaucug

SEQ ID NO: 342548 - RNA, 23 nt, Artificial Sequence
  Synthetic
ggaauuaucuuagcccugaucug

SEQ ID NO: 342549 - RNA, 24 nt, Artificial Sequence
  Synthetic
aggaauuaucuuagcccugaucug

SEQ ID NO: 342550 - RNA, 18 nt, Artificial Sequence
  Synthetic
aagagacaaaaauaucug

SEQ ID NO: 342551 - RNA, 19 nt, Artificial Sequence
  Synthetic
uaagagacaaaaauaucug

SEQ ID NO: 342552 - RNA, 20 nt, Artificial Sequence
  Synthetic
auaagagacaaaaauaucug

SEQ ID NO: 342553 - RNA, 21 nt, Artificial Sequence
  Synthetic
aauaagagacaaaaauaucug

SEQ ID NO: 342554 - RNA, 22 nt, Artificial Sequence
  Synthetic
aaauaagagacaaaaauaucug

SEQ ID NO: 342555 - RNA, 23 nt, Artificial Sequence
  Synthetic
uaaauaagagacaaaaauaucug

SEQ ID NO: 342556 - RNA, 24 nt, Artificial Sequence
  Synthetic
uuaaauaagagacaaaaauaucug

SEQ ID NO: 342557 - RNA, 18 nt, Artificial Sequence
  Synthetic
auccaaacaaaauaucug

SEQ ID NO: 342558 - RNA, 19 nt, Artificial Sequence
  Synthetic
aauccaaacaaaauaucug

SEQ ID NO: 342559 - RNA, 20 nt, Artificial Sequence
  Synthetic
aaauccaaacaaaauaucug

SEQ ID NO: 342560 - RNA, 21 nt, Artificial Sequence
  Synthetic
gaaauccaaacaaaauaucug

SEQ ID NO: 342561 - RNA, 22 nt, Artificial Sequence
  Synthetic
agaaauccaaacaaaauaucug

SEQ ID NO: 342562 - RNA, 23 nt, Artificial Sequence
  Synthetic
uagaaauccaaacaaaauaucug

SEQ ID NO: 342563 - RNA, 24 nt, Artificial Sequence
  Synthetic
guagaaauccaaacaaaauaucug

SEQ ID NO: 342564 - RNA, 18 nt, Artificial Sequence
  Synthetic
ugaaaacuaagauaucug

SEQ ID NO: 342565 - RNA, 19 nt, Artificial Sequence
  Synthetic
augaaaacuaagauaucug

SEQ ID NO: 342566 - RNA, 20 nt, Artificial Sequence
  Synthetic
aaugaaaacuaagauaucug

SEQ ID NO: 342567 - RNA, 21 nt, Artificial Sequence
  Synthetic
caaugaaaacuaagauaucug

SEQ ID NO: 342568 - RNA, 22 nt, Artificial Sequence
  Synthetic
acaaugaaaacuaagauaucug

SEQ ID NO: 342569 - RNA, 23 nt, Artificial Sequence
  Synthetic
aacaaugaaaacuaagauaucug

SEQ ID NO: 342570 - RNA, 24 nt, Artificial Sequence
  Synthetic
uaacaaugaaaacuaagauaucug

SEQ ID NO: 342571 - RNA, 18 nt, Artificial Sequence
  Synthetic
aaaaguugucgauaucug

SEQ ID NO: 342572 - RNA, 19 nt, Artificial Sequence
  Synthetic
uaaaaguugucgauaucug

SEQ ID NO: 342573 - RNA, 20 nt, Artificial Sequence
  Synthetic
auaaaaguugucgauaucug

SEQ ID NO: 342574 - RNA, 21 nt, Artificial Sequence
  Synthetic
uauaaaaguugucgauaucug

SEQ ID NO: 342575 - RNA, 22 nt, Artificial Sequence
  Synthetic
cuauaaaaguugucgauaucug

SEQ ID NO: 342576 - RNA, 23 nt, Artificial Sequence
  Synthetic
ccuauaaaaguugucgauaucug

SEQ ID NO: 342577 - RNA, 24 nt, Artificial Sequence
  Synthetic
accuauaaaaguugucgauaucug

SEQ ID NO: 342578 - RNA, 18 nt, Artificial Sequence
  Synthetic
augaggaugauauaucug

SEQ ID NO: 342579 - RNA, 19 nt, Artificial Sequence
  Synthetic
caugaggaugauauaucug

SEQ ID NO: 342580 - RNA, 20 nt, Artificial Sequence
  Synthetic
ccaugaggaugauauaucug

SEQ ID NO: 342581 - RNA, 21 nt, Artificial Sequence
  Synthetic
cccaugaggaugauauaucug

SEQ ID NO: 342582 - RNA, 22 nt, Artificial Sequence
  Synthetic
ccccaugaggaugauauaucug

SEQ ID NO: 342583 - RNA, 23 nt, Artificial Sequence
  Synthetic
gccccaugaggaugauauaucug

SEQ ID NO: 342584 - RNA, 24 nt, Artificial Sequence
  Synthetic
ggccccaugaggaugauauaucug

SEQ ID NO: 342585 - RNA, 18 nt, Artificial Sequence
  Synthetic
uccaccacuuucuaucug

SEQ ID NO: 342586 - RNA, 19 nt, Artificial Sequence
  Synthetic
cuccaccacuuucuaucug

SEQ ID NO: 342587 - RNA, 20 nt, Artificial Sequence
  Synthetic
gcuccaccacuuucuaucug

SEQ ID NO: 342588 - RNA, 21 nt, Artificial Sequence
  Synthetic
ggcuccaccacuuucuaucug

SEQ ID NO: 342589 - RNA, 22 nt, Artificial Sequence
  Synthetic
uggcuccaccacuuucuaucug

SEQ ID NO: 342590 - RNA, 23 nt, Artificial Sequence
  Synthetic
uuggcuccaccacuuucuaucug

SEQ ID NO: 342591 - RNA, 24 nt, Artificial Sequence
  Synthetic
cuuggcuccaccacuuucuaucug

SEQ ID NO: 342592 - RNA, 18 nt, Artificial Sequence
  Synthetic
aaaaaaaagcaguaucug

SEQ ID NO: 342593 - RNA, 19 nt, Artificial Sequence
  Synthetic
aaaaaaaaagcaguaucug

SEQ ID NO: 342594 - RNA, 20 nt, Artificial Sequence
  Synthetic
aaaaaaaaaagcaguaucug

SEQ ID NO: 342595 - RNA, 21 nt, Artificial Sequence
  Synthetic
aaaaaaaaaaagcaguaucug

SEQ ID NO: 342596 - RNA, 22 nt, Artificial Sequence
  Synthetic
aaaaaaaaaaaagcaguaucug

SEQ ID NO: 342597 - RNA, 23 nt, Artificial Sequence
  Synthetic
aaaaaaaaaaaaagcaguaucug

SEQ ID NO: 342598 - RNA, 24 nt, Artificial Sequence
  Synthetic
aaaaaaaaaaaaaagcaguaucug

SEQ ID NO: 342599 - RNA, 18 nt, Artificial Sequence
  Synthetic
uuggggugucauuaucug

SEQ ID NO: 342600 - RNA, 19 nt, Artificial Sequence
  Synthetic
cuuggggugucauuaucug

SEQ ID NO: 342601 - RNA, 20 nt, Artificial Sequence
  Synthetic
ccuuggggugucauuaucug

SEQ ID NO: 342602 - RNA, 21 nt, Artificial Sequence
  Synthetic
cccuuggggugucauuaucug

SEQ ID NO: 342603 - RNA, 22 nt, Artificial Sequence
  Synthetic
ucccuuggggugucauuaucug

SEQ ID NO: 342604 - RNA, 23 nt, Artificial Sequence
  Synthetic
cucccuuggggugucauuaucug

SEQ ID NO: 342605 - RNA, 24 nt, Artificial Sequence
  Synthetic
acucccuuggggugucauuaucug

SEQ ID NO: 342606 - RNA, 18 nt, Artificial Sequence
  Synthetic
uacauuuuuaguuaucug

SEQ ID NO: 342607 - RNA, 19 nt, Artificial Sequence
  Synthetic
uuacauuuuuaguuaucug

SEQ ID NO: 342608 - RNA, 20 nt, Artificial Sequence
  Synthetic
cuuacauuuuuaguuaucug

SEQ ID NO: 342609 - RNA, 21 nt, Artificial Sequence
  Synthetic
ccuuacauuuuuaguuaucug

SEQ ID NO: 342610 - RNA, 22 nt, Artificial Sequence
  Synthetic
gccuuacauuuuuaguuaucug

SEQ ID NO: 342611 - RNA, 23 nt, Artificial Sequence
  Synthetic
ugccuuacauuuuuaguuaucug

SEQ ID NO: 342612 - RNA, 24 nt, Artificial Sequence
  Synthetic
gugccuuacauuuuuaguuaucug

SEQ ID NO: 342613 - RNA, 18 nt, Artificial Sequence
  Synthetic
uccugggaccuuuaucug

SEQ ID NO: 342614 - RNA, 19 nt, Artificial Sequence
  Synthetic
guccugggaccuuuaucug

SEQ ID NO: 342615 - RNA, 20 nt, Artificial Sequence
  Synthetic
gguccugggaccuuuaucug

SEQ ID NO: 342616 - RNA, 21 nt, Artificial Sequence
  Synthetic
ugguccugggaccuuuaucug

SEQ ID NO: 342617 - RNA, 22 nt, Artificial Sequence
  Synthetic
cugguccugggaccuuuaucug

SEQ ID NO: 342618 - RNA, 23 nt, Artificial Sequence
  Synthetic
ccugguccugggaccuuuaucug

SEQ ID NO: 342619 - RNA, 24 nt, Artificial Sequence
  Synthetic
gccugguccugggaccuuuaucug

SEQ ID NO: 342620 - RNA, 18 nt, Artificial Sequence
  Synthetic
acaucuuuuaaaacucug

SEQ ID NO: 342621 - RNA, 19 nt, Artificial Sequence
  Synthetic
cacaucuuuuaaaacucug

SEQ ID NO: 342622 - RNA, 20 nt, Artificial Sequence
  Synthetic
gcacaucuuuuaaaacucug

SEQ ID NO: 342623 - RNA, 21 nt, Artificial Sequence
  Synthetic
agcacaucuuuuaaaacucug

SEQ ID NO: 342624 - RNA, 22 nt, Artificial Sequence
  Synthetic
aagcacaucuuuuaaaacucug

SEQ ID NO: 342625 - RNA, 23 nt, Artificial Sequence
  Synthetic
aaagcacaucuuuuaaaacucug

SEQ ID NO: 342626 - RNA, 24 nt, Artificial Sequence
  Synthetic
caaagcacaucuuuuaaaacucug

SEQ ID NO: 342627 - RNA, 18 nt, Artificial Sequence
  Synthetic
uucuagauugaaacucug

SEQ ID NO: 342628 - RNA, 19 nt, Artificial Sequence
  Synthetic
guucuagauugaaacucug

SEQ ID NO: 342629 - RNA, 20 nt, Artificial Sequence
  Synthetic
aguucuagauugaaacucug

SEQ ID NO: 342630 - RNA, 21 nt, Artificial Sequence
  Synthetic
aaguucuagauugaaacucug

SEQ ID NO: 342631 - RNA, 22 nt, Artificial Sequence
  Synthetic
gaaguucuagauugaaacucug

SEQ ID NO: 342632 - RNA, 23 nt, Artificial Sequence
  Synthetic
ugaaguucuagauugaaacucug

SEQ ID NO: 342633 - RNA, 24 nt, Artificial Sequence
  Synthetic
augaaguucuagauugaaacucug

SEQ ID NO: 342634 - RNA, 18 nt, Artificial Sequence
  Synthetic
gaaaaagagacaacucug

SEQ ID NO: 342635 - RNA, 19 nt, Artificial Sequence
  Synthetic
ggaaaaagagacaacucug

SEQ ID NO: 342636 - RNA, 20 nt, Artificial Sequence
  Synthetic
aggaaaaagagacaacucug

SEQ ID NO: 342637 - RNA, 21 nt, Artificial Sequence
  Synthetic
aaggaaaaagagacaacucug

SEQ ID NO: 342638 - RNA, 22 nt, Artificial Sequence
  Synthetic
aaaggaaaaagagacaacucug

SEQ ID NO: 342639 - RNA, 23 nt, Artificial Sequence
  Synthetic
caaaggaaaaagagacaacucug

SEQ ID NO: 342640 - RNA, 24 nt, Artificial Sequence
  Synthetic
gcaaaggaaaaagagacaacucug

SEQ ID NO: 342641 - RNA, 18 nt, Artificial Sequence
  Synthetic
ccacuucacucaacucug

SEQ ID NO: 342642 - RNA, 19 nt, Artificial Sequence
  Synthetic
accacuucacucaacucug

SEQ ID NO: 342643 - RNA, 20 nt, Artificial Sequence
  Synthetic
aaccacuucacucaacucug

SEQ ID NO: 342644 - RNA, 21 nt, Artificial Sequence
  Synthetic
uaaccacuucacucaacucug

SEQ ID NO: 342645 - RNA, 22 nt, Artificial Sequence
  Synthetic
auaaccacuucacucaacucug

SEQ ID NO: 342646 - RNA, 23 nt, Artificial Sequence
  Synthetic
uauaaccacuucacucaacucug

SEQ ID NO: 342647 - RNA, 24 nt, Artificial Sequence
  Synthetic
uuauaaccacuucacucaacucug

SEQ ID NO: 342648 - RNA, 18 nt, Artificial Sequence
  Synthetic
uggucaugccuaacucug

SEQ ID NO: 342649 - RNA, 19 nt, Artificial Sequence
  Synthetic
guggucaugccuaacucug

SEQ ID NO: 342650 - RNA, 20 nt, Artificial Sequence
  Synthetic
cguggucaugccuaacucug

SEQ ID NO: 342651 - RNA, 21 nt, Artificial Sequence
  Synthetic
acguggucaugccuaacucug

SEQ ID NO: 342652 - RNA, 22 nt, Artificial Sequence
  Synthetic
cacguggucaugccuaacucug

SEQ ID NO: 342653 - RNA, 23 nt, Artificial Sequence
  Synthetic
ucacguggucaugccuaacucug

SEQ ID NO: 342654 - RNA, 24 nt, Artificial Sequence
  Synthetic
gucacguggucaugccuaacucug

SEQ ID NO: 342655 - RNA, 18 nt, Artificial Sequence
  Synthetic
uuaguuugaguaacucug

SEQ ID NO: 342656 - RNA, 19 nt, Artificial Sequence
  Synthetic
uuuaguuugaguaacucug

SEQ ID NO: 342657 - RNA, 20 nt, Artificial Sequence
  Synthetic
auuuaguuugaguaacucug

SEQ ID NO: 342658 - RNA, 21 nt, Artificial Sequence
  Synthetic
cauuuaguuugaguaacucug

SEQ ID NO: 342659 - RNA, 22 nt, Artificial Sequence
  Synthetic
ucauuuaguuugaguaacucug

SEQ ID NO: 342660 - RNA, 23 nt, Artificial Sequence
  Synthetic
uucauuuaguuugaguaacucug

SEQ ID NO: 342661 - RNA, 24 nt, Artificial Sequence
  Synthetic
uuucauuuaguuugaguaacucug

SEQ ID NO: 342662 - RNA, 18 nt, Artificial Sequence
  Synthetic
uaacaguggaucacucug

SEQ ID NO: 342663 - RNA, 19 nt, Artificial Sequence
  Synthetic
cuaacaguggaucacucug

SEQ ID NO: 342664 - RNA, 20 nt, Artificial Sequence
  Synthetic
acuaacaguggaucacucug

SEQ ID NO: 342665 - RNA, 21 nt, Artificial Sequence
  Synthetic
gacuaacaguggaucacucug

SEQ ID NO: 342666 - RNA, 22 nt, Artificial Sequence
  Synthetic
agacuaacaguggaucacucug

SEQ ID NO: 342667 - RNA, 23 nt, Artificial Sequence
  Synthetic
cagacuaacaguggaucacucug

SEQ ID NO: 342668 - RNA, 24 nt, Artificial Sequence
  Synthetic
ucagacuaacaguggaucacucug

SEQ ID NO: 342669 - RNA, 18 nt, Artificial Sequence
  Synthetic
uagaaaauggagacucug

SEQ ID NO: 342670 - RNA, 19 nt, Artificial Sequence
  Synthetic
auagaaaauggagacucug

SEQ ID NO: 342671 - RNA, 20 nt, Artificial Sequence
  Synthetic
uauagaaaauggagacucug

SEQ ID NO: 342672 - RNA, 21 nt, Artificial Sequence
  Synthetic
uuauagaaaauggagacucug

SEQ ID NO: 342673 - RNA, 22 nt, Artificial Sequence
  Synthetic
cuuauagaaaauggagacucug

SEQ ID NO: 342674 - RNA, 23 nt, Artificial Sequence
  Synthetic
gcuuauagaaaauggagacucug

SEQ ID NO: 342675 - RNA, 24 nt, Artificial Sequence
  Synthetic
cgcuuauagaaaauggagacucug

SEQ ID NO: 342676 - RNA, 18 nt, Artificial Sequence
  Synthetic
auuaaaagugcuacucug

SEQ ID NO: 342677 - RNA, 19 nt, Artificial Sequence
  Synthetic
aauuaaaagugcuacucug

SEQ ID NO: 342678 - RNA, 20 nt, Artificial Sequence
  Synthetic
aaauuaaaagugcuacucug

SEQ ID NO: 342679 - RNA, 21 nt, Artificial Sequence
  Synthetic
aaaauuaaaagugcuacucug

SEQ ID NO: 342680 - RNA, 22 nt, Artificial Sequence
  Synthetic
gaaaauuaaaagugcuacucug

SEQ ID NO: 342681 - RNA, 23 nt, Artificial Sequence
  Synthetic
agaaaauuaaaagugcuacucug

SEQ ID NO: 342682 - RNA, 24 nt, Artificial Sequence
  Synthetic
aagaaaauuaaaagugcuacucug

SEQ ID NO: 342683 - RNA, 18 nt, Artificial Sequence
  Synthetic
uucuuugggauuacucug

SEQ ID NO: 342684 - RNA, 19 nt, Artificial Sequence
  Synthetic
cuucuuugggauuacucug

SEQ ID NO: 342685 - RNA, 20 nt, Artificial Sequence
  Synthetic
acuucuuugggauuacucug

SEQ ID NO: 342686 - RNA, 21 nt, Artificial Sequence
  Synthetic
aacuucuuugggauuacucug

SEQ ID NO: 342687 - RNA, 22 nt, Artificial Sequence
  Synthetic
gaacuucuuugggauuacucug

SEQ ID NO: 342688 - RNA, 23 nt, Artificial Sequence
  Synthetic
ugaacuucuuugggauuacucug

SEQ ID NO: 342689 - RNA, 24 nt, Artificial Sequence
  Synthetic
cugaacuucuuugggauuacucug

SEQ ID NO: 342690 - RNA, 18 nt, Artificial Sequence
  Synthetic
aacauuuugagcccucug

SEQ ID NO: 342691 - RNA, 19 nt, Artificial Sequence
  Synthetic
gaacauuuugagcccucug

SEQ ID NO: 342692 - RNA, 20 nt, Artificial Sequence
  Synthetic
ugaacauuuugagcccucug

SEQ ID NO: 342693 - RNA, 21 nt, Artificial Sequence
  Synthetic
augaacauuuugagcccucug

SEQ ID NO: 342694 - RNA, 22 nt, Artificial Sequence
  Synthetic
gaugaacauuuugagcccucug

SEQ ID NO: 342695 - RNA, 23 nt, Artificial Sequence
  Synthetic
ugaugaacauuuugagcccucug

SEQ ID NO: 342696 - RNA, 24 nt, Artificial Sequence
  Synthetic
uugaugaacauuuugagcccucug

SEQ ID NO: 342697 - RNA, 18 nt, Artificial Sequence
  Synthetic
ccucuuuguagcccucug

SEQ ID NO: 342698 - RNA, 19 nt, Artificial Sequence
  Synthetic
accucuuuguagcccucug

SEQ ID NO: 342699 - RNA, 20 nt, Artificial Sequence
  Synthetic
uaccucuuuguagcccucug

SEQ ID NO: 342700 - RNA, 21 nt, Artificial Sequence
  Synthetic
auaccucuuuguagcccucug

SEQ ID NO: 342701 - RNA, 22 nt, Artificial Sequence
  Synthetic
gauaccucuuuguagcccucug

SEQ ID NO: 342702 - RNA, 23 nt, Artificial Sequence
  Synthetic
ugauaccucuuuguagcccucug

SEQ ID NO: 342703 - RNA, 24 nt, Artificial Sequence
  Synthetic
uugauaccucuuuguagcccucug

SEQ ID NO: 342704 - RNA, 18 nt, Artificial Sequence
  Synthetic
uuaaggugucagccucug

SEQ ID NO: 342705 - RNA, 19 nt, Artificial Sequence
  Synthetic
auuaaggugucagccucug

SEQ ID NO: 342706 - RNA, 20 nt, Artificial Sequence
  Synthetic
cauuaaggugucagccucug

SEQ ID NO: 342707 - RNA, 21 nt, Artificial Sequence
  Synthetic
acauuaaggugucagccucug

SEQ ID NO: 342708 - RNA, 22 nt, Artificial Sequence
  Synthetic
aacauuaaggugucagccucug

SEQ ID NO: 342709 - RNA, 23 nt, Artificial Sequence
  Synthetic
uaacauuaaggugucagccucug

SEQ ID NO: 342710 - RNA, 24 nt, Artificial Sequence
  Synthetic
cuaacauuaaggugucagccucug

SEQ ID NO: 342711 - RNA, 18 nt, Artificial Sequence
  Synthetic
gaucacaucacuccucug

SEQ ID NO: 342712 - RNA, 19 nt, Artificial Sequence
  Synthetic
agaucacaucacuccucug

SEQ ID NO: 342713 - RNA, 20 nt, Artificial Sequence
  Synthetic
cagaucacaucacuccucug

SEQ ID NO: 342714 - RNA, 21 nt, Artificial Sequence
  Synthetic
ucagaucacaucacuccucug

SEQ ID NO: 342715 - RNA, 22 nt, Artificial Sequence
  Synthetic
gucagaucacaucacuccucug

SEQ ID NO: 342716 - RNA, 23 nt, Artificial Sequence
  Synthetic
agucagaucacaucacuccucug

SEQ ID NO: 342717 - RNA, 24 nt, Artificial Sequence
  Synthetic
aagucagaucacaucacuccucug

SEQ ID NO: 342718 - RNA, 18 nt, Artificial Sequence
  Synthetic
uauaugaaaccuccucug

SEQ ID NO: 342719 - RNA, 19 nt, Artificial Sequence
  Synthetic
auauaugaaaccuccucug

SEQ ID NO: 342720 - RNA, 20 nt, Artificial Sequence
  Synthetic
uauauaugaaaccuccucug

SEQ ID NO: 342721 - RNA, 21 nt, Artificial Sequence
  Synthetic
auauauaugaaaccuccucug

SEQ ID NO: 342722 - RNA, 22 nt, Artificial Sequence
  Synthetic
uauauauaugaaaccuccucug

SEQ ID NO: 342723 - RNA, 23 nt, Artificial Sequence
  Synthetic
auauauauaugaaaccuccucug

SEQ ID NO: 342724 - RNA, 24 nt, Artificial Sequence
  Synthetic
cauauauauaugaaaccuccucug

SEQ ID NO: 342725 - RNA, 18 nt, Artificial Sequence
  Synthetic
auuuguuuggcuccucug

SEQ ID NO: 342726 - RNA, 19 nt, Artificial Sequence
  Synthetic
aauuuguuuggcuccucug

SEQ ID NO: 342727 - RNA, 20 nt, Artificial Sequence
  Synthetic
caauuuguuuggcuccucug

SEQ ID NO: 342728 - RNA, 21 nt, Artificial Sequence
  Synthetic
ccaauuuguuuggcuccucug

SEQ ID NO: 342729 - RNA, 22 nt, Artificial Sequence
  Synthetic
gccaauuuguuuggcuccucug

SEQ ID NO: 342730 - RNA, 23 nt, Artificial Sequence
  Synthetic
agccaauuuguuuggcuccucug

SEQ ID NO: 342731 - RNA, 24 nt, Artificial Sequence
  Synthetic
cagccaauuuguuuggcuccucug

SEQ ID NO: 342732 - RNA, 18 nt, Artificial Sequence
  Synthetic
gucuuaucauuagcucug

SEQ ID NO: 342733 - RNA, 19 nt, Artificial Sequence
  Synthetic
agucuuaucauuagcucug

SEQ ID NO: 342734 - RNA, 20 nt, Artificial Sequence
  Synthetic
cagucuuaucauuagcucug

SEQ ID NO: 342735 - RNA, 21 nt, Artificial Sequence
  Synthetic
acagucuuaucauuagcucug

SEQ ID NO: 342736 - RNA, 22 nt, Artificial Sequence
  Synthetic
uacagucuuaucauuagcucug

SEQ ID NO: 342737 - RNA, 23 nt, Artificial Sequence
  Synthetic
uuacagucuuaucauuagcucug

SEQ ID NO: 342738 - RNA, 24 nt, Artificial Sequence
  Synthetic
uuuacagucuuaucauuagcucug

SEQ ID NO: 342739 - RNA, 18 nt, Artificial Sequence
  Synthetic
agcucccuaaucgcucug

SEQ ID NO: 342740 - RNA, 19 nt, Artificial Sequence
  Synthetic
uagcucccuaaucgcucug

SEQ ID NO: 342741 - RNA, 20 nt, Artificial Sequence
  Synthetic
cuagcucccuaaucgcucug

SEQ ID NO: 342742 - RNA, 21 nt, Artificial Sequence
  Synthetic
acuagcucccuaaucgcucug

SEQ ID NO: 342743 - RNA, 22 nt, Artificial Sequence
  Synthetic
aacuagcucccuaaucgcucug

SEQ ID NO: 342744 - RNA, 23 nt, Artificial Sequence
  Synthetic
caacuagcucccuaaucgcucug

SEQ ID NO: 342745 - RNA, 24 nt, Artificial Sequence
  Synthetic
acaacuagcucccuaaucgcucug

SEQ ID NO: 342746 - RNA, 18 nt, Artificial Sequence
  Synthetic
aucccucugaaggcucug

SEQ ID NO: 342747 - RNA, 19 nt, Artificial Sequence
  Synthetic
uaucccucugaaggcucug

SEQ ID NO: 342748 - RNA, 20 nt, Artificial Sequence
  Synthetic
uuaucccucugaaggcucug

SEQ ID NO: 342749 - RNA, 21 nt, Artificial Sequence
  Synthetic
auuaucccucugaaggcucug

SEQ ID NO: 342750 - RNA, 22 nt, Artificial Sequence
  Synthetic
aauuaucccucugaaggcucug

SEQ ID NO: 342751 - RNA, 23 nt, Artificial Sequence
  Synthetic
caauuaucccucugaaggcucug

SEQ ID NO: 342752 - RNA, 24 nt, Artificial Sequence
  Synthetic
ucaauuaucccucugaaggcucug

SEQ ID NO: 342753 - RNA, 18 nt, Artificial Sequence
  Synthetic
uccugccugcuggcucug

SEQ ID NO: 342754 - RNA, 19 nt, Artificial Sequence
  Synthetic
uuccugccugcuggcucug

SEQ ID NO: 342755 - RNA, 20 nt, Artificial Sequence
  Synthetic
guuccugccugcuggcucug

SEQ ID NO: 342756 - RNA, 21 nt, Artificial Sequence
  Synthetic
cguuccugccugcuggcucug

SEQ ID NO: 342757 - RNA, 22 nt, Artificial Sequence
  Synthetic
acguuccugccugcuggcucug

SEQ ID NO: 342758 - RNA, 23 nt, Artificial Sequence
  Synthetic
aacguuccugccugcuggcucug

SEQ ID NO: 342759 - RNA, 24 nt, Artificial Sequence
  Synthetic
aaacguuccugccugcuggcucug

SEQ ID NO: 342760 - RNA, 18 nt, Artificial Sequence
  Synthetic
ugucaugcuaaugcucug

SEQ ID NO: 342761 - RNA, 19 nt, Artificial Sequence
  Synthetic
cugucaugcuaaugcucug

SEQ ID NO: 342762 - RNA, 20 nt, Artificial Sequence
  Synthetic
acugucaugcuaaugcucug

SEQ ID NO: 342763 - RNA, 21 nt, Artificial Sequence
  Synthetic
aacugucaugcuaaugcucug

SEQ ID NO: 342764 - RNA, 22 nt, Artificial Sequence
  Synthetic
aaacugucaugcuaaugcucug

SEQ ID NO: 342765 - RNA, 23 nt, Artificial Sequence
  Synthetic
aaaacugucaugcuaaugcucug

SEQ ID NO: 342766 - RNA, 24 nt, Artificial Sequence
  Synthetic
caaaacugucaugcuaaugcucug

SEQ ID NO: 342767 - RNA, 18 nt, Artificial Sequence
  Synthetic
aauugaaaauaugcucug

SEQ ID NO: 342768 - RNA, 19 nt, Artificial Sequence
  Synthetic
aaauugaaaauaugcucug

SEQ ID NO: 342769 - RNA, 20 nt, Artificial Sequence
  Synthetic
uaaauugaaaauaugcucug

SEQ ID NO: 342770 - RNA, 21 nt, Artificial Sequence
  Synthetic
uuaaauugaaaauaugcucug

SEQ ID NO: 342771 - RNA, 22 nt, Artificial Sequence
  Synthetic
guuaaauugaaaauaugcucug

SEQ ID NO: 342772 - RNA, 23 nt, Artificial Sequence
  Synthetic
aguuaaauugaaaauaugcucug

SEQ ID NO: 342773 - RNA, 24 nt, Artificial Sequence
  Synthetic
aaguuaaauugaaaauaugcucug

SEQ ID NO: 342774 - RNA, 18 nt, Artificial Sequence
  Synthetic
uuaaaaaccucugcucug

SEQ ID NO: 342775 - RNA, 19 nt, Artificial Sequence
  Synthetic
cuuaaaaaccucugcucug

SEQ ID NO: 342776 - RNA, 20 nt, Artificial Sequence
  Synthetic
acuuaaaaaccucugcucug

SEQ ID NO: 342777 - RNA, 21 nt, Artificial Sequence
  Synthetic
aacuuaaaaaccucugcucug

SEQ ID NO: 342778 - RNA, 22 nt, Artificial Sequence
  Synthetic
caacuuaaaaaccucugcucug

SEQ ID NO: 342779 - RNA, 23 nt, Artificial Sequence
  Synthetic
acaacuuaaaaaccucugcucug

SEQ ID NO: 342780 - RNA, 24 nt, Artificial Sequence
  Synthetic
cacaacuuaaaaaccucugcucug

SEQ ID NO: 342781 - RNA, 18 nt, Artificial Sequence
  Synthetic
augaaacagaaaucucug

SEQ ID NO: 342782 - RNA, 19 nt, Artificial Sequence
  Synthetic
aaugaaacagaaaucucug

SEQ ID NO: 342783 - RNA, 20 nt, Artificial Sequence
  Synthetic
aaaugaaacagaaaucucug

SEQ ID NO: 342784 - RNA, 21 nt, Artificial Sequence
  Synthetic
uaaaugaaacagaaaucucug

SEQ ID NO: 342785 - RNA, 22 nt, Artificial Sequence
  Synthetic
auaaaugaaacagaaaucucug

SEQ ID NO: 342786 - RNA, 23 nt, Artificial Sequence
  Synthetic
cauaaaugaaacagaaaucucug

SEQ ID NO: 342787 - RNA, 24 nt, Artificial Sequence
  Synthetic
acauaaaugaaacagaaaucucug

SEQ ID NO: 342788 - RNA, 18 nt, Artificial Sequence
  Synthetic
guaaaggaaagaucucug

SEQ ID NO: 342789 - RNA, 19 nt, Artificial Sequence
  Synthetic
uguaaaggaaagaucucug

SEQ ID NO: 342790 - RNA, 20 nt, Artificial Sequence
  Synthetic
auguaaaggaaagaucucug

SEQ ID NO: 342791 - RNA, 21 nt, Artificial Sequence
  Synthetic
cauguaaaggaaagaucucug

SEQ ID NO: 342792 - RNA, 22 nt, Artificial Sequence
  Synthetic
gcauguaaaggaaagaucucug

SEQ ID NO: 342793 - RNA, 23 nt, Artificial Sequence
  Synthetic
agcauguaaaggaaagaucucug

SEQ ID NO: 342794 - RNA, 24 nt, Artificial Sequence
  Synthetic
gagcauguaaaggaaagaucucug

SEQ ID NO: 342795 - RNA, 18 nt, Artificial Sequence
  Synthetic
ucucucucucacucucug

SEQ ID NO: 342796 - RNA, 19 nt, Artificial Sequence
  Synthetic
cucucucucucacucucug

SEQ ID NO: 342797 - RNA, 20 nt, Artificial Sequence
  Synthetic
ucucucucucucacucucug

SEQ ID NO: 342798 - RNA, 21 nt, Artificial Sequence
  Synthetic
cucucucucucucacucucug

SEQ ID NO: 342799 - RNA, 22 nt, Artificial Sequence
  Synthetic
ucucucucucucucacucucug

SEQ ID NO: 342800 - RNA, 23 nt, Artificial Sequence
  Synthetic
cucucucucucucucacucucug

SEQ ID NO: 342801 - RNA, 24 nt, Artificial Sequence
  Synthetic
ucucucucucucucucacucucug

SEQ ID NO: 342802 - RNA, 18 nt, Artificial Sequence
  Synthetic
ucauggaaaaccucucug

SEQ ID NO: 342803 - RNA, 19 nt, Artificial Sequence
  Synthetic
cucauggaaaaccucucug

SEQ ID NO: 342804 - RNA, 20 nt, Artificial Sequence
  Synthetic
ccucauggaaaaccucucug

SEQ ID NO: 342805 - RNA, 21 nt, Artificial Sequence
  Synthetic
cccucauggaaaaccucucug

SEQ ID NO: 342806 - RNA, 22 nt, Artificial Sequence
  Synthetic
gcccucauggaaaaccucucug

SEQ ID NO: 342807 - RNA, 23 nt, Artificial Sequence
  Synthetic
ggcccucauggaaaaccucucug

SEQ ID NO: 342808 - RNA, 24 nt, Artificial Sequence
  Synthetic
gggcccucauggaaaaccucucug

SEQ ID NO: 342809 - RNA, 18 nt, Artificial Sequence
  Synthetic
gcuggcuugcccucucug

SEQ ID NO: 342810 - RNA, 19 nt, Artificial Sequence
  Synthetic
ugcuggcuugcccucucug

SEQ ID NO: 342811 - RNA, 20 nt, Artificial Sequence
  Synthetic
cugcuggcuugcccucucug

SEQ ID NO: 342812 - RNA, 21 nt, Artificial Sequence
  Synthetic
ccugcuggcuugcccucucug

SEQ ID NO: 342813 - RNA, 22 nt, Artificial Sequence
  Synthetic
gccugcuggcuugcccucucug

SEQ ID NO: 342814 - RNA, 23 nt, Artificial Sequence
  Synthetic
ugccugcuggcuugcccucucug

SEQ ID NO: 342815 - RNA, 24 nt, Artificial Sequence
  Synthetic
cugccugcuggcuugcccucucug

SEQ ID NO: 342816 - RNA, 18 nt, Artificial Sequence
  Synthetic
aucaggagcugcucucug

SEQ ID NO: 342817 - RNA, 19 nt, Artificial Sequence
  Synthetic
aaucaggagcugcucucug

SEQ ID NO: 342818 - RNA, 20 nt, Artificial Sequence
  Synthetic
uaaucaggagcugcucucug

SEQ ID NO: 342819 - RNA, 21 nt, Artificial Sequence
  Synthetic
uuaaucaggagcugcucucug

SEQ ID NO: 342820 - RNA, 22 nt, Artificial Sequence
  Synthetic
guuaaucaggagcugcucucug

SEQ ID NO: 342821 - RNA, 23 nt, Artificial Sequence
  Synthetic
gguuaaucaggagcugcucucug

SEQ ID NO: 342822 - RNA, 24 nt, Artificial Sequence
  Synthetic
ggguuaaucaggagcugcucucug

SEQ ID NO: 342823 - RNA, 18 nt, Artificial Sequence
  Synthetic
uuaucuugggucucucug

SEQ ID NO: 342824 - RNA, 19 nt, Artificial Sequence
  Synthetic
cuuaucuugggucucucug

SEQ ID NO: 342825 - RNA, 20 nt, Artificial Sequence
  Synthetic
ucuuaucuugggucucucug

SEQ ID NO: 342826 - RNA, 21 nt, Artificial Sequence
  Synthetic
aucuuaucuugggucucucug

SEQ ID NO: 342827 - RNA, 22 nt, Artificial Sequence
  Synthetic
caucuuaucuugggucucucug

SEQ ID NO: 342828 - RNA, 23 nt, Artificial Sequence
  Synthetic
ucaucuuaucuugggucucucug

SEQ ID NO: 342829 - RNA, 24 nt, Artificial Sequence
  Synthetic
aucaucuuaucuugggucucucug

SEQ ID NO: 342830 - RNA, 18 nt, Artificial Sequence
  Synthetic
aaacauauguggucucug

SEQ ID NO: 342831 - RNA, 19 nt, Artificial Sequence
  Synthetic
aaaacauauguggucucug

SEQ ID NO: 342832 - RNA, 20 nt, Artificial Sequence
  Synthetic
caaaacauauguggucucug

SEQ ID NO: 342833 - RNA, 21 nt, Artificial Sequence
  Synthetic
acaaaacauauguggucucug

SEQ ID NO: 342834 - RNA, 22 nt, Artificial Sequence
  Synthetic
cacaaaacauauguggucucug

SEQ ID NO: 342835 - RNA, 23 nt, Artificial Sequence
  Synthetic
gcacaaaacauauguggucucug

SEQ ID NO: 342836 - RNA, 24 nt, Artificial Sequence
  Synthetic
ugcacaaaacauauguggucucug

SEQ ID NO: 342837 - RNA, 18 nt, Artificial Sequence
  Synthetic
ugggccauuuggucucug

SEQ ID NO: 342838 - RNA, 19 nt, Artificial Sequence
  Synthetic
augggccauuuggucucug

SEQ ID NO: 342839 - RNA, 20 nt, Artificial Sequence
  Synthetic
caugggccauuuggucucug

SEQ ID NO: 342840 - RNA, 21 nt, Artificial Sequence
  Synthetic
ucaugggccauuuggucucug

SEQ ID NO: 342841 - RNA, 22 nt, Artificial Sequence
  Synthetic
uucaugggccauuuggucucug

SEQ ID NO: 342842 - RNA, 23 nt, Artificial Sequence
  Synthetic
cuucaugggccauuuggucucug

SEQ ID NO: 342843 - RNA, 24 nt, Artificial Sequence
  Synthetic
gcuucaugggccauuuggucucug

SEQ ID NO: 342844 - RNA, 18 nt, Artificial Sequence
  Synthetic
aaccacagugauucucug

SEQ ID NO: 342845 - RNA, 19 nt, Artificial Sequence
  Synthetic
gaaccacagugauucucug

SEQ ID NO: 342846 - RNA, 20 nt, Artificial Sequence
  Synthetic
ugaaccacagugauucucug

SEQ ID NO: 342847 - RNA, 21 nt, Artificial Sequence
  Synthetic
uugaaccacagugauucucug

SEQ ID NO: 342848 - RNA, 22 nt, Artificial Sequence
  Synthetic
cuugaaccacagugauucucug

SEQ ID NO: 342849 - RNA, 23 nt, Artificial Sequence
  Synthetic
ccuugaaccacagugauucucug

SEQ ID NO: 342850 - RNA, 24 nt, Artificial Sequence
  Synthetic
accuugaaccacagugauucucug

SEQ ID NO: 342851 - RNA, 18 nt, Artificial Sequence
  Synthetic
aaagaaaguuauucucug

SEQ ID NO: 342852 - RNA, 19 nt, Artificial Sequence
  Synthetic
caaagaaaguuauucucug

SEQ ID NO: 342853 - RNA, 20 nt, Artificial Sequence
  Synthetic
acaaagaaaguuauucucug

SEQ ID NO: 342854 - RNA, 21 nt, Artificial Sequence
  Synthetic
uacaaagaaaguuauucucug

SEQ ID NO: 342855 - RNA, 22 nt, Artificial Sequence
  Synthetic
uuacaaagaaaguuauucucug

SEQ ID NO: 342856 - RNA, 23 nt, Artificial Sequence
  Synthetic
guuacaaagaaaguuauucucug

SEQ ID NO: 342857 - RNA, 24 nt, Artificial Sequence
  Synthetic
aguuacaaagaaaguuauucucug

SEQ ID NO: 342858 - RNA, 18 nt, Artificial Sequence
  Synthetic
ugcugggugccuucucug

SEQ ID NO: 342859 - RNA, 19 nt, Artificial Sequence
  Synthetic
cugcugggugccuucucug

SEQ ID NO: 342860 - RNA, 20 nt, Artificial Sequence
  Synthetic
ccugcugggugccuucucug

SEQ ID NO: 342861 - RNA, 21 nt, Artificial Sequence
  Synthetic
uccugcugggugccuucucug

SEQ ID NO: 342862 - RNA, 22 nt, Artificial Sequence
  Synthetic
cuccugcugggugccuucucug

SEQ ID NO: 342863 - RNA, 23 nt, Artificial Sequence
  Synthetic
ccuccugcugggugccuucucug

SEQ ID NO: 342864 - RNA, 24 nt, Artificial Sequence
  Synthetic
uccuccugcugggugccuucucug

SEQ ID NO: 342865 - RNA, 18 nt, Artificial Sequence
  Synthetic
auuaagcaaucuucucug

SEQ ID NO: 342866 - RNA, 19 nt, Artificial Sequence
  Synthetic
gauuaagcaaucuucucug

SEQ ID NO: 342867 - RNA, 20 nt, Artificial Sequence
  Synthetic
ggauuaagcaaucuucucug

SEQ ID NO: 342868 - RNA, 21 nt, Artificial Sequence
  Synthetic
gggauuaagcaaucuucucug

SEQ ID NO: 342869 - RNA, 22 nt, Artificial Sequence
  Synthetic
agggauuaagcaaucuucucug

SEQ ID NO: 342870 - RNA, 23 nt, Artificial Sequence
  Synthetic
gagggauuaagcaaucuucucug

SEQ ID NO: 342871 - RNA, 24 nt, Artificial Sequence
  Synthetic
agagggauuaagcaaucuucucug

SEQ ID NO: 342872 - RNA, 18 nt, Artificial Sequence
  Synthetic
gaagaaacaaguucucug

SEQ ID NO: 342873 - RNA, 19 nt, Artificial Sequence
  Synthetic
ugaagaaacaaguucucug

SEQ ID NO: 342874 - RNA, 20 nt, Artificial Sequence
  Synthetic
augaagaaacaaguucucug

SEQ ID NO: 342875 - RNA, 21 nt, Artificial Sequence
  Synthetic
aaugaagaaacaaguucucug

SEQ ID NO: 342876 - RNA, 22 nt, Artificial Sequence
  Synthetic
gaaugaagaaacaaguucucug

SEQ ID NO: 342877 - RNA, 23 nt, Artificial Sequence
  Synthetic
ugaaugaagaaacaaguucucug

SEQ ID NO: 342878 - RNA, 24 nt, Artificial Sequence
  Synthetic
cugaaugaagaaacaaguucucug

SEQ ID NO: 342879 - RNA, 18 nt, Artificial Sequence
  Synthetic
auucugaaagguucucug

SEQ ID NO: 342880 - RNA, 19 nt, Artificial Sequence
  Synthetic
cauucugaaagguucucug

SEQ ID NO: 342881 - RNA, 20 nt, Artificial Sequence
  Synthetic
ucauucugaaagguucucug

SEQ ID NO: 342882 - RNA, 21 nt, Artificial Sequence
  Synthetic
cucauucugaaagguucucug

SEQ ID NO: 342883 - RNA, 22 nt, Artificial Sequence
  Synthetic
ucucauucugaaagguucucug

SEQ ID NO: 342884 - RNA, 23 nt, Artificial Sequence
  Synthetic
cucucauucugaaagguucucug

SEQ ID NO: 342885 - RNA, 24 nt, Artificial Sequence
  Synthetic
ucucucauucugaaagguucucug

SEQ ID NO: 342886 - RNA, 18 nt, Artificial Sequence
  Synthetic
accaaaagguuuucucug

SEQ ID NO: 342887 - RNA, 19 nt, Artificial Sequence
  Synthetic
uaccaaaagguuuucucug

SEQ ID NO: 342888 - RNA, 20 nt, Artificial Sequence
  Synthetic
uuaccaaaagguuuucucug

SEQ ID NO: 342889 - RNA, 21 nt, Artificial Sequence
  Synthetic
auuaccaaaagguuuucucug

SEQ ID NO: 342890 - RNA, 22 nt, Artificial Sequence
  Synthetic
aauuaccaaaagguuuucucug

SEQ ID NO: 342891 - RNA, 23 nt, Artificial Sequence
  Synthetic
aaauuaccaaaagguuuucucug

SEQ ID NO: 342892 - RNA, 24 nt, Artificial Sequence
  Synthetic
uaaauuaccaaaagguuuucucug

SEQ ID NO: 342893 - RNA, 18 nt, Artificial Sequence
  Synthetic
acuuuccuguuuucucug

SEQ ID NO: 342894 - RNA, 19 nt, Artificial Sequence
  Synthetic
uacuuuccuguuuucucug

SEQ ID NO: 342895 - RNA, 20 nt, Artificial Sequence
  Synthetic
auacuuuccuguuuucucug

SEQ ID NO: 342896 - RNA, 21 nt, Artificial Sequence
  Synthetic
cauacuuuccuguuuucucug

SEQ ID NO: 342897 - RNA, 22 nt, Artificial Sequence
  Synthetic
ccauacuuuccuguuuucucug

SEQ ID NO: 342898 - RNA, 23 nt, Artificial Sequence
  Synthetic
cccauacuuuccuguuuucucug

SEQ ID NO: 342899 - RNA, 24 nt, Artificial Sequence
  Synthetic
ucccauacuuuccuguuuucucug

SEQ ID NO: 342900 - RNA, 18 nt, Artificial Sequence
  Synthetic
uuaggggaaaaaagucug

SEQ ID NO: 342901 - RNA, 19 nt, Artificial Sequence
  Synthetic
guuaggggaaaaaagucug

SEQ ID NO: 342902 - RNA, 20 nt, Artificial Sequence
  Synthetic
uguuaggggaaaaaagucug

SEQ ID NO: 342903 - RNA, 21 nt, Artificial Sequence
  Synthetic
auguuaggggaaaaaagucug

SEQ ID NO: 342904 - RNA, 22 nt, Artificial Sequence
  Synthetic
uauguuaggggaaaaaagucug

SEQ ID NO: 342905 - RNA, 23 nt, Artificial Sequence
  Synthetic
cuauguuaggggaaaaaagucug

SEQ ID NO: 342906 - RNA, 24 nt, Artificial Sequence
  Synthetic
acuauguuaggggaaaaaagucug

SEQ ID NO: 342907 - RNA, 18 nt, Artificial Sequence
  Synthetic
uggucagaaguaagucug

SEQ ID NO: 342908 - RNA, 19 nt, Artificial Sequence
  Synthetic
auggucagaaguaagucug

SEQ ID NO: 342909 - RNA, 20 nt, Artificial Sequence
  Synthetic
cauggucagaaguaagucug

SEQ ID NO: 342910 - RNA, 21 nt, Artificial Sequence
  Synthetic
ucauggucagaaguaagucug

SEQ ID NO: 342911 - RNA, 22 nt, Artificial Sequence
  Synthetic
uucauggucagaaguaagucug

SEQ ID NO: 342912 - RNA, 23 nt, Artificial Sequence
  Synthetic
uuucauggucagaaguaagucug

SEQ ID NO: 342913 - RNA, 24 nt, Artificial Sequence
  Synthetic
cuuucauggucagaaguaagucug

SEQ ID NO: 342914 - RNA, 18 nt, Artificial Sequence
  Synthetic
uaugccuuuuccagucug

SEQ ID NO: 342915 - RNA, 19 nt, Artificial Sequence
  Synthetic
uuaugccuuuuccagucug

SEQ ID NO: 342916 - RNA, 20 nt, Artificial Sequence
  Synthetic
guuaugccuuuuccagucug

SEQ ID NO: 342917 - RNA, 21 nt, Artificial Sequence
  Synthetic
gguuaugccuuuuccagucug

SEQ ID NO: 342918 - RNA, 22 nt, Artificial Sequence
  Synthetic
cgguuaugccuuuuccagucug

SEQ ID NO: 342919 - RNA, 23 nt, Artificial Sequence
  Synthetic
acgguuaugccuuuuccagucug

SEQ ID NO: 342920 - RNA, 24 nt, Artificial Sequence
  Synthetic
uacgguuaugccuuuuccagucug

SEQ ID NO: 342921 - RNA, 18 nt, Artificial Sequence
  Synthetic
ccaugaagagagagucug

SEQ ID NO: 342922 - RNA, 19 nt, Artificial Sequence
  Synthetic
accaugaagagagagucug

SEQ ID NO: 342923 - RNA, 20 nt, Artificial Sequence
  Synthetic
caccaugaagagagagucug

SEQ ID NO: 342924 - RNA, 21 nt, Artificial Sequence
  Synthetic
ucaccaugaagagagagucug

SEQ ID NO: 342925 - RNA, 22 nt, Artificial Sequence
  Synthetic
cucaccaugaagagagagucug

SEQ ID NO: 342926 - RNA, 23 nt, Artificial Sequence
  Synthetic
ccucaccaugaagagagagucug

SEQ ID NO: 342927 - RNA, 24 nt, Artificial Sequence
  Synthetic
cccucaccaugaagagagagucug

SEQ ID NO: 342928 - RNA, 18 nt, Artificial Sequence
  Synthetic
cugacauuauauagucug

SEQ ID NO: 342929 - RNA, 19 nt, Artificial Sequence
  Synthetic
acugacauuauauagucug

SEQ ID NO: 342930 - RNA, 20 nt, Artificial Sequence
  Synthetic
cacugacauuauauagucug

SEQ ID NO: 342931 - RNA, 21 nt, Artificial Sequence
  Synthetic
acacugacauuauauagucug

SEQ ID NO: 342932 - RNA, 22 nt, Artificial Sequence
  Synthetic
gacacugacauuauauagucug

SEQ ID NO: 342933 - RNA, 23 nt, Artificial Sequence
  Synthetic
ggacacugacauuauauagucug

SEQ ID NO: 342934 - RNA, 24 nt, Artificial Sequence
  Synthetic
aggacacugacauuauauagucug

SEQ ID NO: 342935 - RNA, 18 nt, Artificial Sequence
  Synthetic
agauccgcuguuagucug

SEQ ID NO: 342936 - RNA, 19 nt, Artificial Sequence
  Synthetic
gagauccgcuguuagucug

SEQ ID NO: 342937 - RNA, 20 nt, Artificial Sequence
  Synthetic
agagauccgcuguuagucug

SEQ ID NO: 342938 - RNA, 21 nt, Artificial Sequence
  Synthetic
gagagauccgcuguuagucug

SEQ ID NO: 342939 - RNA, 22 nt, Artificial Sequence
  Synthetic
cgagagauccgcuguuagucug

SEQ ID NO: 342940 - RNA, 23 nt, Artificial Sequence
  Synthetic
ccgagagauccgcuguuagucug

SEQ ID NO: 342941 - RNA, 24 nt, Artificial Sequence
  Synthetic
gccgagagauccgcuguuagucug

SEQ ID NO: 342942 - RNA, 18 nt, Artificial Sequence
  Synthetic
ucuaauuggggaggucug

SEQ ID NO: 342943 - RNA, 19 nt, Artificial Sequence
  Synthetic
uucuaauuggggaggucug

SEQ ID NO: 342944 - RNA, 20 nt, Artificial Sequence
  Synthetic
cuucuaauuggggaggucug

SEQ ID NO: 342945 - RNA, 21 nt, Artificial Sequence
  Synthetic
gcuucuaauuggggaggucug

SEQ ID NO: 342946 - RNA, 22 nt, Artificial Sequence
  Synthetic
agcuucuaauuggggaggucug

SEQ ID NO: 342947 - RNA, 23 nt, Artificial Sequence
  Synthetic
aagcuucuaauuggggaggucug

SEQ ID NO: 342948 - RNA, 24 nt, Artificial Sequence
  Synthetic
uaagcuucuaauuggggaggucug

SEQ ID NO: 342949 - RNA, 18 nt, Artificial Sequence
  Synthetic
gagauaaacauaggucug

SEQ ID NO: 342950 - RNA, 19 nt, Artificial Sequence
  Synthetic
ugagauaaacauaggucug

SEQ ID NO: 342951 - RNA, 20 nt, Artificial Sequence
  Synthetic
uugagauaaacauaggucug

SEQ ID NO: 342952 - RNA, 21 nt, Artificial Sequence
  Synthetic
guugagauaaacauaggucug

SEQ ID NO: 342953 - RNA, 22 nt, Artificial Sequence
  Synthetic
aguugagauaaacauaggucug

SEQ ID NO: 342954 - RNA, 23 nt, Artificial Sequence
  Synthetic
uaguugagauaaacauaggucug

SEQ ID NO: 342955 - RNA, 24 nt, Artificial Sequence
  Synthetic
cuaguugagauaaacauaggucug

SEQ ID NO: 342956 - RNA, 18 nt, Artificial Sequence
  Synthetic
cuaccauuguggggucug

SEQ ID NO: 342957 - RNA, 19 nt, Artificial Sequence
  Synthetic
ucuaccauuguggggucug

SEQ ID NO: 342958 - RNA, 20 nt, Artificial Sequence
  Synthetic
cucuaccauuguggggucug

SEQ ID NO: 342959 - RNA, 21 nt, Artificial Sequence
  Synthetic
gcucuaccauuguggggucug

SEQ ID NO: 342960 - RNA, 22 nt, Artificial Sequence
  Synthetic
cgcucuaccauuguggggucug

SEQ ID NO: 342961 - RNA, 23 nt, Artificial Sequence
  Synthetic
ucgcucuaccauuguggggucug

SEQ ID NO: 342962 - RNA, 24 nt, Artificial Sequence
  Synthetic
aucgcucuaccauuguggggucug

SEQ ID NO: 342963 - RNA, 18 nt, Artificial Sequence
  Synthetic
acuguuauuucuggucug

SEQ ID NO: 342964 - RNA, 19 nt, Artificial Sequence
  Synthetic
aacuguuauuucuggucug

SEQ ID NO: 342965 - RNA, 20 nt, Artificial Sequence
  Synthetic
aaacuguuauuucuggucug

SEQ ID NO: 342966 - RNA, 21 nt, Artificial Sequence
  Synthetic
gaaacuguuauuucuggucug

SEQ ID NO: 342967 - RNA, 22 nt, Artificial Sequence
  Synthetic
ugaaacuguuauuucuggucug

SEQ ID NO: 342968 - RNA, 23 nt, Artificial Sequence
  Synthetic
gugaaacuguuauuucuggucug

SEQ ID NO: 342969 - RNA, 24 nt, Artificial Sequence
  Synthetic
ugugaaacuguuauuucuggucug

SEQ ID NO: 342970 - RNA, 18 nt, Artificial Sequence
  Synthetic
aaaaaauagccaugucug

SEQ ID NO: 342971 - RNA, 19 nt, Artificial Sequence
  Synthetic
gaaaaaauagccaugucug

SEQ ID NO: 342972 - RNA, 20 nt, Artificial Sequence
  Synthetic
ugaaaaaauagccaugucug

SEQ ID NO: 342973 - RNA, 21 nt, Artificial Sequence
  Synthetic
augaaaaaauagccaugucug

SEQ ID NO: 342974 - RNA, 22 nt, Artificial Sequence
  Synthetic
aaugaaaaaauagccaugucug

SEQ ID NO: 342975 - RNA, 23 nt, Artificial Sequence
  Synthetic
aaaugaaaaaauagccaugucug

SEQ ID NO: 342976 - RNA, 24 nt, Artificial Sequence
  Synthetic
gaaaugaaaaaauagccaugucug

SEQ ID NO: 342977 - RNA, 18 nt, Artificial Sequence
  Synthetic
ucaguugugagaugucug

SEQ ID NO: 342978 - RNA, 19 nt, Artificial Sequence
  Synthetic
uucaguugugagaugucug

SEQ ID NO: 342979 - RNA, 20 nt, Artificial Sequence
  Synthetic
guucaguugugagaugucug

SEQ ID NO: 342980 - RNA, 21 nt, Artificial Sequence
  Synthetic
aguucaguugugagaugucug

SEQ ID NO: 342981 - RNA, 22 nt, Artificial Sequence
  Synthetic
aaguucaguugugagaugucug

SEQ ID NO: 342982 - RNA, 23 nt, Artificial Sequence
  Synthetic
gaaguucaguugugagaugucug

SEQ ID NO: 342983 - RNA, 24 nt, Artificial Sequence
  Synthetic
ggaaguucaguugugagaugucug

SEQ ID NO: 342984 - RNA, 18 nt, Artificial Sequence
  Synthetic
cucuagagcaacugucug

SEQ ID NO: 342985 - RNA, 19 nt, Artificial Sequence
  Synthetic
ucucuagagcaacugucug

SEQ ID NO: 342986 - RNA, 20 nt, Artificial Sequence
  Synthetic
uucucuagagcaacugucug

SEQ ID NO: 342987 - RNA, 21 nt, Artificial Sequence
  Synthetic
cuucucuagagcaacugucug

SEQ ID NO: 342988 - RNA, 22 nt, Artificial Sequence
  Synthetic
ccuucucuagagcaacugucug

SEQ ID NO: 342989 - RNA, 23 nt, Artificial Sequence
  Synthetic
uccuucucuagagcaacugucug

SEQ ID NO: 342990 - RNA, 24 nt, Artificial Sequence
  Synthetic
uuccuucucuagagcaacugucug

SEQ ID NO: 342991 - RNA, 18 nt, Artificial Sequence
  Synthetic
caaagaagugccugucug

SEQ ID NO: 342992 - RNA, 19 nt, Artificial Sequence
  Synthetic
ucaaagaagugccugucug

SEQ ID NO: 342993 - RNA, 20 nt, Artificial Sequence
  Synthetic
gucaaagaagugccugucug

SEQ ID NO: 342994 - RNA, 21 nt, Artificial Sequence
  Synthetic
ggucaaagaagugccugucug

SEQ ID NO: 342995 - RNA, 22 nt, Artificial Sequence
  Synthetic
uggucaaagaagugccugucug

SEQ ID NO: 342996 - RNA, 23 nt, Artificial Sequence
  Synthetic
uuggucaaagaagugccugucug

SEQ ID NO: 342997 - RNA, 24 nt, Artificial Sequence
  Synthetic
cuuggucaaagaagugccugucug

SEQ ID NO: 342998 - RNA, 18 nt, Artificial Sequence
  Synthetic
cuuaaaagcaagugucug

SEQ ID NO: 342999 - RNA, 19 nt, Artificial Sequence
  Synthetic
ucuuaaaagcaagugucug

SEQ ID NO: 343000 - RNA, 20 nt, Artificial Sequence
  Synthetic
uucuuaaaagcaagugucug

SEQ ID NO: 343001 - RNA, 21 nt, Artificial Sequence
  Synthetic
uuucuuaaaagcaagugucug

SEQ ID NO: 343002 - RNA, 22 nt, Artificial Sequence
  Synthetic
uuuucuuaaaagcaagugucug

SEQ ID NO: 343003 - RNA, 23 nt, Artificial Sequence
  Synthetic
auuuucuuaaaagcaagugucug

SEQ ID NO: 343004 - RNA, 24 nt, Artificial Sequence
  Synthetic
cauuuucuuaaaagcaagugucug

SEQ ID NO: 343005 - RNA, 18 nt, Artificial Sequence
  Synthetic
gucauccuucagugucug

SEQ ID NO: 343006 - RNA, 19 nt, Artificial Sequence
  Synthetic
agucauccuucagugucug

SEQ ID NO: 343007 - RNA, 20 nt, Artificial Sequence
  Synthetic
cagucauccuucagugucug

SEQ ID NO: 343008 - RNA, 21 nt, Artificial Sequence
  Synthetic
acagucauccuucagugucug

SEQ ID NO: 343009 - RNA, 22 nt, Artificial Sequence
  Synthetic
cacagucauccuucagugucug

SEQ ID NO: 343010 - RNA, 23 nt, Artificial Sequence
  Synthetic
acacagucauccuucagugucug

SEQ ID NO: 343011 - RNA, 24 nt, Artificial Sequence
  Synthetic
uacacagucauccuucagugucug

SEQ ID NO: 343012 - RNA, 18 nt, Artificial Sequence
  Synthetic
cagcagauuuggugucug

SEQ ID NO: 343013 - RNA, 19 nt, Artificial Sequence
  Synthetic
ccagcagauuuggugucug

SEQ ID NO: 343014 - RNA, 20 nt, Artificial Sequence
  Synthetic
accagcagauuuggugucug

SEQ ID NO: 343015 - RNA, 21 nt, Artificial Sequence
  Synthetic
uaccagcagauuuggugucug

SEQ ID NO: 343016 - RNA, 22 nt, Artificial Sequence
  Synthetic
auaccagcagauuuggugucug

SEQ ID NO: 343017 - RNA, 23 nt, Artificial Sequence
  Synthetic
aauaccagcagauuuggugucug

SEQ ID NO: 343018 - RNA, 24 nt, Artificial Sequence
  Synthetic
aaauaccagcagauuuggugucug

SEQ ID NO: 343019 - RNA, 18 nt, Artificial Sequence
  Synthetic
uggcagguuuggugucug

SEQ ID NO: 343020 - RNA, 19 nt, Artificial Sequence
  Synthetic
cuggcagguuuggugucug

SEQ ID NO: 343021 - RNA, 20 nt, Artificial Sequence
  Synthetic
acuggcagguuuggugucug

SEQ ID NO: 343022 - RNA, 21 nt, Artificial Sequence
  Synthetic
cacuggcagguuuggugucug

SEQ ID NO: 343023 - RNA, 22 nt, Artificial Sequence
  Synthetic
gcacuggcagguuuggugucug

SEQ ID NO: 343024 - RNA, 23 nt, Artificial Sequence
  Synthetic
ggcacuggcagguuuggugucug

SEQ ID NO: 343025 - RNA, 24 nt, Artificial Sequence
  Synthetic
aggcacuggcagguuuggugucug

SEQ ID NO: 343026 - RNA, 18 nt, Artificial Sequence
  Synthetic
uacauugucaguugucug

SEQ ID NO: 343027 - RNA, 19 nt, Artificial Sequence
  Synthetic
uuacauugucaguugucug

SEQ ID NO: 343028 - RNA, 20 nt, Artificial Sequence
  Synthetic
uuuacauugucaguugucug

SEQ ID NO: 343029 - RNA, 21 nt, Artificial Sequence
  Synthetic
cuuuacauugucaguugucug

SEQ ID NO: 343030 - RNA, 22 nt, Artificial Sequence
  Synthetic
ccuuuacauugucaguugucug

SEQ ID NO: 343031 - RNA, 23 nt, Artificial Sequence
  Synthetic
accuuuacauugucaguugucug

SEQ ID NO: 343032 - RNA, 24 nt, Artificial Sequence
  Synthetic
aaccuuuacauugucaguugucug

SEQ ID NO: 343033 - RNA, 18 nt, Artificial Sequence
  Synthetic
uguauaauugcaauucug

SEQ ID NO: 343034 - RNA, 19 nt, Artificial Sequence
  Synthetic
auguauaauugcaauucug

SEQ ID NO: 343035 - RNA, 20 nt, Artificial Sequence
  Synthetic
aauguauaauugcaauucug

SEQ ID NO: 343036 - RNA, 21 nt, Artificial Sequence
  Synthetic
aaauguauaauugcaauucug

SEQ ID NO: 343037 - RNA, 22 nt, Artificial Sequence
  Synthetic
gaaauguauaauugcaauucug

SEQ ID NO: 343038 - RNA, 23 nt, Artificial Sequence
  Synthetic
agaaauguauaauugcaauucug

SEQ ID NO: 343039 - RNA, 24 nt, Artificial Sequence
  Synthetic
aagaaauguauaauugcaauucug

SEQ ID NO: 343040 - RNA, 18 nt, Artificial Sequence
  Synthetic
agauugaacucaauucug

SEQ ID NO: 343041 - RNA, 19 nt, Artificial Sequence
  Synthetic
cagauugaacucaauucug

SEQ ID NO: 343042 - RNA, 20 nt, Artificial Sequence
  Synthetic
acagauugaacucaauucug

SEQ ID NO: 343043 - RNA, 21 nt, Artificial Sequence
  Synthetic
gacagauugaacucaauucug

SEQ ID NO: 343044 - RNA, 22 nt, Artificial Sequence
  Synthetic
agacagauugaacucaauucug

SEQ ID NO: 343045 - RNA, 23 nt, Artificial Sequence
  Synthetic
gagacagauugaacucaauucug

SEQ ID NO: 343046 - RNA, 24 nt, Artificial Sequence
  Synthetic
ggagacagauugaacucaauucug

SEQ ID NO: 343047 - RNA, 18 nt, Artificial Sequence
  Synthetic
auauuuacaugaauucug

SEQ ID NO: 343048 - RNA, 19 nt, Artificial Sequence
  Synthetic
gauauuuacaugaauucug

SEQ ID NO: 343049 - RNA, 20 nt, Artificial Sequence
  Synthetic
ggauauuuacaugaauucug

SEQ ID NO: 343050 - RNA, 21 nt, Artificial Sequence
  Synthetic
aggauauuuacaugaauucug

SEQ ID NO: 343051 - RNA, 22 nt, Artificial Sequence
  Synthetic
caggauauuuacaugaauucug

SEQ ID NO: 343052 - RNA, 23 nt, Artificial Sequence
  Synthetic
ccaggauauuuacaugaauucug

SEQ ID NO: 343053 - RNA, 24 nt, Artificial Sequence
  Synthetic
uccaggauauuuacaugaauucug

SEQ ID NO: 343054 - RNA, 18 nt, Artificial Sequence
  Synthetic
cacagucacugaauucug

SEQ ID NO: 343055 - RNA, 19 nt, Artificial Sequence
  Synthetic
acacagucacugaauucug

SEQ ID NO: 343056 - RNA, 20 nt, Artificial Sequence
  Synthetic
cacacagucacugaauucug

SEQ ID NO: 343057 - RNA, 21 nt, Artificial Sequence
  Synthetic
acacacagucacugaauucug

SEQ ID NO: 343058 - RNA, 22 nt, Artificial Sequence
  Synthetic
aacacacagucacugaauucug

SEQ ID NO: 343059 - RNA, 23 nt, Artificial Sequence
  Synthetic
caacacacagucacugaauucug

SEQ ID NO: 343060 - RNA, 24 nt, Artificial Sequence
  Synthetic
ccaacacacagucacugaauucug

SEQ ID NO: 343061 - RNA, 18 nt, Artificial Sequence
  Synthetic
gauuuagacugaauucug

SEQ ID NO: 343062 - RNA, 19 nt, Artificial Sequence
  Synthetic
agauuuagacugaauucug

SEQ ID NO: 343063 - RNA, 20 nt, Artificial Sequence
  Synthetic
gagauuuagacugaauucug

SEQ ID NO: 343064 - RNA, 21 nt, Artificial Sequence
  Synthetic
agagauuuagacugaauucug

SEQ ID NO: 343065 - RNA, 22 nt, Artificial Sequence
  Synthetic
aagagauuuagacugaauucug

SEQ ID NO: 343066 - RNA, 23 nt, Artificial Sequence
  Synthetic
uaagagauuuagacugaauucug

SEQ ID NO: 343067 - RNA, 24 nt, Artificial Sequence
  Synthetic
auaagagauuuagacugaauucug

SEQ ID NO: 343068 - RNA, 18 nt, Artificial Sequence
  Synthetic
gcgcacggauuaauucug

SEQ ID NO: 343069 - RNA, 19 nt, Artificial Sequence
  Synthetic
ggcgcacggauuaauucug

SEQ ID NO: 343070 - RNA, 20 nt, Artificial Sequence
  Synthetic
uggcgcacggauuaauucug

SEQ ID NO: 343071 - RNA, 21 nt, Artificial Sequence
  Synthetic
uuggcgcacggauuaauucug

SEQ ID NO: 343072 - RNA, 22 nt, Artificial Sequence
  Synthetic
uuuggcgcacggauuaauucug

SEQ ID NO: 343073 - RNA, 23 nt, Artificial Sequence
  Synthetic
uuuuggcgcacggauuaauucug

SEQ ID NO: 343074 - RNA, 24 nt, Artificial Sequence
  Synthetic
auuuuggcgcacggauuaauucug

SEQ ID NO: 343075 - RNA, 18 nt, Artificial Sequence
  Synthetic
agucaguauaacauucug

SEQ ID NO: 343076 - RNA, 19 nt, Artificial Sequence
  Synthetic
aagucaguauaacauucug

SEQ ID NO: 343077 - RNA, 20 nt, Artificial Sequence
  Synthetic
aaagucaguauaacauucug

SEQ ID NO: 343078 - RNA, 21 nt, Artificial Sequence
  Synthetic
uaaagucaguauaacauucug

SEQ ID NO: 343079 - RNA, 22 nt, Artificial Sequence
  Synthetic
cuaaagucaguauaacauucug

SEQ ID NO: 343080 - RNA, 23 nt, Artificial Sequence
  Synthetic
acuaaagucaguauaacauucug

SEQ ID NO: 343081 - RNA, 24 nt, Artificial Sequence
  Synthetic
cacuaaagucaguauaacauucug

SEQ ID NO: 343082 - RNA, 18 nt, Artificial Sequence
  Synthetic
cucuuuauccucauucug

SEQ ID NO: 343083 - RNA, 19 nt, Artificial Sequence
  Synthetic
ucucuuuauccucauucug

SEQ ID NO: 343084 - RNA, 20 nt, Artificial Sequence
  Synthetic
cucucuuuauccucauucug

SEQ ID NO: 343085 - RNA, 21 nt, Artificial Sequence
  Synthetic
ucucucuuuauccucauucug

SEQ ID NO: 343086 - RNA, 22 nt, Artificial Sequence
  Synthetic
aucucucuuuauccucauucug

SEQ ID NO: 343087 - RNA, 23 nt, Artificial Sequence
  Synthetic
gaucucucuuuauccucauucug

SEQ ID NO: 343088 - RNA, 24 nt, Artificial Sequence
  Synthetic
ugaucucucuuuauccucauucug

SEQ ID NO: 343089 - RNA, 18 nt, Artificial Sequence
  Synthetic
uagguaggagggauucug

SEQ ID NO: 343090 - RNA, 19 nt, Artificial Sequence
  Synthetic
uuagguaggagggauucug

SEQ ID NO: 343091 - RNA, 20 nt, Artificial Sequence
  Synthetic
uuuagguaggagggauucug

SEQ ID NO: 343092 - RNA, 21 nt, Artificial Sequence
  Synthetic
uuuuagguaggagggauucug

SEQ ID NO: 343093 - RNA, 22 nt, Artificial Sequence
  Synthetic
uuuuuagguaggagggauucug

SEQ ID NO: 343094 - RNA, 23 nt, Artificial Sequence
  Synthetic
cuuuuuagguaggagggauucug

SEQ ID NO: 343095 - RNA, 24 nt, Artificial Sequence
  Synthetic
gcuuuuuagguaggagggauucug

SEQ ID NO: 343096 - RNA, 18 nt, Artificial Sequence
  Synthetic
gcugggaccuggauucug

SEQ ID NO: 343097 - RNA, 19 nt, Artificial Sequence
  Synthetic
ugcugggaccuggauucug

SEQ ID NO: 343098 - RNA, 20 nt, Artificial Sequence
  Synthetic
cugcugggaccuggauucug

SEQ ID NO: 343099 - RNA, 21 nt, Artificial Sequence
  Synthetic
acugcugggaccuggauucug

SEQ ID NO: 343100 - RNA, 22 nt, Artificial Sequence
  Synthetic
cacugcugggaccuggauucug

SEQ ID NO: 343101 - RNA, 23 nt, Artificial Sequence
  Synthetic
gcacugcugggaccuggauucug

SEQ ID NO: 343102 - RNA, 24 nt, Artificial Sequence
  Synthetic
ggcacugcugggaccuggauucug

SEQ ID NO: 343103 - RNA, 18 nt, Artificial Sequence
  Synthetic
uagaaacuucugauucug

SEQ ID NO: 343104 - RNA, 19 nt, Artificial Sequence
  Synthetic
cuagaaacuucugauucug

SEQ ID NO: 343105 - RNA, 20 nt, Artificial Sequence
  Synthetic
gcuagaaacuucugauucug

SEQ ID NO: 343106 - RNA, 21 nt, Artificial Sequence
  Synthetic
agcuagaaacuucugauucug

SEQ ID NO: 343107 - RNA, 22 nt, Artificial Sequence
  Synthetic
aagcuagaaacuucugauucug

SEQ ID NO: 343108 - RNA, 23 nt, Artificial Sequence
  Synthetic
uaagcuagaaacuucugauucug

SEQ ID NO: 343109 - RNA, 24 nt, Artificial Sequence
  Synthetic
uuaagcuagaaacuucugauucug

SEQ ID NO: 343110 - RNA, 18 nt, Artificial Sequence
  Synthetic
aguggacuucauauucug

SEQ ID NO: 343111 - RNA, 19 nt, Artificial Sequence
  Synthetic
uaguggacuucauauucug

SEQ ID NO: 343112 - RNA, 20 nt, Artificial Sequence
  Synthetic
uuaguggacuucauauucug

SEQ ID NO: 343113 - RNA, 21 nt, Artificial Sequence
  Synthetic
auuaguggacuucauauucug

SEQ ID NO: 343114 - RNA, 22 nt, Artificial Sequence
  Synthetic
aauuaguggacuucauauucug

SEQ ID NO: 343115 - RNA, 23 nt, Artificial Sequence
  Synthetic
gaauuaguggacuucauauucug

SEQ ID NO: 343116 - RNA, 24 nt, Artificial Sequence
  Synthetic
agaauuaguggacuucauauucug

SEQ ID NO: 343117 - RNA, 18 nt, Artificial Sequence
  Synthetic
cagauacuugauauucug

SEQ ID NO: 343118 - RNA, 19 nt, Artificial Sequence
  Synthetic
acagauacuugauauucug

SEQ ID NO: 343119 - RNA, 20 nt, Artificial Sequence
  Synthetic
uacagauacuugauauucug

SEQ ID NO: 343120 - RNA, 21 nt, Artificial Sequence
  Synthetic
auacagauacuugauauucug

SEQ ID NO: 343121 - RNA, 22 nt, Artificial Sequence
  Synthetic
uauacagauacuugauauucug

SEQ ID NO: 343122 - RNA, 23 nt, Artificial Sequence
  Synthetic
auauacagauacuugauauucug

SEQ ID NO: 343123 - RNA, 24 nt, Artificial Sequence
  Synthetic
uauauacagauacuugauauucug

SEQ ID NO: 343124 - RNA, 18 nt, Artificial Sequence
  Synthetic
uuaacucuugauauucug

SEQ ID NO: 343125 - RNA, 19 nt, Artificial Sequence
  Synthetic
uuuaacucuugauauucug

SEQ ID NO: 343126 - RNA, 20 nt, Artificial Sequence
  Synthetic
uuuuaacucuugauauucug

SEQ ID NO: 343127 - RNA, 21 nt, Artificial Sequence
  Synthetic
guuuuaacucuugauauucug

SEQ ID NO: 343128 - RNA, 22 nt, Artificial Sequence
  Synthetic
aguuuuaacucuugauauucug

SEQ ID NO: 343129 - RNA, 23 nt, Artificial Sequence
  Synthetic
caguuuuaacucuugauauucug

SEQ ID NO: 343130 - RNA, 24 nt, Artificial Sequence
  Synthetic
ccaguuuuaacucuugauauucug

SEQ ID NO: 343131 - RNA, 18 nt, Artificial Sequence
  Synthetic
gauggcaaauauauucug

SEQ ID NO: 343132 - RNA, 19 nt, Artificial Sequence
  Synthetic
agauggcaaauauauucug

SEQ ID NO: 343133 - RNA, 20 nt, Artificial Sequence
  Synthetic
aagauggcaaauauauucug

SEQ ID NO: 343134 - RNA, 21 nt, Artificial Sequence
  Synthetic
aaagauggcaaauauauucug

SEQ ID NO: 343135 - RNA, 22 nt, Artificial Sequence
  Synthetic
caaagauggcaaauauauucug

SEQ ID NO: 343136 - RNA, 23 nt, Artificial Sequence
  Synthetic
acaaagauggcaaauauauucug

SEQ ID NO: 343137 - RNA, 24 nt, Artificial Sequence
  Synthetic
cacaaagauggcaaauauauucug

SEQ ID NO: 343138 - RNA, 18 nt, Artificial Sequence
  Synthetic
uuggcuuugacuauucug

SEQ ID NO: 343139 - RNA, 19 nt, Artificial Sequence
  Synthetic
cuuggcuuugacuauucug

SEQ ID NO: 343140 - RNA, 20 nt, Artificial Sequence
  Synthetic
ccuuggcuuugacuauucug

SEQ ID NO: 343141 - RNA, 21 nt, Artificial Sequence
  Synthetic
cccuuggcuuugacuauucug

SEQ ID NO: 343142 - RNA, 22 nt, Artificial Sequence
  Synthetic
ucccuuggcuuugacuauucug

SEQ ID NO: 343143 - RNA, 23 nt, Artificial Sequence
  Synthetic
uucccuuggcuuugacuauucug

SEQ ID NO: 343144 - RNA, 24 nt, Artificial Sequence
  Synthetic
guucccuuggcuuugacuauucug

SEQ ID NO: 343145 - RNA, 18 nt, Artificial Sequence
  Synthetic
aggguuuauauuauucug

SEQ ID NO: 343146 - RNA, 19 nt, Artificial Sequence
  Synthetic
aaggguuuauauuauucug

SEQ ID NO: 343147 - RNA, 20 nt, Artificial Sequence
  Synthetic
caaggguuuauauuauucug

SEQ ID NO: 343148 - RNA, 21 nt, Artificial Sequence
  Synthetic
ucaaggguuuauauuauucug

SEQ ID NO: 343149 - RNA, 22 nt, Artificial Sequence
  Synthetic
gucaaggguuuauauuauucug

SEQ ID NO: 343150 - RNA, 23 nt, Artificial Sequence
  Synthetic
ggucaaggguuuauauuauucug

SEQ ID NO: 343151 - RNA, 24 nt, Artificial Sequence
  Synthetic
aggucaaggguuuauauuauucug

SEQ ID NO: 343152 - RNA, 18 nt, Artificial Sequence
  Synthetic
uuuauuaauuuuauucug

SEQ ID NO: 343153 - RNA, 19 nt, Artificial Sequence
  Synthetic
uuuuauuaauuuuauucug

SEQ ID NO: 343154 - RNA, 20 nt, Artificial Sequence
  Synthetic
cuuuuauuaauuuuauucug

SEQ ID NO: 343155 - RNA, 21 nt, Artificial Sequence
  Synthetic
ucuuuuauuaauuuuauucug

SEQ ID NO: 343156 - RNA, 22 nt, Artificial Sequence
  Synthetic
uucuuuuauuaauuuuauucug

SEQ ID NO: 343157 - RNA, 23 nt, Artificial Sequence
  Synthetic
auucuuuuauuaauuuuauucug

SEQ ID NO: 343158 - RNA, 24 nt, Artificial Sequence
  Synthetic
aauucuuuuauuaauuuuauucug

SEQ ID NO: 343159 - RNA, 18 nt, Artificial Sequence
  Synthetic
uugaaacaauaacuucug

SEQ ID NO: 343160 - RNA, 19 nt, Artificial Sequence
  Synthetic
cuugaaacaauaacuucug

SEQ ID NO: 343161 - RNA, 20 nt, Artificial Sequence
  Synthetic
ucuugaaacaauaacuucug

SEQ ID NO: 343162 - RNA, 21 nt, Artificial Sequence
  Synthetic
uucuugaaacaauaacuucug

SEQ ID NO: 343163 - RNA, 22 nt, Artificial Sequence
  Synthetic
cuucuugaaacaauaacuucug

SEQ ID NO: 343164 - RNA, 23 nt, Artificial Sequence
  Synthetic
ucuucuugaaacaauaacuucug

SEQ ID NO: 343165 - RNA, 24 nt, Artificial Sequence
  Synthetic
uucuucuugaaacaauaacuucug

SEQ ID NO: 343166 - RNA, 18 nt, Artificial Sequence
  Synthetic
aaaaguuauuaacuucug

SEQ ID NO: 343167 - RNA, 19 nt, Artificial Sequence
  Synthetic
gaaaaguuauuaacuucug

SEQ ID NO: 343168 - RNA, 20 nt, Artificial Sequence
  Synthetic
agaaaaguuauuaacuucug

SEQ ID NO: 343169 - RNA, 21 nt, Artificial Sequence
  Synthetic
uagaaaaguuauuaacuucug

SEQ ID NO: 343170 - RNA, 22 nt, Artificial Sequence
  Synthetic
uuagaaaaguuauuaacuucug

SEQ ID NO: 343171 - RNA, 23 nt, Artificial Sequence
  Synthetic
uuuagaaaaguuauuaacuucug

SEQ ID NO: 343172 - RNA, 24 nt, Artificial Sequence
  Synthetic
uuuuagaaaaguuauuaacuucug

SEQ ID NO: 343173 - RNA, 18 nt, Artificial Sequence
  Synthetic
ugaggagggcaccuucug

SEQ ID NO: 343174 - RNA, 19 nt, Artificial Sequence
  Synthetic
gugaggagggcaccuucug

SEQ ID NO: 343175 - RNA, 20 nt, Artificial Sequence
  Synthetic
agugaggagggcaccuucug

SEQ ID NO: 343176 - RNA, 21 nt, Artificial Sequence
  Synthetic
uagugaggagggcaccuucug

SEQ ID NO: 343177 - RNA, 22 nt, Artificial Sequence
  Synthetic
guagugaggagggcaccuucug

SEQ ID NO: 343178 - RNA, 23 nt, Artificial Sequence
  Synthetic
uguagugaggagggcaccuucug

SEQ ID NO: 343179 - RNA, 24 nt, Artificial Sequence
  Synthetic
guguagugaggagggcaccuucug

SEQ ID NO: 343180 - RNA, 18 nt, Artificial Sequence
  Synthetic
uagcagcaucuccuucug

SEQ ID NO: 343181 - RNA, 19 nt, Artificial Sequence
  Synthetic
auagcagcaucuccuucug

SEQ ID NO: 343182 - RNA, 20 nt, Artificial Sequence
  Synthetic
cauagcagcaucuccuucug

SEQ ID NO: 343183 - RNA, 21 nt, Artificial Sequence
  Synthetic
gcauagcagcaucuccuucug

SEQ ID NO: 343184 - RNA, 22 nt, Artificial Sequence
  Synthetic
agcauagcagcaucuccuucug

SEQ ID NO: 343185 - RNA, 23 nt, Artificial Sequence
  Synthetic
aagcauagcagcaucuccuucug

SEQ ID NO: 343186 - RNA, 24 nt, Artificial Sequence
  Synthetic
gaagcauagcagcaucuccuucug

SEQ ID NO: 343187 - RNA, 18 nt, Artificial Sequence
  Synthetic
uccuaauuccagcuucug

SEQ ID NO: 343188 - RNA, 19 nt, Artificial Sequence
  Synthetic
guccuaauuccagcuucug

SEQ ID NO: 343189 - RNA, 20 nt, Artificial Sequence
  Synthetic
aguccuaauuccagcuucug

SEQ ID NO: 343190 - RNA, 21 nt, Artificial Sequence
  Synthetic
gaguccuaauuccagcuucug

SEQ ID NO: 343191 - RNA, 22 nt, Artificial Sequence
  Synthetic
ugaguccuaauuccagcuucug

SEQ ID NO: 343192 - RNA, 23 nt, Artificial Sequence
  Synthetic
cugaguccuaauuccagcuucug

SEQ ID NO: 343193 - RNA, 24 nt, Artificial Sequence
  Synthetic
ccugaguccuaauuccagcuucug

SEQ ID NO: 343194 - RNA, 18 nt, Artificial Sequence
  Synthetic
gcaucuacucagcuucug

SEQ ID NO: 343195 - RNA, 19 nt, Artificial Sequence
  Synthetic
agcaucuacucagcuucug

SEQ ID NO: 343196 - RNA, 20 nt, Artificial Sequence
  Synthetic
cagcaucuacucagcuucug

SEQ ID NO: 343197 - RNA, 21 nt, Artificial Sequence
  Synthetic
ccagcaucuacucagcuucug

SEQ ID NO: 343198 - RNA, 22 nt, Artificial Sequence
  Synthetic
accagcaucuacucagcuucug

SEQ ID NO: 343199 - RNA, 23 nt, Artificial Sequence
  Synthetic
caccagcaucuacucagcuucug

SEQ ID NO: 343200 - RNA, 24 nt, Artificial Sequence
  Synthetic
acaccagcaucuacucagcuucug

SEQ ID NO: 343201 - RNA, 18 nt, Artificial Sequence
  Synthetic
agaguucaugugcuucug

SEQ ID NO: 343202 - RNA, 19 nt, Artificial Sequence
  Synthetic
aagaguucaugugcuucug

SEQ ID NO: 343203 - RNA, 20 nt, Artificial Sequence
  Synthetic
aaagaguucaugugcuucug

SEQ ID NO: 343204 - RNA, 21 nt, Artificial Sequence
  Synthetic
uaaagaguucaugugcuucug

SEQ ID NO: 343205 - RNA, 22 nt, Artificial Sequence
  Synthetic
auaaagaguucaugugcuucug

SEQ ID NO: 343206 - RNA, 23 nt, Artificial Sequence
  Synthetic
aauaaagaguucaugugcuucug

SEQ ID NO: 343207 - RNA, 24 nt, Artificial Sequence
  Synthetic
gaauaaagaguucaugugcuucug

SEQ ID NO: 343208 - RNA, 18 nt, Artificial Sequence
  Synthetic
uaaaagagauugcuucug

SEQ ID NO: 343209 - RNA, 19 nt, Artificial Sequence
  Synthetic
uuaaaagagauugcuucug

SEQ ID NO: 343210 - RNA, 20 nt, Artificial Sequence
  Synthetic
guuaaaagagauugcuucug

SEQ ID NO: 343211 - RNA, 21 nt, Artificial Sequence
  Synthetic
gguuaaaagagauugcuucug

SEQ ID NO: 343212 - RNA, 22 nt, Artificial Sequence
  Synthetic
ggguuaaaagagauugcuucug

SEQ ID NO: 343213 - RNA, 23 nt, Artificial Sequence
  Synthetic
aggguuaaaagagauugcuucug

SEQ ID NO: 343214 - RNA, 24 nt, Artificial Sequence
  Synthetic
aaggguuaaaagagauugcuucug

SEQ ID NO: 343215 - RNA, 18 nt, Artificial Sequence
  Synthetic
caugcauugcuucuucug

SEQ ID NO: 343216 - RNA, 19 nt, Artificial Sequence
  Synthetic
ucaugcauugcuucuucug

SEQ ID NO: 343217 - RNA, 20 nt, Artificial Sequence
  Synthetic
cucaugcauugcuucuucug

SEQ ID NO: 343218 - RNA, 21 nt, Artificial Sequence
  Synthetic
ucucaugcauugcuucuucug

SEQ ID NO: 343219 - RNA, 22 nt, Artificial Sequence
  Synthetic
cucucaugcauugcuucuucug

SEQ ID NO: 343220 - RNA, 23 nt, Artificial Sequence
  Synthetic
ucucucaugcauugcuucuucug

SEQ ID NO: 343221 - RNA, 24 nt, Artificial Sequence
  Synthetic
cucucucaugcauugcuucuucug

SEQ ID NO: 343222 - RNA, 18 nt, Artificial Sequence
  Synthetic
ccugugauuuaaguucug

SEQ ID NO: 343223 - RNA, 19 nt, Artificial Sequence
  Synthetic
cccugugauuuaaguucug

SEQ ID NO: 343224 - RNA, 20 nt, Artificial Sequence
  Synthetic
ccccugugauuuaaguucug

SEQ ID NO: 343225 - RNA, 21 nt, Artificial Sequence
  Synthetic
accccugugauuuaaguucug

SEQ ID NO: 343226 - RNA, 22 nt, Artificial Sequence
  Synthetic
caccccugugauuuaaguucug

SEQ ID NO: 343227 - RNA, 23 nt, Artificial Sequence
  Synthetic
gcaccccugugauuuaaguucug

SEQ ID NO: 343228 - RNA, 24 nt, Artificial Sequence
  Synthetic
agcaccccugugauuuaaguucug

SEQ ID NO: 343229 - RNA, 18 nt, Artificial Sequence
  Synthetic
acauauucauuaguucug

SEQ ID NO: 343230 - RNA, 19 nt, Artificial Sequence
  Synthetic
uacauauucauuaguucug

SEQ ID NO: 343231 - RNA, 20 nt, Artificial Sequence
  Synthetic
cuacauauucauuaguucug

SEQ ID NO: 343232 - RNA, 21 nt, Artificial Sequence
  Synthetic
acuacauauucauuaguucug

SEQ ID NO: 343233 - RNA, 22 nt, Artificial Sequence
  Synthetic
cacuacauauucauuaguucug

SEQ ID NO: 343234 - RNA, 23 nt, Artificial Sequence
  Synthetic
ccacuacauauucauuaguucug

SEQ ID NO: 343235 - RNA, 24 nt, Artificial Sequence
  Synthetic
uccacuacauauucauuaguucug

SEQ ID NO: 343236 - RNA, 18 nt, Artificial Sequence
  Synthetic
accagucgagggguucug

SEQ ID NO: 343237 - RNA, 19 nt, Artificial Sequence
  Synthetic
uaccagucgagggguucug

SEQ ID NO: 343238 - RNA, 20 nt, Artificial Sequence
  Synthetic
auaccagucgagggguucug

SEQ ID NO: 343239 - RNA, 21 nt, Artificial Sequence
  Synthetic
cauaccagucgagggguucug

SEQ ID NO: 343240 - RNA, 22 nt, Artificial Sequence
  Synthetic
acauaccagucgagggguucug

SEQ ID NO: 343241 - RNA, 23 nt, Artificial Sequence
  Synthetic
gacauaccagucgagggguucug

SEQ ID NO: 343242 - RNA, 24 nt, Artificial Sequence
  Synthetic
agacauaccagucgagggguucug

SEQ ID NO: 343243 - RNA, 18 nt, Artificial Sequence
  Synthetic
uucacaucaaauguucug

SEQ ID NO: 343244 - RNA, 19 nt, Artificial Sequence
  Synthetic
guucacaucaaauguucug

SEQ ID NO: 343245 - RNA, 20 nt, Artificial Sequence
  Synthetic
gguucacaucaaauguucug

SEQ ID NO: 343246 - RNA, 21 nt, Artificial Sequence
  Synthetic
agguucacaucaaauguucug

SEQ ID NO: 343247 - RNA, 22 nt, Artificial Sequence
  Synthetic
gagguucacaucaaauguucug

SEQ ID NO: 343248 - RNA, 23 nt, Artificial Sequence
  Synthetic
ugagguucacaucaaauguucug

SEQ ID NO: 343249 - RNA, 24 nt, Artificial Sequence
  Synthetic
uugagguucacaucaaauguucug

SEQ ID NO: 343250 - RNA, 18 nt, Artificial Sequence
  Synthetic
guuuccguugauguucug

SEQ ID NO: 343251 - RNA, 19 nt, Artificial Sequence
  Synthetic
aguuuccguugauguucug

SEQ ID NO: 343252 - RNA, 20 nt, Artificial Sequence
  Synthetic
gaguuuccguugauguucug

SEQ ID NO: 343253 - RNA, 21 nt, Artificial Sequence
  Synthetic
agaguuuccguugauguucug

SEQ ID NO: 343254 - RNA, 22 nt, Artificial Sequence
  Synthetic
cagaguuuccguugauguucug

SEQ ID NO: 343255 - RNA, 23 nt, Artificial Sequence
  Synthetic
ucagaguuuccguugauguucug

SEQ ID NO: 343256 - RNA, 24 nt, Artificial Sequence
  Synthetic
uucagaguuuccguugauguucug

SEQ ID NO: 343257 - RNA, 18 nt, Artificial Sequence
  Synthetic
uuccaugaauauguucug

SEQ ID NO: 343258 - RNA, 19 nt, Artificial Sequence
  Synthetic
cuuccaugaauauguucug

SEQ ID NO: 343259 - RNA, 20 nt, Artificial Sequence
  Synthetic
acuuccaugaauauguucug

SEQ ID NO: 343260 - RNA, 21 nt, Artificial Sequence
  Synthetic
cacuuccaugaauauguucug

SEQ ID NO: 343261 - RNA, 22 nt, Artificial Sequence
  Synthetic
acacuuccaugaauauguucug

SEQ ID NO: 343262 - RNA, 23 nt, Artificial Sequence
  Synthetic
aacacuuccaugaauauguucug

SEQ ID NO: 343263 - RNA, 24 nt, Artificial Sequence
  Synthetic
uaacacuuccaugaauauguucug

SEQ ID NO: 343264 - RNA, 18 nt, Artificial Sequence
  Synthetic
uauuuuauugguguucug

SEQ ID NO: 343265 - RNA, 19 nt, Artificial Sequence
  Synthetic
uuauuuuauugguguucug

SEQ ID NO: 343266 - RNA, 20 nt, Artificial Sequence
  Synthetic
uuuauuuuauugguguucug

SEQ ID NO: 343267 - RNA, 21 nt, Artificial Sequence
  Synthetic
uuuuauuuuauugguguucug

SEQ ID NO: 343268 - RNA, 22 nt, Artificial Sequence
  Synthetic
guuuuauuuuauugguguucug

SEQ ID NO: 343269 - RNA, 23 nt, Artificial Sequence
  Synthetic
aguuuuauuuuauugguguucug

SEQ ID NO: 343270 - RNA, 24 nt, Artificial Sequence
  Synthetic
gaguuuuauuuuauugguguucug

SEQ ID NO: 343271 - RNA, 18 nt, Artificial Sequence
  Synthetic
ugauuacuguguguucug

SEQ ID NO: 343272 - RNA, 19 nt, Artificial Sequence
  Synthetic
uugauuacuguguguucug

SEQ ID NO: 343273 - RNA, 20 nt, Artificial Sequence
  Synthetic
auugauuacuguguguucug

SEQ ID NO: 343274 - RNA, 21 nt, Artificial Sequence
  Synthetic
cauugauuacuguguguucug

SEQ ID NO: 343275 - RNA, 22 nt, Artificial Sequence
  Synthetic
ccauugauuacuguguguucug

SEQ ID NO: 343276 - RNA, 23 nt, Artificial Sequence
  Synthetic
gccauugauuacuguguguucug

SEQ ID NO: 343277 - RNA, 24 nt, Artificial Sequence
  Synthetic
ugccauugauuacuguguguucug

SEQ ID NO: 343278 - RNA, 18 nt, Artificial Sequence
  Synthetic
accuuggagacauuucug

SEQ ID NO: 343279 - RNA, 19 nt, Artificial Sequence
  Synthetic
aaccuuggagacauuucug

SEQ ID NO: 343280 - RNA, 20 nt, Artificial Sequence
  Synthetic
aaaccuuggagacauuucug

SEQ ID NO: 343281 - RNA, 21 nt, Artificial Sequence
  Synthetic
aaaaccuuggagacauuucug

SEQ ID NO: 343282 - RNA, 22 nt, Artificial Sequence
  Synthetic
gaaaaccuuggagacauuucug

SEQ ID NO: 343283 - RNA, 23 nt, Artificial Sequence
  Synthetic
agaaaaccuuggagacauuucug

SEQ ID NO: 343284 - RNA, 24 nt, Artificial Sequence
  Synthetic
gagaaaaccuuggagacauuucug

SEQ ID NO: 343285 - RNA, 18 nt, Artificial Sequence
  Synthetic
gaauuucaaucauuucug

SEQ ID NO: 343286 - RNA, 19 nt, Artificial Sequence
  Synthetic
ggaauuucaaucauuucug

SEQ ID NO: 343287 - RNA, 20 nt, Artificial Sequence
  Synthetic
aggaauuucaaucauuucug

SEQ ID NO: 343288 - RNA, 21 nt, Artificial Sequence
  Synthetic
aaggaauuucaaucauuucug

SEQ ID NO: 343289 - RNA, 22 nt, Artificial Sequence
  Synthetic
caaggaauuucaaucauuucug

SEQ ID NO: 343290 - RNA, 23 nt, Artificial Sequence
  Synthetic
ucaaggaauuucaaucauuucug

SEQ ID NO: 343291 - RNA, 24 nt, Artificial Sequence
  Synthetic
gucaaggaauuucaaucauuucug

SEQ ID NO: 343292 - RNA, 18 nt, Artificial Sequence
  Synthetic
uuacauaaaauauuucug

SEQ ID NO: 343293 - RNA, 19 nt, Artificial Sequence
  Synthetic
guuacauaaaauauuucug

SEQ ID NO: 343294 - RNA, 20 nt, Artificial Sequence
  Synthetic
uguuacauaaaauauuucug

SEQ ID NO: 343295 - RNA, 21 nt, Artificial Sequence
  Synthetic
uuguuacauaaaauauuucug

SEQ ID NO: 343296 - RNA, 22 nt, Artificial Sequence
  Synthetic
uuuguuacauaaaauauuucug

SEQ ID NO: 343297 - RNA, 23 nt, Artificial Sequence
  Synthetic
auuuguuacauaaaauauuucug

SEQ ID NO: 343298 - RNA, 24 nt, Artificial Sequence
  Synthetic
cauuuguuacauaaaauauuucug

SEQ ID NO: 343299 - RNA, 18 nt, Artificial Sequence
  Synthetic
ugugacuccaacuuucug

SEQ ID NO: 343300 - RNA, 19 nt, Artificial Sequence
  Synthetic
cugugacuccaacuuucug

SEQ ID NO: 343301 - RNA, 20 nt, Artificial Sequence
  Synthetic
ccugugacuccaacuuucug

SEQ ID NO: 343302 - RNA, 21 nt, Artificial Sequence
  Synthetic
accugugacuccaacuuucug

SEQ ID NO: 343303 - RNA, 22 nt, Artificial Sequence
  Synthetic
caccugugacuccaacuuucug

SEQ ID NO: 343304 - RNA, 23 nt, Artificial Sequence
  Synthetic
ucaccugugacuccaacuuucug

SEQ ID NO: 343305 - RNA, 24 nt, Artificial Sequence
  Synthetic
gucaccugugacuccaacuuucug

SEQ ID NO: 343306 - RNA, 18 nt, Artificial Sequence
  Synthetic
uccuuugcccacuuucug

SEQ ID NO: 343307 - RNA, 19 nt, Artificial Sequence
  Synthetic
auccuuugcccacuuucug

SEQ ID NO: 343308 - RNA, 20 nt, Artificial Sequence
  Synthetic
uauccuuugcccacuuucug

SEQ ID NO: 343309 - RNA, 21 nt, Artificial Sequence
  Synthetic
auauccuuugcccacuuucug

SEQ ID NO: 343310 - RNA, 22 nt, Artificial Sequence
  Synthetic
cauauccuuugcccacuuucug

SEQ ID NO: 343311 - RNA, 23 nt, Artificial Sequence
  Synthetic
ucauauccuuugcccacuuucug

SEQ ID NO: 343312 - RNA, 24 nt, Artificial Sequence
  Synthetic
uucauauccuuugcccacuuucug

SEQ ID NO: 343313 - RNA, 18 nt, Artificial Sequence
  Synthetic
gguacugcagccuuucug

SEQ ID NO: 343314 - RNA, 19 nt, Artificial Sequence
  Synthetic
ugguacugcagccuuucug

SEQ ID NO: 343315 - RNA, 20 nt, Artificial Sequence
  Synthetic
augguacugcagccuuucug

SEQ ID NO: 343316 - RNA, 21 nt, Artificial Sequence
  Synthetic
aaugguacugcagccuuucug

SEQ ID NO: 343317 - RNA, 22 nt, Artificial Sequence
  Synthetic
aaaugguacugcagccuuucug

SEQ ID NO: 343318 - RNA, 23 nt, Artificial Sequence
  Synthetic
gaaaugguacugcagccuuucug

SEQ ID NO: 343319 - RNA, 24 nt, Artificial Sequence
  Synthetic
agaaaugguacugcagccuuucug

SEQ ID NO: 343320 - RNA, 18 nt, Artificial Sequence
  Synthetic
ugagugguuugcuuucug

SEQ ID NO: 343321 - RNA, 19 nt, Artificial Sequence
  Synthetic
gugagugguuugcuuucug

SEQ ID NO: 343322 - RNA, 20 nt, Artificial Sequence
  Synthetic
agugagugguuugcuuucug

SEQ ID NO: 343323 - RNA, 21 nt, Artificial Sequence
  Synthetic
gagugagugguuugcuuucug

SEQ ID NO: 343324 - RNA, 22 nt, Artificial Sequence
  Synthetic
ugagugagugguuugcuuucug

SEQ ID NO: 343325 - RNA, 23 nt, Artificial Sequence
  Synthetic
gugagugagugguuugcuuucug

SEQ ID NO: 343326 - RNA, 24 nt, Artificial Sequence
  Synthetic
cgugagugagugguuugcuuucug

SEQ ID NO: 343327 - RNA, 18 nt, Artificial Sequence
  Synthetic
uuuggagcacucuuucug

SEQ ID NO: 343328 - RNA, 19 nt, Artificial Sequence
  Synthetic
auuuggagcacucuuucug

SEQ ID NO: 343329 - RNA, 20 nt, Artificial Sequence
  Synthetic
gauuuggagcacucuuucug

SEQ ID NO: 343330 - RNA, 21 nt, Artificial Sequence
  Synthetic
agauuuggagcacucuuucug

SEQ ID NO: 343331 - RNA, 22 nt, Artificial Sequence
  Synthetic
aagauuuggagcacucuuucug

SEQ ID NO: 343332 - RNA, 23 nt, Artificial Sequence
  Synthetic
aaagauuuggagcacucuuucug

SEQ ID NO: 343333 - RNA, 24 nt, Artificial Sequence
  Synthetic
uaaagauuuggagcacucuuucug

SEQ ID NO: 343334 - RNA, 18 nt, Artificial Sequence
  Synthetic
gugcuuagugaguuucug

SEQ ID NO: 343335 - RNA, 19 nt, Artificial Sequence
  Synthetic
ggugcuuagugaguuucug

SEQ ID NO: 343336 - RNA, 20 nt, Artificial Sequence
  Synthetic
uggugcuuagugaguuucug

SEQ ID NO: 343337 - RNA, 21 nt, Artificial Sequence
  Synthetic
guggugcuuagugaguuucug

SEQ ID NO: 343338 - RNA, 22 nt, Artificial Sequence
  Synthetic
aguggugcuuagugaguuucug

SEQ ID NO: 343339 - RNA, 23 nt, Artificial Sequence
  Synthetic
aaguggugcuuagugaguuucug

SEQ ID NO: 343340 - RNA, 24 nt, Artificial Sequence
  Synthetic
aaaguggugcuuagugaguuucug

SEQ ID NO: 343341 - RNA, 18 nt, Artificial Sequence
  Synthetic
cccuguuuuuaguuucug

SEQ ID NO: 343342 - RNA, 19 nt, Artificial Sequence
  Synthetic
gcccuguuuuuaguuucug

SEQ ID NO: 343343 - RNA, 20 nt, Artificial Sequence
  Synthetic
agcccuguuuuuaguuucug

SEQ ID NO: 343344 - RNA, 21 nt, Artificial Sequence
  Synthetic
uagcccuguuuuuaguuucug

SEQ ID NO: 343345 - RNA, 22 nt, Artificial Sequence
  Synthetic
guagcccuguuuuuaguuucug

SEQ ID NO: 343346 - RNA, 23 nt, Artificial Sequence
  Synthetic
gguagcccuguuuuuaguuucug

SEQ ID NO: 343347 - RNA, 24 nt, Artificial Sequence
  Synthetic
ugguagcccuguuuuuaguuucug

SEQ ID NO: 343348 - RNA, 18 nt, Artificial Sequence
  Synthetic
uggcuuguaggguuucug

SEQ ID NO: 343349 - RNA, 19 nt, Artificial Sequence
  Synthetic
cuggcuuguaggguuucug

SEQ ID NO: 343350 - RNA, 20 nt, Artificial Sequence
  Synthetic
ucuggcuuguaggguuucug

SEQ ID NO: 343351 - RNA, 21 nt, Artificial Sequence
  Synthetic
uucuggcuuguaggguuucug

SEQ ID NO: 343352 - RNA, 22 nt, Artificial Sequence
  Synthetic
cuucuggcuuguaggguuucug

SEQ ID NO: 343353 - RNA, 23 nt, Artificial Sequence
  Synthetic
ucuucuggcuuguaggguuucug

SEQ ID NO: 343354 - RNA, 24 nt, Artificial Sequence
  Synthetic
cucuucuggcuuguaggguuucug

SEQ ID NO: 343355 - RNA, 18 nt, Artificial Sequence
  Synthetic
caaguguuuauguuucug

SEQ ID NO: 343356 - RNA, 19 nt, Artificial Sequence
  Synthetic
ucaaguguuuauguuucug

SEQ ID NO: 343357 - RNA, 20 nt, Artificial Sequence
  Synthetic
uucaaguguuuauguuucug

SEQ ID NO: 343358 - RNA, 21 nt, Artificial Sequence
  Synthetic
guucaaguguuuauguuucug

SEQ ID NO: 343359 - RNA, 22 nt, Artificial Sequence
  Synthetic
uguucaaguguuuauguuucug

SEQ ID NO: 343360 - RNA, 23 nt, Artificial Sequence
  Synthetic
cuguucaaguguuuauguuucug

SEQ ID NO: 343361 - RNA, 24 nt, Artificial Sequence
  Synthetic
ucuguucaaguguuuauguuucug

SEQ ID NO: 343362 - RNA, 18 nt, Artificial Sequence
  Synthetic
cagcaaggccuguuucug

SEQ ID NO: 343363 - RNA, 19 nt, Artificial Sequence
  Synthetic
acagcaaggccuguuucug

SEQ ID NO: 343364 - RNA, 20 nt, Artificial Sequence
  Synthetic
cacagcaaggccuguuucug

SEQ ID NO: 343365 - RNA, 21 nt, Artificial Sequence
  Synthetic
ccacagcaaggccuguuucug

SEQ ID NO: 343366 - RNA, 22 nt, Artificial Sequence
  Synthetic
accacagcaaggccuguuucug

SEQ ID NO: 343367 - RNA, 23 nt, Artificial Sequence
  Synthetic
gaccacagcaaggccuguuucug

SEQ ID NO: 343368 - RNA, 24 nt, Artificial Sequence
  Synthetic
ugaccacagcaaggccuguuucug

SEQ ID NO: 343369 - RNA, 18 nt, Artificial Sequence
  Synthetic
uuuaugaggcuguuucug

SEQ ID NO: 343370 - RNA, 19 nt, Artificial Sequence
  Synthetic
guuuaugaggcuguuucug

SEQ ID NO: 343371 - RNA, 20 nt, Artificial Sequence
  Synthetic
uguuuaugaggcuguuucug

SEQ ID NO: 343372 - RNA, 21 nt, Artificial Sequence
  Synthetic
guguuuaugaggcuguuucug

SEQ ID NO: 343373 - RNA, 22 nt, Artificial Sequence
  Synthetic
uguguuuaugaggcuguuucug

SEQ ID NO: 343374 - RNA, 23 nt, Artificial Sequence
  Synthetic
guguguuuaugaggcuguuucug

SEQ ID NO: 343375 - RNA, 24 nt, Artificial Sequence
  Synthetic
gguguguuuaugaggcuguuucug

SEQ ID NO: 343376 - RNA, 18 nt, Artificial Sequence
  Synthetic
uagcaacaucuguuucug

SEQ ID NO: 343377 - RNA, 19 nt, Artificial Sequence
  Synthetic
auagcaacaucuguuucug

SEQ ID NO: 343378 - RNA, 20 nt, Artificial Sequence
  Synthetic
cauagcaacaucuguuucug

SEQ ID NO: 343379 - RNA, 21 nt, Artificial Sequence
  Synthetic
gcauagcaacaucuguuucug

SEQ ID NO: 343380 - RNA, 22 nt, Artificial Sequence
  Synthetic
agcauagcaacaucuguuucug

SEQ ID NO: 343381 - RNA, 23 nt, Artificial Sequence
  Synthetic
aagcauagcaacaucuguuucug

SEQ ID NO: 343382 - RNA, 24 nt, Artificial Sequence
  Synthetic
gaagcauagcaacaucuguuucug

SEQ ID NO: 343383 - RNA, 18 nt, Artificial Sequence
  Synthetic
uaguaaccucuguuucug

SEQ ID NO: 343384 - RNA, 19 nt, Artificial Sequence
  Synthetic
auaguaaccucuguuucug

SEQ ID NO: 343385 - RNA, 20 nt, Artificial Sequence
  Synthetic
aauaguaaccucuguuucug

SEQ ID NO: 343386 - RNA, 21 nt, Artificial Sequence
  Synthetic
gaauaguaaccucuguuucug

SEQ ID NO: 343387 - RNA, 22 nt, Artificial Sequence
  Synthetic
agaauaguaaccucuguuucug

SEQ ID NO: 343388 - RNA, 23 nt, Artificial Sequence
  Synthetic
aagaauaguaaccucuguuucug

SEQ ID NO: 343389 - RNA, 24 nt, Artificial Sequence
  Synthetic
aaagaauaguaaccucuguuucug

SEQ ID NO: 343390 - RNA, 18 nt, Artificial Sequence
  Synthetic
gaggcauuucuguuucug

SEQ ID NO: 343391 - RNA, 19 nt, Artificial Sequence
  Synthetic
ugaggcauuucuguuucug

SEQ ID NO: 343392 - RNA, 20 nt, Artificial Sequence
  Synthetic
cugaggcauuucuguuucug

SEQ ID NO: 343393 - RNA, 21 nt, Artificial Sequence
  Synthetic
ccugaggcauuucuguuucug

SEQ ID NO: 343394 - RNA, 22 nt, Artificial Sequence
  Synthetic
accugaggcauuucuguuucug

SEQ ID NO: 343395 - RNA, 23 nt, Artificial Sequence
  Synthetic
uaccugaggcauuucuguuucug

SEQ ID NO: 343396 - RNA, 24 nt, Artificial Sequence
  Synthetic
uuaccugaggcauuucuguuucug

SEQ ID NO: 343397 - RNA, 18 nt, Artificial Sequence
  Synthetic
uacaggcagaauuuucug

SEQ ID NO: 343398 - RNA, 19 nt, Artificial Sequence
  Synthetic
guacaggcagaauuuucug

SEQ ID NO: 343399 - RNA, 20 nt, Artificial Sequence
  Synthetic
aguacaggcagaauuuucug

SEQ ID NO: 343400 - RNA, 21 nt, Artificial Sequence
  Synthetic
aaguacaggcagaauuuucug

SEQ ID NO: 343401 - RNA, 22 nt, Artificial Sequence
  Synthetic
gaaguacaggcagaauuuucug

SEQ ID NO: 343402 - RNA, 23 nt, Artificial Sequence
  Synthetic
ugaaguacaggcagaauuuucug

SEQ ID NO: 343403 - RNA, 24 nt, Artificial Sequence
  Synthetic
cugaaguacaggcagaauuuucug

SEQ ID NO: 343404 - RNA, 18 nt, Artificial Sequence
  Synthetic
aggcuuccauauuuucug

SEQ ID NO: 343405 - RNA, 19 nt, Artificial Sequence
  Synthetic
caggcuuccauauuuucug

SEQ ID NO: 343406 - RNA, 20 nt, Artificial Sequence
  Synthetic
ucaggcuuccauauuuucug

SEQ ID NO: 343407 - RNA, 21 nt, Artificial Sequence
  Synthetic
cucaggcuuccauauuuucug

SEQ ID NO: 343408 - RNA, 22 nt, Artificial Sequence
  Synthetic
ucucaggcuuccauauuuucug

SEQ ID NO: 343409 - RNA, 23 nt, Artificial Sequence
  Synthetic
uucucaggcuuccauauuuucug

SEQ ID NO: 343410 - RNA, 24 nt, Artificial Sequence
  Synthetic
guucucaggcuuccauauuuucug

SEQ ID NO: 343411 - RNA, 18 nt, Artificial Sequence
  Synthetic
uacuuuuuguauuuucug

SEQ ID NO: 343412 - RNA, 19 nt, Artificial Sequence
  Synthetic
cuacuuuuuguauuuucug

SEQ ID NO: 343413 - RNA, 20 nt, Artificial Sequence
  Synthetic
gcuacuuuuuguauuuucug

SEQ ID NO: 343414 - RNA, 21 nt, Artificial Sequence
  Synthetic
cgcuacuuuuuguauuuucug

SEQ ID NO: 343415 - RNA, 22 nt, Artificial Sequence
  Synthetic
ccgcuacuuuuuguauuuucug

SEQ ID NO: 343416 - RNA, 23 nt, Artificial Sequence
  Synthetic
cccgcuacuuuuuguauuuucug

SEQ ID NO: 343417 - RNA, 24 nt, Artificial Sequence
  Synthetic
ccccgcuacuuuuuguauuuucug

SEQ ID NO: 343418 - RNA, 18 nt, Artificial Sequence
  Synthetic
ccucuuuuugcuuuucug

SEQ ID NO: 343419 - RNA, 19 nt, Artificial Sequence
  Synthetic
uccucuuuuugcuuuucug

SEQ ID NO: 343420 - RNA, 20 nt, Artificial Sequence
  Synthetic
uuccucuuuuugcuuuucug

SEQ ID NO: 343421 - RNA, 21 nt, Artificial Sequence
  Synthetic
auuccucuuuuugcuuuucug

SEQ ID NO: 343422 - RNA, 22 nt, Artificial Sequence
  Synthetic
uauuccucuuuuugcuuuucug

SEQ ID NO: 343423 - RNA, 23 nt, Artificial Sequence
  Synthetic
uuauuccucuuuuugcuuuucug

SEQ ID NO: 343424 - RNA, 24 nt, Artificial Sequence
  Synthetic
auuauuccucuuuuugcuuuucug

SEQ ID NO: 343425 - RNA, 18 nt, Artificial Sequence
  Synthetic
aaaaauuuuuguuuucug

SEQ ID NO: 343426 - RNA, 19 nt, Artificial Sequence
  Synthetic
uaaaaauuuuuguuuucug

SEQ ID NO: 343427 - RNA, 20 nt, Artificial Sequence
  Synthetic
uuaaaaauuuuuguuuucug

SEQ ID NO: 343428 - RNA, 21 nt, Artificial Sequence
  Synthetic
uuuaaaaauuuuuguuuucug

SEQ ID NO: 343429 - RNA, 22 nt, Artificial Sequence
  Synthetic
uuuuaaaaauuuuuguuuucug

SEQ ID NO: 343430 - RNA, 23 nt, Artificial Sequence
  Synthetic
uuuuuaaaaauuuuuguuuucug

SEQ ID NO: 343431 - RNA, 24 nt, Artificial Sequence
  Synthetic
uuuuuuaaaaauuuuuguuuucug

SEQ ID NO: 343432 - RNA, 18 nt, Artificial Sequence
  Synthetic
gcccaaaucauuuuucug

SEQ ID NO: 343433 - RNA, 19 nt, Artificial Sequence
  Synthetic
agcccaaaucauuuuucug

SEQ ID NO: 343434 - RNA, 20 nt, Artificial Sequence
  Synthetic
cagcccaaaucauuuuucug

SEQ ID NO: 343435 - RNA, 21 nt, Artificial Sequence
  Synthetic
ccagcccaaaucauuuuucug

SEQ ID NO: 343436 - RNA, 22 nt, Artificial Sequence
  Synthetic
uccagcccaaaucauuuuucug

SEQ ID NO: 343437 - RNA, 23 nt, Artificial Sequence
  Synthetic
uuccagcccaaaucauuuuucug

SEQ ID NO: 343438 - RNA, 24 nt, Artificial Sequence
  Synthetic
auuccagcccaaaucauuuuucug

SEQ ID NO: 343439 - RNA, 18 nt, Artificial Sequence
  Synthetic
uuagagaugauuuuucug

SEQ ID NO: 343440 - RNA, 19 nt, Artificial Sequence
  Synthetic
guuagagaugauuuuucug

SEQ ID NO: 343441 - RNA, 20 nt, Artificial Sequence
  Synthetic
gguuagagaugauuuuucug

SEQ ID NO: 343442 - RNA, 21 nt, Artificial Sequence
  Synthetic
agguuagagaugauuuuucug

SEQ ID NO: 343443 - RNA, 22 nt, Artificial Sequence
  Synthetic
aagguuagagaugauuuuucug

SEQ ID NO: 343444 - RNA, 23 nt, Artificial Sequence
  Synthetic
aaagguuagagaugauuuuucug

SEQ ID NO: 343445 - RNA, 24 nt, Artificial Sequence
  Synthetic
uaaagguuagagaugauuuuucug

SEQ ID NO: 343446 - RNA, 18 nt, Artificial Sequence
  Synthetic
guauauauauuuuuucug

SEQ ID NO: 343447 - RNA, 19 nt, Artificial Sequence
  Synthetic
uguauauauauuuuuucug

SEQ ID NO: 343448 - RNA, 20 nt, Artificial Sequence
  Synthetic
auguauauauauuuuuucug

SEQ ID NO: 343449 - RNA, 21 nt, Artificial Sequence
  Synthetic
gauguauauauauuuuuucug

SEQ ID NO: 343450 - RNA, 22 nt, Artificial Sequence
  Synthetic
agauguauauauauuuuuucug

SEQ ID NO: 343451 - RNA, 23 nt, Artificial Sequence
  Synthetic
uagauguauauauauuuuuucug

SEQ ID NO: 343452 - RNA, 24 nt, Artificial Sequence
  Synthetic
auagauguauauauauuuuuucug

SEQ ID NO: 343453 - RNA, 18 nt, Artificial Sequence
  Synthetic
aaguuuuacuuuuuucug

SEQ ID NO: 343454 - RNA, 19 nt, Artificial Sequence
  Synthetic
caaguuuuacuuuuuucug

SEQ ID NO: 343455 - RNA, 20 nt, Artificial Sequence
  Synthetic
gcaaguuuuacuuuuuucug

SEQ ID NO: 343456 - RNA, 21 nt, Artificial Sequence
  Synthetic
agcaaguuuuacuuuuuucug

SEQ ID NO: 343457 - RNA, 22 nt, Artificial Sequence
  Synthetic
cagcaaguuuuacuuuuuucug

SEQ ID NO: 343458 - RNA, 23 nt, Artificial Sequence
  Synthetic
gcagcaaguuuuacuuuuuucug

SEQ ID NO: 343459 - RNA, 24 nt, Artificial Sequence
  Synthetic
agcagcaaguuuuacuuuuuucug

SEQ ID NO: 343460 - RNA, 18 nt, Artificial Sequence
  Synthetic
uggguauaaaaaaaagug

SEQ ID NO: 343461 - RNA, 19 nt, Artificial Sequence
  Synthetic
auggguauaaaaaaaagug

SEQ ID NO: 343462 - RNA, 20 nt, Artificial Sequence
  Synthetic
gauggguauaaaaaaaagug

SEQ ID NO: 343463 - RNA, 21 nt, Artificial Sequence
  Synthetic
ggauggguauaaaaaaaagug

SEQ ID NO: 343464 - RNA, 22 nt, Artificial Sequence
  Synthetic
uggauggguauaaaaaaaagug

SEQ ID NO: 343465 - RNA, 23 nt, Artificial Sequence
  Synthetic
cuggauggguauaaaaaaaagug

SEQ ID NO: 343466 - RNA, 24 nt, Artificial Sequence
  Synthetic
acuggauggguauaaaaaaaagug

SEQ ID NO: 343467 - RNA, 18 nt, Artificial Sequence
  Synthetic
caaccccaucaaaaagug

SEQ ID NO: 343468 - RNA, 19 nt, Artificial Sequence
  Synthetic
acaaccccaucaaaaagug

SEQ ID NO: 343469 - RNA, 20 nt, Artificial Sequence
  Synthetic
aacaaccccaucaaaaagug

SEQ ID NO: 343470 - RNA, 21 nt, Artificial Sequence
  Synthetic
aaacaaccccaucaaaaagug

SEQ ID NO: 343471 - RNA, 22 nt, Artificial Sequence
  Synthetic
caaacaaccccaucaaaaagug

SEQ ID NO: 343472 - RNA, 23 nt, Artificial Sequence
  Synthetic
acaaacaaccccaucaaaaagug

SEQ ID NO: 343473 - RNA, 24 nt, Artificial Sequence
  Synthetic
aacaaacaaccccaucaaaaagug

SEQ ID NO: 343474 - RNA, 18 nt, Artificial Sequence
  Synthetic
uucuuuuaagaaaaagug

SEQ ID NO: 343475 - RNA, 19 nt, Artificial Sequence
  Synthetic
uuucuuuuaagaaaaagug

SEQ ID NO: 343476 - RNA, 20 nt, Artificial Sequence
  Synthetic
uuuucuuuuaagaaaaagug

SEQ ID NO: 343477 - RNA, 21 nt, Artificial Sequence
  Synthetic
uuuuucuuuuaagaaaaagug

SEQ ID NO: 343478 - RNA, 22 nt, Artificial Sequence
  Synthetic
auuuuucuuuuaagaaaaagug

SEQ ID NO: 343479 - RNA, 23 nt, Artificial Sequence
  Synthetic
uauuuuucuuuuaagaaaaagug

SEQ ID NO: 343480 - RNA, 24 nt, Artificial Sequence
  Synthetic
uuauuuuucuuuuaagaaaaagug

SEQ ID NO: 343481 - RNA, 18 nt, Artificial Sequence
  Synthetic
uuuugagaauaaaaagug

SEQ ID NO: 343482 - RNA, 19 nt, Artificial Sequence
  Synthetic
auuuugagaauaaaaagug

SEQ ID NO: 343483 - RNA, 20 nt, Artificial Sequence
  Synthetic
uauuuugagaauaaaaagug

SEQ ID NO: 343484 - RNA, 21 nt, Artificial Sequence
  Synthetic
uuauuuugagaauaaaaagug

SEQ ID NO: 343485 - RNA, 22 nt, Artificial Sequence
  Synthetic
uuuauuuugagaauaaaaagug

SEQ ID NO: 343486 - RNA, 23 nt, Artificial Sequence
  Synthetic
auuuauuuugagaauaaaaagug

SEQ ID NO: 343487 - RNA, 24 nt, Artificial Sequence
  Synthetic
uauuuauuuugagaauaaaaagug

SEQ ID NO: 343488 - RNA, 18 nt, Artificial Sequence
  Synthetic
agugaucacuaaaaagug

SEQ ID NO: 343489 - RNA, 19 nt, Artificial Sequence
  Synthetic
aagugaucacuaaaaagug

SEQ ID NO: 343490 - RNA, 20 nt, Artificial Sequence
  Synthetic
aaagugaucacuaaaaagug

SEQ ID NO: 343491 - RNA, 21 nt, Artificial Sequence
  Synthetic
gaaagugaucacuaaaaagug

SEQ ID NO: 343492 - RNA, 22 nt, Artificial Sequence
  Synthetic
agaaagugaucacuaaaaagug

SEQ ID NO: 343493 - RNA, 23 nt, Artificial Sequence
  Synthetic
cagaaagugaucacuaaaaagug

SEQ ID NO: 343494 - RNA, 24 nt, Artificial Sequence
  Synthetic
ccagaaagugaucacuaaaaagug

SEQ ID NO: 343495 - RNA, 18 nt, Artificial Sequence
  Synthetic
cucucuucuuaaaaagug

SEQ ID NO: 343496 - RNA, 19 nt, Artificial Sequence
  Synthetic
acucucuucuuaaaaagug

SEQ ID NO: 343497 - RNA, 20 nt, Artificial Sequence
  Synthetic
aacucucuucuuaaaaagug

SEQ ID NO: 343498 - RNA, 21 nt, Artificial Sequence
  Synthetic
caacucucuucuuaaaaagug

SEQ ID NO: 343499 - RNA, 22 nt, Artificial Sequence
  Synthetic
ccaacucucuucuuaaaaagug

SEQ ID NO: 343500 - RNA, 23 nt, Artificial Sequence
  Synthetic
gccaacucucuucuuaaaaagug

SEQ ID NO: 343501 - RNA, 24 nt, Artificial Sequence
  Synthetic
ugccaacucucuucuuaaaaagug

SEQ ID NO: 343502 - RNA, 18 nt, Artificial Sequence
  Synthetic
cuuugcuggggaaaagug

SEQ ID NO: 343503 - RNA, 19 nt, Artificial Sequence
  Synthetic
ucuuugcuggggaaaagug

SEQ ID NO: 343504 - RNA, 20 nt, Artificial Sequence
  Synthetic
uucuuugcuggggaaaagug

SEQ ID NO: 343505 - RNA, 21 nt, Artificial Sequence
  Synthetic
guucuuugcuggggaaaagug

SEQ ID NO: 343506 - RNA, 22 nt, Artificial Sequence
  Synthetic
aguucuuugcuggggaaaagug

SEQ ID NO: 343507 - RNA, 23 nt, Artificial Sequence
  Synthetic
aaguucuuugcuggggaaaagug

SEQ ID NO: 343508 - RNA, 24 nt, Artificial Sequence
  Synthetic
uaaguucuuugcuggggaaaagug

SEQ ID NO: 343509 - RNA, 18 nt, Artificial Sequence
  Synthetic
guaauuuauauaaaagug

SEQ ID NO: 343510 - RNA, 19 nt, Artificial Sequence
  Synthetic
aguaauuuauauaaaagug

SEQ ID NO: 343511 - RNA, 20 nt, Artificial Sequence
  Synthetic
gaguaauuuauauaaaagug

SEQ ID NO: 343512 - RNA, 21 nt, Artificial Sequence
  Synthetic
ugaguaauuuauauaaaagug

SEQ ID NO: 343513 - RNA, 22 nt, Artificial Sequence
  Synthetic
cugaguaauuuauauaaaagug

SEQ ID NO: 343514 - RNA, 23 nt, Artificial Sequence
  Synthetic
ucugaguaauuuauauaaaagug

SEQ ID NO: 343515 - RNA, 24 nt, Artificial Sequence
  Synthetic
cucugaguaauuuauauaaaagug

SEQ ID NO: 343516 - RNA, 18 nt, Artificial Sequence
  Synthetic
acaagagcuaacaaagug

SEQ ID NO: 343517 - RNA, 19 nt, Artificial Sequence
  Synthetic
aacaagagcuaacaaagug

SEQ ID NO: 343518 - RNA, 20 nt, Artificial Sequence
  Synthetic
gaacaagagcuaacaaagug

SEQ ID NO: 343519 - RNA, 21 nt, Artificial Sequence
  Synthetic
ugaacaagagcuaacaaagug

SEQ ID NO: 343520 - RNA, 22 nt, Artificial Sequence
  Synthetic
gugaacaagagcuaacaaagug

SEQ ID NO: 343521 - RNA, 23 nt, Artificial Sequence
  Synthetic
agugaacaagagcuaacaaagug

SEQ ID NO: 343522 - RNA, 24 nt, Artificial Sequence
  Synthetic
uagugaacaagagcuaacaaagug

SEQ ID NO: 343523 - RNA, 18 nt, Artificial Sequence
  Synthetic
cucggccuccccaaagug

SEQ ID NO: 343524 - RNA, 19 nt, Artificial Sequence
  Synthetic
ccucggccuccccaaagug

SEQ ID NO: 343525 - RNA, 20 nt, Artificial Sequence
  Synthetic
gccucggccuccccaaagug

SEQ ID NO: 343526 - RNA, 21 nt, Artificial Sequence
  Synthetic
cgccucggccuccccaaagug

SEQ ID NO: 343527 - RNA, 22 nt, Artificial Sequence
  Synthetic
ccgccucggccuccccaaagug

SEQ ID NO: 343528 - RNA, 23 nt, Artificial Sequence
  Synthetic
cccgccucggccuccccaaagug

SEQ ID NO: 343529 - RNA, 24 nt, Artificial Sequence
  Synthetic
gcccgccucggccuccccaaagug

SEQ ID NO: 343530 - RNA, 18 nt, Artificial Sequence
  Synthetic
acucagccucccaaagug

SEQ ID NO: 343531 - RNA, 19 nt, Artificial Sequence
  Synthetic
gacucagccucccaaagug

SEQ ID NO: 343532 - RNA, 20 nt, Artificial Sequence
  Synthetic
cgacucagccucccaaagug

SEQ ID NO: 343533 - RNA, 21 nt, Artificial Sequence
  Synthetic
ccgacucagccucccaaagug

SEQ ID NO: 343534 - RNA, 22 nt, Artificial Sequence
  Synthetic
cccgacucagccucccaaagug

SEQ ID NO: 343535 - RNA, 23 nt, Artificial Sequence
  Synthetic
acccgacucagccucccaaagug

SEQ ID NO: 343536 - RNA, 24 nt, Artificial Sequence
  Synthetic
cacccgacucagccucccaaagug

SEQ ID NO: 343537 - RNA, 18 nt, Artificial Sequence
  Synthetic
ccucagccucccaaagug

SEQ ID NO: 343538 - RNA, 21 nt, Artificial Sequence
  Synthetic
ccaccucagccucccaaagug

SEQ ID NO: 343539 - RNA, 22 nt, Artificial Sequence
  Synthetic
cccaccucagccucccaaagug

SEQ ID NO: 343540 - RNA, 23 nt, Artificial Sequence
  Synthetic
gcccaccucagccucccaaagug

SEQ ID NO: 343541 - RNA, 24 nt, Artificial Sequence
  Synthetic
ugcccaccucagccucccaaagug

SEQ ID NO: 343542 - RNA, 22 nt, Artificial Sequence
  Synthetic
uccaccucagccucccaaagug

SEQ ID NO: 343543 - RNA, 23 nt, Artificial Sequence
  Synthetic
auccaccucagccucccaaagug

SEQ ID NO: 343544 - RNA, 24 nt, Artificial Sequence
  Synthetic
cauccaccucagccucccaaagug

SEQ ID NO: 343545 - RNA, 19 nt, Artificial Sequence
  Synthetic
gccucagccucccaaagug

SEQ ID NO: 343546 - RNA, 20 nt, Artificial Sequence
  Synthetic
cgccucagccucccaaagug

SEQ ID NO: 343547 - RNA, 21 nt, Artificial Sequence
  Synthetic
ccgccucagccucccaaagug

SEQ ID NO: 343548 - RNA, 22 nt, Artificial Sequence
  Synthetic
cccgccucagccucccaaagug

SEQ ID NO: 343549 - RNA, 23 nt, Artificial Sequence
  Synthetic
acccgccucagccucccaaagug

SEQ ID NO: 343550 - RNA, 24 nt, Artificial Sequence
  Synthetic
cacccgccucagccucccaaagug

SEQ ID NO: 343551 - RNA, 21 nt, Artificial Sequence
  Synthetic
cugccucagccucccaaagug

SEQ ID NO: 343552 - RNA, 22 nt, Artificial Sequence
  Synthetic
ccugccucagccucccaaagug

SEQ ID NO: 343553 - RNA, 23 nt, Artificial Sequence
  Synthetic
gccugccucagccucccaaagug

SEQ ID NO: 343554 - RNA, 24 nt, Artificial Sequence
  Synthetic
ugccugccucagccucccaaagug

SEQ ID NO: 343555 - RNA, 23 nt, Artificial Sequence
  Synthetic
uccugccucagccucccaaagug

SEQ ID NO: 343556 - RNA, 24 nt, Artificial Sequence
  Synthetic
cuccugccucagccucccaaagug

SEQ ID NO: 343557 - RNA, 18 nt, Artificial Sequence
  Synthetic
ucucagccucccaaagug

SEQ ID NO: 343558 - RNA, 19 nt, Artificial Sequence
  Synthetic
gucucagccucccaaagug

SEQ ID NO: 343559 - RNA, 20 nt, Artificial Sequence
  Synthetic
ugucucagccucccaaagug

SEQ ID NO: 343560 - RNA, 21 nt, Artificial Sequence
  Synthetic
cugucucagccucccaaagug

SEQ ID NO: 343561 - RNA, 22 nt, Artificial Sequence
  Synthetic
ccugucucagccucccaaagug

SEQ ID NO: 343562 - RNA, 23 nt, Artificial Sequence
  Synthetic
gccugucucagccucccaaagug

SEQ ID NO: 343563 - RNA, 24 nt, Artificial Sequence
  Synthetic
ugccugucucagccucccaaagug

SEQ ID NO: 343564 - RNA, 19 nt, Artificial Sequence
  Synthetic
acuucagccucccaaagug

SEQ ID NO: 343565 - RNA, 20 nt, Artificial Sequence
  Synthetic
cacuucagccucccaaagug

SEQ ID NO: 343566 - RNA, 21 nt, Artificial Sequence
  Synthetic
ccacuucagccucccaaagug

SEQ ID NO: 343567 - RNA, 22 nt, Artificial Sequence
  Synthetic
cccacuucagccucccaaagug

SEQ ID NO: 343568 - RNA, 23 nt, Artificial Sequence
  Synthetic
gcccacuucagccucccaaagug

SEQ ID NO: 343569 - RNA, 24 nt, Artificial Sequence
  Synthetic
cgcccacuucagccucccaaagug

SEQ ID NO: 343570 - RNA, 18 nt, Artificial Sequence
  Synthetic
ccacggccucccaaagug

SEQ ID NO: 343571 - RNA, 19 nt, Artificial Sequence
  Synthetic
uccacggccucccaaagug

SEQ ID NO: 343572 - RNA, 20 nt, Artificial Sequence
  Synthetic
cuccacggccucccaaagug

SEQ ID NO: 343573 - RNA, 21 nt, Artificial Sequence
  Synthetic
ccuccacggccucccaaagug

SEQ ID NO: 343574 - RNA, 22 nt, Artificial Sequence
  Synthetic
cccuccacggccucccaaagug

SEQ ID NO: 343575 - RNA, 23 nt, Artificial Sequence
  Synthetic
gcccuccacggccucccaaagug

SEQ ID NO: 343576 - RNA, 24 nt, Artificial Sequence
  Synthetic
ugcccuccacggccucccaaagug

SEQ ID NO: 343577 - RNA, 18 nt, Artificial Sequence
  Synthetic
acucggccucccaaagug

SEQ ID NO: 343578 - RNA, 19 nt, Artificial Sequence
  Synthetic
uacucggccucccaaagug

SEQ ID NO: 343579 - RNA, 20 nt, Artificial Sequence
  Synthetic
cuacucggccucccaaagug

SEQ ID NO: 343580 - RNA, 21 nt, Artificial Sequence
  Synthetic
ccuacucggccucccaaagug

SEQ ID NO: 343581 - RNA, 22 nt, Artificial Sequence
  Synthetic
cccuacucggccucccaaagug

SEQ ID NO: 343582 - RNA, 23 nt, Artificial Sequence
  Synthetic
gcccuacucggccucccaaagug

SEQ ID NO: 343583 - RNA, 24 nt, Artificial Sequence
  Synthetic
ugcccuacucggccucccaaagug

SEQ ID NO: 343584 - RNA, 18 nt, Artificial Sequence
  Synthetic
ccucggccucccaaagug

SEQ ID NO: 343585 - RNA, 19 nt, Artificial Sequence
  Synthetic
accucggccucccaaagug

SEQ ID NO: 343586 - RNA, 20 nt, Artificial Sequence
  Synthetic
caccucggccucccaaagug

SEQ ID NO: 343587 - RNA, 21 nt, Artificial Sequence
  Synthetic
ucaccucggccucccaaagug

SEQ ID NO: 343588 - RNA, 22 nt, Artificial Sequence
  Synthetic
uucaccucggccucccaaagug

SEQ ID NO: 343589 - RNA, 23 nt, Artificial Sequence
  Synthetic
guucaccucggccucccaaagug

SEQ ID NO: 343590 - RNA, 24 nt, Artificial Sequence
  Synthetic
cguucaccucggccucccaaagug

SEQ ID NO: 343591 - RNA, 20 nt, Artificial Sequence
  Synthetic
uaccucggccucccaaagug

SEQ ID NO: 343592 - RNA, 21 nt, Artificial Sequence
  Synthetic
cuaccucggccucccaaagug

SEQ ID NO: 343593 - RNA, 22 nt, Artificial Sequence
  Synthetic
ccuaccucggccucccaaagug

SEQ ID NO: 343594 - RNA, 23 nt, Artificial Sequence
  Synthetic
accuaccucggccucccaaagug

SEQ ID NO: 343595 - RNA, 24 nt, Artificial Sequence
  Synthetic
caccuaccucggccucccaaagug

SEQ ID NO: 343596 - RNA, 19 nt, Artificial Sequence
  Synthetic
gccucggccucccaaagug

SEQ ID NO: 343597 - RNA, 20 nt, Artificial Sequence
  Synthetic
cgccucggccucccaaagug

SEQ ID NO: 343598 - RNA, 23 nt, Artificial Sequence
  Synthetic
acccgccucggccucccaaagug

SEQ ID NO: 343599 - RNA, 24 nt, Artificial Sequence
  Synthetic
cacccgccucggccucccaaagug

SEQ ID NO: 343600 - RNA, 20 nt, Artificial Sequence
  Synthetic
ugccucggccucccaaagug

SEQ ID NO: 343601 - RNA, 18 nt, Artificial Sequence
  Synthetic
ucucggccucccaaagug

SEQ ID NO: 343602 - RNA, 19 nt, Artificial Sequence
  Synthetic
gucucggccucccaaagug

SEQ ID NO: 343603 - RNA, 20 nt, Artificial Sequence
  Synthetic
cgucucggccucccaaagug

SEQ ID NO: 343604 - RNA, 21 nt, Artificial Sequence
  Synthetic
ccgucucggccucccaaagug

SEQ ID NO: 343605 - RNA, 22 nt, Artificial Sequence
  Synthetic
cccgucucggccucccaaagug

SEQ ID NO: 343606 - RNA, 23 nt, Artificial Sequence
  Synthetic
gcccgucucggccucccaaagug

SEQ ID NO: 343607 - RNA, 24 nt, Artificial Sequence
  Synthetic
cgcccgucucggccucccaaagug

SEQ ID NO: 343608 - RNA, 18 nt, Artificial Sequence
  Synthetic
cuucggccucccaaagug

SEQ ID NO: 343609 - RNA, 19 nt, Artificial Sequence
  Synthetic
acuucggccucccaaagug

SEQ ID NO: 343610 - RNA, 20 nt, Artificial Sequence
  Synthetic
cacuucggccucccaaagug

SEQ ID NO: 343611 - RNA, 21 nt, Artificial Sequence
  Synthetic
ccacuucggccucccaaagug

SEQ ID NO: 343612 - RNA, 22 nt, Artificial Sequence
  Synthetic
cccacuucggccucccaaagug

SEQ ID NO: 343613 - RNA, 23 nt, Artificial Sequence
  Synthetic
gcccacuucggccucccaaagug

SEQ ID NO: 343614 - RNA, 24 nt, Artificial Sequence
  Synthetic
cgcccacuucggccucccaaagug

SEQ ID NO: 343615 - RNA, 19 nt, Artificial Sequence
  Synthetic
accuuggccucccaaagug

SEQ ID NO: 343616 - RNA, 20 nt, Artificial Sequence
  Synthetic
caccuuggccucccaaagug

SEQ ID NO: 343617 - RNA, 23 nt, Artificial Sequence
  Synthetic
acccaccuuggccucccaaagug

SEQ ID NO: 343618 - RNA, 24 nt, Artificial Sequence
  Synthetic
cacccaccuuggccucccaaagug

SEQ ID NO: 343619 - RNA, 21 nt, Artificial Sequence
  Synthetic
ucaccuuggccucccaaagug

SEQ ID NO: 343620 - RNA, 22 nt, Artificial Sequence
  Synthetic
uucaccuuggccucccaaagug

SEQ ID NO: 343621 - RNA, 23 nt, Artificial Sequence
  Synthetic
guucaccuuggccucccaaagug

SEQ ID NO: 343622 - RNA, 24 nt, Artificial Sequence
  Synthetic
cguucaccuuggccucccaaagug

SEQ ID NO: 343623 - RNA, 20 nt, Artificial Sequence
  Synthetic
ugccuuggccucccaaagug

SEQ ID NO: 343624 - RNA, 23 nt, Artificial Sequence
  Synthetic
accugccuuggccucccaaagug

SEQ ID NO: 343625 - RNA, 24 nt, Artificial Sequence
  Synthetic
caccugccuuggccucccaaagug

SEQ ID NO: 343626 - RNA, 18 nt, Artificial Sequence
  Synthetic
ucuuggccucccaaagug

SEQ ID NO: 343627 - RNA, 19 nt, Artificial Sequence
  Synthetic
gucuuggccucccaaagug

SEQ ID NO: 343628 - RNA, 20 nt, Artificial Sequence
  Synthetic
ugucuuggccucccaaagug

SEQ ID NO: 343629 - RNA, 21 nt, Artificial Sequence
  Synthetic
cugucuuggccucccaaagug

SEQ ID NO: 343630 - RNA, 22 nt, Artificial Sequence
  Synthetic
ccugucuuggccucccaaagug

SEQ ID NO: 343631 - RNA, 23 nt, Artificial Sequence
  Synthetic
gccugucuuggccucccaaagug

SEQ ID NO: 343632 - RNA, 24 nt, Artificial Sequence
  Synthetic
ugccugucuuggccucccaaagug

SEQ ID NO: 343633 - RNA, 18 nt, Artificial Sequence
  Synthetic
cuucugccucccaaagug

SEQ ID NO: 343634 - RNA, 19 nt, Artificial Sequence
  Synthetic
acuucugccucccaaagug

SEQ ID NO: 343635 - RNA, 20 nt, Artificial Sequence
  Synthetic
cacuucugccucccaaagug

SEQ ID NO: 343636 - RNA, 21 nt, Artificial Sequence
  Synthetic
ccacuucugccucccaaagug

SEQ ID NO: 343637 - RNA, 22 nt, Artificial Sequence
  Synthetic
cccacuucugccucccaaagug

SEQ ID NO: 343638 - RNA, 23 nt, Artificial Sequence
  Synthetic
acccacuucugccucccaaagug

SEQ ID NO: 343639 - RNA, 24 nt, Artificial Sequence
  Synthetic
cacccacuucugccucccaaagug

SEQ ID NO: 343640 - RNA, 18 nt, Artificial Sequence
  Synthetic
ccucggccuuccaaagug

SEQ ID NO: 343641 - RNA, 19 nt, Artificial Sequence
  Synthetic
gccucggccuuccaaagug

SEQ ID NO: 343642 - RNA, 20 nt, Artificial Sequence
  Synthetic
cgccucggccuuccaaagug

SEQ ID NO: 343643 - RNA, 21 nt, Artificial Sequence
  Synthetic
ccgccucggccuuccaaagug

SEQ ID NO: 343644 - RNA, 22 nt, Artificial Sequence
  Synthetic
cccgccucggccuuccaaagug

SEQ ID NO: 343645 - RNA, 23 nt, Artificial Sequence
  Synthetic
gcccgccucggccuuccaaagug

SEQ ID NO: 343646 - RNA, 24 nt, Artificial Sequence
  Synthetic
cgcccgccucggccuuccaaagug

SEQ ID NO: 343647 - RNA, 18 nt, Artificial Sequence
  Synthetic
gaauugaugaucaaagug

SEQ ID NO: 343648 - RNA, 19 nt, Artificial Sequence
  Synthetic
agaauugaugaucaaagug

SEQ ID NO: 343649 - RNA, 20 nt, Artificial Sequence
  Synthetic
aagaauugaugaucaaagug

SEQ ID NO: 343650 - RNA, 21 nt, Artificial Sequence
  Synthetic
caagaauugaugaucaaagug

SEQ ID NO: 343651 - RNA, 22 nt, Artificial Sequence
  Synthetic
gcaagaauugaugaucaaagug

SEQ ID NO: 343652 - RNA, 23 nt, Artificial Sequence
  Synthetic
agcaagaauugaugaucaaagug

SEQ ID NO: 343653 - RNA, 24 nt, Artificial Sequence
  Synthetic
aagcaagaauugaugaucaaagug

SEQ ID NO: 343654 - RNA, 18 nt, Artificial Sequence
  Synthetic
ccucagccucucaaagug

SEQ ID NO: 343655 - RNA, 19 nt, Artificial Sequence
  Synthetic
gccucagccucucaaagug

SEQ ID NO: 343656 - RNA, 20 nt, Artificial Sequence
  Synthetic
ugccucagccucucaaagug

SEQ ID NO: 343657 - RNA, 21 nt, Artificial Sequence
  Synthetic
cugccucagccucucaaagug

SEQ ID NO: 343658 - RNA, 22 nt, Artificial Sequence
  Synthetic
ccugccucagccucucaaagug

SEQ ID NO: 343659 - RNA, 23 nt, Artificial Sequence
  Synthetic
gccugccucagccucucaaagug

SEQ ID NO: 343660 - RNA, 24 nt, Artificial Sequence
  Synthetic
cgccugccucagccucucaaagug

SEQ ID NO: 343661 - RNA, 18 nt, Artificial Sequence
  Synthetic
ucuauacuuaagaaagug

SEQ ID NO: 343662 - RNA, 19 nt, Artificial Sequence
  Synthetic
uucuauacuuaagaaagug

SEQ ID NO: 343663 - RNA, 20 nt, Artificial Sequence
  Synthetic
auucuauacuuaagaaagug

SEQ ID NO: 343664 - RNA, 21 nt, Artificial Sequence
  Synthetic
gauucuauacuuaagaaagug

SEQ ID NO: 343665 - RNA, 22 nt, Artificial Sequence
  Synthetic
ugauucuauacuuaagaaagug

SEQ ID NO: 343666 - RNA, 23 nt, Artificial Sequence
  Synthetic
uugauucuauacuuaagaaagug

SEQ ID NO: 343667 - RNA, 24 nt, Artificial Sequence
  Synthetic
guugauucuauacuuaagaaagug

SEQ ID NO: 343668 - RNA, 18 nt, Artificial Sequence
  Synthetic
aaucagugagagaaagug

SEQ ID NO: 343669 - RNA, 19 nt, Artificial Sequence
  Synthetic
aaaucagugagagaaagug

SEQ ID NO: 343670 - RNA, 20 nt, Artificial Sequence
  Synthetic
aaaaucagugagagaaagug

SEQ ID NO: 343671 - RNA, 21 nt, Artificial Sequence
  Synthetic
caaaaucagugagagaaagug

SEQ ID NO: 343672 - RNA, 22 nt, Artificial Sequence
  Synthetic
ucaaaaucagugagagaaagug

SEQ ID NO: 343673 - RNA, 23 nt, Artificial Sequence
  Synthetic
aucaaaaucagugagagaaagug

SEQ ID NO: 343674 - RNA, 24 nt, Artificial Sequence
  Synthetic
caucaaaaucagugagagaaagug

SEQ ID NO: 343675 - RNA, 18 nt, Artificial Sequence
  Synthetic
aaggagaaggagaaagug

SEQ ID NO: 343676 - RNA, 19 nt, Artificial Sequence
  Synthetic
gaaggagaaggagaaagug

SEQ ID NO: 343677 - RNA, 20 nt, Artificial Sequence
  Synthetic
agaaggagaaggagaaagug

SEQ ID NO: 343678 - RNA, 21 nt, Artificial Sequence
  Synthetic
aagaaggagaaggagaaagug

SEQ ID NO: 343679 - RNA, 22 nt, Artificial Sequence
  Synthetic
gaagaaggagaaggagaaagug

SEQ ID NO: 343680 - RNA, 23 nt, Artificial Sequence
  Synthetic
agaagaaggagaaggagaaagug

SEQ ID NO: 343681 - RNA, 24 nt, Artificial Sequence
  Synthetic
aagaagaaggagaaggagaaagug

SEQ ID NO: 343682 - RNA, 18 nt, Artificial Sequence
  Synthetic
uugagaauugagaaagug

SEQ ID NO: 343683 - RNA, 19 nt, Artificial Sequence
  Synthetic
auugagaauugagaaagug

SEQ ID NO: 343684 - RNA, 20 nt, Artificial Sequence
  Synthetic
gauugagaauugagaaagug

SEQ ID NO: 343685 - RNA, 21 nt, Artificial Sequence
  Synthetic
ugauugagaauugagaaagug

SEQ ID NO: 343686 - RNA, 22 nt, Artificial Sequence
  Synthetic
augauugagaauugagaaagug

SEQ ID NO: 343687 - RNA, 23 nt, Artificial Sequence
  Synthetic
caugauugagaauugagaaagug

SEQ ID NO: 343688 - RNA, 24 nt, Artificial Sequence
  Synthetic
gcaugauugagaauugagaaagug

SEQ ID NO: 343689 - RNA, 18 nt, Artificial Sequence
  Synthetic
ccucagcauccgaaagug

SEQ ID NO: 343690 - RNA, 19 nt, Artificial Sequence
  Synthetic
gccucagcauccgaaagug

SEQ ID NO: 343691 - RNA, 20 nt, Artificial Sequence
  Synthetic
agccucagcauccgaaagug

SEQ ID NO: 343692 - RNA, 21 nt, Artificial Sequence
  Synthetic
cagccucagcauccgaaagug

SEQ ID NO: 343693 - RNA, 22 nt, Artificial Sequence
  Synthetic
ucagccucagcauccgaaagug

SEQ ID NO: 343694 - RNA, 23 nt, Artificial Sequence
  Synthetic
gucagccucagcauccgaaagug

SEQ ID NO: 343695 - RNA, 24 nt, Artificial Sequence
  Synthetic
cgucagccucagcauccgaaagug

SEQ ID NO: 343696 - RNA, 18 nt, Artificial Sequence
  Synthetic
ccucagccuccgaaagug

SEQ ID NO: 343697 - RNA, 19 nt, Artificial Sequence
  Synthetic
accucagccuccgaaagug

SEQ ID NO: 343698 - RNA, 20 nt, Artificial Sequence
  Synthetic
caccucagccuccgaaagug

SEQ ID NO: 343699 - RNA, 21 nt, Artificial Sequence
  Synthetic
ucaccucagccuccgaaagug

SEQ ID NO: 343700 - RNA, 22 nt, Artificial Sequence
  Synthetic
cucaccucagccuccgaaagug

SEQ ID NO: 343701 - RNA, 23 nt, Artificial Sequence
  Synthetic
gcucaccucagccuccgaaagug

SEQ ID NO: 343702 - RNA, 24 nt, Artificial Sequence
  Synthetic
ugcucaccucagccuccgaaagug

SEQ ID NO: 343703 - RNA, 18 nt, Artificial Sequence
  Synthetic
aaacaauaaaggaaagug

SEQ ID NO: 343704 - RNA, 19 nt, Artificial Sequence
  Synthetic
uaaacaauaaaggaaagug

SEQ ID NO: 343705 - RNA, 20 nt, Artificial Sequence
  Synthetic
auaaacaauaaaggaaagug

SEQ ID NO: 343706 - RNA, 21 nt, Artificial Sequence
  Synthetic
uauaaacaauaaaggaaagug

SEQ ID NO: 343707 - RNA, 22 nt, Artificial Sequence
  Synthetic
auauaaacaauaaaggaaagug

SEQ ID NO: 343708 - RNA, 23 nt, Artificial Sequence
  Synthetic
cauauaaacaauaaaggaaagug

SEQ ID NO: 343709 - RNA, 24 nt, Artificial Sequence
  Synthetic
ucauauaaacaauaaaggaaagug

SEQ ID NO: 343710 - RNA, 18 nt, Artificial Sequence
  Synthetic
guuuuuaucaugaaagug

SEQ ID NO: 343711 - RNA, 19 nt, Artificial Sequence
  Synthetic
uguuuuuaucaugaaagug

SEQ ID NO: 343712 - RNA, 20 nt, Artificial Sequence
  Synthetic
guguuuuuaucaugaaagug

SEQ ID NO: 343713 - RNA, 21 nt, Artificial Sequence
  Synthetic
uguguuuuuaucaugaaagug

SEQ ID NO: 343714 - RNA, 22 nt, Artificial Sequence
  Synthetic
guguguuuuuaucaugaaagug

SEQ ID NO: 343715 - RNA, 23 nt, Artificial Sequence
  Synthetic
uguguguuuuuaucaugaaagug

SEQ ID NO: 343716 - RNA, 24 nt, Artificial Sequence
  Synthetic
uuguguguuuuuaucaugaaagug

SEQ ID NO: 343717 - RNA, 18 nt, Artificial Sequence
  Synthetic
uccccuacuaugaaagug

SEQ ID NO: 343718 - RNA, 19 nt, Artificial Sequence
  Synthetic
uuccccuacuaugaaagug

SEQ ID NO: 343719 - RNA, 20 nt, Artificial Sequence
  Synthetic
auuccccuacuaugaaagug

SEQ ID NO: 343720 - RNA, 21 nt, Artificial Sequence
  Synthetic
uauuccccuacuaugaaagug

SEQ ID NO: 343721 - RNA, 22 nt, Artificial Sequence
  Synthetic
uuauuccccuacuaugaaagug

SEQ ID NO: 343722 - RNA, 23 nt, Artificial Sequence
  Synthetic
guuauuccccuacuaugaaagug

SEQ ID NO: 343723 - RNA, 24 nt, Artificial Sequence
  Synthetic
aguuauuccccuacuaugaaagug

SEQ ID NO: 343724 - RNA, 18 nt, Artificial Sequence
  Synthetic
uugguguaccugaaagug

SEQ ID NO: 343725 - RNA, 19 nt, Artificial Sequence
  Synthetic
auugguguaccugaaagug

SEQ ID NO: 343726 - RNA, 20 nt, Artificial Sequence
  Synthetic
gauugguguaccugaaagug

SEQ ID NO: 343727 - RNA, 21 nt, Artificial Sequence
  Synthetic
ugauugguguaccugaaagug

SEQ ID NO: 343728 - RNA, 22 nt, Artificial Sequence
  Synthetic
uugauugguguaccugaaagug

SEQ ID NO: 343729 - RNA, 23 nt, Artificial Sequence
  Synthetic
uuugauugguguaccugaaagug

SEQ ID NO: 343730 - RNA, 24 nt, Artificial Sequence
  Synthetic
auuugauugguguaccugaaagug

SEQ ID NO: 343731 - RNA, 18 nt, Artificial Sequence
  Synthetic
uagguauaauugaaagug

SEQ ID NO: 343732 - RNA, 19 nt, Artificial Sequence
  Synthetic
guagguauaauugaaagug

SEQ ID NO: 343733 - RNA, 20 nt, Artificial Sequence
  Synthetic
cguagguauaauugaaagug

SEQ ID NO: 343734 - RNA, 21 nt, Artificial Sequence
  Synthetic
acguagguauaauugaaagug

SEQ ID NO: 343735 - RNA, 22 nt, Artificial Sequence
  Synthetic
gacguagguauaauugaaagug

SEQ ID NO: 343736 - RNA, 23 nt, Artificial Sequence
  Synthetic
agacguagguauaauugaaagug

SEQ ID NO: 343737 - RNA, 24 nt, Artificial Sequence
  Synthetic
uagacguagguauaauugaaagug

SEQ ID NO: 343738 - RNA, 18 nt, Artificial Sequence
  Synthetic
gagcuaagcuugaaagug

SEQ ID NO: 343739 - RNA, 19 nt, Artificial Sequence
  Synthetic
ggagcuaagcuugaaagug

SEQ ID NO: 343740 - RNA, 20 nt, Artificial Sequence
  Synthetic
uggagcuaagcuugaaagug

SEQ ID NO: 343741 - RNA, 21 nt, Artificial Sequence
  Synthetic
uuggagcuaagcuugaaagug

SEQ ID NO: 343742 - RNA, 22 nt, Artificial Sequence
  Synthetic
auuggagcuaagcuugaaagug

SEQ ID NO: 343743 - RNA, 23 nt, Artificial Sequence
  Synthetic
cauuggagcuaagcuugaaagug

SEQ ID NO: 343744 - RNA, 24 nt, Artificial Sequence
  Synthetic
gcauuggagcuaagcuugaaagug

SEQ ID NO: 343745 - RNA, 18 nt, Artificial Sequence
  Synthetic
gccuccaccccuaaagug

SEQ ID NO: 343746 - RNA, 19 nt, Artificial Sequence
  Synthetic
ugccuccaccccuaaagug

SEQ ID NO: 343747 - RNA, 20 nt, Artificial Sequence
  Synthetic
uugccuccaccccuaaagug

SEQ ID NO: 343748 - RNA, 21 nt, Artificial Sequence
  Synthetic
cuugccuccaccccuaaagug

SEQ ID NO: 343749 - RNA, 22 nt, Artificial Sequence
  Synthetic
gcuugccuccaccccuaaagug

SEQ ID NO: 343750 - RNA, 23 nt, Artificial Sequence
  Synthetic
ugcuugccuccaccccuaaagug

SEQ ID NO: 343751 - RNA, 24 nt, Artificial Sequence
  Synthetic
cugcuugccuccaccccuaaagug

SEQ ID NO: 343752 - RNA, 18 nt, Artificial Sequence
  Synthetic
ccucagccuccuaaagug

SEQ ID NO: 343753 - RNA, 19 nt, Artificial Sequence
  Synthetic
accucagccuccuaaagug

SEQ ID NO: 343754 - RNA, 20 nt, Artificial Sequence
  Synthetic
caccucagccuccuaaagug

SEQ ID NO: 343755 - RNA, 21 nt, Artificial Sequence
  Synthetic
ucaccucagccuccuaaagug

SEQ ID NO: 343756 - RNA, 22 nt, Artificial Sequence
  Synthetic
cucaccucagccuccuaaagug

SEQ ID NO: 343757 - RNA, 23 nt, Artificial Sequence
  Synthetic
ucucaccucagccuccuaaagug

SEQ ID NO: 343758 - RNA, 24 nt, Artificial Sequence
  Synthetic
uucucaccucagccuccuaaagug

SEQ ID NO: 343759 - RNA, 18 nt, Artificial Sequence
  Synthetic
uccccaucguguaaagug

SEQ ID NO: 343760 - RNA, 19 nt, Artificial Sequence
  Synthetic
auccccaucguguaaagug

SEQ ID NO: 343761 - RNA, 20 nt, Artificial Sequence
  Synthetic
aauccccaucguguaaagug

SEQ ID NO: 343762 - RNA, 21 nt, Artificial Sequence
  Synthetic
uaauccccaucguguaaagug

SEQ ID NO: 343763 - RNA, 22 nt, Artificial Sequence
  Synthetic
auaauccccaucguguaaagug

SEQ ID NO: 343764 - RNA, 23 nt, Artificial Sequence
  Synthetic
cauaauccccaucguguaaagug

SEQ ID NO: 343765 - RNA, 24 nt, Artificial Sequence
  Synthetic
ucauaauccccaucguguaaagug

SEQ ID NO: 343766 - RNA, 18 nt, Artificial Sequence
  Synthetic
ggaaacuguuuuaaagug

SEQ ID NO: 343767 - RNA, 19 nt, Artificial Sequence
  Synthetic
uggaaacuguuuuaaagug

SEQ ID NO: 343768 - RNA, 20 nt, Artificial Sequence
  Synthetic
cuggaaacuguuuuaaagug

SEQ ID NO: 343769 - RNA, 21 nt, Artificial Sequence
  Synthetic
ccuggaaacuguuuuaaagug

SEQ ID NO: 343770 - RNA, 22 nt, Artificial Sequence
  Synthetic
uccuggaaacuguuuuaaagug

SEQ ID NO: 343771 - RNA, 23 nt, Artificial Sequence
  Synthetic
uuccuggaaacuguuuuaaagug

SEQ ID NO: 343772 - RNA, 24 nt, Artificial Sequence
  Synthetic
auuccuggaaacuguuuuaaagug

SEQ ID NO: 343773 - RNA, 18 nt, Artificial Sequence
  Synthetic
caaagaggaaaacaagug

SEQ ID NO: 343774 - RNA, 19 nt, Artificial Sequence
  Synthetic
acaaagaggaaaacaagug

SEQ ID NO: 343775 - RNA, 20 nt, Artificial Sequence
  Synthetic
aacaaagaggaaaacaagug

SEQ ID NO: 343776 - RNA, 21 nt, Artificial Sequence
  Synthetic
gaacaaagaggaaaacaagug

SEQ ID NO: 343777 - RNA, 22 nt, Artificial Sequence
  Synthetic
agaacaaagaggaaaacaagug

SEQ ID NO: 343778 - RNA, 23 nt, Artificial Sequence
  Synthetic
aagaacaaagaggaaaacaagug

SEQ ID NO: 343779 - RNA, 24 nt, Artificial Sequence
  Synthetic
gaagaacaaagaggaaaacaagug

SEQ ID NO: 343780 - RNA, 18 nt, Artificial Sequence
  Synthetic
uacagacaauaacaagug

SEQ ID NO: 343781 - RNA, 19 nt, Artificial Sequence
  Synthetic
auacagacaauaacaagug

SEQ ID NO: 343782 - RNA, 20 nt, Artificial Sequence
  Synthetic
aauacagacaauaacaagug

SEQ ID NO: 343783 - RNA, 21 nt, Artificial Sequence
  Synthetic
aaauacagacaauaacaagug

SEQ ID NO: 343784 - RNA, 22 nt, Artificial Sequence
  Synthetic
aaaauacagacaauaacaagug

SEQ ID NO: 343785 - RNA, 23 nt, Artificial Sequence
  Synthetic
aaaaauacagacaauaacaagug

SEQ ID NO: 343786 - RNA, 24 nt, Artificial Sequence
  Synthetic
aaaaaauacagacaauaacaagug

SEQ ID NO: 343787 - RNA, 18 nt, Artificial Sequence
  Synthetic
gaggguggaacacaagug

SEQ ID NO: 343788 - RNA, 19 nt, Artificial Sequence
  Synthetic
ggaggguggaacacaagug

SEQ ID NO: 343789 - RNA, 20 nt, Artificial Sequence
  Synthetic
uggaggguggaacacaagug

SEQ ID NO: 343790 - RNA, 21 nt, Artificial Sequence
  Synthetic
cuggaggguggaacacaagug

SEQ ID NO: 343791 - RNA, 22 nt, Artificial Sequence
  Synthetic
acuggaggguggaacacaagug

SEQ ID NO: 343792 - RNA, 23 nt, Artificial Sequence
  Synthetic
uacuggaggguggaacacaagug

SEQ ID NO: 343793 - RNA, 24 nt, Artificial Sequence
  Synthetic
cuacuggaggguggaacacaagug

SEQ ID NO: 343794 - RNA, 18 nt, Artificial Sequence
  Synthetic
uaaaguaaaagacaagug

SEQ ID NO: 343795 - RNA, 19 nt, Artificial Sequence
  Synthetic
guaaaguaaaagacaagug

SEQ ID NO: 343796 - RNA, 20 nt, Artificial Sequence
  Synthetic
aguaaaguaaaagacaagug

SEQ ID NO: 343797 - RNA, 21 nt, Artificial Sequence
  Synthetic
aaguaaaguaaaagacaagug

SEQ ID NO: 343798 - RNA, 22 nt, Artificial Sequence
  Synthetic
gaaguaaaguaaaagacaagug

SEQ ID NO: 343799 - RNA, 23 nt, Artificial Sequence
  Synthetic
agaaguaaaguaaaagacaagug

SEQ ID NO: 343800 - RNA, 24 nt, Artificial Sequence
  Synthetic
aagaaguaaaguaaaagacaagug

SEQ ID NO: 343801 - RNA, 18 nt, Artificial Sequence
  Synthetic
uuaggaagaugacaagug

SEQ ID NO: 343802 - RNA, 19 nt, Artificial Sequence
  Synthetic
cuuaggaagaugacaagug

SEQ ID NO: 343803 - RNA, 20 nt, Artificial Sequence
  Synthetic
ucuuaggaagaugacaagug

SEQ ID NO: 343804 - RNA, 21 nt, Artificial Sequence
  Synthetic
gucuuaggaagaugacaagug

SEQ ID NO: 343805 - RNA, 22 nt, Artificial Sequence
  Synthetic
ggucuuaggaagaugacaagug

SEQ ID NO: 343806 - RNA, 23 nt, Artificial Sequence
  Synthetic
gggucuuaggaagaugacaagug

SEQ ID NO: 343807 - RNA, 24 nt, Artificial Sequence
  Synthetic
agggucuuaggaagaugacaagug

SEQ ID NO: 343808 - RNA, 18 nt, Artificial Sequence
  Synthetic
augacuuaauuacaagug

SEQ ID NO: 343809 - RNA, 19 nt, Artificial Sequence
  Synthetic
aaugacuuaauuacaagug

SEQ ID NO: 343810 - RNA, 20 nt, Artificial Sequence
  Synthetic
aaaugacuuaauuacaagug

SEQ ID NO: 343811 - RNA, 21 nt, Artificial Sequence
  Synthetic
uaaaugacuuaauuacaagug

SEQ ID NO: 343812 - RNA, 22 nt, Artificial Sequence
  Synthetic
auaaaugacuuaauuacaagug

SEQ ID NO: 343813 - RNA, 23 nt, Artificial Sequence
  Synthetic
gauaaaugacuuaauuacaagug

SEQ ID NO: 343814 - RNA, 24 nt, Artificial Sequence
  Synthetic
ggauaaaugacuuaauuacaagug

SEQ ID NO: 343815 - RNA, 18 nt, Artificial Sequence
  Synthetic
aauauacucuaccaagug

SEQ ID NO: 343816 - RNA, 19 nt, Artificial Sequence
  Synthetic
aaauauacucuaccaagug

SEQ ID NO: 343817 - RNA, 20 nt, Artificial Sequence
  Synthetic
aaaauauacucuaccaagug

SEQ ID NO: 343818 - RNA, 21 nt, Artificial Sequence
  Synthetic
aaaaauauacucuaccaagug

SEQ ID NO: 343819 - RNA, 22 nt, Artificial Sequence
  Synthetic
caaaaauauacucuaccaagug

SEQ ID NO: 343820 - RNA, 23 nt, Artificial Sequence
  Synthetic
ucaaaaauauacucuaccaagug

SEQ ID NO: 343821 - RNA, 24 nt, Artificial Sequence
  Synthetic
uucaaaaauauacucuaccaagug

SEQ ID NO: 343822 - RNA, 18 nt, Artificial Sequence
  Synthetic
aaugauauaugccaagug

SEQ ID NO: 343823 - RNA, 19 nt, Artificial Sequence
  Synthetic
aaaugauauaugccaagug

SEQ ID NO: 343824 - RNA, 20 nt, Artificial Sequence
  Synthetic
gaaaugauauaugccaagug

SEQ ID NO: 343825 - RNA, 21 nt, Artificial Sequence
  Synthetic
ugaaaugauauaugccaagug

SEQ ID NO: 343826 - RNA, 22 nt, Artificial Sequence
  Synthetic
augaaaugauauaugccaagug

SEQ ID NO: 343827 - RNA, 23 nt, Artificial Sequence
  Synthetic
aaugaaaugauauaugccaagug

SEQ ID NO: 343828 - RNA, 24 nt, Artificial Sequence
  Synthetic
gaaugaaaugauauaugccaagug

SEQ ID NO: 343829 - RNA, 18 nt, Artificial Sequence
  Synthetic
ucgugagaccuccaagug

SEQ ID NO: 343830 - RNA, 19 nt, Artificial Sequence
  Synthetic
cucgugagaccuccaagug

SEQ ID NO: 343831 - RNA, 20 nt, Artificial Sequence
  Synthetic
ucucgugagaccuccaagug

SEQ ID NO: 343832 - RNA, 21 nt, Artificial Sequence
  Synthetic
gucucgugagaccuccaagug

SEQ ID NO: 343833 - RNA, 22 nt, Artificial Sequence
  Synthetic
agucucgugagaccuccaagug

SEQ ID NO: 343834 - RNA, 23 nt, Artificial Sequence
  Synthetic
aagucucgugagaccuccaagug

SEQ ID NO: 343835 - RNA, 24 nt, Artificial Sequence
  Synthetic
aaagucucgugagaccuccaagug

SEQ ID NO: 343836 - RNA, 18 nt, Artificial Sequence
  Synthetic
ggcacguaaaaucaagug

SEQ ID NO: 343837 - RNA, 19 nt, Artificial Sequence
  Synthetic
gggcacguaaaaucaagug

SEQ ID NO: 343838 - RNA, 20 nt, Artificial Sequence
  Synthetic
ugggcacguaaaaucaagug

SEQ ID NO: 343839 - RNA, 21 nt, Artificial Sequence
  Synthetic
gugggcacguaaaaucaagug

SEQ ID NO: 343840 - RNA, 22 nt, Artificial Sequence
  Synthetic
ggugggcacguaaaaucaagug

SEQ ID NO: 343841 - RNA, 23 nt, Artificial Sequence
  Synthetic
gggugggcacguaaaaucaagug

SEQ ID NO: 343842 - RNA, 24 nt, Artificial Sequence
  Synthetic
agggugggcacguaaaaucaagug

SEQ ID NO: 343843 - RNA, 18 nt, Artificial Sequence
  Synthetic
ccaagugcccuucaagug

SEQ ID NO: 343844 - RNA, 19 nt, Artificial Sequence
  Synthetic
accaagugcccuucaagug

SEQ ID NO: 343845 - RNA, 20 nt, Artificial Sequence
  Synthetic
aaccaagugcccuucaagug

SEQ ID NO: 343846 - RNA, 21 nt, Artificial Sequence
  Synthetic
aaaccaagugcccuucaagug

SEQ ID NO: 343847 - RNA, 22 nt, Artificial Sequence
  Synthetic
aaaaccaagugcccuucaagug

SEQ ID NO: 343848 - RNA, 23 nt, Artificial Sequence
  Synthetic
aaaaaccaagugcccuucaagug

SEQ ID NO: 343849 - RNA, 24 nt, Artificial Sequence
  Synthetic
gaaaaaccaagugcccuucaagug

SEQ ID NO: 343850 - RNA, 18 nt, Artificial Sequence
  Synthetic
ugaaauauguuucaagug

SEQ ID NO: 343851 - RNA, 19 nt, Artificial Sequence
  Synthetic
uugaaauauguuucaagug

SEQ ID NO: 343852 - RNA, 20 nt, Artificial Sequence
  Synthetic
uuugaaauauguuucaagug

SEQ ID NO: 343853 - RNA, 21 nt, Artificial Sequence
  Synthetic
cuuugaaauauguuucaagug

SEQ ID NO: 343854 - RNA, 22 nt, Artificial Sequence
  Synthetic
ucuuugaaauauguuucaagug

SEQ ID NO: 343855 - RNA, 23 nt, Artificial Sequence
  Synthetic
uucuuugaaauauguuucaagug

SEQ ID NO: 343856 - RNA, 24 nt, Artificial Sequence
  Synthetic
uuucuuugaaauauguuucaagug

SEQ ID NO: 343857 - RNA, 18 nt, Artificial Sequence
  Synthetic
uggcagaaaggagaagug

SEQ ID NO: 343858 - RNA, 19 nt, Artificial Sequence
  Synthetic
guggcagaaaggagaagug

SEQ ID NO: 343859 - RNA, 20 nt, Artificial Sequence
  Synthetic
gguggcagaaaggagaagug

SEQ ID NO: 343860 - RNA, 21 nt, Artificial Sequence
  Synthetic
ugguggcagaaaggagaagug

SEQ ID NO: 343861 - RNA, 22 nt, Artificial Sequence
  Synthetic
augguggcagaaaggagaagug

SEQ ID NO: 343862 - RNA, 23 nt, Artificial Sequence
  Synthetic
uaugguggcagaaaggagaagug

SEQ ID NO: 343863 - RNA, 24 nt, Artificial Sequence
  Synthetic
auaugguggcagaaaggagaagug

SEQ ID NO: 343864 - RNA, 18 nt, Artificial Sequence
  Synthetic
uggcaagaaggagaagug

SEQ ID NO: 343865 - RNA, 19 nt, Artificial Sequence
  Synthetic
auggcaagaaggagaagug

SEQ ID NO: 343866 - RNA, 20 nt, Artificial Sequence
  Synthetic
gauggcaagaaggagaagug

SEQ ID NO: 343867 - RNA, 21 nt, Artificial Sequence
  Synthetic
ugauggcaagaaggagaagug

SEQ ID NO: 343868 - RNA, 22 nt, Artificial Sequence
  Synthetic
augauggcaagaaggagaagug

SEQ ID NO: 343869 - RNA, 23 nt, Artificial Sequence
  Synthetic
caugauggcaagaaggagaagug

SEQ ID NO: 343870 - RNA, 24 nt, Artificial Sequence
  Synthetic
acaugauggcaagaaggagaagug

SEQ ID NO: 343871 - RNA, 18 nt, Artificial Sequence
  Synthetic
aaauggaaaugagaagug

SEQ ID NO: 343872 - RNA, 19 nt, Artificial Sequence
  Synthetic
aaaauggaaaugagaagug

SEQ ID NO: 343873 - RNA, 20 nt, Artificial Sequence
  Synthetic
uaaaauggaaaugagaagug

SEQ ID NO: 343874 - RNA, 21 nt, Artificial Sequence
  Synthetic
auaaaauggaaaugagaagug

SEQ ID NO: 343875 - RNA, 22 nt, Artificial Sequence
  Synthetic
uauaaaauggaaaugagaagug

SEQ ID NO: 343876 - RNA, 23 nt, Artificial Sequence
  Synthetic
guauaaaauggaaaugagaagug

SEQ ID NO: 343877 - RNA, 24 nt, Artificial Sequence
  Synthetic
aguauaaaauggaaaugagaagug

SEQ ID NO: 343878 - RNA, 18 nt, Artificial Sequence
  Synthetic
gcuauuuauaaggaagug

SEQ ID NO: 343879 - RNA, 19 nt, Artificial Sequence
  Synthetic
ugcuauuuauaaggaagug

SEQ ID NO: 343880 - RNA, 20 nt, Artificial Sequence
  Synthetic
uugcuauuuauaaggaagug

SEQ ID NO: 343881 - RNA, 21 nt, Artificial Sequence
  Synthetic
guugcuauuuauaaggaagug

SEQ ID NO: 343882 - RNA, 22 nt, Artificial Sequence
  Synthetic
uguugcuauuuauaaggaagug

SEQ ID NO: 343883 - RNA, 23 nt, Artificial Sequence
  Synthetic
uuguugcuauuuauaaggaagug

SEQ ID NO: 343884 - RNA, 24 nt, Artificial Sequence
  Synthetic
auuguugcuauuuauaaggaagug

SEQ ID NO: 343885 - RNA, 18 nt, Artificial Sequence
  Synthetic
aggcacugcuaggaagug

SEQ ID NO: 343886 - RNA, 19 nt, Artificial Sequence
  Synthetic
caggcacugcuaggaagug

SEQ ID NO: 343887 - RNA, 20 nt, Artificial Sequence
  Synthetic
ccaggcacugcuaggaagug

SEQ ID NO: 343888 - RNA, 21 nt, Artificial Sequence
  Synthetic
gccaggcacugcuaggaagug

SEQ ID NO: 343889 - RNA, 22 nt, Artificial Sequence
  Synthetic
ugccaggcacugcuaggaagug

SEQ ID NO: 343890 - RNA, 23 nt, Artificial Sequence
  Synthetic
gugccaggcacugcuaggaagug

SEQ ID NO: 343891 - RNA, 24 nt, Artificial Sequence
  Synthetic
ugugccaggcacugcuaggaagug

SEQ ID NO: 343892 - RNA, 18 nt, Artificial Sequence
  Synthetic
caccacuaauaugaagug

SEQ ID NO: 343893 - RNA, 19 nt, Artificial Sequence
  Synthetic
ccaccacuaauaugaagug

SEQ ID NO: 343894 - RNA, 20 nt, Artificial Sequence
  Synthetic
cccaccacuaauaugaagug

SEQ ID NO: 343895 - RNA, 21 nt, Artificial Sequence
  Synthetic
ccccaccacuaauaugaagug

SEQ ID NO: 343896 - RNA, 22 nt, Artificial Sequence
  Synthetic
accccaccacuaauaugaagug

SEQ ID NO: 343897 - RNA, 23 nt, Artificial Sequence
  Synthetic
aaccccaccacuaauaugaagug

SEQ ID NO: 343898 - RNA, 24 nt, Artificial Sequence
  Synthetic
caaccccaccacuaauaugaagug

SEQ ID NO: 343899 - RNA, 18 nt, Artificial Sequence
  Synthetic
gcauuggagacugaagug

SEQ ID NO: 343900 - RNA, 19 nt, Artificial Sequence
  Synthetic
agcauuggagacugaagug

SEQ ID NO: 343901 - RNA, 20 nt, Artificial Sequence
  Synthetic
aagcauuggagacugaagug

SEQ ID NO: 343902 - RNA, 21 nt, Artificial Sequence
  Synthetic
uaagcauuggagacugaagug

SEQ ID NO: 343903 - RNA, 22 nt, Artificial Sequence
  Synthetic
auaagcauuggagacugaagug

SEQ ID NO: 343904 - RNA, 23 nt, Artificial Sequence
  Synthetic
gauaagcauuggagacugaagug

SEQ ID NO: 343905 - RNA, 24 nt, Artificial Sequence
  Synthetic
ugauaagcauuggagacugaagug

SEQ ID NO: 343906 - RNA, 18 nt, Artificial Sequence
  Synthetic
acuucuuucgcugaagug

SEQ ID NO: 343907 - RNA, 19 nt, Artificial Sequence
  Synthetic
gacuucuuucgcugaagug

SEQ ID NO: 343908 - RNA, 20 nt, Artificial Sequence
  Synthetic
agacuucuuucgcugaagug

SEQ ID NO: 343909 - RNA, 21 nt, Artificial Sequence
  Synthetic
gagacuucuuucgcugaagug

SEQ ID NO: 343910 - RNA, 22 nt, Artificial Sequence
  Synthetic
agagacuucuuucgcugaagug

SEQ ID NO: 343911 - RNA, 23 nt, Artificial Sequence
  Synthetic
cagagacuucuuucgcugaagug

SEQ ID NO: 343912 - RNA, 24 nt, Artificial Sequence
  Synthetic
ucagagacuucuuucgcugaagug

SEQ ID NO: 343913 - RNA, 18 nt, Artificial Sequence
  Synthetic
uuauaacugcaauaagug

SEQ ID NO: 343914 - RNA, 19 nt, Artificial Sequence
  Synthetic
uuuauaacugcaauaagug

SEQ ID NO: 343915 - RNA, 20 nt, Artificial Sequence
  Synthetic
uuuuauaacugcaauaagug

SEQ ID NO: 343916 - RNA, 21 nt, Artificial Sequence
  Synthetic
auuuuauaacugcaauaagug

SEQ ID NO: 343917 - RNA, 22 nt, Artificial Sequence
  Synthetic
uauuuuauaacugcaauaagug

SEQ ID NO: 343918 - RNA, 23 nt, Artificial Sequence
  Synthetic
auauuuuauaacugcaauaagug

SEQ ID NO: 343919 - RNA, 24 nt, Artificial Sequence
  Synthetic
cauauuuuauaacugcaauaagug

SEQ ID NO: 343920 - RNA, 18 nt, Artificial Sequence
  Synthetic
aaggaaauuuaauaagug

SEQ ID NO: 343921 - RNA, 19 nt, Artificial Sequence
  Synthetic
uaaggaaauuuaauaagug

SEQ ID NO: 343922 - RNA, 20 nt, Artificial Sequence
  Synthetic
uuaaggaaauuuaauaagug

SEQ ID NO: 343923 - RNA, 21 nt, Artificial Sequence
  Synthetic
auuaaggaaauuuaauaagug

SEQ ID NO: 343924 - RNA, 22 nt, Artificial Sequence
  Synthetic
cauuaaggaaauuuaauaagug

SEQ ID NO: 343925 - RNA, 23 nt, Artificial Sequence
  Synthetic
acauuaaggaaauuuaauaagug

SEQ ID NO: 343926 - RNA, 24 nt, Artificial Sequence
  Synthetic
gacauuaaggaaauuuaauaagug

SEQ ID NO: 343927 - RNA, 18 nt, Artificial Sequence
  Synthetic
uuauuaaaaagauaagug

SEQ ID NO: 343928 - RNA, 19 nt, Artificial Sequence
  Synthetic
guuauuaaaaagauaagug

SEQ ID NO: 343929 - RNA, 20 nt, Artificial Sequence
  Synthetic
uguuauuaaaaagauaagug

SEQ ID NO: 343930 - RNA, 21 nt, Artificial Sequence
  Synthetic
guguuauuaaaaagauaagug

SEQ ID NO: 343931 - RNA, 22 nt, Artificial Sequence
  Synthetic
aguguuauuaaaaagauaagug

SEQ ID NO: 343932 - RNA, 23 nt, Artificial Sequence
  Synthetic
gaguguuauuaaaaagauaagug

SEQ ID NO: 343933 - RNA, 24 nt, Artificial Sequence
  Synthetic
ugaguguuauuaaaaagauaagug

SEQ ID NO: 343934 - RNA, 18 nt, Artificial Sequence
  Synthetic
ggaguauugguauaagug

SEQ ID NO: 343935 - RNA, 19 nt, Artificial Sequence
  Synthetic
uggaguauugguauaagug

SEQ ID NO: 343936 - RNA, 20 nt, Artificial Sequence
  Synthetic
cuggaguauugguauaagug

SEQ ID NO: 343937 - RNA, 21 nt, Artificial Sequence
  Synthetic
acuggaguauugguauaagug

SEQ ID NO: 343938 - RNA, 22 nt, Artificial Sequence
  Synthetic
aacuggaguauugguauaagug

SEQ ID NO: 343939 - RNA, 23 nt, Artificial Sequence
  Synthetic
aaacuggaguauugguauaagug

SEQ ID NO: 343940 - RNA, 24 nt, Artificial Sequence
  Synthetic
uaaacuggaguauugguauaagug

SEQ ID NO: 343941 - RNA, 18 nt, Artificial Sequence
  Synthetic
ccuuggccucccuaagug

SEQ ID NO: 343942 - RNA, 19 nt, Artificial Sequence
  Synthetic
gccuuggccucccuaagug

SEQ ID NO: 343943 - RNA, 20 nt, Artificial Sequence
  Synthetic
cgccuuggccucccuaagug

SEQ ID NO: 343944 - RNA, 21 nt, Artificial Sequence
  Synthetic
ccgccuuggccucccuaagug

SEQ ID NO: 343945 - RNA, 22 nt, Artificial Sequence
  Synthetic
cccgccuuggccucccuaagug

SEQ ID NO: 343946 - RNA, 23 nt, Artificial Sequence
  Synthetic
acccgccuuggccucccuaagug

SEQ ID NO: 343947 - RNA, 24 nt, Artificial Sequence
  Synthetic
cacccgccuuggccucccuaagug

SEQ ID NO: 343948 - RNA, 18 nt, Artificial Sequence
  Synthetic
aaacuguucuccuaagug

SEQ ID NO: 343949 - RNA, 19 nt, Artificial Sequence
  Synthetic
caaacuguucuccuaagug

SEQ ID NO: 343950 - RNA, 20 nt, Artificial Sequence
  Synthetic
acaaacuguucuccuaagug

SEQ ID NO: 343951 - RNA, 21 nt, Artificial Sequence
  Synthetic
cacaaacuguucuccuaagug

SEQ ID NO: 343952 - RNA, 22 nt, Artificial Sequence
  Synthetic
acacaaacuguucuccuaagug

SEQ ID NO: 343953 - RNA, 23 nt, Artificial Sequence
  Synthetic
uacacaaacuguucuccuaagug

SEQ ID NO: 343954 - RNA, 24 nt, Artificial Sequence
  Synthetic
uuacacaaacuguucuccuaagug

SEQ ID NO: 343955 - RNA, 18 nt, Artificial Sequence
  Synthetic
augagugggagcuaagug

SEQ ID NO: 343956 - RNA, 19 nt, Artificial Sequence
  Synthetic
uaugagugggagcuaagug

SEQ ID NO: 343957 - RNA, 20 nt, Artificial Sequence
  Synthetic
uuaugagugggagcuaagug

SEQ ID NO: 343958 - RNA, 21 nt, Artificial Sequence
  Synthetic
guuaugagugggagcuaagug

SEQ ID NO: 343959 - RNA, 22 nt, Artificial Sequence
  Synthetic
aguuaugagugggagcuaagug

SEQ ID NO: 343960 - RNA, 23 nt, Artificial Sequence
  Synthetic
aaguuaugagugggagcuaagug

SEQ ID NO: 343961 - RNA, 24 nt, Artificial Sequence
  Synthetic
uaaguuaugagugggagcuaagug

SEQ ID NO: 343962 - RNA, 18 nt, Artificial Sequence
  Synthetic
ucaaaaauaugcuaagug

SEQ ID NO: 343963 - RNA, 19 nt, Artificial Sequence
  Synthetic
cucaaaaauaugcuaagug

SEQ ID NO: 343964 - RNA, 20 nt, Artificial Sequence
  Synthetic
ccucaaaaauaugcuaagug

SEQ ID NO: 343965 - RNA, 21 nt, Artificial Sequence
  Synthetic
accucaaaaauaugcuaagug

SEQ ID NO: 343966 - RNA, 22 nt, Artificial Sequence
  Synthetic
aaccucaaaaauaugcuaagug

SEQ ID NO: 343967 - RNA, 23 nt, Artificial Sequence
  Synthetic
gaaccucaaaaauaugcuaagug

SEQ ID NO: 343968 - RNA, 24 nt, Artificial Sequence
  Synthetic
ugaaccucaaaaauaugcuaagug

SEQ ID NO: 343969 - RNA, 18 nt, Artificial Sequence
  Synthetic
caggagagccucuaagug

SEQ ID NO: 343970 - RNA, 19 nt, Artificial Sequence
  Synthetic
gcaggagagccucuaagug

SEQ ID NO: 343971 - RNA, 20 nt, Artificial Sequence
  Synthetic
ggcaggagagccucuaagug

SEQ ID NO: 343972 - RNA, 21 nt, Artificial Sequence
  Synthetic
aggcaggagagccucuaagug

SEQ ID NO: 343973 - RNA, 22 nt, Artificial Sequence
  Synthetic
aaggcaggagagccucuaagug

SEQ ID NO: 343974 - RNA, 23 nt, Artificial Sequence
  Synthetic
aaaggcaggagagccucuaagug

SEQ ID NO: 343975 - RNA, 24 nt, Artificial Sequence
  Synthetic
aaaaggcaggagagccucuaagug

SEQ ID NO: 343976 - RNA, 18 nt, Artificial Sequence
  Synthetic
caaagacagcaguaagug

SEQ ID NO: 343977 - RNA, 19 nt, Artificial Sequence
  Synthetic
acaaagacagcaguaagug

SEQ ID NO: 343978 - RNA, 20 nt, Artificial Sequence
  Synthetic
cacaaagacagcaguaagug

SEQ ID NO: 343979 - RNA, 21 nt, Artificial Sequence
  Synthetic
gcacaaagacagcaguaagug

SEQ ID NO: 343980 - RNA, 22 nt, Artificial Sequence
  Synthetic
ggcacaaagacagcaguaagug

SEQ ID NO: 343981 - RNA, 23 nt, Artificial Sequence
  Synthetic
aggcacaaagacagcaguaagug

SEQ ID NO: 343982 - RNA, 24 nt, Artificial Sequence
  Synthetic
caggcacaaagacagcaguaagug

SEQ ID NO: 343983 - RNA, 18 nt, Artificial Sequence
  Synthetic
agaaaacugauguaagug

SEQ ID NO: 343984 - RNA, 19 nt, Artificial Sequence
  Synthetic
cagaaaacugauguaagug

SEQ ID NO: 343985 - RNA, 20 nt, Artificial Sequence
  Synthetic
ucagaaaacugauguaagug

SEQ ID NO: 343986 - RNA, 21 nt, Artificial Sequence
  Synthetic
aucagaaaacugauguaagug

SEQ ID NO: 343987 - RNA, 22 nt, Artificial Sequence
  Synthetic
caucagaaaacugauguaagug

SEQ ID NO: 343988 - RNA, 23 nt, Artificial Sequence
  Synthetic
acaucagaaaacugauguaagug

SEQ ID NO: 343989 - RNA, 24 nt, Artificial Sequence
  Synthetic
aacaucagaaaacugauguaagug

SEQ ID NO: 343990 - RNA, 18 nt, Artificial Sequence
  Synthetic
uacagcaauguguaagug

SEQ ID NO: 343991 - RNA, 19 nt, Artificial Sequence
  Synthetic
uuacagcaauguguaagug

SEQ ID NO: 343992 - RNA, 20 nt, Artificial Sequence
  Synthetic
guuacagcaauguguaagug

SEQ ID NO: 343993 - RNA, 21 nt, Artificial Sequence
  Synthetic
gguuacagcaauguguaagug

SEQ ID NO: 343994 - RNA, 22 nt, Artificial Sequence
  Synthetic
agguuacagcaauguguaagug

SEQ ID NO: 343995 - RNA, 23 nt, Artificial Sequence
  Synthetic
aagguuacagcaauguguaagug

SEQ ID NO: 343996 - RNA, 24 nt, Artificial Sequence
  Synthetic
uaagguuacagcaauguguaagug

SEQ ID NO: 343997 - RNA, 18 nt, Artificial Sequence
  Synthetic
ccuuaaauauauuaagug

SEQ ID NO: 343998 - RNA, 19 nt, Artificial Sequence
  Synthetic
accuuaaauauauuaagug

SEQ ID NO: 343999 - RNA, 20 nt, Artificial Sequence
  Synthetic
gaccuuaaauauauuaagug

SEQ ID NO: 344000 - RNA, 21 nt, Artificial Sequence
  Synthetic
agaccuuaaauauauuaagug

SEQ ID NO: 344001 - RNA, 22 nt, Artificial Sequence
  Synthetic
gagaccuuaaauauauuaagug

SEQ ID NO: 344002 - RNA, 23 nt, Artificial Sequence
  Synthetic
agagaccuuaaauauauuaagug

SEQ ID NO: 344003 - RNA, 24 nt, Artificial Sequence
  Synthetic
aagagaccuuaaauauauuaagug

SEQ ID NO: 344004 - RNA, 18 nt, Artificial Sequence
  Synthetic
uuagguuuggcuuaagug

SEQ ID NO: 344005 - RNA, 19 nt, Artificial Sequence
  Synthetic
uuuagguuuggcuuaagug

SEQ ID NO: 344006 - RNA, 20 nt, Artificial Sequence
  Synthetic
cuuuagguuuggcuuaagug

SEQ ID NO: 344007 - RNA, 21 nt, Artificial Sequence
  Synthetic
acuuuagguuuggcuuaagug

SEQ ID NO: 344008 - RNA, 22 nt, Artificial Sequence
  Synthetic
cacuuuagguuuggcuuaagug

SEQ ID NO: 344009 - RNA, 23 nt, Artificial Sequence
  Synthetic
ucacuuuagguuuggcuuaagug

SEQ ID NO: 344010 - RNA, 24 nt, Artificial Sequence
  Synthetic
aucacuuuagguuuggcuuaagug

SEQ ID NO: 344011 - RNA, 18 nt, Artificial Sequence
  Synthetic
ggacagaguuguuaagug

SEQ ID NO: 344012 - RNA, 19 nt, Artificial Sequence
  Synthetic
uggacagaguuguuaagug

SEQ ID NO: 344013 - RNA, 20 nt, Artificial Sequence
  Synthetic
uuggacagaguuguuaagug

SEQ ID NO: 344014 - RNA, 21 nt, Artificial Sequence
  Synthetic
uuuggacagaguuguuaagug

SEQ ID NO: 344015 - RNA, 22 nt, Artificial Sequence
  Synthetic
guuuggacagaguuguuaagug

SEQ ID NO: 344016 - RNA, 23 nt, Artificial Sequence
  Synthetic
gguuuggacagaguuguuaagug

SEQ ID NO: 344017 - RNA, 24 nt, Artificial Sequence
  Synthetic
ggguuuggacagaguuguuaagug

SEQ ID NO: 344018 - RNA, 18 nt, Artificial Sequence
  Synthetic
gcacuguugauuuaagug

SEQ ID NO: 344019 - RNA, 19 nt, Artificial Sequence
  Synthetic
agcacuguugauuuaagug

SEQ ID NO: 344020 - RNA, 20 nt, Artificial Sequence
  Synthetic
aagcacuguugauuuaagug

SEQ ID NO: 344021 - RNA, 21 nt, Artificial Sequence
  Synthetic
aaagcacuguugauuuaagug

SEQ ID NO: 344022 - RNA, 22 nt, Artificial Sequence
  Synthetic
aaaagcacuguugauuuaagug

SEQ ID NO: 344023 - RNA, 23 nt, Artificial Sequence
  Synthetic
aaaaagcacuguugauuuaagug

SEQ ID NO: 344024 - RNA, 24 nt, Artificial Sequence
  Synthetic
gaaaaagcacuguugauuuaagug

SEQ ID NO: 344025 - RNA, 18 nt, Artificial Sequence
  Synthetic
auggucauacacacagug

SEQ ID NO: 344026 - RNA, 19 nt, Artificial Sequence
  Synthetic
gauggucauacacacagug

SEQ ID NO: 344027 - RNA, 20 nt, Artificial Sequence
  Synthetic
agauggucauacacacagug

SEQ ID NO: 344028 - RNA, 21 nt, Artificial Sequence
  Synthetic
cagauggucauacacacagug

SEQ ID NO: 344029 - RNA, 22 nt, Artificial Sequence
  Synthetic
ucagauggucauacacacagug

SEQ ID NO: 344030 - RNA, 23 nt, Artificial Sequence
  Synthetic
gucagauggucauacacacagug

SEQ ID NO: 344031 - RNA, 24 nt, Artificial Sequence
  Synthetic
ugucagauggucauacacacagug

SEQ ID NO: 344032 - RNA, 18 nt, Artificial Sequence
  Synthetic
cugaugccgcacacagug

SEQ ID NO: 344033 - RNA, 19 nt, Artificial Sequence
  Synthetic
ccugaugccgcacacagug

SEQ ID NO: 344034 - RNA, 20 nt, Artificial Sequence
  Synthetic
uccugaugccgcacacagug

SEQ ID NO: 344035 - RNA, 21 nt, Artificial Sequence
  Synthetic
guccugaugccgcacacagug

SEQ ID NO: 344036 - RNA, 22 nt, Artificial Sequence
  Synthetic
aguccugaugccgcacacagug

SEQ ID NO: 344037 - RNA, 23 nt, Artificial Sequence
  Synthetic
aaguccugaugccgcacacagug

SEQ ID NO: 344038 - RNA, 24 nt, Artificial Sequence
  Synthetic
caaguccugaugccgcacacagug

SEQ ID NO: 344039 - RNA, 18 nt, Artificial Sequence
  Synthetic
cacugagagcccacagug

SEQ ID NO: 344040 - RNA, 19 nt, Artificial Sequence
  Synthetic
gcacugagagcccacagug

SEQ ID NO: 344041 - RNA, 20 nt, Artificial Sequence
  Synthetic
ggcacugagagcccacagug

SEQ ID NO: 344042 - RNA, 21 nt, Artificial Sequence
  Synthetic
gggcacugagagcccacagug

SEQ ID NO: 344043 - RNA, 22 nt, Artificial Sequence
  Synthetic
ugggcacugagagcccacagug

SEQ ID NO: 344044 - RNA, 23 nt, Artificial Sequence
  Synthetic
cugggcacugagagcccacagug

SEQ ID NO: 344045 - RNA, 24 nt, Artificial Sequence
  Synthetic
gcugggcacugagagcccacagug

SEQ ID NO: 344046 - RNA, 18 nt, Artificial Sequence
  Synthetic
ucuuagccucccacagug

SEQ ID NO: 344047 - RNA, 19 nt, Artificial Sequence
  Synthetic
aucuuagccucccacagug

SEQ ID NO: 344048 - RNA, 20 nt, Artificial Sequence
  Synthetic
caucuuagccucccacagug

SEQ ID NO: 344049 - RNA, 21 nt, Artificial Sequence
  Synthetic
ucaucuuagccucccacagug

SEQ ID NO: 344050 - RNA, 22 nt, Artificial Sequence
  Synthetic
cucaucuuagccucccacagug

SEQ ID NO: 344051 - RNA, 23 nt, Artificial Sequence
  Synthetic
acucaucuuagccucccacagug

SEQ ID NO: 344052 - RNA, 24 nt, Artificial Sequence
  Synthetic
cacucaucuuagccucccacagug

SEQ ID NO: 344053 - RNA, 18 nt, Artificial Sequence
  Synthetic
ccuuggccucccacagug

SEQ ID NO: 344054 - RNA, 19 nt, Artificial Sequence
  Synthetic
gccuuggccucccacagug

SEQ ID NO: 344055 - RNA, 20 nt, Artificial Sequence
  Synthetic
cgccuuggccucccacagug

SEQ ID NO: 344056 - RNA, 21 nt, Artificial Sequence
  Synthetic
ccgccuuggccucccacagug

SEQ ID NO: 344057 - RNA, 22 nt, Artificial Sequence
  Synthetic
cccgccuuggccucccacagug

SEQ ID NO: 344058 - RNA, 23 nt, Artificial Sequence
  Synthetic
gcccgccuuggccucccacagug

SEQ ID NO: 344059 - RNA, 24 nt, Artificial Sequence
  Synthetic
cgcccgccuuggccucccacagug

SEQ ID NO: 344060 - RNA, 18 nt, Artificial Sequence
  Synthetic
auguacaucuccacagug

SEQ ID NO: 344061 - RNA, 19 nt, Artificial Sequence
  Synthetic
aauguacaucuccacagug

SEQ ID NO: 344062 - RNA, 20 nt, Artificial Sequence
  Synthetic
uaauguacaucuccacagug

SEQ ID NO: 344063 - RNA, 21 nt, Artificial Sequence
  Synthetic
auaauguacaucuccacagug

SEQ ID NO: 344064 - RNA, 22 nt, Artificial Sequence
  Synthetic
cauaauguacaucuccacagug

SEQ ID NO: 344065 - RNA, 23 nt, Artificial Sequence
  Synthetic
ucauaauguacaucuccacagug

SEQ ID NO: 344066 - RNA, 24 nt, Artificial Sequence
  Synthetic
gucauaauguacaucuccacagug

SEQ ID NO: 344067 - RNA, 18 nt, Artificial Sequence
  Synthetic
uaucuccauuucacagug

SEQ ID NO: 344068 - RNA, 19 nt, Artificial Sequence
  Synthetic
guaucuccauuucacagug

SEQ ID NO: 344069 - RNA, 20 nt, Artificial Sequence
  Synthetic
aguaucuccauuucacagug

SEQ ID NO: 344070 - RNA, 21 nt, Artificial Sequence
  Synthetic
caguaucuccauuucacagug

SEQ ID NO: 344071 - RNA, 22 nt, Artificial Sequence
  Synthetic
ucaguaucuccauuucacagug

SEQ ID NO: 344072 - RNA, 23 nt, Artificial Sequence
  Synthetic
cucaguaucuccauuucacagug

SEQ ID NO: 344073 - RNA, 24 nt, Artificial Sequence
  Synthetic
acucaguaucuccauuucacagug

SEQ ID NO: 344074 - RNA, 18 nt, Artificial Sequence
  Synthetic
guacuagagaagacagug

SEQ ID NO: 344075 - RNA, 19 nt, Artificial Sequence
  Synthetic
uguacuagagaagacagug

SEQ ID NO: 344076 - RNA, 20 nt, Artificial Sequence
  Synthetic
cuguacuagagaagacagug

SEQ ID NO: 344077 - RNA, 21 nt, Artificial Sequence
  Synthetic
ccuguacuagagaagacagug

SEQ ID NO: 344078 - RNA, 22 nt, Artificial Sequence
  Synthetic
accuguacuagagaagacagug

SEQ ID NO: 344079 - RNA, 23 nt, Artificial Sequence
  Synthetic
uaccuguacuagagaagacagug

SEQ ID NO: 344080 - RNA, 24 nt, Artificial Sequence
  Synthetic
cuaccuguacuagagaagacagug

SEQ ID NO: 344081 - RNA, 18 nt, Artificial Sequence
  Synthetic
cucucugcugggacagug

SEQ ID NO: 344082 - RNA, 19 nt, Artificial Sequence
  Synthetic
ccucucugcugggacagug

SEQ ID NO: 344083 - RNA, 20 nt, Artificial Sequence
  Synthetic
accucucugcugggacagug

SEQ ID NO: 344084 - RNA, 21 nt, Artificial Sequence
  Synthetic
aaccucucugcugggacagug

SEQ ID NO: 344085 - RNA, 22 nt, Artificial Sequence
  Synthetic
aaaccucucugcugggacagug

SEQ ID NO: 344086 - RNA, 23 nt, Artificial Sequence
  Synthetic
aaaaccucucugcugggacagug

SEQ ID NO: 344087 - RNA, 24 nt, Artificial Sequence
  Synthetic
gaaaaccucucugcugggacagug

SEQ ID NO: 344088 - RNA, 18 nt, Artificial Sequence
  Synthetic
aauuaaucaaugacagug

SEQ ID NO: 344089 - RNA, 19 nt, Artificial Sequence
  Synthetic
aaauuaaucaaugacagug

SEQ ID NO: 344090 - RNA, 20 nt, Artificial Sequence
  Synthetic
gaaauuaaucaaugacagug

SEQ ID NO: 344091 - RNA, 21 nt, Artificial Sequence
  Synthetic
agaaauuaaucaaugacagug

SEQ ID NO: 344092 - RNA, 22 nt, Artificial Sequence
  Synthetic
aagaaauuaaucaaugacagug

SEQ ID NO: 344093 - RNA, 23 nt, Artificial Sequence
  Synthetic
gaagaaauuaaucaaugacagug

SEQ ID NO: 344094 - RNA, 24 nt, Artificial Sequence
  Synthetic
ugaagaaauuaaucaaugacagug

SEQ ID NO: 344095 - RNA, 18 nt, Artificial Sequence
  Synthetic
uauauugauuuuacagug

SEQ ID NO: 344096 - RNA, 19 nt, Artificial Sequence
  Synthetic
uuauauugauuuuacagug

SEQ ID NO: 344097 - RNA, 20 nt, Artificial Sequence
  Synthetic
cuuauauugauuuuacagug

SEQ ID NO: 344098 - RNA, 21 nt, Artificial Sequence
  Synthetic
ucuuauauugauuuuacagug

SEQ ID NO: 344099 - RNA, 22 nt, Artificial Sequence
  Synthetic
aucuuauauugauuuuacagug

SEQ ID NO: 344100 - RNA, 23 nt, Artificial Sequence
  Synthetic
aaucuuauauugauuuuacagug

SEQ ID NO: 344101 - RNA, 24 nt, Artificial Sequence
  Synthetic
aaaucuuauauugauuuuacagug

SEQ ID NO: 344102 - RNA, 18 nt, Artificial Sequence
  Synthetic
gcagcuaaaugcccagug

SEQ ID NO: 344103 - RNA, 19 nt, Artificial Sequence
  Synthetic
ugcagcuaaaugcccagug

SEQ ID NO: 344104 - RNA, 20 nt, Artificial Sequence
  Synthetic
cugcagcuaaaugcccagug

SEQ ID NO: 344105 - RNA, 21 nt, Artificial Sequence
  Synthetic
gcugcagcuaaaugcccagug

SEQ ID NO: 344106 - RNA, 22 nt, Artificial Sequence
  Synthetic
agcugcagcuaaaugcccagug

SEQ ID NO: 344107 - RNA, 23 nt, Artificial Sequence
  Synthetic
aagcugcagcuaaaugcccagug

SEQ ID NO: 344108 - RNA, 24 nt, Artificial Sequence
  Synthetic
gaagcugcagcuaaaugcccagug

SEQ ID NO: 344109 - RNA, 18 nt, Artificial Sequence
  Synthetic
aaaaucuagaucccagug

SEQ ID NO: 344110 - RNA, 19 nt, Artificial Sequence
  Synthetic
caaaaucuagaucccagug

SEQ ID NO: 344111 - RNA, 20 nt, Artificial Sequence
  Synthetic
acaaaaucuagaucccagug

SEQ ID NO: 344112 - RNA, 21 nt, Artificial Sequence
  Synthetic
uacaaaaucuagaucccagug

SEQ ID NO: 344113 - RNA, 22 nt, Artificial Sequence
  Synthetic
guacaaaaucuagaucccagug

SEQ ID NO: 344114 - RNA, 23 nt, Artificial Sequence
  Synthetic
gguacaaaaucuagaucccagug

SEQ ID NO: 344115 - RNA, 24 nt, Artificial Sequence
  Synthetic
agguacaaaaucuagaucccagug

SEQ ID NO: 344116 - RNA, 18 nt, Artificial Sequence
  Synthetic
gauggucagcucccagug

SEQ ID NO: 344117 - RNA, 19 nt, Artificial Sequence
  Synthetic
ugauggucagcucccagug

SEQ ID NO: 344118 - RNA, 20 nt, Artificial Sequence
  Synthetic
augauggucagcucccagug

SEQ ID NO: 344119 - RNA, 21 nt, Artificial Sequence
  Synthetic
aaugauggucagcucccagug

SEQ ID NO: 344120 - RNA, 22 nt, Artificial Sequence
  Synthetic
uaaugauggucagcucccagug

SEQ ID NO: 344121 - RNA, 23 nt, Artificial Sequence
  Synthetic
guaaugauggucagcucccagug

SEQ ID NO: 344122 - RNA, 24 nt, Artificial Sequence
  Synthetic
gguaaugauggucagcucccagug

SEQ ID NO: 344123 - RNA, 18 nt, Artificial Sequence
  Synthetic
gucuucugacauccagug

SEQ ID NO: 344124 - RNA, 19 nt, Artificial Sequence
  Synthetic
ggucuucugacauccagug

SEQ ID NO: 344125 - RNA, 20 nt, Artificial Sequence
  Synthetic
aggucuucugacauccagug

SEQ ID NO: 344126 - RNA, 21 nt, Artificial Sequence
  Synthetic
gaggucuucugacauccagug

SEQ ID NO: 344127 - RNA, 22 nt, Artificial Sequence
  Synthetic
ugaggucuucugacauccagug

SEQ ID NO: 344128 - RNA, 23 nt, Artificial Sequence
  Synthetic
cugaggucuucugacauccagug

SEQ ID NO: 344129 - RNA, 24 nt, Artificial Sequence
  Synthetic
acugaggucuucugacauccagug

SEQ ID NO: 344130 - RNA, 18 nt, Artificial Sequence
  Synthetic
gaaagucaucuuccagug

SEQ ID NO: 344131 - RNA, 19 nt, Artificial Sequence
  Synthetic
ugaaagucaucuuccagug

SEQ ID NO: 344132 - RNA, 20 nt, Artificial Sequence
  Synthetic
augaaagucaucuuccagug

SEQ ID NO: 344133 - RNA, 21 nt, Artificial Sequence
  Synthetic
gaugaaagucaucuuccagug

SEQ ID NO: 344134 - RNA, 22 nt, Artificial Sequence
  Synthetic
agaugaaagucaucuuccagug

SEQ ID NO: 344135 - RNA, 23 nt, Artificial Sequence
  Synthetic
uagaugaaagucaucuuccagug

SEQ ID NO: 344136 - RNA, 24 nt, Artificial Sequence
  Synthetic
guagaugaaagucaucuuccagug

SEQ ID NO: 344137 - RNA, 18 nt, Artificial Sequence
  Synthetic
gaagaauacaaagcagug

SEQ ID NO: 344138 - RNA, 19 nt, Artificial Sequence
  Synthetic
ugaagaauacaaagcagug

SEQ ID NO: 344139 - RNA, 20 nt, Artificial Sequence
  Synthetic
cugaagaauacaaagcagug

SEQ ID NO: 344140 - RNA, 21 nt, Artificial Sequence
  Synthetic
acugaagaauacaaagcagug

SEQ ID NO: 344141 - RNA, 22 nt, Artificial Sequence
  Synthetic
uacugaagaauacaaagcagug

SEQ ID NO: 344142 - RNA, 23 nt, Artificial Sequence
  Synthetic
auacugaagaauacaaagcagug

SEQ ID NO: 344143 - RNA, 24 nt, Artificial Sequence
  Synthetic
uauacugaagaauacaaagcagug

SEQ ID NO: 344144 - RNA, 18 nt, Artificial Sequence
  Synthetic
auuuuuucagaagcagug

SEQ ID NO: 344145 - RNA, 19 nt, Artificial Sequence
  Synthetic
uauuuuuucagaagcagug

SEQ ID NO: 344146 - RNA, 20 nt, Artificial Sequence
  Synthetic
auauuuuuucagaagcagug

SEQ ID NO: 344147 - RNA, 21 nt, Artificial Sequence
  Synthetic
cauauuuuuucagaagcagug

SEQ ID NO: 344148 - RNA, 22 nt, Artificial Sequence
  Synthetic
acauauuuuuucagaagcagug

SEQ ID NO: 344149 - RNA, 23 nt, Artificial Sequence
  Synthetic
uacauauuuuuucagaagcagug

SEQ ID NO: 344150 - RNA, 24 nt, Artificial Sequence
  Synthetic
cuacauauuuuuucagaagcagug

SEQ ID NO: 344151 - RNA, 18 nt, Artificial Sequence
  Synthetic
cacuuaaacacagcagug

SEQ ID NO: 344152 - RNA, 19 nt, Artificial Sequence
  Synthetic
acacuuaaacacagcagug

SEQ ID NO: 344153 - RNA, 20 nt, Artificial Sequence
  Synthetic
gacacuuaaacacagcagug

SEQ ID NO: 344154 - RNA, 21 nt, Artificial Sequence
  Synthetic
agacacuuaaacacagcagug

SEQ ID NO: 344155 - RNA, 22 nt, Artificial Sequence
  Synthetic
gagacacuuaaacacagcagug

SEQ ID NO: 344156 - RNA, 23 nt, Artificial Sequence
  Synthetic
ggagacacuuaaacacagcagug

SEQ ID NO: 344157 - RNA, 24 nt, Artificial Sequence
  Synthetic
cggagacacuuaaacacagcagug

SEQ ID NO: 344158 - RNA, 18 nt, Artificial Sequence
  Synthetic
caaaaagaugcagcagug

SEQ ID NO: 344159 - RNA, 19 nt, Artificial Sequence
  Synthetic
ucaaaaagaugcagcagug

SEQ ID NO: 344160 - RNA, 20 nt, Artificial Sequence
  Synthetic
gucaaaaagaugcagcagug

SEQ ID NO: 344161 - RNA, 21 nt, Artificial Sequence
  Synthetic
ggucaaaaagaugcagcagug

SEQ ID NO: 344162 - RNA, 22 nt, Artificial Sequence
  Synthetic
aggucaaaaagaugcagcagug

SEQ ID NO: 344163 - RNA, 23 nt, Artificial Sequence
  Synthetic
aaggucaaaaagaugcagcagug

SEQ ID NO: 344164 - RNA, 24 nt, Artificial Sequence
  Synthetic
uaaggucaaaaagaugcagcagug

SEQ ID NO: 344165 - RNA, 18 nt, Artificial Sequence
  Synthetic
uauagccaaggagcagug

SEQ ID NO: 344166 - RNA, 19 nt, Artificial Sequence
  Synthetic
uuauagccaaggagcagug

SEQ ID NO: 344167 - RNA, 20 nt, Artificial Sequence
  Synthetic
uuuauagccaaggagcagug

SEQ ID NO: 344168 - RNA, 21 nt, Artificial Sequence
  Synthetic
auuuauagccaaggagcagug

SEQ ID NO: 344169 - RNA, 22 nt, Artificial Sequence
  Synthetic
aauuuauagccaaggagcagug

SEQ ID NO: 344170 - RNA, 23 nt, Artificial Sequence
  Synthetic
gaauuuauagccaaggagcagug

SEQ ID NO: 344171 - RNA, 24 nt, Artificial Sequence
  Synthetic
ggaauuuauagccaaggagcagug

SEQ ID NO: 344172 - RNA, 18 nt, Artificial Sequence
  Synthetic
auaccuugcauagcagug

SEQ ID NO: 344173 - RNA, 19 nt, Artificial Sequence
  Synthetic
aauaccuugcauagcagug

SEQ ID NO: 344174 - RNA, 20 nt, Artificial Sequence
  Synthetic
uaauaccuugcauagcagug

SEQ ID NO: 344175 - RNA, 21 nt, Artificial Sequence
  Synthetic
auaauaccuugcauagcagug

SEQ ID NO: 344176 - RNA, 22 nt, Artificial Sequence
  Synthetic
cauaauaccuugcauagcagug

SEQ ID NO: 344177 - RNA, 23 nt, Artificial Sequence
  Synthetic
ccauaauaccuugcauagcagug

SEQ ID NO: 344178 - RNA, 24 nt, Artificial Sequence
  Synthetic
accauaauaccuugcauagcagug

SEQ ID NO: 344179 - RNA, 18 nt, Artificial Sequence
  Synthetic
ggagccgagaaggcagug

SEQ ID NO: 344180 - RNA, 19 nt, Artificial Sequence
  Synthetic
cggagccgagaaggcagug

SEQ ID NO: 344181 - RNA, 20 nt, Artificial Sequence
  Synthetic
acggagccgagaaggcagug

SEQ ID NO: 344182 - RNA, 21 nt, Artificial Sequence
  Synthetic
gacggagccgagaaggcagug

SEQ ID NO: 344183 - RNA, 22 nt, Artificial Sequence
  Synthetic
agacggagccgagaaggcagug

SEQ ID NO: 344184 - RNA, 23 nt, Artificial Sequence
  Synthetic
gagacggagccgagaaggcagug

SEQ ID NO: 344185 - RNA, 24 nt, Artificial Sequence
  Synthetic
ggagacggagccgagaaggcagug

SEQ ID NO: 344186 - RNA, 18 nt, Artificial Sequence
  Synthetic
cagagcccugaggcagug

SEQ ID NO: 344187 - RNA, 19 nt, Artificial Sequence
  Synthetic
gcagagcccugaggcagug

SEQ ID NO: 344188 - RNA, 20 nt, Artificial Sequence
  Synthetic
agcagagcccugaggcagug

SEQ ID NO: 344189 - RNA, 21 nt, Artificial Sequence
  Synthetic
cagcagagcccugaggcagug

SEQ ID NO: 344190 - RNA, 22 nt, Artificial Sequence
  Synthetic
acagcagagcccugaggcagug

SEQ ID NO: 344191 - RNA, 23 nt, Artificial Sequence
  Synthetic
cacagcagagcccugaggcagug

SEQ ID NO: 344192 - RNA, 24 nt, Artificial Sequence
  Synthetic
acacagcagagcccugaggcagug

SEQ ID NO: 344193 - RNA, 18 nt, Artificial Sequence
  Synthetic
ucaauuggguaugcagug

SEQ ID NO: 344194 - RNA, 19 nt, Artificial Sequence
  Synthetic
gucaauuggguaugcagug

SEQ ID NO: 344195 - RNA, 20 nt, Artificial Sequence
  Synthetic
ugucaauuggguaugcagug

SEQ ID NO: 344196 - RNA, 21 nt, Artificial Sequence
  Synthetic
cugucaauuggguaugcagug

SEQ ID NO: 344197 - RNA, 22 nt, Artificial Sequence
  Synthetic
ucugucaauuggguaugcagug

SEQ ID NO: 344198 - RNA, 23 nt, Artificial Sequence
  Synthetic
uucugucaauuggguaugcagug

SEQ ID NO: 344199 - RNA, 24 nt, Artificial Sequence
  Synthetic
cuucugucaauuggguaugcagug

SEQ ID NO: 344200 - RNA, 18 nt, Artificial Sequence
  Synthetic
ccaggcuggagugcagug

SEQ ID NO: 344201 - RNA, 19 nt, Artificial Sequence
  Synthetic
accaggcuggagugcagug

SEQ ID NO: 344202 - RNA, 20 nt, Artificial Sequence
  Synthetic
caccaggcuggagugcagug

SEQ ID NO: 344203 - RNA, 21 nt, Artificial Sequence
  Synthetic
ucaccaggcuggagugcagug

SEQ ID NO: 344204 - RNA, 22 nt, Artificial Sequence
  Synthetic
gucaccaggcuggagugcagug

SEQ ID NO: 344205 - RNA, 23 nt, Artificial Sequence
  Synthetic
ugucaccaggcuggagugcagug

SEQ ID NO: 344206 - RNA, 24 nt, Artificial Sequence
  Synthetic
cugucaccaggcuggagugcagug

SEQ ID NO: 344207 - RNA, 19 nt, Artificial Sequence
  Synthetic
cccaggcuggagugcagug

SEQ ID NO: 344208 - RNA, 20 nt, Artificial Sequence
  Synthetic
gcccaggcuggagugcagug

SEQ ID NO: 344209 - RNA, 18 nt, Artificial Sequence
  Synthetic
auaguuucuuuugcagug

SEQ ID NO: 344210 - RNA, 19 nt, Artificial Sequence
  Synthetic
gauaguuucuuuugcagug

SEQ ID NO: 344211 - RNA, 20 nt, Artificial Sequence
  Synthetic
ugauaguuucuuuugcagug

SEQ ID NO: 344212 - RNA, 21 nt, Artificial Sequence
  Synthetic
augauaguuucuuuugcagug

SEQ ID NO: 344213 - RNA, 22 nt, Artificial Sequence
  Synthetic
caugauaguuucuuuugcagug

SEQ ID NO: 344214 - RNA, 23 nt, Artificial Sequence
  Synthetic
ucaugauaguuucuuuugcagug

SEQ ID NO: 344215 - RNA, 24 nt, Artificial Sequence
  Synthetic
cucaugauaguuucuuuugcagug

SEQ ID NO: 344216 - RNA, 18 nt, Artificial Sequence
  Synthetic
ugaguaaaugaaucagug

SEQ ID NO: 344217 - RNA, 19 nt, Artificial Sequence
  Synthetic
uugaguaaaugaaucagug

SEQ ID NO: 344218 - RNA, 20 nt, Artificial Sequence
  Synthetic
auugaguaaaugaaucagug

SEQ ID NO: 344219 - RNA, 21 nt, Artificial Sequence
  Synthetic
gauugaguaaaugaaucagug

SEQ ID NO: 344220 - RNA, 22 nt, Artificial Sequence
  Synthetic
agauugaguaaaugaaucagug

SEQ ID NO: 344221 - RNA, 23 nt, Artificial Sequence
  Synthetic
aagauugaguaaaugaaucagug

SEQ ID NO: 344222 - RNA, 24 nt, Artificial Sequence
  Synthetic
aaagauugaguaaaugaaucagug

SEQ ID NO: 344223 - RNA, 18 nt, Artificial Sequence
  Synthetic
cccaaaugcccaucagug

SEQ ID NO: 344224 - RNA, 19 nt, Artificial Sequence
  Synthetic
acccaaaugcccaucagug

SEQ ID NO: 344225 - RNA, 20 nt, Artificial Sequence
  Synthetic
aacccaaaugcccaucagug

SEQ ID NO: 344226 - RNA, 21 nt, Artificial Sequence
  Synthetic
caacccaaaugcccaucagug

SEQ ID NO: 344227 - RNA, 22 nt, Artificial Sequence
  Synthetic
ucaacccaaaugcccaucagug

SEQ ID NO: 344228 - RNA, 23 nt, Artificial Sequence
  Synthetic
aucaacccaaaugcccaucagug

SEQ ID NO: 344229 - RNA, 24 nt, Artificial Sequence
  Synthetic
uaucaacccaaaugcccaucagug

SEQ ID NO: 344230 - RNA, 18 nt, Artificial Sequence
  Synthetic
ugauaguguucaucagug

SEQ ID NO: 344231 - RNA, 19 nt, Artificial Sequence
  Synthetic
gugauaguguucaucagug

SEQ ID NO: 344232 - RNA, 20 nt, Artificial Sequence
  Synthetic
agugauaguguucaucagug

SEQ ID NO: 344233 - RNA, 21 nt, Artificial Sequence
  Synthetic
cagugauaguguucaucagug

SEQ ID NO: 344234 - RNA, 22 nt, Artificial Sequence
  Synthetic
gcagugauaguguucaucagug

SEQ ID NO: 344235 - RNA, 23 nt, Artificial Sequence
  Synthetic
agcagugauaguguucaucagug

SEQ ID NO: 344236 - RNA, 24 nt, Artificial Sequence
  Synthetic
cagcagugauaguguucaucagug

SEQ ID NO: 344237 - RNA, 18 nt, Artificial Sequence
  Synthetic
aaaaugucuguaucagug

SEQ ID NO: 344238 - RNA, 19 nt, Artificial Sequence
  Synthetic
uaaaaugucuguaucagug

SEQ ID NO: 344239 - RNA, 20 nt, Artificial Sequence
  Synthetic
auaaaaugucuguaucagug

SEQ ID NO: 344240 - RNA, 21 nt, Artificial Sequence
  Synthetic
aauaaaaugucuguaucagug

SEQ ID NO: 344241 - RNA, 22 nt, Artificial Sequence
  Synthetic
aaauaaaaugucuguaucagug

SEQ ID NO: 344242 - RNA, 23 nt, Artificial Sequence
  Synthetic
aaaauaaaaugucuguaucagug

SEQ ID NO: 344243 - RNA, 24 nt, Artificial Sequence
  Synthetic
aaaaauaaaaugucuguaucagug

SEQ ID NO: 344244 - RNA, 18 nt, Artificial Sequence
  Synthetic
gauaccuagcccucagug

SEQ ID NO: 344245 - RNA, 19 nt, Artificial Sequence
  Synthetic
ugauaccuagcccucagug

SEQ ID NO: 344246 - RNA, 20 nt, Artificial Sequence
  Synthetic
augauaccuagcccucagug

SEQ ID NO: 344247 - RNA, 21 nt, Artificial Sequence
  Synthetic
caugauaccuagcccucagug

SEQ ID NO: 344248 - RNA, 22 nt, Artificial Sequence
  Synthetic
gcaugauaccuagcccucagug

SEQ ID NO: 344249 - RNA, 23 nt, Artificial Sequence
  Synthetic
agcaugauaccuagcccucagug

SEQ ID NO: 344250 - RNA, 24 nt, Artificial Sequence
  Synthetic
aagcaugauaccuagcccucagug

SEQ ID NO: 344251 - RNA, 18 nt, Artificial Sequence
  Synthetic
acuuuuuaaagcucagug

SEQ ID NO: 344252 - RNA, 19 nt, Artificial Sequence
  Synthetic
uacuuuuuaaagcucagug

SEQ ID NO: 344253 - RNA, 20 nt, Artificial Sequence
  Synthetic
auacuuuuuaaagcucagug

SEQ ID NO: 344254 - RNA, 21 nt, Artificial Sequence
  Synthetic
uauacuuuuuaaagcucagug

SEQ ID NO: 344255 - RNA, 22 nt, Artificial Sequence
  Synthetic
uuauacuuuuuaaagcucagug

SEQ ID NO: 344256 - RNA, 23 nt, Artificial Sequence
  Synthetic
cuuauacuuuuuaaagcucagug

SEQ ID NO: 344257 - RNA, 24 nt, Artificial Sequence
  Synthetic
gcuuauacuuuuuaaagcucagug

SEQ ID NO: 344258 - RNA, 18 nt, Artificial Sequence
  Synthetic
ggaauuacagucucagug

SEQ ID NO: 344259 - RNA, 19 nt, Artificial Sequence
  Synthetic
aggaauuacagucucagug

SEQ ID NO: 344260 - RNA, 20 nt, Artificial Sequence
  Synthetic
caggaauuacagucucagug

SEQ ID NO: 344261 - RNA, 21 nt, Artificial Sequence
  Synthetic
ucaggaauuacagucucagug

SEQ ID NO: 344262 - RNA, 22 nt, Artificial Sequence
  Synthetic
gucaggaauuacagucucagug

SEQ ID NO: 344263 - RNA, 23 nt, Artificial Sequence
  Synthetic
cgucaggaauuacagucucagug

SEQ ID NO: 344264 - RNA, 24 nt, Artificial Sequence
  Synthetic
gcgucaggaauuacagucucagug

SEQ ID NO: 344265 - RNA, 18 nt, Artificial Sequence
  Synthetic
cgugcuguacagucagug

SEQ ID NO: 344266 - RNA, 19 nt, Artificial Sequence
  Synthetic
ucgugcuguacagucagug

SEQ ID NO: 344267 - RNA, 20 nt, Artificial Sequence
  Synthetic
cucgugcuguacagucagug

SEQ ID NO: 344268 - RNA, 21 nt, Artificial Sequence
  Synthetic
ucucgugcuguacagucagug

SEQ ID NO: 344269 - RNA, 22 nt, Artificial Sequence
  Synthetic
uucucgugcuguacagucagug

SEQ ID NO: 344270 - RNA, 23 nt, Artificial Sequence
  Synthetic
auucucgugcuguacagucagug

SEQ ID NO: 344271 - RNA, 24 nt, Artificial Sequence
  Synthetic
aauucucgugcuguacagucagug

SEQ ID NO: 344272 - RNA, 18 nt, Artificial Sequence
  Synthetic
uguucaaaacugucagug

SEQ ID NO: 344273 - RNA, 19 nt, Artificial Sequence
  Synthetic
guguucaaaacugucagug

SEQ ID NO: 344274 - RNA, 20 nt, Artificial Sequence
  Synthetic
aguguucaaaacugucagug

SEQ ID NO: 344275 - RNA, 21 nt, Artificial Sequence
  Synthetic
gaguguucaaaacugucagug

SEQ ID NO: 344276 - RNA, 22 nt, Artificial Sequence
  Synthetic
ggaguguucaaaacugucagug

SEQ ID NO: 344277 - RNA, 23 nt, Artificial Sequence
  Synthetic
gggaguguucaaaacugucagug

SEQ ID NO: 344278 - RNA, 24 nt, Artificial Sequence
  Synthetic
agggaguguucaaaacugucagug

SEQ ID NO: 344279 - RNA, 18 nt, Artificial Sequence
  Synthetic
aaucuacagaauucagug

SEQ ID NO: 344280 - RNA, 19 nt, Artificial Sequence
  Synthetic
aaaucuacagaauucagug

SEQ ID NO: 344281 - RNA, 20 nt, Artificial Sequence
  Synthetic
aaaaucuacagaauucagug

SEQ ID NO: 344282 - RNA, 21 nt, Artificial Sequence
  Synthetic
aaaaaucuacagaauucagug

SEQ ID NO: 344283 - RNA, 22 nt, Artificial Sequence
  Synthetic
gaaaaaucuacagaauucagug

SEQ ID NO: 344284 - RNA, 23 nt, Artificial Sequence
  Synthetic
agaaaaaucuacagaauucagug

SEQ ID NO: 344285 - RNA, 24 nt, Artificial Sequence
  Synthetic
aagaaaaaucuacagaauucagug

SEQ ID NO: 344286 - RNA, 18 nt, Artificial Sequence
  Synthetic
aaaaagcccacuucagug

SEQ ID NO: 344287 - RNA, 19 nt, Artificial Sequence
  Synthetic
aaaaaagcccacuucagug

SEQ ID NO: 344288 - RNA, 20 nt, Artificial Sequence
  Synthetic
aaaaaaagcccacuucagug

SEQ ID NO: 344289 - RNA, 21 nt, Artificial Sequence
  Synthetic
aaaaaaaagcccacuucagug

SEQ ID NO: 344290 - RNA, 22 nt, Artificial Sequence
  Synthetic
caaaaaaaagcccacuucagug

SEQ ID NO: 344291 - RNA, 23 nt, Artificial Sequence
  Synthetic
acaaaaaaaagcccacuucagug

SEQ ID NO: 344292 - RNA, 24 nt, Artificial Sequence
  Synthetic
uacaaaaaaaagcccacuucagug

SEQ ID NO: 344293 - RNA, 18 nt, Artificial Sequence
  Synthetic
agcaaauacccuucagug

SEQ ID NO: 344294 - RNA, 19 nt, Artificial Sequence
  Synthetic
aagcaaauacccuucagug

SEQ ID NO: 344295 - RNA, 20 nt, Artificial Sequence
  Synthetic
caagcaaauacccuucagug

SEQ ID NO: 344296 - RNA, 21 nt, Artificial Sequence
  Synthetic
ucaagcaaauacccuucagug

SEQ ID NO: 344297 - RNA, 22 nt, Artificial Sequence
  Synthetic
aucaagcaaauacccuucagug

SEQ ID NO: 344298 - RNA, 23 nt, Artificial Sequence
  Synthetic
aaucaagcaaauacccuucagug

SEQ ID NO: 344299 - RNA, 24 nt, Artificial Sequence
  Synthetic
aaaucaagcaaauacccuucagug

SEQ ID NO: 344300 - RNA, 18 nt, Artificial Sequence
  Synthetic
aucaaaaugcuuucagug

SEQ ID NO: 344301 - RNA, 19 nt, Artificial Sequence
  Synthetic
aaucaaaaugcuuucagug

SEQ ID NO: 344302 - RNA, 20 nt, Artificial Sequence
  Synthetic
caaucaaaaugcuuucagug

SEQ ID NO: 344303 - RNA, 21 nt, Artificial Sequence
  Synthetic
ucaaucaaaaugcuuucagug

SEQ ID NO: 344304 - RNA, 22 nt, Artificial Sequence
  Synthetic
aucaaucaaaaugcuuucagug

SEQ ID NO: 344305 - RNA, 23 nt, Artificial Sequence
  Synthetic
caucaaucaaaaugcuuucagug

SEQ ID NO: 344306 - RNA, 24 nt, Artificial Sequence
  Synthetic
gcaucaaucaaaaugcuuucagug

SEQ ID NO: 344307 - RNA, 18 nt, Artificial Sequence
  Synthetic
uguuagaggguuucagug

SEQ ID NO: 344308 - RNA, 19 nt, Artificial Sequence
  Synthetic
guguuagaggguuucagug

SEQ ID NO: 344309 - RNA, 20 nt, Artificial Sequence
  Synthetic
gguguuagaggguuucagug

SEQ ID NO: 344310 - RNA, 21 nt, Artificial Sequence
  Synthetic
ugguguuagaggguuucagug

SEQ ID NO: 344311 - RNA, 22 nt, Artificial Sequence
  Synthetic
uugguguuagaggguuucagug

SEQ ID NO: 344312 - RNA, 23 nt, Artificial Sequence
  Synthetic
auugguguuagaggguuucagug

SEQ ID NO: 344313 - RNA, 24 nt, Artificial Sequence
  Synthetic
cauugguguuagaggguuucagug

SEQ ID NO: 344314 - RNA, 18 nt, Artificial Sequence
  Synthetic
caauuugauguuucagug

SEQ ID NO: 344315 - RNA, 19 nt, Artificial Sequence
  Synthetic
acaauuugauguuucagug

SEQ ID NO: 344316 - RNA, 20 nt, Artificial Sequence
  Synthetic
uacaauuugauguuucagug

SEQ ID NO: 344317 - RNA, 21 nt, Artificial Sequence
  Synthetic
uuacaauuugauguuucagug

SEQ ID NO: 344318 - RNA, 22 nt, Artificial Sequence
  Synthetic
guuacaauuugauguuucagug

SEQ ID NO: 344319 - RNA, 23 nt, Artificial Sequence
  Synthetic
uguuacaauuugauguuucagug

SEQ ID NO: 344320 - RNA, 24 nt, Artificial Sequence
  Synthetic
uuguuacaauuugauguuucagug

SEQ ID NO: 344321 - RNA, 18 nt, Artificial Sequence
  Synthetic
aaagauacaaaaagagug

SEQ ID NO: 344322 - RNA, 19 nt, Artificial Sequence
  Synthetic
gaaagauacaaaaagagug

SEQ ID NO: 344323 - RNA, 20 nt, Artificial Sequence
  Synthetic
ugaaagauacaaaaagagug

SEQ ID NO: 344324 - RNA, 21 nt, Artificial Sequence
  Synthetic
augaaagauacaaaaagagug

SEQ ID NO: 344325 - RNA, 22 nt, Artificial Sequence
  Synthetic
uaugaaagauacaaaaagagug

SEQ ID NO: 344326 - RNA, 23 nt, Artificial Sequence
  Synthetic
auaugaaagauacaaaaagagug

SEQ ID NO: 344327 - RNA, 24 nt, Artificial Sequence
  Synthetic
aauaugaaagauacaaaaagagug

SEQ ID NO: 344328 - RNA, 18 nt, Artificial Sequence
  Synthetic
gcaacucaguaaagagug

SEQ ID NO: 344329 - RNA, 19 nt, Artificial Sequence
  Synthetic
ugcaacucaguaaagagug

SEQ ID NO: 344330 - RNA, 20 nt, Artificial Sequence
  Synthetic
cugcaacucaguaaagagug

SEQ ID NO: 344331 - RNA, 21 nt, Artificial Sequence
  Synthetic
ccugcaacucaguaaagagug

SEQ ID NO: 344332 - RNA, 22 nt, Artificial Sequence
  Synthetic
accugcaacucaguaaagagug

SEQ ID NO: 344333 - RNA, 23 nt, Artificial Sequence
  Synthetic
gaccugcaacucaguaaagagug

SEQ ID NO: 344334 - RNA, 24 nt, Artificial Sequence
  Synthetic
agaccugcaacucaguaaagagug

SEQ ID NO: 344335 - RNA, 18 nt, Artificial Sequence
  Synthetic
aguauuuuagcaagagug

SEQ ID NO: 344336 - RNA, 19 nt, Artificial Sequence
  Synthetic
caguauuuuagcaagagug

SEQ ID NO: 344337 - RNA, 20 nt, Artificial Sequence
  Synthetic
gcaguauuuuagcaagagug

SEQ ID NO: 344338 - RNA, 21 nt, Artificial Sequence
  Synthetic
agcaguauuuuagcaagagug

SEQ ID NO: 344339 - RNA, 22 nt, Artificial Sequence
  Synthetic
aagcaguauuuuagcaagagug

SEQ ID NO: 344340 - RNA, 23 nt, Artificial Sequence
  Synthetic
gaagcaguauuuuagcaagagug

SEQ ID NO: 344341 - RNA, 24 nt, Artificial Sequence
  Synthetic
ggaagcaguauuuuagcaagagug

SEQ ID NO: 344342 - RNA, 18 nt, Artificial Sequence
  Synthetic
agccugggugacagagug

SEQ ID NO: 344343 - RNA, 19 nt, Artificial Sequence
  Synthetic
cagccugggugacagagug

SEQ ID NO: 344344 - RNA, 20 nt, Artificial Sequence
  Synthetic
ccagccugggugacagagug

SEQ ID NO: 344345 - RNA, 21 nt, Artificial Sequence
  Synthetic
uccagccugggugacagagug

SEQ ID NO: 344346 - RNA, 22 nt, Artificial Sequence
  Synthetic
cuccagccugggugacagagug

SEQ ID NO: 344347 - RNA, 23 nt, Artificial Sequence
  Synthetic
acuccagccugggugacagagug

SEQ ID NO: 344348 - RNA, 24 nt, Artificial Sequence
  Synthetic
cacuccagccugggugacagagug

SEQ ID NO: 344349 - RNA, 18 nt, Artificial Sequence
  Synthetic
ccucggccucccagagug

SEQ ID NO: 344350 - RNA, 19 nt, Artificial Sequence
  Synthetic
gccucggccucccagagug

SEQ ID NO: 344351 - RNA, 20 nt, Artificial Sequence
  Synthetic
cgccucggccucccagagug

SEQ ID NO: 344352 - RNA, 21 nt, Artificial Sequence
  Synthetic
ccgccucggccucccagagug

SEQ ID NO: 344353 - RNA, 22 nt, Artificial Sequence
  Synthetic
cccgccucggccucccagagug

SEQ ID NO: 344354 - RNA, 23 nt, Artificial Sequence
  Synthetic
gcccgccucggccucccagagug

SEQ ID NO: 344355 - RNA, 24 nt, Artificial Sequence
  Synthetic
ugcccgccucggccucccagagug

SEQ ID NO: 344356 - RNA, 18 nt, Artificial Sequence
  Synthetic
uggauauauugcagagug

SEQ ID NO: 344357 - RNA, 19 nt, Artificial Sequence
  Synthetic
auggauauauugcagagug

SEQ ID NO: 344358 - RNA, 20 nt, Artificial Sequence
  Synthetic
cauggauauauugcagagug

SEQ ID NO: 344359 - RNA, 21 nt, Artificial Sequence
  Synthetic
acauggauauauugcagagug

SEQ ID NO: 344360 - RNA, 22 nt, Artificial Sequence
  Synthetic
uacauggauauauugcagagug

SEQ ID NO: 344361 - RNA, 23 nt, Artificial Sequence
  Synthetic
uuacauggauauauugcagagug

SEQ ID NO: 344362 - RNA, 24 nt, Artificial Sequence
  Synthetic
guuacauggauauauugcagagug

SEQ ID NO: 344363 - RNA, 18 nt, Artificial Sequence
  Synthetic
uuagcuaaaaagagagug

SEQ ID NO: 344364 - RNA, 19 nt, Artificial Sequence
  Synthetic
auuagcuaaaaagagagug

SEQ ID NO: 344365 - RNA, 20 nt, Artificial Sequence
  Synthetic
uauuagcuaaaaagagagug

SEQ ID NO: 344366 - RNA, 21 nt, Artificial Sequence
  Synthetic
auauuagcuaaaaagagagug

SEQ ID NO: 344367 - RNA, 22 nt, Artificial Sequence
  Synthetic
aauauuagcuaaaaagagagug

SEQ ID NO: 344368 - RNA, 23 nt, Artificial Sequence
  Synthetic
caauauuagcuaaaaagagagug

SEQ ID NO: 344369 - RNA, 24 nt, Artificial Sequence
  Synthetic
acaauauuagcuaaaaagagagug

SEQ ID NO: 344370 - RNA, 18 nt, Artificial Sequence
  Synthetic
uaaggaagaaagagagug

SEQ ID NO: 344371 - RNA, 19 nt, Artificial Sequence
  Synthetic
guaaggaagaaagagagug

SEQ ID NO: 344372 - RNA, 20 nt, Artificial Sequence
  Synthetic
aguaaggaagaaagagagug

SEQ ID NO: 344373 - RNA, 21 nt, Artificial Sequence
  Synthetic
aaguaaggaagaaagagagug

SEQ ID NO: 344374 - RNA, 22 nt, Artificial Sequence
  Synthetic
gaaguaaggaagaaagagagug

SEQ ID NO: 344375 - RNA, 23 nt, Artificial Sequence
  Synthetic
ggaaguaaggaagaaagagagug

SEQ ID NO: 344376 - RNA, 24 nt, Artificial Sequence
  Synthetic
aggaaguaaggaagaaagagagug

SEQ ID NO: 344377 - RNA, 18 nt, Artificial Sequence
  Synthetic
auuucugauuggagagug

SEQ ID NO: 344378 - RNA, 19 nt, Artificial Sequence
  Synthetic
gauuucugauuggagagug

SEQ ID NO: 344379 - RNA, 20 nt, Artificial Sequence
  Synthetic
agauuucugauuggagagug

SEQ ID NO: 344380 - RNA, 21 nt, Artificial Sequence
  Synthetic
aagauuucugauuggagagug

SEQ ID NO: 344381 - RNA, 22 nt, Artificial Sequence
  Synthetic
aaagauuucugauuggagagug

SEQ ID NO: 344382 - RNA, 23 nt, Artificial Sequence
  Synthetic
caaagauuucugauuggagagug

SEQ ID NO: 344383 - RNA, 24 nt, Artificial Sequence
  Synthetic
ucaaagauuucugauuggagagug

SEQ ID NO: 344384 - RNA, 18 nt, Artificial Sequence
  Synthetic
aagggugguuugagagug

SEQ ID NO: 344385 - RNA, 19 nt, Artificial Sequence
  Synthetic
gaagggugguuugagagug

SEQ ID NO: 344386 - RNA, 20 nt, Artificial Sequence
  Synthetic
ggaagggugguuugagagug

SEQ ID NO: 344387 - RNA, 21 nt, Artificial Sequence
  Synthetic
uggaagggugguuugagagug

SEQ ID NO: 344388 - RNA, 22 nt, Artificial Sequence
  Synthetic
guggaagggugguuugagagug

SEQ ID NO: 344389 - RNA, 23 nt, Artificial Sequence
  Synthetic
gguggaagggugguuugagagug

SEQ ID NO: 344390 - RNA, 24 nt, Artificial Sequence
  Synthetic
agguggaagggugguuugagagug

SEQ ID NO: 344391 - RNA, 18 nt, Artificial Sequence
  Synthetic
uaccucccucauagagug

SEQ ID NO: 344392 - RNA, 19 nt, Artificial Sequence
  Synthetic
auaccucccucauagagug

SEQ ID NO: 344393 - RNA, 20 nt, Artificial Sequence
  Synthetic
cauaccucccucauagagug

SEQ ID NO: 344394 - RNA, 21 nt, Artificial Sequence
  Synthetic
ucauaccucccucauagagug

SEQ ID NO: 344395 - RNA, 22 nt, Artificial Sequence
  Synthetic
aucauaccucccucauagagug

SEQ ID NO: 344396 - RNA, 23 nt, Artificial Sequence
  Synthetic
uaucauaccucccucauagagug

SEQ ID NO: 344397 - RNA, 24 nt, Artificial Sequence
  Synthetic
guaucauaccucccucauagagug

SEQ ID NO: 344398 - RNA, 18 nt, Artificial Sequence
  Synthetic
uuagugaacccuagagug

SEQ ID NO: 344399 - RNA, 19 nt, Artificial Sequence
  Synthetic
guuagugaacccuagagug

SEQ ID NO: 344400 - RNA, 20 nt, Artificial Sequence
  Synthetic
aguuagugaacccuagagug

SEQ ID NO: 344401 - RNA, 21 nt, Artificial Sequence
  Synthetic
uaguuagugaacccuagagug

SEQ ID NO: 344402 - RNA, 22 nt, Artificial Sequence
  Synthetic
guaguuagugaacccuagagug

SEQ ID NO: 344403 - RNA, 23 nt, Artificial Sequence
  Synthetic
uguaguuagugaacccuagagug

SEQ ID NO: 344404 - RNA, 24 nt, Artificial Sequence
  Synthetic
cuguaguuagugaacccuagagug

SEQ ID NO: 344405 - RNA, 18 nt, Artificial Sequence
  Synthetic
auccauauucaaggagug

SEQ ID NO: 344406 - RNA, 19 nt, Artificial Sequence
  Synthetic
aauccauauucaaggagug

SEQ ID NO: 344407 - RNA, 20 nt, Artificial Sequence
  Synthetic
caauccauauucaaggagug

SEQ ID NO: 344408 - RNA, 21 nt, Artificial Sequence
  Synthetic
ccaauccauauucaaggagug

SEQ ID NO: 344409 - RNA, 22 nt, Artificial Sequence
  Synthetic
accaauccauauucaaggagug

SEQ ID NO: 344410 - RNA, 23 nt, Artificial Sequence
  Synthetic
gaccaauccauauucaaggagug

SEQ ID NO: 344411 - RNA, 24 nt, Artificial Sequence
  Synthetic
ugaccaauccauauucaaggagug

SEQ ID NO: 344412 - RNA, 18 nt, Artificial Sequence
  Synthetic
aaaaaguaaacaggagug

SEQ ID NO: 344413 - RNA, 19 nt, Artificial Sequence
  Synthetic
gaaaaaguaaacaggagug

SEQ ID NO: 344414 - RNA, 20 nt, Artificial Sequence
  Synthetic
ggaaaaaguaaacaggagug

SEQ ID NO: 344415 - RNA, 21 nt, Artificial Sequence
  Synthetic
aggaaaaaguaaacaggagug

SEQ ID NO: 344416 - RNA, 22 nt, Artificial Sequence
  Synthetic
aaggaaaaaguaaacaggagug

SEQ ID NO: 344417 - RNA, 23 nt, Artificial Sequence
  Synthetic
caaggaaaaaguaaacaggagug

SEQ ID NO: 344418 - RNA, 24 nt, Artificial Sequence
  Synthetic
acaaggaaaaaguaaacaggagug

SEQ ID NO: 344419 - RNA, 18 nt, Artificial Sequence
  Synthetic
gaggacaaaagaggagug

SEQ ID NO: 344420 - RNA, 19 nt, Artificial Sequence
  Synthetic
agaggacaaaagaggagug

SEQ ID NO: 344421 - RNA, 20 nt, Artificial Sequence
  Synthetic
aagaggacaaaagaggagug

SEQ ID NO: 344422 - RNA, 21 nt, Artificial Sequence
  Synthetic
aaagaggacaaaagaggagug

SEQ ID NO: 344423 - RNA, 22 nt, Artificial Sequence
  Synthetic
uaaagaggacaaaagaggagug

SEQ ID NO: 344424 - RNA, 23 nt, Artificial Sequence
  Synthetic
uuaaagaggacaaaagaggagug

SEQ ID NO: 344425 - RNA, 24 nt, Artificial Sequence
  Synthetic
auuaaagaggacaaaagaggagug

SEQ ID NO: 344426 - RNA, 18 nt, Artificial Sequence
  Synthetic
cuauguugaauaggagug

SEQ ID NO: 344427 - RNA, 19 nt, Artificial Sequence
  Synthetic
acuauguugaauaggagug

SEQ ID NO: 344428 - RNA, 20 nt, Artificial Sequence
  Synthetic
cacuauguugaauaggagug

SEQ ID NO: 344429 - RNA, 21 nt, Artificial Sequence
  Synthetic
acacuauguugaauaggagug

SEQ ID NO: 344430 - RNA, 22 nt, Artificial Sequence
  Synthetic
aacacuauguugaauaggagug

SEQ ID NO: 344431 - RNA, 23 nt, Artificial Sequence
  Synthetic
caacacuauguugaauaggagug

SEQ ID NO: 344432 - RNA, 24 nt, Artificial Sequence
  Synthetic
ccaacacuauguugaauaggagug

SEQ ID NO: 344433 - RNA, 20 nt, Artificial Sequence
  Synthetic
uacuauguugaauaggagug

SEQ ID NO: 344434 - RNA, 21 nt, Artificial Sequence
  Synthetic
auacuauguugaauaggagug

SEQ ID NO: 344435 - RNA, 22 nt, Artificial Sequence
  Synthetic
aauacuauguugaauaggagug

SEQ ID NO: 344436 - RNA, 23 nt, Artificial Sequence
  Synthetic
caauacuauguugaauaggagug

SEQ ID NO: 344437 - RNA, 24 nt, Artificial Sequence
  Synthetic
ccaauacuauguugaauaggagug

SEQ ID NO: 344438 - RNA, 18 nt, Artificial Sequence
  Synthetic
uguucuagccacggagug

SEQ ID NO: 344439 - RNA, 19 nt, Artificial Sequence
  Synthetic
uuguucuagccacggagug

SEQ ID NO: 344440 - RNA, 20 nt, Artificial Sequence
  Synthetic
auuguucuagccacggagug

SEQ ID NO: 344441 - RNA, 21 nt, Artificial Sequence
  Synthetic
aauuguucuagccacggagug

SEQ ID NO: 344442 - RNA, 22 nt, Artificial Sequence
  Synthetic
gaauuguucuagccacggagug

SEQ ID NO: 344443 - RNA, 23 nt, Artificial Sequence
  Synthetic
ugaauuguucuagccacggagug

SEQ ID NO: 344444 - RNA, 24 nt, Artificial Sequence
  Synthetic
augaauuguucuagccacggagug

SEQ ID NO: 344445 - RNA, 18 nt, Artificial Sequence
  Synthetic
guaacccagaagggagug

SEQ ID NO: 344446 - RNA, 19 nt, Artificial Sequence
  Synthetic
aguaacccagaagggagug

SEQ ID NO: 344447 - RNA, 20 nt, Artificial Sequence
  Synthetic
uaguaacccagaagggagug

SEQ ID NO: 344448 - RNA, 21 nt, Artificial Sequence
  Synthetic
uuaguaacccagaagggagug

SEQ ID NO: 344449 - RNA, 22 nt, Artificial Sequence
  Synthetic
cuuaguaacccagaagggagug

SEQ ID NO: 344450 - RNA, 23 nt, Artificial Sequence
  Synthetic
ucuuaguaacccagaagggagug

SEQ ID NO: 344451 - RNA, 24 nt, Artificial Sequence
  Synthetic
gucuuaguaacccagaagggagug

SEQ ID NO: 344452 - RNA, 18 nt, Artificial Sequence
  Synthetic
uauuucuuuaagggagug

SEQ ID NO: 344453 - RNA, 19 nt, Artificial Sequence
  Synthetic
cuauuucuuuaagggagug

SEQ ID NO: 344454 - RNA, 20 nt, Artificial Sequence
  Synthetic
gcuauuucuuuaagggagug

SEQ ID NO: 344455 - RNA, 21 nt, Artificial Sequence
  Synthetic
agcuauuucuuuaagggagug

SEQ ID NO: 344456 - RNA, 22 nt, Artificial Sequence
  Synthetic
uagcuauuucuuuaagggagug

SEQ ID NO: 344457 - RNA, 23 nt, Artificial Sequence
  Synthetic
auagcuauuucuuuaagggagug

SEQ ID NO: 344458 - RNA, 24 nt, Artificial Sequence
  Synthetic
uauagcuauuucuuuaagggagug

SEQ ID NO: 344459 - RNA, 18 nt, Artificial Sequence
  Synthetic
guuuaaaggaggggagug

SEQ ID NO: 344460 - RNA, 19 nt, Artificial Sequence
  Synthetic
aguuuaaaggaggggagug

SEQ ID NO: 344461 - RNA, 20 nt, Artificial Sequence
  Synthetic
aaguuuaaaggaggggagug

SEQ ID NO: 344462 - RNA, 21 nt, Artificial Sequence
  Synthetic
gaaguuuaaaggaggggagug

SEQ ID NO: 344463 - RNA, 22 nt, Artificial Sequence
  Synthetic
ugaaguuuaaaggaggggagug

SEQ ID NO: 344464 - RNA, 23 nt, Artificial Sequence
  Synthetic
cugaaguuuaaaggaggggagug

SEQ ID NO: 344465 - RNA, 24 nt, Artificial Sequence
  Synthetic
acugaaguuuaaaggaggggagug

SEQ ID NO: 344466 - RNA, 18 nt, Artificial Sequence
  Synthetic
ugauacgcucugggagug

SEQ ID NO: 344467 - RNA, 19 nt, Artificial Sequence
  Synthetic
uugauacgcucugggagug

SEQ ID NO: 344468 - RNA, 20 nt, Artificial Sequence
  Synthetic
auugauacgcucugggagug

SEQ ID NO: 344469 - RNA, 21 nt, Artificial Sequence
  Synthetic
uauugauacgcucugggagug

SEQ ID NO: 344470 - RNA, 22 nt, Artificial Sequence
  Synthetic
uuauugauacgcucugggagug

SEQ ID NO: 344471 - RNA, 23 nt, Artificial Sequence
  Synthetic
cuuauugauacgcucugggagug

SEQ ID NO: 344472 - RNA, 24 nt, Artificial Sequence
  Synthetic
gcuuauugauacgcucugggagug

SEQ ID NO: 344473 - RNA, 18 nt, Artificial Sequence
  Synthetic
ggcuugggagguggagug

SEQ ID NO: 344474 - RNA, 19 nt, Artificial Sequence
  Synthetic
aggcuugggagguggagug

SEQ ID NO: 344475 - RNA, 20 nt, Artificial Sequence
  Synthetic
gaggcuugggagguggagug

SEQ ID NO: 344476 - RNA, 21 nt, Artificial Sequence
  Synthetic
agaggcuugggagguggagug

SEQ ID NO: 344477 - RNA, 22 nt, Artificial Sequence
  Synthetic
cagaggcuugggagguggagug

SEQ ID NO: 344478 - RNA, 23 nt, Artificial Sequence
  Synthetic
acagaggcuugggagguggagug

SEQ ID NO: 344479 - RNA, 24 nt, Artificial Sequence
  Synthetic
aacagaggcuugggagguggagug

SEQ ID NO: 344480 - RNA, 18 nt, Artificial Sequence
  Synthetic
ucagacuaggguggagug

SEQ ID NO: 344481 - RNA, 19 nt, Artificial Sequence
  Synthetic
uucagacuaggguggagug

SEQ ID NO: 344482 - RNA, 20 nt, Artificial Sequence
  Synthetic
guucagacuaggguggagug

SEQ ID NO: 344483 - RNA, 21 nt, Artificial Sequence
  Synthetic
gguucagacuaggguggagug

SEQ ID NO: 344484 - RNA, 22 nt, Artificial Sequence
  Synthetic
ugguucagacuaggguggagug

SEQ ID NO: 344485 - RNA, 23 nt, Artificial Sequence
  Synthetic
gugguucagacuaggguggagug

SEQ ID NO: 344486 - RNA, 24 nt, Artificial Sequence
  Synthetic
ggugguucagacuaggguggagug

SEQ ID NO: 344487 - RNA, 18 nt, Artificial Sequence
  Synthetic
ucuagacuuuuuggagug

SEQ ID NO: 344488 - RNA, 19 nt, Artificial Sequence
  Synthetic
aucuagacuuuuuggagug

SEQ ID NO: 344489 - RNA, 20 nt, Artificial Sequence
  Synthetic
gaucuagacuuuuuggagug

SEQ ID NO: 344490 - RNA, 21 nt, Artificial Sequence
  Synthetic
ggaucuagacuuuuuggagug

SEQ ID NO: 344491 - RNA, 22 nt, Artificial Sequence
  Synthetic
uggaucuagacuuuuuggagug

SEQ ID NO: 344492 - RNA, 23 nt, Artificial Sequence
  Synthetic
guggaucuagacuuuuuggagug

SEQ ID NO: 344493 - RNA, 24 nt, Artificial Sequence
  Synthetic
uguggaucuagacuuuuuggagug

SEQ ID NO: 344494 - RNA, 18 nt, Artificial Sequence
  Synthetic
acagacauacagugagug

SEQ ID NO: 344495 - RNA, 19 nt, Artificial Sequence
  Synthetic
cacagacauacagugagug

SEQ ID NO: 344496 - RNA, 20 nt, Artificial Sequence
  Synthetic
ccacagacauacagugagug

SEQ ID NO: 344497 - RNA, 21 nt, Artificial Sequence
  Synthetic
accacagacauacagugagug

SEQ ID NO: 344498 - RNA, 22 nt, Artificial Sequence
  Synthetic
uaccacagacauacagugagug

SEQ ID NO: 344499 - RNA, 23 nt, Artificial Sequence
  Synthetic
cuaccacagacauacagugagug

SEQ ID NO: 344500 - RNA, 24 nt, Artificial Sequence
  Synthetic
acuaccacagacauacagugagug

SEQ ID NO: 344501 - RNA, 18 nt, Artificial Sequence
  Synthetic
uauugguuacugugagug

SEQ ID NO: 344502 - RNA, 19 nt, Artificial Sequence
  Synthetic
auauugguuacugugagug

SEQ ID NO: 344503 - RNA, 20 nt, Artificial Sequence
  Synthetic
aauauugguuacugugagug

SEQ ID NO: 344504 - RNA, 21 nt, Artificial Sequence
  Synthetic
aaauauugguuacugugagug

SEQ ID NO: 344505 - RNA, 22 nt, Artificial Sequence
  Synthetic
gaaauauugguuacugugagug

SEQ ID NO: 344506 - RNA, 23 nt, Artificial Sequence
  Synthetic
ugaaauauugguuacugugagug

SEQ ID NO: 344507 - RNA, 24 nt, Artificial Sequence
  Synthetic
uugaaauauugguuacugugagug

SEQ ID NO: 344508 - RNA, 18 nt, Artificial Sequence
  Synthetic
gauguuuaucugugagug

SEQ ID NO: 344509 - RNA, 19 nt, Artificial Sequence
  Synthetic
agauguuuaucugugagug

SEQ ID NO: 344510 - RNA, 20 nt, Artificial Sequence
  Synthetic
aagauguuuaucugugagug

SEQ ID NO: 344511 - RNA, 21 nt, Artificial Sequence
  Synthetic
caagauguuuaucugugagug

SEQ ID NO: 344512 - RNA, 22 nt, Artificial Sequence
  Synthetic
gcaagauguuuaucugugagug

SEQ ID NO: 344513 - RNA, 23 nt, Artificial Sequence
  Synthetic
ggcaagauguuuaucugugagug

SEQ ID NO: 344514 - RNA, 24 nt, Artificial Sequence
  Synthetic
gggcaagauguuuaucugugagug

SEQ ID NO: 344515 - RNA, 18 nt, Artificial Sequence
  Synthetic
ucucagauagauugagug

SEQ ID NO: 344516 - RNA, 19 nt, Artificial Sequence
  Synthetic
uucucagauagauugagug

SEQ ID NO: 344517 - RNA, 20 nt, Artificial Sequence
  Synthetic
cuucucagauagauugagug

SEQ ID NO: 344518 - RNA, 21 nt, Artificial Sequence
  Synthetic
ucuucucagauagauugagug

SEQ ID NO: 344519 - RNA, 22 nt, Artificial Sequence
  Synthetic
uucuucucagauagauugagug

SEQ ID NO: 344520 - RNA, 23 nt, Artificial Sequence
  Synthetic
auucuucucagauagauugagug

SEQ ID NO: 344521 - RNA, 24 nt, Artificial Sequence
  Synthetic
gauucuucucagauagauugagug

SEQ ID NO: 344522 - RNA, 18 nt, Artificial Sequence
  Synthetic
ugcacuguucuuugagug

SEQ ID NO: 344523 - RNA, 19 nt, Artificial Sequence
  Synthetic
cugcacuguucuuugagug

SEQ ID NO: 344524 - RNA, 20 nt, Artificial Sequence
  Synthetic
ucugcacuguucuuugagug

SEQ ID NO: 344525 - RNA, 21 nt, Artificial Sequence
  Synthetic
aucugcacuguucuuugagug

SEQ ID NO: 344526 - RNA, 22 nt, Artificial Sequence
  Synthetic
caucugcacuguucuuugagug

SEQ ID NO: 344527 - RNA, 23 nt, Artificial Sequence
  Synthetic
acaucugcacuguucuuugagug

SEQ ID NO: 344528 - RNA, 24 nt, Artificial Sequence
  Synthetic
cacaucugcacuguucuuugagug

SEQ ID NO: 344529 - RNA, 18 nt, Artificial Sequence
  Synthetic
acaaaaaugucaauagug

SEQ ID NO: 344530 - RNA, 19 nt, Artificial Sequence
  Synthetic
gacaaaaaugucaauagug

SEQ ID NO: 344531 - RNA, 20 nt, Artificial Sequence
  Synthetic
ggacaaaaaugucaauagug

SEQ ID NO: 344532 - RNA, 21 nt, Artificial Sequence
  Synthetic
gggacaaaaaugucaauagug

SEQ ID NO: 344533 - RNA, 22 nt, Artificial Sequence
  Synthetic
ugggacaaaaaugucaauagug

SEQ ID NO: 344534 - RNA, 23 nt, Artificial Sequence
  Synthetic
cugggacaaaaaugucaauagug

SEQ ID NO: 344535 - RNA, 24 nt, Artificial Sequence
  Synthetic
ucugggacaaaaaugucaauagug

SEQ ID NO: 344536 - RNA, 18 nt, Artificial Sequence
  Synthetic
uugcuauugugaauagug
